United States Patent Application Publication US 2019/0348154 A1 - sequence listing, part 29

SEQ ID NO: 108530 - DNA, 669 bp, Enterobacter aerogenes
atgttgacggtccatcacctcaaccaatcccgctcgcagcgcgtgctgtgggcgttggaagaactgcaattgtcctatcaggtagtttgctaccagcgtgaaaaaaacatgcaggcgccagcggaactgaaaaaaattcacccgttgggtaaatcgccggtgcttgaggatcagggcgtggtgctggcggagtccggcgcgattctggaatatctgcaggagacctacgatagcgctcagcagctcagaccgctggggcgggaagagaaactgcaatatcgcttctggctccattatgccgagggatcgttaatgcctttgttgttgatgaagcttgtcttcgccagcctcggcaagccgccggtgccgcttggcatgcgcacgctgggcggggcgttgggcaaaggggtgcaaaaagcgtggctggacaaacagctggcgacccacgcggcgtatatagaacagcatctggcccgtcagccgtggtttgccggcagtgcgttgagtatggcggatatccagatgagcttcccggtgatggcgttactggcgcgcggcggtgttggagacttgccgcatacacggcgctggcagcagcaggttgagtcacgtccggcatggattagcgctattgagcgcggcgggccgtttaccctacctggcggttaa

SEQ ID NO: 108531 - DNA, 459 bp, Enterobacter aerogenes; identical to SEQ ID NO: 91038

SEQ ID NO: 108532 - DNA, 330 bp, Enterobacter aerogenes
atgtcccatcaggatattatccaaacgcttattgaatggattgatgaacatatcgatcaaccacttaacattgatgtagtcgctaaaaaatcgggatactcgaaatggtatctacagcggatgttccgtaccgtcacccaccaaacgctgggtgattacattcgccagcgccggctactgctcgccgctgaggcgctaaggaccacgcaacgccctatttttgatattgcgatggatttgggatacgtctcgcaacagacgttctcacgggtgttccgccgggagttcgatcgcactcccagcgactaccgtcatcagatttccgcctga

SEQ ID NO: 108533 - DNA, 1605 bp, Enterobacter aerogenes
atgagtcgtagcgcgccgcataaggcgttcaaaatattcttcaccatactggtggttgtgctgccggtggtgttggcgttgtggttcgcgcaaattagagcccgggaagaaatctccgatagattgcagtcgttttcgcagctggcgttgcaaaaaacggaaatggtcattcatgaatccgagcaggcgcgcgaaaaggccatgcagtttacaggggaattgtgttccccgcagcatcagcattacatgttgaatattgtccgcggattgctgtatgtcgatgacttgatttacgcgaacggtaacaaattcatctgttctactgcagttcatcccgaagaggggtggagaatagccgcggcgaattacacccgccagcccgacgtctctatttactactaccgcgatacgccgttttatccgggctatgatatgaattatatgcagcgcggccattatgccgtggtggttaatcctctctcttatagctcggttatttccagtgatagagacttagcctacggcgtcttcgataccaaaacgaacatgtttttctcggtgagtaaaaacgttgatgccagggaactacaccgccttatccgccacgaagacgctttttttaatcaggatggccgggtttataccgtcgctcattcctcgattcggccgattgcggtcatcatgtccacctcgcgcgccagctattatgccagcctgtacgatcaggtcaccttgaccctgccgttagggatcatctgcagcatattgattctgatggtatggtcgcgcagccgtcagcagtatcattcaccgcgtaataagctcttgcgggcgttaagccaccgccagctatgtctgcattatcaacccattatcgacattaagaataatcgctgcgtcggcgccgaggcgctgctacgctggccgggatttgatggtccggttatgagtccggcggagtttattccattggcggaaaactcaggcatgattgctcaggtcacagattacgtagttgacgagttgttcaacgatcttggcgaatatttgtcccgacacccgcagctctatatcgcgattaatctttcggcctcggatttccactccgcgaggttgattgcacagatcactgagaaagcgcgcagctatgcagtttgcgtgaagcaaatcaaaattgaagtcaccgaaagggggtttatcgatgtgccgaaaaccacgccggtgatccaggctttccgcgaagcgggctatgagatagctattgatgatttcggtaccggttattccaacctgcacaatctctattcgctcaacgtcgatattctgaagattgataaatcttttatcgatacgctgacgactaatagcaccagccacctgattgccgagcatatcatcgacatggcgcgtagcctgcgtttaaaaaccatcgctgaaggggtagaaacgctggatcaggtggattggttgcttaagcgcggcgtgcagttttgtcagggttggcattttgccagggcaatgccgccacaggagtttatccagtggctggcgaaatccccgatcttactgcgtccgccgcacgacggtcgtcaggcggaaatctga

SEQ ID NO: 108534 - DNA, 282 bp, Enterobacter aerogenes; identical to SEQ ID NO: 91035

SEQ ID NO: 108535 - DNA, 360 bp, Enterobacter aerogenes
atgaaatggactattcttaacacccttatctgcccgcataccggcgttgcgttctcgtcaatatcggggctgcggtttctgaagtttattatctggtatgaagccgatcttttattgcttcccggtgaaacaatgaaacttttttcctctaaagttttaattaatgatcaatatcattcattaaaaatttataacattacgcgttatgacgataaacagtgggaaacgttaagagagcggccaatctgcccgtacaatttcgatgccgcggagccggcatcttgtctttatcaatcatattgtgcagttaagcgctgcccaaacgagcgtctacggccgcagttatgcgaacaatattag

SEQ ID NO: 108536 - DNA, 267 bp, Enterobacter aerogenes; identical to SEQ ID NO: 108172

SEQ ID NO: 108537 - DNA, 426 bp, Enterobacter aerogenes
atgatcgatcatccagcgcatatacttaacgccggcatgaatgttggggtcgatttttttgatatcgccaaccttcaattccttgccggtcgcgggcatgacctgcatcacgccgattgcgccgacgtggctgcgtaccgattgattgagccgcgattcctgatatccctgggcggccatcagcagccagtcgacatcatagcgttcgccatattttctaaaaatttccaccatctgcaaaaacttagcgcgctctctgttggctgcggcgtttttaacgtaggtcgtgcttttcaggtagcgcagcagaatcatgtttcccagggtgctgccttgacgattatttttcacgaaattattcagtaccgcgagaagctgtgggttatctttgcggaccgcccaggcgatgctaccgccatcccgtaa

SEQ ID NO: 108538 - DNA, 795 bp, Enterobacter aerogenes
ttgccccatgcccggcagtttgcccatcaggctggccatgccgcccatgtttttcatctggcgcagttgctcaaggaagtcggtcaggtcgaaaccgtcgcctttcttcagcttggatgccagtttctcggcctgcgcgcggtcaactttgctctcgatatcttcgataagcgacagcacgtcacccatgccgagaatacgggaagcgatacggtccgggtggaacggctccagcgcttcggttttctcgccgacgccgaggaatttaatcggcttgccggtgatatgacgaatcgacagtgccgcgccgccgcgggcgtcgccgtctactttggtcagcaccacgccggtcaaaggcagcgcttcgttaaaggccttcgcggtattcgccgcatcctgaccggtcatcgcatcgacgacaaacagcgtctcaaccggattaatcgcggcgtggacctgtttgatttcgtccatcatcgcttcatcgacgtgcagacggccggcggtatccaccagcagcacgtcgtagaatttaagcttcgcttctttcagcgccgcgttgacgatatcaaccggcttctggccaacgtcggacgggaagaaatccacgccgacctgctctgccagcgtttccagctgtttaatcgccgccgggcggtatacgtctgcggaaacgaccagcacttttttcttgtgcttctcgcgcaggaatttacccagcttaccgacgctggtcgttttacccgcaccctgcaggcccgccatcaggacgacggccggcggctgcgcggctaa

SEQ ID NO: 108539 - DNA, 369 bp, Enterobacter aerogenes
atgcagcactacttcattgatagccgtgctgatgcgcttctggcagtcatgctggcacacctgggcttccagcagaaaacgtttttcggcgatatagtggccttcaagtacatcggccaactgctggagtgcgttatccgggtcaaggtcggtaagaaaaccaagattgccgcggttaatgccgatgacgttgatgtcatagcgcgccagcgtgcgcgccgcgccgagcatattgccgtcaccgccgactaccaccgccagatccgcctgctggccgatttccgccagcgtgccggttttaacattgctaagctggagttcatgggcgatttgctgctcgaccagcacctcatagcctttgccgcatag

SEQ ID NO: 108540 - DNA, 1125 bp, Enterobacter aerogenes
atgaaacacatcatagcccccatcgcgacagcattatttctcctgagcggatgcgataatgtgcagacaactgcgccgcaacaacccacgccggaggtgggaattgttacgctgcaagcccagccggtgccggtggtcagccaactgactggccgcactaccgcctcgctcagcgccgaagtgcgcccgcaggtcggcggtatcattcagaagcgcctgtttaccgaaggcgatatggtgaaggccgggcaggccctttaccagatcgatccctccagttatcgcgccacctggaacgaagcggcggccgcgttgaagcaggcgcaggcgctggtggtctctgattgccagaaagcccagcgctacgcgtcgttggtcagagataacggcgtctctcgccaggatgccgacgacgctgcctccgcctgcgcccaggacaaggccagcgtggagtcgaaaaaagcggcgctcgagagcgcgcgcatcaacctgaactggaccaccgtcaccgcgccgattgccgggcgcatcggcatctcctcggttacgccgggagcgctggtctctgccgaccaggataccgcgctggcgacgatccgcggcctcgacaccatgtatgtcgatctgacgcgatccagtgtcgatctcctgcgtttacgcaggcagagcctggccagcaacagcgataccctcagcgtgacgttaacccttgaagatggcagtacctatcccgaaaaagggcgtctggcgctcaccgaagtcgccgtcgatgaatccactggttcggtgactctgcgcgccatcttccccaacccgcagcatgtcctgctgccgggaatgtttgtccgcgcgcgtatcgatgaaggtatcatgaacgacgcgatcctcgcgccgcagcagggtatcacccgcgatgccaaaggcgacgccacggcgctggttgtcgatgccgacaacaacgttgagcagcgtaccgtgcaaaccggcgatacctacggcgataaatggctggtgctgagcggtctgaaagcgggcgacaagctgattgtcgaaggcaccggtaaagtgtcccccggacaagcggtgaaggccgttgccgtcaaaaataacggaggcaatgcctga

SEQ ID NO: 108541 - DNA, 417 bp, Enterobacter aerogenes
atggctctaataattacaaaaagcattaatcccgacgatcaacaagaattgtttgccggcctacggcagtataatcagcagtatctcgacgcagatcagtttggcgatctgggcatttactcccgcgatgagcaagcggtgatgcgcggcgggcttatcgccaaacgcaaaggcaactggctgtgtatcgaatacctgtgggtgagcgaagcgacgcgcggcaacggtctgggccgcgagcttatgcaggaagcggaacggcaggcgcaggcgttgggctgcagccatctcctggtcgataccttcagcttccaggcgctgccgttttatcagaaattaggctatcagttgcagatgtcgctgcccgatttcccgcacgcgggtatgcaacgccactatttatcgaagacgctgtaa

SEQ ID NO: 108542 - DNA, 648 bp, Enterobacter aerogenes
atgccagcacaaaaagctaatgaagcgccgcgtcgccccggtcggccacgcggtaaaaaaccgggaaccgctaaccgcgagcagttgatagatatcgccctggcgctgtttgctcgtcacggcgcggcccgcgtgtcgctcaatgccattgccaaagaggccggggtgacgccggcgatgctgaattactattttacgtcgcgggaagcgctgattgagaatttgctggaagagcgctttatgccgctgcgcaacgatatcagccgcatttttgtcgaccatccgcaggatccggtgacggcgttgacgatgatggttgagacgctggcggacatggcggagcaaaatgcctggttcgcgccgctgtggatgcaggagatcatcggcgagatgccgatgctgcgccagcacatggatgcgcgcttcggcgaggagcgttttcaggtgatgctggagacggttcgccgctggcagcaggaggggaaaattaacccggcgctggcgccggaactgctgtttaccacggtgattagcctggtgctggtgccgttctcgcgcatccatagcgacccgcgtttacaggcggtaacccggcagaccattgttagccacgcgctggcgttaatgggccacggggtcggcggttaa

SEQ ID NO: 108543 - DNA, 1494 bp, Enterobacter aerogenes
atgacatctgaagtcgcaaaccaaccggcgccctcaatccgcctgctgttcagcgccctgctgctggtgatgctgctgtcggcgctggaccagaccattgtctccaccgccttgcctactatcgttggcgagctcggcgggctggataaactctcgtgggtggtcaccgcctatatcctcagctcgaccatcgtggtgccgctgtacggtaaattcggcgatctgttcgggcgtaaaatcgtgctgcaggtggcgatcgtgctgtttcttgccggttccgcgctctgcgggctggcgcaaaacatgacgcaattggtactgatgcgcgcgctacaggggctcggcggcggcggcctgatggtaatcagcatggcggcggtcgccgacgttatcccaccagccaaccgcggacgctatcaggggctgttcggcggcgtcttcggcctggcgacggttatcggcccactgatcggcggtttcctggtacagcacgcctcatggcgctggattttctatatcaacctgccgctgggcctgttcgcgttgctggtcatcggcgcggtattccacagtagcaacaaacgtagccagcatcagattgactggctgggggcgatttacctcagcatggcgctgttatgcatcatcctgtttacctcggaaggcggcagcatccatgcgtggaatgacccgcagctgtggtgcattctggccttcggcatcgtggggatcatcggttttatctacgaagaacggatcgccgccgagccgattattccgctgtcgctattccgcaaccgcagcttcctgctgtgtagtctgattggctttgttatcggcatgtcgctgttcggttcggtaactttcctgccgctctatctgcaggtggtgaaagaggcgacgccaaccgaggccgggttacagttaatcccgctgatgggcggcctgttgctgacctcgatcatcagcggccgggtgattagccacaccgggaaataccggattttcccgattatcggtaccctgctcggcgtgaccggcatggtgctgctgacccgcatcaccatacattcgccaatgtggcagttatacctgtttaccggcgtgctcggcgcgggcctggggctggtgatgcaggtactggtgctggcggtacagaatgcgatgccggcgcagatgtacggcgtcgccacttccggcgtgaccctgttccgctcgattggcggctccatcggcgtggcattgttcggcgcggtctttacccatgtgctgcaaaataacctgcagaaactgctgccggagggcgcggtgctgccgccagccatgaacccggtggcggtacagcatctgccagcggcgatccgtctcgattatctcgacgccttcggcgcggcgatccatgcggcattcctgatggcggcctgcattatggccgtcgcgtttgtcctttcctggctattgaaggaggcgccgctgaaaaccgcggcgcattaa

SEQ ID NO: 108544 - DNA, 984 bp, Enterobacter aerogenes
atggactgtgctgtgaaaaatgataatactgcttatctggtaatcatctttccgaaaagcgggagaataatggaccgattaagcgctatggcgctgctggtgaaagtcactgaactgggcagtatgtcggcggcggcgcgggcgctgaatacgccgttgactaccgtgagccgtaatatcggcgagctggagagcgcgctgggagtccgtttattgacgcgcaccacccgtaaactcaccctcaccgatgccggcgtcgattatgtcgccgccgcgcggcgaatcctcgaagaggtggaaaacgccgaacgccgggcaacgggtgaataccaggagccgaagggcgagctggtgatctccgcgccgacgatgtttggtcgccagcacgttctgccagtcattagtgaatttattgcccgttatccgcaaattcgcgtacgtttgttacttagcgacagtaatgccgatctggtcgacgaccatatcgatctggcggtacggattggcgaactggctgatagcagcatggtggcgacccggcttggcgcgatgcgcattgtcgcctgcgcccatcccgcgctgttggcgaaatacggcgaaccgcagcgtccgcgcgatctggcggcgctgccgatcatccgtattgaatcgccgatgccctatcgcggctggcgctttcgcgccgttgagcgcgaggaccagctcattcatctgccgccggtgttagccgtcaccacgccggagagcgccgccgatgccgcgcggctgggcgttggcgtggcccgcttgctgcactaccaggcgctggatggcctgcgctgcggggaactgcgtctgctgctggaaagcgtcgagccggagcccgcgccggttcatttgttatataccgcgcgggagcaggctccgcttaagctgcggaaatttatcgattttgccgcgccagcgctgcgccagtccttgctacgcattgccggggccgtttaa

SEQ ID NO: 108545 - DNA, 630 bp, Enterobacter aerogenes
atggcagcaacctttctcgatatcgctatcaccccggatgtcatggatgcgcaacatgaaatgggcagcgaccagctgtggcaaacgccgcacagccgccgtcaggcggatcgcttcggcgccagcgaagaggggatgatcgctacccgcgacagtttttatctggcgacggtgtcgcaaagcggctggccctacattcagcatcgcggcggcccgccgggttttctgcgcctgctggatgacaccacgctggccatggccgatttcggcggtaatcgccagtacatcaccaccggcaacctgcgcggcagcgaccgggcctgcctctttttgatggattacccgcgccgtgccaggctgaaaatctacgtcaccgtcgaggtgctggcggcggaagagcagcctgagctgctggcattagtgacgccgacaaactatcgcgcccgcatcgaacgcctgtttcgttttcatctgcaggcttttgactggaactgcccgcagcacattacgccgcgctacagcgcacagcaggtcgcggaatacagccagagcctgcaagagcgtattcatgaactggagcaggagaatcagcgcctgcagcaacaattatccccaaaaggagagttttga

SEQ ID NO: 108546 - DNA, 471 bp, Enterobacter aerogenes
atgagcgaacaacgtcccccgttaccgccgtttacccgcgacagcgccgtgcagaaggtgcgcgccgccgaagatggctggaacagccgcgatgcgcaaaaagtcgcgctggcttataccgtggatagcgaatggcgcaaccgcagcgaatttgtccacggacgggggcaaatcgtggcgtttctgcagcgaaaatggcgtaaagagctacaataccggctgattaaggagctttgggcgtggcaggataatcgcatcgccgtacgctttgcctacgagtggtgcgacgacagcggcaactggtttcgttcatacggcaatgaaaactggcagtttgatgagcacgggctaatgtccacgcgctacgcctgcatcaacgatttgccgatcgcggaaagcgagcgcctgttccactggccccagggtcgccgccctgacgatcatccggggctaagcgaattgggactgtaa

SEQ ID NO: 108547 - DNA, 537 bp, Enterobacter aerogenes
atgagccgtttagccgatatccgtgaacaagatgccaccggtaaagccgccgatattttcgccggaattaaaaaagcgatgggtaaagtgccgaatgcctatctgaccatcggcggccactcgccggcggcgctgcagcaggcgctggcgcacaacgcgatgctgcataaaagcagccttagcgcgcaggagctggaggcgattaatttatcggtcagcgaagcgaccggctgtgattactgcctggccgcccataccctgatggccaaaaaagcgggcttcagcggcgagcaaatccacgccctgcgccgcggcgagtatacggaagatgcgcgcctggacgcgctggtgaaattcgcccaaaccctggtgaccaccaccggtacgctgccggaagcggatgtcgccgcgctgcgtcacgccggttttagcgaccagcaggtgattgagatcatcagcgccgtcagcgccatcttgttcaccaacatggtgaaccgggttaacgacacggtagtggacttcccgaaagccgattaa

SEQ ID NO: 108548 - DNA, 906 bp, Enterobacter aerogenes
atggatagtttgagccatctgttgacgctgctggccccgcgttgcgaagtgaatctgcattgccgtttcggcggccgctggcaggccggacacgatcaaatgcgagcgggcgtggtgccgtggcactttgtgttgcgcggcgaagggcgcctaaccgtcggtcatcaaacccgccacatgcgcgccggcgacgtgatcctgctgccgcacggttcgccgcatctgatggagagcctggtggagtggggtcaggtactgcccgtcgcccaccgctttaacggcacgctgacggaagtccgcaccgccgaagagagcgatgcgctggagatgctgtgcggcgagttttacttcggcccgcacgtcaactggctgttcgccgaagagtcggcgctgatccatttacataccgatgagcgcgaagattgcccggaactggatattttgcttaacgtgctggtacgcgaaagcctggcggaacatcccggcggcagcgctatcgtacgcagtcttggcgatacgctgctggtactgctgttacgtaccctgctcggcgcgcaggagccgccgggcggcctgttgcgcctgatgagcgatgcgcggctgatgccggccgttctcgcggtgctggccgcgccggaacagccttggactatcgagagcatggcggcacgggcgtttttatcgcgcgccaccttcgcccgccattttgcccgcgtctatcatctgacgccgcaggcgtggctgtcgcaactgcggatggcgatggccgctcgcctgctgcatctcgatcgccaggcgcggctggaagtgattgccgaacgctgcggttttcaatcacaggcttcgtttgcgaaaacctttaaaaaacactacggcatgacgccgggcgagtggcgtcggcagtaa

SEQ ID NO: 108549 - DNA, 903 bp, Enterobacter aerogenes; identical to SEQ ID NO: 87494

SEQ ID NO: 108550 - DNA, 291 bp, Enterobacter aerogenes
atgaaagcgtgttggatgttgtgtctggttactgcccttagcgccagcgcggcgtgggccgaatcgccgctgcaaagcctgcagtttgagcagcaaaaacagcaggtgttgaaagcggtgaaggaaaaatgcgccccggcgagcaccctcagtgataccgatttcgccaataaaatcctcgcctcgaaagacaaccagagttacgttcgcgaagcgacgctggcgaaagagcgcaataatcaaaaaggctatctggccgccattgataaaattcgctgcccgggtaaataa

SEQ ID NO: 108551 - DNA, 951 bp, Enterobacter aerogenes
atgtcgacaatcaatgatgtatcacggttagccggggtatcgaaagccacggtttcgcgcgtgctgagcggttcgcgcggggtaaaagaggccagccgccaggcggtgcttcaggcggcggaaacgctgaactaccggcccaatatgattgcccaatccttactgagccagtcgacgggctgtatcggcgtgatttgcgcgcaggacaacatcaatcagaccaccagctatctctacgccctggaaaaacagctcagccagcatcagaagcatctactgctgcgcttcgccaataaccgcggcgacgtattaagcgcgctggatgaactcacctgtggcctgtgcgatgacgtgctgatcatcggcgcgcgctttccgctgcagatcgagcgccccgatgtggtgctgattgattgtctggaaagcgatggcgagaacagtattcagtttgatcacgccttcgccgcggaaaccgcctgtcattatctgattaatcaggggcggcggcagattgcgctgatccatccgcaggggagcggctttgccgatcaggtgctgctgggctataagcatgcgctggagaagaacttcctgccgtttaatcgcaacctggtcttcctggactgcgcctcgtcgtcggtggcggtacaggagttgatgaataacgccactaccctgaactttaatgcgctgttggtgagcgatgaactgcaggcgcagcgggtagtgccgcagctgcaggcgtttaaccgcgcggtgccggaaaaagtaatggtcttcagtctcgcgggttcgctgcagatgccgggtattccgaccatcccggcgattgagtattcgatggatgcgatggcttcgcggatcgtcaactggctgatcgggaaaagcccgcagcccggcggcagcctgctgcgcggcgacttaattattcccgagcgttgggggaaataa

SEQ ID NO: 108552 - DNA, 315 bp, Enterobacter aerogenes; identical to SEQ ID NO: 87490

SEQ ID NO: 108553 - DNA, 540 bp, Enterobacter aerogenes; identical to SEQ ID NO: 108213

SEQ ID NO: 108554 - DNA, 1284 bp, Enterobacter aerogenes; identical to SEQ ID NO: 108212

SEQ ID NO: 108555 - DNA, 498 bp, Enterobacter aerogenes; identical to SEQ ID NO: 90112

SEQ ID NO: 108556 - DNA, 684 bp, Enterobacter aerogenes; identical to SEQ ID NO: 108210

SEQ ID NO: 108557 - DNA, 2049 bp, Enterobacter aerogenes; identical to SEQ ID NO: 108209

SEQ ID NO: 108558 - DNA, 885 bp, Enterobacter aerogenes; identical to SEQ ID NO: 108208

SEQ ID NO: 108559 - DNA, 1371 bp, Enterobacter aerogenes; identical to SEQ ID NO: 108207

SEQ ID NO: 108560 - DNA, 792 bp, Enterobacter aerogenes; identical to SEQ ID NO: 108167

SEQ ID NO: 108561 - DNA, 240 bp, Enterobacter aerogenes; identical to SEQ ID NO: 90118

SEQ ID NO: 108562 - DNA, 144 bp, Enterobacter aerogenes; identical to SEQ ID NO: 98388

SEQ ID NO: 108563 - DNA, 291 bp, Enterobacter aerogenes; identical to SEQ ID NO: 108170

SEQ ID NO: 108564 - DNA, 210 bp, Enterobacter aerogenes; identical to SEQ ID NO: 90120

SEQ ID NO: 108565 - DNA, 1347 bp, Enterobacter aerogenes
atgtttattacgccagcgtatatcgcgttatttttaatcgcatcatggggactttttaaactcgagcaaaaaagccactcgttatcaaaaagcgtttttatcgccatctttctcggcgcccttctcggattatcactccatttcattgccaacgaaccgcgaaaaacggtcattgattggtacagtatcgtcggcaacggctatgttaatttgctgaaacttgtcgcggttccgctgattttcatttcaattctgtcagcgattaataaactcgaaaatagtgccggtattggccgaatgtccttaaccattgttgcctgcatgctatgcctggtgatggtggcaggctgggtcggactgtttaccgctgatttactcggccttaacgccagcgcttttagccatatgcaatcgacgctgaccgccgaagacgtcagcaaaaccgcagccgtttcgttaccccaactggtcacttcgctgatcccgacaaatatttttctcgacctgaccggcgcgcgcagcgtatcggttatcggcatcgtcattttcaccctgctggccggagtcgcattattgaaggtgaaaaaagaggcgccggaggaaggtcaaaaattaagtagtgggattaacgcgattcaaatttgggtgatgaagatggtgcgtatcgtgatagcgctgacgccatacggcgtcctcgcattaatggcaaaagtcttttcgacctatcagctagcgcaattcaccagcctgcttggctttatcgccgcctgttatctggcagtcgccatgatgtttatcgtgcatgcgattctgctgactattagcggtcaaaatcctctgcgctactttaaaacggtgtggccggtgcttaccttcgcttttgtttcccgcagcagcgcggcttcgattccattagccattaccgcacaggaaaaattcggcgtgccgaataccatcgccaatattgccgcctcttttggttccagtatggggcaaaacggctgcgccgggatctatccggctatcatggtggccatgattgcgccaacgctgggtatcgacccactgtccttctcgtttttagccagcttacttccggctatcgcgctgggctcaattggcgtcgcaggcgtcggcggcggtgggacatttgcggcgttgattgtcctgtctacgctcaacttcccggtggcgctggtcggcatttttatcgccatcgagccaattgtcgatatggcgcgtaccgcgctgaatgtgaatgggtcgatgatgtcgggcgtactggcatcgcggctattgaaacatcaaaatgcaaagtcgcaccatgtcgcctcaataagtgaataa

SEQ ID NO: 108566 - DNA, 624 bp, Enterobacter aerogenes
atgtctaaaccttacgttcgtctggataaaaatgatgcggcagtattactggttgaccatcagaccggcttgctctcactggttcgtgatatcgagccggataaattcaagaacaacgtccttgccctcagcgatctggctaaatactttaaactaccgactattctgaccaccagttttgagaatggccctaacggcccgctggtgccggaactaaaagaacagttccccgacgccccttatatagctcgtcccggcaatattaacgcctgggataacgaagatttcgttaacgcggtaaaagccaccggtaagaaacagctgattattgccggtgtcgtcactgaagtgtgcgtggccttcccggcgctgtcggcgattgaagagggattcgacgtctttgtggtgaccgatgcgtccggtacctttaacccgatcacccgtgatgcggcgtgggatcgtatgtcgcaagcgggcgtgcagttaatgtcgtggtttggcgtggcctgtgagctgcaccgcgactggcgcaatgatattgaaggattgggcaccctgttctccaaccacattccggattaccgtaacctgatgaccagctttaacctgctgagcaagaaataa

SEQ ID NO: 108567 - DNA, 897 bp, Enterobacter aerogenes
atgtcgcgtagcgccctgccttttcataccgtagaaacgtttctgataaccgcgaggcatctcaacctaacccatgccgcacaggagctatgcctgacgcagggggcggtcagccggcagatcgccgcgctggaaaactggttcggcttcccgctatttgaacgccacgcccggggcctgcgactgtcgccgcagggcagcgcgctttatcctgagctgcagtcggcattcggccgcctgataacggtggccgagcaggcgcgccagcagcaaactgtcgtgcgcctgaaagcgcctacctgcgcgatccgctggctggtgccgaaactgctggagatagaacgacgttatccggaattgcaggtggcgttgaccaccaccaccgagcatagcgtcaactttaagactgaaccctacgacgcggcgattatcttcggcacccatcaaagcgccggcgacttgctgtttgaggaggccctcacgccggtggccagtcccgatacgccgtgcgatccccagctatcaggcactacatttctccatccgacacgcgataaaaccgactggctgctgtggcttgcgcacttcccgcatgaaactgcgctaaaaatgcataaaaaccaatatttcgacaccatggatctggcgatcaccgccgcgatgcaggggctcggcgtggccatggcggacgaaacactggttgccggggatctgcgaaccgggcgactatgtcgccccttctcgcttagcgtcaaaaccggcgccagctaccggctggttgttcgccgctcgcaaagcaaggccgacgggctggcgcgctttcgcgccgcgctggttaatccagcgtcacatgatgcttcatcacccgacgaaacagcgccagccgcgcgcgcataa

SEQ ID NO: 108568 - DNA, 1344 bp, Enterobacter aerogenes
atggcgaacaccatcacggctgatgagattcgggagaacttttcacaggctatgtcggcaatgtaccagcaggaagttccgcaatatggaaccctcctggagttggtggcggatgtgaatctggcggtcctggaacataacccgaaattacatgaacaattggctaatgccgacgagctggcacggctgaacgttgagcgccacggcgcgatccgcgtgggaacggcggaagaactggcgaccctgcgtcgcatgtttgccattatggggatgtatcccgttagctattacgatctgtcgcaggctggggtaccggttcactccaccgcatttcgcccggtcgatgacgcggcgctggcgcgtaacccgtttcgcgttttcacctcattgctgcgccttgaactgatcggcaacgaggcgctgcgccagcgagcggcggatattctcgcccgtcgcgatatctttacgcctcgctgccgtgaactcattgcgttacacgaagatcgaggagaattcacggctgcagaagcgcgtgaattcgtcaccgaagcgttggaaactttccgttggcaccgtcatgccaccgttgacgagcaaacctatcacgcgctgcataatgagcaccggttgattgccgatgtggtctgtttccctggttgccacattaaccatctgacgccgcgcactcttgatatcgatcgggttcaggcgctgatgccgcaatgcggtatcgaaccgaaagcgctcattgaggggccgccgcgccgcgaggtgccgattttactgcggcaaaccagttttaaagcgctggaagaaccggtgatgtttgctggtgaacataaaggcacacacagcgcgcgctttggcgaaattgagcaacgcggcgtcgcgttgacgccgaaaggacgagcgctctatgaccgcttactgaatgaggccggggtcggtaaagacaaccttaaccatcagcgccatttgcaggaggtctttagcgaatttcctgacagcgaatttctgctgcgtcagcaggggctggcgtggtttcgctatcgcctgacgcctgcgggggaagcgcatcgccatgcttttggccccggcgacgatccgcaaccgctgatcgaacgtggttgggtagtcgcgcagccgattgtttatgaagattttttaccggtgagcgcggcggggatcttccaatcgaatctgggcaacgaaacgcaggcccgcagtcacggtaacgccagccgtgaagcttttgaagcggcgttaggctgcgaggtcctcgatgagttcgagttataccaacaggcggaggagcggagtaaacgccgttgcggtctgctctaa

SEQ ID NO: 108569 - DNA, 741 bp, Enterobacter aerogenes
atgaataataaatggtcaccgcgcgaggttgtacatcgcgattacaatagccatccgccggcgctggcgccgggatataaaactagtgtgctgcgctcgccgcgtaatgccctcatctccctgcaaaattcactttctgaaattaccggtccggtgttcagcagcgacgaccttggcccgctggataacgatctcatcctcaactacgccaaagacggcctgccgattggcgagcgaattattgttcacggttacgtgcgcgacggctttggccgaccaatgaaaaatacgctggtggaagtgtggcaggccaatgccggcggccgctaccgtcataagaaagaccagtatctggcaccgattgaccccaacttcggcggctgtggacgggtgctgaccgatgaaaacggttattactgttttcgcacaatcaaacccggcccctatccgtggcgtaatcaggttagcgactggcgcccggcgcatattcacttttcgctctccggcgatgcctgggcgcagcggctgattacccaaatgtactttgaaggcgatccgcttattaaacagtgtccgattgtcagaaccatcaataacgatgatgccgtgcgtaccctgattgccgagctggatacccacgccgccgtgccgctcgacagcctggcctatcgttttgatcttgtgctgcgcgggcatcgcgccacgctgttcgaaaatcgtactcagggggccgcccaatga

SEQ ID NO: 108570 - DNA, 621 bp, Enterobacter aerogenes
atgaaagactatttagctgaaaccgcctcgcagactgccgggccttatgtgcatattggtctggcgccggacgctgcagggtttcatattttcgaaaaaaacttcggccccaacttagtgagcgcggaaaccaaaggccaacgtattacgattgaaggccgggttttcgatggttccggaacgccggtacgcgacgtgctgctggaactctggcaagctaacgccgacgggcgttataaccatcccgacgaccgtcagcagagtaaggctctggacccgaacttccgcggctgggggcgcacgtgttcagactttgcatccggcgtctggcgctttcaaaccatcaaacccggcgcggtcgtcggccgtgatggacgcatgatggcgccgcacctcaatctgtgggtggtggcgcggggtatcaacatcggcctgaatacgcggatgtattttgctgatgagcaggcggcaaatgaacaggatccggtattgaatctgattgaatgggaagttcgccgccagacgcttatcgcgcaacgtgaagtgcgtggagatgaagtcgtctaccgctttgatatttatttacagggcgataaagagaccgtgttcttcgatatttaa

SEQ ID NO: 108571 - DNA, 924 bp, Enterobacter aerogenes
atggaaaaaaatggtctcttcagtcagcgcattcgcttgcgccatttacatactttcgtcgccgtcgcacaacagggaaccctggggcgggcggcagaaaccctgaatcttagccaacctgcgctatcaaaaacgctcaacgagctggagcagttgaccggtacccgtctctttgagcgcgggcggcttggcgcgcagttgacgctggtaggcgaacagtttcttacccacgcggttaaggtactggatgccctcaataccgcaggccaggctctcaatcgtaaagaaggcatgaatagcgatgtggtgcggattggcgccctgccaaccgcggcgctcggtattttacctacggtgattggtcaatttcataaacagcaaaaagacatcaccttacaggtcgccaccatgaataacaccatgctgctggcggggctaaaatccggcgatgtcgatattggtatcgggcgcatgtctgatccggaactgatgagcggcctcaactatgaactgctgtttcttgaatcgctaaagctggtcgtccgccccggccacccgctgctgcaggagacggtaacgctcagccgggtgatggaatggccggtggtggtctcaccgaaagggacaattccgcggcagaacgcggaaacgctactgcaaagccagggttgtaaaattccccccggctgtattgaaacgctgtcggcctcgctttcacgccagctcaccgtcgattacgactatgtctggttcgtcccttccggcgcggtgaaagacgacctgcgtcgcggtttgttaacctcattacctatcgccaccgaaggcgccggcgagccgatcggtattcttacccgggtggacgccagcctgtcgcagggggcgcaaactctactgagcgcgatacgcaaatccatgccaggctga

SEQ ID NO: 108572 - DNA, 2373 bp, Enterobacter aerogenes
atggctacgggcaacgtgccgcgcggattcccccggatcctgcagtggctactcgccggactgatgttaatcatcggtctggcaatcggcattttaggcgccaaactggcaagcgtcggcggcacctggtatttcgccattatgggactggtgatggttatcgcctccctgcttattttccgcaatcggcgcggcggcatcgttctttatgccgtcgccttcgcggcttccattgtttgggctatcagcgacgctggctggacctactggccgctgttctcacgcctgtttgcgcttggcgttctggcttttctgtgcgccattgtttggcctttcctttccagcgcaccggcaaaaaaaggcgcggccttcaccctcgcgggcgtgctggccgtggtactgctggtcagttttggttggatgtttaaatcccagccgctggtcagcgccagcgaacccgtgccggtaaaaccggtacagccaggtgaagaacaaaagaactggcagcactggggtaataccactcacggcgaccgtttcgccgcgttggatcagatcaataaaaacaatatcaaccagctacaggttgcctggattgcccataccggcgatattccgcagagtaacggttccggtgcggaagaccagaatacgccgctacagattggcgatacgctgtatgtatgtacgccatatagcaaagtcctggcgctggatgtcgatagcggcaaagaaaaatggcgctatgactcaaaagcgacggcgccgaactggcaacgttgccgcggtttaggctactacgaagatagccaggcacaggctaatgccgtggccgggactcagcctgccgcctgtgcccgccgcctgttcctgccgactaccgatgcgcgcctgatcgcaatcgatgccgataccggtaaagcctgtgaagcatttggtgaacatggtaccgtcgatctcagcgtcggcatgggggaaatcaaacctggttattatcagcagacctctaccccgctggtggccggtaaccttgttgtcgttggtggtcgcatcgcggataactactccaccggtgaaccgccgggtgtagttcgcgcttttgacgtgcataccggtaaactggcctgggcctgggatccgggtaacccgcagctgaccggcgtaccgccggaaggacaaacctacacacgcgggacgccgaacgtctggtccgcgatgtcttacgatgccaaactgaatctcatttatctgccaaccggtaacgccacgccagatttcttcggcggcgaacgtacggcgctggatgataaatacagctcatcaatcgttgcggtcgatgccgccacaggtaaagtgcgctggcatttccagaccacccatcacgatctgtgggatttcgacctgccttcgcaaccactgctgtacgatctgccggacggtaaaggcggtatgacgccggtactggtgcaaaccagcaagcagggcatgatcttcatgcttaaccgcgcgacgggtgaaccggtggcgaaagtggaagaacgccctgtcccggccggcaacgtcaaagatgaacgctactcgccgacgcagccctactccgtcggcatgccgatgatcggcaacgaaacgttgaaagaatcggatatgtggggcgccaccccggttgacctgctactgtgccgtattcagttcaaagagatgcgccatcagggtgtctttacaccgccgggtgaagaccgctccttgcagtatccaggctcgcttggcggaatgaactggggcagcgtgtcggtcgatccgaataacggcctgatgttcgtcaatgacatgcgccttggactggctaactacatggtaccgcgagcgaaagtggctaaagatgccagcggtatcgaaatgggtatcgtaccgatggaaggtacgccgtatggcgcgatgcgcgaacgtttcctgtcgccgctgggtatcccctgccagaagccgccgttcggcaccatgtcggcggttgatctgaaaagcggtaagctggtctggcaggttccggtaggtacggtagaagataccggtccgctgggtatccgcatgcatatgccgatccctatcggcatgccaacgctgggagcttcgctgtctacccagtctggcctgctgttcttcgccggcactcaggatttctatctgcgcgcctttgataccgccaacggcaaagagatttggaaatctcgcctgccggtgggcagccaatccggcccgatgacctacgtttcaccgaaaaccggtaagcagtacatcattatcaacgccggcggcgcgcgccagtctccggaccgcggcgattacatcatcgcctacgcgttacccgataaaaaataa

SEQ ID NO: 108573 - DNA, 540 bp, Enterobacter aerogenes
atgaaacttgaagatatttctgattatctgccatccatgcctaagccaacggaagagaaattgctgctagataccattcatgaaaattctgaatggttgccattcttgcagcgtatgtcggattctggattgataactccagctcttcagaaagcttttcacaccaagtggattgaaagtggccactttattcggtcccaaataaaggatgacaaagctgtggcccagctactttctaagctaatgcccaaatatgatggtgagggcctaactgtatttcgtggtgaaaacgagcacagatttaattcaggtcaaataggtttctgttggacctctaatcgtgaagtcgctgagatgtttgcccgcggtcttaacgcctgccaaagtcagggcctgctcttacaagcttatgccccatcagaagcaatattttcaggtccaaatgaacatagtcactacttaggtgaaagcgaggtgaccgtggactctgcattattggaaaatattcaaatcatttcttactatccgcgctctcattag

SEQ ID NO: 108574 - DNA, 123 bp, Enterobacter aerogenes
atgcctgacatctaccgcatcaccgtcaaaaccaaatcaggcgaaatccatgaaggactgatgaggcgatcccagacagaggttgttaatggtttcatcggaatcgcgtgcgaagacggctaa

SEQ ID NO: 108575 - DNA, 135 bp, Enterobacter aerogenes
atgttctcagacttggataattcatttgcaattgccatcgcgccagcaatcaaccagatcgttaaaaccgtttgcttagcaatacagttgtggcttttgaaacgctacggcattatcaagcccacccgtagatga

SEQ ID NO: 108576 - DNA, 981 bp, Enterobacter aerogenes
atgcacgtaatcggaactaaacctttcgctctgtacaacgagatcgacccattcgcggcgcaatggctgcgtaacctcatagccgccgggcatatcgccccgggcgaagttgacgaacggagtattgaagatgtcacacctgacgacctcagaggatttacccagtgccactttttcgccggaattggcgtctggtcccattccctccgcctcgcaggatggcctgacgatcgcccggtctggactggctcctgcccgtgccagcctttcagcgcggcaggcaaaggcgatgggtttgctgacgagcggcacctttggcctcacttcttccacctcatcagcgagcgcagacctcagcatgtctttggcgaacaggttgcagcaggtaatgcaaatgcttggttcgaccttgtacaggcagacctggaaggagtgggatacgccttcgggcttgtgccgtttacgtcagcgggcatcggtgcgccgcacatcagagagagagcttactgggtggccgagtccgctggcgagcaatgtcaaaaactgctaccaggactggctcaaggtgttggcgcggaaggaagccggtcgtcagccaaatctacaggactttgcagtgttggcagcctggacaacgccgacaagccgggactggaaagacacttccggaatgacagcgcagcgagatgggaaagaacggctggaccagctgccacgccaggcatacacagtcggccccttgaggttaacggtttttggcgagatgcggactggctcttatgtcgagatggaaaatggcgtccagttgaacccggcacattcccgctggttgatggggctgccgcgcgcatgggacgagtcgagcccggggtggcacgagtggcaagcagcaaccgcatcggccgactcaaaggctatgggaacgccataaacgcacaggctgcggctgaattcgtccgggcttatatggagggtttatga

SEQ ID NO: 108577 - DNA, 459 bp, Enterobacter aerogenes
atgacgaaatgtaactcactacctgccagcacggagtcacgcttgcttagcaaggttgaaaaggcccctgaaactggatgctggatttttactggtagtcggctaccaagcggttacgggattttatggaatggagtaaggcctactggagcccatcgaatctcattccagttgtacaagggcgaaatacctgccggaaaagaaattgaccacatctgcaacaacagatcttgtgtaaacccggcgcaccttcaggcaataagccacaaagaaaacatccataagagttccactctcatgggggtgaatgcacgtaaatcccactgcaagagaggccatccattaaatggagaaaacttacatgtaactccacttggggccagactgtgcagggagtgcatgagaatgcacgcaagaaatgccaaggcgagaaaacgttatgcacgtaatcggaactaa

SEQ ID NO: 108578 - DNA, 834 bp, Enterobacter aerogenes
atgagcgaagtaacggacttaactgtcatcgaaatcaagcctgagcaggcgcccacgttatacagcgctggcggcctaaataactatctcgagcaaatccgcgaattggcgaaagaggtcccagacgttagcactaaaaaaggacgtgatcgtattggtagccttgcgcgcatggttggctccagcaaaacagctattgagaagcctggtcgcgaatacctcaagcgattgaaggaggcggttaaacctgccgaagaggaattgcgagtattcaccagagagtgcgatgccattcgtgacgcaatccttaaacctcgcgatgagtgggaagctgagcaggagcgtatcaaagctgaagaagcaatgaacgcgctgcatgcagaagcgatggtgatgaacgaagaattcgaccgccagcgcgctgcgcagatggaagcagaccacgaaatggctttgctgatgaatgacaagtttgaccgtgaccgtcaagagcagctccgcctggcggaacaggcacagcatcgcgtcgaagcggaacagcgtgcagaaagagaaaaacaggaagcagctgatcgcgctgagcgtgagaaagccgcggctgtcgaagccgaacgccttaaggcaaaacaggcagaagaagcacgcctggctgaagaaaagcgcaaagccgaagagcaggcaaaaagagaggctgacgttaaacaccgtaagactgtcggcaccaatattgtcaacgcgctaaccagtcataccagcatcacccgcgagcaggctatcgaagtgcttacggcattgaaagataacctgatcccctgcgcgacaattcattactga

SEQ ID NO: 108579 - DNA, 543 bp, Enterobacter aerogenes
atgcaatcacttacgtatcaccacaataccggattcgttccggccgcgatgataaatcgcgctcaaacaaaacaggatcacgatcatgacctgatccgagatgcagtaagagcctgggcgtcggctatcgacaatcagggcgtggtatcagctctgattatcaacgagtaccgtgaacagggcggcgattcaatcagctttcctgacgatatcagccgggcccggcagaaactctttcgcttcctagataaccggtttgattccgatcagtaccgcgagaacgttcgccagctgacaccggcaatcatggccgttttaccgctggaattccgcgccaagctggcgccgcagaacgacaccatgtcgctgatagcttcggcaatgaaagagtgtgcagaagccaagcaggcagtgcttcttaacgctcctgagcaccagaaactgaaggaggtaagcgagggtatcgcttcactgtttcgcctcatgccggagcaggtaggcccactgatgacgatggttacgtcgatgctgggggttatgtga

SEQ ID NO: 108580 - DNA, 534 bp, Enterobacter aerogenes
gtgaagtatcagatagtaggtggtgcaggcctgcaccgcagcgaaaccaaaacagttgatatgatggttaagcagttaccagatagttggtttggctatgctggcttggttgttactgatagccaaggatcgatggaaatcgatacgctaattattactgctgaccggctgctattagtcgagcttaaagagtggaatggtaacatcacatacgaagggggtaagtggctgcaaaatggtaagccacgaggcaaaagtccctatcagatcaagcgtgagcatgcactgcgactaaaagatttgttgcaggaagagctatctcgtaagttgggttactttttgcatgttgaggctcatgtagtgctgtgtggcactgcaggtcctgagaacttgccatcaagtgagagtcgctatgttcatacccgtgatgaattcttgactataggcaaccccaaaaattacgaaaagttggtgcaagacactaacttttctcatctttttgaggggggggaagcctcggccaaattcagatga

SEQ ID NO: 108581 - DNA, 606 bp, Enterobacter aerogenes
atgagattactgctgctgttagggctgtttatcagcccgctggtcagcgccctcacgcttgatgatctgcaaaaacaatttagcgaacagccggtggtgcgcgcccacttcgatcaagttcgcacgattaaggatctgccgcagccgctacgatcccaggggcagatgttgatcgcccgcgataaggggttgctgtgggatcaaacctcgccattcccgatgcagctgttgctggatgacaaacggatggtgcaggcgatcaacggccagccgccgcaaaccattactgccgaaaacaatccgcagatgttccagttcaaccatttgctgcgcgcgctgttccaggcggatcgaaaagtcctggaagataacttccgcgtggaatttgccgataaaggcgaaggccagtggacgctgcgcctgacgcccaccactacgccgctggataagatttttgcccgcatcgatttggccggaaaaacctatctggagcatattcagcttaacgacaagcaaggcgatcgtaccgatatcaccctttcccaacaccaattgacgcctgcgcagctgaccgatgacgaacgccaacgctttgccgcccagtaa

SEQ ID NO: 108582 - DNA, 423 bp, Enterobacter aerogenes
gtgcttaacgatccccgttttactgctgaagtagagctgactattccgtttcatgacatcgatatgatgggcgtcgtgtggcatggcaactatttccgctacttcgaaattgcccgtgaggcgctgcttaaccagttcaactacggctaccggcagatgaaagcctcaggctatctgtggccggtggtcgatacccgcgtgaaataccgcgacgttatcaccttcgagcagcgcattcgcgtgcgcgcgcggatagaagagtttgagaaccgcctacgcattggctacgaaatttttgatgtcgatagcggcaagcgcaccaccaccggctacaccatccaggttgcggtggatgaaaacagccgcgagatgtgtttcgtcagcccggatatcctgtttgaacgcatgggggttacgccatga

SEQ ID NO: 108583 - DNA, 354 bp, Enterobacter aerogenes
atgaagccccatgaaattgagcgccgtcagccgcaagccgatcgggttgaaatcgtgctctctctcgacccggcgctattctggtttcgcggccattttgccgtgcagccgctgctacccggcgtcgcacagatcgattgggcgatgcattacgccacccgcctgctcgcgcccggctggcgctttcatgacattcagaacgtgaaatttcagtcgccgctgctgccgggcgcgatcgtcacgctcaccctgacatggcaagaggcgcgccagaccctgacctttaactatcagctccatgacggtgaaacccggcacaccgccagcagcgggaaaattcgcttatgccgctag

SEQ ID NO: 108584 - DNA, 1350 bp, Enterobacter aerogenes
atgatgcagcccctcacgctggcccagtggctcagcgccccgcgtccgccgcaaacgctgattgcgtggcaggaagcgcacagctggacgctggcgcatctgcgctatgatgtcgctcacctgcttaacaacctgcaacaacagccaggcgagcgttgggcgctctgttttgacaacagctacctgtttttggtcgcgctgttggccacgctgcatgcggggaaaacgccagtgcttcctggccatagccgagcggcgctattacacgaacagcgagcgcttttcgacggcatcctgagcgataagacgctgccatggcgcgggccgctgcgggttatccagtccgccatggcgaccgcatcccacgaatacgcgttcccggcgatcggcgataacgcctgcattgagctttttacctccggttctaccggtgaaccaaagcgaattagtaagcccgttaagagtctcgaccgcgaggcggcgctgatagccgcgcactatgccgggcgcctgacaggcagtcgggtagtggcatcggtcgcgccgcagcacttgtacggcctgacgttccgtctgttcctgccaatggcgctggggttgccgctgcacgcggcgatgattgagtacgccgagcagttggcggcattaagccatgaccatcattatttatttatcagtagcccggcttttctcaaacgtctcgactatcggcttatcccgccgccggtcgcgatgattttgtccgccggcggcaagctgccctggcaggatgccatgcacaccgctaactggttcaatacctggccggatgaaatctacggcagcacggaaagcggggttatcgcctgccgccagcgcctgcaggataatgcgccgtggcagccgttcccaggcatcagctttcaaccagaaggcgacgcgtttcgcctcttttccccactgatcgccgacagtcgcggtctgttactcgatgatattctacattttagcgatagcgatcggttccatctttgcgggcgtcgggaccgggtagtgaaaattgaagagaagcgcatttcgctaagcgaagtggaataccggttactgcaactggatggcattcttgaggccgccgtcctgtcgattacccgcggcagccgccagagcgttggcgcgttgttagtgctcgatcatgacgcccgtcgccgctgggggaaaagccaggaattacaatggcggaaagcgctgcgcgcctcgctggaacctgtggccatccctcgctactggagggtggttgacgagatccccgttaatagcatgaataagcgtgtctacgcgcaattacaggagttctttcatgaagccccatga

SEQ ID NO: 108585 - DNA, 246 bp, Enterobacter aerogenes
atgagcgaacttttttccagtcctgaccatacgctggacgcccttgggctccgctgcccggagccggtgatgatggtgcgtaaaaccgtgcgtaccatgccggtgggcgagaccctgctgattattgccgacgatccggctaccacccgcgatattcccggtttttgcctctttatggagcatgagctggtggcgcaggaaaccgaagccctgccgtaccgctacctgatccgcaaaagccactga

SEQ ID NO: 108586 - DNA, 315 bp, Enterobacter aerogenes; identical to SEQ ID NO: 108123

SEQ ID NO: 108587 - DNA, 174 bp, Enterobacter aerogenes; identical to SEQ ID NO: 108124

SEQ ID NO: 108588 - DNA, 432 bp, Enterobacter aerogenes; identical to SEQ ID NO: 108125

SEQ ID NO: 108589 - DNA, 981 bp, Enterobacter aerogenes; identical to SEQ ID NO: 108126

SEQ ID NO: 108590 - DNA, 678 bp, Enterobacter aerogenes; identical to SEQ ID NO: 108127

SEQ ID NO: 108591 - DNA, 1410 bp, Enterobacter aerogenes; identical to SEQ ID NO: 108128

SEQ ID NO: 108592 - DNA, 426 bp, Enterobacter aerogenes; identical to SEQ ID NO: 108129

SEQ ID NO: 108593 - DNA, 543 bp, Enterobacter aerogenes; identical to SEQ ID NO: 108100

SEQ ID NO: 108594 - DNA, 1200 bp, Enterobacter aerogenes; identical to SEQ ID NO: 108101

SEQ ID NO: 108595 - DNA, 1188 bp, Enterobacter aerogenes; identical to SEQ ID NO: 108102

SEQ ID NO: 108596 - DNA, 1260 bp, Enterobacter aerogenes; identical to SEQ ID NO: 108103

SEQ ID NO: 108597 - DNA, 954 bp, Enterobacter aerogenes; identical to SEQ ID NO: 108104

SEQ ID NO: 108598 - DNA, 735 bp, Enterobacter aerogenes
ttgacgccgggtaccggctacgccatcaccaccatcaccaaatatctgttgatgctaattggcgggctggtcggcttctcgatgattggtattgagtggtcgaaactgcagtggctggtggcggcgctcagcgtcggtcttggttttggtctacaggaaattttcgccaactttatctccggcctgatcatcctgtttgagaaaccgatccgtatcggcgatacggtcactatccgcagcctgaccggtagcgtgacgaaaataaatacccgcgccaccaccatcagcgactgggaccgcaaagagatcattgtgccgaacaaagcgttcatcaccgaacagttcatcaactggtcgctgtcggattcggtcactcgtgtggtgttgactatcccggcgcccgcggaggccaatacggaagaggtcacgcagattctgttgaccgccgctcatcgctgctcgctagtgattgataccccggcgccggaagcgtttctcgttgacctgcagcaggggattcagattttcgagctgcgtatttacgcggccgagatgggacaccgtatgccgctgcgtcatgagctacatcagctgattctggcgggttaccgcgcgcatggcatcgacatgccgttcccgccgttccagatgcgtctggaaagcctggatggcctacgcagcagccagccgctgaactcagcgggtaaaagcagccgtacgccaggaagtttgtaa

SEQ ID NO: 108599 - DNA, 1503 bp, Enterobacter aerogenes
atgcctcaacaaatcaagaagatgagcctgattgggctgatattaatgatctttacttcggtgtttggctttgccaacagcccttcggcgttttatctgatgggttatagcgcgatgccgttttatcttttctcggcgctgtttttctttattcctttcgccttaatgatggcggagatgggctcggcatatcgtaaggaagagggcgggatctattcgtggatgaaccgcagcgtcgggccgcgctttgcgtttatcggcacctttatgtggttttcctcttatgtggtgtggatggtcagcaccgcggcgaaaatttgggtccctttttcgacctttctcttcggcgcggataaaacccagagctgggcttttgccggcttaacctcgacgcaaaccgtcggcgtgctggccgcctgctggatggtgctggtgacgctggtagcggcgaaagggataaataagattgccaaaattaccgccgtcggcggtatcgcggtgatgtgcctgaatctggtactgctgctggtgagtggggcgattctgctgctgaacggcggccatttcgcacaaccgctggatttcacggcgtcgccgaacccaggatatcaatcggggctggcgatgctctctttcgtggtgttcgccattttcgcctatggcgggattgaagcggtcggcgggctggtggataaaaccgtgaagccggaaaagaactttgccaaaggcattattatcgccgcgctggtgatttcgatcggctactcgctggccatcgtgctgtggggcgtcagcgccaactggcagcaggtattgagcaaccgcagtaccaacctcggcaatatcacctatgtgttgatgaccagccttggcgcaacgcttgggcaagcgctgcatctgtcgccgcaggcggcggcgctgaccggcgtatggtttgcacgcattaccgggctgtcgatgttcctggcctataccggcgcattcttcaccctgagctattcgccgctgaaggcgattattcaggggacgccgaaagcgctgtggccgacgatgatgaccaaagtcaacggcaacggcatgccggctaacgccatgtggctgcagtgtctgctggtgagtctgtttatcctgctggtctccttcggcggcgataccgcctcggcgttttataacaagctaacgctgatggcgaacgtctcgatgaccttgccgtatctgttcctggcgatcgcgttcccgttctttaaggcccaagccgagctcgatcgtccatttgtgatgttcaaaagccgcataagtacgctgctggcgacgacgatagtggtactggtggtagcgttcgccaatatcttcaccgttattcagccggtgatggattccggcgactggaacagtacgctgtggatggtcggcgggccgattttcttctcgctactggcgctagggatctacgagaactatcgtcagagaacggcggtacaggtagcgctggcggagggttaa

SEQ ID NO: 108600 - DNA, 978 bp, Enterobacter aerogenes
atgagcgagacggcaacctggcagccgagcgcatccattccaaatctgttaaaacgtgcggctgtaatggcggaaattcgccgtttctttaccgaccgcggcgtgctggaggtggaaacgccttgtatgagtcaggcaacggtgaccgatatccacatgttcccgtttgaaacccgtttcgtcggccccggccactctcagggtctgaatctgtatctgatgaccagcccggaataccacatgaagcggctgctggccgccgggtgcgggccggtatttcagctgtgccgaagcttccgcaatgaagagatgggccgtcaccacaatccagagttcaccatgctggagtggtaccgtccgtgctacgacatgtatcgtctgattaacgaagttgacgatttactgcagcaggtgctcgagtgccaacccgcggaaagcctctcttatcaacaggccttccagcgctatctggagatcgatccgctctcggcagataaaacccagctgcgcgaagtggcggcaaagctcgatctcagtaatatcgctgatacggaagaagatcgcgatacgctgctgcagttgctgttcgccatgggcgtagagccgcacatcggtaaagaacgtccgacgttcgtctatcacttcccggcaagccaggcttcgctggcgcagatcagcaccgaagatcaccgcgtcgccgagcgcttcgaggtctactacaaggggatggaactggcgaacggtttccatgaattgaccgacgcgcgcgaacagcagcagcgttttgagcaggacaaccgcaaacgtgcggcccgcggcctgccggagcagcccatcgactataatctgctggctgcgctggaagccggcctgccggattgttccggcgtcgcgctgggcgtcgatcgcctggtgatgctggcgttaggtgtagagaccatcggcgaagtgatctcattcaccgtcgatcgcgcctga

SEQ ID NO: 108601 - DNA, 912 bp, Enterobacter aerogenes
ttggcgggaagtagtcttttaaccttattggacgatattgccacgctgctggacgatatctccgtcatgggaaaactggcggccaagaaaacggctggcgtactgggcgatgatctttctctcaatgcgcagcaggtcacaggcgtaagagccaaccgcgagctcccggtagtatggggagtggcaaaaggctcgttcctgaataaagtgattctggtgccgctggcgttactcatcagcgcctttattccctgggccattacgccgctattgatgctgggcggcgcatttctctgctttgaaggctttgaaaaagtgctgcataacctgcacgcgcgcaagaataaggaggatccgaaattgcgccagcagcggctggaaacgcttgcagctcaggatccgcaggcctttgaacgcgataaagtaaaaggggcgatccgtaccgattttatcctgtcagccgaaatcgtcgcgattaccctgggtattgtggctgatgcgccattgcttaatcagatcctgattttatccggcatcgccattctcgtgaccgttggggtttacggcctggtgggcgtcattgtaaagctcgatgacatgggatattggctggcggagaagaaaagcgcactggcgcagtgggttggaaaagcgctcctggccatcgcgccgcgattgatgaaaattctgactttcgtcggtaccctggcgatgtttctggttggcggcggtatcgtggttcacggcgtagcgccgctgcatcatttcatcgagaattttgcccatgggctaagcggaatgctggcatccacattgcctgtggccgctaatctggtgctaggatttatcattggcgctatcgtctttggcgtcgttaaagctatcaccgcgttacgcggtaaagcgaaataa

SEQ ID NO: 108602 - DNA, 180 bp, Enterobacter aerogenes
atggtcttgttggtcagtgatgaagtcagacgaaaaaacggcgggccgcggatggtcgtcaccggcattgccgacgatatggtcgagtgccggtggtatgacggacaggtcgtacagcgtgaagccttccgtgaagatgagttggtccgcggcgaagggcaacattcgcagcataattag

SEQ ID NO: 108603 - DNA, 231 bp, Enterobacter aerogenes
atgatgaaatccgctaaagaccacggtgtgatgaataccgacgggattgacgttaatgtcgatgccctgctggcggcgatcaatgagattagcgaaagcgaagtacatcgtagtgaagatgatccgcatcatgtcagtatcgatggccgtgatgaacacacatggcgcgagctggccgaagcctttgagcttgatattcatgactttagcgttactgaagccaatcgctaa

SEQ ID NO: 108604 - DNA, 189 bp, Enterobacter aerogenes
atgcaggtaaacgatcgtgtcacggtaaagaccgacggtggcccacgtcgatcgggggtagtactggcaattgagtcgtttagtgaaggaaccatgtatcttgtggcgctggaagattacccgctggggatctggtttttcaatgaagtggggcacccggacggcatctttgttgagaaagcagagtag

SEQ ID NO: 108605 - DNA, 633 bp, Enterobacter aerogenes
atgtcaacgattatcatggatttgtgcagctatacccggctaggtttaaccggatatctggcaagccggggaataaagaagcgcgatatcattgaggtgcgtagcgcacagagtttgaaagagcgctgcgaatcgctgcgtccggcggttgtgtttctcaacgaggactgttttatacatcacgaagagagcaatcaacttatccgcgacatcattaccacctaccccgatactctatttgttatttttatgtcgctggccaacatccattttgatcactatttacttgtacgcaagaatttacttatcagctcaaaatcccttacgccgaaagaccttgataacatactgggtaattatctgcagaccgatagcgccaataatctaaaccaattacgcacccgcattcccactctatcgctcagtcaggccgaatcgaatatgctgcaaatgtggatggccggccacgctacttcacatatttccaggcagatgaatatcaaagcaaaaaccgtttcgtcacataaaggtaatattaagaaaaaaatccagacgcacaataaacaggtgatttaccacattgttcggttggctgaaaacattacttccggcatttacgtcaatatgcgctga

SEQ ID NO: 108606 - DNA, 417 bp, Enterobacter aerogenes
atgaaaaagattgttatggctggcgcgctgcttaccctggccggatgcgttcaggttgatacctatgaggcggtggtcaaagcgccggcgcctgcagggctggaagggttctggcaatcgaagggaccgcagagcgcaatggtaagtcctgaggcgatagcgacgtttatcgttaccaaagacggagatactctcgattgccgtcagtggcagcgggtaattgctgagccgggaaaattaatgaaccgcgacaatcaggtttataatgtgaccagcagtctcgatatttatcctattgaacgtactggaaacacgctggaatacgatcgaatgacgttaacccgtgttgaacgcttaacgccggaatgcgagcaggcctggaaaaagaaccagacggcgagtacgaccgcgcagtaa

SEQ ID NO: 108607 - DNA, 1488 bp, Enterobacter aerogenes
atgaaaaatcccacgttgttgcaatgttttcactggtattacccggaaggtggcgagttatggcgggaagtagaagcccttgcgccaaatctcaatgaaattggcattaatatgatttggttgccgcccgcctataagggcgcttccggcggttattcagttggctacgatagttacgatcttttcgacctcggtgaattcgatcagaaaggatcggttgccaccaaatacggcgataaagctcagctgttagcggcgattaatgcgctaaaagaacatcaaattgctgtacttcttgatgtcgtagtaaaccacaagatgggcgccgatgagaaagaacgcatccgcgtacaacgcgttgatgaacaggaccgcacgcaaatcgcggaagaaatcatcgaatgtgaagcctggacccgctatacctttccgggccgcggtggtaaatattcacaatttatctgggactataaatgttttagcggtatcgaccatatcgaaaatcccgatgaagatggcgtattcaaagttgttaatgactacaccggcgatggctggaacgatcaggtcgacgatgaaatgggcaacttcgattatctcatgggcgaaaatatcgatttccgtaaccatgccgtgaccgaagagataaaatattgggcccgctgggtcattgaacagaccggctgcgatggtttccgcctggatgccgtcaaacatattccggcatggttttataaagagtggattgagcatgtacaggggtccaccgataaaccgctatttattgttgccgaatactggtcacacgaggtggataagctacagcagtacatcgaccttgttgacggtaataccatgctgtttgatgcgccgctgcagatgaaattccatgaagcctcgcgtcagggccgcgattacgacatgagtcaaatcttcaccgggacgctggtggaagccgacccattccatgcggtcacgttggtcacaaatcatgacacccaaccgcttcaggcgctggaagcgccggtcgaggcctggtttaagccgttagcctatgcgctgattttactgcgtgaaaacggtgttccctcggtattttacgccgacctgtttggcgcaagttatgaagataccggcggagatggccagacatactccatcgagatgccggttatcgagcagcttcacgaactcatcgatgcgcgtcagcgtttcgcccacggcgtacaaatgctgtggttcgatcatcctaactgtatcgccttcagccgcagcggtaccgatgaacatcctggctgcgtagtggtgctctccaacggcgacgatggcgagaaaacgttaccgcttggcgagaattatgccaataaacgctggaaggattttctcaataatcgacaagaggttattgagactgatgacgagggcaatgccgtattcacctgtaatgcaggcagcgtaagcgtgtgggtgattgaagaggtgctttga

SEQ ID NO: 108608 - DNA, 801 bp, Enterobacter aerogenes
atgaaattagcacttctgggtcgtcaggcgctgatgggcgcaatggccgtagcattgatggctggtgtaagcgtgaaaaccttcgccgctgaaaatctgcttaatcaggtcaaagagcgcggcacgctacgcgttggcctggaaggtacatacccgccgtttagttatcaaggcgatgatggcaaattgaccggttttgaagttgagtttgccaatgaactggcgaaacacatcggggtgaaagccgatctcaaacccaccaaatgggacggcatgctggcttctctcgattctaaacgtattgatgtggtgattaaccaggtcactatttccgaccagcgcaagaaaaaatacgacttctccaccccttatactatttctggtgttcaggcgctggtgaaaaagggtaacgaaggcgtgattaaaaccgcggcggacctgaaaggtaaaaaagtcggcgttggtctgggtaccaattatgaagagtggttgcgccagaacgtacagggcgttgatatccgcacctatgatgatgacccgacaaaatatcaggacctgcgcgtaggccgtattgacgccattttggttgaccgtctggcagcgttggatttggtcaagaaaacgaacaacactctggctgtaaccggtgaagcattctcccgtcaggagtccggggtggcgttacgtaaaggaaatgaagatctgctgaaagcggtggacaccgctattgcagatatgcagaaagatggcagcctgaaggcgctttcagaaaaatggtttggtgctgacgtcactaagtaa

SEQ ID NO: 108609 - DNA, 987 bp, Enterobacter aerogenes
atgtcactacaaaatttaacgcgttttccgcgcctggagtttattggcgcgccgacgccactggaatatctaccacgcctgtccgaacatctcggacgggatatttttataaaacgcgatgatgtcacccccatggcgatgggaggaaataaactgcgtaagctggagttcctcgccgccgatgcgctgcgcgagggagctgatacgctgatcaccgcaggggcgattcaatcgaaccatgtgcgccagacggcagccgtggctgcgaaactgggactgcactgcgtcgcgttgttggaaaatccgataggcacgcgtgctgaaaattatctgaccaacggtaatcgcctgctgctggatctgttcaatactcaggttgagatgtgtgatgcattgaccgatcccaacgcgcagcttgaagagctggcgacacgtattgaagctcagggataccgtccatatgtcattccggtcggcggatctaacgccctgggcgcgttaggttatgtcgaaagcgcactggaaatcgcccagcaatgtgaaggagcggtggagatctcttcggtagtggttgcctccggtagcgcgggtactcatgccgggttagcggtaggcctggaacagctgatgccaaatgcagaattaataggggtgaccgtgtcacgtagcgttgccgaccagttgcctaaggtggtgacgctgcagcaggccgttgccaacagtcttgagctgcaggccaaagcggagattaccttgtgggatgattattttgctcccggatacggtacgcccaatgaagaaggcatggaagcggtgaaactgctggcgcagctggaaggtatcctgctggatccggtttataccggaaaggccatggccgggctgattgatggcattaatcagaaccgctttaaggatgaggggccgattctgtttatccataccggtggcgcgcccgcgctgtttgcttatcatccgcacgtctaa

SEQ ID NO: 108610 - DNA, 669 bp, Enterobacter aerogenes
atgcaagaaagtatccaactggtcattgactccgcgccttacctgttaaagggcgcagtttttacgttacaactgagcatcggcggtatgttcttcggcctgctgctgggatttatcctcgcactgatgcgcatgtcgccaatctggccgatcagatggctggcgcggatgtatatctctattttccgcggcaccccgctgattgcccaactgttcatgatctattacggtttgccgcagttcggcattgagctggatccgattccggcggcgatgattggcctgtcattgaatacagcggcctatgcggcggaaacgctgcgcgcggcgattgcctctatagacaaagggcagtgggaagccgccgccagtatcggcatgacgccgtggcagactttgcgtcgggctattttaccgcaggctgcccgcgtggcgctgccgccgctctctaacagctttatcagccttgtcaaagatacttcgctggcggcgacgattcaggtaccggaactgttccgccaggcacagttaattacctcacgtacgctggaagtatttacgatgtatctggccgcctcgctgatctattgggtgatggcgaccgtactatccaccttgcagaattattttgaaaatcagctgaatcgccaggagcgtgatccaaaatga

SEQ ID NO: 108611 - DNA, 327 bp, Enterobacter aerogenes
atgcgggaaaagattaaagttctggaacacaaagccaacatgctgtcgcagacggcggatcaaccctttttgctggccaatactacgcgaagtatcgatagtcacatcgcctacgcgaatggtaccgctttcggggtgttcaagcaggttaatgctgcgcaacagcgtggttttaccagagccgctcgggccgataatcgccacgacctccccttcctgaacctcgagatcgataccgtgcagcacggtctgcccgtggaattttttcaccagttttttgacttcaatcgcactcattttggatcacgctcctggcgattcagctga

SEQ ID NO: 108612 - DNA, 462 bp, Enterobacter aerogenes
atgatccagtacatccagttcgatttcacgcggatcgacttcgatggagatttcagcatcggcgttaaagctgaagtggccgcgcagcagattcatcaagcggctgatttgcgctttgttgagataggtcggcgtaccgccgccccagtgcagttgactaacctggcggccggcaaaaagcggcgcgcggtgaataatttcctgctcaaggacatcaagatactggtcagccttatgctgttggcgggtgacaatcttattacagccgcaaaaatagcagagcttatggcagaacgggatatggacgtacagcgacagcggccgctgcgggtagcggtccacggcggcggcaaaatcagcagcgccgaacgccggagaaaactccagcgcggtgggatacgaggtatatcgcggcccggaatagttatatttctggataagggccagatcccagtcgattaa

SEQ ID NO: 108613 - DNA, 492 bp, Enterobacter aerogenes
atgtttgccgctgcggtcgaccagcgcgtactcgaagacccagccaacgccggtggcgtcagggcccatttcggcgctgaccccggtgggcagtttgccctgcacctgattgagatactccagcacccgcgagcgcgcccagtaaggatcggtgccgtcttcaaaaatcacgtacacgtaggagtcgccaaactgcgagaagccgcgcaccgttttggcgccggggaccgacagcatggtggtggtcagcggccaggtgacctggttttcaacgatctgcggcgcctgccccggatagctggttttgacgataacctgcacgtcggagaggtccggcagggcgtctaccggggtgtggacgatagtccaggtcccccagatgctgagaaacagcgccgccatcatcaccaggaagcggttggccaccgagcggcggataatccattcaatcattgttccgtcctcagtgcgcgtgggcggcaggggctgtga

SEQ ID NO: 108614 - DNA, 264 bp, Enterobacter aerogenes
atgaatgccacgctcactatcatcgttgatggcgaagcgctgacggtgccggaagggatcagcgtggcggcggccctggcgttgaccggcgaccccaccacccgccaggcggttaacggcggcctccgcgcgccgttttgcggcatgggcgtctgccaggagtgccgggtcaccgtcgatggcctacgggtgctggcctgccagaccctgtgccggtccgatatgcaaatagaaaggagccgcgatgaacacgctgcgctgtga

SEQ ID NO: 108615 - DNA, 1017 bp, Enterobacter aerogenes
atggagtcggtaactctatcgttacctgaagcttatgacctggcgctggaggtactcagcgccaatggatttagcgccgaccacgcggcggtcattgctcgtaacgtggcagccggggagcgcgacggctgcgcttcccacggcctgtggcggctgttgggcattgtcgataccttgcgtaaaggtaaggtatcgcctgatgccgagccgcaaatccacgatcaggcgccggcgattgcacgggtggatgccggcggcgctttttcgctgttggcctacgagcgcgcgctgccgttactgctggagaaggcgcggcacaacggcattgcggcgctggcgattaaccgctgcgtccatttttccgcgctgtttgccgatattgagccgttgaccgaggctgggctggtggggctggcctgcacgccaagccacgcctgggtcgccccggcgggcggcacgcgtccgctgttcggcaccaatcctatagcttttggctggccgcggcgggacaaaccgccgtttattgttgatatggcgaccagcgccgcggcgcgcggcgagatacagctgtatcagcgcgccggcaaagcgctacctgaagggtggggaatcgacagtcagggacggccaacgaccgatgccgcagaggtgctgaacggcgcgatgttaacctttggcggccataagggctcggcgctggcggcaatggttgagctgctggccgggccgcttattggcgatatgaccagcgccgaatcgctggcgtgggataacggcgcgggaggtctcccttacggcggcgagcttatcctggcgctggatccgcagcgctttctcggcgcgcaggcacaagagcagctggagcgcgccgaaacgctgttcaatgcgatgcaggatcagggcgcgcggctgccgggcgagcggcgtttcgcctgccgccagcagagtgagcggcagggggtcgccatcagccgttcattgcatgatgagatttgcgccttgcgccagggtggataa

SEQ ID NO: 108616 - DNA, 225 bp, Enterobacter aerogenes
atggcgagcgaccgcatcatcgatatcaaccacccgcccctgcgacaacaccagcagcgcaccttcgtgcaattcaccaatacgctcacgatcgccgctgccgataatgcgcccgcgggcatccattacgttaatattggtatcaatgatgcgcatcgttcgcgctacgatatcctgcgccattttggtatcaagatgccagccagccatgtaaccctcccctga

SEQ ID NO: 108617 - DNA, 1434 bp, Enterobacter aerogenes
atgaaaaaaaccacgttagcaatgagtgctctggctctgagtttaggtctggcgttgtccccgctctctgcgagcgcggctgaaacggcttcctcggcgaccactgcgcagcagatgccgagcctggcgccgatgctggaaaaagtgatgccgtctgtggtgagcatcaacgtcgagggcagcacgactgttaacacgccgcggatgccgcgtaacttccagcaattcttcggtgacaactcgccgttctgccaggatggttcgccattccagagctctccattctgccagggcggcggtcagggcgcgcctggcgataacgcgcagcagcagaaatttatggcgctcggttccggggtaattattgatgcggccaaaggctacgtggtgaccaataaccacgtggtcgataatgccaccacgattaaagttcagctgagcgatggccgtaagttcgatgcgaaagtcgtcggtaaagatccgcgctccgacatcgcgctgattcaaattcaggatccgaaaaacctgacggcgattaagcttgccgactctgacgcgctgcgcgtcggcgactacaccgtggcgatcggtaacccgttcggcctcggcgaaaccgtgacttccggtatcgtctccgcattgggccgcagcggcctgaacgtggaaaactatgaaaactttatccagaccgatgcggctattaaccgcggtaactccggcggtgcgctggtgaatctcaacggtgaactgatcggtatcaacaccgcaatccttgctccggacggcggcaacatcggtatcggctttgctattccgagcaacatggtgaaaaacctgaccgagcagatggtcaagtttggccaggtgaaacgcggcgaactggggatcatgggtaccgagctgaactccgagctggcgaaggcaatgaaagttgatgcccagcgcggagcgtttgtaagccaggtgatgccgggctctgcggcggcgaaagcgggtattaaagctggcgacgtgattaccaccctgaacggcaagccgatcagcagtttcgcggcgctgcgtgcgcaggtcggtacgatgcctatcggcagcaaagtcgagctgggcctgctgcgcgacggcaagccggtcaacgttaccgttgaactgcagcagagcaatcagaaccaggttgactccagcagcatctttaacggcattcaaggcgcggaaatgagcaacaagggccaggacaaaggtgtggtggtgagcaacgtgaaagcgggcacgccggcggcgcagattggtctgaagaaaggcgacatcattgtcggcgctaaccagcagccggtgaaaaacatcgctgacctgcgcaaaatcttcgatgcaaaaccgtccgtactggcgctgaatattcagcgtggtgatacctctatctacctgctgatgcaataa

SEQ ID NO: 108618 - DNA, 1515 bp, Enterobacter aerogenes
atggcaaatattgattttcgcaacaagattcactggcgtcggcgctaccgttcgccgcagggtgtagagacggaacgcgagatcctgcgggtgtttgaaagcgatcgcgggcgcattatcaattcaccggccatccgccgcctgcagcaaaaaacccaggtctttccacttgagcgtaacgcggcggtccgcacccgactcacccattcgctcgaagtccagcaggtcgggcgctacatcgccaaagaggtgctaagccgcctgaaagagcaaaagctgctggaatgcaacggtctggatgaactgagcggcccgtttgaaagcgtggtggagatggcctgtctgatgcacgatatcggcaatccgccatttggccattttggcgaggcggcaattaacgattggttcagcaaacggctggcgccgaaagatgccgccagccagccgttaagccaggatcgctgccaggttggcgcgctgcgtctgcacgacggcgaaggggtgctcaacgaactacggcgtaaggtgcgtcaggatttgtgctgctttgaaggcaatgctcagggcatccgtctggtgcacacgctgatgcgtatgaacctgacctggacccaggtcggctgcattctgaaatatacgcggccggcgtggtggcggggagagacgcttgccagccatagctacttaatgaaaaaacctggttattatttagccgaagaagagtatatcgcgcggctgcgtaaagaattggatctggcgccttacaatcgttttccattaacgtggattatggaagctgccgatgatatctcatattgcgttgctgacctcgaagatgcggtagaaaaacgaatattcagcgcggagcaattgtatcaacatctctatgacgcgtggggcactcatgaaaaaggatccttgttcgcccaagttgtagaaaacgcgtgggagaaatcgcgcgcaaattcactgagccgcagcactgaagatcagttctttatgtatttacgggttaatacgttgaataaactggtgccttatgcggcgcatcggtttatcgaaaacttaccggctatttttagcggcgattttaatcatgcgctgttagaggacgacagcgattgtagtcagctacttgaactttataaaaacgtcgccataaaacaggtgtttagtcatcctgatgttgaacagctggaattacagggctatcgggttatcagcggtctgctggatatctacgagccgctactgaaattatcgctggaggagttcagccaattggtggaacaagatcgggtacgcagtttgcctattgcttcgaggttgttccagaaactttcgacccgacatcggttggcttatgtggaggcggtaaataagctttcgcgtgatgccgaagaatatcccgtgctggagtattattaccgctgtcgattgattcaggactatatcagcggaatgacggatttgtatgcgtgggatgaatatcgccgtctgatggcggtggaataa

SEQ ID NO: 108619 - DNA, 699 bp, Enterobacter aerogenes
atgaaaattggcattattggcgccatggaagaagaagttacccttctgcgcgacaaaatcgagaaccgccagactatctctatcggcggtagcgaaatctataccggccaacttcacggtaccgaggttgctctgctgaaatccggcattggtaaagtggcagccgccatgggcgccaccctgttgctggagcgctgcaagccggatgtgattatcaataccggttccgcgggcgggttagcgccgacgctgaaagtcggcgacatcgtggtctctgacgaagcgcgttatcatgatgccgacgtcaccgcgttcggctacgaatacggccaactacctggctgtccggcgggtttcaaagctgatgacaaactgattgccgccgcggaaacctgcattaaggcgctgaatctcaacgccgttcgtgggctgatcgtcagcggcgacgcattcatcaacggctcggtagggctggcgaaaatccgccacaacttcccgcaggccgttgccgtagagatggaagcgaccgccatcgcccacgtctgccataacttcagcattccctttgtggtggtgcgcgcaatctctgacgtcgctgaccagcagtcgcatcttagcttcgacgagttcctcgccgtcgccgccaagcagtccaccctgatggtggaaaacctggtgcagaacctggcgcgtggctaa

SEQ ID NO: 108620 - DNA, 801 bp, Enterobacter aerogenes
gtggctaagtcgctacagaaggcgttaaccgccctgctgttactcgccccggcgtggcttttcgccgcgccgagggtggtgacgctctccccggccaacaccgaattggcctttgctgccggcattacgccggtcggcgtcagcagttattccgactaccctcccgccgcggcgaaaatcgaacaagtcgccagttggcagggaatgaaccttgaacgtattgtcgctctgaagcccgatctggtgctggcgtggcgcggcggcaatgccgaacgccaggtgaatcagctcagttcgctgggaatcaaggttatctgggttgaaaccggttcgattgagcaaatcatcagcgctctgcggatgctggcgccgtggagcccgcagccggaaaaagcccggcaggccgcacaggcgatgcaagacgattaccaggcgctaaaagcccgctatgccaacgcgccgaaaaaacgcgtatttctgcagtttggcgccaacccgctgttcaccagcaacagcgcctcgatccagaatcaagtattgagcctgtgcggtggggaaaatatttttgccgccagccgcgttccctggccgcaggtcagccgcgaacaggtgctgtcacggcatccgcaggcgatcgtcatcaccggcgacgccagtaaaattcccgccgtggaccgctattggcaaaatcagctcacaatttcgctcatcgccttacatagcgactggtttgaacgcgcgggcccacgtattatccttgccgcaaaacaactctgtactgcgcttgagcaggtaaaataa

SEQ ID NO: 108621 - DNA, 627 bp, Enterobacter aerogenes
atgcttgtctattggctggatattattggcacagccgtatttgcgatctccggcgtattgctggcaggaaaattacgcatggaccctttcggtgtgctggtattaggcgtggttaccgccgtgggcggcgggaccatccgcgatatggcgctggccaatggcccggtgttctgggttaaggatccgaccgatctggtggtagcgatggtcaccagtatgttaacgattctactggtccgccagccgcggcgcatgccgaaatgggtactaccggtgctggatgccgtcggcctggcggtgtttgtgggcatcggcgtgaataaagcctttattgcccataccggcccgctggtagcgatctgcatgggcgtggtcaccggcgtcggcggcgggattatccgcgacgtgctggcgcgagaagttccgatgattctgcgcaccgaaatctacgccaccgcctgcattgtcggcggtatcgtgcacgcgacggcgcactatacctttcagctgtcgctggaaaactcggcgatgttaggcatggtggtgacgctggggatacgtctggcggcgattcgctggcacctgaagctaccaacctttgcgttggatgataacggacgttcataa

SEQ ID NO: 108622 - DNA, 345 bp, Enterobacter aerogenes
atgagtgatgacgtagcgttgccgctggagttcaccgaagccgcagcgaacaaagtaaaacatctgattgcggatgaagataatccgaacctgaaactgcgcgtgtacatcaccggcggcggttgcagcggtttccagtatggcttcacctttgacgatcagatcaacgaaggcgatatgaccatcgagaaacagggcgtcggcctggtggttgacccgatgagcctgcagtatctggttggcggcgccgtcgactataccgaaggcctggaaggttcacgtttcatcgtgactaacccgaacgcgaaaagcacctgcggctgcggctcctcgttcagcgtttaa

SEQ ID NO: 108623 - DNA, 1461 bp, Enterobacter aerogenes
atgcctctcttctcatttgtattaccaataaatgataatggcatgaaagcagaaactccctcttttgaagcacatcagtttgttcgcgtgcgccgtagcgatgcggtccgccgtttgattcaacgcgacaaaacgccgctggcggtattgttgatggcggcggtggtcggcacgctggccgggctggtgggcgtggcgtttgaaaagagcgtgaactgggtacagaaccagcgaattggcgccctggtgcaggtggcggaccactggtacctcgtctggccgctggccttcattctgtcggggctgctggcgatggttggctattttctggtgcgccgctttgcgccggaggccggcggttccgggatcccggaaatcgaaggcgcgctggaagagttgcgcccggtacgctggtggcgcgtgctaccggtaaaattcatcggtggtatggggacgctgggcgccgggatggtgctggggcgtgaagggccgatggtgcagcttggcggcaatatcgggcgcatggtggtggatgtgtttcgtctgcgcagcccggaagcgcggcacacgctgttggccaccggcgcggcatcaggcctctccgcggccttcaacgcgccgctggcgggcatcctttttatcatcgaagagatgcgcccgcagttccgctacaatctgatttcgattaaagccgtgtttaccggcgtgatcatgtcgagcatcgtgtttcgtatttttaacggcgaaggggcgattatcgaagtcggcaagttaagcaatgcgccggtgaataccctgtggctgtatctggtgctgggcatgatctttggctgtttcgggccactgtttaatgctctggtgctgcggacgcaggatatgttccagcgcttccacggcggcaatatcaaaaaatgggtgttgattggcgggcttatcggcggcctttgcggcctgctgggcctgatgcagccaacggcggtaggcggcggttttaaccttatcccgatcgctgctgccggtaacttctcggttgggctgctgctgttcatctttattgctcgcgtcattaccacgctgctgtgcttctcttccggcgcgccgggggggattttcgccccgatgctggcgctggggacgctgctgggaacggcattcggcatggctgccatcccgctgtttccctcctatcatctggatgctggtaccttcgctatcgccgggatgggggcgttgctggcggcttcggtacgcgcgccgctcaccggaattgtgctggtgctggagatgaccgataactatcagctcattttgccaatgattattacctgccttggggcaacactattggcgcagttcctcggaggtaagcctttgtattcgaccattctgcagcgtaccctggcgaaacagaaggccgaagaggcggcgaaagcgcagcaggtaccccgggagaatacttga

SEQ ID NO: 108624 - DNA, 1281 bp, Enterobacter aerogenes
atgaacaaatctgaaaatctgtataacgccgcccgcgaacttatccccggcggcgtcaactcgccggtccgcgcctttactggcgtcggcggcaccccgctgtttattgaacgtgcggatggcgcctacctgtacgatgtcgatggtaaagcttatatcgattatgtcggttcctggggcccaatggtgctgggtcacaaccatccggccattcgtaacgcggtgattgaagcggcagagcgcgggttaagcttcggcgcgccaaccgaaatggaagtcaaaatggcggaactggttactgaactggtgccgaccatggatatggtgcgcatggtaaactccggcaccgaagccaccatgagcgctattcgcctggcgcgcggcttcaccggccgcgacaaaatcatcaagttcgaaggatgctaccacggccatgccgactgcctgctggtgaaagccggctccggcgcgctgactctcggccagccgaactcgccgggcgtaccggcggatttcgctaagcatactctgacctgtacctataacgatcttgcctcggtacgcgcggcgtttgaacagtatccgcaggatatcgcctgtatcatcgtcgaaccggtggccggcaatatgaactgcattccgccgcagccggagttcctgccgggcctgcgcgcgctgtgcgacgagtttggcgcgttgctgataattgacgaagtgatgaccggcttccgcgtcgcgctggcgggcgcccagtcttattacggcgtggagccggatctgacctgtctgggtaaaatcatcggcggcggtatgccggtgggcgctttcggcggtcgccgcgaggtcatggacgcgctggcgccgaccggtccggtataccaggccggtacgctgtcaggcaaccctatcgccatggccgcaggcttcgcctgcttaagcgaagtggcgcagccgggcgtgcatgaaaccctgaccgagctgaccaatcaactggcggatggcctgctgaacgcggcgcgcgaaaccgggatcccgctggtggtgaataatgttggcggcatgttcggtatcttctttaccgaagccgaaaccgtcacctgctatcaggatgtggtgaagtgcgatgttgaacgtttcaagcgtttcttccacctgatgctggaagaaggggtttacctcgccccgtcggcgtttgaagccggctttatgtccatcgcccatagcgaagaggatatcaacaacactatcgatgccgcgcgtcgggtgtttgccaaactgtaa

SEQ ID NO: 108625 - DNA, 243 bp, Enterobacter aerogenes
atgtccgtcgttacggaattcatagaagccattagcaccaccatttccgacatgaacgcccataaaatggtgtttgccaatgcgctcgtaatgataaagattggtgaaaaggtcaccggctccctgaagatgcaacccggtggttatccgctcggagccattctgagtcttattcccgccagcccagaaccagccatcagcgttacgtttggtaaactgcccagcatccagttcggcatttga

SEQ ID NO: 108626 - DNA, 696 bp, Enterobacter aerogenes; identical to SEQ ID NO: 88548

SEQ ID NO: 108627 - DNA, 1689 bp, Enterobacter aerogenes
atgaataaaaaatacaagggtatcggcgtgctggcttttgccgccggttcgttattacccggcgcgacggccaatgccgccgatcaaaatgcggctggccccagcgatggtgcggcaaagaagcccaatattatcctgatcgtctctgacgataccggctatggcgacctcggcgtctacggcggcggcgaaggccgcggtatgccgacgccaaacctcgacagaatggccgatgaggggatgacctttttcgacttctacggccagccgagcagtacgccgggccgcgcggcgatgcagaccgggcgcattcccaaccgcagcggtatgaccaccgtggctttccaggggcagggcggcggtttaccgaaagaagagtggacgctggcctcggtactgaaaaccggcggctataaaactttctttaccggtaagtggcacctcggcgaagcggattacgcgttacctaatgctcagggctacgacgaaatgaaatacgtcggcctctaccacctgaacgcctatacctatgccgacccgacctggttcccggatatggatccgcaactgcgtgaaatgtttacccgtgtcacccgcggcgctctttccggcaaggcgggcgaagcgccgaaggaagagttcaaaattaacggccagtatgtgaataccccggtcgttgatggcaaagagggcgtggtcgggatcccattcttcgaccgctacgtcgagaaggcctcgctggactatctcgaagcaaacgcaaaatcttccgaaccgttcttcatgagcatcaactttatgaagaaccaccagccgaacatgccggatccggattacgtcggcaagtcgatgtcgaagagcaaatacgccgactcgatggtggaaatggatgcccgcgttggccatatcatggataagctgcgcgagttggggatcgataaaaacacccttgtggtatggaccaccgataacggcgcctggcaggacgtctatccggatgccggctatacgccattccgcggcaccaaaggcaccgaccgcgagggcggcagccgcgttccggctatcgcctggtggccgggcaagattaaagagcatagccgtaaccacgatatcgttggcggcctcgatctaatggcgacctttgcttcggtggccgggattaaattacccaccaaagatcgtgccgggcagccgattatcttcgatagctacgatatttcaccggtactgtttggcaccggtaaagatccgcgtacctcctggttctacttcactgaaaatgagctgaccccgggggcggcgcgcgtcggtcactataaggcggtgtttaacctgcgcggcgataacggcgcgaaaaccggcggcctggcggtggattccaacctcggctggaaaggtccggagtcgtatgtcgcaacggtgccgcagattttcgacctctggcaggatccgcaggaacgctacgatatctttatgaacaactataccgagcatacctggacgctggtgaccttcaatgaagccatcactaagttgatgaaaacctacgtcgagtatccgccgcgtaagccgcagagcgaagcctacagtgggccgattaccctgtcgcagtatcaacgctttagtaatatccgcgagcagttacaaaaagaagggttccagttggcgatgccgaccggtaattaa

SEQ ID NO: 108628 - DNA, 1263 bp, Enterobacter aerogenes
atgaaaaaaagcaccaccattccattaacgccattacagaaccaggggcgctatctgcccgcctataaacgccgctatcacatgatggcgaaacccagcggctccacctgcaacctggactgtcaatactgtttttatctgcataaagagcagcttttacatcagccgcacgacaaaggaatgagcgacgaggtactggagaatttcattcgtcagtacatccaaagccaggacggcgaagagattattttctcctggcagggcggcgagccaaccctgatgggactggagtttttcgaaaaggtcgttgagctgcaaaagaaatatcagccgaagcaccagcgcattgagaacgatctgcagaccaatggcgtgctgattaacgataagtgggccgccttcttaaaggcgcataacttcctggtcggggtatcgatcgatggcccgcgcgagatccacgatcgcttccgcgtgacgcgcagcggcaagccgaccttcgataaggtcatggaaggggtcgcggcgctgaagcgccacggcgtgccgttcaacgcgctggcagtcgttaaccgggtgaatgcccgtttcccgcgcgaggtatatcgttttcttacccgcgaactcggtgccacctatatccagtttacgccttgcgtagaggccgccgagtttaaaactaccgcgccgcagttctggcgcgaagagacgatccccatcaccggcagccgccgggcgaaaccgggcgatctggattctatcgtcaccgactggtcggtggatccggacgattggggacattttctgaccgaagcttttgatgagtgggtgacctacgatctgggccgcgtgcaggtgaatttgttcgaaaccgccgtggtacagactatggggcttccatcccagttatgcatcaccgcgccgttttgcggtaaggcgctggcgattgagaaaaacggcgacgtctactcctgcgatcactacgtctacccggaatataagcttggcaatattaaggcgcataagctggcgcatatggtcttttccgagcggcagaaagtgtttgggataggcaagaaagagacgctgcccgcctactgcaaaagctgcccgcatctgaatttatgctggggcgaatgcccgaaaaaccgcatcgtgcgcgccccggacggcgaagaagggctcaattatttgtgtcctggctttcgccatttttacgcgacggttaaaccgacgcttgagaagattgccgccatgctgaagtag

SEQ ID NO: 108629 - DNA, 996 bp, Enterobacter aerogenes
atgaaaaaaacagtactgctcagcatgctgctattgagcttcaccagcgcggcagccaccgatatgctgccggcatggaaagatacccctgctaaacaggcgattgagcaatgggtgcagggggcgacgcgtgaaggcggggcggactttattccgctggataagcgctacgtagtttttgataatgacggcaccctgtggccggaagcgccgctgactttccaactacagttcgcggtggatgaagtgaaacggctggtgcccgaacatccggagtggaaaaaggatccgctggtggcggcggtactgaacaacgatttgaaaacggtagcggcgggcggcgaaaaagggttgctcaagctgctggcgttaacccatagcggcatgaccaccgaagagtttagtcagcgggtcagcgcatggtttgacagccatcaggataaacgtaccggctgtcgctacgaccagttgggatatcagccgatgcgccaactgctggactatctgcgcgccaatggttttaaaacgtggatcgtttccggcggtggaattgacttcatgcgcgtggtatcggagaaaatgtacggtatccctccggagcaggttatcggttcgttcgcgctcagcgaatttagtctgacggacaatggcacccagcttcgcaaaacgatgaaaggcgcatttaatgatgacgccgcggccaagccggtggcgatccacctgtttatgggtcagcgcccggttgcggctttcggcaacagcgacggcgatctggcgatgctacagtacaccgcagccaacccgaactataaaaccttcgagctgctggtacaccataccgatgcggcgcgggagtatgcctacgacagccatccttccgccagcggcaagctggtgaaaggattgaccgaggcgaaacagaagggctggacggttgtcgatatgcagcaggactggaagacggtatacgacccggcgcagtgtcaggtgaaataa

SEQ ID NO: 108630 - DNA, 999 bp, Enterobacter aerogenes
atgaacaaagcgctactttttctgctggttgccacgcttccggcgcatgcggcgatggatatcacccgtgaactggaagcgccggcgcagatcgtccccggccagccggttcgggtggcgatcacctggtggaccgatagctggtttaacccgccgccgcagtggcccgagtttgccgtcaaaaacggcgaacttctgaataccgcgttgccttcacagctggtgacgcgcaaaaagaacgggatcgtctggagcggcattcgccttgaacgtcaggtcagcgcctggcagcagggcgtgctgcgcctgccggcgatcgacattaccgcgacctccgccaatcaggcgccggtcacggtacatcttccggcgctggaacgcccggtaaactggccggccaataccactcaggcggaccattttttaccggccagccagctgacgctcagccagcaaattcaacagtaccacgcggggaaagacgccacgctgcgggttggtgatgtcgttgaccgtatcgtgaccgtcgaggcgcgggatgcgctaccggggcaaattccaccgctgctgtacgccattaacggtagcgaaagccagcgtctggcgccggtcagtgaggcattaaaaagcgagcgcggcgatatcataggcgctcatcgggtggagcggctgcgttatctgcccagccatagcggcacgctgacgctaccaccgattagcttgcgctggtgggataccgttaatcatcaatggcaaacggcaaagctggcgggagaaacgttgaacgtcgccgcggcgcgacagggcggcgcggagcaagcgctgcgcggtaccacgggaatggtcacctggcagagcctgatgtggatagtgattgccgccgccgcggtcggaggcggatggtttggccgccgctggtgttatcgaacgcttctcggcattagtcgacgctggcggcgtttctggcagccgcagccgttaccaccgctggccccttag

SEQ ID NO: 108631 - DNA, 1524 bp, Enterobacter aerogenes
atgagcgattttcacttcctctatccgtggcgcttaaccgcgctgctgctgtgtctgctggtggcctggcttcctggctacggcgcttccgcctggtcaacgctaatggataaaccttttcgcgcgttgattattcaacgccgtcgcaggttaacccggctgctgccgtggctactcacactcggtgtcatcgcactggcgggcccaagctggcagcgcgaactcccggcggcgctgacgccgcaaagcaacgtgatggtgattctgcagcaggatctggcgatgtatgcccaggatcttcccccctcgcgtcatcagcgcatgcagcataaaatcgccgcgctgatgcaacagcagcccggttcgcatttcggtctggtggtctacagtagccaggcctttctcaccacgccgttaacccaggatccgcagttttatcagctatttctcaacgcccagtcgccctctttgctgccggaaggtagcggttccgccctgccgcaggccgtcgcactggcgttaaaaaatctgcctacagacaaagacagcccgcgtagcctaatcctcgttgccgataccctgtcgcctgccgatgtcacctggctgaaagggcaacatctaccgctgcaaatttgggtacccggcaccgccgcgggtggaacgctgccggataagtatgccagcctcggcatcgatacccggctgaacgtcgatcgtttccgccagttgcgcgacgccgggatcccggtgacgctggccagcgatgatggcgacgatctgccgatcatcgccagccacattcaacaatcggtgactcagcaaaataacgcccgcgaggatctgcactggaaaaacagcggctacctgctgatcgcgccgatgctgttcctgctgctgttctggcgacgccagttactgatggtagcgctactatttcccgcgctgctgtggtcgccgcacagcgatgccgcctggctcgatgcctgggttcgccccgatattcaggggcagcacgcctttcgccgcggcgactacgccgctgccgccgggcattatcgcgatccgttatggcaaggtatcgcctggtatcgggcgggcgactatcctgccgccgccagcgcgtttcgcgccgcgccgccaaccgcggaaaccttgctgtggctgggcaacagctatgctcagcaaaagcagtggcagcaggcgctcgacagctacgatcgcgccctctacctacatcctgactggtccatggcgctgcaaaatcgcgataaaatctcgcagattgtgatgggcattcgccagcaagagcgcgagcgccaacaggcgcagggcgatgcgatggacgacggcccggataagctggtccacgacctgcagaaaaaccagggcatcgatcagcagcaaatcggcgctattgccggggagagtccgcaggttaatcaatggtttgatgcgctggatgtttcgcctaccgggctactgaaaagcctgtatcgcaacggctcaggagataccgcaccatga

SEQ ID NO: 108632 - DNA, 978 bp, Enterobacter aerogenes
atgtctgaatggctcgcccacattgatttcgcctggccctgggccgcgctactgctggcgctgccgctgctcactcgttttctcccgctaccggcaaaaaccaccgacgagcgcgtgcgggtaccgtttttaccctcgctcattgacgcgctacagctcgatacccggccaaaacgcggaaatggggccagcgccgtgctgttctggcttatctggtcactgctggtttgcgcgctggcgcggccggaatacctgacgccaccacaatatattaccaggccgatgcgcgacatcgtgctgatcctcgatgtctccgggtcaatggcgaaaaatgacgtccagggcggtaatacgcgcctgcaggcggtacagcaatcggtgcgcaagtttgtcgccgcccgccaatccgaccgcatcggcatggtcatcttcgccagcaaagcctggcccttcgccccgataagcgaagataaacaggcgctgcaaacgcgcatcaatcagctagcgccgggcatgattggccagcaaaccgctatcggcgatgcgctgggcgtggcggttaaggtgctggataatggccccgataagcaggccgataagctggcgattttactcaccgacggcaatgataccgcttcgcagctgtcgcctgaactggcggcaaagcttgctgccgaccaccatgtccgggttcataccatcgccttcggcgacctcagcgataccagtaaagacaaagtcgatttgccgctactgcagcgcatcgcgaaaaccaccggcggccagagctggaccgccgcgcattccggcagcgcgctggatagcgtctggcaacaaatcgacgccctcactccggcgcaggtcaaaagcctcggctggtcctggcatcagccgctctatccgtggccgctcgccgtcgcgctgctattgctactgctggccgcctgcggccgtgtcctcagggagaaaatggcatga

SEQ ID NO: 108633 - DNA, 441 bp, Enterobacter aerogenes; identical to SEQ ID NO: 88541

SEQ ID NO: 108634 - DNA, 273 bp, Enterobacter aerogenes
atgctggcgcatctgcgccgtcgctgcgaggtcagcgcatttgtgctgttcgacgacttacaccttcgcctgccgcgctccggcacgctggccgcctgctacggcgggcgcagcgccagcgtcaccctcacctccgcgctcagcgccgatattcgtcaacacatcatcggtcggctggcgcgtcagcagcagcaactcaaccagttgggtattcgggttaatcatctgacggtaactcaggacctgctgcgccagttacaaaaagggctttaa

SEQ ID NO: 108635 - DNA, 753 bp, Enterobacter aerogenes
gtgaatctggtgaccggctggcaaaaaccggaatatgaccagatggggatctggcccggcgatgaatacttcgccagtcgctatgactacctgactgaatacgttacggttctgcgcgatctgtgggggaccgggcgcagcgattttaaaggtgattacttcaccatgaacgactgccgggttagcccacggccatcgcagccgatgaaggttatctgcgccgggcaaagcgacgccggcatggcgttttccgcccaacacgccgactacaacttttgctttggcaaaggggttaatacccctgcagccttcgcgcccaccgccgcacggatgatgcaggcggcggaaaaaaccggccgcgaggtcggctcctacgtgctgtttatggtgatcgccgacgaaactgacgaagcggcccgcgctaaatgggaacactacaaagccggcgcggatgacgaggcgctggcatggctgaccgaacagagccagaaagatacccgctccggcagcgataccaacgtccgccagatggccgaccccacctccgcggtcaacatcaatatgggcaccctcgtcggctcctatgccaacgtcgcccgtatgctcgatgaggtggcggcggtccccggtaccgacggcgtactgctgaccttcgatgatttcctgcagggcattgacgcctttggcgaacgtattcagccgctgatgcgctgccgtgaccatattgctcccattacccgcgaggtggcctga

SEQ ID NO: 108636 - DNA, 711 bp, Enterobacter aerogenes
atgattacccttcccgctcgcccggaatcgctgaccttgtcgccgcagcacagcgcgctgatcgtggtcgatatgcaaaacgcctatgcaagccagggcggatacctggatctcgccggttttgacgtctccgccacccgaccggttatcgataatattaatctcgcggtggccgccgcccgcgccgccggcatgttaattatctggttccagaatggctgggacgaacagtatgtggaagccggcggccccggctcgccgaattaccataaatctaacgcgctgaagaccatgcgccaacgcccggaactacagggcaagctgctggcaaaaggcggttgggattatcaactggttgacgaattacggccccgggagggcgatatcgtcctgccgaaaccgcgctacagcggctttttcaataccccgctcgacagcattctacgcagccgcggtattcgccacctggtattcaccggcatcgccaccaacgtctgcgtcgaatcgacgctgcgcgatggtttcttcctcgaatacttcggcgtggtactggaggatgccacccatcaggcaggtcccgccttcgcgcaacaggcggcgttattcaacattgaaacctttttcggctgggtcagcgacgtcggcagcttctgtcgcgccatagaacccgccgccccgctcgcttttaccgaggagaaacgctatgcctaa

SEQ ID NO: 108637 - DNA, 393 bp, Enterobacter aerogenes
atgcctaaacaggtgattattccccccggcaccgctacgccgattgccccctttgttccagggacgctcgccgacggagtgatatatgtctccggcactctgccgttcgataagcaaaacaatgtgctctaccccggcgacccaaaggcgcaaacccgtcacgtgctggagattatcaaaagcgttatcgaaacggcggggggcagtatggcggatgtgaccttcaacagtatctttatcaccgactggcaaaattacgccgcgattaacgaggtttacgccgagtttttccccggtgataaaccggcgcgtttctgtattcagtgcgggctggtgaaacccgatgcgctggtggaaattgccagcgtcgcccatatcggtactccaacatga

SEQ ID NO: 108638 - DNA, 804 bp, Enterobacter aerogenes
atgatgaggctcaatattgccccgccgccgtggcccggctccccggtggtggtgctgagcgccgggcttggcgggggtagcgcgtactggctggcgcagcgggcggcgctggaacagcattatcaactggtgtgctatgaccataacggtaccggggagaaccgcggcccgttgccggaaaattacagcatggcgacgatggcgcaggagctgttcagcgccctgcaggcggcgggcatcatgcgcttcgcgctggttggccacgccctgggggcgctgattgggatgcagttggcgctcgactatccgcgcgcggtcagcgcgttggtgctggtaaacggttggctaacgctttccccgcatacccgccgctgctttcaggtccgcgaacgcctgctgcaggccggcggtgcccaggcgtgggtcgaggctcagccgctgtttctctatccggcggagtggatggcggcccgcctgccgcgtctcgaagcggaagacgcgttggctattagccatttccagggcaaggagaatctactgaaaaggctgcaggccctgaaacaggcggatttttcgcgccgcgcggcggctatcgcctgcccgacgctcatcatcagcgccaccgacgacctgctggtccccgcctcttgctcgcgaatgctgcaggcggcgattcccggtagccgactcgtggaaatggcctggggcggccatgcctgtaacgttaccgacagcgacacttttaaccctattttacgcgacggcctgacgaccctgctgccggtcgccgaggagaatatatga

SEQ ID NO: 108639 - DNA, 591 bp, Enterobacter aerogenes
atgagcgaagcaatcaaccaaaaggcttgcgagaccctattcacccatgcccggacctacaatggctggcgggagcagacggttaacgatcggcagctgcaggagatttacgacttgatgaaaatggggccgacctcggccaactgttcaccggcgcgaatcgtttttgtgcgcagcgccgagggcaaagcgaaactccgcccaactctctccagcggcaatgtggaaaaaaccatgcaggcgccggtcaccgccatcgtggcctgggataacgcgttttacgagcgcctgcccgcgctgtttccgcacggcgacgcccggagctggtttacttccagtccgcagttggccgaggaaaccgcctttcgcaacagctcgctgcaggcggcgtatctgattttcgcctgccgctcgctgggtctcgacaccggcccgatgtcgggattcgaccgcgagaaagtcgatgcggcgtttttcgccaacagcggctggaaaagcaatctactggtgaatatcggctatggcgaccccggcaaattgtacgaccggctgccgcgcctgagttttgatgaagcctgcctgctggcataa

SEQ ID NO: 108640 - DNA, 495 bp, Enterobacter aerogenes; identical to SEQ ID NO: 88234

SEQ ID NO: 108641 - DNA, 1323 bp, Enterobacter aerogenes
atggcactcttcgattttcctcgctggcagttaaccacccccgccgcagatgccggcgttgtcgccccggatgaacgtttatccgccgggcaaacgctgatcatgggcgtgcagcacgccgtggcgatgtttggcgcgaccgtattgatgcctttattgatggggattgaccccaacctggctatcctgctgtcgggggtgggcactctgctgttctttgtcgtcaccggcggccgggtaccgagctatcttggctccagcgccgccttcgtcggcgtggtcatcaccgtgaccggctttacgggccaggggttgaatcctcatctcagcatcgccctcggcggcattatcgcctgcgggctgctctataccctgatcggtctggtggtgatgaaaatcggtaccggctggatagagcgactgatgccgcccgcggtaaccggcgcggtggtgatggcgatcggtctaaacctggcgccgattgccgtgcacagcgtttccgccaacgccttcgacagctggatggcgatgctgacggtgctttgtatcggcgccgtcgcggtctttacccgaggactgctgcagcgtctactgatcctgatggggcttattatcgcctgtgcgctctatgcgctgctggccaacggattcgctcttggtaaaccgctggattttgcccctgtcgcccaggcggcgtggtttggcgtcccgcactttacttcccccacctttgacagccaggcgatgctgctgattgcgccggtggccatcattctggtggcggaaaacctggggcatttaaaggccgtatcgggaatgaccgggcgcaatctggatccctggatggggcgcgcgtttgtcggcgacgggctggcgaccctgctttccggcgcctgcggcggtagcggcgtcaccacctatgcggagaacatcggcgttatggcggtgaccaaagtctattcaacgctggtgtttgtcgccgcggcgctgatcgccatcctgctcggtttttctcccaagttcggcgccctgattcatacgatcccaggcccggtcattggcggcgcgtcaatcgtggtctttggtttgattgcggtcaccggggcgcggatatgggtgcagaatcgggtcgatctcagcctgaatgcgaatttaatcatggtggcggtgacgctggttctgggcgcaggcgattttactttatcgctggggggctttcgccttggagggattgggacggcgactttcggcgctattttactgcatgcgttgcttaaccgccgtcagcatcaggaaaaggtggcaaaagccaccacgatataa

SEQ ID NO: 108642 - DNA, 927 bp, Enterobacter aerogenes
atgtcttcgctcaaactctcgataacgccgcaggaactgatcctgattgtgatcaccatgttctggggcggtacctttcttgccgtacagtacgccgtgaactttagcgggccgtttttcttcgtcggcctgcgctttgccaccgccgcgctggcggtggcgctactgtcgctgcgtacgttacgcggcctgacctggcttgaggttaaggccggtgtggcaatcggcgtagcgattgcgctcggatacagcctgcaaacctggggcttacagtccatctccagcagtaaatcggcgtttattaccgccatgtatgtgccgctggtaccgctgttgcagtggctgtgtcttgggcgcatgcccggtgtcatgtcctgcgtgggcatcgtgttggcgtttatcgggctgatcctgctggcggggccggaaaacaatctgctggctttggggattggcgaaatgattaccctggcaagcgcggtggctatcgctgccgaaatcattttaatcagcgcgtgggcgcgtcaggtcgatgtgcgccgggtgacggtggtacagctggcgactgcctcgctggtggcttttgccgcgatggggccggctggggagtctatcccgccgatgcgcccggaactgctggccgtcgcgctgggactggggattttcagcgccattattcaggtcaccatgaactgggcgcagcgtagcgtatcgccgacgcgggcgacgctgatttacaccggcgagccggtttgggctggcgtgtttggtcgtatcgccggcgagcgtctgccgttgctggcgctggtgggctgtctgtttattctcgccggagtgctggtcagcgagctgaagtggaagaaaaaatcgcggccgcagattgcagcagaggaagcgccagagcttgccgagcggcgcgagccctaa

SEQ ID NO: 108643 - DNA, 174 bp, Enterobacter aerogenes; identical to SEQ ID NO: 88231

SEQ ID NO: 108644 - DNA, 597 bp, Enterobacter aerogenes
atggctaaaattctggtgctttattattccatgtatggacacatcgaaaccatggctcatgccgttgccgaaggggcaaataaagttgacggcgttgaggtggttgtgaagcgcgtgccggaaactatgcaggctgaagcgtttgccaaagcaggcgggaaaacacaaaatgcgcccgtcgccacaccgcaggaactggcggagtatgatgccatcatctttggtacccctacccgtttcggcaatatgtcgggacagatgcgcaccttcctggatcagaccggcggcctgtgggcttccggcgcgctgtatggcaaagtcgccagcgtctttagttcaaccggtaccggcggcggccaggagcagacaattacctcaacctggactacccttgcccatcatgggatgatcattgtgccgattggctacggcgcgcaggagctgtttgatgtctcccaggtgcgcggcggcacgccatatggcgcaaccaccatcgcaggcggcgacggctcccgtcagccaagccaggaagagctggctatcgctcgctaccagggtgagcacgtcgccaatgtagctgtgaaattacacggctaa

SEQ ID NO: 108645 - DNA, 228 bp, Enterobacter aerogenes
atgccgaatcaagaagcgaaggcccaccacgtgggcgaatgggcaagcttacgtaatacctctttggaaatcgccgaagccattttcgaactcgcgaattacgatgaaaagctggcggagaaaatttgggaagaaggcagcgatgaggtgctgtcgcgagctttcgccaaaaccgataaagacagcctcttctggggcgaacagaccatcgaacgtaaaaacgtctga

SEQ ID NO: 108646 - DNA, 1248 bp, Enterobacter aerogenes
atgaaaaaaagtctactcgccgccgcggtggccggggccgtattgttatccgccggcgcccaggcgcaggacgccgttgcgccggaagggtatcaactgcaacaggtgctgatcatgagccgccacaacctgcgcgcgccgctggccaataacggcagcgtacttgagcagtcgacgccgaaatcctggccgcagtgggatgtgccaggcggccagttaaccaccaaaggcggcgtgctggaggtctatatgggccactatatgcgtgagtggctggcgcagcagaagctggtgaccagcggcgaatgcccgccggaaaatgctgtctacgcctacgctaatagcctgcagcgcaccgtcgccaccgcgcagttctttattaccggcgctttccctggctgcggggtgcctgtgcatcatcagccgcagatgggaacgatggatcccacgttcaacccggtcattactgacgattcagccgaattcgcgcaaaaagcggtgcaggcaatggaaaaagagcgtcaggggatgcagctcgctgagagctacaagctgctggaagagatgaccgactatcgtaattcgccatcctgtaaagaaaagcatgtctgctcgcttagcgacggtaaagatacctttagtgccaaatatcagcaggagccaggtgtttccgggccgctgaaggtcggtaactcgctggtggatgccttcaccctgcagtactacgaaggttttccgaaggatcaggtggcgtggggtgaaattgccagcgataagcagtggcaggtgctgtcaaagctgaaaaatggctatcaggatagtctgtttacttccgcggaagtggcgcgcaacgtcgctaagccgctggttaaatatatcgataatgcgctggtgggcgatggcgccgctaaggcgaaagtgacgctgctggtcgggcatgattccaacatcgcttcgctgctgacggcgctggactttaaaccctaccagttacccggccagtatgagcgcacccccatcggcggcaagctgctgttccagcgctggcacgatagcggcagcaatcgcgatttaatgaagattgagtatgtctatcaaagcactgaacagctgcgcaacgcggatgctttgagcctgcaatctccaccgcagcgggtcacgctggcgcttaacggttgtccggttgatgaccagggattctgcccgttggagacgttcaaaaaggtcatgaacgaggcggcaaaataa

SEQ ID NO: 108647 - DNA, 225 bp, Enterobacter aerogenes
atgtttaaaacaagtctcgccggcctgcttgcttcggcgcttacgctgacggcttttgccagttgggcgcagtcggaaagccaacaggttcgcgaacgaattgtcgagcaggtgttaaaaccctgcgaaggtaaaaaggccggagataaagtggtgatggtcgaccgccggggcggcgaacatgaagcgatttgtacgctggcggcggtgccattaccggaatag

SEQ ID NO: 108648 - DNA, 1131 bp, Enterobacter aerogenes; identical to SEQ ID NO: 108183

SEQ ID NO: 108649 - DNA, 1251 bp, Enterobacter aerogenes; identical to SEQ ID NO: 108184

SEQ ID NO: 108650 - DNA, 1077 bp, Enterobacter aerogenes; identical to SEQ ID NO: 92471

SEQ ID NO: 108651 - DNA, 1347 bp, Enterobacter aerogenes
atgacgttaatgcaatttagcgggctgttggtggtctggctgctgtcgacgctgtttatcgccaccgccacctggtttgagttccgccgcgtgcgctttaacttcaacgtctttttctcgttgttgttcctgctcacctttttcttcggcttcccgttaaccagtatcctggtattccgctttgacgtcagcgtggcgccgccggagattttgctgcagacgctgctggttgcggtgtgcttctatgccatctactacgtgacctacaaaacgcgattgcgtccggcatcgcgcgatgttccacgtcgtccgctgtttaccatgaaccgggttgaaacccatctggcctgggggattttgatggggctggcgctgctgtgcgtcggtatcttcttcgcccacaacggtttcctgctatttaagctcaattcatacagccagatattctccgcggaagtgtccggcgtggcgttgaagcgcttcttctacttctttattccggcgatgctggtgatctatttcctgcgtcaggattacaaggcgtggattttcttcctggtgagcaccgtcgcctttggtctgctgacctacgcgatcgtcggcggtacccgcgccaacatcattatcgctttcgctatcttcctgtttatcggcattattcgcggctggatcagcctgtggatgctggcggcggcgggcgtgctgggtattgtcggcatgttctggctggcgttgaagcgctatgggatgaacgttagcggcgatgaagcgttttatactttcctctatctcacgcgcgataccttctcgccgtgggagaacctggcgctgttgctgcagaactacgacaagattgagttccaggggttggcgccgatgatccgcgacttctacgtctttatccccagttggatgtggcacggtcgcccgacaatggtgctgaataccgccaattacttcacctgggaagtgttaaataaccattcggggctggcgatatcgccgacgctgattggttcgctggtggtgatgggcggcgtatggttcgtaccgctgggcgccgtcgcggtagggctcatcattaaatggttcgactggctgtacgaactgggcaaccgggagagcaatcgctacaaagcggctatcctgcacagtttctgtttcggcgctatcttcaacatgatagtgctggcacgcgaagggttggattcgttcggctcccgcgtggtgtttttcctcgtgatctttggtatctgcttgttagcggcgaaactgctgtactggctcctggacagcgcaggattgattcataagcgggtgaagccgctttcgcaaccgcaggtctga

SEQ ID NO: 108652 - DNA, 741 bp, Enterobacter aerogenes
atgactgataacacttcggcgccgcagtatgcgctgcgagggctgcagctgattggctggcgcgacatgcagcatgcgctcaactatctcttcgccgacggcgaactgcgtcagggaacgctggtcgcgatcaacgccgaaaagatgctggcggtagaagataacccggaagtgcgtgcgctgattgaggccgccgagtttaaatatgccgacggtattagcgtcgtgcgctcattacgtaaaaaatatccgcaggctgaggtgtcgcgcgttgccggcgccgatctgtgggaagcgctgatggagcgggctggcgctcagggaacgccggtgttcctgatcggtggcaagcccgaggtgctggcggagacgcaagcgaagctgcgtgagcgctggaaggtcaatatcgtcggcagtcaggacggctatttttccgccgatcagcgtcagcagctgtttgagcgggtgcgcgacagcggggcgaaaattgtcaccgtcgcgatgggatcgccgcgccaggaaattctaatgcgcgactgccggctggtgtatcccgccgcgctgtatatgggcgttggcggcacttatgacgtctttaccggccacgttcaccgggcgccaaaattctggcagaacctggggctggagtggttctatcgcctgctcctgcaaccgagccgtatcaaaagacagttccgtttactgcgctatttacgttggcattattccggcaagctctga

SEQ ID NO: 108653 - DNA, 1386 bp, Enterobacter aerogenes; identical to SEQ ID NO: 108291

SEQ ID NO: 108654 - DNA, 573 bp, Enterobacter aerogenes; identical to SEQ ID NO: 108292

SEQ ID NO: 108655 - DNA, 561 bp, Enterobacter aerogenes; identical to SEQ ID NO: 108293

SEQ ID NO: 108656 - DNA, 156 bp, Enterobacter aerogenes
atggtgcagttccgggcacagtctatagaacgattttaccggcagcagttggtccaccacgcgcagaaattcggtgatgcacagatcgtaatcgttaacctcggtcagcagctcgcgcaccagcgaatcgagcacgccttccattggcgccagtaa

SEQ ID NO: 108657 - DNA, 1194 bp, Enterobacter aerogenes
atggcgaaagtgacgcgagcaattatcgttggcggcggcattggcggcgcggcgacggcgctctctctggcgcgccaggggatcaaagtgatgctgctggaaaaggcgcatgaaatcggtgaaatcggcgccggtattcagctggggccgaatgcgttttcggcgctggatagcctcggcgtcggcgaagtggcgcgccagcgcgcggtgtttaccgaccatatcacgatgatggatgcggtgaatggggaagaggtagtgcgtatcgagaccgggcaggccttccgcgaccatttcggtggcccgtatgcggtgatccatcgggcggacattcacgccaccgtctgggaagccgcgctgacacatcccggcgtggaataccggacttcaactcaagtggtggatatccgccagaccgccgatgacgtgacggtctttgatgacaaaggcaacagctggaccgccgatattctgctgggctgcgacggcgtgaagtcagtggtgcgccagagtctgctcggcgatgcgccgcgggtcaccggccacgtggtgtaccgcgcggtgatagaggccgccgacatgccggaagacctgcgtattaacgcgccggtactgtgggccgggccgcattgccatctggtgcattatccgttgcgcggcggcaaacagtacaacctggtggtcaccttccatagccgcgaaagcgaagagtggggcgtgcgcgacggtagtaaagaagaggtgctctcttactttaaagggattcatccgcgcccgcggcagatgctcgacaagccgacttcctggcgccgctggtccaccgccgaccgcgagccggttgcaaagtggggcaacgatcgcattaccctggtcggcgatgccgcccatccggtagcgcaatatatggcgcagggcgcctgcatggcgctggaggatgcggtaacgataggtaaagcgctgcagcagtgcgacggcgacgccgctcgcgccttcgcgctatacgagtcggtgcgtattccgcgtaccgcgcgaattgtctggtcaacccgtgaaatggggcggatttatcacgcggcgggggtcgaacgtcaggtacgtaatcttctctggaagggcaaagcgcaggatgaattttaccgcggtatcgagtggctttacggctggaaagaggataactgcctcgaaccacgctaa

SEQ ID NO: 108658 - DNA, 645 bp, Enterobacter aerogenes
atgaagctgtacagtttttttaatagctctgcctcatatcgggtgcgcatcgcgctggccctcaagggcatcgattatcagagcgttggggtgaatatccgcatcggggcgcagaatgcgctggagtaccggcggctcaatccggttgggctggtgccgacgcttatcaccgatgacggtgaatcgctgggccagtcgctggcgattgttgactggcttgaccgccactacccacaaatgccgctgctgccacaggaggatcccgcgcggatgcgggtgctggagatggtctacgccatcgcctgcgatattcatccgattaataacatgcgggtcttgcgctaccttagcgatgagttgaaggtcagcgaagcggacaaaaaacgctggtatgcccactggatccagcaggggctgagcgcgctggagcaactgctacgacaatcgaaatccggcgctttctgcatcggcgatagaccaacgctcgccgactgttgtctggtgccgcaatgggccaacgcgcagcggatggggtgtgatttgagccattatccgcgctgccaggcggtttacgacgcctgtacccggctaccggcctttattgccgccgcgccggaaaatcaacaagacaaaattccggcctag

SEQ ID NO: 108659 - DNA, 702 bp, Enterobacter aerogenes
atgactcaatacgtttttgctccccaggcgccgattagtatcccggttgttggcagcgatgagcagttcccggtacgccgcgtttactgcgttggccgtaactatgccgcccacgctcgtgaaatgggcttcgatccggatcgcgaaccacctttcttcttttgtaaaccggcggatgcggttgtgccggtggcggctggcgaaacgctggatctgccgtatccggcgcagaccgacaactatcactacgagattgagctggtggtcgccatcggcaaggcgggacgcgacatcccgctggagcaggcgcaggaatatatctggggctatgccaccggactcgatatgacccgccgcgaccgccagatggagatgcgccagatggggcgcccgtgggagataggtaaagcgttcgatctttccgctcctgtcgcgccgctgcataaagccgccgaggcgcgcgaggtgaatcaggccgggatctggctgcaggtgaatggtgaagatcatcagcgtagcgatatacgccacctcatctggtcggtaaatgaaaccatcagctatctctcgggcttttttgaactacagcccggcgatctgattttcaccggcacgccggagggcgtcggcgcggtggtaaagggggatgtgattaccggcaacgtagacggactgacgcctatcgccgtgcgcgtggtgtga

SEQ ID NO: 108660 - DNA, 1038 bp, Enterobacter aerogenes
atgaccctatctactccgcaatcgaaccgcgaacgccagcagttctaccagcatattgccgggcagaatctgacgccgctgtgggaatccttgcaccacctggtcccgcaaacaccgaatgccaactgcgccccggcgtactggaactatcaggaaattcgcccgctgctgctggaaagcgggcagttaatcggcgctaaagaggcggtgcgtcgggtactggtgctggagaacccgcagctgcgcggccagtcgtccattaccgcgtcgctgtatgccggcctgcagctcatcatgccgggcgaggtggcgccgagccaccgtcacaatcagtcggcgctgcgctttatcgtggaaggccacggcgcgttcaccgccgtcgacggcgagcgcacgcaaatgcgccccggcgattttattctgactccgcagtggcgctggcacgatcacggcaatcctggcgatgaaccggtggtctggctcgatggtctcgatttaccgctggtcaactatctcggctgcggatttgctgaagattatccgcaggagcagcagccggtgacgcgtaaagagggcgactacctgccgcgctatgctgccaatatgctgccgctgcgccatcaggtgggaaattcctcgccgatttttaactaccgctacgaccgtagccgcgaggcgctgcacgacctgacccatcttggcgaggccgacgaatgggacggctacaagatgcgctacgtcaacccggtcaccggcggctatccgatgccctcgatgggcgctttcctgcaactgttgcctaaagggttccggtcgcgggtggcgaaaaccaccgatagcaccatctaccacgtagtagaaggtagcggccaggtgacgattggcgaacaaacctttgcattccaggcgaaagacatcttcgtggcgccaacctggcacggcgtatcgttcaacgccagcgaagagtgcgtgctatttagcttctcggaccgtccggtacaggaggccttaggcctgttccgcgaagcgcgttattaa

SEQ ID NO: 108661 - DNA, 1359 bp, Enterobacter aerogenes; identical to SEQ ID NO: 108122

SEQ ID NO: 108662 - DNA, 906 bp, Enterobacter aerogenes
atggcgaactggacgcaaaagttgaagctgcagcatttgaaaatgctggtggcgctgggtgagcaaggcaatctcacgcaggtcgcgaaaatgatgaatattacccagcccgcactctctaagtggctgacgcaatttgaagaagaagtcggcatgccgctctttgagcgccacagtaagggcctgcgcccttcggaaggcggcaaactgctgcttcagcacgcccagcggctaatcaacgatatgtcgcgctcgcagtacgagatcgagcgctttaagcaaggcggactggtcggcagcctgatgatcggctgctctcccgtggcgacagactgcgtggcgcaggcgatcctctccctgcttaaagagatgccgaccctgcatctgaatatcgaagaaaaagtgatgaccccgctgctgcacgacctgctctccggcgtggtcgatgtggtcgtcggacgtgttggcggccgcgcgctggaactgccgctcaactatcgtgtgctctataccgaaccggtgtgcttcgtcgcccgtcccgaccatccgctggctagcatgccgcgtctgagctgggcagatctcgcagcctggcgctggatagtctggcctaccggcacgcccattcgtcagagcattgataacgcgctggtcgataacggcgtcatgctgccggagaatactatcgagtcagcctcgatgaatgtcaccagcaatttgctgcaaagcagcgatatgatctctattctttctttgcggctggcgcagcattacgccgaacatcggcagctgacgattctgaatttgccgcgtattgaacaaaaaggtagcgttggggtgttctggcgcaaaagcgaagtaccatcgctggcgctcactcgttttctgcactacctcgcagaataa

SEQ ID NO: 108663 - DNA, 432 bp, Enterobacter aerogenes
atgatgaatggcagttcatcaagggttattaccatgagtaagtcgctgaatattatctggcagtacgtgcgagctttcgtcctgatttacgcctgcttgtatgcaggcatttttatcgccgggctactgcccatcacgatccccggcagcattatcggcatgctgattttgttcgtgctgctggcgctgcaaattatgccgccgcagtgggtcaaccccggctgcaacattctgattcgctacatggcgctgctgttcgtgcctatcggcgttggcgtaatgcagtactgggatttactgcgcgcgcagctgggcccggtggcggtgtcctgcgccgtcagtactttattagtctttttggtggtgagctggagctcgcatctggtccacggtgaacgcaaaatcatcgggcaaaaaggaagtaaaaaatga

SEQ ID NO: 108664 - DNA, 696 bp, Enterobacter aerogenes
atgatccatgaaatgtggtggtcgctaccgttaacgctgattgtctttttccttgcccgcaagctggcggcgcggtttaaatttccgctgctcaacccgctgctggtcgccatggtggtcattattcctttcctgctggtcaccggtatttcttatgaacgctattttgccggcagcaaaatccttaacgatctgctgcagccggcggtggttgcgctggcctttccgctatatgaacaactgcaccagatccgcgcgcgttggaaatccatcatcaccatctgctttatcggtagctgcgtggcgatgatcaccggtaccaccgtcgctctgctgatgggcgccaccccgcaaatcgccgcttccatcatgccaaaatccgtcaccacgccaattgccatggcggtcagcggcagtattggcggtattccagcgattagcgccgtgtgcgtcattttcgttgggatcctcggcgcagtgttcggccatacgctgcttaacgccatgcgtattcatactaaagcatcccgcggcctgtcgatgggtaccgcctcgcacgccctcggcaccgcgcgttgcgccgaactggactaccaggaaggggcgtttagctcgctggcgctggtactgtgcggaattattacctcgctggtcgcgccttttctgttcccggtgatcgtcgctgttgtcggataa

SEQ ID NO: 108665 - DNA, 885 bp, Enterobacter aerogenes
atgcactctcgttttcaagctgctttgactaatctggcggcagacctgcaggcggccatcgccccgatgctcgcagacccgcacttcccggcgctgctcgaagccgatcaggtagcgacgctacaacaagcaacaggtttggatgaagacgcgctggcctttgcgctactgccgcttgctgccgcctgcgcccgcgccgatctttctcactttaacgttggcgctatcgcccgcggcgtgagcggtcgctggtacttcggcggcaacatggaattcctcggcgccaccatgcaacagaccgtccacgcggaacagagcgccatcagccacgcctggctgcgcggcgaaaaatccctgcgcgcgattaccgtcaactacacgccttgcggccactgccgccagtttatgaatgaactgaacagcggtctggcgctgcgcattcatctgccgggtcgcgaagcgcactccctgcagcactatctgccggacgcctttggcccgaaagatctggaaatcaaaactctgttgatggatgagcaggatcacggcttccctctcagcggcgatgcgctcacgcaggcggctattcaggcggcgaaccgctgccacgcgccgtacagcaactccccttccggcgtggcgctggagctgaaagacggcaccattttctgcggcagctacgcggaaaacgcggcgttcaatccaacactaccgccgctacagggcgcgctgaacctgctgagccttaacggttacgactatccggatatccagcgcgcgctgttggccgagaaagccgatgcatcgcttatccagtgggatgcgaccgttgcgaccctgaaagcgttgggctgtcagaatatcgaccgcgtgctgttaggttaa

SEQ ID NO: 108666 - DNA, 189 bp, Enterobacter aerogenes
atggaagcgctgggtgataataataaaatcattggtatcgaacactttgcgggtgcgcacgatcgaatcgagggtgcggaaaccggcgtagtccagcacgatatccgccggatcgacgccggctttgatcagatcgcggcgcatggtcatcggttcgttatagctttgcagagcgttgtcaccgcttaa

SEQ ID NO: 108667 - DNA, 732 bp, Enterobacter aerogenes
gtgaccgcagtgaccatggcgattaatcaactggtgtcgcggctgaccctgacgctcgaacgcgagcgtctgtttaccgccgacgtcgcccacgaactgcgtacccctcttgccgggctgcgcttgcatctggagctgctggcaaaggtacacggcgtcagcgttgatcccttaattcaacgtctcgatcagatgaccaacagcatttcgcagctgctacaactggcgcgcgtcgggcagtcgttttccgccgggagttaccagcaggtgcatttgcacgaagatgtggtggagcctctgcaggatgagttggcaacgatgctcgaagcgcgccaacagaccctggagatagaaagcggcgcaggcgaggatctcatttccggagatgcgaccctggcgcgggtgattttacgcaatctggtggagaatgcgcaccgctatagccccgtggggtcgaagattaagatttcggtaaaaccgggaaatacgccgattctggcagtagaagatgaagggccgggcattgatgaggccaaaagcggcgagctgagtaaagcgtttgtccgcatggacagccgctatggcggaataggcctcggtttaagcattgtcacccgcatcgctcaactacacgatgcgcaattctttttacataaccgccagcccggacctggcgtccgcgcctgggtgctattcccgcgcagcgcgcgtcagaaggttaatacccattga

SEQ ID NO: 108668 - DNA, 639 bp, Enterobacter aerogenes; identical to SEQ ID NO: 108413

SEQ ID NO: 108669 - DNA, 795 bp, Enterobacter aerogenes; identical to SEQ ID NO: 108412

SEQ ID NO: 108670 - DNA, 1239 bp, Enterobacter aerogenes; identical to SEQ ID NO: 108411

SEQ ID NO: 108671 - DNA, 1347 bp, Enterobacter aerogenes
atgattaaaatcacgaaagggctggatttgcccatagctggcatgccattacagcagatctcgccccggcctgcggtgaaacgcgtcgcgctgctcggcgaggagtacgtcggcatgcgcccctcgatggccgtgagcgaaggcgatcgggtgcaaaaaggccaggtgctgttcgaagataaaaagaacgccggggtacgttttaccgcgccagccagtggggtggtcagcgccattcatcgcggcgagcgccgggtgctgcaatcggtggtgattgatatcgacggcagcaatgaggcggtgtcgtttacccgctatgcattagaagatcttaacgatttgccacgggaagcggtgcagcaacagctgctggaatccgggcagtggacggcgtttcgtacccgtcctttcagcaaaattcccgcgccgggtagcgttccggcggctattttcgtcactgctatcgataccaacccgctggcggctgaaccgcagccgattatcctcgcccagcgtgaagcctttgatgccggtctgacggtgctaacgcacctgacggacggtaaagtccacgtctgtcaggccagcggcggcaagctgggcggccatcccgccgggcaggtgacattcaaccagtttagtggcccgcatccggcagggcttgccggtacgcacattcacttccttgagccggtcagcctgaccaaactggtctggcatctcaactatcaggaggtcattgccatcggcagactgttcctcgacggcgagctgtacagcgaacgcgtcattgcccttggcggcccgcaggtaaaacagccgcgattgctggaaacctgtctcggcgccagcctcgatgagctgctggtgggcgagctggtggatgatgaaaaccgggtaatttccggttcagtcttgagcggcactcacgcctgcggccctcacgccttcctcgggcgctaccatttgcaggtcagcgtcgtcagagaaggccgcgaaaaagagctatttggctgggtgatgccgggcaaagagaagttctcgattacccgtaccacccttggtcatttctttaagcgcaagcgctttaatttctccactgatactaacggcggcgagcgggcgatggtaccgatcggcaactatgagcgggtgatgccgctggatattctgccgaccatattgctgcgcgatctgcttgccggcgatagcgatagcgcccaggcgctgggctgtctggagctggatgaagaagatctggcgctctgcacctacgtttgtccgggcaaatatgaatacggcccggcgctgcgcagcgtgttaacccagattgagcaggaaggataa

SEQ ID NO: 108672 - DNA, 741 bp, Enterobacter aerogenes; identical to SEQ ID NO: 108188

SEQ ID NO: 108673 - DNA, 768 bp, Enterobacter aerogenes; identical to SEQ ID NO: 101792

SEQ ID NO: 108674 - DNA, 582 bp, Enterobacter aerogenes; identical to SEQ ID NO: 108186

SEQ ID NO: 108675 - DNA, 2445 bp, Enterobacter aerogenes; identical to SEQ ID NO: 108185

SEQ ID NO: 108676 - DNA, 1350 bp, Enterobacter aerogenes
atggcctttgttggtctcttgtggtctaccctcttttgggggcataatcgggggcatgtcaattcgatcaggatttgtgcccccaaaatgaaactcaatgctcgccagatagagaccgcaaagccgaaagagaaagcctataaaatggctgatggaggcggcttgtatcttgaagtctccccaaaaggttccaagtattggcgcatgaaatatcgccgcccatctgacaaaaaggaagatcggctcgcttttggtgtatacccgacgatcactttggctgaggctcggggtaagcgcgatgcagcaaagaaattgttgtctcagggcattgaccccaaagctgagcaaaagggggcacaagctgaaattgagggggcatatttatttgaaactatcgcaaggcaatggcacgcaagtaacctaacttggagcgaagatcatagccgtcgcgttctgctgacgcttgagcagtatattttcccctcgataggtcaaattgacgccagaacgttgagaaccagccagcttctcaatccgatcaaagctgttgatgcggcaggtaaacatgatgttgcgcagcgactgatgcagcgcgtaaccgcaattatgcgtttcggtgtgcagaatgaccttcttgaatcaaatcctgccagtgatatggctggagcgcttttaagcgttaaggcaacccatcacccagcactacccccaaaaagaatccctgagtttcttgaaagactatcacgctataaagggcgactaataacacggcttgccgttgaattaacgctactcacatttattcgttcaagtgagatgcgttttgctcgatggagtgaggttaactttgaacgaagcgagtggacgatacccggaattcgtaaacctattcccggcgtaaaacactctgagcgtgggatgaagatgaaaactgaacatattgttccgcttagcaaacaagcatttgatatttttaaacgtttacatgccttgagcggtaaaggcgaggttatatttcccagcgatcatgatcctaaaaaagtaatgagtgaaaatactgtaaatagcgccttacgtgtaatgggatatgatacgaagacagaagtatgtgggcatggttttagaactatggcgcgtggtgcgctaagtgagtcgaaactatggaatgatgatgccattgaaagacagctaagtcacgttgaacgaaaaaacgtgaaaggttcatatatgcatacttctgaatatcttgaagaaagaagattaatgctgcaatggtgggctgattacattgatgctaacaagaatggatctatcacaccatatgattttgcgcgtgtgcatggaaaataa

SEQ ID NO: 108677 - DNA, 639 bp, Enterobacter aerogenes
atgaataacactcaatctgataataatttgttttattttaataggttaacgtacattacaccgcacgaagtggcgcttgctatgaatggttttgactatgataccgaaaatgatgaattgactgatattcaattaaaagaggttattcggttaagaaaggcaataaccagaaatctacaattgattaatgaatataaaaacatatccgccacgcaaaaagtggaggcgaatttagtattaactgccgcttatatctttcagagggaagatattgtacctcctgaaattaaggaaagaattgagaacgcattgcaacaacaagtaaaaaataaagattgggacgatattttaatgatgctaggaggaagtgaattatatgaagttggtaaaaagttaaggagtaatggcagagggcagtacagaaaagatgatgaggataattatagttgtaaattaatttacttactaattgagttgcttaagaaacatggaaagggaaattatagcgataatagtgttatatataatgatattgtttctttttgtaatgagaatgagattctattgaaaggggttaaaaaagctacgttttataagaaaataaagctggggaaagacattataaaatacggagagtga

SEQ ID NO: 108678 - DNA, 684 bp, Enterobacter aerogenes
atgcctctcgtggtgaacggcatgaaaatcactaataaaaaagcccgacatattgagtttgtgggcttaaaaatattgtcgcttactgaaattagcatggagcctgagagaacgtctgttagcttctctattcagcctccttgctctggcttaactttcctgcgctggcggcgtttgatctcactttgcatggatgtaatgatgaattgtgacgtactttcgtcctcttctttcaccatttccatcgcttcaactacgtcatgtggcactcgtgcctttaaggcttgtgatttagcattctttgtaccggtagccattactgaatctccgtatgtttggtgggccacagtatacacgggaaaagaacaaagaaaagcattgacgtgggccacacctgatatttatagtgggccacaccttaagtgttctagggtgaaaaaggcgaagcccggcagtgcagcaacactaaccgggcctctgaccaatccgctgtatgaggaaacgaagatggctaaacagaagtgtacctggttatttgcggtgatcaaccgcagtcaacgcaatgcccgtcctgtgatgttaaggatcaccgcagataacgagcgctcagcgcggcgcagactggccccggactacgtgctgagctttgccggtcgcattccctgcggaggtgaacatgcgtaa

SEQ ID NO: 108679 - DNA, 285 bp, Enterobacter aerogenes
atgaatatttcaaacgggcacaacagtgctcagggccgcgctttgcctgaaaaacacaataccggtgcttttgcctatgggttgtcagaggacggttttggaaagctgacccgcgcaagaaatgcctgcgacatgctccagcttctcttttctgaatacccgtctcaggtcggagcacttgatgcaggttgtgcgccgggtgtcgccgcgctgatggaatacctgcgggcagatttgacggatattgcgcacagctgcgcactgattgaaggaggtgccaaatga

SEQ ID NO: 108680 - DNA, 357 bp, Enterobacter aerogenes; identical to SEQ ID NO: 90738

SEQ ID NO: 108681 - DNA, 1149 bp, Enterobacter aerogenes
atgaatagtcgattacaggatattctggcgcggctgctggcgtttgacaccaccagccgcgaatcgaacctggcgatgatcgacgatattgccgattatctccacggcttcgcaatcgaaacgcagcttttttatgatgcggaagggcgaaaagctaatctctatgcacgactgggccctgcggggcccggcggcgttatgctctccggccacaccgacgtggtgccggttgacggccagccatggacggttcccccttttgccctcacgcaacgcgatggccgctgctacggccgcggtagcgccgatatgaaaggcttcctcgcctgcgtactggccgccattcctgattttctcgcccaaccgctacgcatgccgctgcacctggctttttcctacgatgaagaggtgggatgtcttggcgtacgcagcctggtcgcccatctgcaggcgtcggcagagaaaccggcgatgtgcatcatcggcgagccgacggagatgcgcccggtctatggtcacaaggggaagctggcgatgcgctgcgatgttcacggccacgcttgccactccgcttacgcgcctgatggcgtgaatgcgattgcctgggcggcaaaactgattggccgcctggacgagctgggcgagcagctggcgcttcgccaggatacgcgttttgatccgccttgcagcaccctacaggtgggggtgattaagggtggcgcggcgttgaatattgtacctcagcactgtcagttcgattttgaaattcgccatttaccggatgtttcgctcgatgacaccctgtcctcgctgcaggcgtatgccgaaggcgaactgctgccaaaaatgcgcgcgacggcggcgggatcggctattacctttcaaccgctcagccagtatcccggcctgttgagcgacccgcagtcggcgttcgccggctggctggcgcagtgggccgaatgcgaggatttttcaacggtcgcttttggcaccgaaggcggattgtttgatgaggccggcgtggccacgcttgtttgtggtccggggagtatggagcaggggcataaggcggatgagtttgttagcgaggcgcagttggaaaagtgcgcgcagatgttgaaaaacctctgccgctggatgtcagcttaa

SEQ ID NO: 108682 - DNA, 774 bp, Enterobacter aerogenes
atggatcgtattattgaaaaattagatcgcggctggtggatcgtcagtcacgaacaaaaattatggcttcccgcaggggaattaccacatggcgaagcggtaaattttgatcttgtcggtgaacgcgcgctacatctcggcgagtggcaaggcgaagcggtgtggctggtgcgtcaggatcgtcgccgtgatatgggatcgctgcgccaggtattggatcaggatcctgggcttttccagttagcagggcgcgggatccagttggccgagttttatcgatcgcataaattctgcggctactgcggccacccgatgcatgtcagtaaaaccgagtgggcgatgctgtgcggccactgccgcgagcgctattatccgcaaattgccccctgcattatcgtcgccattcgtcgcgacgattcaattctgctggcacagcatacccgccatcgtaatggtgtccatacggtgttggccgggtttgtcgaagtgggtgaaacccttgagcaggcggtcgcccgcgaagtgatggaagagagcggcattaaggtgaaaaacctgcgctatgtgacctcccagccgtggcccttcccgcaatcattgatgaccgcctttatggctgaatacgatagcggcgatattgtcgtggataagaaagagctgctgagcgcagagtggtatcgctatgacgatttgccgctactgccgccgccgggcacggtggcgcgacgcctgatcgaagatacggtggcgatgtgtcgggcagagtacgagtga

SEQ ID NO: 108683 - DNA, 1065 bp, Enterobacter aerogenes
atgaccgaactgaaaaacgatcgttacctgcgtgcgctgctgcgccagccggttgatgtcaccccggtgtggatgatgcgccaggcgggccgctatcttccggaatacaaagccacccgcgcgcaagcgggcgatttcatgtcgctgtgtaaaaatgccgagctggcctgcgaagtaacgctacagccgctgcgccgttacccgctggatgcggcgatcctcttttcggacatcctgacgattccggatgcgatggggctggggctgtactttgaagctggcgaaggcccgcgcttcacctcgccggtgaaatgcaaagccgacgtcgacaaactgccggtgccggacccggaacaagaattaggctacgtgatgaacgccgtgcgcaccattcgccgtgaactgaaaggcgaagtaccgctgattggtttttccggcagcccgtggacgctggcgacctatatggtcgaaggcggcagcagcaaagcctttaccgtcatcaaaaagatgatgtacgccgaaccgcaggcgctgcacgcgctgctggataagctggcgaaaagcgtcaccctgtatctgaacgcgcagatcaaagcgggcgcgcagtcggtgatgattttcgacacctggggtggcgtgttgaccggccgcgactatcagcagttctcgctctactacatgcataaaatcgtcgatggcctgctgcgggaaaacgaaggccgtcgcgtaccggtaacgctgttcaccaaaggcggcggacaatggctggaagcgatggcggagaccggctgcgatgcgctgggtctcgactggaccaccgatattgccgatgctcgccgtcgcgtaggccacaaagtggcgctgcagggcaatatggacccgtcgatgctttatgcccctgccgcccgcattgaagacgaagtggcgaacattctcgccggcttcggccagggcgaaggccatgtctttaaccttggccacggcatccatcaggacgtcgacccacagcatgcaggagtctttgttgaggcggtgcatcgtctctccgcgcaatatcaccaatag

SEQ ID NO: 108684 - DNA, 447 bp, Enterobacter aerogenes; identical to SEQ ID NO: 90542

SEQ ID NO: 108685 - DNA, 834 bp, Enterobacter aerogenes; identical to SEQ ID NO: 90541

SEQ ID NO: 108686 - DNA, 1185 bp, Enterobacter aerogenes; identical to SEQ ID NO: 90540

SEQ ID NO: 108687 - DNA, 924 bp, Enterobacter aerogenes
atggatgtgatgaaagagatgggtaatcggctgctgaacggctggcagttatcaaagctgtacacctttgaagtcgcggctcgccatgagtcgtttgcactggcggcggaagagctgtcgctgacgccgagcgccgttagccatcgcatcaaccagctggaagaagagctgggtattcagctatttatacgttcgcaccgcaaggtggagctgacccgcgaggggcggcgggtattctgggcgttgaaatcctcgctggatagccttaaccaggagattctggatattaaaaatcaggagctctccggcacgctgacggtgtactcgcgcccgtcgatcgcgcagtgctggctggtaccggcgctgggcgatttcactcgccgctatccgtccatctcgctgactgtgctcaccggcaacgataacgtcaatctacagcgggcgggtatcgatctggcgatctattttgatgatgcgccgtcatcacagctaagccatcattttctgatggatgaagcgatcgtgccggtatgtacgccgaattacgcgcaacagcagcagttaatccacaatccaggcaatctgcgctactgcacgttgctccatgaccgccaggcatggagcaatgattccggtaccgatgagtggttcagttgggcgcagcaatttgcgattgaattgccgcaatcgtcgggtatcggcttcgatcgttctgatttagcggtgattgcggcgatgaatgacgtcggggtagcgatggggcgtaaacggctggtgcagaagcggttagaaagcggggagcttatcgcgccgttcggcgacatgacgctgaagtgtcaccagcactattatgtgacgaccctgccgggccgtcagtggccgaaaatcgacgcctttatcgaatggttgcacagcctgacataa

SEQ ID NO: 108688 - DNA, 1338 bp, Enterobacter aerogenes; identical to SEQ ID NO: 90538

SEQ ID NO: 108689 - DNA, 489 bp, Enterobacter aerogenes
atgacaggatgtcggacagaatgccactccctcgctcacaacgaaccggcagtacaggaggtgaaagtttatcgccaccattgccagcaaccgcagcagctatatcgggagctacgcgcgcagggcgtgcgcgccgttcgttttattccacagctcagagcggaagatgccaatgcatggggaaatttcctttgcgccattttccacatctgggcgcgggaagatattggccgcataacgattacgttatttgaggaaaccctgcgtatctggtgcggcgaaccgttgcgcgaacaacggcagttggccgccaatagcgcctgttttgtctgtgcgtggcggcgattatgcgcaggcgacgacgatccgctctgtgaaggctaccgccagttctatgtcgccagcgcgccctgtatgcgggtcatgcgcgatctgcgtaaacagcagcggtcaccgggcgaactgatgccgctgctgcgggcgatttaa

SEQ ID NO: 108690 - DNA, 312 bp, Enterobacter aerogenes
atgatcgtcaatcaccccgaacgtgaacaaattcgcctcgaaaatgttctttttgccctgggcaaccccttgcggctggaaatcattcgcacgctctccgacggcagcgagcagagttgtaacgcattgcgcaaagaagatatcgcgaaatccaccatgactcaccactggcgggtgctgcgcgacagcggcgtgatctggcaacgtcctcaggggcgggaaaatctcatttcgcttcgccgcgacgatttggatgcccgttttccagggctgttggatacgctgcttaatgtgatgcgacaggagaagtaa

SEQ ID NO: 108691 - DNA, 2103 bp, Enterobacter aerogenes
atgccccgacccatccccctcgaacgttatcgcaacatcggtatctccgcgcatatcgatgccggcaaaaccaccaccactgagcgcattctgttttacaccgggatgagccataagctgggtgaagtacacgatggcgcggcaactaccgactggatggcgcaggagcaggagcgtgggattaccattacttccgcagcggtaagctgcttctggcccgggatggaccgcagctttgagccccatcgtatcaatatcattgataccccggggcacgtggactttaccatcgaagtagaacgttcgatgcgcgtgctggacggcgcggtgatggtctatgactcggtcggcggcgtgcagccgcagtcggagaccgtctggcggcaggctaataagtatcacgtcccgcggttggctttcgttaacaaaatggaccgcccgggcgccgatttcttccgcgtggtgcaaatgatgatcgatcgcctgaaggccaatccggtgccgattgttatccccattggcgccgaagagcatttcaccggcgtcgtcgacctgataaagatgcgggccattctgtgggatgatgcaacgcaggggatgacgttcagctatgcgcctgtgcctgatgacctgctgccgacggctcaggagtggcgggaaaaaatggtttcggctgcggcggaagccagtgatgagctgatggataaatatctcgaaagcggtgaactgagcgaagcggaaattgtggccgggctacgtaaacgcacggttggcggcgaaatccaggcggtgctctgcggcagcgcctttaaaaataaaggcgtgcagcggatgctcgatgcggtcgttgagttaatgccgtcgccgctggatattccggcgattcagggcattgatgataaggggcaaccggcggagcgtcacccgagcgacgatgagccgctgtcggcgctggcgtttaaactcatgaccgatccctacgtcggccagttgacctttattcgcgtctattccgggacgttgaaaaaaggcgatgcggtctttaacccggtgaagggcaagaaagagcgtatcgggcgtatcgtgctgatgcatgccaacgatcgccacgaagtcgacgagctgcatgccggtgatattgccgcctgtgttggtctaaaagatgtcacgacgggcgatacgctgtgcgatccggatgcggccatcactcttgagcgtatggagttcccggaaccggtcatttcgctggcgattgaaccgaagaccaaggccgaccaggagaaaatgggcattgcgctacagcggttggcttccgaggatccgtcgttccgcctgcataccgatgaagagtctgggcagacgattatctccgggatgggggagttgcatctggagattatcgtcgaccgtatgaaacgcgagttcggcgttgaggcgaatattggccgtccgcaggttacctatcgggaaaccatccgtaaaacggtgaaggatgtggaaggcaaatttgtgcgtcagtccggcggtaaggggcagtatgggcacgtcgtgctgaccctggagccattggcggcggggagcggctttgtgtttgaagatgccaccaaaggcggagtcgtaccgcgtgaatacatcccttctgtggaaaaagggctgcgtgaagcgatgggcaccggcgtgctggcgggctatccggttgtcgacgttaaagcgaccctaacgtttggttcgtatcatgacgtcgactcctccgaaatggctttccgtatggcggcgattttcggctttaaggaaggggcgcgaaaagcggacccggtgatcctggagccggtgatgcacgtcgaggtggagacgccggaagagtacgccggcaatattatgggcgatctctcttcccgtcgcggaatggtgcaggggatggaggagcgtttcggtagccagattattcgtgccgatgtgccgctggccgaaatgttcggttattccaccacgctgcgctcgatgtcgcagggtcgcgcgacctatagcatggagttccatcattacgcagaagcgccgcgtaacgtggccgacgatatcatcgccagccgcgcgaaaagttaa

SEQ ID NO: 108692 - DNA, 1443 bp, Enterobacter aerogenes
atggataacgaatcgattatgcaagacagcgccaatcagcctggatttttattccacgactacgaaaccttcggtaccagcccttcgctcgaccggccggcgcagttcgccgccatccgtaccgatagcgatctgaatgtcattggcgaaccggaagtcttctactgcaagcctgcggacgactacctaccgcaaccacaggcggtgatgattaccggaattacgccacaggaagcgctggccaaaggcgacaatgaggccgctttcgcccgccgcatcaacgatctgttcacggtgccgaaaacctgtatcgtcggctacaacaatgtccgctttgatgatgaagtcagccgtaatattttttaccgcaacttttacgatccgtacgcctggagctggcagcatgataattcgcgctgggacctgctggatgtgatgcgcgcctgctatgccctgcgcccggaaggtatcaactggcctgaaaatgaagacggtctgccaagcttccgccttgagcatctgaccgtcgcgaatggcatagagcatagcaatgcccacgatgcgatggccgatgtgtacgccactattgcgatggcgaaactggtgaagacccatcagccgcgcctgtttgactatctgtacagtcatcgaaataaacgcaagctggcgacgttaatcgacgtgccgcagttgaaaccactggtccacgtttccggtatgttcggcgccgcccgcggcaacactagcctggtcgcgccgctggcctggcatccggataaccgcaatgcggtgattatggttgacctggcgggggatatgtcgccgttgttggagctcgacgccaatacattgcgcgagcgcctgtatactccgcgagacgaactcggcgatttaccggcagcgccgattaagctggtgcatttaaataaatgcccggtgctggcgcaggccaatacgttgcgcccgcaggatgccgaccgtttaggtattaatattcagcactgcctggagaacgcccaactgctgcgcgcaaatccgcaggtacgtgagaaagtggtagccctgtatgccgaagccgaaccgttcgtgccatcggataatgttgatgcccaactgtacaacggattctttagcgatgccgatcgcgcggcgatgaagatagtgctggaaaccgaaccgcgtaacctgcctgcgctggatattacgtttgcggataaacgcattgaacgcctgctgtttaactaccgcgcgcgaaacttccccggtacgcttgatgaaaacgaacagcagcgctggttagagcaccgccgtaacgtctttacgccggagtttttgcaggcctatgccgatgaactgcaggtgatgtatcaacagtatgctgacgatagtgaaaaacaagccctgttgaaagcgctgtggcaatatgcgcaggaaatcgtttaa

SEQ ID NO: 108693 - DNA, 474 bp, Enterobacter aerogenes
atgaactacagcattcaatctctcgatgcccgcaagattgccgggtttcatatggttggcccctgggagcagaccgtaaagcaggggtttgaacaactggcggcgtgggtcagtcaccaccaggtgcctgcgcaggagtgggtcgcggtttattatgataatccgcagcaggtaccggcggaaaaactgcgttgtgacaccgttgttaccgtggcggatgattacgtcatcccgccgaatagtgaaggggtcatcctcaccgcaattgccggtggcgattacgcctgcgccagcgcgcgggtcattaaccatgacttctccacgccgtggctgcagttctttgacagcctgctgcagagcagcgagttcgaaatcgcggataagccctgttttgaaatttatcttaacgatggcaaccaggatggtcactgggatattgagatgtatgtggcggtgaaccgtatcggctcgtaa

SEQ ID NO: 108694 - DNA, 1059 bp, Enterobacter aerogenes
gtgcgcgctgataaatcacttaagccatttgagatccgtctgtatcgtcattaccgaattgtgcacggtatccgcatcgcgctggcttttgtcctgaccttcctgctggtgcgtctgctgaacgtgccggagggcacctggcctctgatcaccctggtggtggtgatggggcctatctctttctggggcaatgtggtgccgcgggccttcgaacgtattggcggcactatcctcggttcggtactggggctggtggcgctcaaactcgagcttatctcactgccaatcatggtgctgtggtgcgcggtggcgatgttcctttgcggctggttggcgctcggcaagcggccctatcaggcgctgctgattggcattacgctggcggtggtggtgggcgcgccgccgggcgatatgaacaccgcgctgtggcgaagcggcgatgttatcttcggttcactgttggcgatgctgtttaccggtatatggccgcagcgggcgtttttgcactggcgcatccagatggcgaattatgtcacaacgtttaatcggctgtatcaggccggtttttcgccgaatctggttgagcgcccgcggctggaaaaacatcttcagaaagcgctcaatgacgtggtgaaaatgcgtgggttgataaccccggccagcaaagaaacgcatattcagaaagcaatcttcgaagccatccagaccgtcagccgtaatctggtatgcatgctggaactgcagatcaacgcttattgggcctctcgtcagggccattttgtgatgctcaacgcccagactttacgtgaaacccaacagatgacccagcaaacgttgctgactatcgcccatgccctgtatgagggaaacccgcagccggtacgcgccaacaccgagaagctcaacgagatcgtggtcgagttgcgacagcttatcaaagagcatcaggacgataatctgtcggaaacgccgattcacggctatgtttggctgaccattgagctggcgcgccagcttgagctgctgtcgcaccttatttgccgcgcgctgcgcaaataa

SEQ ID NO: 108695 - DNA, 324 bp, Enterobacter aerogenes
atggaaacaactaagccttctttccaggacgttctggagtttgttcgtctgttccgtcgtaagaacaaactgcagcgtgaaattcaggacgttgagaaaaagatccgtgataaccagaagcgtgtcctgctgctggacaacctcagcgattacatcaagccgggtatgagcgttgaagccattcagggtatcatcgccagcatgaaaaccgactacgaagaccgcgttgacgattacatcatcaaaaacgccgagctgtcgaaagagcgtcgcgacatctccaaaaaactcaaagtgatgggtgaagccaaagtcggcgaataa

SEQ ID NO: 108696 - DNA, 273 bp, Enterobacter aerogenes; identical to SEQ ID NO: 108182

SEQ ID NO: 108697 - DNA, 1392 bp, Enterobacter aerogenes; identical to SEQ ID NO: 108181

SEQ ID NO: 108698 - DNA, 591 bp, Enterobacter aerogenes; identical to SEQ ID NO: 108180

SEQ ID NO: 108699 - DNA, 669 bp, Enterobacter aerogenes; identical to SEQ ID NO: 108179

SEQ ID NO: 108700 - DNA, 645 bp, Enterobacter aerogenes
atggtatatcataccgcgctgaagcaggcgaaattcgctgacgaagatagacttatacctgactctatggcggcatggagagtctggcgttttaaacaaggggaactcatgacgtatcaacaagctggacgcattgcggtcattaaacgcattttgggatgggtcatcttcattccagccgtgctgtctacgctgatttccgtactgaaatttatgtacgagcatagcgaaaagaaaccgggtattgatgcggtgatgatggatttcgcccacctgatgattgagatggtgcgttttaatacgccgttcctgaatttcttctggtacaactcgccgctgccggagttcaaacatgcgttgaacatcggtttctggattatctacgcgctggtgtttgttggcatggcgttgcaggcttccggcgcgcggatgggccgccaggcgaagtttctacgcgaaggggtggaagatcagttgattctggaacaggctaaaggagcggaaggcctgtctcgtgaacagcttgccgaacgtattgtcgtaccgcgtcataccatcctgaagcagtattttacgctttacgtgctgccgattgtggtgattgtgattggctatgttttcttctcactgcttggcttcctgtaa

SEQ ID NO: 108701 - DNA, 399 bp, Enterobacter aerogenes
atgacaacaacagatctcgccccgaagggcgaattggttttacgcaccctggccatgccggcggataccaacgcgaacggcgatatttttggcggctggctgatgtcgcagatggatatcggcggcgcgattatggccaaagagattgcccgcggccgcgttgtgaccgtccgtgttgatggtatgacttttttacgcccggtcgccgttggcgatgtcgtgtgctgctatgcccgctgcgtaaaacgcggtaacacctcaatcaccattaatattgaggtatgggtgaaaaaagtatcgacggaaccgctgggccagcgttataaggcaacggaagccctgtttatttatgtggcggtagacaatgaaggcaagccgcgagcgctgcctgccgaatga

SEQ ID NO: 108702 - DNA, 540 bp, Enterobacter aerogenes; identical to SEQ ID NO: 108147

SEQ ID NO: 108703 - DNA, 744 bp, Enterobacter aerogenes; identical to SEQ ID NO: 108148

SEQ ID NO: 108704 - DNA, 414 bp, Enterobacter aerogenes; identical to SEQ ID NO: 108149

SEQ ID NO: 108705 - DNA, 705 bp, Enterobacter aerogenes
atgaaaacgacactcgctgaaagattgaaggaagccaggacattacgtggccttacgcaaaaggctctcggggatctggtcggagtaagccaggcggctatccagaagatagaaacaggaaaagccaaccagacaacaaagctggtagagttggctaatgcgttaaaggtaaagccggaatggttgagttcaggggaaggcgctatgcttctcactggtcaggatgaagccatcccaccgattgatcggtggggtaccgttgagccttgggataacgcaaccccattacctgatgacgaggtagaagtgccatttctaaaggatatcgagctggcctgtggcgatgggacgttccctcgcgacgattacaacggatacaaattacgcttttctaaagctactttgcgtagagtaaatgcacaaagagaaagcgttctgtgcttccctgcccacggtaatagcatggagccagttatccctgaagggaccacggtagctatcaacatcaacgacaaaaagatcgtggacggcaagatttatgctataagccaggatggatggaaccgcttaaaaatactttatcgagtagggccaaacaggctgagcattcgcagcttcaatcacatcgagcatcctgatgaagaggcggatcttgatagtgttcagattataggcaggatgttttggacttcaaccatctggtaa

SEQ ID NO: 108706 - DNA, 267 bp, Enterobacter aerogenes
atgagcaaaagatacaatgaagcagagctgcttagcgtaacggcccagcagtttatggatttacttgatcctcttgtacagacacatgcaaaaggactgttttgcaactcatgtggaaataactcttttacgcatccatccttggtaagagcaacgctaacaagcaacagatcagctgccatcgattattacaccatctcctgcgataaatgtggtgaggttaagttctataacgcgcagcttatcgccggttctatcattaagtaa

SEQ ID NO: 108707 - DNA, 879 bp, Enterobacter aerogenes
atgaaatattcattagggccggtgctgtactactggccaaaagagacgctggaagatttttaccagcaggcggcaaactgtagcgctgacaccatttatctgggcgaagcggtatgcagcaaacgccgcgcgaccaaagtcggcgattggatcgaaatggcgaaagcgctggccggtagcggcaagcaggtggtgctctccaccctcgcgctggtgcaggcctcatccgaactgggcgagctgaagcgctatgtcgagaacggcgaattcctgattgaagccagcgacctcggcgtggtcaatctctgtgccgaacgcaagctgcccttcgtcgccggtcatgcgctgaactgctacaacgccgtcaccctgcgcctgctgctgaagcagggcatggtgcgctggtgcatgccggtggagctttcccgcgactggctggctaatttactgactcagtgcgaagagctgggtattcgcaaccagtttgaagtcgaagtgctgagctacggccatctgccgctggcctattccgcgcgctgctttaccgcccgctcggaagaccggccaaaagacgaatgcgaaacctgctgcatcaagtacccaaccgggcgcagcatgctgtcgcaggagaaccagcaggtgtttgtgcttaacggcattcagacgatgagcggctacgtctataaccttggcaacgagttaacctcgatgcacggtctggtggatatggtgcgcctgtcgccgatgggcagcgagaccttcgccatgctcgacgccttccgcgccaacgaaaatggcgctgcgccgctggatctcaccgctaacagcgattgcaacggctactggaaacggctggccgggctggagctgcaggcgtaa

SEQ ID NO: 108708 - DNA, 996 bp, Enterobacter aerogenes
atggagctgctctgccccgccggtaacctcccggcacttaaggcggccatcgaaaacggcgccgatgccgtctatatcgggctgaaagatgacaccaatgcccgccactttgccggccttaatttcaccgaaaagaaattacaggaagccgtcagctttgtgcaccagcatcgccgcaagctacatatcgcgattaacaccttcgcccatcccgacggttatgcccgttggcagcgtgctgtggatatggccgcgcaattgggcgccgacgcgctcatcctcgccgatatcgccatgctggagtacgctgcggaacgctatccgcacattgaacgtcacgtttcagtgcaggcgtccgccactaacgaagaggcgatacgtttttatcaccgcaactttgacgttgcccgcgtcgtactaccgcgggtgttatccattcaccaggtgaaacagttagcgcgcgccacgccggttccactggaagtcttcgccttcggtagcttatgcatcatggcggaaggtcgctgctatctctcgtcgtatctcaccggcgaatcgccaaataccgtcggcgcctgttcgcccgcgcgcttcgtccgctggcagcaaacgccgcaggggctggagtcacgccttaacgaagtgctgatcgatcgctatcaggatggcgagaatgccggttatccgacgctgtgcaaaggccgctacctggtcgacggcgagcgctaccacgcgctggaagaacccaccagcctcaacaccctggaactgttgccagaactgatggccgccaatatcgcctcggtaaaaattgaaggccgccagcgcagcccggcatacgtcacccaggtagcgaaagtctggcgtcaggcgatcgatcgctgtaaagccgatccgcagaacttcgtgccgcaatctgcatggatggaaacccttggttcgatgtccgaaggaacgcaaaccacccttggcgcctatcaccgaaaatggcagtga

SEQ ID NO: 108709 - DNA, 525 bp, Enterobacter aerogenes; identical to SEQ ID NO: 88624

SEQ ID NO: 108710 - DNA, 504 bp, Enterobacter aerogenes
atgctgattcgagtggaaattgggattgatgcgccgggtatcgacgcgctgctgcgccgtacgttcggcagcgacgcggaagcgaagctggtgcacgatctgcgtgaagatggtttgatcacgctgggcttagtcgccactgacgatgaaggccaggtggtgggctacgtcgccttcagcccggtcaccgtcgaaggcgaagagctgcagtgggtcggtctggcgccattggcggtagatgaaagctatcgcggccagggtattggccgacagctggtctacgaagggctggattcattaaatgaatttggctacgccgcggtggtcacgctgggcgaaccggcgctgtatggccgtttgggctttgaacccgccgccgcgttcgatttacgctgccgttggccggacaccgctgaagccttccaggtgcaccgtctggcggatgacgcgctgcagggcgtacacggtctggtcgagtacagcgatcatttcaatcgcttctga

SEQ ID NO: 108711 - DNA, 285 bp, Enterobacter aerogenes; identical to SEQ ID NO: 88622

SEQ ID NO: 108712 - DNA, 444 bp, Enterobacter aerogenes; identical to SEQ ID NO: 88621

SEQ ID NO: 108713 - DNA, 519 bp, Enterobacter aerogenes
atgagtaaaaagattgccgtactaatcaccgacgacttcgaagattctgaattcacctcacctgccgaggcctttaaacttgccgggcatcaggtcgtgacgattgagaagcaggctggaaaaacggtaagagggaaacaaggcgaggctgaagtggcgatcgacaaagcaatagatgacgtgacgccggcgcagtttgacgccctgttgctgcctggcggctattcaccggaccagttgcggggtgatgagcgcttcgtcacttttactcgcgacttcgtgaatagcggtaagccggtctttgccatctgccacggcccgcagctactcatcagcgcagatgtcattcgcgggcgtaaactcacggcggttaaacctatcgtggtcgacgtgaaaaacgccggcggtgagttttacgatcaggaagtggtgctggataacgatcagttagtcaccagccgaaccccagacgatctgccggcgttcaatcgcgaggcgctacgcctgctcggggcttga

SEQ ID NO: 108714 - DNA, 648 bp, Enterobacter aerogenes
atgagtcaggtattattaaccggcgcgactggtttggttggtgggcacttacttcatctgctacagagtgagccgggcattaacgcgattactgcgccaacgcgccgtccccttgctgtggcggagggggtattcaatccacacgatccgcagttgaccgatgcactggcgcaggtggttgatcctgtcgatatcgttttctgctgcctgggcaccacgcgccgggaagcggggagtaaagaagcgtttgtgcatgctgactatacgctggtggtagatacggcgctggtcgggaagcgtctcggagcgcaacatatgctggtggtcagcgcgatgggcgctaatgcgcattcgcccttcttctataaccgcgtgaaaggagaaatggaagaggcgctgatggcgcaggactggccgcggctgaccattgcccgtccttcgatgttgctgggggatcgggagcataaacgcgccaatgaaacgctctttgcaccgctatttcgttttctgcctggagactggaaagctattcaggcccgcgatgtagcgactgccctgctcgcggaggcgctggcgccgagccatgaaggcgtccagatcctgacctcgtctcagctacgggagcgcgctgcccggcaggcggattaa

SEQ ID NO: 108715 - DNA, 1044 bp, Enterobacter aerogenes
atggctggtcagtcttcatctcaggcggcatcaccatttcaatggtggaaacccgcgctgttctttctcgtcgttatcgttggtctgtggtacgtcaaatggcagccgtattacggtaaagcctttacggccgcggaaactcacagtatcggtaaatctattctcgcgcaggctgatgtaaacccgttgcaggcggcatgggattacgcgatggtttatttcctcgcggtctggaaagcggcggtgctcggcgtgctgcttggttcgcttattcaggtgttgatcccacgcgactggctgcagaggacgcttgggcaatctcgttttcagggcacgctgctgggagcgattttttcgctgccggggatgatgtgtacctgctgcgccgcgccggtcgccgctggtatgcgtaaacagcaggtgtcgatgggcggagcgctggcgttctggatgggcaacccgctgctgaacccggcaacgctggtctttatgggcttcgtgctcggctggcagtttgctctgatccggctggtggccgggctggcgacggtgctggtggtggcgacgctggtgcaaaaatgggtaaaagaggcggcgacgcagccggtagcggcagaagacgttagccaattgaagcgcgatgagggcagttttatcagccgctggctacgcgcgctgtggtcgctgttctggagtacgatcccggtttacatcctcgcggtgctggtactgggcgcggcgcgggtctggctgttcccgcacgccgagggcgcggtcgataacacgctgttctgggtgatcgcaatggcgatagccggttgcctgttcgttatcccgacggcggcggaaatcccgattgtgcagacgatgctgctggctggaatgggcaccgcgccggcgctggcgctgctgattacgttgccggcggtgagcgtgccgtcgctggttatgttgcgtaaggcgtttccggctaaagcgctgtggctaaccggtgggctggtggcgttgtgcggggcgatcgttggcgcgctggcgctggtgtaa

SEQ ID NO: 108716 - DNA, 1161 bp, Enterobacter aerogenes
atgagctataagccactgattcctgagagtaaactccctgcattaggcaccaccatatttacccagatgagcgcgctggcgcagcagcatcaggccatcaatctatcacaaggttttccggattttgatggcccgcgttacctacaggaacggttggcctggcacgtcgcccagggggctaaccagtacgctccgatgaccggcgtaccggcgctgcgcgaagccattgccgataaaaccgctgagctgtatggctatcgcccggatgcgaatagcgatgttaccgtcaccgcgggggcgaccgaagcgctgtatgcggcgatcaccgcgctggtcagagccggcgatgaggtgatctgctttgacccgagctatgacagctacgcgccggcggtagaactttccggcggggcgctgaaacgtattgctctgcagccgccgcatttccgcgttgactggcagcagtttgccgccacgttaagcgaccgtacccgtttggtgattcttaatacgccgcataatccatcagccaccgtctggcagcgggaagattttgccgcgttgtggcaggcgatcgctgaacgggaaatctacgttatcagcgacgaagtgtatgaacatatctgttttgcagagcaggggcatgccagcgtgctggcccatccgcagctgcgcgagcgggcggtcgcggtctcttctttcggtaaaacttttcacatgaccggctggaaagtggggtattgcgtggcacctgctgccatcagcgccgagctgcgtaaggtgcaccagtatttgacgtttgccgtcaatacgcccgctcagttggcgctggcggatatgctgcgtgcgcagccggagcactaccgcgagctgtctgcgttttatcggcagcgtcgggatctgtttatcgatgcgctacgcgatagccggctggagattttgccttgtgaagggacctacttcttgctggccgactatagcgcgatctctgaccttgatgacgtcagcttctgtcgctggttgaccactgacgttggcgtggcggcgatccccctatcggtattttgcgccgatccgttcccgcataagctgattcgcctgtgcttcgccaagcagccggagaccctgctggcggcagcagagcggctgcgtcgcctgtag

SEQ ID NO: 108717 - DNA, 690 bp, Enterobacter aerogenes; identical to SEQ ID NO: 104390

SEQ ID NO: 108718 - DNA, 543 bp, Enterobacter aerogenes; identical to SEQ ID NO: 104391

SEQ ID NO: 108719 - DNA, 606 bp, Enterobacter aerogenes; identical to SEQ ID NO: 104392

SEQ ID NO: 108720 - DNA, 1026 bp, Enterobacter aerogenes; identical to SEQ ID NO: 104393

SEQ ID NO: 108721 - DNA, 1200 bp, Enterobacter aerogenes
atgtcgcaataccataccttcacggccagcgatgcggtggcttacgcacaacaatttggcgggctcgacgatccgtctgagctggtgtcggcgcaggaggtaggcgacggcaatctcaatctggtgttcaaaattttcgatgctcagggcgtgagccggattattgttaagcaggcgctgccctacgtgcgctgcgtcggcgaatcctggccgctgaccctcgaccgcgcgcgcctcgaagcacagaccctggtcgcccactatcagcacagcccgcagcatacggtacacattattcatttcgatcccgctctggcggtgatggtgatggaggacctttccgatcaccgtatctggcgcggcgagcttatcggcaacgtctactatccgcaggcagcaggccagttgggcgaatatctggcgcagacgctgttccacaccagcgatttctatctccatccgcatgagaaaaaagcgcaggtggcgcaatttatcaatccggaaatgtgcgagatcaccgaggatctgttttttaacgatccgtatcagatccacgagcgcaataactacccggcggagctggaagaagaggttgccgccctgcgtgaggacgctcagcttaaactggcggtcgcggcgctgaagcaccgctttttctcacaggccgaagccctgctgcacggcgatattcatagcggctccatcttcgtcgctgaaaatagccttaaagccatcgatgccgaatttggctatttcggccctatcggttttgacgtcggcaccgccattggcaatttgttgcttaactattgcggtctacctggccatctcggcattcgcgatgccgcagccgcgcgcgagcagcggctcaacgatatacagaccttgtggcacaccttcagcgagcgtttccagacgttagcaacggagaaaacccgcgatgcggcgctggcctgccccggttacgcctcagtattcctcaaaaaagtatggcgcgatgccattggattctgcggaactgaactgatacgccgcagcgtcgggctttcacacgtcgccgatatcgatgcgattcaggacacggccatgcgccacgaatgcctgcgccatgcaattacgctcggcaaagcgctgatcgtcatcgccgagcgtatcgatagcgtggacgaacttatcgcccgcgtacgtcagtacagctaa

SEQ ID NO: 108722 - DNA, 1065 bp, Enterobacter aerogenes
atgaaaaagatagcactttctcttatggcgctgggcctgctgcagtcgatggcagcgctggcgcagaccccaacgccggttccggcggcgatagctgagcataacggcccgatccgcatcgcggtgattcgcaatctcggttctgacgataacactacccagtttgtcgccggggcgattcaggaaggtaaaaagctcggttttaaagtcagcgctttcctgagcaacggtgatgacgcgaagttccaggatttcgtcaatcaggccattagccagaaatacgacggtattattctttcccaggggcgcgatccctactcgaccgcgctggtgaaaaaagcggtcgatgccgggatcaaagtggcggtgttcgataccgcggtgcagggatccgtccccggcgtgacggttagccagcaggatgacgcctcgttgaccgagctctcttttggccaactggtaaaagacttcaacggcaaggccaatattatcaagctatgggtggcaggcttcccgccaatggagcgccgccaggcagcctaccagacgcttcttaaacaaaatccggggattaaagagctggagtctatcggcgccgtttcatccgacgtgcagggtgacaccgctaacaaggtcggcgcaattttggctaagtatcctaaaggtaaaattgacgccatctgggggacgtgggatgcctttagccagggagcctataaggcgctgaaagaaaacgggcgcagcgaaatcaaactctacagcatcgatatttccaatcaggatttacagctgatgcgggaggccggtagcccgtggaaggttagcgtggcggtcgatccgaaactcattggcgccaccaacgtacgcttgattgccaataagattgccggggaaagcaccccggctacctacgatttcaaagcggcggcgattccgcaggcgctgctggcggcacagccgggggcggtcaacgtggcgtcgctggggaaaatcatccctggctgggggcagaccgaagactttattgccccgtggtttgccaccctggaagcccaacataaataa

SEQ ID NO: 108723 - DNA, 234 bp, Enterobacter aerogenes
gtgaacgccggcggcggttacctgatggacgcggtcgcggcggcgtggatcggcttttcgctggcgggctccggcaagccgaatgcgctggggacgctggtgggagcggtgatcctcggcgtgctttccaatggcctggtgatgctgtcagtgccctattacgcgatggacattattaaaggactggtgctggctggcgcgctggcactgacctattttcagcgccgtacctaa

SEQ ID NO: 108724 - DNA, 483 bp, Enterobacter aerogenes; identical to SEQ ID NO: 108340

SEQ ID NO: 108725 - DNA, 423 bp, Enterobacter aerogenes; identical to SEQ ID NO: 105065

SEQ ID NO: 108726 - DNA, 1977 bp, Enterobacter aerogenes; identical to SEQ ID NO: 108342

SEQ ID NO: 108727 - DNA, 636 bp, Enterobacter aerogenes
gtgaattttcaggatatccatagctattatcagcaactcaacattgatgccttttttccgcaaataattgcgcaaggggaagccctgacggttgcggctaataaaaaattagcaattcagccaggatatatttatttttgcactgaaggttcgctgtcaatattaatgccggataatggccttcatattggtaattccattgagtatatgccgatagggcttatggaaaggtactgcccgctggcgaagtttgaatatatcagcagcgcggcggtgaagctggttaaagtcacttatgatgtctttgaccaaatctttttacacggcggccctgaacgcgtgcaggagctggcgaccattctgacctatatgtcgatctttactatcgatcttcataacgaacgccgacagatgaccagctatcagaccatcaggccgatgctgtttcgttatctttatcgccagagtacccatcagggggaaaacgaaggcctggcgctgtttattattaagcgcactaatctgtcgcgcacgcatgtttttcgggtgctggcggatctgaaagccgggggctatatcacgatgaagcgcggcaaactggtttctatcgaccgaccattgccggaagcctactag

SEQ ID NO: 108728 - DNA, 1977 bp, Enterobacter aerogenes; identical to SEQ ID NO: 108343

SEQ ID NO: 108729 - DNA, 429 bp, Enterobacter aerogenes
atgatgaaagtgaaacacgtttctatgctgctgctggcactcagcgcagccatcgcgattggttgcagttcaccagcgcagcgtatggccgagtgcgaagcacaggggagcagtaaagatgcctgttatattgcggaacaaaacaaacaggctacggtgaacgccgcagcggagaaacaggcgctagaaaatgcacaggctttatatcccgtgcagaaagcgcaatccagcaaaaaagtgaagatcttcaatggtatgaagctggtcacaaactcaaccgggctgagcgttgatggcaaacccgcggccttagacgaaagcaatgctgacgcgaaaacctattctcagggtttatacgtttttattgtctaccaatcaggaaaaattgccgtcatgcaggacggtaaatttttaggctacgccaaatag

SEQ ID NO: 108730 - DNA, 339 bp, Enterobacter aerogenes
atgcagcgtcggacgatggcgacgtttgcccgcgtctggcaggaggcaccggcgcagccgcagtggtggagctatcccggttgttcgccgcggctagaaaacagcgctgctggcctgagattcagcggagacgatagtggattgtggccggtggggcgttatctggcgctgctgcttggcgagctgccgcgtctgctggataacgcgcagggttatggccccaacggtaaagggtttattacccacgtcgatttcccacgcgatgttagcgcggcgtggcaatgcttgcgtgaagatacgctattgagcgaggcgctaaacgccagaacgctggggtag

SEQ ID NO: 108731 - DNA, 999 bp, Enterobacter aerogenes
atgagcaaacttgggattaatggatttggtcgtataggacgtttagtacttcgccgcctgttagaagtaaatagcccgctggaggtcgtggccatcaacgatctcacctcaccgaaagtcttagcctacctgcttaaacatgactctaactacggtcctttcccatggagcgttgattttacagaagatgcgctgatcgttaatggtaaaaaaatcaccgtttatgcggaaaaagaggctcagcatattccgtggaaagccgcaggcgctgaggtgattgttgaatgtaccggtttctatacgtcggcggaaaaatcgcaggcgcacctgaccgccggcgcgaagaaagtgctgatttccgcccctgccggcgagatgaaaaccatcgtttatcacgtcaacgacgacaccatgagcccggatgacaccatcatttcggttgcatcctgcaccaccaactgtctggcgccaatggctaaagtgctcaacgatgctttcggcattaccgtgggcaccatgaccactattcacgcttataccggtacgcaatcgctggtggacgggccacgtggcaaagacctgcgcgcctcgcgagcggcggcggaaaacattattccgcacaccaccggcgcggcaaaagccattggtctggtgattccggaactcagcgggaaactgaaaggtcacgcccagcgcgtgccgactaaaaccggctcagtgacggaactggtttccgtattggcgaagaaagtcaccgctgaagaggttaatcaggccatgaaaaatgcggcggcgaacaatgaatcttttggctacaccgaagaggaaattgtctcctccgacattattggcagccatttcggctcaatctatgatgcgactcaactggagatcatggaagccggcggcgtacagctcgtgaaaaccgtggcctggtacgataacgagtacggctttgttacccagcttgtccgcgtactggataaattcgcgaagtaa

SEQ ID NO: 108732 - DNA, 903 bp, Enterobacter aerogenes
atgaaaaagagcattgcactgacgatggtggcgctggcctgcctggcggctaacgtccaggcagcagagaaacttgctggtaatgaaatacttgccgtacagaaaggcggggtgccggataaagtctatacccaacatcagccgaaattacgtatagcaacctataatatcggcaagaatgaagcgtctgataatgtggccgattttacggcacttaattcagcgattaaaaaaattaacgccgatattattgccgtcccggaagtcgataacaaaactcagcgcagccagaaaatcgatcagcttaagacgattgccgatgctaacaatatgcattatgcctttggtaaagcgttggatttcgacggtggcgaatacggactggggctgctgtcaaaatataaaatcctgcattctcaggtggtgaagctgccgtcaggcaatgcggaacagcgcgtggcgctactggcgcaggttgatgtaccgggttttgattccgcgccgattattatggtgacccatctcgactggcaaaaagatcccaccatgcgtaccgaacaggctcgctatcttctcgatttgagtattggcgatgcggcgtctgattttaaagatatcgcctcttcaattaagatcctggccggcgatttcaattcaacccgtgaagaacagccggtgaaagagatcggttatttctttaacgaagtgtcgaagcaggggacggatacgcgtagctggcctgccgttaacccggccattgatatcgaccacattttcaccttcaaaggacaaaagtgggatgtgaagaagctggagatcccgcataactcgccggaatttaactggtcagcggccagtgaccatctgccggtcattgctgaactgcaactcaccgagcagtaa

SEQ ID NO: 108733 - DNA, 528 bp, Enterobacter aerogenes
atgcgcgataaatattctggcctgcagataggaattcactggctggtctttttactggttgtcgtcgcctacgcggcgatggaactgcgcggtttcttcccgcgcagcgaccgtccggtgataaacatgatccatgtctcctgcggcatttccatttttgtcttgatgattacacgactgctggtgcgcctgaagtctccggcgccgccgattgttcctaaaccctcgccgatgatgaccggtttcgcccatcttggccatctggtgatatatctgctgtttatcgcgctgccggcgattggcatggtaatgatgtattaccgcggtaacccgtggtttgctttcggcctgacgatgccctttgcggcgcaaagcaacttcgctttggtcgacagccttaaggggctgcacggcttacttgccaatatcggctatttcgtgattggcctgcacgcgctggcggcgctgctgcatcactatttatggaaagataatacgctgctgcgcatgatgccgcgcaagcgctga

SEQ ID NO: 108734 - DNA, 1383 bp, Enterobacter aerogenes
atgaccgataatataccggccacttcccctcctgtcgccgatgcggggggcgctgaacgcttgagcccgcgcgaacaggtggtgatcaataaattgttccgtcgcttaattccttttctgtttctgctttttatcttttcatttcttgatcgtatcaatatcggctttgccgggctcaccatgagccaggatttgggactgagtagcaccatgttcggcctcgcgacgacgttgttctatgcgatgtacgtcatctttggtattcccagtaacatcatgctggggatcgttggcgcgcgccgctggattgcgagcattatggtggtgtggggaatcgcatcgacagcgaccatgttcgcgaccgggccaaacagcctgtatctgctgcgcatgctggtggggattgccgaagccggttttcttccggggcttctgctctacttaacctactggtttccggcctactaccgggcgcgcgccaatgcgctgtttatgattgctatgccggtgacgatggcgttgggctcgctggtctccggctatatcctcagtatggatggcatgctggcgcttaaaggctggcagtggttattcctgctggaaggattcccatcggtgctgttgggggcggtagtctggttctatcttgacgatagtccgcaaaaggccaaatggctcaccgatgatgacaaacgttgccttggcgagatgatggagaaggacaaactacgactggtgcaaccgaacggtagcgccagcctgagcgccctgcagcaggggaaaggcagcctctggcgcgacgtcttcaccccggtggtgttgatgtatacgctggcctatttctttctctgtaataccttaagcgcgctcagcgtctggacaccgctgatcctcaaaagctttaaccagggcagcagcaatatcgccatcggcttgcttagcgccgtaccacatatctgtaccattgtggcgatgatttgctggagtaaacgttctgaccgcttacaggaacgtaagctgcacacgttattaccctatctgtttgccgccgcgggctggatgctggcggcgcacggggcaaatagcgtgatgcaactgttgggggtaattatggcctcggcaggggcctatgcggcgatggtgattttctggaccacgccagatcagtccatcagcctgcgctcacgagcgatcggcattgcggtgattaacgcgacgggtaatatgggatcggccatgagtccactgttattcggctggctgaaggatttaaccggcagctttaacgccggattttacctcgtggccgggttcctggtattgggggcgctggtggtatggcgcatcccgatgaaggccagccgtccacgagcgacgccataa

SEQ ID NO: 108735 - DNA, 474 bp, Enterobacter aerogenes
atgagagtgagacgcgcggtacccgatgaagcccctgcgttgtggaatatccgtaatcaggcgattcgccatggctgtcatcaaagctatggcgctgaagtgattcacgcctggacgccggaactgatgcccgaagggtatcgtcacgccgttgccgataatccgttttatatcgtggaaaataggctgggccaacccgtcgctaccggctatctcgatattgagtccttaagcgtggaagcgatctttacgctgccggagtggggcgggcagggatgcgcggatttgatcatgagggcggttattgccgaagctcgccgacgggggctcgaaaccattacgcttgaggcgacacccaatgcggcgggcttttatctacgccatggctttgtttcacaaggcgaaaagagtcattattcgaaaatggccaatgccgagctacgctgtatagccatgagcctcactctcgattaa

SEQ ID NO: 108736 - DNA, 276 bp, Enterobacter aerogenes
gtgccacattcaccagaagacaagaagcgtgcgcttagccgcgtacgccgtattcgcgggcaggttgaagcgctggaacgtgcgctggagtccggcgaaccctgtatgactatcctgcaacagattgcctccattcgcggcgccgccaacggtttgatgggcgagctggtggagatgcatctgcaggatgaactggttagcggcgataccaccccggaccaacgcgccgcccgcatggcggaagtcggtcacctgctacgatcctatttaaagtaa

SEQ ID NO: 108737 - DNA, 207 bp, Enterobacter aerogenes; identical to SEQ ID NO: 108150

SEQ ID NO: 108738 - DNA, 225 bp, Enterobacter aerogenes
atgccgtacccggtgaaggatgtccgcgtgctgagccgtatcaccaccgaagccttcaatcagcgccgtaagaccattcgtaatagtctcggcaatctgtttagcgttgaagtgctgacggagctgggcgtcgacccggcggtacgtgcggaaaatatttctgtagagcagtactgtaagatggccaactggttatcccacaatctgccttcgaaggagagctag

SEQ ID NO: 108739 - DNA, 378 bp, Enterobacter aerogenes
atgattaattcgcctcgtgtttgcgtccaggtgcaaagcgtctatatcgaatcgcaatcttctccggaagaagagcgctacgtcttcgcttacaccgtcaccattcgcaacctggggcggagtcaggttcagcttctcggccgctactggctcatcactaatggacacggtcgcgagacggaagtccagggtgaaggggtggtcggcgaacagccgcacatccctgccggcgaagagtatcaatataccagcggcgcggttatcgaaacgccgctgggcaccatgcagggtcactatgagatgattgatagcaacggcgtgccgttcaatatcgagatccctgtcttccgtctcgcagttccaacgcttatacattaa

SEQ ID NO: 108740 - DNA, 849 bp, Enterobacter aerogenes
atggctacataccttattggcgacgttcatggttgctacgatgaactgatcgcattgctggagcaggtggagtttaaccctgatacggacacactgtggctcactggcgatctggtcgcacgcggccccggctctctggaagtgctgcggtttgtgaaaacgctcggcgatagcgtgcgcatcgtattgggcaaccatgacctgcacctgctggcggtatttgccggcatcagccgcaacaaacccaaagaccgcctgacgccgctgctggaagcgcccgacgctgacgaactccttaactggcttcgtcgccagccgttgatgcaggtggacgaagagaaaaagctggtgatggctcatgccggcatcacgccacagtgggatctggaaaccgccaaacagtgcgcgcgcgatgtcgaagccgtgctagccagcgactcctatccgttcttcctcgacgcgatgtacggtgatatgccgaaccactggagcaatgagctcagcggcctggcgcgcctgcgctttatcaccaacgccttcacccgcatgcgctattgcttcccgaacggccagttggatatgtacagcaaagaggcgccggaagacgcgcccgccccgctgaagccatggtttgccattccgggccctgtcgctcgcgagtacagtatcgcctttggccactgggcgtcgttggaaggccgcggtacgccggaagggatctacgcgctggataccggctgctgctgggggggcgatctgacctgcctgcgctgggaagataaaacgtatttcacccagcgttccaaccgccagaaaagcctcgacgagggcgaagcggtcgcctcctga

SEQ ID NO: 108741 - DNA, 495 bp, Enterobacter aerogenes
atggctactgaaactgccggtgttggtggcctcaaaatcgctgagacgttcccggaaggccggggcagcccgcatggatgcgggctgagggccgtgatttgcaaggacgctgcctcggcccgacccgaagcctgcagggataagtcgaaggtaccacgaagtggcgattttggcggccagagcccgggagtacagagggcggcggcgactggccgccctctgtgcgctccctgcgccatgagagacataacgcagaagaaatattgggagcgcaatatgttcggaaacagcacagaacaaccgcttttccaggagcgaaaccattgcaaactgataacagtatctacccacggcgccgtttgtttaccgggtggcggctacgccttacccgacctacggcctgtaccggatggtcgccgggagattcctgataaaacaaaaccccggccacgcctgacgcgaccggggttttttaatccatgtgatttcgcttaa

SEQ ID NO: 108742 - DNA, 480 bp, Enterobacter aerogenes
atgattagtctgattgcggcgttagctgtagatcgcgtaattggcatggagaacgctatgccatgggacttgcctgccgatctcgcctggtttaaacgtaataccttaaacaagccggtggttatggggcgtttgacctgggaatctatcggtcgcccgttgccaggacgtaaaaacatcgttatcagtagcaagccgggcagcgacgatcgcgtgcagtgggtgaagtctgttgatgaagcgattgccgcctgcggcgacgcggaagagattatggtgatcggcggtggccgcgtttacgagcagttcttgccaaaagcgcacaaactctacctgacccatattgatgcggaagttgaaggggatacccatttcccggattacgatccggacgaatgggaatcggtattcagcgagttccacgatgctgatgcgcaaaactcccatagctactgcttcgagatcctcgagcgccgttaa

SEQ ID NO: 108743 - DNA, 1866 bp, Enterobacter aerogenes
atggatagccatacgctaatacaggcgctgatctacctcggatccgctgcgcttatcgtgccgatcgccgtgcgtctggggctggggtcggtactggggtatttgatcgccggctgcgttatcggcccgtgggggctgcgcttggtcactgacgctgaggcgattctgcatttcgccgaaatcggcgtcgtactgatgctgtttgtcatcggtcttgagctggatccgcagcgcttatggaagctgcgcgcctcggtgtttggcggcggcgcgcttcaaatggtggtgtgcggcgcgtttatcgggctgttctgcatgctgcttggattgcgctggcaggttgcggagctcatcgggatgacgctggcgctgtcgtcgacggcgattgcgatgcaggcgatgaatgaacgtaacctgacggtgacgcaactggggcgtagcgcctttgccgtgctgttgttccaggatatcgccgctattcctttggttgcgatgatcccgttgctggcggccagcggcggctcaacgaccctggccgcgtttgcgctgtcggcattgaaagtcgccggcgcgctggcgctggtggtgctattaggtcgctatctgacccgcccggtgctgcgcttcgttgcccgctccggtctgcgcgaagtattcagcgccgtggctctgttcctggtcttcggcttcggattgctgctggaggaagtcgggctgtcgatggcgatgggcgcgtttcttgccggggtgcttctggcaagttcggaataccgtcatgccctggagagcgatatcgaaccgtttaaagggttgctgttggggctgttctttatcggcgtcggcatgtctattgacttcggtaccctcgtcacccatccgctacgtatcctgatcctgctggtgggattcctggcgatcaaagccctgatgctgtggctgattgctaaaccgctgggcgtaccgcgcgcgcagcgccgctggtttgccgtgctgctggggcaggggagtgagttcgctttcgtggtcttcggcgccgcgcagatggccgatgtgctggatagcgaatgggcgaaggcgctgacgctggcggtggcgttatccatggcggcaacgcccatcctgctggtgctgctgacgcggatggagaaatccgccagcggccaggagcgcgaagcggacgagattgatgaagagcagccgcgagtgattatcgccggttttggccgctatgggcagattgccgggcgcgtgctgctttccagtggcgtgaaaatggttatcctcgatcacgatccggatcacgttgataccctgcgcaagttcgatatgaaggtgttttacggtgatgccacgcgagtggatctgctggaatcggcaggggcggcaaaggcagaagtgctgattaacgccatcgacgacccgcaggccagtctgcaactggtggagctggcgaaagagcacttcccgcatctgcagatcatttcgcgtgcccgcgatgtcgatcactacattcagctgcgccaggccggtgtggaagcgccggagcgtgagaccttcgaatcggcgctgaaaagcggccgcatgacgctggaagccctgggccttggcgcttatgaggcccgcgagcgcgccgatctgttccgtcgtttcaaccaacagatggtagaagagatggtggcgatggcggaaaatgatgccgcctcgcgggtggcggtgtttaaacggaccagcgatatgcttaccggcattatcaacgaggaccgtaatcatctgtcgctggtgcagcgccacggctggcaaggtactgaagaaggacggcacaccggagacgttcgcgatgagccggagaataagccttcaacctga

SEQ ID NO: 108744 - DNA, 534 bp, Enterobacter aerogenes; identical to SEQ ID NO: 87474

SEQ ID NO: 108745 - DNA, 780 bp, Enterobacter aerogenes; identical to SEQ ID NO: 108359

SEQ ID NO: 108746 - DNA, 327 bp, Enterobacter aerogenes; identical to SEQ ID NO: 108379

SEQ ID NO: 108747 - DNA, 1086 bp, Enterobacter aerogenes
atgatgaaaaaatacttagcgctcgcgctgattgcgccattgctcgtgtcctgttccagttccaataaaaaaggcgccgaatataacgaggcctgggtcaaggacactaacggattcgatatcctgatgggccagtttgcccataacatcgagaacatttgggggtataacgaagttctgctcgccgggccgaaggactacgtaaaatataccgatcaatatcaaacccgcagccacatcaactttgatgccggtacgattaccgtcgagaccatcgccggaaccgatccgcaaggacggttacgccaggcgattatcaaaactctgttgatgggcgatgaccccaactctatcgacctctattccgatgtcgatgatattcagatttccaaagaaccgttcctctacggccaggtcgtcgataacaccggcgaatccatccgctgggagtggcgcgccgcgcgctatgccgattatctgctgcaaacccgcctgaagagccgcagcaatggcctgcgcgtggtctatagcatcaccatcaacctggtgcctaaccacctcgataaacgtgcgcataaatatctcggcatggtgcgccaggcctcgcgtaaatatggcgttgatgagtcgctgatccttgcgattatgcaaacagaatcatcgtttaacccctatgcggtgagccacgcggatgccatggggctgatgcaggtcgtacagcatagcgcggggaaagacgtcttccgctcgcagggcaaatccggcctgccgagccgcagctatctgtttgacccggcgaataacatcgataccggtaccgcctatctggcgatgctgaacaacgtttatctcgccggcatcgataaccccacctcgcgtcgctacgcggtgatcaccgcctataacggcggcgccggcagcgtactgcgcgtcttctccagcgataaagtccaggcggcgaacatcattaacagcatggcgccaggcgacgtctaccagacgctcaccacccgccatccgtcggcagaatcgcgccggtatctgtataaagtgaatactgcgcagaaaagctaccgccgtaagtag

SEQ ID NO: 108748 - DNA, 276 bp, Enterobacter aerogenes; identical to SEQ ID NO: 89656

SEQ ID NO: 108749 - DNA, 1059 bp, Enterobacter aerogenes
ttgacttttctcgccgcgcaattttcagcccaggtcctggactggtacgacaaatacggccgtaaaaccctgccctggcaaatcgccaagacgccctacaaagtatggctctccgaagtgatgttgcaacaaacccaggtcaccacggttattccctattttgaacgctttatggcgcgtttcccaacggttgttgatttagccaacgcgccgctggatgaagtgctgcatctgtggaccggccttggctactacgcgcgggcgcgcaacttacataaagccgcgcagcaggtcgccacgcaacacggcggtgagttcccgcaaacctttgaagaggtggccgcgcttcccggcgtcgggcgctcgacggcgggggcgattttatccctttcgctcggtcagcattatccgattctcgacggcaacgtgaagcgggtactcgcccgctgctatgctgtgagcggctggccggggaaaaaagaggtggaaaaacggctgtgggaaataagcgaagaggtgacgccggcgcagggcgtagagcgcttcaaccaggcgatgatggatctcggcgccatggtttgcacccgctcgaagccgaagtgcgaactgtgcccgctgagtaacggctgcgtggcctacgctaaccattcatgggcggaatatccggggaaaaaaccgaagcagaccatcccggaacgcaccggctacttcctgctgatgcagcacggcgacgaggtatttctttcccaacgtccgccggtgggtttatggggcgggttgttctgttttccgcaatttgaggatgaagccgggctgcgtgagtggctggcgcaacgtcagataaaggccgataatctgacgcaattaaccgccttccgccacactttcagccatttccacctggatattgtgccgatgtggcttacagtgcactcatctggcgcatgcatggatgaaggtaacgcactctggtataacttagcgcagccgccatcggtcggactggcggcccccgtggagcgcttgttgcaacagttgaaagccggaacgccggtctag

SEQ ID NO: 108750 - DNA, 720 bp, Enterobacter aerogenes
atgaaaaacgacgtcatttctccggaattcgatgaaaacggtcgcccgctgcgccgtattcgtagcttcgtccgtcgccagggccgcctgacgaaagggcagcagcatgcgctggataacatttggccggtgatgggcgttgaattcaacgatgcgccgctcgatttcgccgccctgtttggccgcgaagcgccggtcaccttagaaattggtttcggcatgggcgcttcgctggtggcgatggcgaaagctaaaccggagcaaaacttcctcggtattgaagtgcactcgccgggcgtcggcgcatgcctggcttccgcggaagaagaaggcgtacaaaatctgcgcgtaatgtgtcacgatgcggtcgaagtgctgcacactatgatcccggataactcgctgaatatggtgcagctgtttttccctgacccgtggcataaagcgcgtcataataaacgtcgtatcgtgcagccgcctttcgccgagctggtaaaaagcaaactgaagctgggcggcgtcttccatatggcgaccgactgggaagcctatgctgagcatatgctggaagtgatgtcttcgctggaaggctatcgtaaccggtcggaaagtaacgattacgtaccgcgcccggaatcgcgcccggtaaccaaatttgaacaacgtggccatcgtcttggccacggcgtatgggacttaatgttcgagagggtgaaataa

SEQ ID NO: 108751 - DNA, 327 bp, Enterobacter aerogenes
atggccaagaatcgtagccgtcgtctgcgtaaaaaaatgcatatcgacgagtttcaggagttaggtttctccgtagcctggcgtttcccggaagggaccagcgaagagcagatcgaccagacggtcaacgatctgatcgaagaggtcattgagccgaacaaactggcctttgacggcagcggctatctctcgtgggaagggctcatctgcatgcaggaaatcggtaaatgtaccgaagagcatcaggccatcgttcgtaagtggctggaagatcgtaaattagcggatgtgcgcaccagcgaactttttgacgtctggtgggactaa

SEQ ID NO: 108752 - DNA, 717 bp, Enterobacter aerogenes
atgcgcaaaacgctgctggcggtggcgctttccgtcaccgctttgtctgcccacgcggactaccagtgtagcgtcacgccgcgtgacgatgtgatcctcagcccgcagcaggtgcaggtgaagggtgaaaacggcgatctggtgattaagccggacggtaatctgacctttaacggtaaagcctatgcccttagcgccgcccagcgcgaacaggcgcaagattatcaggccggtctgcgcagcagtctgccgtggattgatgatggcgcgcgttcgcgggtcgaaaagggccgcaaggcgctggataaaatcatcaccgaacaggtcggcgccagcagcagtatgcatagccgcctgaccaagctggacgcgcagctgaaagaacagatgaaccgcattatcgaacgtcgcagcgatggcctgactttccactataaagccatcgaccaggttcgcgccgatggccaacaactggtgaatcaggcgatgggcggcattctgcaggacagcattaacgagatgggtgccaaagcggtgctcaaaggcggcggcaatccgctgcagggcattctcggcagtcttggcggcctgcaaaccgcaatccaggatgagtggaaaaaccaggaagcggatttccagcagttcggcaaagatgtttgcagccgggtggtctcgctggaagagagccgcaaagcgctggttggttcgttaaagtaa

SEQ ID NO: 108753 - DNA, 210 bp, Enterobacter aerogenes
gtgatcggcggcaccagcctgttcggcggacgcggcagcgcctggtccgcgctattggggatcatcgtgattcagtcgatttcaaatgggctgacgctgttgaacctgccgtcttcgctgcgctatatcattaccggcgcggtactggcgattgcggtaatcattgattctctggctcgccgttcacgcgtgtcgcacggccgcgcctga

SEQ ID NO: 108754 - DNA, 1014 bp, Enterobacter aerogenes
atgtcttccattcaactctgcgccgcgcatcaggcgacctctggcttcgacggcgatgcgatcgcccagtacatgcgtaccgactttattacgctgcaggaacatttcagcgtccatgaggcgcgtgaacactttatctcgcagctcgccagcgacgatattcccggccaggtatttgtcgtcgccggtaacaagctgcgcggcagcttatcagtcaaaaaactattgcaggaggcagaggtaggccagtctattcgctacctgatggatagctgtctgtttcgcgtcaaacccgacgatgagcgccctcaggttattgccgaactcaccgagcgcggcctcgatctggtgccggttgtcgataaaggcgagctggtcggctgcctgatggaaaaagaaattgcccatctgctggaggatgacgtcaccgaagacgcccagctgcagggggcgacgctaccgctggaaaaaccgtatctggaaatcagtccgtggacgctgtggaagaaacgctcggtctggctgctactgttatttgttgccgaagcctacaccagcagcgtgctgcagcattttgaagaggcgctggaatcggccatcgcactggccttcttcatcccgttactgatcggcaccggcggcaacagcggaactcagatcacctcaacgctggtgcgttcgatggcgctgggtgaagtccgtttacgtgacatgggacgggttatccgcaaagaggtgtcgacctcgtttctgattgccctgaccctgggtctggcgggctgcctgcgcgcctggatgatggggattggtatggaaatcacgctgatcgtcagcctgacgctggtctgtattaccctgtggagcgcggtggtgtcttcggttattccgatgttgcttaagcggatcggtatcgacccggcggtggtttccgcgccgtttatcgccacgctgatagatggcaccgggctgattatctatttcaaaatcgcccagtattttcttgggttgaactga

SEQ ID NO: 108755 - DNA, 1194 bp, Enterobacter aerogenes
gtggaaaggtttgatgccattgtgatcggcgccggtgcggcgggaatgttttgtgcggcgcaggcggggcagttgggctgccgggtgctgctgctcgataatggcaaaaagccggggcgcaaaatcctgatgtccggcggcggccgctgcaactttactaacatgtatgtcgaacccgcggcatatctcagccaaaacccgcatttttgcaaatctgcgctggcgcgctatactcagtgggactttatcgaactggttggcaaatatggtattgcctggcatgagaagaccttaggtcagctgttttgcgatgattccgcggagcaaatcgtcaatctgctgctgtcggaatgtgaaaaaggcggcgtacagatccgtctgcgcagcgaaattctcagcgtcgaacgcgatgaacaaggctaccggctacaggtgaacggcgaaacgctgacggcgaagaagctggtaatcgcttccggcggcctgtcgatgccggggctgggagcatcgccgtttggttacaaggtggccgaacagttcggtctgaaggtgctgccgacccgcgcgggtctggtgccgtttaccctgcataaaccactgcttgagcagttgcaggtgctttccggcgtttcggtgcctgctaccattaccgccgagaacggtacgctgtttcgcgaaaacctgctatttacccatcgtggcctttccggcccggcggtgctgcagatttccagctactggcagcccggcgagtttgtcaccgtcaacctgttgccggactgcgaccttgaggcgttcctcaacgagcagcggggcgctcatcccaaccaaagcctgaaaaataccctggcgatgcagctgccgaagcggctggtcgaatgtttacagcagcttgggcaaattccggacgtgacgctcaagcagttgaacgttcgcgatcagcagacgctggtggagacgttaaccgcgtggcgcgtgcagccgaacggcactgaaggttatcgtaccgcggaagtgaccctcggcggtgtggacaccaacgagctttcgtcacgtaccatggaggcgcgcaaagcgccggggctttactttatcggtgaagtgatggacgtcaccggctggcttggcggctataacttccagtgggcgtggtcaagcgcctgggcctgcgcgcaggcgctggcggaagcttaa

SEQ ID NO: 108756 - DNA, 1497 bp, Enterobacter aerogenes
atgctacatttatttgccggtctggatttacataccggactattattattgcttgctttagcttttgtactgttttacgaagcgattaacggttttcatgataccgcaaacgcagttgcaacggtgatttacactcgcgcaatgcggtcgcagcttgctgttgcgatggcggcactcttcaactttttcggcgttctgctgggcggtctcagcgtagcctatgccatcgtgcatatgctgccaacggacctgctgcttaacatgggttccgcacatggcctcgccatggtgttctctatgctgctggcggcaatcatctggaacctcggaacctggtatttcggcctaccggcctccagttctcacaccctgattggcgccatcatcggtattggtttaaccaatgcgctgatgaccggtacttcagtggtggatgcgctgaatatcccgaaagtcatcggcatttttgcctcacttatcgtctcgccgattgttggcctggtggtagcgggcggcctgattttcattctgcgtcgttactggagcggtaccaaaaaacgcgctcgtatccacctgaccccagcggaacgcgaaaagaaagacggtaagaaaaaaccgccgttctggacccgtatcgcgctgatcctgtccgctatcggcgtgtcgttctcgcacggcgccaacgatgggcagaaaggcattggtctggtcatgctggtactgattggcgtcgcgccggcgggcttcgtggtcaacatgaacgcgtctggttacgaaatcactcgtacccgcgatgcagtcaacaacgtggaaaccttcttccaacagcgccctgagctgctgaagaaagccaccggcgttgatcaactggttccgtcaccggaaaccaataccgcggccaacggcgagtttcactgccatccggcgaacaccatcaacgcgcttgaccgcgtgaagacaatgctcaccggtacggaaagctacgatacactgtcagtggatcagcgcggccagctgcgtcgcattatgctctgcatctccgacaccaccgacaaagtggccaaactgccggatgtgagcactgacgaccagcgcctgctgaagaaactgaaaaccgatatgctgagcaccatcgagtacgcgccaatctggatcattatggcggtcgcgctggcgctgggtattggtaccatgatcggctggcgccgcgtggcgaccactatcggcgagaagattggtaagaagggtatgacctacgcgcaaggtatgtctgcccagatgaccgccgcggtttctatcggccttgccagctacaccggcatgccggtttccaccacccacgtgctctcttcctcggttgcggggacgatgctcgttgatggcggcggtctgcagaagaaaaccgtcaccagcatcctgatggcatgggtactcaccctgccggcagccattttgctgtcaggcgtgctgtactggctggctctgaagcttatctaa

SEQ ID NO: 108757 - DNA, 336 bp, Enterobacter aerogenes; identical to SEQ ID NO: 87678

SEQ ID NO: 108758 - DNA, 438 bp, Enterobacter aerogenes
atggcttacaaacacattcttattgcagtagacctatcaccggaaagcaaagtgctggtagagaaagcggtttctatggcgcgtccctacaatgcgaaagtttccctgattcacgtggatgtgaattactccgacctctacaccggtcttatcgatgttaatctgggcgacatgcagaaacgcatctctgaagagacgcaccacgcgctgaccgagctttccactaacgctggctacccgattaccgaaaccctgagcggcagcggcgatctgggccaggtgctggtcgatgcgattaaaaaatatgatatggacctggtggtctgcggtcaccatcaggacttctggagcaagctgatgtcctccgcgcgtcagctgatcaacaccgttcacgttgatatgctgatcgtaccgctgcgcgacgaagaagacgaataa

SEQ ID NO: 108759 - DNA, 690 bp, Enterobacter aerogenes
atgaccagaacagagaggcttctcgagttactacagatattaagagcgcaaagatatcccatcacggcatccacgctctcagaaagattagggataagcgtacgttcactttatagagatataaaaacgctgcagcatcaaggggtgcgcattgaaggtggggccggaatgggttatatcgttaagtctgactttcatttgccacccttaaatttttcgcatgaagaaatcaatgctattacccttgggctaaattgggtatctcataacacagatgatgatttcaaaaacacagcaaggaatgcgcttgctaaaatacacgccgtcatccccgacgaattaaaaagccttatcgaaagccaatcttatttaatcggcccttcagaaagtaatgaggtctttttcaaagacattcgcgatgctattaaaaagcaaaagagagtccaaataaaatattgtgacaagaaaggcactgactcttctcgtgttatatggcccatcggattggcatatatgcagtcatgttggcttttggtcgcatggtgtgagatgagaaatgattttcgtcattttagaactgacaaaattgcagagatggcacaactggactctatatacagggaaagccggatggctttattgaaaaaatggagaataaaagaagggatcgccgaggagaaagagtactga

SEQ ID NO: 108760 - DNA, 900 bp, Enterobacter aerogenes
atggcaagacgcaacctcaacgatttactctctttcgtcaccgtggcgcgggaaggcagcttcacgcgtgccgccgcgcagcttggcgtgacccagcctgcgctgagccaggcgatttccgggctggaagagcgaatgcaaatccgcctgctgacgcggaccacccgcagtgtgtccccgacggcggccggggaacgcctgttgcaatcggtgggccatcgtattgatgagatagaggctgagctggacatgctgactgaactgcgggacaagcctgcaggaatcgtccgcatcacctgcgggccgaacgtgctgaaaacgactctgctgcccaagctggcgccgctgctccgcgaatatccggatattcatattgagttcgatgctaatcacggattccgggatatcgtggcggatcggtttgatgcgggcgtgcggcttggcgatacgattgataaagatatgatagcgatgccaatcggcccgaaactgcgcatggcagcagccgcctcgccagattatttcgcacgatacccggtgccgaaaacgcctcatgatctgacgcagcatcagtgtattaatatgcgcatggtccgctccggcgggatttatgtctgggaattcgatcacgagggaggagagttgaaggtccgggttaatggacagttgacgtttaacacgtcggatcatgttgtcgacgccgccctggcagggttaggcatcgcctttttacctgaagaggaattcggctcacacatcagagaaggtcgtctcgtacgcgtgcttgagtcctggtgtcatccttttccgggctactatctttattatcctagccgcaaacagccttccccagccttctcactcgttgttgatgcgctgcgcatgaacgggaaactttag

SEQ ID NO: 108761 - DNA, 1230 bp, Enterobacter aerogenes
atgcgtaatcagaaaactgaaaccaaaaaccagaacggagcaagtgaaaaacaacaggcacactggggcggcgtgtttgctatgacgctgtgcgtcttcgccctgatcgcctccgagtttatgccggtcagcctcctgacatcgatggcgcagtccctaaacgtcaccgaaggcatggccgggcaggggatcgctatttccggcgcgtttgcggtggtgactagcctgtttatttcccgactggcaggcacgcttaaccggaaaaacctgctgcttggcctgacgtgcatcatggcactttcggggggcgtcattgcgatggcacctaattacctgacctatatgaccggccgggccctgattggcatcgtggtcggcgggttctggtcgatgtcggcggcgacagcgatgcgtctggtgccggtgcaccgtgttccgctggccctggccatttttaacagcggcaatgcgctggcaaccgttgtggccgcgcctctgggcagctggctgggttccgtcatcggctggcggggagcctttttctgcctgttacccgtcgccatcgtcgcgtttatctggcaattgctcagcctgccttccatgcaggttacccgccagccagcgggggccggcaacgtctttgcactgttacgccgtcgggtggtcatgctgggcatgctcggtgtggggatcttctttatggggcagttcacgctctttacctatatccggcctttccttgagacggtcacgaaggtggacgcctcagcggtgactctcatcctgcaggtcatcgggagcgcgggtttcatcggcaccacgctgattggccgggtattgaagcgcggattctacccgacgctaatggccattcctgtgctgatggcgaccgtcgcgctgaccctgatcgcgtttggcagccaggcggccatcgtgacggccttgctcgggctgtgggggtttatttcaactgccgcgcccgtgggatggtgggcatgggttccacgcacgttcccgcagaatgccgaagcgggcggcgggctgatggtggcgatggtgcagttgtccattgcgctgggatccaccgtggggggcgtgctgttcgaccatcatggctaccagagcacctttctggctagcgccgcgatgttgattatcgcaaccgtactgattttcctgacctcacgtgcagacgcctctgccgagggtctttcatcacactcgtcctga

SEQ ID NO: 108762 - DNA, 1029 bp, Enterobacter aerogenes
atgaataaatttgcgttagccctgggaatgttcattagcgcatttgccgcctcggcggcggatatgtccagaggcgctgataacttttataaaagcgaaaaagtgacgcagcagaaagtcacttttaaaaatcagtatcaaatgaacgtggtcggcaatctgtttatcccgaaaacgatgaatcagaacgccaaaaacccggcgatcgtcgttggccatccaatgggcgcggttaaggaacaaagcgcaaacctgtatgcgcagaagctggcggagcaggggtttgttacgctggcgatcgatctctcgttctggggggaaagcgaaggcaagccggggcacctgatttcaccagaaatctacgcggatgatttcagtgcggcggtggattacctcagtacacaatcgtttattgatccagaaaatatcggcgtgctgggcatctgcggcagcggaagttttgtcatcagcgccgcgaaaattgacccgcgtatgaaagctatcgccaccgtcagcatgtatgacatgggagccgcgtttcgtaacggccttaaccactcccagactctggaacagcgtaaggcctttatccagtcggccattgagcagcggtttgccgagttcaaaggaggagagaaagcatacattccgggcacggtgaataagctggatgcttccacgccggaaattcagcgcgagttctttgatttctaccgtaccgaacgcggcggttataccccgcagggcgagaaagaggaactgacgacaaaaccgatgctgagcagtatcggtaagtttatgaacttctatccatttaacgatattgaaaccatttcgccgcgtccgatgctctttattaccggtgaccaggcccattcaaaagagttcagcgaggacgcctttaaacgcgccggtcagcctaaagagctgtatgtcgttccgggggcagggcacgtcgatctgtatgaccgcactgacgtgatccctttcgacaagctgacggactttttccgcaacaacctgaaataa

SEQ ID NO: 108763 - DNA, 654 bp, Enterobacter aerogenes
atgccttccatcgaaacgtttataactttccttctcgcgctgacgctgctggagatttctcctgggccagacatgatgctgactatcgccagaggtgtcggtcagggaagacgtattgcgctgcttacggtcctgggcaatgtatttgtagcaggttttgtgcaagtttcttttcttgtcctcgggctggtaaccgttgttcatgcctggccggttgcgctggatctgttacggtgggtcggtgcggcttatctgatgtggctgggcataaaaatgattgcgacttcaggtactgatacgcggctgcgaaaaacggcaaaaatttctgactggaatgccgttaaggaaggcgctctgaacagcctgactaacccaaaatccctgctgttcatgtttgcttttcttcctcaatttgttgatcccgcagcgggtccagtttggctgcaattgcttgtccttggcagtatccaaaagctggcaggaatcgtgtctctggggtcagtcgcgatggcatcaggcacatttggtaactggctaggtaaacacccaggcgttatcaaatggcaggaacgatttacaggtgttgtcatgattggcctgggtatccgcatgttgtttagcgggtccggcatagtatcaaaatctatccgttag

SEQ ID NO: 108764 - DNA, 213 bp, Enterobacter aerogenes; identical to SEQ ID NO: 92100

SEQ ID NO: 108765 - DNA, 429 bp, Enterobacter aerogenes
atgatcgaaataataagtgataagaaaatattaagaatctccgcatttgaaagagaaaatacacctaatgcacctgcttatgattggataaaaacctacgtcgaatatcacctccctgaattgaatgtacaatatcaagcttctttcaacgttggtgaactttccgaactgaaagataaacttatcgcgttacatacccacttaataaatgaagatgcccataccgatgttatttttgaaagcaccgaaaatcagctaaatctggtatttacaccatcatcttttggccatggagcacttatgtcgttaacgttgaggccagaaaacccggctgaaagcgtagtgatcagtgattgtttggggcttgatgaaagctattttcccgcgctcattgctggtctggaagagatcatcaatttacaaagatga

SEQ ID NO: 108766 - DNA, 297 bp, Enterobacter aerogenes
atggaacatttactcagacattgtgaacaggttgccgttggcccctatagccgcgatgcccgggcgctggcgcatgaagtgatcgataccatttcggcgggcgttccgccggagcaactgattctcccctggatgtcggttaaagaggggctgcccgacgccaatagcgggcgctacgtgtgcgcttatacacccgcgaaatctcaggaccgccgctatcagctggtctccgctgccatgttccgcaccgtttgtcgggacgccacccactggttttatatgtgggaagcgctgtga

SEQ ID NO: 108767 - DNA, 369 bp, Enterobacter aerogenes
gtgttcaatggtgcagcgcgctctgacgtaaacaatttcgttaatatagaaaagggaaggcgcggtagaaagagtcagccgtttatctctttctccaaaaatggggggcatgtcaggatcgcggctttcattgctcgtcacggagaacatgttgatattcaaatagattattccaccagaaccatccgggttaagaaggtggaacatcacggcgtgcgtattaacgtcggcggcgtctttactcgtaaggtactggtgaagcagtttctgtttggcgagaagaagaccatccgtgtcgatctcacccaacaggacgatggctggttttatggcgacttgccggtagagttcacggccaattgcgcatag

SEQ ID NO: 108768 - DNA, 693 bp, Enterobacter aerogenes
atgaaaacgacttattccgatgttattgatcaatataaccatgttgtcgccagcgatcttgagttgattcaaccgctgatctcggcaaatcagccacgaatcatcaaagataacggtgtgtttaaaatagaacccggcgaagtggttattgttgttgaaggcattattgcgatagaggtggaatacaacgcgggctttggttccgcgagtaaacgcggcgcgcggagtaaaacgctggacatgctgcagatcggtaaagggatccgcggtatgatctttggcattattgaaagctatggtccagcgttatcgctaaaatatacggcgaagaaaaatgtcaaaatagtgacctgcggtaaggaagcgtttgaacactattttattcaacgcgatcggtttgcttatctgatggaaatcatggcatttcagctatcgctgattattgatgcgcatcacgaaaagaatttaccttcacgctatgatacgattaaatcaatgatctaccgttacaaaaaacagcaggatgcgggagtattacatgatagaagcctggctagctttattctgaaaagaaccaaaatgtcgcgtagctaccttttcaaaattcttgctgagcttaaagaagggggatatatcaaaatggagaacggtgaactgatcgatattgcgcacgaactgccggagaaattttaa

SEQ ID NO: 108769 - DNA, 1569 bp, Enterobacter aerogenes
atgtttaaaaatattccctttaagagaacaatgttggccagtatgctgacattagcttccggcgcggtgaccgttgctcacgcagccgacgccgcagcgccgaagcaggatgctaaaaagcctaacatcgtagttatctttggcgatgatatcggctacctgaacctgagcacctacaatcagggtctgatgggctaccagacgccaaacatcgacagcatcgccgcccagggcgcgaagtttacctcctactacgccgagcagagctccaccgcgggtcgttccgccttcattaccggccagatgccgttccgtaccgggatgagtaaagtcgggatgccgggagcgccgcagggtctgcagaaagaagatccgaccatcgccaacgtcctcaaacaactgggttacgccaccgggcagtttggtaaaaaccaccttggcgatcgcgatgaattcctgccgactgcacatggtttcgatgagttccttggcaatctctatcacctgaatgccgaagaagagccggaaaatccggattacccgaaagatcccaacttccgcaaacagtttggcccgcgcggggtaattaagagtaccgctgacggcaagatcgaagataccggtccgctgactgtgaagcgtatggggaccgtggatgaagagactctggccgccaacaacgactttatggcgcgtcaggtgaaagccggtaaaccattctttacctggtttaacaccacccgtatgcacaacaaaacccacctcaaagacgacagcgttggcgtcaccgggctgggaacctatgccgatggcatggttgagcacgataaaatcgtcggccaagtgctgcagaaaattaaagatctcggcatcgaagataacaccatcgttatctacaccaccgacaacggcccgatgaccgccacctggccggacgcaggcgaaactccgttccgcggtgagaaaaacaccggctgggagggcggcttccgcgttccggcgatgatcaaatggccaggccacatcaaaccgggcaccgtggtgagcgacatgttcgccagctacgactggttcccgacgctggttgccgctgccggcgacagcaacatcaagcaagagatgctgaaaggttataaaacgccgtccatcacctacaaggttcaccttgatggctataaccagctcgacttcctgcagggcaaagggaaagaccagcgtaacgaattcttctactggagcgatgacggcgatctgctggcaatgcgtcagggccgctggaagatccactttatgatccaggaacacaccggtctcgatctgtggcgctatccgttcaccaaactgcgtgcgccgatgatctttgaccttgccgtcgatccactggagaaaggcgaccaggggatgggctaccaatcctggttctacgatcgcatgttcctgatgggcggcgcgcagaagtcggcaaaagaaatgctggcgacgtttaaagaattcccaccgcgtcagaaaccgggctccttcaccgtctccgatgtcagcgcgatgcttgaccagggcgcgcgcaaataa

SEQ ID NO: 108770 - DNA, 123 bp, Enterobacter aerogenes
atgaatatcatttgcacgctgctgcatggtattggcgtacgcatcggtcgctacgcgtgccgcctcttgctgattcccttcatcctgcaaggccttaatctggttgtaggttgccagagttaa

SEQ ID NO: 108771 - DNA, 876 bp, Enterobacter aerogenes
atgcactattctcccgaagccctcaccgcctttgtagaagccgccgccagcggttcgttctccgccgccgcccggcggatgcgtaaaagccagtccaccatcagtaccgcgatttcgaatcttgaaaccgacctggggttgactctgttcgatcgttccactcgccagccgacgctaaccgcgcagggcgagcaggtgctgggctatgtgaaagcaatactggccgccagttcgcggctggatgagctcgccagttcgttatcgggcaataccgaaccgcggctgaccttcgtcttgtcggataccctgcacccggatgtactggaggatttgctggaacagttcgatcggcgttttccgcataccgagtttgaatgtctgattggcgaagatgaagacgtggtggatctgctgcaaaaagagcgcgctcaggtggggcttatcgaagcccgggacagctatccgatggagatcggcagcatgcgcctgccgttgcaaacggcgatggggatttatgttgcgccggggcatccgctggccggtcaggggcgggttttctgggatgatctgcacggctggcgtgaactgcggcttagcacttatcttgagagcgcgccggatccctcgcgcggtcaggtatggtcggcgcccaactatttgctgctgctgagtatggcggtgcagggctttggctggtgcattttgccctgcgcgctggtggaagagttcgccggtagcggcaagcttaaagcgttgaatatcgccggctggccgcgctcgatctcggtggatctgctatggaacaagcgtacgccgctgggggaagcgggcagttggctgcgccaacaccttgaagggcaaggccgcgagtcgtga

SEQ ID NO: 108772 - DNA, 1179 bp, Enterobacter aerogenes
atgaaagatgtcgtgatcgtcggcgcgttgcgtacgcctatcggctgttttcagggaacgctggcgcgtcactcggcggtggaattgggcagcgtggtggtgaaggcgttagtcgagcggagcggaatcgatccgcagtgcattgatgaagtgatcctcggtcaggtgctgaccgcgggcaccgggcagaatccggcgcgtcagtcggcgatccgcggcgggctgccgaataccgtttcggcgatcaccatcaacgacgtttgcggctccgggctgaaagcgctgcacctggcgactcaggccatccaatgcggcgaagcggatgtggtgattgccggcggccaggaaaacatgagccgcgcgccgcatgtgcttaccgatagccgaaccggcgcgcagctgggcaatagccagcttatcgacagcctggtgcatgatgggctgtgggacgctttcaatgattaccatatgggcgtaacggcggaaaatctggcgcgggagtatgggatcagccgtgaactacaggacgcctgggcgcttagctcgcagcaaaaagcgcggcgggcgatagactccgggcggtttcgcgatgaaatcgtgccggtcgccaccgagcataacggcagtcaacggctggtggataccgacgagcagccgcggatggatgccagcgctgaagggttagccagcctgatgcccaccttcgaccagcttgggtcggtgaccgcgggtaatgcatcgagtattaacgatggcgcggcggcggtaatgatgatgagcgaatcaaaggcccaggagctggggctgccgattctggcgcgcattcgcgccttcgccagcgtcggagtcgatccggcgctaatgggtatcgcgccggtacatgccacccggcgctgccttgagcgcgcgggctggcagctggatgaggttgacttaatcgaagctaatgaagcttttgccgcccaggcgatctccgttggcagagtgctggagtgggatgaacggcgggttaacgttaacggcggggctatcgccctggggcatccgattggcgcgtccggctgccgtattctggtgtcgctggtacatgaaatgatcaagcgcgatgcgcgtaaagggctcgcgacgctgtgtatcggcggcggtcagggcgttgcgctggcggtggagcgcgcataa

SEQ ID NO: 108773 - DNA, 762 bp, Enterobacter aerogenes
atgattcttgatgcattctctcttcaggggaaagtcgcggtagtgaccggctgcgacaccggtttaggccagggcatggcggttgggctggcggaagcgggctgcgatatcgtcggtattaatatcgttgagccgagggaaaccatcgagcgcgttaccgcgctggggcgtcgttttttgagcctcaccgccgacctgcggcaaatagatggtattccgcagttgcttgagcgcgcggtggcggaatttggccacatcgatattctggtcaataacgcggggctaatccgccgtcaggatgctatcgaattcagcgagaaggactgggatgacgtgatgaacctgaacatcaaaagcgtctttttcatgtctcaggccgcggcgaagcacttcatcgcccagggtaacggcggcaagatcatcaatattgcctccatgctgtcgttccagggcgggatccgcgtgccgtcctacaccgcctcgaaaagcggcgtcatgggcgtaactcgcctgctggccaatgaatgggcaaagcataatatcaatgttaacgccattgcccccggctacatggcaactaacaatacccagcagttacgcgccgatgaacagcgcagcgcggaaattctcgaccgtatcccggccggccgctggggcctgccgagcgatttaatggggccggtggtgtttctcgcctccagcgcatccaattacatcaacggctacaccgtggcggtagatggcggttggctggcgcgctaa

SEQ ID NO: 108774 - DNA, 1419 bp, Enterobacter aerogenes
atgacttcattgaccaccgatccgggtttactccccaatgcgcagcgcaacacccggcgcatgaaccagtttgtctccattgccgccgcggtggcgggtttgttattcggccttgatatcggcgtgattgccggggcgctacctttcatcaccgatcatttcgttttatccagccgtctgcaggagtgggtggtcagcagtatgatgcttggcgcggcgatcggcgcgctgttcaacggctggctctcttttcgtcttggccgtaaatacagtttgatggttggcgcggtgctatttgtggcgggctctatcggctcggcattcgccaccagcgtcgagatgctgctggcggcgcgtattgtccttggcgtcgccgtcggtatcgcctcttataccgcgccgctctatctttctgaaatggcaagcgaaaacgttcgcggcaagatgatcagcatgtatcagttgatggtcacccttggcatcgtgctggccttcttatctgataccgccttcagctacagcggcaactggcgggcgatgcttggcgtgctggcgctgccggcggtattgctgattatcctggtggtgttcctgcctaacagtccgcgctggctggcggaaaaaggccgccatatcgaggccgaagaagtgctgcgcatgttgcgcgatacctcggaaaaggcgcgcgatgagctgaatgaaatccgcgaaagcctgaagctcaagcagggcggctgggcgctgttcaaagtgaaccgcaacgtgcgtcgggcggtattccttggcatgttattgcaggcgatgcagcagtttaccggcatgaatatcatcatgtattacgcgccgcggatcttcaaaatggccggctttaccaccaccgagcagcagatgatcgccacgctggtggtcggcctgaccttcatgttcgccacctttatcgcggtgtttaccgttgataaggccgggcgtaaaccggcattgaaaatcggctttagcgtgatggcgttgggcaccctggtgctgggctactgcctgatgcagtttgataacggtaccgccggcagcggcctctcctggctatcggtgggaatgaccatgatgtgtattgccggatacgcgatgagcgccgcgccggtggtgtggatcctctgctctgagatccagccgctgaaatgccgcgacttcggtatcacctgttcgaccaccaccaactgggtgtcgaacatgattattggcgcgaccttcctgacgctgctggacgcgattggcgcggcaggcacgttctggctctataccgcgctgaacgtggcgtttatcggcgtgaccttctggctgatcccggaaaccaaaaacgtgacgcttgaacatatcgaacgcaagctgatgtccggggaaaagctgcgtaacatcggcaactga

SEQ ID NO: 108775 - DNA, 918 bp, Enterobacter aerogenes
atggaagtgaccgataccaccatgctgacgccggcgctgcgtttcgatcaccacagcatcgttggtaataactggagcccgtcgctgaacctgtcgcagggcctgggcgacgactttaccctgaaaatgggtatcgctcgcgcctataaagcgccgagcctgtatcaaaccaaccccaactatattctctacagtaaaggccagggctgctatgcgagtaaatccggctgctatctgcaagggaatgatgacttaaaagcagagaccagcatcaacaaagagatcggcctggaattcaaacgcgacggctggctggcgggcgtcacctggttccgtaacgattaccgcaacaagattgaagcaggctatgctccggtttataccaacggcaaaggcaccgatctgtacaaatgggaaaacgtgccgaaagcggtagttgaagggctggaaggcacgttgaacgtgccggtcagcgagacggtgaactggaccaacaacatcacctacatgctgcagagtaagaacaaagagaccggcgatcgcctgtcgattattccggaatacacgctgaactcaacgctgagctggcaggtttatcaggacgtttctgtgcaatcgaccttcacctggtacggcaagcaggaaccgaagaagtacaactacaaaggccagccggtcaccggcagcgagaagaacgaggtcagcccgtatagcattctcggcctgagcgcgacctgggacgtgaccaaaaacgtcagcctgaccggcggcgtggataacgtcttcgacaagcgccactggcgcgcgggtaacgcccaaaccaccggcggcgacaaaggttatatgtacggcgctggcgcggagacctataacgaatccggccgtacctggtatatgagcgtcaacacccacttctga

SEQ ID NO: 108776 - DNA, 942 bp, Enterobacter aerogenes
atgagtaatgcagaacacctggcgaacgtgatggtcgaggcgtttatcgccgcggtggaaaagggcgtcgatctggtgccggtggtcgcggactccacctcaacggccaagatcgctccctttattaagctgttccccggacggctggttaacgtcggtatcgccgagcagagcatggtcggcaccgccgctgggctggcgctcggcggtaaagtggcggtgacctgtaacgccgcgccgttccttgtctcccgcgctaacgagcagattaaagtcgatgtctgctacaacaacaccaacgtcaagctctttggccttaacgccggggccagctatggcccattggccagtacccaccatgctattgacgacctggcggtaatgcgcggtttcggcaatatccagattttcgccccctccacgccgcgcgaatgtcggcaaattatcgactacgccctggcgtatcaggggccggtttatatccgccttgacggcaaggcgctgccggagttgcatgacgaagcgtaccgttttgtgcccggcgcggtgctgaccctgcgcgaaggcgcagcggtggcgctggtggcgaccggttcaaccgtgcacgaagtggtggaggcggcgcagcagcttgccgaccttggtattgaggcgaaagtggtcagcgtgccgtcgattcgtccctgcgataccgcggcgctgctggcggcgctgcagtcatgccgttcagttattaccgtcgaagagcataacgtcaacggcggtctggggagcctggtcgccgaagtgctggcggaagcgggcgcggggattgccttgcagcgtctggggatcccggatggcgagtatgcggcggccgccgatcgcggatggctgcgtcaacatcacggttttgacgcggcgtcgattgtcgcgcgggtacagaaaatagcgcagagttga

SEQ ID NO: 108777 - DNA, 831 bp, Enterobacter aerogenes
atgaatccctacagatttgatatccagacgcttgagcgcaaagcgcgcgccgtgcgccgccacattgtccgcttaaacgccaatagtccggctggcggtcacaccggggctgacctgtcgcaggtcgaattgttaaccgcgctctatttccgcgtactcaatgcggcgcccgatcgtcttgacgacccgcagcgcgatatctatatccagtcgaaaggccatgcggtgggctgctactactgcgtactggcggaagccggtttcttcccgatcgattggctggagacctaccagcacgcgaactcgcaccttcccggtcatccggtgcggcagaaaacgccgggcattgagcttaacaccggcgcgctgggccacggtttgcctgtagcggtggggctggcgctggccgcaaagaaaagcaacagcctccgccgcatctttttaatcaccggcgacggcgaactggcggaaggcagtaactgggaggcggcgctggcggcggcccattatggcctcgataacctggtcattattaatgataagaacaatcttcagctggccgggccaacccgtgaaattatgaataccgatccgctggccgataaatggcgcgccttcggcatggaggtcagcgaatgcgacggcaacgatatggcctcggtggtcgcggctatcgaagggctgcagcagaacggtaaacctaacgtcattattgccaacaccacgaagggcgcgggcatctcctttatccaggggcgcccggagtggcaccaccgggtgccgaaaggcgaggaaatcgcactggcgctggaggaactgaaagatgagtaa

SEQ ID NO: 108778 - DNA, 951 bp, Enterobacter aerogenes
atggctaagcaggatgaacaacggctattggtgaagattgccacgctttactatctggaaggacgaaagcagtctgatatcgcccaacttctctcgctgtctcagtcatttgtctctcgtgcgattacccgctgccaaaaagagggcgtcgtcaaaatcagcgtcgtgcagccatcgaatatctttctcaatctcgaaaaggggcttgaggatcgctacgggcttaaacaggcggtggtggtcgataccgaagaagaggccagcgaccataccatcaagcgggcgattggctccgccgccgcgcactacctggaaacccgcctgcggccaaaagatctgattggcgtctcttcatggagttcgaccatccgcgcgatggttgatgaggtccacgcgcaaaacctgaaggccagcggcgtcatccaactgcttggcggtgtcgggcccaacggcaacgtgcaggcgacgatcctcacccagacgctggcccagcgtcttaactgcgatgcctggctgctgccgtcgcagagcatcgaaggctccatggaagagcgcaatcgcctgctggccagcaaagatgtcgccgacgtggtttcacgctttgacgaggtcgatatcgccattgtcggcattggaattctcgaaccttcccagttgctgaaaacgtcgggtaactattatcacgaagatatgctgcaggtgctggcggcgcgcggcgcggttggcgatatctgcctgcactactacgacaaatatggccagccggtgttacgcgaagatgaagatccggtgatcggcatggcgctggagaaagtcaaaaaatgcccgaacgtggtcgcgctggccggcggcaccgacaaagtcgcggcaattaaaggcgcgcttaccggcggctatatcgatgttttaatcaccgattaccctaccgccagattactggttagcgactaa

SEQ ID NO: 108779 - DNA, 468 bp, Enterobacter aerogenes
gtgcttaatgcgctgctcctgacgatcgcgacgcagcgtgtcgcagaacgcggcgctgcgggtgcactgccaggtgatggcggcgttaatgggttcgccactggcgcgataccagccgatggcggtttcgcgttgattgctgatagccagcgccgcgacgttttccgcgccgacgtgagccaccgctttggcgatcaccgccagcgaggccgccatcagcgcctcgccggattgttccacccaaccttcgcgcggggtttggatcgccagcggctgcgagaacttgacgctaaccttgcctttgctgtccagcaccacggctttcgcgttggtggtgccttcatccagcgcaatgatgaactctttggctgtcgcctgcatatgatgctctcctcggtcacccattgtcctggaacggcggaaacagagatggtctccggccattgcatgcgtctatgcaggccatga

SEQ ID NO: 108780 - DNA, 1533 bp, Enterobacter aerogenes
atgaaggcaattatgaataaatatcgacttgccattctggcaggcttactggcggctggtggggcgacggcgctgcaggcggcgacgctgaacgtgatgcaaaacgaacctccgcgtagcatggacccgggcgatcaaaccgcgacctttaccgatactgtattaaaaccaatgtatgaaggactggtagacttatcgccggatttcaagatagcgcccgcgttggccaccgcctggaaggtgagcgatgacggtaaagtctggacgtttaccctgcgtaagaacgtcacttttcatgatggctcgccgtttaatgccgatgcggtggtcgccaatatcgaacgacatatcgacccaaaaggcggcctggcagccagttcgcggatgcgcaacgttatcgcttccgtgaagaagatcgatgataacaacgtcgagattacgctgaaaaaggtctatccctctttcctcaatctgttgaccggcggctcggcgaagatggtgagcccggcggcggcgaaagccggcaccattggccgtaaagcggacggtaccggcccgtacatgctgcaggagtataaaaccggtgaatatgtgctggagaagaaaaacccgaaatactggggcgagaatcacggcccggatgagattaagtggacctggagcgcggagccgtcggtaatgaacatggcgctgctttccggccaggtcgatgtgattaacccggtaccgccacagtttggtcggcagttgaaaagcaacccgcaggtgaagctggagcaggggcagggggcgtcggtattctgggtggcgctcaacgttgagcaaaaaccgctgaacgatgtccgcgtgcgtcaggccctgaacctggcgaccgacaaagaagcgctgctgaaggcggtgatgtttggctttgcttctgccgccaactcgccgctggcgccggtgaacgaaggatatgataaaaccctcaacgactatccgtgggatctcgataaagcgaaagcgttattaaaagaggccggttacccgcagggctttgagatgaacatcgccgtgcagggaccggatgcgcgtaccgcgcaaatcctgcaggcgatgtggggcaaagtcggcgtgaagctcaatatccagcagatggagagcggcgtctggagcaaagcggcgtttgcgccggcggcggaaaagttggccaaccgtaccgatgcggtgctggcctcctggtcgtccggccttaatggggctgatttgcagctgcgcccgctgtactactcacagagcgccgcgccggccggggctaaccttggcttctaccgcaaccctcaggtggatgagctgttagacaaagcggcgactaccatggatgacaacgcgcgtatcgctgaatatgtggcggcgcaaaaggccattatgcacgacgcaccgcatgtgatgctctacttccaggacgatctgtacgccacccgcgccaccattaaaggcgtgcggatggagccgggcggcgaaattatcgttaccgaagcgcaaaagccataa

SEQ ID NO: 108781 - DNA, 921 bp, Enterobacter aerogenes
atgaaagcttatgtgattaaaaaactgctttctttgccgctgatcctactgggggcatcgctgattgtctttctggcgatcagaatgctccccggtgacccggcccgcctgatggccgggccgcaggccacccaggatgatgtcagccgtatgcatacgcgcctcggtctggacgatccgctggcggtgcagtatggccatttcgttagcggaatgctgaagggggattttggcacttcgctgaagtccggtcagccggtctccgccgaaatgagcgaacgggttccttatactttaggcctggcgctgctggcgtggatgatggcggtgatcctcggtattcccatggggatgtgtgcggcgatttaccgcaatcatgttgccgaccatgtgctgatgctggtggcgattgccggcgcgtcgatagccaatttctggctggcgctgatcgccatggataccttttcggtgaagctgggctggctaccgctactgggcgccgaaggctggaaaagctatatcctgccgtcggtttgcctggggattttcccgatggcggtgatgtcgcggatgacccgctccagtatggttgatgtgttaggcgaggattacatccgcaccgcgagggccaaagggctggcgccgtttcaggtctatttcaagcatgcgctgcgcaatgcgctgatccccatcgtgacgattatcgcactgaacttcggcagcctgatcggcggcgcggtggtgaccgagtcggtgtttaactggccggggataggccgctatctggtggattcggtacgctatcgcgattatcccgttattcagggagtgacgatgattacggtggcaagcgtggtggtgatgaacctggttggcgagatgattatcgccagaatcaacccgaaaataaggtttgactga

SEQ ID NO: 108782 - DNA, 861 bp, Enterobacter aerogenes
atgtcggaaatttcactcgccaaatcgcgcagcggtgtgctcagcggcctgcgctgggggatggagcatccctcgctgaccctcggcggcatcatcgtcgccttaatcgtggtatgtgccctcttcgcgccgtggttaagccactacgatccctatgcgcaggacctgctgaatattctctccgcgccgtcggccgaccactggctgggcaccgatgactatggccgcgatatcttttcccgcaccatttacggcgccaggatctcgctgattgaagtggtggtcagcgtggcgctgtcgctactgatggggctacctctgggcattatcgccgccctgtgcggtaaaagtgtcgaccacctgattatgtgggtgatggatgtcattttcgcttttcccggtatcgtgctggccatcctgctggtcagcgtcctcggcgcagggttgatgaatatgctgctggcgatcgctatcttctcggtgccggtttacgcgcgcctcagccgtaacctgacgttgggcatcaagaatatggagtacatggaagcggcacgggcactgggaattggctatcgccggcagataatccactacatcctgcgaaataccctggggccgattaccgtgcaggcgacattgaccggcggctcggtgatcctcgccgcggcttcgctctccttcctcggcatgggcgtgcaaccgccgatgccggagtgggggacaatgatgagcgatgggcgtaacttcctgggtatcagcctggggatttcgctatggccggggctggctattgtcttttcggtattaggcttcaacctgctgggcgatggcctgcgtgatttaatggattcgcgcctatga

SEQ ID NO: 108783 - DNA, 258 bp, Enterobacter aerogenes; identical to SEQ ID NO: 108414

SEQ ID NO: 108784 - DNA, 252 bp, Enterobacter aerogenes
atggccgaagataatgccgccgagcgggcggaagaggaagccgacgccgaaggtcgcgaaggctgcgagcgtgcccatcgccgggccaatttgtgggaaaaattcgcggttgaacaccagtgcggcggtaatgccgtacaacagaaaatcgtaccagtcgacgacggcgccggcaaagcttccccatgccgcacgacgagcgcgatgaagagaagcaacccccttgccggagtcgggagaaataagcgttga

SEQ ID NO: 108785 - DNA, 498 bp, Enterobacter aerogenes
atgcgtctaatttttgcagttttattttatgttttggttttacccaatgctttcgcagaaaaactgcctgcgccaacaggcaaacccgttttaaccatttcaggaaagattaccaatacaaacgaaggtgataccgccgtatttgacattgccgcgctagaaaaattgggcaatgagacagtgatcaccaccactccgtggtattcagggaaagtgcgctttgatggtatttcacttagcaaacttatggacttagtgggtgcgcaaggtaagacggcgaaggtgatggcccttaacgattataccactgaggtaccggtggaggattttcataaattcccggtgatcctggcgctgaagatgaatggtgaatatatgcgcattcgtgacaaagggcccctttttattgtttatccctacgatagtagcgcggagttacagaaccaaatctattattcccgctcggcatggcaggtttcaaagattataattgagtaa

SEQ ID NO: 108786 - DNA, 1917 bp, Enterobacter aerogenes
ttgaatcgaatactcactgccattattttgtcgctttttatcgtcaccggatacattacctatctggtgcatgagcggcagagtgagctgcaaaaattaacccgttataccgactcgtggtccgtatcccagatggtctctgaatatatgcgtctggaggctcgtttaagcgccctggcgctgaacgtgaaggggaccgaccgcgatgaggtacgcctgcgcctggaaataatgatgagtcagatcgagctgctgcaacagggcgatcttggtcagtttatcagaaaaagcgagcagcggcaggcaacggtgaccagtctgattcagatcctcgatcaactcgatcggcaactggacaccatgacgcctgagcagatggtgattctgctgcataccatgagtaagttagatggtccgatgacctcactggcctccatgaccctggcgcaggactttgatgtcgtcaatcttacgcacgataagattcagcatctctattacatctattcggtgatttcaatcttgctgattacgatgtgtatcactcttgggctattgatgcttcggcaaaataacaacttgcgccgcgctcatgtgcgtatgaaattgctcgcgaatgatttgcagctgtcgaaagagaaactgcaggtacagaaccgccggttgcaatatgatgcttatcacgattcgttaacaggcatgcctaatcgcctttctttctggcagaggctacaggaagtagtcaatcatgtgaaaccttataatggttgcgcagtggttatgttgttcgacctggataattttaaagatgttaacgataccctggggcatgatgctggtgacaaactgctgcaggagctcgccagccgcctgtcgttcttccgtaaaacatcagagacgctgtaccggcttggcggcgacgaatttgccctggtatcgcaagatctgagcgaagaaatggcactggagcgggcgaatgtgatccgcgagaaaatcagccagccgtaccagatctacgattcattaattaacatcggggcttgcattggcatcgtaatctccgatgctgaaagtcgcaccgattacttatacaaatgtgccgatctggcgttgtatgaagcgaaaaaatccggtgcgggaaatgtggagattttccgtcccggcatgttgcaacgtttacaggacaacaaatcctttgaggacgatctgctgcatgcactggaaaacgaccagttcaaggtttactaccagccgatcgccgacacggtgtcgcgtgaaatttatggttacgaagcgctggttcgctggtttcatccgctgcggggcatggtaccgcccacggaatttatcccggtggcggagaaaaccggcctgattaatcaactcggcgagtgggtactgaaaaccgcctgcgaggaagcggcccgctgggagcaaccgctgaaggtttcggttaacgtctcaccgattcaacttatcaatacctcactcacagacacggtggttgcggtgctaaagaagacgggcctcgacccgcggcgccttgatcttgagattacggaatctgatgtatttaacgaaaatacgcgctcgctggagatcctcagccagttacgcgagcaggggattcagatttcgattgacgattttggcaccgggtattcgtcattgtcacggttgagttatttcccctttgataagatcaaaattgatcgctcgtttgtggtcaatatacctatgcaaaaagatgacctcgatattgtgcgcctgatcatcagtatgggtaaaagcttacatatgcgtattgtcgccgaaggtgttgaaaccgaggaacaattaacctcgctgcaacaattaggttgcgatcttgttcagggctatttaattggcaagccggggcagttaaataacaactga

SEQ ID NO: 108787 - DNA, 390 bp, Enterobacter aerogenes
atgcaatatatcgttccattcgcgcgctatttcacggcgcggaaagagaggcaaatcatgcagcgaatcattatacctacccattatgttcagacccgttccacccccatgtggaccaaagagaccgcgcccgcgtccatctggaagcgccatcttgatgccggtacgcgacagggcgtctacccgcgtttgtcggtgatgcagggcgcaatacgctattatggttatgccgatgaaacgagcccagaccctgttgaaacgatgactattgaagcggggcagtttggtgtctttcctccggaaaaatggcactgcattgaggcattaactgacgataccgtatttaatgtcgatttttacgtcgaccctaaaattctgattgagggataa

SEQ ID NO: 108788 - DNA, 339 bp, Enterobacter aerogenes
atgaacagtgaaaataaaggttactcattagcgatagtcaataacaacaataatgaaaaacgagagaaaatttatctcaagccgatggcgctttatatccctgatatcgcggttcaggcagtagcggaattgcttcaggatctttcaaccgataacgcacagggcaaagggttcagcctgatggtgacgaacaataataacggtgtatcggtagataaagattttgctgcaatcgaggcgcttcaggatccactgcatgccgctgatgcggtgaaagagctcatcaatattgtgcgcggttatgaatctgacgaagagactaacgtctgcggttggtaa

SEQ ID NO: 108789 - DNA, 774 bp, Enterobacter aerogenes
atgctgccattggagagacaagagaagatattggaaatcattaaagacaaaggggtggtcagcgtcgtcgaactggtcgaggcgctgggcgtgtcgcatatgacaatccggcgcgatattcagcgcctggagcagcttaacgtgctggccagcgtatcggggggtgtggcacttccgcaacgaacccgcctgctgaatgaaccttcgcatcgcgataaaacgcttatgtttccccaggaaaaagaggctattggtctggcggcgcttaagcatattcccgcgaacagcaccgtctatctggatgccgggaccacaacgctcgcactggccgaaaacctggttgagcgtcaggacttgctgatcatcaccaatgatttcgccattgccaatttgatgattgaacgcgggcaatgtgaattgatccataccggcggacgcttatgccgtgagaatcagtcgaccgttggccacctgacggcaaaaatgctggagaacctgtttatcgatgtcgcgtttatttcggcgtcatcatggaatttgcgcggactgtcgacgcccaacgaaaataaagccatcgtgaaacagaccgtggcgaaggtaagtgaaaaatgtatcctgctaagcgactcatcaaaatatggaaaaatggcgaattacctgatcctgccgctgagcgagcttgatgtcatcatcagcgatgaccggctgagcggcagtgtggtaaatcagctgaatgcgcttaacgttgatgtcgaactggcgactacgcgttaa

SEQ ID NO: 108790 - DNA, 765 bp, Enterobacter aerogenes
atggcagactggaatccctcgctgtatctgaaatttgctgatgagcgcacccgaccggcggctgagttaacggcgcgtattgcgcaacagccggtcaagctggctgtggatctgggctgcggtccaggcaacagcacggccttattgcgtgcagcgtggcctgaagcgcgaattattggcgttgataattccgccgccatgctggcacaggcggcgcaagcgcttcccgattgtgagtttatcaccgcaaatatagaagactggcagccatctgagcccgcagacgtgatctatgcgaatgcctctttacaatggctcacagaccatcaaacgctgttcccgcgactggccggccagttaagcgatggcggcgttctggcggttcagatgccggataactggcaagagccctctcataccctgatgcgtcaggtcgctgaagagctgggatttccggaaagtggccgacagccgctcccccgcgtccagcagtattacgacatgctgagcaacagcggttgcgaggtggacatctggcgcaccacctattatcaccctctggaatcgcaccaggcgatcgttgactggctgcaggcgaccggtctgcgcccgtatctgcaaaatcttgatgaagaagaaaagaacgtgtttttagagcgttatctgacgctgttacaacaacattatccgttacagtgtaacggaaaggtactgttattgttcccgcggctgtttattgtcgcgcgacgcctggttaacgcgtag

SEQ ID NO: 108791 - DNA, 801 bp, Enterobacter aerogenes
atggccttaaccatcagggtattactggaaaatcgccttgcggcgcacgccgatccggcgttgactgccaaagccggacttagcctgctccttgaggatgaaaccagcaaagtgctgtttgataccggccctgacggcagttttcttaagaatgcgcagcggatggggattaaactggataacttgaccgcggcggtattatcacacggccattacgatcactgcggtggcgtcccctggctgccggaggggagccgaattatttgtcatccacagcttagccaaccgcgctatgccgctatcagccttggccggcacgtacgcaaaatcaaaaaactgtcgcttgagctcgactattcccgctttcgcatggaatgctaccggcagccgtttgccatcagcgaacgtctgttgtggtccggcgagattgtggtaaaccgtccgcaatcctttggcgttttagccagctcgccgttgacgcctgattatatcgtcgatgaaggcgtccttatctatctttccgaccacggtctggtcatcatctgcggctgcggacatcgcggcgtagagaacattgtgcggcattgtcagaatatcaccggcattgagcgggtccacgcattgatcggcgggctacacctgcgcgccgcatccgtcgccagggtctggcaggtgagaagttacttacatcagctgcaggtggagaaaattttggcctgccactgtaccggcgcctggggaaaactgtggctcgccggcgcacaggcgccggctacaggggatattttgcagctagcttaa

SEQ ID NO: 108792 - DNA, 291 bp, Enterobacter aerogenes
atgcatcaaagtttcaaccagcgcgttcatttttactactgcattctggtcgcgctgaaaatccacgtaaaaacgaaaaaatcgggcggagcgagagggaaaaataactttcttctcaaatggttgcgtaaagcgcaggacaacaacatctttcacccggatatcaccagcgaaatcgaatggctacgcggaaaaattatccaggccggtcatgatactgaccttgagccgatgctggaattcgtttatgccactgcccggcgcgccgaaatgctgaaagatgccgactga

SEQ ID NO: 108793 - DNA, 1185 bp, Enterobacter aerogenes
atgactacttctgtcagcaccactcagcttaacctgcgaattatttccatcgttgtcttcacctgtatctgctatctctccatcggcctgccgctggcggtgcttcccggctacatccactaccagctcgggtacagtacgctaatcgccggagtcgttatcagcctgcagtacatttcaacgctagtaagccgcccgcatgctggccgctataccgatatctgggggccaaaaaaggtcgttagcctcggcatcatctgctgcatgttaagcggactcttcaccctcgcggcggtgatgttgcaagctataccgcttctcgccgtcagtgccctgttgattggccgggttttcctcggcgtgggagagagctttaccgccaccggggcaacgttatggggcattaaaaccgttggcgcgattcacacctcgcgggtgatttcatggaatggcgtcgcgacctacgtggcaatggccgtcggcgcgccgctgggggtgatgctcaatagttattttggcatcagcggttttgccgtagtggtggtgctggttgcgctaattggattactcttcgcccgtacccgccaggatgtcagcgtgaccgccggagtgagagcgccattccatgtggtagtgcgcagaatctggccctacgggctgggactggcgctgggtaccgtcggttttggcgttatcgccacctttatcaccctctatttttcggctcaccactggcaaggcgcggccttcacgctctctcttttcagcatcggttttatttgtatacgcctgatccttggcaacaccattacccgctacggcggcgtgccggtgtcgcttgtctgcttcgtagtagagtgtcttgggttattgattatctggcaggcaccgtcggcgtggatcgccggtatcggcgcattcctcaccggttctggtttctcgctggtctttccggcgctgggcgtcgaggcggtgaaacaggtagaagaacaaaaccagggtacggcgctgggtacctattcagcctttctcgatttggcgctgggtttgaccggcccggtggccggttgggtggcgggttattatgcgcttgatacgctgtatctgctggctgcggtgatagtcgccatggcgtttatcctgctgcttcgggttcgtctgcaacagaccagggcgaacgtatga

SEQ ID NO: 108794 - DNA, 1476 bp, Enterobacter aerogenes; identical to SEQ ID NO: 108525

SEQ ID NO: 108795 - DNA, 891 bp, Enterobacter aerogenes; identical to SEQ ID NO: 108524

SEQ ID NO: 108796 - DNA, 1545 bp, Enterobacter aerogenes; identical to SEQ ID NO: 108290

SEQ ID NO: 108797 - DNA, 426 bp, Enterobacter aerogenes; identical to SEQ ID NO: 108289

SEQ ID NO: 108798 - DNA, 333 bp, Enterobacter aerogenes
gtgctgctgtatgtgctggtgccgtggacggcgattaatctggtcgattattatttagtggcccacggcgaatatcacgttgagtctttctttaaacgcgacggcggtatttacggttactttaatgcaacggcgatatcctgctatatcctcggtattctggtcgaagtaccgtttatgtcgacctcaatttataccgggccaatcgccctcaccttcggcggcgcggatctctcctggattataggtttattggtggtctcaccggtctattattatttctcgaaagcgaagagtgttaaaagcatggcttttgcaaaagagaaggtttaa

SEQ ID NO: 108799 - DNA, 1149 bp, Enterobacter aerogenes; identical to SEQ ID NO: 108681

SEQ ID NO: 108800 - DNA, 675 bp, Enterobacter aerogenes
atgacattttcgattgccgcacgctgcccggaaagcgggcagtttggtatcgcgatcagctcttcaagcattgccgtcggcgcccgctgcccgtggctgcaggcgggggtaggggcggtatcgagccagaacattaccttaccggcgctggggcaactcactctggcgcagatggagcaggggctgacggcggagaaagcgatgcgtcgggcgctggcggaagacgactttagccgctatcggcagattatcgccatcgacgccagcggccagaccgcgtggttcagcggcgataaaacgctggggacctggcatgttgtgcagggcgataactgtatcgccggcggtaatatgctggcatctgaggctgttattgccgcgatggcggcaacgttttcgcaaaccgaaggcgagctggcgacgcggctggttgccgcgctgcaggccggtgtagccgagggcggcgaggccgggccggtccattcggcggcggtgaaggtggtggatgattactcctggccgctggtggatctgcgcgtcgactggagtgaaacggacccgattggcgagctggcggcgctgtggcaggcctatgaaccgcaaatgcaggcttacgtgacgcgcgctctcgacccgcgggaggctcccagttacggagtacccggcgatgaatag

SEQ ID NO: 108801 - DNA, 423 bp, Enterobacter aerogenes; identical to SEQ ID NO: 108246

SEQ ID NO: 108802 - DNA, 1266 bp, Enterobacter aerogenes
atgaccgtagaaaaaatacaaattgagacgctggttgttggcggggggcaggccggtatcgccatgagcgagcacctgagcaaacagggtatttcgcatctggtcgtggaaaagaatcgcattgccgaagcctggcgtaccggccgctgggattcgctggtggcgaacggcccggcgtggcatgaccgttttccgggcatggagtttaaaggcggcgaccccgatgcctttattgccaaggatgatgttgcgcaatactttgtcgattatgtgcgcgagtttaatcttccggtgcgtaccggcgttgaagtcaaaagtgcggtgcgtaaccacgggcgtccggggtttaccattgaaactaccgacggcgtgattgaagcgctgaatattgtcgcggcgaccgggccgttccagaagccggttatcccgccgatcgccccgcgcgacagcgccatccatcaaattcattcggcgaaatattacaacccgcaacaactgccggaaggcgcggtgctggtggtgggcgcgggctcgtccggtgtgcaaatcgccgatgaactgcagcgcgcgggccgcaaggtttatctgtcggtcggcgcccatgaccgcccgccgcgcgcctatcgtaaccgggatttctgctggtggctgggggtgttaggcctgtgggatgccccggccagcgaacccggtaaagagcacgttaccatcgcggttagcggcgcgcacggcggccacacggttgatttccgtgagctggcgcatcgcggtatcacgctggttggtctcaccgaatccttcgctgggggcaccgtctcctttaaaaataatctcgtcgaaaacattcgcctcggcgatgaaaactacctggcgctgctggatgccgccgatgcttacatcgccgccaatggcctggatttaccggaagagcccgccgcacggcaattcttagcggacccggactgcatgacgtcgccgatcctgtcgctcgatctggcgcaggcggggattaacaccattatctgggccaccggctatgcggtggactacagctggctcaacgtcaacgctttcaacgaacagggccgtcctcagcatcagcgcggcgtctccagcgaaccgggtgtctacttcctcggcctgccgtggttatcgcgccggggatcaacctttatctggggcgtctggcacgacgcgaagcatatcgccgaccatatcgctacccgccgtaaatatagccagtacaaagacgccagccagcgttaa

SEQ ID NO: 108803 - DNA, 156 bp, Enterobacter aerogenes
atggcgttagcctgggtgctgcgagaagataaggtgacgtcagtgctgatcggcgccagtaaaacggcgcaactggatgatgccgtaggcatgttaagcaatcgccagttcagcgctgaagagtgcgccgctattgacgcgatccttgcggtgtaa

SEQ ID NO: 108804 - DNA, 357 bp, Enterobacter aerogenes; identical to SEQ ID NO: 90738

SEQ ID NO: 108805 - DNA, 1173 bp, Enterobacter aerogenes
atggggcccgcgttcattgctgccatcggctacatcgatccgggtaacttcgccacgaatatccaggcaggcgccagctttggctatcaattattatgggtagtggtctgggcgaacctgatggcgatgctgattcaggtgttatcggccaagctcggtatcgccaccggtaaaaacctcgcggaacagatccgcgatcactacccgcgcccggtggtatggttttattgggtacaggcggaaattatcgccatggcgaccgatctggctgaatttatcggtgcagccatcggctttaagctgctgctcggcatttccttattgcagggggcggtgctgaccggtgtcgcgactttcctgatcctgatgttgcagcgtcgcgggcagaaaccgctggaaaaagtcattggcgggctactgctgtttgtggcagcggcctatgtggttgagcttatcttctcgcagccggcgttagcgccgctgaccaaaggcatgatcattccgagtctgcctaatggtgaggcggtattccttgccgccggggtactcggcgcgacgattatgccgcatgttatttatctgcactcgtcgctgacgcagaacctgcacgatgggtcgcgcaaagaacgctataacgccacgcgttgggatgtggcgattgcgatgaccatcgctggtttcgttaacctggcgatgatggcgaccgccgccgctgcgtttcacttcaacggccacaccggcgtggccgatctcgaccaggcttatttaactctcgaaccgctgctcagccatgccgccgcgacggtttttggtctcagtctggttgccgccggtctctcgtcgacggtagtcggaacgcttgccgggcaggtcgtgatgcaggggtttatccgcttccatattccgctgtggtttcgccggacaatcaccatgctgccgtcatttatcgtgattatgatggggctggacccgacgcgtatcctggtgatgagtcaggtgttgctgagcttcgggattgcgctggcgctggtgccgctgctcatttttaccagcgatgcgcggttaatgggcgatctggttaatagtcggtgggtaaaacgcatcggttggctgattgtggcgattgtggtggcgctgaacggctggctgattattggttcagcattagattaa

SEQ ID NO: 108806 - DNA, 1203 bp, Enterobacter aerogenes; identical to SEQ ID NO: 108099

SEQ ID NO: 108807 - DNA, 447 bp, Enterobacter aerogenes
atgcaaaaggatagcgccgctcagattatcgcattgtttaagcgttatagcgtatcgcctgcgtatattacgattgagataaccgaggagcaggcgttctcgaatgcggataccagcatgcataatattcagctgctgagtgagttcggttgcgctatcgccattgatgacttcggtaccggttacgcgaactatgagcgtctgaagagcctgcaggcggatatcgtaaaaattgacggctgcttcgtgcacgaaatcgagagcgaccagcttgatgcgattatcgtcaaatccataatcgaaatcgcgcgggcgaaacagcttacggtagtcgcagagtacgtcgagacagaggcgcaaaaggcgatgctgttggcgctgggcgtcgattatttacagggttacctgattggcaaaccgcagccgttaagcgaattaaaggcgtaa

SEQ ID NO: 108808 - DNA, 123 bp, Enterobacter aerogenes
atgttacagatacgcaacccggtcgctaccatcagcaatgcaccggcgcaggagaaatccgccatcattgacggggtgatcatcggcagaataaacaccgccagcatcgccagcgccacctga

SEQ ID NO: 108809 - DNA, 363 bp, Enterobacter aerogenes; identical to SEQ ID NO: 108461

SEQ ID NO: 108810 - DNA, 435 bp, Enterobacter aerogenes; identical to SEQ ID NO: 108462

SEQ ID NO: 108811 - DNA, 1299 bp, Enterobacter aerogenes
atgggtaacaacgtcgtcgtactgggcacccaatggggtgacgaaggtaaagggaagatcgtcgatctcctgactgaacgggctaaatatgttgtgcgctaccagggtggccataacgcaggccatactctcgtaatcaacggtgaaaaaaccgtcctccatcttattccatcaggtattctccgcgagaatgtaaccagcatcatcggtaacggtgttgtgctgtctccggctgcgctgatgaaagagatgaaaggtctggaagaccgtggtatccctgttcgtgagcgtctgctgctgtccgaagcctgtccgcttattcttgattatcacgttgcgctggatgttgcgcgtgagaaagcacgcggtgcgaaagctatcggtacaaccggtcgcggtatcggcccggcttacgaagataaagtcgctcgtcgcggcctgcgcgttggcgacctgtttgataaagccaccttcgccgacaaactgaaagaagtgatggaatatcacaacttccagttggtgaacttctataaagcagaagcggttgactaccaaaaagtgctggacgatgtgatggcgattgccgacatcctgaccagcatggtcgttgacgtctccgatctgctggatcaggcgcgtcagcgcggcgacttcgtgatgttcgaaggcgcgcaaggcacgctgctggatatcgaccacggtacctatccgtacgtaacttcctccaacaccactgctggtggcgtggcgaccggctccggcctgggcccgcgttatgtggattacgttctgggtatcatcaaagcttactctactcgtgtaggcgcgggtccgttcccgaccgagctgtttgatgaaactggcgagttcctgtgcaagcagggtaacgaattcggcgccactaccggccgtcgtcgtcgtaccggctggctggacgctgtcgcggtacgccgcgcggtgcagattaactccctgtccggcttctgcctgaccaaactggacgtcctggacggcctgaaagaagtaaaaatctgcgtcggctaccgtatgccggacggccgtgaagtgaccaccactccgctggccgccgacaactgggaaggtatcgagcctatctacgaaaccatgccgggttggtccgaaaccactttcggcgtgaaagagcgcagcggtctgccgcaggcagcgctgaactacatccagcgtattgaagagctgaccggcgtgccggttgatatcatctctaccggtcctgaccgtactgagactatgattctgcgcgacccgttcgacgcataa

SEQ ID NO: 108812 - DNA, 198 bp, Enterobacter aerogenes; identical to SEQ ID NO: 108283

SEQ ID NO: 108813 - DNA, 1275 bp, Enterobacter aerogenes
atgcgattctctctcccacgcctgaaaatgccgcagctgggtctgccccggttgaagctgccgcgactgccggggatgtttatttttgcctggctgttcgccgcgctgaaaggttgggtgatgggctcgcgcccgaaagataacgatagcctggtcatgtatgaccggatgctgctgtggttgaccttcggcctggcggcgatcggttttatcatggtgacctcggcatcaatgccggtcggacagcgtctggcgaacgatccgttcctgtttgctaagcgtgatggtctgtacattgtgctggccttcgcgctggcgatgattacgctccgtctgccgatggagttctggcagcgccacagtaccgcgatgctgatcgcctcgattgtgatgctgctgatcgtactggtggtggggagttcggttaacggcgcctcgcgttggatcgcgctcgggccgctgcgtattcagccggcggagttcaccaaactgtcgctgttctgctacatcgccaactatctggtgcgtaaagcggatgaggtgcgtaacaacctgcgcggcttcttaaagccgatgggcgtgattttcgtactggcgattctgctgctggcgcagcctgacctcggtacggtggttgtgttgttcgtcaccacgttggcgatgttgttcctggccggtgcgaagctctggcagtttatcgccattatcggcatggggatctcggcggtggtgctgctgatcctcgccgaaccgtatcgtattcgccgcgtcacttccttctggaacccgtgggaagacccgtttggcagcggctatcagctgacccaatcgctgatggcctttggtcgcggcgagatgtggggacagggcctcggcaactcggtgcagaaactggagtatttaccggaagcgcacaccgacttcatcttcgccattatcggcgaagaactcggttatatcggtgtggtactcgcgcttttaatggtattcttcgtcgcctttcgcgccatgtcgattggtcgcaaagcgctggagattgaccaccgcttctccggcttcctggcctgtgcaatcggcgtgtggtttagcttccaggcgttggttaacgtcggggcggcggcggggatgctgccgaccaaaggtctgaccctgccattgattagttatggtggttccagtctgctgattatgtcgacggccattatgtttttattgcgaattgattatgaaacgcgcctcgagaaagcgcaggcgtttacacggggtgttcgatga

SEQ ID NO: 108814 - DNA, 1317 bp, Enterobacter aerogenes
atggcagattatcagggtaaaaaagtcgtcattattgggctgggcatgaccggcctgtcatgcgtggactttttcatggcgcgcggcgtaaccccgcgcgtgatggatacccgcgtcgccccagccgggcttgataagctgccggaagccgttgagcgccacgtgggcggtcttaacgacgattggctgctggcggcggatctgattgtcgcaagcccggggattgcccttgcgcacccttcactgagcgccgcggccgacgctggcgtggaaatcgtcggtgatatcgagctgttttgccgcgaggctcaggcgccgattatcgccattaccggctctaacggaaaaagcaccgtcactaccctggtgggcgagatggcgaaggcggcgggcgtgaacgtcggcgttggcggcaatatcggcctgccggcgctgatgttgctggatccggcgcgcgaactgtacgtgcttgaactttccagcttccagctggagacgacctccagcctgaaagccgtcgcggcaaccatcctcaacgtgactgaggaccatatggaccgctatccgctggggctgcagcagtatcgcgcggcgaaactgcgggtctatgaaaatgctaaaacctgcgtggtgaatgccgatgacgcgctgactatgccggtacgcggcgctgacgaacgctgcgtcagcttcggcgtcgatgttggcgactatcaccttaaccgccagcagggcgaaacctggctgcgggtgaagggtgagaaagtgctgaacgtgaaggaaatgaccatcagcggccagcacaactacagcaatgccctggcggcgctggcgctggcggatgccgcgggcttgccgcgcgccagtagcctgaaggcgctgaccaccttcaccggcctggcgcaccgtttccagctggcgctggagcataacggcgtgcgttggatcaatgactccaaggcgaccaacgtcggcagtaccgaggcggcgctgaacggcctgcatctcgacggcacgctgtatctgctgttgggcggcgacggtaaatccgccgacttcacgccgctgaaacgctatcttggtggcgataacgttcgtctgtactgcttcggccgcgacggcgctcaactggcggcgctgcgtccggaaatcgcggtacaaaccgaaaccatggaacaggcgatgcggcagatcgcttcgcaggtcaaatcaggcgatatggtcttactgtcgccagcctgcgcgagcctggaccagtttaaaaactttgaacaacggggcgatgtctttacccgtctggcgaaggagttaggttga

SEQ ID NO: 108815 - DNA, 723 bp, Enterobacter aerogenes
gtgcgcaaagacaccaagggcctgattgcccgctggaagtatttctggatgtcggtgattgcgctgggcgtagcgttcgcgctgtatctggcggggaaagacaccccggcgaccgagctggtagtgccattctttaaggacgtgatgccgcagttgggactgttttacattctgctggcttacttcgtcatcgtcggcaccggcaatgcggtcaacctgaccgacggcctcgacggcctggcgattatgccgaccgtcttcgtcgccgccggctttgcgctggtggcgtgggccaccgggaacatgaacttcgccaactacctgcatattccttatctgcgtcacgccggcgagctggttatcgtctgtacggcgattgtcggcgcgggcctgggtttcctgtggtttaacacctacccggcgcaggtctttatgggtgacgtcggttcgctggcgctcggcggcgcgctgggcattatcgccgtactgctgcgccaggaattcctgctggtgattatgggcggcgttttcgtcgtggaaaccctgtcggttatcctgcaggtcggctcgttcaagctgcgcggccagcgcatcttccgtatggcgccgattcaccaccactatgaactgaaaggctggccggaaccgcgcgttatcgtgcgcttctggattatttcgctgatgctggtgctgattggcctggcgacgctgaaggtacgttaa

SEQ ID NO: 108816 - DNA, 1785 bp, Enterobacter aerogenes; identical to SEQ ID NO: 90982

SEQ ID NO: 108817 - DNA, 1305 bp, Enterobacter aerogenes
atgaaaacccgtacccaacaaatcgaagaattaaacaaagagtggacgaacccgcgctgggaaggcattacccgtccatacagcgcggaagaggtggtgaagttacgcggctcggtgaacccggaatgcacgctggcgcagcttggcgcggcgaaaatgtggcgtctgctgcatggtgaagcgaaaaagggttatatcaacagccttggcgcgttaaccggcggtcaggcgctgcagcaggcgaaggcgggcattgaagccatctacttgtctggctggcaggtcgccgccgacgccaacctggcctccagtatgtacccggatcaatcgttgtacccggctaattcggtgccgtcggtggttgatcggatcaataacaccttccgtcgtgccgatcagatccagtgggcggcggggattgagccgaacgatccgcgttttatcgactatttcctgccgatcgtcgccgatgcggaagccggttttggcggcgtgctgaacgcctttgagctgatgaaatcgatgattgcggccggtgcagcggccgtgcatttcgaagatcagctggcgtcggtgaagaagtgcggacatatgggcggcaaggtgctggtgccgacgcaagaggcgattcagaagctggtcgccgcgcgcctggcggcggatgtgatgggcgtgccgacgctgcttatcgcccgtaccgacgccgatgccgctgacctgattacctcggattgcgatccttacgatcgcgagtttatctccggcgatcgcaccagcgaaggtttttatcgcacccatgccggaatcgaacaggcaatcagccgcggcctggcctacgccccttacgctgacctggtatggtgtgaaacctccaaaccggacattgaacaggcgcgtcgttttgccgaggcgatccacgcccgcttcccgggcaagttgctggcctataactgctcgccatcttttaactggaagaaaaatctcgacgataaaaccatcgccagcttccagcagcagctgtcggatatgggctataaattccagttcattaccctggcgggtattcacagcatgtggttcaacatgttcgacctggcccacgcctacgcgcagggtgaaggcatgcgtcactacgtcgaaaaagttcagcagccggagtttgccgccgggccggaaggctacaccttcgtttcgcatcagcaggaggtgggtaccgggtatttcgataaagtgaccaccattatccagggggggacctcgtcggtaacggcgctgaccggctcgaccgaagaatcgcagttttaa

SEQ ID NO: 108818 - DNA, 333 bp, Enterobacter aerogenes
gtggcggtgcagtacatcgaggcctggatctccggcaacggctgcgtaccgatttacggcctgatggaagatgcggcgacggctgagatttcacgtacctctatctggcagtggatccatcatcagaaaaccctgaacgacggcacaccggttaccaaggcgctgttccgccagtggctggctgaagagctgatggtgattcaggaagagttgggggaacaccgcttcagccacggtcgctttgacgatgcggcgcgactgatggagcaaatcaccacttccgacgaactgatcgacttcctgactctgccaggttaccgcctgctggcgtaa

SEQ ID NO: 108819 - DNA, 684 bp, Enterobacter aerogenes
gtgaagattttgattgtcgaagatgagaagaaaaccggggagtacctgaccaaagggcttaccgaagccggattcgtcgtcgacctggccgacaacggccttaacggttatcacctggcgatgaccagcgactacgatctgctgatcctcgatatcatgctgccggacgtcaacggctgggatatcgtgcgcatgctgcgcgccgccaataaagggatgccgatcctgctgctcaccgcgcttggcactatcgagcatcgggtgaaggggctggagctgggcgccgacgattatctggtgaagccctttgcttttgcggaactgctggcgcgggtgcgcactctgctgcgtcgcggggcggcggtaatagtagaaagccagtttcaggcggccgatctcagcgttgatttggtgagccgcaaggtgacgcgcggcgcgactcgtatcaccctgaccagcaaagagtttaccctgctggagttcttcttgcgccatcagggcgaggtgctaccccgttcgctgatcgcgtcgcaggtgtgggatatgaatttcgacagcgacactaacgccatcgacgtggcggtgaagcggctgcgcgccaaaatcgataacgacttcgagccgaagcttatccagaccgtgcgcggcgtcggctatatgcttgaggtgccggatggccgctaa

SEQ ID NO: 108820 - DNA, 1386 bp, Enterobacter aerogenes
atgcgcccaataaagcttcttactctcagcgtgatattcgccttaaccggctgtttgtcacttgctccggactaccagcgccccgccgcgccggtaccgcagcagttctctctcagccagaacaaactggttaccacgacggcgggctaccaggagaccggttggcgcacctttttcgtcgacccacaggtaaaaagcctgattagtaccgcgctgaccaacaaccgcgatctacggatggcgacgctgaaagtgcaggaagcccgcgcccagtaccgggtgaccgacgccgaccgctacccgcagcttaacggcgacggcagcaccacctatggcggcaagctcaaaggcgacaccaccaccagcagcgattatgccgccggcttgaatctcagctacgacctcgacttctttggccggttgaaaaaccttagcgaggccgaccggcagaacttcttcgccagcgaagaggcgcggcgcgcggtgcatatcctgttgattgctaacgtttcacaaagctacttcaaccagcggctggcggcggcgcagctacaggtggcgaacgacaccttgcagaactatcagcagtcttacgccttcgttgaaaagcagctgctgaccggcagcaccaccgtgctggcgctggaacaggcgcgcgggatgatcgaaagcacccgcgccgatatcgccaaacggcaaggtcaactggcgcaggccaataacgccctgcagctactgctcggcagctatcaacggctgccggacgatagcgccagcagcgcggtggacctgaaaggcgtaaccctgccgccgtcgctctcctcagagatcctgttgcagcggccggatattttagaggccgaacacagcctgctggcggccaacgccaatatcggcgccgcgcgggcggccttcttcccgtcgattaccctgaccagctcgctctctggcagcagcagcgagctctccagcctgtttaacgccggcagcgcgatgtggaacttcatccccaaaattgaactgccgattttcaacgccgggcgcaatcaggccaacctcgatctggcggaaatccgccagcagcagcaggtggtcaactatgaacaaaagattcagtccgcctttaaagaggtggccgacgcgctggccctgcgccaaagcctggccgatcaaattgccgcccagcagcgctatctcgcctcgctgaatatcaccctgcagcgcgccaccgcgctctatcgtcacggcgcggtcagctacatcgaagtcctgagtgcccagcgcgacatttttaccacccgacaaaccctgctggaactcaactattcccgtcaggcgaatgaaatcaccctgttcaccgccctcggcggcggctggatcgaataa

SEQ ID NO: 108821 - DNA, 345 bp, Enterobacter aerogenes
atgaattcactatctaaaatcgtcctgttcacgctgttatccggtgtgatgttcactgcccaggccgccgccccgcacgccggcatggcgatgcatgaacaacccgctgccgcgcagacgcaaagcatcgctggtaaaggcgtcattaaagccattgatatggatagcaaaaaaatcactatcgcccacgacgccatcccggcggtgaactggccgccgatgaccatgcgcttcaccatcacctcgcaaacgcagctcaacaatgtgaaggacggcgacagcgtggacttcaccttcgttcagcagggcaatctgtcgctgttacaggatatccgcgcccaataa

SEQ ID NO: 108822 - DNA, 687 bp, Enterobacter aerogenes; identical to SEQ ID NO: 108196

SEQ ID NO: 108823 - DNA, 657 bp, Enterobacter aerogenes
atgcaaaaactgactcgtgacgaaatggcccagcgcgtcgcccgcgatattccggaaggcgcttacgtcaaccttggtatcggtctgccgacccgcatcgccaactatctacctgccgataaagaggtgttcctgcacagtgaaaacgggctactgggaatggggccgaagccgcagcccggcgaagaggatccagaactgatcaacgcgggtaaagagtatgtcaccctgctgcagggcggctgttttttccaccatggcgactccttcgccatgatgcgcggcggacatctggatatctgcgtgctgggcgcctatcaggtttccgccagcggcgatctcgctaactggagcaccggcgcgccggattcgatcccggcggttggaggggcgatggatttggctatcggcgcccgccaggtgtttgtgatgatggaccatctgacccgcgatggcgaatgcaaactggtcgaacagtgcagctacccgctgaccggcgtcggttgcgtcagccgtatctataccgatctggcggtcatcgatattaccgaccgcggcccggtggtgcgcgaaatctttaacggtctctcctttgaagagctacagcgcatcactccggtggcgctgacttttgaaaaactggcggaaagcgcgtaa

SEQ ID NO: 108824 - DNA, 1203 bp, Enterobacter aerogenes
atgaatcaggcatttatctgtgatgcggtgcgtacgccgtttggccgttttggcggcgcattatccagtatgcgcgccgacgatttggcggcgctgccgctgaaagcgctgctggagcgtaacccgggactcgatccggcgctgatcgacgatgtgatctacggctgcgccaaccaggccggagaagataaccgtaacgtggcgcgcatggcgctgttgctggccgggctgccggagagcgttcccggcagcacgattaaccgcctctgtggttccagtctcgatgcgatcggcgtcgcggcgcgggcgattaaaagcggcgaaactcaactgatgatcgccggtggggtggagagtatgtcgcgcgcgccgtttgtgatgggcaaagccgagagcgcctttagccgctcgatgcagctggaagataccaccatcggctggcgctttattaacccgcagatgaaagcgcagtacggcgtgcactcgatgccggaaactgcggaaaacgtcgccgatgagtttgccatttctcgcgccgaccaggacacttttgcgctacgcagtcagttacgtaccgcggcggcgcaggaagcggggcgtttcgccgatgaactgatcgccgtatcggtgccgcagcgcaaaggtgagccgctgcgtttcagccgcgatgaacatccgcgcagcacctcgctggaggcgctggctaaactgcgcggcgtggtccgcgccgacggcagcgttaccgccggtaacgcctccggcgtcaacgacggcgcctgtgcgctgttgttggccagtgaacaggcgatgtcggcgaatgatttacagccgctggcgcgggttgtcggcgtggcgacggcgggggtggcgccgcggattatgggcttcggcccggcgccggcggtgcgtaaggtgctggcgcaaaccgggctgacgctggcgcagatggatgtcatcgaactgaatgaggcttttgccgcgcaggcgctggcggttacccgtgatttaggtctgccggatgatgccgcccacgttaaccccaacggcggggccattgcgctgggtcatccgctgggggcttccggcggacgtctggcgatgaccgccgcttatcagctgaagcgtaccggcggccgctatgcgctgtgcacgatgtgtatcggcgtgggccaggggattgcgctgattattgaacgcgtttaa

SEQ ID NO: 108825 - DNA, 606 bp, Enterobacter aerogenes; identical to SEQ ID NO: 89322

SEQ ID NO: 108826 - DNA, 789 bp, Enterobacter aerogenes
atgaattttgtcatgaataatcaatctcttaaattcgcgcgccgttggcttaaacccgtcgcctgtggcctgttttttattgcccagatcaatgcttcgtgggcgggtattgcgctcgaccgtacacgcatgattatcaccggtgatgctcgctcggtaagtgcgaacttaaccaacaccagcccgagcattccatttctggctcagtcgtgggtagaggacgcccacggaacaaaaattacctcgccattaatggtcttaccgccgctgcaacggattaacggtgggcagaagggaatcgcccgcgtgacgaaaaccagcggaattaacgcgttgccacaggatcgcgagagtctgttctacctgaacgtgcgtgaaattccgccaaaaccggataagccgaacgtgctgcagctggcgatgcagtcgcggatcaaattgttctatcggccgacagctatcgtgccggaaacgccgggggcggtgtggcaaaaccaactgatctttcacaagcagggtcagcgctggaccgtggataacccaacgccatacttcgtcaccttaatcggcttgagccgcaaacctgaagcccagggcggcggcagactgactgatttcccggggattatgatcccgccaaaatcctctctcgatttcaacgtctcggacgccagcgtcagccagttcagcatgatgtacgtgaacgattttggcggtcaccctgaattgaaattcagctgcacaggcaatgtgtgtaaagcattgccgatggagcaacagccccggtaa

SEQ ID NO: 108827 - DNA, 1776 bp, Enterobacter aerogenes
atgcaggctgcaaaactgacggtcggcgaaatctatttgaattctcaggtttttgattcggtgcgcttcaccggggtcaacctcgccagcgatgagcgtatgctgccgccaaatttgcagggctacgcgcctgaagtgcacggcatcgcccgcagtaatgcgaaggtcaccgtcagtcagcaggggcgtgttatctatcaaaccaccgtccctgcggggccgtttaatattcaggatctgcacggttcggtacgcggtacgttggatgtgcgcgtcgaagagcaggatggcagcgtacaaactttccaggtcaatacggctgatatcccttatctgacgcgtccgggttatgttcgctacaacgccgcggttggtaagccgtcgcgttataaccacgacgttcagggtcctgctttttatagcggcgatttttcctggggggtgagcaatgcatggtcactgtacggcggcgcgttgctcaccggcgagcgctacaacgcctggtcgatggggattggacgggatttaaactggctgggagcgctgtcggccgatgcgacgcaatccgtgagtcgggtgaagcatcaggctgaacaaaaaggcatgtcctttaagctcagctacgccaaaacctttgatgagtacaacagcgcgattacctttgccgggtaccgcttttcacagcgaacctttcgcaccttctcgcagtttctcgacgagcagtatgaaagtaacaacagcgccggcaacgaaaaagagatgtacaccgttaccggcaacaaaaccttttttgctgacgatccgcatttagcgaccacgttataccttacctatacccaccagaactattgggatcgcggttcccaggatcgttacggattatcgatgggacacagtttttccttcgcgggaatccaggggatcagcaccaacctcgcggcttatcgctctgagtatcagggcaaacgggacgacagtctttcgctttcaatttcagtgccatggggcgatggccgctccatggattatgaattacagaacagcggtaaccagaccagccaaatggtttcgtattccgataaccgcgatcgtaataatccgtggcgtttgcgcgcaggggtttccggggaagggcgtacggcatttgatggttattaccagcatcgcagcatgatggcggagctggaatcgaacgtcagctggcagcaatcacgctatttctccgtaggcggcacggtacgcggcggctttacggcgacgcgtcacggcgcggcgttacataacagtcaggcgtcaatgaataccgccagagtgatggttgataccgatggcgttgccaatgtgccgcttaacggcgaacaggcgcactcaaaccgtttcggtattgccgttgtaccggacgtcgtcagttatcacagctttgatacccgtatcgatgtggacgtcatggacgaggatatttccgcgaccaaagcgatcgtgactaacaccctgacggaaggcgccattggctaccagcgctttgccgtcgcgcaggggcaaaaaatgatggcgctgctgcgcctgaaggatggctcggtgccgccgtttggcgccgaagtgtttaacgccaacggcgtcagcgtcgccatggtgatggaaaacggcatggcctggattgcgggggtgaatccgtccgagcgtctttccgttgcctgggctggccgtgcgcagtgtcacttacaggtgccacaacaaatcaacccggaaggtaacgtgctgttgccttgtgaataa

SEQ ID NO: 108828 - DNA, 474 bp, Enterobacter aerogenes
gtgaaatacgatcccgtcaatgccgacacctatcgccgtaacgccgaggcctacaaagagaagatccgccagactatggcgccgctgaaggccgaactggcgaaactgccggcggacaaacgctggctggtcaccagcgaaggcgcattctcctatctggcgcgcgataacggcctgcaggagcgttatctgtggccgattaacgccgaccagcagggcacgccgcagcaggtgcgtaaaaccatcgacaccatgaagaaggagcatatcccgaccatcttcagtgaaagcaccatctccgacaaaccggcgcgacaggtcgcccgtgaagccggcgcccactatggcggcgtactgtatgttgactcactgagcgccgccgacggcccggtgccgacctatcttgacctgctgcgcgtcaccaccgaaaccatcgtcaaagggatcaacgatggcctgaggaaacagtcatga

SEQ ID NO: 108829 - DNA, 498 bp, Enterobacter aerogenes; identical to SEQ ID NO: 91666

SEQ ID NO: 108830 - DNA, 774 bp, Enterobacter aerogenes; identical to SEQ ID NO: 108682

SEQ ID NO: 108831 - DNA, 1065 bp, Enterobacter aerogenes; identical to SEQ ID NO: 108683

SEQ ID NO: 108832 - DNA, 1392 bp, Enterobacter aerogenes
atggccctgttgggcgaaaacggcgccggaaaatcgacgctgattaaagcgctcaccggcgtgtaccatgccgaacgcggggcgatttggctggaagggcagcagatatcgccgaaaaacaccgcccacgctcagcagttgggtatcggcaccgtttaccaggaagttaacctgctgccgaatatgtcggtggcggataacctgtttattggccgcgaaccgaagcgctttggcctgctgcggcgcaaagagatggaaaagcgcgccaccgcgctgatggcctcctatggattctcgctcgacgtgcgcgaaccgctgaaccgtttttcggtggcgatgcagcaaatcgtcgccatctgccgggccatcgacctgtcggcgaaagtcttgatcctcgatgaaccgaccgccagcctggacactcaggaagtggagatgttgttcaccctgatgcgccagctgcgcgataacggcgtcagcctgatttttgtgacccactttctcgaccaggtctatgccgtcagtgaccgtattaccgtgctgcgcaatggcagtttcgtcggctgtcgggagacccgcgagctgccgcaaatcgacctggtcaaaatgatgctggggcgcgagctggaccatcaggcgctgcagcgcgccgggcgcacgctgcttagcgataagccggtggcggcatttgaagattttggcaagaagggcacgattgcgccgtttactctgcaggtgcggccgggcgagatcgtcggcctggccgggctgttgggatccgggcgcaccgaaacggcggaggtcatttttggcatcaagcctgccgacagcggtaaagcgtggatcaagggcaagccgcaaacgctgcgctcgccgcatcaggcttcctgcctcggcattggcttctgtccggaagatcgtaaaaccgacggcatcatcgccgctgcttcggtgcgggaaaatatcgtgctggcgctgcaggcgcagcgcggctggctgcggccgatcccgcgccgtgaacagcatgagatcgccgaacgctttattcgccagctaggcattcgcactcccagcgctgaacaaccgatcgaatttctctccggcggcaaccagcagaaggtattgctgtcgcgctggctgctgaccaaaccccagttcctgatcctcgatgagccgacgcgcggtatcgatgtcggcgcccacgccgagattattcgcctgatagaaaccctctgcgccgatggcctggcgctgctggttatctcctccgaactggaagagctggtgggctacgccgaccgggtgatcattatgcgcgatcgccagcaggtggcggaaatcccgcttgccgagctatcggtcccggcgatcatgaacgcgattgcggcataa

SEQ ID NO: 108833 - DNA, 1023 bp, Enterobacter aerogenes
atgcccagaaccgtaccacaaagcggacagccaaaacggcgctttagctggccgaaagggatgccgcaaattatcgctctcctgctggtattagcggtggatagcctggtggcgccgcatttcttccaggtgctgctgcaggatgggcggctgtttggtagcccgattgacattctcaaccgcgcggcgccggtggcgctgctggcgattggcatgacgctggtcatcgccaccggcggcatcgatctgtcggtcggtgcggtgatggctatcgccggggcgaccgccgcctcaatgaccgtcgccgggcacagcctgccggtggtgctgctcgccgcattgggcgcaggcgcgctggccggcctgtggaacggcattttggtggccgtgctgaagatccagccttttgtggccacgcttatcctgatggtcgccgggcgcggcgtcgcgcagctgattacctccgggcagatagtcacctttgattcaccggcgctttcctggctcggcagcggctccctgttgctgctgccgacgccggtgattattgccgtcgcaacgctactgttgttctggctgtttacccgccggaccgcgctcggcatgtttattgaggcggtggggatcaatatccgtgcggcaaaaaatgccggggtgaatacccgcatcgtggtgatgctggcctatgtactaagcggtatttgcgcggcgattgccggcattatcgtcgcggcggatatccgcggcgccgacgccaacaacgccggattgtggctggagctggacgccatcctggcggtggtgatcggcggcggttcgctgatgggcgggcgcttcaatctgctgctgtcggtggtgggggcgttgattatccaggggatgaacaccgggattttactctccggtttcccgccggagctcaaccaggtggtgaaagcggtggtggtgctgtgcgtactgatcgttcagtcgccgcgctttatcggtctactgaaaggggtacgcggccgtgataaaacgtaa

SEQ ID NO: 108834 - DNA, 2499 bp, Enterobacter aerogenes
gtgaaagcgtccagctggtaccaacgtattgccctgacgctgacgaatcactattcgcagtccgtcgatattaatcagttgaaattaggtttcaccgcgacagcgcatcccgatccgtacagcccatttagcggcaccatgctggggaatcaggcggtaacgctggccagcgacggcggttggccgattgaaaaaaataccatcacaatcaataacgacggcgagtatctgttggcttccggtaaatcggcggtgctggagttttatctttcggctacgcaaacgcccgtcgcgcttagcgatctgacggcgacgctggcccatgatcctggacgccagggacaaatcattgtgcaattcccgacgcaggcgcagagcacctcgctgaagccggagatcgaactgcagtatccggatggccgccagcagcgctttgccggtgaatggggcgcttcgctaaccatcggcgatctgagcgctggtcgttatggtatgactgtactggagttgtgtaacgatgaaatgaggatttcacctgttactgaaaactatgcgttgacactctcgtccggtaacgccgttgaacggtgccagattgcttatcagccagcggtgctctttgccgcgatcgagctgctactggcggatgatgaactggaaggcgcggaagtcgtcgttgagctgtggtcggaagcaggcgtgcgcgaacgtactctgacgctgatggcgaatcaaccgcagcgcgtcactcggctattagcaaatcatcaatatgctatttgcctgcagccgacgacgatgaacaaccagttgctgacaacgcctgcggagcctgcgaccttcgtgccgaaggtaggcacgacggctcaggcagacgttgcgctacaaaaaacgcccgttgcgagcgataactttgttgaagtcgcggtgacggtattaggcttaccacagggtacggcagctcaacgctatcgtttccgctgcgacagctaccagtacagtttcgtgctggccagtgacactcgccagcagaagctgccgctgcgtttatctgccggggaatatagcgtgcaggtagcagatgtatacatcgccggtacgccgtggcgctgtgatgtcagcgcgccgttgcgtttgctgcaaagcgttaataacgtcacgcttgagtttatccagggcgttccgttgcaggtgaaaggttggccgaattatctggcacacggcggcgtgacggtgaatgcggcggagacgatcgatctttatcgtggcgtgccgttcagcgcgctgtttaaatatgatggttttgatggcggcggcgatccgattccggcggcggaagtggacactaacggcgatggcttccttgattatgcctcactaccgatccataaaaccgtgcctttggttcgcgagatcgaggccgacgccggccgtgcggtgatgccggtgatggtggtctataccgccaatgccagcggcggcagcgcggtatcggacctgcaggacgaacagcgtctacgcaatcactttggtagcttcattacccagtgtctggcggcgcaatcctggaaagatgaccagcatccggttccggcaacctttgtcctgaatccagacttccttggcgccatgcagcaggagccttatggctataccgcgctgcgtaaggccaatagcgtacaggtcaatgtccaactggcggcggcgattaatgcgcttccttcgatgccagggttcagcgcgccgacgctgccgactttcagcaacgatttgtacggctacgtacaggcgattaactatatcgttcgccagttcgcgccggacatcgctttcggctggcagaccaacgtttgggcgacgggcacggcagattggctgctgcgcgccaatgccgcgccgcgggaacaaggggcggcgatcgctgacttcattaatgaactgggcgtgtacggcggcgactatgcgccagattttatcgtatttgataaattcgaacgcgactgcttcagcccggatgccttagcccactacggctggaacgctacctgctggatgaactatctgggcatggtgaaggagaccgccagagcattgcagaaaccggcgatgttgtggcagatccccggcggccatatgccgacggttgcggaagggaccagtaaaatcgctgcggcgcattttgcgtcaggcggtactttcttcatgggggattcgcggattggcagcgatatcgacaccattatcccggcgctgttaaataccgcggtgaacagcacgacctatggcgtcgcgacggtgggtgattttctgcgtcgcgatggcggatatgattggagccagatgcaggcgttaaatctgccggactataacgtttttgccgtgctgtggggcggcggttcgaccgtcagtatcaccactattcattccaacggtgaagatggcggttggttgtcagagaaaatggcggagtactacgcagcgccccgctactttagttaa

SEQ ID NO: 108835 - DNA, 1116 bp, Enterobacter aerogenes
atgtctttaaaacttaaaaagttgactctgcattttgcaatagcaggttgtttgagcgcggcattttatgcacaggcggatgtgaagattggcgtggccggcccatttaccgggccgaatgcgacctatggcgcccaatactggaaaggggcatcgcaggcggcggcggatattaatgccgccgggggaattaaaggcgaaaaaattgtgctggtgcagggcgatgatgcctgtgaacccaagcaggcagtggcggtggctaaccgcctggttgatgattccggcgtctcggcggtggtgggccatttctgctcttcctcgacgatgcccgcctccgaggtctatgacgaagccgggatcctgaccatcacgccaggctccaccaatccgcagatcaccgaacgcggaatgaaagatatgttccgcatgtgcgggcgcgatgaccagcaaggggtgattgccgccaactacatgctggatgtgctgaaggcgaagaagatcgccgtcattcacgataaagatacctacggtcagggcttagccgatgcgacgcgcgcggcgctcgctaaacgcgggacgaaagaggtgttgtatgaaggcttatcccgcggggaaaaagatttcaatgccctggtaaccaaaatcggcgccctgaaaccggatgtggtttattttggcggctgccatccggaagccggcccgctggtgcgccagatgcgcgagcagggcgtccaggctaagttcttctccggcgactgcgtggtgaccgaagagttggttaccgccgcgggcgggccgcagtttactaatggtgtgttaatgaccttcggtaaggatccgcgcaccattcctgaaggtaaagcggtgatcgacaaattccgcgccagcggttttgaaccggagggctataccctttacgcctatgcgtccattcaggctatcgccgccgcctataacgccgccggtaccgataatgccaaagccagcgaatggctgaaaaaccacagcgtcgataccgtgatggggaaaaaggcctgggatggcaaaggcgacctgaaagtatcggattacgtggtttatcaatgggatgataaaggcaaatatcatcagctgtaa

SEQ ID NO: 108836 - DNA, 279 bp, Enterobacter aerogenes; identical to SEQ ID NO: 88010

SEQ ID NO: 108837 - DNA, 186 bp, Enterobacter aerogenes
atgatgaaggattatctgatcatcgcctggattactattgtcgcctgctggcccattacgttaccggtgttagccgtggtcgcgggaatactattttattcccgccatcgcgtggcgggtgttgtggtatccgggctgtttatcctcgaagccgtggcggcatggcagtttgagcgctatatgtaa

SEQ ID NO: 108838 - DNA, 579 bp, Enterobacter aerogenes
atgcagcatctcctgcatccggtgcatggattcggggccgcgcggttggttttcatcgttattcaactgcggatagtgcgcctccatctcacgcttgcgctgttgtgcatcattctccatttcctgcgcctgacgctccatgtcggcgataaactccggcaggtcttcaagcttaggcaacgtgggttcgtcgatatccgccaacaggctatcgatatcaccgccgctgtcttcaatggcggcgcggtgctgttcacgcagcagacgagcgcggtttttcatattctcctgctgcggactcggcgactgttcaatttcattgtcgatccacggaccgatgttctcttccggtatgagatccttttcgcggaaggagaagagcgcgcccttctctttatccattcgctgggccagtaccttgcgatagtgattaagcgaacgggcggcgccctctttttccagcgccgggatcagctgcaggacgtcggcggcatcgtcttcattgatacgaatgtgcccctgccagataagcatcatctgttcccgatggggaaaaaaccataccgtggtggcgcgtaa

SEQ ID NO: 108839 - DNA, 372 bp, Enterobacter aerogenes; identical to SEQ ID NO: 87903

SEQ ID NO: 108840 - DNA, 702 bp, Enterobacter aerogenes
atgctgggtttgatgcagcgcacatttcgtttctgttccaaccgtggggtaattaacgtgaaccctattgaaagccttagacgatcagatgtagggctcacagcagctgtaaaagaccgcaggttaagtgatgatgaaatcattacagtttggaatgccctgcctcagatgaaatataggcagcaattgataatgaagtttctcattatgactgggtgtcgaagtacagagatcagaacagcgaaatgggaatggtttgatttcaaggaacaaacatggactatcccggcaagtgactataaaactgggaagtcggtgagaagggcgcttcctgaggctgtaatacagatgatggtagctgaaaaagaaacatcagtttcaaaacatgttgtgacgttgtcacgatacaaggggccagaagatgacaggccgccacttcaaccaaacgtggctctgttctctgcgcagattattgcaaaaacagggatgaaaccttggtcgcttcatgatctgagaagaacagtggcgacgcgcctttctgaattaggtgcaccaccacatgttgtggaaaagctactagggcatcatatgtctggagtcatggcgcggtataacctccacgattatttggatgatcagcgtcattggctagctgtttggcagcgtcatcttgagaagttgattggccagcctctggtttga

SEQ ID NO: 108841 - DNA, 342 bp, Enterobacter aerogenes
atgattggaatactcaaaccggtccaggaatcacaatggcctgtaaggtgccacgatcctaagcggagcaacgtctgggctaactcttattttctggtccaggagtttcaggaagaaaacggcgttatccgtctatcagtgaatgccaccagcattgccagctcaggccggtggaaagatggcatcagttgggatgcgctgcaggagataaagtcagctgtcggttacggagatcgtgatgccgtagaaatatatccgcgggattcagacatcgttaacgtggcgaacatgcgccatttgtggattacaccggagccaatctcttttgcctggcgtaaataa

SEQ ID NO: 108842 - DNA, 690 bp, Enterobacter aerogenes
gtgaaagaacgcggaatgatttttaacggtgagatggttcgcgccattctcgacggccggaagacgcagaccaggctgatcatgaaggtgcagcctgagccatcgaaatcgcgaccaggtgatttttggttttcatcgaaaaaattagaaagcatggtgcacatttctgactttgcgccgggtaactcacctattgccgattatcaccttttcattcaggagcattgctgcccgtttggtgctgtcggcggccgcatctgggtgcgtgagacgtgggcgcgctacaacatcgaccagaacagccacgacttagcgtaccgcgccacaactccagcagactggccagaagaaggccgctggcgtcccagcatccacatgccgcgctgggccagcagtattctgctggaaataaccaatgtgcggattgagcggctgaacgctattagcccggaagatgcagagtcagaggggctggagcgtaccaactttacaggtttcggcgacgagcctggattacctagctatccagagccggatgtttatttcgacccactgaagaaacagtggaaggaatatccgcctgaagcattcgcggggctatgggaatccatctacggcgaaggaagttggaaggccaacccttgggtgtgggttatcgagttcaagcgcgtagaaggcggtgcagcatga

SEQ ID NO: 108843 - DNA, 699 bp, Enterobacter aerogenes
gtgcgttacgacatcgccgtagaggatccacgctatatcaaagaactggcgacccaccacgtcggtggctatctgaagatcgctccggagcataccgaagaggggccgctgtcgaagatgatgaagccgggcatgggcagctatgaccgctttaaagaattgtttgatacctattcgaagcaggcgggtaaagaacagtacctgatcccgtactttatttccgctcacccagggacgcgcgatgaagatatggtgaacctggcactgtggctgaagcgtcatcgcttccgtctagaccaggtacagaatttctacccgtcgccgctggcgaactcaaccaccatgtattacaccggcaagaacccgctgggtaaaatcggctataagagtgaagatgtggtggtgccgaagggcgacaaacagcgccgtctgcataaagcgctgctgcgctatcacgatccggcaaactggccgctgatccgtcaggcgctggaagcgatgggtaaaaagcatctgattggttcacgccgtgactgcctggtgccggcgccgacgctggacgagatgcgtgaagcgcgtcgccagaatcgccatacccgtccggcgctgacgaagcatacgccggttgcgcatcagcgccagacgccagccgcctcgggggcgaaaaagcgtatcaagccgaagacggcgtcccgctaa

SEQ ID NO: 108844 - DNA, 528 bp, Enterobacter aerogenes
atgacgccggtaatcctgtcacgacagcagctggataggttgtgggagatagaccgcagcgaaattatcgacaccctttataagctcgataatggccaactccaggcgtacccgcagtattatgatgtgcgaggttgggatcctcacgatcgccaggtttatacgcctattcacgaggcctgctacgatcgcggcggtatatttttcgcctttttcgagcagaataaaatcattgccgcggcggcgatggataccttgccaaggggggaaaagggcgatctgcgccaactgttattcttttatgtgggcgcggcgcagcgcggccagggatgggggcgacgtctgtttgactatgcgctgcagcagcttcctgctctgggcgcatcaggcctgtatatttcgtccatccccaacaaaagcaccgttgatttttatctctcacagggctgtcgtttaattgatgagcccgacccggagctgtttgctctggagcctgaggatattcatttaatttgcgaaagcctttag

SEQ ID NO: 108845 - DNA, 828 bp, Enterobacter aerogenes
atgacacatccaaccgttataaaactacacgacggcaacctgatgccgcagttgggtctcggcgtgtggaaagcaggcaacgaggaagtcgtctccgccattcataaggcgctggaagtcggttatcgttcttttgacaccgccgccgcgtaccaaaatgaggctggcgtcggcaacgcgttaagcagcgcgggcgtcaatcgcgatgagctcttcatcactaccaaactgtggaacgacgatcaaaaacggccgcatgaagcgctaaaagagagcctgagcaagctgaaactggactatgtggatctctatttaattcactggccggtgccagcgataggccattacgtcgaagcctggcaggcgctgatcgaattgcagcagcaagggctggcaaaaagcattggggtatgtaatttccaggtgccacatctgcaaaagctgattgatgaaaccggcgtcgctccggtgatcaaccagattgagctccacccgttaatgcagcagcgtcaactgcatgcatggaacgccacccataaaatccagaccgaatcctggagcccattagcgcagggcggtaaaggggtcttcgatcagaaaattattcaccatctggcggataaatacggaaaaacgccagcgcaaatcgtcattcgctggcatctcgacagcggactggtggtgatcccgaaatccgtcacgccatcgcgtattgcggaaaactttgacgtctgggacttccgtcttgataaagacgaactcggtgaaatcgctaagctggaccagggcaaacgtctcggccccgacccggatcagttcggcggttaa

SEQ ID NO: 108846 - DNA, 513 bp, Enterobacter aerogenes; identical to SEQ ID NO: 108163

SEQ ID NO: 108847 - DNA, 549 bp, Enterobacter aerogenes; identical to SEQ ID NO: 89286

SEQ ID NO: 108848 - DNA, 597 bp, Enterobacter aerogenes
gtgaaccgacgtcgttttctcaccgccaaagaagttcaggcaatgatgcaggcggcccagcacggcccaaccggcgaacgggattactgtctgatcctgctggcatttcgccacgggatgcgtatcagcgaattacttgatctgcactatcgcgatctcgaccttaacgaaggacgcatcaatgttcgccgcttaaagaacggtttctctaccgtacatccgctgcgttttgatgaacgcgaagcgatagaacgctggacacagcaacgggccggctggaaggcagcaggcaaaagcgacgctctatttatctcgcgccgcggcaccccgctttcacggcaacaggcctatcgcattatccgcgccgccggggaagaagcgggaaccgtgacgcatacgcatccgcatatgctgcgtcatgcctgcggctatgaactggcggaaagaggagctgatacccgtttgatacaagattatctcggacatcgtaatattcgtcatactgtccgttataccgccagtaatgcagcgcgttttgccgggatttgggaaagaaacaatctgttagaggaaaatttacaagcgcggaagaaatag

SEQ ID NO: 108849 - DNA, 1227 bp, Enterobacter aerogenes
atgacgatcggcctgctgattatgctcaccctgtacggcggttggctaacatgggtcgtcgttggctttaccttatgttacgcccttatgcgtctgggaacttatcgcttctatcgccgcgttgctgaagaacaggtaatcaaaggcgcgcgctccagttcacactttatggagtcgctatacggtatttcgaccatcaaagcgctgaacctgaaagagcgccgctctcagcactggctgaatatcaacatcgacgcctgtaatgcggggatcaaacagacccgtttcgacatgatgtttagcggtatcaatacctttattaccgccatcgatcaggttgcggtactgtggctgggcgccattatggttattgataatgaaatgaccctcggtatgtttatggcttttaacgcctaccggggccagttctcccagcgcgcatccagcctggttgatcttaccatgcagctacgcatgctctcgctgcataacgagcgtctttcagagatcgtcttcagcgaaccagagcaagagctaccgtcacgtgaagtcttttcgaaggatgccggcgccaggcttgaagtcagaaatctcagctatcaatacgatcccttttcgcagccgattttctcaaatctgaacatcaccgttgagccgggggaatccgtcgcgctggtcggcccgtccggcgtcggtaagaccacgctattgaaagtgatgtgcgggctgctctcgcccaccagcggcgacgtcttcgccgataatctcgatatccagaagataggtctaaataactatcgccagggaaccgcctgcgtgctgcaggaagaccgcctcttttccgggtcgcttatcgataatatcagcggttttgaagataacgccgatgtggattttgtcgtcgaatgcgccaaacgctgcaacattcacgacgaaattatgaaaatgccgatgggctatgaaaccatcgttggtgagttgggcctggggatttccgggggccaaaagcaacgtattttgattgcccgcgcgctttaccgtaaaccgagcattctgtttatggatgaggccaccagccatcttgatttaagaaatgagtcggttatcaaccagtctatttcaggcctcagtattacccgcgtcatcgtcgcccaccgcccgtcaaccatcgcctctgccgatcgggttattgatttatcgcagtcaagaataccaatgccagcgtaa

SEQ ID NO: 108850 - DNA, 870 bp, Enterobacter aerogenes
atgcaaggaacgtttattggttttaacaccgccggaattacctacgaagaccatttcatggcgctgctgctgaaagtaaaacatcggaatggcatgtttcagacgtactatttgcaggcgccggtgctggctgacctgctcatggtcctggcaaaccggatgtctattttcttgcagagattacagcaggatggcgagaatgaggctcagaaagtggagcttcttgcctacaatgaaacgctaatagccaacacgccagagatagatatgttggaggtacaaaaccccaacccggagctgcgaatcatgtcgatcaccctgaaaccaggggaaacagaatcgacgctgatattaatgctgcagaacgagcaaatagcaactctacggattgatgaccgccaggtcgaagcgctgatattggggatccaacaatctctcaccatggccgcggacaagaaactgaatgaatatttagctttggctctggacttcgtaccgctgtataccgtcgatttaacgacccaacctaatatcgagtaccagcaatacgctcaggaagagtggaagttaaatctgttcaaccatcatcttggcgtgctgtatagctacgagcaggaagagggtaaaaaagtactctctggcgcggtgattaaaaccagcgccgcgcatcagtcagattttgaaaaaagtatcgcgctacgtctgattgaaaagagccagaagctaaaacaagttcacaaccaacatacaccgtatcaaatcttcagcaaggtgattccatccgcaccgggacaaatgctgactaaggatgaatgcttaaagtcattgcacgaattctacgtggctaccaaagcagcgcttgaggcataa

SEQ ID NO: 108851 - DNA, 1302 bp, Enterobacter aerogenes
atgcgtaaaattaaagggttacgttggtatatgatcgcactggtgacgctgggcaccgtgctgggttacctgactcgtaacaccgtagcggcggctgcgccgacgctgatggaagagttgcacatttcaacccaacaatattcttatatcatcgccgcctactccgctgcatataccgttatgcagccggttgccggctatgtgctcgatgtgcttggcaccaaaattggctacgccttctttgctatcgcctgggcggtattctgcggttcaacggcgctggcaggcagctggggcggcctggcgctggcccgcggcgcggtcggcgcagcggaagcggcgatgatccctgccggtctgaaagccagctccgaatggttcccggcgaaagagcgttccatcgccgtcggctatttcaacgtcggctcttctatcggcgcgatgattgctccgccgctggtggtatgggcgattgtcatgcatagctggcagatggcatttattatttccggggtactgagcttcgcctgggcaatggcctggctgattttctacaaacacccgcgcgatcagaaaaaactcaccgatgaagaacgtgactacatcatcggcggccaggaatctcagcatcagaccaataacgcgaagaaaatgtcgccgtggcagatcctgcgtaaccgccagttctggggtattgcgctgccgcgcttcctcgcagaaccggcctggggtaccttcaacgcctggatcccgctgttcatgtttaaggtttacggctttaacctgaaagagatcgccatgttcgcctggatgccgatgctgttcgccgacctcggctgcatcgtcggcggctacctgccgccgctgttccagcgctggtttggcgtgaatcttatcgtctcacgtaaaatggtcgtgacgatgggcgccctgctgatgattggtcctggcatgattggcctgttcaccagcccgtatgtggcgatcgcgctgctgtgcgttggcggttttgctcaccaggccttgtccggtgcgctgatcaccctctcttccgacgtctttggccgtaacgaagtggcgaccgccaacggtctgaccgggatggcggcatggctggccagcaccctattcgcgctggtcgtcggcgcgctggcggataccatcggcttcagcccgctgttcgcggtgctggcggtcttcgacctgctgggcgcgctggttatctggacggtgctgaaaaacaaatcggccgacgatgactcgacgccgctcaataccagtaaaccggtgacgcaaagctaa

SEQ ID NO: 108852 - DNA, 588 bp, Enterobacter aerogenes
atgagtattttcccgtccccgcgtgctgtggtagcgacatcctgtgctgaaccgcgtgcgcaagctatcgcgctaagcagcctattcgcggcaggcgcgctgttattgagcgtttccgccattattggcgctatcgctagtttagcgttgctgctggcgctgacgggggcttttgctgttggctatgcaatcgcgcgttggcagccgtggccagcgcattatagcgtgacaatatcgtgttatgcctttgtgctgtccgctataggttggttgctggttctggtgatatggaatagcgaacacggttggctggagctcattccgggaatcgtctttggtggattagggctgggcattgtctggcaaacccatgcggcagaaagaggtttgttggggatgatgccgaacatcccgatgatagcgagtatcgtttttattaccctggcgattctgctaaccaatcactatgccgatccaggaaagggaggctttgtctacgctctggcggtgctggtggatctggcgttgctgggagcagctctggtgaaaatcaggctgcaggatgagcacagcatcaaatacgaatga

SEQ ID NO: 108853 - DNA, 300 bp, Enterobacter aerogenes
atgaccgccgccagcacgattgagaacaaggtcatgatcgccagcgattgccgcgcagccgccctcgcccgttttctgtcgcgcttgccgaggctgaaggccactaccacggtggtgccaagatcaatcgcggcaaagaacgacatgatgaccatattaaagctgtcggctaaccccaccccggccattgcttctttgccgagccagcttacaaggaaagtactcagcacgcccatcaataatacgcaggcgttttccagcaggatcggtacggcaaggggactgatttcacgccagtag

SEQ ID NO: 108854 - DNA, 588 bp, Enterobacter aerogenes
atgagtattttcctgcacccgcgtgctgcggtagcgacatccggtgctgaactgcctgcgcaagctatcgcgctaagcagcttattcgcggcaggcgcgctgttattgagcatttccgccattatcggcgctatcgccagtttggcgttgctattggcgctggcgggagcttttgctgttggctatgcaatcgcgcgttggcagccgtggccagcgcattatagcgtgacaatatcgtgttatgcctttgtgctgtccactataggttggttgctggttttggtgatatggaatagcgaacacggttggctggggctcattccgggaatcgtctttggtggattagggctgggcattgtctggcaaacccatgcggcagaaagaagttttttgggggtgatgccgaacatcccgacgatagcgggtatcgtttttattaccctggcgattctgctaaccagtcactatgccgattcaggaaagggaggctttgtctatgctctggcggtgctggtggatctggcgttgctgggtgcggtgctggtgaaaatcaggctacaggatgagcacagcatcaaatacgaatga

SEQ ID NO: 108855 - DNA, 300 bp, Enterobacter aerogenes; identical to SEQ ID NO: 108853

SEQ ID NO: 108856 - DNA, 576 bp, Enterobacter aerogenes
gtgcagcagaacctgagcaaaagcaacgtaaaagatatcggcctcggttttgattgccgcgtgctgtatcagcgcgctcagtgcgcgatcaatatcgactcgccgggcgaacgtctgaacgccaacctgagcgcggtatcgcgcgagctggcgaaggtgcgcgacaacggtctgccgcaggaagagttcgatgcgctgattgcgcaaaagaatctcgaactgcaaaaactgttcgccacctatgcccgcacggataccgatatcctgattagccaacgtatgcgttcgctgcaaaatcaggtggtggatatcgcgccggagcagtatcaaaagctgcgccaggagttcctgaactcactgacggtcgacatgttgaaccagtatctgcgccagcagctgtcgcaggatatggcgctggtattgcagcagccgaaaggcgagccggagtacaacatgaaagatctgaaagcgacatgggaaaagctgatggcgccagcacccgctgcggcggtgagcgcgacgccggatacggttgatgcgcataacgaggcgacggatattcccccagcgcagtaa

SEQ ID NO: 108857 - DNA, 930 bp, Enterobacter aerogenes
atgtctaagaaaattgccgtgattggcgaatgcatgattgaactgtcagagaaaaacgcggcggtgaatcgcggtttcggcggcgataccttaaacacatccgtctacatcgcgcgccagaccagcgcggatgccctaagcgtgcactacgtgaccgcgctgggcaccgacaccttcagccagcagatgctggagtcctggcagggcgagcaggtaaaaaccgatctgattcagcgcatggctgaccgtctgcctggcctttactacattgaaacggacgagaccggcgagcgcaccttctactactggcgcaacgaagcggcggccaaattctggctcgaaagcgagcgcgcaggcgccatctgcgaagagctggctacctttgattacctctatctgagcggtatcagcctcgccatcctcagccccgccagtcgggaaaagttgctcaccctgctacgcgaatgccgcgccaacggcgggaaagtgattttcgataacaactaccgtccgcgcctgtgggccagccagcaagagactcgccaggtgtaccagcaaatgctggaatgtaccgatatcgcttttctgacgctggatgatgaagatgcgctgtggggagcggtaccggttgccgaggttatcgcccgcacccacgccgctggcgttgaagaggtggtggtgaagcgcggcgccgactcctgcctggtggcgatcgccggccagccgctgctggaggtgcccgcggtgaagctgccgaaagagaaagtagtggataccacggcggcgggcgattcgttcagcgccggctatctggcggtgcgcctgaccggcggcgacgcggaatccgcggcgaaacgcggacatctcaccgccagcacggttatccaatatcgcggggcgattatcccgcgcgaagcgatgccggactaa

SEQ ID NO: 108858 - DNA, 912 bp, Enterobacter aerogenes; identical to SEQ ID NO: 108445

SEQ ID NO: 108859 - DNA, 495 bp, Enterobacter aerogenes
atgcgctctaccggggaagtgatgggcgtgggccgcaccttcgcggaagcgttcgccaaagcgcaactgggcagcaactccacgatgaagaaacaaggccgcgcgctgctctccgttcgcgaaggcgacaaagagcgtgttgtcgacctagcggcaaaactgctgaaacagggcttcgagctggatgcaacccacggtaccgcgattgttctgggtgaagccggtatcaatccgcgtctggtgaacaaggtgcatgaaggtcgtccgcacattcaggaccgtatcaagaatggcgaatatacctacatcatcaacaccaccgcaggacgtcaggcgattgaagactccaagctgattcgccgcagcgcgctgcaatacaaggtgcattacgacaccaccctgaacggcggcttcgccaccgcgatggcgctgaatgccgatgcgaccgagaaggtgatttcggtgcaggaaatgcacgcgcaaatcactaaataa

SEQ ID NO: 108860 - DNA, 234 bp, Enterobacter aerogenes; identical to SEQ ID NO: 87476

SEQ ID NO: 108861 - DNA, 888 bp, Enterobacter aerogenes
atgctaaacctgcagcgcgttaccatgtttgtcgccgttgttgatgccggaagctttactgccgcggcggcggcgcttgggcagaccaaagcggtggtcagttttaacgttcgccagctagagagtgaactgggggtgacgttgctgctgcgttcgacgcgtcggttaacgctcaccgaagccggggcggtgttttaccagcgcggcgtcgggttgttgaaagccgcggagaatttacaggatgaggtgcgcgccagccacgccgggttaagcggtgaactgcggatcaccaccaccccggaatatggcgcccaggtgattatcccggcactggcggaatttgctcgtcgacatccggcgttgcgggtgcgtcacgtctcatcgtcttatcacgcggatttgatctctgaacgttttgatgtcgcgatacgcctcgggaccctggccgattcgcgctatcacgcggcccggatttcgcgttttgccatcgtgcccgtggcctcgccgatttggctggataaacatccgctacgcacgcttgccgaccttgcgcaggcggagtggatagttaacgagcgcttagcgacgccgctgcgctggcagctcctgaccgccgaagggcaatcgttcgcttttgaaattacgcaaccaccgcagatctcagccgatagcgcacaagtgttaatgggcttcgcgctggcgggaagcggagtggcgctactcccggagtggctggtggccgacgctatcgcgcggcaggagctggtgcgggtagtgccagagtatatttttccatcgcagggggtatacgccgtctacccggacgcgcagcatgtgccaaccaaggtccgggcatttatcgattttctgcgcgaacgaaccgcttaa

SEQ ID NO: 108862 - DNA, 420 bp, Enterobacter aerogenes
atggagttacgtaacgaggcgttccaccttctacgccagctttttcaacagcataccgcgcgctggcagcatgaattaccggaactgaccaagccgcaatacgcggtgatgcgctcggtcgccgaacatcctggtatcgagcaggtgacgcttatcgaagcggccgtcagcacaaaagcgacgctggcggagatgcttagccggatggagaaacgcgggctggtacgccgcgaacacgatccgagcgataaacgtcgccgctttgtctatctgacgaatgaagggcaggcgctgctggcaaattccatgccgcaaggcaatcgggtcgatgaagagtttttgagccgccttaacgaagaggagcgcgcgcagttttcccggctggtgctgaaaatgatggaaaataaaaacgcggattaa

SEQ ID NO: 108863 - DNA, 738 bp, Enterobacter aerogenes
gtgacgcaaaatagcggtatcagcggcacgttgttggatcaaaacaacctgagctatagcgtccagcagggctatcagaatcagggggttggcgcgagcggctccgccagcctcgaatacgacggggcaaagggcaacctgaatgtcggctacaacaacagcaaccatggtgattatcggcaactgaactatggcctcagcggcggcatggttgcgcatgctcatggtctgaccctcagccagccgttgggcgataccaatgttcttatcgccgtgccgggagcagggaatgtcaatatcgaagatcaaccggggatccacaccgatagccgcggctacgcggtggtaccgtatgccactacttaccgccagaatcgcatggcgctggacatcaactcgctaaaagacgatgtcgatatcgatgatgcggtgatcaatgtcgttcccacccaaggggcgttggtgctggccaactttaccgcccggatcggcgagcgcgcgctattgacgctaagccattacgggaaaccgctgccgtttggcgccacggtatccattgctggcgcggcggaagaaggcatcgttggcgacgatggcgaggtgtatctctcaggccttagcccgcagggcacgctgaaagcacaatgggggccgcagcctgaccaacaatgtctcactcattatcatctccctgacgttagccagcctttggcgcgtcagcatctggaatgtcgctaa

SEQ ID NO: 108864 - DNA, 738 bp, Enterobacter aerogenes
gtgacgcaaaatagcggtatcagcggcacgttgttggatcaaaacaacctgagctatagcgtccagcagggctatcagaatcagggggttggcgcgagcggctccgccagcctcgaatacgacggggcaaagggcaacctgaatgtcggctacaacaacagcaaccatggtgattatcggcaactgaactatggcctcagcggcggcatggttgcgcatgctcatggtctgaccctcagccagccgttgggcgacaccaatgttcttatcgccgtgccgggggcagggaatgtcaatatcgaagatcagccggggatccacaccgatggccgcggctacgcgatggtaccgtatgccactacttaccgccagaatcgcatggcgctggacgtcaactcgctaaaagacgatgtcgatatcgatgatgcggtgatcaatgtcgttcccacccaaggggcgttggtgctggccaactttaccgcccggatcggcgagcgcgcgctattgacgctaagccattacgggaaaccgctgccgtttggcgctacggtatccattgctggcgcggcggaagaaggcatcgttggcgacgatggcgaagtgtatctctcaggccttagcccgcagggcacgctgaaagcacaatgggggccgcagcctgaccaacaatgtctcactcattatcatctccctgacgttagccagcctttggtgcgtcagcatctggaatgtcgctaa

SEQ ID NO: 108865 - DNA, 999 bp, Enterobacter aerogenes
atggataccctggcgcaggtagtccatcgccgccaggtgctctttccacagggaatccagcgtttgcagcatgacgcctttctcgaagtgacgcatcatttcggcgccgaccacttcttctttacgctggtaggtttctaccgcgctctgcagaatacgttcacgcagggtctcttcgtgcagctccggctctttatccagccactctttgattggcagctcaaggtcgaagtcgtttttcagacgttcctgcaggccttcaatatcccacatctcttccagcgactgcggcgggatatgcgcatcaatagtggctttgaagacgtcttcgcggatgctgttgatggtttcgctcacgtcggagatatccagcagctcattacgctgggtgtaaatagcgcgacgctgatcgttggcgacgtcatcatattccagcagctgtttacggatatcgaagttgcggctttccactttacgctgagcgttagcaatcgctttggtcacccacgggtgctcgatagcttcgcccggcttcatccccagtttacgcatcatgccggatacgcgatcggaggcgaagatacgcatcagagcatcttccatcgacagatagaagcgggaagaaccggcatcaccctgacggccagcacggccacgcagctggttatcgatacgacgggattcatgacgctcggtaccgatgatgtgcaggccacctgcggccagtaccgcatcgtggcgcacctgccagtcagctttgattttttcaatctgctccggcgttggattttccagcgcggcgacttctgcctgccagctaccgccgagcataatatcggtaccacggcccgccatgttggtggcgatggtgaccgcagccggataacccgcctgagcgacgatatccgcttcgctggcgtggaacttggcgttcaggacgttgtgcttgatgccggctttcgtcagttcgcgggaaaccacttcagatttttcgattga

SEQ ID NO: 108866 - DNA, 1014 bp, Enterobacter aerogenes
gtgtcgctggaaaatgttcaggggatcggctggcgtggtattccgcagaaactagccaatgagatacctaacctgtatcaacgcgtgttttatcagcatggtgtggtgggaggcgccccgaactctaagccatttgaattaccgccgcgaaaagaaggggatgcaaaatatgcctttttaacaaatacccgctacaaggcacgcgatgttgtggttaacggcgaggaattaccggaaccttttatttttaaactccagggggaggataaccatccggataatgatccaaaaaccagtgacaagccgtatacgtattatatcgatcctgatagtcctgatgcttacatatcctattcagccaaagccagtacgattaaacgcaccgattctgcaatgtatatgctcgacaattatcagcgtcttagatggaaaccggggcacgtattaacttccgacgaacttaagatggcaagtgttgacaggaagcacacggtcattcatggggaggttcgtggttcaaaagattacccggtgctctctataacctggttgaaaacgcgtgaagagctggaaaaagagtggcagaaaaccgacccgataagctacagccagcactcttccattgtcatgagtgagtttgcgccgtcacatgcgatggcgttcgatttggcaatcggccagtgtaaatcgtttgactacaaagcaggtaaattctgggaaagtctgctgcaccgtgcggactggcgcgatccgttgaatgacctgcccgctgctacagaatattttcgctcaggaaatatttctgatgtcgctacaaaaaactacatgaataaacccgatgaagtactgccgcaaggagaatttggcgtagtgaatgattatgccggtaagcgacctcaaacccgcaggccgaaggatattgatatggggattgtcagatcgaaagactttcaggaaataaagtttttgcagtgggaaatgccaaaacctaaaagcgacggccaactggcctga

SEQ ID NO: 108867 - DNA, 531 bp, Enterobacter aerogenes
atgttgcaatacttaaaccagtgctcacggggacgcggcgcctggctcttgatggcgttaaccgcttttatacttgaattagtggcgctgtggttccagcacgtgatgctgctgcagccctgcgtgttgtgtatttatgaacgctgcgctctgtttggcattatgggcgccggtctggtgggcgctatcgcgccgaaaaccccgttgcgctacgtcgcgctgctgatctggctgtacagcgccctgcgcggtctacagttagcctgggagcacaccatgattcagctgcacccttctccgttccagacctgcgatttcgccgcgcgtttcccgacgtggctgccgctggataaatggctgccgcaggtattcgtcgccaccggcgactgctccgtgcgccagtgggaattcctgacgctggagatgccgcagtggctggtaggcatctttgccgcttatctggtcatcggtctgctggtactgatcgctcagccatttaaggctaaaaaacgcgatctgttcggccgttaa

SEQ ID NO: 108868 - DNA, 1254 bp, Enterobacter aerogenes
atgtttatggtggccgggatctatttcatgaagcagctattgctgtttatttttacccgtctgttgctggggatccgcagcaagatgctgctgtcgctggccttctgccttgcggccgcttttctctccgccttccttgacgcgctcaccgtcgtggcggtggtcattagcgtagcggtcggcttttacggtatttatcatcgcgtcgcctccgcgcggcctgatgataacgacatgcttgatgacagccatatcgatcagcactaccgcgacgtgctcgaacagttccgcagctttttacgcagtctgatgatgcacgccggcgtcggtaccgccctcggcggcgtgatgaccatggtcggagaaccgcagaacctgattatcgccaaagccgccggctggcacttcggtgagttcttcattcgtatgtcgccggtaaccctgccggttatcgtctgcggcctgataacctgcctgctgctggaaaaatttcgtctgttcggctacggcgagccgctgccaataccggtgcgcaaggtattgcaggatttcgacgaccgtagccgccagagccgcagccgccaggatcggatgcgccttatcgctcaagggatcatcggcgtgtggctgattgccgccctcgccctgcatctggcggaagttggcctgattggcctctccgttatcgtgctggcaaccaccttttccggcgtgaccgacgagcacgccatcggtaaagcctttaccgaagcgctgccgtttaccgccctgctgacggtgtttttcgctatcgtggcggtgattatcgatcagcatctgtttgccccggtgattgagttcgtcctgcaggcttcgccgcacgctcagctatcgctgttctatttgtttaatggcctgctgtcgtccatctccgataacgtctttgtcggtacggtgtatatcaacgaagcaaaagcggcgctggaacacggcgttatcagcctgcagcagtttgaaatgctggcggtcgccattaataccggcactaacctaccttccgtcgccacccccaatggccaggcggcatttctgttcctgttgacctcggcgctggcgccgctgatccgcctctcttatggcagaatggtgtggatggcgctgccttataccatcgtgttaacgctggtcggcctgctgtgcgtcgaaaccctgttgatgccggccacccagtggatgctcagccacggctggttgaccaccccaatactgccgtaa

SEQ ID NO: 108869 - DNA, 498 bp, Enterobacter aerogenes
atgaaacgtatccttcttagcgccatcctgctcggcagcctggtcacgaccgctagcgccgcaacgggtgttctcagccagaaaaatttgtcagtggagctcgcggataaaatcgcgcaaagcacgctacaggcctgcgccaaagacggctataacgttgccgtcacgctggtcgaccgttccggtacgccgctattaatgaagagaatggataatgccggcccacacaccgtcgaagccagccgcatgaaagcattcaccgcgctaaccactaaaaacgccaccagcaatgtcatgaaaggttctcagtccaacgccggagccgcgaacctgcgagatatacccggttttctgctattagctggcggagtgccggttaagatgggtgaccaggtcattggcgcggttggcgtcggcggcgcgccggggggaaattttgacgaagcctgtgcgattgccgggttgcaatctatcgaaggcaagcttaaccagggctaa

SEQ ID NO: 108870 - DNA, 618 bp, Enterobacter aerogenes
atggagcagtacatctggttaattgatgacgatgcggcaatacgcgattcattaagtctgctgctctcaaccgttggctggcagacgcaggcgtttgatagcgcatacgcttttcaacatcaggcagggaatctagccgaattaaccggctgtatgctgctggatatccgcatgccggggaaaaccgggctgacgctgctcgatgagtggcgccagctaggtctaaccttgccggttattattatgaccgggcacggtaatattgatttatgtcgtcgcgccttcaaaaatggcgcatttgaatttttaaccaaacccattgatgccgacctgttattcgaagtggtcggcgaagcgatggcgcagcaaaaagcgcatcttgaacgacaacaaatattactgccgctgcaggaaaaactcgccacccttaccgcccgtgagcatgaaatgctccagcagctgcttcagggctactccagtaaagaaatcgcccgtttatgctcgctatcgccgcgtaccgtcgaagcgcatcgcgccaatatttttagcaaacttgaagttaactcgctgcccaaactgttgaagatttacgctgatatagccagtggttctaagtaa

SEQ ID NO: 108871 - DNA, 615 bp, Enterobacter aerogenes
atgagctataaccaggcggcagtgcgcctgattaaaaaaaacgatcccgtaaagatccccgaactgcttgaggcctcagtgttgcagataaaacgcattgacgccctgctcagccagtttcgtctcaagctaaccagcaagcgcgccgaatatcagccggttgaccttccgtcgctgtggctacgcgtgtgcgaattactggataatgagatccgcgccggtaaagttcgtatctccagccattttccgtcggacctacccgcgcttcctgcgccgccgctgtgggtagagcaaatactgcataatatcgttagcaatgccattcaggcacaaagcataaatgttccaggtagtgcgtggattcatctgcaagccgtgcgggtaaataacggtatcgctttaactcttactgatggcggaccagggttatcatctgaagcgctggagcaggtttttataccgttttataccacccgtactgatggtgtgggactcggcatggcccttgcggatacccttgttcagcgtcttaatggcaagatagaagcgagcaatatcaccggacaaggcgcttgcttccggttatggtttccgctgcgcaatgaggagaagtaa

SEQ ID NO: 108872 - DNA, 1221 bp, Enterobacter aerogenes
atgaaataccattcagcaccgctcatcccgcacaaatccgccctcatgtccgcgccggctaatctgctggcggaagaggtctgtctacccgccgcgctgctaaaaaagtcggcgctggaaaataatatttcatggatgcagcgttacgccgacgcccgcggggtgtcgctggcgccgcatggcaaaacgacaatgacgccatggatatttcaggcgcagcagcgagcgggagcgtgggggatcggcgtgggcagcgcctggcaggccagcgcggcgatggccagcggcatccaacgcgtcctgatggtcaatcagctggtcggcaaggccaatatgcaggtggtcgcgcagctaaaagcccactatcgggcagtggattttatctgctgcgtcgatagcgaggctaacgtacgcaccctctccgctttcttcaccgcccagggacaaacgctggatgtgctgattgaacttggcgtgccgggcgggcgctgcggctgtcgtagcgttgatgacgcgctggcgctggcgcagcgggtaagcgatctgccggggttacggctacgcggactggaattgtatgaaggagtgctgcacggcgacgatccacaaccgcaggtggaagcgttattacaacaggccgcggcgcttgcctgccgcatggagtcgctggttgacggcgaatttattctcaccggcgcgggcaccgtctggtatgacgtggtgtgcaacatctggctggcggcggcaaaaccgcgccgctgccgtatcgtcatccgccctggctgttatatcacccacgatcgcgggatctacgatctcgcacaacaagagctgatcgcccgcgatccgattgcctgcgatctcgccggcgatcttacatcagcgctggagctgatggcgatggtgcaatcggtgcctgaggcggatcgcgcggtggtaaacttcggcaagcgcgactgcgctttcgacgccgggctgccgcagccgatcacccattatcgtaacggccagcagttagcgctgcgcgcggagtcgatcgtcagtatcggcatcatggatcagcactgcatgctgcgcctggcgccgggcagcgatgtgcaggtcggcgatattctgctgttcggcacctcgcacccctgtctgacctttgataagtggaagacgttgctgctggtcgatgacgactacaatgtgctggacgagctcgacacgctgttttga

SEQ ID NO: 108873 - DNA, 390 bp, Enterobacter aerogenes
atgagcatgcgcaaccatgccgccgctgaggccatagttcagttgccgataatcaccatggttgctgttgttgtagccgacattcaggttgccctttgccccgtcgtattcgaggctggcggagccgctcgcgccaaccccctgattctgatagccctgctggacgctatagctcaggttgttttgatccaacaacgtgccgctgataccgctattttgcgtcacgccgccgtgtccatcgctactggtggaaaacgtcgcataaacgttatgccgacgctgggtaagatcgtcgccgtgagaaagccactggctgagcggcagcgagatattaagcgccagcgcctggtcgcgttgctcctcgccgggcgcgcggctgctgctatatga

SEQ ID NO: 108874 - DNA, 522 bp, Enterobacter aerogenes
atgttcgctctcatccgccagcgtactgtaggcttgcgtaagatcgacggaaatcgccccccagtcgccgaagttagctccagtgcccagcgccagcgcgcggtaatcggaggaaaactgcgttccgccgtacagcgtaaagccatgcggcaacccccacatcagggtcgcctggccgaaactcacctctcgtttttggctgctatcaccgcgataggtcgccgcggtggcggcatatttcacccgcccctcgcgttgcagaaccggtacggcggcataaggcacgttatagctggagatgctgccgtcggactccttgatctcgacgttgagatcgccgctggaggaggtcggatagagatcgtcgatggtgaatgcgccaggcggtacatagcgctggtcgatggtgtagccgttctgacgtatcgtcacctgagcgttgcttttggcgatgccgtggatagtcggcgcgaagcctttcatgctgtccggcagcatattgtcgtcagacgccagctgtag

SEQ ID NO: 108875 - DNA, 1572 bp, Enterobacter aerogenes
atgagaaaacgtcgggtggttattggcgtactggggacggtgctcgataaacgtggcaagcgcgccaaccgttttcgcaagtggcggccaacggttgggttgtgccaacaagctgaaatgcccattgatcggctggaactactgcatcagccccgtgacatcggcatggcgcagcagctcgccgaagatgtggcgttggtttcgccacagaccgaagtacatccgcatgctgtagccatcgccaatccctgggatttcgaagaggtgtatgccgcctttcttgattttgcgacccgctacccgttcgataccgacaatgaagagtatctggtgcatatcaccactggaacgcacgtggcgcagatctgctggttcctgttgaccgaggcgcgctatctgcccgccagtttgctgcagaccggcccggcgccaaaaggcgccaccgacgagcagatcgcggccggtaccgcctcggttatcgatctggatttaagccgctatgccactctaaccagccgttttcagcgtgaacaacagcagtccgtttcatttcttaaggacgggattgaaacccgcaacgccaccttcaataagcttatcgatcgcattgagcgggtttctctgcgttcaaccgatccgattctactcaccgggcctaccggcgcgggcaaatcctttctcgcgaaacgcattttccagctacgtcagtcacgccacctggtggcgggtaagtttgtcgccatcaactgcgccacgctgcgtggcgataacgccatgtcgacgcttttcggccacgtcaaaggcgcttttactggcgcacaggcggcgcgtagcggcctgctacgcgaggccgatggcggggtgttgtttctcgatgaaattgccgaactgggcctcgatgaacaggcgatgttgttaaaagcgattgaagaaaaaagctttttcccgtttggctccgacaaagaagtgcacagtgattttcaactgattgctggtacccaccgcgacatgcgccagtgggtcgccgatggccgctttcgtgaggatttatacgcgcgtatcaacatgtggagctttgcgctacccggtctggcgcagcgtagagaagatattgcgcccaatattgagtacgaattgcaacgtttctccagcgccagacagcagcaaatacgttttgataaagacgcgcgcgtgcgctatttggctttcgccagttcgccgcaggcccagtggcgcggaaattttcgcgagcttggcgcctcggtgacccgcatggcgaccctcgccgaacagggccgaattacgctggatgtagtcgatgaggaaatttcgcgactgagcgagagctggcagatcaacgatcctcttcccgccgtcatcgacgagatcgatctgttcgatcgccgtcagttggaaacggtgctggaggtttgccgccgcagcgcttcgctatctgaagccggccgtgagttgtttgcggtctcccggctgaaaaaggccaatccgaatgatgccgaccggttacgcaagtacctcgcccgctttggtctcagttgggaaagcctgggctaa

SEQ ID NO: 108876 - DNA, 1245 bp, Enterobacter aerogenes
atgaatacgccatgctttattgtcgttggatataataacgtcagaatttatgatgttgctaaaattcgcgttgaggcacaaaaatattttgacgccaaagttgtattaattactgagaaaaaaacagcaagcgatgagcaatttgctgatctggtgattgaaacaacgcttgaagttacacaactcccggcctcagcggatgtcgttcatcaatatctggcaaccgaatcactttctcccatcggtattttaccattttccgatcgaggtgttcctttgggggcgctgctggcgcaaaagaacagactacccggcgcgctgccagaacaagcaaaagcagggctggataagcaaatattccgtcaactggatgccagggcttcattccatcccgccggttatcggacggtaaccagccagccggtaacatcattgaatgaacttaaagatctggtcgattcgttaggcggtaaggcgtttatcaagccagcgaaggagggcaatagccgcgggtgccaggtgattgagtatattgagcaatgcgagtctatctgggcttcactggcgccttatcgcgaagcagggatcctggtggaatctcttatcgaaaatgcgaaagaatttagttgggatagtgtggcgggtaagcagtggatcacggaaaagcatactactgaaggccactaccgtgcggagtatcaacaggtggtgcctgcctgtttgaccccggcggatgaaatactgctgcgttctgcaggcgaacatatgcgtgaactggtgtcgccgtcgaatggcgcctggcataacgaaatatttttacttcccggcgcgacggccgctgttgaaaccaatatgcgccctgccggtatgcatatttgggatctggcgatgttgagctttgaaaatttcaatccatggctgctgtggctatgttgggctgcggagggtaaatatacggctgagccgctcaaacagaactattactctggtatccgcatgcttcgggcccgcgtatcaggaaccttgcaggcattaccagatgttgagcaattggcattgcaggcgggtattacgcttcatgaagccagcttttcagccaaaatcggcgacatccttaatggcgaaattaagacgaatgccgattttattggccatatcattttgcgcgatagtagccatgagcagttactcaattcattagagacgctggcgacggctattgagtctgccgctgaaattagctaa

SEQ ID NO: 108877 - DNA, 1260 bp, Enterobacter aerogenes
atgggcgtcacccagttctaccagggcgtggagaccgtgcgctcgctgaccagcctcgcgatccttaccggcaacctcggcaagccgagcgtcggcgtcaacccggtacgcgggcagaacaacgtccagggcgcctgcgacatgggcgcactgccggatacctatccgggctaccagtacgttaagttcccggaaaaccgcgagaagttcgccagagcctggggcgtcgacagcctgccggaacataccggctatcgcatcagcgagctgccgcaccgcgccgaacacggtgaagtccgcgcggcgtacattatgggcgaggatccgctgcagaccgatgccgagctttccgcggtgcgcaaggcgtttgaacagctggaactggttatcgtccaggatattttcatgaccaaaaccgccgccgcggccgacgtcatcctgccgtccacctcgtggggcgagcacgaaggcgtgtataccgcagcggaccgcggcttccagcgcttctttaaagcggtggagccgaagtgggacctgaaaaccgactggcagattatcagcgaaatcgccacccggatgggctatccgatgcactacaacaacacccaggagatctgggatgagttgcggcatctgtgcccggacttctacggcgccacctatgagaaaatgggcgagctcggctatgtcatgtggccatgccgcgatgagtccgacgccgaccaggggacgtcgtatctgtttaaagagaagttcgataccccgaacgggctggcgcagttcttcacctgtgactgggtcgcgccgatcgataagctcaccgacgagtatccgatggtgctctcaacggtgcgcgaggtcggccactactcctgccgttcgatgaccggcaactgcgcagcgctggcagcgctggcggatgaaccaggctatgcgcaaatcaacaccgccgacgccgaacggttaggcatcgaagatgaagcgctggtgtgggtcaattcgcgtaagggccgcatcatcacccgcgcgcaggtcagcgatcgaccgaataaaggcgcggtgtacatgacctaccagtggtggatcggcgcctgtaacgagctggtgtcggagaacctgagcccgataaccaaaacgccggagtacaagtactgcgcggttaacgttgaacggattgccgatcagcgcgcggcggaacagtacgtaatcgaggagtacaacaagctgaaagcccgcctgcgcgaaagcgcgatgggttaa

SEQ ID NO: 108878 - DNA, 759 bp, Enterobacter aerogenes
atgttccacgatagtgttgacgccccaaccgccctcttccagcgcattcaggttagtgtgatgggcaacgctttccgcccacggggtaccgaagaagtcataggtcatcaggttaatgccgtacagacctgctttaatcagcgctttcacgttggagtaatcaaaggtcttcacgaccgcggagctggcgatagagattttcacattgctcaggctggcggaatccagttgcttacgcagttcgccaataagcaacgcatagttttcgccatcttccgggccgcaagggttgcccgcgccttcggcattcggatattcccaatcgatatccacttcgctgaacatcgggaactgtttgaacagtttcaccacgcctttggcgaaggttttacgtgcggaatcagacgctgcggtttcatggaagccgttactcatggtccagccgccgatgctcatggacagcaccaggttatggccctgctgtttggctttcgcctgcagatcgcgcagaccgccaagcagacctttacaattttcttgagtcacggtcttcggatcaacatcccagccgctaacgctatgtccaacgttgacgtaagactggaaatcaccccatggatcaaggaaagtcggttcgtacttaactttaccgcactgttccgcgccttcagccacgacgtcacgatattggccatcatttttatggaaaccggtcacgccaacgaagccgaaaataattttatcgtaagcagtcggtga

SEQ ID NO: 108879 - DNA, 222 bp, Enterobacter aerogenes
atgattgacatcagttgccttatcgtcttcttcagattcatctttttctacgttgatgccttcgaagtagaacggttccatatcgatgacttcagattcaatttcataacccagaccttcacgagccgcgttcagcaacacgccattgtcctgatcgatagtccaggtaaacataccacccagacccaggcttgctgcatattcgcccttcgcttttactga

SEQ ID NO: 108880 - DNA, 693 bp, Enterobacter aerogenes
atgaaattaaatggtttcgaaaatgataatgagaatgccttgcactcatatattttctctcagcaggctaaaccccatgcagcgattgacgccttattttcagcgctcttgccctttggcaaatctttcgtcgtgcagtcgggtgaagaattttcgctgtatacagagcagagcagccgcattgtgttgcttgagtccggtatcttctcaatttgccgcagtgatcgaggcttgaacgtgctatcggtctttgccccttcgcttgcagggctgatagatagctacggtgtgacatacgatgttcccacccgcccggagcattttttgattgctgaaacagaatgccgtggtcgtgcagtctcgttagcggattttattaaggtgacggatgagtgcaatctttggcacgacgtagctcgttttctcgcttatcgtctgatggtgatgaacgttcgtgaccgggagctggttggcgttgactcttatcttaaggttcgtgcgttattaatcgaaattgccgcctacaacgacgaatatcgccagagcattaatgttctgaactttattcaacgtcgtaccggaatatcgcggagtcgtaccatgaagcttctttctgaattgcgaaagggcggatatatcaatattgatggtggacgtctgttagggattaaaaaactgccactggcttactag

SEQ ID NO: 108881 - DNA, 258 bp, Enterobacter aerogenes
atgaaaggtgtcattaggttaaatgatccgctggcgggcggaggaaaagtgatcacatcatccggtgctgaatttatgggagcccctgtcaccctgaaaggtgacaaagttcagtgtgctacgcacaaagggactttcgctattactgagtgccaccccttttggacgatgaacggtcgcggtgtggtggtggatggctgtaaagttgaatgtggatgcgcgatacgaacgacgctacaaactgcgggagcggtgtaa

SEQ ID NO: 108882 - DNA, 333 bp, Enterobacter aerogenes
atgcatatcgacagtaatgacgattcggttaatgacgttgtcatcgggcgcagcgatccatttatccaccatgccgtactccggacactcggtaaggtattcgatttcacaggcgttggcgttagggatattcagatgctccagcaccctcctcaatgcatctacacagaagttatctcccccacgtacccagacgataatttcaattccgcggtaattattaccgttcaacatcatagccattggggtaagcaatttcgtgaaaatttgctcattacgggtctgctcgaaaagatcttcaatttctatcctgagtggggttttcggcgctaa

SEQ ID NO: 108883 - DNA, 537 bp, Enterobacter aerogenes
atgcgcctgattcgttacttcttcttattgatcctgctatgcggcaacggttgctatggcgacgatagcggttacaacctggaattcaccgggaccattgtcgcgcaaacctgcgatgtcgaaatttccagcctcagccagagtatcgatttaggtcagttctcagtggcagattttccctctaccggtacgacgacgaagttcaagccgttcaacatcaacctgaaaaactgctcgcgcggcattaccggcagcaaaatctggtttaccggtaccgccgacagcgacaatccggcgctgctggcgctgagcgacaccggtatgggtagcgaaaaaatgctggcaagcggcgttggtgtggagatcctggatgaggatcaggatgccgttagcatcaataacaccagttcggtggtctacccgctgaaaacgggccgcaacaccttatcgttctatatccgctacaaatctacccggccaaccgtgacctccggcaatgcgacggcggtgatgtatttcgacctgcaatatgaatag

SEQ ID NO: 108884 - DNA, 801 bp, Enterobacter aerogenes
atgctgagtacattacccgatttacacagaagttttgcagagcaactcaaacttaaatttcagtctgattcgcgaattcactcccttctcgctggcggctcgattgttcatggcgggtttgataaatactccgatctcgattttgtcgttgtcgtagacactctccactatgacgaaatcatgatgcagcgtagggagcttgccggaacattaggccatctgctccatgcttttaccggggaacatgtcggagagcctcgcctgctaatatgcctgtatggcccagaacttcttcatgtcgatctgaaattcgtcactttggaaatgctcactcaacgcgttgaggagccagcagtgttatttacccgtgataacactgctctgcagcgacagctggcaaaatttagtgctcactggcctgacatgacgccggagtggtttgagtcccgagcctggatctggctgcattatgcagtggttaagttgggaaggggcgaactctttgaagcgatgggtatgctgtcattcttccgtgagcaggtgctggggccaatgttgtaccgtcgtgccaatcttccgcaacgtggggttcgccgcattgaattccacggcattgaccctgatggcctgctgacttccacgctggcaacgcacgatcgtgactccgtcagcatggccatcagaatggctgttgacgcttatatcaatctgcgagctgatgctctgcctgagaatatcgcagatgatgcggctcgttgggctgttcttgcgatgctgaaagcgtattctgacaggggttaa

SEQ ID NO: 108885 - DNA, 390 bp, Enterobacter aerogenes
atggggcgaggcagctatgagaaggtgctgacctttgacgaatggccttatgatcggcccgtgctggtgctttcccggcagctaacagatactcccgtgcccgaggtgctgaagggtaaggtgcagttttcatgcttcacgccaggggaggctcttgctcacctgaaggagaaaaacgtgcacagggtatatatcgatggcgggcagttaatacagtcgttcctgcgcgaaggtttggttgccgatatcgttgtcactatcgttcctgtcctgctcggttcgggaaaaccgctgttcggagtactgaccaatgatatcgatttgacgctattatccagccgcagcttcccttcgggtctggtgcagtcgcactatcggctgatgtcataa

SEQ ID NO: 108886 - DNA, 483 bp, Enterobacter aerogenes; identical to SEQ ID NO: 108098

SEQ ID NO: 108887 - DNA, 732 bp, Enterobacter aerogenes; identical to SEQ ID NO: 108667

SEQ ID NO: 108888 - DNA, 915 bp, Enterobacter aerogenes
atggtatcgataacagcatctgccatcaaagaatggcggagaaataataaagtcatttgtcacgttaaacttaaatataaaaaggtgttgcgtaagtgccgcgaaatacctttaacaggaggtaagtacaagcaatatcaacggctttgccagacatacagctgtgctaaattgaccagcgagacgccgggactggtacattttgaagataagcccttcaaagcttatttaaataagcgaatgtcgaaaagagctaaactaaatattgctcatggcgcgttgaattttattgaaaaaagctttcaagcggaaatattaccgcagttgtataatgtatcagcgttcggttgttcgatgattgccatcccgctaaaaaatggaaccagcctggaagtgaaacttctcgcctcgccgttccaggaagagggggaactgatgctgcagatgttttttgaaaataaacgcgtttatagcgtctgtttttcctgcaccgatcagggtagtgcgtggattggcggtattcagggcggtaaagacatcggcaacgacgaagtgaaagcgttgaccaaagagctctatggcacgcggccaaaaaacctgattatcactctgctgtacgggttattgcgccactttaatattcgtgagatctacgccatcgacagcgactaccatgtgaagagcgacaaggtgaaagccagttactcagagttgtggttagaaatcggcggcgagaagcagcggcgtggttggtacaaattacctgcacaagagattaaaaaaagtctggaagaggtgaaaagtaaacatcgcagccagtttattaaacgtgaaagtttaaaagaacaggctcagttggatctgatcgccgcattacagaagataaccgttggtgaaagcgccaacaaaccttaa

SEQ ID NO: 108889 - DNA, 993 bp, Enterobacter aerogenes
atgacgcggagtaaggatgggaatcaggacaatgccagttacctgttttttgaagataagcttggtgaagagtccgtcgatttgcattctgaaaaaaatatgaacgtgtctgttgaagggatgcacaatgaagttgttcatcagcaaacgatctattcacatctaaatacgcgttccactagtgtggtaggccacgatacgcaaacctttaatgccgggcaaaccatcgctatcacggctaatggacgtaatgaaagcattgtcgatagtgaaacaaaatcggttacgggttattcaagtaatagttataccggcaatgtggtaaccgaaagcggtgatacggttagcactttggcggcatcgaagataatgtacgaaacgccagatgttatctttggtcaggttgtcgatgccaaaggtacagaaagtgcagttcccaatataccttttgatattaaaaataccgctgggcagattatggctgcaccagggaccaagctctacgcaacagattatttggccgcagcctctacaagcgcagtttccgctgccaccagagtgacatacaaaaaaggggttgtaacgcatatccaaggtattgacaaacttaccgtggataataatcaaatagtagacgttaaagggaatgttgctagaaatatcctgggtgaacttaatgaaacggttcaaggcaaaatatctattaactcaccattaaaaatatctataaaaagcgatactaaagtagaaattgtttcccctgaggggttgttcactaacaagggaataagtgtatcattaaatggcacaacacactccttcaacggacttagcacatctgtgaatggtgcatcgtttagttggacaccattaaacatgccaacgtcattagcaagtattgtccactctccaatgaatgtaactagatctctaacaaaaatagaatcttcattgcagaatgtagttattggttttatccacatgtttatgtaa

SEQ ID NO: 108890 - DNA, 465 bp, Enterobacter aerogenes
gtgttgtgggcctatctgcgcaacccggcattcaaaaaggatggcgtcgattaccacgtttccgctgacctgaccggccaggccaaccatctggctgccaccattggcgctgatatcgtgaagcagaaaatggccgagaataacggcggctataaggcggtgaacttcggttataccgacgatcgcgtctacagcaagctgaccagcgataacccgatcgatctggtgcgctatcaactggcgaactgctacatgggccgcgccggattgattaactccggcggtgcggcgggcggcgaaaccgatcttgccgatgcggtgcgcacggcggtaatcaataaacgcgccggcggcatggggctgatcctcggtcgtaaagcctttaagaaatcgatgagcgaaggcgtgaagctgatcaatgcggtacaggatgtctatctggacggcaaagtcaccatcgcgtaa

SEQ ID NO: 108891 - DNA, 819 bp, Enterobacter aerogenes
gtgttcggcagctatattccgagcttcaccattccgcacataggcgagatgggcaccctgtggctggcgctggcgttctgtgtcaccggcgggctgattgccctggcggcgctgcgcaacaccgaaaccccgcgccatatgcagaatctcaccacccgcgagaagttctccgaactggggcgcgcggtgacccttatctacaccaaccgcagcattatgctctccagcatcgtgcgtattatcaacaccgtgtcgctgttcggcttcgcggtggtcatgccgatgatgttcgttgatgaactcggtttcaccacttccgaatggctgcaggtgtgggcggcgttcttcttcaccaccatcttctccaacgtcttctggggtatcgtggcggagaaactgggctggatgaaagtggtgcgctggttcggctgcatcggcatggcgctgtcgagcctggcgttttactacctgccgcagcacttcggccataacttcgccatggcgctggtgccggccatcgcgctggggatttttgtcgcggcgtttgtgccgatggcggcggtgtttccggcgctggagccagagcataaaggggcggcgatttcggtctacaacctgtcggccgggctgtcgaacttcctcgcaccggcgattgcggtggtgctgctgccgcacttcagcaccatcggcgtggtggtggcctataccgcgctctatattctggccttcttcctgtgcccgtttattcgcgtcgatcagcccggttttgctaccagcgaagcggctaaaccactgaacgtcagcacagtaaaatcataa

SEQ ID NO: 108892 - DNA, 465 bp, Enterobacter aerogenes
gtgctgtgggcctatctgcgcaacccggcattcaaaaaagatggcgtcgattaccacgtttccgctgacctgaccggccaggccaaccatctggccgccaccattggcgctgatatcgtgaagcagaaaatggccgagaacaacggcggctataaggcggtgaacttcggttataccgacgatcgcgtctacagcaagctgaccagcgataacccgatcgatctggtgcgctatcagctggcgaactgctatatgggccgcgccgggttgattaactccggcggggcggcgggcggcgaaaccgatcttgccgatgcggtgcgcacggcggtaatcaataaacgcgccggcggcatggggctgatcctcggtcgtaaagcctttaagaaatcgatgagcgaaggcgtgaagctgatcaacgcggtgcaggatgtctatctggacggcaaagtcaccatcgcgtaa

SEQ ID NO: 108893 - DNA, 555 bp, Enterobacter aerogenes
atgaccaaatcagcactgttttcggtgcgtaaaaacgagccctgcccgcagtgcggggccgaactggtgattcgttccgggaaacatggcccgtttctcggctgttctcactatccggactgtgactatgtccgtcccctgaaaagtcaggcggacggccatatcgtcaaggtgctggaggggcaagagtgcccatcttgcggcgctgtcatggtgttacgccaggggcgttttggtatgttcatcggctgcagtcgctatcccgaatgcgaacataccgagctgattgataaacctgatgagaccgctatcgcgtgtccgcaatgcggacagggtcatctggtgcagcgtcgctcccgtttcggtaaaacctttcattcctgcgatcgctaccctgattgccagttcgtaattaattttaaaccggtggcgggcgaatgccctgaatgccattacccgctattaatagaaaagaaaacggcacagggtgttaaacgcttttgcgccagtaaacaatgtggaaagccgatcccggcggaacaaataagtgaataa

SEQ ID NO: 108894 - DNA, 474 bp, Enterobacter aerogenes; identical to SEQ ID NO: 91736

SEQ ID NO: 108895 - DNA, 669 bp, Enterobacter aerogenes
gtggtgattggcctgttgaccctcggtatgctgatgactaacggcatctccgcgctacagaacgcgacggtgatcatggggctaccgttcagctttgtgattttcttcgtgatggcggggttatataagtcattgaaggtggaggattatcgccgcgaaagcgccaatcgcgacactgcgccgcgcccgctgggcgtgcaggatcgtctgagctggaaaaagcgcttgtcacgcttaatgaactatcccggcacgcgctatacccgccatatgatggagacggtgtgcttcccggcgatggaagaagtggcgcaggagttgaagctgcgcggcgcttacgttgagctgaaaagcctgccgccggaagagggcgataaccttggtcacctcgatctgctggtgcatatgggcgacgaacaaaacttcgtctaccagatttggccgcagcagtactcgattcctggttttacctaccgggcgcgcagcggcaaatcgacctactaccgtcttgagactttcctgctggaggggagccagggcaatgacctgatggattacagcaaagagcaggtgatcaccgatattctcgaccagtacgagcgacacctgaactttattcatctacacagggaagcgccggggaatagcgtcaccttccctggaatgtaa

SEQ ID NO: 108896 - DNA, 870 bp, Enterobacter aerogenes
atgggtgggcttagcggaggcagcagcgcggatgcggtggcgggtgcgaaggccgggaagaacgcggtggagaataatgctttgagtccgattgatttcggtaaaggcatggctgacatgggtttatcccagcagtcgctcggcgttcatatgctccagaatggtgccacaccagaagaactcacggcggcgctgatcaagaactcacagggacagataccggacggacagaatgcagctaaaggcctgatgattgcctgggcagaattctttggggttccggtgagtgcgttggcggcggatggggaaatgacgccgcaacgagctgcggaaatcttggcaagtggcgtgccgaccagtgaagcgaagttagtacaatatgtagcagctaaggcgtttttggttgttgcgaagaacacctcttatccatctggaattagttttaaaattgaccaactggaacatatgggttctgttgtaaaatacaatcaacagaaaggtattacaggtggtcataatgctgatgctttctattcaacagtaagtgagaaaaatgtgaaaattgtcggtgaaactcaaagcagcgtgaagggtattactgaggttcaatataaaatacccgcttacgatcgcgccggtaatattacaggttataaggataaaatatttaccaaaacaatctatgaccctaagatctttactgaccaaaaaatgttagaattggggcagcaagctgcaagtagtggttacaaagcagctattgcatctggacaacgagaatatacggcaaccgccggcgggataaaattccaagtttatttggataaaaagacaggaatggtagaaaattttcatccggtgactaaataa

SEQ ID NO: 108897 - DNA, 468 bp, Enterobacter aerogenes
atgctggcgttgctaactgaagaacaggctattagccttgaaccggagcattttcgcgttgaattccatgaaagcgggcgcgcggcttgcttctggattgacgtgcatgccgaccatgatgcgttgatgcttcctgcgcaagcgcgtatggatatgttggtcaataaagccctgaaaccggtggtggaagcgctggaagctaccggcgacattaacggtaagcttatctggagcaataccggctatctgattaactggtatctcggtgaaatgaaaaatctgcttggcgacgagcaggtgaacgcgctacgtcaacactgtttttttgcaaaacagcaggccagtggcgaggataacccgctgtggcgaacggtagtcctgcgcgaagggctgctggtacgccgaacttgctgtcagcgttatcgcctgccggacgttcaacaatgcggcgactgcacgttaaagtaa

SEQ ID NO: 108898 - DNA, 702 bp, Enterobacter aerogenes
atgctgatcccgcaggccatcatggctatctttaagccattggtctctgccgcagattcattaccggccattctgctggcagtgttgattggccacctgctgtggttcgcagggattcacggggcggcgattgtctccggcatgctgcagatgttctggctcactaatctggggatgaaccagcaggccctggcgcagggcgcgccgctgccgcatatttttatggaagcgttctggacgttcttcatcgttgtcggcggttccggcgcaactatggggctggtgttctgctatctgcgcagccgttccgcgcatttgcgctctatcggccgtttaagcgtggtgccaagcctgtttaacattaacgagccggttatctttggcacgcctatcgtgatgaacccggtattctttattccgttcctgctggcgccgatggttaacgcggtgattgcctgggcggccatgaagttggatctgatcggtcgtgttatctccgttgtgccgtggacggcgccggcgccgattggcggcgcatgggcgttgggatgggatttccgcgcggcgattctggtcgttgtcctcgcttgcgtatcggctatcatctacttcccgttctttaaagtgtacgaaaagcaactgctggcgcaggaagctgaagaggcgcagcgcgcggcacaggagaacgagcagaccgcataa

SEQ ID NO: 108899 - DNA, 687 bp, Enterobacter aerogenes
atgctcaggactttatttaaacttgtcttcccctgctttttactgataagcggcattgcacatgccggcattgtcattgaatctacccgttatctttacaaagagggttcccgcgaaataaccgcacaaatagaaaacaaagacggtattccctacttaattaagtcctggatcgagaccccgaaaggacaagcgccgtccttcatggccacgccgccactgttccgtctggaagcgaaacagcaaaataccgtacgcctgttttcaacgggtaatgtcgctgtgccaaccgatcgcgaatcgatgttttattttaacgttatggctataccacccgcagatgaggcaaatgccaaaaacaataccattcaactggcggttcgccatcgtatgcgtctggtgtatcgaccaaaatcgctatttgatatgaaaccaaacaccgaagcggcaaaactcgagtggcgaaagtctggtaataaattatccattaaaaatcctacgccatttttctactacttcaatacgataaaaatcggtaataccgagataaaaaatgaagtgaatgctatccctccgatggctacaaaagaagtgacattaaaagaaagtattaacgcatcaagtattacatggaagatagtcaacgattatggaggagccggttcgctctattcctcaccgctgtaa

SEQ ID NO: 108900 - DNA, 147 bp, Enterobacter aerogenes
atggatgaaacctacactgacggcgaagtcacttctctgaactactacgctggttatgtgaaagtaaacgacgcgactactgtaaccgaaggtccggttaaaggcgtagcgacctttactatcgactacaccagcgccgacgcctaa

SEQ ID NO: 108901 - DNA, 327 bp, Enterobacter aerogenes
atgagctggaatgcggcaggtggtgcaacatccagctatctgaaaggggataatccttttacaggtggcttaattaatggtttggcctctggggtgggttatggtgcaggaaaactcattgagctgcctatggataaaatttacaacccgatgaagccatggaaagactggatgtggacagatgtcggaatggggatttctaaacctttaccgataaacccgttgcccggaacatttggtaatggtggcgctagtttagctactgaagttataaatagtcaggctggtaaagttgataccaataaattgatggggaataaacaatga

SEQ ID NO: 108902 - DNA, 318 bp, Enterobacter aerogenes
atgaaaatcctgcttaactggccgccgctgcgccagatcgttacttacattcaggagcgctttacctttctggttctgctctgttggccggcgattatctggctgttctgccgggttggcgtgtggcttactgatagcacttatcaactgctgggaaaatcgcctgcccactctttcaccgtttgtcttcagccgtttatgacgcccggcacgttgctacgcatttctatcagctgggttgtgctgctattcatccttttcagtatggcaatggccttcacctggggtctgcgccgctttatgaatcgtcaaaaataa

SEQ ID NO: 108903 - DNA, 480 bp, Enterobacter aerogenes
atgggaacgtctgtcggtttgcataccgcaggtgtgccttttatctcaagcgcgttgttaagcgtggtaagttttgctatgccgcagctaacgctttgggggaccatctttcaatggttttcctggcccgcgcatgctgtttttgctggtataatccccacaggtttactctactgtctgctgatcttcccgtcgatgacgctgttctctcgaggttttctggcagcgcttaagttctatctaagtctgattttcctgaccgccgcgctagccgcgggaaatctcatctacgcattcatttcggtattcatatgtggcgggcatgccggcttgcttataagcgctttggttggtgtattatttagcgctggcagcatcaaactcgttaacagtgctatgtttgtaaaaacctcagcattttatttgcataatcgaatttggcgctggcaattaaaacatcatgtacaaaataaagtatga

SEQ ID NO: 108904 - DNA, 936 bp, Enterobacter aerogenes
gtgggggccacgtggcaacagcagaagcatgaaaaaaatcagctcaactataacctcgcgcacaactggtacaccgatgcgcgcggtgaaaacgaatatggtcttaacgcatccgggattaacagcgactcgctgaatacttcggcctatacccgtcagggcggccgatttggtaacggaagtttgaccgtcagcgattcgtgggatcgccaggatcatcgccaccggttcagcagcagcggtaactacagttctacgctggcgttatctcgttctggcctgtggtttggccgctggggtgacggacgcccggcgtcagccattgcggtcaacgtcgcaacgccggaagcgtcacctgattcccgcattgccgtttcgcttgataacagcggtagcgccgatatcccggcaaacgcccgcgcgttgttcgccctgcccggctatcagcaaaccacgctgactattaatgagtcgacggacatttcccacggcgcgaacagtgaaattacgcaggggtcgggaagcagaacggtatttatggtgcctggaaaaatgctgcacagagaggtgcaaaccaccacacgttatacctggcttggccagttgaccgatgaacaacatacgccgtttatcggcggcatgccgcttaacgtcagcggctggagcgatttaggtaatggcggctttagtgcggaaagcgacagcctgatccagtcgctctacctggtgaaacaacagcagttttaccagtgcgcgctgaaggtgaagaccatgcgagacgtcgtgcgctatgtcggcacggtgacctgcgaagaactgacttattccgcgttaccggaaaccgtgcagcagcaggcacaactgctgctggctggccgtacgccggcggtcagcccaacggcgatgaataactctactctctctacaggaaaatga

SEQ ID NO: 108905 - DNA, 819 bp, Enterobacter aerogenes
atgggaaacaagaagaaagccgttgcgcccgtcatacccgccaaaacggagccgttaagcgagaaagaatatcagcaggcattgcgtaaactgcacgtcgagttggtcaagctacagcggtgggtcgtgcataaagggcttaaggtatgcatcgtcttcgagggtcgcgatggcgccggcaaaggcggcaccatcaaagcgataaccgaacgcgtcagcccgcgggttttccgcgtcgtcgccctgcccgcgccaaccgagcgcgaacgcagccagctctattttcagcgctatatcaagcatcttcccgccgccggcgaaatagtgattttcgatcgcagctggtacaaccgggccggcgttgagcgggtgatgggattttgtaccgaggaggaggtgcaaaaattcctcgacggcgcgccaatggtggagagagggatggttgattccggcattattttactgaaatactggctggaggtgacgccgcaggagcaagaacggcgcctgcgcgaccgtatcgatgatgggcgcaaaatctggaagctatcgccgatggatataaaatccttcaaccgctgggatgactacaccacagcgcgcgatgcgatgtttgccgccaccgataccgcctgggcgccgtggtttgtcgcccgttcggaagataaaaaacgcgtacgtctgaatattattacccatttgctttcgcagatcccctacgagtctctgccaacggaacacattaccttaccgaaacgtaaaattggcaaagtgaaaccgacccattttcctttccggtttattcctgagaagttttga

SEQ ID NO: 108906 - DNA, 171 bp, Enterobacter aerogenes
atgcgaaccgtggccctgaacgacgcggagatcgaacttatcctgcaggccgcgcagacggtcgccgttggtatcgaccagggtaatatcgttgttttcgccaacgagattttccgccagcgtgccgcctacctgtccggcgccaagaataataatcttcatcagcagtga

SEQ ID NO: 108907 - DNA, 777 bp, Enterobacter aerogenes
atgtggctgcgtgtgaatcgcaatcatcattcgcgagatgaatggctcgcactgctggaagacgctggtttacagggtttcactcacccggactatccggatgccgtccgtcttgcgaccccagccccggtccatgcgttaccaggatttgataaaggctgggtaaccgttcaggacgcctcagcccagggctgcatgcgctacttgcaaccggcaaacggcgagcgcattctcgatctctgcgcggcgccgggcggcaagacgacgcatattctggaagtcgcgccgcaggcgagtctgatggcggtcgacatcgaccagcagcgcctgtcccgtgtctatgacaacctgaaacgtctgggcatgaaagcggaagtgaaacagggcgatggccgctatcctgaacagtggtgcggcgatgagcagttcgaccgtattttgcttgatgcgccatgttcggccaccggcgttatccgtcgccatccggatattaaatggctgcgccgggatcgcgatatcgcagagctagcgcaattacaggcagaaattctcgatgccacctgggctcatcttaagcctggcggtacgctggtctatgcgacatgctctattttgccggaagagaatagccaacagatcgccgctttcctgacccgtacccgagatgccgaactccatgagacgggaacgccggaaaccccgggtcagcaaaatctgccaggagcggaagaaggcgatggcttcttttacgctaagctaatcaaaaagcgcaattaa

SEQ ID NO: 108908 - DNA, 720 bp, Enterobacter aerogenes
atgcatttcatctcctccctggttatcaaaagaatgagtacgcgaattaccccgattttatttttattagtactgctggcggcgctgggaatgactcagctggcccatgcgggtggtattgcgctgggttctacccgggttatttatccgcagggtgataagcaggtctctctgccggtgataaactcttccagcaataatgtatttttaattcagtcgtgggtggcgaatgccgatggcggcagaagcgccgattttgtcgttaccccgccgttgttcgtcattcagccgggaaaagaaaatctgctgcgtattatgtacgttggcccctccctgccgacagatcgcgaaagcgttttttatctcaacagtaaagccattccctcggttaataaaagcaagctggcggcgaattcgctgcaaatcgccacgcaaagcgtcattaaactatttatccgccccaaacacttaccggttgcctcggtagatgctccggcgatgttgcgctgccagcgtgcaggcgaccgcctgacgatcgccaatccatcaccctattatgtctcgctggttgatattcatgtcggcggacagaagttagccaattcaatggtcccgccgaaaagcgagataacgttgcaaggcggcgtagggcaggtgactttccagtcgattaacgatttcggcgccaccacgccgctgcaaacctgtctgagtcattga

SEQ ID NO: 108909 - DNA, 186 bp, Enterobacter aerogenes
atgcgttttaaatacgccgaccggtttgccggactgcaccagcagggtctcgtcgctttccaggtttttcagcgccttcacgatagcgtcatagcattcccaggtgcgcgcagcgcgaccaataccgccatagaccaccagctcatgcgggttttcggcgacatcgggatcgaggttattcattaa

SEQ ID NO: 108910 - DNA, 516 bp, Enterobacter aerogenes
ttgaataccacctttggcaccggcatcgtggccggcgactccggcattatactcaacaaccagatggatgatttctcggcgaaacccggtgtgcctaacgtttatggtttagtcggcggcgacgccaacgcggtagggccgaaaaagcgtccgctgtcgtcgatgtcgccaactatcgtggtaaaagacgggaagacctggctggtgaccggtagcccgggcggtagccgaattatcaccaccgtgctgcaaatggtggtcaacaccattgattttgggatgaacgtcgcggaagccaccaatgcgccgcgcttccaccaccagtggctgccggatgaactgcgggtggagaaaggttttagcccggataccgtgaaattgctggaagcgaaagggcagaaagtcgcgctgaaagaggcgatgggcagtacccagagcattatggtggggccggacggcacgctgtatggcgcttccgatccgcgttcgcccggtgatttgaccgcggggtattga

SEQ ID NO: 108911 - DNA, 186 bp, Enterobacter aerogenes
ttgcaggtcgcactgattaaacacgcaactatcaagcgtggtttcgacggcctgaagatgggccatttcacactgattgaaggtcgtctgcttaagttgggcgccttgcagctgcaggttctgcagctggcactcggtaaacagggcttcatgcagattggcattttgcagattagcgccgcgtag

SEQ ID NO: 108912 - DNA, 396 bp, Enterobacter aerogenes
gtgtcggaatgctcacttatcggcgccgacttcagccacgcgacgctgcagcagagcaatttgcgccagacgccattacagggcgcgcgctttgcgctggcaaaaatcgaaaacagcgatctgagtgaggctgattgtcgcgatgccagctttgtgcgcgcgaatctggtcggcagtctgtttgttcgcaccgattttcgcgaggccgattttaccgacgccaatctgatgggcgcgttgctgcaaaaaagccagcttgccggagccaatttcgaaggagccaatctgttccgcgccgatctttcacaatcctttaccagtaaaaccacgcgtctggatggcgcatggaccaaacgcattaaaaccctgccgaagcgcgatggagaagtgatatga

SEQ ID NO: 108913 - DNA, 372 bp, Enterobacter aerogenes
atgaccattcgcatccacaatcgtgtaggtaaagatatccgcctgcccaacagcgtctgcatcccccgttgctttgtaggtatagctgccgtcggcatggatcgtaagttgcccgtagagaccattgattacgatacctgctgccgtgacatcaagcggtgtagtctgcacgctggaggcaattttgcttaccgtaataccctcaccggtatccgctacatcgccgcctgcatctgcggtcagaacattgccggcaatagcagtcgaggtatattccgtagaatccgtgatcgttgcttgcgctaccgacaacagatttgccgacgccagttcatcaaccactgcggccaggccgccggatgcctgcggtga

SEQ ID NO: 108914 - DNA, 276 bp, Enterobacter aerogenes
atgcgccagttgacggcaaccggcttctggccgctgtaccgcttcgacccgcatcgcgccgatgaaggcaagctgccgctggcgctggactcgcgcccgccgtcggatgcgctggcggaaacgctgctcaacgagcaacgcttccgtcgtctgaacgcccagcagccggaagtcgccgagcagttgtggaaggacgcggccgccgacctgcaaaaacgctatgatttcctggcccagctggcaggtaaaacggagaaaccggcaaccgaaagttaa

SEQ ID NO: 108915 - DNA, 462 bp, Enterobacter aerogenes; identical to SEQ ID NO: 108612

SEQ ID NO: 108916 - DNA, 300 bp, Enterobacter aerogenes
atgcacgttattgatggcgaagaagttgagcgaggttggcatctgggcgtacaggatataaaacaccaccgcttcgagcatcaggatgaaggcgacgaacatcttgttgcggccggttttatcgaggcggaaagcttcgcggaagaagaaaatcgtcaccacgatggacagcacaatcagcaccaggttggcgattttaacgttatgcatcagccaggcgcagaggaaaatcatcactacggtgccgaccagcacatacagcagattacggaaactcagcggctgatgatccggggttga

SEQ ID NO: 108917 - DNA, 315 bp, Enterobacter aerogenes; identical to SEQ ID NO: 87936

SEQ ID NO: 108918 - DNA, 453 bp, Enterobacter aerogenes
atgcttaaaaaatctatcgttgccctttcattgtttttcgctctgacccccgctgtttttgcgggcaatagtgaaagcgaactgttgaataaaaagaatgtcattgatttttataataaagctttgaacgataaagacttctccgccgccaggccatatctcggggatcgctatgtacagcataacccgatggcaaaagatggcgtggaaggcttcgagcagtttatcgcttttctgaagagtaaatatcccgactcgcatagtgaaattaagcaggcgtttgtcgacggaaataacgtgattctccacgttgaagtgaccggtcgtgagcctggcgttacgcgggcgatcatggatatcttccgcctcaacgaacagcacaaaatcgttgaacattgggatgttacccaaaacgtcccgccaaaaaccgccagcggcaacggcatgttttaa

SEQ ID NO: 108919 - DNA, 903 bp, Enterobacter aerogenes
gtggcgttcgataaaaccggtactctgaccatcggccaaccgcaggtcacccacgttatcaccaccgccgacgttgatgaaaacggcctgctggcgctggcggcagcagttgaacaaggctccagccacccgctggcgcaggctatcatccgcgaagcgcagcagcgtaagctgactcttcccgttgcgcgcaaccagcgggcgctggccggttccgggatagaagccgaggtcaacggcagccgcatcttaatctgcgcggccagtaaggccgcccccgctgaacatgaggcgcagatccagcaactggagagcgccggacagacggtggtgctggtgatgcgcgatgataccttgctcggcattctggcgctgcgcgataccctgcgcgacgacgcgcgtcaggcggtggaagagctgcatcaattgggcgtacaaggggtgatcctcaccggggataacccgcgcgctgcggcggctatcgccaatgaactgggtctgcagttccgcgccggattgctgccggcggacaaagtgaacgcggtgatggcgcttaacgccaacgcgccgctggcaatggtcggcgacggtatcaacgatgccccggcgatgaaagcggcgaccatcggtattgcgatgggcagcggcaccgatgtagcgctggagaccgccgacgcggcgctgacccataaccgcctcaccggcctggcgcagatgatttcgctggcgcgcgccacccatgccaatattcgccagaatatcgccatcgctttagggttgaaggggattttcctcgtcacgacccttctcggcctgaccgggttgtggctggcggtgctggcggataccggcgcgacggtgctggtaacggctaacgccctgcggttattgcgtaaaaagtaa

SEQ ID NO: 108920 - DNA, 312 bp, Enterobacter aerogenes
gtgtggcgcgatccacaaagccactatttgcgccgtcacgtctcgccgcgtagcgatctgccgatcgatctggtgcaaatagagctgccggccggcagcgatgtaccgatgcctgcttcttcgtatgcgctggcgcgacagctcatctggctacagcagggtgagttagtttttgtagaagggaacactcgccatcagatgcaggcgggggattgtctggaactggggccgcccaacgattgccggtttattaatgagtccagcgagacttgcgtctatctggtggtgcgcctgaaccaatccggctcataa

SEQ ID NO: 108921 - DNA, 183 bp, Enterobacter aerogenes
atggatcaccgtttacttgaaattatcgcctgcccggtttgtaacggtaagctgtattacagtcaggataagcaagagcttatctgcaaagccgacagtctggccttcccgctgcgcgaagggatcccggtactacttgaaaacgaagcgcgctcactcgcggtagaagagagccagccatga

SEQ ID NO: 108922 - DNA, 480 bp, Enterobacter aerogenes
gtggtgccggtgatggttgaggagttgggtgagatgtggctgcatcgcgatctgcaagctgtgctggaatcggcatccggcagtaagttaaccgccagccacagcgccgtgctctcgccgtttgatccggtagtctgggaccgtaaacgcgccgagcagttattcaacttcagctatcggctggaatgttatacccctgcgccgaaacggcaatacggctactttgtgctaccgttgctgcatcagggaaaactggttggcaggatggacagcaagttgcaccgaaaggacgacatgcttgagatcttttcgctgtggctggaagagggcgtgaaagtgaccgccgggctggaaagcggactccagcgggcaattaacgattttgcgcgctggcaaggtgcagaagaggttgtgctgcgccagctacccgcgacgctatttgctaaccagcggcaaggttggggcgttgaagccgcgtga

SEQ ID NO: 108923 - DNA, 690 bp, Enterobacter aerogenes
atgactctcaataagaccgatcgcatcgtgatcacgctgggcaaacagattgtcagcggtaagtacgtaccgggttcagcgctaccagccgaagcggaactgtgtgaagagtttgaaacttcgcgcaacatcatccgcgaagtatttcgctcgctaatggcgaagcggctgatcgaaatgaagcgttaccgaggcgcatttgtcgctccgagaaaccagtggaactacctcgataccgaggtactgcagtgggtactggaaaatgattatgacccgcgtcttatcagcgcgatgagtgaagtgcgcaacctggtcgagcccgccattgcccgctgggcggcagagcgcgccacctcaagcgatctggcggaaatcgagtcggcgctcaatgacatgatcgccaacaaccaaaaccgggatgcctttaacgaggccgatattcgttaccacgaagcggtgctgcagtcagtacataacccggttttgcagcagcttagcgtggcgatcagttcgctgcagcgggcggtatttgaacggacctggatgggcgatgaaggcaacatgccgaaaaccctgcaggaacataaagcgctatttgacgccattcggcatcaggatagcgacgcggcggagcaggcggcgttgacgatgatcgccagctcgacacgaaggctcaaggaaatcacatga

SEQ ID NO: 108924 - DNA, 318 bp, Enterobacter aerogenes
atgcgaaaaatattattgctggccgccgttttgctggcatcatccgcaccgatcgtcacccaggccgaggagattacgcttttaccggctataaaactgcagattggcgaccgtgattcctacggtcattactgggatggtgggcgctggcgtgacaaagactactggcatcgtcactatgaatatcgtgataagcactggcgaaagctggagaaaaagcagcgaaaagcctatgagaaaggttatcgtgatggtcgcaaggattataagaagcgcgaaaaagagtacaacaagcaccacaaacaccatcatcactaa

SEQ ID NO: 108925 - DNA, 423 bp, Enterobacter aerogenes
atgccggatagcgaagtcgacgtgctgtacggcatcggcggcgcgccggaaggcgtggtttcggcggcggtgatccgcgcgctggacggcgatatgcagggccgcctgctggctcgtcaccacgtgaagggcgacagcgaagagaaccgccgtatcggtgaaaacgaactggcgcgctgcaaaaccatgggcatcgaagcgggtaaagtgctgcgtcttgatgaaatggcgcgcagcgataacgtcatcttctccgccaccgggattaccaaaggcgatctgctggatggcatcacccgccagggcaatatggcgaccaccgaaacgctgctaatccgcggtaaatcgcggactatccgccgtattcagtcgattcattacctcgaccgaaaagacccggacgtccagcaacacatcctgtaa

SEQ ID NO: 108926 - DNA, 564 bp, Enterobacter aerogenes; identical to SEQ ID NO: 108166

SEQ ID NO: 108927 - DNA, 528 bp, Enterobacter aerogenes
atgcccgaactgcttacgccgcggctgcgctgctcgccgctacagcttgacgactggtctttttttctcagcctgcaacaggatccgcaggtgatgctctatgtcgcggataatcggcccatcgccgatatccgcgccgcgtttgatgcacgcctgccgctctggtcgcctaagtcctcgcactggctatgcctggtggttcgcgatcggcaaagccatacgccccttggcctgaccggctattgccatcacgatgatgatatcgccgaagtaggctttctgttcgccccacaggcgcaggggctaggctatggatatgaatcactgcgctcgctatgtgattacgcattttctacaggcggcattcgtcgtcttaccgccagcgtcaccgccggaaaccaggcctcaaaacagctgctgctaaaaacaggatttatacaggaaggagagctacgcgagagctactggctacatggccgttggcataatgactggctgtttggcctgatgcgccacgattaccaataa

SEQ ID NO: 108928 - DNA, 243 bp, Enterobacter aerogenes
atgccgatgcagccgaaccagcgcaccactttcatccagcccagtttctccgccacgataccccagaagacgttggagaagatggtggtgaagaagaacgccgcccacacctgcagccattcggaagtggtgaagccaagttcatcaacgaacatcatcggcatgaccaccgcgaagccgaacagcgacagggtgttgataatgcgcacgatgctggagagcataatgctgcggttggtgtag

SEQ ID NO: 108929 - DNA, 243 bp, Enterobacter aerogenes
atgccgatgcagccgaaccagcgcaccactttcatccagcccagtttctccgccacaatcccccagaagacgttggagaagatggtggtgaagaagaacgccgcccacacctgcagccattcggaagtggtgaaaccgagttcatcaacgaacatcatcggcatgaccaccgcgaagccgaacagcgacagggtgttgataatacgcacgatgctggagagcataatgctgcggttggtgtag

SEQ ID NO: 108930 - DNA, 630 bp, Enterobacter aerogenes
atgggctacgacgccaacgttaacaatggctcgcctttcccggtacatgattcgaatctggtattccagcttaaggtcgttaagccatttattggcacgataaatatcgagccgaagactatgtttaatgtctatgtcaccaccaccggggacgacccgctgagtaccgtggtatatagcattgtctacagcggcagcgtgaccgtgctgcaaagctgcgaaattaacgccgggcaaaccattcttgtggattttggctcgctgtacagcggcggtttcaatcgcgccggggaaaaaccgaccggtgtccgtaagaaaagatttaccgtgccggtgaagtgcagtggggtggattcacaggtcaacttaagtctgcggttgatagctaccgccgatagccacttaagccaggctattgcctccgacaatcctgatgttggcgtggtggttgagagcagcgacggcgcggtattaacgccaaatgacgccagcagcgtcgagcctttcacgacggatgaaaacggacacgcgactatttccctacaggcgtatccagtcagcaccaccggccagacgccggcggaaggcgccttcaccgcgctggctaacttacgggtggatttcgactaa

SEQ ID NO: 108931 - DNA, 780 bp, Enterobacter aerogenes
gtgcgtgataaaccctctctctcaacgctgtacggactggttcaggcctcgacgttcgacaacgaaaagaacctgccggcggactacatcccgtcactgatggagtcatacccgccggaactgataaaggcttatctgtgtggccagttcaccaacctgaccagcgggacgatttaccatcagttcgatcgtaagctgaataactgccgggaagaggagcagcccggcgagcctctgtatattggtatggactttaacgtcgggaagatggccgggattgttcacgtgttacgtctggggcttccgtttgcggtgaatgaaatcgtgaaggcttacgatacccctgacatgattcgcatcatcaaagaacggttctggctgtacgacggcaaagattatcgcaaggtgcgtgaaatctatatctatccggatgcttccggtgattctcgtaaatccagcaatgccagcgtcactgatatcgcccagcttaagcaggctggcttcaatgtggttgttaatgcatcaaacccaccagtgaaagaccgcatcaactcgatgaatgccatgttctgcaatggcaacggcgaacgtcgctacaaggtgaacgtacagcgctgcccggtgtacgcagaatcgctcgaacaacaggtctgggccgagaacggtgagccggataaaacggcggataacgatcaccctaacgatgccggcgggtatttcattgtgaagcaattcccgatcatcaaaccaaccggaaaagtcacccaactgcggatgtaa

SEQ ID NO: 108932 - DNA, 126 bp, Enterobacter aerogenes
atgggcatgctggccatggatctggataagcaactggcccagctcgcgaagttgagaaaggggcacggcggtaccgttgataaaaccgcgggagcgaccgtcagcgctgatcacgcggcgaagtaa

SEQ ID NO: 108933 - DNA, 885 bp, Enterobacter aerogenes
atgtttaccggattgtgtgcttttccgctgacgccactgcgcaataatgaggtggatagccgcgcgctaataaaaatcatcgatcgtctggtctcggcgcgagttaattcgctgggcattctgggctcaaccggcagctacgcctatttgagccgcgagcaacgcaaaatggtggtcctggaggcaaaacaacatgcgcaaggggtcccgatgatggtcgggataggcgcgatggcgacggatatgattctacgtcttgctgaggatgctcagcaggcgggggcggatgctgtgctgctaccggtgctgaactaccagcctctgacggatgatgaggtgttcacactgttccagacggttaaccgccatgtgtcggtacctatttgtatctatgataatccgcgcaccacccacagagccctttctgatgcgcttgttgagcgtattgcttcgttatccaatatcgcatcaatcaagatccccggtttgccggacgaccaggctggcgtcagagtcgcgacgcttcgtcagcgattgccgcagcgagtgagtataggcgtcagcggcgacgcttttgccgcagcagggttaaacggcggctgtaatctgtggtattccgtttgcgccggtctgttcccgcaaattgcccaaaatattaccgcagcagcgttaagtggtgagcggcagcaggcatcggcactaagcgaacggctggagccattatgggcattgttcagacagcacggtagtctcaaagtgattgccgctgccgcctctattcttgaactagccgaagtagagtgtttaccgcgaccattagccccgctttccacggatgccattaacgatgttaaatcggtcatggataagcttgatctacgctga

SEQ ID NO: 108934 - DNA, 162 bp, Enterobacter aerogenes
atgatgggcgcgcgcacctgcgccccggcgatggaaattatcagcgataccgcgcgcagcaacattcccgcactcggctatgctggcacttacgctatcgccaacgtgctgctcactcttgccggtacgctgatcgtcatcatctggccgggccttggctag

SEQ ID NO: 108935 - DNA, 381 bp, Enterobacter aerogenes
gtgctggcgaccggcttcgacgaaagtttcgtaggtgccctgcacgatgccctggctaccgatgtagatccagctgccggcggtcatctggccgtacatcgccagccctttggcatccagttcgttgaagtgttcccaggtggcccagtgcgggaccaggttggagttagcgatcagcacgcgcggcgagttttcatgcgttttaaatacgccgaccggtttgccggactgcaccagcagggtctcgtcgctttccaggtttttcagcgccttcacgatagcgtcatagcattcccagttgcgcgcagcgcgaccaataccgccatagaccaccagctcatgcgggttttcggcgacatcgggatcgaggttattcattaa

SEQ ID NO: 108936 - DNA, 462 bp, Enterobacter aerogenes
atgttagccgttcagccagaccaaatgtcgaccattccatcgcagattgaaaatcacgacgttgcagcggcgcgaaaggcatctcatgtcgtgcgccaggccactccatcaggctggctgcgacgcgagccaatgacagccgcgcatgataacctttgccgctctctatgcgttgcgttatcccttttagtattgcggcagccatcagatagcccgtcgcgtggtctaacgcctgtaccggaagcgggattggtttatccgcgtcgcgccagcgttgaccggcatgggcgataccacaggccatttgcaccagactgtcgaaaccgcgtcggtttctccatggcccctcccatccccaggcatttagtgaaacatcaacaattcccggcgataacgtggctctggtatgacaatcaagacctagcgcctccaacgcgtcagcgcggtaaccgtgaacaatga

SEQ ID NO: 108937 - DNA, 501 bp, Enterobacter aerogenes
atggcccaggtcaattcagggacggtaagtgcggcagccagggctgtacgttatggtttcccggcgattgcggccagcattgggtatatctttactgaagatgaaatgaagaataaatggccaagcacacataaatattggcctgatgcggtggattatgtggttgaggttgttgagaccctgaatcgtaatcatgttcctggttcacctttggtgcctaaaggatcgggcttaagcattaactatccgccgctgccaaaatcaaaaattaaaggtgtgcactatgtcgaaaatgagatgttccctaccccacagattggttatgatattttgcctgatggacgcgctaaacaaaccatcaatccggaatcgttaaagacagtagagaacgataccgattccggctggcttaataaaggttatatcacctatagcctctttgatggggcaatgaacgccccgcaattccaggcgcaatatgaagaactgttgagtaaataa

SEQ ID NO: 108938 - DNA, 792 bp, Enterobacter aerogenes
atggttgagttcgaaaaagcgaaagacaaaatcatgatgggtgcggaacgtcgctccatggtgatgacggaagcgcagaaagaatcgaccgcataccacgaagcgggccacgcgattatcggccgtctggtaccagaacacgatccggtacacaaagtgacgattatcccgcgcggccgtgcgctgggtgtgaccttcttcctgccggaaggcgatgctatcagcgccagccgtcagaaactggaaagtcagatctccaccctgtacggcggtcgtctggcggaagaaattatctacggtgctgaacatgtttctaccggtgcgtccaacgatattaaagttgcgactaacctggcgcgtaacatggttacccagtggggcttctctgacaaactcggcccgctgctgtatgccgaagaagagggcgaagtgttcctcggccgtagcgtcgcgaaagcgaagcatatgtctgatgaaaccgcgcgtatcatcgaccaggaagtgaaatcgctgattgagcgtaactatggtcgtgctcgccagctgctgaacgacaacatggatattctgcacgcgatgaaagatgcgctcatgaaatatgagaccatcgatgcgccgcagattgacgacctgatggctcgtcgcgatgttcgtccgccggcgggttgggaagaaccgggttcttctaataactctggcaacaatggcactccgacggcgccgcgcccggttgatgaaccgcgtacgccgaatccgggtaataccatgtcggaacagctgggcgacaaataa

SEQ ID NO: 108939 - DNA, 258 bp, Enterobacter aerogenes
ttggctaacgttgcgccacgggagattaacgcgatttggtcaaccttccaggcaggcgaaattgaagcctccaggctggcgcaggaaaacgtcaccggcctgcgtaccgatctctacaaagtcgccttttcccccgccgcggtgaaaaaagcattgcagctgatgggccatgaggtcggcgatagccgctacgcggtgcagtttagcgcatctcaactgcagcaaatacgtggaatcatcgcgcagtatcttaattaa

SEQ ID NO: 108940 - DNA, 207 bp, Enterobacter aerogenes; identical to SEQ ID NO: 108115

SEQ ID NO: 108941 - DNA, 741 bp, Enterobacter aerogenes
ttgttgctgctgtttgcgctcgcgcagcgcaaacccatcgcccggctcaatggccgccagtgcgggcagctggcgatgctggggctgacgcagaccgctatccagtacgccttcttctacgtcggcctggcgttcaccaccggagtgaagggatcgattatgaatgccaccgggacgttcttcagcgttctgctggcgcattttatctaccagaatgaccggctcagctataacaaaactatcggctgtgtgctgggcttcgtcggcgtgatgttggtgaacttcaacacctcattgggcgattttaattttgtctggcagggggatggatttgtcgtgctggcggcgttcatcctctcggcggcgacgctctacggcaaacgcatctcgcaaaccgtcgacccgacggtgatgaccggctggcagctggccttcggcggtctggtgctggtggcgggcgggtatctgaccggcggggagctacggatgcacagcctgaccgcagcgatgatccttggctatttaactctgctgtcgtcgatagcttttgcgctatggagcgtgctgctcaagcacaatcgcgtcagtatgattgcgccgtttaactttgttatcccggtggccgggacggtgctgtcagcgatctttcttggcgagaatatctttgagtggaagtacgcgatcgcgctggtgctggtgtgtgtagggatccgctgggtgaacaaaagccaggcgcattag

SEQ ID NO: 108942 - DNA, 729 bp, Enterobacter aerogenes
gtggcttctacctatggcgtactggcctcggtatcgcgccgctacgcgcaccgcattccattcctcgttaagctcaaccataacgaaacgttgagctacccgaccgagtatgaccagaccctgtacgccagcgtcgaacaggcgttcaaaatgggcgcggttgcggttggcgcgacgatctatttcggctccgaacagtctcgtcggcagattgaagagatctccgccgccttcgagcgcgcgcacgagctcggcctggtcaccgtgctgtgggcctatctgcgcaacccggcattcaaaaaagatggcgtcgattaccacgtttccgctgacctgaccggccaggccaaccatctggccgccaccattggcgctgatatcgtgaagcagaaaatggccgagaacaacggcggctataaggcggtgaacttcggttataccgacgatcgcgtctacagcaagctgaccagcgataacccgatcgatctggtgcgctatcagctggcgaactgctatatgggccgcgccgggttgattaactccggcggggcggcgggcggcgaaaccgatcttgccgatgcggtgcgcacggcggtaatcaataaacgcgccggcggcatggggctgatcctcggtcgtaaagcctttaagaaatcgatgagcgaaggcgtgaagctgatcaacgcggtgcaggatgtctatctggacggcaaagtcaccatcgcgtaa

SEQ ID NO: 108943 - DNA, 204 bp, Enterobacter aerogenes
atgcgccagcagaacgctgaagaacgtcccggtggcattcataatcgatcccttcactccggtggtgaacgccaggccgacgtagaagaaggcgtactggatagcggtctgcgtcagccccagcatcgccagctgcccgcactggcggccattgagccgggcgatgggtttgcgctgcgcgagcgcaaacagcagcaacaataa

SEQ ID NO: 108944 - DNA, 228 bp, Enterobacter aerogenes
ttgagtctcggaaaaaaactccaaaacaagggggaggtggtcgacgagatcgatgggtgggagataaaggacgaaaaatctatgagtgggattctcagcatggagaacttgaaggttacagagctagcgacggctctcatcttggagcatttgatccaaacaccggcaagcaacttaaaggtccggaccctaaacgtaacatcaaaaaatatctttgaggtgaattaa

SEQ ID NO: 108945 - DNA, 600 bp, Enterobacter aerogenes
atggcggtggcgctgagcgcgctgctgcactatttgatcccggatgttgaaccgcgtaagccgccgccgcgcatagagaaagacgccgcgcggatccgtcatgaatcgctgctttcaggcacggttgcgaccattatctttgtgatctttcagatctgcgatctgagcgattcgctatcggcgctgatggccggggtactgatcctgttcccgatgcattatcgcggcgcggtaatcagctcgatctggcgtgtggcgggggtggtactggcttgtctgtacattctggtggtgcagctgattatctatgatttcagcaaccacatgatcctgatgatgccgttgattggtcttggtctggcctttagcgcccgcctgcacgtgatggaaaaagtgggcgcgggcgtgggattcgccagcatcaccactatcggtattatgtttggccagaatctgcatccgaatcaggatctggtgttcagcgatctgtaccgtattacttcagtcacggtatcgctggtggcgacgctgaccatggtgtttctggtccatcgggtactgaactgcttcgcgccgacgcgttttgtagtgaccgattaa

SEQ ID NO: 108946 - DNA, 357 bp, Enterobacter aerogenes
gtgaccgccaaacgtaacgttcctgacgcgctggtggtcgatctgctgccggcaggccttgagctggaaaaccagaacctggccaatagcagcgccagcctgcaggagaatggcgaagcggtacaaaatctgcttaaccagatgcagcaggcggatattcagcatatcgagttccgcgacgaccgctttgtcgccgcagtcgccattaatgaaggtcagccggtgacgctggtctatctggcgcgggcggtgacgcctggcacctatcaggttccgcagccgcaggtggaatcgatgtatgtaccgcagtggcgggcaacaggggcggccagcggcccgcttaccgttacgccgtaa

SEQ ID NO: 108947 - DNA, 528 bp, Enterobacter aerogenes
gtggcaaaagggaatgcagtattatcagcccatctgacaggtactgttgggttaggtatattgccaaagggggctctgataacagcagccatcggtggcggagccaatactgcaatacaatatgccacgactagtgaagtgaattacacagatgcgttgatagcgacttgggttggagcagcaacctcaaaaactagttggttaggaactgtgggatggaatgcggcaggtggagctgcatcaagctatctgaacggcgatgatccatttaaaggcggcgtaataagtggtgtcgcttcgggtatcggttatggaataggtaaagttgccaaaatttcattagataaatgggttaatcctgcatggaaaaattatgagtgggttaatttggagatgggaataagtaagccattaccagtggttcctcgtcctgccgtgatagggaatattattgcttctggttcaactgagagcattggccaaggcagttctaaagcggccagaactctaagagaaggggataaatga

SEQ ID NO: 108948 - DNA, 168 bp, Enterobacter aerogenes
gtgaagcctgaccttgatgagcgggcattagcgcatattgaacgccgccagaatcactcctccgtagaagtgagcgtggcgtggctggaagcaccggaaggcgctcagctgctgctggtggctaacgaaaacttctgtacctggcagccgaacgaaaaatcgttctga

SEQ ID NO: 108949 - DNA, 438 bp, Enterobacter aerogenes
atgaaacggaaaccgactttatccctcatcttcgcggcgattgccgcactgacctttggcagtaacgcggcctgggctgggcatcactggggctacaataacggaatgggcgcgcagggttacagccagctcacccaggaacagcaagcgacagtgcagaagctacatgacaattactatgcgcaaaccagcgccctgcgccagcagctgcagtccaaacgctacgagtacaatgcgctgctcaccgcgcagaagccggaaagcggaaaaattgaagccgtggcgaaggaaatggaaacgttaagccagcagctggatcagcagcgggtaaaatttgatatcgccctggctgaagcaggcgttcctcgcggcgcgggtatgggttacggcggctgccgcggtaatggcggtggtcatatgggcatgaaccactggtaa

SEQ ID NO: 108950 - DNA, 324 bp, Enterobacter aerogenes
atgttctcacgtcttacccatatatgggataaaaacccgggccataagtaccctgccatacaggatatgctcactatttattttagtaacgagcacgatgattttggcaattcaattaatgagattatcggcagctatcgtgactacagtatctcatcaattgaaaatgctaaattagaaatttcctctttattagaaatcgaagatgaggaagtgcttacctccattatggagaaaattgcgaatgacaggttccatcccgaaccgtggggtgaaacatggcgtagcttcctggagaaaactctttttttattaaaacattag

SEQ ID NO: 108951 - DNA, 459 bp, Enterobacter aerogenes
atgcaggtcaaattcaccaacatcaccacctcgccgaacgatatcgtggtgaccacgccgttccaggtggagattggcgcgctaagcggtgaattcaatatctgtattcctttcgccatgattgagccgctgcgtgaactgctgaccaatccgccgctggagaattcccgccaggaagatagccagtggcgcgaaacgttggtcaagcaggtgcagcactctgagctggagctgattgccaacttcgtcgatatcccgatgcgcttgtcgaaaatacttaagctgcagcctggcgacgttttaccgatagataaaccggatcgcattatcgcccatgtcgacggcgtgccggtgctaaccagccaatatggcaccttaaacgggcagtacgcccttcgtgttgaacacttgattaaccctattttgaatgctctgagtgaggaacagcccaatgagtga

SEQ ID NO: 108952 - DNA, 186 bp, Enterobacter aerogenes
atgcgttttaaatacgccgaccggtttgccggactgcaccagcagggtctcgtcgctttccaggtttttcagcgccttcacgatagcgtcatagcattcccagttgcgcgcagcgcgaccaataccgccatagaccaccagctcatgcgggttttcggcgacatcgggatcgaggttattcattaa

SEQ ID NO: 108953 - DNA, 300 bp, Enterobacter aerogenes; identical to SEQ ID NO: 108853

SEQ ID NO: 108954 - DNA, 600 bp, Enterobacter aerogenes
gtgccgttgctggtggcttacggtctggctgatggcgaaacgttgacgataggttcttcctctgcgactcgtttcgatgaccgccagcggcagggactggaatatgtcgagcataccggggctgcgattgaagccggtaagatttcccttgaggatctggaaaaccagatgcgtcaggccggcgcaaaactgctgcgagcggaaaacacatcgactaaatccttagaccagactcacgaagagcggatgcaggagaattcacctctctacaccatggcaagctcgcttgaggatgcgctcgataatatcctgcagattatggcggaatggctgggcgagaaagaaggcggcaatgtcgatgtacgcaccgaactggatgtttcagcccagacgtttgatgccgcagctgcaacagctgttcagtcgctccgtcagggtggtgatatacgtcaggtcgatgctgttcgcgtattgcaggctctgaaatttatcgatccggatgcgaagcccgaagaggtaatcgacgagctgcgaaatcagcaggtcacgctggctggcggactgagtaacccgggtggtgcaaatggcaacggcgaatga

SEQ ID NO: 108955 - DNA, 285 bp, Enterobacter aerogenes; identical to SEQ ID NO: 108112

SEQ ID NO: 108956 - DNA, 321 bp, Enterobacter aerogenes
gtggtggggttttattcgttagcaaccggcagcgttaatcacacggaagccactggcggcctgcggcgcaatatgcccgatcctatcccggtcatcattctcgcccgcctggcgatcgactgcgcgtatcacggacaggggctgggagctgatttactccatgatgcgctcttacgcagttatcgcgttgccgaaaatgttggcgttcgtgccctgatggtccatgccctgaccgatagcgcgaaacgattctatttacaccacggattcaaagcctccaccacccaggaacgcacacttttcctcgcgttgcctaaataa

SEQ ID NO: 108957 - DNA, 186 bp, Enterobacter aerogenes; identical to SEQ ID NO: 90770

SEQ ID NO: 108958 - DNA, 357 bp, Enterobacter aerogenes
atgctgcgcggcgcgttgaagaaaactgatgtatcggcagcggaaccgcaggttgagctggcgcgtagcgggcgcagtttcctgaagggcctgctgaccaatctcgccaatccgaaagcgattatctacttcggttcggtcttttcactgttcgttggcgataacatcggcgccggtgcgcgttgggggattttcctgctgatcgtccttgaaacgctggcgtggttcaccatcgtagccagcctgttcgcactgccgaaaatgcgccgcggctatcagcggatggcaaagtggatagacggcatcgcaggaaccctgtttgccggtttcggcattcatctgatcatttcgcgctaa

SEQ ID NO: 108959 - DNA, 204 bp, Enterobacter aerogenes; identical to SEQ ID NO: 108282

SEQ ID NO: 108960 - DNA, 411 bp, Enterobacter aerogenes
atgatcactttcatcaccgttgaagacgtcaattcgattctcggtgccacctggacagatgaaagcaaaaaagccaaatttgtgctgatggctaatacctggatgaatggacttaacctgaaactgccgtgcaataaggcaacttacgaaaccattattcctgacgatgtgaaacaggctggcgcctatgcggcgctgtcggcggcaaatggcgggctgtatcagcagaaaactgattcgagggtattgctgagtaagacggttgacgctgacgacgtttctgtttcaaagaccttcgcagaactcgctaccaacagctctgcattgcttgaatctgacctgcagctggcgctggccatgcttaagccctatggcgttagtcagtcacaggtgcggctggtgagggggtga

SEQ ID NO: 108961 - DNA, 177 bp, Enterobacter aerogenes
atgaaatccattaacgatacgacccacaacaaacctatcatcacctttcttatctcaataattacctttggctgcgtatggttcataaccagcttaacattgacgctaatatatactctcagacttaaaaaattcattattcgggagcatgaaaaagcctatgactatcttacatag

SEQ ID NO: 108962 - DNA, 390 bp, Enterobacter aerogenes; identical to SEQ ID NO: 108873

SEQ ID NO: 108963 - DNA, 465 bp, Enterobacter aerogenes; identical to SEQ ID NO: 108892

SEQ ID NO: 108964 - DNA, 375 bp, Enterobacter aerogenes
atgccgggggaagaggtcaaacaacgtctgcgtaccggtacggtggtgaccaccgatgatcgcaactgggaattgcgttattccgcctcggcgctgcgctttaacctcagccgggcggtagccatcgatatggaaagcgccaccatcgccgcgcagggctaccgtttccgcgtaccttacggcacgctgctgtgcgtctccgataagccgctgcatggcgagattaagctaccgggacaagcgaaccgcttctacgaaggggcaatttccgagcatctgcagatagggatccgcgccatcgatctgctgcgcgccgagggcgaccatatgcactcccgcaagctgcgtaccttcaacgaaccgccgttccgttaa

SEQ ID NO: 108965 - DNA, 519 bp, Enterobacter aerogenes
atgggctacgaggactgcaaagcgattccaacctggatgccgccgcacgagtggtatcgcgggccggaagccgagaaatatccgctgtcgcttaataccggtcacccgattaaccgtctgcattctcagctcgataatacgccgctgcgcaagaaatacgcggtagccgatcgcgaagccatctggatccatccgaaagatgcgagcgcgcgcggcatcagcgaaggcgatctggttcgcgcctttaacgatcgcgggcagatcctggtcggagcggtgattaccgataacgttcgcgaaggcgtggtgcgcatcagcgaaggggcatggtttgacccggccgatccgtcacagccgggatcgctgtgtaaaaacggtaacgtcaactgtctgacctttgacgtcggctcctccagcctggcgcaggggaactgtggccagatgtcgcagctgcagatcgagaagtacaccggaccggcgctgaaaaacaccgcgcacgatgtgccggtaggcgcgtaa

SEQ ID NO: 108966 - DNA, 294 bp, Enterobacter aerogenes
atgttgatagcctgcggtttaacgattcccgacagtttccgtggtatcagtgcgtctgcatggacggcgctggcctatgtctcgttattcagcatgatgatcggctttatcttctggtatcggggactggcaatcggcggtattgcggcggtcggtcaactccagctattgcagccctttttcggcctggcactggcggcactactccttcatgaatcagtgagcccgttgatggttgtcgtcacgcttggcatcattttctgcgtgatcggttcgaagcgctttgcccgttaa

SEQ ID NO: 108967 - DNA, 345 bp, Enterobacter aerogenes
gtgctgagcgagtctgatttccaggtcaatcagctgttggacatcctgcgtgcaaagctactcaagcgcggtattgagggaagctcgcttgacgtgccggaaaacttcgtacacagcggaaaaacctggtttgttgaagctaagctgaagcagggtattgagagcgcgatacagaagaaaatcgttaaactgattaaagacagcaaactcaaagtacagacgcagattcagggcgaagaaattcgcgtcactggcaaatcccgtgacgatctgcagtcggttatggcgttggttcgcggcggcgatcttggccagccattccagttcaaaaacttccgcgattaa

SEQ ID NO: 108968 - DNA, 255 bp, Enterobacter aerogenes
atgcgtaagattgtcgtggcgcagcttaacgagcaacaaaaacagcgcatcgccgcaatactgcaacagtcgttgccgttgggcaagccgccgggccagccggattctccgggtagcggcgaccagcgtttttttcgcattcagataatcagcgcccggcgctatcacagcctgatcattctcatcccggaagagcgcgcgccggaggcgctggttgaactctggcgtaacggtgaaggctgcgttagcgattag

SEQ ID NO: 108969 - DNA, 216 bp, Enterobacter aerogenes
atggaactcaattgcccgatttgtcatgcccggttggaagcgcaaggcaacggcgcgcattgcgcgcactgtgagcaagattttgctttagaggcccgctgcccggactgccatcagccgctggaagtgctgaaggcctgcggcgcggtggactatttctgccagcacggccacgggctgatctcgaaaaaacgcgtcgaatttgtgcctgtctaa

SEQ ID NO: 108970 - DNA, 480 bp, Enterobacter aerogenes
atgggaacgtctgtcggtttgcataccgcaggtgtgccttttatctcaagcgcgctgttaagcgtaataagttttgctatgccgcagctaacgctttggggagccatctttcagtggttttcctggcccgcgcatgctgtttttgctggtatcatccccacaggtttactctattgtctgctgatcttcccgtcgatgacgctgttctctcggggttttctggcggcgcttaagttctatctaggtctgattttcctgaccgccgcgctcgccgcgggaaatctcatttacgcattcatttcggtattcatatttggcgggcatgccggtttgcttataagcgctttggttggtgtattgtttagcgctgggagcatcaaactgattaacagcgcaatgtttgtaaaaacctcagcattttatttacataatcgagtttggcgctggcaattaaaacatcatgtaaaaaatacagtatga

SEQ ID NO: 108971 - DNA, 414 bp, Enterobacter aerogenes
atggcgtatttgctcaactttcgtttgcccgtaatcatcgccatcaataatgatgacctctctgatacgcagatcggtcagcaccactttccctttaaccactttcgatttccagccgatgacctggcgaggattaagcatcgtggcataagggcgggatccagcggctttttcgtcggctttagtttttactgcctcccggtcaattttcgggaaatccaccagcgcatgtaccagaccatactggaatccgatgctgaaaaattgctgcgcccagacatcgagccggtttccttccatatcaatatctggcgacagctcccgtatttgttcaggagaatcctcactcaataccgtcggctcagcaaacactcgcccgatgttttgtttaatggcctcttcataggcaggtag

SEQ ID NO: 108972 - DNA, 210 bp, Enterobacter aerogenes
atgaccatcgccgaaagattacaggaagttggccgcagaaaaggcaaacgtgaagggcggcttgaaggatggcaagaaggtagagaagaagggcagcacgccgaggcgcagcgaattgcgaggatgatgcttgccgacggtattgcacctgaaaccgtactgaagatcaccggtctggccgccgaagaaatagccacgttatcacattaa

SEQ ID NO: 108973 - DNA, 342 bp, Enterobacter aerogenes
atgcagggattcgaactatgggcagagaacagtgacggtacgctaactcgcctggctatctcatcggtcgctatcgtaagcggctcacgcattaaggttgttcctgcggttccgtttaatgcggctgataaaatttatctggcctatgcattcacgccggaaaaccgtggcgccgacagtggaggcggtatctatccgaactggcccgccggatataccgccgggtgtcgtggaaatgtttgtgattctgatgattacgaatctgatctccgcgataaaaacggcaatccctatgaactccgcaactatctaactattttccggaaagaggctatttcatga

SEQ ID NO: 108974 - DNA, 426 bp, Enterobacter aerogenes
atggtggtgctgagctggataatcaaccacacgcagctcgggcgcgtatgccgcgcgacccagcaggatcggcggatggcggccattctcggcattaacaccgatcgggtgatttcgctggtatttatgattggcgccgccatggcgggactcgccggggtgctggtgaccatgaattacggcacgtttgatttttatatcggcttcattatcggcattaaggccttcaccgccgcggtactgggcgggatcggctcgctaccgggggcgatgcttggcggtctgctgctgggcgtcgccgaggcgcagttcgccgggttagtgaactcggattataaggatgtcttctcgttcgcattgctggtggctatcctgatttttcgtccacaggggctgttaggccgtcctgttgtcgccaaggtctaa

SEQ ID NO: 108975 - DNA, 435 bp, Enterobacter aerogenes
atgctctatgtcgcggataatcggcccatcgccgatatccgcgccgcgtttgatgcgcgcctgccggtctggtcgcctaagtcctcgcactggctatgcctggtggttcgcgatcggcaaagccatacgccccttggcctgaccggctattgccatcacgatgatgatatcgccgaagtaggctttctgttcgccccacaggcgcaggggctgggctacggatatgaatccctgcgctcgctatgtgattacgcattttctacaggcggcattcgtcgtcttaccgccagcgtcaccgccggaaaccaggcctcaaaacagctgctgctaaaaacaggatttatacaggaaggagagctacgcgaaagctactggctacatggccgttggcataatgactggctgtttggcctgatgcgccacgattaccaataa

SEQ ID NO: 108976 - DNA, 186 bp, Enterobacter aerogenes
ttgcaggtcgcactgattaaacacgcaactatcaagcgtggtttcggcggcctgaagatgggccatttcacactgattgaaggtcgtctgcttaagttgggcgccttgcagctgcaggttctgcagctggcactcggtaaacagggcttcatgcagattggcattttgcagattagcgccgcgtag

SEQ ID NO: 108977 - DNA, 303 bp, Enterobacter aerogenes
atgcggatcaaaaagcggttcagcgggttgctgttctccgccgggatcttgccgcggatccagaagcccatcaggatcgggatcaccacgatcgccagcagcgccgccccggccatcgaccaggttttggtgaaggccagcgggccgaacagtttgccctcctggccttcgagggtgaaaatcgggataaacgacagagtaatgatcagcaggctgataaacagcgcggggccgacctccaccgacgcatcggtaatgattttccagcggatgtcgttgcttagcttctctcccgggtgctga

SEQ ID NO: 108978 - DNA, 276 bp, Enterobacter aerogenes
gtgctggccaactttaccgcccggatcggcgagcgcgcgctattgacgctaagccattacgggaaaccgctgccgtttggcgctacggtatccattgctggcgcggcggaagaaggcatcgttggcgacgatggcgaggtgtatctctcaggccttagcccgcagggcacgctgaaagcacaatgggggccgcagcctgaccaacaatgtctcactcattatcatctccctgacgttagccagcctttggcgcgtcagcatctggaatgtcgctaa

SEQ ID NO: 108979 - DNA, 195 bp, Enterobacter aerogenes
atgacttacggctattcactgcccgaaatagccacccggcttgatagaaatatcaaaaccattcgcgcgcataaatttaatgcaatgaccaaactgggtgtgaactctgacattggcttgctcagcgcggcagacattctgctgtgtctgccggctaataatgacgacggccggggaatgcgcctggcgcaataa

SEQ ID NO: 108980 - DNA, 153 bp, Enterobacter aerogenes
gtgggttacgaccacctggtggccctgggctatcagatcgacaatagcctgcgcggtttgtttgacggcctgcatttgtccggccagatcctcgccgagcgcgttaccgccgagggcgagtacaattttcttactcatgaatacctcacttaa

SEQ ID NO: 108981 - DNA, 297 bp, Enterobacter aerogenes
ttgccgtggctgaaaaaagcggactgtctgctgattgacggcaccgtatggcaggataatgaactgcaggctgccggcgtcgggcgcaataccggtcgtgatatgggccatctggcgcttggcgatgaacacggcatgatggcgctgctggcctcactcccggcgaagcgcaagattctgattcatatcaacaatactaatccaatccttaacgagcagtcgccgcagcgtaacgccctgacgcaacagggaattgaagtgagctgggacggaatgcctatcacgcttcaggactaa

SEQ ID NO: 108982 - DNA, 294 bp, Enterobacter aerogenes
atggtgctagcctgcgggttaacgcttcccgtcagtttccgtggtatcagtgcgtctgcgtggaccgcgctggcctatgtctcgttattcagcatgctgataggttttatcttctggtatcggggactggcaatcggcggtattgcggcggtcggtcaactccagctattgcagccctttttcggcctggcgctggcggcactactccttcatgaatcagtgagcccgttgatggttgccgtcacgcttggcatcattttctgcgtgatcggttcgaagcgctttgcccgttaa

SEQ ID NO: 108983 - DNA, 255 bp, Enterobacter aerogenes
ttggatattcaactggaaggtacgcgtctgaccgttaaaggcacgccgcaggcggctgaaaaagagaccaaatggctgcatcaggggctggtgaatcaggccttcagcctgagtttcaccctcgcggataatatggaagtctctggcgccacattcaccaacggcttgttacatatcgacttaacccgccacgagccggaagtcgccgccccgcagcgtatcgccattagcgagcgcccggcgctgaatagttaa

SEQ ID NO: 108984 - DNA, 189 bp, Enterobacter aerogenes
atggtgatcgatctggctgaacagcgtttccagaaccagcatatcgaaacgctggctgaggttgaactgcgcaataagcggaataaaacgatccggcgtgataatcgtctcgccgcaacgcatacgggtgaggatttcgtaatagccctccccttctgcgttctgaatcggctgcgcatacagcagtag

SEQ ID NO: 108985 - DNA, 255 bp, Enterobacter aerogenes
ttggatattcagctggaaggtacgcgtctgaccgttaaaggcacgccgcaggccgctgaaaaagagaccaaatggttgcaccaggggctggtgaatcaggccttcagcctgagtttcaccctcgcggacaatatggaagtctccggcgccacctttaccaatggcttattgcatatcgacttaacccgccacgagccggaagtcgcggccccgcagcgtatcgccattagcgagcgcccggcactgaatagttaa

SEQ ID NO: 108986 - DNA, 270 bp, Enterobacter aerogenes
atgtggaaacaacgcatagttctggaagatcatcgcaaaattgcgttctcgcggcgtggtgtcggtgatgttctcatcatgcaaccagatttcgccttcactgacctgatccagcccggcaagcaggcgcagcagggtgcttttaccgcagcccgacgggccgaccagcaccacgaattcgccttcgtgaatatcaagcgacagcgcgctgagcgcgggtttaccgtcgaaatgtttactgatgttttgcagactgagcatagtggttag

SEQ ID NO: 108987 - DNA, 315 bp, Enterobacter aerogenes
atgctgagccgcatgatgtgtgacgcgctgcatgccaccgactgcggcgatggggtgatttttctcaccgataaaaccggtgccgcgccgtatcgcgccgccgcgctgatgagtcacaaacacacccactgtgaagtgatttccggcattcgctatccattgctggaggaaatgtatttacagcgctataccctcagcagtgatgccttccgtaatgctatcgttagcgccggaggccccacggtgagcagcctgtggcatcagcagcaaaaaaatccgccttttcgtctcctgcatgatacgttcggaaattag

SEQ ID NO: 108988 - DNA, 123 bp, Enterobacter aerogenes
atgtcgggtttcttgctctttatcgtggcgatcgctctactgggggtcgccgtatacagcctggtgtcttacatcaaagaacgccgcgccggtcagttgccaaccgataaaaaaaagaaatag

SEQ ID NO: 108989 - DNA, 123 bp, Enterobacter aerogenes
atgtcgggtttcttgctctttatcgtagcgatcgctctactgggtgtcgccgtttacagcctggtgtcttacatcaaagaacgccgcgccggtcagttgccaactgataaaaaaaagaaataa

SEQ ID NO: 108990 - DNA, 249 bp, Enterobacter aerogenes
gtgcagcactctgagctggagctgattgccaacttcgtcgatatcccgatgcgcttatcgaaaatacttaagctgcagcctggcgacgttttaccgatagataaaccggatcgcattatcgcccatgtcgacggcgtgccggtgctgaccagccaatatggcaccttaaacgggcagtacgcccttcgtgttgaacacttgattaaccctattttgaatgctctgagtgaggaacagcccaatgagtga

SEQ ID NO: 108991 - DNA, 297 bp, Enterobacter aerogenes
ttgctcggctactacggccatctggtctgtatacaagaccggctcgagcacgcgccgctaccggcgtttactaccagtatctcattgcatgaggtcgcgctggcggcaatccatccttacggtacccagaggcagtggagtcgattacgtcaggccggggaaaacatgctgcagcaaattggccgcggcgaaatgatgatgccgccgatagaaagcgtcagtttcgacgagatcccacaggcgctggaaaggctaaaacagaacaataacggtattaagtacgtagcggtgctgtaa

SEQ ID NO: 108992 - DNA, 297 bp, Enterobacter aerogenes
ttgctcggctactacggccatctggtctgtatacaggaccggctcgagcacgcgccgctacccgcgtttactaccagtatctcactacatgaggtcgcgctggcggcaatccatccttacggtacccagagacagtggagtcgattacgtcaggccggggaaagcatgctgcagcagatcggccgcggcgaactggtgatgccgccgatagaaagcgtcagcttcgacgagatcccacaggcgctggaaaggctaaaacagaacaataatggtattaagtacgtagcggtgctgtaa

SEQ ID NO: 108993 - DNA, 285 bp, Enterobacter aerogenes
atggcattccgctatggcggcgaagagtttttggtactgctttccggcagcgatgaggccagcgcagaagcctgcgcgactgaaatctacaacaacgtgagaaatatgactttacgctctgggctgacggatataggccaggtgaatgtttctatcggtattgccagctatccgcaacacgcgcaaagcgacagcctgctacgtgccgcagatgccgcgttgtatcgggcgaaagagctgggacgttcgcggataatccgctttgatatgctgaaatcggcataa

SEQ ID NO: 108994 - DNA, 285 bp, Enterobacter aerogenes
atggcattccgctatggcggcgaagagtttttggtgctgctttccggcagcgatgaggccagcgcagaagcctgcgcgactgaaatttacaataatgtgagaagtatgactttacgctgcgggctgacggatataggccaggtgaatgtgtctatcggtattgccagctatccgcaaaacgcgcaaagcgacagcctgctacgtgccgcagatgccgcgttgtatcgagcgaaagagctgggacgctcgcgaattatccgctttgatatgctgaaatcggcataa

SEQ ID NO: 108995 - DNA, 210 bp, Enterobacter aerogenes
atggataacaacggcctgttgcgccgaaccttgcaggcatggtttcgtcataacgtgcagccgttggccacctcaaaggcgctgtttattcatcgtaataccctggagtatcggctcaatcgcatttcggaactaaccggattggacctgggaagttttgacgaccgtctgctactgtacattgcattacagctggatgagcaacgctga

SEQ ID NO: 108996 - DNA, 135 bp, Enterobacter aerogenes
atgaaaaagtcacgattcaccgaagaacagatggtttttgccctgaagcaggctgaactggagacgtccgtgccggaggtctgcggtaagcagggcatttccgatgccacgttctatacatggcgcaagaaatag

SEQ ID NO: 108997 - DNA, 267 bp, Enterobacter aerogenes
atgaacgatggcggctacggcgtgatgcgcggtattcaggataaatactttggcggccgccagtattacaacgagctgcacacgccggactttaccctgctggcgcaggcgattggtctgcaggcgtggagcgtggaacgcgctgaggatttccaggcggtgatgaccgaagcgctggcgatgcctgggccatcggtggtggaagtgaaaatgggccagattggcgcgctgcgctttgccggcccgccgcagaaaacgctgtattaa

SEQ ID NO: 108998 - DNA, 186 bp, Enterobacter aerogenes
atgaaaagtaatacgctacgtaaaagatgtactgacgtgccaacccggaaggagtcagcgcaggcaggaaaggatttacgagaagccgataagcagcgacagcataaggaattcatcgccgcaatgaatgaatttattgcaaaaacaggtactctcacagatgatgaatttttcagggtactatga

SEQ ID NO: 108999 - DNA, 246 bp, Enterobacter aerogenes
ttgcgcgcgcctatcgtttcggtgtcgctgggactgccggcggtgtttcagtttggcgggctgaaacgtaacgatccgttgcgccggctgctgctggaacatggcgatgtggtggtgtggggcggcgaatcacggctcttctatcacggcattcagccgcttaaaccgggggagcatccgctgaccggcgcctgtcgctacaacctcacttttcgcctcgcgggtcaccggcaaaaacaaaaataa

SEQ ID NO: 109000 - DNA, 246 bp, Enterobacter aerogenes
ttgcgcgcgcctatcgtttcggtgtcgttgggactgccggctgtgtttcagtttggcgggctgaaacgtaacgatccgctgcgtcggctgctgctggagcatggcgatgtggtggtgtggggcggcgaatcacggctcttttaccacggcatccagccgcttaaaccgggggagcacccgctgaccggcgcctgtcgttataacctcacgtttcgcctcgcgggtcaccggcaaaaacaaaaataa

SEQ ID NO: 109001 - DNA, 204 bp, Enterobacter aerogenes
gtgacccgcccttctctgcaaggttacatcaccaaccgggaagagctgacggaagccagcaacgagctattttcgctgatcgccagcggtgtgatcaaagtcgatgtagcggaaaatcagaaataccccctgcgtgacgccagacgagcacatgagattctggaaagccgggtgaccgagggatcgagcctgctgttaccgtaa

SEQ ID NO: 109002 - DNA, 204 bp, Enterobacter aerogenes
gtgacccgcccttctctgcaaggttacatcaccagccgggaagagctgacggaagccagcaacgagctattttcgctgatcgccagcggcgtgatcaaagtcgatgtggcggataatcagaaatacgccctgcgtgacgcccggcgcgcgcatgagattctggaaagccgggtgaccgaggggtcgagcctgctgctgccgtaa

SEQ ID NO: 109003 - DNA, 126 bp, Enterobacter aerogenes
atgggcatgctggccgtggatctggataagcaactggcccagctcgcgaagctgagaaagaggtacggcggtgccgttgatgaaaccgcgggagcggccgtcagcgctgatcacgcggcgaagtaa

SEQ ID NO: 109004 - DNA, 174 bp, Enterobacter aerogenes
gtggtgagcaaagattcgctaatgctgcagctctacccggatgccgaactccgcgaaagccacaccatcgatgtgctgatggggcggctgcgtaagaaaatccaggcgcaatatccgcaggacgtgatcaccaccgtgcgcggccagggctacttattcgaactgcgcggatga

SEQ ID NO: 109005 - DNA, 231 bp, Enterobacter aerogenes
atggtcggccaggggctgggcttctcggtgctggtgacgcgcccggtgaacgacatgacctatgacggccagcaggtacgctgtgtggagattcaggatgaaatggcgaattccgcgctggtgatggcgcacctgcgcagtagtgaaccgactaaacccaccaaactgtttatggagtattgccgcaacgcggtattaagcccgccgcagcaagaagtgaaagtcgcctga

SEQ ID NO: 109006 - DNA, 153 bp, Enterobacter aerogenes
atgattgcgccgtttaactttgttatcccggtggccgggacggtgctgtcggcgatctttcttggcgagaatatttttgagtggaagtacgcgatcgcactggtgttggtatgcgtagggatccgctgggtgaacaaaaaccaggcgcgttag

SEQ ID NO: 109007 - DNA, 180 bp, Enterobacter aerogenes
atgtccaacgttgacgtaagactggaagtctccccacggatcaaggaaggtcggttcatatttgactttgccgcattgttccgcgccttcggcaaccacatcgcgatactgaccatcatttttatggaagccggtcacacctacgaatccgacaataattttgtcataagcggtcggtga

SEQ ID NO: 109008 - DNA, 147 bp, Enterobacter aerogenes
atgctcactgaagagttgcatggctttatcgctgtcaatccgcaggatttccgtatcgatttccgcacgaaggccgtggctacggctaggctgcagcatctcggctacgccaaacaggtgtggttcatagacggtgaccatgagtaa

SEQ ID NO: 109009 - DNA, 159 bp, Enterobacter aerogenes
atggtggggattggcgatctgttcctgccgccgctgtcaacggtgcagttaccgcattatgaaattggccgcctgagcgccctgcatattattaacggcgacagccatcgggataccattaaggttcccagcccgtggctgccgcgcgaatccgtgtga

SEQ ID NO: 109010 - DNA, 159 bp, Enterobacter aerogenes
atggtggggattggcgatctgttcctgccgccgctgtcgacggtgcagttaccgcattatgaaattggccgcctgagcgccctgcatatcattaacggcgacagccatcgggataccgttaaggttcccagcccgtggctgccgcgcgaatcaatgtga

SEQ ID NO: 109011 - DNA, 324 bp, Enterobacter aerogenes
atgcgccagcacgctgaattcaccctgacggcgttaatggtcgacggcggcccaaccaacaacgactggctgatgcaataccaagccgacctgctcggctgcccggtgatgcgcagcgatatcccggagctatccgccatcggcgcggcgctactcgcccgcaaagccctcactccgggtgagaccgccgacctgcaagcctttttaaccgaacacagcgcttttcaacccgacatggcccgccaccagcgactacagcagcgctggcgggagtggcgccatgcggtaaacagaacattatggaaaccggattcgccagcctga

SEQ ID NO: 109012 - DNA, 1635 bp, Enterobacter aerogenes
atgagtcatttattacaagcatatgatcttgatagttacgaagattttattaatcaggaaacctttgctgggcgtccattacatgaatttgtatctgaggtccagcggatctatctggctgataaacgcccttgggttattggttacagtggcggtaaggattcgtctgctgtaacaactcttatttatctggcattactgggattgtctcccgagcagcgtaataagcctgttttcgtcgtatgttcagatactttggtcgagacaccagtagttgtaaacctgatcagtcgaacattgaagctaatagaaagaggggctcgtcaggatggtttacccatatcggtgcaacaagttgttcctaaaacgcatgaaacattttgggcaaaccttttaggaaagggatacccggcgcctactcggcagttccgctggtgtaccgaacgtatgaaaatcaatccggttagtgactttattcgagataaagtaagtcagttcgaagaagttattgtggttttagggtcccgttctgcagaaagtgcatcccgtgctcaggtaattgcaaaacacaagattgatgggactcgattagctcgtcataccaccttagctaatgcatttatctatacccctattgatacttggggggtcgatgatgtctggaaattgttgagaggtgcattccgctattcaagtgatgtaaccgaatgggaaacaccttggggaggtgggaacaaccttcctttatggactttatatatggattcctctggtcagggggaatgccctatggttattgatgacagcaccccatcttgtggtaattcgcgatttgggtgctggacttgtactgttgtaaccaaagatcgagctatggaaagtctagttcaaaacggagagcaatggatggctccgttgttggagtttcgcaatatgcttgcgaagactactgaaccagaagagaaagataagtaccgtaactttaagcgccgaactggaaaggttagttatcaatatttaaaagagggggaggatatttcggttgaacgaaaacatgttcctggcccctatttattgaaatatcgacaagaatggctggagaagttactcaacttggataaggtcttgaaagcacaaggacatgatattcagcttataactgaaggggagttacatgctattcgtcaagagtggcttaatgatcctaatgaacctgattggaatgattctctgccaaaaatctataaacgtgtatatggtcatgatttagcttggcagatagatgaacgagttcgttttgctggtgcagatgcaggactacttcatgaactagccactgaacatggaattgtccctgagatggtcatgaagctgattgatcttgagatctcttttgaaggaatggggcgccgtcaaaatgttcaaaagaaagtagaatcgatattacaacaggattggggaacatttgaagagatcaaggaaaaatactcttcggttcagaaaaaaaatcagttcgatatgcttttaaaagaaaaagaagatattgaacttgctttggatgatctatcaaatgattttgatcggcttgagaacatattaaatagtgtgaccagtaatgatgaggtggcaaaatga

SEQ ID NO: 109013 - DNA, 1086 bp, Enterobacter aerogenes
atgcatgatcgtaaccagacaaattacttttacatgtttcctgcggtacgtggaatgcaggcaggaagagagttttacattgcgacctgcccattgctgacaatcccaaagattttcagctttgatgaagaagaggttccacctgaactgcgggcgcagcgttcattaaataaagcacggatacccgacatggtgcgctatctgttggataatccagataactatattttttctgcgcttaccgcttctgttgccgttgatgtgcattttgaagcaattaacgatgctgggagtctgggtacgttacaagtgcctatgggagcccaaattctgattaatgacgggcagcatagacgaaaggcgatcgaagaagcattaaaagcaaaccctgagctgggatatgacaacattccggttttgttcttcgttgatcgggggttagtgagaagccaacagatgtttgctgatttgaacaaatacgcggttagaccaagcccttcgttggcgaccctctatgatcaccgagatcccagtgctcaacttgcttgccatctggctgaaaatattgagccgtttattggtttcacagaaatggaaaaatcaagcatatcatcgctttccaataagctttttacgttgagcagcatcaagcaggcgacgaaagcattactcggtaaagggctgaaagatgtgtactccgatgacgaaaagcataaagcggaacgtttctggcgtgctgtgtttggagttatgcccgaatggcaaatggtacgacgccgtgagatttcgccagcgagtatgcgtcaggaatttatccattctcatggtgtaggtttacaggccatcggtttgatgggtaagggattgctacaacattcgccatataactgggagcaaaagttggaaggtttgagagatattgactggcgaaaggcgaatccggaatggctaaaacgcacgatgctgcatggaaaaatcagcaaatcagcgatatcgatacacttaaccagtaatgctctgaaacagaaactcggcattcctttaaattcagaagaacaaaaattagaagagcaactgaagtcatga

SEQ ID NO: 109014 - DNA, 249 bp, Enterobacter aerogenes
gtgctggggaatatgctgaccaatatgttcagtggttcacatccgcaggagattgtgaacatcatcgatgaacagcagccgcagccgcaacaagatgtcagcccggcgctggataataacgccgctgaggatccgttccgccagcaggacgaccctttcctggcggacaataataccttcgactccgatttcgacgccggcttcggcaatgacgatgatttcggtagcgatgatgacagctgggtttaa

SEQ ID NO: 109015 - DNA, 405 bp, Enterobacter aerogenes
atgtcaggaacgctaaccgctgatacagtaaatcaggggcttagctacggagcactggcggcagtcgtcgccggagttccgccggaagtggcgctgggctcactcgcaggggcggtaatatttgtcacctcagcggttgaatatcctatccggcgccgcgttcttctgtcccttctcagctttctctgcggtcttctcttctacaagcctacggcatcagttcttatcgggctggctagcatgatcccgacaatcactcaggactctttcgagcgcggcattgtgtattccgccggcgctttcgttgcgtcaattgtcgctgtgcgggttggcatctggctgtatcaccgctctgataatccacgcgatttaatcccgggaggaaaagacgatgacaggccatga

SEQ ID NO: 109016 - DNA, 546 bp, Enterobacter aerogenes
atgctgccggaacaccaaaatcaagttccacaaacttcgacaaatacgcaagactatactggcaaacaaagcgatagtcctgaatttgaagaagtagaagaagatctcagcaaggagatcattgaacacccagatgccttttcgcgtgtgcttgacaggcctgaaattcaggaaattgtcgtggctcatcatgcattccaggggccattaccgccgccatatcttttgcgtgggtatcaggatatcttgcctgattccccagagcgcatttttcagctgactgaaaaagagtttgcgcataggcaaagaatggaagaaaaggcacttgatggagccataaacagagacaagcgtggtcaatgttttgggttaggtgccactatatttactgtggcatgcgctacgatcttaggcttgactggtcatgaggtactggccggaacagtcatcggaacagtagtagcagtcgctggtatttttgttctaagacataaacctaacataaagaagaaaactgagaacaaatcatcagaagatgaagactaa

SEQ ID NO: 109017 - DNA, 1803 bp, Enterobacter aerogenes
atgagttactttggacttaacccggtaaaccagaatcagcaactggatgatgcagcttcgaatcctgctggcttcaacagtgatgtgggtttcttcgataatgcagtcggcgctggcctgtctggcctctattctggtctggtggctaaaccagaccagttactctgggctggcatggacaagctggtttcacctatcgctaaattcgtaaacgaaaacacctcagtaaacgatacgtctgcagaatacattgccgagcaaagaaagttagcacaacagcaagtaaagcgcctaacgccagacgcagcaaccacaggaacagctgggcaggttctgcatggactgttcgacatgggggggcaggccgtggttggttcgctacttgctggccctgccggcggtgcggcggcagtgacatccctgcaggggttttctgagtatgagcgccttactgcgcagggcgttgatttcaggacggcgcaggaagcagggctggttcagggcatcactgctggtgcaggaacgctgatcccaatgagtcttggcttgcgtgctggtggcgcattagcggaaggggttggtgcacaactggcgagaactggtgaaagtgcagtacgcggtgctgccgcgaccgcagcacgagcagttcctgacattgcctatgcagctggaactaacattgcctttgggatggctcagcgcggtttgactgcgcagacgctgcgtgagggtggctatactgagatggctaatcagtacgatgtatttgatcgccaggccatagctattgacgcagtgctcggtgtcgctttcggcggtttaggtcgctttattaatgcccgaggtgaatcggcaagagcaccagaatttacccccacagaggtggatgcggcactttccgccaacgcctcccatcatgctgagatcgatgtagccccaggcgtaccgatcaacgttctttcacgtgacgcgcacattcaggctttacagaaggccatgagagatgtcagtgaaggccgggaagtggatgttgccagcattgccgaaccagcatcattcagtgatattcccgggcgccgaagtttgattgcgcagtccatcgatgaggtgctttttcaggcagatgaaggttctgcggcgcgtgcaattgagacaaggattcttgaagagcaggccgcgcaggttttatcgcgcggggatcgtcaggtttaccagtctgagatcgccaacagtcagcgcattattgataacctgacagaacagcgtaaccaaattctttctgaggaaccaaagggaagcggaaaggcgctggcacagtcacgcgctgataaacaatccagattgcgcgaccttgataagcgaatcaccgaagcacaaggacgcctcgagttttcccgtgatgctctgtcacctcatgagcccggcggggcattctttgaagcgcgagcagaacttgctcgccgccagcaggccgaggcagatctgaatgcgcaggctctttcattctataaaactgcagaagtgcgcagtgctgacgaggctgccccgtttgatactgctgcatctttacgccaggcagagcagaaaccaacggcggagcaggccggtgatatggatcttcgcattgccgaggactcgttaaacgaatcgccggatatggtgatcaccgttcttgatgaagatggtaacccgcagtcgcgtagcgcgcgcgaggcgcttgatgaagccagtagagaaaacgaacaggcaattcaggattccagcctgtttgatgtcgccgtagcatgtttcttgagaggatag

SEQ ID NO: 109018 - DNA, 450 bp, Enterobacter aerogenes
atgaacgatcaggcaaataaaattcttgttgaattgctgcaaaaggcagcgaatggaattgacgccgcagtatcatttagtcaggcgcaaataccagaagttgtgaatcagttgcttgtctggaacatggtgcatagcttgataatcacggtggtagcaattttgactgtgcctttcattttctggcttgttaagaagcaatgccaaaaggttcaaattggagtttacgataatgaggggtattcgtgggatagaggtaagcccaaatacagcccaacattgatatgggatagcaaaggcgagctcaccttcatcatcgctcctttcgctgttgtgttagtcatatgggcaatgtgggtgattgcagccgtgactgatatgacatggatgaaaatctggatagccccgaagttatatctcctggagtacgcggcatcgctaattaaatag

SEQ ID NO: 109019 - DNA, 273 bp, Enterobacter aerogenes
gtgagtaaccagacaatccgaacccacacagaacgtctcgaaagggttatcgagcaaggcgttgagctgcgtgatgagatgcgcaggaaaatagcgagccttgagaagacggtcagtgcacagaaggctcaaatcatcaacgccacccgcgccaaggagttataccagcggcgccttgccaactacaagcgcactctggtagccgaaagggagaagcgacagaagctggaaggccagattatcaagctaaagcggagggttggcgatgcctaa

SEQ ID NO: 109020 - DNA, 237 bp, Enterobacter aerogenes
ttggagaagcgaaacgctgagcttggcaagcacgtaggaatgctggaaaagcggcttaagggaaccgaggaaagcctgattgcttccactgatatggtcaccgagctggagtcccgcaccgtcaccgtgaatctgcctaatcaaactgaattcgatgatccgctatcagcgtatgaggctatcgagaagtgcaaagaggcgctaaccgcgcagggcatcaagtgggagactgagtga

SEQ ID NO: 109021 - DNA, 822 bp, Enterobacter aerogenes
atgaaaccaggcatttatcacgatatcagcaacgaggattaccacgccggtgacggcgtgagtaagtcgcaactggatatggttgcaaaaaaccctgccctgctgaaatgggtaaaagcggcgccggaggatgaagagaaaaaatcggcgctggatatgggtaccgccctgcactgtctgctgctggagccggaagagttcgacaagcgtttcataaaagagccaaaagttgacctgagaacaacaaagggaaaggcagcgctggctgaattcaaggattcaattaagggatcgaatatgacgccaatacctgatgaagactggagaaaactcgggttaatgcataacagcgccatggctcacccggcggcgcgctggatgcttgaggcgctaggccactgcgaaacatcgatgtactggaacgacgatgagaccggcgaactgtgccggatccgtccagataagtggctcaatgagcacaacgtgattgtagacgtgaagaaagtggctgatatggaccgcttcgcccgccacatcgaggagtttcgttaccacgttcaggatgccatgtaccgggaaggtgcgcagaaagtaactggtgagccacacggattcttcttcctggcagtaagcgaaacgatcgactgcggtcgatacccggtacgcgttttcgaacttgacgcaccagatgttgatgccggcatggcgctgttccgccgggatctaaatacctatcaccagtgtcgcctttcagatgaatggggcggtgtggaaattattaaacgccctgagtgggcacgcaaacaggatatgtacgtatga

SEQ ID NO: 109022 - DNA, 192 bp, Enterobacter aerogenes
atgaacagagcatcacctgtggatttaaggaaaagcctagaaatcgccaataatctagcacacatcggtattcgatttgttcccatcccggtagctactgaagaagaatttcaggtcttgtcatcagtgttatcaagaaagcttgagcagatggcagctgaggcagaagaaagtgaaggcggtacagcatga

SEQ ID NO: 109023 - DNA, 297 bp, Enterobacter aerogenes
atggacgacaaactgtttaatgaattactcgatggtgtgaatgaaatggtcgccatcgaaaaaggcgaaattcagccgcaccctgaccgtgttcacagccatgacattcctgatgtaaaggcgatgcgaactgaatttggcatgaaacaaagtgaatttgcggcggctattggagccagcactggattggttcagtcatgggagctaaagcgccgcattccttccggcgtcgccttgaagctgcttaggttgctggagcaagatccgcaaatcatcaattgcttgaaaacagcctga

SEQ ID NO: 109024 - DNA, 321 bp, Enterobacter aerogenes
atgaaattcctttttattgaaactgctgcctttagccggaccagggaaggactcatgcaagatgatgaattgcgagagtttcaaacccatctcctggataatcacgacttgggggacacggtggcaggtactggcgggtgtaaaaaaattcgctggagtcgcccaggttcaggaaagtcaggtggtgtacgggttatctattatgttagagcgcaaagcggaagaatttacctcatcgttatgtaccccaaaaacgtgcaggacaaccttaccgacaaacaaaaagcattgattaaagcagcagtacagaaacttacctaa

SEQ ID NO: 109025 - DNA, 609 bp, Enterobacter aerogenes
atgcttaaacgtctggcttacctgattgctggcagcgctctcatgctgctggcggcggcgatgttctggtgcgtcaaccgcctgaacactctgacgctagcgcagcaacaaacacaacgccagataacgcaacggcgcgaccaaccgaagccagacaatgattaccgcgagctacaggttgccgtaaaaaacattaccgatcgcacggaagcgcttacccggcaacttaacgatgccacccgcgctcaggccgaacagcttcaacccattaacgaacagatcaaggtactggagagacaagtccagaccctgaacgccaattatcaacacctgcaacaacaaaccgccacgcgcagccgcgcaaaggcaaaacgtcccgtctcatctccgctttgggccgcaaaggcccctttttcccttatcagcagcgagtttcgcgccggacggcagttcgccgtcatcgcgccatccggctatcgctcgctctcgcagcttcagcttgttacccccggcgacagcgtgcagggctggcaactgctgcaactggacggcagtcacgccactttccgtaaaggcgggcagcggctgacgctgaacgccggaggataa

SEQ ID NO: 109026 - DNA, 408 bp, Enterobacter aerogenes
atgaaacaccttattccagccatgctgttgtttactgccaccgcgattgccgggcctgccgttcccatgcaggcgctggatgaagcccagttactgcccgtcgtcacccacactctacatcccggtcagcaaccgcgtcaggcgctcagcctgccggggatgacgccgctgtttttaatcggcgacgatccgctgtcaacagaatggctgcgccagcaccagaacatattaaaaaccctgcacgccaccgggctggtcgtgaacgtcaccacgctggcgcggttaaatgccctgcggtccatcgcccccaaactgacgctgctacccgtcagcgccgacgatatggcaaaacacctgcccatcaccgcgtatccggtactgatcaccgacaaggggctcgcacagtga

SEQ ID NO: 109027 - DNA, 684 bp, Enterobacter aerogenes
atgtccgaacatgcgccgcaaggaccagtacgccgtcccggtctgctcggctggctcgcattgttgcccggcgtgctggttggcttttgcctcggcgcatggatgctggcgataacgctggagtggctgggcgatgcgtttttctggcggaacacctgcgccagccacagtgagcaggtattgcaggagacatggcagtggtggcgggcctctgctagcgcaccggtgtggttagtagaagatctggtgattgtcagaggtaagctgcaacaagggatcgcggtgctgattacctcgctcaacggacaaagcggattgttctggacagaggctgtcaccacggtgatccgctgcgcattgctgtcttcggaaaatatcactctcacctttctgttgcggctggcgattttgttgcaggcacagccgctgtttgcgctcaccattaccatcggccttgttgacgggctggtacgtcgcgacttacggcggttcagcgcaggtcatgagtccgggtttgtttatcaccatgcaaggcgtatgatcagcgccagcctggcggcaacgggactggtgtggctggcggtgccgatttttctctctccaaggtatgttttaataccaggggcaattctatttggattggctgtatcggtggcgttaggtgcattcaaaaagtttttataa

SEQ ID NO: 109028 - DNA, 870 bp, Enterobacter aerogenes
atgagtttccatcaagatacaaaaacaaaaaaacatcatttcatcccacaatatatgcttaaaaaattctacaatgagaataatgaattttatgtattatttaaagatagaggcgttataaaacatcaaaccagcgcacaaaacttttacaaagaaaacttccatactataaacctttttggggagcgaaccgatatcatagagcaacttcattcaaaagttgaaggtgcattctccaaactctatgatttatttgaagagatccctgaaaccgtgaatagtttcgatataatgtccttaggaagcgaggttaaagtttttaggcttcttattctttcaatgctatggcgtagaccagcagcagaatcatatgttgatatatactcagataaaataattgaactcttcaaatctaatccttctgatatcataccagcagggctcaccctaaaattcatcaaatatctgcataaaaaaaggaataaagaaaacattaaaaaattgattcaacacatgctacttcctattatatcgacgaaactcgatgcaccaatacccaacgatctaaaatggcttattataaaaacaccagaagatttccgagataagctcatgatgggtgataattttttctcagatggagaattcccagagataataaacctaaattcagagttttcattcccaatatcaaaaaacactttttttgtatccacccgcagtaatatcattgattttatggataaaaattacattgaagatatgcaaagaaaaacataccttaactcaaacgaaaaaatcatatgtgctttaaaagaagaacttgaacatcaccttaattataagaatgatgacgataataattgttaa

SEQ ID NO: 109029 - DNA, 318 bp, Enterobacter aerogenes
atgttacaatacaagcagataaattatttcatagctatattttatctagcgccaaccttcgccgaccctctcaccgagcgcgaagagctatccctgtccctcaaccagcttagccaaatcgaagcctcgctccaccgcgcccagcaaagcgccagaactggcctcaacgagcgctactacttcgattacccacgcatccacggcgatatcaccactctgcgcaacgggatcgaacattacctcacccctacccgcgcccaaccgcgagatacggcgacactggtcgggcaatacagtgaggagaaaaccacgccatga

SEQ ID NO: 109030 - DNA, 708 bp, Enterobacter aerogenes
atgagttttattaaatacatatattcacaaaagagaactgaattaattgaacttagtgaaaaagagtatattgactctttagttaacaccagtcccgaaaaggcaaaaagagcttatgaaaaagcatgggaaacaagaaactttgaaattgagatgtattggaaaagagcaacatacttttgggcattcattgcaagtacgttcgtaggttacttcgcattaatttcatctgagaattacattaaatatgatagatttaaccatgttgaagtatattttctaatatgcatcggttttgtactatctttggcatggcattttactaatataggtagtaagtcctggcagaggcattgggaggtacatgtcgatttacttgaagatgcttttacaggtccattatataaaactgtttatccaaaattaacgtattctgtttcaaaaataaatgagattgttagctttgtttttgtttttatttggttcttacttggcattaagtactttttcgaccaaaacttaattcgcccgattgcagagactaaatctataaattggtttgttgttgtcagtacattgatgtctttgcttgttgttttttcgatgatttatggccacggtcgaggtcgtttcggctcaaggccggtaataatgtataaaagacagatttcttatgctaaaaccagcattgataagttacataaatag

SEQ ID NO: 109031 - DNA, 1050 bp, Enterobacter aerogenes
atgctggatactgaattgattgagatactacgcggtaaaaacatttctgaagaattgataaatgatgtaattgattccggatatatgcttagcgggcgttgtgatccatttacaggtaaaacatgggaggtaattcatgacaaaatgtatggtaacaaaggttattcaagttcatttgatatcaataagtttattagatacattcaaggggaaaatgtttttgaaaagttacctcctttcacagagtacattgtaaaaagctatgaagacatagataaaattttatctaccccaagaagacagcactatatcaatgaaggcaggctttcatttcgtggtcaagtatcacaatatacttttaaaagaaaaattccaaacccagtaagggctaataatacaggaagggaaatatcaatattccctggattatatagacaaaaagaagcgccatattcctttaatttccctcacaaggaagaacggagtatccttagatttcttcatgagcttgagcctaacaatccggatgtatacttagatagttactatgcatatgacattatgcgagtagaacaacattatgccacacaaaccacgggtttagatatctcttttgatattgaaactgctatattttttgccacctataattttggctttaattcaaatggtaatgcatatcatacaaaaattaaaaaaggtgatcataagggggtgatttatggtttttgtttcagagatccaccagtcaagaaaactgaatttttgattaaggaatttgacttatttaaaacatacaaaccagagagagttataaggcagtgttgtggtttaccattatttggtgattatgagcgtaacatcgcgattactgatctagactttataatttatctcgacaaagattttgactatgagtgtaaaagggatcctagttatatgttcccaaacacaaaagaagatcgtttctatggaaaacttcttgagctgaaggataaacacccgcatgaacttaaaaatattgtagagtatgaaggtagccgagtttga

SEQ ID NO: 109032 - DNA, 1296 bp, Enterobacter aerogenes
atgtcagaaagtctgcaacctaatgtcactcaaacgttacctgacgacagggaagagctttaccaccttgtctggcgcgagcctgcggagcgaataacttccctctatagcatcagcaaagaacaactgacaaaacgatgcgttgagttacggataccgagaccgctcgcaggatactggaaagcactggcgaaaggggccgctccgtcaataccagcactgcctgatttgaagaagggcaagatagaaaaaccctccaaaaaaactagccaggccattccttctccaacaaaaatgtcatcgaaagtagcagtgccagcaccgcgaaagcgagcaaggacagcgggtagtggctatgcactgatcaatgatctcaaaacttaccttcccgtctcttccgtcacaaaagacggctactacaaaccaacgaaaaagaagctactcgatctgaatgtttcagaaacggggttcaacagcgctatcgattttctgagtcggttctttgctgcactgggaaagcaagggtattgggtacgattagctgagggcaatgagggacttcattgtcagggcatcgatatcaaagaagatccaaaagagggaggtttacgttacgacagtttatggcgcccttgttcagccagtattatttgcgttgaggatatgctgttcggctttagtttggctgaaatgacggaatatgttccagcaaaagaaattaatggtcgatacattcgcgatgaaacgatgatccgctggatgagggggaagaatgacaagccatttcgctatgttgttaaacatgccttacctaccggacgatttctgttgcagctctactcgccatattcatcaacaaactggcaggtgcaatttcgacagacaaagcaatgtggccttataagccagataccgaagctcatttctgcgatgcgtaatgctgttccgttgattaagaagcaacaggaggaggcgagagtcaaagctgaaaaacggcggattcagtgtgaactggatgagaagagatatcaggaaaaggagcggatcagaagggaaaaagatgcatataacgctagtttggaagagctgaaagctattatgatgcagtgggtagaagataagcgtatagagcaattttttcatgaggcggaacgggatatggctggtcttgatgagttgcagaagatacagattatggaacgtctgcaattagctcgtcagtttttatttgcagattcagcaagtgagcggttgctgaagtggaaaacacctctggacaggtttagtaaacgataa

SEQ ID NO: 109033 - DNA, 285 bp, Enterobacter aerogenes
atgattccgaagcgtcttagaattgcgagagagttggctgacatgtcccaagaagatctcgctgctgccgcgggtgtttctgaagaaacgggatcctcaagaatttcgcattatgagcatggaaggcatcgaccaaaatttgaattggtttgccagttggctagggtgctcaatgttccggaaggttatttttacacgctggatgatagctttgccgaagcgatgctaaagctttacgctggtgaaatcgtgcagtggaaaaaaccagtaagtgaacctagttag

SEQ ID NO: 109034 - DNA, 261 bp, Enterobacter aerogenes
atgactaaacaagactggcacccagccgacatcatcgccgccctgcataagcgcggcatcagtatggctgcggtctcgcgggaagcggggctggcgtcctccaccctagcgaatgcgctttcacgtccctggccaaaaggcgagtggctgattgctcgcgcactcaacgttcacccggcaaaaatctggcctagccgttatgaggaagaaggcgaactgcggcaaccgaaaaatccgctccccgtcaggtgcaggttatga

SEQ ID NO: 109035 - DNA, 738 bp, Enterobacter aerogenes
atgattatttccgacgccagcctccacagtatctctacgccagctcaggttcagcaggccgctataccaccgccagcggaaatgccttttctcactgccccggctcgcaaccactccgctttccactacacccacttttcccgccatgccctgctacgccctatcgctcgtgaaacaggaagcaaaatctatctacaggaagaacccatctgcggcttttggtatctcaaccatggcgtagtcggtttacaccacacactggaaaacggcaaagaaatgctggtccgcgcctgccaacggggcgactggtttggctatctggggttatttggctcggagttctaccattgccacgccagcattttgcaaacggcatcgctgtgccacgtcatacctcactccaacagcgatttcctgcgccatcatccgcagttcgtccattttttgttaaatcaggtggtcgcaagtctgtccgatgcagaacatcgcatgacctggatagcccgttaccgcacccgtcaccgggtactgagcagcctctggtatctgacaagttattttcccaactacgactggacgtggcgtgaagtggcagaatttgccggatgtgagacagaaaccgcgttgaggttcagcaaggaactaaggctggccgggatactggatgactcacagcgtcgcttgcacgtatgtcacccagaacagctggcggcactacttgctggcactcataattag

SEQ ID NO: 109036 - DNA, 1152 bp, Enterobacter aerogenes
atgaaacacgcttttcatctgatggcgaagcctgcgggctggcgctgtaatctggcctgtgattactgtttttacctggcaaaagggcagggtgtgctgcgtgatacctgcggacagcggcatatgtccgataaggtactggaggcgtatattcgccagtacattgcggcatcggacggcccagcggtgaactttacctggcagggcggcgaacccaccctagctgggctggatttttatcgccgggccgtggcgctccagcagcgctatgccggggataaacgtattaccaacagccttcagaccaacggggtactgattaacgacgaatgggcggcatttctggctcagcatcgctttctggtcggcatatcgctggatggcccggcgcatctgcataatcattaccgcaagacaaacagcggtcagcccgtgtttgagcaggtgatggcgacgctggatatcctgaagcgtcatcgtgtggacatcaatatcctgaccgtggtgaacaatgtgacggcacaggctccactggacatttaccgcttcctgacgcgtgaggtgggggctgaatttctccagtttattccggtggtggagtatgacgcccaacgtgggctgttgccctggtcagtgacgggggaagattacgggcggtttatgatcgccatcttcgacgagtgggtgcgctacgatgtcgggagggtattcgttcagctttttgataactcactggcggcgtggctgggcgaacgcccttcgctatgtgtgatgcagcccacctgcggacgtgggctggtggttgagcagaacggcgatgtttacagctgcgatcactatgtggatgcggagcatcggctgggcaatctgctacagcagccgctggaaaagctggtggtgggtaaagcacaacggcggttcggccagcagaaagcgcagctcccagattattgccagcgttgtccgtggcgctttgcctgccagggcggctgtccgaagcatcgactacatgagcggctgaatcatctttgtgccggatatcgcatgatgttcagccatatggatccgtatatgacctatatggcgcagcagattcgtttgcagcaatctccggctggagtgatgacggtggtggatagtctgaagcagtaa

SEQ ID NO: 109037 - DNA, 801 bp, Enterobacter aerogenes
atgactgcatggatgattgccgcactctgcggctgtggtatggcaaccagcctgctctcggcgctgtttggcgtagggggcagtatcctgctcgtgccggtgctgcatttgctgtttccgcaatgtgctgtgcaggtgctggccgcgacgtccctgacggtggtgatgctgagtgcgttgattaacgtttgcgccttctggcgtcagggtatccggttaaattcgcggctgctggtgctctggtcgctgggtatggcgacgggaatgcaggcaggcgtgtacgccagctttttgctgtcggataaggtgctgctgatgctgtttgcgctggttctcgtggggctggcattacgttgtggattttcgcaccagacaaccagcgaaaacgtagagccagataaccggacgcgcagcgccgggatgctgctgtgtaccgctggtggtgccgtggccgggttaaccgggctgggcggtggctctgtgcttgcgccgatgatgtcgcagctctctgggatcccgcgccagcatatcgctgtgtactgcaactggatgatgctgttcggcagtgccggaacggtagtcagctatctgtatcgcactgcaccggatatcggcgcattgccaccggcgatgcagtttggttacgtcaatatggcgattgtggccgtgatttttctctgcacgctggcgttccagccggtcagcatgaggctgcgtactctgctgccggaatgctggctacagcgcgttttctccggcgtattgctgatgattgccacgttgatactggtgacgctatga

SEQ ID NO: 109038 - DNA, 1296 bp, Enterobacter aerogenes
atgatgcaaccgaatattctggtctttttcaccgatcaacaacgctgggacacggtgggctgctacaaccccgctgtcagtaccacacctgttctggaccagcttgcccgcgagggcgtgaagttcgaaaacgcctttaccgtccagccggtctgcggcccggcacgttcctgcctgcaaaccgggcgttaccctacgcagaacggctgttaccgcaataatatcgccatgcggcaggatgaggtgacgctggcgaagctgttcaatcaggcggggtatgacacggcctatatcgggaagtggcacctggcggatctcgatgaaaaaccagtgccggaagcactgcgtggcggctggcaatactggctggcagcagatgcgctggaacatacatcgcacccttacggcggtcacttttttgataatgataaccagccggtgcatttcgatggctaccgggtggatgaccagaccacgttcgcgctcgattacctgcaaaatcgccagcgggataatccgttcctgctattcctctcttacctggagccgcacttccagaacgatatggcgcgttttgtcgccccggatggctatgccgaacgcttccagaccgcatcggtgccgccggatctgcttaaccgtcccggagactggccgcagaacctccctgattattacggcatgtgccagaacctggatgaaaacctcgggcgtatcgttgattacctgaaggccagcggcgaatacgacaacacgattattctgttcttcagcgatcacggctgtcacttccgcacccgcaacgatgaatacaaacgttcgtgtcatgagtctagtattcgtatcccctgcgtggcgcggggcgggccgttcagcggtggcagaacggtggagcatctggtgacgctgctggatattccggtcacgatgttaagcgccgcaggcatcaagttaccggatgccatggtaggacgtgatttgcaaactgcactggatgctgagcattgggacgaggaagtgctgatccagatcagcgagtcggaggtcgggcgggcgctgcgcaccactcgctggaaatatgagattgtcgcgcccggcagcgatccgtggaatgagtctgccgcgacgatttacgtggagagccagctttatgatctgctgaatgacccgtgggagcgccagaacctgattgccagcccggaacatgcgcggatccgcgataaattacgtcaggatattggccgcaaaatgacggcaattgatgaagacctgcccgtcattgttccggtggagtaa

SEQ ID NO: 109039 - DNA, 1245 bp, Enterobacter aerogenes
atggctattcaacgcgatacaaaatggaatgtgatcctctggggattctttttcctgttctattactacaactggtcttcctgctttttgtttttacccatgtggctaacccggatggtggagctggataaaacgcatattggtatggtgttttcttcatttgcagtggccgctatctgtctgcaaccgttgctgggctggataacggataagctggggccgaagaaacacctgctgtggctgatcgttatcctgatggtgctcttcgcgccgttctttatttacgtgtatacccctctgctgcaaagccattttgcgattgggctggtagtgggtgggctgtatctgggatttatcttccacgcgggctatggcgcggtagaagcctttgtcgagaaggtcagccgtaatcggggctttgagtatggtcgcccccggctgttcggctgctttggatcggcggcctgcgccaccatctccggtattctgtatggtttcgatccgacatggatttactggatcgggtcggcgctggcgctactgctggtggtgatcctgttggttgcccgttctgagccattgccgggcattgaagcggagcaggtccgccaacaaaaggtgagcgtgctggagctgtttaaactccgtcggttctggtatttcacattatatgtattaggcgtagcttgtatttatgatgttttcgaccagcagtttattaatttttttacccgtttttttgaccatcaggaacaggcggcgagagcattcggatatatcactacagccgggaatcttggtgatgctgccgtaatgttttttattccgctgctgattaataaatatattggtagcaagaatgcattattaattactggtaccattatgacgattcggatcgttggctcctcctttgccaccggaccgattgaagtgctcttcttacggatgctgcataattttgaagtgcctttcctgctgattggtattttcaaatatattgctgacgtttttgatactcgtctgtcagggactatctatctggtgggcgtgatgtttatcaagcagtccgccgccattgttttatctaccgtcgcaggccacctgtacgacaccatcggcttccatagcacctatctgatcctcggcagtattactgctgcgttcactctgctgtccgctttcctgctgacttcgaccccacgccagaaaacggcagatgtctgcgcacccgccacactctaa

SEQ ID NO: 109040 - DNA, 3150 bp, Enterobacter aerogenes
atgaaaaaaacaaccggatggctctctttactggcgctgtcaatttctctggtctgccaccaggcagcggcaagcagccgtctgtctgcgtcggcaattcgtgtgatggatgcacaaggcaacaacgtcagccagcccctgctggacaataatccggcgacccaatggcagtcgaagctggattacaaccgctggctggagatggacttaaaagggacgtaccagctcagcgagctacagctcactaccccactcaacacgctaacgcgcttcgacgtttacagcagcgatgatggcgtgacttaccgcaaaatcgcctctgcaaagactggcaaaccgaacgagcgactgccactcaacgttcgcgccagccgcctgcgcatcaatatcaccgactattcggcgggtacaaagggcgtggttaacgatatctctctgacgggggataaaatcagcgacaccgcgccgacaccccccatgattcaggtcgccgattacggaaacaccgaatgggcaaaacgtcatcagcaccgccagaacacggcatatcgccagcaggaagtcgtcagcgaagcacaggcgctggttgaacgggtgcttggcgcgcagtaccagaaccgttttaccttcatggttactccctccaccaccggcaaagacagcttcaccgtgaaggaagccgacggcaaaatcagcatcagcggaccaaacggtatttcactggcctccgggctgaactggtatctgaaaaattatctgcacgtcaattatgatccgctgaacgtatccaatctaaccctaccgacaaactggccgatgccgcagggtgtgacggaaaaagcgacgccgtatcagtacaagtatgcccttaacttctgcacaccgtcctacaccatggcgttctggcgctggcacgattacgagaaattcctcgactgggcggcaatgaacggcgttaacctgatgctggatatcgtcggccaggaagaagtccagcggcggatgctgcaccagttcggctacagcgataatgatgtgcgccagtatctacccggcccggcttactttggctggttttacatggcgaatatgcagagcttcggcggcccgctgccgcagagctggtttgcccagcgcaccgaactggcgcgtaaaatccacgacaggatggaagtgtacggcatcacgccggtcttccccggctttgccgggcaggtaccggataccttcgccgccaaaaatccacaggcacaggtgatcgatcagggcgactgggttggctttgtccgcccgccgatgctgcgcacttacgttaaacaaggcgaggactatttcagcaaagtcgccgacgtctattaccagacgctgaaaaccaccttcggcgatatcagccactactacgccgtcgatccgttccatgaaggcggtaaccgcgccgatctggatatggtgaaagtggcgcagaccgtgcaaaacaagatgctggaacacgacaaaaatgcggtatggattatccagaactggcaggaaaaccccaccgacgatttcctgaacggcctgaagaaggaccatgcgctgatcctcgatctctacgccgacaacaaacccaaccatgcaattcgtcacgagttcagcaacacgccatggatctggaacatgctgcatgccttcggtggccgcatgggcttctccgggatgccggaagtgctggcacaggagatcccgcaatcgctggcagaatcgaagtacatgaaaggcgtgggcgtcaccgccgaatcgctcggcaccaacccaatgctgtacgaaatgctctatgacatggcgtgggaaaaatcgcccatttcgtcaacggcgtatatccacagttggctcaccagccgctacggtgcacagtcgccggagattgaacaggcgtgggatatcatggtgaaaaccgcgtatcaccgccgcaaagatcgtcagcgggcggaagactccatcatcgatgccaaacccggcttcggcgtcacccgcgcctgtacctactacaccgcgcttattgactacgacaaggccgagtttgaaaaaatcctgccactctacctgagcgtttacgaccgctttaaggataacccggcgtatcagcacgacctggtggatatcacccgtcaggtgctggctaacgcttcctatgaatattaccgcgcctttgaagatgcatggatggcgaaggattacagcgccttcaatcagctttccggcaagttcctgcgtcttatcaagcttcaggacaaggtactgagtacccgcccggaatttatgctcggcaactggatcaacagcgcccgcacgatgctggatggcatggacgactggacccgcgaccagttcgagtttaacgcacgggcaatggtcacgacctggggaaccgaacaggccgctgatgccgggctgcgcgattactccaaccgccagtggcagggactcaccggtgacttctactaccagcgctgggcaacctggattcaggcgctaaagaatgcggcggctaccggccagaagcaggatgccattaagatccactggttcccgctggaatatcgctgggtgaatcagaccggtaacggctatccgacgcagccttccgggcgcgatatccgacaactggcgcagcaggcgctgaaggagttctccgttaccagcaaggatttacgcccgtaccgggagaacaaggacaagcgcaatctggcgctgaataagccggtctttacccatggcgatatcatcaacgccgaattctcgaccgagcgcgtggtggacggacagtcctcaacgctgtggggcaataaaacctggcctgcggatctgattatcgaccttcagggcgtgcagaaggtagacggtatcgagctggagtttgagcagacagcggaggatatgcgtaacccggtggtctccggctggacggtagaaattcaggacgcacagggtaactggcgcaccattcaggataaatcaaaagacttctcgcaaaagcaggtcgtcaatgcagtgccgtacaaaggcgaagcgcagaaagtcagggtcacgctgaccggtgccgatttcaaactgcgcccggatctgaagccacagctggcggaagtccgcgtgctggcggcagcccaataa

SEQ ID NO: 109041 - DNA, 1008 bp, Enterobacter aerogenes
atgaacagaaataccctgctctgcgccctgccgctgctggcttccggtatcggcctgcccgtcatggcggcggatattgataccgatgacattcagcaaaaagtggataccggcctcgaccagactccggcatcaaagccctggaaagtccgcgcgggtctgctgatcgaaaccgaaaacaaagaaggacagtcgttcgacaaagacggcttttttgaacccacactgtggatggatttctcccgcgatcgctggacgttttatggctcgtattatcaggaaacgcacggcaccaattacagcgacggattcagccgcgacaactggtttaaccaatatgaatttgatgctcgctatctgatggtcgatcaaaaagatctggcactgggcatgaccttccacttccgaaattacacctttatttatcaggataacccggaaaaaacgcagtccggcggctataactcccagcgctggtcattccagcccgactggcgaattaatttcaccgataaattcaaatccaccggttgggtgacggtctacaactggtacaacaatctgcatgaaaacggtctggcgaaccgggaattaaaaggcgaaggcggcttcgaatatcgctttaatccgaccatcgcggtgcggctgaattactttatcgaccggggctggaataccaacagcgacgaccagaccggtgagttctgtcgctcgcagttgcgcccgtataccccaatcaccttctcactgtttgacgcaggccctaccacgatcacaccttacgggcgctggacgctggatgtctggtcgcaaaataagtcgcgtaaccaacgaatgcacaccacggaaacccgtaccggcatctttatcgagcaaaagctgtcgccgcatctctccatgacgctggattacgcctatgaagtgcaggcccggcatgatttatctcccggcgataagcctgttgtgaagttccacaaaaccggcctcggttttatctatagcttctga

SEQ ID NO: 109042 - DNA, 1377 bp, Enterobacter aerogenes
atgagtacaccaatatcaccgttcctgcccgataacgcagactggatctatcaacccgatctcagcgatgaatttaacggtccggacctcgatccgcgctggtgcccgtattaccaggcaagctggggcgatctggatgcctcccgcgcccgctatcgttttattaccgaatccgatggcaccgtcagcctggaactgtacgtagataacgccgggcagggatactggcagccgtggcgggccagtaacaacacctataaagtggcaggtatcacaggtggcgctcgggattatatgaatcagtggccgagcggcggttttcctatcaccaaccatataccgtattacgatgcctttgccacccgctacggctattttgaaatccgcacccgttttctgagcggaagcgggctggccccggccttctggttcctgggaatgcaggatgcggcgtacaccgaaaatatggaggtcgattcaccagaagtcttcactctcgaaaacgtcgtaaaatttaatctgctgccgcgacagggcatgcaacaagtctccattccgacgccttatggcgagggtactgaactaccggatctggaagacggctaccatatttatggtctggagtgggacccggaatatctgaagctctatatcgacggacaactggtttcaaccattgatgcagcgattgattaccgcatgttcccgctgatttctctcaatcaccatgaaactaataacgccgaagtgggcaatatctacgataacgacccgccactgcccaacgatgagacgtttaccatcgactattaccgggtatttaaaaaagcagatacgcccgccgatccgtggccgaattatcaaaacccgctgttgcccggctataacatcgccgaacgcgcctttattaatatctatggctatgacggcgataactccacctcgcgggaaggcaagctgaacgacggcgatcacttcagcgtcgcggactcctatcctaaaggtagcggcaccgaagaggaaaatgagcgctggtacaacgaccagttccgctatatctacatcgagtggcatcagccagtggatttcgacacgctggtcctttatgccacgcaggcgcaatcaaccgcgccgcagaatatccgtattgaggtttccgccgacggctacggtgactggactgtcgtgaagcctgatttcgatctggactggcagacagatgatccgggtattgccgaaggactgaaaattacgctggatacgccattgcagcggaatcaacacacccgcatcgtcatcaataccgcgccggaaagctacgctttgagcgaaattgaaatcggcacacagattaatgccaccacccgcttcaaataa

SEQ ID NO: 109043 - DNA, 1185 bp, Enterobacter aerogenes
atgaaaatagatgatagaaaagataaagtaattaatctattcaatgatataaactcaggagagatcaatacccgccctgatttccaaaggggagaagtatggtcatcttcgaagaaaaaaatgttaattgacactatattaagaaaatggcctataccgccaattcatttagttaaaatagatgataaaacatttgaagttcttgatggccaacaaaggttaactgcaataagagattttataaataataaattctcaattgatggtaatattcaacccttagatgatgaaatacaagcattaaatggaaaaaaatataagcagctcgatgatgatacgaaaagggaatttaacacatacagatttataatttatgaaatgatggaatattctgctggtgaacctggtgaaatatttcacagattaaatcaatcagttaaattaacctcatcggaacaaaggaactcattatttggagaattaagaagccaaacggctgattttgttagattaatgcaagataatggcgtgaataaagatctattaggattcacaaactctagacttgcttataatgaccttatagcaagagttggatatttattagaaaagaactctcttcgtgcaacacttaacgacaaagtgttaaattatagatttagagatgaaactggatttgactcagatatattagaacagctaagtttctcaatattaaccttagccaatatgcgtaagcatttagatgaatgtaactatagcattaatctaacaaaagcatcatccttaaactggatatactctttagcagaatataaaaatatcctttcgactaattcagacaatcttatggtagcatttttcaaccttgaaagagctaagcactcagtaaaaaacaatgaacaaattcctgaagacataattcatttctttggttccaatgaaacaaacataaaagaattattgcttatatatattgagaggtcatcatctagagtaatgacgacagcatctattataattcgtgacattataataaatttatcactgtataaggcaggaattactctgcctgatagtattgacacattacagcttgatactctagcagatgtaatagcatctcataatttcgatgtcaaagagtgtattgaaaacctctctaacgaatggaaggtttattaa

SEQ ID NO: 109044 - DNA, 153 bp, Enterobacter aerogenes
atgtctcgcatctttgtgctggaagaaagccacgctcaggtcatccactctcgcgaccattacaagcgcatgtcagaggaaggtctgaagcaactggcggagtcccgcaccgtcaccgtgaagctgccggagctacgcgagggggctgaatga

SEQ ID NO: 109045 - DNA, 141 bp, Enterobacter aerogenes
atgtctaccatgactttcgttgttgagtttgaagatggcaaagagccgccggtacacgcgcacatggaggtgtttggcgggaaggttatcgcagtggctttccgtgacgcacttgaagagccggaagaggatgaagactga

SEQ ID NO: 109046 - DNA, 198 bp, Enterobacter aerogenes
gtgctatacaccgtgacgtttaatgagactggacgaaaagaagactttgaacttggcgatgacgttagacccgaagatctgttgtcattaacactcgatggcgtgaaagatgactacatggtaatgaccgtaggcggaccagttattggcggcgtaggtgtgccatcggtcatcagggtcaaaaaagctgggaaataa

SEQ ID NO: 109047 - DNA, 465 bp, Enterobacter aerogenes
atgggtattaaagttagcggcattagccaggccaaaaaacacctcaatgacaccatcaacgatgtcaggggacgcaaggtcattcgtgcgcttcagtcagcgatgattcttattggtgcccgggcggcctattacactccgatcgacacctctaccctgattaacagccagtttcgggaaatcgacgctggtggcgttttcatcaccgggcgaatcggctactcagccaactatgccgcctacgtgcatgaggcgtcaggcaagctgaaaggtcagccgcgcgcgcactttggtataaccagcaaccgatctgagttcggtccgcagaaaccgaaagagttcggcggcggcaccggaaaaggcaactactgggatcctcatggagagcctcaattcctgaccaaaggcgcgaatgatgagcgcgataacgttgacgcggtgatgcgcaaggagctttcactatga

SEQ ID NO: 109048 - DNA, 384 bp, Enterobacter aerogenes
atgatacccatgatgcacgagcgggtgcgcaacatgttcggcgatgccgggctaacgaccggcttcacagtgcagcagctgatgtacgacgccccgggcgacctgtcgaaggcgatcatggtgttcaggccaaacggcgggtcgaatattcgtactgacctaggctctgagtatcacgtcttggtcgatgttgtcggcgcgaaagataagcgcaaagacgcgctcaatgctgtgcagcgcatcgtcgattacgtccaggccaaccccatggctgacgagtgcgtcggctacatccagaacatgggcgcaattcccgcgccggtgctcacagaagaagggcgaatagtctttcgactccagttcgcctgcacttacggcgaatag

SEQ ID NO: 109049 - DNA, 744 bp, Enterobacter aerogenes
atggctaattgccagaactcgaacgagcgcctgttcggcggtgcggtcgtgctggaagtcgccgatggctgtccggacgtcaagccactggaaagtgagtggaaggcgctggcggctggtacgtcgaaaggcttcgacttcaacccgaactcggttacctctgatgcggatgacggcggcggctatgtcgagaccatcatcaccaacagtgacttcaccctgagctttgaaggtgaggtgcgcaagaaggacaaattggatcagtacggtgttggcaagttcatcaagtatttcgctgatgagctgaaggccaagcgccagcccggtatctgggtgcgcatggactacggcccggttgaattcatcggctacatgaacatcacggcgctgagctctgacggtggcacgaacgacatcgtcacgttctccactgagttcaaagtcggcgacgctagcaccatcgaagtgaacgaaatcaccgcagtggcggtgactggcgtgacggtaaccccaacaatcagcaccggtacggcaggtggtaccagcaccttcacggtgaatatcgtaccaaccgacgcaacaaacaatgacttcactgtagcgactaccgatgcgaccaaggcaacggcaacagcatccggcaacaccgtcaccgtgacccgtgtcgccaccggcagcgcgcagatcatcatcaacaccgaagacggcaactttgtggccgtgcatacggttaccgttacctaa

SEQ ID NO: 109050 - DNA, 687 bp, Enterobacter aerogenes
atgaccgctttaaccgatattggcgaactatctatcagcgacagccgagagggcgggaaagattacctgttacgtccttcattcgaggctatgacgaggattggcactccggaagagattgtgcaggcatacgccaccatccacggcaatgatgtcgctcagctcattgaggtgtgcgcaggcacgctggggcgtttcccggcctggctatctccatcattcaatcgcgctgctgaaaagctgttatcaactagcatgctggtgctacaggcgtgctgccaagacgatctgacgccaatgatcggtgagtggaaagggtggcgttactgcgtcgtctaccgcccgggccagatgccgaagaacgacatcatcgtgctggcgcagcacctcatgcagcacggtgtcgtgggaaaagccaaggttcggcagttacagcgccacgaaacgggtgcgagaacgaatgaatttaaagccttcgactacatcagcgcggcacgcagtcactttgaaatgaaccgagccgaagcctctcagttaactatgaccgaattccagatgctgctggcatctaagtatccagaacaaaagggttttaccagagatgaatacgatgaacttgtagacatttacttgcggaaaaaagaaaaaagactcaaaagtgagcatgcatcactcgcccattcatga

SEQ ID NO: 109051 - DNA, 375 bp, Enterobacter aerogenes
atgcttgttacagctaaagcacagggcagaaaactcattgaatcaggaacgttccatgtagactacgaagtagcttctactagcggacttatattagcctactcaggcctaaaaataattgttaaaaccaaaatagttactgacattgagaatgaaaatcttagcgtacgtgtagagggcaatgatgttatctttgatcacgttacaactgttcctccttttggtgcaccggtagggttaattgtaccgtctgaaattggtgagcaatccaatggcctgaagatctttttctcttggttttctcacattgtgacttcaaaaaatggcgatagcactgttatcacttcatatagcttgtatgaaggtgaaaaatga

SEQ ID NO: 109052 - DNA, 306 bp, Enterobacter aerogenes
atgctggtttgccaggttctgcaccggatccacatcaccggccgcctgctgctgcggggtaacagcctgttgcgctcggattttcgcaagattagcctggtgagttgcctccagtctctcagaggtctcgttatattgttccttgctgattttcttcgcggccagtgcagtattcagatcttgcacatcctgcttgtaacttgcattctcgcgtgcttcagggagaagtttctcagccgcggcttgcgccttgatagcgttggccgtatcccactttttagcagcatactgcccagccagcgctaa

SEQ ID NO: 109053 - DNA, 174 bp, Enterobacter aerogenes
atgaaatggatatccgtcaaagagcgccatccgcggtcattcgtccgtgtctgggtgatgaccgataccggacagcaaacgacggcgtacgtcaaatccaatggcgagtggtacatcaactgcaaccgcatacgcgccacaggcgcaaaggtactgaggtggaaagatggctga

SEQ ID NO: 109054 - DNA, 426 bp, Enterobacter aerogenes
atggaacaagaagaaaaattgcaagaagtaatttcctacccacagaatatgaaagatagtgccttatcgcatcttgtgctatgtgcaaatctaaacgcagccgtggatgtcacgctcattattggtggacaagtagttgctgggcaattggtctcaggaaaggaatatgctgagactatggccggaaatctcagatctgcgaatgccagcgaagatttaaaagatgcaatggcttcgtttttcgactctttagcccaagagtatcgaaatgaagaagggcattccattccactaaactttcttcatattcgtaatcccgcttacttgagaggtgatggggggtggactaacgtgcaaggtactattgttagaatccctatcgaaaaggttagtggattctcgctgggaaaagacagccaactttga

SEQ ID NO: 109055 - DNA, 474 bp, Enterobacter aerogenes
atgtctagatatgaagatttaaacacagcactttctgcattgtatgagcatcaacatcagtattggcgaaaaatagaggcggtttattgcacgattgctaatcagtatgcaaagtacttaggagttactggcgttttcgtggatcttaaaggggacatgatatctcctgtcgtaactggtactttcgatcctgtcgacaatatcgttaaaaatactcctgctccattactaaaaaaacaaaacaagtatttgttttttgatattgctgtatctctttgcgaatcagggaccacaaaagtagcgtttcaatatttgatcaaggtgcagatgaggaaagatggtgatgagtatcatttggaagtgcctgattttaaaatcaactgtgtttgttatgaaattgattctcatgttgacttcactgacttctttgaagctgttcaggccgtaatgatgaacaaattaactccacagtag

SEQ ID NO: 109056 - DNA, 915 bp, Enterobacter aerogenes
atgttagatattaaatcgaaattaaagaaaaaaaggcctcgcccttcactacagattacatcagtgtctgattttgtccgtcatgttgtcaattggcggcttgatggtcatccaccgactgctttccgcggacagaggcattatggatggtattctgtacctaaacttttacgagatgataatgatattcatagtagcgaaaactttgctgtcagggatattgtttcattgcatcctagtgagtttgaatctgataaaactatgtttgaccgattggtcagaatgcaacactttggtttgcccacaaggcttttggatgtaacaacgaatcctctcgtagcactctggtttgcaacagaaatgagtaatgataatgaggagtatcatggtgcagtccaagcttttttagtgccaaaagaccggcagcgttattatgatagtgatagagttagttgcatggctaacattgcgaatctgaccaaaaagcagaaagaggaactagcctattgtgctgtaactgcctcatctataatcgaatttaataaggagcctatcgtcgacatcttggtttttcacattgggatggagaaggctcatttcagaaaggttgtaaaccctgacgatttattacgtccggtttatgtcaaacccaaaatgtctaacaagcgaataattgctcaggccggagcgtttatgctttggggtgtaaatattgatgcatctacagtcggtgaacgtttacgacaggatcgaatttggatagatgaagccgataaagcctcaataagagatgaacttaatcttttaggcattaatgagaggactctttttcctgaaattgacaaatcagcaaaattcataacagatttgtacgggagcaggcgtcggggtttgagtggaagtggtttactttaa

SEQ ID NO: 109057 - DNA, 528 bp, Enterobacter aerogenes
atgccggaagatatttatagctatgagagattcgaagagtttctacaacggctacctcagttgaacatcgttaccgaagcgacagccaggaatcttaaggagtcagccctaagattgttagcaacctacacacccgattttgatgaagatatcagagatttggatgtagatgaggcaataaggcaatactgtgagtcctcaggggtggatgtttcaaattcaacgttacattcgtacaagagtcgcctggcgtcagcaattgagaaatttattgagttccaaaatactcaggatgccaaagctgacgatgttaacaatgagaagtcaaaaccaaagcgccggagaagaatgcctaaacaaccagtccctgtatcggcaacaactcctgaaccgataaaaacttttgaccttccaattcccgtgcgggacggaatgattattacagttggaaaattaccgatggacttaacaattgatgaagctgaaagaattgcaacgattattaaatcgttcgcagtaaggcaataa

SEQ ID NO: 109058 - DNA, 315 bp, Enterobacter aerogenes
atgccaaagagcagatcgcactggacgcatcgggagccgcggcagatatcaaagtggctattgcggacgatgattgcactactcgggctgtgcctgctggcgcagttaagcggttgcagcaatacgcggacggtttacgttaaagttccggtggttccgttgccagccagcctgatggttgagacgccgataccagaagttcctgacggtctaacgtgggggcaaagtttggatttgaatgttagcctgctatcagccttggggcagtgcaatcgagataaagctgatatccgccaagctgttgcaaagtactaa

SEQ ID NO: 109059 - DNA, 321 bp, Enterobacter aerogenes
atgaaaaacggtatttatttcgttactttcagcagcaataacaatgatgttggtcaagggactgttgtcgtaaaggacaacgctatcaacggtggtgatttcggattcacctaccaagggcatattcaaggcgataaactggatctgcacgtttcacaacacaaccctcaggcagtcaatgtcattcagggtgtaaataattacacgatggaaatgagcattactgaaaggcaaggtggatatgttttatccggtgctgttaagggtattccccaagcaagactgaacgtaagtgcgaaattcattggtgaattagtttga

SEQ ID NO: 109060 - DNA, 405 bp, Enterobacter aerogenes
atgcatccctctgcgcgacggtggtctgatatggctaaaacaaccaaaactgtactgggtgatgatctgaatgcggaaggaactgcagatgatggtctgaatattgatgagctgaatgccggcggcagcgttcagatgacgcaacagcatgacgataaccacggcgagtcatcagatgatgaggataccgctgaaggagatgaccaggaagaagcgcctgagtttgtggtgctgaaagggaactgcattcgccatgacggtgaggtctaccgggaaaactcccttattccggtctccggtaaggatgccgagcgtctgctggcagcaggtgtaattgccgatgtccatgccctgcgacagcgcgcgttatctgctgcgcgtggtgtaaaaattacaacggagtga

SEQ ID NO: 109061 - DNA, 786 bp, Enterobacter aerogenes
atgagaaaagttggcagtacaactgacaccgctgatgctaatggtgaatacactaatggtaatgtcgctaatggtatttcaccgacaataattaatgctgagatgatgaatacctttcagcgtgagctggtaaacgttgtggagggcgcggggcttgagcttgatcctgatgatgattcacaggttcataaagcgattggtggcggtcgcctgcttaatattgtcacctttacgaagtcagggacttacactccaactaaagggacgaaaagagtgcgggtgaaagtttggggagcggggggaggtggccagaatgctccagttagtgtgggcgcatctggtggttgtgctggtggattttcggaagggttatttagtatttctgataacgaaactatatctgtgacgataggtactggtggcagtgctgttgctgctggtgtcgcgtctaaaggcgggaatggtggtgatacaaggttcgggagtttaatctcagctactggagggagtggtggcggggctacagttcctgctggaggtatcggaagtggcgggaacattttaaatattactggcggaatatctcaaggtggtctgtattatggttctgatgcttttattggcggggctggaggatctgcattttcatcaacgggtggcaatggtcacttcggtagttctggcgatgatggcggtttccccggctcaggtggtgccggggggaatggtaactattcatcaggaaaaggagcgaatggtttagtttaccttgaagagttttcctga

SEQ ID NO: 109062 - DNA, 1092 bp, Enterobacter aerogenes
atgcttggcctaataaggttttttttggcatcgtgcgtcattgcttttcacttaacggcccgcatacctgcacttggcaactttgcagtgaattgcttctatgttattagtggttttttaataacatacattttgcatgaaacatacaagttcaacttctctatgttttggaaaaatagaatactgaggttattcccggcatatatattttttctcgtcatgggatttcttattataaaattaattccatccgcaaaggaattccattcaaactggacaggcaatttcttacctggagatttattaggaaacctcttgatcttcccctgggctttcctttctgataatgctgtagcaaatccattcggtgccttttcatccatttatcactttgctattgatggtaatagattcagaatagtcacatcatcatggtcagtgggtgttgagataacatgttattttttattgtggcttttcatagcccgaaataaatttacagccattacgtcgattctgctttcactgctttatcatgcttacgtatatgtagtacaccattcttttgatatggcgtatttcccattccttgctgcaacacttccttttagcatgggttctctgggttattttgcccatagaaagttcaaagctatgtatctttctccacacaaagcttttttaataacatttatctgcatcgggatttttattaccaattggtatttatatacaattaatgcattaggtcagtacaacataatactttactacaccaataatgtaatagcattatttacaaccctggcattgttaaaaataaagacaaacatacatcttgagaaaatactcaagtggtttggtgacttggcctatccaatttttctttgtcaatattttggcggatttctagcatggattgctattggtggtgaaaatcgtggcttatccatctttttattaggctacccaatatcaattgcacttgggatcgcttgtgtaatattaatagacaagccactaattaaaattagagcaaaaataagggcggacgctcaaagcaaaaataatcaggaaaactcttcaaggtaa

SEQ ID NO: 109063 - DNA, 1566 bp, Enterobacter aerogenes
atgagtaacgatgaaatgaaatccaacatgagtactgcggttgttaacattaatggttttattacaccggaagaaaaaggggctgtaggggatggagttacagatgaccgcatagctattcaatcagcaatagatgaagcatatcaaaatgctatcaatggttctggacctacaactgtatgggctggaagtaactatcttgtttccttaaaccctcaatccccggtaattccaggagagatgtctgctgggcgaggggtgttatgcatgaaatcgggggtaacacttacaggtggaggtcagtttttattagttgatacgtatactggtacaagtccaggtgctgtaatctcgaactgggatgggaatgccaataacatcacaataaaaaatattaccattgattgtcgatatgatgttacttcagggagaggtataagcggcattaatattgtcgactccgataatgtacttatcgatggagtttcaataaaaaactcaacagggggaggggtttatctgcgtcatagtcgcggtaatagtttgaatgaaaattatggatgtacaaatagtaggattgtaaattgcagtgttaataatgcctattatataggtattcaatgtgaaaggcctagcgggatggttattagctcaaatgttattgttaacactctggataacggaatcgatattgagggtaataatagcgcaacgactggcgcaggatatgcggaaaatgtgattattagcggtaatactctctcgatggttaaaaatggggtgtttcttgagagttgtgggaatgcgaatgttgtaaataatcaaataataacatcaggggttggtgttatatttaaccgaattaattcggcatcctattataatgtgtgctcgcagaataaaattactggtctgaatgtttcttcaggatatgggataagattaaataatcaaataggtcggtgtcaggtaagtgataattttattagggtaatgaatgttggtatccactttgtagacaggattgacaggtgtaatataggtgttaatacatttgatagtataggtaatacgattctttcattttcaaaagtcccttcaggggtctctgttctacggtctagtatttcagaacaaatatatctcggtacacaaactggtggtattccatacccaacatcacccaggggatgcccttcaaactatccgaatcgaatgtctcaatcggtaagatataatcctgttttttttacggatatcactggctctggtgaggataacatgttgtacaggactgcaaaacttgcctggaatgaatcttggggatcatattcaaagtataatattacggggggatatacagagattaatggggtttttggagtcgcaggtgattatgttaatattaatgatataatttatatcattgcatcagtttcgcaatcaactacaacagtcaataaatggagtgcgcaacaatcatcatacatagctggtgattttacaagcgagattaatgactcctatactgtaaatacataccgatcaacttggggggagttataa

SEQ ID NO: 109064 - DNA, 834 bp, Enterobacter aerogenes
atgcaaattagtgctcaaaaagcaattgaatatggattcgtttgtgacagaaataataatagaatcacaacagatcattctaataaatcaagtgtggatctctctatcagagaaatcctttttaaagatgaaaaaaatcaggtaaggtctctcggaagaactttattaaaaccgcaagactcggcttttgtaatatcagaagaaatacttcatgtaccagagggctttattgcatatgtttttttaaagaatagattgtctcaaaagggctttcttgctctcaatactggtattatcgattcaggatataatggtccaatttcaacattgctaattaatttttcagcagtagaggaatatcttccaattactgatagcgagcaagataaatctttctttagagttgtgtttcacgaaattgaaaacaatccaaattatcaaccgattcctcctgcacctggttcttatgatgttgcagataaatataatacatataggacttaccgtgtttcagatataactaagtttccaaaaacttttttagaacccgtgatcctaaaagaacaaataagcaaagagttaactgagaaattatcaagtatatccatagctaaaatagggatggtaatcgcttttgttgggttattcctctcacttattccttttggcagagattactatttcgcagaaaaatttgatttgaatgaatttaatcaatataagttgcagtccgaagccaaaataaaagagttagaagaacaactggaaatagttaagggtaaaattggcactacaaacaaatcaaagagctctaataaggtcaataatcactga

SEQ ID NO: 109065 - DNA, 687 bp, Enterobacter aerogenes
atgaaaatttgtttttttgatatggaggggactttgcttgaaaagaactcatcttttgataatgggaaggttgcaccgagcgcgtggacagtacttgcaaaagaaatcagcgaagcctgttttgttgaagaagaaaaaacaaaagatttatggctagcaaataaatacatcagttacacacaatggatgaaggaaaccgtagaaatacaaatcaagcatggtatgaataaaaatcatttacaaactatattatctcaagcaaagatacaaagaggtgcggtagagcttattcattctttgaaaactcaagggtatttaacggtattgatatcgggaggatttaaagaattggcggacttgactcaaagacgcctaaaaatagatcatgcatatagcgcttgtgagtatttctttaatgatgatggtagcatcgaacatttcaatctattaccaaccgatgaggaaggtaaattagttttcatgaaacaccttgcgtcagaatataattcagaacttgaaaattgcattttcattggcgatggaaaaaatgatgtgtttatcgccaaaaatgtaggtacttccatcgccttcaatgcacaacgggaattaagagaagtatctacatttattgtagatcaagaaacacctgatttatcagtgattattgaccttattagagctctttga

SEQ ID NO: 109066 - DNA, 228 bp, Enterobacter aerogenes
atgaaacacaccaccatcaccactcaggaactcgaatgcctggaacatctgcgcaacgtcggccagctcgtgaatgccctgatgcaggagcaggactgcaccacccttcgccgcgatccggcacagcagtcgcagctcacctccgtgatttacctgatgaccgcccagctcgacggcgtggtcgagcgctgtaatcagcgctggctgaccggggaggctaacgcatga

SEQ ID NO: 109067 - DNA, 744 bp, Enterobacter aerogenes
atgaaacccgaaacactcatcaccgccctgcaagatgtagccgctcagcagtacgcagagaacagtccgcacatcaccgacaagctgagcgcattcactgcggccagagacacccacgcggccagcatgcaggcgctgaaagagattgatacgtccattgaacgctgtaagcaggagcggcagacagccctcgatgagagcgctgaggcggagcaggactggcgcagccgctttcgcaccctgcgcggcagtctcacgcctgaaatgaaagctgagcacagcaggcgtatcgccagtcgcgagctggccgacgagtttaccgacctgattgcggagctggagactgaccggacacgcgccatgctgaatgcctgctccaccggcaataaatacctttcagcgcatgaagatgcctttaccgcttacgccggtgcggaatgggctcaggctgtcaatgcggttcctgtcaccctcatccgcgctttcctgctgcgcattcgtgccctcgaaatgaagggagaaagcgccccgcagtccgtggccactggcgagctgcgcgatgcgctgagccgtcagggcagcctgtatcacttcgatatgatgcaggagccggtgttgtccgtgacgggcatgcaccggccgcagattactgacgttgatacggagctgttacgcagccctgcgaagagaatgatgcttgccagaaagctggctgaaaatggcgagacagaagcggaggggtaa

SEQ ID NO: 109068 - DNA, 219 bp, Enterobacter aerogenes
atgtttcactgcccgttctgcaaaaccagcgcgcattcccgcaccagtcgctatctgtccgataacgtcaaacagcgctatcaccagtgcatgaacatcgagtgctcggccacgttccgcacgcttgaatccatcgacggggttattcgttcaccggtgacagagccggttatcccgctacccgcaccggcggccaccgttaaccgtgccggtgcgtaa

SEQ ID NO: 109069 - DNA, 957 bp, Enterobacter aerogenes
atgcactttaaattttacacaacgttaagatttatgaagattacaggtgatgattttaatgattttgagctccttccgggtgtaactctaataagagaccgggcgaagattagaaaaataatcaacaaagacatcaagccctttacaggaattattgaatacgagcatttatataatgcaaaccacataatttatgctgatcttcaagatgattttttttcgccatctacttcaagtgctgatgcagtgatgacttggcttttgtggatagacatgcttattagcacctcttggttgatcaaagataatggtatgctttgcgaaattgcatattgcaataaaactgatcgtaaaacatattcagaatggtctaacaatagtttgttaagtttatttacgatggcagatggtcatcgtcatattgatgttgagttcagcagaaacgacttgattaaatgggaggctataaaccatagagttcaaacccatctatacaataataactctactgtttttgattcctttgttgattcaaaatattctcgatatggaagagcattaagctttataaaatcagccaagcgagatttcgatcctgcaatgaaaatctcccattattgcagcgcactcgagagtttattttcaacagatagctctgaactttcgcataaactatctgaacgaattgctatcttcttaaaagcatataactatgatcccatttgtacatttgatgaaataaagtcattttataacattcgctctaaagttactcatggtgatagtctaaaatcaactaaagttggtaaactaccagaagaaagtattaagcttgataattatttaagagagatcatgaatataataatagattctgatgaattgatgagtgtattcaatggcaataaagaatgcttcgaaacctatttcaagaaaaaattactacttggtagttaa

SEQ ID NO: 109070 - DNA, 1944 bp, Enterobacter aerogenes
atgatagcaggtctttttatacgcaacgttaaaacgtatcaaggtataaattatattccattaacggattcaccaaatttaagtggttttctgggaaataatggaataggtaaaagttctatcctagaatctttagatacaatactgaattcaaaagaatggaattataatgcagtagtaaaaaagagtgggctagaaaaatcaagcccatatatcgtgccggtctttatattggaagagacattctttggtccggaaactttacctttagcaaaaacgcttgatgctttagctcgagaagtaaatttggatgattcaactaattctcaaacaagaaatatactggagaatttcattcagcatcgtgatcgaatactaaatagacatgacctgcatggtaaattaatagtgcctattggtcgtttgtataataataatatatcggtgtctgttttggcgggaaggactttacctgccatcatagaaagaaacacatttgatgccgagtttatggtaagtgatgagagtgtagatttaacaggatctttcagtaaattgttagactatattcttaataagttagagtatttatatataccaaaggaacttgatgcggagctttttactaagctagaaagtataggcacgcaggttttaatgggagagtctttgtatgaaattcttgatagaatagtaggtgattcaacgattgctaatatcaacggtgaactgagtgcttttcttgatgagctttcaactaaattgggcgattatatatataaaacgccattggataggcaaaggagaattcaaagaaaagaagtatacaatttaattattcaagctttctttaatatcagaaagttacataaaaggcatggtagcgagaattatatagaaattggtaatttaagttccggggaaaaacaaaaagccatcatagatgtggctcatgcactgttaacgaaacacagaagaaatagcgataacctaattataggaatagatgagcctgagtcatctttacatatgtcagcatgcttcgagcagttccaagcgctttctgagttaagtgaaagatgtagacaattattttttacctctcactggtatggttttctcccaactcttgagaaaggtgccgttacaattatatccaagaaaaataatgagcatgttttcgatttgataaatttggaatcttacagggaggaaatcaagcagcttgttcgagaaagtagagggaaattaccatttgatatcagaattaaaagtatgaatgattttattcagtcacttttatctagtgcgacaggcgataatccatataattggctgatttgtgagggttcatcggaaagaatatatctgtcagcatatcttagtgatttaataaaagaaaggaatcttcgtataattcctgtggggggagcgtcagaaattaaaaaaatttataattacctctcaggttgctacaaggatgtagagagtgaaattactgggaatatatatttgctggctgatactgacagccagttggttaggtacgatgttattacgcatcaaaaattacattgtaaaagatttgtttatgatagtaatagtaataaagctattttagttaagatagactctaatccagtatctccagcaacagagatagaggatgtattaaacgcaaggctctattaccaatcgttatccacttttgttggtagttacggttatttaagttttattaataatatagcaactccagacgaaggtctggaatcatactctgctcttgatttaaggcagagtgaaaaagatgcgataactagattctttgatgaaggcaataataagtttctgttcgctaaaaaatatgttgagttaatgacggaggaaaatagtattccggaatggattagtgaaatcagaagggtaatgacttcgcgatag

SEQ ID NO: 109071 - DNA, 888 bp, Enterobacter aerogenes
atgagcaccatcctgaaatgggcgggcaataaaaccgccgtcatgcatgagctgaaaaagcacctgcctgcaggcccgcgactggttgaacctttcgcgggttcctgcgctgtgatgatggcgacagagtatcctcattatcttgtcgcggatattaattcagacctgattaatctttataagcagattgcatttgactgtgagaagttcatttcaaatgcaaaacatttctttttaggcacaaatagcgcagagtcttattacaacatccgtcaggactttaatcattcgtctgaaatcaccgatttctggaaagctgtatttttcctttatctaaatcgccactgttatcgtggattgtgccgttataacaggaaaggtgaatttaacgttccatacgggaattataaaaaaccatatttcccggaagacgaaatcagagcatttgcagagaaagcaaaacgcgccaccttcatttgtgccagctatgaggaaactttagcgatggtcaaagtaggtgatgtgatttattgcgacccaccttatgacggtacatttaccgattatcacactgatggtttcaatgagcttgaacagcgtcgcctggcgacgactcttgatgtactggcatcagcaggccatcaggttgttgtgtcgaacagtgaaaccgagctgacgaacgcgatttaccagagttttacccgccaccgtattaacgcaaaacgcagtatgggcgttgccggtggtgatggtaagtctgcaactgaaattatcgctgtttctcaacctctgatctggtccgggtttgatctggcagcgtatccagtcgtgagtgcgtcttacgaaactttccaaagagagtatttgtatgagccatcacgacgttaa

SEQ ID NO: 109072 - DNA, 234 bp, Enterobacter aerogenes
atgcgaaatatcgaaacccgttccaacaaaatcggcccggatgatgcaggtcttaaccagatactgacagaggcccgtatggaagaacgccgtgcacgtgctgcggcgatggctgcccgtcttgatagcctggcgtgtcacatcacatcgcgccagcttaatcacgttgaggcggcggagctgctgcgcgttgctgcggaaaacatccagaacgaagcgcaggagatccactga

SEQ ID NO: 109073 - DNA, 339 bp, Enterobacter aerogenes
atggctttcaaagctgaagatatcactatcaatatgagcgccgggcagcgtgccagtgcgttaaatcatatatctgtgctacgcaccgctctatatggcgactgtgaaaaagaacttaatcgctttattaacgaaatgcgtgataagcgtgatgaaaagtacgagctgaataatcgtgtgcttgctgcattattttttcttgcaaatattagcaaggagcgtcactgcgttgagtttagtgagctgacgagtgacgaggtaaccgcacttattggtgtgatgaaccatcttcgcgcagtcgtgagtttatttccaaaacggctagccatgccgaattaa

SEQ ID NO: 109074 - DNA, 405 bp, Enterobacter aerogenes
atgtaccctcaggcagacgaaaaaaacaagtccaaaaacgagagtcagcccacagtacgccccctttctaagattgtcgtcccgccagtgaaacaggtaacaatagagggcggtacttttaatgaactggaggatatttatcttgatcaggggctgatttcaggtaaagcagaagactgtttgtacgtaaaaacgactgaaggggattacgttattgatacctctacaaaacagctcagtaacggaatctggcttatcgatattgatggaatgaaaagtatcgtgaagattgcccgcatcccagggaataaaattattgtccatcaagatgacacctcttttgaatgctctgtcgacgacgttgaggtaattggccgtgcagtaaaagtcattaagagcatttaa

SEQ ID NO: 109075 - DNA, 1551 bp, Enterobacter aerogenes
atgaaaaaaataacggtcttagattcagatatcctatctaaaatgaagatgagagctgtcaaatcggcaatccgaaaattacagccagaaacatttattcgtcaatgtatggattataatctccagagatttaaagatagtctagacatgttgaaacatcacccttggattgtaaatctatgcatcaagtgggcagcatcaagcataggtgataaaagggccacaaaagttggtgatactcgcacactcaataaaattctacagcaaacatacgatgtaatgccttacatcccagttggtttgaaaagtgctgatggtattgatttcttctttagaaataatctatatcagcagctaatgtaccaaacttcatctactggtcactacattagcagagaagccttcatatttggaagactcgatcctcatcataaattatcaagaaggttctttgaattaactaatttatcagttgaacgctttgtcatgttatcaattacattcaccttcttaatcagcagcaaaaaaaatgtaataaaagaagtaacagctgacatgtttagtatattgacaccatatataagccgagaagagattttctattttttggattcattatcaattagttatgaagagcttcctgagttttgcaaaagaaaaaccacggaaaatccgttaaaagaatacttcttaccttcaccatttattgagaacccattaataaaatacaacgacaaatttttattactacatactcaactgactttagctagccttcaaacatttatctatgacttattaagaagagatgatcctgaaaagtttatggacagctttggctcaatatttgaaaatcttgtcaaggatatatttgatgaaagcaaaataagatacattgatgagcaatcacttaaaaaacatttgcctcaagaaaacaaagtggttgattttttaataccccatgaggcagcgaacatattcattgatgctaaaggggttgagatacatgagcgaggcatggttactctcagtcatagtgaaatatcagggaggataaaaaactcagtattaaaaacaatcgaacaagcgcactccgttaatagggaaatccttaactcacctaaattaataacagatttcaaaagtgaatcttatattttatgcataacgtataaaaacctcatgcttggaaatggcacctttttagaaaagtcatacgccactgatggagtttcaaaaatacggaaaaatcacgatgatgcatatcaaattccagatagtcatattttttgcattagcattgaagaatttgagtacttgatgtcatcttgtaaagagcatggtcgccaaccatatgaagttttaaggtatgccgttgaaatgaatagaacaccatcacaaactgtatttttattcattcagcacctcgaaaaattctttggtcaagttacaaagtcggaaatgattaggaaaacaggtttagatttacttgaacgaatgacagagaacattcccggacttaaacaaaatgtaaatttggttaatgagtaa

SEQ ID NO: 109076 - DNA, 615 bp, Enterobacter aerogenes
gtggtttcaggtgcaaatgaatatcatgagtttgtactatcgctagttgcaagcatgcttaagaacccggttgtacgccgtaggtttgatgatcaagtctacaaaatgtcatttgatgaaccggacacggttagcgaaactatagatgaacttgtttttctagctgatgttaactggcacctagggcttgggctcctgaacgcgaataaaaatgaagcgataaagtgcctactcctaagtattgaataccttgattactgccgtggtcttgaagatcaagaattgtggcaacagcaacagaccacaaaactcgatgttccggtgaaggggggcagaagtaaagctgctcgctttgatcccgttaaagccaaaattatcaggcttttgcaggaagcttgcccttcaggcggatgggatgctaaatcagaagctttgaagggcatagagaatgggattaatgaactggaatggccatctgcccgtgaccagaataatctgaccaaaaccggagctgaaatatttgcaatgaagatacgccaggttgaagtctggtcaagtcaggatcagaaaatcaaagctgcatttgatagtgtcgtaaagactaaaaagaaatag

SEQ ID NO: 109077 - DNA, 330 bp, Enterobacter aerogenes
atgggttttccttcgccggcgactgattacatcaagagaacgttaaccgtcgatcttgtttacggtaccgggccaaacccccgaacggttgaaacagctactggatacgttgtagtcgatgtatcaatgaagcccaggcagggcagtaccgtgatgattacctatgatggtattactgactttgcaaaggtaatggggagatcgcttatcaccaaggatggtgaagccattgagggggaaacgcttaacgatgttgttgttttcggtgtagtgacgttcattatcccgcgcgagcatggaagaggatgcgtgtccaatatgagtttttaa

SEQ ID NO: 109078 - DNA, 180 bp, Enterobacter aerogenes
atggactccattacccagaatccgaaagggtactcatgcctgcatacttgcgacttcatccatgactgcgaagccgtggtattcatttgtcaggagaagaggctaatcggtggacagagagaaatcagatctacttcgtgtacaagtcaacgtctgagggggaaaaccgcctctggctga

SEQ ID NO: 109079 - DNA, 438 bp, Enterobacter aerogenes
atgaacccgacgctcaggaataagatgattggcgcaatcgccagcggttcctgcgccatcgcaatcgcttctgtaatgcctggtgacgctgatggactgaaagggcgccgctattacgcttaccaggatgtcgtcggcgtctggactgtttgtgatggacacactggcgccgatactcgccgcggtcaccgctactcagacaaagagtgcgatacactgctgaagtcagatctgcgaaaggttgctaacgccatcgacccgctgattaaggttctcatccctgagcctacccgtgccgcgctttactccttcacttataacgttggctctggtgctttcgccagttccacgctactgaagaaattgaatgctggagacgtgccgggtgcgtgcaaagaactgcagcgctggataatctccacaccatacccggtctga

SEQ ID NO: 109080 - DNA, 153 bp, Enterobacter aerogenes
atgccagctttccagctcataaccgaaatctatggtaataaaaattatagttcccggttccttcatttctttttgtatcaagttcgcgtcaaatcaataaaatccgtgacggatatcatctatttcaatcataaaaagctaaattatttttaa

SEQ ID NO: 109081 - DNA, 393 bp, Enterobacter aerogenes
gtgaagcaggcggcggatctgcatactaatatgctctctcaggttatcaccgctgagtatctggaaatgaatcgcctgaacgatcagatcgctctgatccgcgaagactaccgcaagaagtgcgtggcgctggctgatgcgctggaaagtcgtcttggcgagcatcttgagtttagccgcccggaagggggaatgttcctctgggcccgtttccgctatccgttcgataccatggcgtggcttgagaagacgttggaaaacggcgtggtttacgtacctggtgaagcgttctacaacgataatccggatacccgcacgctgcgtctttcctactcgacggtttctgaagccggtctgctgaccgccgtcgaacgtctggcgaaatcgctgtaa

SEQ ID NO: 109082 - DNA, 342 bp, Enterobacter aerogenes
atgggtaaaaaaataatgcaaagtcgcaatgatgaatatcataagttaactcgtggggaacgtattggctacgggatgggcgattttgcgcaaaacctggttttcggcacaataggcggctttcttgctctacatatgttgacggtgaatacgatcagtacggccactgcggggttcatttttcttttcgtacgaataatcaatgtgttttgggatccgatggttggaacctatgtagacaaaaggacgtcagtcgcgggcaaataccgtccctggctgttaagagccggcgtgccgctggtgatcctttccgctttgcttttgctcccattcctggcgtga

SEQ ID NO: 109083 - DNA, 1161 bp, Enterobacter aerogenes; identical to SEQ ID NO: 88361

SEQ ID NO: 109084 - DNA, 126 bp, Enterobacter aerogenes
atggttaacctgttaatcatcgttctgagagcggtagctgcgcttgcaaatgcgctgattgccattctggaactgatccgccagttcatggggtctgaagcccaaccgtacgatactgtacgctaa

SEQ ID NO: 109085 - DNA, 570 bp, Enterobacter aerogenes
atgaaactctatatcgcagaaaaaccctccgttgcaaatgacattgctaaagcacttggaggaagcattcaaaagaaaaacggctatatcgaagcgggtgaagaccttgtaacgtggtgctacggccatttactgaaaaccgttgagccggagagttataacccggactataaaaagtgggtggcggcggatttacccctacaactctatcctctgcgttatgaacccattgccagtaatgccgcgcatacacaaatcgttctcgacctgattaaaaaagcagatgtgatagtccacgctggcgaccctgacgacgaagggcaactgctggttgaagaactgctggagtatgcggggaatagcaagccggttaaacggttgctgattaacgacaacaccgatgcggcagtcaaaaaatctctggcgcagcttaaagataaccgtgaattccggggcatttatcgtaaggcgctggcaagggcagccggtgatctgggggtccgcttggaaaacggaaaatatcctacgctaagcctgttttttgtacagactgacatcaactgtgcgtaa

SEQ ID NO: 109086 - DNA, 615 bp, Enterobacter aerogenes
ttgcatgttttgacaaatggacgaaagtttgcagatgtcagttttactgaacagatgaaagagcgaagcgaaaagctcaaaataactttcggtattccgctttattcttcaaggtcgtcagttcatgactatctggttggaagcgagggggcatttgatgagacagttagggggcttatcaatgccggtaactcaggaatcaacattgagttaagaatcattcctacactggctaactatatggaactggacaaaatcatagagttcgctggtcgcgtgttctccaatatcaaccagatttctcttatggggttagaatccattggctgggcacgtaaaaactggtcatcaatcttcattgagcatgatagctatagtgagaaaattctctctgccataggaacagcacaaaggtcaggtatccccctgacaatcttcaattacccattgtgccatcttcctgaaagagcttggagatttgctactcagtcaatttctgactggaaaaattactatcccaaagaatgtgatgaatgtactcagaagtcttactgtgctggttatttcagttcatcaaaaggccgttttcatcaaccaccgagaccaattttatga

SEQ ID NO: 109087 - DNA, 774 bp, Enterobacter aerogenes
atgaatactgcaaaaatccctcacatttccctaaccaaaaaagacggctacgttttccgtaaacgctatcaagacgggacattctaccttgctctacgtaccaaagaagaacagcaagcaatgcaacgtggtgcagcagtctcaatacggtattttgaactagaagcgcttaacctcccctatgaggccgtgtatctcagtttgaaacagtaccgggatgaagctgtacgtaacgagcagatagccctgcttcagcgtgtacacaacatggggaacacttccaccttctcattcaacgtagaacagcctgtaagcgctccagtgattgaagctgtgcaacctgttacctttgctgaacaaatggctgctacggcgatacagcagcatttagaaagtgatatatctcattccctgctagatgttgaagcacagtggattaaagctaacactgaatggaaattgaagacacttaagggcaatacagccgctgtagataaatttatcacatgggctatcactaaaggcctttctacagtggaagcaatcaagaaaactcacatcactgattttaaagcgtggatggatggagaagaacgcaccccacaatataaaaataagctacttaccattaacgggggtatgttcaaattctgtattgatgtactagatgtggatgttaaaaacccatttagtggaatggaatataagaatacagctacagtaaacaagaaagaagatatcaccaaagaacagtttgagcaggtagaggaatag

SEQ ID NO: 109088 - DNA, 600 bp, Enterobacter aerogenes
atgaatattaccaacctgaatgcacatgcacttatcaatatcactaagagcttaattgaaatgctgcgtaacaataagaaagcaactattagcaaggttgtaacagagtggaacatttgcgtagagcaatcaggttacacaaccacttttgatttcccggttgaaggccggacacgtaaagcacaggtaattgcagacttagaacgctgtgccgctcagcttgaaaaattggcttttgctactgaaacattaactgtgagggcttctaataatgaagttcaaacaactgatgttttaattaatgaggaagtaaacgtgattaataaccgtatccagcgtgtacagcagcaggttaaccaattggctaacgttttcgtagtgggtagctatatggatggttttatggctatgcataatgctgtaggtgaatgcagaaacattctaaacactcagggaattacactagagcaacaaaattcagtatgtggatgcttagcccaatgcgcagtaattttccatgaggttagcgaggcaaccggagcaccttctcctgaagctgtttctggtggattcagaaatgatatctaccctaatgcttaa

SEQ ID NO: 109089 - DNA, 771 bp, Enterobacter aerogenes
atggctaaaccaattgtagacgtaaacaaaattatgctgcctcttttcaaaaagtatgctgtgaatgtagacctgttagaaagtgatgcacatcgtaaatctgaggtgcttaagctgcgtcctgcattcaatgtggacttcaacgccaacaatcttatgaagtggtgtaaagataatggcattagtttatctgccgtaaccattaagaactggatggacaaggaaaacaccacggtaagccctaagccagttaaaaccaccactgttaagcagtggactaatgcacttgcaggaagtagcgcagagccacagaagcacctgattacacatgctgaatggttattcattagtgcagctaaaaacctcatgacagaggaacaattgaacgctgcatacaatcaagtgcatgaaacattagttgctgaccgaatgaaagctattgaggctgaagcagcactagctatgcaagcccttacaggtcgtaaacctgatgctgtatttttcagagagctaaagcaattcatttgcagtgaagattataaacatggtgggtgggctgaacttaagccagcagatagacgccgcttagcggatatgcgagaagcacaacctgacaatgaagaggtgcaacaatggtgcagggatttagatgcagatactgaacgtgcaactaaagctagcaatccgtttgcgcctgctgaagaacaggctacagatggtagtgcaagcccttcagaggcttcagcggcgttgggcttactgtggggttag

SEQ ID NO: 109090 - DNA, 204 bp, Enterobacter aerogenes
atggctaaagaacttcctgtaatacatcacgtacacttccagcttaatggcgctaccggatgggttgtggtggctcctgagctgcctatgtgggtttactttatgggtgagcgtattgcttatgcagcgatgcagggagcactgaagaagcacgttcatagtgtgatgattcagcattcattagttagcgcgtggagagggtaa

SEQ ID NO: 109091 - DNA, 297 bp, Enterobacter aerogenes
atgttatacgaattagggttaatgggctggaagctgtttattaccctttcagggattgccatattattaactgcttgctggttattatttgttggtgcaggtgctgtagcagccactgctgctaatccactaattaagctggtacgcttcctgatgccgtgggagcttatgagattccgtaaacagcttaatgaagaaaagaattatagctacagagcacaactcactttgtcttggtggtgcatgtggctcttgattgttgttagtttatttgtcgcctttggtggcaccaattaa

SEQ ID NO: 109092 - DNA, 390 bp, Enterobacter aerogenes
atgtttattccagcgtggttattggcaatcgctttgggtgttgctgcgtggtggtattttaaagaccgtgaatcagctttaaaacctgtgcctgtagttgattttgatgaagatgctaaacgcttcactattgacggaaaacgggcaattgttattgaagccttagattatgacatttccattaaaggaaccgtaacagatggaagaaccatcaccctacgtaatgtcatgggcggaaataaagtatatttcactgtttttgatgtagacaatgaagaagatgaaagtggctttgtacatcttaagcctcttcataaagccattcctgaagctaaatttaaaaacattacggacgtaaccaaagaatttaaagcaggaattaaggaatga

SEQ ID NO: 109093 - DNA, 462 bp, Enterobacter aerogenes
atgactaattcagttttaatgattcatgccctgatagttggctatggttttaaagacgctgtgaaaggcaagagccttacatccagcaaagacacccctaagagtaaagtgattgtttgcactgtattcagtatcgccctgctctggactctctacggacaagccacggggcaatctgtatggggcttgctcttgccgggactggtgattaactacggcgtttaccttatgggggcggcttgtcttgcgtggcttattgttcagcgtaaattcctgggttacttcagcaagttcacagaagtaatgatggtggtttatgtatttgctgaactttattgtgaagtaataaagataagtaatacaccattagatgaaaatgtagcctttgctatccttgctgtattcgttgctctgattattggctttatcgttgatggtattaaggcattcaggaagatttga

SEQ ID NO: 109094 - DNA, 393 bp, Enterobacter aerogenes
atgaaaaaattaattattgcaggggcattagctctgtgcagctgtacggcctttgctcacgatatcgtatgtggtggaggatatgccattgataggaacgtgacaggctctatgagcaccgggcatgctctgtttgagattgatacgggaagcattgctctatatcggggtgataaagaattattccgtggtgcccttcagaacacgatgctgtatgcatacggcttaaacggtcagaccatcattaactatgaatttgattcagataatggtcagtcctatatgctggtgatggatatgagctttattggtgctgacggccatgattcaggcgattcaactaagctgattacaatgcaaggcgattacacatgcaaattaaattctctgtag

SEQ ID NO: 109095 - DNA, 276 bp, Enterobacter aerogenes
atgcaaattaaattctctgtagcccttctggctctggccctgtctgctccctgcttcgctggctacaactgcaaagcttttgtgcaggatgcagcaaacaaggataatgcgggcaagctgtatcgtatgtcctctaatcagaagatgggtaatggcatgctcatgtgtcaagggatggtgaaaggaaagaatatgtataacgtcactgtctatacaacttatacgattatagggaatccgaaaacaggacagtacgaaatagagagcgttatgtag

SEQ ID NO: 109096 - DNA, 243 bp, Enterobacter aerogenes
atggattggcacaaagcagacatcattgcagcacttcacaagaaaggtatttcactagccgccctaagtagagagaacggattagcagattcaacgctagctaacgctttaacaaagcattggcctaaaggtgaaagaatcattgctaagtctttaggacgaacaccgcaagagatatggcatagccgctactacgatgaagacggtaagcccatcatcaaagcctttcagaaactaatgtga

SEQ ID NO: 109097 - DNA, 813 bp, Enterobacter aerogenes
atggacatccggaagatgactatacgcctgttagtttcaacaatattcttactggcatcgcagtgcatttttgccgccagcagctgtgatatcaaagccatcattaaacaggtatggcctgatgctcaaccgactgagcagggggtcatcacaccggcagagcaatttatcaaaacacaaaatggctcgccttttagcgctatttgtcgcatctggcctgctcatcccgagctcacgctggccgccgttccgctaatggagccagaacagcgcgaccataaccataatgccgatctcgagctgctggtacttgatactgcaactcttgaagttaagcaacgtttacatcttcccgaacgtatgaacgatgacgcgatctatattagcgatcttgctattgataccgcgcactggaagatagcgccagagcaaactgcgtttggattgcgcatacagaaaaccggaagttctcgcgttaatcccattagtgaagaggcgctatggctttatacactcgatcgcggccagcttcgcgtagtgctggacggcatagtgctaaaatatagcgtcggggaattggatggcaactgcgccgaggaatttacgaatatcatacgcacgctggcaatgggcgccacaaaacatcatggctttagcgacataaaagtcagcgaaaagaatgtcgcctcaacggcctggctggacgaaaataacgagtgcaggtcgaaagatattccgacgcaaaaaacatggacgctacaatacgatggtaagcaatatcgcgttccagctaagttacacccaatacagtag

SEQ ID NO: 109098 - DNA, 1176 bp, Enterobacter aerogenes
atgaaaacaaacccagagaagtgtattttttgtgatattccctttgataaagggagcctagagcatgtattccctagtgcgttaggcggacgaattaccacaacacatgcgacatgcaaaagttgcaacaatttattttcagaagtgagttcagatgcggttgagatcgctctggctgataactttatttatatcaggaatgctttgaatgtttggtctggaagaggaaagccaccaccaacaataaaggaagcaggtcagtttgatgataacatcaagtatgatctcgcaccaaacttgacacctattgtgtctaagtcaagaataccttcaaaagatgaaactgatagcaatacagtctttgatttcgttgctcaagatgaagctgatgctaataggattgtaggaattcttaagaagcgcggacttaatataggagatattaatgcaaaatatgttacaactaaggctcctgttataagagctagcattaattttgaaggaaataaaatttttcgtgctatagcgaaaatagctatagtttcctatgttgttttgtatggcaattcgcgagcaagaaccgatatctatcagggccttagggtatcaacacgaagtggagaacctgacattacaaattattgcggatgggactatacaaatgattttcctgtcattacaaatttacacccacacgaaaaaaccccaaacgccattcaatgtggttttgaacatactgtatttataactaatgtaaatcaccaattggttgcttatataaagctttttggtgcatttaatttctctattattttaggtaatcattcgagtatatcatctaaatgtttgtgtttaaatcctacagcaggaaagtcttcaaggtttaacgttgcatttaacccgccattaagttatatacctaaaaatattgactcattcaaaattgaacatgaatctgttaggaaaaacgttcagttagcgatgaattctataatagagcactgtcaaaatttatcgaccgaagaatatattagaagcctcagccaagagttaatgatttctgttcaaactgcatccactgactctgacatatctgaaataatcagttctttttcagagaagcttgctcatatagaaaatggattggcttgggaagaagaaattaatattgaataa

SEQ ID NO: 109099 - DNA, 1005 bp, Enterobacter aerogenes
atggatagatttgaaataaaacttaatgaaatcaatgaaattctttcaaagaatcaattggggcttatctatgattttataaatgatagagataatggtctcgtactgccgttttttagtaaatacatggactctgttcaaaaattagatctggatttttgcattacaaccaactcacattttcaatgcggcattatttatgatgaaaaattgatatttatgtcttatggcacatttgatagactatgtaagttatctgacttaatttttcggtcagggatgataaccgggaaaagtactaatttaaacttttatgacttgcatctcgttactaatccatttgttgggtttaacaatgagataagagaggaaagtgagtccgaatcacacttatttatgtttattcttgattgtctaatgctgtttatagttagtcacgaagtaggccatttcattaataaacatggcgaccgagcaaaaaagcaatctattgacactatctttgatgatgttttaggacataaaaaaatcaatagcgcagagctaatatcaagccacgcaagagaattagttgcagatggttttgctcttaatattgttaaaaaacatgtacagtctgcatttgatcagaaggtatcttatcttgataacttgcttgatttttatagcagcaatgaaggcggaattgcattttcattgctattaatactgtgctacttcaaactttctgatggcttatcacctcatgaacattttcaatcgacacatccctcaacggcggcacgagttcgattcattctcagttgtcatattgaatcattagtcaatgaggatgaagaaaaaacttttggattttactatggtttaatcataactcaattgaaatcaatatttgcatctatgggagatgactttgagttaacttggataaaggatacgaactcacctgaaatgaccgagtggtttaatgatgtttataaagagcatccaaaatggttagcataa

SEQ ID NO: 109100 - DNA, 813 bp, Enterobacter aerogenes
atgtcgcgtagcttatacccaaccaccttatttcattttactgaaaagttagataccttatttgagatacttgactcaagtgattttcggatttctttcgctagagaatttatacaaggccagagcacgaataggaatttcggtataccgatggtttcattttgtgatatcaggctaacacagcttacccagcatactgaaagttatggccattatggcatcggattatcaaaagattgggcaaacgaaaatggacttaatccagtaatttacatgtccaagcactcttctgtttttgataattataatctagagattaggcgtttaaaagcagaagttaataagttattaaagcatttggacgaaataaaatcttcaggaacaaaatctcaattaactaatgcaaagcggaaatatgagtcggcgattcttagttacaagaaaattgtagatcctttgcgatatatgaaaaattaccaggcaactttgaaacgacgcaatggtcaggagaaacctaactatatttttgcagatgagagggagtggcgatttgttccagatatagaaaaatcaattggaaaaccagtgatcgccgcttcgaaaaacatatcaactcaagatggcaagagaaaatataacgaatattatgatgatgacaggttgcccttttcacataaggatattaaatatgtcattgtagagcatgaaagtgatgttgaaaagatgatggactttctgcatataaagtatggttcaaaaagtagcttgattccaagggttctctcaaccgaattgatagcgaatgatatgtaa

SEQ ID NO: 109101 - DNA, 171 bp, Enterobacter aerogenes
atgaaaccattcagcagcaccgagaatagcatgaacggaacattggtcataccaaaattgatgtgcatcaagttttaccgcatattttttaaacgaacaacgtcaattatggacaagaaaaagcccgcggcgtttgcacgcggcgggctgattatgacaaaacaggattag

SEQ ID NO: 109102 - DNA, 285 bp, Enterobacter aerogenes
atgggcacaccacgttttacccctgaatttaaggaagaggttgtccgccaaatcaccgagcggggctattccatcgctgaagtatctgaacgactcggcgtttcggcgcacagtctttataaatggctccgcgctgttaagcctgacaacaatgggcaacagacacaggacttactggatgccagaacagaaattctcaggctgaaagcgcagcttaaacgcactgaggaagaacgggatattctgaaaaaggcggcgcggtactttgcaagggagcccgactga

SEQ ID NO: 109103 - DNA, 513 bp, Enterobacter aerogenes
gtgaacagaataaaatggattatccggggcattgctttatttgtgtcagtgttgttatcgggatgttcgcactcccagactggcgagtcgagtgcagggaatattagaggatacaaccatgttgccgggcagaacgttaactggttttcagtaaacggctaccatgcgacgctaaatggaaatgtgtgctgcgttatgatcccggaccagtggcgacctgggatgactgcacatattgagtgggaggttgatcctaacccggatgaaaaaattccaagactgaaaatgggggttggttttgaaccaaaggccttagctcagcacgaggccaaataccagcacttcagtgctgatgttcccattccgcaatataaggagagtgcgggcattaacgtccattttcttccttgccatcaggtaaaaatttatgcgggtgtagccggctacggtgcctattcctacccaattaaagaaccactggatatgaaggagcctgcaacatgtcagaaataa

SEQ ID NO: 109104 - DNA, 771 bp, Enterobacter aerogenes
atgacaacacgctctcatcatgacaacgtcgaaaagcagtttggctcacaggcaagcgcctatctgaccagcgccgtgcacgcctccgggagcgatctgcagcgtctggcggaacggctggcggatttcccgcaggcaacgttgctggatatgggatgcggggcagggcacgccagctttaccgctgccggccaggtagcgcaggttaccgcgtatgatttatcgagccagatgctggaggttgtcgctcaggcggcaaaagacaaaggttttaccaacatcgtcactcagcaggggtatgctgaaacgctgccgttcgccgacgccagttttgatgtggtgattagccgctactccgctcaccattggcatgatgtcggccaggcgctgcgtgaggtgaaacgcgtgctgaagccgggtggggtgatgatcatgatggacgtgatgtctccggggcatccggtgcgtgatgtctggctgcaaaccgtagaagcgctgcgcgacacttcgcacgtgcgtaactactccagcggcgagtggctggcgctggccaatgacgcaggcctggcgatcaatcatttattgaccgaccgtctgccgctggagtttagctcgtgggtcgcgcggatgcgcacgcccgaggcgctggtggaggcgattcgcttatatcagcatagcgcatcggcagaggttaaagcctacttcgaattacagcaggatggatcgtttaccagcgataccatcatgtttgaagcgcataaagcagtgtaa

SEQ ID NO: 109105 - DNA, 306 bp, Enterobacter aerogenes
atgacagcagacaagattatcgagggtatcctcggcaaagagggtggttatgtcgatcacccctctgataaaggcggccctactcgctggggtatcacgcagaacacagcgcgtgcatacggttacaaaggcgatatgaaagagctccctcgggaaactgcgaaagaaatctatatgcagcagtttggctggagcccaaatttgacaagatcgccgaattgtcaccatcaatcgcagaagagttatgcgataccggcgtcaacatggggccgcgtgtttccacaacgttccttcagcgttggctga

SEQ ID NO: 109106 - DNA, 234 bp, Enterobacter aerogenes
atgaaaatcgaagtaaccatcgacaaaaccaaaaaattgcctaacggtgctgagccagcgttagaggccgaattcctacggcgattaaatcaaaaatatgatgaccgcaaattatctattcgtcgcgctggtgctgatggactcagtgttttcggcggcatagatggcgataaagaaaccattgcagaaattctccaagagacctgggaaagcgccgacgactggttttattag

SEQ ID NO: 109107 - DNA, 294 bp, Enterobacter aerogenes
atggcaaatgattcacgaggaaatgaggtggttttcaaccgcgcatatctaaacttgtgctctaagaataagaatttaagtacattggttatagccagagagtttaaggatgataatattgtcgggtgtttttcttttggccttaaaaaactaatcgatattgagtcaaagtgtttgtttttgcgctataagtacccatggccagattttgaaattgaactggttaaaaataaaggcggtgattacgagttcatgcttattcataatgattttcttaaaggtagtgaggtttaa

SEQ ID NO: 109108 - DNA, 126 bp, Enterobacter aerogenes
atgatggttaccatcatcggcaccaccaccatcatcatcatgatcgaggatggtgacagacgggatcacgcaaaaggcgaactagtgttcgccttgttgcttttagtcctgacggtcagagcctaa

SEQ ID NO: 109109 - DNA, 123 bp, Enterobacter aerogenes
atgtcaaaaattgatcttcttattcttgtttttacctttggcatttcggccttgggttattccatctggcttctgattgagcattccctgagtttaatatcaaaaaatagtctggataaatga

SEQ ID NO: 109110 - DNA, 135 bp, Enterobacter aerogenes
atgccatttaatgacatgctaccaccaattaaccgtatgcaagagttactaggtgtgatgtgtgaaggcttaggatggtttgactatttaaccaatctgctcctggataatttgcgcggtagctggttacattaa

SEQ ID NO: 109111 - DNA, 255 bp, Enterobacter aerogenes
gtgacattcatctacaacgacgacgagcagaacaggacgtgcggggggattatcgcgcagcaggtgcaagaggttgatccgcagtacgtgaagaaggttaacacggcatacatgcgcaacggtgagagggtgaacgacgatcgcctgcagctggataacaacgtattcatgatggacacgctggcaacggtaaaggtgctgattgagcgagtagacgaactggaggagaaattatctgcattagaaatccagtaa

SEQ ID NO: 109112 - DNA, 984 bp, Enterobacter aerogenes
atggctatacttgtagccatagggcacttttactattggaataacaattataatttcccacactcatttatattagcagtggatttcttcctggttttaagtggattcgttctcgctaagtcgattctcaacaaaacttctttttgctctataagattcgcaaagaagcgttatatcagattagcccctgtttatcttttttgcgctatacttacagcatcatcggctatcattttaaagggaaccccagttccgaccttcactgagatagtaaaaatacttggaatagcacaaatcattccatttgattcaaaggaaggttttgcatatattggaagcttagcaatttcttggactatttccgcagaactatggttaggaatagtcatattcccagtggtatattttttaaataagcatgcaaaaccgctattattcccatcacttttaattgcaatactttattcatttttggtcataaataaagaatctccaaactacatggacattcaatatgataactataaccgttatataatgtttggtttaatccgcacattacttgactactcacttggaatattatcattcgttgtactagacaaaataaaaactttaaaatatgacaaagttaattcagtagtacaagtggcggtaattattttatatttaagcctattctctggcttaggatatgaaagagcaaatgaaatttttgccccttttatattttcaatattcatttgctcgcttggtactgaaaaggggattatatatcgattgctgtcaggaagaataagtgctttcctaggcgatatctcttaccctagttacatgatacatattctattactgtatgtaatgacaagaactttatccatgccgctcaactggttaacaacaataattttcgtcactctattaatagtaatatccaagctaataaacatatgcattgaaaagccttttatgcgttttttataa

SEQ ID NO: 109113 - DNA, 336 bp, Enterobacter aerogenes
atggcaacgaattactatcaggatggcaaaacgatggactggagcaactccacgggtaaagacgtggtctcgggtcaggcggtggccgtcggtaacattatgggcgtggcacatgccaatattccgaacggtggcgatggagtactgcatatggttggcgttttcattctccctaaagttgcagaggaaacctggcaacgtggggcgaagctgtatctgaatgctgaaagtctgctcacagcggtggcacccgatgcagatgctgttgtggccggtacagcctggatcacctcaggggcaggcgaggcagacagccacgttcgtctgggcttctga

SEQ ID NO: 109114 - DNA, 525 bp, Enterobacter aerogenes
atgaataatctgtcagttattccagccttcgacttcagtgaaatggttgtcccatcagggaataaagtgattactacgtcgcttaaagtcgcttgttatttttgcaaagcgcataaaaacgttcttcgtgctatcaagcggcttgaaagtgaatgttctccggatttcaaccggctcaattttgagcccgttgaatacatcgataaaaagggcgagatgcgtctgatgtacaacatcacgaaagatgggtggatgatgctcgtcatgggctttactggtaaatcagctaccgcgataaaggagagttatatctccgcttttaactggatggctgaacaattgaaacgacgtctggctatgggggaggaaatgcagcaccgctacgttattaaggaaactcgctcaaaactgaaagggacgataggcagccggctgatgaatgaacgaaagaaagagaagtatgtgttggcgctggagcatgaacatatcatgcaggtaacacaacctgacttgctgatttattaa

SEQ ID NO: 109115 - DNA, 468 bp, Enterobacter aerogenes
atgagccgtataaccaccattatctactccgcgattatctgtttgatagtttatctgggctggcttgcaaatcactaccatacctccgcaacaaaatacaaaaggcagcgtgacgtaaagacccaggcgctggacttggcgaacgctaccatcaccgacatgcaaacccggcagcgtgacgttgccgcattggatgccagatacacaagggagttagcagatgcgaaatctgagaatgatgctttgcagcgtaagcttgatgctggtggtcgggtgctcgtcaaaggcaagtgtccagtgtctgccacaacccaaaccaccagcaccgccagcatgggcgatgctgccaccgtcgaactctcttcagttgctggacgaaacgttctcggtattcgagccggtatcaagcgagatcaatcagcattgatggttttgcaggagtacatcaacacgcagtgtcagaaataa

SEQ ID NO: 109116 - DNA, 528 bp, Enterobacter aerogenes
atgggaaataaagcgaaacttagtgccgctatgctggggctgattgctgctggtgctactgctccgcaactctttgatcagttcatcagtgagaaggaaggcaacgcgctggtagctgttgccgatccgggcggcgtctggtcgttatgccacggtgtgacggtcattggtggtaagcgtgttgtgaaaggccagactgcaaccgaggcgcagtgtaaaaagattaacgccatcgagcgcgacaaagcgttggcatgggtggatcgtaatatccatgctccactgacaccgccgcagaaagtcggcattgcctcattctgtccgtataacatcggccctggtaaatgtttcccgtcaacgttctatcagcggattaacgccggagaccgtaaaggtgcgtgcgaagcgattcgctggtggattaaggacggtggaaaggattgccgcatacgctctaataattgctatgggcaagtatcccgccgggaccaagaaagtgcgttaacgtgctgggggatagagcaatga

SEQ ID NO: 109117 - DNA, 183 bp, Enterobacter aerogenes
atgatgacctgcagacttctaacagacaaacagctcaatgcccttattgtaaaaatacaggcacattcagacgtgatgagtgaattaggctcggaacaggaagctgaagagtctggccagattctaagtgcattatgtgaattgaagcagtacagggtaatagctacgcaggagatgaagtga

SEQ ID NO: 109118 - DNA, 276 bp, Enterobacter aerogenes
atgagcagaacgattttttgtactttcttgcagcgtgaagcggatggcccggatttccagctctatccgggcgagctcggtaagcgcatttacaacgaaatctccaaagaggcctgggcgcagtggcagcataagcagaccatgctgatcaacgagaaaaaactcagcatgatgaacccggagcaccgcaagctgctggaacaggagatggtgcagttcctgtttgaagggaaagacgttcacatcgaaggctacacgccgccggaacaacagtaa

SEQ ID NO: 109119 - DNA, 477 bp, Enterobacter aerogenes
gtggtcaaacatgacgttaatatcccagatagcgcctctggcgcttttaaacgctttgctgatctggaattcgccaccgttgctttcgttaccgagacggccaatagccgaggcgccgttataggagccatcgacgccgacatatttctggtcgccggtctggaagtgggcgccatagcgggcgtaaccgctaaatttcaggccgaatggaatcgccatatccggcgaagcggcggtggtttgcgggttggtaataacatcgacttttttattggcggcggcgtcgattttcgcctggcggtcggccagcgctttatcgacggctttcgcgacgatggcgtcgatctgctcctgggtaaactcctgcgccagtacggaaattgggcacagcgcggcgataaccgccatggccaatggcagctttttaactgtattcatggttatctcactttaataattaatatatgcagacaataa

SEQ ID NO: 109120 - DNA, 1512 bp, Enterobacter aerogenes
atgaatcttttgataaaaaatgatagacatcgaaaatcaagcgcggatcataattctttattggctgcaacgcaaagtgatcgtgcaagacttatttattcagctgcatttcggcgattacagcaaaaggcacaagttttttctttagaaagcaattcatcagtacgttcaagactaactcactcgattgaggtttctcatatcggtagatatttagttggggccatattcgaaaaaataacagaaagcaaacattttcactcagatataaaagactattggattaaaaataatttatccatttctaatattgttgaaacagcttgcttaatgcatgatattggaaatcctcctttcggccattttggagaagctgcaataattaactgggggaaatctaacgaaattataaaagctattaaagaggcattgggttcagaaatatctgagggggatgttaaggatttattatgcgatattcaaaattttgatggtaatccgcaagggtttagggttattactaggctacaaggagatgatggtttttatggattaaatctgacctatacgcagttatctgtgtttcttaaatatacatgtagcccagaggataagagaaatgacaaagctttctgcaaaaaaattggatatttttgtagcgagaaggaaataataaaatctgcttgggacaatttggggatgcctgaacattctcgccatcctttaggatttttaatggaagcatctgatgatatatcctattgtattagtgatattgaggatggattagaaaagcaaataatagtttttgagaatttcaagcaatttacaatcgatggtttagagcatctcaaaattgattttaagaaaaataaaacaatctgcgatgaacttatatatagcttgagtaaagacaactcgtcaccgataggtaactttctagcttttaaaacacgactatcaaactttctggttgaaagcgtctcaaatcgttttgtttataactatgagcgctttgttaattttgagtataataatgaactgattgccgaaggtgattttgaattccaactattaaaaatactaaaagactatacatcaaaaaatctttttacctctgatgaagctgaaaggatggagttatctggtttttatataattaaagggatcttagatgaatatattaagttattatgtttgacaaaagatgatttttccctgttaattaacaaagataataaaaatataagaaagaaagatttagatatacaaagacggctttttaatagattaccatcaaagcacttaaatgcatataaaacatctgtaatcaatctgcctataaatcatcctgacttttctgaaaccgcagtctctgataaactaaaaagtattgatgaaaaaagagagtggcttcttcgggtgcatctcattgtagattttgtgtcgggaatgacagatcaatttgcaatggatatgtatcagatgttaaagggcataaaggtgatgtga

SEQ ID NO: 109121 - DNA, 633 bp, Enterobacter aerogenes
atgaattatctgagagctgcgcatcaattatctcataggcatcctgtttcatgggtcagacgggttttatctgaacatgttaatgagggttatatatctaatagttcttcctttacattcagcaaatatacatacttgccgcagagtttcatagacgaaagaaatgtctttactgtgaatagttggtatttgaatgatgaaaatttgatgaatataataaatagcttaggtcaaggggaagagcttgcttttcattcacagatttttgatttcgggaaacaatatcatctccctttgatagatttcggtaatgtcgatcgaggtattattgatagcagtgtcttgcgtgatttggcatctcattggaatttatcatttaatatttataatagcgggagatcttaccatgcatatggcaataggctggtcagtaatgatgaatggttaaagttcatgggtagtctgcttcttttaaacaaacctagtggattcaagctaattgatgagagatgggtaggccatcgtattatggctggttattcggcattacgatggtcgttaaatacttcacaatataagaaaattccagaactcgtaggttatctaaatccatatggcctgtttatggaatag

SEQ ID NO: 109122 - DNA, 912 bp, Enterobacter aerogenes
atgtacttccctttgctcagaggtaaacagttcgagtttacagcgttaagagaactatcggctattgtgcccaatagcctttttaaaccagttattgagcccgtaagagaaaacacaaagcagctcgaaactacgattaactcattgaacaaaaacaatattacgccacttattattgtcaattcggagataggagaactcaaaggaaagactgatcaattcattaatgaactatataaaatcaaaggcatatcattcaccccttgtattaaatatatagataacattcgagagtttgatagattaaatggtcttataaagggagaaaaagcatcatatgttgaaagtggtgtcacccgagatttggtatctcgcttaaaaacatttacaattaatattattcctgaaggatcacctaacattgtgctacagcaattatcaaacattgtcttgatggatgacccgtttaaaaagaaaaaaaggaatgctgattatccatcaaattcatatttctcagatttgcatgtccgttataaaggtgtccacaattcagtaattggttttggagatttcaatattgcgggttcagattatgcagaatctggcggccctgcatacgtggtgacaattcatgctagctatttggatagtgatgaatttgatgcaatgtccgttaaacatttttcatcaatcgatgatggcacaccctcgaatccatcaggaaaattccagcaagctttagaaaagcttatcgtgcatgatcaaacttatcccggtttctttgataacacattaggcctacgtgagtttaaagcacttcattcacgtagacattaccctgggcttggccaagtcaagcaattttcgatggaacaccatattgaaacaatctgcaatttcatcgcaatctag

SEQ ID NO: 109123 - DNA, 897 bp, Enterobacter aerogenes
atgatgaataataaaaatattggacaattatttacaagccaagctatcaatgccgttgcagatggtgatttttcgttacttcacgaattggcgtcgactgctctaacccctaaatttttccctattaaggtttccgaaatattcgagatagcttttaaaaaactgtctcacgaatataaatcagagtattttttcaaaaatattatagtaaacgaagtgtttttgaaaaaacataaaaaaaatgaagcggtaatgctctctgaatttagagttggtacaaacaaagcagattgtgtaatattaaatggattatcgacttgctatgagataaaaacagagctagataatttaaaaagattaccagaacaattagattcctatactaatttatttgataaggtatatgtcgtagcggctaagactcatatagaaaaaatcaagcttataattccagaaactgttggcatcattgaactaacagaaaaaaataagttggatgaaataaaacctgcatcaatcatcgattcggaaattaatccgaaattaatgattagttctatgcgaattgcagagtataaacatatggccgaaaaaatatctggggtgagaatcgacctcccaaacatggatgtatattctttttgcctagaaatattcgagaacatagactctcaaactctaagaaagcacttccgtgactcactcaagatacatagagcaaacaacattagctttattaatacgttacctagatcactaaaatcatcagcaattagttttagtattaatcagtctcgtcagagatcactgaccaaaatactatcaagctacattgaaaaggatgatatatgtacttccctttgctcagaggtaaacagttcgagtttacagcgttaa

SEQ ID NO: 109124 - DNA, 198 bp, Enterobacter aerogenes
atggaaaaatgtatagaacgaatatacattcttgatttattcacatcgcacaatggttacaagcatatgctgagcctgaaaatgttggggctggtgctgccgatgatgctgaaaaagtatgggatgaactacgtgaagcggtacatcaatagggaacagaccaacctgatgctcagggaggacagcatcggcgattga

SEQ ID NO: 109125 - DNA, 306 bp, Enterobacter aerogenes
atggcggagtatcctgcgggctcgcgggagaaatccgtgaattatcacctggtccgggatatgagtcgctacacctttctgatgtcttcggatgccccggcgactgcggcgaatcagacgccggatttctggtacatcgataagcaatcatccaccccggcgctgaacagcattgtctttgacgacgataattcggcactgtcatccgcagagcacatcatcgtgacagaggctgacggccagacccggctcaacgttatttgggcgaacgggaagcggaacatcttcatcctcgataatccttaa

SEQ ID NO: 109126 - DNA, 408 bp, Enterobacter aerogenes
atgaacatgttctctgctgccgccgccgtaatcacattactggcaggcctcgtctcatctgcggtaagcgcagaaaatgacgccatcaaagtcgatatccagaaaagtggctgggagtgcaatgactgtgtctacgtcactgtgactgcccgcacggagcggattcagataaaaaatatcgatgtaaaccggggcaaatgcccgcagctgaagcagggcgtgaccaccattcagggtcagaagatggaggggtggtggcccaataaagacccgttcacgccccgtacgatgcagtttgctgacagtctgacctggcgatttggcaacacgctctggcagaagggtattacctgcaatgttattgaagcccggatattcactgacctgggcgtattcacttacagctga

SEQ ID NO: 109127 - DNA, 888 bp, Enterobacter aerogenes
atgaaacatctctcgggctacgcccttatccgccgtcacctgcggcgctatccacgctcactacgacaacatttgctgaaagaactcaatcagctcgtcacgtacgaaccagtgattggcattatgggtaaaaccggcgtcggtaagtcctcgctgtgtaacgcgctgtttcgtagtgaagtctgcgccgtgaatgcggtggaagcctgcacgcgtcagccacaacgggtccggctgcgcttcggcagccattatctgacgctggtcgacttgcccggcgtgggcgagtctgtttcccgcgacggtgaataccgtgagctgtatcgtgacctcatgccaaagctcgatatggtgttgtgggtgttaaaggcggatgaccgcgccttctcggtagaggagcagttttatcaggccgtttttgccgggtacaacgggccacggcctccattgatatgggtactgaatcaggcggacaagaccgaaccggcagagcaatggaactggtcttccgcgcaaccctcagcgctgcaggctgaacatattgctcagaaacaacaggcagttgcccgcctgctgggaattgcagagcgtgatgtactggtcatctccgtcagggggcgttaccggctgtcgcgcctggtggaggccatgattacccgtctcccaaagcagacccgcagcccgctggtaccgcaccttcaaaccggctatcgcacacaagtcgttatcagcagctcccgcaccggctttggcgaggcggtcgtggaggtgattgaccgcatcattgatttggccccgctgccgcaagttgcccgctcgacccttcaggccgtgacgcataccgtggcccgcgccgcccgcacgatctggtcctacttcttcggttga

SEQ ID NO: 109128 - DNA, 843 bp, Enterobacter aerogenes
atgaattattatcatattatcgttgagaccattgacagggacgcaaataaaagatttatcaaaataatagagtgtgataggacggacttagaagaaattaagtctgaagtaataaagccatactctcaaaaaaaagaagtctacattgatggtgcatatttaaagtttgctaccattcgctcgcttaaaattaaaaaatcagatgagagttcttctgaactaactactagagcaaacaataatatcccagataatgtctttatgtttattacggctgaagatgtcatatcaggcgatggctataccacagatataaccagagagttaatcaaagaggtcactgaaaaaagtgaaaccacttctggaaaagaagtttcccctttgagtattcatgctgataacaagaaagttttcgtggtacatggtcaagataatgcgattaaatcagaaatggctaggtttcttgataaagcgggtctagaacctatcatattgcacgagcaagccagttcaagcaatacaataatcgagaaaatagaagcgaatagcgatatcggttatgcagtggtgctctatacaccctgcgatattggggcaaggaaagttgataatcctgacctcaaatcaagagcaagacaaaacgtggtatttgaacatggttattttattggtcgcttaggaagatcccgagtctctgctttgctagtagaaggtgttgaagcacctaatgatattagtggagtcgtatacattgacttagatacccgaggtgcgtggaagattgacttggctaaagagttgattgctgctggatataacattgactctaaggcatttatgtaa

SEQ ID NO: 109129 - DNA, 693 bp, Enterobacter aerogenes
atggcgaatatgttcagtatgcatggaatccaggcagccaatttgttggctgacctgagtgggaagaactacagatttgatggccgtaacgaagggctaattaatggacagcaatacgagtctgaaacaagaggagtgtttggttctgatggggttctccgctgccagttcattaccacacaatgcccctcaggcttctcaccaaaacttttgtcacttagtaatgcaagtactaaatcctctagcttcgcaatatctaaaaacaaggcggctagaaattttttttctttagcaggcgggaatggaataattcgctctgcacgtatctacacctttcctgactaccctggaactatcctcacccaagttggaacagcgacactctcggagcaaggaataaactatcatacgtttattaatggctttacagacgggattcctttagacgtaataagtattgaaccgtacacacaatatttttcccgtcaggtagacggtgcacttattcttactgcaaataccgagctgatgctttctaatgggaatagcgtgagaagtcgaattactggccagttcacatttgaaggtatgcatgcttatacgcacgatttcttggtaacttatgagcctacctttagacaaactggtaatataattgatctggaaatgccggtatcgatgagaacgctttaa

SEQ ID NO: 109130 - DNA, 177 bp, Enterobacter aerogenes
atgaacaaaataattctaactctggttgttgctattatctctttttatgccctgcctgcattctgtgagcagggtcttgaactggttcctacgggttataaaacagcaaagggtagcacccttgaaataacaaatttacctaaactaagatcgcaagactcggagccagagacataa

SEQ ID NO: 109131 - DNA, 420 bp, Enterobacter aerogenes
atgcgcatactgaaatgctttctggcaaacaacatatacaacaagtatgtcactgctaaggaagccgctgaagcctccaataccaacgagcactggacatgcgccagctgtggctgcaggctaatattacataaaggggatgagaaagaaggcccttggtttgagcatattcagcactcgatatctcaccataaactaatgaagtgcgcctgggtggacccaatggagaaggaagctgcccgtattaaaaaattgcggcagatcacttatgcgatcgatacctcgaccagcccgcctactcgctggttctgcgttctttgtagtgaagattacgtcggtaacaagcattgtaaaaaatgccattctggaatttacagcgttgagcgtactgctaacaaagcgctcttgttacctgagtag

SEQ ID NO: 109132 - DNA, 558 bp, Enterobacter aerogenes
ttgaccagagcctcacacgaacaggcagccacggcagtaatgctccgggttggtatcgttgtcatcagccaggtttccgtcagcttcagtggcgcactaaatctcaaggcctggcgcaaacatgtaaaagataatctggacaaggagggtattatgttttcttacgtgatgctgggtactaacgatctacagcgtgctattagtttctacgatccgttgatggaattgcttggacatcctaaggcaggcaggaatgaagagggggcatcctggggcacgttcagcgataaccatacgaccgggttatgcattggtaggccttttgatcagcagcgtgccggaacaggaaatggcacgatggtcgcgctgaatgcccgctcatttgaacatatcgcgcaattgcatgcgctcgctctcagcctcggcgggacagatgaaggcgcgccgggacataggccgcattacggagcaggttttcacagtgcttatgtacgcgatccggacgggaataagctggcgtttgtgttctattccaatgtggggttaacatcaaactga

SEQ ID NO: 109133 - DNA, 585 bp, Enterobacter aerogenes
atgtcacgtaattccttgaatgctgattaccagcaggcattttacgatgttattcataatgcaacaaatgagtttcctcgtaccgtagcgttacgtgttgatttacgttttcctcgtcgttatcagtatggtgattcgaaccgagaggttactcgttttattgaatctctgaaggctaagttgctggtggattgtcagcgtaagaacaaacgctggaaacgtaactgggctaaccggttacggtacgtatgggtacgtgaagtcggtgagcgtaaccgtcgtaagcattaccatgttctgctattgctgaataaagacttctaccatggtgccgggagatatgatgcagatgacagtctggctgctttaatccaacaagcatggtgcagtgcgttaggacttaatccggtacaatattcggctttagcgaatatgactctaaatggatgttattatttaaacaggaattcacctaactatatgcaacacgttatcgaattattggaccgtatggagtacttggctaaagaccataccaaatgttatgacgatgggtatcgttccattgggatgagccgcgggtag

SEQ ID NO: 109134 - DNA, 2544 bp, Enterobacter aerogenes
atggatgatttacagcaagatgtaataacgtggttacatggacagcaggactggctgcaagaagctgctgaaattcttctaaggaagggggctgctgctgaagaagatcttataagattaactgaacagattaaaacttcggacgggcaagcaataacatcacataggcaatttgtggagctaatttcaacagcatccattcctattgagttgagacttaccaggatcgagaatattcaaggtattgagaatctagctcccagaaagccattgatttttggaactggtaacttgactgtgatttatggcaataatggttctggtaaatctagttacacaaagattttaaaaaatataacgggtaagtcaagggctgaatctattaggcataatgtatttcagcctattccaaagcatcaaaaatgtgatgtgtcgtatatggtttcatcacaagagagtacccaggaatggtttgtaaacgatggggccatcaataatcttaaagggattgatatctttgatagcgatgaggctacgtattacctcagtaaggaaagtcctgcaacatatactcccccactcataggtatgtttgaagagttagctaagatttgtgatgcggtaaaaagcaggcttcaacaagagcaaggaaagcttactaccgctcttcctatgcttcctgctaagtattctaatacagaccttgctgtattttacaattcattaaaacccaatatcacgacagagtctgtttgtagcaaattatcgtggttagaagatgatgaaaaaaatattacgttactaactaatcgattaaaagagacagatccagaggcaaaagcaaagcagttaagagctacaaaactgcaggttgagttgttcattaagaaattacagcaagctactttaaaatataaaaaagataatctgaataatattgatacactacgcgaacaggcagaaaaagcaagaagaatggcaagcgaagcggcatcagtaagtgccggcatctttgaagggatcggttcagaaacatggcgagcaatgtgggaagctgccagagcgtactctcaagcctcagcctatcctacacaagattttcctgtaatagagaatgctcattgtgttttatgtcaccaagagctttctattgaagcacaattgcgccttcgtgaatttgagacatttattcaaggaaagttagaagcagaagcaaagcagtctgaagttttgtactctaatatgttaagtagtttgcctcttataccaacatctgaacaaatagaaactcaatgcgaagccgcaggtcttggtgaggattggaaacaattcgctaaaagtttctgggagtcagcaggaaaaatcaggctcggcttactggataaacaaccatcacatcaattagaggaattagtagatttctctcaaaatgaaggtatacttcaaaaatactgtattcagattgaggcagaggcgcttcaatttgagaaagattcacaacaattcaatagagctcaagcggaaaaagaaaaacttaaccttgaagctaaatactttatatctcagcaaatagaacaagttcaacaagagatacttagattaaatagtttaaaacagtatgataagtggattacatccgcaagctcacgttcaatatcaacaaaagcaagtgtaatcgctgatgcaataattactgacgcatatgtaaaaagatttaaccaagaattgacttctcttggggctactcgtttgagagtggagcttgtcaaaacaaaggcacaaaaaggtaaatctcttcataggttacaattaaaatcagctgaacataatgtaagtgttgaatcgatccttagtgagggtgagcgtcgaattatttctcttgcagcatttcttgctgatgtaattgataaaccgtatatagctccatttatctttgatgacccgatatcatcgttagatcaaacatgggaagaaaaaactattgagaggctagttgcattgagccaaactcgccaagtaatagttttcactcatcgtttaagtatgttaggtatgctgtcagagaaagctgatgaaattcatactatccatatacgtcaggaaccatggggagcaggtgaatcgggagaggtacctttatatggtaaaaagcctgaatcagctcttaagaatttgcaaggagaaagagtttctcaagctcgcaaaatctatgacgagttgggccaggaagcatactatccacttgcaaaagcaatatgcagtgatttaagaatattaacggagcggatagtagagtgcgtatttttagctgacgtgatacaaagacaccgacgtgccgtaaacactcaaggaaaaattcatcagctagctaaaatcagcgttgcggattgtgatttaatagaggagataatgactaaatactcatgctatgaacatagccaatcatccgaagctcctgttgaattaccaactccagatgaattgaatgcagatataacaaaaattcttgtctggcataatgagttcagcaaaagggctgcttaa

SEQ ID NO: 109135 - DNA, 219 bp, Enterobacter aerogenes
atgcaatcatctactgtaaaaatcctacgcatgcgagcagttacggtcaaactcggcatcgcccgctccaccatttacgactggctcaatccgaaatcaccacgctacgatgcaacttttccgcagcagcggcgcttagggcaacaatctgtgggttggttggagacagaactggatcaatggctgcttcaacgtgaaataccaccgacatctatctaa

SEQ ID NO: 109136 - DNA, 765 bp, Enterobacter aerogenes
atggatgattttaatctctgtttttttgtcgatgcgataaaggaatcattcaacttaaagaaaagtagactggtgctcgctctgcgtgcagttggatggaaaagctgtataacctgtttaaatgatggcgatactcatatcaacaaaatagtcaatgatattatgctggacacagcgaagcgtcgtgaattggaaaatcagtcgtaccacatattgtatgaagaggttgacactatccaggaatcaatagatgagtggatctttctggctgcaatatactggtgcctagggatacatctcgtggcttcagattggcgtgatggtgtcacgttattgctcaaatcgacagaacttctcgacatgtgccatggaattgttcaccatgaaatatggcaaaacactgaggcgaaaaaaaaagaacaggccactaatgggggtaaagcaaaagcatcgctttacgctcctctaaaagctgaaattatccgtttgttgtattgcaacaagcctgcggatggctggagaaacaggagagaggctatagagttgattgatgaggatgtaagcatatttattcaagagcatggctatcccggttcccctgaggaaaaacaggaagacttagctgtattatttgcaagaattccccggctgattgaagattggtctagaaatgacgccgtagttaaggctgcctttaacgcaacgctaaagaaaaaaagcgccaataaaggcgcagaacagaaaccttggacatcagacatctaa

SEQ ID NO: 109137 - DNA, 1074 bp, Enterobacter aerogenes
atgcaaggtttaaattacctttcagaaattgaaaaattaaagcttttcaaaaacattcgaattggaatgagttcagaagaagaatttgatgctttccttacctctgtagggaatgatgaaaataaaaatgaaataaaaaggcgaattaacggtttgtttttagaggatgaattcgctttgctgtgctttttcatggaagtatgtacaagtctaacctctttaggtcaatcaccagtaaataacactggcattaaggtgccagattatctggctagttttaatatgccaaaagggaaggaattaaaatgttttattgaggtaaagacgagcaatgctctagaaactaaaaaaatatcaggctctttcttaaataagtacagtgagttttgtcatagattccgacaccctttatttattgcatcacgcatacatcaaaacaatcttcttttctggatattgcaaagcgagagcgagtttataaactctggtcgaaaagtagatgtgagtaatataacaaataatagcggatgtattcttttggatgattggtttatttcctcaattaatgttttaacagtgacaattcattttagcgagcaccctttagtatctcaggccagatatgaggataaggggtatttacatcaaattaccgtatcgcagaagcatgagggaaatatttgcaagtttgttcttaacgagaaagaattcgttttaaatgcattcctagatgagtttcagtctaatgatacttatcataaagaaaaaaatatattagtaagagaaatacctgaacactcttctaatttaataagcagcttattactaaaaatgaatatgcgagtaattgattcagaaagtccagatgacagattaaatgccagtagaatgttggcaaaaatagaatcaggttatagcacttacataaacaaaagttatcttaaaaagataatagatagtttgaataaaaaatcaatcgtaagtggtgctggtattatttttgccccaatggggcttgggagtagccatgatagaaaaaagaaattgggtgaattactcaaaatttctagatga

SEQ ID NO: 109138 - DNA, 555 bp, Enterobacter aerogenes
gtgcttcaggacttgctgaatgcctgtatggataacctaaatgacttcgctgatactatgagtattgtctacccgcagccttatatccagctgttcatcttccatatggtacgtaacagcctaaatacgtatcctgtatggactacaaagcggtcaccagtggtttaccagaccacgactgaagaagtagcgctgatggcgctagaggcgttcgccggtgagtgggaggacaattatctacaaatctgcaaaagctggagtgtacagagggaaaatctgagcatgttcttcggctatccaccggatatgagcaaggccatctacaccacaaatactatcgaatcgctgaacagcgtgatccgtgcggtcataaagaaacgtaaggcattcccgacaaacgactctgtacggaaagtggcttatctggcgctcgaagttgcgtcaaacaaatgttgtatgccgaaccagaattggcgaccggtgataggtcgttgtatcatcgagttcggtgagctcgttagcgatcttattaaatacgggaacagttatacttaa

SEQ ID NO: 109139 - DNA, 519 bp, Enterobacter aerogenes
atgaatttaattaaaatatatattgcattagcgtacccactgctgtttgctacgacaaccgcattcgctgtgcctgttaccactactatcgatgttgaggcagaaattagtaccagcgtaaaaatttatgttgatggtaaagatgtcactaatggtaatatcagcgtaaaacttgctaaccaagcgggttatatgtgggggataacacccaaaatattatttattggaaatgcttcggatgtttcactcaacctgacagaaccaccagaaaattctttagtttcaggtgaaaataaaatgcttattaatactgcatgggtacttgacggtgatgataacagtattggctcaaccactgctgcaccggtgaataatatccccgtttacccctcgcttgccaatgtacctgcgagtgaaaaaggtataaaactccgttttatttccgagcgacgggcagaaacttatccgcttgggaaatatagtggaacctataccgtgatggttacaccctcctcgtaa

SEQ ID NO: 109140 - DNA, 918 bp, Enterobacter aerogenes
atgaagtactctttgctattagcatctttgctacttaatcttagtacggctactgctggtgattggatattcactccgcgagttcatggagcagtacaagttacgcagcagggctcgtcagcgctcggccaggatattttggtaacgaaacagctggaaaatgaaacagtcactattcaagttatccctgcaggctggggagtatgtcaaaacggtgtacttagcggtaatgatcgactggcggcgatacacttaccgatgatatcggtagttcgtggcgttccccagccagcccttatcgttccgtgcggcgagtcattacaacttgctgcacaggtggaaagcaggagtgtcggtgtacaatctgcagcgcttaatgaacgtgtttcgataagtgatattccagcaggtctaagagggcaaagagtattacttggttatgttaactttacgcaccagaatagtcatagagaaactaatgcggtgtatatcgattttactaactataatagcgatgttgcggtacttaatgcagccttcgataagcccgtacttcgatttggcgaggttaacgtattaaaagacaaccttaatacatcaagactcacgattagcaaaaccaccgaagctggcaatgcagcaatgccctatgaactttcatttgaatctcggcagcaacgagaaaatagttttcaacttaaagactcactaactgaggcttgggttccatatcaaattaaggttcgtgggcgggcgatgctgccaggtgatatctttgcaggtttagttcctgcaggcagtgccgctacggatattattaatattagtttttccctatcaggtaaagacattcaaggactatcagcaggtactcgcttaactgatacactcacagccgtaattaaaccaaccacttaa

SEQ ID NO: 109141 - DNA, 720 bp, Enterobacter aerogenes
gtgaaattcaataaattaaaattagctcccctaaccttaggattagctatcatctccacctccccttttgcacaagcaatcgaggtgttcccaataattaaagaaataaagactgaaactccgcgggataattacatcaccgtcaaatccatgtttcaaaataaagatagtgttaagcaggataagaccgatattcagcagtatgagtttgtcacactcgaactttttgaaataaaaaatcccggagaagaaaaagaaatattcgaaaaggagatcggaaaaaaagatccaacgttaatgttctctcctacccgtcttatcgttccttacggcgaggaaaggaaagttcgccttctgcccttaaaaccggtgcaatttgaaaaagtttatcgtctgcgagtccgccccagttatccagaacaggcgctggataaaggtaaaattcgtttcgcgattggttacgatgctttattaagatatttacctgatggtcaaagaactcaaggtgtccagattaattgtaataacgataaatggacaataacggcaactggaaccgtgcgcagtgaattaaaagatcttattatcgatgggcgaaaaaataaaaagaattttaatgtttacccagggcacccacgtactctaagagtcaagcagaaattgggattttcaatggataagaaagtctatgcgtatgaacaatgccagttaaaggattaa

SEQ ID NO: 109142 - DNA, 2574 bp, Enterobacter aerogenes
atgaacagtaagattattttaaatgctgtatgtctgggatgtactttcattttcacacctataaccttaaatgctgccgaagttgcgctcccgcagggctttgaagacatatttaatgaacgccagaatggtatttttgatatcatttataatgatgtggtagttgcttctatcaatattgaatataatttatccaatgttattctaagctctccaaagatcgtcgatgagcaaattactgccgtggatatgcccgcactgaaagtgagcccagaggcgttacttaaagcgctatcgttacctcttaaacgcgtcagtcaacaagggtttaatcatgacgaaattaccgtctgggttaatgaatccgatgccaccatgcaactaatgctgccttcctcaatgtaccaggaacccaatgcagagaatgatcgtacctatattctgagtaaaaataacgctggctttatacataaccataatcttaaccttttatctgatgattattcggatagttttacttttgcgtctaacgatacgctcaacctgaccggtaacagctatattcgcagtgtctggagttattctcaagacattcgctttaacctcgaggaatttgcattatacttagaaaataatagtactcgtttcaaaggtggacgccagcgcttgggagataattttacttatagtactccctctcttagctatagttttttcaacccggtaagctacgatggtatctcacttggctatatgactgataattatttacatacaacagatggagcgtcatctcctgttagtatttacatgccacaggctggtaccgttgaggtatatcgcaatggaaggctaattgatttacagcaattcacttccggcatgcagcaactaaatactaatagctggccaagcggtggatatgatgtaaaactagttcttaaactagttaacggttcccgggaagagaagatacaatcttttttcaagcgtaccggcatgttccgctccggggatatcgaatatagcatccaattaggccgctatgatcaacgccagggacatttacttggaaaaaataccgttcattgttcaaccagcttttgcgatgagtatagtaatactattaataataacaatctcgctagcgcaaccttgggttacacgactcgctcggcaacctcttttggtggcggggttttaatggatgatgattatttttattacaatggaagtattgatattcccattaatttattttttatagaacgcctgtatagcgatacattgttaggtaatgatggcagctttggatatcaattcggagccaataaaagcatctacaatatgggttttaatatcagctatcgtgacaaccgctataaaggtccagagcaggattatcgccgctttggtattgtttccgcctatgactttaactacctccaatttagtaccagtttattcttgccttataatataggtctgtctgctatctatagtatgaatacactctaccaagactatggccgacaaaataaaacaaattataaaacttgggatcttagtctcaaccgtgattttacttttaatgataatctaaacctaagagttgacctaggatatcatcatggaaaaaatgaatatactaatcacagtggcacatattatcaatatgctaaaagcagcgatgatcgtatatttcttcaattaactttgggaatgcgtgaacgtagttataatcactatcaatctctctacttacgctctaaattgagcgatcgaggaaccgatgaaaataactatactgccgactatacgcttaatctggataatccagagtttgatcgtggaggaaaatactcagttaatgcaagcttaggtaacgggcctggtagccaaactactagcggctttggcttaaccattgataaccgtttaggctataactccatcggcctaaacaactcatatggaaataatagctatcagcaattttatctatcccaacgcggtggattcgccgtaggtgatggcgacttcacctatgggaaactggatgacaatgccgcacttattgtcgacgcaaccagcctgccaaaagaccagtatttcgcagtacagaatcatggtgcttccccagccttagttcaagggggccataaaactacgctggcgtttacgccgtataataaagttgcaccgaccgttgagcaaatatacactggtgataccaacgctttttataatttaacaaccaagtcaacttcaacatgggcgatgccgggtcaggcctatgtagtaaaaattggcgcaactaagaatcaaaccgtcactggtcaacttttttatcatggccaaccgttagcaaatgccaaggtcgtcggtggcaatacgcttacagataacgatggtttattcattggtgattttacgttgggtattgaaaataagctaactaccttttcagtaaaaaaagatggtcaagattttacttgtcctttagacgaacataatatcaaacagatgcagggtgtactgcaagttcatgaggttgaatgtgaaattcaataa

SEQ ID NO: 109143 - DNA, 519 bp, Enterobacter aerogenes
atgatgaaaataaaatgtgcagcctttatcctatatattattacactttgtttgcacaccaaggcgcaagctgagggggctcctcaggtgaatcttgaggtcgaggcagaatctgttgcgcacgtcgttgtttattatcatgatgctccggtaacaggtcatagcataaattttcctctgccaatacacggcctgtctcaacgttttgaaagagtttccgaatatttctatgtggtggggaatgtgccacaagctgaagtatcattttctgatagcagtttttctttatatgcaactagcggtagtgaaaacaaaataaatttagctggaagttttgtatttgataacaagttttctgacgcacagaaaccgctacgggttcctgtactcaaaaatatcagtgaggctacgtcctccagtggatttaaaatacattttatgtcggagtttttagccggaaactatagccagggtagctatgcaaactcattcacgctattagttaaacctattctttaa

SEQ ID NO: 109144 - DNA, 543 bp, Enterobacter aerogenes
atgaaaactaaatcagcgattgctattctgaccggcttagttctttccgcttcagctatggctgagagtccagcaagttatgatactaagttcaatgtaagcgctaacgtgccggacagtgcccacatcaccgacccaagcggtaagccgattaccgatatggatgttgtcctcactccggcagcttccggtttcatggaagcaacaactgatatcgtaaagctgtggaataatgacgtcaataagcttgacgttaccctaaccctggatgacagccagtcagctaccggcggtgacttcacgctgtacagcactcaaggtggtactctgaacagcatgacctacaaaattaatgctatttcctctgagggcacaaaacagttcgccacttcaggatcaacccaggactataccttggttgctaacggaacccatggagagctacctgttaaattccatttcgtctctaacaaagcatataccgaccttggtcaaggtaactataccggcgttgtatatgccaacgttaatgccaaagcataa

SEQ ID NO: 109145 - DNA, 1314 bp, Enterobacter aerogenes
atgttttcctacaccctacaattgatacgccgttttatcgatgatcggcacggcgcttttgccgtaagtctctccatgcttggcgcttttttattaagtatggcggcactgggtctggagggttctcgttacgttatggaacaagcacgtttatccgatgcgatggagcaagctgctctagccttgacagcagaagacaatggcaaaaactcgccacgtaaccaagtgcttgccacccgatggctttcagcctatatgaaccacgctacgcatatcgagcccccggtaatacaagttctgcatggttccgcgagccaggggcacaaacttgcctgggtagaatatcgcctgagtagccgcgtccagcagaattcatggtttgcatcatctcttttcccttcatttcataaacaggtaaaaataggtgataatggagctgcaagaaaattccgctccaatatcgatgttgccttcgcggttgatttttccggttccatgagacaatctatagataaagagattggcgatcaatcaaggccttggaaaattgatgtggcaaagcagatcgctgtgaagattgcacgccagttggcgcaatataatatcgataacaaagtcgcttttgttcctttcggctggggtacgcgcaaaggtaatcgatgtaccccgcaatttgtgcttaattctccgttacctctcaatatatttggaagcaatgatcaagaagatattaaacatctctatgattatattgattatcgtgcaacgattgatgcaataccaaagcaagttaacgatattcgtattgatgttaataatttacctgatctcatctgtctctcataccatggcgcggatccggaagaatccttaaccatgactcaggcacaaaccgtccctttaaccccttcgcctgcacatcttcaaaaggctatcatgaatatggccgccagcgatcgtaccctagtgagctcaggaatgttagaaggaacacaggttttagccaaaggttccgcatctcgtaaagtattagtcgtggtttccgatggtgaagattggccgatactcaacgaaggtattacagagaaacttttacgtactggcttatgtgaaaaaattcgtagtgctttaactaccccttacgcaattggtaagattgcatttatcgcactaaaatataatccaacctctgactggaaaaaatgcgttggcgataacaacttctacgtagcccagagctatcaagagtttgaagatgcaatgactcgagcagtatttgaagaagtaggccacaacactctcaaagattactag

SEQ ID NO: 109146 - DNA, 594 bp, Enterobacter aerogenes
ttgttcaggaatatgaacgttcgcaatttatggactaatcgagaaggttcgatcgcagtagaatctgcaattatctccgtggttctgctaatctttatatttttcctggccgatctggtgctacgccaggcgacagtaggtaagctcgatcggctctcttactctgtcgctggggtcttacgtgaacgtacacaactttacgccagccgggaagaattaagtcagaacgatgttaatagaatatatcgattagctcaaagaatgctgcaggatatggatccaacggccaatacctcatctcttaagattcgggtacagcaactgttcttcgtgccgcgagccgatctttcaaataatgaaaagatacctgtgaaaaaaccggaacatactcataatatacagggagatgaatgccaaccagcaaaatcacttaataaacttcaggatctatcgccacgaggaagctatggtcgctgggtacctatgtaccagataacattatgtttgccgacagtcaactggtatcaaaaactgacctcgggtgataaccacaacccattaatggcctcatcatcaatcgtaatgttacgttaa

SEQ ID NO: 109147 - DNA, 495 bp, Enterobacter aerogenes
atgcattttttaaatcgtttttatcggcagcagcggggagtcgttactatagaattttccctaaccattacaatatttttatttatggtgctatttatcgctgaaatgtcacgcatggcatacgtttcatcaactattgatcttgccgtttctgaggcggctaaagcgggaaaaaatgcccctcaaaataatcatggatatgaacaacgttatcgtaatatattgactaagcagggcggggcattatggttttttttaaccaatgaagatgcggtcgaaatgtcaatacactatgctcgatccattgatgatatggtaaataccggcggcattgagggccactcacatattcatcatagccctttagcgcgttatcacctgctttaccactaccatccgatgtttttcccttttccaaaaagttgggcagaccctttatttaatcgtgaggtgatctttgttcaggaatatgaacgttcgcaatttatggactaa

SEQ ID NO: 109148 - DNA, 738 bp, Enterobacter aerogenes
atggtatattttaaacgtaacacaatcattttattatgtttactaacgcttagtggctgcgtcgccccgttgcataaaaatagtgccagtctgacggctaaagaaaacattttactcaaatcaaaaaactttgccgggcttatcagcctgtatcgtgactcgttaaaacaccgagacgatccggaaatcagagtgaagttatctcgtagttattatgaaacaggcgattatccttcatcactactttatttacaacctttagcaacatcagctaaccctgaggtttacgctttacaggctaaaaatatgatagctcttggtgaacaggagcgggcgttaaaagccgtagatcgtatgttacaacatgacccgcatagcgccgaggcctttaatctgcgaggaatcgcccaaacgctttcaggaaacttacaatcaggtgcccaatctcttcaaaaatcaagggaattattcatttccgatgacatcgccattaataatcttgccgtcgtcgcgctactggatagacgctataaagatgcggtgagtttattattaccgcagtatctgcgcggacagcggcagcctcgccaactgcataacttggtgttggcattggtcaaagttggagacattcgctatgcgcgagagattattcagaatgaaaaactatcgccaaacccagatgaaattattgatgcattgagccaaatccatcctctgaataaaggtaatgcataa

SEQ ID NO: 109149 - DNA, 873 bp, Enterobacter aerogenes
atggatactattaaaaagggcaacctgatgaattttgtttatctgatgatgctgctcatcggggcgtatttcctgtgcttaagtttatctaagcagctcaggttttctaatcaaagagaacaactaactcctaaaaggaatagggctaaaggggatgcaaaaagaaacatcacaattgattatctcagtgttatcataaaaaatagccgctggctatctatattagatgtgctcgataaaaacttgcatattaaacttaaagtttttatcgtagcggcctgcattgctattttattaaacctagtcaacgtcattaccttttcgcgttcaggtttagggacgttgctactgctgctcatgatgactattatcgtgttaccgggtctgcttctcaaaccggcagttaaaagaaaaacaaaggacatgatggatgtccttccctatctggtagatttaattgccgtttgtattcaatcgggaatgacggtggaaagctctctaaagtttgtcagcgccagatttcaccatctcaatgccgatctggccgaattaatagaaatattaatcaagcgcgcagaggttagtggtatggaagaagcactctccgatctttactgctctatggagataacggaaatgcggatgtttaccgcaaccctacaacaaagcgtgcactatggtacttcactatatgaacacttaattgagttagctcatgatatgagagaattgcagctcttagacactgaggaaaaaatcggcggcctgtcagcgaaaatgagcgttccgctgattatatttattatgtttccaataactatattgattatcgcaccaggaattctgaggatagtaaagaatggtatattttaa

SEQ ID NO: 109150 - DNA, 876 bp, Enterobacter aerogenes
atggcctttcttatccttctggttgggttggtattattagccattaatattttaagttggcgaaaaattctccactcactacagccaaacttgcctcgacttacacagcacggttactatcgtgactatattatagcgatagttaaagaatggcgagagtattctttaggcgatggcagtctccgcggcatgcgaaacttggcgatcgcttttgcattgtttttcgttttattgctgactaatggcatatggtttaaatttgaatggataagcttcatatcaatctcgctggcagcaatattttttgctcaaattcgcatcggccgaagccttcatagaaaagcatttgaggcaagttttcccgaggcgcttgcggtcatcagcgcctcggtttcagcaggcaatagtatccatcaggcgctctatcgctccggtcaggatgttgccggagaacttggcaatacttttaatcgcatcgaccggcgacttaatctgggtgaggaagcagatcgcgtatttatcgaagcatggctaaaatatccgtaccgtgaattttatttttttataatagttatacaggttagtatacaacgtggtggtcagcttcggaccttaatcaacaggctagctcgcataattaacaatagtaaaaaaatggcgaagcgaaagaaagcgatgacttctgaggcacggacatccgccaaaattgttgcagcaatgccgttactttttttctttggcatgaagtatcttaacccggaaaactatgatttcattatccacgatcctattgggaggataatactatattatgtcataggtagtgaattaatcggcatgtttataatatggatactattaaaaagggcaacctga

SEQ ID NO: 109151 - DNA, 1281 bp, Enterobacter aerogenes
atgaatatcgacctaaagctacaagaaaaactgcgcgatgcggtcttaaaaaatattgacatcaataaaattgaaagcataactgcagaccgaccgttattaatatcagaaatgaatcaattgcttgaacaagtttcagataagcataatctgtttcttactacccagctacaaagacaaatggctgaaatcatggccgatgaaatcattggctttggcccgttacgtcctttactggaagatgattcagtaagcgatattttagtcaatggcccagaaaagattttcattgaacgttatggtaagctggaattaaccgattgtcgctttattaataacggtcagctaactgatattgccaagcgattggtacagcgcgtcggtagacgccttgacgaaggtaatccattagtcgatgcgcgtctcccggacgggagccgtttgaacgtagcgatccctccaatttcgcttgatggcacatcaatttcaatccgcaagtttggtaaacataatttacaacttaccgacctgctaaactcaggtgcgctaactccgcaaatggctaactttctggcaatagccgcccgctgccgcgttaatatcattatatctggaggaacaggttcaggtaaaacaacgctacttaatgcattatctaaatatattagtgaagatgagcggatcattaccatggaggatgccgcagagcttcgtctgatgcagccacacgtgttacgcatggaaactcgtcttgccggggtggaaaatacagggcttatctccatgcgttcgctactcatcaactcactgcgtatgcgaccggatcggattattgtcggagaatgtcgcggtgaggaagcttttgagatgctacaagctatgaatactggtcacgatggctctatgtcaacactccatgccaataaccctcgagatgccgtttcccgtcttgaaaatatggttatgatggcgggaatgaatattcctattgaatcaattcgccgtaatatagcctctgcaattaacctcatcattcaggtttcgagactaaatgatggttcccgaaaaataatgaatattagtgaggtgatgggtgttgaaggcgaccgtataatcctccaagatattttttcatttaagagccataacgaacgcgatgacaaagggaaaattaaaggaaattttctttgcgaaggattactgatgcgctctgcagtaatgcaaaacgctatcatgtttggcctggaaactgagcttaagaaaatatttaacatggagtaa

SEQ ID NO: 109152 - DNA, 1110 bp, Enterobacter aerogenes
atgttattgtttcagcaaaaaaaatccgatgatactaatatcactgaccgcaaactatatgttatttctgaacgatacgaagtcagggaacagctgtgccagctatttcgcctggcaggcttccatgcagtagaagatgtccccgcgggtattacccagctatccactctggctatacctgaggataccaacggcgtcgtgatagatattgcggacaatatcgacgttgctggcattgttaactctctgcaaatacagttaccgcgcaacgtatggtgctgcgtagtaggggaaagtgactctatcagtctggcacaatcttttgcgcgtaaccaaattggttactttaatctccatacccaacaggatatggcagtagaagcggcactatccagagccgaatataaatatagtcgttctgctattaatatcaccatccttggttgtaaaggaggtattggttccacaacgatagcatggcagctttcagaagaactagctcatcaaaaacagcttcctattttatttatgcaaggaagcagaggctcacacgacctggatctgattatcggcaaaaaactgtcgcaggatataacttcagtaggtaagaatctggatgtcatgtccgccgtcagcgattatcccaacgttgaacaagatacctcaaataattataactttgctgtatttgaacaatcaatagcaacagcagataaagagatgatgcgcttattagcagaaaaatctcgttgtatgatattaataatagatcgctcactgtcctctgttcgagtagcccgaaatatgattgaaaaaaccgagcaactacgtcgtaacagccccacccccaggcgtctgttaatctgcctgaatgatactaggccagtcgccgaagactcattaagcttagtcgatataaagaatctattggataatacaattgatattcatttgtgctatagccggcgaaatgagccatctaatttagtaaaaaaccgacaatttcacacatcaattatccagctaacgcgagtagtactaggcgataaatataagcctgtgaaaaatacttttcctcgactctcagccttatttcagcgagacaaataa

SEQ ID NO: 109153 - DNA, 474 bp, Enterobacter aerogenes
atgaaaaatttactgtttgttttttcactgctgttatcttgtctgtcattaactacatatgcagctaacggacagaatagaaatagcggatttattgaaataacattaaacgcgcccgataaaatgctccgtgaaatgaccataatggaaatattaaaaattgccgaaagaaaaacctttggtgaaataaacctgctctggaataaagaacaactcactgcgcagatatatgccttacgcagtgaattaatatccaacggcatagatccaaagcggattatcctacagcgtgagagtggcggatttcataacaatgcggatgcccgcattgttatgaaacggctgcggctgcgccgtcctgaatgctcaggaaatagtcaaaattaccattctaatgcatcttcagagccaggctgtgtgctcaccaacaacctgtacaacgcattagttactccatatcactttgaccagtag

SEQ ID NO: 109154 - DNA, 1359 bp, Enterobacter aerogenes
atgagtaagtttttgtattctaccgcagcaagtttatttctttgtttcctgacctcaggtgcctgcgctgccgatacctatttaatgcccggtgactctcaagttattaaggttaaggaaaatattgataccgtatttatctcatcaccgaatatagctgactatgagcttattggtgacaacagcattgttgcctatgccaaagaagaaggacgcaccgatttagttgcgttcgataagaatggggagcaggttctaaagacaacactggtcgttgactccctgttaagcagcgttcatcagcagatcaatcaggagtttcccgatagcaacgtcaccatccagaaaatagggaaaacttatatcatttctggcactgcgcctactgaagatgccagcaatagaatatatcaaattgtcggtgaaggtattggtgcaaaacgccatataacccaaaagaaagtcaaggatatcgcaagcgatgcagatagcaatagcaacgataacgatatcccctggctggatgatatcacgtgggagggcgtcatcaataaacttgagctaccgataaccaaccaagtcaacgtaaagctgtccgttgttgaagtgagccgtgaatttattgataacgttggtcttgactggggcactatctcctccagtggaggaagcattacgccgggaacctttcgcttgattcgatttaacgctgatactctcagcagtatggtacatgcaattagcaatgaatctgttgcccgggtactggcagaaccaaacctttcagtactatcgggtgaaacggctgaattcctcgttggtggtgaagtgcctgttgtcacttcgtcgcaaaacggcagcagcgtctcttacaaagagttcggcattaaactgaatatcggtaccaaagtcagtaatagtaaaaagattcgcttatcgcttggcgaagaagttagcaacatcgctaactcgtattccgatcatgccggtaacagcttccccgcgttgcaaacccgccgcgcgcgaacaacggttgaactcgccgatggggaaagtttcttacttggtgggcttattagcaaccgcgaacgggaagcattgagcaaaatccctctgattggcgatgttcccatccttggtgcgctatttcgcaacgcttcgacacaacgtaaccgcagtgaactggtggtagttgcaacagtaaatctggtcaaacccatctccccacggggtgttgtaatgccagagtttaaacgttcgtctactatcgcccgtttttttaatttagacggagttttccagcgccgcgataaagctcgcgcccttcaatttatcgagcagggtggatttataaaatga

SEQ ID NO: 109155 - DNA, 855 bp, Enterobacter aerogenes
atgaaccatcggatacttttttttctttctgtaattattatcataattggctccgggggcatttttttacaactcagcagcaacgatcgtcatgagcaaaaagaaaaaaacacaccggaaaaaatctctactacgaatacgattttagcagctgaagcatttcgcgacctgaaggcaggagaaatattgagcgcagaggattatcagcttgtaaatttaaaatcctcaacctcaaacaataatctcatcgatatctcagagaaatcgggaggagatgttcgagggtatttattaacaaccaatacaaaaaaaggaagctatttgacgccatcgacactcctgtccccaaacgatccagaatatgctaaacgcagcataggagttaatgaaatgccttattccttcccaattccctttgtcgataattatttactctcatccactcaggctggggataaagtggcgctttacatcagaataaaagagatcgaaaaaggtaaaacagagatggttgggcttgcaggtgaagatgaaggggcttcggcatcctatcgttcccagacccctaaatatgccgttagccaagtttttgaccagttaacggtaatagatactaagctttattcctcaaccagagaagaggatagctcatataataaagataacaaccggatcatcggagccataatattacgattgaatcagaagcagctcgcaacgttaagaacgattgaaaaagcaggtcaattatttttattacccgcaagcaaaacggaacaaagtatcaaacgtaccagtatggatgatgtactcccacagctacgttctattaaggaattgcgtggctctaaataa

SEQ ID NO: 109156 - DNA, 384 bp, Enterobacter aerogenes
atggtttggttaacaaagataaattacatggcaattattgtaattttacttttgatttctatgcaagacatctattgtcgcatgatctccaataaatttgtgattgctctgggtatcgcctgctgcaccttgtctttttttgttggtcattttcccaacgtatttttattttttgctgtactgctccccggtatttttcttagtgcagccaatattattggtggtggcgatattaaactgatgtcaacgctagcattactctttacgccagcacagttcgcgaactttttgctacttacgtccctatgcggcggtgtacttgcagtattttgcacaatttttttttacggaaagtcaaacgcgatggcctgccttacggagtag

SEQ ID NO: 109157 - DNA, 228 bp, Enterobacter aerogenes
atgactcattatctgactaaatattatgttgctgtagagaaccatattgcacactttatgaaaaaccagcgtggtgtaaccgcgatcgaatatgcactaatcggtgttggtatggcgacattgctagcacttatttttggcaatcaaaacagcggatttcttggtgccatcaacactgctttccaaaaaatcatgaaagcgatccaaagcgttactctgagtaagtaa

SEQ ID NO: 109158 - DNA, 561 bp, Enterobacter aerogenes
atgatggatgaaaaagacaggttcatatattctcttgaaaatgatgtgattttctcgcctaaaaagcgctgcttaaaaactaaaaatggaataatcattgagttgtccgaaaatagctatcgttttctcatgctcttgttaaatggcgagacagataagcaccaaatcatcaatcaagtatggatagagcaaaatggagctgtcagcgaaagtagctattatggtcaactttatctgttgcgtcgctcttttattgaggccggacttcctgattcattaatcaaaacgattcccaggaaaggggtgaaatatatggggaacgtcgagaaaatgatatcgacaaatgaagatgaggacaagaatgaacactgtctaaagagtactcagcaaggtattgaaatcttcgatgaaaccatcactccaacgcagaaaacggccgcgactaaggcctgtagcggcgaatggcatcactcgaaaggatggaacgtgcttatatctattcttactgccataacggtatgttggttagtattcttaactttcgtaatgtttttcttttaa

SEQ ID NO: 109159 - DNA, 1731 bp, Enterobacter aerogenes
atgacaaagggcaaagacaatcccgcgctgatagccgcagagaaagcacaaagaaaaatcaatgatgcccttgatgcaggacaaagctttcggctggaggcgggggccggtgcaggcaaaacctattcgcttgtagccgcactgaaacgtttaattgaagaacaaggagcgactctcgtacggtatgggcaaaaggtggcttgtattacctatactgaagttgcacgtaatgaaattgcacaggagctcgaagagcatccagccattctggtaaataccattcatggtttctcatgggcattcctgcgttcatttcagaaaacattgcgtgaactcttaggggaaatggaggataagaaagaaaagattgagcaaggcggtggtattggagccaagtcggtggaatatgatatgggcttctttggtgttgatgagaacaaaatttcgctgagtcatgatgacatcccaaatatgatggcaaaacttttgcaaagagagaaattccggcagattttaagtcagcagtttccagtgatatttatcgatgaatatcaggatacccatcgtcaatttatggaagcaattactgaatacttcctgaaaccggctaggggtcccttggtgggccttttcggcgaccattggcaaaccatttacagaagtgagtacgaacttgccacatatcccattaaagagatcgcgaagggttctaactttcgttctgttccagcaattgtcaaagtattaaataatctacggcctgagctgcgtcaggaagtccataaccctgaagcaaaaggcgaggctcggttcttccacaccaataactacaaaggagagcggactaatgaccggcactccaaacaggatctattctccgatctgactcgacagacacgtatagcgttgatggatcgactacaggctgaaggttgggacttaagtaaaacaaaagtgctcatgctcacccacaacgtacttgccgcggaacagggatatccaggtatcgtagaggtattcaatggaagaaatgatctatttgccaaaaaagaagatcctgttatcaaattctttactgaaaacgtagaacctatgtgtgaagcctattgcgcatcccgctatggagatatgttcagaatatacggatctgcaccagccataactcagcaccaggataaagccagctggcgaagagatatggacattttaaggactttacgtcaagaagggacaatcggacaagtcattgatcacctaaaaactacgaggcgcccagccccaccagaccgcgtattgcgtcgagatgaagaattaaattctttggatagtgctccggtgccagagggagcatctgcacttaagagatacagtaaacttagagatgttccctataaagaagttattgagatcgctaaatttattgaaaagcagactgcttttgcaacacagcacagcgttaagggggcggaatttgagaatgttctggttattttaggtggtggatggaatcattacaactggccactctttctggagctcatcaagactaaagctctgaatgaaaaaaataccaagggcttttatcgcgcacgtaatctattttatgtttccctttcccgaccgatggtaaggcttgctgtacttgccacgcaaactatgtcagataaagctttagagtcagtagaagagcttttcggaagcgaaaatgttgaaggattgatcatctcatag

SEQ ID NO: 109160 - DNA, 2085 bp, Enterobacter aerogenes
atgcgaattgaaaaggttcgagtcgaggggtttcgccttctccaggatgttgaaatcatgctggaagatacctcaacagtaatcgtggggcgtaataacagtggaaaaacatccttcactgagatttttgagagatttgccagtgataacggagcacgattccgtcttgaagatttctcgcctgttcagcgtgataaatttctcagtgcaaaattactgagggagcaaggtgccaaagctgaggatgtccttgcgatgcttccgactctatctctcactcttaccttccgttacgacagtacatctccaaatctcgggccgctttccccgtttattattgatctggatacagagtcgacaactgcgattgtgtgtatagaatacaaaacgtctccagcggaccttcatattttgtttgatgtccaaccagcgcctgagggcgttgagccaagggcttacttcttccgttcattgcgagaaaccttgctcaaggcatatggcacctatgtttcggctatagacccaaccgatccaaaaaatagacgtagcttcgatggttctgctgatttagcaacattgatgcaatgcaattttgttcgggcacaaagaactctcgatcatgcgaagaatggtgacgcagatgtgctaggtaaattactcaatacactttttaagacagcatccactccaactgcggcctcgagagatcaggaacttgccggaaaactgagagaagctattgaaggtgttgagcgcagtatgcagggcagtttcgatgagatgttaaaaaatctgcttcccgcaatggaagttctgggttttccgagtctcaatgacgccgagcttcgccctgaaacctcattgaacgttgaagctctcctcactggtcacacaaaggttgtctacacaggtactgatggggtgcatcttccggaaggttataacggattaggaacacgtaacctcatttacatgctcttgcagctcgaaagttaccataagttatatcgagcaagacctgtctgcccggctacgcatcttattttcatcgaagaaccagaagcccatttgcaccctcagatgcaagaggtatttattgcccagcttaatgctgcgataaaaaagctatcggcaagttaccccaacgagccagtgtggaatgttcagttcattatctctacacactcaccccatgttgcaaatgcagcctccttcgaggctgttaggtattttctcaatgaagcgccaaccccaaagaaaccccgtcagacaaaagttaaagattttaaaaagggattaggctgtatttcagctgaagaccaaaacttcctgcaccagtatatgacgctgacaaaatgtgatttatattttgcagataaagccattttggtcgagggaacaaccgaacggttgctaatgcccaagttatgtgaattagtcgataagtcgcttgatgataaacacaagctagtcaggcagtacataactaatgttgaagtggggggggcctatgcgcacattttttacccattattggatttcctcgaactaaaaacgttagtaataacggatatagactcaaccaagccagtggaaaaacaaaataagcatgggaaaacaattactacctgggaaaaatgtcctgtcgcagagggacaacgtacatccaatgcagcaatcaaacgctggtttcgacccgaagagcatccggatgacgaacaatggcatatcacacctgctgagctgctttcaaaaacggctacagagaaactaaaaggatttcgccgcattgcttaccagatagctgaaaatccagaaacaggaatcagtgcacgaagctatgaagatgcgcttgttctggcaaatccagaactgtttacatggactaaagagcaggatgcagcgattgaagcatgggaaatagccaagacactcgggaaagcggatacagccttgcagttcgctattcgtgaaaaagaatgggtggtgccacgttatattcatgagggcctggcctggctttcggaaccacttctcgtgcctgaacagacaaatgaagaacaagcagctctggaggctgtatga

SEQ ID NO: 109161 - DNA, 2580 bp, Enterobacter aerogenes
atgctgacctgctattttcgtagcgggaaaaaatatactcgtccattttctgtgtgccagataacaccaaccgtagtcctgcaaaatgtttttctcgagcgtaatgggcgttctgtaacatcccgggctgaacgggttattatctatggcagtaaatatgcggcagtttactactctggaaacaacaaaccctatattatgaaaatggccgggcttgattttcagaactgttctgcatttacagagcaggctacgtttaggtatttttgtcgcgtagctgaagagcgtattgctcatgcaagaggaaacgacaaaaacattgctgagaatatccacaggcagataaaaagaatcgttcctcatccggatactgctttgcatgcatactgttcaggagagagtaaggatcgtgacttaccggagagtttaatttttccgtttggtcttaatgaaagtcagttacttgcggttgaacgggcattttcctcacagatttccattatcgaagggcctcctggaacgggtaaaacccagactatactcaatattgttgccaatattttgattcagaataaaacagtggcaattctttcgaataataacactgcagtcagtaatgtttatgagaagatggacaggcaaggactggggtatctgattgccagactgggaagtacggaaaacagagagcaattttttgccacaccagtttcgaattctgaggagatattggcagattcacctcccgaaagtataattaatgatgtgcttcaacaagtgaaaaaacatctgaatattattaaccaggtggctttgttgaaagcagaactcgatgagttgcgtattgagtatagctatttgcaggaatggcaggaacagtcccctcagtttgtcaccaacagctatcgtttttcttcccgtaaaacaaccgatctgatggcctacattcattacctttctgatcgacgggttgggctaaaaaacagaattgatttactgttgaacttcaggatcctcaggataaagccgcttaaaaatcaggaggaaaggctggcgcttttcacttcccttcagttgtcttattatgaaaaagctatttgggaaaaacaaaatgttctttctggatataataaaatattagaagtgtctgattttgatattttgctggaacagctaacatcattatcgatggtttatttaaaaaaatatctacgtgagcatgtccctacagcaatatcatttatggcagaaacttacagagataattttgagcgtttcattgaacgttttccggttattggcagtagtacacattcaattattaactccatcggtaaaggagcgcttcttgattatgtcattattgatgaagcttcacagcaggacatcgttcctggtatcctggggttaggatgtgcccgtaatgttattgttgttggagatcgcaaacagctcccacatgttccggtaatacatccgatcacaccaccggcagaacactatgactgcaataaatacagcctgctcgattctgtttgtatgctattcggggaggcggccccggtaacgcttctgaaagagcattatcgctgccatcctaaaatcattcagttctgtaataagcagttttatgacaatgtactgatcccgctgacgactgattcaggcgaagcttcattatctttggtgatcacggcaaaaggaaaccatacccgtaatttttcaaatctcagggagcttgaatccatagaagggcattactgggatgaggaaagtagcagaggatatattgccccctataatgcacaggttaacctggctgaaacagtgctgcctgccgacttcgtgaaatcgacggtgcataaatttcaggggcgggagtgtgatgaaatcgtgttttccactgttctggataaaaaaagtagtagccagcagggtcggaacatcgcgtttgttgatgatcctaatctggtgaatgtagctgtatcccgggcccggaacagatttacgctggtaacgggcgatgatgtttttgaaaaacacggcaagcatattgctgcactgattcgttacatcaaatactatgccagtgacaaagagatcttcgagagcccggtgatatccgcgtttgatttattgtacagcgagtttgacaaatcacttgagcggctgaatagtcggctgaagcctgaggattcgcgttttaagtcagagcagattgctgccagtttgttgcgggatatcctgtcaaagaataaataccagagcatgatgttccattcgcaaatagcgctgaaccaactggtttcagtggaacaaggggattattcttccagagagctgtcatttatgcgtaatcgggccagctgtgattttgtcatttattataaagttggaaaaactccattaggagttattgaggtggatggtgattatcatctggaaaatgcccaaattgaacgtgatgagctcaagaacagcatactgaaaaagtgcagtctgcctttgctcagattacgtacaatcgacagtgatatagaaggaaaactggatttgttcctgtcaggattgttgggctaa

SEQ ID NO: 109162 - DNA, 2118 bp, Enterobacter aerogenes
atgaaccttcaggatgcttcaggtgttttgcgcaaggtattattcaaaatctcacgtgtaataataagtatctttcctggtcgtaggatccccgttttcggttcaggtcccgaaatgatcggttcaattattgttattaatctcgatcgtcaacccggcaggtggcggaggttgagcagagagctcaaaagattccggacttatgatgggcttccactagcctctatcatacagcggttttctgccgtggatgccagggatggtcgcgcgagtgccgcaacagctgacgttgattcggtctactgtattggtgatcagctttatgtccagccggatgcaaggctggaggcacatttcagcaatgatgaacccatcaaaatgaccaggcaggagattgctgttgcaaggtcacatgtggaagtatggaaggctattgctgccggggataaggaatatgttcttgtccttgaagacgatgtatggtttcggttgggggctgttgcggctatcacaagaggctggcgggccgctatacgagagtgttcaggggatcacgggccgcatttactgtatctgtcttatgaagatgcagggggaacagctgaacgtatgaactgctgtggtgacctcttcaggccagtaagaggactgtggtttctttctggctatgtgttatcacgcgatggagcggcagctctgttgcgggcaatgcccgtggttggtccagtggatctctggatgaactaccgctttaatgaacttggcgcgcttgcgctctcaaagccagctattttgcaacgacaggatggtgcttccgataatgcttattccgtacttccttacctggcccgcgcagggattgttgatgccggtacgggattaatggctccggataaaattgactcatgttctgtgatagcctggactgctggtggtccacgagaagggctggcgatggctctggctatgctggggctgcgggtttgtgttttcgatggcgatgaagaggaaatccagccccaggaattgctgaatctttttacggtatttgatgtgcttcttgatgttccactcactcctgaaacttttaatactgtgcttgcaaggaccgaaataaaattcattgtggaggcggggactaaacagaggtttaaatttgaactgaagtctttaccttcattacgttcggtattcttatcggacattaagtctgattttcaaatgtgggatccgctttgtaccctgctcaatcttccgaggcctgcacaggggtaccctattggtgcaccgcgtggatcccgattattcaggtgggatcggctctgtgatttatctcatcaggatcaatttgagtcacctgagacatgttttttactggatgtttcaccctgggtactacctcctcaatatgggtggcgaccagcacacctctcaggtaatgagatgcatcctgtgggcaattgtctgttatgtacagatatggcgactgaaacgccatccttcatcgggcttgtcgaaacttttcctggcaatatggcttcgttttctaaagaaaacctggtctgcgatgaggacggtacgcatctaactatcagtgcaatacctgccggcaacaggccgtaccgcgcgggagccttcgcatcaaaacaatcttttgaatacggacggtttgaggcagaaattaaagctgctcgcggttctggtctggtcaccggcttctttctccatcgggattcaccaaggcaggagatagatattgaaatagcgggtgatgatcctgagagcatgttagtgaatgtctatttcaatcctggcgacgaaggagcaactttaggttatggatacagaggagccccatatcgtgtagaacttggtttcgatgcctctctggattttcatcgctataccattgactggcgaccagaccggatcgtctggtctgtagatgggagagttgtgcacgagcgcgccagttgggatcccacaccagttccgcatctttcaatgcgtttacatgcaaatctctgggctcctcgttcggaagaactcgccgggagaattgatatccaggctttgccagcaacaacaacctttaaaaatattacgttgtgggaataa

SEQ ID NO: 109163 - DNA, 834 bp, Enterobacter aerogenes
atgaattcatatcgaacgggttttgaagaggatgacgacttacgctcttcatttatccgggatcttacgttgcagcaactggaacatcctgcgtcattacatactgataatcaggagttatcgccccttattcccaggaaactgattcgctactggcatgaccagcacaatgtaccggaagacgttatggtttgtctcagaagctgggatcggcttcttgatgatggttttgaatgtagtatgtttaacgatgaatcggcaatggcatatattgccgaacgatttggcgctaaagagtgtaaagccttctccctttgctatcatccggcaatgcgctgcgactatttgcgtatgtgcgttttacttgctgaggggggattgtacgttgatgctgacgatgttttacttggcgacaactggaagtatcttttccatgatgggacactcaaagtacaacctttatgttacgacattcagtcctcttcaatggtgcctgctgtggatatctggagaagtgatttaccgacgactgagcgcattttttacattaataatgaccctattgtggcccctgcaggccatccggttctacagagtgcgcttattagggcgaccgaaacgctactgagtgatgtacattctcccgaaattcaatcaacaactgggcctgggaacttcacagctgcactggcggcacacgctcacaaattgataagggaagggaagtcattcgatttcgaattgttacgtgattgggaaaagattgcagaaacgcgctgggagctgtcctaccgtaatgatgaacgtaactggcgtaatatgggctcagcctga

SEQ ID NO: 109164 - DNA, 1614 bp, Enterobacter aerogenes
atgaaaatcctctcttataatccaggtcatgatggtgctgtagcatttctggataatggacgattaattatgtctattgaagcggaaaaagattctaaccatcgctattctccactgggtatttcgaatgtattagatgctattggtgaaatcgacgatataccagatgtaatttgcgcagggggatggtggcccagggatcatgatgaatatttaaatggttcgaaaattaacgttggttatcggggcatctcagatacagatgtcatggtttcagaaagacgattcctaaagaagaaaattaaatatttttcgtcttctcacgagcgagcacacatactttgtgcatttggcatgtcagacttaccaaaaggaacatcctgttatgctttggtttgggaaggaggaatcggagcattctacgaattagatgcagaactgaatataacgctcattggcgatgttcaaaatcagcctggtaaccgctatggtattgtttatgggttagccgatccagttttttccaaagacagtgcttaccctcgcttctcagatgctgggaaacttatggcgttggcatctttttcaaagagaagtatagcctccccggaagaacaagagctcatcgactttctgttgaatggccctgccagaaaacttagcgactatgcgaatattgaaaaagctccgcactataatgttggtctggacgatgaagaatttcgtaactttactgggatatatagtgatgcactgtttaatgttttttatcagtttgcaaaagacaacttaaagaaaaaacaaccacttattattgctggtggatgcggtctgaactgtgactggaatactaaatggagggagacaaaccttttttctgaagttttcgttcctcctgttgctaacgattccggtgttgctataggcactgcgattgatgctcagttctattttacgggtaatcctaagattgaatgggatgtttacagcggattagattttagaacggataatacattctgctcagagaaatatgatgtctataatgtcgacaatgatcagattgctgatatgctggctaacgatctcatccttggttgggtgaatggaaaatatgaaataggtccacgcgcgctgggcaacaggtccatccttgctgctccttttcaggaaagtaccagggttcgtttaaacgaaatcaaacaacgtgaacagtttcgcccaattgctccagtttgtcttttggaggacgctgaaaagtggttcggctgtaataacgaaagcccatatatgctctttacgcatagagcaaagactgaagcccttgcagcagtcacgcatgttaatggtactgcgcgtattcagaccgttacaactgcaacaaatagtcatcttcataaattactttcagcatttaaaaatcggactggttatggtgtcttgtgcaatacatctctcaacttcaatgggaaaggctttataaacaatatcaatgatctggctgtatacgttcaggagcatcacctggatgggtttgtggtggaaggtcaggtatatcttttaattgaatcatcacgttatcaggcatacaaggaaagccagttgtttttatga

SEQ ID NO: 109165 - DNA, 522 bp, Enterobacter aerogenes
atgccagagaagacgcggcgaggccgaaaccatctgttcccatggacggtaaaagagatgagctctcttgaaaataattatggaaaattttctgctcaggacattggtgatacgttggggagaagcgccaagggcgtcgctgatatggtcagaaaaatgggcctggcgaagcgacctgaaaccgtcaacgtcccctggtcagagcaggaactggaaatattgcgggcccattacggttctggtgcatggataacgcgtgtacaagccctacttccgggacgcactaagggagcaatcggtgtacaggccaataaaatggggataagagaatcccagaactggtcacctgaagaaattgaaatattgcgagaatactatccttatccaggttcagaagttgccaaaaaattaccccaccgaactgaggcagcaattaaaagtcaggccagccggctgaaaatcaaggagtttcataacaggaaaacgattttcgattccagtgtgaaggaggttgatgaataa

SEQ ID NO: 109166 - DNA, 1380 bp, Enterobacter aerogenes
atgaatgacattacccaacgtaagattaaaaccggcggtgacccgcgctcgctacaggattatgccgccctgcgtgatgagctgagtaagctgacgcatccggctcgcccggatgtgaactggcgctatgcggaaaaactctgtctctcactgtttgagcagaatggcgtggaactgcaaacggtagcctggtatacgcttgcgcgtacgcaactggccggcttattcgggctcaatgaagggctgacgatactcgaggccctgataagccatcagtggggggcgctgtggccgcaaccagtccatgcccgcatggaaatcctcagcagtctgagtcagcgcctgcagcaacgaatacgttcgctcccgctgaattacagtgacctcagccagttgtaccgggcggaacaactgcttacgggtctgggagatgtattgcagcgcctggagcttaaacatctgagtcagctcgatacgttgcgtaccctgatgcacaatagtgctgtccggctggaaaacagcgatggcatagccagcaacgggccaaacattcagccaggcgttgtgttgtctgccgccgtgatgaatgatacgacagaatccacgagagacattgctggtggatcagatgaagatacgccagagagtgcagtgaagtgggtttacgttgcgcaaccggaaccgcagacgaatgtggaagtgctgtcgacattgcctgttccggttaaaaagtggaaatccttcgtcgccgggatgtgtaccatgatggtgataaccaccatcgcagggtggggctggcagtatcttcaccgtccggatccgctacagactcagcttgctgcttcactggctccgttccctgcacctctcacgtctgaacaactggggatgttgcgtcagcagactccgttaccgaaggatcttatcgcacagacacagcagcagcttgcccggctggataaattacctcctgactggaatatcacttatgccagaaaactcatcgaacaggttcaggtattgtggccggaacaggctaagaccctggtacagcagtggcaacaacaggttaacgtcacaaaattgtcaactgatgcaatgaatggatggcatgagggtatgctcgaactgcaggatctgacggcacagctcaataccctggataggcaaaaaggaaagtatattactgtcagcgagctgaaatcacaggtgtttgctgctacccaggcattcagtaaaacagtgcccgtcgaagaacagctgcggcagatgagcattcgggaaaactcagggatgatcccgtccgcgcaaaaaatccagacagagctgcgcctgaagcagctaatcagtagctactcgacggtgacggcagatcagtag

SEQ ID NO: 109167 - DNA, 450 bp, Enterobacter aerogenes
atgtttggaaaaaacaccacaaaaacaacgaatgtaacgcgcacgcctgcatcgaccgttgagccagtaaaggggtctgttatcgcgcagggcgtcatcattgatggaaacatctcttcctgcggtcagttggtcattcacggtcaggtgaatggtgatattcatgttaaagacggacaaattaccattatgcaggaaggtctggtgactggtaatgccatatctcctgttttgattgtggacggtaccatcaaaggtcattgctgtgcagaccggatggaaataggtgagaacgggcgcatagagggaacattacgctatatcgcattatcggtggctcagggtggggtgctggtggggcaggcagaacactgcgaagataaacgtgacagtaatgtggttggtattacacctgaaaaagaaaaggactcattgatggcatcagcctga

SEQ ID NO: 109168 - DNA, 471 bp, Enterobacter aerogenes
atgtcagtaaaatcacagtttctcgataaattgcaggctcgacagtctgctccggcttcatctgtcagtaagagtcaggccgatatagctgagttttgcctgcgaatgacgcaacttaaggagcagatggacgtgtggctggaaggtaccggactgaatgtggaggcgtacagtacatccgttacggatctgctggtggagaacgggacttttgagattaccgccctcgttctgcgtatcgacgaccggtctgtaaaatttgtgccggcgttcctttatgatcagggtgtgaccgggtgcgtcgagataaccttccatgatggaacgcacatgacttcactgggacgtttattcatgcggtcaggcacggtgaacaactggacctttgttccgcctggtgctttattccgccctggacagggttttgatgagagcacattttttggtttgattctggcgcttcttccatag

SEQ ID NO: 109169 - DNA, 624 bp, Enterobacter aerogenes
atgaaaatgcaggataatgtaaccgatatttttcagtatgaaaatatctccgcttctgttgttcaggataagaccagtatacctctgattattccttcgaaaggaattgcatttttaggtgaaaaaaatgtctatattctgacaagtggggctgatgagttactgtctttaaacaaattaacagacaaaatccctctgattgcaggtaaagaagaaaatacgctcaggcttcagttggctcgtcctgtaacaggggatgctgtcgttcgttttaaggattcgttacgtgtctgggttaataaaagtgcaggtgagctttcggaatacgatacaggtgtcattaagcattcaggcttccagagcacgaagggggggtactggaaagacgtcaatattgagggcatggttctttcgaggaaaagtctcaattatacatttaccaataccgcatcactggggcgaaagtataaagttgaattttacgcgaccgacaatgaaaccgatttttatccgaagaatcttgctactaacattgtgctcacacctgtggcacttgctgcagatatcgtatttttccctgtctccctcacgtttctgcgcttaatcatcgggcaacaacactag

SEQ ID NO: 109170 - DNA, 1161 bp, Enterobacter aerogenes
atgggctgggaaaggacgaaagcaacaacgatggagttgcctcctgaaccatcatttattggatggctgttagcaggagttgttgccgcagttgtgggggttttgctgtttatcctgcatgcgtcaggcatgattaaggctctggctgcattcaatatctggtggctggcatccagcccggttcttggctggatttttctgttttgtttgcggggatggctgtggggaagaacaatcaatgaacatcagtttttgcagaaagaagctgaatacggacagcaacagtgggaagcatgggctggacgttatctggtcgtacttggaagcagcatactgctaccttccggagtgacctctgacgccattgctaaatcagatgctgcagatgcaccgcaatttctttcactgacctgccattttgatgcgaaatcgacgacgtccacctccttgctcgaactggggttggccggtgtacaaaaggcaatcgcgatgttgcctgcgacagtgccgttcaacgtcaccattgtgagcgacacgatttcgtctgacttcgagacccggtttcgcaaatcatggggaaaaatttatccagggcgtgcgctgacaggttcgatttcatgttgtgaagtcctttcttttgcctggatcgaagagcgccttaaaaaccccgttttcgatattgatttgatcctgatattgcagaatcagggggctgaacagtattccgatgcactggcagcgatggtacttaccagcgatgatgttgctgaaaaataccagctttcacactccgcccgcatattgcgaccgatgccgctggacatgacaaatttcagggctgatatgaggttgttcctcgaaacacaaacgatcgcctgtcagacgtcaaacgtgttctgtgattacgggcactggaatgacgggtttgctgatctaatgaccgcgtctcaatcacatctgacaccgtgggtgccccaggaaattgatgtactggaaaaatataacggaattccagggggcgggagtgcgtggcttctggctacattactggccgacatcgtgtccgtcagcaacaaacctgttttagggttgtttacctcaggtgctgatcgttttgtcagtactgttacctcagggagtgaaaataatgatgcccggtag

SEQ ID NO: 109171 - DNA, 267 bp, Enterobacter aerogenes
atgacaaaaggcatggttttgcttggtgacaaaacttctcacggtggaaaagtgacctctgcctcttccaatattactgtcgacggaaaaaaagccgcattagttggtgataaggtgagttgcccgatagaagggcatggaactaatcctatcgtggaaggatcaccgcaccggacatttaacggtcgggctgttgtcgtcaatggctgcaaatgtcaatgcggttgtactgtaatttcaagtgctcagaacagcacagtagaataa

SEQ ID NO: 109172 - DNA, 792 bp, Enterobacter aerogenes
atgcttaataaaaaagattttatttttttaccacttgtcttttttatagtcggaggttgtagtcatgccacaagcaatgcaatttcccctccagcggataccaaatgggtgactattgaggttagtaatccttcaaaatacacaagaccatttcctcttgaagttagatatatttcacgtgaatgccagaaaaaaagagtgaacggatttgatggttctgtggatgcggaattaagctataacgttattaaagtacctttacaacagcagaatggtgataaatggaaaggtacagtcgctattactggcgggggggagtgtgtatggagcttaagcgcaatcaatgtgggtattgaatatatagatgctacacatcttgggaatgatttagtacctggatctgcggttggtgtaactattgcttttgatgcagatgctgcgcggaatggacaatttgacacagtggtggggaatgatattaattatactccaaaatactatccttttataaaaaaatggaataatagcccacagtctactatgcgggataaattatatcttttcggtaaggaagatgcgttttggaaagtgaagttggactataaatctaacgaaaatgttttaataaattacaatccctctatagacgaaagtaaaaaagtattgatgatattccctaataagaaggggaaagatgctatgtactcttttgtctatccagatgggagcgtcatttcatcaaaaaacacaacacctgattttagcaaagtcaacggatctggtgggaaataa

SEQ ID NO: 109173 - DNA, 2007 bp, Enterobacter aerogenes
atgaccacagcagtttcctcactttgccgtaagaatccccatgctccatgcgacgagcagatgccatactgggtcgaatttcaactggttgatgaacagggcgaacctgtggcgaatatgccatggactgctgaaagttcacatcctgtttccgggccagtcgataactttacgtattcaggtcaaagtgactcagatgggcttattcgcattgatatgccgcatggacttgaattggctctgaaattagaatcgactgctttagtaaatgaaatggagaagagagcgcttcgcccaggtagagatgcagaaaccgattctttagttagacagcctgcagtagatgccggtcatatctggcattacgccgtagtcggtgaacttagttcaggttatcctaatatcgaattgcataaaggcgaaaccttaccatccttccattttccacctaacaagtctttcaaagggcttaccgtccggacaaatgaacttgaaaagcggcatattattgaaatttgccctttcagagcatgggagttggtattacatcaccaggatgaatattcaatggcaaatgccatcaacctcggagcaagtgcctctctagcttatgccgatgataaagcactccggccggaatcaataacacgattttatataaaccagtgccaagatctatcgcgtttacctcagctccataaaggcggttttagttacaatacactagtgcaggatgtaccatttagcgagcgatataatcctcctgttttcatggatacctctagagacacctcgaagactgataataaaagtggcagtacctctggaggggggaactcagcaaaaccagaaggcgatactcaactgtattatgtttacaatacagataaagtcattgtcgcatggagagggactgctgggttgtatgatgtcggaacggatctggcatttagtcctgttagcactgaggtatgtgatgtaaataaaactatgtgcacaaacttgagtcctgctggaaaagtgcacgatggattcctaagtggatatagtagatctgaacggcttttttcttctgagtttgatgagctcttaactttaattagagcacgaaatttatttgtttgcggccatagtttggggggagcgcttgcattaatttactctgctgcactaaagtctgaaaaacctttgctctacacatatggtatgccccgtacatttaccaaggaggcagttcagcagttatccgaaatcacccatttccgtcatgtaaatgataatgatcccgttccagcagttccacccgaagcgagtctagataatgcgttatataacctctggggaccacttggaaaaactttagggatgctgtggtctgttggagaacttctggcttaccaagctatatcttggggggattgcttttggcaccatggtaatccagttgtatttctaactgcgacacaaagtcgtgagtggcaagaatgtaaaacaagtttgcccgtacctgctggttgcataaatttaaaaaggcttcttccgataaaagctaaattatatcttgttccttctttggcggaccaagagatgcaaattgcaggccgtaaacaaaaggagttcagaacgtcactaacggctagcaagctggaagagatttttcctgaaggacaaaaccctgaccgtggagcagatttaacatttggcgatcatttcatgacgtcgtatatgccttacatgaataataaattattggaactaatagataacgaaggattggttgagaaccggaattttactgagcatctatataatgtagatcgttttaaagagcaaatgttggaacataaagatgaaattcctgaaaaggaatatgaaagaaatgagatattccttgacatagaagggttattgaaggcatcactatctcccactctgtctgaatcttatgggaatgatgcgctagttcgatttgccatttatggtgatgaggtgattgaaaatgcttaa

SEQ ID NO: 109174 - DNA, 2541 bp, Enterobacter aerogenes
atgagcctgacggataccctgaacacgatggtggccaccgtcaccggaaaagccctgaaccgttaccgcctcgatattccttcctgcacggctgatatcgacgtggaggacttcagtggttcagaagcgatgagtgagctgtacagctacaccatcaacttcaccagtgccgacaagaacattgatgcccgccagatgctgagcaagccggtgaccctgaccatgggggcgggtaacctgctttccctgacggagcgcaaggtggttcacggggtggtgacgcatttcgagcgtaccggtggctccgcggatgaagcgcagtactgcatcgtgctggagccgttcctggcattgctgggcaatcagttccgcactcaccgttttttcgtcaacaagtcggtgccggaagtggttgcagaggtgctcacggagcatggcctgaaaggctgggagtatgaatttaccctcaaagccgactatccgaagcgtgagcagattaaccagtatcaggaaaacgacctcgccttcattgaacgcctgctggcggaggtgggtattttttatttcttcaccctgcagcctgatacccagactgaagtggtgcactttgcggacaagcagagcgcctggacgtttggtaaaaaactcccgctgaacagcccttcaggggcgaatgacaatgcggccgactcggtgtgggacgttcacgtgtggcataacgtcgtggagcgctcggtcaccgccagcgattacaaccaccgcgaagcccagaacgtcctgacgtccgtgccggcggacatgacccgcggggacgggaaagggaatacctacggcgatgtgtaccattatcgcccgcgtcaccttgagcgtggcgacaaaattaaccccgcagcggaaacaggtaacttctgggcacgcctggagcatgaacgctacctttccacccagaccactgtaacaggcagcagtaccgaccataccctgggcccggctcaggtattgactatcaccgaaactgctatcccgccgacgctgccgcgagaaaccgaaaacggtctcgtcatcatcagcgccggttactctgccagccgtcagaacgcgctgaaggtggaatgggcggctatgccgtactacgagaaccgatgctggcgtccagccgcgaaaaagcgtccggtggtcagcggcaccctgatggctcgtgtgaccagcgccaaagataacgacatctacgcctggcaggacgcatccggcatgtaccgggtgaaattcgatgccgaccgtgatgacaaaaagcagggcatggaaagcatgccagtgcgctttgccaaaccttacggtggtgacaagtacggttttcactttccgctgatacagggtactgaagtcgccattgcgttccatgaaggtgacccagaccgtccatacattgctcacgccctacacgactcccggcacgttgaccacgtcactgaagccaacagcacgcgtaacgttatccgcaccgctggcctgaacaaactgaggatggaggacaagcgcggcgaagagcacattaagctcagtaccgaatacgggggtaagacccaactgaatttagggcacaacgtcaatgcttccagggttcttcgtggtgaaggggcagagttacgcactaacgactgggtcagcgttcgtggtggtaagggcattctgcttactgcagatgctcagcctgacgtcggcagtaaaatgcttgaaatggacagggctgtagaacaactggaacaggcactcacgctggcaagaagcctccaggcagctgcgaaaggggcacaggcgacagtatctgacatcgacagccaaaagatgctaaacaactcactgaaatatctgaaaatgccaggaatgctggccagtgctcccgctggaataggcattcttagtcctgaggctgtccggcttgcttcaggcggggcaagtattggcctcatgtcaggtaaaaacacggatatcagcgccgggcaatcgttcactgtggcggcaagcgaggctgtaagtttgtttgcacaggctgcaggaatgaaaatgtatgcgggggcagggacggttgatattcaggcacaagctgatgccatgaatgtctcagcattgcaggacatcactgtcgccagtggtcagggaagcgtaaaggtgaatgccagcaaggaactgattttaagttgtggtggcgcttatataaaactgagtggcgggaatattgagctgggatgtccggggaatattttgctgaaagcggcaaatgttaatcagacaggtcctgcaacactggatacaccaccggtgactttcccgaaaggatacagcgaagggtttaccacgacgtcattagcaagcggagcagtcaagcctttcacgacatataaaattacgacggctgaaggggaggtttatgagggcatttccggtgcagaaggagagacttctccaatatttacgtctatgccatcgcagttaaaaatcgaatatccgcgaaatatagctgatagccaggagggcgattaa

SEQ ID NO: 109175 - DNA, 228 bp, Enterobacter aerogenes
atgaaaatcctgctgtttgttgtgctgttctggagcgggatccacttcattcctgatttatgggttgcgagttttgtgaaggcccatataccgattagcggtgacggggaagaagcgatggacagcttcgagatgcatatcatcgtgattaaaacaacgttgtgtgctgtcggggcgtacctcctgatgaagctattctactggttgaaaacacgtcgaaaaaaataa

SEQ ID NO: 109176 - DNA, 606 bp, Enterobacter aerogenes
atgcagatttgcatgatggattacggcaacctgtcggcggatggcaaaacggcgtacctgaaatgctacggcatcgggacgtttgaagtgctgacagacgtggatttttatatcaacaatcctgactgtgccgaccatgaaaatgctgccatcccgccggggacttattgggtcacggaccggcctgccggcagcctgtataatcgcgtccgggcagaggcgatcgatgcctggcatggttaccgaaatcatcattccgaatggtttgcccttttcagtgataaaactaaaagagacggcatcatggtgaatggcctgaaccgtacaggattccgtcttcatcctttaaacagcgatggttccggtgagtactggggctgtatcacccttcgccgaaccagtgattttcagcatctgcgacgtctgctactgcagcgggggacgttccctgttcctggcggcaatggcctgaaggcctatgctcgtatcgatgtgcgtggtaccccggactacagcctgtgtgataaagaaaccgaagaacgaaaagaggctgagaaacgccggatgcagcaggccctgaaaaagcgagcggggaatgccgaatga

SEQ ID NO: 109177 - DNA, 1734 bp, Enterobacter aerogenes
atgcgggatgcgtaccgaagtctgttaacggccctgggtgccttactcgcgctgtggctcattctgggattctggcccctgtccatgggtagccgtgtggcactcagcctgctggttgtgctggttgtgctggtgtccggggtgatgctctggcgtcagcaccgggctgcgcaggcgcgggcgaccgttgtccgggatattgtggatgaaaatttgccgccggaagattttcagggcgcgatgatcctcgtctgtggcgacaacgccccgctgtttgtgtccggttcccgccaccgggaaacccggcagggctggtatctgtgggtgaaagatgctgaacagttgccactgctggcacagcacctgagcctggtgcgcccggccctggtgtcgcaaatctccgtcatgctggcggtggtgccggaacagcacacctccggcgatgattttacccagagtcttcggggctggcagcgggctgtcgtccagtgccgtgcggcatttggctctctccccccgctgtggaccgtgacctgggtatcgccccccgtggcctgcgcggaagccgaacccgtctggtttaccacggttaacccgcgaagcggcattcaggtgtatcagcccggtcagggcaatgtgtcactgacggaatggatccgggagtccggatcttacgggcgtctttcacgtctgagtcagggcctgtggctggacagtctgcttgcctggcagaacagcgcagtcaatgacctgctgtcggtgcgccagggtgaactgccggtgatgaagccctgtgtgcagggcatgtgcatggtgccggtgagcggtatcgcgggcaatctctggcaacagcacatcacctccgtgacgatgctgccaccggatgccgccgtaaccaccgacccactgccgctgcctgagctgctgctgccggcgctgccgcgccgacggggagtcagccgcaggatggtgttctggcgctatgccggattactgggcgggatttttctggcactggccatgctggcgtcctggatgaataaccagcgtctcatccgaaatgttggcgatcaccttgcgttgtatcaccaactgacggggaagcctgttgccccgaaactgcgtgcgcagcagcgcctcagagccgatggcgcattgctggacgactgggcgcgtcgtggggagccactgcgttatcgcttggggctgtatcaggggctgcgcctgggacctattgttgaggctgccgtcagcgactgggctccaccgccaccaccaccaccggtcatcaagaaaatcattcagggtccgaaaaccatccgtctcgacagcatgtcgctgttcgattcgggcaaatcggcgctgaaagccgggtccaccagaatgctggtcaactcactggtcggtatcaaagcgaagccgggctggctgattgtggtgtcaggtcacaccgacaacacaggcaatccaaatctgaaccagacgctttcacttaagcgtgccgaagcggtgcgcaactggatgcgtgataccggtgatgtaccggaaagctgttttgcagtgcagggctatggcgagagccggccgatcgcaaccaatgacaccccggatgggcgcgcgctcaaccgccgtgtcgaaatcagtctggtaccgcaggccagtgcctgtcagatacccggcaaaaccccagcgtcatcgcagaatgatgacatatcacaatcaaatggagagtaa

SEQ ID NO: 109178 - DNA, 561 bp, Enterobacter aerogenes
atggcactggctcatttggcatggtgtgcgcttgtcgccttacgtaccgcgcagcaggatggtcaggcgttgtcgccgctcagcacgcacgcatttttactgcgctggttaatggtggcgtataagcaaaaacggtttacgcgtgcaatcgcatccgatattgaggcattgctgacgctgggacgtaacaaaggtcttgcagcgggcttattcaaccgcctggaatatttgtgggtatcctgtacagggccggtgaccgctcagtcggatttgtaccgtctgacgtacgcaattgaacagcttaaatcggagggctgggtcaatgcagtggtgagtgatcgggagtggggcactgaagccctgactgaagaatatcgtgatattgatgcgctgctggtaagaaaatcggcactgaccgatggattttctaatgaaggcaaactggttgcgccggttgaatttcaggtgacgggcaacctgtcagcatgtatggcggttttccagtcccatgcactccctgctgtcgtgctgaagcctgacaggatcgccatacagctctga

SEQ ID NO: 109179 - DNA, 561 bp, Enterobacter aerogenes
atgaatctttatccatccgccacaaccgccgggaatgcggcagatgtggctcacgttcgtgcttttctgcagcaagccgttgaccattacccgcgacttgccgcgtttggttttacactgcgattgccatgctgcgaaaaccttgcggattatcagtcattgatgttgcgttttcatactgaagtctggcagcgcaccgacgagtattcgcgtcatcgtcagcaggctcgccgtcattcacctccgacggtcttacgctgggtatggggggcaaccagtgctccggtttgccggatggcgctgatgatgaattttgacacgctgggaggggggaataattcacagtttaacgaaaacgcgttgctggatatgagcgagatcatctgcgatgcagggcagacgttcggtggtatccattatgatgctgtgacaaacatggcatcgctaattatcagccgttctgagcgtggctcgttctcatcaccatttaatcaactgataacatggatacaggctatggatgcgccagttatcatggttagaactggaatagcaggttag

SEQ ID NO: 109180 - DNA, 240 bp, Enterobacter aerogenes
atgacacaaaaggccgctaaatacgccctaaatgagttcggttatctggttaatgttaaagactttcgatttccgccagcaggaaagctctactgcttctattgcgcacatccggtggtgctggtgcctgctcaggatgacagtgacgcacatttcctgcatgagctcatggtgccgggttgggataaaatcattgcctgccccaacctggaagcgcctcacactgagcaagccagctga

SEQ ID NO: 109181 - DNA, 279 bp, Enterobacter aerogenes
atgaaactctccgaaaatacgcagtatgtaacagtggcggaataccgttcctgtatcaccctgctgagagcgcaccagaacgctttctatgggtgctgtaataacgctgagcggcagggctggcgtaaaagggcgcttaaccagttgagcaaagcaaaattaattcattgtcactgggcaaacacctctgacgtccaacggtttgaatcggcctgcctgcaactccagcaacgtatcaacagcgtctctccggaaggtctgctaatcaacattgcctga

SEQ ID NO: 109182 - DNA, 876 bp, Enterobacter aerogenes
atgaactccggatccctgacatcaagacgacaatttctgtacgacattcaggctgaacagcattcggacgcgttgagatcaggtaaggcgtggctggcaacccagcggatgcttaagcgaacgggacgtgttttcgtatcggataagactgatccgacagcaccgggatctgtctttgattttaatgatgttcgggatttatacctcctgcaactggcggctaactggataaaaaacgctgcaggattttcctcgtgggtcgaaatttctccggttcagagactcagtgctcaacaatcatccctggggactcaatatatgattatccctcgcaccgtacggagaaaagtggatgccttcaggcaaataaatgcagcgaagcacatatccgtgcaggagtttaaggggagcctgtatgctgcattatgcagggcgtttggttcaaaaacggctgcaaatgagaaactccttcagctgccattgacgatggaagagatcaaaaagataactgaccctgatattaaagtttatggcatgacaggagagaaaattgccccgtcgtttatcctttttacgctcgaatgtaagcgacttggatacagtacagaacatgatcttttatgggacttattccggataatcaaagataaaagtatgctgagcttgttaggtgacagcctgttttttacctttctgtatcctgatgacggagatttcttttccagttttattcgcgagcatcaggaaccgtttccctctttgcaggcaaaaagggaagccattagatcatttgtacaggctgttcatactcgttatctttttactgccaataaacgtaattatctcaaacgtaaaaaaaagaaatggtcagagtaa

SEQ ID NO: 109183 - DNA, 252 bp, Enterobacter aerogenes
atgaaaaactaccagacacctaccttgccgtcaggagcattcacccgcgctcaggctgaagctgtcgccgctgtttatatcaatattgccattgaagacgaccagggctcccatttccgcctggtcatccgtgacatcgacaacacacttatctggcgggactggaattttgcgcccaatgctggcgtgacgctcaatcgctatattgccagccatggtatctctgtttcttccccctctggcggtaactaa

SEQ ID NO: 109184 - DNA, 384 bp, Enterobacter aerogenes
atggacaggactgcgcatagccatcctcatcacatcgtgatggccagctcccctccgggaggcttaagctgcacaggctgcgttcaccgggtcggtaaagaaggtgcgagcaccaggcacacaggtcgtcatcggagatggagcggctgcagggattgtttttcagagcgctcggataaaggggggcctggcgggcgttatcgggcagcggtggcatcagctcagcgcctgctgcagttcttccgccattacccagagcgcccggttgagcttaacgtcgccgtctatgcctttaactgcgcgcgtatggctgcgtttgcctttggcggtacgtcctggcagaccccctttcagcaggttctcctggcaacgattgaaaactga

SEQ ID NO: 109185 - DNA, 378 bp, Enterobacter aerogenes
atgcaaaccttatccgccattccggtgcggaaggcaccatcacgcccgacgcccgttgaaatctggcagcaacttcttacgtatctgctggaaaggcattacggcctttcgcttaacgacacacagtttggcaacgacggtgtcattcagcagcatattgacgccgggatttcactggcagatgcactcaattttctcgttgaaaaatctgaactggtacgaattgatcgccctagtttctccattcaacatcagtctccgttcatcagcgctattgacatactccgggccagaaaagccaccggcatgatgcaacgtaccggatataaagcggtgacttgcgccatcagtggacggtcttccggagggccacaatga

SEQ ID NO: 109186 - DNA, 492 bp, Enterobacter aerogenes
atgaaactgtcccttacagtggaagccgatgttgtcaacgtacaggccctaaacatgggccggatcgccgttgatgtcgacggtattgaactggccaatctaatagatgtggtctgtgataacggttactcgcttcgtattgctgatacccccggaaagctggtcgtggaagatccgcttccgaccatagcccgcgttaacggtatccagtgcagtaccgcggatatcaccgaagccgataacactctgctgtttaccctttcacaccagaacgaagactttggcgacagcgagtggatcctgtacacggggtcgggctatctgctccacctgggggcgtgctcatttccggtgttgcggctaaaacgcctgggtttgtctaaatcctgtcgtcgtctggtggtaactcttatgcgtcgttacgccatcggcattgttcattttgatgcctgtggcgaagtgctgccaggctttaccacctttgactggtaa

SEQ ID NO: 109187 - DNA, 204 bp, Enterobacter aerogenes
atgccagaattaaccactgaggtcgctctcaacattctgactggctggctgcaggacaatattgattgtggcagcgagattatcttcgataacgacgaagacaacactgactcagcagccctgttgccctggattgaacaggcattacaggacgttcgcgatctccgccatctgcagcttctgcaacaggccagaacagattag

SEQ ID NO: 109188 - DNA, 141 bp, Enterobacter aerogenes
atgcctgttattgaagagcaagaatacatttttagaccgtacattacggttaaagggcggcggatcacccgacctaatggtgggatgtttaaaattccggtgaaagacaagaagcctgaaacaagggatacgtcacgatga

SEQ ID NO: 109189 - DNA, 174 bp, Enterobacter aerogenes
atggctaaaaatgcaccttatggcgataaccgccgggttgggatggtaaaagatcgctcacaagcttttaaccctcaaacagaacagtgggttaagagagacgcgacaacagggcgatttatggatgtgaagcaagatggaaccccgttcaaaggggtcaggaaagaaaaataa

SEQ ID NO: 109190 - DNA, 900 bp, Enterobacter aerogenes
atgacaccaacattcgaaaatctggcagaaaatgaatcgctatcacaggcggagcgactggcatttattgatttcaggctgagatatctgggggagatcgcaagaagcgacctcattgatgagttcaagattggtcaggctacagcttccaatgatttgaagcgatacaaggtattacgcccggaaaatacggaccgaaataatacatcccgtacaacaatagcgatggatagttcgttttcaccgttgatcaggcttaacgtccacacggccctcaatttcatactgcatggattttgtcggaatgagttactgaccagaccgccctatctgcctgcaggctctatagatgcgttaatgaccacggacacactacaggagaaaaatgttgtggccatcacacgagcgattcacagccaaagtggaatacagtgctgctacctctcctcttcgagcgaaaaccacgatgagaggttgcttttcccaactgcaattttcgtggatcgagggcactggtatttcagagcttatgatcgaaatgcaaaggctgaaagctgtggttttaagaactttaaaatggcacgaataaaatcagcaatacagttaccccaggataaacctgcgttccatgagagtatgtctcaggatgaggcgtggcatacattattgccgctgcagcttgctatccacagcgagtgccagaacaaatcatcacttgcaaaagaatttggttttgtcgacggtaagaagactttggtctgcaaagcagcgtttgcgtacatcgtgaagaaaagctggcatattgatgtaggagacgggggtaacagcttttatcattttactcttgagaacagtgagagcttgagacaaatcaaatgcgcagacaacttgttcaaatga

SEQ ID NO: 109191 - DNA, 1113 bp, Enterobacter aerogenes
atgctgataaaaataaatgagttcaaaaaagaagatattgttaatgataaattcacgatatcaattgaaaatcttttgcgttcatttgctgaaaacaagcatatactaatcgcacatagagatttctttaattgcattattgaagaacaaagtgggatttatagtgcatcgtcgaaaaacttcgcatcagaagcactttcacgctccagagaatataactctatcatttcaaagatatcgttctatgttgaagtcgatttcaacatcctggacaattcctttagttgggtagatttaggtgaaacaataaagtttgtatgtggccctttatatttcaatgactcatcccagctacaaaaaacaaaaattgtttgtgaaaatccgttagattctgatttctttaaaatcatcgccacattttatgcaaataatgaagacctaatgcgttgtactattaatttcaatgcacttaatggtgggggggggagtactaaagatgtgtttgagcgcacaattagcaacaatgagattgctttctgcattgttgataatgacaaagcacaccctcgagctccttttgggggaacaagttctcattttttaggttcaaggacttctagatcaggatttatagaaatactagatgtccatgaagttgaatccttagtacctttagataccattgagaacgttttgataagtcttaatcttctgttagcaaaagaaaagtcattaacattctttaaagatctttgctcaattgatgaatcggtgaaattttacattgatcataaaaaagggtttaatctcaaaaccgcactggaactagataactctcatggggatttctggcgagttattttacagaaattaaagaaagaatacgcctgtgattgtttaactgagataaattgtacatgtaatccatcatgtttaaaatatgaggggtttggagataatttattacacaacaccttaaaatacataagcgaaggtagcttaaagtcatacagacctaatttaactccaaagctttacgagaaatggcatagccttgggaagagcttctttagttggagctgtgggccttataaaaagtcaagggtcagctaa

SEQ ID NO: 109192 - DNA, 1560 bp, Enterobacter aerogenes
atgattaaaggtatcgggctacaaaacttcagaagctttgtgaataaaacattcattgaattaaaaccaatcactgtttttgtaggtaaaaatagcagcggcaaaagctctttattacgcacattccctttatttcgtcaatctgtagaagaaaatacaactggtccgatattatggttcggccgctatgtcgattttggagattttacagatgtactttcgaaaagctcagagagcaaagaaataacattcagcttctccttttcgattacacctgatttagctcagcgatattcatattatcgattcagtgaactttcagaaaaaaacacaaacgttgacattgagctgacagtctattcaaaagataaaaaaacaaagacaaaaaatataaaagtaacatttgacgattcaatcataaattttatattggatgataacaacaatgttaaattactaatagaatctgaagggaaaatattagaacgtgaaaatataattgcaaaaaatctcggtcagttcattcctaacattcacttaaaaggaaaagatgaggcccctataacaccaaactctttttatttaatgggtacaagacgtgatagggccttagaatcctcatttattgactctgcatcaaaattcataaaacaatattttcatgttaaatcagacattaagcaggtattccaatcctttactagaataaactttataccaaaggagcatgcagggagacttgttgaatttcttttcaaagagcaaaaaacatttactaaaaactttgaatctcatcgcgatgagattatgaatgagttgtatccgtttgtcattggatggaatattaacaatataatagatattattaattcgtctctatccagcacgttcggaaatgtaaaatatattgctccacttagagccacctctgagcgattttatagatttcaagatcttcaggtgaatgaaatagaccatacaggttcaaacttagcaatgcttttgaattctctaaaacagactgacaaactgagatttgaagaatggacaaagtctaattttgatttcatcattaaggttgagcaaacgggctctcattttgcgatattgattaataccggtgaaaatagtgaaaactttaacatcagtgatatgggctttggttactcacaagttttacctatagttacagccatttggcttgaaaccgatagaagggctacgtcgcctaaaaaaccaattacatttattattgagcagcctgagttacatttgcaccctgcatatcagcacaacctggcaaaagtgtttgccaaggtaataattaaagcaaaagagaataatgttgatcttaagattatttttgaaacacacagccaaacgatgatagaagctcttggtgaatgtatcgaggataacatcggcctaactgaaagtgacgtatctatattagtatttgaaaagaacgaacaacaacaaacaatagtcaagaagtcctattttgatgaagagggttttatccaaaactggccaattggtttcttttcaggtagaaaatga

SEQ ID NO: 109193 - DNA, 228 bp, Enterobacter aerogenes
ttggccatcttatcgactgttttccagcgtaagatggctgaatggaatgaccataccgatgtcgcgactggtgaagtatgtcgtggttttatggatgtagtatctgggctggtacagtgtcttcccgaaccctccaccattgaaaaacaggctgacaagaacgccttgcaaaccttggatatgagcgatccggaggctggggaagcgtttaaagccgaacactattaa

SEQ ID NO: 109194 - DNA, 1170 bp, Enterobacter aerogenes
atgaagtttgcagatgtgtttctcaatgaacatcaacaagcaagtttagattttattaatatcccactagatactgatttacaattttttatagatccaaccgctataaaagcactaaaaaccacatggggaaataatctggagaagttaattaaaaattacttttcagatatcatggcaagtatcaagaatggcgatcttaaacgtgcaggcatcttgctttcatcattaagagagtcaaatgcatttcatttgggctattcagcaaaaaaatcctcaggaaaagcattgggagaaaaaactgctcaacttattttagactcattgataaatagtaaagcagcacaatcaggtttattaactgatcttgaagacactgcattaacaatagatggtattgcatcagataggatatcagattctgtttgtaatatactaaaactgccattcatagaatacactcagacgatatgtgatttctatggcgtaagtatgtcagaagtctctggaattaggttatgggatcctattagtggaaggtgggtaaaaaaaacggtcaaacttcctattcataatggtgaggagataatactaatacccaaaataatggcacgcgaaaaaattgcttactctcacacctcattttatagaaaatatatcataccggagataagaaatgagcatctcgcatcaggttcggcactagtttcccttttaaaaggaaaaccaaccgtaacagctaaaaaaattatagaagaatttgggcaatcaaaagatttcattgaaggacaaatagttaaatatccaaattcgataaaacagtataaggaagaacttttactatcaccatcatccccactacctcacaatagttttgacgactcagcaaacgctataaagaacaacctgtcagatgacataaacaaattaaaattctctatcaagaatagtaacaaagagctgtatgaagatagtattaagaagttactattgactattttctacccctctcttttctatccaaccacttctattagtcatactgaaaattatagttttactctactgaatgagtcgcgtggaggattcttttttgatttctcaatctttgggattaaagcagagaaaattttaataaacgttattatgtccagtgataatctcaattaa

SEQ ID NO: 109195 - DNA, 660 bp, Enterobacter aerogenes
ttgtcaagcaatcgcttgttaaatagcgctgagaaggcatctgcgacgcccgagcgcctcctttatctgcttaaaacgcgtgggccacagcagtctgtggaagcgggggaaacactaggcatgacagccgaggcagcgcgccagcagcttgctaaacttgcttcggcaggtctggtggaaacctactctcagagcaaaggggttggccgccccagtcagttctggacactgactcaggcggggcataaccgctttccggatacgcactccacattgacaatccagctactggacacagtgcgtcacgcctttggcgaggaggcgattgaccgtctgattgatctgcgcgagcagaccagcagggagaattatctacgggaactgggggaggcggccagcctcagagaacgggttgcgcgtctggcattaatacgttcgcaggaaggttatatggcggactatgaagagctggcggatggaaccttgctttttatcgaaaatcactgcccaatctgtgctgccgctgcagcctgtcaggggttttgtcgtgctgaattaacattgttcagagaagtacttggcgcaaaagtagagcggacagagcatattttaaatggggctagacgctgcgcttatactattagcgggcatgctgattaa

SEQ ID NO: 109196 - DNA, 1413 bp, Enterobacter aerogenes
atgtcgtcagtacaggaaggaagctggaatgatttactgggtggtagaaacctgtttttctctattgcgctttcaggaggagtagcgctacatgcgatcaatatttacatcgcgaccactgtacttccctctgtggttaatgaaataggtggtcttgaactctattcatggaatacgacgctttttgtagtggcctccatcctaggttccgcactgacttcacggctgctggccctgatgggagcgcgcaaagcctatttggtcgcggttatgttatttatcgcaggcagcatagtctgcgcgctggcgcagactatgcctgttatgctggccggtcgggcgctacagggcctcggcggtggttttttgtttgcgctctgctatgccatgatttatgcactttttgacgaaaagctctggcctcgcgcgatggcacttatctctggtatgtggggcgtcgcgacgctgctgggtcctgcagcaggcggaatatttgcggagatgaatgcctggcgcgctgcgtttggcatactggtgcctgtcacgctgctctatatgctgctggtctggctcgtctttcccgcgcacaagcgtgaagccgaccttcctgtaagcaagcccccgctgatgcagctactgctgctggtcgctgcagtcatggctgtaagcacaggaggcatgtcacctgatgtagcgatcaatgtggcgggaatcagcgttgcggttgtgctgattctgttactgatacgtcgggaatttaccagtgaaattcgcctgttgccgcgtgatgcgctgcggttgaattcgcctttgctggcgctctacatcacgatggggctgctgatcattggcatgacgagcgaaacttttattccctatttcttacaaatcctgcatgggcagacgccgttgatctctggatacctggcagctctgatggccgcaggctggacggtttcggaaatctggagttccggctggcaagggcggaacattaaacgcgcaatcgctgctggcccggtattggtgttagcaggcatgatggtactggctctgagtaccccccgttctaccggaggagactggatagtactcttcttaattggcctgggcctgacgttggtagggtttgggatcgggctgggctggccgcatttactgacgcgtatcctccagtttgcacccgctgacgaacaggatgcggcggctacgtcaattaccaccgtccagctgtttgccactgcgcttggttcaactgtcgctggtatgctggcgaatgcaggtggattgtcaatgcccggagggcaggaaggcgcatcatctgctgcatggctgctgtttgcagcgatggctgttgccccgttgctctctctgctgagtgcaaaaaaggttatatctggactcaataaataa

SEQ ID NO: 109197 - DNA, 1617 bp, Enterobacter aerogenes
atgaatgaaggtatttcagacaatttaaatgctgactcgatcatctacgacgacattacaggagctgaggttttcctcggcgatttccttcgcgaaggatacattcgggtaaagtctcgtgatgaattggtagctgctgtaaattacgtcaatacaaacattaaaaaagcaactgagattcgtctttcaaaagcattcgagccatggattgccccccaaactgatattgaccttgcgtgggtctctttggttggtgagggtggtgtttgtacaatcgatgccacaagcattcctgatgttgatggtaattactggctacgtctgtataactccggcgcatccagtattaacaatattggaaacatttacacggataaaatacgtgatattttttgtcttggcccaggggctaccagtaatgttgatgcaataatttaccataatcccacacgtgccatagcatctttcacaaccagaagtcttggtactatgggattcagaactggcgattcataccgtcaaaatgcatatattataaaacactggggaaggagtattacccgctgtaccaatcatatatggatgccatctggttactcaaactacggcgaagcaatagaatatcacgcatcgaccatttcaacttcaagtggcacaggtatacgcaatgacaatgctgatggtgcgatacgagtgtatggtggatcactggattatatggggaggatcatagttgttaccgctggccgtgttgaaacatatggaacatacattgaattcaacaacaactcgaacaaattgaatggaattccttttgaaacctctggtgcagaaacagcgaaaatttcactaatgggaggcgggataagaggctatattactccactgccagatgaggttaccacaatatttaaatgtggcgataatacgaatggaattggtttatcaaatatggaattgatgaacatagtgctaccaacaggatttactaatataaacagtggtaaagggaaattccagaccactggtatagatattatttctggcggcggaaaccctcgggtcccacttctcaaatcggatacacacaatttaatatcagaccctgaattaacccaaacagaggttgtagactggtatatttcatctgatacaggagcattaaccagtcggacatcaggtgaaaacaccaaactatcaaaggatacatccaactttagaacaaatggcacagcatccttgaaaataagcaaagcccttggagtcggtacttcttcggaaatacaaataaacgccccaatatcagcaaacatgctaactatgtatactatgtttattcagggagtcaatctcacaggaaacattaacattagcgcttattattgcagaacaatatataacaaccaaattggaattccaatagcatcaagagttttaaaggtcgggccaacacgaatcattgattcttccactatatctgaatggataccggttacccaacagagtgccagaaattacacccctgaatgggcgactgaacttattgtcaaaatctcattaaacaatatgtcatcaggtaacctgtatgttgctgatgcaaaaatcactgagctttag

SEQ ID NO: 109198 - DNA, 588 bp, Enterobacter aerogenes
gtgtcccgacgtcgatttttaacatccaaagaagttcaggcgatgatgcaagccgcatacaaaggtttaacaggtgagagggattattgctttattttgttagcttttcgtcatggattacgcgtaagtgagctcttggatttacattatcgtgatcttgaccttattgagggacgtataaacattcgtcgtttaaaaaatggtttttcaactattcatcctttacatgctgatgagcttgaggctatcgaacgctggacacagattcgttttagctggaaagccgcaagtgaaacagatgctatttttatatcccgacgaggcacccagttatccaggcaacaggcctggcgaattattcgttcggccggtgagcaggcaggcactgctactaatgtacatcctcatatgctgcgtcacgcctgtggttatgagcttgctgaaagaggcatcgataccaggctgattcaggattatcttggacatcgtaatattcgtcatactgtccgatatacggcaagcaatgcagcacgatttgtcggattatgggggaaatcaaatatcttagaaaaaaaaatgcgaaaatga

SEQ ID NO: 109199 - DNA, 183 bp, Enterobacter aerogenes
atggaatcccaatcctggcgaaaagaaccccgtaaaaattatcccaatgacttcaagctacgcatggtcgaacttgcttcccgccccggggcctgcgttgctcagatcgcccgcgaaaacggcatcaatgataacgtcatcttcaaatggcttcggctctggcaggggtcagtttggatatag

SEQ ID NO: 109200 - DNA, 984 bp, Enterobacter aerogenes
atgaaaattgccgcctccattacccttttgagcgcttgcccatttgtaagtctggcggcagtaccgatgaccttttccgaaactgtcctggatgccgcagggccaaaaggccctttgaaaggtacgttactaataccgaattcaaaaccaaccgccgttgttcttatcgttcctggctccgggccgaccgatcgggatggaaacaacccgcttggtgtgaatgcttcgccctaccgacttctcgctgaaggtctggctgccaaaggctttgcgacgcttcgtatcgacaaacgtggaatgttcgctagcgcgatggccgtagaggatgccaatgcggtgacgattgctgattatgtcgacgacgttcgatcctggatagacgtgcttagacgtcacatacacactgcctgtatttggattttaggacacagcgaaggaggcgtagtcgcacttgcctcggctcaagaagaggatgtgtgcggcgtggttcttatagcaacgcccgggagaccgatgggcgaggtgttgaggggacaacttaacgctaatccggaaaacgaaatgctattaaagcaggcactgtcgataattggtactctggagcatcggcggcgagtcgatattacgaatatgcacccagcactgcaaagtatctttaatcctgcggttcaggggtttttgatcaatgcattttcatataatccgggtcatctcatttcgagtattttcaaacccgtgttagtactacaagggcaatgtgacctccaggtggaagaaacggatgcaagactgcttaaggccgcgaatcctcaagcgtccctggttatactgcccaatatgaaccatgttatgaaagaggtggcttcggacgatcgcagggcgaatatcgcgacatacgctgaacccgagttacccttagctcccggtttaatcgactcgattgagcatttcctgatccacaactcaccttttcccgaaaagtaa

SEQ ID NO: 109201 - DNA, 3384 bp, Enterobacter aerogenes
atgtctgaacatcttgtcccgggttattgtgcgctctgtcgttcgcgttgcggaaccttaaatgaaatcattgacgggcgactggtatctgttcacccggatgaggatcaccccaccgggggagcggtttgcctgaaaggtaaagcagccccggagctgatttatagcgaagcccgggttttgtggccactgcgccggacacagccgaaaggggcagaagatcctggctggaaacgtatcacctgggatgaggcgctggcagagattgctgacaggctgacgcagtttaaaacggaaagtggtgcagagtcagtagcgtttggggtaactacgcccagcgggacgccaattatcgacagtgtggaatggattgaacgtttcgtgcgccactatggcagccccaatacctgctacagcactgaagtatgtaactggcataaagataccgctcacactttcacctttggctgcataacgccggctgccgactacagcaacgcagaactgattatgttgtggggcaataatccggctgccacatggctggcacaggccagcgccattggtgaagggcgtaagaaaggtgccagaatgttggttatcgatccccgccacacagagtttgcccgcgacgctgatgtctggcttaacattaacccgggtactgacacagtacttgccatggggtttatacgccagttgctggaacaggggtgcaacgacacgtttgtcagaacccggaccgatgcccccctgctggttaatgaagactcgggactgctgctgcgcgagcgggacattacgtcagacgctgtaaccaaccattatctgctctgggatagagtggataatgcagcgcgtccctgcacagatgcagtgacgggtgatgagtttttttatcagcgcgcctcgctgacaggccgctattcgttgcccctggctaatggtaaaacggtcatgtgcaccccggcactggacattttgcgccaggcggttgccaggtatacacctgaacatgtggtgaccgtgaccggggtttccatagaagaacaacaggctgccctggcgttaattcgcagttcatcacgcattgcgtaccacgcctgggtggggattgcacagagccagaatgccacccagaccgaacgagccattgccatcctgtatgccctgaccggggcattcgatacccgcggtagtaaccgggtttacgcgaaaccaccgttcaatgccgttaatcagttatcgctattgcctgaatcgcagcgacaaaaagcgctgggactcagtgaacgtccactgggaccgccggccagcggctatgtcacgacagcagatttacatcgcgccatcctggaacataaaccttacaaaataaggggtctggtctgctttggttcaaacatgttgtctgcccatggcaatgtggataccgctatcgccgcactgaagcagcttgagtttcatgttcactgtgaccattttattacccccacatcacgcttcgccgatatcctgctgcccgctagtactctatgggagcatgaagcgctgaaaatcggttttgaaatctctgaacgcgccgatgctcacgttcagctgcgcccgcaactggtcactcctctgggggagtccctggccgattacgagatagtgtttcgtctggcctgtaaaatggggatgggggacgatttcttccacggcgataaggatgccggatttaatcatatcctcaagccctccggcctcacactggaaatgctccgggcacagcccggcgggatcaccactcaggtcgccaatcatgagaaaaaatatgccctgtgcgatggcccgggcggtaatccacgcggctttgccaccgaaaccggcaaggtagagatttacagcgagcggctgctgcggcacgggtattctccggttccacagtatattgaggaagcgccggaacaggacgccttcccgctacgcctgaccaccatgaagaacgcgctgttttgtcacagccagcaccgcagcttggtcagcctgcgccggaaatcaccggatccaacagccatcgtcagccgggcagttgctgacgatgtgggtatcgataataaagactggcttgaaatcattaccccggctggccggggccgattcagggccagaattgataatgccattcatcacgacgtggtgatcgctgaatacggttggtggcaggggtgtcctgagctgaataagccagagcttccggttaatggggaaaatggcagcaattataatatgctgattaactatgctgcggttgacggtatcagtggctccgtccccctcaggacaatgcggtgtgcagtacgtaaggtggccgatgcgctggcctggaagggggaacgacggtttattgtcagcgacatcgttcaggaaacgccggacgtacgcagcatcagttttattccggtggacggggcactgctaccggactggcaggctggtcaggcagtgctcctgcgggtcttcccggagggcaaacctgaggggatctgtcgggcatacacgctgagtaacgcaccaggccatgggacacatttcaccgtgtcagtaaggttacaggtacaggggacaatgtcatcttttattcaccagcagctacaggttggtgatgaagtggcgctgacggccccggatggcagtttcgtgatcccgacccgaagcgtttatccggtggtaatgatcgccggggggatcggcatcacgccgtttatcagttatctgagttcactggagccgaggctggaagagcctgatctgtggttgtactacggtaaccgcaacagccagagccatgctttccgcgaacaactgcaggccatgtcacagcagtttccgcgactgaaaatcatcaatgtctacgacaacccacactcgacagatgtgccgggtgaggattaccagcatacaggcattatcacagccgcgctttttgatgaaaagctgatccgaaaccgcgcccgtttttatctctgcggcccgggtccgatgatcggttctcttgagaaagggttgcgggagcggggcgtatttccctttgatatctttaaagaacggtttgctcctccggtgccaaatattacctcacgtaaagccagccataaggtggtatttgcgcgttcaggggtaacggtgcagtggacgccggcagcaggtacgctgctggacctgggggaaaaacaccagatccgtatggccggagggtgtcgggccggacagtgcgaatgctgtgcagtgaaagtgacggaaggcgctgttagttcactcgccgaacaaacggtttccggcgacggcttctgccttgcctgccagtctgtaccggtgagtgatatagttatcgacgcgtga

SEQ ID NO: 109202 - DNA, 318 bp, Enterobacter aerogenes
ttgtatggcctccctgatttcgatgagggaccgcagcaggaatttttatcacttttagcggccgagttggagctggcaacccgccgttctggtttaccggcccgcatttactgcatccttcagatgggttatttcaaagccaagcatgccttctttcgctttacgccgcaggaggtagagggagattacaggtttgtggcctggcgttactttcgcgaagtctcttttcccgacaacgccattcctgaccatgaatactatgcccagcgcaaaattatcgctgacttctttggttatcgtctgtcagacctgttttga

SEQ ID NO: 109203 - DNA, 303 bp, Enterobacter aerogenes
atggaaaagaaactttttgatgccctggtcaacagcatggaggaaatggttgccattgaaaatggccgaatccagccacctgcagaaaatgttcaccgccatacactgccggatgtgaaggccatccgtaaacatgccggaatgaaacaggctgaatttgcagaagtggtgggagccagtgttgacctggttcgcagctgggaacagcagaggcgtatcccgtcggggatcgcgctgaaaatgctgtgtctcattgaacgtgagcctgcactgattaatacattgcgtggtattcacgcttaa

SEQ ID NO: 109204 - DNA, 324 bp, Enterobacter aerogenes
atgaactatctggagtttgttgaaaccagcgctttcagtggactgcgtaaggagctcatggatgatgatgaattccgcgaactgcagacctatttactggaagcccatgatcggggtgacactataagtcataccggtggatgcaggaagattcgctggggtcgcccggggatgggtaagcgaggtggtgtcagggtgatttactacgttcgccttgccagcggcagactgtatctgctgctgatatacccgaagaatgcgaaagatgatctcaacgagaaagaaaaagccgttatgaaggcattaacacagcagctgaagtaa

SEQ ID NO: 109205 - DNA, 288 bp, Enterobacter aerogenes
atgcgagtggctgaacatatcatcctggctgcactcctgcagggaggatgcatcaagacgttttaccggatatcggcccggcaggcggcttcgtcagcggtcagagtgcctgccggctatgtgctggagactccggaagcttcgggtgatacccccctcagccaggctgatttttccgcactggagaaaaatctgatgcaggttgattgctgggaacaggtggtgggcagagagtgttttggtggcgcgacctggcagctgcgacgggaagagactggatcgcggtaa

SEQ ID NO: 109206 - DNA, 435 bp, Enterobacter aerogenes
atggaaagcactgtcgcatcgctggttataccgcgcaatattgaagaagtctgggaaattattgaaaagtttcacgctctgtcagcatggcatcctgccgtagtcagcagtgagttcgaagagggttgcacagaagatgtggtaggagccgttcgccgcgtaacccttggaaacggagctacgggaaccgaaaaattaatccgtaaagacagcaaagcatatctgctgacctattcctttgaaacagcacctctgcctgttgaaaattatctctccaccattcagctgctgccaacctgcactccgggacacacgcatgttgtctggtcagcctcttttaactgcaaaccggacttatgcagcgagatgcgcagggtgctggaaaatgatgtttatctggctggaattaaagccttgcagaccacgtcggtctga

SEQ ID NO: 109207 - DNA, 744 bp, Enterobacter aerogenes
atgaatcatctgcagaacaaaaccgcggtaattactggtgcgtcatcgggcattggcgccgcgaccgcgctggaacttgcacgtcatggtgtcaatatcgtagccgcagcacttgatcagaccggtctcgataagctggtaaaggatattgagtcagccggtggccatgcttccggtctggtgacggatgtgactcgtcttgaagatacacaggcgctgataaagcatgctaccgataccttcggtaccgttgatatcctgattaacaacgccgggctgatgctcttttcagcctggagtgacatcgcgtgggacgactggaacaagatggtcgacgtcaacatcaagggctatctgaacgccattgcgtccgtactcccggttatgctcagcaaaagtgacggccagatcctgaacatggcttctgtggcaggccaccaggttgacgccggcgcgggtgtgtacagttcgaccaaattctttgttcacgccatgacagaatcaatgcgtaaagacctgggcgtgaataaaggcatccgggtcaataccatcagtcctggcgtaattaacacaggatgggctgataaagtgagcgatccggaagggcgtaaggtggcgcaggagctgacaaaaattgctatcagcccgcaggatgtggcaaatgcggtggtctatgcactcaaccagcccagaaacgtgaccgttaacgatctcatcgtgtcccctactaagcagaactggtaa

SEQ ID NO: 109208 - DNA, 1104 bp, Enterobacter aerogenes
atgactgacaacagtaaccgtaccgatctcttttcccctgtgactatggggaaacttcagctggctaatcgtatcgttatggcgcctgtcacccgtagccgctatggtgaagatggtgtaccaaatgagttacatgcaacatactacgctcagcgcgccagcgctggcctgattatttcagaagcgacaaatatctcagctcagggccgcggatatgcggcaacgccgggtatctggagtgaagagcaggtcgcaggctggaaaaaggtcaccgatgccgttcacgcagaaggaggtaaaatcgtctgtcagctctggcatgtaggccgtttttcaagcgttgaactgcagcccaacggcgagcgtcctgtcgccccctccgcaatcaaggccgaaggccagacctataccgtcaatggcttcgtaccggtatcgacgccacgcgcgctcgaaaccgacgagatcccgggcattattgagcagtataagcgtgccgcagaaaacgccctgcgcgcaggttttgacggcgtggaagtgcactctgcaaacagctatctgctcgatcagttcctgcgcgactcaaccaatcatcgtaccgacgcctacggcggctctgtagaaaaccgcgcgcgcctgacgctggaagtcactgaagcgatcgtcaacatctggggcaatgaccgcgtaggcatccgcctgtcaccggtaactcctgacgcaggcaacacgccgccggatagcaacgtgatggcgatgtatggctatctcatccagcaacttaaccgttttaatctggcatacctgcacttcgttgagggtgccactgcaacgtcgcgtgacgtgcctgccgacgtggatatggatgcgctgagcgcgcagttcagcggtccgttcatcggtaacaacaactatgacctcgaaatggcgatcagccgccgtaatgcagggatcatcgatgccgttgcctttggccgcctgtttatttccaatccggatctggttaagcgtctgcgttatggcgccgagctgaccatcgcgcctaaggaagcctactacggtggcggcgcgaaaggttacaccgactggccggaagcgaattactga

SEQ ID NO: 109209 - DNA, 582 bp, Enterobacter aerogenes
atgaaaaaacaaacggctaacgtgcgtcagcacatcattgatgttgcccgaacgcttatcacccataaaggttatagcgccgtcggccttgctgagattgtcaaagccgctggcattcctaaaggatccttctattactacttccagtccaaggaagagtttgctgaagctttgctggaacattacttcactcattatctcgttcaggttgaagagcagttgtgcggcagccaacccgcaagagagcggctgctgcgctactttacgttttggaaggccacacagggagcagatctgccggaaagcaagtgccttgtcgtcaaactcggggcagaagtctgcgaccagtacgacaaaatgcgaagcgtcctggctaacggaacccatgagattatcctaaggatcacggcgtgcatacaacaggggcaggatgatggctccctgccatcaggtgtggattcagaggctcttgcagaagagctttaccagctgtggctgggcgcatccctgatggcaaaaattcatacgcctgaacaggcgttcgacaaagcaatgagtgcaacaaagcggctgctcgcgtag

SEQ ID NO: 109210 - DNA, 642 bp, Enterobacter aerogenes
atgcccgacatgaagacgaaaaacgcaggtgccactggcgaaaagccaaaaggccggccgcgcagctttgatcgtgactgggccctgctcagggcgctggacattttctggcgtaaagggtttgagccagcatcggtagccgagctttgcgctgcgatggaaatcaatccgcccagcctttattccgccttcggtaacaaggcaaaacttttcctggaggccgtgagctattacgagagggtctactggaaggcaacctgggagcggcttgaagaagagccagatatcacgcgggcgattgaaaagttcttcagcgaagcggctgatattctgctttcgccttccgcaccttgtggctgcatggtggtccttgcggccatcaacgtctctcaggagtctgctgacgttgtggaggcggtaagcatactcaggcaggaaggaaaagacctgtttgaaaagcgactgcgcagggctgtacatgaagagcagttacctgcagataccggcaccgccgcgctggccaccgcgctgaatacgcttctggaggggatgtcgatcgaggcgaaagatggcgccacactggaaagcctcagagcaaccggccagtatgcgtcgcgtctgctgccttgcagaaaacagtga

SEQ ID NO: 109211 - DNA, 651 bp, Enterobacter aerogenes
atgtcagaactcgcgttctccttcagccattatctgcagtcctccggagaggcagggattgtgttgtatttcgttatttttgtcacggccacgctgatgtttttcccggcttctctgctggccgcgctgtccgggtggctgttcggcgctataggaggaaccgtgctggctctgctggcgggcaccacctccgctctggtcgctttttgcctcagtaaaagtcagttatttccggtcgcatcgcgcgctgcgggccggaaccgctatctgaaaaccctgctttcactgtcgcataacaatgccctcctgctgatcctgttgctacgcctgagctcggtcctgccgttcacggcgctaaattacgtgcttggggtcagcggtgtatcgctacgaaagtacgccgcggcgacggtgtttggcctgatccccggcacgtatgtgtatgccgctgccgggagtgttatttctgacgtccaggtgcttctgcacggcggtttcagcgccagggatattttacagcgagcggatgtgttaaccggcatggcagttgctgtggcgagtctgatgctactgtttgtcataaaaaagattttcaaccgcatagcgggcatccgtgcggatacccgtaacaacacaatcggagacagatga

SEQ ID NO: 109212 - DNA, 384 bp, Enterobacter aerogenes
atgaccgacttaacttatgtacaggaatataacgccatcgtggaagtcctcagcaaatataacgaaggcggaaagcaggcaaagagcgaggtaatgaagcccgccttcagcgaccaggccacgatttttggtgttgacgctgaagcaaatctcacgggcggtccgatccagggcctcttcgacaccatcgataccgcgttccggccttcaccggaggctaaggccgccattgtatacgtcgacatcgtgggcaccgcggcaagcgcgcgtatcgataccgacgatatttcaggcttccgttttacggactttttcaacctgctgaaggtcaacgggcgctggatcgtagtgagcaaaatttaccatacccacgccgcttcctga

SEQ ID NO: 109213 - DNA, 387 bp, Enterobacter aerogenes
atgagccagaatatcaaaaccgtccctgtttctgcctatgaggccgttctcgacacggcgcgtcgctacgttgacggcctgaaaaaaggctgcgccgaaacggtggcagaagcgtttcacaaggacgccgtcatgtatggctttactgacggtgaactgctgggagggtctgtcgacaacctgtataaattcgtccgtgaaaacggcagtgcgccagagattgaaacgcatctggatgtgctggccatcactccgaccacggcggtggtgcgcgtggacatggaaaaggatgctatcggcgccgactataacgactacctgaccctcatccgcatcgacggtcgctggcaggtgattgcgaaagtctatcaccagtttacgggctga

SEQ ID NO: 109214 - DNA, 660 bp, Enterobacter aerogenes
atgagtacggtgtttattatcggcggcgcaggcaaggtgggccggcgcctggccagaattcttacggagaaagggcacgctgttcatgcgctgcaccgtcagccggagcaggcgcagttgattcgtctgcagggagcaaagcccgtcagcgggagcctgacggagctggatgccgcggctctggcgaccatgatgagaggatgcgatgtggtggtcttctcggccggtgccggcggcaaaggtggcccggaaatgacgaacgccattgacggagaagggcttaagacggccgcagaggcggccgcgatggccggcatttcccgcttcctgctggtttcggcctttccggaggcttcaagaaatgaatccacctcggcgtcgtttgaaaactatatgcgcgtgaaaaagcaggcagaagtcgtgctggccgcaagctcgctggactgggtcattctgcgccccggcctgttgctggatgacaaaggttcaggatatgtccgcgccgggctggccataccttacggggaggtcgcccgggataacgtggcggccacgctggctgaaattatcgctcagccccgcgtcagccgcgtcatcattgagctgaccgacggtgaggtgccggtacgaaaggcggttcagcagatggcggaacgctga

SEQ ID NO: 109215 - DNA, 681 bp, Enterobacter aerogenes
atggactggtccgctgattcagaaccggatatgcggctactgctgctcggtgcaacggggctcgtgggcagtcatgtcctgcaacaggcgatgtccagcccacacatcggtaccgttattgcgccgacgcgaaaacctctcgcatggtgcgccacaggccatacccggcttattaatcccctgatcgactttgatgcccccgacgctgacgctctggagtggcgcgttgacgcggttatctgtgcgctcggcaccacaattgccagagccggcagccgggaggcattccggcgggttgattatgactatcctctgatgtttgcccggctggcacgtaatggcggcgcctcagcgttcgcgctgacctcggcgaccggcgcaaatgtcggctcccgattcttttataaccgggtgaagggggagcttgaacaggcgctgaggcacgaaaatttcccctcactgacgctggtccgtcccggcgttattgccggcgatcgggctgaatcccgcccgggtgaaacggcgctgaagcaggcgctcaggctcttatcgccggttctgccacgcagctggcagctcagcccggctgaagacatagcccgccatctcctcagagctgtgaccacacccaggtcgggcattcatattgtttctgcgggtgaaataaattctgcaagataa

SEQ ID NO: 109216 - DNA, 441 bp, Enterobacter aerogenes
atgtcagtagtgaactttaatgccgtggttaacgcccatgcggaccgcgtatggcagacgctcagccagttcggacgcatcagcgactggcatcctgctatctgcagcagcgaaatcgaagataatcagcccgacggtcgcccgggctgccggcgccgactggtacttgaaaacggcgatgtcctgcgcgaagagctcctcatgctggatgcaggtaagcgggccttctcatatcgctttattgaagccccgctggccgtagatggctatgtggcaacagtcagcctcattcctctgagcgatagcaacgaaacggtcattgcctggcaggcgagttttgaagcccggtcccgcaacgagatgcaagcgatagaggcgagcgttctggagctgatagcgtcaggccaccgcagcctcgctgcctaccttgaaaacctgtaa

SEQ ID NO: 109217 - DNA, 609 bp, Enterobacter aerogenes
atgcttgactacattgtgcccgtagagccagcaaaggcctacaggctgataaatcatggaccggcaacgctggtctctgcgcgctataacggaacggacaacgtcatggctgcatcatgggtctgcgccctggattacgaaccggcgcgactgaccgtcgtgctggacaagaccgcattcacccgcgggttgattgaaaaaagccgttcctttgttattcaggtcccggtggcaggccaggcctcactcgtgcactacctcggttcacattcactgtcctgcgaagcggataaactcgctcagtccggggtgtcgctgtttgaactgcccggcgcggatgtgccaatggtgtcaggatgtgccgcgtggctgtattgcgaactcatccctgaagcacatacccagcaggcctatgatttattcatcggagaaataaaagcggcctgggctgacagtcgcgcttttaaggacggacactggcaatttgaacggggagcggcggactggcgaagtctgcactatatcgcgggcggccacttttacactaccggcgatccgctggacgtgccggacgcgccgctgcaaacgcccggagagccgcaaggctga

SEQ ID NO: 109218 - DNA, 963 bp, Enterobacter aerogenes
atgatccgtgaactgaaaacgtttctgatggtggcaaaggaagggacctttgcggcggctggcaataaaattggtctgacgcaggcggccgtcagcgcccaaatgcagaggctggaggccgacttaaacttcccgttgtttgaccggtcggggagaaacgcacgtctgaaccagaaagggctacaactgatctctcaggcacaggaactcctctcgttgtatgacgggctgggtgagcgactgaatttggctacccccggtaagaccatcacgataggcgcaattgcctcaatacagcgtacgctgctgccggatgcgctgacggcgttttgcagacacagcgccggctgccgtatccgcgttataccgggcctgtcgatggaactgattaaccttgtggacgccggtgaaatagatatggccgcggtgctcaaacctccgtttgcactgccgacagggctgcagtggagtgcgctggcacatgaaccttttcacctcatcgtgccgaaaaatgtggcaggtaacgatattgccgctctgctgagcgaccagccttttatccgctacgatcgttcgtccttcggtggacgccaggttgatcgctttcttcgcgaaatgaatctttcggtcaacgaaatctgcgaggtggacgagctggaggccatcctcaagctcgtcagtaatggcatgggggttgctctgctgccccggacggccaactggcggcgctggccggcctccgtcagggccatcggtctgaatgagaaggttttttaccgggacgtcgggcttattcaccgcccgcttgaaaaccttgacgataacgtcaggcggatctccgagcagattatcctgcaggcggggcggaaactcgaccggcaacagcgtgagactcagccttgcggctctccgggcgtttgcagcggcgcgtccggcacgtccagcggatcgccggtagtgtaa

SEQ ID NO: 109219 - DNA, 426 bp, Enterobacter aerogenes
atgagcctttcccccttccatctggcgatccctgtctatgatctgaaagcaacacgtcgtttttacggcgagaccttcggcctgagtgaaggccgttcgagcgaacagtgggttgactttgacttttacggtcatcagctggtcattcacgaacatcctaaaaccgcatcgcaggagagcgtgcattccaactccgtcgacggtcacgacgtacccgtcccgcactttggcatcatcctgaagtgggaggaatgggaggcacttgcagaacgcctcagatcatttaacaccaaatttgtcatcgaaccttacatccgctttaagggacaggtcggagagcaggccaccatgtttttattcgatccctgtggcaatgcgcttgagttcaaggcgtttaaggatatgagtcagcttttcgcaaaatga

SEQ ID NO: 109220 - DNA, 1260 bp, Enterobacter aerogenes
atgaaaaaaataacactggtctggcagatagttattggacttgtacttggaataattgtgggatggtattttaatacgcaccctgagtatcagcagtgggtcagccacgaaatccttaaaccgctgggcgatattttcatcaaaatgatgaaaatggtcgtggtgcctattgtcttctgttgcatgattctgggcataaccggaagcggtgacaacaagtcgttcggacgaatgggcgcgaaagcgctcggttacttctttatcgtcacggggctggccaccatctttggactggtgctggctaaccttatttccccaggcgaaggcaccagtattcagggaatggcgcacggcgacggacacatgaaaatggaaccggcgcggggcgcactgattattctccagaatatcgttcctgataacctgtttgttgcgctctccgagggcaaactgctgtcagttttgttctttgccgtcctgtttggcctggcgcttaatggccttcccaggaataaaacagccccgatcctcagcgttctccaaagcgtatcagatggcatgttcagggtggtgtccattgtcatggcctacgcgccggttggcgtcttcggcatgattagtgccaccgtgtccacttttggtttcgcttcccttctgccgctgattaagcttgtaggcaccgtttatctgggtctggttttattcgccctgatcgtgctgggcggtatctgcgcgctgatcggggaaaacgtctttaagctgataaaacattttcgtcaggaactggtgctggcattctcaagcgccgcttctgcagcggttatgccacagctgatgtacaagcttgaacgctatggcgtaccgggtcggatcgtcagctttgtggtgcccgtgggatatgcttttaatcttgacggcgcgtcgatatttctcggtgtggcgaccatatttgtggcccagctttacggcattgagctgacgctgatgcaacagatcattttagttgtcacaatggtgctaacgtcgaaaggagcagccggtgtgccggggtttgccatactgattctctcagccactctggcgtctgcgggattaccgcttgacgccgttgccttgatagccgggatattccgtattattgacagcggaacaacaaccctcaacgtcctgggaaatgttgttgctccattggtcattaaccggtgggaaaaagaaccacgagcctttgaaagctctcagccggacctgaataaacgctga

SEQ ID NO: 109221 - DNA, 219 bp, Enterobacter aerogenes
atgcttatttataacgtttttggacgtcacattggcgttcaacgtaagaatgatcggtggctggtatttcgtgctgacctgaccgagagaaagttttctcgactctatgacatcactattccagacgatatgacagaaggcgaaattgccagctggcttggtgacatattccatgaagccgcaaccgagcgtcatccaaatgtggaacgcatcgaataa

SEQ ID NO: 109222 - DNA, 186 bp, Enterobacter aerogenes
atgttgtatcttatcaagatacattacctaccatatgttgtgtccctgatgcctgtcgaaggtcaccagactttcgtcgacctgcaggtcatactgttttttctccagtggcagtgccagcatggattgctgttcctccatccagcgaccgcagaggcgggtctgggtagtttcagcttccgttga

SEQ ID NO: 109223 - DNA, 405 bp, Enterobacter aerogenes
gtggtcccggtcggcactcataccagcatgccggcaggtgggaccgtggtcccggccgatactcataccaccatgccggcagatgggaccgtggtcccggtcgacactcataccaccatgccagtaggtgggaccatggtcccggtcgtcactcataccaccatgccggcagatgggaccgtggtcccggtcgtcactcataccaccatgccagtaggtgggaccgtggtcccggccgatactcacaccaccatgccggcagatgggatcgtggtcccggtcaggactcataccaccatgccggtaggtgggatcgtggtcccggttggtattcataccactataccggctgggaccatggtcccagccggtactcaggaactatctaaaaagctcgaaccatag

SEQ ID NO: 109224 - DNA, 150 bp, Enterobacter aerogenes
atgccaggacaaacaggatcgaaccagaaagggaagggggcagaaaaggagaggatgcgctacgtgaattctgacctgctacaccctgggataaccctgtcagttttcatgcagcacaaagtggttgctgactactgccagttgagatga

SEQ ID NO: 109225 - DNA, 501 bp, Enterobacter aerogenes
atgcgagtcagatttttatttgaaatgaaaataattgctgtgttcacttttttttctctttttattcttttttgcggattaagcatccgtaattggattacatggaagacacttcatgcaccaaccatgacttgcgatgctattgtaaacgttcacaaagaaaaccaagttctttctctaaggttaaaatatgctttcctggggaaagagggggttacaactctttctggcacactatttaatgataaaattgcaaccgcacatataagcaggcatgttttctttaattacaaaagagtagacaatgctatatactttgaaaataaaagaataaacatctcacttcaagacactgccggggagtacggactaaagtatttactgccttcattttatacacaacaaggagcgcaaacgagctttgagatatatgctcagaaacctggtggctatatctttgttaaagattttacaccagccttttactgtgctgaacaataa

SEQ ID NO: 109226 - DNA, 840 bp, Enterobacter aerogenes
atgaaaactgatcacatgaactctccatcagtaaaaaattattacatcattgaagagatagttcatttttacccatgtgaatatagcctttataatgtcaatagtggtgaaaccatcacactgctgagcacagcctctgaatgctttcttactcttttagaagaacaaggaaacatagtttctcgtaaagaaatgaaagaaaaggtatggggcaaacgcggagtagtagtcagtagcaacaccttttatcagaccattctgaacctcaggagaagtcttgaaaaagctggtgccggtaataatattatttcgacctactatggcaaaggtgtaagtattgaaaatagtgtatcagttacctgtcagccaatctcagaatgcgttagactacagacagacttgacgtatgttacgcttgaagaaccatcaaagcaagaaatagaggttagaactgataccactcacattcaacgattaaataaaaaaaacacaagcaatttttttatacggaacgccttaactttattcattggaaacgttatccttttggtggcttgcttgattatgctaagctttggaaactctttaaaaagagataattacttcgagcaatacgttaaaactgatgtaaaagtcaataattgtgcagtttttactgagcctgaaaacattaacagtgaagattttatcaaattcttaaaaagtaacaaattaaaatgtgaagatggtgaaagtctatacttatcaatgacatacccaatccaaagggtttctgttatccgttgcactgggcattttctaccgggggatgaatgcgagtcagatttttatttgaaatga

SEQ ID NO: 109227 - DNA, 615 bp, Enterobacter aerogenes
atggaaatgatagttgtgagtgataatgaattctatttggctgcattttcacaaataaaagattgtatactaatcactccaaaagtaatgtttgccagcgctgataaattattaacttctacttctgaaagagtttttattcttagtattgggaatgttacggtgatgcttcaagttatggaggtgttatttaaaatgaaagtgaaggggattttcattgagcctcttatgtggccaaatcataccaggatattcaatgttggcaatgtatatattttaccaagtaaattgaggtttccccgcctgataaatacagtaaaaagctgcataatttcagataagctcgtttataaagtaaacttaagccgagtaaaaggtgcagagtggaatgcaatgctatatttgatgaatggaatttcaagccgtaagcttgctttaattacgcatacctcagaaaaaacaattagtggtaggctaaggtctctgtcatgtaaaattggtttttcggggtttaatagagcaactcaactttatagaataaatttggtctatcgcatttatattttaaagaagagaagtgagatgcaacaatatgcgatgagaatagttagttaa

SEQ ID NO: 109228 - DNA, 738 bp, Enterobacter aerogenes
gtggttatagttctcatcgattctggtttgactttaaatgtgttctttgattgcacggacggattgataagaatcactctgtatactcaaagaagttctattttaagtaaacctcaaccagatgtgcggcatttatgccatattgtgttattgaaatttatggatttaaatatgaaaaactcaatcgttagcctttctctgatggctgttttaggtatgactgctgttacagctcacgctgcgtcttccggcactatcaacttcaatggcgaacttacagatacaacttgtgatgtaagtcttgatggtcagggggccgatgcaacctatactcttcctactgtatcggttaatgaattagctgtagctggagcaacatcatccagaacttcattcacaatggatttgagtaagtgtaatgttggtaccgtgaatggtaaatcaaaagtagcagcatacttccaggctggcagtaccgttgatccatcaacaggacgtttgaaaaatacaactgcaactggtgctcagttagttgatcttcaattgttggatggacagaataacttttctgcaatcaatgcaggtagttcagaacaaacaactaaaacaacttttaaagatattaacagcgctgacggaactgccaagctggtatatggtgttcaatattatgcaaatggtaaaacgactccaggcgtagtcaccagtagtgttgtgtataatcttcagtataaataa

SEQ ID NO: 109229 - DNA, 717 bp, Enterobacter aerogenes
atgtttgagaagttaaacatgaattttttttatgttggcatttttgtctttgtgatgtgttttactcatgcaaatgcaagtgttgtcgtaaatggaactcgagttgtttatctgggaagtgaaaaagaaacaacagttaaggtatccaatgccgggaaaaatccggttttaattcaaagctggattgataaaggtgaggtaaatgataagcctgaaaatattcaggtgccgttcattttaacccctccaattgggcgcattgacccaaataaaagccaaaccttgcgtttgagctatacatcttccccatctttgccggaagatagggaatcagtgttttggctgaatgtattggaaattcctcctgtaacgaaagacatgtcgcctaatcacttacagattgcatttcgtactcgcatcaaacttttttaccggccagcggccttatcggataaaactaaggctattgaagctgctaagaatttacggtggtctttcagcagtaataagttgacagctgttaatgactcaccgtattacgtatcattggtatcagtaaaaattaataataatgttattgatggtgaaatggttcctcctaaaggtaattacgcttttgttgtaaatggaaaaacagcgttatattcaaaagcgaaagtttcatatgaatttattgatgattggggtgctgtacagacagtagaaactagcctgtag

SEQ ID NO: 109230 - DNA, 2571 bp, Enterobacter aerogenes
atgcgccgtaactttcattactctttgttaacaattgccattattgcttctttagctaaccttccattaacagtaatggcagcagacattgaaccggttgagtccatagatactcagtctcaaccacaaggtgagtctgtaacgtttgacccaacttttttgtattccttaggtcatgatagtattgatttgagccgttttgcacaaagtggtactgcattacccggtacttggccaactgatatttttgtcaatggtgagcaagtatcacatgaaaacgtaaaatttactgaacaggcagacaaaagtgttcaaccctgcctatctaccgttttgctaaaaaaaattaattttgattatagccaattatcaccatcttttaagagtgcactagcaaataaaaatgcttgttatttgttaaaaaaccttgtggagcaggcagggcttaaatatgatccaggcacacaaagactcgatataagtattccccaggcaatgatgttaaataatgccaggggttacgttagcccagaattatgggataaaggggtacccgcccttttattgggatataatgctaactattatacgaatcggagtaatggaaaaacttccaattctgcttatacaggcatcaatgccggactaaacgtcggtccttggtatttacgccatgatggtagttatatctggcaagagaattatggagggcattatcaaacaaggaataattatgttcagcgtgatattcctgccatatccggacgagttttactggggcaaaccagtacacagggattattgtttgatacattgcccttcagggggatcgaattatatagtgacgatagaatgttaccgcaatcccgtcgtggctatgcccctgatattcatggaacagcacgtactaatgcccgtgttactgtacgccagagtggacgagttatttatgagacgaccgtttcacccggtgctttcgtgattgatgatttatatccgacgggctacggcggtaatctcgatgtgactgtgacggaagcggatggtagtgtccagacattttccgtgccgtatgcctctgtcacgcagttgctgcgtccaggcacgcaacgatatgatattgtcgcaggtaaacttaatgatccgtcattatcaataaaacctactttatatcaggcaacttatcaacgtggcttgactaatatccttacaggatatggcgggatacaaggtggcggcactgattactatgctatacagggtgggttagcgattagcactcctattggggcaattgctgcagacgtaaccacagccagaacacatcttagaacagtcgaaagtggtggcagtagcggacagagttaccagttaagttatagtaagtatctacctgacactaatagtaatttaacattagctgcatatcggttctctacatcaggatattatgacttcacaaccgcgatgcaagctattaatgaagaacgcaatggaggttctgccagaaatatctggagacccaaaaaccgatttaatgctaccttaagccaagggctagaggatggctggggtcaaatttacttaacaggttactcacaaaactattggaataataataatacagatattcagtatcaaatggggtacagtaataactggaaaaacctgaactatagtgttagcgctggacgcgtaagaaatactgatgggcatatggaaaccaattggcttctaaacttatctttaccattaggtagagagggtagtactaatgcgcctatgttaactgctgcggtaaaccatgatggcaatggccgtactggtgaacaactgagtctttcgggaaccaatggcaacgataatcaatttagttatggtttaaacgcatctcattacaatcaaggtacgggaaatagtatggcgcttaatggcgcatggcgtgcaccttacactaatgttactgctgcatatggaacaggaaaaaactatcagaatgcttctgttgggttaagtggtaccttaattagctggccatgggggattgtatcaactccatatactggggatacatttgctattgtcgaagctaaaggagctaaaggtgcgaaagtaagtggatatactggtgtacatattgattcatgggggcatgcagctgttccatatcttaatccatatgaatttaatgttattaccatcgatccaaaaggactaccagatgatgttgagcttgaaaatacaagcgatagggtcgcaccctattctggtgcggtgtcaaaaattgtatttaaaacgaaacaaggtataccgcttttaatccttgctaaaagagaaaatggtgagccagttactttcggggcaaatgtttatgatagtttgggaaacacagtaggaagtgtaggtcaggctggacagatttttgctcgggtttcgaaagaacgagatacattaaaagttaagtggggagataacaatgttggcgagtgcactgtaaattatattttacctccattacctaaaaacgggaaaactaccagcgttacccgatttgattctgtttgtaaatag

SEQ ID NO: 109231 - DNA, 1212 bp, Enterobacter aerogenes
atgcaatttaagttcggaatgttattcagggcattaaacacccaatgcaaaatggggttcgcgttagcgctgttattttgtgctaataaggggtacgctagcgttacctgtgatataaatcccagtggtggcattccaaccatcagtctttctggtttacctcccatttcggtaaccgaaggccttccagttggcaccaccttattccaaggtcgacttagtacaactggctcgaaccaatctcaaggtattgctgattgttatattgagggtggaaaagggagtgaaaattttactgttcagatacgaaaccgtgttaatggtggaacattatctggattagataaccatacgttcaaaaccaatataccaggtataggagcaagattttatttgtatggtaagtatattacaagcgaagatactttaggcggtggtgaacctaatcttaatacagtcaattttaatattagtggcaatgcagttgttcgtccatggggggatggtccaactagtaacaaccatctcagagagatgaccttttggcttgtaaaaacaggaccggtctcaccaggagttttaaatggtgtttctctacctaaggtagagtatagattatatagcggggggactcctatcaacaaccttcctgcgcgttatatgattataggcttcaatggtactgttaatattacttctccgacctgtactactccttcgagtgtttcagtagatctcggcgaatacactgtatctcagttaactcaatccggcagcagtccatggaaagatgcaagtattcgattgacaaactgccaaaaatttacaggctatcaaaatggaggtgatagcatgtttaatcaagataaaatatcgggtgaatatgatgttaagtatacatcgcttgtaccttatattaataatactcttggtataacattgaatggtaatcagggaaacattgatataaaaaatggtgttgtaggtatcaaaacaggtagtggtgaagcgactggcgttgcagtacaagtcgctagtggtacgagcggtaatgtgcctgttaaccttggtatggagtataaacaaactttacctaaagatggttcatctactattacaataccactttcagtacgtttaaaaaagaatggaagtgttatcaaagcaggaaatgttacatcacaaataacatatactatcaactataaatga

SEQ ID NO: 109232 - DNA, 555 bp, Enterobacter aerogenes
atgaactgtcaactttttttgtcaattttttacagatgtgcagccattctgaccttatcttttatttctagtgcttgggccggaggcaatggtgttcttaccgtaactgcaaaaataatttcttcaacctgtagtgtcggtattaatggaaaatcaagtgcagtggtttcgctccctgatatttcaacgggagattttaaaaatacctcggatgcgctcaatcgcactcagttcagtattgacatctcaaattgttctgatgttgcgcagggagctctaaaagtaattgttacgcgccctgcggaaggtactactgctggtagtgtgccggcaatcacaggaggcgcaaaagatagcattgaatttcgtattttcaacgtaacaggtaagagccctgcctggggatttactggccgaaccgctgagtttattgttcctgatttaatcaatggtaatatctcgttgccttataccgttggatatcaggcaaaaaaagttcctgttaatgcagggacaataagtagtaatttaactgtgtcattgtcatataagtag

SEQ ID NO: 109233 - DNA, 540 bp, Enterobacter aerogenes
atgttaaaaaaaaatttcgttataatttatggtgttttgcttttggcttttaataacagctacgcagctacttctgcaaatgttacttttaatgggcgtgtgttgtcgtcttcttgtgttgttgatgttaatggtctaagtaacgctactgtaaatttacctgacgttatgacaggtgattttaaaaacaccagttctgttttgcagaaaacaccatttaccataaatctctccaactgcgcagatgttggtgctggcgctctttatttaacaattaccagacctgctattggcgctactaacgtaagtgttccagcaacatcagggggggcaaaaggaaatgtggaattttcgctatcagatgtaccaggtaaaggccccgcctgggtttttgatggtttgaaagctacatttcaacctttagctttggttgatggtaaggcatcaatgacgtataccattggttatcaggcggtaaaattacctgttcttgctggaactatatctacaaatcttaaggttgatattgtttataaataa

SEQ ID NO: 109234 - DNA, 546 bp, Enterobacter aerogenes
atgtatttcttaagaaacactttttttctgttaataattttgacagagagttatgcatgggcagtaccatcttctacccttacagttaatggtctcgtttcatcttcgacttgttctgtcgacattgatggtatgtctgaatcgaccgttaatcttaataagttccctgtaagtgattttactggtaaagggatagtgcttggagggaaagaattcatcttaaacttcaatggatgtgaaggtaatggtgatggttttgtgcatgtagaattaactccactaggtaatgtttcgtctattgataaaacagttctcctcccctcctctggcactgcgaagaatgttggttttgctttcacatcagatgatacaggatcttcacctattatatttgagggatcaaaacaagcttcaatgcacaaatggaaagttgatgctacaggaagggctataggtttacttaaagtatactataaatcacttgatattcctgtgatgcctgggactttaaaggccagtatgatggctaccattatctaccattaa

SEQ ID NO: 109235 - DNA, 1575 bp, Enterobacter aerogenes
atgatttcaatgcttgttcatcacacaaaagcttttgccagatacaagatgactttatcttgtctcgcactcatgatttgtcctggtttagtttttggtcagtcctcagagaaggatatagctagtattattgacactcacaaaaacgatgatgtgcctgctatattaaaatattcgacgcaacattctgattacaaagcacgcaaagtaggtcaatctgattctaatcagaacaatgttgactttcaaaatcgtaaagtaactgaccttcagaataagctaaattctcagataaaaatatcagagcatcttcaaaaaaagatcgccatattaagcttgtcaaaacacgaatctgagcatcttcgtgctcaattaactgaggtttctcgggagttagagcaattaaggaaaataaacatttcccttaaatctaaacaaaacaactctgtaattatagacaaaaatggcaaagatactgattttaaaaatgatgctaaccagaaggcattattagcaattaatacgaaacttgctgataaagaaagattgctagatgaagctaataattctctctctggcatcaaaagtcagttgattggttacgaaaagaagattgacgatcttaacaaacaaatcgctcatttagagcaaaaagaaaatataaataaagaactgttaatatccaaggataaattattaaaagaaagggagcatgagtcgttaacgagaaaagaggaagtgtctgctattacattgcagctcacaaatcaggctgttgattttaagaaaaagtttgatgaaaaagataaagcattaaacgagatgcttaaaaaagttaaattatctgaagatacgataaaatctaaagataaaactatcgcacaattaaaaactgaatatgatacaattctaaagaaaatcgacttaataaattctaaaaaaattcagagtcaaaatccatcgctttctggcgcggaagcgaaaagagcctattctgttggtgtatcccttggtaatgaaatgctccggggtttagagtcgaggagcaaacaaaatatgcctttaccaaaagaaattgtattatctggtattcgggacagtttttcctcgcagctaaggttggatattgatacaattaacacggagttatctgaagacgcaaagtctctcagcaataatgtaacatccatgaggcgtaaatctattaaggatgggcgccaattttggactaaatttgttaaacaaaagggcgttatagtagagagtggcgttgctattaaagtggtatctaaaggtaaaaaaaattattctgataatgatagtgtatcggtagtcatgaaggagagccttacagacgggactgttactgttgatatggctgcatcgaaaaaagtatggacagaaacgctgaaaaactatcctccagcattttatgtggctctaaaaaaggtcggttatcaggggcatgttattgtagttgtccctcctgaactcgcttatggtgataatggattaccaccaaagataccaccaggttctactatcatttatgatatcactgtgatggataagtaa

SEQ ID NO: 109236 - DNA, 681 bp, Enterobacter aerogenes
atgaataaatctcttgcgcatttttccgtttcagctctgctggcattggtttcctcacaggtatttgccagcgactcatttgatatcagcgttgttggtaatatcacaccggccgcctgtaaggctaaccttgcagggggtaatgtctttgattacggtaatattcctgcctcttccctgagtaaggatgatttcaccgttttaccatccaagacaacgggcatttcaattatttgtgacgcccccactaaagtggctcttcagaccacagataaccgtaccggtaccgaaaatattccgttaggtaaggtgctggaaggtatgaaaatgaatgcttccagtaccccgatgggtctgggtcttgatgctgccggtaacaaaattggtgcgtatcacgcctccattccggcggatacggtcaaacttgacagcgacaatgcacctgattccattttttcaaaggatatgggcgcatcttgggttaaatacaacaaaactctgtttaccagcaacaagaacctgttttcatgggctaaaagtggtgaactggctccggaagctttcacgagcatgacgggtacgatcagcgttaccccggcaatttctccggcttccagtctggatttgtcatccccggttaagatggatggttctgttaccgttcagctgtattacctgtaa

SEQ ID NO: 109237 - DNA, 702 bp, Enterobacter aerogenes
atgtttttattggctgctgtcagagctatgttgttattcctgctttactgtacaagtattgtatcctttgcctcgggtatgttacctgatacgtctgttattgttctggaggaaaatatcggggaaacgtcagcgatagtcactaatacggataatagccctgcgcttttattaacctctattgaatctcttcctgaggacaaagaaaaaatcatccaggtatccccaccggcaattcgggtcgatggcggaaaaaaacaaatggtacgtttcctgctgacaagtaagtcaccgttaaaaacagaacgcctgcggcgtgttatttttgaaggtgctcccccaaaagataagggagataatcgtgtccggttaagtgtgacacaaaatttacccgttgtgatccgccctgccggtcttgcgcgaaataatgctccctggaaattactgaaatggacataccggaataatatcctgtcagtttctaacccgtcggcctatgtggtcaggctagctcagatggtgcagacacggccggataacactcgctggaatctgaaccggacatatattctgccttcagaaacgatatcactcaaacttgagagcaagaaaatgccctcttctccggagttggtacacatttatccggccacaacctgggggttttccgttgatagctgggatgcgccactggaaccataa

SEQ ID NO: 109238 - DNA, 2433 bp, Enterobacter aerogenes
gtgaacactaaactgcataacttattatttcattttttcctggttgccatatttacccttgtcggtattttcattgaaggcatcgcaactgcacagtcccgtaatattatttttgacactgaggtgatccgcaagcggggttttgaccccaacatcgccacacaatttcagaaagacagcaggtttccgcaaggctttgctcgtgtagatttggtactcaatggacatcctcacggtcaggtgacggcaaaatttggagcggaagggaacctgtgtctgaccaccagtctgcttcgggaggcagggcttcgcgtacctggaaaattgcctttggataccttccgggactgtataaagccctcaggactgtggccccggaacgaaataacattacatccggatactaacacgctagaaatactggttccggaaagtgcagttgccgaccagacagattataccgactgggagcatggcgggaccgcaggcatgcttaattacaatggacagtacctggtaagccaggcttctgacagtcgtttcagcttctggcaaatgcagactgaaactggatttaactcgaatgactggatagtgcgcagcagccaggactggacccactcggatgacaccctacgtttccggcatcacagtctgtgggctgaacgaacgttttataatcttaagtcccgatttcggaccggactttttacgctgagcggcagcacgctgggtgtcggacgaattttaggtgctcagttaacccctgaaaatgccctgtacaaaaattcgggagtggcagtggtaaccggtattgccggaacgccgtccgttgtcgaaattcgccagtctggcgtactcctgaacagcaccacggttccggcagggccgttcacgctcagtaatttttccctgttgaatacgcacacggacctgcaggtaaatctggcagggagtgatggagtgcgtcaggagtattccgtccccgcagcggcttatatggctggcggtcacagggttacgcccggtatggcatggggtattggacgcttggagcaggaagattatcgtcagcatcccatgattatgacattctcacgcggctggcaggtcttcccccggttaggtatacagacagatgttttatattctccgcattaccagtctacgggaattaccagcgatcttccgtttggaggacaggttttttcttttagctcgatactgatgacagcaggttcacatcacggtgcaatgtcatcgttgtcagtctccagaacgctggcagaaaatgtttcactgaacctgaatggggcattgcggaacagtggattccgggattttagcgaaaccatggtttcggatgagggcagaaccagaaaccgtctgcagtatggctcagcagtcagctggtatcacgcactggccggaagtttttcactgtcgtggacgagaagtgaaaaccgtggcgggaggcatagtgattatgctcagcttggctggaccaggaaagtcggaaagggatacctgagtgtcaccgccagcagaaacgaagggagcataaatcaccgcagggaggatatgttatatgcttcctggcaggtgccactgggcgaagcaacatcgataagcagctggatcaacaaccgtggaaaggatacgcgttacggaacccgtttaacacgccgtgaaaccagggatacatcgtggaatgtttcagtagatcattcccgcaatgacggagccagttcgttatctgttgggataaatcagctgacgtcatggagtcagcttagtggaaatgcaagttatgattcagaacaataccgtagcctgtccttgcagggaagtggtgctgccattctgcacaaaagtggactgatattctctccgtaccggattggggacacctttgccgtggttcaggctggccagcaggaggggatcagaattgataccacaagtggcgtcgtcagaacagaccgtgacggatatgctgttgttccttccatggctgcatggaataagtctgcgctgcagattgattccgtctcattaaagaacaatattgatgtcatcaacggggttgaagaaatagccgtggcacgcggcgcggtcagggaggtgaacttcaggatcgtttcaacacgacgtgtccttgtcaatgctcgtgggggggccggtcagccattacctggcagaatgggcgtttatgatgatctgaataaattcattacggtaaccggtgatgacggaacgttgtttatcccggatgcaaaaccaggaatgaaacttatcgtcagtttgcctgaggggcgccaatgcatgatggcgttaaccgaactgccgtcccgtatacagcctgatgcgggactgtatgaaacaaccgaggccatatgcagaccggtacagtcagcgggaaatgatgattaa

SEQ ID NO: 109239 - DNA, 570 bp, Enterobacter aerogenes
atgaaacatgtatatccgggattactgggtgggatattgatgatctgggcttatacggccaatagtacgccacagccccctcttccacaggattgtctggtaacggggacccagaacagaattgattatggcacacggacccggtcgggattagccatcaataaccgggggaaattaacaccgggtcaacgaagcacacgcatcagtgtggtatgccgttatccgcaaaaaatgatcgtgaatattgcgggaaacgccaccggaagacaatttgcttgggggaccagtgcagcgatgcatataaaaattcaggatgccacactggacagtaacccaattctcctcagcagactggagggagattatcattctttttcggacggaattccggtattatcggtaaatccgggggattattttactgtatcgaccgaaggcagacaaataaccggcaagcaactgacgtttaccctgactgcagagcctgaaattgatgaaagcaaagtgatatttaaccgcccgtatagcggacagtcacaccttactctgagggtggagtatatgttatga

SEQ ID NO: 109240 - DNA, 195 bp, Enterobacter aerogenes
atggaacgcttcttccgcagtctgaaaacaaaatgggtaccggtgaatggttacgcaggcaaggacgaagctaatggttacatattgaactactacaacagcgtcagacctcactattataactgtgggttgacgccggaagagtctgagaacaggtaccatttttactgtaaaaccgtggccaatattacttga

SEQ ID NO: 109241 - DNA, 168 bp, Enterobacter aerogenes
atggacctttttatccgcaagttcataggctggcgtctgtcagcatatgcccataccgcactgatatgcagcgccctgcgggtggcctatgagacgcgcggtcaaccgcgtgatgtcatgttccacagcgtccagggaagccagtataccggtctgaaatatcaataa

SEQ ID NO: 109242 - DNA, 2343 bp, Enterobacter aerogenes
atgagtattaatgataagtcccatttccctgtactgataatttctgaaggtggcagtgaaaatggtatgtcggacctctttaatacggttcggactgagctggagaaatataatcatcattttatttttgccaacacagaagaaacagcactggccttgattcggcaggagtctggtattggttgtgtcattattaacgactgctacacggagtcccttaacagcaattcactttttttcacagatgtagtccgggctattcggcaaaaaaatcgaaatcttcccattttcttttcttcgactgtacctgtgttgggccgtttacctattgacgttatcaaagagttgcatgaatcaattaatgtgtgtgacgactcgccgatatttattgcaggacgaatccacctggcactaaaaaaatacgttgaaaatctgcttcctccgtatttttcagccctgaaaaaatatgccctagatagcccctactactgggactgtccagggcatcaggggggcgtggctttccttaaacatccagttggcaaggaatttattgatttttttggcgaaaacttgatgcgtgcagatatagggatatcaaccccggaaatgggtgactggctggagcacaaaggggccccggaggagtcagaaaaacgtgcggcgagactgtttggtgcagacaaaaccttttacgtaacaggagggtcctcacaatcaaatcagattgttgggcactctcttgatctgaagaataaagttgttctggtagaccggaactgtcataaatccgtcaatcatgaactgacgatcacgcaggctaatcctgtttattttcagcctgcccgtaacggatttgggattattggtttgataacacccgaacagttcactgcccggttcattggcaaaaaaatctcggacagtattctggctggtcaggctcaggagcctgtatacgccattattaccaactgtacctatgacggcttaatttatgatgtaacctctctggtagatatgctcggtgaaacagtcccgcgcataaaatttgatgaggcatggtatgcatatgctgcatttcatcctttatatcagggacgtttcgccatggacgtcccacaggacaggcagcacggaccaacactctttgccgttcagtcaacgcacaaaatgcttgccgccctgtcctcggcatccatgatacacatacgcagcaatgagcgggctcccgtaaattatgacgtctttaatgaggcatttatgatgcacgggacaacgtcacccttttatcccattatcgcgtcaatcgacgtggcgacctcaatgatggaaggcgcagcaggaaaaactttactggatgaagccatacacgatgccatctgttttagaaaaacgctgatatctgtggctgagaggctcaaagcttcaggtccagaaggatggttttttggtatatggcagcctgacacagtcctgatagaagggaacaaagtctctttcgttgaggcgaatgatgatgtactggcgaataaccctgagtgctggtttttaaagacgggtgagctgtggcatggtttcgaggatttacctcagggttatgccatgcttgaccccctgaaagtgacaattacctgccccggacttgatgcgcagggaaacatgactgagttcggcatcccggctccggttgtcgtgaaatacctggacacgcaacgaattgtcccggcaagaaatggcgattacacgattttgatcctttttgctctgggatcaaccctagggaaatggaataccctgatagacagtctgatgatgtttaaacatcattatgatatcaactccccgcttacggaagtacttccggaggttgcagtcctttctgaccgctatgcgtctatgggattacgggatttatgccaggcgattcattactccaataaagagctgaatattgccggactggcagagcgagcctgcgctgcagaagcggttccggttctgaacccgtcgcaggcctacgagtgcctgacctctgatcagactgaactggtgaaagtggaaaatattcgtaaccgaacgcttgccgtcatggtcactccttatccgccgggtatccctcttatcatgccgggtgaaaaaatgtgtggtggaacagagcccattattcactatctgcttgcactacaaacttttggtcagcgctttcccggttttgagcatgaattacagggagtggaaattgatgagctgggggtttaccgggtgaggtgtatcagggaaaaaccggagcctgtaaaaaaagactgtcgtgtcgtgccattgtcttcaccgcttcattaa

SEQ ID NO: 109243 - DNA, 1092 bp, Enterobacter aerogenes
atgagcacagaaacacatcagctttccgttcgacaatcgacagatgttcatttactcactggattagggttactggccgtcagaattatacagggatttatttactggggcgggggaagccggcgctttatttatgcaccggataaactcaacccggaagctggacactggatggcttataaatttcagacttccatgcctggtgctctattgggcctggaacacgtgatttcatttatgcttcagcacttctggttgctgtatgtcagtgtgatcattttcagtgcagctgaactgattgccggtttatttctcatgctcgggcttttcacccgtctttctgcgctaatgtcaatgtgtttctcggtagtactgatgctgatgtttggatggcagggggcaacctgtattgatgaatggaccatggcagcatgtaatctggcaatgggagcaaccttatttttgtgtggttcacacagctatgctctggataatctgattctgaaaaaaagcccccgcatgacagataatacgttattccgttggtgctgtggcacgttacccctgccagtaacgccgggccgttataaaaaaatggcactggcagttcttgtcgttgtggtgggatttgatgtcggtacttacagttactaccgtggctcagtcataacaccataccatagcgggcctgtcagtccgaccacgcaccatataaaactgacagaaggaaaactctttgctgatggcacagtgcaggttcatgcttacctggatgccggaacgcctgaggcacctgaatatatcatggaggcatggttaaaagataatcgtggtcgtatactcgctcactgggatgcatctttgctgtcagcactccctcagggtagttttgataatgattatgcctaccacggattcaaagtgagtcactatggtatacaggcagtggttggctctgcagctactcttacatttcctgctgatgtcatcacacacggtcatgaacgtttatctgatggagcaatcacactggaactgatggatgtgagtgggcgtacgttcaatgcttcacttgcacgtatttcaggctga

SEQ ID NO: 109244 - DNA, 654 bp, Enterobacter aerogenes
atgcattcatatgaggaccggatccgggccgtcgaactctattaccggtacggaaagaaagcctccgttgtcgtcatggagctgggatatccttccacaaaacagctgggccgttgggttcggatttatgaagagaagggcgatttacccagggaattagagccaagagaacgctattcacggacacagaaaattgctgctgttaagcattatcttactcacggtggttgcctgtcgtacactcgccgagccatcggctaccccagtaatgaaattctaaagcgctggattgaagagttttacccaaatgcgcgtcccctggtcattcgctcaggcacaaacaaatggttcagcccggaagagaggtctcaggccgtccgggagctctgtaaccgacgtggaaccgcgcgtaaagttgcacaaagcataggtgccagcgtcccggtcctgtacaaatggaagaaagaccttatcagtgacgaggcttatcaatccatgcgcaaacgaaaggcagtccctcaggataaaaatcaggatgctttactcggtgaaatccagcgactcaggcagctggttcatcagctgcagctcgaacgtgacatactgaaaaaggcgaatgaactgataaaaaagatctgggcatcagctttctga

SEQ ID NO: 109245 - DNA, 612 bp, Enterobacter aerogenes
atggcagaagagcagctcgttgttaagcgcaccaggcgacgacgatacaactcttactgtggcgaaatcggcccggcaccggaaaatttactcgcccgggattttagttcctgcaggccaaatgagaagtggctgaccgatattacggagttccagcttccggctggaaaagtctatctgtcgccggttatcgactgctttgatggccaggttgtaagctggtcgataggaacacgcccggacgcgacgctggtgaacatgatgctcgatgacgcactcgatacgctcaacgaacatgataaaccggtgatacacagcgatcgtggtggccattaccggtggccgggctggcccgatcgtattaacacatccggacttataaggtccatgtcgcgcaaaggatgctcgtcggataatgctgcgtgtgaaggcttcttcgggcgtatcaaaaacgaaatgttctatggcagagattgggctggtatcacgctggaaaaatttatctgcttcctggacaggtacatacgctggtataacgagaaacgtatcaagctatcattaggtgcaatgagtccggtgaagtaccggcagcatcttgggatcacaacataa

SEQ ID NO: 109246 - DNA, 498 bp, Enterobacter aerogenes
atgataattaagatgagtgaaacaatgatttcacagcttgggaaagattcaattgaggctcaaaacaggaaaaacgaagtaaaagattacaaaaacttattatattacagacaatctgaattatggcgcgtaataaaaaaaggggttaccccacataattcattcgggttttcctgtgtaagtgagaactattctatactgagcagtacaacaaaaaatggtatggttttttcgttaaacaccaaagaatataagattagtttgaaaaaccgaaacctggaatatcgattcactccagtaatggactctttctctggcatttttcgttataacttttcacgttttgagaatggttatgaaagtgctataagaggtgagttatcctggagtctcaaggacagatgctggtttttaaattatcatggcaaggcgttagagacaggatgtttcaatgataaaggtgtaactatgattctggctaatttagcatacatgtaa

SEQ ID NO: 109247 - DNA, 303 bp, Enterobacter aerogenes
atggaaaaagaaacgctgacgccggtagctgataagcttgccgaaggtctggagagcgcgggtttataccgcagagcagccacccgctggttagaggtgttttttgaatgtcagagtgattctgaacggtcatgggtatcccgcaggagacagcactgtctgagccagatgcagacaaggaagccgaatgatacctaccaggatatctacagcgcagtcagtgcattacaccgggaaatgggactggagcagaccggaagtatcccccgcagacgctgtcgaagcagggggcagcgcaagtaa

SEQ ID NO: 109248 - DNA, 198 bp, Enterobacter aerogenes
atgacagacgaagaaaagcactggtcagcggtcattaagcggttcagaaaaatcagttcggtggagttttttgtccgcaaaaccctgctaatgcttgatgatccggaagaaaaattaattttaagcgcccttgcgcagaagaaaattgaagagctggaaagagagtcggtgtctgagttaggtaacggacggtgctga

SEQ ID NO: 109249 - DNA, 1542 bp, Enterobacter aerogenes
atgaaagcgtggcggtatatctttatagcagcggttctgtttatatccataatactccctgcagtaatatatcttttaccgtcatggcataatcacagtgataacggtaaaagagatattctgttagctgtacgtattgattttctcctgcgcgatgcccgtttactgggcggggatatcctgcgtcagcctcagccggacctctcatgttcgcctgacaccgcgcgagcactcgaacaggcagcactccggtatccacatgttcatggtgtgtttctttaccacaacggggaaatttactgctcctcgttaaggcagctctttacgcctgatgccacatttcaggacgtcacccgttctgctaatgacgggaaaatcctgttgctgagtgggatgaaagcattccccggaaaagtctttctggcatacatccggggaaatcagaaaactggtattgtggtgaccatcgatacctactggttgcgacgctggtttgctgccgatggacagaatggccttctcgtggcggacaaagtcttaaccagagaccagaccatcactgaagtcgggtctgtacgttcacaaataacaaatacactgagctcaccgttgtccggagtcagtgtggtctccttccgtcatgacacaccgcatctgtttttctggccggcggtggcggtactgatactggccaccggcttactgacatttctggcgctggggcggtttcgcagaaacacctttccgacagtccggcagcttgaacaggcgattcacgccggagaaatggttccctggtaccagcccattatggatgccaccaccggacaggtgagaggagtggaggtcctggcacggtggcatcatccccggaaaggagtactgccacccgacctgtttattcccctggcggaacgcagtggactgcttgttcccatgactcaggcccttctggaccaggtcaggcgggacatggacgttctcaaattccgcctgccggataaattttatatttcagtgaatatcagcgccacgccggaaatggttgcggcgctttccgccacgctgacagagttcagacaagcttttcacaaccatctcaggctggttgtggagctgacggagcgaacggctgtccggtctgactccccggtcattgcgttattacgggagctgcgtgccgaagggattggtattgccctggatgatttcggaacggctttttccaatatttccaaaatcaacaaactgccggtgaccagtatcaaaatagaccagtcattcatacggaaattagccgactccatggagtcacagcgtctggttgaaagcattattgagctggccagaagtaaccgcctgtctgtcgtggcagaaggtgtggaaacagcctttcagtcggactttctggccgccagaggcgtggcactgcagcagggatattactggtcaaaaccgctgccggtgatggattttgcccgttttcttatctggcacagaacggtacccgggatgttcagtgaagaaaggagcccggtatga

SEQ ID NO: 109250 - DNA, 1734 bp, Enterobacter aerogenes
atggcagtggaaaaactgattgtcgaccatatcgacacctggaccacggcgctgcaaacacgctccacggcagggcgcggcagctcgggcaagattgacctgtacgggattaaaaagctgcgcgagctgattctggagctggcggtgcgcggcaagctggtgccgcaggatccgaacgatgaaccagcatcggaattactgaaacgcattgcggcggaaaaggccgagctggtgaagcagggaaaaattaaaaagcagaagccgctgccggagattagcgaggaagagaaaccgtttgagctgccggaggggtgggagtgggtgcgtttatccgatctcatggaggttattaacggtcgagcatacaaaaaacatgaaatgcttcaagaaggaactcctctcttacgcgtagggaatctcttcacatcaaatgaatggtattactctgatctcgaattagatgaaaataaatacatcgataatggtgacctcctatatgcatggtcggcatcttttggcccgttcatttggacaggtaaaaaagtcatctaccattatcatatatggaaattaaaactgtttgcagaagaactatcagataagttctttatacatgattttcttttatcaattacagataagataaaatcacaaggtaatggcattgcaatgcttcacatgaccaaggagagaatggagcaacaagttattgcattaccaccagtaaatgaacagaaaaatattgtacaaaaaattagggagctaatgtctctctgcgaccaactggaacagcactccctgaccagtctggacgcccatcagcagctggttgaaaccctgctgaccacgctaaccggcagccaaaacgccgatgaactggccgaaaactgggcgcgtatcagcgagcatttcgacacgctttttaccaccgaagccagcattgatgccttaaaacagaccattctgcaactggcggtgatgggcaaactggtgccgcaggatccgaacgacgaaccggcctctgaactgctcaaacgtattacgcaggaaaaggcgcagttggtaaaagacgggaaaatgaaaaagcaaaaaccgttgccaccgattagtgataaggaaaaaccgtttgaactgcctactggatggtccttagcccactttggtgatattgctatagaaatagcaactggcccttttggctcaatgattcatcaaagtgattatattattggcggagtgcctttaatcaacccatcgcatattgttaatagtaaaatagtcatcgacccagcaatatctgtttcaacagaattagcaaaaagtttgtcatcttataaaatgattgcaggaaatattgtcatggcacgtagaggtgaaatggggagatgtgccgttgtaaccacgaaagaaaatggttatttatgtggaaccggaagtttcatccttaaattcagtgacgaaatagataaagactatatagttgaattatttaaaactgtctatgtgcgaaattatttgggcggaaattctgttggctcaacgatgactaatcttaatcattctatattaaataaaatgccaatccatttacctccagtaagaatgcaaacgaagattgttgcagctataacaagcttttcagcgtattgcgaaaatcttaagtccaaaattaaatccgcccaacaaacccagctccacctggccgacgccctcaccgacgccgccatcaattaa

SEQ ID NO: 109251 - DNA, 144 bp, Enterobacter aerogenes
atgcagttgttcgtcgcgttcgctcaggagcaaaacttttgtacctggcgacacgttgtaccggccgattggttcggggtcataagcgatatcccgctcagcttcttcagccaaataagccaggtactcttcacgggtttgtga

SEQ ID NO: 109252 - DNA, 612 bp, Enterobacter aerogenes
gtggctgaacggaatattgacgttgaccgccagcatctggtcgcggccctgctgccaggcgtttttagtcaggctgtagctcagcgtccagttgatgtcgtccaccgccgcgttgagtccggcctgcagctgctggtccgccttgccggtcgaccagtaggtctgatgactgccgctcagatagagcgtggcggtacgccccaactgttgggtcacgctcagttgcactttgccgcgcttgttataggcgaggttgtagtaatcggtgaatttcggcttcacctggatcacgccatcctgggtctgtacgtcgtaaccgctcatccggcggtaggtagtatcggcaaagctgtaataacctttagtggagtagcgatagcccaccagttggatattggtgccgacatcgctcagcgacttgttatagaggaagcgaatcgactgcccctgatgatcgctgtcgtcgggcagggtggcgttggcctgggtgacatccagcgagacggcgccgaaatcgcccatgtttttccccacgccgagattaaaggcgcggtagcggtcggcaagttgcgtaccgccatacaaagtccagcccgcaggcaggccgtgtaa

SEQ ID NO: 109253 - DNA, 123 bp, Enterobacter aerogenes
atgattcaagcggcaacgggtatgatctggttactggcaatgagtttactgagctggggatgcgtaccgtcgcagaaagtgcgcacggtgctaatacggggatcattgaatccgatgaaatga

SEQ ID NO: 109254 - DNA, 744 bp, Enterobacter aerogenes
atggcggcgcagaacaacagcgatccggcggtgaaagacagagaaaacgcgataaacgcttttacgcgcgcgtatgcaatagagcagggatttccgttcgttgatatgcggtcagtcactgttgatcctgaaaccgacggctggaaggcgggctataacggcaaacttcaggatggctcacctgatccatcacaccctgcgccactcggtgcttttcatatgggtaaagcactggcggaagcgctggcacctttcatgatgccggtttatccgcagatggccatctccaacccggtcacgtcaggaggaccgaatgccattatcaacccactctttctcgataccgtgaatggtctaccgtcaggatgggttgttgaaagcggaaccgtgtcattaaccactgatcctgatgtcgttggtaacgtgctggtggtgacaggcgccgggaataccagcgcgcgcgtgtcacagactatcccggttacgccgggtgagcgccggaaattcagtttcagagtgaaatttgatgtggatgaaaacgcagcaactgcctgcttcctcgaagccaacggagccaatattgccggaattcgcccctcgaaccagtcgacggaaggattcaggacgttcagttatgacgtggtgatcccggaggggatgaccgaaatgaaattgaccattgtcgcgaatggagccactaccagcgtgggccagatgggattattaaaactggaggaagtatga

SEQ ID NO: 109255 - DNA, 246 bp, Enterobacter aerogenes
atgcaaagttttatttttaataatggtattcattccaattttcttaccatcaaattcaaaattagcagtcgcattggcgttcatatcgacgtcaattctattaaagaagtcaaacaatccatcgaaacggcagttatcaactttatttttaaagccaccatttacaaaaataactggagtccccatagccaggcacggaagagctgtatggatcctggatgttacaaccagttttgcattagctaa

SEQ ID NO: 109256 - DNA, 1143 bp, Enterobacter aerogenes
atggaaacgttattactgctgtgttatgccgccttgtgtatcgtgatatttaaagtattccgtattccattaaataaatggacggttcccactgcggtattaggtggcgtgatactgattggcatgttaatcctcggtatgaattataacttcccctatagcgaagtcgggaagcaggtttatcgcacggtgcccattgtttcgcaaacccgcggtcgagtcaccagcgtgccggtgaaaccaaatcagatgctgcatgaaggcgacatcttgttcaccatcgacccaaccccgttccaggcgaaggtggacgacctgaccgcacaggtgaaagcggccagccaggatgcgttgtcgctggatgcggggttaaccagcgcgcaggctgatttaagcaaagcggtcgccgagcgcgaccgggcccagcgtgaatacgcccgcttccaggcaggtcatgataaaggggccttttccgatcagatggtcgatacgcgtcgccagaactggaaagcgacgcaggcggcggttgacgccgcccgggcaaaggtcgtacaggcgcgtaacgatctcaattcggtggtgcacggcgagaacaccaaagttgcttcgctgctggcgcagctgcgtgaggcgcaatttaagctcgataacacggtggtacgcgcgccgtctgacggctacgtcagtaccgtcggtctgcgtcctgggaccatgtccaccgcgttggggttgaagccggtgatgacgtttgtgccaacggataatgtgaattcacgtgaatacgtcgccgcattccgtcaaaacgcgctgcagcgtttgcaaaaaggtgaacaagctgaattgctgttcccctctattcccggaaccgtgtttaaagcgcaggtagcggaagtgctgccggcgattggcgaaagccagtttcaggggcagggaacgttgctgacggccaacgatctggcggcgcgcggccgagcgctggtggtattaaaagtgaccgacgatcgtctggcaaattatcagctgccgcagggcgcggacgtcgaagccgccgtctattcgcagcattttgagcacctgtcgctgataagaaagatcctcatccgcatgaaaagctgggaaagctatctttatctcgatcactaa

SEQ ID NO: 109257 - DNA, 1017 bp, Enterobacter aerogenes
gtggactacagacagcagatcctcaacattttgcatagcgaaagcgaatcgcgggcggagatgacccggcggctcggcgtcactaaagcctacattaccaagctcaccgcccggctgctggaagagcaattaatcgaagagcgggaagtaaaagacgccgcttttggccgcccgcagcagtgcctatccgttaaagaaggcaatgcctggagcgtgaatatcatgctgcgtcgcggcagtttccagggtacgctcaacgattaccatacgctgaaagcgccgttagccagccatcagttcagcctcccggagcaaatgaccccggatacgctggcgcagtttattgccgatggcctgcaggcgttatgccagcaggcttcgttgaaaacggcgcaaatcaaggtagtcagcgtggcgctgcagggcggtattgaacataccaccggcgtggtgcgctactgtccgttattcgccgacaacaacattaacctgctggcgctgctggaacagcgcctcggcatccctacccgcatctacaacatcgcccactgcaccaattacctgctggcgaaacgctcgccggggatctcatacgtggcgtttatgcccggcttcggcagcctcggttacggctactgtaccaatggcgttccgggattgggcgaaaacggtttttatccggaaatcgtccatttaccttacgatggcgggctggagccggcgtttaacgtcgatccggcgaataaaacccccggtattcaggcgaccgcccgcgcgctttattttgccatctgctgtaccgcgcctattcacaatattcgtctggtcattgccaccggtgagctattcgaagattacggcgatgatattctgccgctggcgcagcagatgctggatgacaacccgaaccgtcatattcgcgagattaaaatacgccactacaaaaccgggcataactacggctggcgagggcttgtgcagctgagctccgacgcgattaccgcgcaactggcgtaa

SEQ ID NO: 109258 - DNA, 1545 bp, Enterobacter aerogenes
atgatccaatcacaacgcagcaggctcgctcaaagtatctggctggcgatggccgggctattggcagcctccgcgccgctggcggccagcgccgataccaccatcggtcaaatagcggctaaagtgctgccgtatcaagccaaaccgcgcgtcttcgtgctcaccgacattggcaatgaaccggatgaccagatgtcgctgacccgttttctgctctacgccaatgagatgaacgttgaaggactggtcgcaaccacctcgacctggcagcgcgaaaaggttcacaccgatatgattgaacgggtggtgggccactatggtgaagtgcaacctaacttgctgaaacacgccgccggcttcccaacccagagccaactggacgcggtggtcgcgccgggcgtggcaggctatgggctggcggcgaccggcgccggtaaacataccgccggttccgatctgctggtaaacgctattgagaaaagcaccaatgccagccagccgctatatatcaacctgtggggcggcgccaataccctcgcgcaggccttgaaagacttaagcgcgaagcatccggccagcacagtgaacgcattaacgcaaaacctggtggtttacgcgatttccgatcaggacgatgccggcttctgggtgcgggaaaactatcctcagatcacctggattggcgatccctccagccaaacaggcgaagattatgcccgcgccacctggactggcatcagcggcgatcgctactatcgcaacgcgccgggcgcggatttcaccaccgtttctcagcactggctggatgacaacatccgcagcaaagggccgatgggcaaaggctatctgcagtatctgttcattatggaaggcgacacgccagcatttctcgggttaatccgtaacggcctcaatagcgagcgcaatccgggctggggcggctggggcgggcgctatattgttcgtcaaccacaacacgaaacgcgcccgttctggagcagcggcggcgatttctatccgggtaacccgaatgcagccgatacggtcaccggcgtcgatggtcagcgatatacctctaatcaggccacgatctggcgctggcgcgaagccttccagcatgatttcgccgcgcgaatggactgggggatcaaagactatgccgcggctaaccataatccacaggcggtggtgaacggtgatagcgggcaggaagcgttgttcctgaatgccaaagttggcgaaacgttgaaactgagcgccgagggcagtaaagatcccgatggcaatcagctcagctatcgctggttcctctatccggaagccggctccgccagctcacagccggtggcggttaacgacgttcagggccgtcgcggcgaagataatctgcaggcgcctgcggtgctgacgcttggcgaggccgcacaatctcacaccgaggttaaagcgcagcgtgcgggaaccgagcatctgatcctcgcggtaaccgataacggcacgccgtcacttaccgcctaccgtcggatcatcgtcaccgtcaagtaa

SEQ ID NO: 109259 - DNA, 489 bp, Enterobacter aerogenes
atggtcggtatctggcgacagtggcaaaagcgctgcgatatggggcgggtgttcgtcatcaatatcgaacaggcgtgggcgcagtactttacccatagcagcggcagctgcgtgcatagcgcccgctgcggcagcaatctggtgatggagtctgacggacagctttacgcctgcgatcatctgatcaacgccgaacatcggctgggccgtcttgacgagcagacgctcgccgcggcggtcgacgcgtctgttcagctcccttttggccagcaaaaaagccggcgccgcgaatgtcagacttgcgctgtaaaaatggtctgccagggcggctgccccgcgcatctcaacgccgctggcaacaaccgcctctgcggcggctattaccggttctttagcgaaatcctcgcgccagtacgccccttttcccgcgaccttaacggcctgaaggcctggcgggccgcgtttgttgggtctgcgcatactgcgtag

SEQ ID NO: 109260 - DNA, 330 bp, Enterobacter aerogenes
atgctgacccaaaacggcgtcccgatgagccgttaccgtgcggggcgtctgatgaaacatctgaacctgagcagttgccagcctggaaaacatcagtacaaaaatgcccgtcaggagcatacctgcctgccgaatctgcttgagcgccagttcgctgtgcccgagccagatcggatatggtgcggagatattacgtatatctgggcaggaaatcgctggtgctatctggcgatcgttatggatctttttgcccgcagggttatcggctggagtctgtcagcgcatgccgataccgcactgataagcaacgctctgcggatggcttattag

SEQ ID NO: 109261 - DNA, 1416 bp, Enterobacter aerogenes
atgccgcacattgccaacctacaagaaatacaaccgcttagtcactataaagccacatttgacctgttttatgagtttgtgaaaggtcaagttaaaagtgatataaaagcagaacagtatattcaacttcaaacaattgccgaacctttggatttttcaaagaattactgttggttttcatactttacttatttaaataaagtcgaccaaataataaaacccgaacctctgagtgatcagttttccgttacagatagaacgttagcgcgagagtatgagaggtttgttgaaaccgccttgcaacttgtagaagcgatcgagcttcctcctgaggtagtcagcgaaatcaacgctaaagttgtacgtttagacaacatcaaaaaagaggttcgccgtcttgtacgagaagaagctgatgcatggaaagagtatgcggagcttcgcggcattccatctggggacctgtctcaatacttacaatggagtaaccgctatggaaatgcaaacgacatagatgctcaaggtaaagcacttgctgacgcctacggaacgcttgaacgcttgagaagacgacaatactctgatgtggatcaacgggaaataaaggaggcgtgggacaagttgatctctgtcggggctcgcattagatatccacgtcgacctgatgatgagtatcctgatggttcaaagttttcattaccttaccttgcatcgctagccacaggtgatagtgcactatttgccgatagacctgtgatattccccgatatgtcttttgatactatagctggcggttcactcggtcaatttagtgctggaattaccgagtctagtactgcgaaagagagtatgtccgttgattggtctgcttcagcatctggttcttatggctggtttagcgcatcagtcaacgcttcttcatcaactaagatcgaagaagagttttctcacactaaagatgtaatgttagggtgcaaagcatgtatgatagtgcccatccagcctccatcatggtttaattctaatctctttgaaaatcagttaatacttaaaaataaaagaaccttcgacagattccttggagctaaaggtaccctcctctattaccccaaagcattagttgttatgagaggatttaatgtaatctttaagtctactaatatatggaagtacgattatgctcgcgatttctctgtcggcggtagtggttctgttcgcttgtttggaattggtcttggcggaggctacaagcgtcatgaacatcaggaaaaacacactgttgaacaaaatggtgatgagctacgcttttctgatggtgactcaagccttcgagtacttggctacatcgttcaaaaaaataccgcttttgaaaaggatatacttacagaactttcaaacattaagttgttgccatga

SEQ ID NO: 109262 - DNA, 225 bp, Enterobacter aerogenes
atgtcaaataaaataaaaattaaatcgccaccgctttttggtgtggtattcgtgaatgacacttactgtgatattaatagaaacatcctccgaggaaatggaaccggcgtaaccatatggttatttttaataattggaactatttactctctttttctggtggggcctctactaacccattccgatgaaatcttttacgccatactattcgttatttttatatga

SEQ ID NO: 109263 - DNA, 321 bp, Enterobacter aerogenes
atgtcatttggtagctacgaccttgtgagcctcgcagaagcacgagagaaacgagatacggcccgtaagcaagtcgcaaatggcattgatccggtcgaagaacgtaaagcccaaaagctggcacagcaactctcaacagagaactcattcgaagccatatgtcgagaatggcacgccaacaaagctgaccgctggacagtggcctatcgcgaagaaatcattaaaacattcgagcaagatgtgttcccgttcattggtaaacgcccaatcagtgaaatcaaaccgttagaactgcttgaagtattgcgacgagacgaatag

SEQ ID NO: 109264 - DNA, 1167 bp, Enterobacter aerogenes
atgcacatacccagccaacgtatacagaatgcgatgagtgcggaagaagctagtctttggtttgtgcctgctatgggaaacggtgatgttgcttttcttatgaaggcaccttcatcaattttgaaatcaataataaatggttgttctgtagaattcatcattggattaagaaatagtcttatctactgcgccatgaaaatacatgatatttcagatgccccagtgatgataactaaagtactacgtcatgaagatgatatatcatctttaataaagatacttgagtacaaaacaacacctatttttctgtttaatgaacttgatatttccgtatcatggtcaaatttaacaataaatactgatacatctcatctcattgaaaaaataataaaaatacaacacagcattgcgagaaaagatccaatcgcagttaaagaaacacatgattactttgataacctaaatagcaactctaatacgcctctcaataatgaattcatgtatactctcccctttacctgtgaagcatggacctcaacgcctaatcattttattggaatcactgaaactaaggccataaatatttctgataatgatgaaggcggtaatttcgagaatactatatgggcgtcattagaatcagtattcccatatacactacacgcaagccccaaagttaaaataggaaaaaaaacacgcgaactaacagatattcttgccttttatcctaatgcatcattttttattgaggctaaagatacatcgatactgaattcagcatcaataaaagacatgcaacgcagaaccagcaatctcaagaaacaagttaaaaaagccataggtcaacttgttggtgcagttaaatcgacaaagggtggatgcgatatatctgatttaaatgagaggcctatcaaacccgtattgaaacgcttccattgcattgtattaattactgaaatgaatcatcatggcgactgggacaatataacccatgaactactgagagcctcatccgaaacgagagagtatttccatttattagatctggatgatttaatttacttattgaaaagatgtaacggaagcgctgagctaattgatcttaacttaatgggccgatttaatacatttgtagagaacaaatcgatttttattagaatgcgatag

SEQ ID NO: 109265 - DNA, 594 bp, Enterobacter aerogenes
gtggacaaggattttgtgacttcagatgattttgtcaaactacttgaggaacctcaggagcaattatcgctggttataaaaagtcattacgaaattgataccttgttagatcggttgttaacagtttctattaataatgtggattcattagaaatgcggcgtattagctttatattgaaggtcgatatattaatcagtttaggggtgatacgtcctgatttcaaaaaattatttaataatataaatatgattaggaatgtttatgcacataatccatattctattttcgattctaaacaagcagaaaaatcaaaaaccattttaatgcaaatagatgaatctaggagtctggtaaaggaattcacggatcccacagatattcttgtatttgtgtttttgaatgcatatatatttttagagactgctttaaaaaaccaatacaggaaaatacaaggaggagtagtactaaacaagaggattcacaaagttctgggtacaagcacaccaagagttagtgaggcttctattcaatcataccatgcggaaatcgaaagtaacttgcaagagattttcccaaagttgtttggaaagtaa

SEQ ID NO: 109266 - DNA, 804 bp, Enterobacter aerogenes
atgtcgttacacataaaaatactattaaataacctaacttcgacaaataacgctgatttactaccaaatttaccgcaagtagagccacaaccaaatctctcgcccagcaaaacagaatgggataataagaaattatcaaatcgttctttgcttactgatgatgagagaaataaaatactctcgggcattgagaatagtaagataataattagttctccgactgatgttgcaaacttattagaagttccaacagggcagttactatatattttatatgagagaaaaaataattatcgaagttttatattaaaaaagaaaaatggtaacaatagaattataaacgcaccttattcaggattggctatattacaacaaagattgaaattaatacttgattatttctacagaccaaaaaaatccgcgcatggattcataaaagataaaagtattatttctaatgccgaaaaacacataaaaaagagatatgttgtcaatcttgatcttgaagattacttcggaacaattactttcccacgaatttatggcatttttaaaagtagaccttttaacttttcccatccagctgctacagtattagctcaactttgtacacatgaaggtaaattgcctcaaggcgcgtgtacttctccagtgcttgcgaacttggtatcagcatctttagataaacagctgacacatttagccaaaagaaagaatattacatatacacgatatgcagatgatattacattttcattcaaacaaaatggtatcaatgaagtaataaaattaagtgaattatag

SEQ ID NO: 109267 - DNA, 441 bp, Enterobacter aerogenes
atgagtgaaactgaaacatatgatatctttatctgtcatgcaagtgaagacaaagatttaatagccattcctttatatgaggcattatgcgacagaaatatcccaacatttatcgatcatgttgaaattgcctggggtgattcattaattgataaaattaataatgccttagctaaagctaaatatgttgtcgcaatactctctgaaaactctgtcgaaaaagaatggccaaaaaaagagttaaatagcgttttagcaagagagataagtaatggaaaagttaaattacttacactagtgaaaaaggaagatgaagaggcaatcgcagacaaaatcccgcttacgcatgataaaagatatatggtttatgatgacaatgcagattttatagcagatgaagtgcgtaagatgcttgataatcaggcaagcaataaccaataa

SEQ ID NO: 109268 - DNA, 291 bp, Enterobacter aerogenes
atgcagcatgatcagcgtggccgcaatcgctgccgcatccacggggatcataacggaagcgtactgcgtaaaacccagaccgaagaagtccgccgagacgatattaaccaggttagaaacaatgagtggcaggctggccgtatctgcaataaatcctgcagccatgacaaaggccagtgtcgtgccctggctgaaccccagtgcgagcagcatcgcaatcacaatcggcgtcaggatcagcgcagcaccatcattggcgaacaaagcagcgacagcgatttgacgcggtga

SEQ ID NO: 109269 - DNA, 726 bp, Enterobacter aerogenes
gtggaaaatgtgactatcaaagaaaacaaaaagacacaaacgatgattcgcatcgtattaatcctgataggtttgaccgctatcttcgcgggtctctctctccttagtggcgatatgtggcgcatcatacccgatgccgactcggaaaaaaccactgccggtactcttgttggtcttattgtatattcacccagcaaattcttttttgcgttgttatatatttttatcgcccctctaatatggcttttgcttattcgtaaaattaatattcgtcgcctgcaccaccctgttatccctgtaacgctgtttctctgcgcaggtgtctttgtttttttgcacccagaagtgacaccgggcgaagacttgagcattcagtacagtcgccacaatagttatcatacttctatgttctggcgagaaagaataactcgtatctatcttaataatacaattaaatacgaaacatttatcgaggctaaagattccagatgggattttagcaagcataatattaaaagtgcctggaactgtaaaacaatacaatactcaagctttttaactttaggattctatgaaagctggttcccgggtagcgatcctcaactgctggccaccaactgtagccaaattacggacattgaaggactctctgaagaaacactctacagtacccatcctatttcaactcaaaatgatcaagcgggcgtacagaaaaatgaacaataa

SEQ ID NO: 109270 - DNA, 687 bp, Enterobacter aerogenes
atgaacaataaagaaacaattctcaaacctgcattaagagtttggcttgcgctgtttggggttatagttttggcaagcgttttgagtgctattaatgggaaacacttgtatttgggtaacagagtcgattttttgttggcagaaacaggagaagttattattaatgaactgtatatccctgctaaggttttttttgctcttatcgcttcctttatcccgccgattctgtggctactgttcttgaacaataagccgcaacgcccatttttttccataatccttccgctgttactatttttatcagggctattatttttctttcttaaacctcaaatcattcccggcgaagaaacaaccgcctaccgctacggcctctctgatctaaattatcagactatccgttggcagaaaatggttcccggaaaatttattgatacacattcaaaatttcaaattttcctcgagtatctggaccttatggcaggggagacctccgacaatataaaaaatgcttatatctgtgaaactgaacgggagactcagttttatactttaactatcaaccaacgatggttgccggataaataccctcacattctggatgcccattgcagccaaataaaagaaatcaattcactgacggaatctaccctttcacaggcgcattggttcctgacaagagattaa

SEQ ID NO: 109271 - DNA, 696 bp, Enterobacter aerogenes
atgccagcaatggaaaaggcctggcagggtaaaaatggtttgcagtatctgaaaatgtcgggcgccggttgcacgataattgcgtcggccattttgcttggcctggatgtagccagggtgtatcaagaaagtaatacagaacaacgagaattgttcgttggtctttatagtgtaaaagtcctgagcgatctcgcagcgatagttaaagcgaatggtaagctgctggaagcgctgattgcccgctttggttgggaaaccgccgttgcttcgcgcgcaacatggctgggaagactggcgaagtctgcattctgtggactaggtatcgaatgggtaggattactggcttcctggcaagtatcgctgcttatcatgctcgttgattatgtcgcgacacaatactattctcgcgatgagctgcaaaagtggtttgaacaaggcatctttggcaatgcatgtgaaaaaaataccgatgattttactgcagaggacatcagtactgaaatagctcgctgccagcagtcattagaatatgcgctaaataaaatggcggagccgcaagaagagattaaacaagatgtaataattcaggagtcatcttatccactttataaagatccgctagtttctaaactagaggaaaaaaccaaacaggatgaatggaaaaagagatcaccataccctatttataagggttaa

SEQ ID NO: 109272 - DNA, 903 bp, Enterobacter aerogenes
atgatatttgatcgcctccctccattgcagactctgcgtgcttttgaagccgcagcccgtctctctagtatgacactggctgcaacagagctgcacgtaacgcatggcgcgataagccggcaaatccggaagcttgaagagcatctggggttaaaactatttttcaggctgacccgacagataatactgactcaggaaggggctgaatatcatcgcactgttacccgccttttgagtgagttaatgatggaatctgagcgtctgcgcagaaggaatcctgcaaaaagtttacgtgtcagtacaacggtttcatttgccagcaagtggctggcaccgcgtctgagccggttcaaacagagatatcctgaagttgatattcagctggatgttactgacagtaatgtggatctaaatgatggtcagatagatgcagccattcgttacggtcttggccattatcgcgacgtttcgtatgagcgtctctttgatgaaacagtgacccccgtctgtagcccgggttttcttaaagaacataatggtctgacagaaattaaggaactttcaaactgcgttcttcttcatgaatacagaatgctggcgaactgggaggcatggtttgcactggccggagaaaaaaaattttgctgccatcatggtcccttatggacccttggcagcatggcgactgaggccgctatacgtggcgaaggtgtggctcttggacgcagtactctggttgcagatgatgtagcagctggaaggcttgttgttccgtttccgcaatacaaacttaaggctgagcggggatacgatttagtttatcgctcggataatcaggattcatttaaaatacgaattctgagacagtggctctctgaagaaatgagtttgctggaagattga

SEQ ID NO: 109273 - DNA, 324 bp, Enterobacter aerogenes
atggaaagcttgtttgtttacgggacgctgggtcctggccgacctaatgctcatattcttgaaaagattggggggacatggcaggaaggccacgttggtggttcgttattagataaaggttggggtacagagatgggatatccggggatcgtgttggatgattccggtaatcgtgtacagggttttattttcacgtcagagaatttgcatcttcactggcacatactcgatgagttcgaaggttttgagtatgaacgggtacccgttgaagtcactctctctaatggctgcaatgttaaatccttcatatatatactcaaataa

SEQ ID NO: 109274 - DNA, 378 bp, Enterobacter aerogenes
ttgatagataaactcgatcatttagtactcacatgccgctcaattgagcagtgtatggatttctatactcgtattttgggtatggaggccgtaatgttcagcaatagccgtagggctcttctttttggtaaccaaaaaatcaatatccatgagtatggtaaggagattggacctaaggctcacctgccagtacccggttctcttgatctgtgttttatcgtggacaaatcaatccccgaggttctgttacatcttaaaggacataatattgatgtcctcgaaggccccgttacccgaacaggtgcaaaaggtgaaataatttctgtgtatattcgcgacccagatttaaatctcatagagctagcagtatacaaataa

SEQ ID NO: 109275 - DNA, 1308 bp, Enterobacter aerogenes
atgcagtgggtggacattgaggcttatcgattacaggaggagggacagaaggccgatacaggatggttgaagacgcttgagaaactggtcatcgcaaaactgtattttccggaagaagccatggatacgtcaatcgtcagtgtggttaagtgttccctgaccaggaaggcaaaagtcatccaggaagacagtgcaaagaaagacaataaaaagaaagaagcggtgcccgatgaccttattaacagttttttcattcaggaactgcgaaagctcgacgcggagtggaggcaaggagggggtggagccggttttaaagactttatcatggcgataacccgggataaccaacagcgcctcgatatacgcactgaagaaggcctggatttcgcctttgagaaactgttgcccacacagccaccagctggctcctggccttcaaagtacccgctggcattcagccagcagctggccgtcaatgaaacctggaccagaaatcacactgaaccgggtatttttgctgttaatggtcctccgggaacggggaagacaacactcctgcgtgatgtggtggccgcagtcgtcaccgatcgggcgagtaaactggttaaactcggagactctgcatttaaagccaaagacagcctcaaatacaatgacaggctgataccctattattcgcttcacccgtccctggcggggagtgccatcgtgattgcatcgtccaataacggagccgtggagaatatctcacttgagctccccgggatggaggcggtaccggagaatgtgtcagatcgcagcgattactttgccgggctggctaccgtaatacttaacaggcctgcctgggggcttctggcggcaagactgggcaataaaagtaacagagagcagttcgttaacacactgtggtggggaaatctgcagaaaagtgaaaaaggcgatgaagcacctcctgagaagttttcacccgaacgtggagaggggctgaaataccatctgaatttactgcgaccgccccggaaagtcagagagcctgcactgacctggactgaggctgtcacacgttttgaacaggcacaggcggtggaggaagccgagcgtcagcaactggtcgtcagttcagggctaacgaataaaattgagaggctcgaagaacaacgaagagaatgggaagaaaggaagcaaaccgcaacgcttcagattgaggaatgtcggaacgcgctacagactcgccgcgatggaaatgaccctgaccctgtccagtggagaacgggacgaactcgatcagcgcatccaccagcatga

SEQ ID NO: 109276 - DNA, 2055 bp, Enterobacter aerogenes
atgaccctgaccctgtccagtggagaacgggacgaactcgatcagcgcatccaccagcatgaaaaaaataaacccggccttctggctaatctcttttcgctggggaggatatcgaaaacatggtgggatcgttatcaacggctgacagacgaatcagatgctttgcgggcgacgttgactcagcaacggcaggaacagcagcaggcgcaattagaaaaacataatgcagactatgaactcaggagcctggagcgtgagctcactcaggtgatcagcaactgtcaggcggtctgtaaagagcaggaacagaataatacattgctgaagcaggctatatccgatctaggagcctcctggccggagcgggatgcaacagatgagcaaagggagttgtcagcaccatggcttcatgagcgctggagaaaggcgagggaagacgtgtttatcgcagcattagacgttcaccgggcgtttattgaaaataaccccgtaaaaatggccgccaatatagggcttgcaatggactggttaaaagggcgaaaactgaccgaaaaacaggcggctctgaccctcgactccttatctctggtcgtcccggttatatcaagcacctttgcgtccatgccccggatgttcagggatacaggtcaggaagcgataggctggttgctgattgatgaagccggacaggcacaacctcagcatgcgattggggctatctggagagcaaaacgcacggttctggtaggtgacccaaaacaactggagccggtcagcagtattccgtccactgtagagggggtgctggcaaaacactatcagatcccttcctgctggtggcccggaaaagtctcagcacagatactggcagaccagacgatggatgttggcacctatctgcccgacccggagtctgaacagatttgggtgggctgtccattacgggttcaccggcgctgtgatgaaccaatgttcagtatcagtaaccatattgcctatgacgggctcatggtccacgggaaaaagccgggcctggcggattttcctgaaagtggatggctggatgtgaaagggagaacatgcgaaggaaactgggtagcggaggaaggggtggcggtggaaaagttacttttggcgttgcgtcatcagcattcactcacacctgacgacgtgtttctgatctcgccattccgggattgcgctaagcagcttagtcggatcgcaaagagactgggattcaggatggacagaacgggcactgtacataaaacacagggtaaggaagctgcagtggttatcctcgtgctgggaggcaacataaaaagccagggggcgaaagcctgggcggcggaaaaacccaatcttggtgttttttgcgaaccaattgagtttacccatagcgagcgttttacaactgcgatacagggaatatgctgtacgttgagcccggctacgaaagtaactttcttatcaacacggtcgggggagtgccacactgtggcgtttgattttttccttactagtccgcccgacgtatttattactcagaatagcgagaaaacacgtgcgataatgcaggcagcctggtttggtagcgcccgcgactgtccaccgattgttcagctcagtgatactcttccgactacatgtgctggtgtgattaattaccagatgaattacgcgcggttggggagaatgattgcggatcatattcgacagcccacggaacaaggtgagtgctcaacgattataccaaatgtcgggtttccttggtgtggccagagtagtcagtccccggaaagtaacgccactttgaatatgctcattttaccgagtccctcgaccgatgctctgagaaaattgctgcctcatttctacaggacaagcgggattaaggtaaacctagcgatttacccttatgacgaagtatttaatctgaggcaggcagaaattatcataggtcagggagttacgaatgtcgtaaacggtgtaatggcgatctccgaggcagtacaatacatcaatgaacgtattatccatgaaaccggttcttga

SEQ ID NO: 109277 - DNA, 309 bp, Enterobacter aerogenes
atgcccgtagacaaattctgtcctcacgatggggctgttcgcctccaagatgacggtggcgccgggcggggtcagtccacttgccaaataacaaaaacggtgtacagtcagcgtgctgcttcatacaaacaccctgttcaacataccaatgcccagtcaagaaccggtttcatggataatacgttcattgatgtattgtactgcctcggagatcgccattacaccgtttacgacattcgtaactccctgacctatgataatttctgcctgcctcagattaaatacttcgtcataagggtaaatcgctag

SEQ ID NO: 109278 - DNA, 1599 bp, Enterobacter aerogenes
atgaaaaaaaatgtagagaattttgacacttttatcctagagcagaaagcttggttcgaaaagaatctggcagcagattttgcagaatcatgggatagcgttgtctggatatgtggaaaaaaaggttccggctggctacgtggtaatggtgttaatgtattgcgatttgatgagattaaccggctaaaaggaatcgacgaacaccatactgtatccgatacttatcagttgtttatgaaagccatactggtactcgtctatcgaggcagaaatcgcagcatttcccctgcagttgctgttgcaactctgattattatgaaacgctggtactgcgcgctgattaaattaaccgggcaaactcatccaatctatctgactacagatgttgtacgtagtgcgatggatactatgagtgcagcatccaagccaggtgatcctaacatagccaactataaggggcgttgcgttaagattgtaaaattagtaaatcatcacgctttcacattggtaacgctacaatatgtgtcagacgaaaattatactaaccggaccaatttgacccggaaagcccgggaaacaatagccctcaaacacaaggacagactggatgatacagccactgatggtgacgatgcacttattacaattcgaggattcctcaatatcgtgtcacttatcaagtgtgtagaaagcggcactgaaaagatagtgctcaattgccttctgctactcatcatcacgggttttcggtccgttgaagcattcaatcttaggcaggatgcgttggtcaaacgaaagatagaaaactctgacatcagcagacgtctacgcgataaagggttgccggattattttcttggcattcgctatgttggtgttaagggcgctggtgagcgaacacattgggtcgaacccttagctgttcctttagttgaaaacatattcaaatcggttaagtcgctaacatttgagttacgaaagcatctcacaaacttacgttcaaaaggatttgctgattatttaccggaggcgatcaatgatattgcaggtgaacttgttgaacttgatgatattgtagaacacatagcccaatcctcatcagagcttcggggtcgtgccggattacgtgataaagcatcaaaagcgttagcgaaacgaggctgtatgccggttgaagtcattctctttccaggcaatgaaaaaaggaaatactattcaaaatcagaccttaatctttaccttaaaaatgaatttggtgatagcagcgcaaatactccctgtactcacgcatgggtagaaaatggcaaaagatttgagattatgtatgaggatttattgttcctttaccccaaagggactatgacgttaaaaagatcattggggctaaaagcaacacctctaccactgagtaatgctggcgtaaaccagtttctcggtaatgtagacggctatgcttcggtcttcagtaaatacagacttctcgaagatgacggtcgccctacccagcttcgcactcacattcctcgtcacaatataaacacttttctcgctattcagaaatttttgcccgcatactttcctgtattgatgcaaacttag

SEQ ID NO: 109279 - DNA, 1176 bp, Enterobacter aerogenes
atgagagtaatcatagtagatgatgataaagtccgcagtgagagtataaaaaattggcttgttgcagtaggtattacctcaagtgattttgtcactattgtatcttgcacaagcatggctcgaacttcaataaagaattttttctacgatattttaattttagatgtagtgttacctaaaagagatgatgacaaatctaaatggatcaatggcattgatcttttgagctacattaatacatctccgcttgccaaaaaacctagcaaaataataggaatgaccgcctactccgatgatatacaaaatttcaaagctgagtttgaacgttattgcttcacggttgttgaagtggttaaagacaatgaggaatggaaaccaaaattccttaatgttttcaattatcagtcatcatcaaaacttgccagtttagatgacgaaaaaccgatcattgctatgacagtacacggtattagaactttcgggaattggcaggagaagttaagaacactgattcaaaacagagcatcatatatcgattttcaaacgtataaatatggctattttgcaggtgtcaacttcttcatacccttcattagaaatactcaaataaaaagattaaaagcaaaacttacagactcattcaaaataaatcacaataagcatttcgtttttttcgctcatagctttgggacatacatagtagcaagggctatcaatgaaataatagaaaatggagatattgtaccacaattaacattggtacttgcaggtagtgttcttccatcaaactatgatttaaataccatacttgaccacaataaaaataatgtcattgtaaatgattgtggtaatagtgattatgtcctatggcttagtgaggcacttgtaccatccacaggcatggctggtagaaccggcttttatggtgtaagcaatagtaggtttgttaatagatatcatccagggggccatagtcattactttgaagttgatggcttcatggaaaaatattggctccctatactttggaatgatacagtgataggcaacactgatattagaccattttcattttttgagcatgggatacttgagcaattggttgttctttcgcgaaaattaaaacccctttacccattaatattcgcatgcttactatactttgctttcagataa

SEQ ID NO: 109280 - DNA, 453 bp, Enterobacter aerogenes
atgattaaactactaatagttgaagataattcacataagcgtgagaaagttattgattatatccttgaacttttaccagatgctattatagaccaagcacattcgtttagctcaggaagtaaattagcgatagataataattatgacacaataatacttgatatcagcttacctacatatgacaaaaccgaaaatgacaccgggggtaggaatagagcatttggtggccatgaaattgccagaaagataataagaagaaaactcagaacaaacatcatatttattacacaattcgattcttttagtgatcaagatagatcgcattctatagattcattagaggaactattaaaaaatgattgcggaaataattttatcggcctcgtccgctacgatagttcaaaatattcatggaaggaaacgttaagcgaatttttgggaattaagtcatga

SEQ ID NO: 109281 - DNA, 924 bp, Enterobacter aerogenes
atggatcgattcgacgcgatgcgagcttttgctcgtgtggtggaggcgggtagcttcacaaaggctgcccaaacactgcatatgagcaaaactacagtgacgcagctcatccaacaattggaagcacgcctgcgcgtcaagttgctccatcgcaccacccgtaagctcggtgttactcccgatggcgtggtgtattacgagcgtgttgtccgccttttggcagacattgaggatgccgaaaccagcttgtccagtgcaacgatcacgcccagagggcgcctccgtgtggatgtgcctagtccgctggcctgtctcatactagtgccggcgctgccagattttcacgcacgctaccctgatatccagttggagatgggcgtgagcgaccgagcggtggatctgatcagcgacaacgtggattgcgtcttgcgtggtggtgaaatcagcgatcaatccctgatcgcacggcatgtcggcgatttgcaaatcgccgcctacgccgcaccaaattatgtgaaacgcctcggcactcctacgaatccgcaagagctggtaaataccggccatcgcattgtgggattcctgtcctcacgtaccggtaagattgctccttgggaaatgtaccgtgatagtgagcgtattgaaattcggagtagctacgtgctcgcagttgatgatggcaatgcctatctcgaagcgggtttagcagggatgggggtggttgcactacccacttatatggcggcagtatatcaggcatgtggcgctttgattccgctattcgaacaatggcggtttaatcccatgccgctgtacttggcatttccaccgaaccgccatgtcagtgccaaactgcgagcttttattgattggatcattgagctgatgcagcatcatgtaccgaatgtcagtaaccatcaatga

SEQ ID NO: 109282 - DNA, 390 bp, Enterobacter aerogenes
atgacaacacgcgaagcagtttttcccctcggtcggcaggcgctttatgagcgcaaccggtattcaccagccataaaatccagcggattcttgtttgtttcgggtcaagttggcagccgcgaggacggttctcctgaacctgacctcaaagcgcaggtccggtcggcattcgataacctaaatgctgttcttatggcagcgggctgcacattcagtgatgtggttgacaccaccctctttatcgtcgatccggaatcaaacctcgacacggtttggagtgtccttccagaatactgggggaaagcgccttatcctactttgacaggagttggtgtgacatggctatacggattccagttcgagattaaggtcattgccaaactaccttaa

SEQ ID NO: 109283 - DNA, 414 bp, Enterobacter aerogenes
atgaaactcttggaccaagcagggccggactccctcagtgaaagtcttgaagacgattcatcattccagctaattccctctaacggaatctgcacacgactcggtgataaatggaccgtacaggttatctggcgtctggccatcgcagatgatcgtcgcctgcggttttcagagatcaaacgtgaggtggaaggcatcacacagcgcatgctgacgttgacattgagaaacttggaacgagatggtttggtcgaacgccactattttcccgaagtgcctccgcgtgtggaatatgagatcacggagatggggaaaagtatgtttcatgcgctggaaggtatcaatatgtggatcagagaaaaccttccgcatgtagagctattgcgtcaaacctacgataccaaaaagcgttga

SEQ ID NO: 109284 - DNA, 888 bp, Enterobacter aerogenes
atgaacaaagtacatcgccctattctgattttcggagccaccggccggcaaggcggatcagtggccaaggctctgttgaaggtccgctggcctattcgagctcttgtgcaagacccgttcgagcctgcctcagttgcgctgcgtgaggctggcgccgagctcgtgcaaggatcattggaagatgccgaagtcatcgcaggagctatgaaggatacctacggcgttttcagtgtgatgccagccaacctgtcggcagaagatgaagtccgttacggaacacgcgtcgcagatctggcactaagaagccacgttgatcatttcatctactcttcgggcgcaagtgctggtgacgaactgacaggcgtcccgcgcttcgacgccaaaccccgtatcgaagcatatatccgcgaactgccgctggctgccaccataatccgtcccatgatcttcatggatatgcttgttcgacctggctttggccttgatgaggggcggttggtttccctgatccatcgcaatcattcgatccagctcactgccgtacaagatatcgggaagatcgttgcagcgatgttcttagacaaggcgcggtttgccggcaagacgctgaagatcgccagcgatcgtgtgacgggccgtgaactggaagctgtgttctcggaagcagcaggtctacccatcaaatattttcgtttcccagatgaagttctgtcctccaacgccgacctagcccatatggcatctagtctgcaagatggccctctatcagagcaagtagatctcgatttgatgcgagagatcaatcctgaacttgtctcgttgcgtacatggttaatgggggtgggacgggacaaacttgaagaatcgctacgcaggaaacatacatag

SEQ ID NO: 109285 - DNA, 726 bp, Enterobacter aerogenes
atgaatcaagacgaaattaaggcagtattcgatcaacaggccgccaactatgatatgcaatgggccaaaacggaagcaatcaaagattgcttgcacctccttcttgaatcgttgtttgccgagttgcctgcggacgcacgaattatctgtgtcggagtaggaacaggagcagagttggctcaccttgcttggaagaatcctgagtggaggtttacagcagtagagccttccggccctatgcttgatggttgccgacaacgagcagaggaggacggatttacttctcgttgttatttccacgaaggttatcttgattcgctcccaaccattgagcttcatgacgcggccacttgctttctagtgtctcaattcattctcgaccaccaagagcgatcagggttctttcgagaaatatctagcaaactcaagcctggagggattcttgttagttctgatttggcttcggatgtggcatcaccagaatatgaagtgttgcttcgcgcctggataagcatgatggcatcgtcagatatttcaccagaggggatagaccgcatacgcaaagtgtattccaatgatgtcagcgttcttccgccaattaaaattgcatcaataattgaggctggaggtttcgaaccttccgtgcaattttttcaggccggattgattcatgcgtggctgtcaaaacgcgctccgagcaatttttccatcaattcaactgtttga

SEQ ID NO: 109286 - DNA, 960 bp, Enterobacter aerogenes
atgaaagcagcagtttatgacgcgcctggatctcccggcgttttaaggtatgccgacataccagccccaacctttgggcctaatgacgtactgatttccgttgaggcgatatcagttgaaggtggtgacctgattaatcgccgtttgactctaccacctcagccttcctgggtagtcggatacgcggcggcgggaacagtggtggcagtcgggtcgaatatcacaagccgccaagtcggcgatcgcgtcacggcgtttgatatgcagggctcgcatgctgccctctgggctgtgccagcgagtcgtacatggcgcatacccgatggagtggatgcaacagacgcagctgtattaccgatctcgttcgggacggcgcatcactgccttttcgctcgtggcgaactcgcacacggcgacactgtcctcatccaagcggcagcgggcggcgtgggccttgccgccgttcaacttgccgcgcaggtcggtgccactgtcatcgctgtgacaagtggaactcagcggagcagtaagctgattgaagtcggcgccaaccatgtcgtggatcggtctgcacatgacatcgtggacgccgttcggcagatcacccatggagctggcaccaatctcgtcatcgatccggtgggtacgacgctgcaaagttctcttgctgcgctggctccagaaggtcgtcttattttcgtcggcaatgccggtggcggcgatttggtcgtcgatctgtggccagccatgcaggccaaccagacgctctcgggcgtattcatgggaccgctatttgagacccctgcggtccgctcaaccgtagatgatttgttgcaagctgttgctgacggacgcatacgcaccatcgttgaccgaatattccctctggcagaggctgcggcggcccatacctatgcggaaacggccaagccgctgggtcgcgttgtcatgagaccgtga

SEQ ID NO: 109287 - DNA, 156 bp, Enterobacter aerogenes
atgatttctctgattatggagtttaactttccacctcaaaaccttgcggaggtatttggtttcttcgcagtgatgttcattgtgatgctagccttttatatttgggggcagtggctgcacagcatcggacactggatcacacactttgaatattga

SEQ ID NO: 109288 - DNA, 2109 bp, Enterobacter aerogenes
atgtctgcatttacgattcagataaaaaactgcaacagcatcgaaagtgctgagattcggatcaataagggcacgcttaatataaagtacggtcctaatggattggggaaaagctcaatagcgaaagcaatcctagcatccgtgagcgatgatggaacgcttcaaaaattgaagccctttaaacatcgtgcgtttgcagggcagtttgatccgtctgtggttggggttgaagatataaagtcggttttggtttttgacgacacctatgtgtcgcaatttgcattccagcgggatgaagtcctcaagaatagttttgaaatattcatcaagacagatgattttcttgctgctatgcaggagatagaagcactattccaaggaattaaggcagccttcgacggaaatgagaacttgggcaatgctatatcagacctgaaagaacttcgtgatgcatttggagttacaaaaacgggggcgctttccaagtcaagcaagggatataaagcatttggttccggaaataaaattgcaaatattccagaacatctcaagccatttgaagaatttataaaaagtgatcaaccggcgacgtggatagcttggcagactaaaggtaattccttcttggaattgtcggataactgcccttattgttcttctagttttcaaggtactgataagaaggacgtggcgcaagcagttgccaaagaatacgattcaaagtccgttgagcatttgagtgcgttacaggcaatcattgcaagattgggaaaatattttgatgatgcctgccgtgagagcttggagaaaatcacaaaatcaaaggttgagctttcgttagaagaaactaatttcctaagcgcccttagaggcgacgttgaaacgctcattgcaaaactcgaagggttgcgatctatctcgttttttgcacttcgagatgttgagaaaattgaagacgaaatcagcaagctgagaattgatctcggccttcttgggaggcttaattcggcagatactaaatctgtggttgatcccgtaaatgctaagctccaagagttggcggagaaggtgggggaacttaaaggtaagatcaacaagcataaaaagctaattgagaggaccgtcgcggaaaatcaagatggcattaatggctttctgaagtcggctggctacaaatacagcgtagttatcaagtctgaagccgagtcttacaagatgaagctggtacaccaagaccatgacgaacatattgagacagcggcccagcacctaagctatggagaaaggaacgccttcgctcttattctattcatgtatcaggttctgagggaaaaacctgggttggcggtcttggacgatcctgtctcaagctttgataagacgaagaaattcgccattctgaacgagttgtttagaggcaaggcaagtcttcgtgatacgaccgtccttatgctgacacatgatattgaacctgcaatagatgttatacgtggcgttaagcgattattccaacatcctaagccaacggcatattttctggcgtcgaaagcgggtgtagtgtccgaggtggagattagagaggaaaatattcaaacattcgcgcagatatgtagtgataatattcacgaacttgatgatgaagttataaagtgcatatatttgaggaggcattttgagatcatcaatgatctaggtgcggaatataattatttggccaatcttttacacgctagggacgtgccaattctaaaatctgccgtgggcgatatcgctatgaatgctgaacagattgcgaacgccgaagctggcatcaagaaattcatcccggcttttgattactcggcggtgcttgctgcgattaaagataaagcagagatgaagcgtcgcttcacagaagctaccgttgggtacgacaaaatccagcttttccgcatctttaaggaagtgcatggttccgccaatggggagcaggatagcattcttcagaaatttgtgaacgagtcattccacatcgagaacgaatatgtgatgcagctaaatccccacaagttcgataatgtgccggagtatgtcgttttggaatgtgatagggccattctggcgtcttaa

SEQ ID NO: 109289 - DNA, 699 bp, Enterobacter aerogenes
atgacgcaagcagcttggacacgcgacggtcggccggtagatgcggcttccattcccggcgccgagtgggaggcgttgaaacagacggcgcagttaggtgacttcgtcatgccgtgctgcaaggcaccggcagtactcaagacaagcatcaatggtttacctttcttcgctcatctgtcggaggagtgcggcactgcgcccgagactaaatggcataagtcgggtaaggccgcagtgatggccgccttaaccggcatgggtatcgaaaaccgtgacgaggtgccgggccgatcaccaagcggcgacaagtgggaggctgatgttctcttctcggcttccggtcgcaccatcgtcatcgagctgcaacgttcctaccagcatctacgcgacttcacgcgtcggcaggagcggtacgctgcatcgggcgttgagtgctactggctggttcgcaaagagacattcatgaccttaggaaaggccacgtcacgcctattgttgaagcgtgatttcggcaacgtgtttccggctagtggaatcggtactggcatgctgcccgagttgccggtggcgatgctggacaccgagggcgagcaaccggttcagttcggcgggtttaagaccgcgactgtgcctgtgtggttggctggcatccttgatggtgcataccaatatcgcggcggctcttggaaccttaattaa

SEQ ID NO: 109290 - DNA, 189 bp, Enterobacter aerogenes
atgaaagacagaccacatagagaggccatggccgagtacttccgagccgatccgacctatgcagcggagttgcttgccgaagtccgtcgtgacggcaacccggacgagctggcaattctgttgcggcagatggacgaggcgttcgggagcgactgcaaacgttcgggctctccggtgagacaactatga

SEQ ID NO: 109291 - DNA, 825 bp, Enterobacter aerogenes
atgggcaatgtaacaattattaccaatgctattgggcgttttgccaacgccatgcggctctatggtgaagccttcatcagatatcgagggctggcagcaatcgaccgtgaagaggctatccacaacctcgaccgcgcatttgagcaaaatcttgagagttttcatacgttatatgatgtatcgcaaggggtgtttgactttcatgttcatccggataccagtctcctaattgctattcgtaatgctcttcatcatcgtgaccatcctttgttccatagtcttcttcagactatttggttggacggggagccagagcgtctgcttggagcggagtatttaatggctaggcatcgaacgacgggtggcaatcccccgccgatgatgcacttgatcaagttggaagatatatacagtcgcctcgacccacgtcgtgaatcggtgcacataaatccaatgggtaagggcaatgctttatctagatttatcactctggaaaatggccttgccttcgagagagtgtgggccaaagcaaaaaaagatcgctatcctaccaagcaggtgtatttggacttgttgccgatatttaattctgcggtttcgagagtttttgctgcattggatacggctggagtgccgtttcaagggtttgatgcaaacgcctataaatctacatttattgatgaattaaagacagaccttcaacatttcgatttctttggtctgcgtatgcatgcgctacagatagaattaggcccgaagttcacaatccaagaggcctctatcagacggggctgtacctacgaaaaggtgatggaggacgaatag

SEQ ID NO: 109292 - DNA, 900 bp, Enterobacter aerogenes
gtgagcaagtatgacttgactcacgcccggcacgacccggtgcattgtctggcacccggtctgttccgtagcctcaaacgtggcgaacgcaagcgtagcaagctggacgttgtatatgactacggcaacggcaagcgtatcgagttcagtgggccggaaccgctgggggccgacgatctccgcattctgcaaggactggtagcaatggctggaccttctggccttgtgctttctcccgatcctcagacagaagccggtcggcagctgcggctatttctcgaacccaagtgggaagccgtccagcaggatgcgatggtggtcaagggtagctatcggtcgctggcccgtgaggttggctatgcagatatcgacaatactaggccagtacgcgattgcattgagaggctctggaaagtctctatcattgcgcaaaatggaaggaggcggcagggcttccgtttgctgtccgagtacgcaagtgatgagcaggacggcaagctgtatgtggcattgaaccctcttattgctcgcgcaatcatgggtgggcagcacatccgcatagacatggccgaagttaggaagctacagaccgaccccgcccgcctgattcatcaacgactatgcggctggattgacctcggtaagtcggggcgggtagagctggacacgctatgcggctatgtttggccggatgaaccgacgaacccgaataccatcaaaaaacgccgccagacggcacgcaaggcgctggccgagcttgctgccgtgggttggaagctggacgagtatgctaagggcaaatgggaaatcgggcgacccaaggcatccgactgtaacgctgctcccccctgtttaacggcaccccaccccctgtttaacagtacccaaccccctgtttaa

SEQ ID NO: 109293 - DNA, 234 bp, Enterobacter aerogenes
atggatcgccgagtgataatctccggcaaccagaatatccagcacggtatcgatacgttgggcgagcaggcgggcattcagatcagacatagcattatcctggttacaaaaatgaatgaaatcaatgatgcaaaaaacggttgcaaaagagaagcgaaaaaaacgcacatccttgcgcagctggcgatattcactcaaaacgagaaatgcatggcccctgggcaggggccataa

SEQ ID NO: 109294 - DNA, 651 bp, Enterobacter aerogenes
atgccacttgaagcgcaggccagccttttgagagtcttgcaagaaggtgaagtgttgcgtattgggggcaaacgcccgatgaaggttaacgtcagaattattgcggcgaccaaccgggatctgaaaaaagatatcgatcatggatcatttcgccgtgacctctatttcagacttaatgttattagcttgcccattccgccattaagagcaagaaaagaagacctaaaagagcttgtagaatggttttgtgaaaaaatctgtcgagcactcaatcgaaaccgcgtgaaattttcagattcagctctcagtcttatggaaaactacgactggccaggtaatgtgagagaactagagaacatcgtcgaacgaacaattaacctcactgaaaatggtgtaataactgataaagacctacccgaggaattacagacttccatttctggcgccctggctctacatgatgcacgcacaaaaaactataaccttaaagatagcgaaaaaatgattattgaacgttgcctgatggagaaaaaaggtaatctgaggcaggttgctatcgcacttaatctctcacgtggtgcactttacaataaattaaagcgttacgatattgaggcaaatgaatatcgaaaactcaatcctgagtgttga

SEQ ID NO: 109295 - DNA, 930 bp, Enterobacter aerogenes
atgaccagaaaagtaataatattagcaatatctatccttaccagcctggtgacactaccatgccgggcagatgggccatcaccactcacggctgatgaacttcaaaagatagctaaagatgatcgtggctttgatgattatgcaaagagagtcattattgccgggccggcaattatttcactaaacggcattgccgaactgaaccttccggaaggttatatttatgccgaaaataaaataacctataacaagcctccacaaaccaggttagagcaaacttgcaacaggtacctggcgctacgcggcgccagcgaaaatagactatgtataaaaatatccgatgtaggttatttaaggttatctgacgaactgtttctgttgaaagaccaggctgaacaactgcagcggaaagtgcctccaaaagctttctggcattttcctgagacgatcaactttaactggctacagaaacccacttataacaaacaaaatcacaccttatcatgggcgtatcactatatttatgataataaaaccataaaaaaccagcgcccagaaagtttcgtcgatcaagaaatcagcatggtcatgttcgggcagcgccacatcatctggttagtcaatggcagctatgattcagcggaaaaattccagccacaattagctgactgggtacaaagaataacattttacgatcaatttaagtatcaggaagataaagctcccacctgttatggactcgcaccaggggatagcgcgttagggggcaatgcctatgactattatgccgacccgcaacgctgttttccttacccaatagaatatttaattattgatttacctaacagcaacgatggcaatgataatatttcgaggtttctttccaccagaagaaatttggtatggactaaaattacaccgagaggctaa

SEQ ID NO: 109296 - DNA, 642 bp, Enterobacter aerogenes
atggatattaaaaaaaacaattattttggactgctatgtattctgtttcttaccgcctgcgataacgcacagccagacgccgggtacccggttaccaaattgaatgaacagcagtggcttccggaaattcaaaaacgttttgacgccgctaatcctaatggcaatcaggcgatatgtattattactcaaaataagctacaaacggatttttccgaagcgttgtcaccaagcgctgggacgtcctggtttgttcagcacgatctgcttgaagaaaaaattaaggtaaatgaaaggggagtcaccgaatactattaccggctcactgataaaggcgcatccagtaggcctacatggcctaatagctggagaaccggcctgtgcttcggcagcgtacaggtggaaaatgtaagtcgtataactccgtttgatgatgaacctaccactgaggtcgaatttatttaccacctcaacaacgtccccgattgggcgcaggagctcatgccacagtttttccccaatataaaagaagggaaaatagccggcagcgcccaatttgatatggcggataaaactcacttacgctgccaatccggtatcagcaatgaatacgtcgaggaagacaagttcttcaacgcgaaatga

SEQ ID NO: 109297 - DNA, 678 bp, Enterobacter aerogenes
atgtcatttaagaaaatactctgcgggttctttatctatacgctatgcggctgtaatgatcagcaatatgtgtctgagatcaattcggagttggggatctgggcaaacaaagcccactgcttcgctattcgtaagcaggatttttcatttcccaaggatatcaaacaggctttgacatcatcagacctggccacaagcatcgttaaaaaacagccttcagataccaaccaggttaaacagacgctggacagttttgtaaatctagggctcattaccagacaatccatcccctatgataatactcaagacctaatcattaaccgctatacgctgacgcctgaaggacgtaaatactggcagaaaaaaacgtcctccttctgcttcggctcaatcaaagcgattaaagttaccgatgtaaaagatgggcaagcttttcatcatcaagttcgaataatagactataactatcaaatagagaatatccccgactgggctcatcagaataccttctatcagatatacggtattaatcctgacgactatagcgaccgtattcattcaaccagcgctatctatgataaagaagaggcccgctatattgcgctgcaatcctcccacggcataatccgggaaggatttttaggttacccgcaaacatcgtggccagaaaataaataa

SEQ ID NO: 109298 - DNA, 1389 bp, Enterobacter aerogenes
atggggagtaagtggaaaacatcttttttaaccgaccattacattattagctcaggtctttccaagccagctaaagactttggcacgggttacccgttcttatcctttaaggatattttttataattatttcctacctgactcacttacgcaattagtgcagagtactgataaagaaagagccacttgctcagtaagacgcggtgatgtttttcttactcgcacaagcgaaacgatgcatgaactaggtatgagttctgtagcattaaaagattatgctgatgccacgttcaatggcttttgcaaaagattgcgcccgaaggaatcttctgaattagagccagagtatgttggttattatttgcgtagccctatatttagacagggcatgcttgccttttctacaatgtccacccgagctagtctcaataatgaaatgattagtcggctagaaataagttatcccgaccgtaaaacacaaaaaaagatagcaaataccctactttctcttgataaaaaaatagcactatcaagagcaatcaaccaaaccctagaacaaatgtcccaaaccctgttcaaatcctggtttgtggatttcgacccggtgattgataacgtgctggatgcgggaaactcaatcccggaagcgctgcaatctcgcgccaaactgcgtcaaaaagtccgcaatagtgcagatttcaaaccacttccggcggatattcgtgctctgttcccggctgaatttgaagaaacagagctgggttgggtaccaaaggggtgggagagcgtgactttcgattcattctgtgatttgattcagagtgggggaacaccttcaagaaaggaaacatcattctggaatgaaggtacaataaaatggctttcatctggcgaagtgaaaggaaaaatagtattagatacaaaagaaaaaatcacagatattggattactaaatagctcagcgaaattatgggcaaagtatacaaccgttgttgcaatgtacggtgcaactgcgggagaagtgtgtcttattggcgataagatgacagccaaccaagcatgttgtggattgtattcagaaaaatatccattctatgtctataattttgtcagcgataaagcatatgaattagcatcaaaagctacgggctcagcgcaacagaatcttaataaacttataatatcctcaacaaaatttacacgtccctctaatgcgataatttctatatttgaagataatgtagccccattatttatgaactggttttctaatacagctgaaaataatactttaaccgccctccgcgacaccctgctccccaaacttatctccggcgagctctccctggaggatctcccggatttagtaacccaaaccgaacccgcttaa

SEQ ID NO: 109299 - DNA, 141 bp, Enterobacter aerogenes
atgcgaaattataaagtcatcacgccattgtttccgacctacgaccaaacccgagcgatgatgaaagccgtaacaggatgctctgtaaaatcggtccgtaatatgatctccgccattcaggaacagaccggcaccccgtag

SEQ ID NO: 109300 - DNA, 858 bp, Enterobacter aerogenes
atgcaattcgactatttagcaaagcatatcgataacgatggtcttgccagaattaatgctgagacgagaagtaatacagataaactcacgcacgcgggtaaactcgtttatgtaaatgatgattattgcgaaataacccgtaactactcatcatcttatggcgctaacattttattagttgcgttattctctcccattattcttgtgatagttatcggagtcattgtttttttatatgaaataatttttgattttgaatggtatattaacgcattttggggaaatgagcaggaattaaatagcacactcctttttcattttgcaattttactttcaatagccttatcctttattttctcggccatcgtaaattacgcttttttcgcacctcgccattatccaattcgctttaaccgtaaaacaggaaaaatctatgtttacgagtatactctgtctgatttaattaagaggcaaccctatacatttttccttcacagccctttttataaaaaaccaaaaccagaatgcaaggaatttgactggagtgatataaaagggagctattctctaaattataacgcaataataaactgtcacgtatatgaaaaccacagcatcgttgactccttcatcctcacctcggatgatacaggaactgaaacgatgttgatgaataactataaactatggctgtggatcagtagctatatgaatttcaaagacgagatgctagatatgaccgtcaatcctaacgtgggcatttacgggcgcaaagtcgaatggcctgaggtgatgcttaaaaaatctaccgcgtcatcgttagaagaatatgaaaaaatcgccgaaacggtatcatag

SEQ ID NO: 109301 - DNA, 693 bp, Enterobacter aerogenes
atgtctttaaacgattcaaaaatccgtaacttaaagtccccttccaaacccgtaaaattgtctgattcacacggtttgtatcttctggttaatcccggcggctcacgtatctggtatctcaaatatcgcttcaatggcaaagagtcccgcgtcagtctgagcgcgtatccactggtttctctcgctgaggcccgccaacagcgcgacggtatccgtaaactgctggcacagaatatcaatccagcacaacaacgcatgactgaaaaagccgccgcatcaccggaaaaatgctttgaggccgttgcggtggcatggcataaaaccaacaaaaagtggtcggctgactatgcagagcgcatccttgccagtatgaaaaaccatatctttccggcaattggtcacatgcccgtcacactgctgaaaacgcaacatttcacggcgttactgaaagttatcgaggataaaggctttctggaagtcgcgtcccgtacccggcagcaactctgcaacatcatgcgttacgccgttcagcagggactgaccgaaaacaacccggcgctgcatctggaaggcgtcaccgcgccgccggtaaaaaatcattatcctgccctgccactggaacaattacctgaactgctccggcgtattgatgactatcagcagatacagactggccggattacttcggcgtga

SEQ ID NO: 109302 - DNA, 828 bp, Enterobacter aerogenes
atgaaagaagtcattgttgttattggcagtggggccattgcccaggcgattgcgcgaagagtcggcgtgggtaagcatattttgctggcagatatcaaatccgaaaatacccagcaagctgaaaacatcctgtcccgcgccggtttcacggtcagtacagcgattgtcgatattgcttgccgaaaatccgtacaggatctagtcgagatagcgacccgacatggccaaattaaaggggtaatcaacacggcaggcttatccccttcacaggccaaagcacaggatattctgcgtgtggatctgtatggcactgcggtggtatttgaagagttcggaaaagtcattgcaccgggtggctccgccgtggtgattggctctcagtccagccaccgcctgaatattgatgcgctttcacaggcacaggctgatgcgctggcaaccctgtcaccggaggcattgctggaactgccgctggttaaagaaattgatgacagcctgtatgcctatcaaatctctaaacgcgggaatgcgctgcgggtgatggccgaggccgtaaaatgggggaaacgcggggctcgcatcaactgtatcagcgcgggaattgttttcacccctctggcctacgatgaactgacaagcgctgaacgtggcgatttttaccgaaacatgcttgaaaagtcacctgccgggcgcggcggaacgccggatgagattggcgcgttagccgaatttctgttcgggccagcgggaacgtacatcagcggcagcgatattctgattgatggcggcgtgacggcctcttataagtacggagaactccgcccctga

SEQ ID NO: 109303 - DNA, 1149 bp, Enterobacter aerogenes
atggataacttcagtttttataatccgacccgtattgagttcggctcagacaaagaaaagcttattggccagattctggctgaacataacgtcaaaaatgtcctgctggcttacggcagcgagcgcatcaaacacgatggcttgtttgcgacgattagccagagcctgacgcagcatgggatccgctatgttgagtttggcggcattgtcagtaacccgttactctctaaggttcgggaaggtattcaggcggcgtgggaacatcaggttgatgcggtgttgagcgtgggcggcggctcggtgcttgatagcgccaaatccattgcagcaggtaccctgtatgagggggatgtctgggatctgtttattggtaaagggcagatcaatgcggcgttaccggtattttcgattatgacgcttgcggcaaccggcagcgaaatgaacagcggcgccgtcatcaccaatgacgtcacccgggagaagtttgctcttcaatctgtacatacatttccgaaggtctctgtcgtcaatccgacgctgatgcagaccgtttcccgtgattatctggtctattccgccgccgacattatcgcccattcgattgaaggctatttcaccgcagcggtacaacccaaaatccagtcgcgtctggttgagtcagtgattgccacggtactggagacaacagaaatgttgttaaaagatccgggagattacaacgcccgcgccgaatttgcctgggcgtccacgctggcgctaaatgggctgacttatgccgggacctcgggcttcagctaccctaaccacatgattgaacactcactttccgcgctgtttaacgtcccgcacggggcgggattgtcggtggtcatgcctgcgtggatgaagtggtatcacagccaaaacccgacacagtttgcgcgctttgcccggacgctatttggtaaaggaaccgcagaagaaggcattgccgcgctcgaagcgtggttcgataaaattggcacaccgacccgtcagtcacagttaggcattacagaggccgatatgccagccatactggaaaacctgaaaggaaatacccgctggtttggcctggcggagacctatactcaggaaacgctgaccaccattcttaaactggcgttataa

SEQ ID NO: 109304 - DNA, 963 bp, Enterobacter aerogenes
atgattaatgaattgcgctctatgacgacgtttgtccgtacggttgagctgggaagcctgagtaaagccgcagatgctcagcagatatcaccccaggcggcgagcaaggccttaaaacaactggaaacgcatctgggggtgaggttgttccaccgtaccacgcgaaatatgtcattaacggaggagggtcaacgtttctttgaagcggcaaaacctgcattaatggggctgcaacaggcgctggcgacggtgcaacagacgcgcgaggagtttgccggaccgttacgtatcgtcggtccgcgttcagttgttcagcaggttattaagcccgtgctgattgaatacagccgactctacccggaagttcagcccgatgtgcaacttgatgacgggataactaactgggttgagaagcgagtggatgtcggttttcgtatcagcgtttcgccgcaggaagggctgattgcccgtcgcttgttccccctacagttgatcatttgtgcttcgccagcctatttgcgtaaatatggcgtaccgaaaacgctgcacgatctcagcgcccaccggtgtagcgtgtttcgccatgccgcaaccgggcgcctgatcccctggacagtgaagtccggggacaatgtgcaggatcatcatgttaaccctgccatgtcgaccaatgatgagatgctggagttacatgctgtattgatgggagaggtcattgcgcaactggccgggccgacggcagcgcaatacattcgaacaggtcagcttgttccgctgttacctgagactattaccgatatacacagcttatttttgtattacggaagtcgtgtcgcacaaccgctcagggttcgccgcttcatcgaccttgcgattgaacgcttagccaacaggcaggacgtggtgttatcagcagaggaaatcagccttgcgcatattcaggggacaaccagttactcatag

SEQ ID NO: 109305 - DNA, 522 bp, Enterobacter aerogenes
atgattttattcaaactacctttatttatatcaggaatgttgctctataaagccgtagcagagaacagtaagatttatgttatggttgcattgctttccccactcgctgcatttttaatgggttactttacttcacctatcaggatgatcattgagattatgataatccttgggatgtcgactcttctgatgccacatagtgagaaatcgcctctaaaaggtattgtcttcctgggcagaaagttactttccgcccgcttcagccagttcctcggcgacgtatcttattcggtatatctgttgcatttaatgattgttattccgttgatcggatggcttgttcaacatcagacctatgtgcaacttcctgcattgatccgttttgttattgctgcagtgataattttaccaataacttatatcattgctataaacctatacaaatacattgaaaaaagaggcattgcattggggcgtaaaattataaaacctaatagcattaaggttaacgaaacggcttaa

SEQ ID NO: 109306 - DNA, 168 bp, Enterobacter aerogenes
atgcgtaaagcccgattcaccgaacaccacatcattaccgttctgaagtccgtcgaagccggacgtaccgtcaaggatatctgccgtgaagccggtattttgaagccagctattacaactggaaagcgaagtttggcggtatggaagcgtctgatatcaagaagatga

SEQ ID NO: 109307 - DNA, 174 bp, Enterobacter aerogenes
atgaaggacctggaggatgagaaccggcgattaaaacagatgtttgcgggcctgagtctcgagtgcagtgcactgaaagacgttattgtaaaaagctttaaaacctgcgatatagcgagaactcgtcagctatctgacggcacaattcgccatgagcatccgcacggcctgtag

SEQ ID NO: 109308 - DNA, 312 bp, Enterobacter aerogenes
atggacaacggcccggaactggtttcgctaacacttgcgcagtgggctgaagagcatagtgtggcactggattttatcaagccgggtaagccgacgcagaatgcgtttatcgaatggttcaaccggacgtaccggacagaaatcctggatttttacctgttcagaacgctgaatgaagcacgggaaatcacggaaagctggctgaatgaatacaacagcgagcgtccccatgaatccctgaataacctgacgccggaggaataccggttgatggctgaaaaaccggaactctcaaaaagtgcgtggaactaa

SEQ ID NO: 109309 - DNA, 2877 bp, Enterobacter aerogenes
atgaaaaagagaaataggatctccgttaagaatgttaattttggtaaaaatttcattccagctttaaataaagcaagtttattatttattaacaaagagtcgattcctgtcgcactaaataaatttttgcattccaaaaatcacacaaaaatagaaagcgaacttccatttttaataagttcaaaaaaagtcaaggaatcaatgaatgcgttcgcatatgatttcaactctatgggtttaaatcccatacatactgacttaccttttagaacgttaatttccctttataaaaatatatataaaagtgaatcggaacgccttttaaaatatgttaaattcagagatgatgtcgaatcagcattagcaagcggctgttatgatgtgttagatgagttacttgaacaagtgaaagatgaattgggtgaatcgttatggtacgctcgcattaaattacttacactttatcttaatggtgaggctggtgagatgcaggacttctgtacctcattgaaatctcgtacagcggacagcatgtccttatttataattcactacctaatcattttaacacaatcaatagacccaagaaatgttatcaatgttgtattaaataaacaattaaaagaattaaagtccgctggttttgtagactacgcaaaccttatgcaagagtttttagttccgtcacatatgaaagaagtagtaataactccatatatgttagagttattccaaaaagttaacttgattgatcaatataatctgattacttcaagtttgatatctttcttgatagatgcaagggatgaattggatgccgaggataaaaatattttcaaaggactttttcatctccttcaggatattaccaacgactataaaattaacaatttcctaaactcttcagcacttgaggttgagcaaaaaccgaacgcctgtcccacaaaatctgtttcgaacacgcagatcacagtaccagatactagccttaataagggtgtgtacaataaacctatcagaaatcttatcgaaatttatgaattatcaaaacgttccacacaatcttttgatgagctaagggctcatattacgcgcttaaatggtacagaagcatgtttctggcttgaggctgaattggtcaaagcagttcctcattatcttccagaaaaaaaatctatacacattaaaaccacccattccatactaactaaaaacactacacctgatgagttagtaaagttaacgcttttggtctcaccagatgattgtatacctaatatagatgaaataaatctcattgatttcagtgaagaaaaactaacaccaagcaatgcattaagttctaatattgggtattcaaaaaagatcattgaaagaaacatccaattttttattgatagtaatgatttagaccaagcaattaatttagcagcgaacgttcttgttcacaaagaagaaacatacttaagccttccattaaaactattgatacaaaaaatagaatctgaattcaaacctacattagattaccttatcgtcagccatttttataaaaagtacatttcatctaataaatcgacattgcataatgaattatttgaagagtatataatcgataacgatgtgacaaaaccatcagaattagtttcaaacaaaataacaaagtctagtaaactttactttttcttcaaagaaatctgttcacttgaaactatggattttttatctgatttccaaaatagcgatgagcttcgagccgaaagattacgacttctggagtatctgtatgctaatgggaaaattagtaaagatgtattttacaaagaaacagacgaaatagtaaaccagtttatactcgattcttcagcaagccattttcaaatcagtaaaatttatgtcgatgaggtatctctaaagaaaaagctaaacaaagaaatctccactttatttgaatcgtataaatatgcagaggattcaaacgaagagatagaagtagtaactttagatggtgatgaaagtgtaccaatacaagccttcgttcgtggggccaaaagtgatattttattaaaatcaattggactcatgttagaagctttcttatacgatgaaaatcatggtttagatacaaatttatctactgaaatcagacatggattcttctcaaattatcttcggtctgaccttgaatcccgacggttaatttctgaaattgatgttgacggaaattttaaaagcatgacctactgggatgagatgtattcaaacatcttatcaacaccttttctacagagtataactgaagagttcaaaacatttacgaatggatttaacgaaacaatacgcgaagcacaagcatggatgaaggtaagtacatcgcacgaagataaaaatgcacttttcatttataacgtatatgtcagccagtatgactactttaaattatggatggagtattgtgagaccgctgatgagtttatggacgaagtttttactatgttctgggagatcacggacgagattttaactctaatgcgtgaaaaaataaacgtcgaccttaaaggcaaagtccaacagttgttttacgatctactgactcgattagatttagtgaaaggtggtgcacttttaactgacttgatatcaaacattgttgcttctcaaaataaaacaagtgagataatcagtgaaatatctgactggtttaatattaatcaacacagagacttttctcagcagacattatctcaagttattgatgtatccgtaaattgccttgagaaaataaaaggcaagaatattaacataataaaatcatttaataacgagctaaataattttatagttgatggctttactgttaaaaaatggctttgttga

SEQ ID NO: 109310 - DNA, 885 bp, Enterobacter aerogenes
atggaagtgttattaaccgtacttggaaaggagaagaacgtagccaccatcacaaagaaggatattaaacaggtgatggaggttgtagaaggtcttcctaagcgtgttatccagccttacaggtctatgaatataaaacagctcattgcgtgtgatgacgttccagaggaacacctgatagggacggaggcgattcacaagcatttaaaaatttataaatctttgtttaagacatttttgatagaagagaaggatgtacttacagcctcccctacagatggtgtcatagctccgccgtctagtgctcgctatggggcttatacaaacagtgagatgaagagatttgttcgttatgcaatcgaagaggctaagtctgaatggcttaagtggattatcctgcttcttgcgtatacaggagcaagacggggggagattgctaccctcactaaatcacaggtgagatatgatgatgatagcaatcgtcactacctgctcattacggacggtaaaactgagaatgcagcgagggaggttcctctccataaccatcttattgatttaggttttctggagtttgttgctagtaagaaggcgaaacttttcagcgaagtagcgggtaccaatatggctaagattggtaaagtgatgtcggatatcagagaagaacttaacattccatacagagacattcataaccagcggaggatagtgcatagctttagacatagcgttgttacagcggcctctggttggatgaatgacatcactcacttgcagcaagtagtagggcacgaaaagacggggacaggcataacacgcaggtatatccacaccttccccctgtccgttgtatgtcatatcattgatggtcttaactggcggtaa

SEQ ID NO: 109311 - DNA, 831 bp, Enterobacter aerogenes
atggctagaccgttctctcaaagatatgggcatgtgagtgtaaaagatgttattcaattgaatggattgaatgctgaaaccagaaaagcaatttggaattatctatatcttggcctgttcagtaataccgatttacaagataggccgatgcgatgcgctaagagtatgtggatacattattttaataatgcggccgatgacattcccgattatgatagggattttacatatgaggactctcttcttacaacaattaagaaatatgtctatgacgcaaaatggtttaatgtctttgatttgctagaggcacttctgaattatacagaggatttttatcgatttgatttaggggagtttattaatgatgtgtttgaaaaatatggggtgggctatcgggcaattgatgggttaattacccccgtctcagatgaggtggaagttgaaagtattgaaaacgcattggctaataacactgaatctgctaaaaatcatttctcaagagcgctggagttaatggctgatagagaacaacctgattatagaaactctatcaaagagtctatctcagccatagagtcattatgtaagaaactctctggaaatgataagggtactcttggagattgtcttaaaactgtagaagataaagggcatatccacccggctatgaaacgggcttttatgcaattgtatggatacactagcgaccaaggcggaatacgtcacgcgttaacggatgatagtgaggagcctacattagaagaagcacgttatatgctggtgatatgtagcgcctttagtaactatcttgtatctaaaatggctgattag

SEQ ID NO: 109312 - DNA, 561 bp, Enterobacter aerogenes
atggaagtgtttgcctattgccgtgtgtcacgtaatgacctaactacagctaaccagaaacacgctattgaacgttcaggctataaacccacccaagtattagaggaacaggttagcggctccatatgcgctatgggacgccctgtattctctagaatggtggagaatatgaagaatggggacgtgcttgtagtgctgaagatagacagactaggaagggataacatagacgttcaacgcactatccaaatgctcacagagaaaggaattaccgttattagtctagacctacctacacgaaatctagcctcagcagaagggaagatgatgatgcagatgtttgctgtgtttgctgaatttgaaagagcaaggatagcggaacgcacaagagacggactggcaagggctaaggcagagggtaaaactctgggaagacctttagccacctcaaccacagaagctgtgcaggaatgtaagtctgaaggaatgacgcagcaagctgcgagcgagaaactaggaatagggattgctacagttaagaggcactggaacagggcgtag

SEQ ID NO: 109313 - DNA, 141 bp, Enterobacter aerogenes
atgtctatgggtgggctcggggagttattgagcgttaaatctatatgcttacttcttatttctatcatctatcccataggaaagttagtcctaacggggtgggagaaaatgaataagaaaagaagaaagaaaaaactataa

SEQ ID NO: 109314 - DNA, 1812 bp, Enterobacter aerogenes
atggcaaccgatatgtttgatattggcattggtggagcacaaccctcaccaattcatccgcaatcccccgtaacggataactcgcaattaaccaccctgcaaggaattcagacagcattgcaaggtgtaggacagttatttgcagcgggcgggcaagctgcatcgcagaagcgacaagaacggctggcacaagagaaggctaacgttatgtccagctacggtcagcgggtagtggcattagatgccgctgtagaacaaggtaagatgaccgctgcggaatcaaagacccggctacgtgccctatataaccaaactattgctaactacccttctctcactgaagaccttactgctttccataagggcattacaggtgctgaagggctgggggatgctgctgttaaaggaacagcagtagaccaacaatacgagcagcttaagaaagacgctaccgctaatgggtgggtgcatccgggaatgaccccagaccagatagaaagcgctacagatgcgtatcaagcacagcagaaaagcataggtgacatgaaatactattcccaacagcttgagattgttcaaaagaaagcttctattcaagcgcaacaggaatctattgccgcctcaagagtagctcgtgcgaatgctcaggcggagctacagattaagcgtaataagatgggcgcccaagctgccctttctaattttgctgtaggggaacaagcgaaaatgtccgcacagattaaccagcttcaacaggatgtggacagcggaaagcttacgcgagaagctgcacttgctcggttgcaagcaatgaaggataactatgcagcacaaactatgaagctacgtggggtggcggggggtgattatgttgatagtctgagtaagcctctattcgaccaaatggaagcccatgctaattttctctccgggaagattggggcggacgtaatgaaaacacaagtagagcgagcgcaaaatacggcgatgctcccgctaatgcaagacccacagttagctaacttaatggctgcctccaagctgctaggcggggctctcccctcgaagcttcaaacacaagtgaccgaccgtatcttacaaatggcgtctaacaatcaaaaccctaataaccctccagccaacccaactccacatactaagcaggaaggtaagcaagtgggtaaatatatggatagtatccgctccgggattaactcactggcagataaagatcgttccctcaaagaccctaaaggaacttgggaggaaattcaaaaccacgttaatcaagtcttagcaggtacaggggagttttcctcatcacagcgctctcctaaacaattgaatcagtcattagactttctcgcctctcctgagtttctaaaatatcagaaaatgggaggccgcattgatgatgccagtgttagcgccgccgcacaggctgttagtgttaattacactgataaacttatccctactatccaagaagaatgggagaaagctaaaacggttgtgggggttactccttcagcaggtggattcccggcctttggtggaggaatgcctacagcctctacagaacagcgcgcaacctctgacgctgtagaatatgtctggagtggctcctcaattacatttcgccctactaaggcatttctaaagaatccgggagcagtagctaaagcacaagagttaaataaatctatggcacctctcatcaatcgaatggttagagcagatgcgcatatgaaagggacagataactattcagcctcttttaaacaatacgagaagaatatctttggagaatag

SEQ ID NO: 109315 - DNA, 222 bp, Enterobacter aerogenes
gtggattattacaacatcaacattgtgaacaatttaattaatgaagccactgtggcatataacacaaccatggatattatcaaagaacgctcaaaagaagatactcttgaaggagacgaggaagagtgggaacgtctattccttcttatccgggatattgaagatactctttatgaacttgaacaatttcgcttttccctctcctcttctgttaaacactaa

SEQ ID NO: 109316 - DNA, 462 bp, Enterobacter aerogenes
atgaataagaacttctcgctggggaatgaacagcataagcgtaatctacagcgcagggctaaacagtattccgcctcctctcgcggttccagccatggatgctttatcttcagttataaagggatacttatcaagaaagaatctggtatgtatagcatatataaaaatttcaaggttagcggctgcgatgctgcccttgttgagggagagtggaacagagcaagcgactttaagcgagagcttgatttcatgctagattccgctaatgaggaacgactagaggaagtgagagctttacataaaaacttccactgcccagagtgtaagggcgtaaattatttagaccccaaactaatcacccacttcgaaagtagcattggagacacaatctattgcaaccaatgtggacaatctacaagtatttctattcttaaacttctaccagacaatcaaatgtactga

SEQ ID NO: 109317 - DNA, 471 bp, Enterobacter aerogenes
atgtcagctttaattaatgcgttagtacaagcaggcttttcagaagaagaagcacagcgtattgcatctgtagcccctcaacaatcccaaacctcccctctgtttgaagagcacaaacctaacggtttattccccgcagagcctatccccgatgattcccgtcccgattctgtatacctgccaccaaatggagtggcaactgaacagcaattgtctagcccctttggtaaagcaggagccaccaacaaagacatgattgcatatatggaacaattacgggcacaaactcttaagaatctggacgccactctcaatcctaaccaacgagcagagattaaagccgctgtaaaatcacaagagattcgggggggcaaaactgcggaagaagcatttaaagagggtatgaaatcccgccgctctaaacctacagcgcaggaacagattgaagcattatattcgcaataccgctaa

SEQ ID NO: 109318 - DNA, 255 bp, Enterobacter aerogenes
atgagtagactagtgggtatctttgagatgcaaactcatgcagaaaagatgcgacttattagggagcttagacagaagaaatacgacgaagctttaaaacctatcttagaggagctactctccttcggcttgggttataacgctattgctagagcccttaatgcaagaaatatcccctcccctaatggtggggagaatatagggcaaggagtaagaagaaccattacgcgcttaggtttagaaacaactcaataa

SEQ ID NO: 109319 - DNA, 4761 bp, Enterobacter aerogenes
atggtagacaaacaatactcattgaaagactttattggattccaagagcattcattggaagattttagttcatcccttcctgatgatgggaatccccttgtaacttctgccccctcagaccgtaacacttcagcttatacagcactgttaaatgctcctaatgacctagagcaagcgacccaaacctatattaatgttaatgatgaatatgcccttaatggctattcacagactcacgaagaagtggtagatgttcgtaaatctcaagagatggacgcttaccgcaatgccgctgttccttctctaattgaccctaattcctctacagaatcaaaggccgccacagtgggatatgttaacaatcccgccgctgctcattattccacgcagggcatggttctttctcaagaagcagccattccagcagatggtgaaacattagaggctaataaactacgtgctggtatctctattggtattgaacaggcgctagaataccaacgagagaaacaacgcatctacaatgaacacgccactaaagaacgcgagagcggtaatacagcctcatgggtagggcttgccgaggatttagcgccctttgtagaggctttcaaaacttctaaactctacgcagaaactaccggagataaagcaactgccacaggtggaatactccttccgggggaactgaaacaaggaatggtagacaagttcaacgctttgcctctcgataaacgtattgagtttatggagaaacttagcgccaccattcaagccgacggtaaaacgatcctactacctaatgacattgaccgtggaaatcttcatgtattgcaggagataacagagagcggaagttacacagttactgaccgcacaatagataatgtgtttggtctaatgaatattgtggggctaggttcctttctcgggaagctaactaaaggcagtaaagctgctgagtctgtagcagccgctgaaaaggctaacgatctttcccactcatgggaacgccgtatgattgttgatgatacacagccagcctcagtagcaacaatgctaaaggacgctaacccagaacgtatgcggcagcttcacttagctaacgagaaagcccttaatgatgaagttgcactagccatacatgggacggataaagacagcgctctagcctcaaatctttctcctcagccaatgggagtggatgggggggcacagagtaaaacctatctcccagaaaaatattctgattttgataagatgcctgatgctgatgttatcgattttgtctctaatacttctgccccaaatctttctattgcagaaaagcgagctttacgcgccacggtagctaatgattttcagaatgtatcgggcatggtcaatcgaaaagaaatgacaactattggagagtcccccgatgctggacatattattatttctgcttcctatggccctgccgattctggtttctcttccattcaggatgctgtcgagcaagcgaaatatgcattaagaaactatgctgtagatgataaagatatttctattctaatgcgtcaaggggatgaatacctgcccatcccaaaagacacacaagctttgcttctaaaagggaataatacacaaatcaaaggagattatctccttcaaattaataaacaacacgcctacagcgctggagatttggctggtgaaaatttcgagaagtttggcgtagctgctgtgtttaatgccttcaatcgtacgggttggtttgcaggtaaacatggagcgggtagcgcagttagccatgtggtagacccttccatcctattcaaccctaatgttatgaaaggtgctcaacttgcagacatgcgcagcgatgctctcacagctaaaattctggatacagccaagccattcatggatgcaatgaagaatgtgaaacctgaacgcaggctagagatggaaaatatactccgcgaagctaatgctaaaggtattgaacttaactctacatttctaacctctcgcggatttaatacagaagagcgcattgggattgaatcattccgccgtacacaggacaccatctggaaacttacaaatgacgatatggtgaagacataccagcgtaacgggtatggacgcctaacaatgaaagaggcagggctggatgttattgctaaagaggtttctgccggaagtgtcgcagggaatactcgcgtatatgacccactaaccgatgaagtgcggatgatgtctaaggaagatattgctgaacattactctaataacggaaacatagttgaaaccgctcacccgattactatcaatggtaaggaagtcgagcatattctaaaccctaatcatcaaacctccggctatttacgtgctttagccgatggcgagcctgtaatggcatatcgtaaaggctactattctgtacgatataaagaccctcattttattatgcagaaagttattgacccggatacagggaaagctgtacgtgatgctcatgggagagagaagtttaaagctgtagcaacagcagctaatatccctgatgctcaagcgatgattgagcgccttaaagctacaaaagggggtgaatatgaatttcgcaataacctgaaaggggaagaatacgatagagcctacactcagatgaatactgccggggggatgtcttctcaacgcttccggggacagcgtctggaggatagcacaggcaccaatgctgaatttggcgctcacattgatagccccgctgaaagtttagcgcgtagtattagtgctatttcttctcgtgtctcttatagagactggattgaaacaaataagcagcgtctatttaatgcgtataaggaagttatgccgatgaaggagggacaccccgtctacccttcaaatgtcacagatattaaaggccatagcagagcagcagcagacgcaagagctacatttgaatacatccgcatgatggaaaatggatatgttaacgccttagatgatggttataaagcagtgattaacctaatggctgacagtctaggggctaaaggttttggaaatgtagaacagaaattaagaaatgcttctacagctagtttctctgccaccccgaagcgcgttgtgtttgatatgatgattgcactcaaccctttgcgccaaatgatggtacaaacgggacaggcagcaatggttctaacacggttccccgcctacacaggtaggattgtgcaagattcaaacctccttcttctttcacgcatgaataagaaacttcccgagaacgtctataaagcaatgggacgtgataaggaagcattcgagaaaatgttacagggacttgaagagagcggaattaacaagggaatccagaatcatgaattggttaaaagcctagttgattccacagtggatgcctctgtagccagcatgaaagccgcctctccttcttctgcttctaagatggtgagcgcacctctaaccgcatacaaagctattactacagcaggccgtaagattggctttgatgctggggagtggatggtgcaaagcacctcttatatggcacattgggatgctgctgttaaagctggtaaggatgtcactagtaaagcggtgcgggatgaaattgcctatcaagcgcgtaatttcacaggtaacttctcccgttcaggctctctggctcttaacaacaatgccctcagtgttgtaacgcaatttatgcaagtgcctttgaaaatgtttggattactgtttaacaaaggcattccattaaaatctagggctactatgggggttgctgctgctcttctctttgggactccttttgatattggaagtgacatatacaaagctattacaggagagaaagatctcccagagaatgatttagccagacagtttattactgatgggttaatcactgctgcgggaaatgctttcatcaattccttgttcggagagaaaagtacaattgattttggaggaagcttaagcccttatgacccttcgggactggctgaccttctgaccaatgcgtataaaggagggattgctgaaattctcccctctactcctgcggggagcttagtagctggaaccaacccgagagttgctaatgttatcagttccttcggtagagctatgggctatggtgaaattggtgatactacatctatagagagagttggtcttctggctagtgatatcggtaagttgtcctctggttattcaaatgcaatgaaagcattacaggcacttgcttatcacaagagttacagcgcaggtggaacggtgctaagtgacgaccttcctacccctgatgcaatagctaaggcttttggcttccagagccttcaagatgttcataaatttgatttgaacagctatataaaagatgtagggaaggataagaaagcggatgtattggcaagctatgattacttccatcgcctctttacgagggatggctctacagttgaggagttacaatacgctttggatatgtcacaccagatgatgtctgtgtataaagatgacccagcagctatggaaatttggcacaatgaatttgagcgcagaattaaagcaggagataccagcttgcttgaagctttgcgtaaattctcagggctggcaactccagaacagttagacaatgcattagataaatcagatttacctccagagcagaaaaagcttctgcgtcagtggtacaacatggatttatctggcttcaacagcgccgtagcaaccgcagactaa

SEQ ID NO: 109320 - DNA, 837 bp, Enterobacter aerogenes
atgattaaaaatttaggtgatgtatttatagatacatccacaggggaaattgtagaccctaccccgtattgtgtatcttctgatttagacattaatcaagtagtgacagaggcgttaacaggtgttcctgaaaagattctaactactactgcgttaattaaacaaggtaaagggcgtaagcctaaggtgatttataatccttatgcatctatctttcagaacctcccacgcagggattacgttaacgcagaaggcatcgctaaatctgttcctgtaatgaatgggacattaggtgatattgtcgagggcgtgctacgcctgaatgagggaactgataatacagtaatacctgtagggcagattgtttttgttctctcccatttggaaagattgtctgtcgataacatcaaaaaactatttaccgcacgtagagcattaaagggggacaacattcctaataagcgatactgccagtacctattgcgtaaatgtgaatctgtgattagcagcgtatcctatcactttgagcgcgggagtttagatatgaaagcagagtttagtattgaacaagatgctaaagatcatgctaattatggcaaagaaccctcccgcatcctctcccctattgctttcacagaaacagacagaaagattataagaggctatgtccttaaaggcttacatgaacaagctaccgcttacattaaagggattacagaaacatatcagcgttatgtagcaagagttgaaaaggctaccagtgttaagcgtgaaattgtttatgctgaagattttaaaaacgacccatatgtaacagaacagccctactatatctaa

SEQ ID NO: 109321 - DNA, 537 bp, Enterobacter aerogenes
atgaaaattaaaaatgcatgtgtggggcaaatgttccccactaaaagtggctctgttattattaaagaaatcataagccgttcaaatatcactgttgaatttattcagacaggatatattaaaacaaatgttacgctagataatcttgcacgaggaagtgtgaaagaccttacagctaagtctgtatatggtgtaggttatttaggagagggatatactaaaggggatttgaagaataaatcctacactttatgggctaatatgattaagagatgttacgcagaaggttttgattggtatgaaggcgttacagtgtgtgagagatggcataactacagcaacttcaaggaagacattaaactattagctggttatgaagaatggattaacgagagcggcaaatatgagcttgataaagatgttctatcagggaaacataaaacatatagccccttcacttgctgcttccttccttcagcaatgaatagacaacttgctaaagtaaccaaaactcagaataatatatcattgttttaa

SEQ ID NO: 109322 - DNA, 210 bp, Enterobacter aerogenes
atgtccaaagctttccctaataagtccccctattatgaatacaaggacggcgcagcagagatgttagtcaaactttctccagccagaaagaacaccattaaaatctacgcacaaactcacggattaacgctccacggagcgctattgagcatggtagatagttattatgatgtaacgcgaaagtctgctaaagaacataacaacaaataa

SEQ ID NO: 109323 - DNA, 417 bp, Enterobacter aerogenes
atgcatacagtacatttaaaaccacattgtctaaacccgattcatgctttcaaaatgaatgatgctatttactacctatcaagtgaccataaattaatgtggagtttcatcacttatgtatgctctacgcatcaagggaaaggttggtttagtatcaaacatctgaatgataaactaggatttggaagtgaagagctaacagagattattcttgatgatttattccatatcaatgtaataaaacttaatgagcaactatttgaagcggaagatactaagcgcttctctttgtctgttcttccctttacccatgaggtggtaattggcgccaagatgaaagcggaagattgtttccgcgtagggtttggagttgatgttccaagagcattacgtcttttccctgaaggagaggaataa

SEQ ID NO: 109324 - DNA, 372 bp, Enterobacter aerogenes
atgagatatctgttattattttttctttttttaagcgattttgcattttcaaagccagtaaatataacgttgaatgatgttagggagttaagtcttaaagagtgtttggatataaattatttgagattgggaaaagccaactctgtagaattgaatgataagtcatatcttttggtgtggttttctattgataacgattcaacaaaaaaatcaaaggaactaaaaaaatttataaaggataatacagggcattattttatgatgaagcctcctgtgaaaacctcagaaagcaatatgattttttcattatgtatgcgcttttacgaatcggataaactgattaattatattgagaattatgtttttgattag

SEQ ID NO: 109325 - DNA, 591 bp, Enterobacter aerogenes
atggtgaaagtaattttcgcactcgtattttctatttgtttgtattgtggttatttcaacaatatggagtgtcatgcagaaagttatagcggtctggagaataatgatttttatattctaatcggtcagtatgttgaaaaaagaaacatggcaggcggtactgctcaacggatagtatcatggaaagaggcgacaaatatttatgacatatattattatgacattgctcgcgatattaataagagaccagcgcaatatctttctgatgctataagggtattgtctgactcacattatgatcagagtcaaaagttatattcaattttattaatgcaacatcttccgataaatgactacatttgtttgatgcgcgttgctaatgaatcatttgaaaatggtaatattgataaagaagttatgcggtttgcgttgtttcctgatccaaatataaagagtggcacatctgtttattattggtggctaccagcctggagagatcaatttatgaagaatgcatataatgtggcagatcaagaatctgttgatgaggttttaagtggtaagtggtcattaaatcttattatacagtaa

SEQ ID NO: 109326 - DNA, 1080 bp, Enterobacter aerogenes
atgggggttaataatgctatgcgtaatttagaaaaaaggtcttattatttactgccattgatggtagtgatattgctgtcggctgttttttatggctataaaaaggtcattcagacggattattcaataaagcccgccatgttgccacaggatgagttgtggaccgttgagcattcatggcagatggttgaaagtattacgccggaaattccacagattgataatgaggaagagctgctagagttaatccggcacgcatggcagtgggataaaaatgccatgatccagtatgcccgaattcagaagctgctttttggtgaccccatccttgatgactttatcagcagacaggctcaccggctgacgggccgggacggccagcgcctccggcggcccgatatatttgatatggattgcagcgagtttatcaaccggctggctgatatgcagtaccctctcgcggcacggctcagggcttctggattactgtggagcgccggggaaacggggataacattcaatccactgacgctcgagaaccgcgctcagctgattcattatacgcggtatgccatacagggcggataccgcatccattcctttctggccgactatattctgtttgataccgggtttgctttcagagacagtaatgataaccagctaaataccctgccgaacagaattcgggatttatcacaaaaagagctggaagagagtgttgcaggttataaggtgagtgcgttacatggctcacagtacgcgcaaatcagaatgagtgagttttatttatatggagtgggtgttcaacaggatctcgaagcagccagcgcctggtcgcagattgccagagagagttttgaaaaccggggacgttattcttcactgacatacagaaagaatgaaaatgtgctgaatacctataacagcacggtgctgtttcccctgatgcagcagcatatgacccaaaagcaaagggataaaagtacgcagctggcatcgcagataaagcgcgatatcacggagacagattattatacttggctcgcaggtatggatgcggttccaccaaaaccatga

SEQ ID NO: 109327 - DNA, 597 bp, Enterobacter aerogenes
atgagaccgataaaaacagctaagcggaaagtagttgcggcaatggcgttactggttgtttctttattgtatatatctttttacttaagggttgatgatgtatcttgtgaacgttataaaaacagcaggggtttaagtgatattttccttgaagctataagtaactcctctgagagtgttttgggttcgtggcgttatatgaataataaatatggcattcttttaaatggtatcgctttagaaattaccaaaaatccaaaagattatatagttaatgctatagatgttattgctggagaaggctatgatcaaactcaaaaaatgtttaccgttattttgatgcagaacttaccaattagagaatatatgtgtttcatggatgtagcaaacaggtcatttgaaaaaggtattattgataaagaagtggtaagatttgctattttacctgatgttaatgtacacggcgcatcgctctactattggtggttgcctgactggagaaaacgatttctgaaaaatgctgactatttatttgataaaaatatgataaatgatgtacttagtggtgattattttttttattctttgcgcgagtaa

SEQ ID NO: 109328 - DNA, 465 bp, Enterobacter aerogenes
atgaaggtgttttttcatgtgttaattatggtgtgtgttgttgttattttgttttttatgttgaattacgggtattatagaggggggttaaaatgttacgatgctgttggtgttggtaatttaacatattgtcttaattccaagttgaggtttgttctgttagttttagtttttaatatgtttttttatttttttgggaaaaggtttttgttaaaggttaaatcaattggcaatgtaactaaatcatgtattttaatcattctttgtggtgttaatgttattaatggctttgcctttgcagttgaaaattacataagtaattattgtgaagtttccgagctgaatgtttttcctgaattacttgataaatatggagtggtcgttaatttgatctttatcgctccgctgatcttgtcagttcttgtgttttgtgtgtttattcgtcttttaaaacgaattaattag

SEQ ID NO: 109329 - DNA, 615 bp, Enterobacter aerogenes
atgaagattggcttaattaaatatataagatgtttttttcgaaaaaaagctctactaagggatttttttattaaagataatttttattttcacttgtcagaaggtgggtatccagtatttatttccatagaggtggaggggatatatgcttttcattctatctttgcttgctcgaaggaggaattagcaaaggtaaaaagaaacatttctcatgtattcagtgtcgatgaaaatagccttgaagaagaaggtgtggttagtgaagggattgctttggcgcagccttattatagtgatgcgctagctatgagggagaaatgtgtattgatatattcattccgatgcaggatggataataatttaattagcgttatgacgaattcttctatgtttataagtaccatgtgcgaattaaatataaaacaaccgttgccatgggtggtttttccaaatttggaacctgatacttttggtagcctacaaggcgaggttgatttctggtgggggaatatatggcggccattctgggatagtttatctattgaagaaaaaagaaaattcctggcgagacataatgtcagtcagaagtggcgagattttatcttacggcactaa

SEQ ID NO: 109330 - DNA, 147 bp, Enterobacter aerogenes
atgtataataacaactgcttcataccatccctctgctccatttatataggtattcttatattccctttcaatagtcagcgacaacacatgatcttttgtaaatgttattctttctacttgctgttttgtttttggactaatcgttag

SEQ ID NO: 109331 - DNA, 384 bp, Enterobacter aerogenes
atggcggttctcgtgactccggagagtgaaaacgatccggagtggccgtcgaaaaagaagtggtttaatgccagtaaatggttaagtacgccacagtacataaaaattagagattattatgtgataaatacccagtatgccccgattgatgttgacagcagtcgaataatatcggagttgcaggaggcaattaagagttcgaaaagaagatttctggagttgaccgtgttatctgaactggaatggcagaaatttcatgatgtgatgaaatacaatcattactggatgcgcgggtattcagtgaaaaatgctggctactggcatgaaaagttccctgcatcctattcataccgaaaccatctgaacaaagagaagattcgatga

SEQ ID NO: 109332 - DNA, 192 bp, Enterobacter aerogenes
atgcaattaattttaaaatcacacggtattcatattgctttagatgccagtagtgctacagatataattaaaattaaggctctggctgagatgcttgagatcagctatccagccttaaaacagcgcatttatcgcgggcaggacgttgatacagctatcagagaactattagctaaaggaggcggtgaataa

SEQ ID NO: 109333 - DNA, 204 bp, Enterobacter aerogenes
atgcttctaatgaacgaaccacaaaaacataaaatccagaaaatgcaggatgattttaagaatctcagcgtggaagagaaacagtttattgctaaatgccttgatgtttcctcaacagatgaggtggataccctcattactaaaatgttggagcctcagaaaatcactatgcaggatcggattaatcaacgaattaataaataa

SEQ ID NO: 109334 - DNA, 360 bp, Enterobacter aerogenes
atgaataactccacctcatacaacactttgcaatctgtcctacagacataccacgataattacgctatccctatgctgaccctaataaacgaaatgcagcgtgatagaacgcctgagacgctcttagcggcgattaaatcacaagacctagcacaagcaatgctaacgcatattagcgacgtggtgagccgtatagcggctatggaacattcaacgctaacacaggatgaggctgatagtatttcaaaggaaatctctgattcgctgctgctgctattccagtgtattgaggaaacgcgcgaaatggcgcttgaactggtgccgaacaccaacacacgagaggcgttatataaccactag

SEQ ID NO: 109335 - DNA, 222 bp, Enterobacter aerogenes
atgcaccaacaaacaacacagacaaaacgattcgaaaaactattaaactggtgccaggggcaggtgagagaaatcgagtttattctcgaggacgcctatctgagcgaagaagagaaaatagcagcgcttgaggaacttctggataaatgcctaaccatgcaatcgcctctcatcgtattgggcaataaaatcaaaatagcaataacacaattaaaggattaa

SEQ ID NO: 109336 - DNA, 405 bp, Enterobacter aerogenes
atgagcaaaaaacaacgtaacgtattaaaacgactagagcagcaatctaatattctccctcccgccaaatcgctagtctctagaaaagagtttcgagagctatctcgcctctctaaagaatataactccacccatggggagtggaaaacagagattatcgaacatgacagccctccgttatcagaggaagagcagaacgccctagatgatattctatcctcctgtgatgatgtgtatttcaaacctcgtaaaagaaaacagtatattatggactcctctaatttgaggaaacaccagattttgggatttgaggattatgtttcatattgtggatatctcagcgtcaacgggctaaacaacctggtgaaggattttgacgcagtatatgcagacagggaggaatga

SEQ ID NO: 109337 - DNA, 174 bp, Enterobacter aerogenes
atgagcgccattataaacgcaaaagctattccacgcacttacctacatgttgatcctgatatcttcaaaatactatatgttgaagcaaaaaagcgacagattccagtaaacgaattaatgttagaaattttagaaaatgaagcgggaaaaataaaagcaaagaaaggtaagtga

SEQ ID NO: 109338 - DNA, 183 bp, Enterobacter aerogenes
atgaaatggttcaaagcagaagatgttgttaatgcttttaatgaaggcagtatcagtcgttatcaaattcgaatgaatcgaaatacagcccgccgccgtaactatccagaacgagcagcagtgtttgatgaggcactacgcattatcgacgaagcaaaagcagcagaaaacgacacaaagtag

SEQ ID NO: 109339 - DNA, 891 bp, Enterobacter aerogenes
atggttactcaagtgctactcacacaaaaagcagttgcagctatacaatttgcaattcttgggaaaaacacctatacgacggcttccacctatgatgccgtagcaggccagtttcgtacgggggcgattagccaagaacaatatatttctaacctgttagcatccacagcgggtcagactttgtattctggcaaaaccgatcttgagatagttaaacttgtctatgcgtccatttggggaagtaccccagcagatagtgtcgcccaaacttttttaacaggctcaaatttaaacgcggctcttaataatgtaattaatggtgttctgaattatacaggattcgattctgcgacgctaacggcacaaaatagctttgataatgcgctgaataaagtcatgtacaaagactatggctcagcgaactggaatacatggagcgtcgctctaagtagtaaggagcaagtcgaagctgcgtacatttctttagtgggacgttcagttgacatgggcgggcttggcgactggactaattatcttgccaccggtggtaatacatatagttcattactgacaaaattaattgcttcttctgagtttcaaagcaaaggttctaatttaactggcgatgcctttatcacgcatgtttatcagggaatttacggcgtcgcccctagtgcagcggttttagcgcaatacagcgctctcggcaccaataaggcaaccattacccaggcaattatcaacgatttacgcggttctacggctacagatgcggcaactgtaaccaatcagcatgcctttgaatatcagattggtaccgggttactttataaaactagcgctgtcctcagcgccagcgctacaggcggcaacgccactgggctttgttga

SEQ ID NO: 109340 - DNA, 543 bp, Enterobacter aerogenes; identical to SEQ ID NO: 83409

SEQ ID NO: 109341 - DNA, 870 bp, Enterobacter aerogenes
atgaaatcttgggtaaaaatgaatagttggacatcagaagacaccaaagcagtgaaaacatggtttgatttggatagatatcgagagtttgaaaacatttcaattaatatgctttaccatgaaatatgggcgaggacatatttcttcaaaccagtaatagaagaaggaatgcataaaacagtattgaaaaattatatgcagatattagaaggtaatccttttctcatcaaagagaaagacttgaattatatggatgctgaaaataaactttatcaaccgccatacttttttataaccacggtagatcgaatagctaatatcagttttgcttgtatgaaaaaggctttattcataagagctaattcagaacaatataagattgattccactattgagaacgaatacatatccgaaaaaatccctgaacagtttcctactacaattatgttagaaatcgatcttgcggctggaagtgatgatgagatagcagaggcactgcgaatatcattaccacaatggcgaaaagttaagggtgtaaaacctgcaccgcttgatgcagtaagatttggttatgggacaataaaaaagttaatgagctatagaataataccaatgcttgatttacttgcttggtcagaaagaaaaaaagtgcatctgtcagatgatagaatatcacgattgatttatagagatgaagatgacgataaggtaattagacaagggtatcatatcagagatgcagaccgacctttagctatgaaagtagtagaaaatgattttttacgccaattctacttttttataaataaaaacagacatattaaagagatgagcgtttatgatgtaatgaaaattacagacaccgattga

SEQ ID NO: 109342 - DNA, 915 bp, Enterobacter aerogenes
atgctgtcacttattattatttttgtttttcttatcagtgtattgtatgcgcattctcgcggtaaaataaaacaaaagttttccaggcagttatttgatcattcaacatttatggctccgataaatatgtttatgacaggcttttcgaagctgccgtcaaagcaggcatggtttcccccagaaacatttcctgaacttcaaccattaattgataactggcaggttataagagacgaagctgttaatttgcaagggcacattaaatcatctgaaaaaaataatgatgcaggatttaatacattttttaagcgcggttggaagcgcttttacctcaagtggtatggagatgctcatccatcagcggagcggctttgcccagtaacaacccaactggttagctctattccctgtattaaagcagcgatgtttgctgaattgccttcaggaagccatttaggaaagcatcgtgacccttatgccggttcagttcgttatcatttaggattatcaacaccaaatgatgaacggtgttttattgaagttgatggtgtacgccgcagttggcatgatggtgaagtgataatttttgacgaaacttttgttcactgggctcagaatgataccgagcagacacgtattattttgttctgtgatatagaaaggccgatgaagtggcggtggtcacaaaaaataaataggtggataggtggggtgctaatgtcagcggcagcatcacccaacgataataatgacaggactggtgctataaatcatttatttaaatatgttaatgctattcgtgatgcaggtcagaaactaaaaaaaaggaatcgaaaactatattatttgattaaaaatggagttatttctttgatttttgtttggcttgctgtctcagtgtttagatggctgtga

SEQ ID NO: 109343 - DNA, 168 bp, Enterobacter aerogenes
atgacacgtgacaagaacgaccgggaatcgccggaagagcctgcagacagaggcacccgcgacgataaaagctcacaaaacgacaaaggcggggactggataggcgagctggagcgggaactgcaggagatcacgaagaagtggccaggcttacggagcctgagctga

SEQ ID NO: 109344 - DNA, 405 bp, Enterobacter aerogenes
atgaccattttagtgacgatacaggcccagctcgttgtcggggaggaacaggttataaagagcctcgctcctgagggcatgctggccgccgtgttcgaagacgatggccggaccgggtatttctatgcgctcgatgagtccgtcgagggaaacccgattatggacgcagtacacatctacaatgccgaagacgtttcagacggtcacattccttctgatgttaaaattggctggtcagaagacagtcagaagtgcgtactcctgatcaatggatacccgcacggggcattcgatttcgtgggaaaaaacgggtactgcaggagtggttatcctccccctataaacaaggtgtggtctctttccgggcatgagtggagcgactcggtggatgattttttccggtga

SEQ ID NO: 109345 - DNA, 345 bp, Enterobacter aerogenes
ttggcagacaaacgcagcaaaatgctcacgatgtgggtgaccgaagatgagcaccgccgtctgctggaacgctgcgacggtaaacagctcgcggcctggatgcggcagacgtgcctggacgagaagcctgcccgcgccggcaaactcccctcgatctcgccggcgctgcttcgtcagcttgccggcatggggaacaaccttaaccagattgcccggcaggttaacggcggtggcggcagcgggcacgaccgcgtgcaggtagtcgccgcactgatggccatcgatgccggactcgagcggctgcggcatgccgtgctggaaaagggggcagacgatgatcgttaa

SEQ ID NO: 109346 - DNA, 498 bp, Enterobacter aerogenes
atgaacagtcttttaacgctggcgaaggacttagagcagaaatcgaaagcgcagcagcagactaccggcgagatgctgaaagccgcattcagcgagctcgagaagtctgtcagagcggaactgagcgaaagcgagaagagaatcagcgccgccatcctcgaccacgaccggaagctgtcctcagccatgagccagcgcacgaaaggcatggtgcgtatggtcagccagacgtggctgaccatcgtcctggtctccgcgctactgatagcctcgagcgcggccattctgtggtggcaggggaaccagatgctcgacaactacgcgagcatccgggaacagagggacgcgctggagaagctgaacgcccggacgtggggcgtgaggtaccaggaggacaaccaggggcgttttctggtgctgccggagggcgtgaaagcggatacgaactggacgttcgacaacggaacgaagatcggcatcaggctggtacgggagtag

SEQ ID NO: 109347 - DNA, 1284 bp, Enterobacter aerogenes
atggaaaatttagaaccagtgtgggaagatgcaaatgacatttctttggaaagttttaataaaacattgtatgaaagtgtgaattcggaaagtgccgtcgtaagaaatggtattacgccactaagagattatgacgctgtccgtgggctaagagaagcttttggtaagcctgatcgagaggaagagcctgcgattggaacacatcctgactttaaaaatttggagacaaataatataacgcaatttgggtatgtggttaccatgtttatggatattataggctcgactaaacttggtctttcatatagtccatctgatgtttttctttttaaaaacaatatcattagcggttttattgagactatcaatgcatttgatggacatgtgcatagaattatgggagatgctgttatggctttcttccgaagcaatgaaaatgaaaaccttaatacattagaaaatagtgctattgatgctattaactgcgcagcatactttattgaggtaatgaatgaaatcgttgttccacaaattaaagaagtcgctgatgagaatattggtattagaattggcatagatatcggtgaaagtgattatgtgttgtgggggaactatggtatccctggcattaatgaagtaactgctacatcattctatgtagatatagcatctaaattacagcacaaggcacccaaaaattctataatgcttggggaaagtttagttaataaattagggcttactattaaggattatctggattacaaaataaaaaataacgaaccagatagatatgttattgattacacctctaaaaataaagaaagattgcgatatcgtcaatatttacttaatcaggaaaaatacttttcacttcttcctcatggtattatatcctcccgtataaaaattgaaatcacatatagtagcgacgagtttggtttttcaaataaaaaaacttataaaagttgcggctctgtaattccaaaaaataaatgggttaagtttcatgctattttttctgagggttatggagagaactatgattcgcttaaattcaagtttcgtgttgtaaataatggaattgaagccagtaaaaagcacgactatgacaatcatgaaactgaaataataaaaaaagctcacgagaaagaagatggggtatttcatgctattcacaaagaaagaacttcatacaagggacttcatcttatgtatgtttctgtgatctctaacggaagagtgattgagaaagaggttccttgtagtatatttatacagtaa

SEQ ID NO: 109348 - DNA, 345 bp, Enterobacter aerogenes
ttggcagacaaacgcagcaaaatgctcacgatgtgggtaacagaagatgagcaccgccgtctgctggaacgctgcgacggtaaacagctcgcggcctggatgcggcagacgtgcctggacgagaagcctgcccgcgccggcaaactcccctcgatctcgccggcgctgcttcgtcagcttgccggcatggggaacaaccttaaccagattgcccggcaggttaacggcggtggcggcagcgggcacgaccgcgtgcaggtagtcgccgcactgatggccatcgatgccggactcgagcggctgcggcatgccgtgctggaaaagggggcagacgatgatcgttaa

SEQ ID NO: 109349 - DNA, 624 bp, Enterobacter aerogenes
atgtcagaaataaaagcgtctggcagggctattagccaacgagtgaaattatgtgtgccagatagccgcagggcacaagttataccattcaccaggcaaaaagcgcagggaggaagggtgaacagaataaaatggattatccgtggcattgctttatttgtgtcagtgttgttatcgggatgttcgcactcccaggctggcgagtcgagcgcagggaatattagaggatacaaccatgttgccgggcagaacgttaactggttttcagtaaacggctaccatgcgacgctaaatggaaatgtgtgctgcgttatgatcccggaccagtggcgacctgggatgactgcacatattgagtgggaagttgatcctaacccaaaagctcatttaccgcctttgggaacagatgcttataacaaggcgtacctacagcataaggccaaataccttcgctatagtgctgatgttcccattccgcaatataaggagagtgcgggcattaacgtccattttcttccttgccatcaggtaaaaatttatgcgggtgtagccggctacggtgcctattcctacccaattaaagagccgatgaatatgcaggagcccgcaacatgtcagaaataa

SEQ ID NO: 109350 - DNA, 588 bp, Enterobacter aerogenes
atgcaaaaacattacccacatctaaagaaaatcacccctaatgactttctgctgaatttgatcaatcaccatcttaatcagatcctggcatgtcactccaaaatactggcctttcgaatggattttgattaccagcgaggtactaaccgattcattcgtaattcctccgccgaaatacaggatgaccttagagaactcactcaggcgataatgaaccttcctggcgtcactggtattttttgggtactggaatggacttcagaaggtgcggtgcatgcccatgcgattttctatcttaatgctcaggaacatcaaaagtcattcccgttcattttacagacaggagaactgtggcatcagattacccatggggagggaaaataccaacgatgcaggccaaatgaatatcatcaggacaatattaacaatattgttgaatatcacaacaacgaagccatagacagcctgagacgtatagccagctatttgacaaaagaagaccagaaaaatggttatccgatctggggatgcaatgaggttccaccacctgcacgacagggtagacccagaaaatatatatcaagctaa

SEQ ID NO: 109351 - DNA, 864 bp, Enterobacter aerogenes; identical to SEQ ID NO: 85419

SEQ ID NO: 109352 - DNA, 351 bp, Enterobacter aerogenes
atgcagaataaaagcaagatcgcagctcaggatattgctgaaccgtggtggggactccgacgctatttctcaccgtgttttagtgcccgcctggtacaggaggataaccagttgcattacctggctgaccgcgccagctttaacggtcagttcagtgatgcggatttaagccatctcgacctggcttttcctgtactgatgaaacagcttgaactgatgctcaccagtggtgagcttaatccacggcaccagcactgcgttaccctgtatcacaacgaactgacctgtgaagcggatacgcttggtagctgtggctacgtttatctcgctatctatcccacccaacgctaa

SEQ ID NO: 109353 - DNA, 222 bp, Enterobacter aerogenes
atgaaaattatcagtaaacgtcaggcaatggcgatataccgacagcaccctgaatcgcggttatttcgcttctgtaccgggacatatcagtggtacggcagcgtctgccactattacggcagggaggttcaaaacatcaacggggtactggctgtctttgctgaacgtagtcaggaccgcaaagggccttatgtcagcctgcgtagcgtgaccctgaattaa

SEQ ID NO: 109354 - DNA, 465 bp, Enterobacter aerogenes
atgaaaagaaaaatgatgcacacttttctgctggcctgttcactgatacccgtactggcacaggccttcggtaatcatgagacatggagcaagggctgggcccagggagtatctgagtttgtcatcaaggggaaaggtcaatcacaactgtctctgacctgtgaggattacggatcgcaaccggccacggtcatatttactgacgccagcgggcatcaggtcagtatggatgaagataaaagccttcaggtcagtatcgacggtggagcacttattgatatcagcgaatctggcagtcgagtgggcggtaataacctggcgctggcctgggctcagttacgtaatggcaaacaggtctcagtgacaggagacggtgttaagcctgccacattcacgctggccggtgcggctaaggtactaccggcattcgggacacacggctgtgtgggtaaagatgcactctag

SEQ ID NO: 109355 - DNA, 927 bp, Enterobacter aerogenes
atgaaggcttacaacatgatggacgatttcaggttcctctaccctaggaaatctgacatgcataagaacataaggcgagacagaggacacctgaacatgctggtaaatacctggtgccttttttacaatgacagcgttagagaaaaacccgtagatctcattgctgaattagattactactatgagggaattacggatggtaagatcatattctcaggtgactgttcctcagaatataaagaagaaattattgctgcaacaagacagtgtatctataaaaaaatgtcggcatatcgaagactgatagattatcattacgaagtgctaagctttcatcctaaagcagggtatatttgcttttctctggatgttgataaaaatacacgtaaccatcagtcctccgatacccataataaagatattaaggatttggcaaaaagattcattaataattttaaatccttagcattatactcacaaataacggcatacttctgggttctccttcgacgtcgtgatggggactcctatcttcatttcactctctacttcaaagaaaaagatttcaaccatgtagctggattatcgataaacaaaacatggtttaatgttctggaaaaacaagggctcaaaggaagtattcgttactttataataacggatgattttatcggtccacgcttatccaaaggaggtgttgccggagacagatgcctctatgaggtcaacccataccacgatgatgaaaaaaatgagttattcatttataatgactataatggaatagatatactccatgagttatccctcgacataaatgaaattaataaaaaagtatttgagttacatctgtacacgctgtcaaaactgatttttgttttgccaggaaaaagcaaaagtcaggggttctcgaaaataaagaaatag

SEQ ID NO: 109356 - DNA, 630 bp, Enterobacter aerogenes
atgtttaataaagcattactggaccatcgtcattccccgtttaattcacgctatttagaacggctggagaacgtcatggcttgtgctatagctgagtatccacgaacctttgccctgagggtagatttacacttttcccctgaatgggcagcagacgacagtatctgctgtcaccctaacacttcatctaacgtcatggcgcgctttactcgctccctgatagcaaagatcgaccattatcgccaacaacgttgtttgagaggcctgcgggattattcttgcaagttacgttatttctgggtcagggaaactgaaaccgctctgcacagtcactaccacgcgctactgttcttcaataaagacttattccggtctctgggatcggcaggatacagcagcctgtggaacatgatacaagaagcctggctgagcgcactggggttaaccgattatcccgaatacagccgcctggtccatttcccggaaagtggctcttacattcttgagcgtgacaaacctgtattttatcagcagtacgaagacctggtcttccgtgcaagctacctggcaaaagagcggacaaaacattactccgctgatacacgttccatgggtgccagtcaggggtag

SEQ ID NO: 109357 - DNA, 219 bp, Enterobacter aerogenes
atgactacagccattaaaaccattctttgcgcagaagacccacttatcgacatggtatacatcaccgcatacaccggtatgaccgacaagtggttctacaagcttattcaggatggcgaattcccaaaacccatcaaactgggacggagttcccgttggtataaaagcgaagtagaaagctggatgcaacaacgcattgtagcctcgcggagagcctga

SEQ ID NO: 109358 - DNA, 447 bp, Enterobacter aerogenes
atgaattttaagaccgttaccagtgaggagcagaacgccggaattcgtatgctgaaatgctacctcgccagtgaccaccgtgggcgttttgtgacaacccgtgaagcggcgaacatgccgggacaggtatggagctgcgtatcctgtggctgtcgactcatcttccataccggcacgcacgctgactcaccctggttcgaacatgaccagaggacagtagctgccagtacgttgatgagctgtgcgcatattgacccggcagtgaaagccgaggtacgcagcagaacattacgcagtcttttcaacaccctggattctccggtaatgtcgctggcctggtactgcgtctggtgcggtgggcattacagtggaggaaaactctgtactacctgtgggaccggtatttacagcattgaggaagactgctggcagaataattacacttga

SEQ ID NO: 109359 - DNA, 1416 bp, Enterobacter aerogenes
atgagttctgaatttcccatggtatcacttgagcaagtaagttcgaaaattggtgatggcattcacggaactcctaaatatgatgaaaacggtagctactattttattaatggaaacaaccttagctcaggccgggtcgttattacaacgtccacaaagaaagtttcttatgaggaatatgtcaagcataagaaagagataaattcatcaacgatattgttatcgataaatggaactatcggtaatgtagcgatttacaaccatgaacctattattttagggaaaagcgcatgctatatcaacgttcactctaatgtgaatgttaattatattggttatgtgctgaaagataaaaaattccagaattacatcaaacagcaggcgaatggttcaacaataaaaaacgtttctctaaaattagtacgggaattcaagttcccgttaccaccaaaactacaacaagatcaaatcgctggaatactttgttcactcgataaaaaaatcactattaatgaacatatcagtcaaactcttcaacaaatggcgcaagccctgttcaaaagctggtttgttgattttgaaccagtaaaagctaaaatcgctgctttggatgcgggtggttctcagaaagaagcaacgcttgcagcaatgtcggttatttctggaaaagacgctgatgccctggcagtgcttgaacaagaacactctgaaaaatatgatgaacttaaggctatagcaaagttgttccctgctgcaatgcaggagagcgaccatggcgatattcctgtagaatggacatatacaaacttatcaagtcttgcattacttaatagctcttcttggtctaaaaagaatgcccctgattcattaaactatgttgatttagctaatacaaaatggggcattattcactcaatagaacagtatttgttcgctgatgcgccaagtcgtgctcgtagagtattaaaggctggagatacaattgtaggaacagttaggcctggaaacggttcatatgctttcattactgaaaataacctgaccggtagcaccggtttcgcggtattaacgcctaaagaacctcattttagtacttttgtatatatctgtgcgacttctgaagataacattgaacgattagctcatttagcggatggcggtgcttatccagcagttaattcagaggtcgttctgaccaccccctgtattatccctgctgattataatgttagtaaaaaactaatatctatttttcatcactacactaaattcttattcgaccacaagaaaaacacctcattacaaaacaaaacattagaagaaatccgagacgtattactcccaaatattttatgtgggaaaacttatttatcaaacctgacaacctcctccaacaaaattaaggagggagcgtaa

SEQ ID NO: 109360 - DNA, 1749 bp, Enterobacter aerogenes
atgaccagtcctgctcttaaatttacagaaaacgaacaaataggccgtgtggctggagtagataccagccgtgtggctattgatgtcaccaactcagaaatgctgacacgtgttggaattggacagcttatagcaataaaaggagcaacacaggccgaattcctgattggaatgacagatcgcgttactcgctcactacgagaagaactacctgacccagaagaggatgagtcagggatgttaaccgtatcaccttcagaccatatgcaggctttcgtcattggcacttatagaactgttgatggagataaaacggatattttcaaacgaggtgccgatagttttcctcagatcgatcgcgaatgctttgtgatagaaggtgttaatcttcagcgttttatggggatactcggtgccggtttacccagcgaagaacgtcttaaactaggtactttcgtggcggatcggagtgctgaggctattgctagtggggatagatttttccagaggcatgcagccatcctaggaagtactggttcaggtaagagttgggctgtagccctaatactagagcgagcagctaagcttaaatatccgaatatcgttgtgttcgatatgcatggtgagtacgccacacttgctgacaaaaccaaaggaggttacgcacaacgattccgtatcgctggaccaggagaccttactgcacctaaagatgatgcactatttctgccgtattggttactgaatcgagatgaaatgttgtcgatgattcttgaccgtagcgatcagaatgccccaaaccaggcctctcgtttcactcttcatgttcgggatctcaaaggcgcaactctggactcatctggtaagccgaaagtcaaagagacattcactgtagactcaccaataccttacgctatttctgatttagttgctcttttaaccaaggataatataacgaagggtgtcgggaaaaacggagctgctgtaaagggggactgggaagacaagctgacacgttttctttctaggctggaagcaaaacttgatgatcgccgatatggttttatgttttccccacctcctgaagctctcgattatggatggcttgccaaacagattataaaattacttcgagctgattctggtaatggtattaaaattatcgatttctctgaagttcctgctgatgtcctgccagtagtgacagggacgttagcccgcctactctatgatattcagttctggatgaacgcaaattctcgtacgccaatcactttactttgcgatgaagcacatctttatcttcctgtaaaagatgacgccgattcagttcaaagacaggctctatggtcctttgaacgcattgcaaaagaggggcgtaaatatggtttctcattattagtcgtaagtcagaggccatcagatgtaagccgaacaatcctttcccaatgtaacaacttccttgctctgaggctaacaaatgacagcgatcaaaatgttatcaagagacttatgcctgattccctcgtaggtctaacagctatgcttccacttttagatacaggtgaggctttgttgcttggggatgcggttctgctaccatcacgcattaaacttgaccaaccgctggtaaaacccgacagcgccacccgagatttctggaaagaatggggttctcttaaccctgatctaggtttattagaggcggcagttgaatgtttaagaagccagtcaagaattaataaataa

SEQ ID NO: 109361 - DNA, 1038 bp, Enterobacter aerogenes
gtggaactgaatgatttaaaaaaacggcttcaacagcatctgggtgatggcctagttctaatcgttggttcagggttatcttgcgcagaaggcgttcctgggatgggaaaactcggggaccatctgatcgcccatgtcgcagacaatctttcccctgatgacctgaaactctggaatgagatccaccccgcgatcggaactgatggtttagaagcggcattgctcaaacgagccccgacaccagcccttgaagcaatcattgtcaaatctaccggagaatacatagcagcagccgaagcagctattatctctgaggtgtttaaaaacgagaaaacacttcggcttacaatgttacttcctcatttattaaaaccagataaaggcatacccattgttacaactaactatgaccgcttagttgagcttgcctgtgaagaagctggattaggagttgatacgatgttcagcgggcattttgctgctcggctagtgcctcttgatagccattggggcttttgccgtggagccaaacttgttggtaagcatgtgcgatacaagttcacaccaaaagtgaacgttttcaaaccgcatggtagcttggactggtatcaccgtaaaggaaacccggtgcgatatacaggagatcttcctcttcctcgtctaattattacacctggcttgaataaattcaggagcggctacgacagtccctttgacaaacacagggaaaaagctaatgacgcaatcgataaagcccgtcgtttctttatcatcggttatggctttaatgatgatcatttggaaacacatctcactccccgtattcggtcaggagtcagaactgtcattttgacccatacactttctgcaaaagctaaagaaatagctaagttaaataagaatgtaattgcagcggagtttcatagcgatgcaggaactaccggtgcgcgctttatcgtcgatggtaatgagatatttttccctagtgttgattactgggatcttaaaggattcgtagaaggagtcttatccgcatga

SEQ ID NO: 109362 - DNA, 294 bp, Enterobacter aerogenes
atgacctctgacaaaaccctaaagcaagcgatatcaaatattactatttggcgtaaaggcgaacagcgtgcgccacataaaccattgttgctactgaacgtcctctcacactatcgcctgggtcatgatcgcctgtttaactatggttctgaaatctacgaacccctgttggatcttctggaacgctatggaccgcagcgccgttacgagcgaccggacatgccgttctggcgtctgaagggcgatggcttctgggaaccccagttaagcaaggactgcgaatcaaagttgtga

SEQ ID NO: 109363 - DNA, 174 bp, Enterobacter aerogenes
atggacttcagaaccatcatcgcaattatagaaaaaactcttcttgagcgaatgagtttacgcttacgtgagcagagcgagaaaaactatttttttataattactttactggttgtattatttcactcccttcaaggagcaaagaaacaaatagagcataaagttaaaggttaa

SEQ ID NO: 109364 - DNA, 501 bp, Enterobacter aerogenes
gtgaagattcatgtagatactgtgtcagatgagtttcaaccgtcattagaagaaatacctattattaatttactcggtggagtttattttttggagcagatatcggtacgtcgaatcccccttggttctgcctcttatggcgacgtggttaagaatgattgtatcgatcttgtaacgattaatagagatgatatttatatacctacaacactaggtcaaaaaatcttggataattctctttcagaagtcgatagatttttcttggcgacaagtgataatgcatataggtggattctgggagggaatccaaaaacacgagttgatatcctctcgactatttctttaattttacctcctaggttttcaaaccttgcgaacgaaatccttgaggcgtggatagataacaatagtataattagctacgactatccaggcccacgaagatatcgaagtatacattggttgcatgatgtatggttgggtgatgatgattatatttaa

SEQ ID NO: 109365 - DNA, 174 bp, Enterobacter aerogenes
atgtcaaagtttcttactgatgaagagttatatgctcttatcgaaaaggtccatgcacattcagaagttatgcatgaattaggctcggaacaggaagctgaagagtctggccagatactaagcgcattatgtgaattgaagcagtacaggataataaccacgcaggaggtgtaa

SEQ ID NO: 109366 - DNA, 3117 bp, Enterobacter aerogenes
atggcctttaacccgccgctgggatcgaccaacgccgatgtttttatgggtaacgttcaacgtctggatgaactgattaacggtcctgctgctgatgttcccgatcgcgcaggtgacccgctttattcgtggcggggcatccatcagaaccttatcccactgagccgccagtacatgacacttgcagacgcacaggcggatattgccaacatccctgccgggagcgccgtctatgttcgcagcgtggatggctctgtgctggcggatgagtatattaataatggcggcacgctggccccttcagggcgccaaatgccatcgcaacgaactgttgaagccatcattccggaactgataaacccgggcgttaatcttttcaacaagaatacggttacccctggatattatttgttcgaaggtacgggcgtaccgacggtaaacccggattattgttattcagaacggatccgcattgttggtgatgccccgtacacaacccgaatcaacaccagggttgcgacattttttgatgctgatggcatgtacctatccgatgtcagcagtgtgacgtcatttacagcgccagccagtgcagcgtttgttgttgtctctgtactaatcagtaatctggatgtattccagttaaactttggcgtcggccagatgccgtacacgaattacgagtccatcgtcagccctgtcattaatggtgctaccacaaatggatatgtcgcgctgggttttgcgcatgggaaaaacttctttaacccctcgctggtatttgacggtaggcatttatcatcgaccggaacgataactaataacagcgacacgtcaatgtcggtgtcaggctatatgaagattgacgcaaccaaaagctactgctctaaccagcagtggcgggcggcagcgtattacgatgctaaaggccggtttatcagtgtgcaggcagttgatggttatggctcgaaaacgatagccgcacttgttatccctgctggcgcagtgtttatgcgcattgaggttcctactctggttgttccggcgatgatgattgaagagaacagcctggctactgagttcgagccgttccggcaggttgcacctgatgcatttgacggtgtacaggtcacgttcgctgaggagccggaggagaccatattgtttggccccggcgtaaacctgtttaacaagaacgctgccagttttggttacatcaatgaatggggatctgtctatcccgtacagggggcgtcaggggctggctatgtctattctgactatatccgggtcatacctgccacgaaatataaagccgctgctcagttacggtttgtggcgttttacaatgctgacaagcagtacatctccacgctttcactggttaccgagtttaccccgcctgaaaattctgcctatgcacgcatcacgctggcacagaatgtaatggaaaccatgtttctgtcagaaggtgattatctcgcgccgcgagctgattaccagcacctgatggagccggtagcttcagatggttcagcactcagagttccgggggaaatggtgctcgctgatgggcttgatattaacttcgttcagcaagggcttcttgtatcggggaaaaacctctataacaaaaacaccagaaaatctggctatatcgatgagcagggcataattcatgagcctgattcccggtactactactcggattttatcccggtgacacctgggatgaaattcgcctttaactctgactcccgattcgtcgctttctatgccaggaataaagggttcatcagctctctgtctgatacgggccagcatatccgggtgattaccactcctgccgattgctattttgtgcggatcaccacgtccgttgccatcagcgatacgttccagatggaagcgggtgaagtgtctacggcgtatgaagcatttacctactctttgctgtcaacgatgccagacgggactccggttactggcggcggtgcggcaccggaagatactaccgttcctgactcatacggacttgaacggttgcgtgaaacccatatgcgactgaacaaacttacctatggcggtaatgtgcagttctcctgggcgatgattggtgacagctacacaagggggcaggtacgttatgccctgaaatgtgcgcagaaattatggcatctctataacggtactgcggcgacggtcaccgttccgcccattggttttgggtatcgatcgttcggttatgaccagttcggcgacaataccgatattatcggcacggtgataacgcaaactggtttcgcctgccagtacaacaccggtaacgggttggatatctcatcagtcactagtgctgctgcaggagcgacgctgacctggaatgacgactttagcctggggttcacttatacgctttacgccgaaggcggcggcggaataatcagctataacgccccagggatggcagcgccggtggagattgatttgtccacctatgcagcgggtatgcagatgatcccgatgccgtcgatgccgactgtaggtagcggaacggtaacgataacgctggtttccggtagtgtgatgctttacggcgtcagtatccagaacgccacgcagccgggtgtcatcgtgcataagcttggtggtagtggttcgcatactaacaattgggtgaatgccgatgaaactcgctgggagacggcatttacaaccctgaaagcaaatctggctaccatcatgttgggcacaaacgaccagggggtgaagattactccggagacgtttaaatcaaacctcctgacgatgattaaccgcattcgcacagcgtcgccgaccactgatattatgctgatttgtcctgcagaaaataaccgtccgggaggaaatactatcccaatgtctagctatgcccgggaaatgtacgaactctcccgggagcaggatgtagcattccttaatctgcaaagctctttcggagttcaccctgcagattatgcctatggttccgcgcgtccgtggatggtgggggatggattgcatcctgacccggatactggtgggtatgcgattgcagccgcactaatcagggctatgttgcttccacagatataa

SEQ ID NO: 109367 - DNA, 1434 bp, Enterobacter aerogenes
gtgtttgtggaaacattcaaatttacgaaaactaagctagaaagcttgccacctgccgaacgtggtcaggttgagtacggcgatgccattgttaatggtctgcgcatccgtattggtaccagtggcgtgaaaagcttctgtatctcccgcaagagaaacggcaaattcattcgtgccacccttggccggttccccgacctgaccattgataatgctagggcaaaagcccttgagctgctgggggatgttgccactaccggcaaaaacccgaatgccgtaaagcgaattaatgataaagcctcggtgacactccatgaggcgctggaaacatacattagcagccgcgctcaccggctcagcagcagctcagcaaaacaataccgctcgactctggagaacttctccggcgactggatgaaacagcctatcggctctatatctcgcgaacgtgttgaaaaccgccataaggccgttacggatggaaccgcatggtttggcccggacaaatctaccctaagggctggtgttggttctggaagcaaagcacaggctgacttgtgggctcgtgtgctgcgggcaatttaccgatttgctcatgatcactatcgggatgatgaaggaaagactctactaccagatcctcctactcaagttctcagcacaaaaagacagtggcacggtacggtcaggaaaacggatcgcattcgtactaatgagctggccagatggtttaaagcgctggtggcagtccgtgacagagcagaggaggggcgcgatgatattgctgcggctgtatgcgatgccgtagaaatggatatttttaccgggttgcgtaagtcggagattctgggattaacctgggatcgcgtgaatattggtgcccggtacttctggatcgacacctcgaagaacggcgacccgttggagttgcctatcaccgaaactctgcgaaaacttttccgccggcgcatgaagatgaagacgggagaggagctttatgtgtttcccggcattaacggtgagatcaaagaataccggcatgttatcgaccgtatcagtgcggccaccgttccagaccctaatccggatatggtgaagccaattcctttcaagtggcatgatggccgccggacgttcggcacggtcgctgagctggtgggcgttggtaactatattctgaagcggttgctgaaccatcgcacgatgagaagtgctgatgttacccagggttatctccatttcagcgctgatgaactgatggagccagcatcgaggattgaacgggccatacttgagcacgctggactcattgaacgaaaaaagggattggatgcgcagcttgtatccgtactgggaagcctcagtgatgaagaaaaacgaaaattaatattttcaatactgcaaaacaataaaggtgaagccaatgaaatttaa

SEQ ID NO: 109368 - DNA, 612 bp, Enterobacter aerogenes
atgaaatttaaaaagactactcctctggtcagggataaatggtcttactctgaggctgagatacatgaaaagatagcagcagactctgcgcgggctgcgatgaaatttgctagtagaagtattagtgggttggaattattgaatgatactcagcgccttgagttggtcagggaaatggattcatgggattattcagaagctttaaagggcggcagggctaatgaagctataaacagaatggtctttatatttcagatgttggggctaaaagagagtgcgttttttttgggtgttatagcatgtcatgcggttggattacgtcaatttgacgatgtactcgaagaattaaaaggtaagaaatttatttcccaagtaaataaaaagaaagccagtaaaccaagaaacaaatactattatgaggtgatggaggtcattaggttgacatgggagaaatatcccgcagccagcccaacaggaatacaggaaaaattgtccgtccattaccacggaaaggtaagccgtggggctttgggtaactgggtgaacaggcatgaagcacggccagcaaagcctgaaaagtatcagcgttttgacttggttttcccccaatag

SEQ ID NO: 109369 - DNA, 204 bp, Enterobacter aerogenes
atgaatgtggtttctcaatcctctaaaaaactaacccgcagcgaagccgctgaggcattgggtataacaacccagacgctggcgaactgggcctgtactggccgggtgaaaattcctttccataaagttggccgcaaggttatctatctgcaatccgatctggacgcttatctcgcatcaactcgcagaacgcaaacggcgtag

SEQ ID NO: 109370 - DNA, 468 bp, Enterobacter aerogenes
atgtctgtattcataacagttttatctggtgttttagtttttgttattggtcaaatagttgtaaaactaataattgaaccgataaatgattttaaaaaagaaagatcaaagataatctacgatctagtattttatgcaaataaactagctaatccgaaaagccctgataatacggaaatggaagaggtatgcaaaattatgaggcaacattcatcaatgctgcattcagcaagccacctaattcctttttacaaatattttgcctttatttttggtctgcctacaatcaaaaatgttaacgaagcaaccagcaaattaatatatttatcaaacggctatgcaggtatatttgataaccaagcgattttaaacgcctatgctatgcaagagattaaaattgctttaggtgttcctattccccaaggggagatgttagaccccaagcttaaaagagatttcataaaataa

SEQ ID NO: 109371 - DNA, 351 bp, Enterobacter aerogenes
ttgacaaatcaggcgaggctctggccggaaggagaggtatttacccgtaaggttttgataccgacaaactacgatccactacccgttgaggtggtttatgttgtcccaccattcgaggtcgtcgttgctctatggcagaacaaggaacatgaaaaaacgtatccgctgttccgtcagtttattcagggctggagcctggaagaaaaactcaccgataacgtacttaaagcctttctggcggcttactcgggtactgcggatgctattttttatggttggtcagaatatatgaaagtctttatagctgaatgtcaaagagagttaagctttacgacacttactattaattga

SEQ ID NO: 109372 - DNA, 789 bp, Enterobacter aerogenes
atggctacacaatttgaaaaacttaaagaagaacttgccgaactagacaaaatgggccatcaactctttttctcaatgtataaagaatgtgaccaacttgatgaaaaaacaataaaagaaattgaaaaaaaaggttggacctttgttaaggtagctaacgaatatcaacaatggtatacaaaagcttatcgagtcgtttcccagataattcctgagagactggaagagtttgaaagattatataaaggagatcccaaacgaaaagaagttacgtatggtaactattgtatttcagactatttaattggattaatacgaaaaaacggattaggagagcttgtaaggaaaccaagcgacgctataagtaaaatggaaattcaatataaaatcctctcatccgcaaaagaaagatttaaaagcgttctatttgatataaaagacattgtacaagctgatatctttgactcagagctagatactgctagagaacttaataaaaaaggattcattcgtgccgcaggtgcagttgctggagttgtgttagaaaagcatttagcacatgtctgtgagctccataaattcaaaccaaggaaggcccacccttccatatccgaatacaaccaaatactaaaagacaatgatattttagatactccaacctggagattcattcaacacttaggggatattagaaatatttgtgatcatggaaaagatagagaaccgactaaagaagaagtaagtgaacttatagctggcattgataaaataacaaaaactgttttttaa

SEQ ID NO: 109373 - DNA, 147 bp, Enterobacter aerogenes
atggatactgtcgaaaagggctcagacctgctgtctaagcgtatctatgctatgagcggtcttatcatggctctagcaagtgccgggcttaatgcctctcttgttatccttgtaagcatcgttctggtctttctgctacgtagatga

SEQ ID NO: 109374 - DNA, 933 bp, Enterobacter aerogenes
atggaacttctagattatattgctaacggtctttttctcagtgacgcagaggcgagaagatatatttcaactattcctcggcgttataaaaaatatcatatcttaaaacgaaatggtaaagactttagattaattgctcagcctgcgaggcaggttaagtcgctacaatctgctgttttgaatcatatatctgatgtgctacaagtgcatgagagcgctttcgcatatgaatcttcaaaaggtattaaagccaatgctttaatacattgtacaaatgactatttgcttaaaatggatttcaaaaatttctttttaagcatcaagccgttcaattttttgcgaaacttgaaagagtttggcattgagctaagtgaaactgatgtatttgtaattgaaaacctttttttctggaagttaagaagaagtagtcctcttcgactgagtataggcgcgccttcatccccgaagatttcgaacgttgttatgtatttttttgatgaaaaaatgacaaaaaaatgtgcagcgcttggaataacttattcgcgttatgctgatgatttgacattcagcactaaagtaaaagatgtgttgttcaatgtacctaagatagtgcgtgaaatacttaatgaagtaaaattaagaaatataaaaataaatcatgaaaaaactgtgttttcatctagaaaatttaatcgtcatattacaggtgtaacgatcactccagatggtcatctttcattggggcgagagagaaagcgccttcttagaagtaaaattcatcactacgtcagtggcgtattgtcttcaaaagaaattcttactcttaaaggggaaatgggttatgcaaaattcatcgaacatagcttttatcaatcaatgattaatcgctatggtgtagcagtgattgatgcaatagctaagtacgagatctga

SEQ ID NO: 109375 - DNA, 876 bp, Enterobacter aerogenes
atgaatgcgctccctatgagtgttcgagaccatatatttacatatgtggctgggcataatcctgttttatccgactcccttgtattggctgaaaacttccatgattattttaaagatggcgcttattctgatttaatgagttttgaggacgacattgcaaatatatcaactcttgttgttatttgccttgaaagtgctggatctttagtcgaattggggttgtttgtaaacaaaaaatctcttgctcagaaattacatattgtagctccgttggcggaaattgaagggaatgaagagaaaaaaatcccaccaagatcttcttttatatatttaggccctttggaatatctcaaaagaatagatgatgcttcagtatctgtctacccatggccaaaatctgagagtatgaagtacgatgaagttgagttgatctatcacgatatatactccagactgaaacgagttaaaaaaacagagcgttataatactgagaatactggacacctcgcaatattaatatatgaaattatacttttatcagagcctattaagaaaacagaaatagagtgggctctatattgtatggacatagatgtacctcaaaaaatcatctctcggttactttatttattgggtaaaatgaatttgacatcgtctctgtcatatagtggtaccgattattattattcccgcggacgcagagaaagcaaactcaagtttggtattagcgctagtggcaaaattaaagactctatgaatattaaagtcgccatacgtcaatcttaccttagcatggatgctagggatatggatgagacagccaaaaaaagaaaaaatgcgcttaatcaaataaatattgttcgaggaggtgcttga

SEQ ID NO: 109376 - DNA, 267 bp, Enterobacter aerogenes
atgaccatttgtaaacaatcacaccgttacaacactcttttcattagcttacctcacgatcaaggtggtgaaggtcgccataaatgttgtggctgcgcttacgatcagggttaccgcgctggcctggctcgcacaggtcaggtttgggtagacttaaccgccttacctgatagtcaggcgggaaccgttcgtcacaaaagccctcaggctgcttttgctgatggctatcgtgatggtgtccgtgattcctacaaacaagctatctaa

SEQ ID NO: 109377 - DNA, 225 bp, Enterobacter aerogenes
atggatcaagatctgataaagaaactcggtctggaacccacacatacttttaatcagacgagttttgttaataaaacaaaggggcgcttagatatcgatgtgattgtgtatgatgagtttgataagagcggtgtcagggttgcagaagtaacaatccatgatacaaccgagcgttatcctccattctcgagagagatttacttggaatcacgagtaaaagtttga

SEQ ID NO: 109378 - DNA, 924 bp, Enterobacter aerogenes
atgttctacgaatgcgccatttcaccagaggctttgtttgagatcgcaattgatcggagaaattatcgtgacttcatcaaaggattttctacgggcggtaactttctgtatagcgaattaccaaagctgaagagaaataaaaaacaattgctagagttattaaatgctaatcatagtgaacttcaaaaaaaacgattagaggatcttattgtttttttaaaaaataataaggttggtagggtttatgattatgttggtgacatgtcatggtcagataacatctctgctgtaaatcgaattgaacaatttgatcatatagtgagctctactccttatgataaccttgatgtaactaatatagatgatttctttggattaaattatgctcggcaaaaaattgttgctagaattgctggggatatgatatctataatctcacgcttattaaaaacatcagagcatattattattgtcgacccatactttagtgacaaacaaagatggtggaatgtatttatttcattacttagggttagcgctaataattcttataaaaaaaacttaaatatagatgttgtattcgatgggagtaaagaaaattccccaacggtaaattatttggctgataaattgaaccgtgaaaactttgtctttccagagaattttgcattagctgtaaattttaagtctttggctgcacgcgaaggtaatgaacgactgcataacagatacgttctttccaatctcgctggagtttgtttcgtgcatggtttagatgaaggagaaggaacagatgatgtctctattttatcggaagaggtatataataaaagatgggagcattacactacgaataatgtttttgatttaatcgaacagcgtgaagttatattttcaccattcttctttagtgatttcaattaa

SEQ ID NO: 109379 - DNA, 1623 bp, Enterobacter aerogenes
atgaaattaactaaacttgtacttgaaaatttcagatctgttagagaggtgcaggaaattgactttgcacctgtaacattgctattgggaccaaacagcgctggcaagactactattttaattgcattattttatcttcaacaaatattagaccgtgagcaatgtgatcctatatatttagaagctatggggaacaggcgcatagatggatttagatctctagtccataatggggatctgaataatgtaattactattggtatcggtttcgatcctgaacaaacaataggtgtagaatataaaacatattcagaagaacttagtgatattttcgatattcattttataaaaatgagagacattgcggatgaaactgaaaaagtttatgtagagtttaaaatcgcatggtcacaattgcacaaaacagcatatataaagaactatgctgtttctataaataatgaatttattggagagctaagtaatgatgagtatactaaatcatctttagtaaatagattgaactttacgcatccgttgcttcttcctattgattataatttatggcttgaatctattgataaggaaggattagatacgattgtcagtgaatttgaaatgtctttaaatgacttaattcctggcttagatcgtaataaaactggtgcaacagagcgagtaaaaactgttgattatatatttgaagaagataaagaaaaaacaatgcttcctgtttttttaaagacgaaaattggtgcattacctcaactgggaagaactgttgatacaaatttgaaagtttttgatatatccgagtcagttgagtattttaatcgagacataatcaccagagtgctaacgcaagtttttacttctccgttagataaattaaatgattatttaaagactagcgtatcaattggaccgttaagaattatacctgattcttcatttacgccaaatccttatccagaacaaaatggatggtttgatggtacatcagcatgggataagctgtgtttatctcaacataatgatagtgatttgattaaaaaagtaagtgattggttttccaatagagataaactaaacactaattataatatatttagtggaggagtatttgatataaaaacctcccctcaactcttaggtctgaaagataatgtttacttccgtaaaatagattcaagccaaatgttatttccaaatcaagtcggtgtcggattaactcagatcgcacctcttattattgcagccaatatagttcaggatggattaattgctatagagcagcctgagctacatattcatcccgctttacaactcgctgtaggtgatctgtttacccaataccctcctgatgttaaaagagctatgtttttagtcgaaacacatagtgagcacattttgcttcgaattttaaaaagaattagacaaacaacggacaatgaattacctgaatcaaattacccagtaaaacctgattttatatctgtaatcgttctcgaggataataatggttcgactgttattaggaaaatagatattactgatgatggtgactttaaacaaaaatggcccaaaggtttcttcgaagaaagaaggggagagcttttttaa

SEQ ID NO: 109380 - DNA, 1170 bp, Enterobacter aerogenes
gtgagttggccgatgggaaaagttaccgatattgccgaaattatatccggatttgcttttaaaagtgaatggttcggtgctggtgatgcgaaagttattcgaatcggcgatctaaagaacggtcgaattgatcttagtgaggctatggcctttgatgaaaaaattcataaagttcgcgcacagtatagagttaaaagtggtgatattttaatggctttatctggagctactgttgggaaaatcgcagttgctgatttagaggctgaaggggcgtatctaaaccaacgagtagccgttattcgaggaaaatgctatgaaaataccgagtatttgaaatacatatttactgggagtcgacttcaaaaactactcttaaatgcaggtggcgccgcacaacctaaccttagcccaaaagatttggctgagatggaaattccccttcctcctctaactgaacaaaaacgcatcgcaaccattcttaataaggcagaaaatatatgccaaaaacgcgagcaagccatcaaactagcggatggttttttgcgggctaagtttttagagatgtttgggactcctgcaaacaacatacatcgtttcccgaaaggaaagattcgcgacttggttgattcagtaaattatggaacttcagcaaaagcttctattgattctggcgaatatcctatattgcggatgggtaatataacgtatcagggtgggtgggattttaaagatttaaaatatattgatctcagcgtaaaagaaaaggataagtttttggttaaagaaggcgatctccttttcaatcgtactaacagtaaggaacttgttggtaaaacagctgtgtatgaagaagagcggccgatggcatttgctggatatttaatccgtgttagacctaatcctatcggaaataactactatatttcagggtatcttaattccacccatggtaagatcacattgatgaatatgtgtaaaagcattgttggcatggctaatatcaatgcacaggaattgcagaatatagagatattaatcccacctaagcatctacaagatgagtatgagattatttataaaaaagtaaaaaaaggactaagcatttatgataaaagcgcgatgcaacttcaacttttagcatcaaacctatcgaataaatatttcatgtaa

SEQ ID NO: 109381 - DNA, 930 bp, Enterobacter aerogenes
atggtacgaaaaagaaacaataactttgaaggtaaatttggtaaaacacctactgattactatctagaacactttaataagcccacaccgcctgttccaggtagtttcctgaatgatcactggctcagtttttcctcgtcagaacaacgtctggtaagttatctgaatgactcgtatcccgactggatacatcacattacattgaggaaaaactctgtaaaggaacgacacccgtcaactattcttcaaaactacgttgtcagcacacagtgcaattttgatacttttatgcgcttccttcttgaagacttaagtgaggaagatgaaattgaaaccggacttagcgccctgaaaaaacttaacgaccaagaatctgtagaagacccagattttacttcactgcatgtcaaaggcttgcgcaagggacttgatacggtaaatgagttactgaataccaatggaatggacaggtttgaagcagcttcttacttttttactctggcctttcattacctgagtgaaatgggccgcgaaaccgagaagtccaatgcaatgtttgaagccttcgaacaactgggggagtttcggggatggtgcagcaacgtacaggcccttgaatcagcgttaaaaaaacgcgaagatgcaaaaaatgccgcaaatgtaaaagccgcgaagaattttggcgctcacaaaaaagaagttactcgcatcctgaaagaggaaatactgccagagccaaactctaaactgaaaacagctactgcattacacaatgaactgggtgggaggcttgatgaattcatcatagctaacaatttgaatgaatcagctaactcagcaagcatgataaaagggtgggcgcgtgagggggattttaaagaacttttcgataaagctctatctgcgtgcaaaagacaacacaataattaa

SEQ ID NO: 109382 - DNA, 294 bp, Enterobacter aerogenes
atgaccaacccgccacgaaccgattatccggtttatgtaagctggcataacaacatagagactggacgaccacccctaccagacgttgaaagacgtacctgctttgcaatgggtgatgacatcttgctcagcatgaaagacatcaccgctcacagtgggcttagcgacaagcattactattcccttattaaacggggactgtttccccgaccgcttaaaataggtcgttcaagtcgctggagaaagagtgactatgaagcatggttaaatgagcgagacaccaattgcaagtaa

SEQ ID NO: 109383 - DNA, 1254 bp, Enterobacter aerogenes
atgacacaatgtgatcggggtaactgtaaaaaggatatactcagacgtacagcttctggtaacgtaggtctttgtgaagagcattatcagaagtttatgtttaatcaacaaaataaggagaagaaattattaagcatctgccagtattgcggttgttctttggcagagacaagaaatgaaaagtattgcagtactggatgccgccagaaaggttcacgtaaaatcccttctgatagcgttgtcagtattctgagttcatcatactcgcagcatattgatgaaacgattaaacgaaatccactctcattaggctctattactggaccgggggatgtggtggattttcaccagctatatcagataaaagcccgtcatcagcgaagctatgccattcctgcttacgaggggtaccagggaaaactgaagcttgtagcattgctgtgtattgaaatatgtcatatgtatccaaatggaaaaggaggtgcaaacatagcaggtaatttgattatagctcctgaattattaaaccgcagaaacagagatatagtaccttttcagggacatggtttcgatggtattaaatcaacaggtgaatatattccatttagtggaagcctttatgaaggattagttgaacgcttcggctcagttgccgtcaataattccttggctaaaataactcctgttaagcgttttcatgggaatgccgtaagagagatagatttcagcgggattgatcaattgctccccctatttaccttactgcatgaagaactttggcgtctgggataccggaagatcacagaatgtcttgcggagatccggcagttatatccgtattatcctttatatcttgagttgttggctgtcatcggttttcatgcagttctatccggcgatccagatcgttttatggcacttttatgtcgcgtgtttaacaagtatttcggttttacctcgcggatatcccgtccacacaagcgatgtgcagggctgatgtatcttctattgcgtaaatatctacgtcgatattttagcgtggaaattgaaagtaaagaggctgtggtggctttctacaataaactctattcacaggagatagtctcggtgagcccagtcaaggatctggtaatctgttaccagtattcaaggggagtcagaaggtccaccagcacgtttttctatatatctccacaagacaaagataactctatcgaattatggcatctgataggaggtgatttgcctttttaa

SEQ ID NO: 109384 - DNA, 798 bp, Enterobacter aerogenes
atgttacagaacaacatcaaacagctccgtacccagctatctatcactcagcgcgagctggcgtttatggtcggcactagccagcaacaaattcagcgtatcgaaaccgggaaggttgcggcaaagctgagtcttgcacaggcaatatgcaatgccctggataaacctctaaacgtagtgttcccggaaagcgatcggttgataaacgacttccgcaagaagcgtcgtaaaaccgatgaagatcttgatgcgatagccacaagcggtattgaaatggatagcggtctctggaccgtaaaactttggctacaggggcagcaggactatttgctgttgcccatttctgctacggataagcggaggttttattattattttcaggaaaaaaacaccccaaatatagaacgcttcttcgtttttgattcttctgagtatcgttatgcgttaaatattcgtgaagtgatatttcatcagttcctgtctgatggtctgcggccaatcgttgacgaagaggatgatgcctacgaagacgattattttaatgtccatatcacgctggtaaacggcggaccagtgattccactgagtgttgagcctgatgcgccgcaaaacgaagagacggatgatatcggccagttgaatgcgttctttgacacgctggattgcgagcctgaaacaacggatcgttttatgataaccgacgaagatggagaagatgctttcatccgtattggttctatcgctatggtgcgagtcgcgcttgacgcgttagaacctgtggaagatgatgaagagtaa

SEQ ID NO: 109385 - DNA, 1458 bp, Enterobacter aerogenes
atgaaaatgacacttactcagtcgattataatcaataagttatctatcgacgtgaaaccagatctcgaccagcaagggcgagtaatctacttacccaatcctgaacgaaagccgtatattatcactgacatccacagggattcacccgtaggtttcggtgtcaaaatcagtgccaccaaaaaaacctatatcattcaacgacgggtggcatcacctgacaagcgacccttgactggtggcaaggcaccgaaacaggttatcagatctacgattggtaatgtttcagattttgccaacattgatcaggcacgcgatgctgctcgcaaattcgttgaaactatgaagttgaccagacgaaatccgaatgcagtaaagcgagaagcagaggcttctgagctaacgatcagtgaagtttttgcgcaatatagaagtcatcttatgggcagatcgaaaccggcaaagcccaacacattaaatgtgctgaacaaagccgaaaaccgcctgaaagagtgggaaaatcttagagtaaaagatctgacaggcaacgagatattgcgcaagtttgatgagatcgcttcaagagccagaactgcggcagagcagacttttcgctgggtgaatgtggcggtaagacatgcgattgagatcgaagcgggaaatgcccagacacaacaacggcaaccgacactaagctacaaccctttctcaattctgacgatacagaaaaaattcagaacccgttcacagcttgaagaaagctatcgcgcaaaaggtgtacgaaacccactgtcgccaaaagacaccttggggcgatttttaacggcattgcacaacaagagaagcttcaaccgcctgggatgcgattatcttttgctgactgttctgacaggagccaggaaagaagaaacagcttcattgtgctggcgagaagctctgacagaagaagaagccagaacaaccagctatgttgatcttgaaaataggataattcgattttacgacactaaaaaccgcaacgaccatgaacttccaatttgtgatgctacgaagcgaattcttgaagaccgaagagatttagtcaacgagactgaaaagcgagtagataaacgcaaatgggtttttcctgctcggtcgtcgcgaagcaaagttgagcactattcagacagcaaaagcctgcgtgagtatatctgccaggaagccggaatagggaagttgggaatgcacgacctgcgaagaacctttggtcgtgttgcagaagggctcacttcatattctgtggtgaaaaggttgctcaaccatcgcaataccactgctcctactgaacggtatgcaatgcctgataatgatcgaatttatgaggcacttcaaagtattgagctccatatgcttatgactgcaccagagttgtataatacacttctggcttcggcgaaatatcaaccattgccaacaaattag

SEQ ID NO: 109386 - DNA, 639 bp, Enterobacter aerogenes
atgttggaagtgtggggaaggaaaacatcgtcgaacgtccaggccttaatgtggtgtatcggtgaactggaattgccctatcaacgatatgatgtagggcataagtatggaggcacagatactgatgacttttacctgttaaatcctaatcgaaccatacccgttatcagagatgatctggggccgcctttctgggaaacaggtgcgatcctgcgttatctggcttgtcgttacggacatgagaccttctggccaaaggatttactggaaagaacaaatgttgatcgctggactgaatgggcaaaaattagtgttgcaatgaactttaatgaacccattttctggagagtagtccgtacgcctgcgcatttacgagatccttctgctatcaaaaaagcagtcgaatcttttgaaaagcgcctaatgattgccgaaacgcagctatcgcgttatcaataccttgccggtaatgattttacacttgcagatatacaatttgggcatgtgctttttcgctacttcgacatagatatttgccgggcagagcttcctcagcttagaaaatactacgaaggcttgcgacaacgcttgccatatcgtgagcatgttatggtttcttatgaggaacttagagtttaa

SEQ ID NO: 109387 - DNA, 465 bp, Enterobacter aerogenes
atgccttacgatagcgtctacagcgaaaagcgcccgcctggtacgctgcgcaccgcatggcgcaatttttacggcgatgcaaccgcaatgatcggcctgtatggctgtgctggactggcaattctgtgtatttttggtggttggttcgcgccttatggcatcgaccagcagtttcttggctaccagcttttgccgccgtcatggtcacgctatggcgaagtctctttcttcctcgggactgatgacctggggcgtgatgttttaagccgcctgcttagcggtgcggccccgaccgtgggcggtgcgtttgtcgtcacccttgccgccacgttgtgtggcttattgcttggcgtggttgccggggcaacacacggtttgcgctccgcggtgctgaatcacattctggacaccctgctgtcgatcccttcactgttgctggcgattattgtggtggcttgggtatag

SEQ ID NO: 109388 - DNA, 966 bp, Enterobacter aerogenes
atgattatcttcaccctacgccgatttttattattgctggtcactttgttcttcctgacctttattggcttcagtctgagttatttcaccccccatgcgccgttacagggcgcatcgctgtggaacgcttgggtattctggttcaatggcctgattcactgggattttggtgtgtccagtattaacggccagttgatctcagaacaactgaaagaggtgttcccggcaacaatggaactgtgcattctggcatttggttttgcactaatggtcgggatccccatcggcatgttggcgggcataacgcgtaataaatggcaggatcgttgcatcagcgcattggctctgatgggcttctctattccggttttttggctggcgctgctgctgacgttgctattctcactaaccctcggctggttacccgtatcagggcgttttgatctgctttatgaagtaaaacccgtaaccgggtttgccattattgacgcctggatctccgactcgccctggcgcgatgaaatgctggtcagtgccatccgccatatggtgcttccggtgttaacgctctccgtggcaccgacgacggaagttattcgtctgatgcgtatcagcactattgaggtctttgatcaaaactatgtcaaagcggcggcgactcgtggtctgtcacggttaacgattttacgccgtcacgtactgcacaacgctctcccaccggttatcccgcgcctggggttacagttttccaccatgctgacgctggcgatgatcaccgagatggtctttagctggccaggtcttggccgttggctgattaacgcgattcgccagcaggattacgcggcgatttcggcgggtgtgatggtgattggctcactggttatcattgttaacgtgatctctgatattttgggtgctatggctaaccctctgaaacataaggaatggtatgccttacgatag

SEQ ID NO: 109389 - DNA, 1644 bp, Enterobacter aerogenes
atgcgcctggttttatcatctctgatcgtgatggctggatttctgagtggtcaggctgcagctgcgcctgagcaggcctcgtacgctgatattcgtgacagtggctttgtctattgcgttagcgggcaggtcaatacgttcaatccacaaaaagcaagcagcggtctcatcgtagacacattagcggcccaattgtatgaccgactgcttgatgtcgatccctacacctatcgcctggtgccagaactggctgaaagctgggaagtattagataacggcgcaacctaccgcttccatttacgacgcgatgttccgtttcaaaagactgcctggttcacgcccacccgcaaactaaatgcggacgatgtggtatttaccttcgagcgcatctttgatcgccagcatccgtggcataatgtcaatggtagcagttttccttattttgatagcctgcagttcgccgataacgtccaaagcgtgcgtaaactggacaacaacaccgttgaatttcgcttaaatcaacccgacgcctccttcttgtggcaccttgccacacattatgcctctgtgatgtcggccgaatatgccgccaaattagcaaaacaggatcgccaggaattactcgacagacaacccgtcggcacaggcccgtaccaactttcagaaaatcgtgcaggccaatatattcgcctacaacggcatgaaaaattctggcgtggtacccccttgatgccgcaggtcgtggtggatctcggctctggcgggaccggacgcttatcgaaattactgaccggcgagtgcgacgtcctggcatggcctgccgccagccagctcagcatactgcgtgatgacccgcggctgcgcctgacgctgcgtccggggatgaatatcgcctatctggcgttcaacacggataaaccgccgttgaacaaccctgccgtacgacatgcgctagcgctggccattaacaaccaacggttaatgcaatctatttactacggtacggcggaaaccgcggcatctattttgcctcgcgcctcgtgggcttatgacaacgaagctaaaattaccgagtacaacccggcaaaatcgcgcgagcagttaaaagcgctggggctggaaaacctgacgttacaactctgggtacctaccagctctcaggcctggaaccccagtccgctgaaaaccgcagagctgattcaggctgatatggctcaggtgggtgtgaaagtgaagatcatcccggtagagggccgttttcaggaggcgcgattaatggatatgaaccatgatctgacgttgtccggttgggcaactgacagtaacgatcctgacagctttttccgaccgatgcttagctgtgccgccattaactcgcagaccaattttgcccactggtgcaatcccgagtttgacagcattttgcgcaaagccctctcttcgcaacaactctcctcgcgaattgatgcctacgacgaagcgcaaaatattcttgcgcgcgagttgccgatcctgcctctggcctcttcgctccgtttgcaggcttaccgctatgacatcaaagggctggtgctcagtccgttcggcaacgcttcttttgccggggtttccagggaaaaggctgacgaggtgaaaaaaccatga

SEQ ID NO: 109390 - DNA, 393 bp, Enterobacter aerogenes
atgaaaatatcgttcgcccccttactgttctgttttttattgccatcagcgtttgccgatgataatggcggattgaaaaaagataccgccccgccacctgcccatgcactggatgaaggctatcgcggcactgaaaatgcaagaatcatgaccgtcgaacaagctaaaaccatgcatgacggtgcgaccatctctttacgaggtaatctcattgaggatcagggaggagataagtttatcttccgtgacaaaaccggcagtatcaatacgctaatcccgcttgcggtctttgatggccgaacgataaaacccgatcaaatgatcagcattaacggtagccttgacgctaaaatgcaaccgccggtggtgcgcgttaataaaatccagaagtaa

SEQ ID NO: 109391 - DNA, 504 bp, Enterobacter aerogenes
atgaacagagagaaaacccattttcaaggagtaaaagagagcctgcgttttctgaattttgaatctggctttcacaagattggttttatctgtttgctctgcattgtttttcttgcttcggtgggagcgttttccggcggatatttaagtgaggtgacgagaaaaaacaccttaaagacaacagggttacagtacgaaaggtttgggcgcttgcaaacggaatttaaatttaaaatctctgcacaaaagtatgattctgtgaacaagacgttgcgcattggcggcgatttcaacaaattttatgaaatggaaaatatttggccgcagccagacagcatgtacagcaaggggaacgatctttacctcgtctacaatgattctgaagcaatgcagaactttactatctggctgcgggttacgcccgtgaagccaggaagcgtaaagagttttctccagctaaatggcgaacctgaaatccgcttcagacaatttatttatccctag

SEQ ID NO: 109392 - DNA, 447 bp, Enterobacter aerogenes
atggagatggtcttccgggcatccgccatttaccttattttgctggtggttttcaaaatagcaggtcgccgggcattattacaaatgaccagcttcgatctgattttattactgattatcagtgaagcaactcaacaagccttgttgggtaatgatttttcgataaccggcgccatgatcacgattgtcactctggttactattgatattctgttcggtttcattaaaaaaaaggtgggtggggccgaatccgtgctggatggttccccggttatcctgcttgatcacgggatccctttattagataaaatgaagaaagtggatgtctctcttgaagatatattagtcgctgcgcgacaaaatcaggggattaccgaatcaagtaaaatcaagtatgccattctggaacgcaacggacatatttctgtcattcctgaagagaattag

SEQ ID NO: 109393 - DNA, 516 bp, Enterobacter aerogenes
atgaatacggagtacaatgacgcaaaaacagtcaatgaactgacaaaacggcttgcaaacacgctcattgatagcgatttaacgttgaccaccgcagaatcctgtacaggaggaaagctggccgcggcgctttgcgcacaggcggataccgcagaattttatgatatcggcgttataacctttagcgatcgcgccaagcagaaaatgctcgacgtgcgggccagtacgctgaagaaatatagcgccgttagtgagcaaacggtcagtgagatgtctgtaggaatacgtcagcaagccgaaaccgatatcagtatagccatcagcggatatgcagggccggagggtggggaggatggtactcccgcaggaaccgtgtggtttgcgtggaatttccgcggacagataataacaaaacgtgagtgtttttccggggattgccaggacgtcattgaaaaggcggtacgttttagcctggcggtattgattgaagaagtgtcagcctggaagaacaaataa

SEQ ID NO: 109394 - DNA, 909 bp, Enterobacter aerogenes
atgactgacctaaataaaggaaaacagaccaccaataaaactaattcagagcgttttccgcagccgccttttccacatcaaaaacaaccttttccggggctcgccggaaaaatgcaaccgcgccccgatcatggcgaacaaagctatcagggaagcggcaggttaaatggtcgcaaggtattaattaccggtggtgattcaggtattgggcgtgctgttgccattgcctatgcccgcgaaggcgccgatgtcgcgattaattatttacctgaagaagaggacgatgctcgtgaggttgttgagttgataaaaaaagctgggagaaaagttgcggcgattcccggcgatattcgtgacgaaactttttgtaaccatctggtaaaacaggcggtagacgcgctgggagggttggatatcctggtgaataacgcaggccgtcagcaattttgtgaatcgatcgaagacctcaccacagaagaatttgatgcgacattcaagaccaatgtctacgccatgttttggatcaccaaggcggctattccccatttctcccgagacagcgtgattattaacacctcatcggtacaggcttatgagccgagtgagatcctgcttgattatgctcagaccaaggcggcgatagtggcatttactaaatcgctggcgaagcaactggcccctaaagggatccgtgtaaatgctgtcgcgcctgggccgtactggacggtattgcagtgctgcggcggccaaccacaggaaaaaattgagaaatttggtgcaaatgcgccgcttggtcgccctggccaaccggtagaaattgctccgctgtatgtcactttagcggctgaagagaacagctatacatccggtcaggtatggtgttctgacggggggaccggaaccctctga

SEQ ID NO: 109395 - DNA, 648 bp, Enterobacter aerogenes
atgatgactctggcgttagttggcgaaaaaattgacagaaacaggttcaccggtgaaaaagttgaaaatagcacatttttcaactgtgatttttcgggtgccgaccttagcggcactgaatttattggctgccagttttatgatcgagaaagtcagaaaggatgtaattttagtcgcgctaacctgaaagatgccattttcaaaagttgtgatctctccatggctgatttcaggaatatcaatgcgctgggaatcgaaattcgccactgccgggcacaagggtcagattttcgcggcgcaagttttatgaatatgatcaccacccgcacctggttttgtagcgcctatatcaccaataccaacttaagctacgccaacttttcaaaagtcgtactggaaaagtgcgagctgtgggaaaaccgctggatgggtactcaggtgctgggcgcaacgttcagtggatcagacctctctggcggcgagttttcatccttcgactggcgagcagcaaacgttacgcactgtgatttgaccaattcggaactgggcgatttagatatccgcggggttgatttgcaaggcgtcaaactggacagctaccaggcatcgttgctcctggaacgtcttggtatcgctgtcatgggttaa

SEQ ID NO: 109396 - DNA, 990 bp, Enterobacter aerogenes
atggtgaatttcatcatggcaggatacaaagataatctgctgggcgaagcgaacagctttattgaagtgctggagcaggtttctcgtctcgcgccgctggataaacctgtgctggtcattggggaacgaggaacagggaaagagcttatcgccaaccgcctgcactacctctcaacccgttggcaaggcccgtttatttcacttaactgcgccgcgctcaacgaaaatttacttgattccgaactctttgggcacgaagcgggcgcctttaccggcgcgcagaaacgtcacccaggtcggttcgagcgcgccgatggcggcacactgtttcttgatgaactggcaaccgccccgatgctggtacaggaaaaactgctgcgcgttattgagtacggagagctggaacgcgtaggcggtagccaacctctgcaggtcaatgtaagactggtttgcgcaaccaacgccgacctgccacgcatggtgagtgaaggcacgttccgcgccgacctgctggatcgtctggcctttgacgtggtgcaacttcccccgttacgcgaacgtcaaagcgatatcatgttaatggctgaacattttgccattcagatgtgccgtgagatcgggttaccgttgtttcctgggttcaccgatgaggccaaagaaacgctcctccactaccgttggccgggcaatattcgtgaactgaaaaacgtcgtggagcgttcggtataccgacacgggaccagcgattacccactgaatgagattgtgattgacccgttcaggcgtcacgccgcaccgccgctggcgcaagaaaccagacatacatcagtaaccctaccgctggatctgcgtgaattccaacagcagcaggagaaggaatttttgcaaaccagcttacagcaggcgaaatttaatcagaaaaaagccgctgaattattaggtctgacctaccatcaactccgcgcattactgaagaaacaccaaatttag

SEQ ID NO: 109397 - DNA, 669 bp, Enterobacter aerogenes
atgggtattttttctcgttttgccgacatcgtgaacgccaacattaatgcgttgctggaaaaggctgaagatccgcagaagctggtgcggttgatgatccaggaaatggaagacacgctggttgaggtgcgctccaactccgcacgcgcgctggcagaaaagaaacagttatcgcgtcgtattgaacaggccagcgcccaacaggcagagtggcaggaaaaagcagagctggcgctgcgtaaagaaaaagaagatttggcgcgttctgcgttaatcgaaaagcagaaactgactgacctgattgcctccctggagcatgaggtgacgctggttgacgatacgctggcgcgtatgaaaaaagagatcggtgaactggaaaacaaactcagtgaaacccgtgctcgtcagcaggcattgatgttgcgccatcaggcggcgagttcttcccgtgatgttcgtcgtcaactggacagcggcaaactggatgaagcgatggctcgctttgaatcttttgagcgtcgtatcgatcaaatggaagctgaagctgaaagccataacttcggtaagcagaagtctttggatcagcaatttgctgacctgaaagcagatgatgaaatcagcgagcagttggcgcaattgaaagccaaaatgcagcaagacaagcaataa

SEQ ID NO: 109398 - DNA, 225 bp, Enterobacter aerogenes
atgagcgcgctatttctggccatcccgttaaccatctttgtgctgttcgtcttaccgatttggctctggctgcattacagcaatcgttccagtcgcggcgagctggcgcaaagtgaacaacagcgtctggtagaacttaaccaggacgcacagcggatgcgtgagcgcattcaagcgctggaagacatccttgatgctgaacatccaaactggagggaccgctaa

SEQ ID NO: 109399 - DNA, 360 bp, Enterobacter aerogenes
atggggggcgttaatctgaataaaaaactgtggcgtataccgcagcagggcatggtgaaaggggtttgcgcgggtattgcgcattatctcgatgttcctgtgaaactggtgcggatcctggtggtgctgtccatcttttttggtctggcctttttcacctttgtcgcctacatcgtactgacgtttgtgttggatccgatgccagacaacgtggtttccggagaacagcagccatcaagcggtgagctattggatgctgtcgatcgtgaactggctgcaagtgaaaagcgtttgcgtgagatggagcgttatgtaacgtctgatacttttacattacgcagccgcttccgccaattgtga

SEQ ID NO: 109400 - DNA, 231 bp, Enterobacter aerogenes
atgaataatcgctggcaacgtgccgggcaaagggttaagccgggcattaaaatagcaggtaagctggtgctactgactgcgctgcgctatggcccggctggggtagcagggtgggcggtgaagtccgtggcccgacgtccgctaaaaatgttgctggcgttagtattggaacctttgttgagccgggcagcgacaaaattgtcgaaacgctattcaggtaatcaaccctga

SEQ ID NO: 109401 - DNA, 822 bp, Enterobacter aerogenes
atggacgttctgcgttttatcctccgcttaccttttattttgctgcgtctggcggctcgcagtcttgtttatctctttactctgctgggttttctgctgcgcccgttcaccggacggatccgctgggcggtgccgggctgggtgacctttgccggtaatcagcttgcccggctggagcgggggggcaaccgctatccgaaaaccatatctgccttattattactgactgctgcggtggcagcgggcagttattacacctggcactggtatcagaacaaaccgaagccggtggatgttgcgccgctggtggtgcaggatatttccgcgtctgtgcagcgcccttcggcggttaattataaccgtgatgataattcagcgcagattgtggtggtgacattctcccgctctgccgcaccggtaacgctgatcggtaaaccggtcaccgccggtattaccctgacccccgcaatggaaggtgagtggcagtggcgtaatgaccgtaagctggtattcacggcgaaaaaaaccttcccgatggggaaaacctacaccgtcgatatggatgccaaaacactgctggctccgcaggtggcgttaacagagaaacaaaaaacctttaccacccctgagttttattatcgcggcggccgggcggagttctatcaggatccgcaagatccgatgaaaaaacacgccattatcggcctgaccttcaatgcccccgctgatgtcaaaaatctggaatcgcgtctgtctatgacccgtgacggcaagccggtgccgtataccgtcactgtaatgaactgttgtcatttatgctga

SEQ ID NO: 109402 - DNA, 1140 bp, Enterobacter aerogenes; identical to SEQ ID NO: 30086

SEQ ID NO: 109403 - DNA, 483 bp, Enterobacter aerogenes; identical to SEQ ID NO: 30084

SEQ ID NO: 109404 - DNA, 144 bp, Enterobacter aerogenes
atgaagttcgagtccagtcagaggagccaaattcaggacttcatgaagtcacgcttcgtgaagttatcaaaaagcctgatgatgctaatgtatcatcaggcttttttgttttactggtcagatggggtcagcctaaggtattga

SEQ ID NO: 109405 - DNA, 843 bp, Enterobacter aerogenes
atgaccaaagcggagatcgccagcgctgttaatgagtggttcaacattgaaaattacagcgtgcttaaggatttgacagtagaacaactttttcaagagatagagaacaggattgtcgcttaccgcatggggcaaaacagtggggagttgcctcctgaaagccgtcgcaggcatcagaactattacgaagaactgattgaaggtaaggtcgtgtttggtgatgttttcggggggccagaaaaaaggctgtcttccagctatgccatcaagcctgtcacacatcaggggttatgggaggtggcgggttatgtggctgctttcgataaatacgttaacccggaaggaaaacccctacctcatatggaagtctcgcattatctgaaggaagccggggtaaataacgaagggttgatgcttgttcaaattaatctggcggaaacgtcatccgaagaaatcatcaatcacctgaaagtgatggtgcctgagtggaaagaacaactacaggctcctgagcctccagccagagattttcgctttggggtcagcaacctcaagagaatactcgattacaacatcattcccatcatggatttgctgttctgggcgcaggatgaagaggtcaggattggtatgccgcagcttaccagttttatctacccggacgagtttaaagacggtattcgtgatgttgagaaaatgaagtctacagaccatccgttggcagtcaagtatctgacaaagctggctcgctatcagtcttttgtcgattttacatacagatacgacgacagaagacactggaaggttcaggatctcatcactgacgaactcggtgaggactga

SEQ ID NO: 109406 - DNA, 219 bp, Enterobacter aerogenes
atggttcaaatcaaaacagataaacatcccaagctcattcgtttaccagaggtaatgaacagaactggattcgggaagacatggatatatgagcttattaaagcgggttgctttcccgcacagataaaaacaggtgtaagagcaatcgcctttattgaaagtgaggtggatgcgtggattgaacgagctattcagacatcacgaaaacaagcagtttaa

SEQ ID NO: 109407 - DNA, 318 bp, Enterobacter aerogenes
atgagtaaagcaataacagaagtccacgaaatcaaagtttacaatgaatctaccagattattccttgtaaagtcattttattgctatgagctttatattagtaatatgcaggaatacatgggcgatagatttgttaaaatggttgaagacagaatatatatggatgatgtttttgacaaggtaatagaaaacagtaaggaaggatttaataagtttcttaaggagtgtaaaagctcaggctctctcagagatgttttattcgatgaggtcaaggtaaatctgagacatatgcacaacgttatttttaactcaaactaa

SEQ ID NO: 109408 - DNA, 237 bp, Enterobacter aerogenes
atgaatgataatattgcaatatcagtaagtctgctatgtgagcaaacacctgaaatattctgcaccatccaagcaagcgtcagtacgttcattgcgctatgtgggtattcagcagaggaaataatggatgatgaaaaccttacagacgcactgaacaggtatgttaataacgagcttgtcagtgaaatggatttaagatacggatcagtgatcattaatctggtttataaaaagtag

SEQ ID NO: 109409 - DNA, 297 bp, Enterobacter aerogenes
atgtctaaagaaactgtagtgacaaataagtctacacggctgttccttgatcttgctataagatcattggaggcaagctggaagctttttcaggaagtgaatggagatggagatgctaatgactatcttgatgatcctgatttcatgagtccatttattatgaacatcattgaccatattcagaataactttgagagatttacaacccaagaaggtgatagtgggagtattaatgaagttaacttcgagcagattgctgttgtgttggtgtgccattcagaacgattcaggaaatga

SEQ ID NO: 109410 - DNA, 468 bp, Enterobacter aerogenes
atgaggaaagtaaagttaaataacgacgatttaattcagtatctgaacaccatcaatacgttaaaacaatatccaacgatgtctgaatacagagaggaatatcgcaggctaagaaccgatggttcaccgttgagtgaagccaaaacatttaaatcggcgcataccgaacttctgagattagacaggaagaaaaaatcactactcgaaaaatttattgaagaactcaaccctgtcagtcacgcatcagcccttgcatcaagaaagcttgaaaaagtacaggagtccattatctaccgaaagtcattacttgagaaaagccctgatgaactcgtcgctctggtcataaaacagcgcacagaagcggctcttgagttccagcgttctgttgagcaaagtcttgcgcaactttcaaatatatcttctgactttaatgcatcagcaacaaagtgccgaaaattttctatctaa

SEQ ID NO: 109411 - DNA, 702 bp, Enterobacter aerogenes
atgagcattgattacaatacaataatgacctccagcagtgaagaagtggaagaatatatcaacagaaatcattttacagacaaacagaaactggagatttacagtttttataacagaaacagaaaagataaaataaccgtaaatgtgaaaaaagagagaagttctgatattcaaccgggaatatcctatgttcatgcttttcttgataatctggaaaagctcggaaaaaatatgtccggagcagaatacacaataatgatccgcttatgtaaactcatgcagcatggaaacctcattgccagtatatctcagtcggcactcgcagaagagcttaatatgagcaaatctaacgtgtgtaaatgctggaacaagctaataaataaaggcattctggtcaaagaagggaagcatacaatgataaacgcaaatctctttctgaaaggccagtacagaacattaaatgccataaggaaagaatatgttaagaagtcgctgagaacgaccagtgaaggcatagaaaacgtattcgtcaccgtttataaagatgcggtacttacaaacaacgcagaaaaaaccatcgataaaggagatgataaacctttactttctacgcccgacgaagatattgactgggactctgtttcagaagatgacatttttgttgattatcctgaatatgttgatcaagaagaaagaatgtag

SEQ ID NO: 109412 - DNA, 1116 bp, Enterobacter aerogenes
atgtctgttaatgatgcaaaaaaacttgcggacaaacttttcccagtatttgatgatgatgatgtttccatagttgatattcccccagagcagcgccggttgcatacagaaacttatgatttttcaatatcaacactagttgattatttgaaaagtggtgctgtttttattcctgattttcaaaggaagtatgtttggaatagagggcaggcatcaagattgatcgaatctttaataatccaatgtcctattcctgttatttatttgaatcaagagaaagacgagagtttatctgttattgatggcaatcaacgattgacttcaattaaactttttattgaggatggctttgaattacaggggctaacagcatacccagaattagaaggaaatttgttttcatctttggatgcgagatttcgcagacatattttaaatagaacattgagatgtataaccatattaaaagaaacccatcctcaaattaaaattgatgtctttgaaaggattaatactggtgctgtgcaattaaatccccaagaggtacgccatggcgtttatcatggtccattatttactatgattgatgaagtcagtgaagaaaaagtgtggaaagagttgacagggattaaaaatgatacgcgaatgaagaataacgagctcatattaagagcatttgcgctttcattttctaccacaccatataggaaaccgttaaagaaattccttaatacctttagttctgaaaatcaatatattgaacctaatcttgctttagagtggcgtagtagatttcttagggcattgaattgcattaataaattgttcggcaaaaaagcatttagagtcctaaatgaaaacctagagccgcaagtgaaaaactttaactctgcattatttgatgctcttattgtcggctttatgatatcaagatttaatcaggatttagtaaatgaattgaatggtatagcacttaatgattttttaataaatttccagagaattatatcagaggaacgttttaatgagtcgattacttctggcacatcagcgacgcaattagttcattatcgtattggcacaatgaaagcattcattgaacggtatttcaactga

SEQ ID NO: 109413 - DNA, 717 bp, Enterobacter aerogenes
atggcatacgttaaaagcgcatctaggaagcaattcgagcagattcatttaagtttgctcgaacaggttcgctatgtatcaaagataaaagagctaagatcagacattgtacatagtgtttataataacgcgatattcagagcatccgctgcattcgaagattatattaaggaggttttggaagattggattgatatgcttaacaacaataacggatgcctttcacacttacctgatgagattatattattctctttatttaaaaaccaagagaaaaatttcataaattatgtatcacatggatcagagtcgatgatgatgagcgacttgaataagtgtaaggataaacttcaggcgttatcgtcaccagattctcctgttaaaccagttattgtttcaaaacaattaattatggataaaaaatatccttccaaaaaaaacatcaaactcctttttaatagatttggcattaaagatatatttaaggcaatgactgtgaaaggtaagaaagattatgagtttatgcttcaatctttttctgatagccgtacggaattagctcattcttattcttccactaatattacgaaggaaactgttattgataacttaaataatgtaaaagagattactcagattctggatagaatattatatactcatatttgtgctaaaagtggtagtaaatactggaaaacagaattgttaattatttag

SEQ ID NO: 109414 - DNA, 1272 bp, Enterobacter aerogenes
atgccacttactgatactaaagtaaaaaacgccaaacctctcgataaggaatacaagctgactgatggcttcggtatgttccttcgcgttacccccaagggttccaaatactggcagatggcctaccgctttgaagggaagcaaaaaatcttctctatcggtgtctaccctgctgtttcacttgctgatgcaagacagcgccgtgatgaagctaaaagacttctggctcagggaattgatcctaacgccaagaagcaagccgaagttaaagagctgaaatccaagcgcgacaacacacgttctttcagggctgttgccaaggcgtggtttgctaccaagaaaaaatggtcagaagagtatcatcaaaccgtattgacccgacttgaaacctatatcttcccggatattggtaataaagacgttacggagttagataccggcgatttgctggttcccatcaaaaaagttgaagcccttggttatctggaagttgccacacgggttaaacaatacgtgacctctattttgcgttatgccgtccaacagcagcttatccgctataacccggcttacgatctggaaggctccattcagaaatcagaaacagaacaccgtcctgctctggagcttgaagagattccgttactgcttgaacgtatgggtgcctataaaggccgcagactcaccacgctggctattcaacttaacctgctggtgtttgtgcgttccagtgaactacgctttgccagatggtcagagatcgatttcaaaagcaaactgtgggttatccctgaacagcgagaagtcatcgatggcgtgaagtattcaggccgtggcaccaaaatgaagcgtaagcatttcatccccctctgtcgtcaggcaatcgtgttgttgaacgaaattaagcaactgacttatgaagaaggcaacgaagatggcttcatcttcacgggaagctacgacagcttcaagccaatgagtgagaacaccataaacaaggcgctacgtaagatgggctacgatacccggcaggacatttgtggtcatggcttccgcacgctggcctgtagtgccttaattgagtctggtttatggtcagaagacgctgttgagcttcaaatgagccataaggaaagcaacagcgttcgcgcagcttatacccacaaagccaagcaccttgatcagcgccgactgatgctccagtggtgggctgattatctcgatgctaatagaaacagtatggtcaggccgtttgagtttgctcaaatatga

SEQ ID NO: 109415 - DNA, 453 bp, Enterobacter aerogenes; identical to SEQ ID NO: 64554

SEQ ID NO: 109416 - DNA, 216 bp, Enterobacter aerogenes
atgaaagatgttttagatactttgcgccgagtgcgtgagaagagcaaacacactgtagacaatagctctttgaaagaactggatgatgcgattctgacccttgaaaagagaatcgagggtaattctaaaggccacacagccttagattatctttcttatatcgcgaagatatttgctttaattaaacttctgagcggtgattctgattttcattga

SEQ ID NO: 109417 - DNA, 252 bp, Enterobacter aerogenes
atgttagatattggttcaaccattaaactatgccgtgaagcacgtaagctcaccttacaagaactatcagatagaacagatttaactaaatcttatctatcccgtattgagaataatcaaagagaccctactatttcagcgctagaaaaaatatcattagcgctacatatccctctaaatatcatcatccttctttctgaaaatgaagaaatgctcaaaaaaactataatggatacattagttaatgcataa

SEQ ID NO: 109418 - DNA, 1614 bp, Enterobacter aerogenes
atggacgctgtacagaaagccaaatccggccaccctggcgccccgatgggcatggctgacattgccgaagtcctgtggcgtgatttcctgaaccataacccgcagaacccgtcctgggccgatcgcgaccgcttcgtgctgtccaacggtcacggctccatgctgatttacagcctgctgcacctcaccggttatgatctgccgattgaagaactgaaaaacttccgtcagctgcactccaagactccgggccacccggaagtcggctacaccgcaggcgtggaaaccaccaccggcccgctgggccaggggatcgctaacgcagtcggtatggctatcgcggaaaaaaccctggcggcgcagtttaaccgtccaggacacgacatcgtcgatcacttcacctacgccttcatgggcgacggctgcatgatggaaggcatttctcacgaagtgtgctccctggccggtaccctgaaactgggtaaactggtggcgttctatgatgacaacggcatctccatcgatggccacgttgaaggctggttcaccgacgataccgcgaaacgatttgaagcctacggctggcacgtggtgcgcggcgttgacggtcacgacgctgacgccatcaaacgcgcggtagaagaagcgcgcgcggtcaccgacaaaccgtccctgctgatgtgcaaaaccatcatcggcttcggttcgccgaacaaagcaggcacccatgattcccacggcgcgccgctgggcgacgcggaaatcgcgctgacccgcgaagcgctgggctggaaatacgctccgtttgaaatcccgtctgacatctatgcgcagtgggatgcgaaagaagccggccaggcgaaagaagccgcgtggaacgacaagtttgccgcctacgccaaagccttcccgcaggaagccgccgaattcacccgccgtatgaaaggcgaaatgccgtctgacttcgacgccaaagctaacgagttcatcgctaagctgcaggccaatccggcgaagatcgccagccgcaaagcatcgcagaacgccatcgaagcgtttggcccgctgctgccggaattcctcggcggttctgccgacctggcgccgtccaacctgaccctgtggtccggttctaagccgatcaacgaagacaccgccggtaactacatccattacggcgtacgtgaattcggtatgaccgcgattgccaacggtatcgcgctgcacggcggtttcctgccgtacacctctaccttcctgatgttcgtggaatatgcgcgtaacgcggtacgtatggcggcgctgatgaaacagcgtcaggtgatggtctacacccacgactccatcggtctgggcgaagatggcccgactcaccagccggtagagcaggtggcttccctgcgcgtcacgccgaacatgtccacctggcgtccgtgtgaccaggttgaatccgcgattgcgtggaaatatggcgtagagcgtcaggacggcccgaccgcgctgatcctctcccgtcagaacctggcgcagcaggagcgtaccgcagagcaactggcaaacgtggcccgcggcggttatgtgctgaaagattgcgccggctgcagccggaactga

SEQ ID NO: 109419 - DNA, 360 bp, Enterobacter aerogenes
ttgcgccggctgcagccggaactgatcttcatcgccaccggttcagaagtggaactggcggttgccgcgtgggacaaactgaccgctgaaggcgtgaaggcgcgcgtggtctccatgccgtccaccgacgcgttcgacaagcaggatgcggcctatcgtgaatccgtactgccgaaagccgtttctgcccgcgtagcggtagaagccggtatcgcggactactggttcaaatacgttggcctgaacggcgccatcgttggcatgaccaccttcggtgagtctgcgccggcagagcagctgttcgaagagttcggcttcaccgttgacaacgttgtcgccaaagcgaaagcactgctgtaa

SEQ ID NO: 109420 - DNA, 1149 bp, Enterobacter aerogenes
atgattgccgacatcgcttttcatgatcttgatagcgacaacccacatgctcacgttatgttgacattaaaaactataggaccagaaggttttggtaaaaaggaaaggagctggaacgacagaaaaatgtctgttttatggcgtgaatcatggtcagctatggctaacagctaccttgctgccgctggttcgtcagaacgtattgatcatcgttcccttcaggcccagcacgaggaggctttagaaaaagcagcagtagctttagataatgaagaaaaagcgctatggcttgctaaagccactgaaacgaaccgccctgcaatgaaacgtatccacagtgccaaatggcgtagtaaggcggctcaggaacaaagagccacagaacaagctgttcgtgatactgccaagcaggaagcagttgaagtctacaaatcattcagcgaacttgatcttgaaatcgtcgttgatgtcagaagctttacgattacacatcttgctgaaccagaagatattgtattacctaaaacacaccccggctcttctactgatgagaatcaaagacctgtattggtagcaccagctcctcatactcgtattcgtggcgttaaatcttaccgtgataaaacaaaagtcagtaaggtcgttgctggtaagaaaccagcagtcagtatttctgattctggaacaaatactaacctgaaaacatcctcctctcaaaacccaaacagggcatccagaagcgcccctgaacgcgttaagaggacacaggctattccacgtcaggataatatttttaaacgcttcacaactcttgtcatagattttttcaagcagaagtttgtatgggctaaagcaaacaaatcccaaattgatcttatcagtgaagaacatgataaacgtattgctgaaaactacgtctttgacgaggtattaggccgtcatatctctcgtactgaatatgagaaaaaagccaagtttaaccaagatgactataaaccaacaccggatgagatcaaccgtttcccaagtcgtcagaataacgagcaccacaatgccaatagagacatgggtctcaatccgtcgatacatgaaaacaaaaaaaataattcaccacaattgagaccatccagttatcgtgttaataaataa

SEQ ID NO: 109421 - DNA, 1107 bp, Enterobacter aerogenes
atgaataagatcaatgtctcattagatgataaagtgaggcattatgatattttgctttcgcttatattaactgcaaaagatttggagtctaatcaagataatattaccagcatcaagaattatttttctgatgaaataaaagtcaaattagtacttgatggtctcgacgaagcatatgccaaatatccaggtataatcgatgctataaatgaatttaaaataatgcatcctttaattcaaatattgatttccagtagagattgcgtgagttatctttcgaaagttaattttttaggtataactcttttacccttcagcgaacaacaactttataaattcattacttcatggtttaaaaataatgatgtaactcttggtgaacgtataattgaaagcattaaagggaaagaaattgcagaaatagttaaaactccccttcttgcaacattgttatgtgatcttgctgaaaaaggtatagatataccacgaagtgaaagtgaaattttcacaaaaagactcgaacttttttgtggtgtatatgatacatataaagctatacgtagaacgactctatcacaaagtattttgcaaaaagcagcaataaaaattgcttatgctttgcattctcgaaatcttcgttcaggcacaaagagtgatattataaagtttatcactaatgatagtagctttaattatgacaatgaaacctgtgctactgctgttggagagttaattgatccgtgcaatatgcttgttcatgatggaatatcaggaacttattctttcggacatttacgatatcaagagcatttagcatcactagaacttttacagaatagatcaattgaaatagttccttatttaaagaatgattggtggagggggactttatgtctttatgctcaaaattgtgaatttttctcacttattgaggaatttacattgaaatatcataatattcaatcggcattaattactctgcgagaaatgactaagtatcgtcctaaaaaagaacaagctaatctattatatttgattgataaatatgaaggtactgacgattcattttatgttgatcccgattgggaacatacagttcattggtaa

SEQ ID NO: 109422 - DNA, 663 bp, Enterobacter aerogenes
atgtctaaattaaacatacaccgtggtgtcctaactaatttaatgggtacaggtgtaagttttgacaactcgaaactttactttactcaatttaatcaaagtgaacttaacgccagttccttcaaaaatacggtgatggatgaagctaattttaaggatgcaaatatgattggttcatccttaaacaaagcaattgcccgtttttcaaacttcagtaatacaacacttaatggcgcgaatctgtctggcgcagatttttaccaatcaaatttcaatagtgctgatttgtcccaatctgaactcatatcggcaaatttacagcactctatattaacaaacgcgaacctaactggagcaaatattacaaatacagacttaagggattctataggattgaaacaagatatgttagataaagcttgtttttctcctaaacagccaccattgatctctcctcctttaactctccccaaacagagttgctataaaacagaagcagagcatgatgatcgatatgttctgcaatatgctcttaaagtcacagggatgatggcagtcattaatggattttgtgataagggtaaattaattgacaggccttcagatgtatctggtagacctgacttgaatatagaaataaatattgccccaaatgccagataa

SEQ ID NO: 109423 - DNA, 312 bp, Enterobacter aerogenes
atgaatattgatgataaaaacagaaaaccaagaacagaaaaaaccattaagcaaaaaatagcatcagcgcagatgcgtttgaatcgtctcaagaccaaagaaaaatatttatccaagagcgcggagacacgcctgaagatcatccttggtgctgaagtggctaaagctgtgggttgtaaagtggaagaggtggataaagagttaatattaggactgatattgcaatcatcgaatattaatgcggaggctaaagcaagaattaaattacgaggaaaaagatttcttgaggatatggtgggtaggcaggaataa

SEQ ID NO: 109424 - DNA, 1386 bp, Enterobacter aerogenes
atgcaaacaacatcacaacaacaaggtgggcaacttaagcgcaccatgaaaacgcgccacctgattatgctctcgctgggcggcgtcattggcacagggttattcttcaataccggctatattatctcgaccaccggcgcggcgggcacgctgctggcgtatctgatcggcgcgctagtggtctggctggtgatgcagtgtcttggcgaactgtcggtggcgatgccggaaaccggcgcctttcacgtgtatgccgcgcgttatctcggcccggcgaccggctataccgtggcgtggctctactggctgacctggaccgtggcgctcggctcgagctttaccgccgccggcttctgtatgcagtactggttcccgcaggtgccggtgtgggtctggtgcgtgattttctgcgcggtgattttcgccctgaatgttatctctacccgcttctttgccgaaggcgaattttggttctcgctggtcaaagtgatcaccatcattgcttttattattctcggcggcgcggccatcttcggctttattccgctgaccgacggttcaccggcgccagggctgcataacatcaccgccgaaggctggttccctcatggcggcttgccgatcctgatgaccatggtggcggtgaacttcgctttctcgggcaccgaacttatcggtattgccgccggtgagacgcaaaacccgcatcaggtgataccggtcgcgatccgcaccactattgcccggctgattattttctttatcggtaccgttttcgtgctcgccgcgctaatcccgatgcagcaggcgggggtggaaaaaagcccgttcgtactggtgtttgaaaaggtcggtattccttacgcggcggatatttttaacttcgtgatcctgaccgcgattttgtcggcggctaactcgggcctgtatgcctccggacggatgctgtggtcgctatcaaatgagaagacgttgccagcctgctttgccaaagtgaataaacgcggcgtgccgctaaccgcgctgtcggtgagcatgctgggcggcgtgctggcgctgttttccagcgtagtcgcgccggatacggtgtttgttgcgctgtcggcgatttccggttttgcggtggtcgcggtatggctgagcatctgcgcatcgcattttgtcttccgccgccgccatctgcaacagggcaaagcgttaagcgagctgcactatcgcgcgccgtggtatccgctggtgccggcgctgggttttgtactttgcctggtggcctgcgtggggctggcctttgacccaagccagcgtattgcgctgtggtgcgggatcccgttcgtcgcgctatgttatggtgcttactatctgactcgtacacggaaattaacttag

SEQ ID NO: 109425 - DNA, 258 bp, Enterobacter aerogenes
atgaaagtttcactctcaaaatggcttttgatcctactctacttagtaattgctttacctattggaatatttattgcaacggttgccactcaagttgtaataaaattgttttattttattactagcggattgtctatggatttattatccatcgattatgtgaaaattttgaaaggcagcgttgttggtggcgttattggagctataggttgctggtttgtgtactaccagcactataggaaaaacagacgcaaataa

SEQ ID NO: 109426 - DNA, 333 bp, Enterobacter aerogenes
atgaacgaattagatgatctgcataataaaataggtcagttattagtggatgccggtcctgctaatgcgatgaagatcattgctcgtgctaaattatcacttgatggtgagtcatgtgagtatgagtatgattatcttgatcaagagggagatgaagactggttcgttcctgataagttagctagtcacgatcttagactactgttagttaaaatgagggatttttacatccaaaataatatgactaacgggaaaccagcatggataggttgtgaaataatcgttgatataccagaagaaaaaataagcataaaccttcaatatgatgattaa

SEQ ID NO: 109427 - DNA, 1398 bp, Enterobacter aerogenes
atgacggcatacggaacggagtttttctcaatgaacgatgtaaaccgactcaggatccttcaggatgttatcgaccgccgtcttaccacacgtcttgcagcaaaccggcttgagatatctgacagacactgccgacggttgctggagcgctatcgtgaacatgggccgctttcacttgttaaccgtcgtcgtggccagcctggcaaccggcaactcatgccgggcctcgctgaacgagcactacgaattatccgcgaacgctacgctgattttggcccgactttagcctgtgagaagctcgccgaggttcatgggctgtatctggccaaagagacagtacgcaagctgatgacacaggctggtttatggctcccccgcaagttacggccgcctcgtgtgcatcagccacgaccgcgtcgggcctgcaccggagaactcatccagattgatggctgtgagcatcgctggttcgaggatcgtggtccggcctgcacgttactcgtttacgttgatgatgcgaccagccggctgatgcagcttctgttcgtcagttctgagtccactttcacctattttgaagccacccggggctatctggagcgttacggtaagcctctggcattctacagcgacaaggccagtgtcttcaggatcaacaataagcaggccatcggcggagatggccagactcagtttggccgtgctatgaacgagctgaatatcaccggtatctgtgccaataccagttctgccaagggccgtgttgagcgggcccaccttacgttgcaggatcgcctcgtcaaggagctgcggctccgcggtatcattacacccgaggctgcaaacgcctttgccgaagagttcatggctgactacaaccaccggtttgcgaagccgccacgtcacgatttcgatgttcaccgtccgctcgagaataatgaaaatctggcagcaacattcacctggcgtgaacaacgtaaggtctcaaaaaacctgacattacagtatgataaaaagctctatctgcttgaagataatgaagaaaaccgacgttttcaggggaagtacattgatgtctggcagtatccggacggtaccatcgaactccgggctaacggtacttccctgcccttcataacctacgaccggctgggagaactggaccagggcgccatcgttgacaacaagcgcctgggacgtgctctggagatgataaagctggttcaggacaaacgggacaacacccgctcgcaggccctgccatcactggacggccagacctcacgcagaaagaaacagcccggaaagaaatcacaaagaagcctgaaccaggacgacatgctggaagctctgcagcaactccagacaagaagccaggaaatctttggcaaaagctga

SEQ ID NO: 109428 - DNA, 801 bp, Enterobacter aerogenes
atgccgctgccaattaaagtccaaaatggtggcctgtttatctctcgcggcatcggcagccacccggcgaggaagttacagtcctgggagatcatttttgttgaaaaggggacattaacgattcgcgaagatgaggagacattctgcgttcgtgccggagaaagtttgctgctttggccggagcggttacatgtaggtgtggaacaatttccggcagaccttaaattctactggctccattttgaaatgatcccggaggcgttggtttcatcatgtcagccaaaaattgcgctgccgcagcatacccgcgtagctgaacctcaatatattatttcgctattccgccaattcttgcgtgagcaggaaaatattcatcgcagcgtcgcgctggaattaatattgctgctgattttgcagcaactttccgccgctgcagaagagttgccggtcgatactcctggtaatgcgttggcgtggaaagcacagcagataatccttacccagtatcatctgccgctttccgcggcgaccctcgccaaagaactgcactgcaacgcggactatctcgggcgggtttatcgccatgcgtttcatttaacgctgaccgacgcattacaccgccaacgggtaagggcggcggagaagctgttaatcagcgattcattatcgcttagcgaggtggcgcggcagtgcggctttaacgatgtgggctatttccgcaaaatctttcgcaaacataccagcctgactcccgcggcctggaagcgacgctactgcaaagagcacattaattcggcatag

SEQ ID NO: 109429 - DNA, 1401 bp, Enterobacter aerogenes
atgacttcggctccgattaccacaagtgaaatagcgcaacgcgcgcaggacgacacgttatccctccgtgaaaaaataggttacggcctgggagatgccggcgggaccgtgattacctgcctgatcatgaattttctgacctttttttataccgatgtctttggtctcaccccagcgctggtcggcacgatgtttcttgcgctgcgcgttttcgatgccatttccgacccggtcatgggcgtgctggccgaccgcacgcagagccgctgggggcgctttcgcccgtggcagctatggattgcggtgcccatcggcattatcggcgtcctgaccttcacggtgccggatgccggcatgggggtaaaaatcgcctgggcgtttggcacttatctgctgctttctgtcagctacaccgccatcaacgttccctactgcgcgttaatcaacaccatgaccagccgccacaacgaggtgatctcctgccaggcgtggagattcgtcctgtgcggcgtggccggttttctggtctccgtcggtctgccgtggctggtgaaagcgctcggccagggcaatatcgcacagggctatcagtacggcgtcggcgtactgtgcgccattgccgtggtgatgttcctgtgctgctttttctgggtgcgcgagcgcgtgtcgctggatgtgatgggcaaatttaccctccgcgaacatgttgccgggctgcgtaaaaacgatcagctgctgctgatgctggtgatgtctttcctgctgatcaacgtgtttaacatccgtggcggcggctacatgtatttcatcacctacgtgctgggcggctcgaccggctacacctcactctttttcaccatggtgactttcgcttcgattttcggctccgtcattattaacctgctgtcacgccgcttcgatacggttaagctttactattacaccaacctgctgcttgccgcgctggcggtagcgatgtggttcctgccgaccgggcccgcctggcaaaccttgtggctggcggtcatcctcggcaacggcattattctcggcttcaccctgccgctgcatttctcgctgatggccttctccgatgactatggcgaatggaaaaccggcgtgcgctcctcggggatgaacttcgccttcaacctgttctttatcaagctcgcctgggcctcaagcgccggcattatcagcctggtctttattttcgtcgcctatcagccaggcgccgataaccaaacggcctcttcactggccgggatcgccgcgatggaaaccctactgcccgcgctctttcacctgttgctggcgttcgccatccgcgcctgcaagctcaataaccctatgatgtcgcgcatcgccaccgacctgcgcgcgcgtcacgttcagtcttaa

SEQ ID NO: 109430 - DNA, 1959 bp, Enterobacter aerogenes
atgtccgtaatggaagtcgatctgcacaagcttaaaattaatgatccgttcctcggtcagtatcagcaactggtgcgcgatgtcgtgatcccctaccagtgggacgcgctcaatgaccggatcgccgaggccgatccaagccacgcgatagaaaacttccgcatcgccgccgggctacaggaaggggaattttatggcatggtttttcaggatagcgatgtggcgaaatggctggaggccgtcgcctggtcgctatgccaacagccggatgccgagctggaaaaaaccgccgatgaggtgatcgaactggtggctgccgcacagtgcgccgatggctatctcaacacctatttcacggtaaaggagccgaacgcccgctggaccaaccttgccgaatgccacgagctatactgcgccgggcatatgattgaagcgggcgtcgctttctttcaggccaccggcaaacgccgcctgctggaggtggtttgccgcctggcggaccacattgatagcgtcttcggccccgccgaccaccagctgcacggctatccgggccacccggagattgaactggcgctgatgcgcctgtatgacgtcactcagcagccgcgctatctggcgctggtcaattacttcgtcgaacagcgtggaacacagccacacttttacgatatcgaatacgagaaacgcggcaagacgtcctactggaacacctacggcccggcatggatggtaatggacaaaccctacagccaggcgcatctgccgattgccgaacagcccactgccattggtcacgcggtacgttttgtctacctgatgaccggcgtcgcgcatctggcgcggctgagcaaggacgaaggcaagcgccaggattgcctgcggctgtggaacaatatggtccagcgccagttgtatattaccggcggcatcggctcacaaagcagcggtgaggcgtttagtagcgattacgatctgccaaatgatacggtatacgcggaaagctgcgcctctattgggctgatgatgtttgcccgccggatgctcgagctagaagcggacagccagtatgccgacgtcatggagcgcgcgctttacaacaccgtgctgggcggcatggcgctcgacggtaagcacttcttctacgtcaacccgctggaagtacaaccaaaagcgctgaaattcaaccatatctacgaccatgtgaagcccgtccgccagcgctggtttggctgcgcctgctgcccgccgaatatcgcccgcgtgctgacctcgctcggccactatatctacacgccgcgcgatgaggcgctgtatatcaacttgtatgtcggcaatcaggtagaagttgcggtcggcgaggagacattgcgcctgcgcatcagcggcaactatccgtggcaggaacaggtcaaaatcgccatcgattcgcctgtcgcgatcgctcatactctggcgttacgcctgccggactggtgcgaccatccgcaggtgacgctgaacggccttccggtcaccgaggatatccgcaaaggctacctgcacatcaatcgccgctggcaggaaggcgataccctggtactgacgctgccgatgccggtgcgtcgtctgtatggcaatccgctggtgcgccatcaggcaggccaggtcgccctgcagcgcggcccgctggtctactgcctggaacaggcggataacggcgaggcgctgcataatctgcagctgccacgcgatgcgcagttcaccacctttgaaggaaaagggattttcgctcataaaatgctgattcaggcgccgggctacaagctgacggcagaacaggcggagcagcagacgctctggcgatacgacagccccgccgctacccgcgaggcgcagacgctcacgttcattccgtggtttagctgggctaaccgcggcgaaggtgaaatgcgggtgtgggtacaggaaagcgcataa

SEQ ID NO: 109431 - DNA, 249 bp, Enterobacter aerogenes
atgacccttctgatgcggatgacaagaagtaccatgcggcagagcataaaaagctggcttcaggtatacagccacgtaaagtccgagatttttctaaggctttcggctgggctgtcgctcataacgacggcggtgttgagcggctcaagaatgaagatccagaacttggaaaattggttgttgtttactcatggtggaaccgcgctctccaaaacggtgttcctcagaaagattttgatgcttacatga

SEQ ID NO: 109432 - DNA, 213 bp, Enterobacter aerogenes
atgagaattacaatttcgggtgttggtggcgtgcctttggttgtctctcacgttaaaacgctgggtgataatgatctgataaatatcagcggcctttgtagagcgcttggcaacattccgcgttcttccttcatggaaaaagttgccagtatgggcttggaggcagcaattaagcactacctcaacgagaaacgaaagaagatgattaactaa

SEQ ID NO: 109433 - DNA, 336 bp, Enterobacter aerogenes
atgattgtatctacagaggaacgttcattccgggatgtcgttatttatcgtgacgacccggtattcagccacaagaccaaaacctttgccacactagcggtggacacggttcctggtacgctgcttacctcaactggtgaggcatacgccagcggtagcgatctgctaatcgcgctggatagtcataagtctggctctaatgttccggtgattgtggttgatcgtggctgtgttctgaaccgcgccggattgattggcaccgatgctaccgccgttgcgaatgctatctcccagattgaggccgatggcaaaaatcgtgtctctatttctgaataa

SEQ ID NO: 109434 - DNA, 2157 bp, Enterobacter aerogenes
atgtctaacggcaacattattgtaagtaaaaccgtaaatcaggtggagtggctggttgatgagtcaagtttcaaacgggcgctcaaaaggatcaagtctctcaagacagagcatgagaagcccgctaaagcgctggagaaggctcagaggcgtaccgcccagagtgaaggcaaagcagcactagccgcagcgaaagcccaggcccaacgcctttcacttgctcaaaaaaccgcccagcagcaacagaaaattgctcagtcacaggcgaggatcgaccaacaagagcaggcccacgctaaaaagatggctgctattaacgctcgtggtgcagtccagcaaatcaatcaggccgatcaactggcgaaacagaatgagcgccttgcccgtattagcgcgaaggtcagagcggcggcacggtcaagatcgatgacctataacccagatatgggtggcacagctcccgaaccaggattattagcagcgcaaacagcagcaatgaatcgcggccatgcttctatcgcgaatgatattatccagacgaaaaaagctatcgcactggaagagaagcgccagcgtgagaaagaagccagcctcaagcgccagagcactgcatacgataccctacgccgggccagcttgacgatcagccatatcgaaggtgccagcctggctgacaaaatgaaagcggtgcaggcaatcaaagaggcgacccggggttacgccgagcagcgttttaccatcgcagaaatgcgccttgaacttgctaaagcgactctggaaaccagacgccaggcacgattaaaccgccagattgttaaggatagagcgaaagctgagcgtgctggtcgcattaatgccgaacgtctgacccgtgaacgtagcgaacgtggttatggtggccttgctgccactggtgtaattgcaggtggttccctgattggctcaatgggtgttgctcgtgttggtcagaccctccaagggagtcttgaacgctccagagaggcgcagcaattaaggcagtatgacattagccagcttgaatttaatgctattcatgacgttgtacagaagcgtacagggtacgacctgactgtagataagtatgcgtccatgaataaggattacttcgagaaagcaggcgagctaataaataccggttcctttaaaactaacaagcaaggggtaacaacattcagcggaggtggtgaacttgctgatctggtgaatgcagttcttagcaaaaccaaccagcgaacagcccagaaggtgatcggtgaactccagaaattagacatgggaacctttgttacctacgtccggcagttgggtaaacaattcggctggacagagaattccatgcgtcattttcttgaggccatagacgatggttcggtgctcctcagcgggcttacaggggagggtgacgaggttattgcccgtatgcagaaactttctgctgaaggttggacattatcagaagctcagcaagccaacctcgataagctggcagcattaggagctgagtataatcgagtgcaaaccagtctctctgaccacttttcaagcgcctttgtgaatgggcttcaggattacgccaccaatacggatacactccgccagtcaatgaccggattaatcccgattgctgacaatctgggccaatcgctgggtgaactcacaactaacgttatcgcgtgggcctcgcaaattggcggagaacttcagaagggtgcaactctaccgaccgctatctataacaccaccgttgatgaaggcagcaatgccgcagcgcagtggattaaagataagacgggttttgatcctcgtgtcatcggtcagacgcttaaacagatttacccgtggctggatagttctgcacagaacaatatcggcagtggacaggcctggacaaatccggggttaacccgtggggttgctggattcagtcaaccacaactaacctttactccgcctgagccattcggttctacgggatggaggccagacagctccaggtttaatctgactggtgaggcgacggttaaagtcgaggttgagcagactctgaatgctggcgttttagatggtcttattgatacaaagatcaacgataacaacgtcagacagcagaatatgatactgggtatagccgattaa

SEQ ID NO: 109435 - DNA, 630 bp, Enterobacter aerogenes
atgaacagcagagtatcgcaaaataagccagagctatggattgaagaagatcgccgacttttctttgcagaaaccatcacaattaaagcaactggtgaatgtttcaacattgaggacaaacttgaaaagattcatacctacatgcttgaccaatataacagttaccgggctgatggtaagaatttctatgaagatcagcgggatattgcgactaaatgtaaatgcacgccaaaaactcttggcaagtggctgaaagttcttcaagcacttggtctacttatcattgatgagagccagaagagccacgcttacacggtgcggtcagtagtcagccaggaacacaacttgattttcagctatccgaaattgttgaacggcaagccgtcatacgaccatgaagaggcgcttaaacgcctttatgcatctcagagacgtaggaacgtaaaaaatcatcagccaaaaaccgaagagagcggtaagaatgagcaaaaaactgttgtggaatctgccgcgtctgttgctggaaaaccagacggcgtacctgttgtggatattcctgtcgatgctgatgtacctgccaatgatgatgcgatgaacctggatgaaatgtttaatgagatcccatactaa

SEQ ID NO: 109436 - DNA, 192 bp, Enterobacter aerogenes
atgaatttgaagattcaacagcacgtatacgccggacttttagaagaagcgaagcgccggggaacaactgttccaaaccttgcacgcgaagtgctagaaatcgccgcccatctttttgataacggtgaacctttacccgccttggggaatattaatggagaacataatgaacagcagagtatcgcaaaataa

SEQ ID NO: 109437 - DNA, 360 bp, Enterobacter aerogenes
atggaaatcgtccaaggtaaagacagctttaacgagatggcgaccggaattctggtgaaacttttcgcggcttaccctttccattcagaatttgattattcggactggggctggaacgacaagcgcagcgagctactgcggaacactttactagctctaaaggatatgggttacattgatataatctcatcaaccgacatggactacgccgctaagttaactccaataggcttaaagttgcttcaacagcaagcgccaggcgcaggcgataccgtgatcaacattctgaaaggtgcagcaggtgaaacccggacagcgctcatcggtgccatcatcggttggattttcggcgggaaataa

SEQ ID NO: 109438 - DNA, 1446 bp, Enterobacter aerogenes
atgtttattaaaaaactgaagatagaaaattttaaagggtatcacggggaagataatgagttggaattcaatatccctgatggagaaacggaaggtagtggacttaatatatttgtgggtgaaaacaacgccggaaaatccactgtatttgaaattatagattttataaaggatggaaccaaaaagaacattgaggatcttatatgcaaatcagattcggctaatattgctgagaagctttcagccgagctaaccttcactggaaacttatcagaagtaattgccgctcatgtacaagctaataaagttgcagcattcacctcgcatgtttttgaggacgagggtgttaattatttcagagtgaagaggtgtagtgaggtaggggagaagaaaatattattttggaacggaaatgaatttgttaacccaagtggtatagatgccccatttaagaagttttatgataataacttcatttgggctgatacaaacccaagcaatgaagcaaagtttggctctacaactatatgtggttcgcttctaaaagaaattgctttaggccatattgaaacggatgagtatagagcgttttctgagcaataccatcgcgtattcaatcaccctgaatcagagttgagacagaaaatatcattagtcgaaaatcaagttagagaggttttctcatctcaatttggtatggcagatatttctttcatttttgaagagttgcaggtagagaatttcttcaaaactatttccatcatgattgatgatggggtgaatgtcccaatgggagaaaaggggcacggtatgcaaagggcactagccctatcattacttcaggtgtacgctgagataacgtgtaatgcgcatggtgcggggattagtaaaccattttatcttttcattgacgaacctgaaatatgtcttcatccttcagggcagcaaaagcttttagaagctttaatgattatatccaaaagtagacaggtctttgttacaacgcattcgcctttccttttatcctccccttatcttaaaaatgtcggcttgtttgttttcaaaaaagagaataataagaatgttgtggagagggctgatacgtctccttggttcccttggtctccatcgtggggcgagattaatttcaaagcatacaatttagcaaccgttgaattgcataatgaattatatggttatttgcaggaaagaaactcctgccctaatgaaagagcaatggagcaatggttaagctcacaaggcatcgtccttagtaaagtatggacaaaagaaattagaaatgtggcgcaagctcctacaaatacaacattacaaacttttatccgtaatcatatacatcatccagagaatgttactatgcagtctaatcgttatacgcagcaggagctattaagttcaattcaacaaatggtaggattattatag

SEQ ID NO: 109439 - DNA, 729 bp, Enterobacter aerogenes
atggaaaagcggggagcgcctgagcttgcaagcaaagtacgtcagcgttgtagtgaggtttttcggtacgcgattgttacaggtcgtgccgaatacaaccctgctgctgatcttggtagcgctttgcaaggccatgagaaaaagcactatcccttccttaccgccggtgagctgccggagtttttgcaaaagctatcaagctactctggaagtcttattactcttcttgcaacccgtttgctcatgctgacaggcttgagaacagtagagttacgtctggctgaatggagtgaaattgacttcgataatcgtatctgggaaattcccaaaaatagaatgaaaatgaaacgtcctcatgtaatcccgttatcggctcaatccttgagcgctcttcgtcaactggaagaactaacaggaacctaccagcttatttttgcaggacgcaacgatgttaacaaagcgatgagtgaagctagcgtcaatatggtcattaaaaggattggctatgataagagagcgactgggcatggttttcgccataccatgagtaccattttgcatgaacagggctttaatacagcctggatcgagatgcagctcgctcacgtggataaaaacagcattcgcggcacatataaccatgcacagtatctggatggaagacgagaaatgatgcagtggtacgctgattatattgacaagcttctcagttcatcgacaaaaagttag

SEQ ID NO: 109440 - DNA, 930 bp, Enterobacter aerogenes
atgacaacgggtgattcagcatggcgcggaggatggggaaaactggggttctccgcgctcttagcgggcgggattgcctggggcatctggcactatggtgatcagatggggctgcataccccgttatttaaagggctggtcattgccggagccctgattttattgatgctgttccgccacggcaaaaccattacgctcgccattaaacagggctggtatcgtttccagtctaagcgaaagaatgttctgccagccgatgaaggccgcgttgaacagactgagccgcgtaacgtcaccgtcaataccatccgtgaagccatgcgtaacctctacggtcggtgttggggacataaaactcgcatccttctgataaccggtaccgccgctgaagtggagcaactgaccccgggtcttacagctcagctctggcaggaagatcgcggcacgctgttactatggggcggtgacctcaatactccagtggacagtgcctggctgaccgcgctgcgcaaactgcgtcgccgtccggtggatgggctggtgtgggtcacctcggcctttgaccagctctcagcaccagggctagagccgccgctgccggtaccgtctgaaagcaccatggattccctgtctcacgccatcagcgcgcgtatggaaacgcttggctggaaacttcctttctacgtctggtccctgcacccgcgcgctggtaagccggaagggcgcattacgcaggcgaccggttgtctgttgcctgccgggtgtcataccgaagggctggcagagcaactctcagccctgatatccggctcatcgcccgttgggcaagacccgggctatgacgatgacttccagcagatgcgcgaggaggtcaataaactctccggtgcggatgtgtggaggcgaccttccataatggaggattcgtga

SEQ ID NO: 109441 - DNA, 1155 bp, Enterobacter aerogenes
atgagctgggagcgtcagaaatcaacaatatcggctaagcccgaagaaccttcattcatcctgtggatgatgctgggtgttcttgcgctggtcgggtgcgtgctgttgtttgtcctgcatgccaatcaactggctgggccacttcaaacatttaatctttggattgttaccgcatcccctgcagttgtctggtttttctttctctgtctgcgtggctggctctataacaatgcatttgacagacacgaatttgaagccggtgaggcagaatatgcgcaacaacagtggattgaatggtctggacgcaatgtcgctgtattacacagcggtgtaatgctgcccgcaaatctgatacctcaaaattttattgcagccccgccaacgctggagcagagcacatccctgacccaacgaatttatctgcaagatcatgagacacatttttcagttctgttgaccgggttaagtcctgtactggcaaagttgcctttagatttagtaccagctgtcacgctactgacagattctcacgatgacatattggtattgcaggatgcatttgcgcaggcctggcagacagccattctggatctccctgttccagcgttgacgattcttacgtcaaagtccttcctttcactggatgagcgaattaagtcaccgacgctggatgtggatttgatcctgattcaccagacacaggggcgggatacgtacagtgatgtgctggcagccctgttgctgacctccgatgatgtcgccacaaaatacaacctctcctttaacgcccgtcttttgcgtccaatggcacttgacatggcgatttcagaaaagtcattggatacatttttctcgacccagacccaggcttgtgccaccgccagtattgtcggcgacagcgtggagtggggtgatgcattttctgatttacttgcagcggcacaagattatgacggttactggaaacctgaacagctccactggctggagaaatatgccgggcttagcggccccttttctccatggataatggctgcagtagccagcgatatcgtgaatatacaaaaagccgactgtctgatgctctctacagatggtgagcagaaatttattaataccgtgcaaacagggaacagaaacgatgacaacgggtga

SEQ ID NO: 109442 - DNA, 267 bp, Enterobacter aerogenes
atgtctaaaggttttgtattgattggtgataacaccacgcacggcggccaggtcatttctgcctcatcaacaatggtagtaaatggcaagaaggttgccctcgtgggcgataaggtcagttgcccaaaagaggggcacggtattaatgccattattgaaggttcgcctgaatggacctctgatggcaaagccgtggttgtggatggttgccactgtgagtgcggttgtcaggtgatctccagtgcaccggattgtgtaataggataa

SEQ ID NO: 109443 - DNA, 636 bp, Enterobacter aerogenes
atggtgatttttaaagatgtacatcacaaaccattaatgttctatcatgcttttgtgaaaggtgtttttatgaaaccattttatgtattagtgttattttttacctccgctctgtgttttgctgaaactgtcactatagatccaacatcaacaactaaagcagacgatgcaaatacaatagccaatatgtatcgtatgggcatgggtgttccaaaggatatgaaaaaagcctttgaactctatcaggttgctgctgaactcggaaacacggatgctcaggtcgatttaggcgatatgtattattctggcgaagaaacttctcagagctacgaaaaagccaattattggtatgagaaggctgcgaaaaacagcaacgctaaagctcagatgtatttaggttacgcatatcttaatggtaaaggtgtcgctgttgattatgataaagccaaaaattttcttgaacttgcagttaaacaaggcgagccttcagccatgaatcatttgggaatgatgtactttgagggtaaaggggtaactaaagatcaaaataaggctatcccgctatttcaaaaaagctgctctgaaggtgattcgaatgcgtgtgataagttaaaagaaattaaagcagagaaataa

SEQ ID NO: 109444 - DNA, 663 bp, Enterobacter aerogenes
atgaaatcaaatgccagaattatctcgatcttatttcttttgggctctgttagtgcctgtgctagtgaacaacccaatagtcttaaaaccccttgggacaaatggtactttgcctttaccacaccaaaagctctaccagcacaggttacattgttaaaactgttggatgttgatggttatgcatcgacatatcggactatcgatcagccacaagggatcagtgtaggtaaatggagtgaacgtaactctgcggggaacacccagtttaataaagccgacaggttgccacagataatgatattttgttgggactcaatcattgataaaaaggtttatcagtccactttattctttactcaggatacttggaataagatgacaaccccttatcctgatgtcttagaacctggggaaaatgcatatcggcaaacgatgttaataggattagcgccggaaggaaaagtacgggtctggttgagacaatatggtcattcggatatcccattaaatgatacaaaaataacgactgtttcaggtaaagaccttgacatgtgcaaaggtgaaacgaactttcctaatggatatgaatatagcgagggtataaagaaatttataaatggaaaaaatacccttatggtaattggtaatcgttgtaaatggtga

SEQ ID NO: 109445 - DNA, 648 bp, Enterobacter aerogenes
atgaaaacaattaccagaataacttcggttttattacttgtgggttttgctaacgcctgtgccagtgaacaacccaatagtcttaaaaccccttgggacaaatggtactttgcctttaccacaccaaaagctttaccagcacaggttacattgttaaaactgttggatgttgatggttatgcatcgacatatcggactatcgatcagccacaagggatcagtgtaggtaaatggagtgaacgtaactctgcggggaacactcagtttaataaagccgacaggttgccacagataatgatattttgttgggactcaatcattgataaaaaggtttatcagtccactttattctttactcaggatacttggaataagatgacaacctcttatcctgatgttttagaacctgggaaaaatgcatatcggcaaacgatgttaatagggttagcaccggaaggaaaagtacgggtctggttgagacaatatggtcattcagatattccattaaatgatacaaaaataacgacagtttccggtaaagaccttgatatgtgtaaaggggtaacgggaagtgatttttcctatgggtacagtaatacaaccaaagagttcatcaagggtaaaaaatatccttatggttcatggtga

SEQ ID NO: 109446 - DNA, 648 bp, Enterobacter aerogenes
atgaaatcaatcgccagaataatttcgatcttatttcttttgggctctgttaatgcctgtgctagtgagcaaactaacagtatcaaaactccctgggacaagtggttctttgcttttactaccccaaaagctttaccggcacaggttacgctattgaagttgttggatgttgatgggtatgtgtctacatatcggactattgatcagccgcgtggcatcagtgtcggaaaatggagtgggcggaattcagcggggagtacgcagtttaataaagccgacaggttgccgcaaataatgatgttttgctgggactcaataattgataaaaaaacatatcaatcaactctatttttctcccaaaatgcatgggataaaatgatcgctccttatcctgatgttttagaacctgggaaaagtgcatatcggcaaacgatgttaataggattagcgccggaaggaaaagtacgggtatggttaaggcaatatggccattcggatatcccattaaatgataccaaagtaacgactgtttcaggtaaagatcttgatatgtgcaaaggggtgacagggcatccagatggatatatttactatggagaaactcctgattttattaaagataaaaagtatccttacgggagctggtaa

SEQ ID NO: 109447 - DNA, 1584 bp, Enterobacter aerogenes
atgagtgattaccatgcatgggaagccagtgattgcgagcatttcactgatgttaatatttccgagaaaacagttgtctgcaaacgaaaacccgttccggggataaccatcacgatcgggatgttttttgatggtacagggaataatgcgtttaatacccagaatcgcatcctggagtcctgctctcatcttgacgttggaatgaagtcagaagacgctgaagcctgtgctaaaaaactgggaaaaaaaattgataatgcagggagttatattggctattattcaaatattcactggctcaatacactttatgctaccaatgatgaagtaattgaagggcaatcagattatcaacgcgctatctatgtacaggggatcggtaccgataaggggaatagtgatagcacgataagtatggggacgggcggttggttttatggtgtggttgataaatctgatgaaggcgttggtctaattgctgaacagatttcacaatttctggctcttaaccaggggataaattttgcaatcgaaaaaattcagttcgatgtttttggatttagtcgcggagcggcagcggctcgccactttgttaaccgtgtaagaaacaacgataaagccatacagcaggccataacgaaagggcttggtggacgaaatcagcatggaaaacctgcaggtgaaacccgctttctggggttgtttgataccgtgtgcgcggtaggtacagtcagtaatctctttgatgttcatagtggtgtgaaccccggcgttgagctggacctgcctccagatattgcacagaaagtctttcagatcacggcaatgcatgagtgccgctacaacttcagcctgaacagtattaaggaattgtggccagaactggctttaccaggagttcattcggatatcggcggtggctataatccaagggaaaaggagtatcttttcctgactcagccccaaaacgaaactgtcagtgaaagtattccttctgaaatgactgatatctaccggcgttcagcggctgaaatacctgacttaaagagcctgccagcgttaagtgcgatcattccgagtggtgaagtaaagacagaaacctggtatgactatctggttaacgaggataaaaaacgtggtggcatcacacaaaagcgtgttggggcggcagtcactattgagagggtagtgactaatgactggagcaaagttagtttacgggtgatgctggatgcggctcaagaagctggagggatttttgaggcttataaccctttatcaccagatatgaaacttcctcctgagcttgagccgttgtgtcaaaaagcaattgaccagggaaagactgtaagaggtggtggtgtgccgacgccttttatctcaccggaattacagttgattggcaaatatattcattgctccgctcactggaatcctgtggttgtaaaagatgtctggttggacgggaataaagtgaaaaccatctacggggcagtgaaatcatccgatttgtttttttatatcaatcgcccaaatccggggtggcttcgagctgtctggaatatgcagggaggtaaatcatga

SEQ ID NO: 109448 - DNA, 2538 bp, Enterobacter aerogenes
atgagtctgacagatacgcttaagaacaccctgtctgcgctaactgaaggcgggctgaaccgctatcgtctggatattccgtcctgcacagccttactggatgtggaaactttcagcggtaaggagtttatgagtgagctttattactaccaggttatctttaccagctgcgatcaaaatatcagttcagcgcaactgctgactaagcctgccacgctgaccatggggaccgggcctctgatggggctgaccgggcagaaagtggtgcatggtgtggtgacgcattttaagcgtatcagtggctcacgtgaccaggcgacgtaccagattattattgagccgttcctgtctttgctgcgcaatcaattccgtacccaccgcttcttcgttaataagtcagtaccggaagttgtcactgaagtattgcaggagcatggcctgaaaggttgggagtatgagttcaccctcaaagctgactatccgaagcgtgaacagattaaccagtacaaggaaaacgatctcgcgtttattgagcgtctgctggctgaagtggggattttctacttctttaccctgcaacccgacacccagactgaggtggtgcattttgcagacaagcagagtgcatggacgttcggtaagtcgctgccactgagcagtccatcgggcatgagtgacaatgcagcagattcggtctggggggttaatgtccgacagaacgtagttgagcgctctgtcaccgccagtgattacaatcaccgtgaagcccagaatatcctgacttctgtaccggcagacatgacgaggggtgatggtgaaggtgtgacctacggtgatgtgtatcactacctgccgcgtcatcttgaacgcggcgacaaaatcacccccgcagccgaaaccggtaacttctgggcacgccttgaacatgaacgtttcctgtccgggcagacgactatcagcggctgtagtaatgatgccctgctttctccggcccaggtgctgaccatcagtgaacgtgtggtgtcgcctaccctgccatcagaaacggacaacggcattatcattacccgcacgagctatatcgccagtcgtaaagatgccctgatggtgatgtgggaggggatgccatattacgagaaccgatgctggcgacctgccgctaaaaagcgcccggtggtcagcggcaccctgatggcacgcgtgaccagcgccaaagataacgatatctacgcctggcaggatgcgtcgggcatgtaccgggtgaaattcgatgcggaccgcgacgacaaacgccagggaatggaaagtatgccggtacgctttgctaaaccctacggcggcgacaagtatggctttcacttcccgctgatacagggaactgaggttgccattgcgttccatgaaggtgacctcgaccgtccatacattgcttatgccctccacgactcccgccacgttgaccatgtcactgaggccaacagtacgcgcaatgttgtccgcacagctggcctgaacaagcttcggatggaggacaagcgcggcgaagagcacgtcaagctcagtacggagtatggcggcaaaacccaactcaatttaggtcacaatgtagacgcttccaggaagcttcgtggcgaaggtgcggagttacgcaccgataaatgggtggccgttcgtggcggagccggtgtattcattagtgcggacaaacaaccattcgccagtgacaaaatgctttccatgaaagaggctatggcacagcttgaaaatgcgttaagtatcgccagaagcctttccgatgcggcagacagtgctcaggcgtatccggcggatatccagagccagaaaatgctgacggatgcactgacggaactggcacagccggggatggtattgaatgcaccgcaaggcgttagcatcagcagcccggaaggtgtacgcatttcctcgggaagtgccagcgtggggatcgtcgcgcaaaataatgcagacatcagcgctatgaagcgtttcacggttgcggcaggtgaagctatcagtatgctggcccgtcaggcgggtatgaagctgtttgctgcgaaggggaaagtcgaaattcaggcacaggatgatgcactggacgctatcgccaagaaagatattacggtaacgagtgccgaaggcaaaattgaaattacagcagcaacggaactggtcgttaactgtggtggggcctatatcaagttaagtggcgggaatattgaattgggttgtcctggaaatattcttctgaaatgtgccaatgctcagaaaatgggagcagcttcgctgaacacgccagcccctgaatttccaaaaggttatggtggtgtttactctctgaatgacgaagaagggaaaatcatccctcagactgaatataaagtgacgacagctgacgggcaggtgtttcatggtatttcagatgataatggcaaaacactgccgatttataccacaatgcccggcaaattaaaagttgagatccttggaaccggcaattcaacaacagggagtgaataa

SEQ ID NO: 109449 - DNA, 228 bp, Enterobacter aerogenes
gtgctccggtataacgtcatgaagctttttatctttttagctttagtggtggcgggagtactgtttcttccggatacgtatttttacacaatcgttaagcgctttatccccatcactggtgacggcgaatacggcatgaacaattttgaaatgaccgttttgctgatgaaaatcctcgcctgcgccctcggggctggaaccgtaatccccctttttcgtactcgctga

SEQ ID NO: 109450 - DNA, 465 bp, Enterobacter aerogenes
atggtaaaagtgtttggttttggtaagtgttggcctgatgttttttctggtttgtgtctggtgattttaaccggatgtccaggcccgggagataggtttatcccccatgaaaccacttctgctagtaaacagggaaaaaacgtatgttttaacattacagatgctcaggattatcaacctgctgacataggaataaatccgcgcggaactccctcgaaggaaaaggactttaatttttcccctgaacttacgatcgttgatggaaaattatgtattcctccttctttttatcactttcctgataatgggaggtttattgttgaatatatattaatttcaaagaaacatgataagccacggaaatttgttgtcggcgtggggataaatcatggggtggtttacaattttccgttgaccgatcgtgaaattgcaaggccgtatggttcaattaaagtttctgaatag

SEQ ID NO: 109451 - DNA, 555 bp, Enterobacter aerogenes
atggctgatgaaacgcaggatgggttcagaatcaaagagggtggtgtcagactactcacggcgggggaaatacagctggcgcaatccgtttttttatccaccattgattattcgaaagtatggatacacagagaaagttatctccctttcaatttacaggataacaatacggcgatgaccccaaacggggagatctattttcgcgatcaatactgcgatgatttttcccagacgacagacgatcttcaacatatgttcatccatgaaatggggcatgtttggcaacgtgaaaaagggatgaatgtaatcttcagaggattggttagctggatggtgaactatcactatatacttgatggtcgtctcttaagtgaatattcgatggagcaacaggcacagattattgcagataattttacgttgcaaacgcagggatataagatatggcatcgattatggggcggtaaatatccaactattactctggatggtgatactactgaatcagtaatacgtgaacaatacaaaattgcgttacgggggttcccatggtaa

SEQ ID NO: 109452 - DNA, 210 bp, Enterobacter aerogenes
atgtctgtaaaaaatgggaatgccgctggtggcgagagcgtgttgctggaacgtcctgaggcaggtggggtttatgcatccctgtttgaaaaaatcaacctgaacccggtgtccgagctgagtgcgctggatatctggcaggacgcgcaggcgataccggtgcgcgtaacgttgacagtctgctcaatcagcagattctgccggtactga

SEQ ID NO: 109453 - DNA, 564 bp, Enterobacter aerogenes
atggcactggcacattttgcctggtgcgcactggtcgccttacgtaccgcgcagcaggatggtcaggcgttgtcgccgctcagtacgcatgcatttttgatgcgctggttgactgtggcgtataagcaaaaactgtttccgcgtgcaatcgtgtctgatattgagagtctggtggtactggggagccagaaaggccttgctgccagtttgcttaatcgtcttaagtatctgtggagttactgcacaggtcctgtgtcagctcagtcagatttgtaccgtctgacgtacgcaattgaacagcttaaatcgcagggctggatcaatgaggtggtgagtgacgaagactgggacaatgacgctcctttgctccaggaatacagcgatattgctgcacttctggtaaaaaagtcagcattgactcatgggttttcttatgagggcaagttgattgcaccgattgaatttcttgtgactgatgatttgtcatcctgtatggcggttttccagacccatgcactccatgttgtcgtgctgaaacctgataagatcgccatacagctctga

SEQ ID NO: 109454 - DNA, 519 bp, Enterobacter aerogenes
gtgcaaagcccgggatatcccgggctttgttgtttttgcagcattttcccgcagcgctgcgcctggacgggctactggtggtggggcctgtggggtttcccggcggcgctgcgcctggacgggctactgtggtggggcctgtgggatttcccggcggcgctgcgcctggactggctactgatggtgcggccttcgggattcccggcggtgctgcgcctggccgggctactggtggtgcgggctgtggggtttcccggcggcgctgcgcctggacgggctactgatggtggggcctgtgggattcccggcggcgctgcgcttggccgggctactggttggtgcgggctgtggggtttcccggcggcgctgcgcttggccgggctactggttggtggtgcggcctgtgggatgggtagcccgggcgaggcatttatgccgaccccgggaagggcggcggtgccacatgcgaaaaaagagcccgtactttcgtacgagctctcatctcgaatatggcggtga

SEQ ID NO: 109455 - DNA, 324 bp, Enterobacter aerogenes
atgaacaatccgctagttgtcgagacgagtatgctgatcgcggccgttgccgttggtgttattagccaaaatggcttgtccaaacaatctgatgcaagaaatattctctttctcgtctgtcttttagtcggcgtggctagcgccttgagcctattatttgatggccttcttctgctttttactggcgatttagctacaggcggcatgcgaattatagggccattcgtgttacttattattctgtggaaacccgtcaacgtcctggtgggaaaaatcgatgattttttgcagcgcaaagaagccaacagcaagcgcgaccattaa

SEQ ID NO: 109456 - DNA, 873 bp, Enterobacter aerogenes
atggcccgcgcaaaaactaaagccccaccactcttcggtgttactgaagttaatgatatttactgtgatatcagcaggaatataccacgaagtgaatggttaggcatcacgctgccttttactatggtactggtttctctgacagccctgtttattctcactccgttgatcggttatctccaggagcttatatttcttgtgcctatacttctcttattattatatagcggcatacatgcagtaagactattcatcatcaagccaaaatcgttgatggttcgactaaatcgccaggagcagaaaatttatgtccagaagcattgcatcaactataatattttttctcaatggcccgtcgaaacgttagttttcaactggcatgaggttattcaccccagttttagaaacggttccggttctgcaagttcacgaacctggtatacctggcatatcagcccaccagctagcccaagggtcaaagttgtcatcagcgatgataatatacctttgttttataacgcctctcgctattccattaaccttgaagatacgattctaaactatgccatatcctggcaatggtgtaacgactatatgcgcggtattaattctcccgtttatatcttgccaacacaccgctactcctttaaatattgcgtaactacgctgagcaatagaatgttgtcacgcgccgatgagagcgatcgctggaccaccatttttcccatctgcaacccattattctgggtgatatcatttttcatcgttccgctcattttagcagacgctctggcgctgtactggattatgcgaagacttccggatacggtctggtctcattccgcacaagctgaatcaacctcagaaagttaa

SEQ ID NO: 109457 - DNA, 240 bp, Enterobacter aerogenes
atggccatacttgaagatcagcaaaaaaagaatgacatcaaagacttcttcattaaatataaaaaaggttcagatttaaacgaacacgacatagagttgattaaaataatatgcatatctcgtgctgaacgagaaaaagctgctaaacatccttatgaaataatactaaaaaacatttcagggagcagtttaagctttggaaaaagcaagcttaaaataagcgatgaagaaaaaaaataa

SEQ ID NO: 109458 - DNA, 759 bp, Enterobacter aerogenes
atgacaactacccgcgtttatatcgatggtaccgtgacggccagccgttctcttggtcagattgctttccctatcactagtttacctgacctggtaccgggcatgatcctccagtgggacgttgacgggacaaccggctcgctggcacgcaatcgcgttggtgaggatatgacggttgtgggttcgccagaaatcgccagctacgccgcatcacttaatgagacggcatacattgatacggggatcagtattgccccctttgccaacagtgatatgacctttatcgggataacgaacaatcccggaggcaagtttaacgtggttggggtgatgcaggttgctgcgccgaaacggtcacggtgccatgagtttgaaactacgcataaaccaggcggtttatggctgaactccgccggtgcatcatggttttcagtgctggactcagcgccggcagaagctgctgcgccagatggtattttctctgtctccagaacggtgacaaatgatggtactggccgggttgggatccacgctgacttgccgataacgggtcagcatgctctggtgacgaatggcacagcgccttcaccgtcaatcaccggaaatatttatattggcgccagtcttgaccatggtactacagtaacgggtcaggtaatggctgtactggcttttagtcgggccatcaccgatacggaaatggcgaccatctaccgggcctacaaaagctattatgccgggctgggtaaaagtatctga

SEQ ID NO: 109459 - DNA, 2151 bp, Enterobacter aerogenes
atggcaacaccgttaccgactccaacgcagaacccggtgccaagtacggacatcagggatgctgtatttgccggcgcaaaaatggatgagattgtctcgtctgataacaaaacgtatatcgacaggctcggagtggagcgctatacgtgggctggcgctctcgcaaatatagagcctctcggtcatccatggacagaagcagaggccagcgccgctattgcatccggtgaaataccaaacatggcttattattttgtctggtctgacgataaaaataatgttgctgatgtctggcagaatatcaatggcgtgcctaccagaacgggcaaaagctacccatcgagtgattttgtttacggtttgcaaaaacaggtcgacttcattttcgacagcaatgcaaaaaacgtgacagggtttccggggatagctgagatggcaacagataagaatggcaatgtaacctatcagcgccttgaggacggaacatcacagttcccggctgtgatggtaggcagcagtattgagcaggttcagaaagctgatggctcagtgtttcagtcacgagcatcaggcgcttcagtgctgtcattgtccgaggatggcagcgtgggaatgctacggttcaatactttcttctctgctgactaccctgactatgccgaagttcacgctgatattaatggcgaaatcttcaaaatcgttaagcgcaatggtgaggttatagatctgcgtgatagcggagcagatcagagcgagccggttgtatctgccgatggcggaatggcaattgaagtaagcggaaacctcaaatttatttcacctgaaggggcaaatactgacatcacaactgacggggggaataccggcccggttacgttccgtgcagttgataacagttattttgtgaaattcgcttcgcaggagggcggcagcggtgattatcatcttcaccgcatcaaaactgatgggcgttcacgcatcaggcaggggcgcgctgagctggttcacatcatgcttgttggacagtcgctctctgttggcgcggcatctgtagttcaggctcccgtaacgacaacggccagatacccatacggggcggtgattttcaatggcggttcaaaatatgacagcgcacacgctgagaaatcagtcgcgctgtccgatttgcagtacctggttccagctgtggaaaacatcggtaaggctggatctcaggaatcagactgcagtggccttggcgagcgcctttttgaaaagggcggtgtgacctgtcttgtttcagctaccggggcgtccggcacatcactggcgaatatttcgaaagggaccgcctctttcatcgcgactcaactggtgatgcagcgagggtatgaaattgccagaagtctcggaatggcttaccagccttatatgctgttcattcacggcaatgcggacgcggtaaacaacaccagtgcggaaacctataaaagcctgatgatcagtcttcgtcaggactacgaaagctatctccactccctcaccgacgacggcgatcagtcactgaagatgtttgttcagcagttcagtaacgctaccgttcaggcgggggcggcgggcgctgacgttaatctcgtcattggcaatgcacagtatgagatttgtcgtgataacgaagaatttatcctgacgggaacgcagtatgcgcggccgtatgtcgataaagaccatctgtccagcaatggctaccggactgatggggaaattgccggtgtctcaattgctcagtatctgaatacgggtagcgtgctggcgcttcgccctgatgatgccaacatcacccagacttcaacagagatggtcattccactgcttggcggtgtcggaaatgcggtgattgataccgtccgggtatccgatccgggtaactatggtttccggcttgtcggcgccaccatcacaggggtgaccattgacgcgggcagaaccattcgaatagcaaaaacgggtaccgcaaccgcggtgaattacgcctacgtgggcaacagggcaaatatgccgggtgcaacgactggcagcaggggatgcatcagggactctgccacagatatttcgccagtatcaaaccttccgctttacaacgacctggtcgcttttaacaaaactctctga

SEQ ID NO: 109460 - DNA, 327 bp, Enterobacter aerogenes
atggtacggaaaatcatcaaacccactcccgacttgtttatgacagttggggcaataaaccgcgttgacgtagccaccagagggattttttctaaaggccgcacccatgtgctcgacaaactgatcctttgccctgtaagccgctatttccttttcaagttctacgtttttggctttcgtctcggcaagttcttgtacggtggcagcatgggctttctgaagtacgtcaatctgctcgccgatgaaagcgatacgctcgcgcaagacctcgttgctttgaacagcagagagggcgccaattccgttcttaagagaagcaataagtaa

SEQ ID NO: 109461 - DNA, 729 bp, Enterobacter aerogenes
atgactgaagaaaaggtgatgttctcaaggatatttaaaacgttagagttcagggaacagtttttggatggccgtatttttatgaaccccttgggtttttttaagagttatgatgaagaggttaaaggaaatatctcagactctcatgagggcgcatataaagtttctgatgcgaaatttttaaaaatgtcaattaacaataatttgattgaatctgccaacataattggtcctgtggtttttagtcacaagtggacggagtgtgtgaatattgtatgtttgacaattattaagccaataagaataaggtggaataacagtccttatgatacgagtgggattcaaactacttgtcattattgtttgcaagagggagcggagctgctaggtgactttggtttaatcatcactgacccttatgagtttcttaaaaggttgaaggtagcacttgatttaaaatatacttcaaaagaaatcaatgattataaagctaagcctgttacatattacagtgataaaaatgtgtatataaacctcaatgagtttgattttggtgctgttttctataaaaacgataaatacaaacaccaaaatgagtttagaattgcagtggataggcttatggttgagcaagagccttatgttttggaaattggttcaattagggatatttgtattgcgttagatgcacgagacaaaacacaaatcgaaaagatttattatttatag

SEQ ID NO: 109462 - DNA, 267 bp, Enterobacter aerogenes
atgattgttaatgaagagtttgtttttcagacttccacagtacatcccggtaatagattttacgtagtaaacgcgttaaaaggcgaccagcccgttgatgaaaatgggtatcttgtcatggttaatgaacgcggggacagagtggcttgtcgggtgccgggacatgaatggcagtgtgatgcgacgattatctccggatataaccctgagattccctcgtacaaaaatgcagttaaagttgcaataccgcctcttgaaaatgaatga

SEQ ID NO: 109463 - DNA, 522 bp, Enterobacter aerogenes
atggatactaatttcatagcatttgagactttgctcgccacacgagactctgcatactgggtcatgtggggggcaatagctaccggtatagctgctttcgcatcgtgtatgacacttatcattgcaggggcagcactcaatacgtggaaacaacaggaaaagactaaaataagaagtgaactcaagaggtctttacttgcattggattacgctgttcatatgatgcctgacatatggaattctttaactgcacagagagtaaatatcgcaatcacgcaaaaagccttccgtttcgatggtgatgaagatgcagtagtagccatgattgaactcaaaagatgctggcatgatgcactttcagcgtgggttatgtgtgaaggacagctaaaagaaaccaatctaacaaagttgtggaatgaattgtctgaaatttatatacaattcctcgagggccaagctaataaattgaaagttttgaaaaaattagcagaaatgcactctgttaaatttatctttgattga

SEQ ID NO: 109464 - DNA, 480 bp, Enterobacter aerogenes
atggccttccaagggaaggcgttcactaccaatcaaaagatcgctgattactttggcaatcgtcatgacaacgtgctaagaaaaatcaggcaggtcaaatctgagtgtccgcctgaatttgctgccctcaattttgaggaggctgatttcattgataaaaatggtgaagcgcagccaatgttcaaactcactaaagacagctatatgctagtcgttatgggctttactggcgcagccgctactcttatcaaagtccgatacatccaggcatttaactggccggcagatcaacttactcgctggcatgaaatgggcgaacaggcccagcaccggcacgctctgaaggttgctaagtcagaagtgaaggcgcgcataggtagtaggatgatgaacgccagaaagcgagagaagaaattactcgcactggagtttgaccagatcttctctctgacacagccaaagttgatttttactgaatag

SEQ ID NO: 109465 - DNA, 132 bp, Enterobacter aerogenes
atggactataactgcttctttcatttgcgttacctttttgaaagtgagcctgtctcacagaaaagccgcccgagagaggtcgccacctataacggcatttctcaggctcacttactgaaaggctctcgttga

SEQ ID NO: 109466 - DNA, 462 bp, Enterobacter aerogenes
atgggccgattaaccgcaatcatctgcgctgtcgttatctgcctcctggtttctatggcctgggcgatcaaccactaccgcgacaacgccatcacctacaaagaccagcgtgataaagccactgataagcttaacctcgcgaacgacaccatcaaagacatgcatacccgccagcgtgatgtcgctgcattggatgctaaattcaccggagaactggctgatgcgaaagaaaccattgaacgtctgcatagcgatgtcattgctggccgtaagcggctgcagctcaacgcaaaatgtaccgcgaacggagcggccagcaccggcagcctgggcgatgcttccggcccccgacttgttgactccgctgaacgggattatttcaccctcagagagcgaatctccaccatcaccgagcaagtgagctacttacaggactacatccgaacgcagtgcctgaaatag

SEQ ID NO: 109467 - DNA, 303 bp, Enterobacter aerogenes
atgaataaacgatttattgttacccttgacagcgcaacagatgagcaagacatgaagttcattgatttcatcaaagagaacgggcttggttggtggcattggatttcaacaaattggatgctggttgatcctaatgggaagtttactgctgtaaccttaagaagtagtttgatggatatttatccaggtgtgaatatgattgttattgaattatctgctgatggtgattcatgggctggatttggtccaagtggaaatgaaaaaaacatgtttacatggttaaataataactggaaaagctag

SEQ ID NO: 109468 - DNA, 402 bp, Enterobacter aerogenes
atggtcttaccaaaaattgttcaaaccatgatgggacaggctaacgttagcggagagcgttcaacggtcctgcatgctgttctttggcttattgggatcatctgcggtttattttcagttattgcgttaactggcttagataaaattttcctttacattattttgattatatttgtcatttctttaatgttttttggttacatttatctgtactgtttaaagaatgatcctgatttattaagaagcgaaaaatttgcacttcagaaaatgactattcaaaactcagttcaaggagatagtgatataggggttattgaatctccaaaaaataacaataataagttaatctcaaatattactaataatgaagcaaacggtacgcaggaggggagtaatgaataa

SEQ ID NO: 109469 - DNA, 783 bp, Enterobacter aerogenes
atgaaacttgaagcatcgttaaagcattttagccctcagggcatgaacatcagagacgacgtgaaaggaacctctcctgaccgccttacaggaacagacgtaatggcggcgattggcaccaccagcagccgtgcgcgcttcggcctggcggcattcttcggtaaagcgggaatcagtaagactgatgagcaattggcggtgcaggcgctggcgcaacatgctcttgatacagcaccaaaaaacgtgcgcaaggccgctggcactgagctggggcgctgctgtctggtgctggcgcagtttgcttttgctgattactcccgttcggcggctaccagtgtgccgtgtcatagttgcagtggtaccgggtttatctccagcaatgaggatgtggttaaacaccctggtattttcgacgcggacggcgtcgcactggtggacccgaagattaagaatgagctggtgaaaagagtttgcggaacatgcggaggaaagaaagtgatccttgctcggtgcaggtgtgtcggtaaaggtgaagtgttggaccgcaaagccactaaagaccgaggcgcaccggttttcaaaacgtgtgaacgttgctctggtaatggcttctctgttgtgtcctcggcgacggttcaccgtgccgttctgaagcgtcttcctgacctccatcagtcctcatggtcacgcaactggaaaccattctatgaaatgctggtgggcactctacgccgtggcgagcgacaagcggctatagcattcgaaaaggcaaccacttattag

SEQ ID NO: 109470 - DNA, 369 bp, Enterobacter aerogenes
atgaaaatctacgatatcacacccatcggcaaacccaggatgaccagagctgataagtggaagcagcgtccggaagtaatacgttaccgggcgttctgtgatgaagctcgtctgcgcaaaattcacctgccagactccggcgctcacgtcacgttcgtcattcctatgccgcaaagctggagtcagaaaaagagagcgcaatacgcaggacgtccacatcagtcaaagccagactgcgacaatatgctgaaagccctaatggacgccctctatgaggatgattcacacgtctgggattgccgcatcaccaaaatctggggtgagacaggacaaattttaatttcggatatcggagaaatggccgcatga

SEQ ID NO: 109471 - DNA, 309 bp, Enterobacter aerogenes
atggataattctgtcaactggtttacccgtaataccagcatcattgttattacgctctctatatatccctggctgctgctattcattctgcacctgaatggtacgtacaaaggaaccgtgtttgtaccagctttcgaggtggctatttttgctttcatgctctctgtgtttaaccttatcatttcaattattttcataaccttcacatatatattttcaccctcagttgcacaaaacgccatgggacgtttctttgccatcaattccgtttctgtcgtttggataggtttacttttatatttcatttaa

SEQ ID NO: 109472 - DNA, 165 bp, Enterobacter aerogenes
atgacaccgcgctcggttggttccctcaccccgaccctctcccaaagggagagggagaaagatgacaccgcgccggttggttccttctccccactcctctcccaaagggagggggaaggtgacaccgcgccgggtcggttccttctcccaaagggagtgggataa

SEQ ID NO: 109473 - DNA, 192 bp, Enterobacter aerogenes
atgtcagaattagaaaactcgctgcttgtaaagcagcgcttgcagagtgaatgtcggcccttattcctctacgtcaccgtcggcaaacggttctgctcggggggcctccacgatgaaaatctgtgtcggcaacgtgaagtttcgcagtttcagcaacgccagcgggccatcgccgagttccgtacgcagtaa

SEQ ID NO: 109474 - DNA, 129 bp, Enterobacter aerogenes
atgacacagaacaagtggtttaatcaggcctgcggaatggcgatgtattcacccgatgcacacagtgccagtgataaatattgtgcgtaccgcagcgacggcaacggcaatcttaaacactggtcatag

SEQ ID NO: 109475 - DNA, 810 bp, Enterobacter aerogenes
atgtatcaaatagggctgttttcaaagatctgccgtgtgacgataaaaacgcttcattactataataaaattggtttacttgttcctgcctatattaatcctgagaatggttatcgattttatacttctgaccaattaatgaaattccatcagattgcgagtttacgtcagcttggatttaccataacagaaatagttactcttactcaggatgaaaattcctgccacataattgaacggcgacgccttgaaatacagaaacaaattcgagacatggacgatattctctcccgaattaaccactatctgcaacataaaaaaaaggaaggaattatgttatatcaagctgttttgaaagagatcccggaatgtattgtttactccaagcgtttcattgttcctgatttttcctcatatctcaaattaattccgcatataggacaagaggttgtgaaggcaaatccagatttaactttagcaaccccagcttattgcttcactctttatcatgataaagagtacaaagagaaaaacatggatgtggagttctgtgaagctgttgatgattttggtaagaatgaagggagtattttttttcaggtaatccctgccataacagctgtaactgtaatacataagggaccatatgattcattaagaaatgcttacatttaccttatgcaatgggttgaagataatggttacttgttaacaaattcaccaagggaaagctacatcgacggcatctggaacaaacaagactccgcagagtggatgactgaaatacagttccctgtagagaaagtttaa

SEQ ID NO: 109476 - DNA, 678 bp, Enterobacter aerogenes
atgatgtaccatatccccgccgtcctgacgcctcaggaagtcgccgaattcgccgctcagctacagcaggccgagtgggttgacggccgcgtgaccaccggcgcccagggggcgcaggtaaaaaacaatcagcaggtcgatacgcgcagcgcgttatacggcgagctacaggctaaggtccaggcggcgctgaaccgcagttcgctgttcttcgccgcggcgttacccaaaacgctctccaccccgctgtttaaccgctaccagcagcaagaaacctacggttttcacgtcgatggcgcggtacgcagccacggtcagggcggctggatgcgcaccgacctctccgccaccctgttccttaacgatccgcaaagctacgacggcggcgaactggtggtcaatgatacctatggccagcacaaggtaaaattgccggccggcgatctggtgctctatccttcaagcagcctgcactgcgtaactccagtcacctccggcgaacgcatcgcctcttttctatggatccagtcgatgatccgcgacgataagcgtcgcgcaatgctgttcgagctcgatggtaatattcagaagttaaagagccgccacggcgagagcgatgaggtgctgtcgcttctcaacctgtaccacaacctgctgcgggaatggtcggaaatctaa

SEQ ID NO: 109477 - DNA, 2295 bp, Enterobacter aerogenes
atggatatggaaaaaaataacaatctcccttttagcagtttccgttcactgacgattttcaccggtttatgcctgagcctctccccgacgggtcaggtactggcggcagacagcaatgaacagaaaggcggcgaaaccctggtcgttgaagcgcaaacgccatcgctgtatgcgccaacgcattccgctgacccaaaattctcccgccccatcgccgacaccacccgcaccgtcacggtggtatcagagcaggtcatgaaggaccagggcgtcactaacctgaccgatgcgttgaaaaacgtgccgggcgtgggcgccttcttcgccggcgaaaacggtaactccaccaccggcgacaccatctatatgcgcggcgccgatacctccaacagtatctatgtcgacggcattcgcgatatcggcagcgtcactcgcgatacctttaataccgagcaggttgaagtgattaaagggccatcgggttccgactacggccgcagcgcgccaaccggatcgatcaacatgatcagcaaacagccgcgtctggattccgggatcgatgcttccgccagcgtcggcagcgcgtggatgcgccgcggcaccctcgatatcaatgaagccattggcgataccagcgccgtgcgcctgaacctgatgggagagaaaacccacgatgccggccgcgataaagttaaaaatgaacgttacggcatcgcgccatccgtcgcctttggtctcggcactgagaatcgcctgtacctgaactatctgcacgtcacccagcacaatacgccggacggcggtattccaaccatcggcctgccgggctactcggcgccaaacgccgccaccgatgcgctgaaccactctggtaaagtcgcaaccagcaacttctacggtacggactctgattacgacgactcgaccaccgataccgtgaccatgcgtttcgaacacgatatcaatgacaacacgacgatccgcaacatcacgcgctggtcgcgggtgaaacaggattacctgatgaccgcggtcatgggcggcgcgtcaaacattactcaaccggatcccaataacgtcaatacctggacctggtcacgtctggcaaacaccaaagacaccagcaacaagatcctaaccaaccagaccaatctgacgagcaaatttttcaccggatccgtcggccatgacgtcagcgccggggtagaatttacccgcgaaacgcagactaactacggcgtctatccgatcaccccgccggcggtgaatatctatcatccgaatagcgatatttcgatcggcggcctgaaccgcagcggcgctaacgccaacggtcagaccgataccttcggcctgtacgctttcgatactctgcagatcacccgcgattttgagctgaacggcggtatccgcctcgatacctatcaaaccaaatacgatagcgccagcctgtgcggcggcagcggtcgtggagccatcgcctgcccgaccggcgtcgctaaagatacgccggtcaccaccgtggacacctctaccagcggcaacctggtcaactggaaagccggcgcgctgtatcatctgactgataacggcaatgtgtacgttaactacgcaatctcgcaacaaccgccgggcggtagcaacttcaccctcgcccaaagcggcagcggcaatagcgccaaccgcaccgacttccagccgcaaaaagcgaagaccagcgaactgggcaccaagtgggaactgatggataagcgcctgctgctgaccgcggcgctgttccgcaccgatatagaaaacgaggtcgaacaaaacgacgacggtacttactcgcagtatggtaagaagcgggtcgaaggctatgagatttcactggccggtaatattaccccggactggcaggttattggcggttacacccagcagcatgcgacgatccgtgaaggcgccgatgccgctcaggatggcaccagctcaatgccgtatacgccggaacacgcctttaccgtctggagccagtaccaggccaccgatgccctctccgtcggagccggcgcccgctacattggcagcatgcaccgtggcaaagatggcgcggttggcacgccgtcctacaccgaaggctattgggtagcggatgcgaaaatgggctatcgggttaatcgcaatctcgacctgcaactgaacgtgtataacctgtttgataccaattacgtcgcgtctattaacaagagcggctatcgttatcacccgggcgagccacgcactttcctgttaactgctaacgtgcatttctaa

SEQ ID NO: 109478 - DNA, 264 bp, Enterobacter aerogenes
atgaaaacatctctgctctcgctgctctttatcgcgcttgccgccccctcctcctatgccctggccgacacgcctgaatctgcgcttacccagaccggtccgcttcgcccgtccggcaccgtatccgcctccggcgccagcacccttgacgatttgcaggcccagttggcgcaaaaagcccaccagcagggcgcgctcgcctggagaattaacgccgccggcggcggtaataaattggcgggaagcgcgataatttataaatag

SEQ ID NO: 109479 - DNA, 237 bp, Enterobacter aerogenes
atgccgggtggcggcttcgccttacccggcctacagaatggcgttccggccaggaccggtagcccggccaggcgaagcgccgccggggaactggatggggatgaagccgctttatgccgggtgacggctgcgccttacccggcctacagaatggcgttccggccaggaccggtagcccggccaggcgaagtgccgccggggaactggatggggatgaagccgctttatgccgggtga

SEQ ID NO: 109480 - DNA, 576 bp, Enterobacter aerogenes
atgaatttcagaatgattaaaattgatgatgacttatctgttatacattgtgctttgacgatggaatatcatttttatgtcaagaatcaatatgtaaaattgggtcttgatacgatgtatgatgagcttggactgggtgaaaaaagtaaaatatatatacttgaggagcttggtttccttagtgtctatactttattatatatgattcatttgatttatgaacgcagggatgcctcaatcatcatactgagcgatagaatcgttcagggagatgcgtctttgttctttgtatcaaaacgttcatcaatagatgagtggcgtaaaatattactggttgataattcaaaacaaattaaagtattaatttcgtattactattcaatttgcaacggggaagggttaacccaacaggcgcatgctgttttactgatgacccggggaattaaaaccattggctctatatgcaatacgttgaatcttaaccggaaacaagtttcatattatcactcaaaactcaaagagaaacttggtttgaatgacccgatgttattttataactatctcaactggttataa

SEQ ID NO: 109481 - DNA, 915 bp, Enterobacter aerogenes
atgatcgaagaaaaagaaagtggctcaaaaaataatcattactttataattaatggtcgtgttaaatttattccatttcgcagaacaatagaggacatgaatactggaacaaaacttaaacttcatgttccagcaagcctttgtctggatagattattaaaaaaccaaggacgtcttgtatctcaggatgagctaatcctgtacgcctggggcttgaagcgagagtccacggtgagttctaatactttttatcagtgcatactacatctacgtagaaaactggcacagctggaattatgtgatgttattgaaaccgtcccacgtcatggtattatttttaacaatagtgtcagtgtattaattacgcaggatacccccccggcgtttcaactcaatgagagtaatcaaacaccagaaggcacagcggaaaaggatatagaaccagtgccgtccgttgaaatcggcaaaaaacacttcaccgaggagatacctgtatcgcttcctcccgaatttggttctgatatggtcctcacgtcaacgattcaggttgcgaaaaagaatagattacaaataaaaacccgctacgttttattcactggagctatattattaatactgataaccgtattgggattcatgtacataagcttcactaatgataatatattcaaatcttataaccaactctcatccacgaactgcttcatctacactataggtgatcaatattctgaaaatgaaattaaaagcataatgaaaagtgtcgggttaccctgctttaataaagagaacgttttttttaccgtatctccgatgcaatcaaaaataaacataatcaactgcgctacatataataaaaaacaacaagactgtcgctccgttaccatagcgagagaattagaggaaacaccatga

SEQ ID NO: 109482 - DNA, 471 bp, Enterobacter aerogenes
atgagatataaatccattttatgctcacttgcatgtttaggcgcttttgcaggggtatatttttatttaccctctccatttaataccgacagtgctatttcatgccatagccgccatactctcattaacaatgattttaaattagatgcaagttatggttttatttttggcggtaataaaggcgagttaacaatgtatggttatgcggtagacaatggtgttcggataaatatcaggagagtgattagttttacctatacaagaatggatgatatttatacttttcacagtaaaagagtagagaagttttacggagataacagtgaaaaaggaaatgtaaatattcatctccccgaatttttttatcagacaggaaaagaccttaccatacaactcaagcgggatggcttcaatatcccgataattttcgtgcatcgcatgcctgttttttattgtaatcaatcaggttaa

SEQ ID NO: 109483 - DNA, 933 bp, Enterobacter aerogenes
atgtatgcccgcgagtctcgctccacgcccccgcgcaggacgctttttgccattttctcttgccttacgctcagttacagcgctcctgtcttagcaaaacccgatatgcagccgctggggcccaatatcgccgaaaagggttcggccttttaccacttcagcgtccatcagttcgattccgccgacggcgcacgccactatcgggtgtggacggcagtgccgaacaaagccgcgccgcccaccggctacccggtgttatacatgcttgacggtaatgcggtaatggaccgtctgtctgacgagctgctcaaacagctcacggcgcaatcgccgccggtgatcgtcgcggtcggctatcggaccaacctgcctttcgatctgaagggccggtcctttgactatacgcctgttgacaacagcaagggcgcaacgccgactggccgtaaaaacggggggagtcatggcttccgtcagttgctggaaacgcatatcgcccttaaggcggagcaaggtctgcatatcaacccgcagcgccgcggcctgtggggccactcctacggcggcctgttcgtactcgactcctggctgtcgtcctcgtacttccacgcttattacagcgccagtccatcgcttagccgggataactttgcgctacttagccgtatcacgacggccgaacctgcgtcgtactgcggcaaaagtctggtcattatggaagggtcagcgacgccgggcgataagcgggattcgaacgctgatcacgtgctaacaaaagtgaataccgcgatgactacgctgaaagagaaagaggtagatgccgctgtttgggatttcccgggcctgggccatggaccgatgtttaatgcctctttccgcagcgcgctgctagatatcagccgtgaaaaagctgaacgcgtaccagactgccactaa

SEQ ID NO: 109484 - DNA, 144 bp, Enterobacter aerogenes
atgaatcagtacataaagggctcagacctgctgtcagcacgcgtgattgccattactggtttaatcattgccctcggcaacataggtttaggcccattagctgtggtgacagcatgtatggttttaatatacatgcttaagtaa

SEQ ID NO: 109485 - DNA, 579 bp, Enterobacter aerogenes
atgagtgagtacgacgatgattatgatttttggatcaagaatagaaaaaccattacggaacaacgcttgcatccaaaccactggtttaacagagcatcggacttaagagcttcggcgcatgttttatggatatcgatggagtcaaaagatattcaacagcaaatggggtatggcggtgcattctcgcttgaggttgcatgtaatcctgtttaccacatgctttgtgggttagctttagaattaatcatgaaagcagtagtggtccagcgttcaaaaaaagttcccgggatacatgatttgaatcatttggctaatttggcggagatatcggttaatccaaagagaaaagaattactgaaattttatactgccgccatcgtttggactggccgttatcctgtcccagttaaatgtgatgatgaaaaattaaaagattattggtcattagcctcaagtgtactcaccgatagagtcgaagggcatggtaatttgaatattcgaaaaaggaatggggctgctgattgggacaaattccaagctttattcaacgagattgcggataagtttgacttcaattag

SEQ ID NO: 109486 - DNA, 195 bp, Enterobacter aerogenes
atgtatccgctgtttcgtcagtttattcaggactggagcctggaagaaaaactcaccgataacttgcttgcaacctttatagttgcatactcagggactgcggatgctattttttatggctggtcagaatatatgaaagaggcactgattgaaaacgagcatttattttcagtacacagtcagactatcaactga

SEQ ID NO: 109487 - DNA, 726 bp, Enterobacter aerogenes
atgaatcatggtgaaatgggtattagagctacaattgtggctacgttcattaacgagctttttattgatggtactgattctgcggccatttcagtattgcgtgatggctttaaggctgatgcctcttcaagcttggcgcgcaatatggttaataatataattcattatttcgaatgctctgatgatccaattgaagaatttttatatttcattgggatagaaaaatctgaaactaaaagtaatgaacagtcgatcaatacattgttgtacatggatgaaaaacaaacgccatttttaaccgacataccattatcaggtgatggagtcacactgttaaatgctgcgcttgcgttacactttgtaggaatgaaaaataatgcaaataatcttgcaagaattggtattaagttgctaatggaaggagtttttagcgacgagatatctataagggagtttaacgaagttgcgcgaaaggcgatttcagatgctcagagagaaaaggcaaaaaagccccgaagtccatattattcagaggtgattgaagtcattaaactcacctgggaaaaatacccttgcggtgcaaaaacagcattacttgatgctttagccgctcattatcatggcaaggtaagccgtaacgcattagacaattggatctccctctctggcttgagacccccaaaaccagaaaagtatacacgacttgaattagtattcccccaatag

SEQ ID NO: 109488 - DNA, 1422 bp, Enterobacter aerogenes
gtggaaacattcaaatttactaaatccaaacttgaaagcctgcctcccgctgatagtggtcaggttgagtatggtgataccgttgttaatggcctgcgggttcgcgtgggggttagcggtgttaagagcttttgtatctcccgtaaacgtaatggaaaattcatccgggccacgcttggccgctttcccgatctcacgattgataatgccagggcaaaggctctcgaactgctgggggacgttgcaaccaccggcaaaaatcccaacgttgaaagacgcatcaacgaaaaggcttcagttacgcttgccgacgcactgaatacctacatcgagagccgcgatgcaagattaagtgcggatacggcaaaacaatatcgctccatcctgcaaaattactcaggtgactggatgaaacagccaatcgcctctatcagccgtgaacgtgtggaaaccaggcataaagctgttaccgatggttccgtatggtttggtgcagacaagtcaacgcttcgcgccggagtcggaaccggcagtaaagcacaggccgatctctgggcgcgggttttacgtgctatatgccgtttcgcacatgatcattatcgcgacaatgacggcaaaaccttactccctgaccctcccacaatggttcttagcacaaagcgtaagtggcatggaaccgtcagaaagacagaacgcatacgcaccaatgagcttggcagatggtttagtgctttatctaccgtgcgtgatattgccgaacaagggcgagatgatattgctgccgctgtatgtgatgctgtggaaatggctattttcactggactgcgtaaatctgagattttagagcttagctgggatagggttaatctgggtggccgctacttctggattgtcaccacaaagaacggcgatccgcttgagctgccagttactgaaacccttctgaagttatttcgccgccgggccaaaatgaaatctgccgatggtttattggtttttccaggcgacaagggaattattaaagagtacaggcatattatagaacgcataagcgctgctactgtaccagagccaaaccctgatttactcaagccgataccttttaaatggcatgatggccgccgcacgttcggcactgttgctgagctggtgggcgtcggaaactacatcctaaaacgattactgaaccatcggacgatgagaagcgccgatgttactcagggctatttgcatttcagtgctgatgaactgatggagccagcttcaagaatagaacgggcaatacttgaatatgctgggataattgaaagccataaagacatcaacacccaattaatgtctgctttggagaatcttagcgaagaagagaaaagaaaattaatcttcgcaatttcaaatgacaaaaggggttgccaggtatga

SEQ ID NO: 109489 - DNA, 642 bp, Enterobacter aerogenes
atggatagatcattattatttttttatttcctgtgtgggtttctcctgacttactttttatttaaatttgcaaaagaaaaatataaattacaaagcttaacatttatcttttcgttcataataagtttagttatcgcatcttctttttcggttttatcaacaggagaatggtttttagtagtaatagcatcaacggttacccttttatttttattaggattcttcacggcgctactaaaacaatttgtaatgtaccgatacattcttcgttgtgttgataatttgaaacttctatcccctgccgaaatggttgaatctttaattaacaaccataataacaaacagtggtacgttttatattttcctgtagaaggcatcattgagattggcgttaatttattcgctgaaaaccctattgttggcagaagattatacattagaactatgacaaaccgccaaatgtacattattcctgagaacatctccagcactatagatttacaatctaatatagcttgtacgttatatgaattttataccctcgccccgcaaaccaagagtttaattgaagattatttaaacagaattaaaaatggttatttgcagccatggcggctaaatgcagaacacgatgaaaaataa

SEQ ID NO: 109490 - DNA, 1464 bp, Enterobacter aerogenes
atgtttgcaactttttatacctcacgcttagttttaaatgcgcttggggtttatgactttgggctttacagtgtcattggcagtattatcgttttattttcgttcattcaaaacgtatcagctttggcaactcaaaggttcctgtcagttggtttaggtagaagggacttttcctggactaaaagagtcttttcgacaagtatattggtccattttataatatgtggcgctgttttattcctcgctgaaacaattggtttatggttcttaatctataaattaagagttcccgttgagcgtatgacagaaatattttgggtgtaccagttgtctgtcatatctctgcttattcagatcatgcaaacaccatttatcgctgcgttaattgcaactgaaaagatggatttgtttgctaagatagggatatttgatgctattcagcgttggggcatggtgtatttatttaccttgttcgaattcgactcgaaattaatatggtatgctgcattcttgctttttggatatatatcagtgttttttgtctattttgttagttgcattaagaaaatagatatatgtactgtaaaagtaagtttcaaggaaaataaagaactgctcaaggaaatactatcattctcgagttggtccatgatgggctcattgagtttagtcggactttctcaaggtattgctctcctgacatatttctttgtcggagttgtggcaaatggttctgtttggttagcggagcaggtgctgattgcatttaaccgtgtcataggtactttgcaaaccgcattcaatcctcaactgataaagcagcattcaactggaaatcacgaagaggtttcgtctcttctatctttatcctgcaagttgactggctttatcgtactgattgcagcagtacccgcctttgtagatgcgccttttgttattaacttatggttgaaacaagttccagagcatttggtggtgttggtaagaattgtcatactgtatgtcatcattgattctctatcaggaccttttgttaccgtagcatatgcagtgggaaagttgcggaactatcagttaatagcatcattaataatgcttttaactttggtattaacatatgctctttactctttgggttttgcattggttgtggcggtgtcgagtcgtatactttgtgcagttgcaatgcttatgttcagagtgttgtatgtggaaaaagtaactggattaaatagtaaaatatttttccttaatatttttccgcgcttattttctgtttctgtaatatcatttgcaatttcattttacattaacaccgtacttcctgtaggttttttaggactactgcttctaatcgccttaaacacaatcgcagtggctatactctttttctatttggtgctaattagttcagaaagaaaatatttaacatctttaataaagaaaaaattaggtaggaaataa

SEQ ID NO: 109491 - DNA, 1047 bp, Enterobacter aerogenes
atgaataaaaaagaagtaatcgctgtcgtatttactgcagcaatcgtcggtggtcatgaattgatgacgattgctcatttaaataaatttagaaataaagggtttaggtttgcatgctttgtcccttcagataatatagcgttaaaaaaaattctctctgatcataatattgcatatgagaatcatgaagtgttacataaaaaatttgaaatacttcattctacttttaattatccttttcgaaaaaaagctaaagaactactagtatctctgaaggggaaacataaaactattatcattgtgcaaggtgatattgagttaggctctgtatttgttaatacttcgaaggctgcgggagtccaaaatttagttagttatataccttatgcgcatagttttcgtttgatgggtagcaagttagggtggttaaaagacatattatcgaaatttgtttacaagaagtgcgagaattatattacgattagtaaagtttttgccgaacagatttcccttaaaaacaaaaatgccaaagttagagtattacataacttttcctctaagttaccaatagaatacattagaggtaagggatatatctataagaaagataaggataagtttactatcttaatggcaggacgagtttcatttagacaaaaaggacaagatattctatttcaggcgttaaattctatttcgacctctaaagaaatagtgcttaaggttattggagatggtcctgatcttgagaagctgaaaactataacaggatgttcatataataatattagagtaaattattatggctggcagccaaatgtatgggagtatagcaaggatgttgatcttattaccttgccatctcggtttgaaggggtgccgcttctgatgctagaagcaaagcaagccaatatcccgattatcgcccctgcacgtgatgggatgattgattttcttcctcccacaaatttatatgagccaggaagtcgtgactctgaagctgcggcgctggctaaaaagatccagactataataaataaccactga

SEQ ID NO: 109492 - DNA, 867 bp, Enterobacter aerogenes
atgctcccgatccagaaccattatttagcaaagcaaattaccgatacggaacttaaaaaccttatcgcagagactccaggcgatacaaataagttaacgcatgcggggaaattatcctatgttaatgatgactattgtgaaatcactcgcaatcactcttcattttatgggatgaacattctctatatcattatgctattacctttggttattttatcatgtttgggaatcattatgtttttatactatatgattttcgatttcaaaagttacgcggcttttttttggcaagagaaaagtgaactcctgctaacactcactatccactttggcgtcattattatattgaccatagcttatttctcctcatttgcagtaaattactgcttcttttcgccacgacattacccaattcgttttaatcgaaaaacaggaaaagtttatatttgcgaatacgttttttttgtactactccaaagaccgaaccgcaactataaagccagaacccgctttccattctataaacggacccggccagaatacaaagaattctcctgggattctataaaaggctattatgatttttatcagcaaaggtcgtgtatttgctgccatgtttatcaaaatgaaaacattgccgacacatttacgcttatttcagaaaaaactattattgagtctgaatattttaataactataaactctgggcttgggttaaccactatatggatttcaaagacgagatgttagatatgaccgtcaatcctaacgtgggtatttacgggcgcaaagtcgaatggcctgagactatgcttaaaaaatctaccgcgtcatcgttagaagaatatgaaaaaatcgccgactaa

SEQ ID NO: 109493 - DNA, 1368 bp, Enterobacter aerogenes
atgcataaattaaaattcggaattatccttactttattgttatttattaatacttcagcatgctatgcgaaatttcattcatgcacggaatattggcacgacgatggcaaagttgaaaaaatgtcatgcggcagcaattacaaaccaataccagatagcccttatgtattaaaaaacaacaaagcctggtatactaattacaatagcaggacatataatcggcactctggttgtgctggtgtcacctgcatggcacctgacttaaatatccttccagaaattgaacgtgaaaaaaaacactattattcactcaatattaatatcaatcgtataaatgtaataaaagaaagcgttaattattgtggacgtagtagaattaattacatcgcagatgataaaaatgtgtattacagaggaacaaaaataaaaaacgccgaccctcaatcattcaaagcatacgaaatgaaagagcatgacatatactctctcggatgttatctggcatgggataagaacaatatttattacttagaaaaacctctggatgtgccagttaccggtgaagtcaatctgatcaatgaatcattaattagcaccggaaagcaaatttataaaatagaaaatcaacaaggtaatttaattttaacgcctcgtaacgacatctctgccaatctctatgcgctgccaagtggtcggggtttatccacagataaccagcaccttttttactatggaaaggctattgaaacgctagcaggtatcccaccgacgctcgtaacacctgtgtgcccggttcctggctttccccatctggaatgctaccttcctgataatagtatttataatacgatgaagaatgatggttacactgttattcgtacaaaaaataatatatgggtgcaaataaacaaacactatcataaagacatatataaaataggcatcactccacaggacaagatttactttcttgttaaagcaaaatatagcggaagcgcgtacctcattatcaacaacactttatataatcttgaaaatcataatagaagagataaatatgatagacgtggccccgtcgttttttcggattttctgatgagttatggttattcaaaatttattgatagccatggggtgatttatgatgaagcgaatcaaagcatcgataatcgtaagacattgtttaaatgtggtgaaaaaaacaagaaaagattacattgggataaagataaaaacacaaccccaggaacattcgttctaagcgataaggaataccgttactttatagttaagggtgaattagccaaagttcaggataaaaaaacaaagcagttcatcgacgataacaaaggtgattgttcaaaatga

SEQ ID NO: 109494 - DNA, 282 bp, Enterobacter aerogenes
atgacattgagtgacttaccttcttatataaatagtttgttatgttggttaattattttgcggataatattctggaaaagaaatggaaggcgttataaaccggcaatttcgttaattgcctggattctggttatttcctgtagtggtattgctgtttttcttttttttggccattaccggcttgcggattgggatgagttgtttattcatggattattatgtctcattgtttaccgtaccgctggcaatatcgctactttgttaaagatacgtaatcgttaa

SEQ ID NO: 109495 - DNA, 264 bp, Enterobacter aerogenes; identical to SEQ ID NO: 94215

SEQ ID NO: 109496 - DNA, 507 bp, Enterobacter aerogenes
gtgagtcacttcaatcgacggttgcgtatgaacccttattatacaaaccgcgagtggcaatataaaaatatacaacctaaaatattagttgagcgaaaacttaatgtttttgatggcaaagaccaggatgtaacaccagaaatgttccgggtacattgttttcacaaaaaagccatgtacatcgaagcagattttacctgcgtgaacggcagagaatatgttaatatttatgacactaattggatgctacagccgtttacgcttggatatggtaacaccccttacaacattgatcgtccttcctctctagacgacattcttgatattgcagcgaaactggctactgatcttgattactgcagggttgatcttatggttgaaaacgaaagggtctacttcagtgaaattacgctgactcctgaaagtggtcaactgaagttcagtcatgcagaatgggatttacgtcttggccgcttatggaatatgcctataatgaggatcgattag

SEQ ID NO: 109497 - DNA, 207 bp, Enterobacter aerogenes
atgattgcacttaatgacaaaagaaactggaagagcttcaaagtcgcggatttttattctctcaaaaacggcaagcaacggaaccagatgttcattacctaccatcatttcaacatagtctcgaacagcaattttatcagcaataacactcaagaaaagatcgcgattaaaaaccatgcgatagtttatcttctcgttcagtgttaa

SEQ ID NO: 109498 - DNA, 777 bp, Enterobacter aerogenes
atgaaggaattaaatacgatcctgtcggcaatatttttactgccgtttgcaacctacgcctcgtctgatgtacataaatctgaggtaaccgttggcataggagctcaatatgctcctcaatatatgggggccgataaatttgactcaacagtcgcgccttactttgaatggactgacggaaccttgtttttgaattcagaaaaaggggcggggcttacatattcctttgataatggtttttacttgggacaggctctgggatatacatgggggagaagggatgatgacggttcctggctacaggatggttccagacatctcaaaggaatgggtaaaataaaaacagcgctgaactcgacgacaacgctgggttggtggatggtatcctggattggatttgaaggtaatattattgcccccctgactgaaagccagggggttctgtataacatcggcctcaatgttgttttgtttaataatgacagcgacacacttaccgtcagtaccattcgtaattatggcgatgcacggtacaataatacctggtttggagtgagcgaaaagcaaagtacaaatacaggatttaaacagtttaactccgactcggggttaaccagtgtcgattacggtatcaactggcaacacacatttgatgacaactggtctggttatgcagacctgcgctatacaacactggcaaaccgcgtaagtcatagtcccattgttgaaaaagatgactacctggctttcactattggtgcgttctatacattctga

SEQ ID NO: 109499 - DNA, 687 bp, Enterobacter aerogenes
gtgaaacgtgtcttaatcattgaagacgatctggatgctgcgaatgtacttgaggcatatcttaaaagagatcagttcaatacctcgttagccagtgacgggcaacacggtctggatctggtcttcagctggaagcccaatatcattcttcttgatgttatgttgccatccatgagtggtactgatgtcctgctagcggtacgacggcgtagtgatatcccggtgataatgatcaccgccatcagcgacggggcagataaaatcagtgcgcttcgttacggtgcagatgactatgtggttaaaccttacaatcccgcagaagtcgttgcacgcgttcatgctgtcctgcgtcgttatgccgggcaacgtagcggggatatcctccagttcagaaatataaaagccgatatggactccatgatagtcgtcgtggaaaaagaaggcataccccctcaggcactagagctgaccccaacagaactgtcacttctgatgacattcttgaagtcgccatctaaagcctttacgcgtcaggtgctactggaagcctgccttccggaaagcgatgctcttgagagggtggttgatacgcatatctataatttgcgtaaaaagctggaagctgcgggtcaacctgatcttctgattaatgtcaggggcattggttacaggtttgctaactcatga

SEQ ID NO: 109500 - DNA, 1188 bp, Enterobacter aerogenes
atgaacagaaaattgcgatttcagaaaagtgaaaacagctctctgtggaactggatatgccgtaaggttatttcgctggcagtaggcagcataatcctgatttctttctgcatgtggctgcgcttttacattgataacaagtggcacgagtacaggatacctgttgaggtcagggccgagctcgctgagttaattaaaaacccctggctaaatattaaccgctatcacgcgatcattgatcgatggtatggcgtggactactggaagccagaaataaggattactgactggctaattctggctgtactcgtcctaatcgtaatgcccatcattttcacactgacgctgagagcagcacgccctctatcaaagcagataagtgcccttgctaatgcagctaaatctgttgctcagggtagcttcggcgtaaaagtaaaaatcccggataatcttcctctggaattacgtagtctcagcgaaaattttaatgggatgtcgatgcagcttgagcgttatgaaaaggatctaaaaaaatcacatgttgccatggcccatgaacttcgttctccgttgaccgcagccacaggaagactccagggcatgattgatggtgtatttgagcccagcgaaacccagctgaaaatggtcatgcagcaacttaacgaactgaatcggctggttgaagacctgcatttgctgaagcttgctgatgccggtcagttaaatctgagcatgatatccgccggtcttaatgagattgtcagggaaaaaattgcatggattacaccttctgcagagaaagcgggcgtatccatcagacacaaccagaatatgatgctgagcggagtagcagacccctatcgtttaggacaggttttcctgatactgatggataatgcattacgctatgcagctgatggtggcgtgcttgatatcagttacgacgccactccagataccgtttcggttattttcagggacaaagggcctgccgttccgaatgaattgcttgaagatatcttcacaccatttgttcgtgaagaggtttcacgctccaggcattccgggggctctggcttgggactttctattgcccgggcgatatgtgaagcacatggagggcaactggaggtagagaaaaataaaaagggtggacttgccttcagggtatcgttgcgaaaatcttaa

SEQ ID NO: 109501 - DNA, 450 bp, Enterobacter aerogenes
atgggcatggggggggaatgttaccgcctgtcagacatgtcacccaaagatatagccagtctgtatgtccgtctgttcaagttgcggtttggtgattctgtccgctgctatgaggaagagaagattgaagaactgatatccgctgtaccgcatctgattttcggtaacgtattgttttatgccgatacgccttgcgctattgatctggtactcagtgcgaacagtgacaacatggtgtattttgacgtgccaaatggcggtgttgaccctaaatattcagcattcagcccgggcagcatgctgatgtgggccaatatttcagatgcgcgcgacttgtgcactacgcaggataaagaaatggtattttcaatagggctttatgagaaagactgggaatataaattacggtgggccgatacagcgaagacagggaaagttatctgcttttaa

SEQ ID NO: 109502 - DNA, 1419 bp, Enterobacter aerogenes
atggtgtttccggtatcaatagaacttcgtgtgtcagccattacggtgatggcctctttactactttcaggctgcacaatggcaccggcatatcagagaccggaagcccccgtgccattagcctggtcacataaagacacttctgttgaaggtatgtatacaacggcagcaaacgggccttttttcacagacagcaagctgcagcaactgataaaactgaccatcgacaataacaaggacctcgaactttctgcactgaacctgaaaaaatcaggtgttcagtatggggtagaaagactatcctggttgccagcagtcagcctgaccgcagaaaaaaccgcagctcatgagcctgcagggagctttgataccgttgataccggttcggtaacgtatcatcaatacaacgttaaactggtctcagcttcctgggaagtggacttctgggggcgtttgcgaagcctcagggaagcatccctcaatgaatatcttgctgcgggagcttcatcaagagccctgaagatcagcctcattgagcaggtggtcagtgcctatctgatctatttcaccgaccaggaaaacattagtattgcccgtcagaaactggacaatctccagcagctccggcacatgcaacagcaagcctataatgccggagacatgactaaaaatgcgcttatggacgctgatagtgcggtaaacgacgcacagtcagaattgaaccagacagagttgcaggtacaacaggatttaaactcgcttcagttgcttgtcggcaccccgctacctgactctctgctgaatgtgtcacctgagcatgactgggcttttccgttaattaaagcaggaacgccatcagaggttctgctcaaacgtcccgatattattgctgctgagtaccagttgaaagctgccaatgccagtataggcgcggcaagagcggcatttttcccgtctatttctatcaccgctgaaggcggatcatccacggctgatatgggtaaattgcttgcgggtggcgctgctaactggagctttattcctacactcaatcttcccattttcgatgggggtaagaaccaggccaacctcagtctggccgagctgaataagaaaattgagatcgtcaattatcagaaagcaatacaacaggcgttcagggatgcatctgatgctcttgccggacaggcattcctgaaaaagcaaaccatccagacatccggtatctttgatactgtcaaagaacaataccgaatggctgaagcaacgcggaacgccggacagataagcaacgcaactctactggaaaaaaacaatgagctgcttgctgttcgtaagcaaaaagctaatgcccgtctcaaataccttattcagggggtgaaagtatttaccatcctgggtggggatgattcgatttaa

SEQ ID NO: 109503 - DNA, 444 bp, Enterobacter aerogenes
atgaacatgaaagtgcgttcatcggcactgtatgaatttttatttcccgactgcttaaaagaaacgggtctgacaacaaaagagaaaactgagcaactcaaagctgaatttatccgccgggaccggcgtctggatatttatctggaattgttcatagtgtttctggtcgcaggggcgctgttgttctgggtaatgacaaccatgtttagtctctgtgtggatgactggaaagcaagcggtgacctgcgcataaaagacctgtggaatatcctgatgtacgttatcccttatgcactggttgctgttggcctggggttcctggttgtagcattgtcattttcgcttcttaattttgtcagctattacctgaacaatactttgattcagagaaaagaccgcattaaaaattcgggcgtaagtcacggagggccggatgcgaattaa

SEQ ID NO: 109504 - DNA, 555 bp, Enterobacter aerogenes
gtgaaaaacaacctgaagaacaccactaaaacagccgcaacggtgaccctgcttctggctctttctggcatggcgcaggcaggtacactcgatgaagtgaagtcgctctgggacccgcagggtatctccggtgcggcatctgtctcacggaaggatagtgctccgcgcgcggtgacgccagcctctcagccccgctggttccggctcagtaacggcaaacaggtggaccttcgggactggaaagtcgtgctgttcatgcaggggaagtgcccgtactgccataagtttgacccggttctgaaacaactggccaggcagtacggcttctccgttttcccctataccatcgacggtcagggcgatgagtcattcccggaggcgctgccggtaccacctgacgtgatgcagacctttttccccaatatcccggtggccacgccaaccacgtttctggtcaacgtgaatacgcttgatgctttcccgatattgcagggcgcaacggatgctcagggttttatggcgcgagtggacaccgtctttcagatgatgcgctga

SEQ ID NO: 109505 - DNA, 399 bp, Enterobacter aerogenes
atgcatgcttatattaatggtaatgatgtagggtgggttattataactggcctgttaatattatttacgggcgtcctgggcgtgtttgctgcactgattcttcctgaacgttatcagctcagggggtatcttttcctggcgtgcgttttcactgcgattactggctttgtaatctctttcgtgatgatgagaacaacctatagcgctaatgaaattgatgcgggccgacactggaaaacagagtgctcatttattgaagtcaatgtacagggtggcttttttaatggcgccgtaaataaattaaattgtgatggggttatggttaatgcgccagcgtatttatatgaaagatatattcagcagtggcagttactacaaattaaaggagttagcttgtga

SEQ ID NO: 109506 - DNA, 414 bp, Enterobacter aerogenes
atggtgttaaatattgattttataaagtatctgtatttactgatgaaagaaaatttatcatatatcattctgagtattgctctttttggggtgcttccagcaatgttgttaccgggtgtattgcggattaaaaacagaacgaagcgcttcctgtcgttaatgattattatggtattttcatttggaatgcttgcattactccaaccagaaagtaagtacaaagcaatattgatcaataagcaaaatactgactatacattacaacactgcacagtatcggcatttaacgcgcagccagaaacactctttgccagcgtaaaggatgcctggcgttgccctgacgacattacccgctatctgggggttaagtaccgggataagggcattcacagcctttccggtaaaaaggagtaa

SEQ ID NO: 109507 - DNA, 252 bp, Enterobacter aerogenes
atgaaacgcggctctatcattcctatatataaaatgaaaaccataccggcagacaccgtacagtctccggccccagccgcaccaatggtggactcactgattgcaccattggtgcaatggcgcgtggtaatacgatttcacttcctgtctgcggtcgctaagtcaaatttaccctcgagacactccaggggaataccgttgcagaaatgttccccgtctggtcaggtaacgagcgtgtacaggaactgttga

SEQ ID NO: 109508 - DNA, 156 bp, Enterobacter aerogenes
atgctgaagaatgtggtgcctgaaacagacgaagtggttaacgaccagatgcgcatgagaacggtttttgaacaggctattgagcagcgttcttctaccggggtatggcgaaatgccctttccatctgggaacctgtctgtaatgaaattttttga

SEQ ID NO: 109509 - DNA, 534 bp, Enterobacter aerogenes
atgagcatgaaaaaaattgttcttgcggtagctatgtcttcagcaatgggcatggtcagtgcacatgcggcggatcagggacatgggtctgtaacttttataggttctattattgatgcaccatgttcaatcacgccagatacaattgaccagaccgtcaaaatgggggaaatctccaataaagcattacaaaatggtggtacttccagtccgcgtccttttgatattaagctggaaaactgtgatgtgtcaggactaaaggataaaactgtcaccactacattcagtggtacttctgctaaaagtaatggtgatttactggctatcacgggcactgctgcaggtgctgctattgcactgacgcaggatggtaatactccgatcaaactggggcacccggctaatcctagcaccattcaggatggtaataacacgcttcactttgctgcctacctgaaaggtgacggcgcttctgctgctgtcgtcccaggcgattttactgctgtggcaaactttgctctgaattatcaataa

SEQ ID NO: 109510 - DNA, 561 bp, Enterobacter aerogenes
atgaacccaattattcgttcttttcattctgtcatgttgccttacatattggcgttactggccatgggtcagtgttcctctgaagcaggggctgctgaacatggtcacggtcgagtcaacatgcaaggctccatcattgataccccttgtgctattgacgttaatagtcgagatcaaaccatcgatatggctgttattccggttggacaaattattcgggacaaccatgggcctgaacgtgcgtttcatattcgtctcattaactgcacgctgacaccgctacgtccaaatagtccggactggtcaaaattcagaattacttttgatggaccctccacggggcagaacctgttccgtgttagtggggacgctcgtggggttggactgcaaattgctgacactgcaggcgccgtcgccattccgggtgaggcaatgcctgcagctgagctgctcatcggaaacatgcaactgaactatacccttcggctgatgagtaaccgtgaacatctccgcgccggcgcctatcggacaactattcgcttcaaactggattatttctga

SEQ ID NO: 109511 - DNA, 2595 bp, Enterobacter aerogenes
atgtcaattgtaggttctgacgctcgtctcggtttgcgtccagtagctgtatgtgtactgcttgcgctcagtgttgtgcacagttcctgggctgctgatgctgtcgagttcaacacggacgtcctggatataaaagatcgttcacatatagatctggagcaattttcgcgtgctggttttattatgcccggaacctaccagatgattctgcgtattaataaaagtgaactaccggagcaacctgttttgttcctgccacccgacagcgatccaaaaggtagtgaggcctgtctgactccggaaatggtcgcccaatttggactgaaagccgaggcagcccgtcacctaaaatggtggcatcataatcagtgtctggatttcggctcgctgaatgggatggaagcaaagggtgatttaggttccggttctcttttcgtcaacctgcctcaggcatatctggaatataccgcggaaaactgggatccgccttcacgctgggataacgggattgccggggtattatttgattataacgtgaacgctcaagttgcccatcgttccggaggaagtggtagccaggatcagtcagtaagtggaaatgggactaccggttttaacgtcgggccatggcgttttcgcgcagactggcaggcgcagagtaaccataccacgggtgtgggtggcagtaccgagcaaaattgggactggagtcgctattatctttatcgtgctgttgctgcccttaaagcaaagttgacagtcggcgaggactatttaaattccggtcttttcgatagtttccgctttaccggcgccagtctgatttcggatgacagtatgttgcctcctaatcttcggggatatgctccggaggttactggcgtggccaaaacgaatgctaaagtcacaattagtcagcaagggcgggtgctgtacgaaaccacggttgctgcaggcccattcaggattcaggacttaaacacggcggtcaacggtaaacttgatgtcaaagtaacggagcaggatggtagtattcagcagtttgaagtggacacggcaaatattccttatttagctcgcccgggtatggtgagatataaaattgcgacaggtaagccatcagattttaaacatcacagcgaggggcctgtttttggaaccggtgatttttcctggggtataaacaacggctggtcattatttggaggggcactgctggccggtgactataatgcgctggctattggtattggacgcgatctaatggcttttggtgcattgtcatttgatgtgacgcagtcccgggcacgacttccgaaagatggtatgaaatccggtggctcctacagagtgagttattccaaacgatttgacgattatgattcgcaggtcacttttgcgggatatcgtttctctgaacgtaatttcatgaatatgtctcagtatcttgatgctcgttatcatggtatcagaaacggaagtggcaaagagctatataccattacctttaacaagcaattcagggagcttgggcttagcgcttacgttaactacagtcatcagacttactgggatcggcctgcaaatgatacttacaacctgtcactgtcacgttattttgatatcggtaaatttaaaaatgtcagcgttagtctgacagcataccggacgcaatataaccataccaatgatgacggaatgtatttgagtgttgctattccctggggaaattacggcaccatgactttcgatggacaatatgcccgtgggaataatagcaatatggtgggctattacgatcgaattgatgataacaattcttacaacgtaaaagcgggagtcgggcaaaaaggtagtacatccggtagtgcttatttcatgcatgacggtgatctggcgcaaatgaccgcaaacgcgaacatccagggaagccagtacagtgcctttgggatgtccttgcagggggggatgaccgcgacgcaacacggtgcggccttgcacaggatcaacgccatgggcggaacaaggatgatggttgatacggatggtgtaagtggtgtgccggttcggggctatgggggcattgcgcacactaataactttggtaaagcagtggttagcgatatcaacagttattatcgcaatagcatcaatgttgacctgaataagctgcctgatgatgtggatgcaacacgttccgtggttcagggaacgctgactgaaggtgcaatcggatatcgtaagttcggtgttattgccggtcagaaagctatggcggtgataaagctgcctgatggttcttccccgccgttcggggcggtagtaaaaaatgagcataaggcacagaccggtctggtaaatgaagggggaagtgtctggctgacaggtattcgtccaggggaaaaaatgaatgttcaatgggatgggcaggtgcagtgcgtgatcacgcttccttcccctttgaaacccggttttgccgaacatttattgctgccatgccgtattgtgacaacacaacccgagggcaatatgaatcaggatgctgcacgtaaactggctggaaaaacggccgaggcatcatcgacaatgtcctga

SEQ ID NO: 109512 - DNA, 777 bp, Enterobacter aerogenes
atgaagactgacatgaattctgaccatcagccttaccgcaacagcgtaaggattgcactttgtctgacggccctgatggctgcacagcaagcgagtgctgcgattgctcttgaccgtacccgcgtcattttcaatggcgatgagcaatctgtaacactggccgtaagtaatcagaataaggaactaccttacctggcacaggcatgggtggaagatgaaaacgggaataagattgagagcccactggccgcgctgccgccgctgcagcgcgtggaacctggtgcaaaaagtcaggtaaaagttcaggcaacaagtggcatacacatgctggcacgggacagggaaagtctgttttattttaacctgcgtgaaattccgcctaaatccacgaaacctaatacactgcagattgcgctgcagactcgtgtgaaattgttctatcgccctaagtcgattgccctgacgcgggcggatcaggcaacgccttatcaacaaaaaatcacgctaagccatcagggtgataaatatgtggtgaataaccccactccgtatttcgtgacaatcgcctcagcagctccatcgttgcaggtggatggtctgaagagttttacgcccatgatggttgcgcctaaaagcagtgcggctctgaatgtcagtgcttcgtcattaggtacttctccggtattaacatatatcaatgattacggtggccggccaaaactcttgttcgggtgtgctggtacaacgtgttcggtaaaaggcagtaaagccggctga

SEQ ID NO: 109513 - DNA, 603 bp, Enterobacter aerogenes
atggaccggaaatacacaaaccaggcaggtacgatagtgccggctatgatggctctgttactgagtgccgggatcgcacaggctaatccggataactgggaggtcgaaggggaacacggtgagctgcatgtctcgggggcattgaccgagggggcatgccggctggatatggcatcggcataccaggaggtattactgggcagtactccgaatgctttactccgccatccaggcaaccaggggacccccgtcactttccatcttcagttacgggattgccagcgaaatggaggacgacaacgtgatatgcgtacagatactctgacatgggacccgctccagtcagtggtcagtgtacgttttgtcgctccggctgatgccagtatgccatcgcttgttaaagtgacaggggtgacaggaatcgggttgttactggaagacagccatcaccgtgagatccggctgggtgatacgggagtaccgcagtttgtaggggccgccagtgatgaactcatttataccgtgacaccgatcaggacaccggaatctctgacgaccggggtataccgtgccacagtggactttcagctcagctacgactga

SEQ ID NO: 109514 - DNA, 510 bp, Enterobacter aerogenes
atgacaggcatgaaagttatcgtggcagcgttcacgctgctgataagcgtctttttattcccctcagttttcgcggcgaaaaaaatcgggaatgtaaatatcagtatttccggtactgtggttgcgacggccaactgcaagataagcggtagtaatccgattaaagtggactatggcgatgtgtatatcagcgaaattgcgggagataattaccgaaagcaagttgtctatgatgtttcctgtcagggagatgcgggtggtaaaaatatacaacttgaaataacgggaaatagtgcggtgttcgacggaaatttactcagaacagatgcggatggtctgggcataaaactattacgtaatggcagccagatgcagttaaatcaatggtatgacctggatccggtgaatccacccaaaatcgaaagtgttctggtcaagcaaaaaggggccacgttgatgaatggccaggaatttaatgccggagccactctgaaagtggcgtataactga

SEQ ID NO: 109515 - DNA, 576 bp, Enterobacter aerogenes
atgatacgaaaaatatcagaaaataattctgccagagatccaaagaaaatgtgtataaaacatacctggccagcagtgtcaccactgtctttattaatcttgatgctagtaagcctgttattaatgcacgtgtcgtcatcgtatgcggtacagacaggggatagccgtaacgtctcgtttcatgggatcttaaaacgcaaaccctgtcatatcagtaatgaccgagatattgagatccactttaacaaagtaggtattcataaagtggatggtcagcgctatatgcaggaaataccttacacattgacatgtgaggaaaccgatccttcgttcgtgctgaagatgacgataaagggcatgccatcaggtttcgaagagtcggcattaaagaccaatgctaacggactgggaattcgtatcctgcagaatggacagcagctgaaaattaatgatgcgctgacgattaattataataatccaccgaaactgaaggctgttccggtacagcagagtggggtgacgttgacggagcaggatttttccgccacagcaacgttactggcagaatatcagtga

SEQ ID NO: 109516 - DNA, 570 bp, Enterobacter aerogenes
atgaaacacgacagaactccctccagtgatgatgttcgtcagcgtaaactaaagttgcttgggggaatttttattgcgactgtcctgctaacaggaaatgcggaagctaaggataataatcttcatttcgacggtacacttgtggcggatccatgtgtactggatccggatactacggatatcacgctggatttcgggacggttatcgataagtacctttatctgaatacccggactcacagccagccattcacaatcaatttgcgggaatgtgatacaacccttgggaatagtgtggtatttactttcaaaggaactgaaagtagtgaattacccggattgcttgctatgactaagggacccgcctcgggtattgctattggaatggagttggttgatggatctcctttgccatttaataagtcaacccgggcattcagattaaatgatggtgtcacgacactatcttttctgggatacgtgcagggcgaaccgacagcattaaagcaacacagtattcggcgtggtaactttactgcaatagcaacgtttgagattgattacccttga

SEQ ID NO: 109517 - DNA, 984 bp, Enterobacter aerogenes
atgaaagttatctatattgaaaaaaatcaagcaggtagtatggtgctgtatttttttactgttattttatttatttttgttttttttatttcatgtcacacaaacgaagcatctgctggtggaaatcaatatcggtttataggatgtaatgacgtcgcatcacgcttagggacttggtgcagggtgttacactccaaccagacaagacgctgggatggggcagcaggaccattgggtgcaacgctttcttatggttttagtagtaccgatggggtcggttatgtacctccgaatgtaacacatgtaactcccgttttggctttgtgttcgggaccgaactctgtaggggattgtgcaagtggtcaattaacacgtaaaacagtcagtggtgccggttgggcatgtactcccggtgaaccatggaaaaattgtatgaacagagctgttggctccccatctgttctggaggctcagtttattggttcggaatctgggtcatgtcttatgttccgtgatcaatctggaggaatgtggagtaccaattattacggatatgcatgcggagattctaaattaccacctgtggttcaggatacctgtagtctaacaagctcaaatcgatgggatattgcatttggaaacatagagcgcagtagtatcaatgtaaatagtggtaatgaacaacaacgaaaccttactttaaactgcactgggggccgggcccatgatttttctgtaagatttgtcatgacggcaacaaactggtctgaaactcaaatggcaaccagtaatactaacttaggaatacaaataaaactggatggtactcctgtttcgttgaacaaatccttttctatgcgtttcccaggtcaagccagtagaacattgggtttctctgtgttgcgtaactctaatataactgcaaatgatatcgcaacaggtgggtttactgcttcgggtacactggtaatatctgagttataa

SEQ ID NO: 109518 - DNA, 456 bp, Enterobacter aerogenes
atgatcgaatgctcgcatgcacgatttataagattctatgggttttcttttcaactagcgatggttatttttttagtgactgggtgtgcacaggaattgcccccaaacgaagtgcctgctttagaaaaaaatgtggcagttgaccatgttactcgagagcaccgcatacatgctagtacatatttaaaaaattatgattcaagtaaaatttcacaatgtacacgagaacttgaggcactgaagtcttttaacaacgttaaatacaacaattataaactggagcttggtaaaataaagcaaacaagtgccagctatctgggagtcgctaacggtattagtgaggatattaatgatttggtcaggccaaagctccaatatgctttaaccaatttatgttaccgaattaagaacgacctgtcagagtcattgattaaacaggtgaatatccatgactag

SEQ ID NO: 109519 - DNA, 1632 bp, Enterobacter aerogenes
atgactagaatatttttttccaaaatatataatcgtatttatttactctttatttttgcagcactaccgggtgcttttttgtcaggtggattatcttcagcacttgccgcacaggaggaggggtacgttcctcctgatggtatgcaatcactggataatatcatggccggtgatagtaataatagatatggtcttgagtctcttgttgctcaggaacctgagccgggaacagcttctcccagaaacagtaataaggaatctggcagtcgctccattatagacgagataaaagaacggcctgattcatctaccgctgccaggaaagctatacgttctgaaaatcgcaaactgaaatcggagttagcaacacttacattacagctttctgagcttaaaacaaaacttgaaaagtcccagggaccttcccagcagacagcagcatcaaatgctgcgacgataaagtcggtaactacccgggcagagactgcagaaacatccgcaagagctctgaatcagcaggttaaagatttacagcagaaactggtagtggctgcagatttacttaaaacgcgtgaagccacactcgaacagataaaagtacagctgtctgatttgaaagcaagcggaaataaatcttatgttcgtgtaaaccaacttggtgcagatctggcgttgcgtgatcgtgaattacagacgagcaaggagttacttgccaggcaagcagaacaactttctctgctcaaatccacacttgcggatgagaatacgaaaaggacaaatgacgcgaaagtttcagcatcgcgcgtaactgaattggaacataaagcggcggaaagtatcgaggcactggagaccgcccgggagcagttaaaagatgctcaatccacgaatcaaaaaaatagctctgaattagccagtgtccgcgaaaaactgacaacagtaacaggtgaaaaagaaaaagcagatacgatgctggccagtgtccgcgagcagctgaaaattgcagtaagtcaggcatcaaactcagtgagtctggatacacctgttcgtcagcaggcttatgtggtgggccaggcaatggcctcgtcattacgagataagttgatcggttaccaggacgctggaatgctgttagatcaggcccgaatcattgcggggatatctgatggactgcgaaatcgggctgcaatgaaacgtcctgatatggatattgcctggaggacgttcgcatcaggtttacagaaacaaattatttcaaagattagcgacagtgaagccttaatcaagaagttgaccgcaggaaaaaaagcggtgctctcggctgatggaatgcagttttatctttccagaaaaggtcatggagataaggataagaatgcaacgagaactatatcactgacggagaaaattgcccctgaaggacgcgttctgagccagatacctcatttaacattaagtccggatgatgatatgccagcgattgtccgtgatgctttaccgttgcttaatagtggcgctgaagtagaagtttatgcgatagcgcgaacggtctatggctcacgtcctttgccaaagaatatcgctccatatactgttttacattatgagatgaaagggctcggcactcgataa

SEQ ID NO: 109520 - DNA, 249 bp, Enterobacter aerogenes
atgagtctttatatgcacttaccgacaagtgaatggcggcgtctgcggttgcttgagaatgcagtgctcaattatggcgggggactgactacgttaatggggagggcagaaaatcaggctactttacatcagagcgattgtcctgaagttgcagccttattgcgtgaaattgctggatatctccatgatgttgcaattgcaggccacctggatacttcagatacgctttcattgttacgggataaataa

SEQ ID NO: 109521 - DNA, 624 bp, Enterobacter aerogenes
atgagttatccacatattttactctccggtgatttagggatatggggacagggaattaggtcattaactagcaggatcccggtcgaggtaattcttgtttcagaagataaattaccataccagcttcaatatcgttcaggtttgcgtggggtagtacatatctatgcaggaaagggaccctgcccgcagttggtcaaaagtctggttgagatccaacataaaacgcaactcccccagcttgtgcttggagaacaactagaggacattctgaggttatttccgggagtcagggttgaatctttatatgccccactggagaaagtccggaaatcgctgaaatgggtaatttccggagttcgatctgctgacagaaagtctcgctttttgccattaccgatgctccaggcaatgcagtggttaaatcaggggcaggatatgacagaaattgccaggagatggaacgtacctgtcgccactgcttactcgcgatatcgtaactatcgtaaccggaacggtctaaataaatctactgagcatgctgctgtttgcggaatggctgatctacttatcggactttatgattcagtcgcattaaccgatcagacaagatgggatcatatgtaa

SEQ ID NO: 109522 - DNA, 525 bp, Enterobacter aerogenes
atgaggagcagaggattatttgtaattgcactgttagtgggcatcgttatttcgaaccgaacactggctgttgatcatcagtgtattcaccaagatggtcgttgggagcacagagttgatagcaatggaaatctggatgttgcggtaacaacccggaacggcaatggacatatctggttggggggggctccaggtaagttacaaatgataaaaattgacaacacagggggaaaagtaaaaaaaacgataatgaaaggcccgccagctgtatttgttgccgaagttacgctttcttcagatgtttcagaggccgcaaaaacgctggccttttatgatgaaaaggatggagggacccttgttatccccgttcctaatctgctcgctgtgctccttcgtagtaaaactctcacagttagtgtgccacaaatatcaggtagtctcctcacgtacagtgaagatgtttcagatattcctttaggaacagggcatcggtgtggtccacaggatgaaaagattcaaaactaa

SEQ ID NO: 109523 - DNA, 1545 bp, Enterobacter aerogenes
atgtctgtacttgcattatggtgtctcttaacctcaccagtgagaagagtaacaattacagtcggcccactgttgctgattaccggtgtcttactttggtcattgccacttttatggtccccccatcacgactgggtagttaatgcaaccccccgggtgttggctttgtgggccatcgtcggattgtggatgcttttgttacatgcgaaattaggtttacgagtccgtctggcatggttgaatattatcatactggcgtccttagtgcaggccgtactggcaataattcaattttcttcacaccatgcattgcctggtggtcggccaggaggcagttttttccaggcaaatgtccttgcttctttcctggcaacaggacttgtcagtgcgatgttgaaaagcctgtatccctctcaccaaatgtctcgtgtccttgcccatataagtctggttgttctgcctgctgttctggttcttgtccaatcccgggctggcttcattggcgctctcctgggattgctgctaatcctgctatgcggatatcgaaaggttaaatcgataagaacacctatattgttaatgctgagtggtgtgattacaggaggattatggctctatggaggtcatgcctggtttcccggagtagttcctgcaccagtcagtaaatcgggctctgtcagcactcgattatatatgcttgagctgacgatgcgattgattatgcgacatccttttgctggtaatggttatggtggttttgaagcattatttggacaattagcgcaaataacgccccccggactcgaaactgatactgtaacacatcctcataatgaactgctttatgcctggattgagggaggtgtgattgccttgatgggtgttttccttatcgccgctggaatattaatgaggtttcgtgagaaaggtggtgggttgaccgggctggcattgctcattcccatcgttacccatatgaaccttgaataccctctgtacatatcagtgtcacatagtctgttgttattaatactgctgattataggtgaagctgatttaacatgtattgtacacatggaacactatcaaccattttcattaccacctacaacacgcttaactatcattagacgtattatggtaggattatttgctattggggtggtgatttttatgattacaggtcttcattcgcaacagcaattgatgaaaattgaagatagggggctatctgatctggtaacccatgagtcagaaacgctttcagcgctgtataataaagctgcaatttatgaaaggctagattttgataaacatattgcaatgctgctccgtttcaatttgaccagtgatcctttattgatagcggatttcagaaaatgggggatgcagtatttaaacactcataatgaccctggtgtttatgatagcttattaaaaatagacaaggttcagtttcctcatgaaggagaacttctttgcaggcaagcgcacgggcgatggtcatcggactcccgttttatttgctccccgcagattaaataa

SEQ ID NO: 109524 - DNA, 366 bp, Enterobacter aerogenes
atgggaaaggtggatacaaaagacaggttatcttctggcgatatgatgcaagaagttataattaacattctgtactggattgacttaaatatttatgaaccattgaatgtaaaagatgtttcccgacgctctggttattctcattggtattttcaacgccgttttagtgaaatatatggtatttcattaggacagtatattcggcaaaaaaaaatgatactcgcagcatctctcttaactgaaactaatcttcctgttaataaaataatgcaaagacttggttataacgattatgtgacctttgccagaatattccaaaggcaatataaaatatcgccaacaaaatacagagagatattgatctga

SEQ ID NO: 109525 - DNA, 1641 bp, Enterobacter aerogenes
atgtttgatgttcctctggaaatacgtaatcttttacataaataccaacgattgttacgggcatataacacgaaacgtgttgaattacctttgtctgtaattgcagtgacattatcttgtacaccacgatatgcaagaactctactgagcagaatgcaagctgaaggttgggttttatggagtacaaaacctggtcggggggcattaggtcatctcgaatgtcgccttgatgttgctgcattacaatcaatgaaaacacgagattttgtgctcagagagaaagttagtgatataaaaaatgaatcacgaacaacatcacaaataaaaggctatcattataaaatagaatattatcgtccattaatgccattaatcccatccgttcatttagccagagcggagaggcatttattgcaaatggtgcatgcagggttgacacgctggacaccaggaaacagtaatcctgtacctggattagcacatacaattaaaatttctgaagatgggttagtatggacatttaatttaagaagggggcttatatggcataacggagaggctgcaaacacggagcaattgagacatattattgaaagttacatcggtagcccaggtttaccctatgttatttgtgtaagtgcgcaaaaatataaaattcggctgcatttgtcacaaccagattacaggctggctcaacgactggctaatcccatttatgctcttgctcatccagataacagaacttgtggcatgggaccttttcgtgttcatgagcatacggatcaaaaaatggttctaaagcggtttataaactggtatggagagaaacctcaagcttctgaagttgtttatgaaacaacacttcaatcagaatcagactggtcttctgttaggttattaactcccgactcacaactattgtctgaaaaaaaagccaatacagacacaactgattcttttctatttttgacatttaaccgcaaagattacaaattaaacatgcaacaaatcaattatttacacagcatgattaaaacactggtaacatgcctgaaaaataatccaggagttcattccctgcctgattggttgctgataaaagaaaagttcgctaatgaagcgatacttcctcatagcatatcgatggcatattttagaacaaaagaaacagaattgtttgtaagtcttttaaaaaaaaacttgcggtatcgaaattgctcactgaagttaacggctgtgaatgatacccattggttacttcctacagaaatttgggctgataaagatatgtttcttgggtatttactctctgagccagaagtattatttagtttcgaagagcgctatcggcatagtgcgatgttaaaaaaaatatggcctgatcacttacagtataaaattaatatattattagatcgctatgtatgtaagccacaggatgagtatcttaatagagtaaaacgtatggttagatacggtgtccgtcattcgtggattacacctttgtggagtcataaacataagattgaatatcccgagagtgtccatattggtgttttatattctcaatgctggcctgattttactcagatatggactgatgctgaaataatgccttacatgattgatgactcattttaa

SEQ ID NO: 109526 - DNA, 702 bp, Enterobacter aerogenes
atgaaaaaaataagaaaatatataagtgcaaaacttcaaagttatgtcacccggcaccctttatttatattcggttatggagtaaatgacaggtttgtaaaatccattcttttggatgttaaggaaatgaatggtgtaaatgattgttttatgtcgaacgtgttccttgtcatttacgataaggaatgcaatgcatacatggaatgtgaaaaagaaatctattttggcaatgatgtaaacagtggaattagagtaaatttaatttatactagcgattatttatgggtatttgacgcattatcagccaatacaaataaaatttccgtaacccctgcctttattcatcaattattagagcgaacgcactatttcacatcaacgttctttttaaaaaaaacatatccactgcatcgtacgaaaggtgatgcaattgacctgaaacgtataggttcagatatccatttgaaatatccatacactattttagatctcgtaagtattttagacgcggaatcataccatgcggtcaataaagaattcaaaaatataaagaagctaactggcgttgatattcgagcaactaataatatctttcacatgcttttaacatcaggcaggaaattatcacaaaaatattcagatgaaacgttgcttttattaagggaaagcatggaaagtgcaatttatgataagaagaaataa

SEQ ID NO: 109527 - DNA, 411 bp, Enterobacter aerogenes
atgaataaattattcaaagcagttttgagtgcagagtccttgcatgcgcgagagaagcagagggaaattctatttttgcaggcatatgacactctttgtcgggagatggtggcgtaccttgaatctcgtccaggactcgtagtacaggtaatacagtatatgggggggtacaccttccatgttaaggtgagcacgcagatttttaccctggcactgcaccggaatacgtcgtctcgggaagttagcctgcgggtgaatagtgaagaggggcgaaattcagtgcagattggcctgaaaagctgtagtcaaggaggttggagaatagtaaatattaattataatcggcccatgtatcttctgcgaagattcagaaaggaaatgttagaggactttatggtgcacttagtctga

SEQ ID NO: 109528 - DNA, 894 bp, Enterobacter aerogenes
atgccaacattaattcagatgaaatattttatatgccttgctgagaataatagcttcactcgagcggctaataaactaaatatcactcaaccaccacttagcagagctatatctgcaatcgaagatgaatacggagttaaattatttgacagactaccacatagtgtcgaggttacgccgaagggaaaactattacttgatgagtttagagttctactcagaaaggtggagaacataaagaataatattcaaactgaaccagtgaagaaaaacataataaaaattggttttacgatgtgtgccgcttttagtattatcccaataatatataaaaacttcacaaaagataacccactcattgaacttaaattggttgaatcaactcctttactattaatggactctttaaataatggcgatattgattttgtgattagttttccagaaccccatgagagtagtaaaagttcaatgattatttataaagaaccccttgaactgtgtatcggcgataattttgtaaagagtaaaacattatctgttaaaaatgctcttgagcttccacttgttattatacctaaaaaagagtgtccggtgctatggaacacaataatatcatggttccactcccgcggaattaatccaaaaataggtattgaggtaaaatttcagcagacaatcgtgaacctggtttcaaatggaattggtatcgcttttctaccaaagtcaataaagaaaagtctacctgaaaatatatctttactgaagataaatgaaccgcccattatcgctcaattattatattgggatgaggaacatataaataaagtgaatgttatttttattgattattgtaaaaagcactttgagactatgtgtatttccactccttaa

SEQ ID NO: 109529 - DNA, 1689 bp, Enterobacter aerogenes
atggaaattaatgaagtcaaaaaatgtaatttgcgccgtggcgcagatattttacttgaagtccttgaaagtgaaggtgttgagttcatttttggtaatccggggacaacagaacttcccttgatggatgctctcattaaatgtaacaatataaaatacatttttgcactgcaggaagcatctgtagttgctatggcagatggctatgctcaggccgccaaaaagccaggattcatcaatctccatacagcaggtgggcttggtcacggtatgggaaatttgcttaatgcaagtgtttcacaaactccacttgtcgtaactgcaggtcagcaggattcaagacatatgattactgatcctttgctttttggcgatttagttagtatcgctaaaccagcatcgaaatggtcacgtgaggtttctcatatatctcaactgccagtactagtcagacgcgcttttcatgatgccgatgcagctccaaaaggaccagtgtttctctctttcccaatggatattatggagggaatgagtgatattaatataggagctaagtctacaatcgaacaaaaatccattgccggatcgttggttgagctagctatttaccttactgccgttaaaccggggagacttgcaattattgcaggtgatgaaatccactacagcaatgcttcatctgaagttgtaaaacttgctgaaacacttggtgctcctgtattcggttcatcctggccttcacgtatcccgtatcctacggctcatcatgcatggcggggcaatctccctacatcagctaaagatatctctgaaaaattatcagagtatgatgcaattttcgctctgggtggaaaatcactgattactattctctattctgatagttcagcactacccgctggctgtgatgtattccagctatctttagatgttagtgatttgggacgaacatatccaacaaaattatctgttgttggtgatattaaaaaatcactagaaatgcttcagaatcacattgaaagtatagatcttgtatataagaatgagtattcgcatttttctgaccaaaataagatatttttcgatgaaagcagactacgtgttcttgaattatccgatcaaaaatacttacagaatagtatttctcctattgttgcagcccgtgaagcactcagagctattggaacgactatccctattgttgatgaagctttagtaacttctggttttgtccgtaaacttctttgcagtgacaatcctggtcaatactcttttcttcggggagggggattaggatggggtatgccagcagcagtggggtgttcgcttggctatgatagatctcccgttgtctgcctggtaggcgatggggcagctctttattcgccacaagcattatggactgccgcacatgagaaactacctataacttttgttataatgaataatcgtgaatataatatcttaaaaaatttcatgcggtcacaaaaagactataatgcagctaagactgggcaatttattgctatggatataattaatccaactattgattatcaggcactggctaaatcatttggtctaccatctatccgtatagaaaaatcttgcgatatagcggaagcgatcaatgcaggcattaaaagtggtgttgctaatattgtcgaaattatgattggatcaaattag

SEQ ID NO: 109530 - DNA, 1155 bp, Enterobacter aerogenes
atgaaagtaatcagtgatattgaagacctaagaagaatagcacaaaaaaaagtacctaaaatgttctatgaatttgcagattcaggttcatggacagagagtacctatcgggctaatgaaaatgattttaaaaatgtactgttccgtcaaagagtaggggtgcctattggaaatcgcttgttgaaaacccaaatgataggaactgatgtctcaatgccactgtgtatatctccagtcggaatggcaggaatgatccatcctgatggagagatacttgcagcaaaagctgcagtctctaatggtatccgatatactctttctactttaagcgtttgctcattggaggatatacaaaagacaataaaaaaaccattttggtttcagctctatgtaatgaaggataaaaacttcatgcttgcactgattgaccgagcaaaagctgctggttgtgatgcactaatactgacaatggatttggcagttataggaaatcgttttaaggatgcaaaaaatggtttatctacaccaccaaagctaacgctttcaaatattattaatatgatgaccaaaacacaatggtgtttgggtatgatgaaaacacgtcgtcataatttaggtaacattattggtcatgctaaaggggttgatgatatgaagtcattatcctcttggactgcggagcagcttaatccggaattgagttggagtgatattgaatggataaaaaaacactggggaggtaaattagtcatcaagggtatcctggatcctgaagatgcaaaaattgctgtgtcatcaggtgcggatgccatcattgtcagtaatcatggtggacgtcagcttgatggtgctccttcaacagtttctgtattagcgaatattgttgatactgttggttcatactctgaagtatggatggatagtggtatccgaaccgggcaagatatcctgaaggctgttgctcttggggccaaaggtgcgatgattggcagagcgtatctttggggattgggtgcttatggtgagaagggagtcaatattgctcttgatattcttcgtaaagaattggataccacaatgggattttgtggtcaaacagatataaactgtgttgacagaagtattttgctggaaaactcaattcctaaagtataa

SEQ ID NO: 109531 - DNA, 297 bp, Enterobacter aerogenes
gtgaaaaccgttaaactcacgccgaaagccagtcaggatctggaggatatctggtattacgggcagcaccatttcggtgaacagcaggccgacagatatattaatcagctatccgacatttttcaggttatgagtgctcataatatcggcactccacgtcctgaactgggggaatacacattcgcactacccgttgaacgacatataatttattttctgcaaactgatactgaaattattattatccgtatattaagtcagcatcaggatgccggccgtcatcttaactggcagtaa

SEQ ID NO: 109532 - DNA, 162 bp, Enterobacter aerogenes
atggagcagaaatttaaatttattcattttgaagggttcaatggaatgataactataaggaatatagagcttttaataaaattaagtcaacgcttgatgttaatattgtgtattttatatattacaattttcataaatgtaatgaaaaaaagaaaatcttaa

SEQ ID NO: 109533 - DNA, 1425 bp, Enterobacter aerogenes
atgaaaaaatatgaccgaggctgggcatcgctggaaactggcgcggctttactgattgttatgctcctgattgcctggggagcgggcatatggcaggactatattcaaacaaaaggatggcaaactgaagcacgtcttgtcagcaactggaccagtgcggcccgctcttatatagggaaaaactacacgactctccagggcagtagtaccacaacaactcctgccgttatcacgacaaccatgctgaaaaataccggctttttgtccagcgggtttactgagacaaacagcgaggggcagcggttacaggcatatgtggttcgaaacgcccaaaacccggaattactacaggcaatggttgtatccagtggtggcacaccttatccagtgaaagcacttatccagatggctaaggatattaccactggtcttggtggatatatccaggacggcaaaacagccacaggtgcattacgttcctggtcagtagctttaagtaattatggtgccaaaagcggtaacgggcatattgccgtattgttatcgacagatgaacttagtggtgcagctgaggacactgatcgtctttacagattccaggtcaatggtcgccctgacttaaacaaaatgcacacggccattgatatgggatcaaataacctgaataacgttggggcagtaaatgcccagacaggtaatttcagcggcaatgtgaatggtgtaaatggcactttcagcggtcaggtaaaaggcaatagcggaaactttgacgtaaatgtcaccgctggcggtgatatcagaagtaataatggttggttaattactcgtaacagtaaaggctggctcaatgaaactcacggtggcggattttatatgtccgatggatcatgggttcgaagtgtaaacaacaagggcatctataccggcggtcaggtgaaaggcggtactgttcgggctgatggtcgcctttatactggtgaatacttacaactggaaagaactgccgttgctggcgcatcatgttcgcctaacggccttgtaggccgcgataatacaggggcaatactttcgtgccaatccggtacgtggaagacttctggttcgctcaatggttcttacacaaacttaggttcacatagaggttcattctcagggaggaattcagggggcagtacattgtttatttatgcatctggaggtaatggaggatctgccggaggtgcatgtgcaaatacatcccgactgcagggatatgttggtgggacgctaattagcgtgaatgccagcaataaccctgcatatggaaaaacagcctttatcagctttgctgtacctgcaggtacttcctatcagataacatcctatccaacagaaaatacatcatgtggtgccggggtattttcagtatttggatatcaaacttaa

SEQ ID NO: 109534 - DNA, 657 bp, Enterobacter aerogenes
atgcagacaatcgtaggcataagtctatcccctgtttatatactgccattgatgttcacattttccattattggacgaactctgctattcagagttcgttattttttatctgatacgggacatctctggtataagacacaccctgctgttctgtcaggaatatggctatacagtatagctgtggcgttaattattttatcatcatcaccactgctctaccgtattcatgctgtccttattctttcgttcatactgcaaatggcggtaacggatgcactgacaggtttattaccaggaacattcacccggcgttttttaattgcaggaatgctatcacaaatcacgactgatatatggtggttccgtacaacagaatttgccactgctgcaattgtcttattctgccttcataaattagttaaccgccatcgtcttaatattggcactggagacctgtggcttattgcaggtattaccgcatggtcagggttatataacgccatatggtgtgtgttgctgggcacaggaggatttgtcttatggcattcaacatggtgcataaaagggcataaagaaggccctctgggtccatggctatgttttggtcatgtccttttgctgctggataatctttatcaaccactatgggtaatctga

SEQ ID NO: 109535 - DNA, 561 bp, Enterobacter aerogenes; identical to SEQ ID NO: 8482

SEQ ID NO: 109536 - DNA, 615 bp, Enterobacter aerogenes
atgttagtagaaaatattaatgccactttaactggaaataataagaagaatgagcctcatgataaaggatggggaattttggagcagggaacaatagcgctcgttgttctttttgttatagtcgttgttctgggtagtttgtatgcgttacgtacaagaaccaatgtggcaactgaaaccgcaaatatacaaacaattatcacaagtgcccagagcctgctaaaaggtagcgatggatatacatttaccagcagtgccaaaatgacaggtgccctcattcagatgggggccgttccctctgggatgacagtacagggcgacaaaacatctggtacagcaacgctctataacgcatggggcggtgctgtaactgttgccccggcttcaacatcagggttcaacaacggttttaccgttacctatgataaagtcccacaggatgcctgtatccagattgccacacggatcagtaaaactggtttaactaacggcattaccctgaacagtactgctcacagtgatggaaaagtcactactgaagaagccagtacgcaatgcaaggcagataatggcagcactggtacaaacaaacttatcttcaccatcaatggttaa

SEQ ID NO: 109537 - DNA, 1098 bp, Enterobacter aerogenes
atgcgtgaaatgaatttcagtcaacggctgaggcgtttcattgtcagaaaaacgttcagcgccccctacagggtgcagttttacgaagccctgcgttttctgctggaaaataaacagccattaaagaccgcactggaacagatgcgggatgcctggacagactttggacgaaaatggcatccctttgctgaactggccacagactgcattgagtctcttcgtgaaaacagtggcgaaaactctctggaatatactcttagtttatgggttcctcaggaagaggccgcagtaatcagcgccgggataagaagtggttcaattgtggatgcactgcaattcgccaccactcttacagatgcaaaagaacaaatccatcaggctatatggcaaatggctatttatccggtgggattgttaatcatgatgacggggacattatatgttctgaatacacagctaatacctgaactgagcaaaataagctcccccgattcatggagtggtgctcttggttttctttatggattatctgtttttgtcgataattacggcgctatatgtgccgttctttttgcagtgatcacaggtttaatatcatggtctctgccaaactggaaaagccctgacagtgttcgtacttttgccgacaagataatgccatggagtatttatcaggatatacagggagcaacatttctcctgaatatggctgcacttctgaaagccaaaatgacgacgctcaactcactaaacattcttcaggagtttgcatcaccatggttaagcacacgtcttgacagcattatttaccgcgtccgccagggggatcatcttggactggctttgcgtcagtgcggttatcagttcccatccagggaagcagccaacttcctgtctttattacagggagatggcgcaacagagctaatcagcaattatggtcaacgatggcttagtcaaacacttcaacgtgtaaagaaacgggcaaacgtgattcgtttaattatgctgatatttcttgtcatgtctctcatgttactggtttttgccattatggatattcagtctattagtgacaacagcatgggtaacttttaa

SEQ ID NO: 109538 - DNA, 1554 bp, Enterobacter aerogenes
atggataaatataatctgaaggatgctctcctttttatatcccggggagacacccatgaaattcttatagaaacaaaccagcggacaaggcctgacgtacaaagtaatctccaggaactgctaaaattatatccgggtatcaacccaaaagtagtctcgttgtcggagttacaggaagcaggtcaggatgaaaaaaacagaggcccgaaagaacgaattattcatctgaaagatcttgctgatgtcagtgaaagtgagaagaaagttctatcttattttgaaacggccagaaaacttggtgcttcagatattcattttttaatttctgagtctattttcaaagttcgcatgagaatattcggtgaactgcagactgtagatgaagatcaaccagcactgggctattcactttgcgcaacagccattctgtcaatggctgatgtcactgaaaccagtttcttccctcaaagggaacaggatgcgcgcctgtccccacaattaatgcgaaaaataggaatatttggtgcacgctacagtcacagacctacgggagacggtctgattgcagttatgcgcctgatacccgatgacggagataaagttcccacgtttaaacaactgggctttatcccggaacaaatccggttgctgaacataatgctgcgccgcccggaaggaaaaatagtcctgtcaggtccaaccggttccggtaaatcgacaacgttacgcagcgcctgccgtgtatatcttgacgataatcaggggcgacacctgctaacaatcgaagatccgctggaaggacagatactgggagcaacacagactccgattatctgcgacaaatccgacgaagatgccgtcaaactggcatggagtcgggctatttcatcggcaatgcgacttgaccctgatgccatcatggaaggggaaatgcgcgatcttatctcgatgatgtcaaccacctacgcggcacagaccgggcacatagttctgacgacattacatacaaactcagctctgggtataccggagcgaatgattacgatgggtatgaatgccgatcttatttgcgatgcgcaattactgattgggatgatcagccagcgccttgtaccaactctgtgtccctcctgccgtattccatgggaaacgcgagcacctgaacttagagacgacgagcgtgattaccttgagcggcactgcaataaagattcactctgcagtacagataatatctggttccgaaatcctcacggatgctctgaatgtaatcacgacgtaatcattaacggcagaaagcgcggtgaaataggtaaaggcctcaccggcaggactgtaattgctgaggtgatagaacctgataaccgcttatttcagattctgaaaacacgcggcaaagttgcagcacgtaaatactggctggaaaacatgaaaggcatcagtcgtgtagagcatcttcttcgccgtatcaatgaaggtctggtagaccctcttgaagccgacagaatcatccctctggacgaagacgagcgcctcagcatcgatgatgtctaa

SEQ ID NO: 109539 - DNA, 1296 bp, Enterobacter aerogenes
atggctgatgaagatatcaacccggtagtgcttctcgaagatcctaaagtaaatcatcgcgtgtgggctgcctgtcttaaatggactcctgtcgtaaaaaaacagcgcgtcccctcacatcataaacacaagtctcatgtaaaacccagacggcttacctccctgaaagtgactgtaggcagcagaaattcccgtggaaagatcagccgccttaccggcacaggaatactgaccaggccagaacgcaatcattatttttccctggcactggctttctgctcatgggtcagaaatggatacggtgtcttccggtacagcgataaggagctcttattccttgcttccattaatggccagcctgccgttatggctgacttatcaggaaatgatgccgacgttgcccaaaaggtcagcctttttctggcgatgaacgaagagccccccgaaaaatggcaggttgtatcgtctctggaacatcctgataactgggaaagtattattacccagttatcatcagcagacctccgccgttgcaaacttactgtcggcaatcgcagcaaattcacactgcctgccgtactgtttttagtagcagccggcgcaggcactgtattctggatgactcagccagagccggatgtcgtaccgacgcccgaggagatagctgctcgggcaagattgcagtttaaaaagcccgatccaccgccagaactcccgcatccatgggcatcacaacctgtaatcagtgattttctgaaagcctgcgcggaccttcgaaaaccgtcaccggtcgcactggaaggctggaaacttaccggcggaacatgtactcctgagacattcacactgatttacgaacgacagcctggaggaaccattgagggttttctggcaagaagtaaagaaatctttggtgttattcctgactttaaccttaaagatggtgcacgccaggtttctgtaacccgtccactgccgtccctgcccgacagggatgaggctgtcccggccccctcagaacaactgatgcgggtgttcacgtggtttcagaaaaaacagttaacaccggccattaatgaaatagccataccggagccattaccaggcaacgatggtgaaccagcccctgttcagaaatggaaagaatatcagttcagtttatcaactcctgtaaatcctgatgagtttttccctttacttcaggataccggcgtccgtctgagcaatatccattttgaattaaacggcggtactttcagttattcctcagaaggtcatatatatgcgtccaagtaa

SEQ ID NO: 109540 - DNA, 1683 bp, Enterobacter aerogenes
atgaaaaaatcacaccagcgttcaatgaagctggcggtgctcccctgcatgatcgccgtcgctctttccatctccggatgtactttcagcgaaatcaacaaaatgcagaaaaaagcacaggaagactcagcacatgcacgggaaaaggtatcagccctttcggcccgtaaatcgcaggctctcacctggctcgataatcaatggataaaccctgttccggtcgctcaggtatcaagagagaaaaaacaaacagctccggcctgctacatcacgcaggcaagaaaaggagagatcactctgcaggaactggggcaacgtattactgccgtatgcggcatccctgtaatcatcacgcctgacgcagccaattcaactcttgaaggaggcgctacccgccagatgacaggaacactaccagcaccagatgaaaatggacgtctaccgttaagcagcctgggcagcacaacaatgactacctccactcagccattaacgctgaataacctcatgtggcagggagatatcaatggtcttctggatctgatggccagccggagtggtctgtactggcgcatggataatggtcggattgtattctatctgactgaaaccagaacgtatccacttcatatgctgaacaccaaaaccagcagcagttccagtgtcagctctggctcaacaagcacaatgggggcaacaggaggccaggataactcagcatccggtgatgcaacgtcctctcagagcacaaccgttggtcaggaatacgatctgtatgaagacatccggaaaactattgaagcaatgctgacaccagaaaaaggccgttactggttatctgcatcgagctcaacgctaacagtcactgatactcctgctgtccaggaagccgtcgcacgatatgtggacgaacaaaacagtattatgaaccgccaggtagccctgaacgtacaggttctgagcgtcagcaataccagaaacgagcagttcggtctggactggaaccttgtttacaaatcgctacattccgccggagcaacgttgaacaatgcaagcggagattttacaggcgctacatctgcaggcgtatcaattctggatacggcaacagggaatgccgccaaattcagcggttccagccttctgattaaagcactgagtgaacaaggcgatgtcagcgttgtaacttcacaagaaagcactgtcacaaacctgacgccggtacctatccagatggcagatcagacagtttacgtcgcccagtcagcaacaactacgactacggatgtaggagcaacaacaacattaacaccgggcatgatcaccactggattcaatatgaccctactgcctttaattcagaaaacaggcaatctccagttgcagatgaactttaatctgtctgatcccccaactatccgtagctttacgtcaaaagacggaaacagttacatcgaaatgccatataccaaactgcgttcactgagccagaaggtcaatctgaaagaagggcaatcacttgtcgttactggtttcgatcagaacaatacgacgacaagtaaagccggtacgtttacgccagcaaatccattatttggtggttcacaaaccgggaaaaatgaacgcagcacgcttgtgatcatcattaccccgactttcccgtcaggaggcaataatggctga

SEQ ID NO: 109541 - DNA, 438 bp, Enterobacter aerogenes
atgggatggctggtcatggccgtcggcctgaccattctgattatcactggtagctaccagaatcagaagatgtctgaaaccacaaacgcccagcaatatgcaagtgcgtctgtatgggcaagtcagatactaatgattgctaacagaatcaatgatatcagatacgtatcaggccagcaggacggagtaatttcctcagataaactggctctccctgtcactccggactcccgaattaaacatcagttacaacaggggcgtctgtgggtatggatgcctgaacaaccaggacttgttgaaactttgcgttcaaaaagtcgtggttctgcactaatagggatcttccaaaacgggcaactcacctggctatcaggaactgcaaccggtctgacacccccggcaggcattactgctggttctgtcgtctacgttaactaa

SEQ ID NO: 109542 - DNA, 1068 bp, Enterobacter aerogenes
atgaaaaaaaactgtctgacacttatactgccgtcattattgtccggctgtgccggaatttccggcagcaataacgtggcaccatcagatacgcctgctctggtttttgttgacggacaaatcagtgaaagtgctggcgttctggcacttacgcaacaacgtctttctccacctaaaataactccccccccgagagtcagcgtgccagagacagtaaaaacagcacagcctgttagcgaatcccgaccgttaccttcaccaacaataagtcagaatttctcccggttaatcattacaggcaagcctggtagcgcccctgtaacactatcgccgacggcccgtaaccggaccgtcagtcagtggataaaaacattactaccggaaggatggaaattcagacaagagaatgcagccacgcccaagctgaataccaaactggtttcatggtctgccaatgatcagtggacccgttctctgaaccggttgctggaagaacaacacctatggggccatctggactgggataataaaacgttgaccgtcacaacatcagctgctgcaccggcacaggacacggcaaccactatctcgccagcagccatggtaaccacatccacttcccctgaatctccaacaacagcaaatagccagaacaaaccacgaaatccattcagaggaaacagcgtatcttcgtcaacccccgccgccaccccaactccaaccggctccacagtcaagtctatcccgctcatgaccgggacgcctgtcaaaccggtatctcagggtaaagagtggcgtgcgccggcaggcaccacattaagagagaacattattaagtgggcagaagaaacaaaatgcgaaagcatggcatcaacgcactggatggtcatatggccactttctgtaaccgattaccgtctggatgcgcctttaatgttccggggatcatttgaatcagccatggagcaggtatttgagttatatcggactgcgcaaaaacctttatacgcacaggcttctcgcatgcagtgcatcattacagtttctgatacaagggatggtcgctaa

SEQ ID NO: 109543 - DNA, 594 bp, Enterobacter aerogenes
atgaaaaataataacgtaccattatatctatggttgctttggtgtacgctttgtctgtacatcactaccccatggcaatacttacgttatccatacactgacaacttatcattgccttatatgttatatttctgtgtggtggttgtgatttgcattttcccactacttttcagatgtgtacttcttattgtaaggtctgcatctaaatacgacttcacattctttgtgaagaagaaaaagggaagcaagaaatcaactatacatcttagcccctatgctgacacacgttgcccgaagtcaatgaggaaacactgggatgtattgctttctctgatatcaaaagcaattaataatgatgaaatcattgtcatgcattcacatctctttactccagcaagaataaataaacttataaagagactggaatcttatgatttgagtttttcagttattacatacccacggaaaacaagtctgtacgaaaaattatcaattccttttatatatctcttatttcagtggtctttcccgcatttgcattcggacggaatgacagtcgtcattcgtcctctccagccgcctcacaccaattaa

SEQ ID NO: 109544 - DNA, 297 bp, Enterobacter aerogenes
atgtttaccatgttctttctagttaaattaaccatcgcgattgtgattgtctgtggaatcctttctccgattttagtttcaccacataacaaactgtccacacttttttggaagataccaaacgcgttctggattttcctgatttgcatatactttgcaatcgccatggcggtgttaatagaaagcagtgaacagacacgcatccgccgccaacaatatttccaacagtacgaagtgccaaatgagacacataaaaatgtggtgatagaaaacagtattaaaagtcaactaatatga

SEQ ID NO: 109545 - DNA, 255 bp, Enterobacter aerogenes; identical to SEQ ID NO: 8471

SEQ ID NO: 109546 - DNA, 552 bp, Enterobacter aerogenes; identical to SEQ ID NO: 8470

SEQ ID NO: 109547 - DNA, 684 bp, Enterobacter aerogenes; identical to SEQ ID NO: 8469

SEQ ID NO: 109548 - DNA, 534 bp, Enterobacter aerogenes; identical to SEQ ID NO: 79137

SEQ ID NO: 109549 - DNA, 288 bp, Enterobacter aerogenes
atgtcacctcaaatgatacagaaactcccggccatcactctgttggaaggcatgtttcccgagctatcaacaaaccagcttaaagtctgcgttttttacgcaatgggtgttccttacgacgccattgctcagaactgtcggctttctcccgaaacggtacgaacctacctgaagcgaagcctgaagaacttaaatctggaaggatatgatgcacttcgctctgctgtgctgatgcgaacgttcgttttcatgattagcaatacagctaaagaaaacgaaaaaatgtga

SEQ ID NO: 109550 - DNA, 1077 bp, Enterobacter aerogenes
gtgtataaatacacggcacaatcgctccgccataagcgacagcttgtggcaggtctgaagaatactccatataacgcagtacactggagtcagttagcacccgaagagcagatccgtttctgggaagactatgaagcgggaagggcgaccactttcctggttgaaccggaaaggaagctcacaaatcgccgtcgtggtgagcactccactaaacccaaatgcgaaaatccgtcctggtatcgtcctgagcgctataaagcgctgaaagggcagctcgggcacgcctataaccgtctggtgaaaaaggaccctgtaaccggcgagcagagcctgcgcatgcgcatgtcgcggcatcctttttatgtacagaaacggacgttcgtcggtcgcaaatacgctttccggccggaaaaacaacgtctcctcgatgccatctggccggttctggtcagcttcagtgatgccggcacacataccgtggggatgagcgtcactcggctggctgaagaaatcagcccgaaagacagcgagggacatgttattccggaactggaagtgacggtctcccgtctttcccgtctgctggccgaacaggtgcgctttggtgtgctgggtgtgtcagaggaaacaatgtgggaccgtgaacatcgtcagcgtctgccacgttacgtctggataacaccggcaggctggcagatgctgggcgtcgacatggtaaaacttcacgaacagcagcagaaacgactgcgtgaaagtgaaatccgccagcagctcattcgggaaggtgttctgcgtgaggatgaagatatctccgttcatgcggccagaaaacgctggtatctgcagcgcagccaggatgccctgaagaagcgccgtgaaaaagccgcagccagcaagcgtgccaaccgcctgaagaaattacctgttgaccagcagatttatgagatggctgagtatctccggaagcttctgccgccggatgaagcctatttctgttccgatgactatctgaagcgactggccatcagggagttgcgtcagcttgaactgacgctggctgcgccaccgccgcactag

SEQ ID NO: 109551 - DNA, 510 bp, Enterobacter aerogenes
atgagtaaatcaggtgcagaaaaaattcaattcatcctgaataatcatgaacaggcatacagacgcctgaagcctgtatatacttttttagaactggcatcttggatttcggttgttctgctgattatatacctatcaggcaagaatcacgtgcttacagcagcttttctctgctttgcatggacagcattctgggttcttttccttttacattatttcccaaaagttttctctattctcgatcgtcagagtctgctcaacctcatggaggccaccaaagactcaccagatgtaaagcaggagctgcttaaccgccttttttccggaaaaagaatgaccgggcgggatgaaatggatatctgccgtcttctgagaaaaaatgaagaagaaaaaatccgtcagagtgaactgaatatcatcaggaattttattgatgaacagcagttaacgaatagtgatattccgaagaaaagtacggtcccaaatgaagataaaaaaggcataagatga

SEQ ID NO: 109552 - DNA, 603 bp, Enterobacter aerogenes
atggaaaaaaatcaggaagaaaggaaaatccccgtcattgtagtgaaaaaacgtcgtaccttttcgttaccttccttatccgaaaaaacagatattatcgaatctgcatttactgaacaggcagcagaatcagcccccgtcggaataaattcatctgccgtcgaaacacatatccccgaagcaccagccaggaagaagaaaaagaaaaaacgccgtttcccacgtccctcccactggaccagagagtatactcacgagtgcgtggaaaaaataaagatcctgtttcctcatcttcgtgctgaaggtggtggatttattcccctgaaaattggcataaacaatgatatttcagcatttctggcagaacacccggagacagaactgaccatggacgaatggctctgtgcagtgtcctgcatcacctcacgccgtgtatatctgcagcggacagctgtcgccggcgtcccacgttatggtctggatggtcaccccaaagggcaggtctcagaatctgaagcacagagtgccggtcgcagactggtgacattagaacaaaagttgctcaggatgcaggcacagcaggagaatatttctgggcaataa

SEQ ID NO: 109553 - DNA, 1263 bp, Enterobacter aerogenes; identical to SEQ ID NO: 67462

SEQ ID NO: 109554 - DNA, 123 bp, Enterobacter aerogenes; identical to SEQ ID NO: 8077

SEQ ID NO: 109555 - DNA, 876 bp, Enterobacter aerogenes; identical to SEQ ID NO: 8076

SEQ ID NO: 109556 - DNA, 321 bp, Enterobacter aerogenes; identical to SEQ ID NO: 83617

SEQ ID NO: 109557 - DNA, 1395 bp, Enterobacter aerogenes
atggcaacagtagctcgaaggtgtgagggtgtcggtgcgggcgcacgtaggtcccaggtacttgtaaagaagaatccccggggcaaagtgattcgggagcttagcagtgaggaagagactgcagtaaagacggtctgtggactgaaaaagccagcaaccatggcacaacataacctggccaatgatcttctccgggaaatgcgtgagtatgatgcatggttacagtgtgactgtattccgggagattcgccggccatgaattttgctgctcttaaaaacaatacgggtactctttatctgtccagttttaatcatgagcatgcacctgaatgccccatgtatcgtcagttatcaggaaatgaagaggaaacatccttcggagcaagccggcatcccgttagcacccgtataaattacagaaactttttaccacctgatgacagtaattctgttatcagactgcagacccgctctgcttaccataatggtgagcgctcctccgttcgcaagaaacgtccgcgccttggccgtttactcctgtcgcttattgaagatgcagggctgaataaactggattccctggctaatccccgtatccggactaattatcgtgagtgtcttgatgccatacggcaggttacactacagcaggagtatattcggggaagatccttatctgaaattatccatttccggccaggaatgtctgaaaggtctcaggagcggttaatggaaacgctggagaattcagaacgacactggcctgccagaagaaaacatatgttctttcagatttttatggcgcagcacatctgtcgtgatgctgtggaaattcactgggcgaacggtaatattcaggtcttcagacctgtgcgggggatcagtattaatggtgaagcgcagggcggaatacgtcccccttactgggttattcttgctttttgccggagtgccgatggcagaatcatctgcagtgaagggtatgctcatgctctttatcaactgacatgtccggttcctgtggacagcaaactggaacgaaacacgctcactgctcttctgaatgtggccagctggcttaaaagaaagccaggtacgccggaattaagtctggaaaggcccctgtttgatacagaagtttatgttaatggtgaaaagaaatatgtactgccggatttcattgtcacagcaagggctcctgacggaaagacggccagagtggtcatcgaaacgatgggatatgaagacagtgattactgcgcgagaaaatccaggcagcataccggcatgaagcagattggtgttctgcataccgatccaccgaaatggctggataacgatcatcccccttttgagaaacatatgtacggtgtttttatgcatctcaggtactga

SEQ ID NO: 109558 - DNA, 348 bp, Enterobacter aerogenes
atgaggaagagaatgcgaacgatcaccacacgtgaacagttattagtgaacggaaaagtcagggaacggattgccacacatatcgtgacaggcgctcacgggtatgaaacgctttgcacaagtggttataacttacaatacaataaggaacgggtactgattgaaaactgcgaaaaggtggctgatggagaactgcctgtcacctgccacacttgtttctctatatggcaggatgtacaccggttcaaacctggtgactttgacacagaatcaggaaagggaaatttcactgatacggagctcacgaaaatcacaattggacaagaaaaaacgccgaatgcgtgttga

SEQ ID NO: 109559 - DNA, 981 bp, Enterobacter aerogenes
atgcgtatctttgtagacgacggctctaccaacatcaaactggcctgggttgaagacggtgcagtgaaaacgttaattagtccgaatagttttaagccggaatggtctatgacgctgcagggactgactgatgccactgtacccgcttccgcaaactatgagattgatggagaaaaatacagctttgatcaattgagtccggatgcagtgcgcaccacagaaacgcgttatcagtacagcgacgttaatgtggttgctattcatcatgcgttgatgcagtcaggtattgctccacaacctgttgatattgttgtgactttacctttaggtgagtatctggatgagaacgatcagccaaatctggctaatatcgaacgtaagaaaaataatgtccggcgaactgtaacagttcaggggcgtgaaaactttaccattcgtaaagtcagtgtcttgcctgagtccgtgcctgccggttttgacgtgctgaaagatctgaatgatctggagtcgctgttgattgttgatatcggtggaacgacccttgatattgcacatgtccgcagcaaaatgtcaggtttcacaaaaacctattgtgaccccaagactggcgtctccatcattactgaagcagttaagcatgcgatggatgtgaatgtgagtacacgaaccagttcttattttgcagatcgtctaatccagggccgggatgacaatgaattcctgacccgttatatcccgaatgcagaacagcgtgagcggatcctgacagtattacgtgaccgggaaaaaaaactgcattatcgtgtggcggattcagtaggacgctttgctggttttactcatgttatggttgttggcggtggtgccagccttgtggctggggcagtaaaaaaagcgacaggagtgggtgataaccgtttctttgtcagtgacaatcctcagttcgatctggtgttgggaatgatggcaatgaagggatga

SEQ ID NO: 109560 - DNA, 489 bp, Enterobacter aerogenes
gtgccccttcagaggagcgaaagctcctcctgccgtccacttcttcggggtttctccccgcagtggacctttccgatgggggcccgtttaccgcctcacgggacagctgtccgggggcggacgcaaaattttttgccgggttcatggctaaaaattttgtggccggtgcatctcaccctggacagatggaacgggagggggttacgtctgccccccggaaagtccacagcgggaaacaggccgcaggggtggcggcaggagggaggactgctgcgccatcaggcgcagtttcctcacacaccgtcaggtgtgcagggagcgcaggtcacggcgcgacaggggcggcgcgacaggggcggcgcgaccgtaacggtcgctgcaagcccgggttttcacgcatcggaccgtagcggcagcccgaaaccgcgccagcgggttcggcggagactggcgggtgcgccagcagctgcctgtcggagtcgggcctga

SEQ ID NO: 109561 - DNA, 234 bp, Enterobacter aerogenes
atgagcgaatatttcagaatacttcagagactgccggacggctcctttacccgcgaacaggcggaagccgttgccgcacagtaccggaacgtctttatcgaggatgatcagggaacgcattttcgcctggttgtccgtcaggatggcacgttgatctggcgctcctggaattttgaggactgtgccgggtactggatgaaccagtacatcagggatttcgggattcttaagtaa

SEQ ID NO: 109562 - DNA, 435 bp, Enterobacter aerogenes
atgaaaactgaactgacactgaatgccctgcagtccatgaatgcccaggaatatgaagaaatccgtgctgcgggaagcgatatgcgccgtaatctcactcacgaggtgatgcgtgaagtggacgcaccggctaactggatgatgaacggagagtatggcagcgagttcgggggctttttccccgtccaggttcgtttcacgccagcccacgaacgtttccacctggcattatgttcgccgggagacgtctctcagctctggatgctggttctggtgaatggtggtggacagcctttcgccgtcgttcaggtgcaacatatcttcacgcctgtcgcgatcagtcacacgctggcgcttgccgcgacactggatgcgcagggatacagtgttaacgacatcatccatatcctgatggtagaaggaggtcaggcatga

SEQ ID NO: 109563 - DNA, 720 bp, Enterobacter aerogenes
atgagcgtacgttcacgggcactgatccccctcagcgcagaacaacaggccgccatgcaggcggtggctgtcacagaacaacgtcgtcgtcagggacgcacactttcagcatggccttatgccaccgctttctttcgctgcctgaatggcagtcgccggatttcgctgaccgatctccgcttttttgcccctgcgctgacgaaggaggaatttcatggcaaccgtctcctgtggctggctgccgtggataaactgattgaaagttttggggaagtctgtgttcttcccctgccatccgatgcggggcaccgtctgttcccgtccgtgccttttcgtgaaggtgagcgtcgtcgtcagaaaaccacgctgacagagcagaaatacagccgccagcgggaacgtgaggcagaacgacgggaactggaataccagacatgttttgctcaggcgcagattgaccttgcgtttcatactcccgccacggtcggaagctggttgtcccgctggtctggtgttgttgaggagcatgatctggaaacgattttctgggggtggtgcgggcgttttccatcactgtcatcatttgaccggtttttctggcaggaggaaccactctggcggctgatttttgaagccggtgaggccggtcgtggtgcaccggtacaggtacgtgcacttgagcagtggatgatcccgaacaagctggagaacgtaatatga

SEQ ID NO: 109564 - DNA, 597 bp, Enterobacter aerogenes; identical to SEQ ID NO: 17091

SEQ ID NO: 109565 - DNA, 501 bp, Enterobacter aerogenes
atgtctgttgttgcacctgctgtatacgttggaacctggcacaaatacaactgtggaagcatcgccggacgctggtttgacctgaccacgtttgatgatgagcgcgactttttcgccgcctgccgtgctcttcaccaggatgaagccgatcctgaactgatgtttcaggattatgagggattcccggggaatatggcctctgaatgtcatatcaactgggcctgggttgaaggcttccgccgggcacgggatgaaggctgcgaagaggcttatcgtctctgggtggatgataccggtgagacggattttgacaccttccgcgatgcctggtggggcgaggctgacagtgaggaggcttttgcggttgagttcgccagtgataccggcctgctggctgacgtgccggagacggtggcgctctattttgactatgaggcgtatgcgcgggatttattcctggactccttcacctttattgacggtcatgtgttccgtcggtga

SEQ ID NO: 109566 - DNA, 435 bp, Enterobacter aerogenes
atgacagtcagcagcacgatttccgttttttgccgcgacggggtgttccgtaccgtttactgccacctgcacggtgagccgacctggaacggtcgcatcctgcatacccactatgccactggtcagcaggccgaagccctggttgaacacggtgatatccgttgcctcggtccccgttgcgacaaacccgccgggcatacgcttcagaacccggtggacggtgtgacggcttattacggacgtgacagtggtttccggatggacagtgaggcgcgtgagtaccgttctttcatggaggctattgccactgaaagcactgaagaggtgcgcttccattatgtgttcatcgacggctactggaaggtgatgtatcgcacgccggaaggctggaagatgaaagcgctcgcgctggcactgcgccgctgtccgaaatga

SEQ ID NO: 109567 - DNA, 267 bp, Enterobacter aerogenes
atgaaaccatcaattatcttcgcaaccgccgagtatgtaaagcgtctgcgtgaagagtgcctgcgggagaataaacccctgcaccgccatacccgcttcagacgtcaggagctggcacaggatgagattaacccggacgtcctggcgatgagcggtcatatcgccagacgctgcagtgagcagaagcgggtacgtatccccgccatgaaagtcagcgaatggggccacctgctccgcgcgcttgaaattgaacgggtctgtcactga

SEQ ID NO: 109568 - DNA, 390 bp, Enterobacter aerogenes
atgaagtcttgttttgatactgacaaagcttttcatatgtcttttgatgaagtcactttcaacgctgacagaattcgctcaaaactggaactattatccgaagaactaatgccccgttgtggtcttgtttatgagctatatcagcgacgtttgagtgctgctattgataattttgtggccacattgccgacagaacaacatctgctggtcctggaactggcccgtgaggagtttgattacctttccgcagaagagattgctgaagaaatacgccgtgactcagaacgcggctattgttgtcatggctttgaacgcaattgctgtcctctcggttgtggggatttgggcgatgattgctgcgatgctgctgatttgatggaggaaccgtga

SEQ ID NO: 109569 - DNA, 903 bp, Enterobacter aerogenes
gtgagtaagaagaaaaacaccacgacgcccacgccgcatgatgccgcgttccggtcgttcctggcgaatcccgacgtcgccagagattttctggaactgcatcttcctgcggagtaccggcagttgtgcgacctgtccacgctgaagctggaacccgccacctttgtagagccggacctgcatcagtacgccagcgatatcctctggagcgtgaaaaccaccgggggtaaagacggctatgtttatacgctcatcgagcaccagagcaccgaaaatctgtacatgcctttccgcatgttacgttacagtgtggcggcgatgcagagacatctggagcagcacaaaacgttgccactggtgattccggtgctgttctatcatggtgagcgcagcccgtatccgtacagcatgaactggctggactgttttgagaatccggcgcttgcggctaaaatatacacaaagccgtttccgctggttgatatcactgtcgttgatgacaatgaaatcatgaaccatcgccggatggccgcactgacgctgctgatgaagcatatccgccatcgtgacatgatggagctgctggacaaactcccgcaggtcatggtggaaatttcagacgagcaggtgcgtgttctgattcattacatcgttaacgcaggggactctgtatcaccggaatttatgcgggcgctggctgagcgtctgccgcagcatgaggataaactgatgactatcgcagaacgtcttgagcaaaaaggtcgccaggagggcaggatggaaggtgcgcttgaaaaagccctggctattgcgtgccagcttcagaaaatggggatgacgccggagcagattaagcaggctaccggactttccgatgacgaactgaagaaaatcactcactga

SEQ ID NO: 109570 - DNA, 207 bp, Enterobacter aerogenes; identical to SEQ ID NO: 10660

SEQ ID NO: 109571 - DNA, 252 bp, Enterobacter aerogenes
atgaccggctgggaactgcgaatctggcgaaaaagcatgctctggtcacgcgaaaaagcggccagagaatttggcgtgacgcagagaacatggcacgcctgggaaaatgcggaacaggtggacgtcaccgtctggaggaccacccaggcactttcagtccgtgacctgctgcctcacatgcaggggatgcgcaaggcagatatcatcaggcgtctggaaaatgaactgggggaaacggcagaggatgtgtga

SEQ ID NO: 109572 - DNA, 849 bp, Enterobacter aerogenes
atgaatcagactttacccactgctgacctgaatactgccggcacgacagatgttattccgtctgtggccatcgaccgcatcatcgcgcagcgtaacgaaggtattgcactgttcatgcaggcgatggaatgcctggcgacagcgcgcaggattctgctcgatgcgtcaggtgatatttttctttacgggtttgaagactgcgtgactgattccgttcgtcgcatggataaaccggaagaagcgaaaaggaatatcacccgtcttgccgaccggaaaatctgggaccgcctgatgacagatacgggcatgtacaccttcatgagttcatgccagcgtgatgagtggaacagccagctgatgagcgacacctgtcctgaaatcaccctggacaatgtactggcaacattccgccatcttaatgccagcaagatgcagacgtttgaacaaggtctgattgatgtctaccggaaattgtcatgggattacagaaccaataatccctgccgcctgggtaagaaaatcattattgaaaacctgctgtaccgctggagtaatgggcgtgtgacgctggactgcagcggacgggaggcactggatgacctggtacgtccgttttatctgctggaggggcgcaacgttcctgacttcaggaacagcatcggggcgcagtatggtgaatttatcgggaacggcgacaatgtcggtaagctgttagaaggggaatattttacggtgcgtggctaccagaaagggaccgtacacattgtctttaagcgttctgaccttgttgaaaaactgaatgatattattgcacggcattatccaggtgcattgccgccacgagtctga

SEQ ID NO: 109573 - DNA, 132 bp, Enterobacter aerogenes; identical to SEQ ID NO: 79086

SEQ ID NO: 109574 - DNA, 2700 bp, Enterobacter aerogenes
gtgaatgcagtcattccgaaaaagagaagggacggcaagtcttcgttcgaagacctggtatcctacgtctctgtccgggatgacatgaccgatgaggaactggatttatcttcttcttcgcaggctgaacaaccgcaccgaagtcgtttcagtcgccttgttgattatgcgacacgtcttcgaaatgagtcattcgtggcgctggttgatgtcatgaaggacggctgcgaatgggtcaacttttatggtgtcacctgctttcacaactgtacatctcttgaaactgctgctgcagatatggagtacattgcccggcaggctcactatgcaaaagatgacactgaccctgtttttcactacatcctttcctggcagtcacatgaaagcccgcgtccggaacagatttatgacagtgtacgtcatacgctgaaatcactcggccttgccgaccatcagtatgtctctgccgtgcatactgatacagataatctgcacgtccatgtggctgttaaccgggtacaccctgaaacgggttatctgaaccggttatcatggagtcaggaaaaactcagtcgtgcctgccgtgagcttgaactgaagcatggttttgctccggataacggttgctgggtccatgcgccgggaaatcgtatcgttcgtaaaactgccgttgaacgtgatcgccagaacgcttggacacgcggaaaaaaacaaacttttcgcgagtatgttgcgcagacagcggtcgctggtttacgcagtgaacctgtacatgactggttatccctgcatcgtcgtcttgctgaagatggtctgtacctgtctcatatggacggaaaatttctggtgatggatggctgggatcgcaacagggaaggtgtacagcttgactcgtttggtccctcctggtgtgcagaaaaactcatgaaaaaaatgggtgactacacgccagtaccaaaagatattttcagccaggtggaagcaccaggacgctataatccggacttcattgcagctgatgttcgcccggaaaaaatcgctgaaacagaaagtctgcagcagtatgcctgtcgtcatcttgcagaacgtctgccggaaatggcacgggaaggacggctggaaaactgccaggctattcaccgcacactggctgaagcgggtttatggatgcgtgttcagcatggtcacctggttatctgtgacggttatgatcataaccagactcccgttcgtgctgacagcgtatggtcactgctgacgctcgacaatgtgaatcaactcgatggtggctggctgcctgtaccaacagatattttccgccaggttacgccaacagaacgcttccgtggtcgtcgtatggagagctgtcctgcgaccgataaagaatggcaccgtatgcgtacaggcacggggccgcagggggctatcaaacgcgaactgttttctgacaaagaaagtctgtggggatacagcatcagccattgtagccctcagattgaagaaatgatcacacagggtgagtttacctggcagcgttgtcatgagctgtttgcacaacagggactgatgctacagaaacaacatcacgggcttgttgtcgttgatgcctttaatcatgagcaaacgccggtgaaggccagcagcattcatcctgatctgacactggggcgtgcagagccacaggccggaccttttgtgagtgccccagcagatttgtttgacagggtgcaacctgaaagtcgctataacccggagctggctgtcagtgacaggtacggggtcagcagtaaacgtgacccaatgctgcgccggcagcgacgtgaagccagagctgaggcccgtgctgacctgcgtgcccgctatctggcatggcgtgaacaatggcgtaaaccagatctgcgttatggggaacgttgtcgggaaattcatcaggcatgccgtctgcggaagtcacacattcgtgcgcagtacgatgatccggcattacgtaagctgcattatcacattgcagaagttcagcgaatgcaggcattgatcaggctgaaagaagacatcagggatgagcgacagaaacttattgctgacgggaaatggtatccaccctcttaccgtcagtgggtcgaaattcaggctgctcagggagacagggctgctgtatcgcagctgagaggctgggattatcgcgatcgccgtaaagacaggtcacgcacaacgacgacagaccgctgtgtcgtgctttgtgaaccgggcggaacgccggtatacggtaataccggtgatctcgaggcccgtctgcagaagaacgggagtgttcgtttccgtgaccgtcggacgggagagtttgtctgtacggattatggtgacagggttgttttccgtaatcaccatgaccgcaatgcgctggtagataaactggatttgattgcaccggtattattcgggcgtgatccacgcatgggttttgaaccagaaggaaacgacaaacaatttaaccaggtctttgctgaaatggttgcctggcataatgtgacaggccgtaccggtcacgaagactacaggattacgcgaccggacgtggatcatcaccgtgaaggaagtgaacgctactaccgcgattatatcgcggcgaacagcaacgatgacgcatcactgcctccgccggagcaggataaacgctgggaaccgccttctccaggttaa

SEQ ID NO: 109575 - DNA, 2292 bp, Enterobacter aerogenes
atgagtgaacatcgcgttaaccccgagcttttacaccgtacagcctggggaaatcctgtctggaatgcactccagagtctcaatatctatggcttttgcctggtggcaagtcttgtggccagttttatctggccacttgcattaccggcatgtctgttgttcacactgataacgatgctggtatttagtctgcagcgatggcgctgccctcttcgtatgcccatgacgctggaatgtgctgacccgtcacaggacagaatgattaaaagaagtcttttcagcttctggccaaccctgttccagtatgaggtcattctggaatcaccggccagcggcatattctatgttggttatcaacgcgtcagggatattggcagggagttatggctgagtatggacgatctgacccgccatataatgtttttcgccaccaccggtggcggtaaaacggaaaccatctttgcctgggcgattaacccactttgctgggcaagaggattcacccttgtcgatggcaaggcacagaatgatacggcaagaacgatctggtatctggccagacgctttggacgtgaagacgatgtggaagtcattaacttcatgaacggaggaaaatcccgcagtgaaatcattctgagtggtgaaaaaacgcgtcctcagtcaaatacctggaatcccttctgttacagcactgaggcattcacagcggagacaatgcagtcaatgctgccccagaacgtccaggggggcgagtggcagtcccgggccattgccatgaataaggcactggtatttggtactaaattctggtgtgtgcgcgaaggcaaaacaatgtcgctgcagatgctccgtgaacatatgactctcgaagggatggccaaactttactgtcgtggcctcgatgatcagtggccggaagaagctatcgcaccgttacgtaactaccttcaggacgttcccggtttcgacctgtcgctggtcaggacaccatcagcctggacggaagaacccagaaaacaacatgcttatctctccgggcagttttctgaaactttcagcacattcacggaagcattcggggatatttttgctgaagattccggtgatatcgatatccgtgacagcattcacagcgacaggattctgatggtaatgatccccgctctggatacatcagcgcatacaacgtctgctcttggacgaatgtttatcacccagaaaagtatgattctcgcccgtgatttgggctaccgcctcgaaggaactgattccgatgcactggaagtcaaaaaatataaggggcgtttcccttatctgtgtttccttgatgaagtgggggcatactatacggaccgtattgctgtggaagccactcaggtgcgttcactggattttgctctgattttgacggcacaggaccaggaacgtatagaaggacagacaacagccacgaatactgcaacactgatgcagaacacggggacaaaatttgccggcaggattgtcagcgagggcagtacggccagaacgctgaaaagcgccgccggtgaagaagccagggcgagaatgaacaacctgcagcgtcaggacggcatatttggtgaatcatggattgacagcccacaaatcagcatcctgatggaaagcaagataaatgttcaggagttgattgaacttcatcctggcgaattcttttctattttccggggagaaaccgtaccatcagcatcattcttcatccctgacgatgagaaaagctgcagcagcgatcccgttgttataaacaggtatatcagcgtggatgcgccacgcctggaccgtctccgccgtcttgttccccgtaccactcaacgtcgaataccgtcaccggaaaatgtcagtgccatcattggcgtcctgactgcaaaaccctccagaaaaagacgaaaaattcgcacagagccgcacacgatcgtggatacattccagcaacgcattgcaggacgtcaggcggctatggcaatgctggaagagtacgacacagatatcaacgcacgtgaaagtgccttgtgggaaacagcggtgaatacgcttaaaacgaccacacgggaagagcgacgaattcgctatatcacgctgaacagaccagaactacctgaaacaaaagaggaaaatcagatatcagtgagagcagaaagagcaggtataaacctgttaacgcttccacaggacaataaccacccgacagggcgtcctgtaaacgggtttcatcataaaaaaaccaaccgtccggactgggacggaatgtactga

SEQ ID NO: 109576 - DNA, 1071 bp, Enterobacter aerogenes
atgacaatcgagtactttgcaacacgcattgcaaaacatatttccgtgcaggcaatctggccggatggcaggacagaaattattgccgtccttccacaggatgccctgtcagggctggtaacacgaaataatcaactgattcatatagcctttgacgccatgggcacccgtaacagagaaaccgtcctgattgataaacaggagcataacgctgaccagatacttacagctattgattcctgcctgcgccttgaatacctgatggaacgccgcttcagcagaacacctttgttccgtggcataatcgccagcgttgtgctgttcgtaatggcaacgattggcttctctctgttccgctatgttgatcgtgtattctgggatgatacaacgcctgaagcagtacagacagcaggtgagccacgactgcttccccctcacctgaatcacactgtgccattaaatgaaggcattcaactcccggttcccccgaaaaaagacgttcaggtaccggagaaaacaatcacaagcaaaaatccggaagccgcagctgcgcgacataatctggctactgttctgaagcggaacgccgatcggggcatgtttaccatcaacctgtcatccggtcatgaacgaaccctgtacgcatttctcgatcctgcctgtcctaactgcagacttctggagccggctttaaaacgcctggccagcgacttcaatgtcgttatctacccggtttccgttattggtggagaggaatccaccgaccgtgtggcaccactgctgtgtgaaaaagatgctcagaaacgtgctgctggctggcaccgactgtattccgcagataacggaatgatgacgccatcagaagaaacaacgcctgcagatgaaacatgcctgaaagcagccagagctgcgattgatgttaacaatgtcgccttccgtaagttcggatttgccggtaccccatgggtgctgtccgacacgggctggcatctgcctactggaattctgcaggaaactggcacgcttaatttattcctgaaaaccaccgacagcgagtctggccatgagtga

SEQ ID NO: 109577 - DNA, 1209 bp, Enterobacter aerogenes
atgtcttacaatcgacagcctgtcgcagaagatcctatgcagatatggggcgctgttggtgtccttcttatcctgctgctattcgtcatatggttattcttgccggaagtggtttacgccagctgcctgattcttcataccttatggggactggttgactggggaccatttcataactatgcagcaccacgatacaacctgcttgccatgaccggtaacaacgccgccaacataagctatagccagtgggttaacgtcatggagcagaccataggtattttgtggatgtacctcttacctgtgacactctggtgtttgtgggaatggtatcaacatccgggacaaagccgtttcacccgcagaccagtagatattacccgactgccacacatctttgcttcgttgtcccctgctatcgcccctgtactggaagatggtgatccggaaaaactctttcatggtggtaaacgacctgaacggcgggttgctctcaccccggaagcatttgtcgaacagcatactctcatcaccaatatgcagctcgatgttgcagctgcaagacgatgtttcatggcccagttgggtaaacctttaacgtcctggaaagacatggcaccacatgaaaaagcgctctttgccatatttggccttcagtatttcctggatgatcggaaggcagcattaaagctcatggatacactgaacctctcatgcagaattaaaagcaaacgggacagcgggaaattctgtacccctgtttattcactggccaaatcagctttccagagagtgattaaaagcaacggagcacagcaatggctgaaacaacatcgctacgtccgcagtgggctggtctggctgtatgcacatgacctgcggcttacgccacccaactggatttggctgaaaggcgtggacagaacgctgttttatgcattacaccgcgccaataccacgaaaggatttattgaaggcgctggcgtggtggccgttgcacgtgcagaggccgaagccatgcgttttggccttccctgccctgaaccctgtgttgatgaagcggtggaaggcttacggcgggatatgctcagtctcggtcttatctgggatgaaccacaaccagatcgcgaccggaaacgccgcatcctgaccaactggtccctcaccgaagacatcctgccccgtacacctgctacagacaacgaattctga

SEQ ID NO: 109578 - DNA, 1086 bp, Enterobacter aerogenes
atgtcgcagttaaaacaacctattttcctgaaaaagataaaaaaagtcatcaacacaatccctgggcttgaagagcaaatctttgcatgccgaaataaaaaacgcagcgacaatccattattatttatcgacagaaaagatgaagaacgcatactaatgagtcgtctccagagccaacaaaaaaatgaagaactggcttctaaactagaatctttatttcatggaaacgaattatcgtcaccacacagtattttgtgttttatatactggcgctatacaaagaaaatttatcgcctaagcgaggacatcatcagtgatgtggctaacacctatgttgataacattcctgcacagatcctcaaggaactcccttcatggagtatctatgtttcagccgaaaatctgcatactatacttcctacgtcctatccgatacatggatttttcttttatccatttttggacaataatggaaatattatccggcttttcattattgatgatctgaaacaaagtcaaggaactacagggctaaaagaaaaggatgttgacgtcgtcaataatatcatcagaataaaggactctcgtgaaggacttcttgactccagaaagatggagtgtatcgatggtgaagtcgtcgtaacagttaacgaaaagctcaaagatttcagagacagggagtttaatcttcttaacgcacagatatcaatggtgctttatatctgttcacagatcaatgatataaaagaaaaaaatcaatttaaacggtcagaaaagcacaaaaagcatgttcacactcaccatgaactaccagcacaaaacattcgggagtgggacgttggtattcgaatggggcaagccatacggcaatatcgccaagcagaacccacagggaaagagcggacaacaataggtagcaaacgtcctcatatacgccggggacactggcatacatactggacaggaagtaagaaaccagaactagcccatgagcgtaaacctagattaatatggttacctccggtaccagttaatttagaagacgtaaacaaactaccggtggtaataacacccattgataaatga

SEQ ID NO: 109579 - DNA, 156 bp, Enterobacter aerogenes
atgatgccacagcgaacgtttttaatgatgttaatcgtcgtctgtgtgacgattctgtgttttgtctggatggtgagggattcgctttgcggactccggctccagcagggaaacacagtgcttgtggcaacgttagcctacgaagttaaacgttaa

SEQ ID NO: 109580 - DNA, 252 bp, Enterobacter aerogenes
atgtcagaaaagtggagtaaagaattcgactcttgctttcaggtggggagcatagaagaaattgacgatgctctcgagaaacgcagcggaagcgaggaaaacgcgttagccatgctggcaatgacagccttcacactcatgacccgacgtggtatctgcgaaatgcagaacgtggcccccgatggcaaaggcattcggctggagctaatcggcttcagggaaaatgaaacaataccagatacgcttcattga

SEQ ID NO: 109581 - DNA, 177 bp, Enterobacter aerogenes
atgaatctggtagacgcctttgtcaaaaaagtaatatccgggccatatgaagaatatggaaaatggtggatagatgtcgaatacatttcatggggtgttcccgggaaaacaagactgatgtttgagtcaaaggagcaggcactggaagttaaagaagggtacaaatttttaacgtga

SEQ ID NO: 109582 - DNA, 210 bp, Enterobacter aerogenes; identical to SEQ ID NO: 8510

SEQ ID NO: 109583 - DNA, 663 bp, Enterobacter aerogenes
atgaaagctaaaagagaaacaacagacagatttccaacctggtggctattttattatgtattaagaaaagcttatttctttcttggaatccctttttttctgttctgcgcattaggctttaccgaaatgctatgttctgatcgttatttcggaaataaggtcgaagattatgttgtcacttttggtagttggttcttattacttgcgccaggcatatggatgtactcacgtgcaaaaacaaggagagaaaaaataagaaaagttgtacaaacaataaaagagtcaggcttctactctccagagaaggggtatgaaggattatctttaactcagggagcttatttcggtattgaccttaaaaatggcacaatgttgtatgtccgtatttatccaggcaacattatggatgttatcggttttgacattcataatttcactcgtactgtaacagacgacaaaacactggaaattcatacgaaatacatcaacctgccaatggttcctattccatcatggtgtactcatccagaaaccgcatcaaacaccatgcacgcgatggcaagtcgaggatatgattaccctgtcgactttcctcgcctgattcaggaaaagcgtaaggagtgggagcagattgcaggcatacctgtagccgaagtattttaa

SEQ ID NO: 109584 - DNA, 2169 bp, Enterobacter aerogenes
gtgaaaattttacttcgcgcactctgtgcaggccttgctatatcctcactgccggcaatggcttcagtgacctatcaggatattgtgtctgccgcaaccaatcctgacgatctgtcccgtcaggcgctggtcacgatattcggtgatgtagtcaccaatccactgtcaaccagcgcccccactctgatcggaagcatgttcggggcgttcaacagtatcatcgccgtacttgccgttgtctggtttatgttcattggtatccgtcatgttgtgcgttcggggcatcagggacaggtattcagcaccggacgcgatatcgtcggcacactgagtgtcgttgcaggttttctgatgatcgttccaaccggaaatggctggagtatcgctcagctcattatgttatggggcgcatcgataatgggggttgggtccgccaatgtgatggtgcaacttgccgctgataatatcgcaaatggttattcaatgactgtacagccagttcaggcatccacacgaacagcagcgcgtggcatttttgaaatggaactgtgtaagtatgcggttaacgcaggactaaatgattttaatcagacggtcaaatcctcgacttcactgatgacagaatcagctaaaaccgccagtggtaattacactgtcacggtatccaatggcagcggtatctgtggttcagccagcctgtcagtagaaggaaacggaacaacagatcaatcgacgattggaaaattctttaatcccttcagtaaaaacgaatacagcggtgttatctcagcacaacgtgcagccatggataatatgattagcgacatggacaacgctgccagtgagtttgtgacaacatttctggaaaaaagaaattctggcaacggaacactgccggatatcgagacacgaattcagaaagcagccgacgaatacgaacgtgctgtgcaaaaatcgctacccactgataacggagagcaatccagaaaagaggctcttaaatcttatctcacaacctacgggtgggtaacgcttggcgcatggtatcagacctttgccactgctaaccagcgtctggcagagctggctgacagagctccagctgtaacttcaatgtcatcactgggagaagttggtgatactgacttattcagtgcggtcatgagtgcctataggacgcaactgcagaattcctcctatacgccaccgctgggcacagtagtatcatccagtgaacaacgcatggcaaatgcacaagatccgaaatctgccttgtctgaaattatgggcccccttgttagtctcactaacaggattgcaacggaaacaagtggcacaggcacaaccagtgctcaaattaatcctctgataaaaatgaaaaatatcggagatataacaatggtaagtgcagaaggaatctggactatatatacaacggccagagttgtcgttgccggtggcaaagattcaattcttgtaaaattctttaactcactaacaggtgccgcttcgatgcttaccgcgctgtttgaagcacttgcaccacctgtttattttcttttgttcctgatgttctgtgctggattttccttatcaatttacctgccattcattccgtttattttctggatgacaggcatcgggaactggatagtcagcgtattaataggatgtaccgccgggccgctgtgggctgcaacacatctcgggacatcagaagacagaggaagtcgggcagcctacggttatatatacttaattgatagtatgataaggccgcccatcatggtctttggttttttctttgcttctgtagccatcatcgccgtaggcacaatactgaatgcattatttggcgctgccctggttaacgtacagttcaattcgctgaccggtattttcagtcttgctggtttcttgctgatatacgccagaatttgtacaaccactgtagctgccatatttgcccttcaggcctacctacctgatcatgttattaacttcctagggggacgtgatggagccaacacgcttggcagcatggcaaattctgttaaagaaatatttattggaggaagtcgcaatatccgacatactcctggaatgaaaacagatcgtcttaaagataatacaaaaggaagtgacgacaaggacggaataaaaggataa

SEQ ID NO: 109585 - DNA, 585 bp, Enterobacter aerogenes
atgaataagttaccggaaaattcagaccagacgaaaaacgtcaaaaaatcaccatccatcacccgcatagccacccgggggattattaacattttggttcctctgatggagactcgcctgataacgaattctgtacagcatatgctgaagcaacaaaaaagcaggctggaaaaattccgtcaggtaaataataaaaaggcgcaactctgcctctcgtgggaagaagctctgctggccagccatatgtcagtagacgatctggatcgccgtttccgtcggcgcagaacagcatggcggttatgctgctggagtctgctggccatcgctttattcctcagcggtatgctctttgccgcctcctcattacctttgatgacactggtacgcgccatcagcactcttatgttgatactgtcaggcgtcgctctttgtgcttccagagctctgatagttacataccgcctctggcagttgcatgaacgaaaagtcagcgaacccgagcaggggactttccgtgattttctgaacgaccgcaatggctggcgcaatgccacattaattgccgtaaccagtaaacaatactga

SEQ ID NO: 109586 - DNA, 1203 bp, Enterobacter aerogenes
atgcaaagaaaaacattactcgcagcccttataaccaccctgagtggaacggcatgccaggctcatgcttattcagtcaccgtcgtcgccagccggcctgttgaagagcaggtcatccccagaatggaagccatcaaagatgtccttggcaacatactgagtacccagacagccacgggtaccgctatcaatcagaactctgaaaagctggcaagtgtcattgcccagaacggacaggcgacacgtcagcagatgattttcagtaatgaaactcagcgcctcgaggaggcacggaaaagcttcaccgtgccagactccatctgcagtgaatccgcatcagggattgcaacagaaagcaaaagtgcctcagcatccgctgcctcaaaactcagtaaaggtggcggtgtgagcaaccgtagcatccgcgaccgtctggccagcgcagcaaactctcccgtgcgggaagcttatgatggcgcggccatacacgccagttactgtacagaagcagaatatgcacgttttggaggaaccgccgtttgtccttctgtgggcgaaataccaggtggagacagtcaggtacgctcgatttaccacggcgcaggtacagcggacacacctgcagcactgacatgggatcagaagcaaatagatgcagcgacggcttacatgaaaaacacttcccgcccctctgccggtcgtgctctgggtaaaggagaagtgaatacccagagtgggcgaacctacgtcggactccagaacgaatacaacggcatcattgattctgcgtcgaatccccaactgacgctgattgctgacagcacgcctgatgaaagcacacgtaaagcactggctgaaacactgcagtcagactcagcagccgcttacttcgaccaggtggcttcaccagaagcaaaagcacggggatatatgagtacccgtgagtttgaagcttttgaggctggccggcgctacgccaacacagcatacctggtggatttacaggaaatgcagggagataacctgctccgtgaactggtaagaatcactgcgcaaatgaactggcagctgaacgacctgaaagaacagatccgccagggtaatgtcatctctggacagcaactggctctgaccgcccgccagtattatgaaaaacaactcggtagccttgagaaaacaatcaatcaggcaaacgcacgttga

SEQ ID NO: 109587 - DNA, 615 bp, Enterobacter aerogenes
atgtgtacaattcatatcaccccacgctgccggagacctgccagagggcaggtatttcttaaaaagcttgaggtaaaaggtgacagtttctcattcactctgccgtcacgtctcttcaggttacatccggcccccaatcccagagtgatatacgcttcggatgccagaacacagggaaaggttacaggcatgcggctgttgttgccgtccagcacagatgagctgataacaacggcaatatggcaggtttctgtcccggatgaagcaccattcgacgttcagcatgtcatccagtggatactcccttcaccgctggcttcgctgatgtccgatgatacctggttatggccatccgttcccggaacgccggcactgagtgccggtgactggcctgttatggatactgacccttccaccttacggcgcgtcagacgtcgttctttcagcatcatcgataaccggaacaggaaaggttatatcaccaggcgatatcagtgtttcccactggccccactacctgaagacagaaaatacgacagccttcctgaccttgtgctccatcccgagcaggagacaataaaatgcaaagaaaaacattactcgcagcccttataa

SEQ ID NO: 109588 - DNA, 3045 bp, Enterobacter aerogenes
atgaacataaaccgtttcatcttcactatcgaagactgtctgaacacgctatcccgtttctctgtcgcaagcagttttgttgagtattgcgatttacgtactgtaattggtctggacagacaggatcgtgaacgtcgcccatggcttaattcgccctatattgcagccacaaagcgtggagaatatctctctgtctttgaagtcagcggtgctttcagggaaatggatgaagcatccgaccagactggccctggttcactggaatcgctgatcaccagcatgagtgacagcctgaatacggcatataaaaacagcggtcataaaatcagctgcgttttcgagcgtgaccctgaaatggggaaagaagaaatcgaagacatggtcgccccacaaaaacgctcactggctaatacaggtatccagttacaggatgtggtcgatgagaaagtcacaacactgtccccatggctggtccgggagcgttgctggctggcgatctggagtggacccgaccttatcagcaacagcgatcgcaccgcccatgatgagcttgtcagaagactggctgaacgggtaccgaaagcacgctttgcccagtccccctggcagtggaccttatctgcactgaaaatccgccacgaagcttttcttgataatgtggaacaggcactgagacattcatctgatggcctgattctccggctactggatatacacgaggtcggacgtgaaatacgtcgtcagacagaacggcacagcacaccgcgtaactggcaaccccacctgcctgaagatgcccagccagcgggatatcgctggactgacgatgaatccgtactacatgctccttcattgcatttgcagttattcaacacgcaggtgaccacacagggcaacctggttcaggcgggcggactctggcacggaatggtatcgattactttacctccgcaaaatctgcagacgtttaacgaactggtccgtgctgtcccccgcgcagtcccctggcgcatcagaatggatctgatgcccggcgggatgaaagctcttaatctgaagaaaacgcttctgacttacagcagcttcatttctgccgttcgtccaatgtatgaatccgttatgaccctggcggcaacggatgaaaaagaacctgtctgcataatgaccatcatggcctccacgtggggaaaaacacgtgaaatatgcacacgaaaccaggccattctgaaatcggccattgaaggctggggcgtatgtggcaccacgacaacatttggtgatccccgacgcgcctgggtgaataccattctcgcggcatccggaggctccggcccggttcccctgtatcccccgttgtcacatgccatctcgcttttcccacttaacagggcaggctctgtctggcgaggcaaagggaatctgatgttacatacagaagacggttccgcatttgaggttggtctggcgtcatcccaacaaaataaacatacagaactggcaccaggcgatccgggactgggtaaatcagttctgattaatacgttgtcggaaatacagatatcatctgctcagaaaaacctgcccttcattgcctatatcgataaaggatacagtgctcagggactggttcagcttattcgcgacagtcttcctccggaaagaaaagacgaagctgtcggtattattctgagcaatgatccggaatacacccgtaacctttttgacgtgatgtacggcgctaaaaagcctattacgccggaaaagaatttcatgtcatcggtgctgtgtgctctctgtgtcgataccggtaccggtcaaccctgtaaccccggagacacccgacaaattatcaaccagcttatcgagctggcttttaaagagtacggtgaaaataatccgcgactttatcgcgcctcaacggaagacctggtggattcagcactgcaggactcgggactgtatgaaaaacatgatgcagcctggtgggccagatcaacctggttcgaagtccgggatatgctccacaatgccgggtatatcatggcggctcagcgggcacattatcaggcaatgccccagcttcccgaagtatcctctatgctgggccataccagtctcagggatgttttcggtactgttcagcgtgatggttcaaacgaacttctgctggactacatccgccgcgccctggagcagggacataacgactaccccatgatatccgggtatacccggtttatgatcaacccggaaacccgggtcatcgctgtcgatctgaataatgttgccggtgacaaaacgcctgcaggcaggcttaaaaccggcatcatgtacctgcttgcaggtcagatcgccggtggtgacttcaccctgccacaatacagggatgaagtgttaaagcagcttccacgggaataccatgaaatcgctcttaaacgtattaaccaacttgatcaggaggttaagacaaaagtttatgatgaactgcataacgcccggggcattgacttcatctgggaaaatctggatacccaggagcgtgagcaacgcaagtttgctatccgcacggttctgagtactcagtatctgagggactacccggaaagtgttcttaagtcagcaaatactctctggttactgcgctacaaacccgaagatatccccgtactgagggataacttcaacgtgcctgaatttatgctgaaacgcttcctgaaaatgccggaaggcccggcaccggatggtagtggtgttcctgttctgggagtattcagggtaaaaagtggcacgcttgcgagaatactcaaatttaccgtcggtccactggagctatgggcgctgaactcatcaccaaaagacagtgccctgcgtaaaacgctgacaaataagttaggttcagttcgggcacgtaagattctggccgaaaacttccccagaggttctgcaacgtcattaattgagcaccgggcgggccaacataacagtgacaatgttattgaagatctggcctcggagctcatccgaaaacagggatacaatctctga

SEQ ID NO: 109589 - DNA, 801 bp, Enterobacter aerogenes; identical to SEQ ID NO: 8503

SEQ ID NO: 109590 - DNA, 189 bp, Enterobacter aerogenes; identical to SEQ ID NO: 8502

SEQ ID NO: 109591 - DNA, 405 bp, Enterobacter aerogenes
atgtcacgtattcgtgtcgtggcggctcgtctgtacgccgcatttatccatgcacaactgtttgtaatgtcatgccggagcaaactgactaagtacctgctgctcattcccatgatgttgctgcccaaagccgttcttgccgatggagatcttgccgatatggttcgcaatgttggtgaaggtgctaaaacagcacagtcatcatcaatcactattgcgcagttcatcggcgtaattctgtttctcgggggcctgattggcctgaaaaaagttgggaaacaaggggggatgggactggctggttgcattgtatctatcgtcattggggcggtacttgtcgccggacctgaaatgatgagtcgcagccagaaacagttggggatttcctcaatttccattggctaa

SEQ ID NO: 109592 - DNA, 528 bp, Enterobacter aerogenes
atgaacatggatgccctgaccgccattgagaactttgccagcagtattttcagtgccggaatggatttcctgtttacctggggagaattcatcggggtgatcagcatgattaccctgtttgcccgcgcccgttcagccggtccggtaaaaatgtctcccggaaaatttattgcggggatgttaaccagctgcatgctcgtatcactcccggcaatgattaacgccggaggcgtacaaatgggattcagggctgactcatttggtccgattgcatatgtacaacctcagacgtttggcgctgctgctggcgcagcaaatgcagttctgtcgctggccaagctggccggtgtgggatttgtcatgaacgggatatccatctggcgcaaggccggactcgatggacataccgcactgagtgccagtgaatccgtcagtaaaggaaacgtcaaatttattgccggcgtcctgctggtctttatcgatcgtgtcctcaatgccctgctggcaagcattggaatcgtcttctga

SEQ ID NO: 109593 - DNA, 705 bp, Enterobacter aerogenes
atgaaacctgaaacagaaatagatgaaaccggcagcttcggtgaacccgaagagaaacccgcccccttctggaaacgttccgtctgggggatatctgtagcaacatgggggctatgtgcagtcgtgttgctcgctgccatatggtatctgttcctgagagcgccatcggaaacaggcatgccttcgtttaatgatgcggatgctggcgtacagacctggcaaaccacccaagaatcatcaccttccgttcagtccactgagactatgactgtccggacaggagaagatatgagccagcttgcccgggatgtaaaaacagagctggataaccgggatgaaaaaattcaggcaacactgaatatgcttcacgacagcattaacaagctgggcgaagctataaaaaaggatgaagaatacgcacaggaaacgcgccgtcagctggatgatatccggagccgcctgaacggaataatgacacagaaaagcgtcactgaatcctcttccacaccgcatccagcaaagaaaaaaacgtcgtctgtacttaacggaatgaaaatcatgtcgatggaaactggcatggcctggattcgctggcagggtagtacctgggctgtcagagaaggtcagacgctgggcaatgtggtgatccagcggattgatccgacgacccggaccatcatcaccagtgcagggacgttacgctga

SEQ ID NO: 109594 - DNA, 1290 bp, Enterobacter aerogenes
atgagtgctgaacaggatgccggtaaatccggaaagaaactggctgccctgcttggactgggcagcatcatcttatttggcggcggctatatcgcgttttccaaactatcagggagtaacagcgatatgcagtcagccgtgaacattaacagtgcagcaagcggcggaacgcgcagcgttaccgaaacgcctcattatcgtgaactgttaagagcggataatgaacgaggggccgcagctgcagcccgcaataatcagacgttcattgccagtcttccacaggggcttgatattccggacactccggaaaagcaacaacagcctgcaacaaaaccggaaaactatgctcatcgccaggcttccggcacaccacaggaggatcgagcagccagtgaaaagcgtatggagcggctgcaaaagctgattgtaagaataaaagatcagcatcctgccggtagtacaccaaccatagcaacgactatgtggaataaatctccggcagaaacaacagggcagaatggtacgcagcaattcgcattacagaatgccagcctgtccacgccggtagcagaaaaagggatacaactgatacctgctctgacccgtataccggcatatattgatactgcagtggattctgataacccgtcatccaaggttatcgcaaccattccggctggcccctgggcaggggcaacgctgttcagtccgggagtcaaactggtgggtaacggcgtggagatccatttcgaccggatgagctggaacggcatggaccttaaggtcaatgcatatgcacaacgggaagacaacctgatgtcatccgtggccagcaatgtgaatacacgctggtttaaacatatcattctgccgtcagtgttaggaggtgtgggcagtattggcacactttataaagatgccaacacgcaggttattcagggtaactatggcacggttaccggacgcgtgggaatgcccagtggtgaagctgttgcgggcgttattgccggtggtatggcggaaagaggaagtcagatattaacccgccaggcagaaagtgagccctataaacaggtagaagtgtatcagcatgaagtcgtatcaattctgtttgttgacccggtaatgacaaacgacgccaggtcctcttccctttccagtggcatttccccttcagttaatcgtacatcacaggcggaacaacgctcgcaggcacgaatgcagacagccatggagcaaagaaaagctgtgatgcaacgtcggtatgatgaacaaccggagacaccataa

SEQ ID NO: 109595 - DNA, 984 bp, Enterobacter aerogenes
atgcaatcacgttatttactgagcacactgctcctggtgtgcagcgccgccacgtctgccgataacgcaggatggcagaacgcacgcacaccacaaacgacaaattctgccagcgatcacgttcagaatgcctcccaaaacaccggaggtgttccggcaacactggtaaaaggtgagctgcctgcccccgggcaggccagcccgctggtacaggatgcggcaagacttgattctgagctctccgccgatgaaattcgctcactacgcagtctcatggcggataacgagcgggccatcaatgcgcccatcaccagtgttgtaccccgtatcagctctctgacagttaatctgtcccccggtgccagccttcctcttgttcgcacagccatgaacaacctgagcgtggtgacatttaccgatatcaacggttcaccatggccacaatccgatcctccttataacgcggcaccaaaactctttgatgtgcagtacaacgggaacatggtgacaatcacaccattgcggccatgggcatccggaaacatttctgtctacctgaaaggtctgtcggtaccggtcatcctgaacgtaaccagtggcgaaacagatacgccgtcatccagtcaggaaatggacagtcgtctggatctgcgaataccacggcagggaccaaccagcccggttgtctccatcccgacggataaaatcgccctgcatgatgcaacattacaggcatttcttgatggtattcctccccgggacccttcagttaagaggctgaaattcacaggtaatgtcccggatacaacgatctggcaacacggcgatgaccttctggttcgttcccgggcgatgttgcgcgatgaatttgaacagaccttgtcctccgccgacggaactcatctctggaagcttcccgtcaccccactactgactttctctgtgaatggccagtccgttcacgtgacaccagaactggagtaa

SEQ ID NO: 109596 - DNA, 693 bp, Enterobacter aerogenes
atgaccgaaaataccgagccatcctcgccatcacatccggcacctgacccggaaatactgaagagcacaatcagggctatgaagcagtcagaacagcgggcaaataatgtccctgcgctgataaaagcgcttttatgtacgggcacatgtcttcttatcagtattactggtaacgccattcagtactggcactcaacgaatgtggagcgcgaatatttcgctacagacaatggtcgtctggtcaggctggcaccaacaagtcagccagcatggagtcagaatgatgcaatggcctttggcagccaggcactggcgaccgcattcaacctggattttgtgcactatcgttcacagatctcctccctgtctccgcgtttttctgacgaaggttttgtcggatatgtgaatgcattacaggcatctaacattctggagacgatcaagaaagagaagatgaatctgaccgccacgacaggtgctggcgttctggtacgacagggacaaatgtccgacggcgtatggttctggacattccagtatcctgtccgtatgcgtctggtcggccagacaaccagcaagccagaacagtcttttgttttcgaaatcaccatccagcgtgttgaccccagactgaaaccatccggtatggaaatccggcagatgatctcccgtaacgccggaccgaactcctga

SEQ ID NO: 109597 - DNA, 348 bp, Enterobacter aerogenes; identical to SEQ ID NO: 8495

SEQ ID NO: 109598 - DNA, 3768 bp, Enterobacter aerogenes
atgccgtctgtatcccgataccgcacctggcttgccgtgcctgcagatgaaatcgaagatctcaaaaaagcacatcccccgatgaacgggcacacgcccgttctctgggacaaggagcacaaactctggtttgcccgcccgggggcggacctgtccatgctggaccgctggctgccccggccgcaggaagtctccatgaacggcagtgacccggtcaccgagtttgcccaggtactggaaaatgccgggctggttctgaaagaactgccggtcatggacgggaaaatccaccgtgtcccgaccgccggtgacaaaaaaggacaaaaaagtggcgcatatcgcggcttcctggacggcagacctgccggctggtacagggattaccgcagcgcagacgattcgccggtcacctggactttctccggcggagagcagacagatccccgcgcaagacttcacctgaaagcgcattcgatgcaacgcagggaagacgcggagcgggaactgaaagcacagtacaaccgacaggctgcctatgcccgccgctatgtcagcaaatggccgcaggccacggcacatgaatacctgacccggaaaggcattcaggctgcgccgggggtgcgaataaacgacaaaaatgagcttgttattcctttcagcaaccgtaacggcgcaatacgctcctaccagcgcattccggtcaccggcgggaaggatgcccgcatcctgaaagattccgagaaaaccggtaactggtttgcgctgggcacgccgcgcaacggccagccggtactgtttgccgagggctacgccactgccgcctccctgcacgaagccacaggccttccggtactgatgacagtggatgcgggcaacatgattattgtggccgaagaggcccggcaaaaatggaagcaaagcccctttatcttctgtgccgacaacgatcatgcacgccaggttaacaaaggtatcgtcagtgcaacaaaagccgcagaactgacaggaggatcggtcatctttcctgcgttcaccgatgccgaaaaagcgcaggggctgaccgatttcaatgacctggatgccagccggggacgggccgcttttctgcatgtcatcaacgcccagttagaacatatcggggtttccacccccaacagtaacaccccggaaatccgggaggcactggtgatcggcaacctcgtttttacaccggtccacactgaggaaaaaaccatgactccgacagaatatcctgaaacatcacccgatacagggcacagccatgaccagggaccttctctgccgtccgccacgcagcaggaacaacctgctgcttccagcggtaacattgctgatgaaacacagtcatttaccagtcacgccactgaaaataacggcaaagatgagcggcacgctgataacgttcaggcgcaaacggaaagctctgtagttcaggactcccctgcagaatcaccggcgtccccggaaagtacaacggcgtctgcccctgatgaacccgctcatccggcggaacctccggaaaaagttgtctcggtggccacagataaagactggcgtgaatttgaagccgaactgtcacaaccggaaaaaaacgagtcacaacaggaatccggcacttcacctgaaataccggcccctgctgccgcccccgcatcccctgaagacagtccctcatctgaaaccatgaatgaatcagccgagccatcaccttcccctgatgcagtcaaagaggaaatgaccgtgatgacggagcctgatgacaaacaaagcatcggaatatccccggatactccccgggaagaggcggtcaaccatgtaactgaagacattccccttcagccagagccgttccttcctgagtcagatggccccgaagaatacgaagactacagcgcatatcaggagctgatgaacaatgaaaatcctgagcatctgcaggaaaacagtgatatgccgtcgcaaccggacacaggccacgttcaggcagatgagtcagaacttcaggccacaacagccactatagaaccggctgtccgggatgaacccactccgcagcaacctgttcagagcacatcaccttctgataatacttcatcgtttctcgacaaagcgcgtggcttttttacacgtaaaaaaacggattcacaggcgcatgagaacagtgatcccacgccctcagcagaaaccacgacgactccaccgatacctgacagtattgtctacgccccggaacgttctgatgcaccgatatcgctcaacatggacgaaattcttaaagagcttgactgggaaaaacgagcagacagaaccgtcctgtacaaactggatggcaaacctgccttcattgaccgggtaaaccggctggaaatggtcaacggtgccagcaatgacgatcgcagcgttctggccgcacttgctgtggccaccaaattttatgggggcgtcatagagctgacgggcagtgatgcctttaagcaaaaagcaatgcagttgattatcgagcacaacatcgatgtccggatgaaattgccagatcaacgggctgaactagaaaaattacgcaaggaaatggctgtcagtaaggatgctgttgtcacccatcagccaacaccggaacttaaccggaatatccctgaacaaccggctgtccctgaccccgttcaggaaaaagaagccacacaatccccggcgtcccctgctgcccctgaagcatcaaccgtcagcaccgctcctgcatcatcaccggctgaaccaggcaaaacggcagatgcagcaccaggtgaagaaccaccaggaaaacttcgcccgggagagagcgtgactgccgtactgcacaattttggtcgtgctgaatatgcacccggcaaaggagaaagtttctttgttgagcttaaaaaccgcagtggcagcaaactctactggggggaacaactggaaagtctggtcaaaaaccatcagaaaggtgacgtggtgacactgacacttcagaaccgcgaacaattcatcctcccgggagagcaaaaagcacgtttccggaataagtggtccatggagtcagttaccaacgggatctcggtatcacatgataatccggataaaggtcagcgtattcaggcgattccggtcgaaacctttatgaaagtggctgcgcaaatcagccaggggtggcccgaagagatgaaagcgttacgtatgccagaaaacgtcggctcacatctgtttatcggtgaagaccgacatccggtctccgcgccacagaacgcaaatcaggtaacagaaataaccagcgcagcccctgacaagctgacacctgttctgggatcagtggataaggatacgcgtgaactcaacctgctacttgtccagagtgccgatgaacatctgcagggtgtggtccggctgaacggcacattgtatccggcactggccaccccatcagccgacaacagtcagctggttatcaatgcgctgaccgacaaaggtttacgctttgcaggttatggtgaagcggtaaaccacgatgctgacagcacgaatcgccccgcaccggagcttatgcagtttcatctgaaaacccgggaagaaccgctttttgctgctgtctacacgccggaaaaacaacctgatgcgttgtaccggaacctgggcttcgagcagtcatggcagcagtggtccaacagccaaaagccggaggacaggcaggaaaaaactctgcatcaggatctctcccacagccccggccgatga

SEQ ID NO: 109599 - DNA, 552 bp, Enterobacter aerogenes
atgtcaggtaaaaaaactatcgttactctgctccgggtatcactactggcatgcccgttactgttcacgacaccatcgtttgcaatgatcgacacgccatccgtgaaggtcggcttttctcctgaaggaagtgcatccgctctggtgcttgacacaatcaacagtgcggaaagctccatcaggatgatggcatattctttcaccgacccggatgtaatgcatgcgctggcaaaagcgaaaaaacgcggagttgacgtccgtattgttgttgatgacaaggggaatacgaaccgggcaagtcgggaagcgatgaaatatatcaacctgctggacattcctctgcggactgtagatgtcttccccatccatcatgacaaagtcatcattgttgacggaaacacggttgaaaccggctcctataacttctctcgtgctgctgcacacaagaattcagagaatgtcgttgtgcttaagaatatgccggatgtagccgcacaatatcttgaacactggcaggatcgctggaataagggtacagactggagaccctga

SEQ ID NO: 109600 - DNA, 291 bp, Enterobacter aerogenes
atgaaaagagaaggtttctggcgatatgcaacaccgccagtcaacatccagggcgtacctctgccgttcaccatgatttatctgtttatatgcccttttccctccgaaacaaccttctggatttgcaccggcatcattttatttttcgtcattctcgaccgttcaggctggactgtcaggactatctgtacacgtattttcagcattctgagaggggccatcgcctccggtcgcccatggtggtatcgccaccatacggaatcaccacgagactggactggcctcgattaa

SEQ ID NO: 109601 - DNA, 1149 bp, Enterobacter aerogenes
atgaatattcctgatgagtttggtctttttccgtttcagcgtttcactgcagatgaactacggcatttctttgtctggtgtgccgcacataaagtcagtgatgtggatctgaccggcgggtcacctgtatctgtcagtcgctttggccgacgggtgcgttgttccagtgcaacgttaccaaccacactcatgtcctccctgattgatgaactgttcggtcgggaagtcattccccgcgttctggcaggcaatccggttgacaggacgatacagattaacggggatgcatccgggcgctatggtcttaaacgcggagaacgcatccggttacgctctcacctcattcagggcacatctggtgcggaggagaaagcaatctcaataaccatgcgtgtcatcccgacagaaataccggacattctctccatgaacattgaaccagacctgcttgaagcaatggtctgcaaaagcggtctgggatttgtatgtggtgaaacagggtcaggaaaatcaacgctgtgtgcagcactgtactgttacattaagaagaattatcccaacgccaaaatcgtgacatatgaagacccggtggaatatatcctgggaaatgaaaacgatctgctcccaccgcatcaggcagaaatcgggcgtgatgtggtcagttttgctgccggactgcgttctgctgtacgacgtaatcccgaaattatcggtgttggtgagatcagggataacgaaaccgccgacgcagcggtacaggcaggcaacaccggacattactgcctgagcaccatgcatacgaaatctcctggtgaaacgctggcacgtcttcttgggctgtttccccctgtcatcagggattcgatggcctgggctgtcctgtcactgttgcagttcattctggttcaggttctggtcagaacaaatgacggtggccgtaaagccgtccgggaatatatcgtcattaacgatgagcttcgcgacaatctttccggaatgccacatgcagagtgggggcatcacattgatgccataatccggcaggaaaaacgtcgtatccgggatcagattctggaaatgtatatccggaatgaagttgaccgaagagaagcgattctttttatcccgccaggggagttacggtcatga

SEQ ID NO: 109602 - DNA, 819 bp, Enterobacter aerogenes
atgaaagcactcacctctctcattttgccagtaatactgcttactggttgttcttcttcccctaccatctcgccaggtggtgtcaatacgccaccacctgacattaatgcatggcttaaaccacgaagtgaaaagccggatagtctgtcagaaacacgctggaaaatgctgaccgacgcaggtaaaacgcttggatttcgtggtggcaaggctcagcgctcatgggagctgattcaggcactcaacgcccgggaaagcacacttaatgccttatacgatttccggccactgattagcccggaaggctggctaccaccggttattgatgaagcacaggacgtagctcatatcacgccagatcaaatccggacctcttcccgggtctggaccatcattcgccctgaacgctttgtcagcaatccaccgggctggcgtgactggcttctccgggggctttcaacaacagccactccgggtacagaaggcagcgtcgttccagaagacagcgtgcaacgaaaagtgtgggaaaccgcattacggcagggatggcaggaaggaagacaaaacgccgacctgacgcttgaagccaaccagaaaaccctcacccgtgattaccggggcatgatgctgtactcacttctctggcgtcagggcatgatcacccgtccggatgtttctgatcaaatgcaaaccgttacaggtgacgggaaaaaactggtcactggagatcgtgttcgtcgccttaaaaatcatgcggaattcaatcttcagaaatctcactggcgtccgcttataggcactgaaggaggctcccgatga

SEQ ID NO: 109603 - DNA, 459 bp, Enterobacter aerogenes
atgaaccgtattatacctgcggggtgtcttgccgccctttttctggctggctgcaactccccttctcagcatactcctgttccgcgtaactacggtgctgcctctgatgtggcggttacccggcacactcagtacacattatgggacaaaggtgtgttttccggccaacttccggtttcaacggggtctcatcttctgacagctaacagcgatcgcctttcctttgactgggaaggtgatgcgattgaattactgaacgaactggccagagtcagggggatgcagtttaactacaatggtgtccccctgccgttaccagtcaaccttcacgtccgggatatgacgttttccaatacgttgagacttattgaagcccagacagcctggagagcaacaatccatcaatatccgggcttgttacaggtcagcttcatgcagccggagaaccggaaaaaatga

SEQ ID NO: 109604 - DNA, 582 bp, Enterobacter aerogenes
atgaaaccacgttcttcttattcaaagacagcattcattcttttattttctgttttcctggtagctgcagtgacaaaagcaaaaagctcgcttcccgatatcaccctggaacaggcaaaagaaattaatgctgataacaccgttattttccttttccgccatggagaacgttgcgaccgttcagatatgccctgctattcggataagagcggaatcactattaccggtacagagaaagcacagcaggaaggtattaagttcgcaacaatcttcagtgaatatgatatttactccagcaatgcggtaagaaccatacaaactgcaaaattcttctccggtaaagaacccgtcgttatggacagtttatcagactgcaataatgatctttataagacgcttgaatcaatcgcaagagaatctcataaaaggaacatagtaataatgacacataatcattgtttatcatttctggccagagataggctcggcaagaaattcaaaccggcgtaccttgatgccctgatcatgcattacgatggtacccggctcatacttgacggaaaatacaacaaagaggcatag

SEQ ID NO: 109605 - DNA, 1203 bp, Enterobacter aerogenes
atgatgaagaaaaatcatattacccgcaccatcattgcatctgctgtattattttcctttaacgctgcagcagcgacgtcatattttgaagcgcgtaacgatgcaatgggtggcaccggggtagcatcttcccattatggtgtggcacctctggcaaacccggctttactgacaaagcacaacagcaatgatgatttcagccttcttctgccgtctgttggggcacaagttgctgatcctgatgatgtatcaaataaagctgatgatgttaaagatgactgggatttgtttgacagtgctgtagataaccagcatggcgtacaacaggcagcggcaaatcttaaacatcgtctgcaggaattccgcaatatcaatgcagatgctcaggtaggtgtatcagctgtagcagccatggcaaatgacactctgccgtttgcccttatggtcaagtcttacggaactgtcagcgtaaacggaaaagtaaacgatgcagacctggattatctggacaaagttgccaatggaacaattaccgacgtcgataagaatgccctgacctcacgcgcattcgggcgtgcagctgtaattaccgacgtcggaatttcatttgccaaagaactggaaacggccggacaaaaatggtctcttggcgtcacaccaaaatatcagcgtgtggacctgtttaactacaacgtaacggttcgtgattacgacaaagacgattttgacggtgacaagtaccacaacacgaaaaacggattcaacgccgatattggtgcttatacagacctgaatgacaactggactgtcggtcttgttgcccagaacatcattccacgcagtattgatactaaagtcgtcaatggctttaaagaaaccttcaaagttcgtccacaggcaaccgccggtgtatcctggcataatgacctgtttaccactgctcttgacgttgatctgactcctgccagtggcttcacttctgacagcaaacgtcagtttgcaagtgttggtgctgaatttaacgcatggaaatgggcgcaattgcgtgccggttatcgtcagaacatggcatcaaactccggaagcgccttcaccgctggcgttggtatctctccatttgacgtcgtacatatcgatgtttccggcctggtaggaactgaccacgattacggtgcaatggcacaacttcagttcactttctga

SEQ ID NO: 109606 - DNA, 825 bp, Enterobacter aerogenes
atgagactgaatacgaccggtattgcggcccgaatgatgctctcgctggacaaaaaagcaatcggcgaaaaactcatcaacggtcgtcagataaacccgacaccactgcaggtccgttacccacaaggggtaagagaagttctggggataatgagcgaacaattagccatatccaccgctgatttaacccgaatcctgcttgaggatgctcttcataatatgtttatgcctgcggataacaccacaggaaacataataagcagaattgaatacatcatgctgtcgcatgatataaatgcgccattactggcaacattgctgtcgccatggaatatccgctccacggttatacaggacccggccagacttgcagactatctttcagctgacgctctcgaacatcttgctgaatgttttaatctcaatccggactggctgaatggccatgaaaactatccgatagcgttgtccggtgaatggccagatactgctgataatttcagaatgcttattaatgatagcagcaacactgaagttattttctggcatagtttccccttcgcaggaaacacgaaaagagaatattgcggggtaatattgagacaggaaaaagaaataaatggctctgtaatatatccggcactatcattatcaccaacacttctgaacgatgaaaaaagaaaatggttaactgaatatacaaccaggcagaatacaacaatgtctttgcgacgcgtcacgttgagacctggccttgccgagaaccttattacagggcaaatactacctgttagcttatttaatacgtctttattaccctggtaa

SEQ ID NO: 109607 - DNA, 1155 bp, Enterobacter aerogenes
atgccgtctccacgcatccgtaaaatgtccctgtcacgcgcactggataagtacctgaaaacagtttctgttcacaagaaagggcatcaacaggagttttaccggagcaatgttatcaagcgatatcccattgctcttcggaatatggacgaaataacaaccgttgatattgctacatacagagacgttcgtttagcagaaataaacccccgaacgggtaaagccattacaggtaatactgtacgtcttgaactcgcccttctgtcatctctgttcaatattgctcgtgttgaatggggaacctgtcgtactaacccggttgaactggttcgcaagccgaaagtatcctccggacgagatcgccggctaacgtcttcagaagaacgtcgcctttctcgctatttccgcgaaaaaaatctgatgttgtatgtcattttccatcttgcccttgaaacagccatgcggcagggcgaaatactggccttacgttgggagcacattgatttgcgccacggtgtggctcatttacctgaaaccaaaaacggtcactcacgggatgttcctctgtccagacgtgcccgtaactttcttcaaatgatgcccgttaatctccacggcaatgtttttgattacaccgcatccggctttaaaaatgcctggagaatagccacacaacgacttcgcatcgaggacctgcattttcacgatctacggcatgaagcaataagccgcttcttcgaactgggtagcctgaatgtaatggagattgctgcaatatcaggacatcgttccatgaatatgctgaaacggtatactcatcttcgtgcatggcaactggtcagtaagcttgatgcccgccggcggcagacacaaaaagtggcagcatggtttgtgccgtatcctgcccatatcacgactatcgatgaagaaaatgggcagaaagcgcatcgtattgagatcggtgattttgataaccttcacgtcactgccacaacaaaagaggaagcagttcaccgcgccagtgaggttttgttgcgtacactggccattgcagcacagaaaggcgaacgtgtcccatctcccggagcgttacctgttaacgaccctgactacattatgatttgccctctgaacccgggcagcacaccgctgtaa

SEQ ID NO: 109608 - DNA, 183 bp, Enterobacter aerogenes
atgatctggcggggtatttttcagcaatttacctttcgcggcgataatggcgaactctttggcgaactcgtgcgatatccagtgaatatgttcttatttactatttatttttttgtatggattatgacggctattttgtccgtctggcatgttgttcgctctcgcgcctgcgctctgccataa

SEQ ID NO: 109609 - DNA, 249 bp, Enterobacter aerogenes
atgctttatgcctgcgtaaatcacaccgggattgcgattttaccgaactggctatcgcagcaggctgaagaacaagggcttattcaacgcgtcttcccggagtgggaatttagtatgttccccagcgaaaccgccatctggatgctgtacccgcaaaacaggagagtgccgcataaagtccgggcctttatcgactttatggttgaaaagattgggatgccgccctactgggagaaagagagtcattaa

SEQ ID NO: 109610 - DNA, 264 bp, Enterobacter aerogenes; identical to SEQ ID NO: 94215

SEQ ID NO: 109611 - DNA, 369 bp, Enterobacter aerogenes
atgaaacaactaactatctttgaaatggagagtatttccggtggttactcatgggatttttcctcatttcaatccagtattaccagtatagtttgtaatggcgttgaggctgtcgcttcagccgttttactggggactggcatggcggcaatgggaacgcttattggcggtacccaatctggagcaaatggcggcattctcggttttggtttgctaggcaatgccgtcgggatggtatggggattaatcgtgggtggagtcaccggggcagttaatggtgctgttatgggatgggatgcctctgtcgctctggttgaagagggtattcaaggcctgctggctggcaccttcatgccctggaaaagctaa

SEQ ID NO: 109612 - DNA, 372 bp, Enterobacter aerogenes
gtgaaagaacttacagttttcgaaatggaagcggtatccgggggctatagctgggacttttcttctatacagtcaagcatcactagcctggtaagcaatggcgctgaggctgtcgcctcagcagttcttggcgctgttacctggggagcgtttgggactttattaggcggcacccaatccgggaataatgggggcatccttggcctcggtctgatcggcaacgctgtagggatggtctggggattaattgtcggcgccgtaggtggcgcagtaacttacgccgctctgggatgggaaaaatctgtagaatactcaaatgcagcattcgaggcggtagttaagggtacttttattccgtggggccagtcctaa

SEQ ID NO: 109613 - DNA, 879 bp, Enterobacter aerogenes
gtgaaactgaaaatgcaggatctgagactgtttaatctcgtttttgaaagcgatccgggctggatactcgatttttccaaccgcacgctgtcggctttttttgatgaagagctgaacattgatattgatgatgaacgttatcaggaagacggaacctcaaaagccaaacgggtcagatgcctgctgaaacaggtggatcgcgagacagccctgcgggttcttgatgcactctggcggtacaaaatgaagagcatgcctgagcaggccgaaaaaagccgcaatgactggctcgcactgatttcacggctggaaaatgcagacgctgatacagcaagaggcgacaggcctgcccaggtatggcacgatgttgactggccatcactggtagccgaaatgaacgcgatgaaatccctgccgccacacccgcggggtttccgctttgaagcatggcttgcagaacttttcagtacctttaagcttgctccccgctcgtcattccggaacacgggcgagcagatagacggcagcttccggctgaatgatgacttttacctgatggaagcgaagtggcatcagaacagaacgccggcggcagatttgcacgtatttgaaggaaaactcagtaccaaggcaaaatgggccaggggtgtgttcatcagctggatggggtttactgatgaaggtctgacagccttcgggaaaggaaaacgggtgatctgtatcagtggttatgatctgtaccattccctcagtcacggtatcgctctgcccgacctgcttgaagccaagctcaggcatgcggctgaaacgggggaaccttatgctgagtttgacagactctacaccctcagagacagaatacccggcacgctgaaataa

SEQ ID NO: 109614 - DNA, 1059 bp, Enterobacter aerogenes
atggccagtgccctgtccgtcactgaaggtatgattggacagggaattgcagtatctggtgtgctggctgtactcaccagtttaagcatgcctgcattcgcaggacggcgggatcgaaaatctatcctgctgggtctaactgtcctgatgggtatttcgggcctcgttatcggtacggcctccagctatgttgtctacatgctggggagagcgctaattggcattgccgtaggggggttctggtctctgtcagtcgcaacagcaatgcgactggtaaaagcatctcagatcccgcgggcaatggctatttttaacagcggtagtgcactggctactgtggttgccgcgccggtgggagcatggcttggatccactattggatggcggggcgcatttttttgtctggttccgattgccgtcggtgcgttcctctggcaatggttttcattgccagtaatgaaagcttcgtcagaaagccatcagtccgggaatgtttttgatgtcctgaaaaacaaacgggtagcctggggaatggccggctgcggcgcgttcttcatggggcagtttgcccttttcacttatattcgcccttttcttgaagccattacagaggttcatgatagctccctttcactgatcctgctgatgatggggttgactggcctgctggggaccagtctgataggccggttcctgacgacaggactgtacaggatactgacaacaatacccttgatgatggctgccattgcggtgatgctgatccttttcggtgacaggaccgttctggtcgttggtttacttgcgttctggggactcatcgcgacagcggctccggtgggatggtggacatggcttgccagaattcctcataacgccgaggctggcggaggactgatggtggccattgtgcaggcgtcaattggtctcgggtcgactgtcggaggcatactttatgacacagcaggttacgagggggcttttctggccagcgccatggtgcttttactgggcgggattgtggcgggagtgacatcaacatttgaaggcaaaagatag

SEQ ID NO: 109615 - DNA, 477 bp, Enterobacter aerogenes
atgagaaatatattaatggtcgctctgtttgcatcagtagttatatcagacagcgttaatgccgatgatggtcaggatattacagtaactccggctggcactgtgtcttcagagcagggttctcctgattatttcacagggcatgtgattatcgatctactgacgccttcgtcgttaaaaactcctgcgtcatcgggtctggtgacattcgcgccgggagccagaacagcatggcatattcatccggcaggtcagatgcttattgtcaggtcgggtaaaggctggattcagaaagaaggtcaggcaaaaaggattattaaccccggtgatgtcgtctggatcccggcaggagtaaaacactggcatggcgccactgatactaccggaatgagccacatcgcggttacatatctgcaggacgggaaaggtgcagactggcttgaacccgtatctgatcaggagtacagcgcaaagtaa

SEQ ID NO: 109616 - DNA, 780 bp, Enterobacter aerogenes
atgaaatcaataccagctgtttttctgggaatcatcctgtcagcgccaggtttcgcgcaagttactcaaggagagcaccgcatgtcttcagatacccccccttctgttgccgtcgtttccccggcattgcaaagttatattcagaacgctgttgagggtgatctgtggaaacgaccacagctttcaccacgtgatcgaagtgtcattactgtagccgtactgatagcccggaaccagatatcggagctttcgggtgagctgaacagggcccttgataacggtgttaaaccccgtgaaatatctgaaatcattacgcatctcgcattctactccggacttgccaatgccacaggtgctgccactgcaacggcagatgtctttgctgcccggggcattggtgtcgagcaactcccctcaactgagcctgtactgttacccctggatgtagccgcagagacaaagcgggctgaaactgcggagaagattgcaggctccgtttcgcctgcactggtgcaatacaccactgacatcctgttcagaagcctctggctacgccctgatctcacaccccgtgacagaagcctggtgacagtatctggccttatcgcgaatggtcaggtgaaccagatcggattccatctcaataaagcaatggataacggcctgacccgtgcacaggttgctgaattgattgctcaggttgcgttttatgcaggctggcccaacgcgttttccgcagttccggttgttcaggacgttctcaataaccggaacagctga

SEQ ID NO: 109617 - DNA, 885 bp, Enterobacter aerogenes
atggcgaaacgggaaaactataatgacctttacctgttcatgcaggtcgtgagggaaggtagttttactgctgccgcgcaacggcttggcctggctcagtcggggatcagccgcgctgtccgcgaacttgaagagcgccttggcgttcagcttctggttcgaaccacccgtcggttatcactcactcaggccggcgaacaactttatcacaatgttgcatccggttttgacgccctggacctggggctaaccagactggcgcattatcgccagacaccctccggtacggtacgcatcaatgccagccagcacgccattgataaagtcctgctaccgaagctggcagcatttaaacaaagctatcccgatatcagactcgagctcatcagcgaaagccggtttgtcgatattattgcagagcgatttgatgcaggcgttcgtctgggcgcggaagtgcgaaatggtatgattgcagtacgtatttcccctgatatggagatggccattgtcggtacgccggaacactttcgtcgctacggctttccccgaactcccgccgatttagccgtacatccctgcatcgcttatcagtttggcgacggcaacctgtacgcctgggaactcgatctggatgggaaaaaaatcacccatccacctcagggacagtgggttttcgccgacagctacatggaagccagagcggccaggctgggtcttggcctggcctatgtcccggaagagctgataaccgaggatttagcacaaggcacacttatccgggtactccagcgtttcagccggcgtcttgacggttcatttctctattacccgcaccgcaatgtgtcacctgcactgagagtggtaattgatacattacgaatttaa

SEQ ID NO: 109618 - DNA, 1059 bp, Enterobacter aerogenes
atgagttatgctgatacaactaacccgaatgcgcctgtttcattgactgaaaaatgggataaaactttctccgaaagcgcgaaagtggatcaccgtaaggtgacctttcagaaccgctacgggatcaccttagttggagatctctacctgccgaaagaccgcggtaaccgtaaactggctgctattgccgtcagcggccccttcggtgcggtgaaagagcagtccagcggcctgtatgcacagacgctggccgaactggggtttgtcacactggcgtttgacccttcctatacgggcgaaagcggtggctatccccgtaatgttgcctcaccggatatcaataccgaggatttcagcgcggccgtggactttctgggcctgcaacacgaggtggatcgtaaccgtatcggcctgctcggcatttgcggatggggggggatggcgttaaataatgcagcgatggatactcgcgtcagagctgtggcgaccagcgtaatgtatgacatgagtcgggcgatggggcatggggtgggcgatggtaaagaccgctacaccactgccgatcgccgtgcggtactgcagtttctgaacgctcagcgctggaaggatgcggcaaacggtacttccacgccgggcgggcatgacatttatgttgatgagaagggtaacgccaccgctgccgcgcgtattctgccggaaaccttacccgccaacccccatccggtactgaaagaattcttcgattactaccgtgtgccgcgtggtttccatgcgcgttcggtcaattccaccggggcatggaatgcaaccatgccattgtcgtttatgaatatgccattgctgagttacgccagcgaagtcaccattccggcgcttatcgtgactggtgaaaaagcccactcacgctattttgctgaagatgctttcaaggcaatcggcagcaaagagaaaaaactggtgattgtccctggggcaaaccatgtcgatctctacgataacgctgcgggtaaaatcccgtttgctgaaattgaacatttcttcacggcaaacttaagataa

SEQ ID NO: 109619 - DNA, 894 bp, Enterobacter aerogenes
atgatccgcaataatattaacgaccttgtcgctttccttgctgttgcaagagagcgaagctttacccgggcggctgcgaagatagggatctctcagtcagctctgagtcacaccataaggaacctggagaaaagactgggtgtacgtttgctgaccagaaccacccgcgccgtttcaccgacagatgccggtgaaaaactgatacagggcataggtccacattttgatggcattgaaatgcagcttgaggcgcttaacgcgctgaaagaatcgccctcaggcaccattcgtctgaatgcaccggattacgccatcagcaacgtgatctggccaaaactgaatgatttcctgctggcttatcctgatatcaaaattgagctgatgctcgacaacggtctctccgatattgtgactgaacgctatgacgccggagtacgtatgggcgagcagctggcaaaagatatgatttctgcacgcatcagccctgattttcgttttgcagtggtgggttctcccgcctatttcagcaaccatcctgtcccccgttctcctaatgaactcatcactcatacctgtataaactaccggtttccgtcatccggtgcgctgtatgcgtgggaatttgaggtggaaggtaaagaagtcaaggtacgcgttgacgggcagctgacctttaataatattttttatgttctcgacgcagcactggccgggtacggactcgcctacgtacctgaagaaattgccctggcatatataaaaaagggcgatctcctccgggttcttgaaaattgctctccctggtgggaggggttttatctctattatcctcacaggcatcatgcctccccagccttcagagcgcttactgaggccctccgtcaccgcggctaa

SEQ ID NO: 109620 - DNA, 1593 bp, Enterobacter aerogenes
atgaaacgaaatggtaaactcaaaaaatcagtatcggcactgattaccaccgcctgcctgatgatggctctgccagccatggcgcaggatacactggaggtatccacctcttcaggtccggtcacaggaacggtaattaatggtatcagttcctggcttggcctgccttacgccgccccacctgtcggtaaattacgctggcaacccccgcagccagtcgctccctggacaacggccttaaaggcaaatgcactggcagcaagctgtgcgcagaacgctgatcttggtgagttcgccagggccgggggaaatgaagattgcctgtacctgaacgtctatcgcccagctgaaatgcacaatagtgatcaaaagctgccagttttcgtctggatccacggaggagggcttcaggtagggcaggggggggattacgacccatccagactcgtcagggaaggtaattctgttgttgtcaccttaaattaccgactgggaatgtttggttttctgtccactccagggctggattcagaagggcatgaagcaggcaattacggacttatggatcagcaggcggcactgcgctgggtgcagaagaatatatctgcctttggcggggatccatctaatgtcaccatttccggagaatcctccggcggtaacagcgttatggcacatattgccgctccgggatcagctggtctgttcaagcatgttgtggcaatgagtggttccggaatcatgtcgcgtcatccagcttttggcgctccgcgtccactgaatgttgcgcgtgaaacggggataaaatttgcccgagccctgggctgtgatgccggggatgcagaatgcctgcgcgccgtaccgaccaagcggatcctggatgttcagccatcgttcgcacttaacgaatttatcatcgacggtaaaaccttgcctgttcatccggctgatgcttacaaaagtggtaagatcaacccggttacgcttatcaaggggacaacgcgtgacgaagggcgctttttcgtcgcactgccggaaatactgacagggaaaaccctgcaggaaagagactaccccgaatggattgaacagcagtacggtaaaacgctcaagcctaaggtgctggcagaatacccacttaaaaactatgacaatcctagtgaggcttttgcagccgctgcaacggacagcatgttctcctgccctgcgcgcgcattaaaccggagtctggctgataaaatccccgtgtatgcgtatgagtttagcgatcgcactgcaccctcttatatcagcgcaacaacattccctctgcaggcagctcatacatttgaactggcttacgtgtttccgggttttcacggaggaagcgatatacatatcagccttaacccagcccaggaaaaactgtcacaggaaatggtcggctacttctccggtatggcaaaaatgtccagccgtgaacagagctggccccgctatagtgcgaagtcagataatttcatgaccttcgcccttccgaaagccagaatggtatcagggcatttcgctgatactcatcactgtgaattctgggataagcaggggctttactga

SEQ ID NO: 109621 - DNA, 1197 bp, Enterobacter aerogenes
ttgactgataagagcatgatccctgaaacaaacctcacgaaagcgatggtgctcctcttcgccgtcactggcggccttgctgtcggaaatctgtactgggcccagccattattgcatgttattgctattgatatgcatattccggcaggcaacgccagtctacttattacgattacgcaactgggctatgcactcgggattttcttgattgtaccactgggtgatacgataaacaggaaatacttgatccctgctgttctctttacctctgcactagcccttctcggatgtgctctttcctcgcagttcattatattgtgtatatttatggggattctgggagtgactacagtgggaggaggtattttgactccttttatcagcgatatatctcctgctgctaaacgtggaaaaattattggcactattgtatccggaatgctgaccgggatcctgctctcacgtacactgagcggtttttccagtgaatatctgggatggcggtctatctacttttttgccgccggatgcacatttttgttagcgatgcttttattgttcatactccccgaagaaaaagataaagctcgtataccctatgttcctttgatcctctctgtttttaaaattgcagggagccacaaggctatccgtaccaccctgatgctgggatttggtgtcttcgccgtctttagcgcattctggacaggtttaacatttcttctgagcagttcgccctttttctatacgaccgaccaaattggtctggtcggcattgccggtcttgctggagcgctcgcagcgcgaagagcgggctcacttcacgataaaggatactcggttgcagcaacgggttatgcactcattctggccattgtttcccttgctgtgacgctgattgccgtacacaccatctggctggtcattatcgccgttattacctttgatatggcaatccagacgctgaacgtggtgaatcagtccagaatactggcgctggatccagtcaaccgcagccggattaataccgcatttattactttaaacttcatcggtggggcaacgggttcagccctgacaggtctgctctggaatgccggtaactggtacgccgttgcaggtgcaggcatggcagtgctgggcataaccttccttatctggtttttctttcgtggaaatctggccactcaccggtga

SEQ ID NO: 109622 - DNA, 975 bp, Enterobacter aerogenes
atgacaactgactttactgcaacgtccaccgcaaacgatgttctcaacaatgttgacctgacaggtaaaaatgttctgataaccggtgtctctgccggtcttggcgtggaaacggcccgggctctggttgcacggggagcttcagtgacaggaactgcgcgtaacctgaaaaaggcggaagctgctgtctctgatatcagattactggctgcagaatcggccggttcctttcacttaattgagatggatctcgccgcgttgaacagtgtctgtgcagcaacggacagcctgctcaacagtaaccaacattttgatatcgtcattgccaacgcaggcgtcatggcgacaccggaagggaaaacggcggacgggtttgaaacccagatgggtacaaatttcatcggtcactttgtgttcattaaacgtctgataccagcccttaatccgggagcacgaattatcctgctctcttcgcttgcccatgccattgctgacgtgaatattgaggatctgaattttgagctcactccctatgatccctggatagcctatggccgctcaaaaacggcagttgcactgcttgcagtcgaactggaacgccggtacggaagccagaatattcacgcagcatccgttcatccaggtgcgatccagaccgaactgcaacgccattacagtaaggaagtcgatgaagctttcatcgctgagattaataaggcgaatgccagaagaggtctcccaccatttcagtggaaaacagtacaacagggagctgcgacgacagtctgggctgccgccgcagccagtgtgtctgatatcgccggtaaatactgtgaaaactgccatgtcgcctacatcaataacagtgagggggtcagcgacggggttcgttcttatgctcaggatccagcacatgcaagtgctctctgggacgccgcagaacgtctggtgaaagagaagttcggtgatatataa

SEQ ID NO: 109623 - DNA, 981 bp, Enterobacter aerogenes
atgaaacaacgtaaactgggtcaggaactccgggtatctgccataggttttggctgtatgggactctctttcggatatggaccagctgtgaagcaggatgaagcagtgcaactcatccggtcagcttatcagaacggcgttactttttttgatactgcagaagcttatggcgctgaaaatgaaacgctactgggagaagcggttgctccatttcgccatgacgtcgtacttgccacaaaatttggctggaaggacggtaatgccagaacgggattgctcgacagccgtccgcagcggatacggcaggtggctgaaaaatccctgaagctgatgaaaacagattatatcgacctgttttaccagcatcgcgtggatcccgatgttcctattgaagatgtggcgggtacggttgcggatctggtgaaagaagggaaggtcaaacattttggcctttctgaagcggggcctgagaccatccgccgcgcccatgccgttttcccggttacggctgtgcagagtgattactcattgtttacccgggatcctgaaaaatacattctgccgcttctgaatgaacttggtgtgggatttgttccatttagtccccttggcaaggggatcctgacgggagcaatcacatcagatactgtttttgatgaaaatgatgtacgtaaccgtcttcccagattcagtacagaatcccgtgataacaatgtgaaaattgcgacagagataggtcgtctggcatcagggattaagtgtaccagtgcccagctggcactggcgtggctactggcgcaaaaggaatggattgtgcctatcccggggaccacaaagatacaccgtatgcaggaaaatacagcggcagcttcagtggtgctgacgccggaaatccttcaggaactggatgctctcttgcttaaaatgccggtgaaaggaacccggtataacgaaaaggacctaaaactggtaggccgctga

SEQ ID NO: 109624 - DNA, 987 bp, Enterobacter aerogenes
atgaaaaacgagtttaatgcggagtcgacgacagaagatgttctgaaaggtcatgatctttctggtttgcggattcttgtcaccggggcatctgccgggcttggcgtagagacagcccgggcactggttgcgcatggcgctgaagtgatcggagcggtcagggatattgataaaggtaagctggctacacaaattgttcatgaagcggcaatacagggcggcggtaaattttcgttgatccagctcgatcttgccgacctggacagtgtccgttcttgtgccggtaaacttcgggacagcgtttcagcgctggatattattattgccaatgccggggttatggccacaccattcggtctgactaaagagggatttgaaatccagattggcacaaactttatcggccattttgttcttgttaaccgcctttttccactgcttaagaaaggcggaagggtcgttattttatcctcaggggcacactcacgggcaaatattgatttgaacgactttaattttacccacagccgctacgatccgtggatagcttatggtcgttctaaaacggctgatgccttgtttgccctggagctggaccgacgagcacaacgatatggcattcgtgccattgccgttcatccaggctccatccggacagaacttcagcggcattacagtccagaagatgaagaagcccttgtcgcttctataaatgaagccaaccaaaaagccggacgccccccgtttcgctataaggatatttcacagggagcggcaacaacggtatgggctgcagtggcggcacctgtggaggaggccggggggcggtattgcgaagactgtcacgttgcgaaagtgatggatggagaggggctgcgcgaaggcgttcgttcttatgctgcggatcctgaacaggcgaaggctctgtgggacaaagcggaagagctgaccggagaaaagggactttgtttcgctgaatcggagtag

SEQ ID NO: 109625 - DNA, 894 bp, Enterobacter aerogenes
atggctaaagataattacaacgacctcgcagcgttcatggcggttgcctccgaactcagttttacccgggcggccgccagaatgaacgtatctccctctgcgttaagccataccatccggaatctggaaaggcggctgagtatgcgactgtttacccgaacaacccgggctgtggccctgactgaagccggcattcgtttacagtcaggaatttcacccctgatggatgccattgacgaacaactcgatgcgctcaacactctccgggataagcctgccggtaccatacgtttatctgcccctgaattcgccgcccggttttatctgtggccaaagatcagacggttcatttcagactatccggatgtgacggttgaaatgaacgtcagtaacagcctgcttgatatcgtgtccgagaactttgatgcagggattcgaatgggggaaaacctggctaaggatatgatatcagtaaggataagtccggatacgcgctatctggtagtgggcgcgccggcctatctggacaccattcaccttcccgcgcatccccgggagctgattcagtataaatgcattaattaccgtttttcgctggcaggtcagattgtcccctgggagtttgcccgtgacggaaaaatcgtaaaagtccgagttgagggccccctgatatttaatgacgttgagcatgcactgcaggcggctgtggagggaattggactggcttatgtgcatgaagagtatgccgatgagtatctccgcaatggcatgctacaggaacttctggctgactggtcgccgctctgggaaggtctgcacctgtattaccccaaccggcatcttacttcatcagcttttaccgcgtttgtagaggcgcttagatttcgtgaatga

SEQ ID NO: 109626 - DNA, 726 bp, Enterobacter aerogenes
atgaataaaaaattaacctcccttaatatgggaatattactgggtgcaagcctgtttctgaccagcgtacaggcaaaagataaccagataactgcgccggaaactcatctgtcttatacatcctcggtaatttcagcaaccggtgtaaaaacggtcagaaacgatacgctggatccatcagatgtactgtttatctttgccgacctgcatcctgatctaatcgcatccagcaatacaatgtcaccgtctgcgctggcagccaacgcagggggactggcaaaagttgctcatgccatcaaggccccgtccctttttctgaccgtgccacggaatgggaaaccgggtgaactccttccggaactccagccttacgcgacggcagaaaacactatttaccgggaaaatgcggatccattcagggttaagcaaatcgttaatgcaattaaaaaatctggaaaacacaccctcatcgtttcgggctatacctcagaggttgccgtcatgcttaccgcgctgggcgctctggataacgggtatcgggtattgatccctgtggattgtatcggtaatcgctcagctcgcaccgaagatgcagcactggcccggactgcacaggcaggcgcacaaatcacgtccctcgccagtgtggcagctcagctggcacctgatttttctaaagagcccggaacgaccattctctccgttatcctggacgccaaactttaa

SEQ ID NO: 109627 - DNA, 1005 bp, Enterobacter aerogenes
atgcaagatataaaactctcaacatttggttcctttattgccggtggcgaagtggtcaggcggcagaataccgacggcacagaagaggttaccctgcgccatcaggcatacgtggaatactatattccttcagacctgtcggcagatcgctcggctatcattctgacccataattatttcgcggcttcagcctggttaagtaacgttgacgggaaagaaggctgggcgcaattcttcctgcgtaacggccacccggtgtatgttatcgatccgcccgggtcaggacgtgccggctttaatccggatgatatcgaccatgcacagatggtgattgatggcgcgatgtctgttgataaagggttctggccaggccaggacagcagtgcctgggctgcatggaatatgggacctgaatggggggtaccgggtgatggtatccttcagggcaatcagatgcccggtgatgaggcttccagacgtcgcctgctcgggacgcttatcccgaataaaccggttcctgatgccattctggacgacaccttcatcagcgtgcttgaaaaggtcaataatctgtccggcccggcagtttttgtggcgtggtcaatggccggtggtctggggcaacgtctgctgctgaggcgcccggacctgttcagagccctgatcctgctggacggctacagcggcgaaaatcgtttcccacagcccggaaaatggttcgataacgggcctatcagtgaatataaaacggtagctgccacgatggccagacacaatattccgcttctcaacgtcaacagcgcaggcggacactattccaacaccgggcattcaggcgagctgaaccagacgctggtcgatgaaatccatgccgtaaacggcaaagctgacagcgtcttcctgcctgatcatggtattccgggtaacagccatatgatgttctttgaacagaacagcgatgatgttgctgcactactgaaaaactggatcgcagatattgcctga

SEQ ID NO: 109628 - DNA, 612 bp, Enterobacter aerogenes
atgaccaccctctccccggacaccgtccgccgcattgaagacgccgccgccgccctgatcgccgccggcaccccgaacccgaccaacgaacaggtccgtcagcacctcggcggcggctccctgtcccacatctccccggtgatgcgcgcgttccgcgcccgccggcgcgagcaggctgctgagcaggccacgcccctgcctgcagagctggcgcagctgctgacgggccagctgggactactgtggcaggccgcggtgaaacaggctgaagccggagccctggcggcgcgcgagcaggccgacgacgacattgcccgggccgaccaggagcgggatgaggcgcaggcgacggtggccgccctggaaagcgagctggcggtgctgcgcgaggtggtggccgagcgtgaccgcctgctgcaggaggtgcgcgagctgcgcgcggaggcgctgccgctgcgtgagcaggtggcccgcctgaccgccaccggcgaacacctggcggcgcagctgcaggacacgaaagcggagctgaaggaagcccgggaggacggccgtcagcttcagaccgaactgctggccctggcccgccaggacgggaaggtgaagaaatga

SEQ ID NO: 109629 - DNA, 807 bp, Enterobacter aerogenes
atgaatgcggacaccctggcccgggtggaggccttccgtcgcgcgctggagctggctgcttatgaacggtccgctgagccggtaccgtccgtctggcgtgactttttaaaggcatttccgctcggctgctgcgagctggccagccagacgctggcggaatatctgacggaagacggcagcaacctgcacccctgtatcatcgctatggcgtggacagaaaacgccggtaatcacggacacgtgatcgttgctctggacggggagtacattgacctgacgctggaccagtttgacgggtatgatgaccggattgtggtggagcccgtcgagtccggcgggcagctcgcgggatttattcagaaggtccgggcccacggcgggaccctcaccacgcgtaaagtaaccctcgatgtcataccgtacgaaggccataagctgtatggctggctaaaagccacggcggacagtctgctggctgcgtcaggacagggcagggcaccttacagtatgcctcagctggtctccacggagatcctgcctcagtaccgcgacagaacggtggctgcttcgtcagatacggccactcacgtctctgcacagaaaaagcggcaaacaatgacgcacgtggggatcattaccgaatgctaccagccccgcgaggtcaggctgcgggaaaccgacacccaatgggtcagtgagtgcggtctgcgcttcagaaaggccaccggcgctgcggccggaagcggggtctggagtgcaaaccgccttgatttgaagagcatccgggaaatcgagactgaagattaa

SEQ ID NO: 109630 - DNA, 1134 bp, Enterobacter aerogenes
atgtatttttatgtggatgaaaccggtcataccggtcccaatctttttgaccacacccagcctgtgctttcctacggtgtgctttcctcaccggatgacctggacaaggttgccgaagcagatcttgctgccttgcgtaagaaactgggagtgccgcgcctgcacgccgcagaactgggtattcaccgccttgatgaagtggttgatacgctacttgtcctgcaaaagaagcaccggatacggtttgatgcctggcaagtggttaaacgggatcacgccattatttctttcttcgaccaggtgttcgaccaggggatgaatcctgcagtgcccggggttgcctactggaccccctttcgttacccgctgctgctgaatctggcaagcctgttcgatgatgaactggctgaaaaagcgtggcgtgcccgcctcgaagcccatgatgaacgttcctcatccctgttcagtgaggtatgcagtgcgttacttgcgcgcgtccataccctgggggatcaccgttacattgaactgattaccgatgcgttgtcctgggcgatgacccactttgaagagctgggatataactgcaaaaccggcaagcaaaaactgcagatcatgcccaacatgattggatttcagttcgtattacgcggtatctgtttccgcctgggagcaccaaaccgaaaagccgacatcgttgtggaccagcagtcgcagttcaacaccacccagcgggagctgagggatttctattaccagatacgcgagcagccctggataaacggacccggtttaccgggcatggatgtgacgaacatgccggctgaaccgctggtcttccagtcgggtacacagagtgcagggctggagctggttgatatatatctctggatcttcaaacgctttatggaagggaaggagctgaccaggccgttagcccgcctggtttacaccaaccgcaataccggcaggatggacagtgtctccctgcaatcggtcgctaaacgagctaaggagttcctggacaaactgcaggagccaacggctgaaatgttgaaaaaggccagtgaataccgggatcaggaagaggctaaacggctggcacatcgggtgcaaatcctgccgacatcctga

SEQ ID NO: 109631 - DNA, 444 bp, Enterobacter aerogenes
atgaatacacaaaatcatcagttcgcggagcataccgcaattactgcctcagtggtcccagacgagttacgcatcggcttctggccgcagcactttggctccatcccgcaatggataactcttgaacctcgcattttcgcctggatggatcgcttctgtgacgagtactgcggtggaatctggtccttttacatgctcagtaatggcggtgcgtttatggcccctgatgctgacggtgacgataaatggcatctgttcaacggcatgaacggcaatggtgcggaaataagcggagaggctgccggtattgcggtctgcctgatggcatacagccaccatgcctgtcgcaccgagtgtgacgcgatgacagagcattattatcttttacgcgactacgcgctgaatcatccggaatgcagcgccattatgcatcttatcgactga

SEQ ID NO: 109632 - DNA, 411 bp, Enterobacter aerogenes
atggctactgttgaggtattaaaagtaaagtatccaggcgcagatgcctggcaaatgggagacagcccggaactggccagcgagcttgcggacctgattaaaaaagggattaaaacggcctcctgcggatcctttgcctcttaccagcaagaaaagtctgccccgaggattggaagctataacattatccttgatggcctgaatgccccggtctgcgtgacccggctggtttcaatgcgactggtgcgtttttgtgatgtgactgaggagtttgcccgcaaagaaggtgaaggcgatttaagccttcaatactggcgaaatgagcatcagcgattttttacccgcgaaggtcatttttctaaagatatggagttgatcgcagaagaatttgaagtggttgaagtgctgtaa

SEQ ID NO: 109633 - DNA, 324 bp, Enterobacter aerogenes
gtgaagttcgataaagagcccgtcagtaacgctctggagaagatttgttccctgacgggttatacgttcggcatccaactgactgaatcggaatcggtgcacagcgcaggcatcatcgctcaggatttggaaaaagtgttacccgttgctgtaagttctggcgggaccggcacaacgcagaatggagaggagattaacgatctcaaaaccgtggactacagtgcgatgagcgccctgtatgttgaggccatgaaggagctggccaaccgggtaaaaagtatagagagtgagcttgccgaactcaaagccctggccgagatatag

SEQ ID NO: 109634 - DNA, 405 bp, Enterobacter aerogenes
atgtcagatgctctaacacagttaaacaatatccgtaccttacgttctcagactcgtgaaatgtcattagatgtactggaagatgttctggaaaagtttaaaattattcttatagaacgacgagaagaagagacattacgtcttgcaaatgaaagtcagcgccgcgataaactggaaacacttcgtcagatgatgcttgatgagggtatcgacccctccgaacttttagctgctattggctctctgggtaaggctaaaaggacgcgctccccccgccccgcgaagtatcgatatactgacgaaactggagagtcaaaaacatggtcaggtcaggggcgaatgccgaagcggatctcaaatctgattgctgaaggtggggaattaaaagattttgaaatcagctaa

SEQ ID NO: 109635 - DNA, 822 bp, Enterobacter aerogenes
atgaaaaataaagttattataaatcagagcattatatacgatagcgcatcggcttctttatataatctgaatgatcctgataagataattatcttgacaacgcctgcaaataactgtctgcaaattttaataaaaaacagaacggaaataaccacacaaaaagaattattcaccaaagtgtgggaaagtcatggcatacctgtaaccgctaatacactatatcaaaatatcgctttaattagaaaggcaattcgacagttaggaaataaagatgaatttataattactatacctcgtcgtggaatgctaattgcagaaaatgtacatataaatgattttagttcagatgaacatcctcctccaaagacatcaattaattatgaaacaaatcaacatggcacatcacttgtttctgacaaatatacatatcatcatgaggaaaaaaaaactctattcagttatagatttataatgaatgttatgttttttttgctatacatattattaatgacatgtacttcaatttttacaacattcgttcatcaagaatatcaggatacacaaagtcgtttttatagttatcgtttttggggggggtatcatcagtgtcctatatatgtagattcccgagaagtagataaaataaaagggtcaattgaagaatcactcaaacgtgctgatataaaatgtaataatagcgaacgagtttatgcgtctttttttactggtgcacctcgtgaatcatttattttttgtgatggagatatattaaagacgtcaacacaatgtaggtctaaataccaactatatatagaggggtaa

SEQ ID NO: 109636 - DNA, 489 bp, Enterobacter aerogenes
ttgaagttaatcgctatttatgtggcttctgtattgttgatgataattataacagtagcctataatcaatataagtgggatgtgaaactaaaaaatgacattaactgctttgctcaggttcaatataattatgatccggatagtgataatacagtgttaaatactggtattctctttgctctagaaaatggacatggaattatttcctatggtggaagattatatcatgatggtaaagcatatacgataaagcgttatgttgaggttagttacacagtaaaaaacaactatcaattattgttaagaacaaaagatttaaaaattgcaagcagtgatgatatccctgatgatctggcaagtaaatatctatatagctatttacgtgacgataatggttggttaaatgtcggcatttatcaaaatgggaggaacgggtatgttatatcaacaactccagtccctcaatttttatgtaaacatgtgagttga

SEQ ID NO: 109637 - DNA, 552 bp, Enterobacter aerogenes
atgaaaatgaataagatgaaaaaaactattcttgctgctgctattatgtttggtgctgcttctgtttcgcatgcagatcaagggcatggtaaggtgacctttacaggtgcaattatcgatgctccatgctcaattacccaagagtctattgaccagtctgtatggctgggacaggtatcaaacgtcgcattaaaagatggtggaaagtctacacctaaaatgttcagtattgatctcgaaaactgcacctttgttgatgatggcagcggaaatctgactaacaataaagttacagttacatttactggtatggagtcttcagctaataatggtcttttaggtattacaggaaccgctaaaggagctagtattgctattgctgatggtgatggtcaaattattaaattaggtactcctactaagcctcatgctttacaaaatggtaaaaacactttgtcatatgctgcttacctgcagggtgatggtggtacagctgctgtaactgaaggtgatttccaggctgttgctgattttactctggcttataattaa

SEQ ID NO: 109638 - DNA, 537 bp, Enterobacter aerogenes
atgtgggttgttaattattttttgatgtcgattttacttttattatcgaataattgtttagcggcaaaccagattgactcttcgcatgggtgggggcgagttaatatgcaaggttcaattattgatacagcttgctctattgcggtcgatagtcgtgagcaaactatcgatatggatacgacccctttatcagaaataattcgtaatggtcacggacagagcaaaagattttcaattgaattagttaactgtgttattaaaagagtgggcaaagaagattggaaacaatttagtgtgacttttgatggaaacactgatggtgacctttttagtataaatggagatgcctctggaattgctttgcagatatttgatgattatggaaatgttgttattccaggtaaatctttgccagcattagatattgctcccggtaaagataagcttgattttaaaataagagtagtagctaataaagatacattaaaatcaggtgattatttttcatcaatacgttttaaaatagactatttttga

SEQ ID NO: 109639 - DNA, 2559 bp, Enterobacter aerogenes
atgaatgtgtcgtctatagggaaattgttttgccggcatagattgttttttttggttctgagctctctaagtgttcagatacattttgtgcatgctgttgaaaatattcagttcaatactgatgtacttgatatacacgatagaaataatattgatctgagtcagttctcacgtggtagttatattatgccaggtatttacgatatggctgttcatataaataaaaatgagttgtccgagcaacaagtgccattctatataccagatgatgacagtgatggcagtcgtgcttgtataacaagggaaattgctgatcaacttggttttaaagaaactatattaaaagatgttcgttggtggagaaatggggaatgtcttgatgaaaacagtgtggaaggaatggaagtccgcggtgaccttgcgacagctacattgtatctaaatattccgcaggcgtttatagagtatacagatgagaactgggatccaccatctcgttgggatgaaggtattccaggaatactactcgattataatttgaatacacgtactcaaaggaatcttaaaaatggtcaaaagacctacaacattagcggaaatggtactgttggagctaatttaagtgtctggcgttttcgcgctgactggcaggcaaatgttagtcatcacaccggtagtgaccaaataaataataacactctggactggtctcgatattatgcttatcgcgctgttgcatcgttacgctcgaaattaacattaggcgaaagttatttagaatcaagcatgtttgacagcttccggttttctggtgtgagcttaatttcggacgataacatgctgccaccgaacctgcgtggatatgctccggaagttacaggtgtggcgaaaacgaatgccaaagtgacgattagccaacaaggaagggttttatatgaaaccacagttgcttcggggccatttcgtatacaagatattaatgatgcaatgagtggggaattgaatgttcgtgtcgaagagcaggatggcagtgtacaggagttcactataaatacttctcatattccatacctgacgcgtccaggttctgtacgatttaaattcgctgcaggcaaaccatctgactggcagcatcattcgcgtggtccaatttttggtactggagaattttcctggggggttagtaatggttggtcattatatggtggggcactagcaggtggtgactataatgctttatcactcggtattggtcgtgacctgatgatttttggtgctgtatcttttgatgttacagagtcgcgtgctaatttaccccaggctgatgataccttgaatggaggttcgtatcgtctcagttattcgaagaactttgatgaatacgacagccaagtcacttttgctggatatcgtttctctgaacaagatttcatgagtatgggggaatatctggatgcgcgttattacggaaatcgcagtggcaatggtaaggaaatgtatacgatcagttttaataagcattttcgtgatctgggactaagtagttatctcaactacagccatgagacatattgggatcgaccagctaacgatcgttataatttcactttatcgcgttattttgactgggggaacctgcgtaacttgagcttgtcgctttctgcttatcgtaaccagtacaacggaagcaaagatgatggcgcctacctttccctgtcaatgccatgggggaagagttctaccttcagttataacacgacggtaagccgtggtgatagtacacatcgtgttggtttttatgagcgtatagatgaacgcaataattatcagcttaatgcagggagttctcgcagcgggataaatattagtggttattacaatcatcagggcgatgcctcacgtattagtgcaaatgcaagctatcagcaagggatatatagtgctttcgggttatcaacgcaaggtggtatgactataacaccagacggcggggcatttcatcgtactggtgttatgggaggaacccgtatgctaatcgatacaaatggtgtcccagatgtaccagtacgtggttatggcagtaccagccgtacaaatgcctggggtaaggcagtaattagcgatatgaatagctattaccgtaacaaagcgactatagatctaaaccaacttggcgacaatgttgaggcgactcgttcagtagtacaggcaacacttaccgagggtgcgattggttacagacgcttcgatgttatcgctggtgaaaaagcgatagcagttatcaaactttctgatggtagtgaacctccatttggtgcaaccgtaattaacgctcaaaaccaagaaacaggaatcgttaatgacggcggtagcgtatacctaagtggtatcaatgcaggggaaagtatgaaggtattctggaacggaacagtgcaatgtaaaataagcatgcctattccattaccttctgacatgctgaccaacaatttattgctaccttgcaaggcgcatagcgtcgatacagagagaaacaagaaccaagctaaggagttattataa

SEQ ID NO: 109640 - DNA, 753 bp, Enterobacter aerogenes
atgaatgctattattcactatatgttaatatttttttcaggtgttatttttgggggctctttattaccagtggcggaggctgcaattgcattagatcgtactagggttatttttgatggtagccaaaaatcaattagtttgaatgtcagcaaccaaaataagcaactgccatatcttgctcaggggtggatcgaggatgaacagggaaataaggttcagagtccgctaacagtccttccgcctgtacagcgtattgaaccgggtaaaccaagccaagtaaagattcaggcattaccagtagcaaaaatgttaccccaggatcgggaatctgtttactattttaatttgcgtgagattcctccgcgaagcagtaaacccaacacgctacaaattgcgctgcagactcgtatcaagttgttctatcgtccttcagcaatagcgattgatactaatgccccacctcctcaggagcagatgacattaagtaagcagggcgataaatatatagtcaataacccgacaccatattatgtgactctggtagatgcaggcagtacaaaaggttccagtattaaagattttgagcctttaatgataccgccaaaaagtagccagcctctgacagtaagtgcggctattttgggtaatacaccggtgttgacttatgtgaacgattatggcggtcgtccaaaattaaattttaggtgctcagcgggaaattgtcaggtagtacaggaaaagaaagggtcttaa

SEQ ID NO: 109641 - DNA, 639 bp, Enterobacter aerogenes
atgataaaaatgacgaatgtccccgatagtctgggccagtcgctacgtaagtttcatggtgttgatatcctgttaaagtccttcgggatcatgttgctcttgttacccacagctcaggcaactgtagataactgggatgttgagggggccaatgggacactctatgtgtatggaactctgactgaaagcgcatgccgtcttgaaatgttaagtgcatggcaagatgtaatgttgggagagataggcactggtcgtctgctaagtacgggggaaagaggagagcctgttcattttgaactacgactgacagactgtctgcgtagcccggcaggtagtctcgatcatcgtactggaagcctttggtggtcaaataatcagcctgcggtcaccgtaagttttatcgctccacgtgacagggataatccccagttagtcaaattagatggtgtggcgggaatagggttacgtgttagagatgaacaaggtaatgatgttcgcatcggtaatcgtggcatgcctttatttcttacgcctggacaagatagtttgggttacacggtttcgacggaacgtacttcagcggccatgatcgctggtaactttaaggcggtcatcggatttcaacttagttatgactga

SEQ ID NO: 109642 - DNA, 480 bp, Enterobacter aerogenes
gtgtacgaaatattaaaatattttctacttgtcgtgacgatgttgttttcatatacatcagcagcctccgttccggtaagtgttaaagtcaaggtggttcctgttccatgcacaataaatgaaggtaatccaattattgtagatttcgaagaagtaatgacaacaagaattgatggtaaaaactatcgtaaaccgattgagtatacacttaactgtacaggaatgacttcagttttaattaagttaagagtagtgggcgctggtgccggatttgatagaactctattaggaacatcagttaatggtctgggtattgagttttggcaaagtggtaattttaaggtgccattgaatagttggttagattttatgtatatgaaaccacctacactctgggccgtacctgtaaaacagcaggggatatcattgaaaggtggtgagttttatgcagcagctacgatggaattacactatcagtaa

SEQ ID NO: 109643 - DNA, 492 bp, Enterobacter aerogenes
atgagcaaactgtggtgcataataataatcatatggacaggggttatgagcaaaactgttttcggaaaagaaggagaaatgcttttccacggtattttagttgagcctcccccctgttcgattaacgacaataatcttattgaagtagattttggcgaacgagttgggattaaaaaagttgatggtgtcaattatcgccaaccgttaaattatcaaattaaatgcgatggaagtggtaatttaaactggactctttctttgagtctcaatgggagtgtatctgcatttgatattaatgctttacaaacaaataaagcgaatctagggatacgtatatatctggatgataaacctttagcccctggaagttctgttagcatagatgtcgctaatccacctcgtcttgaagcggttccagtgaaaaaaatgggaacagtgttaactgaaggggaatttgagtcctgggctacgttacgagcagaataccaataa

SEQ ID NO: 109644 - DNA, 576 bp, Enterobacter aerogenes
atgaaatttttatggattgaccttgatagtcgaaataatatacgattatcgaaattaagcttggtaatagtgtttgtttttttttctaacattcactttgcatacggcatgcctgaaaataatgttcgcttgtttggtgcgctggtagcagaaccgtgtgtaatattacctggagatgaagagattcaactggatttcggtactgttattgataaatatatttatttgaacacgcgtactctggggcagttatttaagatacatcttgcagaatgtgatcttagtcttggaaatactgttaggataacatttattggcaaggaaaactctgaattacctggtttacttggaattaacaacagcacggaaatgagtgggattgctattggacttgagacaacaaactccgagccagtcaaattaaataaacaaagtaaactatatccacttcaggttggtaacacttatatagcatttaaagcttatgtccagggcgaaccaaacgctatagctcgtaagagtatcagacgagggccatttaatgcaactgccacctttaaactggaatatgaataa

SEQ ID NO: 109645 - DNA, 822 bp, Enterobacter aerogenes
atgaggttttttatttatgtggttgcattgctaatgtcatgcgcatttagcgctaaggctgcaatctatccagtaccacaatctataaaatacacgtttaatgtggctgaagggaacgtgtttgaaattgtctggggagaggtagaggtgcctgatttagataaaccacctattagtgaatatgacactataattcttgcagccagagctgtgggcgttgccggttctcttctcacaggtggtggcttttctaattcaacagcgcattcatcaggatggacttgggctttggaaagattatatcctgatgagactatggcggatgctgcggcaagatttaagattggtttgccgacacgtatcgatacacgcaatattatgactaataaaattctagatggatgcatcggtgttgtatttatgaatagaaacaatatctcctggagtaatgtttttagcccggcaggtacctgtataacaataccgccagtaactgagactgctgcacgctgtaaaattataacgccatcgattacacttgatcatggtcaggtaggtttggggaaaacaatatcaacaatgacttccgcggatcttattattgactgtgacaaagaagcgtcagcgaatataaaatttgattcgtctgtgcttaagcttgggtcattaattagtaatctttccgttagtaatttaaataatggtgtcgttaaattgatgcagggtaataataatttgtcagtcgtaagttctttaactgggactgctattagtgtaggggcgttttctgcatctactgtacttacagttacatttaattag

SEQ ID NO: 109646 - DNA, 597 bp, Enterobacter aerogenes
atgctaataaatgacgttaacaattttttttctgttggattatcccgatacattaacaatgaaatatatggatgtatcgaaaaggaactaaataacaatatatggcgtaaaggccttggcgttgatctttgtttcatagccatcgaaacttcgatcgattttttttttgctttaacccttgttcgtaaaaatactaaaagagttattttatttatcatggataggcccgaggacggttttttaatacctcgttggatttgtaagcattttactgttatttatcgaaatgattctttaatgactattcgtaggaaaattattgatcagattagaaattgggggagtataggatattttgataaaattgaaaatgcagtttatgaatgtaaccgatcgagtttatcagaatgcgaaatacaagttctagaattgatagccagaggggtgtcaatcaatgggattgccaatatattaggtagaagtgttaaaactatttactcacaaagatactcaataatgaggaagcttagacttaaaaatagccatgagttaatattatttataattaaacatcaacgagtgttgatgttgtcttaa

SEQ ID NO: 109647 - DNA, 180 bp, Enterobacter aerogenes
atgtcaattaatggactagctgactggcatgattatgacgacaggctgaataccctggcacggaaacccaacatcgaacataccattctgagatgtatcagcaaatactcaccagcatgggacaattatatttcagctgtacgtcaagagataattgaacaggccagtgaactcgaatga

SEQ ID NO: 109648 - DNA, 1341 bp, Enterobacter aerogenes
atgattgattcaacaccagttaacggaagttctgattcacagcaacctcaacggaactggaatgccctgttccgtggagattatgaactgggggcttacaatgcctgcgtgggagacaacggttgtccggacctttattactacgctgatggtttcgctgatagcgtattcctactcattgatgcccttaccaaggagcacaaagcaatacttgatacgcttatttatcctatctgtttcaatctgcgacactccgtggaattaactataaagggtcagatagaggatctcagccaacttgcgaaactaagaaaacagccgcttgcacccgatacagaaatagaaaaagtgctgaatcagcacgatattatgaacctgtgggattttttttcaggccatgcagttgcgtttgatcggcgttataaggaaaagctgtcaacactggaacctctctttcgctgtattggtgaaacagatcccaccggtcagacatttcgctacagttacagtacggaagccaagaaacatctgacagatgtaagtgttatcaatgtattagttctgcgtgatcaatttcgtgtcatccgtgagcaactggaagaactagtcgggttgactcagtggctagagagggaatactccaccggcgttttcaccaaaaatctcagtcgtgaagatcttcatgctatcaccgttcagttgccgccacggcattcatggtctgatccggctgcaggccttgatgacatcatacaaactatcaaatctgaaaatgacatcggcagcaaggaactgacggaggcattgaacaagattcaaggttgcagagatttggcgcgaattatcggtctgcctgtaactattccgggtttggctatgagtgatttgctaattctcaatgactgctggaaaatggcatgggatcgggatgctctggaggataaattacgtaacgatatatccggagttacagatacacaggttgtaccggtgatcctgctcgaggagatgaagcatgaaattaacatgatgagagataccaaatcctcatttgccagttttatgcagtgggcaacgccagagagagtcgccggactacaggcattaatggaggtccggagttttcgtttcagtgaagaacatgaccgttgctacgaatattacaaagcagagctgaccgccgctttttcaggcactgcgcaggtcattgatgctgagttatcagagatctggtctcaaagtattggacggcgtaactatccttcgcgggtgataaacagcctcaaacttgccgggtttacacaagaaagcgctggccttgaggaacacctcttctcctga

SEQ ID NO: 109649 - DNA, 195 bp, Enterobacter aerogenes
atgaacagaacagcacatgaaatacagaccagctggcttgagagccggcagcctgaagatcgtaccggtaatgaagctgaaaaattttcggatgagtgttggaagaacggtctgcggctggataaaagcctgtctgtgcactatcaacttctgatggaaaacatccgctggacgctgatcccacggcaaaagtga

SEQ ID NO: 109650 - DNA, 471 bp, Enterobacter aerogenes
atgccggacctcgctgagcgagcattgcgtattatccgcgaacgctacgctgattttggcctcactttagcctgtgagaagctcgccgaggttcatgggctgtatctggccaaagagacggtacgcaagctgatgacgcaagctggtttatggatcccccgcaagttatgtccgcctcgtgtacatcagctacgaccgcgtcgggcctgcaccggagaactcatccagattgatggttgtgagcatcgttggtgcgaggatcatggtccggcctgcacactgctcgtgttgagcagggctcacctgacgttgcaggatcgcctcgtcattcgcggtatcagtacgcccgaggcagcaaacgcctttgccgatgagttcatgactgactacaaccgccggtttgcgaagccaccacgccacgatttcgacgttcaccgtccgctcgagaataatgaaaatctggcatgttga

SEQ ID NO: 109651 - DNA, 264 bp, Enterobacter aerogenes; identical to SEQ ID NO: 94215

SEQ ID NO: 109652 - DNA, 948 bp, Enterobacter aerogenes
atgcggcatgccaaccgcggagaccgtatccagcagccccataaactcgatactgatgggaatgcccagcagggtcgggccggccggaaccaccgtccccgccggcagcatatttgtcgcatcaagcggcattttagcgtcatcgagcaacgactccagcccgcgggcgcaggcgcgggcggtggcggccccccggcagtagccgtagacgaacagcttgattttggcgatgcgccgctgcgagcgctggatatacagccgcgtcggctgccgcggccactggttgaccacggcacccagatggtcgtcgcagaatttgtcaagcgcgcttttacggttgaacttctgggtcagccgcgagaatggccagacggtggccatttgaggccgaaagatatccagttcgctgtcttcgatcctttcctttttcaccgcatagcagatgctgctgtaggttttaagcagcgcctggttgatacggtcttcgccgccgttggcaaacagctcgccgtccagcgagtattcgttctcgccaatctcaggaaagcttgccccacagccggggaagtagtaactgaagtagccgtcatcttccgctggcggcaactggccactccagttcgcggcatgataaagccggccgatattggtcagcggcggattacgagagccataaacttcatcggcccccttttcattacagcaggtaccgtcaaagaacaggctgatatgcaggctggccaggcagcctggttccgtttttttatccgattgatgatcggactctttaacatacccctccaggtactgcctggcgtagttaccttcggtctgcgttctgctcgctggcaggcgcccgcgctcgttgtattcggctttctgctgtgtagagttatcggcaggcttttctccctttttatcatccggcccgggaaactttggcggtaa

SEQ ID NO: 109653 - DNA, 420 bp, Enterobacter aerogenes
atgtccgacaccgcagactccacgctgaatgccctgaaggcgcttatcgcagcgtttcagaccggcgccaccccggtcgctgttaaaacctctaccgcggaagcggccagcttaccgccaaagtttcccgggccggatgatgaaaagcccgcgggtaaatccacacagcagaaaacccaatacaacgagcgcgggcgcttgcctgcgagcagaacgcagaccgaaggcaattacgccaggcagtacctggagggatatgtcggggagtccgatcataaatcggacaaaaaaacggagccgggctgcccggccagcctgcatatcagcctgttctttgacggtacctgttgtaatgaagagggagccgatgaggtatacggttcgcgtaatccgccgctgaccaatattgctcggctctaa

SEQ ID NO: 109654 - DNA, 858 bp, Enterobacter aerogenes
gtggcgcttacgcttaccggggctaccaaccgactaccgaaccgtagcccggataaggcgctgtgcgccgctatccgggaaccctccccggtggcgcttgcgcttaccggggctactaacctaataccgaaccgtagcccggataaggcgctgtgcgccgctatccgggaaccctccccggtggcgcttgcgcttaccggggctactaacctaataccgaaccgtagcccggataaggcgctgtgcgccgctatccgggaaccctccccggtggcgcttgcgcttaccggggctactaacctaataccgaaccgtagcccggataaggcgctgtgcgccgctatccgggaaccctccccggtggcgcttgcgcttaccggggctactaacctaataccgaaccgtagcccggataaggcgctgtgcgccgctatccgggaaccctccccggtggcgcttgcgcttaccggggctactaacctaataccgaaccgtagcccggataaggcgctgtgcgccgctatccgggaaccctccccggtggcgcttgcgcttaccggggctactaacctaataccgaaccgtagcccggataaggcgctgtgcgccgctatccgggaaccctccccggtggcgcttgcgcttaccggggctactaacctaataccgaaccgtagcccggataaggcgctgtgcgccgctatccgggaaccctccccggtggcgcttacgcttaccggggctaccgaccgactaccgaaccgtagcccggataaggcgctgtgcgccgctatccgggaatcctccgccggtggcgcttacgcttaccggggctaccaaccgactaccgaaccgtag

SEQ ID NO: 109655 - DNA, 264 bp, Enterobacter aerogenes; identical to SEQ ID NO: 94215

SEQ ID NO: 109656 - DNA, 135 bp, Enterobacter aerogenes; identical to SEQ ID NO: 10665

SEQ ID NO: 109657 - DNA, 909 bp, Enterobacter aerogenes
atggcacagacttttactcataatttacttcatcctcgacactggcttacctggtctggtttgggtctgctgtggcttctcgttcaacttccttacccggttttacatactctgggctctggccttggaaaaatatccagaccctttctgaaacgccgggaagggattgcgattagaaatatcgaactgtgctttcccgagatgacaccgtttgcccggagccagatggtcaataaaaactttgtttctctcgggctgggactgatggaaacaggaatggcctggttctggagcgatgcgagagtcaaaaaatggtttgatgtcgaagggcttgaaaacctgaccggcgcgacaaaaggagtaatggttgtcgggattcattttatgtcccttgagttgtgtggaagagtaatggggttatgccatcctatgatggcaacgtatcgcccacacaatgatccattaatggaatgggtacagacaaaagggcgtatgcgttcaaataaggctatgattaatcgacgtaatttatcaggttttgttcatgcgctaaaagcaggtgaagccgtttggtttgcaccagaccaggattatgggtctaagggaagcgtttttgcaccttttttctcggtaaaaaaagcagccacgacgaacggcacgtatgctctgtcaaaactcgctggtgcagacttgctcacacttagcatgattcgacgtagcgataaaaaaggttatcacatgtatatcagcaagccgttgtcaggctatccaggggaagacaaggtcgccgcagcggcttatatgaacaagatcatcgagcgtgaaattctccgtgctcctgagcaatacctgtggatgcatcgcaggttcaaaacgcgtcctgaaggcgaagtctctttatacaaatga

SEQ ID NO: 109658 - DNA, 135 bp, Enterobacter aerogenes; identical to SEQ ID NO: 10665

SEQ ID NO: 109659 - DNA, 135 bp, Enterobacter aerogenes; identical to SEQ ID NO: 10665

SEQ ID NO: 109660 - DNA, 135 bp, Enterobacter aerogenes; identical to SEQ ID NO: 10665

SEQ ID NO: 109661 - DNA, 153 bp, Enterobacter aerogenes; identical to SEQ ID NO: 38610

SEQ ID NO: 109662 - DNA, 135 bp, Enterobacter aerogenes; identical to SEQ ID NO: 10665

SEQ ID NO: 109663 - DNA, 135 bp, Enterobacter aerogenes
atgcagaaaaccctcaaggttggaagccgaattactttgcaggatcagttgcaacttatgatgcaaatcgaattgttaaaggtggtttttatgatgaatacaatttccataaagggacatttagagctgatttaa

SEQ ID NO: 109664 - DNA, 135 bp, Enterobacter aerogenes; identical to SEQ ID NO: 10665

SEQ ID NO: 109665 - DNA, 126 bp, Enterobacter aerogenes
atggtgatcttcttgttgattatacatgacggacatcttaacttagcccaaagcggacattacaactttgctgttacaacactggtgcgcataatgtatattatgttaaatgtagtcaattgttaa

SEQ ID NO: 109666 - DNA, 3096 bp, Enterobacter aerogenes
atggaatatttttatctgataaaagcgactcaaaaatcgggtaaagctgatgccgtaatctggcgcactaataaatcagaagctcgcgccctactgcagctcgacgtcgatctggaagacgctgggatcgaaacaggccgcggcaaagactatcaaaaaccaattcgtaccgatttcccggtattcaatgacctgccggcggaaggtgttctcgattactcatggtgcgaacgctaccagctcggcaacgatggccgcacctgggctctgaagccaggtcaggcgcctgcggatcatcacatcgatgatgccggagtatctgctgagcccgttagtggcgagctggttgatgccaatactactggtgacgcggcacaaggtgagaccgtggaaactttcggtagcgatgaataccaggacgattcgagcgcgctatttaacgtggcagaactcccctttcgcgctcagctgctggcgcagtacatggccgaagaacgtcacgtttatcatatcagcatgcctcaccggcaggagctgtcagttcttgaaatggacactgataacgcagccgtccaggatctgattctggccgccgagaatatccctgaaatcaaaaaatacgatatgccggcgctctggaaattcaccagcgccaataaaaaagtcttcccggaagggaaacggcatgagctcggtaaacgtatccagtttgcaaaactgtggttcgccacgaacgcgatcgaccgcggcattctcaccagggaatgggctgccggtaactgcatttcttcggttatgaaaactgatgcaggaacgaatgctggcggcggtaataaaaccgatcgcaatcctgactacacacatacgctagatacgcttgatgttgagattgcgctggccacaatgccgatggatttcgatatctacaatttcccggcatccattcatcgccgggctaaagaaatcgtccagaaaaaagaaagcccattcaaagaatggtctgctgcgctgcgtaaaaccgcaggcatcctggattattcacgcgctgccatttttgccctcattcgtgacgccaccagcgatattcatcatttcccggtaagtctgcagacctatatcaatgcgaacctgacagagcataagcatgaaacgccctctgctgaaacgcttgagaaagcagggcatgtctcatctgccgccgttgttcttaacaccgtgaagaaagctattgatggcgaggaaaacaaaccggagctggaaaacctctcaaccgaatatcaggttgttggcgctcaactggtggaggaagcccaaaaagaacggtctgccgtggataagattctcgcagctgagcgcggtgaatatatcgaaggggtaagcgatccggatgcaccgaactgggtaacggaagacctgactaaacccaaacagcctgtagtttcaaacatgggcaatggtgttttttcgattgatggtctgatggatagccagccagcaccagcttcagcactttctattgtggaccaggcgcgccagcgcgctgcagaagaaaaattacatccagctaattccggggaaaccactagcgatgtgcagatggaaacggctcagccagtcgaagacgaaaatgataatgcggtatcagcaagcgaaggcactgatgcaactgctccgcaagcagatgccgtgaacatgcgcgacattcttgctgagcgctgccctgaccttaccgcggcagtattgaaggaccagcaatcagcaactgcagaagaagagcatgagccagagcctgaagcaacaaaatggcctgaattcttcgagcccggtcgatatgaaagtgttccgaacgagatttaccacgcggcgaacggcatcagttctactcaggttaaagatgcccgtatatctctgatgtatttcgaaaagcgtcacgtctcgaaagtcattgaaaaaacgcgatctcctgttctggatatgggcaatttggtgcatgcgctggcgctgcagcctgaacagctggaaaaagaattcagcatcgagccggaaatccctgaaggcgccttcaccacgactgcgacgatccgcgcgtttatcgacgagtacaacgccgggcttccgtcgctgttgagtgctgacaacatcaaggcgttgctggaggcacacaacgccacactgcctcaaccggttcctttgggtgatgacgttacccaaacaggtgaaaactacatggccttacccgctgaatttcagcgcgtcgaagatggtcagaaagttaccgcggccaaaatgaaggcatgcatcaaagaatataacgccactctgcccgccctagtgagaaccagcggcagccgggatgccctgttagaacaactggcgattatcaaccctgacatggtagctcaggaggcccagaaggcgcagccgctgaaagtatcaggcactaaagcggatctgattcaggctgtgaaatcggttaaaccggatgccgtgtttgccgacgaactgctggatgcatggcgcgaaaacccggaaggaaaaatactggttacccgccagcagatgagcactgcgctggacattcagaaagcacttttgaatcaccccaccgccggcaagctgctccagcatccgagccgcgccgttgaggtgagctatttcggtattgatgaggaaaccgggctggaagttcgcgtacgccctgaccttgagatagacatgagcggcctgcgcattggtgcggacctgaagaccatcagcatgtggaacatcaagcaggaagggctgcgcgcgaagttgcacagggaaatcattgagcgcgattaccacctcagcgcagccatgtactgcgaaaccgcggctctggatcagttcttctggattttcgtcaacaaagacgagaactaccactggatcgccattatcgaggcatcagaagaactactggaactcggcatgctggaataccgcaaagcaatgcgcgccatcgcgaacggtttcgacactggcgaatggccggcgccaatcactgaagactacgccgaagaacttaacgattttgatgtgcgccgtctcgaagcgctgcgcgtacaggcataa

SEQ ID NO: 109667 - DNA, 195 bp, Enterobacter aerogenes
atgagccattcacaggaatacatcaagggcgccattgctgcgctcaacgaagttaaggccatcgggttagccgcagccatgcacgcggggatcattcacggaaaagaaaccgggaatgccgtaagagcaacagtcgatagtgttgctgatccgctcattgataaatacaaagcgatggtggtgaaaaatgattaa

SEQ ID NO: 109668 - DNA, 546 bp, Enterobacter aerogenes
atgaataacatgatgcttgacgttagggcattgggtagcgaagacgactcaccgttgttcgctgttgagtgcgtcttctttgaaccgtcaaccgggaagtttgggcctcagttctaccgcgcgattgacctaaacaccgtcaagaatatcgatccttcagtggtgattgagctgctgaaaagggacgccgatcagcgcgtagagataattagcgctactcacactgaattagccgccgtggccgaacttctcggatttgtggaaaaaaacgcttcaaaacacgcggagctacagtgctggacaagagcagagggaacggtaaagcagctcatttctgccgtgaaaaggcataacctggttgtgtcccgcatcgctctcagggtctgtagtttgcctacgctggttatgttggcgggctccaccggttacgttccgcacccgcgccgctcaacggctacttacatgctgactgacgccgtatatcaggccgagcaagtttgcgagatctggcagcgcctgacctctccacacattgaatcgctgtga

SEQ ID NO: 109669 - DNA, 228 bp, Enterobacter aerogenes
atgtcgatcaagtcaataaagttggaaagcggaataagtgatccggagtttatggaaataagcgccaacgctcgtaggcacgaacgcgcccaccttctgggcctgctgcgtatctttgtcggccagctgaaaaaggaaagctccaccccggaagagatttattcatcaatcgaacagtgggccggcgcccgcgagctaactatcagtgagggaaaataccatgaataa

SEQ ID NO: 109670 - DNA, 2547 bp, Enterobacter aerogenes
atgaaccactggaaagacatcgcgtctaccttgctttctattcctatggcgcaccagttgattggcttttataccgtcgccgacgataccgacggcgtgcttaaggtaatgcgcagttatcagtattacgccgccaatgcgatatcagacaaagtagccaaaaccaactggcaacagctgggtagcgctaataaccctgatcgtctcggaggttatgtgtggcatactaccggttcgggaaaaaccatgaccagtttcaaatcggcacagttaattgcacaatcgaaagatgccgataaagtgatttttttaatggacaggattgagctgggtacccaatctctgacggagtatcgcaattttgctagcgatggagaaaccgttcaagctacagagaatactcatgtactcattaccaaattaaaaagcagtgcaacttccgatacgttaattgttagctccattcaaaaaatgagtaatatttttgaagaagctgatgatgagggaacagcaacaaattcagctgatatagaaaaaatccgtgctaagcgcttggtatttattattgatgaagcacatcgctcaacgatgagtggaggcaaagaaaataaactaggcatgctggtaagcattaaaaaaacattccctaaggcactcttttttggttttaccggcacgccgattcatgatgaaaataaaatcaatagcaatactaccgctgatgtatttggtaacgagttgcatcgctatagcatagcagatggtatacgtgatggtaacgttttgggctttgatccttacaaagtacctacttttagagatagtgatcttaggaaagaagttgcattagaacaagctaaggctaattcggtttctgatgcgatggcggatcccgctaaaaagaaaaagtttaatcactttttaaatgacgtaccgatggctggctataaagatgccacaggcaaataccataaaggcattgaagactatgtacctaaaagccaatatttaacggctacccaccaggaaaaagtcgtcagtgacattttagataaatgggatgtactcagccaaggcaataaatttcacgcaattttagccacaaatagcatcgctgaagcgattgactattaccggcgtttaaaagcggccaaacctgagctaaaaatctcagccttgtttgatccaaatattgataacgacggtagcgatgaccgaggcccaacgtttaaaggcgatgggctggatgaaattatgagtgactacaataagcgttatggccacgattttgattttgcccgccacgccgcttttaaaaaagatttagcggcacgccttgctcataaaaaaccttacgaacgcatacataccgagccttcaaagcaattagatttattgattgtagtggatcaaatgctcactggttttgattctaaatggcttaatactttgtatttagacaaggtaataaaatatcaaaatataattcaagcgttctcacgcaccaatcgcttgtttggtcccgacaaaccccacggcatcatccgttattaccgctacccacatacaatggagcagcacattaatgctgcggtaaaactctattccggcgataagcctatcggcttgtttgttgacaagttagaaagcaatcttaaagccataaatgaattagtagctgacattaccgagctgtttgttaccgctggtgtggagaattttgaaaaactgccagacgatatagaatcctgtgcccaatttgccaagttgtttaatacctttaaccagcacctggaagcggctaaagtacaaggcttccattgggaacagtcgatctattcctttactgaaaataatgcagaacatgaagtaacgctggctatagacgaacaaacttacctgagtctggtcctgcgctataaagaattaacagctaaaggtgagcacgatggtgcaggtggtggcgatgtgccttttgatatcagtggttatttaactgaaatagataccggcaaaatcgatgccgactatatgaatagccgattcgataaatatttaaaagagctgaacaaacaccaggaccctgcaagcattgaatccacattaaatgaactgcacaagtcgtttgcaacactcacccaaattgagcagaaatacgccaaactcttcttgcacgacttgcagcgcggcgatgctcagctcgttgaagaccatactttcagagactacatcaacatctacaaaaataacgctgaaaatgcgcaaataaacgcagttattagcgctcttggtgtagataaagaactactcatagcattaatggttgatagtgttaatgagaaaaatctaaacgattttggtcgcttcgatgcattaaaagaatcggtagacaaggcaaaagcaaaaatctattttgaaaaacaagatggcataaccatacctctatttaagcttaatatacgcattgaacagtttttaaaacagtttatttttgcacaaaaaaatgattttttaagtgacacagatgttgttggtgatgtgaagtga

SEQ ID NO: 109671 - DNA, 1365 bp, Enterobacter aerogenes
atggatatcttagcgttaaaagaattactccgccctgtggtgggaaacttgaaagatcactgcactaacgaaaaaatccctgatctctgtcgtcacttgggtctacctgtgcccaaagaagaaggatccaagcgcgagcgcttgcatggagcctttgatttactcgatgacgcagatatgccggagtttgcaagagcgcttttggcgcagaaggttttcaatcccagcatacgcaacaatatccaggacctcctatgggcggacgagcccatcatcgatatacccaagcgtcatcgtcgtgaactggcagaagctctgcaaccatttgaattatttggccactgggaaaatttcaagcgtttattaaatgatctgtttgtttttccgttggatttaagtgaaatgttttcgattcatgagacagggattcttggcgaaattcaccgacattttgtacgaaatcctgaagacggtgacgtggcatggttatttgaaaaactacaggttgtcgaactatcagctccacgtttccgtaggtggctcgaaggtttagtctctgcggacgtgcagatcagtatcgaaaggcagttagcaaaagttgaggccgttaataaagttttaagaacctgtggagctgagcttatccatagctctgatgctgaaggctatccggttttcagcctgatatcgttgcggacatttcgggggcgccctaagaacattatttttgcctctctcaccaaacccgatattcgcttgagtgactctcttaataacgaaattgaaattctttcaaaccccaatcaggttttgatctatgatcgtccattaagtaccgagggattgagttggcgtgaactgcaggcatggtgggcagattttatttgcgaagagaatagcgaagaggcaaaaatttcgctttatcgacgattgcagcaaagtttgcctaattcgtctccgccccagaaaaaatttttcaaggaattctttcgacaatataggtcagcaatttatgacttacctgcattgctaccagaagtttggctgcactgggatcccaaaaccgtatctgagagaggcgctggagcattactcaatcatcggatggattttcttttgctaatgcctgatggcggtagggttgtgatcgaaatcgatggcattcaacattactcagatgaaaaaggtagggcaagtaagagtaagtatgcagatttggttgcagctgatcgtagcttaaaattggcaggttatgatatttatcgttttgcaggtgtcgaacttcatcacgacgatgcttcatacaaaataaagtacttttttgatgctttatttaaatatcatgggataaaaataaaattttag

SEQ ID NO: 109672 - DNA, 840 bp, Enterobacter aerogenes
atggttacaatgaatgctggacaaccgtactcagcttggctcaaaaaagctgaacatagcataaccacttctgacggcaatgaggtagaggtatacgagctcgaaatcgatcttgaagcagggcttgtactatccgcatgggccaaacatttccgtgagcattactgtcttgatagccaaattgatcgcctgcgcagagggactaacaaatcgcgagccgagtatttgagagacttggtgtttcctgatgagtctgaagattttggcccagcaacgcgctccggtgattttgctgaaatccttatcgcggatctacttgaaagccattttggtttttgggttccacgtacccgatatgacaacaaaatggttcgcaacgagtccccaaagggaacagatgtcttagcgtttaagtttgatggcataggcccatcacggccatctacaaaagatatcttgatttcttttgagtcgaaagcacaactcagtggtaagaaagcaaagcctagattgcaagacgccgttatcgactcgataaaggatgtgtatagaatttcagaatcccttaatgcgatgaagcgccgtttaattgatcgtcaagatgaagaaggtgcagatcgcgtggaacgctttcaagaagggttggatgtcccttatgtacgaatgacaggggcggcggctgttttttgttcaagtctttatgatccggttcatatatctaaaactacagactgcacttcgcatgaaaatattaaaaaccttatgttggttgtgatacatgctaaatcgcttatgaaatttgttcacgctctctattggagggcagaaaatgaagcctaa

SEQ ID NO: 109673 - DNA, 3186 bp, Enterobacter aerogenes
atgaagcctaaaaaacgtgctcgatatgcggcggcagttacgctatcaaaaggaaaaatgtttgagtatggagttcctgaaggagaccatatagagcttcctgatgatctcaatttggagatgcagtttccattagctgttggtactgtcggtgactttgcgtccgaagtggtggctaagaccatcggcaattcgattgaagcacaatcccaaaccccactggatgaggttattttttcggctcaagtccttcaagcttttgacgattccctgcttaacaaagaactctccttcaatcttcgcatacttgccgctgctggtttctatcttggcgatgtacccggaaatgctgcagtccaattatctaaactgagccaactagattttcctaagcacgatactttagctattgcagttaaaactgcgatggatcggccttgggagcataccaacgagacactagagtcttcacgtgcaaaagatattttggatgttttgagccaacacttcagaaatggcctgaatggccgacagaaagccaatgatgctattaaatcattgcgcgaatgggcctatagccatgcgtctgcacatgacctacttatggccgatttgctcggagcgattagtgccactcgcatcgctaattctgcttggacattacttccacgctatagcaacctcccgcaagaaaagtgggatacatatttatcgcgttctatgtcaattaaggaaatgtggccatctcagcgcttgctaggagaggctggattgtataaagggacatcaggtgttgttcagatgccgacgagcgccgggaaatctagagctaccgagcttattattcggtcggcatttctttctgctcgtacgaaattggctttagttattgcccccttccgcgcactatgccaagagatagcaaacgatcttgaaaaggcattcaaggatgatggctatgacgtcaatcaacccagtgacgcgttgcaaccagatgtcgagttcgatttttctaacttatcagattttctcgatttggaatctggaatatttgactcagaggtcgaatcgaagccacaagtcattattcttaccccggaaaagcttctttacatacttcgacaagagccagacattgttcagaaagctggattggtagtttatgacgaagggcatcagtttgacacaggcagccggggtgtaacttatgaactgctgttaacatccattaagcgaatgctacacgaaaatgcccagagcgtgttgatttcagcagtaattcagaatgctgcttctgttgctgcatggctattaaatgacggttcaaaggttgtctccagtagagccttacaggctagtagactcattgcctttgccagccttccgaaaggtaaagatggtcaacttcagttcaatgtggcctctgatagcgatcagaaattctttgtcccgcgagttattgtttcagaaaaaatgcctcgattacctaaggaaagaaaggatcgttttttccctactcaggagagtggctccatagcgttatatcttagtttacgtctgctgaaaaatggtggggttgctattttcacaggaagaaagtcttctgctgcaaaaattgttcgtgaggccgccgaagatatttttcgtcgtggaatttcacttgagccaccttctgcccatagtgaccctaatgagattcgtcgctttgtttatctcttcgaacgtaattttggtgctaatgcatatttgacacaagcagctgctttaggcatttttgctcatcacggcaacactccccaaggtgttcgtctggctattgagtatgctatgaggcaaagccttattcgattgatcatctgcacctcgacgcttgcacagggtgttaaccttccgattcgatacctacttgtaacaagcgcaatgcaggggcgtgaatcgatcaaagtacgcgacttccataatctcatgggacgcgctggacgtgccggaatgtacggtgagggtactgttattttcactgacccccgtctctatgacgagcgtttcgcaaagacgtaccgttggcaagaaacgatcaatctaatcaatcctgatagtgctgagccaactggaagtacattgctttctcttttcgatcctctgcgaaatgacctcggaacagttattctaagctctccaagctctgctgaagtagccacttacattgtcaatgactgggaagctcttttaaagtgggtagagagcgttcctatcaatattcctaaacagaacttttcggtcgcttcactaatcgaacaacttaaatccaagaaaaagataattgaagctgttgaaagcttcttaatgacatatcgtagtgatgttcagcccgaaacttttgtggacaactctcgagaattggttactgaaacacttgcctactcgcttgccactgaagagcaaaaaatactcctgacagatatcttcgagtctgtggcgcgaaggatcgaactttttgttccagatacagcgatccagaagcgtttcgggcggactttgttaggtattgatcaagcgttggcaatcgaatcatgggtcactacaaatgcaaacgcactcgagggagcaacctctgccgatcacctgtttgatatgctatggccgcttttagtactcttatctaatgaaaaacggttgagcgacatagttcctaatggggcacttaagaaattagcattggggtggctggctggagattcgtttgcagctctcgttcaacggcttgacaaattgggtgcatcctatccctatggtgcgaaccaaagaaaatttgatcttgatgtggttgtagacctgtgtgaacaaacatttggctttgagtttgcgctgttgctcgcagcggtaaaggaatcctttctcgcgttctcttcagaacaggcgggtgaggtttttagagaatatgttgatcttcttcagaagcgattgaaatatggacttccgaatcagagttgcattgccttttttgaagcgggatttgctgaacgcgtaattgcccagtgtcttgcagaaggaacgactcaaggtgctattcaagttagttttgacgcccgacacatgattcgacaaaacccagagagatttgaagtaatgctacaaggcttcccatcttatttttttgatgtatttaaaacgatcacttcaccttga

SEQ ID NO: 109674 - DNA, 600 bp, Enterobacter aerogenes
atgcaacttcaaggggagttttattacacgttaaattttgaacccttgttttaccctaacattaaagaggaggacggtataagatatgtgacatcaccagtcgtgaccaagctctttgcattacttagttttatttatatccgtatgcacagtttgcttgactacataacaaaactagctatagaaattgaaaatttaaaaacacagttctctacttatgttaaattgacagccaaaaactctcaatatggcgacaaaaagaaagtgagcttaaataattatgaaggatctttatttgagcaatgtccatttattaatgaaatagaatgtgttcgaaaccatatcatacatgatggtcttttagacgatatgccaaaagcatatagagttatcctgaacaatgcatgcattgaaaaatatttgcttttccctgaccaaacatcagaaggacgttttgagtcgtataaaagtcgaaatttattttatagtggtgatactaaaataaatcatcgactcccagaaatcaccaaccaatttcaaaagcgacttttgcttacgttaaaaatactacttgacaaattgaatgataagcaaagttag

SEQ ID NO: 109675 - DNA, 264 bp, Enterobacter aerogenes
atgggcttctttatttcagggagctttaggctccaaccaagcggtaacgtcaccggcaccgttgataaagtcaaaaaggatgaacgactgttccagtctcatgcaagaattaattacttgatatccagcatgaaaaataaaactcaccggcattaccatttgccactacatctatatatctcatgcgtatacttgtattcattattattccccatggtcaaatactatcactcctttgtatattacaatggtttaatgcaataa

SEQ ID NO: 109676 - DNA, 153 bp, Enterobacter aerogenes
atgatattaaatcgtaaagaaaaaataataagtagaggtttaggtatgtggcactattcttatacaaagtgtatcgttttatatactttttctcattttatttttcatgtatttaccttaaaatatcaaaatcatttcaataaaaacaagtga

SEQ ID NO: 109677 - DNA, 1359 bp, Enterobacter aerogenes
atgagatttattgaatcaataaatgaaagaattaaaaaaacaaatgatttaattaagtcagatgtaataatgacagatgaaatattaggcccggacaaaaacctaccttatattttaaagagcttcatatattcaaacgaaaaattcaatttttctttaattaatgatgtggaaaattctttttttgggattgaactttttaaattcatcaaagaggatcgtggtatcgaaaaggacttatttggacgatgggatttcaggacatcattatatcataacttcaattatcaccttatgggtttagattatcgcattgaggtttccaggaaagaatcggtaatacaaaatgatagtatcttaaacgatttaagacaactaggccttaaggatggtgtagtcattgatttagaatttttcgagtttcctcaatgggataagcaatttgatgtttcaagaaaaataagccaaattgactttaatgaaataaatcacacagagttgcgtgactattttaaagataattttctacatgtagaaaaagaaaaaattcatctaaaaataataaaatgcaaccaagtaaatggcaaaaaaatttatttgccattatatgttggtgtaggaaccaatgagccttttgggttggcaataaaaaaagatggggataaatcacgttggtataaactatctctcgattctgatgctccgtatattgaagaaggtaaaataaaaatattaagttgcaataatagcactataaataacatacttgtagattcaaatttgatagataatgacaattcgtggaatcaaaaatcaaaaaccatgattatgacagcaataaataaaaaccaccaaaatacagaagagggtaataacaatttactaaagggctatgttaagttcaactataaatcaacaaataatgatattgtcattggaaaaccgatttcaagtttagaaccatactatgataaaaaaaatgttgtacgtatggacatatggaaagaatatattaatgggaaagacttttttttagaactaaatgaattgctagaaaagtctcaagaagaatatgagattttttttgagcttttcaattgtccatataagattatatctgagattgggacgaaaaaggttgttgaattaatcggacgaaaatacaaaaaaatactaaaaactcaagatttaaaaatgctaccaaattgcattgagcatggcaatataaatacagttgccggtgacttatatatgttaggtatcgactccaacagaaatagagtatcctcccttttaatccagttattgatattaacagggcgatttgaacaacatttagatggcaatttcaaagtttaa

SEQ ID NO: 109678 - DNA, 168 bp, Enterobacter aerogenes
atggatatttatattggcaattatcgtttctcaacttatttttctactttggccgcaatggaagctaatagcttgatgaatacagctgtggccgtgtctgcttttcatttaagcgatgcacttacacgtataagatttcaggaggaagtaaaaaactttgcgcactaa

SEQ ID NO: 109679 - DNA, 1770 bp, Enterobacter aerogenes
atgagaggatttctgggaagtaaaaaatctttttatgaaaaattaaaacccatctcaaacattcctagcatagatcttgatgctttatcacatgaatataatgaattattaaagcataacaacaatgaatgcccagtaataactctaccaataaaagattttttgtccgcactggaatatgatttattagcaactccaattattgaccttagcaatagttatctttctgaaaatataaagaaattacaaaatcttgactgggtgaaaataggaaaagaattataccttaaagatagtacttgcccattctgtcaggaaaaaacaattaacgaaaattttacaaaagctattgaatcaatttttgatgaaagctacagcagtaaaaccgagcagataaacaccatacaaaaaaaactaattaataacatgggagaacatttacaacaactggaacaagaattaatgctgtgttccattttaaatgaagaggagaaaacaaagtctatcacacacattaaattactaagaaataatttagatagcaacatatcattaatcaatgataaagttaaaaatccatccatagctattacattaaatttcgatgaagaaatttataaacgactttccggtgaaatctcacaatacaacacgagaataaatgatataaataataaagcaaaaaacttcaaacgcagtgaggctatgatccaagggaaattatggtcaggtataaaagatctttgccgtactgactttgagacattaaaaaagagtgtacttgaaaacaaaaaattgattgaagttgcggacaaagaaatagaagaaataacaaatcaaggcaaagaaaacaatataaaaatacaagaattacgcacaagcatttctaatatagacttaacaatcgattcaattaacaagagacttgaaaaccttggcatcgataatttcaacatagtaaaacattcaaaaagtgaagataaatacgttatttctcgttctgatagccaatcaacagaaagcgtttaccattctctaagtgagggtgaaaagacccttattacatttctttattttattgaattttgtaagggtaagacagataaatctgacaacgacaatagggagccacttattgtaattgatgatccaatatctagcctttcccaaaactatatttatgatattgcatcaatgatacactttgatatatttgaacccccaacacctaaaaaagtaattattctaactcacaatttatacttctttcatgagttagtgaaacttgcaccaaaaagcaaaaaagataaaattttcaaaagagattatagtctaggtcgagttagcaaaaacatacacagcatttatactgaaattgataagagcagcttacaaaatgaatatcaatctttatggcagatattaaaagatgcgcaagatggtaaaatcaataaaataatcattccaaatattatgagaaacattctcgaatactattttgcatttgtccataaaacagatgcgctgcaaacagaattaataaacttagcaaaagatgaaaataatgagagtttcagagcattttatcgttttataaatagaggctcacattcagatgcagtaaatatctccgacatgggtgatatttcaccagaaaaatatatggagcaactcaaaaaaatattttcaaagacgggagatgaaaaacactacttaaaaatgatggaagagtatgaaactgacgaagaagatgaggttgctaccgcttag

SEQ ID NO: 109680 - DNA, 1680 bp, Enterobacter aerogenes
atgagaaaacaagatataaccctcatatcacaacataactatcctctcccctcttatgaaagggatatttatttatcagttagcaatgactctgattttttcataacgaaattggatcaagtaacatcagtcctaaaattggaagcaaagataaactgggataataaagataaaaaaaatagtttcttaacagaccatgaatcaaaaacatcaaattacgtacacatggtttttactggtaacgaaagcaaactcaatgagtttttagctctcataaataacaataaccttagaataaatctatcgcaattacaaagccgttatgacctcgaattcacatcgcaaattaatgatgaggaaacctaccgctggctttcaaccactcatgaatcggagtatctcagttttttaaaaacaattaaagatgcagcaacctcaattaatatttttaaaaacatcagaaagaacaagatctttattaaatacaacctccaaaaatatctagtcgataacagcgccaccaattatgcatataccaaagggtataacataatactatccagattaatgggtccagtttatgaaatggaaaggactgatgaaatgtttctaccatctacttcaaaacccattagaattagattcactaacaatttgaatatcgaaaatcctatacatgctataataggtaaaaatggcagcggaaaaacatatcacattaaaaaatttctcacacaatactttaagcgtcttggacaccatatatattcatcaagcgaaatattcagcagagtaatattaatatctaatactgtagatgataatggttatacaccttcaagaatctcaagaaataaaagtaaccgttctaattatcattttatatctaacacaagtttaaagcactataataatattaattctggtggaagcaaaataaccatcgatgattgcgttgaaaacattattttcagagaggtcactagatctggggtttttgacaaggctattattgctgatgaaatcataaagacccttaatttgaatgtgaacataataataaaaagcattcatgatttccaactggtccacagcatcactgatgcactgaatgtgattaaaaatgaaggaatctctcacatttcaagctcattaagtatttctgatgtacttcttgaaataacttttttcagtgggattgaaaagaccaacttgagctctggtcaaaacacattcctaattaagaccctcagcattttaatgacaattgagacgaacagcttagtcataattgaagagccagaaaatttccttcatcccagcctgttaattaagcttatgactgtattaaaaaaaatactaatgaaaacaaattcatgctgcctcatttcaacacattcaccattggttctcagagaactacctaaagagcaagtgacaatatttaatagacataacaatgtgacgtctcacagaacaccagaaatagaaacctttggctctgatgcaactgaactatatcatgaatcattttccgaactggaaaccagtgcagcatacagagatacaattagtgaaatagcaagatcagaagattcagttgaagttttattacaaaaatactcccacctcccctcaaaccttctcacaaagataattaacgaatggagaaggaaatga

SEQ ID NO: 109681 - DNA, 861 bp, Enterobacter aerogenes
atgaaaaaactgacgacccctataaaagtaaatagcatcagcatcaatataacgtctactctcgatgctatttttagctcttgtactcgcgatggagtgagggagctaagagcttttcgggatgattggcttttagaattaaataattacctcattgaaatgggatcatccaaaagactaatcaccaacaatcataaatcgttcgaaaagcataagaatatattgatatggctttatgaaaatccgttagcctcaagaaaaacattatacataaaagaacttagggatgcttatattgaagaaggtataacttgcccttattgtgggattgggaccgcaacaacccttgaccactattattgtaaatccaccctcccgcaattttccattctaaaagaaaatctaatcccatgctgtggtgagtgcaacaaaacaaaaggcaccttaaagcccaagaaaaaatggaaaagagttttcaatccctactttgatgacttttcggggaagataaatgcgcctccaattgtaattcactttaaagaaaaaggtgatggagttttatttcacatcaccccaaacccaatgttatcaagaatagataagatgcatatcaattttcatatctctaagttaggtataaagaaaaaacataaagaaaaaatcatcacacatttcaaaatagagtccaatgcactcaaaacacaaaaagaattagtagcgagcggtgatcttacatcaaatggctttagtagactcatccaacgacgcttagatttaggtgaaacaattggatatgattggagcattattattttatattctcttttccattttaaggataatcattggtgctatgtataa

SEQ ID NO: 109682 - DNA, 438 bp, Enterobacter aerogenes
atgtcaaagaacctcaatttattcaataagcaagcagccggaattttcgcactactatgggagaacttccctgtcaagcaaataattacgtataaaaaatttggtgcggaactaccaaaaaattattgggataatattaactcccctgaagcaaaaaaggcaatcacgctgcaaagtgtggttgatggcaccttttctttccttggtgaaaatggttacataaaatatcaaactgcattaccagaaggttttagagatgttcgccttactgaaaaagcgctcacagtattaaacaaaaaaatcgaagcacttgatacccatgagacaatgggcgataaaattttgagtgctgtaaaggatagaacccctagtattattgctggagcagtagccaatttacttacactcggtattaagcttgcaacatcaatgaattaa

SEQ ID NO: 109683 - DNA, 474 bp, Enterobacter aerogenes
atgcgtttatctcatgccgccctagcggtcgttatgctggcttcagcctccgttgcacaggctatccccaatatgtggagcagcggcttcgctcagggggtgaccgaatacatcatcaccagtccggagaaagtggtctttaatcttaactgcactaccagccccgatgagcagaatgtgttgcagcacagcgtatacctgaccctgcccgacggtaccttgctgaattctcatgatgacggaaccgacatcaccatggtgatggatgacagccagtatccgttaccgtcatccctgggctggcgaaacggtgataatgcctgggtgtcatttattgacgcactggggcaggcagcaaatttcgatgtttatgtcagcgataaaaaagtaggcactttcagtccgggtctgaagaatacgcaaaaagagctgtctgacctcagtgagtgccggactacacactacagcgattaa

SEQ ID NO: 109684 - DNA, 465 bp, Enterobacter aerogenes
atgaaagtgaggtttgcagttcttgcactggtcttcagcgtcagtctcagtaccgcggcccgggaacgagccgatattccggcgaacactatctggtcgtttaaggaccctggtggtcgggttttatgggatgtctgtggcggaaaacaaagctcctgcaccatcgtgttggcggcaacgaacagagtagccatcgttaatcgtaaatccactaacggctgcgccctgggggatttttacgtggtgggcaaacccgaaaaagcctggaaccagtacgacacggggacctgcagcagcaatgcttacttcagtcaggggaccatgaacaacgggcagtaccggactatcgatgtccgtctcaacggggaactggtaaaacgattcccggtggaatactggtcgatggtgaaatccttttcgggtagcaaccggccaaaatggaaggacaagacgacagacagataa

SEQ ID NO: 109685 - DNA, 1785 bp, Enterobacter aerogenes
atgtatttatcaaaactcggaatccgcaactttagaaattttgaggcggctgatattcccctagcaggtaatgttgtgttattgggggaaaatcgtgtcggtaaaagtaatctgcttttcgcaattcgactggttattgatcctactctgcctgattcagccaggcagcttaagctgtcagatttctgggatggctgcgaccttgaatcaaaccctcaaattgaggtgcaccttgaattcgccgatttcgacagtgacccttccctctcagctctgttgaccgattttcgcatcgcagaggatcctaccgtagcaaggttgagctacatttttcgtaaaaaggaagaagtcgatggggctccacgttcgggtgaggactgtgagtttattgtttttggcggaggtcaggaatcgcgagccattcctggacgcgtcaggcggcggatctccattgatatgctggacgcgttacgcgatgcagaagcacaacttgcttcctggcgaaactctccgctacgccccttattggaagatgcattctcttcactgagccgagccgatttggatcgcgtagcaactgagcttcaggcagcaacggaaaccatggagaagttcccatcaattaaggatctcgaagattctcttcgtggtggcattcttgacctggctggaactgctcacgatttagatgcccgcctccgttttgcgcctgctgaccctctcagattaatgcgttctatctctatgttcattgatgatggaaagagaggcattattgaagcgagcctaggttctgcgaacgtggctctgatatcactcaagctagcagagtttgcatggcgacgtgaaaagaatgaacgtaatttctccctgctttgtattgaagaacccgaagcacaccttcatccacagcttcagcgcgctgtttttgacaaactcttcaataatgccgacaaagatcagtctttgattgtaacgagccattctcccactctggcaaccattgctcctcttcgttctgttgttcgcatttgcagggatcctgaagggcgatctcgagctttttccctagccgatctgccagtaaccagtgaagaactcgacgacattgaacgatatttaacagcaaccagatcggagctgctttttgctaacggggtaatatttgttgaaggcgatgctgaggaggttttacttccaggtttcgcacaggccatggggatcaatctcgaccagctagggatcacggtatgtaacgtagcgggagttaattttgaaccatacgtgaagctggcagccagcctcggactacctttttccgtcgtaaccgactgggacccactagatggtacgaaacaaccgatgggtaaaacccgttcaattggtatctggcaagcatatagtgatgtatcggaaaaaccgggaaaattaaccccagaaaatattaattggttcaataacagttcttatgaagtctgtaagcctgtatttgaaaggattggcatttttttaaacgatcagacatttgaagtcgctgtagccaatacggcaggcctcaaagaagcgctgcttgatatcctcgatgaacagggatttggtgagttacgttcatcaaggattgcttcatggcgtgccggtatagctccagacccgacgcaacttctcgcgatgatatctgacataggtaaaggacggttggctgccaagctgaagcaaaaagcacctgggcttgcgccgccggagtatattgcttcagctattcaatatgtggtgtcgaatgtctga

SEQ ID NO: 109686 - DNA, 1782 bp, Enterobacter aerogenes
atgtctgaccgccgcgcactttcagaggctctgaatgagctattgccgaacagagagcagtacgctgcggccacataccccggccactgcgtagttattgctgggccaggcagcgggaaaaccaaaacacttacgactgccatggcacgtgccctgattgaagaggtcgctgacccccgaggcgtggcctgtattacttacaacaatgaatgcgcttctgaacttgaaggacgtcttgcatgctttaaggtcagtggcgatgagcggaactttattggcaccgtgcatagctttgcattaaatcaggttttaatcccctactcacgatgtataccgggtttgctgccggatgattttcgtgtggcgaccagagatgagagtcgcgcggctgttgaagtggcttaccaggctagattcggttctgtcggagatcctcatgcacggtggaaatttgcagaagagaaacgacgccgggatgtgaaccgactcctaccggcttggcggaataacaatccggagctggcagattttattgaaggttatgaggcagaacttcggcgcttaggactgattgactttgatgatatgccactcatcgcttttcgtattattagcgagcatgaatgggtacgtaatgctatccggtcgcgctatcctgttttgtttgtagatgaatatcaggatcttgggcacgctcttcatgagctggttctgctactgtgctttaacggcggaatacgattatttgcggtcggtgatgcagatcagtccatttacggatttaatggtgcaaatccagggctactggatagtcttgtttcacgggcagatgtaagaccgttccgtcttcgcttcaactatcgatctggcgcgaaaattatcagggcatcactaggggcgctgggagaagaccgcgattatgttggccccgatggtaatccagagggagagttaggattccatgggattaatggcgattatgacgcacaggcgcattttatcgctcatgatctaattccttcgttgtttgaaagagggtttcatcctgaacgcatcggggttctttaccgggcagcctggcttggcgataaagttgcggatgagttcaaggccagaaatattgccataatacgtgctgacagtaatgctctcattaagcgcaattctcgtcttgcccgtttcatcgaagcctgcagtcagtgggtaactgggggatggaaagaagcctctccactatttaacctcttactgggtcaggcgctctttcttgtttatggccgccgcgcaagccgtgctgaagaacaattactgaccgtacagctcatcacttttttacgaaacggaattgataaagcggaaagtgctcacgagtggctgagacgtttaaatgatgaactcatcaccggctggatggctatctcacagaacactcagcaggaatgggatgtcatctctgagttactgaaacgaaccgatcccctcaagggactggatgtggctctggatatattcgctgggaaagtagaaggaactggacgcatcacccttagcactcttcatagtgcaaaaggccgagaatttgatgtagccataatgtttggggtaaataaatatgacttcccgagtaagcgagatctaacttcagataatacccttcgcgaggcccgtcgcctcttttatgtaggcgttactcgtccccgaaaagagctgcacatggtttatgaaaagggtaaacattccccttggattgccgaactgtatcatcgcagccagcagatatag

SEQ ID NO: 109687 - DNA, 2076 bp, Enterobacter aerogenes
atggatcttgtagatagtgtcgaagcaggcaagctgacgatcagtgaattgattgatgcgctggcgaaagataaaaattactcagcttccaagtgggatcagcgataccgtgaatttacgaccttgctacaacaaacctcaacttttgatgagcctgaaacggatgatttagttaagaggctctggtatgaacgtgataacggtattgccagtattcgtcagggcgttccatcattagcagaatatcagcaaagcctcccattgcttagagaactcactgaacgtgttcgtcagcaaccgaatgaagctacctaccaatatgtaggcagtgcgctgcagcaggccaaagagaccggacagcttaagcgcatgtattggagtttaagaaatcgtgtctttgccgcgttctccccagaaaactacaccagtacagtggatgagaatgctttcaataaagcagcagaattcctaaatcaacacttccatctcgatttggtactgaccggaaattggttacagaaaaactatgaattgaaacaagctatacacgcccaatctcctaacacagatccttattacgtgaatatggccatctggcatctctatgaattgctccgtgaacgcgataatgaacaaaagcaggagaaagtagctagcacaacaccctcaacctgcagtgagcccatcgggaacaagaccattccacattcaccaactaacgtaatcttctttggccccccaggcacaggcaagaccttcacgttgcagcaaaaaatgaaagagtacacttctcatgctgttcctgctgatcgtgatgcctggctggattctcgccttgaatcgttgaactggatgcaggttataacgctggtgctgctcgatcttgggaaacgagccaaagttcgccaaatgacggaacacgagtggttccaacgcaaagcgctgctaaatggccgtagtagcaacttttctcaaactgcctgggcgacgttacaatccttcaccattccaggatcaactactgttgcgtacaaaggtcgtcgtgaacctgcgatcttcgacaaaactgccgatagtgaatggtttttggtcgaatcacagttagagcaagtggatgagctacttactctttacgcagaattaaaacaaggcccaaaatctaccgaagccatacagcgttttgcagtggttacgttccaccaatcttacggctatgaagaatttattgagggtatccgcgctcgctctgacgagagtggcaatatatcttatcccattgagccgggtatttttatgcgcctttgccaacgtgctaatgccgatccagcacatcgctacgccattttcattgatgagatcaatcgcggaaacatatccaagatctttggtgaactaatctcactcattgaagtagacaagcgtgcggatatgtccaatgcaatgagcctgcaactgtcttatagcggtgatcactttagcgtacccgccaatgtcgacatcatcggagccatgaatacagcggaccgttctttagctctgatggacacggctttgcgccgtcgttttgactttgtcgagatgatgccagatctctctttactgagtggagctaaggtgaaaggcatagagcttgagtcgttgttagaaaaactcaatagccgcatcgtagcgctttacgaccgtgagcatactctgggacatgcattctttatgccggtaaaaaatgcactcgataccggtgatgaagaagctgcgtttaaacaattgaagatcgtattccagaaaaagatcattcccctgttgcaggaatactttttcgatgactggaacaagatcaggctagtgctggcagataaccagaaacaagatgacagcctgcaattcgtgattgagaaaaccgacgatctcgatacgctttttggtaacaaccatggtttacgacgccatgatcagcaatcgacagcttacgagctcgaagcatttgatcaagaggtctggaatatgccacaggcttatcgttcaatttatcagccacagcagaccactcctgatgagcaggccgtaaaccatgggtga

SEQ ID NO: 109688 - DNA, 1287 bp, Enterobacter aerogenes
atgggtgaagttatctcagtttttgaatatgacctgctggggagtggaaaagcggcttcagttggcgcaaagctggtgcctcaacaggtctttgattatttagaaacacttagcctaacaagtgatcaaggaagccagtttctcaaactcacctctcgttcaggtttcaaattgctgcaggtgcaaaactacgcggggatgctttctacgcctcacggtatccagcttgagatactgcccaagattggtaaaaacctcacggctgcgagtgcgcgagaaacattcattacgatgctaagtcacctgcctgggtttcgacatattcaaacccagcagaccactcttcaggcacaacgcatgcctttgctcgagatttttatcagtcagtttttgcttagcgtcagccaattgcttaaacaaggtttacgctccgactatgtgagcgagcacggtaatctggcttttatgaagggcaagctgatgctctctgcacagctgcgacataacgcggtaaatcgccataagttttgtgtcgattatgatgagtatatgcctgattgtgctgccaatcggctcttacactccgcactggataagttacttagtctgcagctgtcatcagagaatcaacgctggctttacgaactgcgctttgcgtttgacgggattccacttagccgggatatagaaagtgatataaacagcttacgccttgagcgcggtatggctcattacaacgagccaatggcgtgggcgcagttgatcctgagaggaatgagcccgagtgccttgcagggaaataccaaagcgatatccctcttgttccctatggaagcagtgtttgaatccttcgttgcacaaaccttttccgacgaactccctcctcacttcaaagttaaatcgcaagccgccacttattccttggtaaaacatggggcttatgactgctttaaacttcgcccagacttgctgattcaatcacgtcaaccggttcaaaccaaaatggtgatggacacgaaatggaagctggtaaacagcaacgagcaaaaaaaatcactatatggactagcgcaatccgacttctatcaaatgtttgcttacggccaaaaataccttggcggaacaggcgaaatgtacttgatttaccctgcgcatgatgactttagccaaccgataccgcagcactttgctttttcagagactttaaaattatgggttgtgccataccagataacggcaaagcgtggtgagagaatgatgtgggcgagtgatatgttaattacatag

SEQ ID NO: 109689 - DNA, 2592 bp, Enterobacter aerogenes
gtgaataaacaacagcttgcggcgaaaatctgggaatctgccaaccagatgcggtctaaaattgaagccaacgaatacaaagactacatactcggctttatcttctacaagtacctaagcgaccaactggtgcagtttgtcaccagacaggggatgacgcccgaagatatcaaagccctcagtgaagaagactccgacaccgttgaatacgtgcaaagcaacttgggctactttattgcctacgataatctgttttctacatggattaatccaacatccgaatttaacgaatctaatgtacgtgatgcgctttcggcctttagccgtttgatttcgccaacttacaaaaaactgtttgacggtatctttaccaccttagaaacaggtttaagcaaactgggtgaaagtgcgggtaaacgtaccaaagctatcagcgacttactacacctgattaaaagcatccccatgaatggcaatctagggtatgacgtactgggctatatttacgaatacctgattgaaaaatttgccgccaatgctggtaaaaaagcgggggagttttatacgcctcatgaagtttcggtacttatatcgaacatcatcgcacatgagttaaaacacaaagataccattaaaatttacgaccctacttctggctcaggttcattgctgatcaatatcggtgaagcattcgagaaatacgcgaaaaataaagactgcatcacctattacgctcaagagttaaaagctaacacctacaacctaacccgtatgaacctcatcatgcgcggaattaaagccagcaacattaaaacccgtaatggcgacaccctggaagaggattggccgtattttgatgacagcgatcctcaaggctcatactacgccttacatgtcgatgccgtggtgtccaaccctccttactcacaaaattgggaccccagctttaaagacagcgatccacgctattcacggtttggtctggcacctaaaaccaaagcagattatgcttttttactgcacgacctctatcacctaaagcccgatggcattatggctatcgtgctacctcatggtgtcttgttccgtggtggtgaagaaggtgaaattcgcaagcagctcattgaacagaatcatattgatgccattattggtttaccggccaatatcttttttggcaccggcattcctacggtgattttgatactcaagcaaaaacgccaaaataccgatgtattggtggtcgatgcctccaaacactttatgaaagaaggcaaaaacaacaaactgcaggccagtgatatcaagcgcattactgatgcggtgattaaccgcgaaagtatcgaaaagttctcgcaactggtgagcaaagaaaccctgcgcgacaatggttacaatctcaacataccgcgctatgtggattcttcagcggcggcagaaagctgggatttacacgcgaccatgctcggcggtattcccaatagcgaaattgccgagttacgcaatttttggcaagtgtttccggaattgcacagtactctgtttacgccaaaatctgccgcttacagtgaactggccattgccaaacaagacgtcaacgctagcatcagcgggcatccgcaagtgttagagtttatcagtgcctacaaccaggcctttaatggatttgatgatcacctaaacgctgagttaatacaaaactggcaaagcgtaaagcgtaaccagcaagaagcagcattgagtgctgagctatttgcccgtttagcacctattggtttaatcgacaaataccaagcctaccaatttctaaataaccaatggcaactcatcagcgccgatttagaaatgatgcaaaccgaaggttttactgccactaaacaagttgaccccaacattgttataaagaaaaaaaacggccaggacattgaagtgcaagacggctggaaaggccatatcttgccctttgatttagtgcaacagatttacttaaatgatgacttacaagccctggccgctaacgaaagccgtctggcagaaatcgccagcacgctggaagaaatgttagaatctctgagcgaagaagaaaaagaacaagatacggtcaaagagagcaaagacggctttgccagtgccgaattaagcaaggccgccaaagtcttcctgaaagaacaaaaagacagcaaagttaaatttgcagaagaaagctatgaagccaaaatcattcgtgcgaacaaattaatcgatgaagaaaaaaacctgaaaaaaacggtcaaaaatgccaccactgccctgcacttaaaaaccaaaacgactatcgaagctttaaccgatgaacaggtgaacaacttgctgcacctgaaatggattgcgccattaagcgctgaactcgccgccatgccagacgccgttattagccaacttactagccaagtgcaagctcttgctgataaatacgccgtcacctattcacaagtctcccatgcgataaaaaccaccgagcaagaactggcggaaatgatgggcgagctcactggcaatgagtttgatatccagagcttggctgaactaaccggtttactgaagggtgaataa

SEQ ID NO: 109690 - DNA, 1578 bp, Enterobacter aerogenes; identical to SEQ ID NO: 91429

SEQ ID NO: 109691 - DNA, 612 bp, Enterobacter aerogenes; identical to SEQ ID NO: 94343

SEQ ID NO: 109692 - DNA, 600 bp, Enterobacter aerogenes; identical to SEQ ID NO: 94786

SEQ ID NO: 109693 - DNA, 189 bp, Enterobacter aerogenes
atgccatctccaatcatgaagtattttgcgtatcagcatctcccagcgcacctgcaggaagtgagtaagccaattggcgatcttgcgacgctgatggatgaatcgctgccggacagcgctgaaaagtcagtaggcctccgcaagttgctcgaagccaaagatgcgctggtgcgcgcgaagctgggttaa

SEQ ID NO: 109694 - DNA, 210 bp, Enterobacter aerogenes
atgactgcattaatttctgaagtgttcggacgcatcaacgaagaagggactgttgacatcctgtatgttgaagacgggtaccccgtaacccggcttgatgccagcaacgtctaccctgtaaattctagcctgagcgttagttatgaccacgctgaaggcataaagctgacacaggaagatgcacgtctcatcggtatcgatatcgaataa

SEQ ID NO: 109695 - DNA, 351 bp, Enterobacter aerogenes
atgtctcgtgaaatttcccgtaatccctcttttactccttctcccaaactaagggagcatcttaatagccaccatgagggagtaactgaacgcttgaataatatgtttgaccgttacgagcatctgactcgtagtagtgccatagctctcgagcctgatgaaaaacaagtgctgctgaatgttctctccggttcttacgtagatccatccttcattgaatatttagcgcaagaagtcgttgattccgatgactacatggagaataacccggcagcaaaatcattgtatgagaaatgcaaaaatgcttcatacgctgaattgctctcaatcatcgagcgtctgggaaaataa

SEQ ID NO: 109696 - DNA, 1077 bp, Enterobacter aerogenes
atgagcaaggttggtgatcatttctttgaattccctgcatcacgtggaactcagggcggttcgattgtcctgatgctgacagttcctgctcggacattaactcgagtgcttgccagcgataattatggggagactcttgaacgctctcagcgagaactgaacccaaccagggcgaaaaagttttatcagtatcttgttgaggcatacgagaaaaaagagccattcatcattccaccgttggtaggtaattgcgactcgtatgttgaattcgaagagtttggaaacactaacgtgggggtagcccgtttcccaatggatgcagagattaaactgtttgatggtcagcatcgcgcagcaggtattgcgcagtattgccgaaccattgatgagccgatccatgttccgatgatgcttactctccagttgccactgaagacgcgacagcagtttttctcggacattaacaacaatgtttcgaagccatctgcggctatcaacatggcctataacgggcgtgataagaacgcgcaggagatggttaattttatcagcgcacacgatgtcttttctgaagtcaccgattttgagcacaacgtcgttcccgctaaaagcgataaatgggtaagttttaaagcccttagtgatgctactgcgaaattctctggttcctgctcccaagacgatctggagggtttgtggaatgcgtggctaatgctaaccgggttagatgatattcgccggggtacgaaccaggctgagtacaaacgcgagtatatccagttccacgcagtaatgattaatgccttcggctatgcagtgcagaggctaagcgaaggtcggggagttcgcggtgtcactctgatgattgaagacctggtaatgaataccggcattgctgatcgcgaagattttttcctcatttcatcgtgggatggtgtttgcgctagctgcgagaaatccagaccaacggtcattgctaatgtctccgcacagaaagcagcggctttgcgtctgatggatgccatcgtgaaccagaacctgtctgtgacaaatggtaaggatgccaaccatgactga

SEQ ID NO: 109697 - DNA, 603 bp, Enterobacter aerogenes
atgactgatatcacccgactgttagccagcctcaggcgccgctcagcccacgtaaaagagtttggtgacgacattacgtttgtaaagcttgaagacctcgacgcactgatagaggcgctggagcgcaaggaagagcagcgcgctaactggttccagatggcacataaattaggggaagacttggatacggcagagaagcgcaacgccgagctggagtccttccgcactgcctacatggaatggagcgacaaaaccgactgggtgcagggagataagcgctttgatgtgctgattccttggggcaaacatcgtgctgatgtcctgaaagcgtatatagagcgtctggagctgcgcatcgccgaactggaagaaagccacgctcaggccatccagtctcgcgaccattacaaacgcatatcagaggaaggcctgaagaaactggcggagtcccgcaccgtcaccgtgaagctgcctaagcgctctgttggtgaagtaatgcatatgagcggatttagccgcgactacgccgagggttggtgctcaggcaatgataacgccattcatgaaatgcgtgccgctggcatcaaggtggaggctgagtga

SEQ ID NO: 109698 - DNA, 720 bp, Enterobacter aerogenes
atggttaaggttgttacagattggaacatttgcgtagctcaatctgacatgatcacctacaacttcccggtaggagaatataagcgtaaggctcatcttatcgctgattttgagcgtgttattgaacagcttaatgaaatggctttttgtcctatagaaactggtgaggccttatctgtatgcgattctaacgatacgcagattaataacgtttcaactactgaagaggctgtacaaatggttaatgttcttatcgctactaatgctacctttcgtgatgttcctgataatggcgtattctcacaagctggtacatcaccgcttagcctctattcttatttctggaaaactccagaaggtgaagcggctaatactgtagagtctaccgctttatctatgaatctattgcctgtgcaattcaatccagatgatcgggttcaagtgtggggagtggctaatacatgggaaagtgtaaatgatcttatctctgctcatgtgttagctagtcgccgtgtctatattcagaatgaaacagatgctgagcgcttagcggcctttgctttgtctctgcctcaagctgatttagctagcttcttacgcatgattcaaactcattgcaccgaagagttcactagtgaagtgttagccgcttttcatgcctctgtagagccagagatacaggaacggttaaacagcttattgcacacagcacaggcttaa

SEQ ID NO: 109699 - DNA, 927 bp, Enterobacter aerogenes
atggtagatgtaaaagcaatctttgaacgtgttggtgttgaactggatgaagggatttatggtatgtcaccttcaccgcttccacgtatgaagcagttagtaaaactcatgccagcggtagaagatggtgaatgcaccttagcagatatcaacatctatcttaatgatatccggtctgctcgtattgaagcagatgctaacagtaagatggctagtgaaaagactattcgcaagtgctggaacctgcttaaagaagctaagcaaaagtatccacatcttgagaaatatcctttagctcaggctgcatatctgatccacaaaggggagacggttaagccagcacctaaagctgtgccagtggttaacgctgtaccagagcaaatcaaagctaactcagacaactacgttagccttgtgaacaatggcgtagttaatgggaagcgtcttatcaatgagactgattttaatatccttgagcatatcaaggctacagatccagcgtattacaatacggtagctgttctaatcactgaagatctgagagctaaggcagaggctaagttagaagagtggctcaaggaacaggcagagcgtaagcgtgaagagctttatgctcagatgggtatcgtgttagagccgttgccagtggttcaggctgataaccctgctgaacttccagcggctgaacagacagcgccagcttttacacctgctgagccaaaggctaagaaggggaaagaatcagatgctgattttctggatcgagtgaaagctctgatctgtgagaacaaggatctgaacaatgatgactatcagcgccttttagccctgaagagtaagaacaatgctgtagcggctgaactagtggatctttgggaaacgtccccagagacttcaccagaagccccacaaggcgataaaaagtag

SEQ ID NO: 109700 - DNA, 2916 bp, Enterobacter aerogenes
atggcctttaatccgccgctgggatcgaccaacgccgatgtttttatgggcaacgttcaacgcctggatgaacttgttaatggtcctgctgctgatgttcccgatcgcgcaggcgacccgctatattcctggcgtctaatccgtcagagcctgattcctcttagccgccagtacatgacacttgcagacgcacaggaggatattgccaatattcctgatggctcagcgacctacgtgcgcagtgctgacgggagttcacttgcggatgaatatatcaacaacagcggaacgctggaggcaaccgggcgtaaaatgccgtcacaaagtggtattgccacggcgattaattatttactgagtggtatttatccatctgacgtatcctcttcatgggaaattactaagaattttgtcattttcagggatggcacttttgctgctaatgacgcatgggatggctattttgttccctgcaaagaaggcgatcaggctgattattttggtgttatcaacacagtaacagctggagaaaaaaccgcctggctgattcagtgcgacaataacaaaaactacgttaaggttttggcggaaaccgtttcgacaggtgttgcaactgagcagggaactgtacacggcgtggcaactcaggacgggtatatttatgttcgcgtgcgtaatagtgtaaacccgaactggaatatcaactttctcaaaaagcatttgattaccactgatgactatttgaacggcatttctcaacttaaccagggactttggccggaaagtgcatcatctgtctgggaaattacccgccagtttgttttgttttctggcggtctttccggctcttatcctgaatgggatgcgtattacattccttgcagcaaaggggaccaggctgaatattctggcattatagatctggcaaccgcagggaccgttacggcatggctgattcagtgcgataccgacaaaaagtacgtgtctgatttagcggtcaatgtcactactggtgatgcaacaaggcagggcacggttagaggaacggctatccaggatggttatatttatgttcgggtaaaaaatagcgggaatgctgggtggtatatcaatttcatgaagaagttcttagttgcttcttctgatgttggtattgctggcggggttgctgaatatgacgttttaaaagctattggggataatgggcagtccattgattacaccaaaaacggcaattactatgtttttggcgtcgtaatgctgtatgacggtacagttaacagcaatgccggtaatgactggctggcgtattacctgccagtatcaaaaggcgatcaagtcacgatgtccggcatctacggttcagcgaccgtcggccagcaaatggcatatttcattcagctggaccatgacaaaaattttgttgcgcccttggatatctatatcagtaccggcgcctctgacgtccagttaacccgcagcgttatcgcttctcaggatggggtgatgtatgtcagggtgcggcgtgtactgggtggcgtcgaacaggcatacagcgttacagcattccagcgcagctacaagctgctgcaggacctgtacgctctgcaaaatcaggttgatgacctgattaataacggggcagtgcagacgcctgtgattggtgcgactctggagcagttacccgtaagactggataacagatttaactacaacgctgccgtatatattcaggataacgttgtcactgccgggaattacactttcgcagttggtacacgtgggaaccgtcatcccatcatcatgcgcaaagagaatctcaccggagtgtggacatatttcgaccttcactatatcaccggaaaccctttagcatcgccaaccgaagaagatagtcataacgtttacagcctgggcgtgacgaaggatggttatctaattgtcagcgggaatatgcacgccaaaccgtgccgggctgttatatccaatgctccatatgacattacggcatggacggcaatcagctataccgcgtcaacggaggtaacttatcctcggtttgttaattacccggacggaaccacgcaggcattctggcgacaggggctatcggctgcaggccagtattattcagccctgtttaatgacacgaccagaacgtttggacctgtattccagattgcagcaacagacctcaacgcgaacgcctatgaacaacgcctcggtgttggccgggatggttcgctgcacttctgctttggcctacgcgtcaatgcgaacacagcagatgctaaccgcggcctgtactatgcgaaatcgatggataagggactgacatggacaaacgctgccggcactgtaaattaccctgcaccactgacagaagccaacagcgagaagatcgctgatatcgctctgtattctggttatgttaatcagaatggcggcgcgtgtgattatgacagccactaccacacttgcctgtggcagactgatgagaataaccatacgcaaatcgctcatatctggtttgacggctcagactggcatgaggaattcgtttcaaagttcacattcaaggtcaatactacaaagcctctactggacggttcccttagtcgtccggccattggctgcaacaagtatgggaaaacatggatattctatcgaacaaccgaaatggggcgcgatggagaaatcagggcgatcgatgtatctgagccaggtaacccggtagagcatattgttaccgggttcaatatggggacactagagctggcggtaaataccaatactctgatgaacgataaccaactgctgatgctggcaactcgcggtgcgattggttatgcggaccctatgtacgctcgatacacagatgagccagggtatctgttagttgcagtgatgccttaa

SEQ ID NO: 109701 - DNA, 960 bp, Enterobacter aerogenes
atgactcctgaaactcttaagagtgaagtttctgatatcttcgataattttactggcatcagaattattttcgttgtgaagattgaggatagttattctttaaaattatcaaaaattgaagcaggggctctgccgaaaattgttgaaggatttaaaagaaaaattgaagaggacatgatagaaaatgatgatttgaccatacctttcctatcaaattttgatgatagaaagaatgctctatttaaatttgattatgaggaacaacctaaagaatttggatttattaaaagtgctacagccataccccctaactcgcaggatttttatgatttgaggaataaatttaccgatgttaaagggataataattcaattacgtggaaataataagtgtctatctttgtataaaaacaaaaccaaccttaccgtgtttgaacaaagccgtaaattattcaatttgatacctgattcggatggttacttgaaagagttaccaaatcaagtatttagattggattacaactacgaccttgctctcctggataatgattttttaataaaaaaccagaaaactctcgaagttacaatgcaattccaccaagttattgaagctcaggcgactgtcgctctggaatctttaaggtcgtcatcattaattgatgacctttctcaccttgaaaaaagtgcaaaagaaatatctttctcaagaaaacttgccaaaatctcaaaacactcccctgttttaggaaaaattgatgtcccagtaatcatccattatgttagtcatcatacatacttatctacagtattaattgttagtgaggatggtagaaagctaattatcaagactaaagagtctcaaaaacatttcataaaattattaagtgatgactatcttgagtctcctctaacgaaaattctctacgactcactagctaaagatgaattaaaaacaaattaa

SEQ ID NO: 109702 - DNA, 591 bp, Enterobacter aerogenes
atgaaaagcaaaggcacatttaataagatagggttgtacatactatctttaatgctgttgtttgtttttattatcatcttaagtgcaaaaattccgatgtgttatggtgactcatgtgaatttataggtttttataaattagccatcgacaatgtaataccaataatatgtttcttttttatttttttagcatgctatttttataagaggcttcgctcattaattaaaataaataatgctgacactgttacaataacatcctgccaaagtgagaattatgaaagtttaacttttttagctacgtatatagttccttttatggggttcagtttcgatgacattcagaaaaatattgcttatcttttgttagtaataatcattggtttaatcttcatcaaaacggacaaatattatgcaaaccctacgctagccctttttggatacaaattatatagagttaatgtttcttatacaggaagcgttgaagttaaaaatgttattgcaatatccactgatattttggctgttaacgacaaggtcttttacagttttttagatgattatgttttcatagcaaggaaaaaacaatga

SEQ ID NO: 109703 - DNA, 351 bp, Enterobacter aerogenes; identical to SEQ ID NO: 76656

SEQ ID NO: 109704 - DNA, 933 bp, Enterobacter aerogenes
atgaaagaagcatcgaagatgtcagtccagatgacgtgtcaggatttgctcaatgtcattggtttgcaggagttgcagtatggtcccattccctccgcctcgcaggatggcctgacgataaaccggtctggactggctcctgcccttgccagcctttcagcgcggcaggcaaaggcgatgggtttactgacgagcggcacctttggcctcacttcttccacctcatcagcgagcgcagacctcagcatgtctttggcgaacaggttgcaagcggtaacgcaaacacatggttcgaccttgtacaagcagatctggaaggagtgggatacgccttcgggcttgtgccgtttacgtcagcgggcatcggtgcaccgcacatcagagagcgggcctattgggtggccaacaccaacagcgaatgcgatgaccggtgcgggtacttccgggcgccaaggcgggatgaacattcagtcagcggtaatgctggcaggctggcagacaccagtggcgaacgacgcaacgggatcaactcattgctacagcgggaagaatcaagacggaacgccaaatgtttgtctgaagctaccgggaactgttctgctgacgggatggccaacaccgagagcagtggacggagagaaaggatcgaggacattgcaggggtgcgaatcggaaatgcagaggaagggacggctggacgatttgccaagcatggcggcatggacaatgagttccggccccttgaggttaacggtttttggcgagatgcggactggcttctttgtcgagatggcaaatggcgtccagttgaacccggcacattcccgctggttgatggggctgccgcacgcatgggacgagtcgagcccggggtggcaagagtggcaagcagcaaccgcgtcggcagactcaaaggctacggcaacgccataa

SEQ ID NO: 109705 - DNA, 552 bp, Enterobacter aerogenes
atgactgatgaattgcagccacactgtgttgaatgcggtgttattcttcccggctctcattcgcacaggaaatactgctcaggtaagtgcaaggcgagatggagaaagaaaaatccatcacccaaaagagatgcaggccatgcctgtagggtttgcggaaagatctttccgatagggcctgggcagcacaacaaatggctctgttctgatgaatgcaggcgagcaagcaatgctttatctgttagatcatttcacgacaggcgccccaaaatggaggcgatttatagagccagaacaaaagcaaaactaccgccagactctcaaaaccgtcggttttaccaattaaatcctgatgcaccaagagtttgtgaggcttgcggagagagtcgcgttacagaaatagctcataaacccggacatgagagattgggccagcgtaggtcttcttcgaatatgaaatggccagaaatggtttgggttctttgtccaacatgtcatcgattgatcgacaggatgcattacccgcctgaggatattgggctaaagctctag

SEQ ID NO: 109706 - DNA, 528 bp, Enterobacter aerogenes
atgacacagcaagaccctatagccaaaagaatagaaaaatctatagaggcattcttcgcaaatgattacgaaacctgcctcctgcaactgtttccagctgtagacaatacatccaaggctagaagacccaaaaaaaaagttggagaacgcataaaatcgttcttagatgaccagcaggacataattacctatatcgcattaagaattgctttcaaaggtggaatcatgatcgatgatcaaactctgtcagatgcaatttaccacatcacaagaacatcaattgttcatgaggggcagcttgatcctcgacttaaatttgtagaggaaggtgaactaagggcttctaaggatttgtgggtcctacctaagaattatatctttgggatgataattgccgttatcacagcaaaggaaaataagcaatcatctcttcctgaagactggaagattgaaatgttcggcaaagagtttatgctcaacaacttttggggggaagaggacaaattccgtcaggaatttcttccataa

SEQ ID NO: 109707 - DNA, 162 bp, Enterobacter aerogenes
atgctcatgcttaaaccaaccagcccaatccagaaccttacctctggcttcctctatcatcagcgcgtgtgcaggagtaagaaaaccaacagtaagcttgatttccatttcatcaagttgttgttgtgtgagcgccaacgcaagttcgttaatttgttctaa

SEQ ID NO: 109708 - DNA, 339 bp, Enterobacter aerogenes
atgaccattggagcagcggttttttcttacgacatgagcaatcaccatgttagtattcatatggttgaacatttcaaaagaattgcttacgaagacccactgattaaacgcatggggttcttggcgctcaatgttgcttacatattcgccaaaacggtaaaggcgactcatatccgtgtaatcaatccactcaaggacgccattccttactacaagtatctgaatttcaaacctattgaagaagagtgtcttgaagcatccatggatgctatcagaaataagctcactcagttgcgagatttaggtggtcagcacgattacgaatgggaagaagtttag

SEQ ID NO: 109709 - DNA, 183 bp, Enterobacter aerogenes
atgagaactgttcaagaaatccttgattccatgagcccagaactacgccgcaatgctgcgaatgctgtggaagaatctcgtatttttgctccagtcttagctcaaatcccttcgccgtctgcgttaaatggtctttatgagcagacaaaaggttgtgcttcatatgatgaagccttcgcctga

SEQ ID NO: 109710 - DNA, 369 bp, Enterobacter aerogenes
atgggcgctaaagttcgcggcatccgccaggctaaggccaatctcgaccgcatcatcaaggacgtacaggggcgcaaggttgtgcgcgcgttgcagtctgcgatgcttattggcagcgcgcaggccgcgctttacaccccgatcgatacatcgacgctcatcaacagccaagccagggaaatcactgttaacggaacgttcgtcaccggtcgtgtaatctattcggccaactatgcggtttatgttcacgacccggcagtgaaacagaacttcacgcgagcaacggcccgcaaggagttcttaacgaagggcttcgaggatacccgcagccagattgacgctgcggttaagaaggagctttcgctatga

SEQ ID NO: 109711 - DNA, 222 bp, Enterobacter aerogenes
atgatttatccattcgatgcatcctatgcacagaaggtgctgagaattcattacgaatatgcggatgtaattgttcgaaaaagagaaaggcttactgccagaactgtcgggctaattgcacatgaccgaatgctgacgacgtctgacaaagacacttctaatgcggtgcatcgtagagagctctcgctaaacactctgcggatagaggccagagcggcttaa

SEQ ID NO: 109712 - DNA, 612 bp, Enterobacter aerogenes
atgatcgatgccggttttttgcgtgcaaaattaggcacaaaggataaaccaatcgatgcagaagttattaagtcatttgtaggaaaaatcaattcaagagccgaactagagggtatgattttgcatcgtgtttactattacgatgcagaaccactaacgggaattcaaaaacatcctataagcggtgagaaaattgacttttctgagacggacgtctcaaaaagaaacaaaataatgctcgacgaattgaagaagacgcctttctttgcagttagacttggagaaacgaacttcagaggttggaaggttgatccttgggctttgaaaagtagtgacacgaagacagcttctattaatgcctataatgttaagcctaacgttcagcaaaaaggtgtggatatgcggattgccttagacatgtcatcaatgtctttaaagaaacaagccgacgtttatgctttagtcactggtgattctgattttgttccgattataaaattcgcaagaaaagaaggccggcaaatcttcctttatacattagggcatggtgtgaaacagacaatgtatgagcactcagatcttttgattcctgaagctatggataagctttaa

SEQ ID NO: 109713 - DNA, 477 bp, Enterobacter aerogenes
atggaaagatttgagcgtaataggcagaggaagattttagaaatcttgttgaaaagttacccagcccgcttgcctattgatgcctggaatgaaatctataccatgtttgatgggcctgaccagcattatgattactatgcaaacttgttatatttagaagaacatgaactcatcaaaagcggaataagaaaggtcagccactcattcaggtacagccagcaagatatatttatcactgcaaagggcatcgacttcatccgtgatgacggcggcctcggcgcaattatcaacgtccataccataaaatttcatcgtgatgctgtcgtagtgctggaagacctcattgcaatttcgaacatgaacgatgagcagaaggaaaaggccaaatcaacacttggtgaactttccactgaagcacttaaagccgtagtacaagccgtgacgaccgcaggattctcagcgctacttggaaagtga

SEQ ID NO: 109714 - DNA, 579 bp, Enterobacter aerogenes
atgaagttggaaaggggaatggatctttctgatggcagggtaatctactggctggaagacttatgtatcaattgtgtcccaagtcaggacaagcgatggctcgtcggccattttgaccgcgcagaatatgaatcgcggtgggagaataccgttgctttactaaaagatgaaaaatttcaattcatggtaaaggttggtcgtgggttctccgtaagggctcggtgtgtttcaatcaatggtacctttgtattcagcgtgcaccgtgatcctgattctaccatggcagcgatcatcgtgatgaatgctcaacaaaaagaagttttcaagttaaccacaactgcacacctaacctcatgttccctgtccgagtttgctgagtatttggcactatccttctatggcgctctaagtgacaaagaaccatacgggaacaaattggagattttcaatctcaaaaccggtgaggttattgcttctatcgacaaagataacgacttaaggcacgcagagattattgttaccgaacccgatggtaatgtcatcgccttttataagggaaagagttttaaagtttgctag

SEQ ID NO: 109715 - DNA, 330 bp, Enterobacter aerogenes
gtgaaaaaggtcttattttcagtcatagctctaatgtcatttagtgcagtttcagcgacaacaataaacattccaactgattcgaaagccaaatacaccatcattgataaaagcttaaatggctccatggcaaccatcacgaccatgagagagggaccgtcagggacatcttactcacagcgcctgtatgactgcacggcgtggaccgtgaagtatcttggtgatggagacacgctggagcagatgaaggcgtccaagcctgacgaaggcatgtcttcaatagttgataattcgatagcatattatataggccaacgggcctgtaaataa

SEQ ID NO: 109716 - DNA, 762 bp, Enterobacter aerogenes
atggatgatcttctggatgctattacagcactgagctctctaatatcatctgaaaaaataagagctatcgctgaaaacatcagccatattgatgataataagtctataaccacattgtataatgtggtcaatactccggtagcagcgacagtagtcaaacaactcattatgacctggcaaaagacgtctgtcagttctagtgagttggctgcgatgctccttactgccagccatgtctattcaaaagccacttcagagcaatgtattgagttagtgtggactggccctacaacaccatttgtttcagcacgtcgtactgaacaggctttgcttcaagttattagtaccgctgagcgcactctgtttataaccagcttcgtcgcttatgatgtttcaacgatagtgaaagccttaaatgctgcaaatgaacgcggggttatgatctcaattttacttgaattatcgcaagagaaaggtggtagtttaaattttgataccattgagaagatgagaatgcaggtcccttcagccaggctttatgtatggcataataaagctaatgaatattatggcggatgtgttcatgcaaaagttgcagttgctgatgtttatgagtgctttatcactagtgcaaatcttactgggcatgctatggaaaaaaatattgaagctggggtgcttatttctggtgggagtattccaaagcaacttaatgagcatcttttttctcttattaaaacaaaagttatctgcttggtttga

SEQ ID NO: 109717 - DNA, 1872 bp, Enterobacter aerogenes
atgaacattaatgagaaaacacccgttggtgaagttcgcccgagccaattgctttggacatatggtcctggagccctcattgatttgcccaacttgtcagttgtaacacttggaatcgacaggtgggaaaagaaccgttgtcagccaattcaggaaacccggttactagctgccgttagaaaggtattaggtgaccaggttgaaagcttgcgaatgccaccatttaaaaaaggcgaagtcgcagatatgttgtctgccgaggcaaatatcggggtacctgttcgtcctttccctagatggttacgatgcgttaaatgtgggttactttcaccttacgatgccgggcttttcgaaataaaaccaaatcaatatagacctgaacgaactcgttttgtccataaagattgccggggttctaagggcgatcaaccagccagggatgctgatgcagtaccagcccgttttcttctggcttgtcgcgatggccatcttgatgattttccgtggcattattttgttcatggaggaaacagttcgtgcaaagggacactgcgattctttgaaagtggtgcttcattgcagacagaaaatctgtgggtaaaatgcgattcttgtgaatcatcaaggagtatggcgcatgcatttggtaaggccggtaaagaaaatcttcctgcatgtagaggacgtcaccctcatctggattactttgatgctgaatgtaacgaagaaccacgtgcagtactgcttggggccacgaatagctggtttcctataacgctttcagcactagtgatcccattatcaaacgttaccccattacatcagatagtcattgattattggaatgatttttcggatgtagaagatcctgctgaacttagagggacactaaaaatcctcaacaaacgtggtgaagctcaaggtattgaaaagtatgctgtagaggaaatatggtctgcaattgaagctcatcgctcacattatggtgaggagtttgtcggcgaggctgatattaaaggtcctgaatgggatgtattgatagaacctaatccccccgcagattaccctcattttatgagtaaaaaagttagtagtccgacgcgttttacgccatatattgagcgagttttactcttagaacggttacgtgaggttaatgctttacttggttttacccgggtcgaagctcctgaagaatctgaggatcccaatgaacgaccgcaaatggccagcctgtcacggagcaaacctgattgggtacctgctaatcaggtccatggtgaagggatattcctgcagttcaatgaacaagctcttgtggcatgggaatctttggacgctgtaaagcaatcggacaaaatactgcgcggtgggcatacaggctggagaaatgctcgtcacttggatccagaagaaggttatcctggtattcgctatgctatgttgcatacactttcacatttactgattcgagaattggctctggaatgtggatataatgccgcgagtattcgggagcgtatctatgcaaatacaaccaatggtattcctcaggcgggtatccttatttataccgctgcagctgactcagacggtactttagggggactggttgatcttggcaaaccagaaaatcttggtcgtttacttgaacaagcactaaatcgctcaaggatctgctcatcagaccctttatgttcagaacatgatccagagaaggatcgctctctgcatggagctgcttgccatgcttgtagcttagttgcagaaacctcttgcgagaaagggaatcgttatttagatagagccctgcttgtaccaacactggaacatgctgaagcagctttcttcaaggatttattaaatggatga

SEQ ID NO: 109718 - DNA, 3996 bp, Enterobacter aerogenes
atgactaatagcccctattccaattcaagcaacgcatggtttgctattgatcgtgacggagataaggattcccacttagccctctatacattgcaactaaaaggtgatcgtgcactcagccaagctgttgtcaacaatgattgggtagtagtcttggatactaaaggccatatcacgcgagttggccgcattctgcgcattcgctctgatctcgaaactactacgctctatttcgatcgtatgtttcgggttgtatcgcctgtttccattggttcgacctcacttacactacctgcaaaaggaagttatggccggcttcagtggaaagaattcattgaaatgctaccaaattcactaaatacaagcattgctgaaataccaacgatcgaagatcaaacttacattcgcgaattactgcaactagcagttatggatgatttactcgggccggcagccggccctaatgagcttatcgtcgatatgggcgtaagggatcgctatcttgttggtaagcttgctccacgtgaagccgccaagcgcagttctgagttttctgtggatccagagaatgctgatgatgatgttggtgaccaaatagttaagtctcagacaacaaaagtggattctccaaaagtgtctggccggggagaacctgatgtcccggaagaaattgatgctgccagcaaccaatcattggtaccaagtagtctgggaatgactttttgtgttgatggcgatattgatcaaatagaactagaagctcgttggggacgttatgagcgtagcaatgaccatgagatttatcgaatccgcaagaacaaggatacaggggtcgaagaacagaccaaagtaaaagtctggcagcgtttccctagtggcgggaagattacattatctctgatagaaggcacgattcctcctcaagttgtagatagtacatgcccagatgttttggtacagggcacaattcgtcacaagaatgaaaatggggatcgcctgatcaccatattccttgtaaataatcaggaagatccaccttctaatcatgacatggcatggattttccaaccagaattgatcgttagaccagtaaaggatgctgctgagaaagcaatattcaggcgtaaacccgttttggattctgatggtatggatcccgaacgtgaagcgctggaaatgatttaccgtaaccatgttgaatttgcagtagggcatggtgttgctgtgcatgctaaacctgcagataacactgaacttgcgactgaaattcgcacgactgttatgccacagtacgaagtccagagaacagagactcctggtcttgatccatcagatcgtccagcgatgcaagaaatggtcaaaagtggtttacttgacatgcagaaactggccactttggaagtggaaccactgatcgatgcattaaatgtactaaccaaggactatctggattggattagtgaacaacgtgccagtgtaggtattaaaattacaggttttgaaacccaatctcagatcgcaatggatcgttgtaaggagatccattctcgcctgcaaaagggtattgatacacttaagcttaatgaaaaagcgctggcagcatttcgtttcgccaacaaagcaatggcaacgcagcgagtacgaagtttatacgcgttggctaaacgccgtggtgaagatacaactattgaaccatttgatattgaaaagaatcgtagctggcgcccttttcagttggcattcttattgctctctataccttcgttggcagacccaaaccattccgatcgcgtgcagcctgtaaatgcctatgctgatcttttatggttccccacgggtggtggtaaaactgaagcttatttaggcgttgcggcttttacaatggccatacgccgcatgcagggtaatttaggggggtatgatagttcgcgcggcttggcggtaataatgcgatacacattgcgcctgctaacattacaacaattccagcgtgcgacagccttaatttgtgctatggaagttttgcggcgagaagcactcaataatggcgacgtgtctctcggattagaaccatttactattggtctttgggttggcaacaaagtaacgcctggttcgactgaagagagtcatcgagctattgaagatgcccgtaatccgggaaaaaaccatgcgggaacggcctcacctgcacaattaactagttgtccatggtgtggttcatcaattatccccggacaggatgttgaagttaaaaaggataaattggggggaaggacgtttgttttttgcggtgataaaaaggggcgttgtgacttttccaaaggaaaatcaagtaaacaagcccatccaggattgccagtattagtagtggatgaagagatctatcatcgccctcccacaatgatgattgctactgtagataagtttgccatgatggcatggcgtggccaggtgagaacacttttcggccgtgtaggattggaatgtgaacgacatggtttgctctggcagggggctagctgcacaggaaatcatcccgcagccaaaggacaaccttcaactaaagttaaggttatcaatccaatacgaccaccggaccttatcattcaggatgaattccacttaattagtggacctttgggcactatggttggattgtatgagactgctgttgatgaattatgtagttggaatcttgacgggaagtcggtcagaccaaagatcattgcttcaactgcaacagtccgtaaagctaaggaacaggtaaataatgtttttatgcgccaagtggcagtatttccaccacatgggatagacgttgaggataattttttctcagtacaacgacctataaaagaaaagtatggacgtcgttatcttggggtatgctcgcctggcagttcaaggcccgcaatgctgatccgtgtttatactgcattcctgaccgcagcacaggaattattcaaccactttggcgagcctgctgacccttatatgacaatggttggctatttcaactcgctacgcgaattaggcgggatgaagcgacttgcagaggatgacgtacaaacacgttcttaccgggtgcgaatgagcatggtggaaagaccggcattggcacaacgtagtataagtaatattcgtgaattaacttcccgagtatccagtcaggatatccctaaatatcttgataatttagaggttaagtttaaatctgactttgatactactactggtaagtatgtgactaaatggcaggagggggatactcgggctattgatatcgtccttgctactaatatgttgtctgttggcgtcgatgttaaccgacttggtcttatggccgtaaatggtcagcctaaaggaacggccgaatatatccaggctaccagtcgtgtagggcgttcatttcccggtttagtttgtaccgtactaacatgggctcgtccaagagacctttctcattacgaaacattcgaacattaccatgccaccttctacaagcatgtagaggcccagtctgttactcctttttctcctcgagcgatggaccgtggtttaacaggtgcgttattaagtcttgttcgtctggaaaacgacgaattcagtccaaacgatggggctggtaagttgaatatgtctaatcaagtcgagatctgtaatgcaatcaaagcgctggcgaatcgtgcaggtaacgttgcagaagataattctcgtaaaaaattggcagagaatgaactgaaagagcgtgctgatgaatgggcaaagaaagcgtctatgggggggcggattctcgcatatgaaaaacgtgggcctgaaatagataagacagttagtttaatagactcaccaggcctgaagccttgggacaactggacagtgcctatgtcaatgcgagaagttgaaccaggtgtgagacttataatgaacaccaaccatatagcggacgatcacaattggaagcctcgtcccgcaactaaggatgaggactga

SEQ ID NO: 109719 - DNA, 4071 bp, Enterobacter aerogenes
atgagtttaaataacattcacgctgaatggctttctctggtagatatttcgggaccttttctcgctatcccggtactaacgcatacatttcctcagggactagaggtgcttagtagcttcaagcgtaggcggctgcgccaagcctatgacgaatggcgggaggcattagaactggaagatcctcagctagaagaattgcactctgcatggatagacgaagtgctgtcacgagtgttggaatttgatgatgatggtaaaggtgatgtgctgaaacgtgcggagtggtgtggaagccacttgaaatcactattgccggaccagggagtggtccaatatcccgatttagcagttgtagatgagcagcaagataataagccattgttactcatacatacctataaaccaaatgtagatctggaatcaacagttaagcaagagggatggataaccactccggcagatcgtatggttcagttatgtcgttcactcgattgtcgcctcggattagtaaccaacggagaacgttggatgctagtagatgctccagttggtgctgtcacttctttctccagttggtatgcgcgtctttggagtttggaaccaatcacactgcaagcgtttgttcatttacttggcattcgccgcttcttcgttgatgaaactgaacagttacctgcattgtttgatgcttcattggagtatcaagatgatgtaactgatgctttaggtgaacaagtttgccgtgctgtagaagtgttaattcaatcgctggacaaagccgatcaggatcgcaatcgtgaattgctgtgcgatgtcagtgaatcagagctttatgaagccgcgttaacagtgatgatgcgtttggtatttttgctctcagctgaagaaagggggctgctgctcttaggtgacgaatgttatgagtctaattacgcgatttccactttgcgtatgcaactacggcaagaaccttcagaaatcctggaaaggcgttgggatgcctggacacgattgctggcaacctttcgtgcggtttattgcggtattgagcatgagaatcttcgtttacctgcattaggaagttcattgtttgatcccgaccatttcccttttctcgaaggaagggctaaagaatccaactggaaaaacgatacagctgtacctttaccaattgataatcgaacagtcctcctattactggaagctattcaggtttttcaggggagaactctttcttaccgcgcattagatgttgagcagattggttatgtttatgaaggtttgctggaacgcactgtcagacgtgcagatgaagttacgttagagctgaatgcgaccagaaaagctcaatctccttggattaccttagctgaactggattcagtctgtatggatggtactgaacagctgatcaagttactacatgaacgctctggtagttcgattagtaaggtacgcaatgatctttctaaaacaattgatgaagatctgattgaacgcctcttgattacctgtcagggtgatatcaagttgcgtgatcgaatcaaaccttatgtccatttgcttcgtacagatccttggggttatccattagtttatccagccggcgcatttatggttattggcagttccaataggcgcgaaacaggtactcattacactcccaagtcgctaactgaagctatcgtggcggagacattgacacccttaacctacttcggccctgtggaaggttctgcatgtaaagaatggactctcaaaactcctgcggaactacttgatctcaagatctgtgatccagctatggggtctggagcctttttagtacaggcttgtcgttggttagccgatcgtctcgtcgaggcttgggctcaagccgaaataaagggaaagattataaatgtagatggaaacgttcttgacgatttgagttccaacgagttaatgccacatgatattgatgcaaggataaatattgcccggtatctgatagcggagcgatgtttatatggcgttgatttgaacccacttgcggtcgaactagccaaactctcaatctggttagtgactctcgccaaaggtcgcccatttggtttcctcgatcatagtctacgttgtggagatagtttacttggaattcatcaagtaaatcagctgatagaattatctgttttaactaacagtgatgaccaagatacattatttagcaaagatatccgtaaagctatttacgacgcgagtaaattgcgtcagcgattacgtgagatgcctataggtgacatccacgatatagaggaaatggagcgcttgaatacggaggcgcataagcggctttataaagcaaaaaaaattgctgatgcgcttgtcggtgagattttttcgacaggagctaatttttcagcgcgagaagcaaggctcaagatgttgtccttgaagttaaaagagtccgttgaagaagatgaaaatatctttatggaaatctcttatcaaggaactgtaaaattacaacaagaacttccatcaggcagaagtaaacggataccaattcattggcctttagagtttcctgaagtatttatacgaacttgttcagggtttgatgcgataattggaaacccaccattcttgggagggcggaaaattactggcgtattcggtaatctatatagagaatatctggttgctaatattgcaaagggggaacgcggttcttccgctgatctagttgcatacttctttttgcgttcattctatttacttcgagactcagggtgcctaggcttaattgcagtaaattctattgctgaaggtgattctcgtcaaattggtttggaacgacttcttcaatctggcgcccaaatattttctgcaaccccaaacgaaccttggcctggaaaagcagctgtagttaccagtagaattcatcttattaaaggtgcattttttggagaaaaactacttaatgggaaaaaagtcgctataatttctgcatttttatcagatcaaaatgaatggagccctaagatcttgaaggaaaatttaggtcaatcatttcaaggatcgattgttttggggatgggatttatacttgatgaaaccaatgctatgcaaatgctggactctgataagtctaattcagaagttatttttccatatatcaatggagatgatctaaattccaatccaacacacaagccaagtaggtgggtaatcaatttttgggattggccagaagagagggctaaaaattttaaatttccttatgcatgggttgagaataaggttaagccggagcgacagcgcctcaaacttgatggaacctatgcattgagaaaaccattacctatacgttggtggcaatatgccgataaacgtcctgcactttaccatgctataggtaaaggtgatttttttgaacgtcatccaaaaaattggtccactgaatcaagggtgttagagaacattatcgctatatcaagacatacaaagttctttaacccggttttgattcctaatacagctattttatctgatgcaactgtagttcttgcctttgacagttttgcttatttggcttggcttaattcttccttggtacaggtctgggttcagaaattagcttcatttataggtctcactattcgcttcactcctagcgattgtttcgatacattgccaaagccgaataacatcaacaatgtagagctcattacactcggtaaagaataccatcagtatagaaaaaaaataatggttaatcgcgacattgggcttactcagttgtataatttatttcatgatcctaatgaacgagattcagaactaaatattctacgtgagaagcaactggaaattgatgttgctattctcaatatctatgggtgggatgatataaatctgagtcatgacttctataatgtagcttacctacctgaaaatgataacaagcgtttcactatctccgagcctgcacgtatcgaggtattgcgacgtttagccgaactgaatcgggagcgatatcaggatgaagtcaatcaagatttacatgcccgtaaatctactagatcatga

SEQ ID NO: 109720 - DNA, 3141 bp, Enterobacter aerogenes
atggatatttcgaatcaaaaaaatcatcctcaacaaattattccagagccagggcaacttgttgaagttcgtcgacgccaatggatcgttgttgaggtttcatcttcccagttaccaccgccttcgtctcagcagcatctcataactctttcatccatagatgaagatggtttaggagaactacttgaagttatctgggaaattgaacctggcgctcaagtaattgaacgagctggtttaccttcgattactggcctggatgactctgacactcttgaggcctttcttgatgcagtgcgttggggagctgtcactaaagctgaccatcgtaacttcttacaagcaccttttcgtagtggcgtaagcattgaagacttccagcttgatccgttggtgcgtgcaattgatatggcccgtgtcaacctgcttatcgccgatgatgttggacttggtaagaccattgaagctgggctaatcatccaggaaatgttacttcggcatcgagctcgcacagttttgattgtttgccctgcgtcgctgcaagagaagtggcgtgttgagatgttagaaaaattcggtcttgaatttcaaatcgtcgacaccgcttatattaagcgattaagacgagaacgtggcattcatgccaatccgtggacatcgcatccacggttaatcacttcaatggattgggccaaaagtggggaaggtttgcgttctatgcgtgacgtccttcccttaaagcctagttatccacgaaagtttgacatgcttgtcattgatgaggcacacaatatagccccagtgggtagagctaactatgcaatggaaagccagcgtactcggtttattcgttcgataagcccacacttccaacaccgtttgtttttgacagcgactccacataatggctataccgagtctttcacttcgttgcttgagttgctggatgatcaacgttttgccagaaatgtacttccagatgagaagttgttgaatcaggtgatgatacgccgcctcaaaagtgatctggtcgattcagagggcaatccactttacgctcaacgtaagctcaaagccttatccgtcgaatattcggctcaagagcgttctatccacaaaaaactggatgaatattgccatagccgggagcaaggggcagagaaagccagcaatacttttgggacgacctttgtcaaccagctacttaaaaaaagacttttttcatcaccagcagcctttgcatctactcttgaaaggcacatatcaactttgatgcatggcaaacggcctaatgataaaaatgccatggctgatcgtatccttcataaagcaatccttcgtctagaagaagattacgccgacgatcaagagatagagaatgcccaatctgaagcggtggaagaagcaacacattacacccaaccgctgacgaatgaacagaaacaaatactcgatgtattgcgtcaatgggcgcaagtagctaagaatcaggtagactctaaagccaggacaatacttgattggattaatacgaatcttaaaacaaataatcagtggaatgagtaccgggtaattctgtttactgaatatcgaacgacacatcaatggatgcatgagattctggccagccacggacttgctggtgagcgcttagctgttttacatggtagcatgccgcaagaagaacgagaaaaagttaaagccgccttccagacatcaccaaaggcttctgctgttcgcatactcctcgcaactgatgccgcctcagaaggtatcgacttgcaaaactattgtaactaccttatccatttagaaattccatataaccctaatgtaatggaacaacgtaacggtcgtatagaccgccacggacaacgccaaaaagaagttgtaatttggcacccagttgatggtgtggataaggtggatgctcgtatcggtggtcacggtgacgatatcctacgagcattacgcaaacttgaatcaatgcgggctgacatgggtagtgtcaatccagtcatcgcacctcaaatgtcaggactgattgaaggcactatcaaagattttgatacccgtctggctgaagccagaattgcaaagacgaaacgttttattagtgttgagcgcgaactaaaagagagaattgcgaagctacatgatcgactcctttcagccagacaggagcttcatctcacacctgagcatatacaaatagccgtcaatacagctctcatgttagctggtcgtacaactcttgaaccttttgagttacacgatgctccctcaggttctgtattcaggatacctgctctctcaggtacatgggcacgttgtcttgaaggacttcgtcatccccatacacaggagattcgtcctgtcacttttgatcactgcgtggcgaaaggacgtgatgatgtcgtactcgtccatttaaatcacctgttagtgcagatgtgtctacgtctattacgagcagaaatatgggcgcgcgatgatataaaaaaactacatcgagttacggtgcgctcagtaccagacatgttacttgaaagccctgcggtcgctgttgtttcacgattggtgattactggaggtaatcaccatcgacttcatgaagaattgacaatagctggtggctatcttggcgacaaaaattttaggcgcgaggatggtgttaataaactacagcaatggtttgagcaggcgaaacctgtgactactgaattttcgcttttggatgcctttcgcatgcgttttgagcgagcacaaaacagtattctccagtccgttgaagctagatcaaaagatcgcctgcaatatctgactaatacccttcagacccgcaaagagcgtgaattgtctgatattaataacatactcaatgaacttgaaataactatcaaatctgagttagctaaagatcaacaacctatgcagttttcattgttttcagaagatgaacgcgctcaaatcaagcgtgataatgcagcgctcgaagcccgtctcgctcgcattcccgcagagcgggaacaggaagtacaaacaatcgaacttcgttataccaacattgatgatcgcacattccctgtcgccgtcatttttctcgtcccagaatctactattcagagaggtgcagcatga

SEQ ID NO: 109721 - DNA, 453 bp, Enterobacter aerogenes
atgagacaagagcgggcggaactggttattgcgttacaaccgcatccgctggggaatgaaattttggtgctgctggagaaaggggcaactcgcatgcttatggccaacaggctcctgcagaaaccgttcaccgccctggcttatacgctggtgagttttatgctgcgtctggcatggctcatcgccatgcttcccttgatctgtctgtgtgttttaatcgggctgatagagggtctggtgcggcgagatctgaggcggtttggctccgggctcgaatccgtttttctccatcgttatatcatcaggtccggcagttccgtcgccacaacgctgtgggtgttttatctggcgcagccgctgtttctgcccgcaatgctggttttactaactgcaggcttatggtttgggataacgatctggatggctgcagggagttttaagcggtggttgtag

SEQ ID NO: 109722 - DNA, 1902 bp, Enterobacter aerogenes
atgaagctaagaataagtaaaatttcattaaaaaacttcaaaagttttaaaaatattactatcaatccaaatcctgatttcaatatcatcattggggaaaatagcgctggaaaatcaactgtttttgaagcaattcatttatgggagaaatgttataagacttatattcttgcttcaagaaaggggttttataaagttaagaagtcaacaaacagatatgtaaattatcaagaactggattttttacggatcacaagtgatgaagatctttttcatgatccaaaagatcccaatctaggtaaatgttctgaaatcactctgaccttaaaaaatgaagaagtggaagataatagttgggaactgggattcaaagtcacatgtccaacatcaatcgaaaatgcctttttccgagttcaaccaatagatgaaaatcagtttactgactttgcggaagcattttgtgaaggaggaaattttttggatgaagctatttttatttaccagacgagaccagtagcaggagtccatcagtttgagccgtactataatgaagctcagattaagagaaaaatccaaaaaggttattcacacgaagtccttagaaacaaaattatcgctaaaaggaagtcaatatcagatttagaatcaagtatttctgaaatacttgagaaagatgtcaagttcactatgccttcggatgccaggaaaaataaagatgaattcattcaacttgatgtttcaatcgatagttcaaaatattatgatcttcaccttcaaggaagtggttttcttcagattgtagaaatactatctactgttgaatttattgaagcccccctcaagttactgcttgtcgacgaacctgattcacacatccatacaaagctgcaacataaccttctcgcccatttaaaaaaaatagatcataatcagttttttatcatcagccataacgatcaattcgtgaccagtgcaggagaaggtgaagtattctttttaaacgaagatgctaaatcaggtggtcacctagaagcaattaacccgaatagctttgatattataaaaaattcactggggggagtaattttatcccttgagaggcttaataatgccaaactaatcgcatttgttgaaggtgaggacgatgaaaaatatctcaaaaaacttaaccttaagattaaagaaattactaacccaaatgggtgtttaaaaaatgtagttttctttccgttacgagggaaagataacattctacaaaaggttgagtacaataaaagaactttaaattctattctaaatggaaaatcatggcatgtcattttcgatcgggatttttcaacaaacactgttgacaatgaccttaaacaaaagctcagtggaaagcgctgtaccccatatagtcatacggggtattgtattgagtcagtattgttttcagatcttaacattcttaaagaatatttttattctctagcaccaagcattaccgaaaatgaattatcaacacacgttgataccttgattaatgaattaagagcttcagtcaatgatattaactccccgctaaacaaagaaatagagattagattcaatggtcaaaaaaataatcggccagaattcgccaatcttaatttcgtagatgttgttagatcatggtgcgaagatgcagtattcaaacctgagcgagtgatgtcaaaacctcttatcaaaaagtttgttactgacctagaaaataaaataggtatatctcttttcttacgtaactcaaatgcagatgaggaaatagcatcaatattattatttaaatactttgactttattcggacaatggatgatttgtatccatcatttcgacacttgatggaacaactagaagtgttacctaggaatcaagtcgaataa

SEQ ID NO: 109723 - DNA, 300 bp, Enterobacter aerogenes
atggtatgtccttccctaaatgacaaactcaaagaagaaagagacttgatctacaaatgcatcgtaaatcatttaggtggaaagcagctaaacgtttttgaaaggctcgacttccttaaagacatgctggatagactactggtcaatatcgaaggctggaggttgaatcacctaaataatctgcaagtttggcgagcagagcactttatatttagctcgctagatgattttgaacaggtaaagagtctaattgatgattgtcctgagttagtcggcggcccccgttccgttgttttgtaa

SEQ ID NO: 109724 - DNA, 483 bp, Enterobacter aerogenes
gtggcgattcacaactcggaaaaaaagaaacggaccaaacaggtattcgcactgaataaacagacccgttgcgttataaaaatgagtgtaaatgacgctacggtacacagtcgtttttacaatcttcataaccaacccaaaatcgtcagtctggaatcgttactttgcctctacgaaggtagcggcgcaacagttatacgtaagctaatttccactaagaacatacgggggttgtccgaagaagaaaggagtgcgctcgcccggttcgtcaccgtgcagcgcctacgtgctagtggtgaatacgagaaccagaggcacatggctcagggactgtaccacgtgatcaagtccataggcattatcagtgaagaagtcgagaactattttagcgatgagaactttgagcagaataccaagggcaactttctgaatcagattgccgactgcgattttgaaatgtcaattatcttgggcaaagaatag

SEQ ID NO: 109725 - DNA, 909 bp, Enterobacter aerogenes
atgcatattgacccacatagcgacccaaaagcatgggaatcgtacttcaaaagcattatttggctacattacaagccagcgaactgttgtgacttacctgattcacatggtggggattttggtcttgaatgctacactctcaatggacatgtttttcagtgttatttgcctgagcagtcgagcgatatcgacaaactttataaagcacaacaaaagaaaatatataatgatattcaaaaattctctaaagataatgtgaaacagttagaggaactatttggaacattaaaaataagtcgctggattctggcaaccccttataataaatcagcaaaactaagtcaatactgcacaaaaaaatcccttaaggttcgtcagttaggtctttcgtatgttgctgatgactttcaaattattgtccaaaccgagaatagttattcacaggaagcttttttacttcgcagagactcctaccaattaagtctgaacttagatgatacaactgtcgaaggagctatggaattcattagtgataatagctcttttctcgaaaaattgaatttaaaattacctaagattcacgacactatatcaagacaagaacagattagaaacttcctaattcaaaaatttcttgattatcaaaatctattagacactttaaagaaaaactgggtcgatatttatgaaattgtttataaatgtattcaacagagagaaagtaatttagttggtatgtttatgcttgctccatctaatgcccaaccctcaagaatcatgacagatcaaattgaatcgttgaaaaaatgtattgaagaagaagtgcctacttttaaacaagcggacctcgagaaaattacctggggtgtaatttccgactggttgatacgatgcccattagacttttaa

SEQ ID NO: 109726 - DNA, 570 bp, Enterobacter aerogenes; identical to SEQ ID NO: 91951

SEQ ID NO: 109727 - DNA, 1356 bp, Enterobacter aerogenes
atgtctgatgaaccaatgaatgttattgtttcagttatcattcctgtttataatgctgcgaagtatatttccggaactcttgatacaattttatcgcaatctttaaaagatattgaaattattattgttaatgataactcaactgataatacgttggatgttataacccaaatagccagtgaggattcacgagtacggattataaataatccacttaatgtggggggaggtgaatcccgtaatattggtctacgcaaagctattggtgagtatgttattttccttgatgatgatgattatgtcactaacgatatgttaaagattatgtctgaccaggctacaactctcaaaagtgatgttgtcatctgccgctgtcagtcagttgatttaagcacgaatacttattctccgatgcctttgtccatacgtgaggatttattgcctaagaaaaatgttttctcctcgcaggaaatagctaacgatttttttagagccttcatctggtggccatgggataaactattcaggcgtgaagctatcttagcaatgggcctggagtttcaagcattgagaacaacaaacgatctgtatttcgtatgttgttttatattattagcggatcggatatcactggttgatgagatcttgatctctcatacaattaaccgcgcagagtcgctttcatcaaccagggagaactcttggcattgtgctctggacgctctaactgcattacatacttttatagaaagtaataatttacttactaccaggggtagggatttcaataattatgctgttgtttttcttgagtggaatttaaatacagtttcggggccatcatttaatttactcttaaatgatgtgaaatctttcataatttcattgaatatcgatgaagatggcttttacgatgactttattaaatctgcataccttcgcataattaatcaatcggcagaagaatacattttttcgttgaaggataggattctgcatgaacttgaacaatcgcacatgagtgcagaaaatttgcagctcaaagttgataaactagaacatttagctttaaataaagataatgagattaatgacctcaacttgcagattgcagaactttctgaaagtataaaaatacaaactattaatatcacgcaacttgaacagttgaatttgagtttagacagaaatatttataacctacagcaaactttggcgaaagctgagagtaacttaaaagaaacaactctgcaaatcaaattgctaaggtcatcactatcttggaaaataaccaaaccttttagaaatggtaaaactattttaaaaaaaattgctctcaatttgtatcgaaagtaa

SEQ ID NO: 109728 - DNA, 1161 bp, Enterobacter aerogenes
  misc_feature (1133)..(1142): n is a, c, g, or t
atgaacaacaatttaacaggaattattactccttctacaaagttattacttacactctcgatgattaaaggagtaggtccagttctacttaaaaaagcagcatctttattttcattttcaaatatctcatcaatagatgaactgtcaagaactgatgcgaaattttcgtcgttagtcaacaatgcagaaaattttttgttggcaaaggaaaaggctgaaaagcaaattgaatatgcggataaatattctttccgaataatatctgtattggatgatgattatccaaagttattgtccgaaacaaaggatgatccttgcttattgtatgttcagggacgtttatttaattatcctgataattccgttgctatcatcggaactagagagccgactcatcatggaaagctgattacggaaaggataacgaaattctttgtagaaaagaattggagtattgtgagtggattagcattaggctgcgatggcattgcccatgaaactgcattaaattgtaatgggcatactattgctgtcttggctcatggtttacaaactatcgcaccttctcgccataaaaaattggcctatagaatagttgaagaaggaggtgcgttgataactgaatatccatttggacaagacatacaaagacaacaatacgtaaagcgagatcgcattcaggcaggcatggctcgtggcgttgttatgattcaatctgacataaaggggggaagcttacatgcctcaagagcatctttggattataaccgatggcttgcagtaccatatccaacaaaagatgatgtcgaaagaaatgaacctaaaactcaagctaacttactaatagcaaatgggtccgattctgataaagtcaaaattcttaattttgataaaactaagttggaaaatattatcgttttgaatggcaaaaatgattataataaattaatagatggtttttatatggaaagaaattccagaaatgctccatctgtaattgatatgtttgattctcttattaaaccagatgaatctcatttcgaagcagataatggttacgttttacaggaaagtaaccggcccgataataagacaatgatcctcgatatagcatcagatatttccattcaaannnnnnnnnntctcagaataactctgtag

SEQ ID NO: 109729 - DNA, 1242 bp, Enterobacter aerogenes
atgtttgaattgtgtatttttgatttagataatactttgatacatacagatgatttgaaagaaataagagagagccttgctaataatgatgatgagggtattctagacgatttatcagaagcccttgaggaagatggggatagaatcatttattctcaggatcttatacaagaagtaatttctagacatcctaacatcttcttggttatttttactaggtcaccacgtagttataccgaagcagttttagcgtgggcataccctgagatagaatgggatatgctggtttgctacgaggatgtgaggccaacgaaaccatatgggaaaggaattcattatgctatggaggaatttgatattgacgatcttgagcgagttataatgattggtgatacagatgtcgatataaaagctgcttacaatgccggttgttttgcagtgcttgataaaagtggttggccatataagtatgcacaaggacattggaatgcactcggtttaattcctgatgcaattataaatagtcctgagataatattagatgttttagatgaaccatgtaaattcttaccaagtttagaatgtttattatcttctgattacatcatttctgaaagatttgacaaacttaatcattttataccaaaagctatcggtggggatacaaccactttccctatatattcagctggtagaaatttttcaaattatgaatcgcttagttacaaaaggtatgaacattcacttactaattcgatagagaataacaaaagctctaccaactttcctgctcagtggatcagtagtctcagagaatttcttcgtactgaatgtgcaggcttttttggggcgacaacgacaataattacctgtgttcctcatcggcctgggcgtgttcctcgcttagagcacctacttaatcaattaatgatttcactagcaaatgatccaattgaacactgtaatgttatactggtaccagatctattagcctaccgtgatggagttcgttcgcagcatggtgagcatttgagccacggtgacagatttatgaacgtcagagatcatttgattactggtaatgtatctaaactggctttggctgataaagtgcttgtagttgacgatgtggtcacaacaggagcatcgttaatatatgcatctaaatatctaaaagatgcaggggctaggaatgttatactatttgctttagctaaaaacataagtgatatcttaagatga

SEQ ID NO: 109730 - DNA, 1986 bp, Enterobacter aerogenes
atgtatttccaaattcgaggtattgtgctttggccgcgaaacaaaaaattcaaacctcgcacgttgcggtttgagcttggtaaggtcaacgtcattagtggggcttcgcgcacgggtaaatcagctgttattcccatcatagattattgtctcggtgccagtacttgctcaattcctgtgaataccattcgtaaatactgtgaatggtttggcattgttgtggcgactgagcagggtgataagctcttggctcgaaaggaaccaggagctcagcgtagcaccaatgatatgttcctgctggaagcaaaggaaataaacaagatcccccaccatctcagtaaaaatactaatgtagtagcagttaagagactacttgatgacctcgccaatttgcctaatcttgacttttctggtggagaagactcctcggggttcgatggtcgtcccgcgttccgagatttagctgcattcacattccagccgcagaatgtagttgccaacccggatgttttattttttaaggctaacacttacgagcaccgagagaagttaaggaagatcttcccctatatacttggcgcaatcacatcggctttgatggccaagcagttcgagttgaacagaactcgccagcttctacgccgcaaagagcgagaactcagaaatgctcaggatgtctccgcacggtggcttgccgatttaagatctaagtacagtgaagcacaggagcttggtttggttcccaagctggagggagagatatcacgaaaccaaatgattgaacatcttgaagaaataatcgtccgcacagacctaactttggctgttagcacattaacgatttcggatgcgctacgcgagttgaataatctagaaagtgaagagcgggttgtttcgcgcgaactcactacgcttcgtcatcgtctggaagaaatgaatcgaatgcgagcgggtgttcagcagtatcattcggcattatcaatgcagagagatcgtcttcaactgtcgagttggctggtttcacattcaagcgatgagatggactgccccatgtgcggcagccacactgactcagcgaaacgaaaattgcaggttctggctcagcgactggaagaggtagagagtgctgcgaatgtcgacaaggacaaggaagtgccagcagccttcgatcgggagttgcagcgcgtcacattagaagttgatagcaccaccgaacgattgagatccgtgcaggtccgtaaaagagcgttgacgagtagatcgaaggaagccagtgatcagcaattttctgtgaaacgtaccgagcgttttataggcaacatcgaatcgtcattggatctacatcgtaaactgggcaatgacagtgaacttgtcgaagaagtgcgagtgctcaggcaagctgtgcaggcattagaagttgaactccacgagcaagatattgaaactcggaaacataaagcactgcgagttatcaacaaaaatgctgggaaacttctaccctttcttgatgtagagaatccccatgatccgatctcattagaaatcaatgatttaactattaaagttcatggagttgagcgcgatgattatctttcagagataggaagtggctcgaattggctttcctatcacttggcagtgttgctctcacttcatcaattctttctaggacaattaggcagtcctgtaccgggatttcttgtgcttgatcaacctagccaagtttacttccccaagcccatatcacatcaggatatggttttagaagaagaacccaaggttcgtgatgaagacgtggaagctatacgcaaggctttcgaagttatgggcagtgttgtacttcaggggaatggaaatcttcaacttttagtcctggatcatgcatcgcgcgcagtgtggggaaatattgatggggttgttggcctgcccgagtggcgtgatggagtcaagcttgttccaatggaatggctttctgagaataaatga

SEQ ID NO: 109731 - DNA, 495 bp, Enterobacter aerogenes
atgctggctagagaagtccaaaatgttcagaatcctgcattaggtgctacgctcgtctggcgtttttgttgtggctatgtcgaggctcatcgtgtagatgcttcaccgcctcttcctttactctttttcgtgctccctatcattttgcatcaagcaacctcagagtttgtgaagcgcacttataaaagctcgggtctacgggcatttgcggcaaagtttggggattcctcagtgtccaaacaggatttattgcttcaagtgcaagaacgatcaattcgttggcgtaagctcagcttgcaatccattgaacttgcagtcgctggacaactgatcattctccaagatacaggcgaggtaattccactttcgagaaccaaggcaaggggtttgcccgacgaggtgaagcaacttatagatttggcggaaaaacttggtgcatggtgcggtgaacttaccatgcatgaggttttgacaacgttgaaggtgaaactctaa

SEQ ID NO: 109732 - DNA, 1212 bp, Enterobacter aerogenes
atggtgacttcaagagtgaaagggcaacctcagaccaggcgtaagactgaggttccaggtcaggcactaggctacagccttcaattcacacgactcacgcacatgctgcttcaagcgccggagggaagtgtgtgcagtttagaacttcttgatgatgtagctcaagaggatggaattggcggtgttaaactcgttcaaagtaaaagtgccctaactgctaatcctgtggctgatcgagcaaaatcactttggaaaacgctctcaaattgggttgagcttattgcatcaccagggttcgatgtgaataaagccattttcgagctttatgtttctcgccctgttgaagggccaatcgttaatagtttcgccaacgcgaacactaaggaaagcgctcgggtagctatcgcgcaagctcgcactgcattatggggtaatgctcctcactttgattttaaaaaagatatctcagcagaaattgcgccatatattgaaaaagtatttacagcagaccctgatcttgtagaacgactcatttgcaattttcaattgacgcatggtagtggcagtcctcaggcagaccttgaggcgctagttcgaagtcatccagtatccccatctaaggtctgcgatatttgcaatcacctttgcgggcaggtcaagcgtcatattgatatgctattagaggccggtcagccagcagttattgcacgtaatgactttcatatctggtatacatcgtttgtccaaaaaattgatcgacaaacggtcctttcgagtcgcgctcaggcaccatcagaggaggtctcacgagaatatcttcccgataacttcgttaaacaaatggacatcatagggttgtcatacgaggagatgctcggagctgtcaacgattatttaatggcctcatttgaccgcaccgattgggctgtaagaggtgaagttgatgaaagttcttttgacgatcttgatgagattctgacacgctcatggaagaataaacagagagcctgtcggttgaatcatagagaaaagtctgaacaggaccaaggccaaattttatattcagactgcatgcagtttgctgtgccggttcagtcaatgtcacctcctggatacttcatcccaggctgtttccacatgctggccgatgatttcgtcgtaggatggcatcctggctatgagactaagctaaagggcaagaaggtggcgtaa

SEQ ID NO: 109733 - DNA, 129 bp, Enterobacter aerogenes
atgagcctgactcacgatattattactctgattttattccagtggtgccaggagaaaagtacgcgtttaattctgattcgcggtttgtcgcattctacgcacagaacaaagcatttattaatgcaatag

SEQ ID NO: 109734 - DNA, 240 bp, Enterobacter aerogenes
atgcgcgactttgagctaatggttgagcaaataaaaggtgaagttgagaagtatggggaggatatcgccccagtcatgctggcgcgtgttgcacggttttacgctccatactatttcgacaaagacgatgtctacaagcgaaggcttttaagccaatttgctgaattagaaaggcgaataggcttcacagaaaacttcgattggttatcttcactggaaaaatacaaaaacggcctctga

SEQ ID NO: 109735 - DNA, 1248 bp, Enterobacter aerogenes
atgagtaacgccgttcaactgccgatccccgcgaagcttgcgccactgttcactgcggtgaataagcgttaccggtgctctcatggtggacgtggtagcgccaagacgcgcacatttgctctgatgacagccgtaaaggcgtatcagtcgatgatgaacggtgaaagcggggtggtgctttgcgcgcgtgagttcatgaactcgctggaagagtcgagcatgcaggaggtgaaacaggcgatcctgtctgttccctggctggcttccaactttgacatcggcgagaagtacatccgcacaatcgacaagagcgttaactatgtgttctgcggtctacggcataaccttgacagcatcaagtcgaaagcgcgcattctgctgtgctgggtggacgaggctgaatcagtcagcgaaatagcctggcagaagctgagtcctactgtgcgtgaagagggatcggagatttgggtgacgtggaacccggagcgtgatggaagcgccacggataagcgtttccgcaaagaagccggcgacgactgcatcaccgttgagatgaattacacggataacccgtggtttccggacgtgcttgaaggtgagcgacagaacgatcagcgccgcctcgacccggcaacatacgcctgggtgtgggaaggagcttacctcgaaaactccgataagcaggttctgtccggtaaataccggatctctgaattctcggacaatctctggaaagaggccgaccgcttgttcttcggtgccgacttcggtttcgctaaagaccctaacacgctagtgcgttcgttcatcctgcataacaggctgtacgtcgaatatgaagcatacggccagcagaccgaactcgaccacatgcctgagctatacgacacgatacccggtgcgcgtgactggcccatcaaggccgattctgcgcgtcctgagactatcagctatctaaagcggcaggggttcaacatctcagctgccgagaaatggcagggtagcgttgaggacgggatcgcacatcttcgtggcttcgacgaaatcattatccatcctcgctgcaagaacgtagcgcgcgaggcccgcatgtggtcgtacaaaacggaccggagcactggtgaggtgttgccgaaactcgccgatggctatgagcattgctgggacggtattcgctacagcctagacggacacattaagcgcaaaggtcagatggtcggtatgatgatcccaaaaagattaagataa

SEQ ID NO: 109736 - DNA, 456 bp, Enterobacter aerogenes
atggcggcactgaaaggtgaggtcaaagccttcatcgttcagtctcttgcctgcttcgataccccatctcaggtggtggagtcggtcaaaaaagaatttggcctgagtatcacacgccagcaggtcgaatcccacgacccgacgaaggcaaacggcagggggctggcgcagaaatgggttgagctatttcacgatacccgaaagcgcttccagaccgaattaagcgacatcccgatcgccaacaaggcatatcgtctccgtgcacttgaccggatgatgactcgcgccgagggaatgaaaaacatggccctggctgcctcgctgatggagcaggctgccaaagaggttggcgacgcgtatagcaacaaacagaaggtcgagcacaccagcccggacggaaccatgacgccacagccgactatcattcagctactccccgttgagccgaaagcatga

SEQ ID NO: 109737 - DNA, 327 bp, Enterobacter aerogenes
atgaaaaacggcatttacaaggttatttttaacagcaatgttaacaaaaatggtaattgtgatggaattgtcaccatcaacgatggccatttgaatggaggagattatgtctgctactacaaaggtgtttttgaaggcaagaacatcaagctgaacgtagttcggcataacccccacgacactacagtgtttaatggcgttgataacgtagtgcttgatctcatagtgaatgagatgacaggaggcggggtattcgatggaaaggttgcaggtaagcctgaactgactatttctggcagcttgcagtttctaagtgagatagcctaa

SEQ ID NO: 109738 - DNA, 315 bp, Enterobacter aerogenes
atgccaaagagcagatcgcactggacgcatcgggagccgcggcagatatcaaagtggctattgcggacgatgattgcgctaatcggcctgtgcctgctggcgcagttaagcggttgcaacaatacgcgaacagtttacgtcaaagtgccgtcagtacctctgccagccagcctgacggctgacaccccgcaaccagcaatccctgaaaatctgacgtggagccacagcctcgatctaaacgtcagtctgctttcagcgctgggccaatgcaatcgtgataaagctgatatcagaaaggcagttgccaagtattaa

SEQ ID NO: 109739 - DNA, 207 bp, Enterobacter aerogenes
atggaacagcgcataaaactcaaagattacgctcagcgctttggtcaaactaaagcagcgcaggatcttggcgtttaccagagcgccatcttcaaagccatcacatcaaagcgggatatcacagttatcgtgcatgccgatggttctgtatcagctgaagaactgaagtcatttccaagtaatcgtcgcgaacctaacgcagcataa

SEQ ID NO: 109740 - DNA, 579 bp, Enterobacter aerogenes
atggcttttactcaattaacaatacgccagataatacaaaaagtaagtgaaggtgaaataagaatccctgcattccaacgagactttgtgtgggaaccagataggattcagtttctaatggatagtatatataaaggttatcctattggcacagtacttttttggcgaagtagagaaaaattgtcatttgatcgtgacttaggtccatttacattacctgaacccaaaaaagaatatcctatcgattatgttttagatggacaacaaagaattacatctatattttcgacatttcagactgagcttcaaaaaaataaagataataagtgggtgccaatatatttcgatttagatgcaccggaacatgctcaggattcacagttcatagccacagatgatgatgatgttccagatacttttatcccattaaatattctttttgatgtagttgagtatggtaaatactctagaaagattaccaacgatatacacataaaaaactggacgaattacaaacaaagtttaaggaagcaagtatcccagtcgaaactgtcgagacggaagagcattcaaaaatag

SEQ ID NO: 109741 - DNA, 501 bp, Enterobacter aerogenes
atgagaacgtacaatcttaaagatggagctataagtatattaaattcggcttttgttctctcaactcatttaagtatattagatccagtggagcaaaagctggtattcaaggttaaaaaaagggctctttttttaattaaaaaaagcattaaaggagattttaaaaacaataaagaaattacaaccctatttagacttctttttggaggaaaaactgccacacttataagtttagaaatgaatctgaaaaaaagctgtcaaagaatagacccatctattacagccacaataaagaaatataaaagcaatgagcttaaattcttactcccctataccacaaaaactagtggctgggttaccagttttttggattttacgatagctaagttagagcaagaaaatgctgataagatagccgagaatttacgcttccttttccctgaaattatatctataatagagcaagcttcttcttcgatagatataggggagtttcactga

SEQ ID NO: 109742 - DNA, 1029 bp, Enterobacter aerogenes
ttgagagttctacacgtctataagacctactatcccgatacctacggcggtattgagcaggtcatttatcagctaagtcaaggctgcgcccgccggggaatcgcagccgatgtttttacttttagcccggacaaagagacaggtcccgtcgactacgaagaccatcgggtcatttataataagcagctttttgaaattgcctccacgccgttttcgttgaaagcgttaaagcgttttaagcagattaaagatgactacgacatcatcaactaccattttccgtttcctttcatggatatgctgcatctctcggcgcggcctgacgccagaacggtggtgacctatcactctgatattgttaaacaaaaaaggttaatgaagttgtaccagccgctacagcagcgattcctcgccagcgtagactgcattgttgcctcgtcgccaaactacgtggcctccagccagaccctgaaaaaatatcaggataaaacggtagtgatcccgtttggtctggagcagcatgacgtgcagcacgatccgcagagggttgcgtactggcgggaaaccgtcggcgataatttcttcctcttcgtcggtgctttccgctactacaaagggctgcacattctgctggatgcagccgagcatagccggctgccggtggtgatcgtcgggggcgggccgctcgaggcggaagtgcgtcgtgaagcgcagcagcgcgggctgagcaatgtggtgtttaccggcatgcttaacgacgaagataaatacattcttttccagctctgtcgtggcgtggtattcccatcgcatctgcgctctgaggcgtttggcattacgttgctggaaggcgcacgttttgccagaccgctgatctcctgtgagatcggcaccgggacctcattcattaaccaggacaaagtgaatggatgcgtgatcccgccgaatgatagtcaggcactggtggaggcgatgaatgagctctggcataacgatgtgattagacttgagataaatgacagggaataa

SEQ ID NO: 109743 - DNA, 915 bp, Enterobacter aerogenes; identical to SEQ ID NO: 5824

SEQ ID NO: 109744 - DNA, 189 bp, Enterobacter aerogenes; identical to SEQ ID NO: 5822

SEQ ID NO: 109745 - DNA, 987 bp, Enterobacter aerogenes; identical to SEQ ID NO: 5820

SEQ ID NO: 109746 - DNA, 582 bp, Enterobacter aerogenes; identical to SEQ ID NO: 5819

SEQ ID NO: 109747 - DNA, 651 bp, Enterobacter aerogenes
gtgtggcatctggttaaaaagctgccgtggcgcggcattctgctggccattcttatcaatgcctttctggtcggcctgtatgccatgggatacagaagtggtcatgactctgcaaagcgtgacggtgataccgcgctcagtcagttgcagtcagcatttgacgcgtacaaaacggagcaggcaacgcttgagaatgctgcgctgcggacctgggccagacggtatcaggagcaggtggccgccgggcagcgggctgaagccagttatcttgagcagattgctcaactggagagccggaataaacaactacaggggcaaattaacgatgtcacacagcgctggattgatgaaaaaggtaagagccatcccattgagtgcgtgtttactcgcggtttcgtgcgccagtacaacgccgcactcggatatgacaacgcatccgtcgacaccggtcattcagactcagttgccgccgctggcacccgctctggcacagcgaccgggcaacctgaaaccactgacacccggttacgcgattcgggtgtctcccagcgtgacgttctcgccaacatcatcgacaacgcaggacaatgtcgtcgctggcggaaccagataaacgcgttactggatgaacgggaaggattacagaaatga

SEQ ID NO: 109748 - DNA, 546 bp, Enterobacter aerogenes; identical to SEQ ID NO: 5812

SEQ ID NO: 109749 - DNA, 225 bp, Enterobacter aerogenes
atggtcctcacctgctggttcgccgcctataagaacccaagcatcctcggcattatcgagtgcatcagcggcccgaccggggcggcgattctactgctgttgccgatgtatgccattcataagttaccggtgctggcgccgtatcgcggcaaagccagcaacgttttcgtcaccctgattgggttaattaccgtatccgccattttttacggcatgttccagtaa

SEQ ID NO: 109750 - DNA, 1236 bp, Enterobacter aerogenes
atgagttatagcaaagatatttccagtcgaatttttaaatcatgtacattaaataaatccacaatcgaaaaaataatattttctcacgatgggttaattggtaatgtcattataatcactgacaatgaatcttttgaaaaaggattagatgatttgtcaaaaaccaatgatggacaatttatttcaaagatatattttagatattacattgaaaaaaccttatttgaatgtggtgatcacccggatgatgatatagatgttcgtgttaaatatttcaaaaacctcattaatagtctaagtttagttaagcaaacagaacatagggttgttaaacaagtatttggtggaaatataaaaaatgggtctcaccctattaatctagggccattttgtttttatgagattcctcgccatgcaagtcatataaaacttccattctcagaccctttctttagtaaacagcaacctacaaaaactgttgttcaattatgtgtgaaatcattagattcctataaagcttcagaaattgcagacacttttttcaatacactagaattgtcattttctttcttattggcgaagaaaggtaaagagttttctataggtgctttcatgtatgagttttctcctaccgaaccaccgattatttatacggaaggctcaatttttggaaggactgaaaataaacacgagcaagatcaaataattgatctggctgatctgactgattattttccagaaaaaaaagcaagctcgatgacaaatttttttaatgtcgttttatctccgggtacccagcttgaaagaaaactttccagagcagttgaatggattggagaggcttatcgcgataaaaacagatcaagtgccttactgaaagtcgtaattgcgcttgaagcacttttcaaagttaatgaacgtagtgttattactgcctctatagtagctagcatggctgaacaatgtgcttatataagtggggaatcagtagatgaatgcttagaaattgaagattacgtcaaagaactatatggattaagatctaaagtagtccatgctgggtctaataaccttggagaaaatgagttgaaaaaggcgttaacatttagccgctccataattttcaaattgatagacttgaaaatcaacgagaaattcgaatcaattgatgaattgcagcctaagatccgggaaagcaaatataaatcatgtccactatggcaaactactaattag

SEQ ID NO: 109751 - DNA, 273 bp, Enterobacter aerogenes
atgggttatccttcgtcggcgactgattacaccgtgagggcgttaaccgtcgatcttatctgcgatgtatcaatgaagaccacgccagatagtactgtgatgatgacttacgacgggaaaatagacttcgcaaaagtaatgggccgttcgctaatcaccagggagggggaagctatcgaaggggaagcacttaacgatattgtggtgtccagtgtagtgaccttcattaccaactgcgcaactcaggtagatgatgatttcccggtaatgtga

SEQ ID NO: 109752 - DNA, 678 bp, Enterobacter aerogenes
atgctgcccagagttatcttatcaattagtttctatttttctttggtgtcatcaagctacgcggatgtaagatttcacagtcactacgtcagatattctcattatgattcatcagaagtaataggtggaattgttcttcttctgttgatatacgcatttataaccatattaaaacttttgaaaacaaaatcctttaaggatggtgaattaaaattcacgcctcaccctgcaatacaacaattgctcctgcctgacgaccagatattaatgataagcacaagtaaagtggtaatgtatattggcgatgagaacaagaatttgctggcaaacaaaacatacagaataaatattacggtaacggctcggcatattatactctgtttatatgattgctataaacctgaacgaacgcttttagaatttgatcatctggtctcgccattcctcatttcatttagattagaagatattagcaaattcaatctcggcagacactcatggctaatggttaatcgcatgttactacgggaaaatgattcccaacacgaggttgaatttacccaaacgcggcgactgcaatttcgctttgactccagtatggacgcaactctgtttcgtctggcgttacaagaaaagagtacgcgcagcagttatttctctggcggcagtaacggctaa

SEQ ID NO: 109753 - DNA, 294 bp, Enterobacter aerogenes
atgccagccgcaaacagtatgacgatgaaacgcgaaaccctgaacctgcgcatcaagcccgccgagcgcgaacttatcgaccgggccgcgaaagccagagggaaaaaccgcacggactttgtgctggaagcagcccgcgctgccgccgaggaagcgctgatcgagcaacgcatcattatggccgatccgcaggcttatcaggaatttctggctcgtctggatcaggctcctgcacctaatgccgcactgcgtaaaaccatgcaaacctctgcgccgtgggagcaggaaaaatga

SEQ ID NO: 109754 - DNA, 489 bp, Enterobacter aerogenes
atgatctccgctcctgagccgcttcacgccgggcatattcttactccgttttgctgcggtgtggattctatggataactggctgaaactgcgggcaatgaagaaccagctttccggcgcgtcccgcacctttgtctgctgtgacgatacgaaggtgatggcgtactattcgctggcttccagtgctgtgacgacaaatactgcgcccggccatttccgtcgcaatatgcctgacccgatcccggttgtggtgctgggccgtctggcggtggataaatcgctacatgggaagggcctcgggcgtgcgctggtgcgcgatgccgggctgcgggtgattcaggtggcggagactatcggcattcgcgggatgctggttcacgccctgtcggatgatgctcgggatttttacctgcgggtggggtttgagccgtcgccgatggatccgatgatgctgatggtgactttgggggatttggtggagagtatttag

SEQ ID NO: 109755 - DNA, 219 bp, Enterobacter aerogenes
atgctgtatcgggttgatgaaatactgggatatttgaatcgttgcgagcgcattacatcaaatcaagctgatccattagagcttctggctaaaagactttctttacgtgggttgatcgttagttctattttcctactgctaatgttactctctcttggaaactatgcattttctgaggaactattcgttctgttgggaaaattttatttatttttatga

SEQ ID NO: 109756 - DNA, 141 bp, Enterobacter aerogenes
atgcccatttataaacaagttgtgaactatgttaagaaacatgtactgtggaaagaggagtatctcgaacgctattatcagctcaaaggtgaatcgattcatgagaatttggatagtatttatcaagctgaaatgatctaa

SEQ ID NO: 109757 - DNA, 249 bp, Enterobacter aerogenes
ttgataaaaatgaaaatttttaagattgaacaagtcaattggggccaaactgtctatatcataaaaatgttttgtaatcttttgcaactgacaagtgcatatttcatcaaaaaaaatcttatcttattgatttacattaacttctataacgacctttctttacttatcctcctccgactatctaccacacactcacttctcagcattgaactcaagcacgtcgtttttccatacccggcagagttgtag

SEQ ID NO: 109758 - DNA, 171 bp, Enterobacter aerogenes
atgtccgatttcgacatggttggccaccgtcaggtggccttttttttgccttgtcgacagccgcaggctctcccttgcgttaaaaaacgctattgtattgatttgatgaatattattaggaataatcactcgccgctttccgggggaggggagatggttaattttatgtga

SEQ ID NO: 109759 - DNA, 423 bp, Enterobacter aerogenes
atgaatctgcaagacttgataaaacttcaaattaaaaaagcaagtgacattttctcaacaaaagatgaagtcgagaatgagattagaggggtttttaatactataaaggatttaatgccagataaaataaattttaattacaaagcggaaattgataattttagtgatactgtaactacagtatacgccactaacccaacaatagagcaccagtatattgtactaacatatgattttgataatagaacaatttttcctgttaagattacactttctgatggacaaaattggatgtgtcaaactttagacgatgttaaaggtacattacatgatattttatctcaagacgattttatgataagacttatatcaatttcaaaagaaaaaggtaatttaattgattttgacgacataccattctga

SEQ ID NO: 109760 - DNA, 894 bp, Enterobacter aerogenes
atgatagaaaaatgtattaatatttcatggtggaataccgggcttgtacctcctgttgctgcaaaaataaaccagcctatatgccaagatctggcggaaaaaattgaaaaagtgataattcatatcatggaaaaaaaccctattgatatgatgattcttgctgaggtctcaaataattgtactgattttctagagaatcttgctcaacaaacagagatggaacttgtacgatgtacagagaaaataggaaagataaactttgatatcgctatattatttgagaaaacaaaactcaagtttattgaaagagaatatatagcccccaaatcagcatcaggcacaacaataaaatgtggtaccaggcttctttttagagaggaatttaattttgaacatataaatatttttgcatctcactggccgagtcgattatatagaacggaaaaaagagttattcttggacaaaaattaagacagcatatagattttatattaaacaaggattcaaaatatataatattatgcggagattataatgaccaaccattcggacagtctattgttgaaggtatagaagccacaaaagatattgatattgtcaagaaaaaaccaaatatgctttataatccattttggagacatcttgataaaaaaaccgatgaacatattttttgtggtagttattatcataaaaacaatgatactgataaatggtttacttttgaccaaatgatgttctcatctgcatttgttaaaaataaaataggttggtccctagaacggaatagttcatgttttcatgtggacaatatatccgagaaagatattggttttgattttttaaattttttcgatcatataccgatctatagtaaaataatgataattgaataa

SEQ ID NO: 109761 - DNA, 870 bp, Enterobacter aerogenes
atgccaaatacccaagccagtctgcgtttgcttttcccgcagtggcaaggcggtaacaatccgccctactttttcggttcgcagctactggcctggctggcgcccccagcgcaaggcgtcgttctggaaatcagcgtacctgaacccacagacgctgaactggcaaatgaagaaggtattgtcggccgccgggcgatcgttgaacagttgcttgaggcacaagacaaaatcacgcgaaatcagccagagaccatcgtcaccttagggggcgattgcctggtctctctggctccttttgcctggcttgcggaaaaatatggcgataaattgggggtgttatggattgattctcaccctgacgtcatgacgccccagcagtacccacatgcccatgcccacgttcttggggcgttaatgggcaatggcgacgtggaactaacccaggtggtcagaaagcccttatcgcctggcaaagcccttattgccgggatccatagcccgctggatgttgaaaggcagtttatcagtgaacacggtattacgaccttgagcccggcagaactacgccaacatcctcaagcaatagacgagtggattgcgcgggaaggtattgagtaccttgccgtccatctcgatctggatgtcctcgacccggccctgtttcgcgcggtgctgtttgcccgaccggggcgcggcgtacacgattttggcgacgtcgcagaagggaaactaacaattgacgaagtggttaaccttatccacaaggccgccgtgcaggccaaaccggtggggctcaccgtcgccgaacacttgccctgggatgccttaaacctgaagaatatgctcgaagctctaccattattgagctaa

SEQ ID NO: 109762 - DNA, 231 bp, Enterobacter aerogenes
atgaccggcaacgttacgcagttaaccatcgatgtggtgaactggtgtcaggcgcccaaccgcgagaatagagagaaaatcaaaaaatcgggggcttcggtgctcggttttctgctgggcgcagggctcggagcgctgggttacatcctgacgggcttttactcggtacttattccggtggtactggtggccatcgtcgcctggcgtgaattcagcgccgcgcggaattag

SEQ ID NO: 109763 - DNA, 777 bp, Enterobacter aerogenes
atgtttctgattaacaacaatattgagtttctgccggaacagcaggtgctgataaataccgaaaccggcaccgaaaccgggctgaacctggtggcagcgcagctgctggtctatttattgcagcacgcggacaggatctgcggacgcaatgaactgctggatgcggtgttcacccggaataattcctccgcatccgacggcaatctcaaccgccatattatggtactccgcagggcatttaccgatgtgcactgtgacgctgacgtgatcattactgtcccaagaaacggttttaaaatcggcaatgtatcggtccgtccggcagagccaagagcggaaacggaaggttcccaggaatatacaggaatgcctgaacaaccgcccgcgcaggaaacattgtctgccccggcacggcaggcggtaaaaacattttcacgcgggtatactatcctcttctgcctgtcattctgtttttgtctggcggcggccggatattattttatggccccggaaccacatatttcccggccggacgtgagtgtcttcaaaaccgagcattacctgaagtgtgaaattacctttaccagcggtacccggtattttccgcccgccgaagtcatcagtgaactgacccgtcagggggaaacggtgaattgccgtgaacccgtgaaaattaccctctggcggaatgacaccccgacgcaggcctggcgttttaccactctctgcgactcattgaataaatgccgggggatctatgtttatacccagaaataa

SEQ ID NO: 109764 - DNA, 510 bp, Enterobacter aerogenes
atgtttatacccagaaataatcgtctgctgacgctcctttcactctgcctgctggccggcggggtatggctcagcctgctggggtataccgcacgcaaggcggcgccggcagaacaggcctgccgctcggattatgccatcagcctggaaacggccacggatccggtggcgtcagcaggggtgttctatctgttcagcgagaagaatggccagctcatcctctcggtgaacggtaaactgaccacgaagcagggtacctataatatcgcccggcgtatcgtgtatgccatgacgcgcaccacgcgggggactattcaggaagtgcagtcggcctttctgcgcagtgaaaaataccccggtgataacgctcccgaccaaatcgtagaccagcgcctgttcgggacgctgcagaaaaatggcagccgctataaagtggaacagctgactccggatacggtggtgatcggcacctatttctcgccgctatacgtctgccagtttgacagctaa

SEQ ID NO: 109765 - DNA, 558 bp, Enterobacter aerogenes
atgatatacgtgatgtccgatgaccattacttttcactgggcgtccgggcggtctttgacatcgccggtcacgctgtaaggatccttccttcacccggagaggagacgccggcccggatacgtgagctgggcgacaacgatattctgctgctggcggtggagaacatgatggtgctgcggctacttttacgccagctggcggcgaaaaaaacccgcatagcgttgtttctgaagacggcgcacgacggtgagcaccatgccgggttcaacggggtcatccgccggcaaatcccggctccggcgctcatcagcgaggtggcgaaatcggtccgccacaatcgcgtcaggaaagtggtgaaatatctgaccttcccgcagcgttatgtgctggagggactggttcggggcggctcactttcccggattgccagtgccctgcatattacagaaaaacgggtgtatggtcataaaacggaagggctggcacgactgggattatccggccggatgaactgccggaatttattaatctattcctgtctggctcagctgggataa

SEQ ID NO: 109766 - DNA, 693 bp, Enterobacter aerogenes
atggaactgaaaagaaataccctggcatgcctggtcctgattgcatcaggcctgtccctgtcggcccgtgcggcagacagttttaatattaacgtcaccggcgttatcagcccggccgcctgcgaggcgaatattaccggcggcgaaaccattgattacggcaccattccggccagtacgctgaaggcggatgctgtaaccttattaccggccagacagacgggtttcaccattacctgcgatgcaccggcgaaactggggttccggaccgtggataaccgtgcggcatcaaaaatggcaccaggtcctttgattgcgatggagtcggggatttcttgggatcgacccgctttgaacgggcttggggtggatggccggggaaataatattggtggatggagcgctgagattattaacctgacttcagacactgtatccagtccgaactttatatattctcgtgataatggattaacctggaccaaaaataacagtgacattgtatttatacctttaagtaccgtaaatcgattaaatagtatttcagcagcagatacttcaactccggcggccttcagcacgctcaccggaaccctggcggtgcaggccgttattaacccggcctccacgctcgacctgtcgcagcccgtcaccctcgatggttcggtgacggtggagatggtttatctgtaa

SEQ ID NO: 109767 - DNA, 513 bp, Enterobacter aerogenes
atggtccgtacaggtttactcagcatgatgctgatggtgagcggcgcggcactggctgtgccgctggtccagccgctgttaccccaggaatgtcaggtgacgggatcgcagagcgatatcgattttggggagctgaataaggccaccacggtgacgagaaatatcagcatggcggtgagctgccgccatccggaacggatgcggctgcgcctcgacggtgggctgccggggcgcgggtttgtgctggatgaggccggaaagctcagccttaccctgagcaacgcccggctggataatcgcgcggtttcgctacgtcaggatctggcgtcgccgggaaccgggctgccggttctgaccgctgtttccggtatgcgtgtggttccggatggcggtcgggaaagcggccggctgctgacgttcgatgtgaccgtcacgctggacagaggtgtcggaatggcagcgccgcgacaacgggctgaaccccggctaccgctgacggtgaccttagattga

SEQ ID NO: 109768 - DNA, 711 bp, Enterobacter aerogenes
atgcatctgttttttcagtgtttagtttgggctgtgatggtatgcatcgcaggtggcggtgctgcccgagctgcggacagcttcagtatttacgtgacggggaaaattgtgccggctgcctgccaggcagtattcgctggcggagatacgtttgactatgggagtttgccggccagttcgttatccctgaccgttgaaaccttactaccggtaaaaagtacagcattctcggtacgctgttctgcccctatgaaaatggccttccggcttacggacaaccgtgccggtacacaaatacagtgggcgagtacttacatcagcctcgttggtgaaagttatataaacggcggggctgtatggcttggtctggggacagacagtaaaggacaaccgctgggagcctggcttgccaggcttagtgaaatgaaagcggatggaaaaccggttgcggcaatcactaatgtgacgcccaatctggaggacgcctgggtatatgcaaatccggaagatatggtgtttaaaaactaccctggtccctacgcaacctctgttggcaatccggatcacagtattggaagttctcctttagcattcactgtgctaaacggaacgctagaagtacaggcggcagtggctccgtcatccacactcgacttagtgcatcctgtccaactggatgggtctgtcactattgagatggtctatttatga

SEQ ID NO: 109769 - DNA, 393 bp, Enterobacter aerogenes
atgaacaatacccaaataactcgggcaattgccctgatggtttttacgctacccacgctgtctgctatcgcgcaaaacgacttgactggctgtgaggccaaacgagcggaaatacagagccagatagactatgcacaactgcacggaaatacctatcgtctggaaggcctgaaaaaggcgctcagggaaacatcggcgcactgtacagaccgttctcttcagcgggagcgggaagcggatatccggaaacaggaacggaaagtggctgagcgggaggacgcgctgcaggaagcccgtcgtgatggacggacagacaaggtgcgtaaggcgacccgtaagctggaagaagcgcagcaggatctagccgatgcccgggcggaactgcaccgttaa

SEQ ID NO: 109770 - DNA, 189 bp, Enterobacter aerogenes
atgaatggaaaaaaatatcaatccctgcgtaaaaagtcaataagtaagggtggtgggatagcgtgtatcatcatgctgatacacgcgttatccatttcctcagtacagatggatttagacgtacatatgggggatatgaattggaaacactcgattgtgcttaaaactactggaggtaagggagagtaa

SEQ ID NO: 109771 - DNA, 603 bp, Enterobacter aerogenes
atgcataaaactgttacattagagagtgttgctgagatcagattagggatgccctttaaatcagcgatacaagatgctggcgagcaaggttcctgctaccttatccagacgaaagatattgggcttgatggcatcctagatcttggaactctaacttctgtcattccagatggaaatccagagaaacattatctcttccccaacgatattttattacgtctgcgaggacctgttttttcagctggaattatcgaagagggtacagataaaccaattattacttctaatcaattagcagtgattagatgtaatgaaaatctaatattaccgcattatttacattggtatataaattctgcttctggtagtaaatatattcgtagtatgagtgaaggaaccagtattagtaaaattaattcaaaaacaatttctaagatgaatgttaaacttccaacattggaagagcaatataagattggcttgataaatagaaattggattaaacaaaaaatcacctataatgcgttaatacaaaatggtgatgtactctttgatagtatatgtgaaagcattattaatagaagggctttagataatgagtga

SEQ ID NO: 109772 - DNA, 1482 bp, Enterobacter aerogenes
atgagtgaaatgatggcactccataaatcactttggcttgcttgcgagctatttagagggaaaattgactcatctgcttataaagattatatattcccattgttgttactgaagtatatttctgacatgaagaatgaccatgtggagggtttttttaatgaaaactattctgagctgttagaaattgtttctcgagtaccagagaaagcaagtttttataaaatatatcatggagctaagaatcatgatggctatattggagagagaattgatgactcgctgaggttaattgatcaagctattgactcggtcagccacagtagaggaggttatttattcgagtctatacaattcgcttcagttaattttggagcaagatcagaaagagatcggatgctttatgatttactcactatttttgcacgtcctgaaatggattttagttataggcaagatggtgctaataagattaaatttgcttgtagttatctttttgataaattttcatctgattctaacggtcgaaactcagagctttatactccagaaggggttgcatggttaattgcagaactgctgcagcctaaaccgggggataaagtttgtgatcccatttgcggttcaggttctcttttaattaccttaggagaaaaaataaaaaactcctatgggagcaatgattatttattgtttggccaagaggttaatagatcaggctgggccttggctaaaataaacatgcttctgcataacgagatgaatagcagggtagagtggggggatgttatttctaacccacaacttctggattctgataatagattgatgaagtttgatgtagttgcttctaacccaccgttaaatattggcagttggaatcatgatgatctaatgtctgatgtttatggacgttttaatttaggtctccctcctcatactaagggtgattatgcctttattttgcacatgatttcaacgcttaagaatgcaacggggagaatggccatacttgtatctcatggagtactgttccgtggaggtcaagaagagaacataaggaaaaatttagttgatgagggattattggatgcagtaataggtctaccagatagacttcttcctgggacagggataccaagcgtcattttgatgtttaggaaagataaaaatagctccgatgttttgtttattgacgcatctgatttggctaaacctataaaagggcgtaatttacttacaagcaaaattattgataaaatatcgaaatgttatttcgaaagaatgatagttgacggtttttcgcatgtggcttatctagatgaaattcgtcaaaacgattataaccttaacatatctcgatatgttaaaaagtatgaagaatttgttcctgtagatcttgagagcttacgtcaacagcgtgaggaactactatcaacattgcatgaattagaaagagaaatgaaagattttattgataattga

SEQ ID NO: 109773 - DNA, 1290 bp, Enterobacter aerogenes
atgggcataatggagatgcagctcaatatgaaaagtgaagagaaaggcactaaaacacaaatggtaatccctgatggctataagctaacagagttaggtgaaatcccagaagattggcaatgtgtacagttaggagaaataggaaaatgtattattgggcttacttatagccctcgaaatgtatcggatacaggtgttttagttttgcgttcgtcaaatattcagaatggtaaactagcataccaagacaatgtttttgtaaacatggtattaccagaaagggttatcgtaaagaaaggtgacatattaatttgtgtcagaaatggaagccgtcaattaattggcaagtgcgcactcattgatcaaaaggccgaaggttctgctttcggtgcctttatgtccattttcaggacttcagcgcacgactatattttttatcagtttcaatctgatttgattcaaaatcagataaatgagacgatgggggccacgataaatcagattacaaacaaagatttatctggattcaaaatacctatccctatctgtgtaaaagagcagaaagccatagccaatgtgctttccgatactgatgcgttgctgactcgccttgagcagttaattgccaaaaaacaggccataaaaaccgctaccatgcagcaactgctgactggccgcactcgcttgccacaatttgccaagcattcagatgggacactcaaaggccatagacccagcgaattgggagctattcctgaggactggcaagtagttccttttaaagatgtgctcacgataaagcatggtaaaaatcaaaaagaagtcgaatcgccaagtggacaatatcctatttacgccactggtgggcagattggaaatgcaacatcttttttatttgataaaccatcagtattaattgggcggaaaggtacaattgacaaaccccgatatgctgaaacccctttctggacagtggacacactattttactctgaaataaaaaaggatttttgtgtaaaatttatttattacaagttctgtatgattgactggatgcagtataacgaagcatctggtgttcctagtttaaatgctcacaccattgaaaatgtgttggtcacattacccaatttagaggaacaaaccgctattgcaagtatcctctcagatatggacgatgagctcgaggcactagagcaaaaactcgccaaggtccgcaatataaaacaaggaatgatgcagcagctgctgactggccgtatccgtttaccgttggaacagcagccatga

SEQ ID NO: 109774 - DNA, 498 bp, Enterobacter aerogenes
atgaagggtattggaactgtacttcaggctggatacctcaaactggatcacagtatgaagacctactcagttctcacagagaatactcttttgtttaccggtcattttgtcgatcttgatcctcatggctggggttctctttacgaaaaatttactggtcaggcatttgaggctgagggctatgaagtggaatacagagggctcacggcagggtttaatgatggtggtatcgaccttattctacgaaaaggggatgacactatttttgttcagtgcaaacatgcttttaaatcttcactatctcgcaactccattgagaatatcctgtataaagcaggatattatataagccttaatatgcccacgaatagagtacatctgtggttagttgtacctgatattaaacgaataaaatggaaacggtattttttacggcacaacactacacagaataaagttaaacttgctttgattgaaatccgtatgctttctatctga

SEQ ID NO: 109775 - DNA, 711 bp, Enterobacter aerogenes
atgtcatcgatttctggggttgatattgttacagggttactcatccccgtagttctgtatttgataaagaaagttattgactggacaggaaaaatcgttggtaacccacgacctaaacgaaaataccagtttgataaaattcctgcggatcagaaagtagagattttttcgaaaattgatgcgttaaaggaaaaaacaacaacgccgcatgttcttgttcaaatgaaacttttatatgaacaactgggaatgtatttgccggtatggcattgtcaccaactggtttcctgtatggcggctgaaaatattagctcgctggatgtacgtctgcgaggttttctgaaaaacacaattatcggtcactatcctgagaaagggttcagcgttaacaccaaggttgtccgcagatcctacgtgataactaccttgttcgggatatttgcagttgctatgtttatttatgcaggatgggattccatctcttctttctggaaaagcaaagagacagggttgtttatcttgtttttattgatttatgcttccgctattattactgttataggttatataatttctcagattgaagatatctacctgggatctaaatttggggatttattcgagacttggctcaggaaccatccaccgtgtaacgatgtgaaccctgatacttctgcagcaacgccaactgaggagcaagcatcatcctaa

SEQ ID NO: 109776 - DNA, 459 bp, Enterobacter aerogenes
atgttacccgaagatatcgtacactcacttgcagactggctttcaaaaatgaatgatttagagaaaattgctgcactgaatagcctgcaacgattcatacactatcatggcccgtttcgcaatgaacccgtcggttgcgtccagtggataccagctgagtgcgtaatagctaatgactataatcctgatactattggcccggttgagcgtaaaatactggagctgtcattgctacaggacggttttactcaacctatcgttgtcactgtgggacgggcagaagaacttcattatcacgtgatggatggctatcagcgttatcttctcagtcagaaaccactattacgtaagaggctgcgtgggcatatccccgtgacaattatccgccctcaagatgatgctattttctcgctgatggcggcggttactcgtgaacaggtgataatcaattccaaataa

SEQ ID NO: 109777 - DNA, 861 bp, Enterobacter aerogenes
atgactgaaccatcactaaaaatgcccgcaagcaggaacgtcattctttatggtgactgctggcctgtggtcagtgccgtacagagcctgaccacgaccatgctgccggacagtgagtgccgggcgatattcgacctgccatcactgattgagcggctcacggttgagccacgggcggcactgattttatgtcttcgtccacgagagcatgttttcctcttttacgcactcagacaggagctgtttgaccatccggccctggtcatcagcgacgagatattcttcaacgacagactcatgctcagggtatggggcgatcttccctgcatgatgcatgacgagttatccatgatggtaaccagccagcaactatatgagttcctgacagttccttccggttattgtccggaaaaaagccttctggctgattttctgcaatcaccgacgcttcctgtcggattttctgaagtgcctcagatattccacctcgaagcaccactgatggactatatgtcgttactgatatatcgggaaatgctcgacagaaaaatcacaccttttcgtatgcgaatgctccaggcgatctggtctggttttcagacaagggatgagcttattactgaattagatgccccaaaaagcaaaatatggaatgaaaaacaccgtttgctgatgcaactggagatgccagcacgtctgcgtgacattctttatggcacccgattttgttctttcctgcaaagaacagaatttatatcacctgctgaggtggaaaatatacgctctgaggtcagagaacgacggatagccagggttgaaaagaattgcataacaactctctctaacgaaacaacgtactga

SEQ ID NO: 109778 - DNA, 474 bp, Enterobacter aerogenes
atgtattcagagaaaaaaattaacgaagcagaccacactcatcacccgagtcaggccggatatgatgcctgttatataccggagtccgtccgtcagtatcgtggagaacctctgtatatcctggtggcgtggtggtgcctgcaacagcacgactgggtcaaccgcaatcagatttcggaggcgttccgtgtacctgtccagcgggccagttacctgatggcctatttgcgtaacaaaacccgacgagtaatcgttgaaagtcgtgaaatgttactggccaataacgtttatcgctacgaaattcaggtcacccgcgtgatgcctcccggttcccgtaaaaaacgtctccccggggagaaaagacgcctgacccgcagacgtattggtaatgcagacacgacacaggccactcttatctggaataacctgagaaaaggtaatccatccccggtaaaagggggggacgaacaatga

SEQ ID NO: 109779 - DNA, 1050 bp, Enterobacter aerogenes
atgacagtacggagacgccttctgccggcggtgttgtgcctgctcgccgggtacagcctcacggcagcagctttcaatgagcactcttcctgcacaggtacgggtaacacccgctttcagatgcatagcgtcaacttatattcgggagcactgccggcgcccgggacgctcatatacacctcgccgtattataccgtgacttacatgtgtactacggagctggactcctcccgggacttcaggcccacgctgcagaaactgggggactttcagggggcgatggaggctcttaatcgtgccgggctgaaactggatatcagtatgacagaatcggggcggtctccggtactctgggactggaacagtttacagacgcagaataccataccctttggtgccagtatggggtcgaaccagaatgatgtaaaacgttcggtgacgtttcagcttaagctgtatgtgaacacacagataaacagcgcccagattgtcgacgtgggttccctgacggcgttcagcattattccctgcacgaactgtaccgcctctcagggcgtccagctgacgtccaccccattctccatccgctatatgccatctaattttggttatgtcagcatcagtcccaccacggtcaacctcggtcacatctacacgaattatcagaatccggccaaacgggccagctttacggtcacggcgggtcagcggatgggcgtcgggggacccgatggaacttttaccatccccctgcagaccacgtttaccgccaccggtaagacgctgatcgataacggtcaggcggcccgcatgacaaacgaggatggtcaggcgaacggactgaagctgagcattctggacacgtcttccggcgacaggctgaccttcgggcagccctccgacctgggcaaactggaatccggcggaaccggcatcctcgccacgccggtcagtaaaaactatacggcactgctggaacaggatgccggtacgccgctgagaacagggcccttctcagcggatgtggtggtgactgtgacgtacaactga

SEQ ID NO: 109780 - DNA, 744 bp, Enterobacter aerogenes
gtgaaacacagctgtattacccggggcgtggtgattgccctggcggcgtggagcctgaacgcgcaggccgccgtcaacgcggaccgcacgcgggtcatcatgaacgggaacgaaaaaacggtctccgtcaccctgaccaatgagaacaaaacgatgccctttctggcccagtcctgggtggatgacagcaacggcagacgaagcagcatgctgatggtgctgccgccgctgcagcgaattgatggcggtcagaaaacgcaggtccgcatcatgcaggtacaggggaccgggctggacaaactgccggcggaccgggaaacgctgttctggttcaacgtccgcgaaatcccgccagagccggagacaacgaatgtcctgcagctggccctgcagagtaggctgaagctgttttaccgtccggttgccattaaaaaaggcagtaatgacacctcagagaaaaaactgacagtggagcgggagggagggaatctggtcctgaaaaatccgacgccttaccacatcaccctcgcctggctggggaccacccgtcgtgagcgccttgagggcttcagcgagggggtgatggtctccccgctgagcgcgctgccggtaaaggccattctgccggccgggtccacccggctgtgggtggggtacgtggatgactacggcgggctgcagatgaaccagtacacctgtaacgcgcagcgttgtgccatgtcactgcgggagacaacaccatga

SEQ ID NO: 109781 - DNA, 2502 bp, Enterobacter aerogenes
atgaaactgacccggctcgccatactcatcaccctgacgctttccgcacgcccggtactggccacggaatttaacgtcaatatgctgaacacagaggacagaaaaaacgctgacctctcggccttcagccgggaagggtatattgcaccgggcaactacctgctggatatctggctgaacgagcagtctgtccgggagcaataccctgtcagtgtggtcccggttaagggggccggcaacgaggaagactccgtcatctgcgtgacgtctgagctggtggatatgctgggtctgaatgcggagactctcagtcgcctgaaacccgtttccggtacacagggcggacgctgtctggacctgcgcaccccggacagtcaggtgcgttacagcgcgccgcagcagcggctgacctttgtgataccgcaggcctggatgcagtatcaggacccgaactgggttccccctgcccgctggagtcagggcatcagtggcgcgctgctggactataacctgatggtcagtcgttatatgccgcagcagggtacctccagtaccagctacagtctgtacggcaccggtggactgaatctgggggcctggcgactgcggagtgactggcagtacagccggtatgacgctggtcagagacgcacacagtccgatttttatctgccccagacctatctgttccgtcctctgccgtcggtgcgttccaggctgacgctggggcagacttacctcaattctgccatttttgactccttccgtttcgccggcgtcacgctggccagtgatgagcgtatgctgccaccgtccctgcaggggtatgccccgcaaatcagcggcattgcgaacagtaatgctgaggtcaccgtcagccagaacggtcgcatcctgtaccagacccgtgtgtctcccggcccttttgtcctgcctgacctgagtcagaacatcagcggtaatctggatgtcacgctccgggaaagtaacggaaccacacgcacatggcaggtcaacaccgccagcgtcccgttcatggcccgccggggacagttacgttataaggtggcggctggtcgtccgctgtacggcgggtcacacaataaccgggcggtcagcccggactttctactgggggaggtcacctggggggcctttaacagcacctcgctttacggcgggggcatcgcctccaccggggattatcagtcccttgggctgggtgtcggccagaacatggggatactgggagcggtgtccgcggatatcacccgctcggatacccgccttccgcagggactgcgtcagaccggatacagttaccggataaactatgccaaaaccttcgataaaaccggcagcaccctggcgtttgtcggttaccggttttcagaccgccattacctgtccctcccggaatatctggcgcgccgggcggtgaacggcggtgacgtctggcacgaaaagcagagttacaccctcacgtacaaccagtatttttccgctcccgccatgagcgcctccctgtccgtcagccggctgggttactggaatgcggaatcaaacaataactggatgctcagtctgaacaaaagcttcagcatcggggccattcgcggaatttctgcctccctgtcactggcccgtaaccagtacgccggcggcggaacgcagaaccaggtttatgcctccgtgaccgttccctggggggaaggacgtcaggtcagctataacgcgcagcgggataaccggggaagcctgcagcagaacgtcagctacagcgatttcagccatcccgacaccacgtggaatatcagtgccgggctgcgtcgtgatgacagtaccggcagcaacagtaacttcagcggcagtctccagagccggatgccctggggacaggtcagcgcggatgccaccctgcagcccggtcagtaccgcagtctgggcctcagctggtatggctcggctaccgccacggcgcatggcgcggccctcagccagtccctgtccggtaatgagccccggatgatggtggataccggcggcgtggccggtgtcccggtctccggcgacagcggcgtgaccaaccgcttcggaattgcggtggtcagcggcggcggcagctatcagcgcagcgacatcgcggtcgacgtcacccgtctgccggaggatgtggaggtcagtgattcggttatcagccaggtcctgacggaaggggcgattggttaccggcgtatcagcgccagttggggggcacaggtcatgggacatatccgcctggctgacggcaaagcaccgccgtttggtgcgcaggtgatttcagagaaaacgggtaaaacaccggggatggtgggcgatgacgggctggcatatctgaccggcatcggtgacgaagaccgcagcgcgctggcggtttcctggaacgggcgcgtgcagtgccggctgaccctgccggcagacctgacgctcagccaggggccgcttctgctgccctgccggtaa

SEQ ID NO: 109782 - DNA, 582 bp, Enterobacter aerogenes
atgttcagaaaaacctgcctgaccgtgttagccaccgcagccatgctgagtggtacaaacgcctttgccgaccctcccacctcgggcccctttggacagggcaccattttcttccacggtacagtgactaactccccctgcaacatcgcaccgggtgatgacgctcttaaagtggagtttggccaggtgtcttaccgcgccctgaaaacagcagatgccaccacagcatcccagccgattgttattcatctgacagattgttcatttgacccggataccgcatcgcctgtaacccgcccagagggtctgatgtctaaagtgaaggtaacctttaccggggacgcaaccagcaataataaagggtatgtgaatacgggcagtgccaccaacgttgctgtccagttgctcaaaaacgataacagcacaccgatcccaccgggttacgttccgaccgatgctgatgcccagcagctgcagcccggtaataatgaactgcgtttctttgcccgactgctggctcttggtgccgccacgccgggtgaggttaaatctcaggtcacctacaccctgacctacctctga

SEQ ID NO: 109783 - DNA, 657 bp, Enterobacter aerogenes
atggttactgatttactactcagaattgcactggctggattattaggtggatttattgggattgaacgtcagctgcgtgcgaaggaagcggggttacgaacgcatattctggttggtattggtagcgccatgtttatgattgtttccaaatatggttttgaagatattctgctggaaagccatgtcgctttagatccaagccgtatcgctgcacaggtggtcagcggtatgggatttctgggggcagggacaattatcattcagaaacaggttgttaagggactgactacagccgcaggtatgtgggttactgcggctattggcctggttatcgggagtggtttgtatgaaattggtatctacggggccgtattaacgcttgttgtactggaagtgtttcgtcagttaagtaatcgcttgttaagcagacattgtggtttgctggttaaactgggtccggatagcgttgcctgggtatttactgtgcttcagacgaggtcaatacgttttgcttttcgctctctgaaaaaaagttcctcaggagagaatgtatgggaattgcttttggtcctgacattgcgtcccgggagttccatcagcgatctgtgcccggaaattttgaaaatagaaggggttaaatcagtcgctatcagataa

SEQ ID NO: 109784 - DNA, 615 bp, Enterobacter aerogenes
atgcgtaaagaaatatcaattacatcaccagataattatttggcgacaatacaatttcgactggatgaaatgactaataataatgttgatcaggaagactcacatgaggaaacgttgcgttatcatactctgacctgggtaaacgcagcctcttcaaatggaaaaaaaattgcattcatcgcaccagtttttctggtgcggtgtctgaatcctgtaaccaggccagcttatgtcctcccaccatcgtgcgaattaccggaaccattcacaactgacatcccatctctttgtcatattttactgaacgagcttcagcgactgggtatgatgaaaaggtatgaagagttaaaaaacacgttagagttaataaaacagaactggctaaaagaaaagctggttttggctaactggtatcttttgatgtcaggggaaaattattggatatacagtaatcagtgcacatgcgatgataatgttctggattcagagataacccgctgtcttcaggcacacggacatcttcattcagagatagatgcctgtgtctttttttcacacttcgggtgttggtcaacaacaccatatttctctgacaacttatctgatagcgactga

SEQ ID NO: 109785 - DNA, 534 bp, Enterobacter aerogenes
atggagtttttaaacgatgagctgacagaaatacagcaagtaaagcgggtggttcagcaggccatcgaccaatacccacgtctggctgtatttcggttgacgttggactgccccagccctgagtcaatagggtgttttcaggataccgtctaccgaaaagtaagtgaactggcagcaatccgacaattgagcggcagaccatcgccaccaacaattctcagatggattggaagcaaaacttatccccactcatatcagacactactgatgctcaaccaggacactttttacctttcccgacacgactcacttccagagaagtgtttccagacaatgaaaactttgctccgtcaggcatacaatacaatccgaataacgaatgaactgtatcagagtaatgaaacaaaaataaccgtcttaagagtggacagaacccaggcaggacactctgacgctgagcataaattattacaggaaaatgccctgtcgtttcgacctgcagcgattacacagagccccagtatctttccctga

SEQ ID NO: 109786 - DNA, 405 bp, Enterobacter aerogenes
atgcacatgctgaaatgttacattgccaataatcgtgacgggcacattgtgactgctaaagacgcgatgcagtcaccaggcagggtatggacctgctcttcctgtggctgccagttgatacttcatgcgggttcatctggtgaggccccctggtttgaacatgaccagcgaacagtgacgacgaacgttctgatgcaatgtacccatctcgatcctgaagtgaaagccgaagcccgatgccaaaaactacgcagtatcatcggcaatctggatgcacctgtaatggtgctgttctggcattgcgtgtggtgcggaaatcattacagtgggaaaaagcattgcacttcatgcggaacaggcatctacagtatcgaagaaactgacaaacaatcagatgcgaactga

SEQ ID NO: 109787 - DNA, 534 bp, Enterobacter aerogenes
atgaactcaaccatttttaccgcacactgtcaggcctggcttgatgacctcacccggctgcaggtcactcatgggctctgccagcctgaaattaaaaagtggcacaggctgaccgtgacgtcctgctcgttaccaaacgggcttaccggactgctcattatcccgcagtttttgctgacagtaacgcaggctgcttgtgtggaagaagaatcggtagcgggacgtatcattaaacgtgctgaggggccagcgctggcggggatgttgcgcagtgaatgctaccgactgggactcagtgccattgctgagcagttatcgctgctcttccgccagtatccacagcccggtatacgtgaatcactgatgttgctgtgctggtgtgagctggtgaaagggattgagccggaagcatggtacgcactgcatctgctgcttccggccacgctgaagaaatggatcaatacacgacaaaaagagttcaatggtttatcggcactgactgaggattacattcgtgccacccggccactgtga

SEQ ID NO: 109788 - DNA, 573 bp, Enterobacter aerogenes
atgaaaacaccgtattcccgtcatgacttcctgttgcagcattaccagcgctggctggacgatttcacgcgtctggctgtacgacatgggttgtgtcacccgaacatccaggccagccatcaactcaccctaggttggctccgcttcacgggtacggggcaggtcactgccgtggtaccccatgctttgtaccggttgttctgcggtaatcagcctccggtcatcacggtgacagaggacatgtccacccggctggattcagataccacgctgctgcttcaccatcccatgctggaaggcatattgctgagtgaatgtgcccggctgaagcagttcccggtacaacgggcactgttggtgatgctacagcggctgaccagccgggaaatccgacacaaaatagtctggcagtgctggcgcgatttgatgtgcggggatgacccttgcgactggctggagcgtctggtcggacagccagacgacgcgctgtatctctggctgggtgaccgccaggatagtgaccccgttttaaccctgatgatggatgaatacctgctgtttaccggcaactga

SEQ ID NO: 109789 - DNA, 267 bp, Enterobacter aerogenes
atgacaattaaaccttccctgtctgaagaccagttcgtcaatatggctttcattacccatctcaccggattaaccgataaatggttctacaagctcatcaaagacggtgagtttccggcacccatcaagtttggtcgtagttcccgctggcgacagagtgaagtcgaaacctggctacaggcccgcattgatgcatcccggggagagaattccgccctggcaatgacccacaaacttaccgtaactcccgtggaggcgttgtcatga

SEQ ID NO: 109790 - DNA, 582 bp, Enterobacter aerogenes
atggactttccctggccctggaaccgcaaatacacgatgaactggttcctgctgtcgttactgaaccaccatcttgatcagctactggaacgttactcccgccttcagcccctcagactcgatgtgttctatcagaatgacacgtggcgttataaccatcacggatggaacgagacagaaagggaggtacgccagttaacagaacatctgatatcagagagcaacatcgtgggtcacttctgggtgctggagtgtacttcccgacacaaatgccatgcccatatcgtgatgtatcttgatggtcaccataaccaggccacctttccggtagctgaacaggcggggactgcctggcagaagattacacagggtgaggggtaccacaatcgctgtgatcgtaagaaatgctacgaagccgatatcacccgccccgtcaattacgatgatgctgcagccatcgacaacctgcgctacatcatcagctatctcgccaaggagaaatcaaaacacgggcagacttactacggggccagcgaggtaccacccgcgagtggactgggcagaccgcgagggcttcgataa

SEQ ID NO: 109791 - DNA, 798 bp, Enterobacter aerogenes
atgtcagaacgaatcactttcaatgtaaccaattctgagactctgcgtgttgttgatgaatacagcaaaaaacagaagatctcacggtcgcaggttatttccacattgctggatgccaccgttccggtactgaaagatattaatcgttattatcagcttgcggacgaacttaaggcccggctactgtctggtgtctaccagcaggatttgcctcgccgaagaaatgttgtgactgctgaaaagtactgcatggagatctgggaaagtaagctccaggttggaaaagggtatgactttgacagcgtcaatggcaaggtgcatgttcgcgaacataaacgacactaccgtcgggataatgcagttggcagggtcgaaaatcgacatatcaaagagctctgtcagtttatcctggataggtcagaacaggatgcccgttacgcctgttttatctataccgaaaggattatatttgctgatgccgggacctcagaactctcctcatcgccagtcaaatttgcggcaggtgacgctgtgattttgctggcaaaagatgtagtttttaacgagtttttctttgatataggtaaggcgctttttatcaatgtggttgatcttatgtcatacggtacaagtggtatcccggagacgacaggagacccacgagttcactgctgggtgccaatcctgtttagtgggaaaaatgccgtgatagtacctgtgtacctgattgaccctgctacggccctgacgttaagaaaaccagacaacatcacagtggtctaccacggtaaaaaataa

SEQ ID NO: 109792 - DNA, 753 bp, Enterobacter aerogenes
atgaatgcaactaaaggactcgtcgattttcactgccacttagatctctatccagaccattctgcggcaataagacatgcagaagaagcagaaatatttacattagccgtcacgacaacccctcgcgcatggccccgcaatcacgagctaacactgcgaacaaagtatgtcagggcagcattaggattacaccctcaactagttgcagaacatgaaaacgaacttgagctatgggaccagtatattacggagacacggtatatcggagaagttgggttggatgctggtcctcgttttttcaaatcgctcgacgcacaaaagagagtgtttcagcatatattgcagcaatgcgctcaggctggcgataaaatcattacggttcatagcgtaagagcagtcaaagcggtactcgatctcgttgaagccaatttaccatcaggccgtggaaaaatcgttcttcactggttcactggaacaaagaacgaggcaaagcgggcgtcagaattaggctgctatttttcgcttaatgcaggaatgctaagtaacgcgaaacatattcccatggtgcttactataccactggaacggatgctgacggaaactgatggtccatttactcgtaccggtgacagaccatcacaacctacagatgtagcaaacgttgtagaagaactagctcgtttgcatggtctatccacaggcagtatggtcaaacttattcgtaataacttaaagacattgctcaatggttaa

SEQ ID NO: 109793 - DNA, 1368 bp, Enterobacter aerogenes
atgaagcgacaacttctggttggtcatttcggctacgacgattcatttgctgcagtagtaggtattgatgaacagataacttacctacagctcatcgccggtcaacagactttggattatgggattggtcattcactgtccagtctgaaggatatcggaatattcccctcagaaatgggcattgatctgttagtgttagccgctcatgttcacgctgctgatacacgaatatctcgtgttgagcagtcacaggactcatggacacgtgagattagattgatagtaccagtaagtgatccttctcgctggagatcagcagcgccaaccatcaagaaatctcttgatttcctcactggtgatcgctggactatcgatttcagaccacgccctgaacgttttgttaccattgccgaagaagcaccaccatctttgatttcgcatccatttaattccgtaagtttgttctctggcggacttgatagcttgattggagctatcgactcgcttgaaaaaggtgccacacctctcttagttagtcatttcggagaaggtgcaacaagtgacgcacaaagtaagttatttgccggcctgaaaaaacattacaccacgtcatctttcgagagattacgggttggtatgacttttgaggaagggcttgtagaaggtgttagttcagaaagtagtactcgaggcagatcattcttgttctttgctctcggcgtttttgcaggaacagggctaggggatcatttcgttttgagcgtccctgagaatggactgattgctcttaatgtgccgttggacccactacgattgggatcaaacagtactcgaactacacacccgtattatatggcgagatggaacgagttgctttccatacttggtattaatggcaaaattcataatccgtattgggacaaaactaaaggagaaatggcttcgacttgccaaaatccttctcttttaaaaacacttgtttcagattcattatcatgttcatctcctgccaaggcccggtggttaggacatggcattgaacaatgcggttattgcctgccatgtttgatccgccgtgcagccttgatggcagcatggggttcagatagcgatccaacgatatatacagtgacagacctccatgcgcaggccctcgacacacgccaggcaactggagtgcaggtcagatcctttcaatacgctatcgagcgtctgaaaggaaatccacaactcgccaatatcttgattcacaagccgggttcactcgcggatgaaacaatgcaccttgaacagctagctggcgtttatagtcgtgggcttgctgaagttgaacgactcattgatggtgtcgcaacgagaccttgttga

SEQ ID NO: 109794 - DNA, 876 bp, Enterobacter aerogenes
atgggaacctcaacagcttatggaggaccaggtggcgggactccacttattccatcatggttggataacgaagccccggcatctccgtcagaaaatggcactggaccaagcgatcagcagccagttgatcactctgaacctctaactccaccaaatcgaccaccaataccaaatgcagcggatccacaacgtttctcaagcgcacgcaacaacttcacgcgctttgcaggatctggtggtactgatcgtgcaagccttggacgagccatatcgaagtatgtctctacgtcatcaggcggcgctcgccaggcggcacaacgtatgggggcgtccagaggcgcgagcgctcgactaatcggtttcctagcggatgcacaagcaagaggtgttaatgaagcactgcgcgcactggatttagaatccctggcaggtcgtccaataacagaaatttttgttgggctggctgactatatctgccctggagcaggtactgttgatgaggggattgctcgtgaagcatacattgagactatcgtagagcttgcgagcgaaggactcaccgatttgaatacctttacaacagagcaaatgcaaaccgttttcgaactatatgccactcatgcgattgaagcacgcatctgtaatgatatcgggaccaaagtggtgacaatgcctataaatgctcattctgcacatcttgttgagcagcaggtgcgagacttcattcgtggtggagtaagcgatgcactagcacgtgctcaaacgaagacgcattatcttaccccagaacaaattcaagggttcgtggatactatttatgagtctgccttcgggattttacaggctcttggtgaagcagaggctaataatcaatga

SEQ ID NO: 109795 - DNA, 1929 bp, Enterobacter aerogenes
atgctcctgaccgacaacgaaacaaaaatcgatctgctgaacaatgaggccattgctactaccattattggactgcttcgcgaggaacctaatcatcctgtaacaattggtgtccacggggattggggcgcgggaaaatcaagtgtactcgaaatgattgaggccggtttctctgacaaaaatgatgtcttatgcttaaagtttaatggctggcgtttccaggggtttgaggatgcaaaaattgccttgatcgaaggcatcgtcgaaggtctgttagagaaacgtccagcgttgaaaaaagctgaaggggccatcaaagacgtattttgcagcatcgactggctaaaagttgctaagcgagccggaggcttggcattgaccgcattcgcaggtgtaccaacaccgggacaaataggagctattgttggatctttggaggctttactaaccgatcccacccgacttgtgacgaaggagaatatatccaccaccatcgatgaagtaaaggcggtaatgaaggaaggagacgcaaggaatgtacctatggaagtggaaacattccgtaaggcatttgatcagcttctgaaagacgcaggtatcaaacagctcgtagtactggtagacgatcttgaccgttgcctgcctgacacagccattgaaacccttgaagctattcgcttgtttgtgtttaccgcacgtacggcatttgttgtcgctgcagatgaggcaatgattgagtactctgttcgtaagcactttcctgacttacctgataccaccgggccacgggactatgcccgtaattatctcgaaaaactcatccaagtcccattccggatcccggctctgggagaaacggaaacgagaatctatgtcacattactgctcactggtgcagaaataggtgagaataacccagactatgaaaggttaatcaccgttgcgcgagaaaagctgaaacgtccctggaccagcggcggattggacgccgtcacagtaaaatcaattctcggtcagcaagccgataaagcaaataatgcacttatcctgagtgaccaaatcggaccaattctggctagcggaacaaaaggcaaccctcgtcaaataaagcgttttctcaatacccttttactacgcgaacgaacagcgacagcacgaggttttggtgatgatataaaactgcccgtgttagcaaaactcatgctcgcagaacgctttattccaagattgttcgaacagattgctcttgtggcggcggttcattcagatggattctgcaaagatctcgaggctctagagacctttcttgcaataaccgacggcagaaatacaaaggaaaagcaagccactgaagtattattacctcccgatagtgcggttttgactgaatggaaatcttcagaaatgataagtgactgggctcgcctctctccaaaactatcaggtctcgacttacgaccttacttgtttgtaacaaaggacaaaaaagattattttggacctgtatcagttcttggtcacttagccgaagtagtcgagaaattgttcggcggaaaaatgactgtccaaagctatgagtcagaactgaagcagcttgtacaacctgaagccgagaaagtcttcgaagcagttcgtagcaaaataatgagtacagccacttttgatatcaaaccgtcaggagtggatggtttgactgttcttgtaaaggcacaacctgacctgcagggccagcttatggatttcctagaggctctgccaaatgagaagtgtggtccctgggcggtaagtggttggcaaagtgtcataaaagataccgaatgtgtagcacgtttaaccacgttgttggggaactggagcaagattactacaaatatcagcctcaaaatcgcagccgaagccgcgcttaaaagtcaaaagggaatacattaa

SEQ ID NO: 109796 - DNA, 555 bp, Enterobacter aerogenes
atgataataggtaaagcagattcatttatcagtacaggtttgcaccccgtgctgatggaagcacttacactggcgattacagcaagaccacagcaaatgacacccggtacctttgcgcttcagggtgataatatctttatgcatgagatgcagttcaccacacagccgcctgaacagaagaatttcatgctaaagtataacggtgataaaagtaatattgtactcatacctgaatacctacagaactatattactgagttgaattacatattacacaaaattttcaaatatcaagaacagtgtatagcaaatgaaaattacgttccattttacggtcctaaaaataccctaaaaaatatccagaagcctttctgtacttcaagcatccctatctcgacgataataataattcacttgaaagtgataaaaagtttcggggaggaggatgctagtgttaccgcattgataaaccgacttaacaatgaatattcgcatctggaatctattcctgactgcggattcaaaccattggaggcacctgaaattttagggtaa

SEQ ID NO: 109797 - DNA, 876 bp, Enterobacter aerogenes
atgaccacactggcgattgacatcggctgcacaaaactagctgccgccctgattgggcacgatttacagccccaggagcgccgggaattgccaacgcctgccagcaaaacaccggatgcgctgcaggacgcgctgagggggctggttacccctctacagaagaaggcccgacaggtggccgtcgcctcaaccggtattatccaggaaggagttttgcaggcgctgaatccacagaatctgggagggctgctgcactttccgctgatacagacactggaaacgataaccggtttacctacatgggccattaatgatgcgcagtcagcgacatgggcagaataccatgcacttgccggtgatatcagggagatggcgtttattaccctctctaccggggtcgggggaggaatagtcagccaagggaaactgctcatcggaaccggcggtcttgccgggcacctgggacatacgcaggcagatcctcacggaccggtatgtggttgtggtcggactggctgtgttgaggctatcgcctcaggacggggtattgcggcagccgcccggggaaaacttgtcgggtgtgatgcaaaagctatattcgcgctggctgcaaatggtgacgagcaggcgctcagtctgatccgacattctgcgcagactattgcgcatttaatcgccgatgtgaaaacgataaccgactgccagcatgtggttattgggggaagcgttggactggcagaaggatatcttgcatttgtgcaacagtttctgaaacaggagcctccggcgtaccacgcaaaactgagtgtcgcacattaccggcataacgccggattgctgggggcagctttactggctcagggagatgaaagatga

SEQ ID NO: 109798 - DNA, 822 bp, Enterobacter aerogenes
atgattaaaataaaacgcccggatgggtctgaacccgctgaattaagaaaagatgctgctaaggagctacgacgcaaccgcgtaaaatacaaaaacaatgaaaaactcagtttcagtgtctattcgcagctttatgtcaaaaatgcactcaatgacatatttcagctaaagtgtgcattttgtgattccagactaaatggagccggagacgttgaacactaccgccctaaaggtaaagtgcatatcaaagttggtacagccgttcataaaattgagggatattattggctggcagcgagctggaataacctcctcatctcctgtgttgactgtaatcaacgcagaaatcagctgcatgaagatggagtgacatggagtctgaccggtaaaggctgcttcttcccacttgcaaatgaagcgttgcgcgctaaaggcccccgcagtattaattctgaacaaccacttttaattaacccttgtttaacagatccagagcagcatatcaaattattggaaaacggcagtatcgaaccggttcagatgaatggttcccccagcccgcagggagagtcaacgatagaaatatgcggattagcacgcgtggaacttcttaaatcccgtgcggaaagggctatatttatcaaatcgaccatcagacatatcatccgggatattgaagaaggaaaagatcctactgatgatcttaatgatctgctcattatgctggataaatctgccccatatttggcgttagcacgcagcctcaccagagataagctgggaccctacattaattcactgggtttagctccgttattatga

SEQ ID NO: 109799 - DNA, 2079 bp, Enterobacter aerogenes
atgagactggtccaccgccccgagtgccctccattcttagtcccctacttggcacttgaggatgccgagagaaatcagactagagagataatccgacttcggcagtctcgccctatgccctattcaaagttattgggcagaaacgagtattctcatttagtagacatgctgaggcagatatttgaatacaagtgttgctattgtgaatcacagctagggttgtcaagtgaaggtgaaattgaacaattcaggcccaaaggcacggtattagacaaagaaggaaggcattctcatcgttactggtatttatctgccgactggagaaacctctatttagcctgcccggtatgcaaccgaaataaaaacacgcgctttccgttagagggtgagtctgctccagaaggctggagctatgacagggtcattgcttttgaacaaccactgctactcgacccctgctatgatgatccggatgaacatcttgccatagcacccgatggcagactgattggattgactgagcgaggactcacaaccattgagacgttgattctgaacagagaagcactggttctcgcccgtcaaatggaaattgaaaaatttcaggaagccacaccaatagtccgatctgagaatgcacttagatcaccctattctctcgtctggcgacagctactttctggcaaatctctgactgaacgtacgcagggtgatgatcaacaactgatcaggcagcaggaaggttacgaaaattcgctttccaatttttcaactgaaagtgccagtgaagaggataaagaaaaatatcgcgcgaaggcacgctatatagaaaagatttccataatcaatttcgggcctgttgagaaactgacccttgatctgagcgcgcccaatgccagcagaattccttgttttgcccttttaggtgagaatggggttggaaaaagtaccgtccttcgcgcgatcgctatgactctcagcggtaaaaattatcttcgaaagttaaaacttaccagtaatcgttttctccctgatcgcgcctatagtggagaggttaaggtgacctgtgctgataggtcagaatatgtgatgaccttaaccagaaataaacccatttcgcttagtcatgaaagacctcaatcgcttcttttagcctacggtgccacccgtcttctgccttcgaaaaaccgcaaaagcaagtccggagaagcatttgccaaaatagataacctttttgatcccttcctgcctctgacagaccctaaggcatggttacttgaacaggatgagagccgagttgctgatatcaatacggttctgaacaacctgttgccagcagatcaacagcttgaattgcaaattggtggtgataatgaagtcaggatctcaatatgcagggatcccttccacgaattcagtgaactgagtgatggctatcagggtatgctcggtatcgccgtcgacatgatgaaaatcctctatgatgtctatgattccatggaatctgcccagggaattgttttgattgatgagttagggaatcacttccatccagcttggcgccttcagcatgttaccgccttacgcaatgccttcccaaatattcaatttatctacagcacgcacgacccactctgcctcagggggttgcaggaaggggaagttgcggtactgcgacgcgataaatctaggcgagtttatgcattagaagatctacctccggttgacagattccacgttgagcaactactcaaatctgaacattttggcctgcgcagtacggttgacccttctcaggaagagagaattaaggaatatgaagatctgctctccgttacatcacgagatgcagaacaggaaacacgcctagatgagcttattcgcgaactcacagatgaaggttatctcggtgagacacggcgtgaacgtttggcactcaagcttatagacatggaatcagcaacagcagtcccttatcagtcatcagttagcgccagagagttatcagaaggaacaatttctaaacttcgtcgtatcatgaatgaaatagataacagggtagcgaaatatcatgattaa

SEQ ID NO: 109800 - DNA, 876 bp, Enterobacter aerogenes
atgcaaaagttggacggccttaaggccttagaacaacccttggcttcactgccacacccgcttcgaaaacttatcctagcacgtcttcgcagtcttacgcagtacgagccgataatcggtatcatgggtaaaactggagcggggaagtcgtcgctctgtaatgccctgtttcagggcgaagtcacaccggtcagcgatgtgaaagcctgcacgcgtgatgtgctgcgctttcggctctgcaatggcaatcacagtctgatggttgttgatttacctggtgtgggcgaaagcgagcaacgcgacgaggaatatacagcactgtatagtcacatcctgccggaactggatttagtgctgtgggttatcaaaaccgatgaccgtgcactgtcagtggatgaacacttctatcgcaaggtgatgctggcgcatcagcatcgagtgctgttcgtggttaatcaggctgacaaggccgaaccctgccatcagtggaataccacaagcaatacaccatctcatagccaacagtcgacaattgaggccaagcggagcgctgtacagcagctcttcctgccgcaccatccagtctgtgttgtatcggcccgaacggggtgggggctggatgcgatggtagagacgatgatgcttagtctgcctgatcgggccaccagcccattgacgacacaactgcatggaaggctctgcacaggttcactaaaaaaggaaacccgcgagcgatttagcaatgccgtagatgaaatgattggcactgtggaatcgtcatcttttctgcctgcgcctgtaagggctgtgattcgaaccgtgcgggaagccgtggtgtccgttgcccgtgccgtctgggactggattttcttctga

SEQ ID NO: 109801 - DNA, 717 bp, Enterobacter aerogenes
atggctcgtaagtatgtttatggtgataaaccaatccgcacaacaaccgctgagatagttgaaaacgagtttgctggaaaggctacggctgctcaggtcgatgcaattttaaagaaaagatttccacattacaaagacaatacttatttgaatctgatagttaacgcagttaactgcaatcgtggtcactggagttttaacaggacagccagacgaacagatgatgccacccatcgccaccatgaatatgatcgacttttcaagcgcggaaacgttttcgaggtctatgattccgcacttcatggtgtgtttgaaatctatgaagcttcagacggcaaatggctaacacgtccggttaaaagtgagtttgaaaaggccatagaaatagcgtctcaacttacctcagaagaacgtagagagaagctggctacaaccaacaccacgccagaaagggtcattataaagagctataccttcaagcgtaatcccctcgttgtagcagaggtattatccttagctggaggtaagtgtcaaagctgcctacgtgacgcaccattcaagcgggaagacggtagaccgtatcttgaagtgcatcatgtggagtggcttgctaacggtggagaggactctgttgaaaatgctattgcactctgtccgaactgtcaccgcgaagcacactacggcacgcttgtgttgaagccgactaacattaagtag

SEQ ID NO: 109802 - DNA, 1743 bp, Enterobacter aerogenes
atggcggtggaaaaactgattgtcgaccatatcgacacctggaccacggcgctgcaaacccgctccacggcagggcgcggcagctcgggtaagattgacctgtacggcattaagaagctgcgcgagctgattctggagctggcggtgcgcgggaaactggtgccgcaggatccgaacgatgaaccggcgtcggtgctgctgagaggaatgaaaaagcagcaagaagacttaattaaagaaaaaaagataaaaaaaccgaaaaagcttccgccaatagatgaaattttagaatcaatttcaataccacaaggctgggagttgtgttatttgaatgatattggcgattggggggctggagccacaccaaatcgtacaaattctggatactacggaggaattattccatggtttaaatctggagaattatctgaagattacataaccgattcagaagaacatattactgcattggcactaaaagaatgctccttgcgtgacaaccagcctggggatgtattgattgcaatgtatggggctacaataggcaaaacatcaatactcaatactcgttcaacaagtaatcaagccgtctgcgcttgtacccctttcgatggtttatcaaatcagtatctgttgaccttccttaaagcgagtaaaagagtatttacatccatgggtgcaggtggagcgcagcctaatatttctaaagaaaaaatcgttgctacccaatttgcattaccgccgcttaaagaacagttgcgaatcgtcgaaaaagtcgagcaactcatgtctctctgcgaccaactggagcagaattccctgaccagtctggacgcccatcaacagttggttgaaactctgctagccacactaaccaacagtcagaacgccgatgaactggccgaaaactgggcgcgtatcagcgaacatttcgacacgctgtttaccaccgaagccagcattgacgccttaaaacagactattttgcaactggcggtgatgggcaaactggtgccgcaggatccgaatgacgaaccggcctctgaactgctcaaacgtattgcgcaggaaaaagcgcaactggtgaaagacgggaaaattaaaaagcaaaaaccgttgccaccgattagtgatgaggaaaaaccgtttgaactgccggaggggtgggaatgggctcaattacaagatatttgtcataaaatcaccgacggagaacattcaacacctcaacgttcaacatcaggacattatttactttcagcaagaaatgttacaaacaacggaattatgctagatgatgtagactttgttcctacatccgttttcaataaaatcagagagcgatgcgatcctaatattggtgatatattgatttcgtgttccggtagcattggtcgagtagccctagtggataaagatgatgaatactcgatggttagaagtgcggcaatgatacgcccaaataaaaacctttatattcattttattgagaacgctctaaaatcaccattattacagtatcaaatggttaatcgctcaaaaaaatcagcacaagccaatcttttccttggttcaattagtgcccttacaataccaatccccccatattcagaacaaataaagatatatgaaataattagtaaactattttcttatagtgttcagcttaggactaaaataagctcagcccaacaaacccagctccacctggccgacgccctcaccgacgccgccatcaattaa

SEQ ID NO: 109803 - DNA, 1131 bp, Enterobacter aerogenes
atgcgtgatgtggatgcagaaaacgacattattgaactcgaagggcaagatgaactcgagttaacgtcacatccgcatcagatggggactgatacggaagttcgaattgcgaaagaacaatccagtgtttttgagttattgcggcgtgaagcacgtgggcaattagtgcttgctcctgatttccaacgtaagattgtgtgggatcgaaagcaccaatcagaactaattgaatctattttgatggggatacctataccgttaatttatcttttcgaagatgaaaatggtgtccgacaaataattgatggaaaacagcgaatttctgcgctaaaacgctatattaataatgaattcgcgttaacagatctctccatgttacctgatttgagggggaaacattttactgatatacctccattattgcaggctaaacttgaagattgtcaattacactcttatgtaattcaaccgccgacgccggaatatgttaagtttaatatttttgagcgagtgaatcgtggtggcattaatttgaataaacaagaaatgcgtcatgcgctatatcagggagaggcaactcttttaattcaaaatttagctgaacatgaatcatttaagttagcaaccggaggcggtgtaaagtctgaacgaatgagagatcggtatcttattcttcgattcgttgctttttatttattgattacagggcagttgcctggagtcgaatttcgttctgacattgatgcttttctcgcatcagctatgaaatttattaatacaaaagcaagcgatactttaattgatgaagttgaatatgcttgcataaccggaatgactaatatttataaatctttaggttctgaggcttttcgattctcttcaaaatcgggggggaagagacggccagttaatatgggattatttgaagtattagttatggttttcagtcagattgatttgaattttttaccacgtaatacggctctactaggatttatagaggaatataagagtaattttgatgcgttaggtgttttttctggagctatagatactacggaatatgtaaaaattcgatttgattttgctcgggaaatgataaggagaattaaagatgcttacacaaattag

SEQ ID NO: 109804 - DNA, 1050 bp, Enterobacter aerogenes
atgcttacacaaattagtatcaatggttttaaaagtttggactctacggagctgtctttatcaccattgacgatattaactggtaccaattcgtctggtaaatctagtgttctacaggcgttgatgttaatcattaagcatagtgcttcagtaaatcaatatagcatggaagatgttatcagatttttggctgatttttcatcaattagaaataaaaaagttaatgctaaatccatccgtattagtgtccaggattctaacaatataaaacacaatctagtattgaatgcagaatgcacagatactgatagtcgcttgggatatcaatatgaacctcgcgtaattggaattgaacctgaactactttatttaaatgctaatagattaggtgcgcaagaatttgttcctgtagctgaacgtcgggttggcggggctggggagcatttgttttcaactttcgataaaatgaaaaataatccagtcccagattatctggttaaaactgccgagtcgaaaacattggcatatcaggtttcatattggttgaaattaattactggaacgagttcagaactggtcactgaaaaagtaggagatcaagttaaagttgcatttagcattagagaattggaggggagtgtatcgccattaaatttaggtgccggaatgagttatattgctaaggtgcttattatctgtcttatggcgaaaaaaggagatctaattttattggaaaatcctgagattcagttacatcctaaggctcaagctcatttggctatattcctgacatttattgcgagtaaagggattcaaattattgttgagactcattgtgagcatttaattaatcgaatcgcttatcaaatttatgatgatgcaatacctcctactgatgttgtggttcattataaacctagcgtagatgaatcttttgtttcattgcttattgatgacaatggtgattttaccgatcttaagcataataaagcatcattcccgaaaggatttttcgatgctacattggccgaattgatggagatgagataa

SEQ ID NO: 109805 - DNA, 744 bp, Enterobacter aerogenes
atgctagggaatatagtgcttgaaacgccattgctagtggagtatttaaatcatactggttctaagaagtataaaagaatcttaaaaaagattacgtttccgtactccacaaataaaaaacaatgggatgcagctaaaaaattaggtctcaataatgaaacttatgaaaggatattacctcagctattaaatgagggtgaaaaggatgatgatcttcttacattagcttcaaaatcagcattgaaagttattttaactgatgacccatcaaagaagttgccttatgttcactataaggatgggttaatcaataatcatattgccataaatattgaagctaatgcgtctcgagatgatttgaaaaactacctagaaatactatgccgtgatgcgcggagagtaacaatttgtgataattactttgcaaaaaattgggatcataataaaagccttttttattctgttcttccaaggggtaatctaattattgaatatgccgatacacccgagaaattaaatgttttactaaatagtaaagagattacaaatgattttgtcaaaagtgtatgtcctgattggagtgttcagatcactactcaacaaaaatatctaggttgccatgatcgttatctattaatagaaatgcccgggcataaggtcgaaatattactatcaagtggtttcgatcatatttggcgacctaatcctaaagaactcacctgtgtctttcgtaatgtatcttaa

SEQ ID NO: 109806 - DNA, 825 bp, Enterobacter aerogenes
atgaatgaacagcggtcatttgaagcgatcaaaaatcgagatgaggcggggcgggagtattggtctgctcgaaacctcggaccattacttgattataaagagtggagaaattttcaaaaggtcatctcaaaagcgataatttcatgtgaggcgagcggccagttatctgcagaccattttgttgaaaccaacaaaatggtcgaattaggttctggcgccagcaggaatcttgaagatttccatctctcgcgctacgcctgttatctggttgtgcaaaatggcgatccagctaaatcggtaatagctgcagggcaaacttactttgccttgcaaacccggcgtcaggaactggaagatgatcaaatatttaaatctctacgggaggatgaaaagcgattattcctacgcaatgagctcaaagaacataataaacatctcgttgaaacggcccaacagtcaggcgttgagacgactctggatttcgcaatctttcaaaaccatggttacaaaggtctctatggcggccttgaccaaaaagcgattcatgagcgcaaggggctaaagaaaagccaaaaaattctggaccatatgggatctactgaactcgcagcaaatctcttccgcgctacccaaacggaagaaaaactacgccgtgatcgggttgctacgaagcaactggcgaatcaaacgcattatgaagttggacaaaaagtgcgccagactattaaagatcttggcggcacaatgcccgaggcgcttcctgcgccacagaacagcattcaacaacttaaaagtgctgcaaaaaagaaagatgctcctgagtag

SEQ ID NO: 109807 - DNA, 183 bp, Enterobacter aerogenes
atgtacgaatttcttgtatcactctctctgatacaaatgcagttcatgaacatattactcatgttggcagttcccaatttaaccctcctggtagtaagtggagcgttgagcaagttgaaagtaagcgacatactttctatgtcacaggaagtgatgggaagcgagctaatgttggcgtcgtag

SEQ ID NO: 109808 - DNA, 1251 bp, Enterobacter aerogenes
atgaagaaacttgctggcgcagcgttgctgtcggtaggggacattttggggaagctgattggcttcctcatccttccatatttaacgtccagaatgggtactgtcgaatatggtatacttaccctctatctttcatttattcaaatactcattattctaatatcatttagcggtcaggggttacttcctgttaagttcatacaggaaagcgaaactgctggattgatttttagacgcgataacataaatttaggcattgtcatatcgatcttcttattcttaatttcgttactgataaaacctttcctccatttctctatttcagcatatgatcttttttggattatatttgcagcattagtgcaggcagtcaatgttatcaatttatctcatttaaggattagtcagacatatagaattgcaacaattgggcaatttgctctctcagttatgaacgtggtatttacagttatactctttactgtcttgaccggttctgcgattaaccgattgattgctgtatcattctcttttttatttgtacagttattatattcatttttcatctattcgaagctaaagattgacaattcgaaaactactttgtcattagtctgtaggtataaggagatattcttgtatggagtatctttatggccgcatcacggtagttattggattaaatcgactatagatagatttttcatcgcccattaccttagtgtatcaattgtcggtgtctacgggttagcgttacagctatcttctattcttatgttgttttttactgtcattaatcaagcctgccagccatttatttatcgctatctcaattcgggtgattttaaaaaggtcaggaaggttcagttgggttacgcaattatagtattgttttcggcgctggcttattctattattttgccaattgtatttccttggctgttcaactcaaagttcaatgatgcattaaaatattttacttatttaatgccgggaacagtttttatgtgtatatattatatttatacacatgcgttgtttttttataaaaggaataaaaaaatatcattgatcaccgcgagttctatgatagtacatctattagggatcttaatcgtagtcaatacaaatatctctgtagagtatttttgtgttgtatatgcgatttcaagtggatttgcttgtggcgcaacaattttattttgtaataaacaactcaaagaggtagccaataataagtatgttgcatag

SEQ ID NO: 109809 - DNA, 1098 bp, Enterobacter aerogenes
atgaaaactgtatttgtgcttggtgctgggttttcaaaggaagccggcgcaccgatgcaggcagagataatggaagaaatatttaagatacgcaaggaagatccaagttattttaatgcttctgaatttagactttttgaaaatctgcttattaagcaattgtactataagcgtagtcagtttaaatatattcaaattgaagatatctttactcccttagaccgatgcttggcagataatatacagtttagaggtctttcaattgagcaaatgataaaaactagagatgctatttttaatataattggaatggctatcaaagagatcttaaatcggaagggtaagagcaaggagtatattgataattttgctcggtatttggtggggaaatgtagtaagagattaggtggtaattacagattgaatgatcctgtaagcgttattagtactaattgggatattttattagataattcaatatataatcatatccagcagagtttcccgcaacgtgccgtcgttgattactgctgctatataagctccttagaagaaaaggacgatacagtaaagcctggattagaaatattaggagccggtggctttaatgttaagttgctcaaaatacatggttctctcaattggttgcaatgctcgcgatgtatgcgtctttatgtcggttttaatgaaaagaagggggcccttagaggtctaacttgtagacactgcgataataactatactgctaaaaataatgaaaatagattaatatcaaatcttatcatgcctactttcttaaaagacctatcaaatcctcaatataaaataatatggcagaatgctgggattgaactatccgaagctgataaaataatttttataggttattcgttgccaagtgctgattttgaaatgagacaacttttatctcgaatgactaaacgaaacgttaaaattgaagtcgtaacgtatgaagaagataaaggaaaggaaaaggaaataaaaaaatattggcaggcattttttggagagcgtgagattaatgttcatttatgtggtgccagccatttcattgagcgatccttatatcttgattaa

SEQ ID NO: 109810 - DNA, 1200 bp, Enterobacter aerogenes
gtgtttcagcgcctcggcgcacctttttcatccgggaaaattgcctctctcgtggaaaccctcaaactgatagttccacaacagcagaatccggcgcggcagttgatcggtttccgcaacggcgtgctcgacacccgaacgggattgtttagcctgcacgataagaagcactggttacgtacgctgtgcgaggtggattacacacagcccgttgacggtgaggcgctggaaacccatgccccggcattctggcgctggctggatcgtgccgcaggtttcaaacctgaaaagcgggacattatcctggcggcattgtttatggtgctggctaaccgttatgactggcagctatttctggaagttacaggcctcggtggaagcggcaagagtatcctggctgaaatcgcaaccatgctggcaggtgagaataacgctacctcggcaaccattgaaatgcttgagtcgccacgagaacgagccgcattaataggcttttcactgattcgactccccgatcaggagaagtggagcggtgacggggccggactaaaagccatcactggcggcgatgcagtatctgttgatcctaagtaccagaacgcctattcaactcacattccggcggtcattctggctgtgaacaataatccgatgcgttttactgatcgtagtggtagagtttcacgcagacgggtgatcctgcatttccccgaccagatagccccggaggaacgcgatacccagctcaaagagaaaattgccagcgagctggcggtaattgttcgccagcttatgcagcgtttcagcgatccaatgagtgccaggacattacttcaggcgcagcagaactccgatgaagcgctcaccatcaaacgtgatgctgattcagcgtttgatttttgcggctaccttgaagttttgcctgacatcacgggcatgttgatgggtaacgctaacattgtcccacgtcagcctcgtacatacttttatcatgcttatctggtctacatggaagccaacggctataaaaacacgctcagtctaaccatgtttggcaaggggttgccgttaatgctgaaagagtatgggctgcagtatgagaaacggcggaccaagcagggaatgcagaccaatctggcactcagggaggagagcaatgctgattggttgccaaagtgcaatatagatattagaaagtaa

SEQ ID NO: 109811 - DNA, 1158 bp, Enterobacter aerogenes
atgaaaaacagtgatatagaaaatgacttagagcaatttcaggaattactgaactgccctgaacaaaactggttgcttggtgcaggaattagttattccgcaaaaattcccttaatgtaccccctgacctcgaggattatggagttgatccaagaggatgccgaggccttaaatcttataacaaaaataaaatcagaacttccaccaaacctccatatagaacatatacttagtcacttaggtgattactgtgcaattgcttctcgcacattgaagaaagaaattgaaatatgcaaagaaaaattcacattagattgcattgaaaaaatccataataaaatacttaaatatattgctgatacaatacgatacggttatgtagaaaagcctgaaaaaatcattggtgataaagataacttcatagtcgatataaaagagcattttaatttcattaatactattttttatagtttaagagctggtataaatgaacgtagaaaaccaatacggttattcacaacgaattatgacacattgcttgaagatgctttggcattaaacagaataccatattgggatgggtttagtggtggtgctgttgcgtatagatcatatcaatatggacaaattgagcctatgaacgatgcaaaggctcacataattaaaatgcatggttcaatagattggtttcaaaatgatgatgggtctttgtggagagtaagagaccgggatacataccctattaaaaacaatagagtattaatctatcctcaatctacaaagtacattgcaactcagaaagatcccttttctgcacaatttgatttacttagaaaatctctgaactcattatcctatcatgtattaattgtttgtggttatagtttcggagatgagcatatcaatcaagaaatttatctatcactatcaaaccctaacaataaaacagtcttgcttgcattttgcgaggaagttgataacaagataccggaagctcttgatatttggagatgcagtgactggggagaaagagtttatgttgcaacccaaaatggtctttatgtaggaagtaaatcccccattaagagaaaggaggaatatgatgattggtggactttttctgggatgactaaagttctaaaagaaggggtcctataa

SEQ ID NO: 109812 - DNA, 1899 bp, Enterobacter aerogenes
atgaaattcaaaccagtagaagagttgaaaataggacacgtagtagaagtgaccggtacaaaaataagagtagaactgtccaacaatgtagaagaactgactagaagttattgtggtaaagtttatgcaataggacagctgggtagtattgttaagataaacttcggaagaaatatcatttttggttttgtaactcttttaagaatgagatcggatgaattacaacctaactctctaccaatccctccagaagcagaccaacgtatcatggaggtagagttgttctcgcacggttactggtcgccatcaaatcagaaattaacattcaaccgcggtgtaaaaatatacccattgcctcagcagggcgtttatctcctaactcattctgaatcagcagaactctttagtgctgctgaaggtgcaagagatgactcgtgtaaccccttagtgccattcgctcactattcaagtgcaaattcaataccttgtagagcgaatattgacaaattatttggacttcattgtgcggtattaggctcgacaggatcaggaaaatctggtgcagtcgccactatccttcatagcatattagaacactcaagcattgagggcaaaaccctatctcctcgtattgtaatgatagacccgcatgatgaatatgggttagcctttaaagatagagggataacttatcaagcttacagtgctcttgaaaacgatgaaagtaaaaaaaacataaaactcccatattggctaatgtcaagtgatgagtttagaacattaataattggcaaaactgaaaaagaagccacatcccaaaacaatataatatacaaagcgctatctcatgccaggatggttacatgtggaattacaaatcgtgcgccagataactataactggcctctaccgacagatgatcaagctctagatgaaccgaggccgactgaaggtcattctattgaagaaatactttcatttgactcggataaaccaattccgttttgtttaaatgaatttgaaaatcacataagatacattcaagcagccagaataaagtcaggaaaaatagaaaaagaaacagaatcaacatttgctgaaaagtttaaatcaattttagacaaattatcagtgttaagacgagacccaagaattaaattcatgatggaaaactggtctcagaagaatgactataatcttgagcaaatattagatcagctagttggtgaagtcattattgaagaaaaacataaagatatacgaattattgacatatctggcctacccaatgaagtcgcaggtccattagcagcaacacttgccaggcttctattccaatataaagtacatcaaacagtatctgaaagaaataaagatccatttcttctagtctgcgaagaggctcaccgctatgttcctaaccatggtgaagcccaatacgcagctgcacaatccgcgatccgacgaattgcgcgtgagggcagaaaatatggtttgggattaatgttaatcagtcaaaggcctgctgatattgaaagcactgtcatttcccaatgcggctcatgggttgttttaagattaacgaatgcgacggatcaacagcatgtctcaacatttttaccggatggcctttcaggtttggtagcgtctttacctagcttatctcagcaggaaggtatatttgttggcgaagccgctgcattaccatctagaattaaaattaattttttaccggaagatagaagacctcggtcagagaacgttagtttttctaagggatggtctgagccgagatttacagtagaacaattaaagggtattgcagacagaatgtctggccaagtgaaaatatccgataatgtgcaagttaatattcaggcagatgatttacctttttaa

SEQ ID NO: 109813 - DNA, 276 bp, Enterobacter aerogenes
atggtgccgcaggtcatgttattgatgctcttgaagagcgctttaagagactgcaactcccaattgaaattattaagattcaccatgagcctgatggctcatttccgcatgggattccaaacccattacttcctgagtgtagaaaagatactactgaggcagttattaagcataaagctgacatggggattgctttcgatggtgatttcgaccgttgtttcttatttgatgagaaaggtaactttgtcgaaggatactatattgttggcttattag

SEQ ID NO: 109814 - DNA, 819 bp, Enterobacter aerogenes
gtggagaaacctgatctaaagactgctaccgaatacttagacagcggggaatattattggaatagtggtatgttcttattccgtgctaaaagttatctggatgagttagctcaatatcgtcctgatatttatgaagcatgtaagagtgcaatggctggtcttgaacctgactcacaacaagattttatccgtgttgatgagcaagccttcaccgcttgcccggatgagtcagtagactatgctgtaatggagcgaacaactgcggcagtagtcgtccctcttgatgctggctggaatgatgttggttcttggtccgcattgtgggatgtgaataataaagatacgactggcaatgttattaatggcgacgtatatgctcataatacttctaattgctatattaacactgaagaacaactggtcgctgctgtaggggtcgaggatttagttattgttagtacgaaagatgcagttcttgtcattaataaatcaaaagttcaagatgtcaaaaaagtcgttgaatatcttaagaaatgtagtagaagggaatatcgtttacaccgtgaatcgtatagtccctggggcaaaagtgatcaagtagtaagcgcccctcgttatcaaatcaacaaggttacagttaaacctggtggaaaattttccttacaaatgcatcaccatcgtgctgaacattgggtcgtgctggccggaactgcacaagttacattaaatgaaaaaatctatttgctaactgaaaaccaatcgacatttatccctattggatcgcagcatatgctggaaaatccggggaaaagtcgttga

SEQ ID NO: 109815 - DNA, 150 bp, Enterobacter aerogenes
atgacaggaacggactatccgcaccttatcgcaggggaaaatatgcacgtcgaaaccgcaggcctgatcctcctcccagcgctcaatcggcacggtaattggcccatggcgctgatagtgagtttcataatcatcgggcatctcacttga

SEQ ID NO: 109816 - DNA, 210 bp, Enterobacter aerogenes
atgaaaaagctaattttgttgggtctactggttctcagtggtcaggctatcgcaactaaaatcacaatgacggatccacaggaagaacagacggagaacgggaaaactctctgcatctatgagaacagcatttacctgtttacgttagtaacgcgctcgcggacctgcctatattcgaagacgttcgacacagaggataatgaaaagtaa

SEQ ID NO: 109817 - DNA, 165 bp, Enterobacter aerogenes
atgaatatcaattttaaatctgatgtatttcacaaactataccaactggcagaaaaacaggatacgagcataccagtattggtaaacaaactaattgaaaaagcccttatcgaagaggaactaaatgaacagaacggaacaatcactaaaaataaaaatcgttaa

SEQ ID NO: 109818 - DNA, 360 bp, Enterobacter aerogenes
ttggcgctagcgagaaatgtggtatttgaagaatcaattgaattaggatttaacaacagaaataaaaaagttagggtttctaaaaaactaaaaccattagcgatcattaaactcagcgatccatctgcaccactgacaccagacgaacaatcaataattaactctatgaatggtgtgacgtggaagcctcgccaaaagtatgcaggttttaaattcaatcgtgagccgctcaaatttgaatgtttatttgaaagtgtagttgaatacgagggttggcttgaattcaatcgtcttgagaatgaaaactttaacggcaatgatcttggattagattttgatgcaccaggcatctctgattaa

SEQ ID NO: 109819 - DNA, 276 bp, Enterobacter aerogenes
atgattaattttgaacaacacaaaaacattgtagaagaatttattgaacaacactacacgctggcgcatagcttgatggttgatagctatattgacccagaagcctattattcaaactaccaaatgttgctggaggctatgaacactctcccggagcatccagaattctttttagagtggctcttagaatatgaccccgcgatttatattaatttgatggagcttgttgtcatcaccagaacagttcacaacgtctttgaacaagtaacggcataa

SEQ ID NO: 109820 - DNA, 2916 bp, Enterobacter aerogenes
atggcctttaacccgccgctgggatcgaccaacgccgatgtttttatgggcaacgttcaacgtctggatgaacttgttaacggtcctgcagccgacgttcccgatcgcgcaggtaatccgctatattcctggcgtctaatccgtcagagcctcatacctcttagcggccagtacatgacacttgaggaggcccaggcggatattgccaatattcctgttggagccgcgacatatgtcaggagtacagacggtagctcactcgctgatgagtatattaacaacgctggagcactggaggctaccgggtggaaaatgccttcgcaaaatggtgtcaatacggcaattagttatgtattggatggtgtttatcccgcagataactcgacgtcatgggaaataacgaacaatgttgttatgttctctgatggttccacagtagcaaatgcctcatgggatgcatattacatcccatgtaaaaaaatggaccagattgattacttcggggtggtcaatacaactactgtgggcgaggtcacagcctgggtaattcagtgtgatgcaaacaaaaaatacgtaaaaacattgaccacgactgtatctactggtgtggcaacgcagcagggcacagtacatggaactgcgacgcaggatggttttttctatgttcgcgttcgtaattcgacaaaccctgagtggtatattgattacctgaagaagagactcatcacctctgatgattatctgactggcatttcccaaattaataatggcctgtggcctgaaagcgcatcatcagtctggtctattaccacaaagtttgtgattttctccgctggtctgtcaggaacatatgctgactgggatgcgtattatgtcccatgtaagaagggcgatcggtttgaatactttggttctgtaaacacctcaactgctggggagatgaatgcctggttaatccagtgtgacgcaaacaaaaaatatgtttcagatctggctaccagcatttcaacaggaacgcctacagagcagggggctctgtttggaactgctgtacaggatggctatgtctatatccgggtgagaaataatgctaacccagcctggtacattaacttcctgaagaagcacattctgatctcttccgagcttggggccgttggtggtgtggcagagtacgatgtccttaaagcggtaagcgataacgggaagacaactgattacaccaaaaacggcaattactatgtttttggcgtcgtaatgctgtatgacgggacgattaacagcagtgctggtaatgactggctggcctactatctccccgtgtctgccggtgacaaggtgaccatgtcgggtatctacggttcagcgaccgtcgggcagcagatggcctatttcattcagctggaccatgacagaaattttgttgctcctctggatatctataccagcaccggagcctctgacgtccagttaacccgcagcgttatcgcttctcaggatggggtgatgtatgtcagggtgcggcgtgtactgggtggcgtcgaacaggcatacagcgttacagcattccagcgcagctacaagctgctgcaggacctgtacgctctgcaaaatcaggttgatgacctgattaataacggggcagtgcagacgcctgtgattggtgcgactctggagcagttgccagtaagactggataacagatttaactacaacgctgctgtatatattcaggataacgttgtctctgcaggaaattacactttcgcagttggcacacgtgggaaccgtcaccccatcatcatgcgcaaagagaatcttaccggagtgtggacatatttcgatcttcactatgtcaccggaaaccctttagcatcgccaaccgaagaagatagtcataacgtttacagcctgggcgtgacgaaggatggttatctaattgtcagtgggaatatgcatgccaaaccgtgccgggctgttatatccaatgctccatatgacattacggcatggactgcgatcagttacactgactcagcagaggtaacatatccccgctttgtcaattacccggacggaaccactcaggcattctggcggcagggggtatcggctgctggtcaatactattctgcactgtttaatgacacgaccagaacgtttggacctgtattccagattgcagctactgaccttaatgcaaacgcctatgagcaacggcttggtgttggccgtgatggaagtcttcatttttgttttgggctacgcgtcaacgctaacgctgctgatgctaaccgcggcctgtactatgcgaagtcgatggataaaggggcgacgtggacgaacgccgcagggacgataaactatccggctcctctgacagaggctaacagcgagaaaatcgctgatatcccgatctattctggctatgtgaatcagaatggcggcgcgtgcgattacgacggccactatcatacctgcctgtggcagaccgacgagaataaccatacgcagatcgttcatatctggtttgacggcacagtctggcatgaagagcttgtgtcgaaatttgatttcaaggtagacacatcccggcctctgctgactggtacgctaagtcgtccagccctcggatgtacccgctacggaaaaacatggattttctatcgaacaacggaaatggggcgcgatggtgagatacgggcaatcgacgtttccgaaccaggtaacccgattgaacatatcgtcaccgggttcaatatggggacactggaactggcggtaaataccaatattctgatgaacgataaccaattgctgatgctggcaacccgcggtgctattggttatgaggaccctatgtacgctcgatatacagatgagccagggtatctgttagttgctgtgatgccgtaa

SEQ ID NO: 109821 - DNA, 3036 bp, Enterobacter aerogenes
atgacgatcagtatttatccctcccggttacctggcggaccacttgaaagccatcagcatgcgcgcataaccctgcatgagtggatgcagaggaatgtcgaaaattatgatcccgggctgccacagccaatcagcgttgagattgatggcgtgcccgtagcatcagaggaatggccgcggtgcgaactgttaccagatactgacgtgaagatttaccccgtcccttacgcgacaggctttgccattgccgccctggttgtagcggtagccgctgcagcttattccatctacatgatgaataacctcgatacgggggcctacgattcatctacgggtaagtctctggacttaaatccggcaaaagcgaacacggcaaaacttggcgatcctatccgggaattgttcgggcgtgcgcgggtttatccggattatgttgttcagccggtcagtcgttttaaccttgatgacccaaccagaatgacagttgagatgttgatctgcgtgagtcgtggaaatgtggcatttgctaacggcgatatcaggattggttcgacgcctatttccgccctgggtgattcattctcctggacgctgtatccgccgggggcggatgtttccggcgatcgccgcagtgaaaactggttcaactctaccgaggtgggcggaacgtccagcggcagcggccttgatatggcgcagacagcgcctgattcatccgatattaccgccgacagcatgaccgtttcgggatcgtcggtttggttcaccgggctgagcgatgatgatggcgatgattctctgcctgagtcctgggtggaaggcgcgctggtgactatcatcgcgccgaccaactacctgatttcgtcttcatcgggttacagcgtcctgttcagtgacacgctgactgagattaacccctatgccggcatgcccgttacactggaaattaacggggcagaatatgatctcttcatcgctacgttcacgccaaagcaggatgctgttccgggagtggggggatcagctgcttcattgcgcggcagcgcagccccaacaacctatgatttttcgagcatcagccagacatttaccctgacctggcaggcaaccacctataccgtttcgctgatcgctaactacggcaatatgtctggcctgctggctgcaatcaatgaagcgatcgccgggtcgaacctggtcgctcaggatgatggcggggtcgttcgcatcgttgagaagtccagtccgtggctgggtggaagtattaccgcctcatcacttccggtttccgtatttggggacagcccggtattcaccgatggtaccgcatccagcggtggcagcccggcgatcaccgccaatgtcacccttgcgtatggcagcggcaccggcgcggcattctccggcattcctgaaggaactcagcgattatcacttgcgcaccgcggtaatgaatatcgtatcgcctcagcagatggtacgaccgcaacggttcagcgcatagtgaatggcgccattgatgcaacctggcctggcttttcacccaggacaatgatcgattaccaggcgacagggattaacgacagcaatacgtggatggggccattcctggcttgtcctgataatgaggtggttgatgcctttgaggtcaacgtttctttcccaagtgggttatgtggatttgataacaaagggaaaaaacgcgtccgtcataccggggtggatattcagtaccggacctatggaagtggcggcggctggcagacggcatcattccagtatgaaaacaaaaatatcaatgccctgggttatacgcacagaatcacgctaagcgcacctgcgctggttgaagtcaggatgcgccgccagaatgagcagggcagcaataatgcgcgtgactcgatgtactggcagtcgttacgtggccgtttgcttaaccgtcctgcttcttacgctggcgttacgctaatgggcgcgacggtcgagaccgggggcaaactggcggcacagtctgacaggcgcgtaaacgttgtggccacgcgtatttatgataccggcgccccgcggcgtatctccagcgcgctgtttcatgtcggtaattctctcggcctggcgatggacaccgaagccattaatacccttgaggcaacctactggacaccgaaaaatgagtatttcgacttcgcgacaggcgacagtgtctccgcgctggaaatgctgcagaagatcacaacggcggggaaatcgtacttcctgctgagtgacgggctcgcatctgtaggcagggaagggattaagaactggtccggcattatcagcccgcatgaaatgaccgaagagttacagaccaccttctcggcgccgtccgccgatgattacgatggtgtggatgtcacttatatcaatggcacgacgtggtcagaagagaccgtacagtgccgcacgccggataaccccacaccgaggaaaattgagagttataccctcgatggggtgcttgacccgaaccgcgcctatcaaatcggcatgcgccgcctgatgaaatacctatatcagcggctggggcataacacgacaacagaactggatgcgctggtctatcagtatggcgatcgcattctgctgacggatgacattccgggaaataaaacggtaagtagcctggttatggatatggccacatctggcggtcaaacggtatttaccgtctccgagccgctggactggtcctttgaaaacccgcgcgcaattctgcgttaccaggatggttctgcctccgggctgctggtggccacctttgtcggggattatcagttgtccgttccgtggcaggctgcttttgatgaaattctgctggacgatccgagcattgagccaccacggctggtgttctgcagctcaacgcgcagtgtttatgacgccatttttgaggagattgccccgcaggcagatggaacctgccaggtgacgacaagacaatacagcgacattttctaccagtacgacgacgccagttaccccggcagcgtctcttaa

SEQ ID NO: 109822 - DNA, 207 bp, Enterobacter aerogenes
atgaaaatagaactcataactgcaaaagactataaacttcttaacggagctgttcctgcgcttgaaaaggaactgctgcgccggttatcccagtcctctgatgactgcaaattaagaatacggaacaccagcaatgatggacccagcgttttgggcggtgctgtcggcgataaaaagcgtgtagagcaaaccctgcaagagacgtga

SEQ ID NO: 109823 - DNA, 1665 bp, Enterobacter aerogenes
atggctaatttattggattggaatacgctgcatcataaggtacatgcatacttagacatagagaatggaatcgataaacctcagaaggcttttcccattctcatggtggcaactctgcttaatgtatcggatgaggaagccgaggatgctataactgatggctcgatggataggggggtcgatgctgtttatgtcgatgatagggatggtagaaattctatacatatatttcaatttaagtatgcagacaattatgaaaacaccaaaaagaactttccgagcaatgagattgataagttagtttcttttttttctgatttgttggatttaaatagaacactagaaaaaacctgtaatccaatactttggaataaggtaaaagaaatatgggctgcacttgaaaaaaacaatccttctatcgaggtgcatttttgtggtaacactgttgaaatgcaagaaggagaaaaagaacgcgctaatgcatcgttgagtaaatataagtatttcaatgttcatcatcatagtttagatacaatcgttaattactttgttgaacgtaaaaatagtattatcgatgagcgattgcagatagtcgataaagattatttcgaccgcactgatgggagtatacgaggactgatctgcactgttgaagcttctgaaatagttaggattattactaacccagacaatcccaaagaagttcgcaaagaaatttttaatgataatgtaagagtttatttaagtcggacaaataaaataaataggcgtataattgaaactgcactatcagaacgtagcccattgttttggtatttaaataatggaattacgattacttgcgactcattttcttatataaaagggaaaagggcaccattagtagaactaagtaatattcaaatcgttaatggcggtcaaacttctaatgcattgtttgaggctagcttgagttcagatgaagcattagatgatgtattaatcttagtaaggataattgaaaccaagtcccagccagttagtttagctattgctgagtcaacgaatagccaaactccaataaaaagccgagaccttcgctcaaatgatgatattcagaaaaaattagaagaagctttcgaaggtatggggctttattatgacagaaaggatgggcagcattctaatcaacagaaaaatattaggatagatgctctgagtgcaggtcaggcacatttggcctactctttggatttacctgaggttgcgaagaaagatagggggaggattttttcagatctttatgaaacaatatttacagatgaactaatggccgatgatttattggctgcaactaaagtgttagctgttatagaacataagaaaaaattattgcaatcttccataaggaaagaagagaaattcaaccctgctcatatgtttttaattgacggagcatatcatgttttatttgctgttgggcaattatgtgatgttaataacgttgatagattgaattatcaaaaggctattacgtttgttcctatagcaataaaatatattggggttatggttgaaaaagctcaacgtgatgatgcatctttttcttttaatagatattttaaagatgcaaaaactaagactaagatcgctgcttacattcagggtatggctaaagcaaaataa

SEQ ID NO: 109824 - DNA, 882 bp, Enterobacter aerogenes
atgcgtgattacggcaaggtgcacacatctttttggattagcgatggaatgcgtcgggtatctgatgatgcccggttgctggcgctgtacctgcttacaggtcaacacaccaacatgatcgggtgtttccgacttcctgatgggtatgtttcggaagacttagcctggactcctgaaagggtttctaaagggttcgatgaactatcaagtaatggtttcgcaacccgcgataaggcatcgaaatgggtcctgatacgtaacttcctatcctggaattctgttgaaaacccaaatcaggggattgctgcgctgcgcctgttcgatcaagtgcctgacaaatcctccataaaaccagagctggcgcgggttcttgctgctgcaatagctcatataggtagcgccaagctaaagggttcagaaagggttctacaaccgttccttaaccaggaacaggaacaggagcaggaacaggataaagatattttggggcatggctctgccacccccccagatagtgaatcttcagacgaagctccatctgaaaagccgaaaagcagttattcggaggaatttgaactggcctggaaggaatacccgaaacgagccggaggcaacagcaaggctgacgcgttcaaagcctggactgcccgaattaaatcaggcgcaacagcgcaggagctcatcgatggcgttcgtcgatacgctgcatacgtgactgctgccggaaaactcaatactgagttcgtgaaacaggcatccacatttttcggtccgtccaagcactacgaggaaccatggaccgcaaccgcggctgccggaaagcgggatccgaatatggtgtcccagcccaataagttaattcccagcgggttcagggggtag

SEQ ID NO: 109825 - DNA, 144 bp, Enterobacter aerogenes
atgctgctggaggtgagcgcctggttgccgccattgagcaggctggttaaggacgacatcgacataccgccgccgctttgctgggaactgctgctgagctggctggcggcgctattgagcgagtcctgccaggaggcggcgtag

SEQ ID NO: 109826 - DNA, 2703 bp, Enterobacter aerogenes
atgtgtaatcacgatgacgacagtaatctcaatctatatttaaaagctatacaagcattaaaagaggatgatttttcaaaaaatgtacttaaaccactttttgagtcgatgtcgttttcacgagtggattttgtaggcggcccatatgagtatgggaaagatttagtagcgatacatgatattcctttgaaggggacgtgtatatacgttatacagacaaagaaaattggtgaaaaatcaaatacgtcagagaaaaatatactatctgatcttataattcaattaagacagtgcttatcaaaaaaagtaaaattacataatgggttcgaacagatccctgattatgtttatttggcttctccatttcagatcagtcagagattactttctgaaattcatgaacagcttcgttttggtgataaaaatgttgaaattcttgatggtccgaaagtcatagagttaataaaaaaatataaaccactgcttttagaaaatctattgtcaattagtgacaaacttcaattgcatgatatacaacaattaaataatttagaattaatagccgcattaaatcaaaaatattcaattgatgaactaaattgttacagtgatttggcattttttatgggaacaatagacagtaatatattacttgatagcactttttccataaaaaaagaaaattttaccctgtcgaaaggttcttgggatttattgaataaagaagtatgtcggccattagaaaaaattttagggtactatcctttaacccaaccaagtgatgatattgatgatgcttataataaagcaatgttaaaattcaaatctgaacataaccaaaaaattaaaaaggatattgatcaggctcagcaactaatttcgactaatacacaatcaatacatagcattgtatccactatcgattcagcgattaatggaatgctgtctctgagtcgagataatgtgactttgcctttagctatagaatgcaataaaatccttaaaaaaataatttcaaattccttttctaaacaagaaatcgatgcggctgaaagttttatttctaaagaaaatatacataagatttcagaacagcataaacaaagtgtttttccaaaatttctcaacgcaataaaagtcatcaaaaaaataattatacaaaaacaagaggttatgattttatcgaatgaatatatagatgaaccacaaatttctataatttttcagtatgataagattgatagatggatcgaaagtaagtgtaaagcttataaggataatatatatgacattaacaaaagcaaagagtgtgttgatttagcactctttttaacagatacgcagaaaacacttaatgctttggatatacttattaataaagttgaggatagtaagaaatttataacgataaccaaaaaatccaaagcttacagtgacggactgtctatttcgccttttaagctttttgatagtagttatgatattgctgtttttgggggcgctggagcaggcaaaactaccacattacaaatgtatgttaaaaaactattaagtgacgcaaatagtaaagttatctatattccactaaatagatacatgaataagatcaatgtctcattagatgataaagtgaggcattatgatattttgctttcgcttatattaactgcaaaagatttggagtctaatcaagataatattaccagcatcaagaattatttttctgatgaaataaaagtcaaattagtacttgatggtctcgacgaagcatatgccaaatatccaggtataatcgatgctataaatgaatttaaaataatgcatcctttaattcaaatattgatttccagtagagattgcgtgagttatctttcgaaagttaattttttaggtataactcttttacccttcagcgaacaacaactttataaattcattacttcatggtttaaaaataatgatgtaactcttggtgaacgtataattgaaagcattaaagggaaagaaattgcagaaatagttaaaactccccttcttgcaacattgttatgtgatcttgctgaaaaaggtatagatataccacgaagtgaaagtgaaattttcacaaaaagactcgaacttttttgtggtgtatatgatacatataaagctatacgtagaacgactctatcacaaagtattttgcaaaaagcagcaataaaaattgcttatgctttgcattctcgaaatcttcgttcaggcacaaagagtgatattataaagtttatcactaatgatagtagctttaattatgacaatgaaacctgtgctactgctgttggagagttaattgatccgtgcaatatgcttgttcatgatggaatatcaggaacttattctttcggacatttacgatatcaagagcatttagcatcactagaacttttacagaatagatcaattgaaatagttccttatttaaagaatgattggtggagggggactttatgtctttatgctcaaaattgtgaatttttctcacttattgaggaatttacattgaaatatcataatattcaatcggcattaattactctgcgagaaatgactaagtatcgtcctaaaaaagaacaagctaatctattatatttgattgataaatatgaaggtactgacgattcattttatgttgatcccgattgggaacatacagttcattggtaa

SEQ ID NO: 109827 - DNA, 846 bp, Enterobacter aerogenes
atgaaatatctacctgtaggcgttgatatcgcaaaaagtctgattcaagttcacttcatcgatgagcacacaggtgaagtggttgataagcaattacgcagcaaagattttctatcatttttcagtaatagggaaccttgcctgattggtatggaggcatgtggtggatcgcagcactgggcgcgtgagctggagaagatggtgcactcagttcggttgatgcagggacggttcgttaaagcattcgttatgggcaacaagaatgatgtgatggatgcccgagctatctgggttgcggtccagcaacccggcaaagctatagccgtaaaaacggaagagcagcagtcgatcctggtgttgcatcgttctcgccgtcaattagttaagtttcgtactgcacagattagcgccctgcatggaacgcttctggaatttggggaaatcatccacaaaggacgagcagctatggacaaagaactgccattggccctggaacgaatgaaggcgaagctgccaccatatcttattactgtgctggaagatcaatacaacaggttgaatgagttggacatgttgatagatggaatcgaaaaacaacttaacagcgttgcccggcaaaatgaaacctgtaaacggctgatggaaatccctggagtagggccactcattgccacagccgcagttgccactatgggagaagcatcggcatttaaatccgggcgagagttcgctgcttatgtcggtctcgtaccaaaacagactggttcaggaggaaaagtgcgtctgctgggtattagtaaacgcggtgatacttgtttgtgcatggtgcccgggctgcgtcattag

SEQ ID NO: 109828 - DNA, 213 bp, Enterobacter aerogenes
atgaactcccaatccgaaccgacaattattattaacggcactacacttactgatgcacaagtaatgactctccgctgcgcctgttctaatttcggctcagatctgcttgagaatggtcttggcaatgatgaaagcggtaaggcaatgagtgctggctatctggccagactacgcgaattagataaattactgcatttacactgtaagtcttag

SEQ ID NO: 109829 - DNA, 279 bp, Enterobacter aerogenes
gtggcagcagggggggattttccacgatccctggcccacgaaagtggcccggctggcttaacaggttattttgcagtaatagtcatgttatattccgcgattttatcggtacaggacatgactaaacctacccgggctgaacgagaaaaaatcctggcgatgctgccagaagattacatgaaccctgtgcaacaggactacttccggcggcttatccgccatgaaaggcaggaggtgcttgatcatatcttatgcccaggcatgctaccggatatttag

SEQ ID NO: 109830 - DNA, 1188 bp, Enterobacter aerogenes
atgcatctttcacggcgaatttttattcagaatgcagcattaggattatctgcagcaactctttcggcagcatctgttgcagccccccaactccccaccccgcatacccccctaaagcaaaaaactgtaatgcctcacgatcttattaagatcattagcttggatggactggagaaaaaggctaaaagtgttatgtctgaggctgcttacgcttatattgctcatggtgccggagatgaatggacctaccatgaaaaccgtcgggcgtttaatgattatccattattaccacacagattaagtggtgtggcagcagataagattgacattcaagttgagttgctgggacataagttacctcatccattactcattgctcctatgggagcacatatgtttgttcatcctgagggagaggttattgcagctgcaggagccgaaaattcaggtgccctttatgaatcttccggggcttccaatcgccctctggaagatattgcaaaagccaacaaaggagctaaatggtttcagttatatttcaatgctgacactggggttactaaaagcttactggagcgagcaaaagctgcgggttattccgccataatcattacagctgatgcacttgggccaggaatgagtgatgcgtttcttagaatgaaatcccctttccctgcaggagctactttcggaaatcatgacccacgctatggcggaaaaggggatttttttaatcaaaaagtagaacttacacctgcagacatcgagtttgtcaaaaaaataactgggttacctgtaattttgaaaggaatactcaggggagatgatgctgaaacagcaatccaagcaggggctgatgcaatacaggtatcaaaccatggggggcgacaaattgatggagtgccagcggcaataagtcagttgcaggaggttgcatccagagtggggcacaaagtgccgataatttttgacagtggcatccgccgtggaattgatattgtaagagctctttcattgggagccactgctgttgctatcgggagacctattctttatggtatagctgttgctgggagcaatggtgttgcgagtgttattgagcatttgaagatggagttaaagagcgcaatgctattaacaggtgctgttacgctaaaagatttatcgtcaaaatttgttaagttttga

SEQ ID NO: 109831 - DNA, 654 bp, Enterobacter aerogenes
atgagtaatgttgataacggaacgaagatctacacaccattcactttgaagctttatgactggtgggtgctgagcatttccaacagttacgcttggcattgtccgacaaaagagattttgctcccttattttttacaaaatttaagacctaaccatttagatattggcgttggaactgggtattatcttgccaaagctcctgcaaattacaatatctcacttatggatctcaataaggctagtttgaaaacggcatcagcaaggatagggaaagccagaatacggtatgaagttcagcataatgtatttgaatcttatccagaggaactacatggtaaattcgattctatatcaatgtattatctcttacattgtcttcctggggcgatggtggataaaggtgttgtcataaaaaacgtgaaagctgctttaactaaggacggaatactttacggggcaaccatacttggcgatggggtaaagcataatagtttctcatcgaaactaatgaggatttataatcacaaaggtattttttctaatatgagtgattctgaagaagggctaaaaaaaatactttctgaacattttgaatataccgagatctccgtgaaaggtactgttgcaatgtttttggcttctatggcgaaatag

SEQ ID NO: 109832 - DNA, 828 bp, Enterobacter aerogenes
atgaagcgcaataccgtaagtaatctgacagaaaaagatgattttgatacgctggaaagtattctcagcgttaatattcattctctgttgcggccagacggcgggacgttgctttctgacgtccatttttcggtcaaagcaggagaatgtctggccattatcgggcctaacggcagcggtaaaacttccctcgtgagagcgattagtcaggaactgacccatctaaagggggacattcttctgcggggccgttctatgtctgctttatcccgtcaacagcgagcccggctggttgctgttttggcccagaatgatacacctgatacgagattatcccttgaggattatgtagcgctggggcgtatccctcatgccggggatgtaccacgtaatgtacatgacgcgattgtagcaaatgccattaaagaaaccggattacaactgctacgcaggcggtcacttttatcgctttccggcggcgaaagacaacgagcggcgctggcacgggtactggcacagacgcccgacctggtattgcttgatgaacccaccaatcatctcgatcctcccgggcgcgaggaactgctttcccttgtaaaaatcaaggggattgccgtcgtggcggtgttgcacgatctgacactgacagaatcatttgctaaccgtgttctcctcttgtcgcaggggcaatcagtgatctgtgacacaccggagaaggtattggtatcagaatacctttatcccgtttttggcttgaccagttttaccgtaccgcatccccatacaggaaaggcgttgcgtatttttgaagttccgcattatgtataa

SEQ ID NO: 109833 - DNA, 363 bp, Enterobacter aerogenes
atgaatacagataatcgtattcccgttatcgttctgaccaggattctgggatcaagaaaaaccacactacttaacaatattctcagccagcagcacggcctgtgggtggcggttattgagaacgaattcggtgaaatcggtatagatgatgcattggttatcaatgcagatgaagaagtctttgagatgaataatggcagcatctgctgcacggtgcaaggcgatttgattcatatcctgagtcgtctgatgcaccgccgcgataaatttgaccgtattctgatcgaaaccaccgggatggccaatctactgagtgaagcaaatgaagagagagccgctaacgatcctgaatggttttcttag

SEQ ID NO: 109834 - DNA, 972 bp, Enterobacter aerogenes
atgatacctttgtcaatacaacaaaatctccagtctggtttgcactccatgaagatgaaattagcgacgtatctcgcggcagcattctctgtgccgtttttttgcagtacagctttagcgatgacttatactttaccgtccaatggtagtcgtattgttggaaaaaatcaggtgattactatcccaaaaggtaatacccaaccactggaatattttgcggctaaataccaaatgggactgtctaacatactggaagcgaatcccggcacagacccctttcttccaaaagaaggcacagtactgaacattcctcaacagttgatcttgccggacactgtccatgaaggaattgttattaacagtgcagaaatgcggctgtactactaccccaaaggtaccaacacggtgattgtgttaccgattggtatcggagagttaggaaaagacacaccactccactggacaacgaaagttgaacgtaagaaagcaagtccaacttggacaccgacggcgaaaatgcatgacgaataccgtgctgcaggtaaacctctaccgaccgtcgtgcctgctggtccagataaccctatggggttgtatgcgctgtacattgggcgtctgtatgcgattcacgggaccaatgctaacttcggtattggcctgcgcgtcagccacggctgcgtccgtttgcgcagcggcgacataaagttcttgttcgaaaatgtgccaatcggtacccgcgtacagtttattaacgagccggtgaaagcgaccactgaaccggatggtagccgttacattgaaatccataatcctttatctagcactgaaaaacagtttgaagatagtgaggccgtaccgcttaacctgaccaaaagggttcaaagctttatcggccagcctgatgttgatcagtttgtagcgaagcaggccattcagaaccgttctggtatgccagttcgtctgaatatatga

SEQ ID NO: 109835 - DNA, 543 bp, Enterobacter aerogenes
atgtttagtcttgtgaagaaaagctccgatagccgtataacatggctcataatggctttaactgctttcgctttggaaatagttgcgctttggttccagtatgtaatgcagttaaggccttgtgtcctttgtatctacgagcgctgtgcattgtttggaataatgggggcagggattactggagcgatagctccacgtactccactgcgctatctggcgttcgctatatggatttatagtgcagtccgcggcattcagctcgcgtgggagcaaactcaacttcagcttcatccatctcccttcatgacctgcgattttgctgctcattttccctcttggctaccactggataaatggttaccacaagtatttattgccaccggagattgtgcggaacatcagtggaactttctgacgttaagtatgcctcagtggatggtgggcattttctcagcttacttgattattgctgtactaatattgattgcacgtctgatcaaatcagacggttcttctactaccactgagggatacacacgatga

SEQ ID NO: 109836 - DNA, 561 bp, Enterobacter aerogenes
atgaagaagaaaacatacattaccgcaatagctttaatcgtttcctctttctcttttagtggacaagccttttcggctaatgagccttcgtctatgctggcgaaactttcgccagaaaattcaggcgggacatttaagtattcaactgatacaaatatttcatccgaacagaaaaaggtgtatgacactattataaaatatcaaactgcattaaatgcaggtgatacaaaaacaattctcggactatttgcaaatgaaagttattcccaatggaatgatatgctgactgctgacagtacagaaaaaagaaaagtccagtatgacaatctttttcaacgtgaaaagtttgagacagagtttgcttttgattctatctggattaatggtaatactgctgtagtcagaacgcatcaccatattggttctgttgttactaacttcaaagaccaaaagacagtaattgacttaaatagggaggttttcgttcttagtaaagttaatggtgaatggaaaatattcctgtatacattcaatacaaatccgttgcaggggagcgcttaa

SEQ ID NO: 109837 - DNA, 4128 bp, Enterobacter aerogenes
atgaataaaatctattttcataaatattgtcatatcactcactcagtgaaagttgtatccgaactagccaaaaaaagaagtcgaggaagacgaaaactttcaacgcttctactgctgaatattgtcacttttatccctgcaatatcttctgcatctgtggtcggtaatgatgtatcttaccaaacttaccgtgactttgctgaaaataaggggcaatttagtgttggcgcagaaagaattcatatttttaacaaacagggtaagagttttagtctgctaaatgctggtccaatgccggattttagtgcttcagatatttacgggatatccactcttgtaaatcctcagtatatttcgagtgtaaaacacaatggaagctacaccaatgtaagctttggaaatggtgaaaataagtataatattgttaatcgaaataatcatccctcccaggattttcatttgccaaggctggataaattagttactgaagttatcccaacagcagtgacaaaagaagggcaagcgccatatgcctatgctgcatttatgggacgctatactgcattttaccgactagggagtggtacccagtatgtaaaagacagaaacaataacatacatcttatatcaaatccttatcgttatttgatcggcggtactgtagcccaaccatattcgtctaatatgataattgcaagtaatcccggtaatgtatttgctgaggttaatgggccattatcaagttatggtgcgccaggggatagcggttctccattgtttgcttatgattctttagaaaaaaaatgggtaatggtcggagtattagatacatggagcggagaaaaaggaacaaacagtgtgtgggaggttcttcctctggagttccttgaacatacaatgagtaaagataatgactctccagttaagtttaatgcatccacagataaatcgttggcttggtcttttaatcgaggtactggtattggcgtcctaaaacagggaaatatcacatatgccatgcatggtcaacgcaaccatgatctggatgcaggaaaaaatctactgtttacaggtaagaatggggatattgatttgcttgatgatgtttatcaaggcgcgggttctttaacattcaaagatgattatacagtccactcatcaaaagataagatctggagtgggtctggagtcattatagataaaggagttacagtaaattggcaggttaatggtgtaaagggtgataaccttcataaacttggggaggggactcttctagtaagcgctaaaggcgttaatgaaggtggattaaaagtgggggatgggattacaatcttaaatcagaaagcggacgaacgcgggaatattcaagcttttagcagcgttaatattgctagcggccgcccaagtgtcatcctcggagataacaaacagattaatccagataatatcgcatggggatatcgcggtggggtattagacatcaacggaaacgatcttattttccatcagctaaaggctgctgattatggtgcgatactagcaaataactcagcagattttgcgactgttactctagattatagcttgaaacctaatgatattgaactggagtcttgggctgaatcgcgaaacggcactattggtaatctttataaatataataacccctatacgcacacgaccgatttttttattcttaataaaagtaggtatggttatttccccgccaatcaaagtagtactgatgtttggaaatatgttggccacaaccagagtgatgctcaaaaattagcggccgatcatatcaatgccgctggttatgtgttccacggacagctgaaggggaatctgaatgtggaaaaccatcttcccataggaagttcaggagcgttggttatggatggttctgctgataccaatggtagttttacccaagagaacgggcgtcttaccatgcagggacatccggtcattcatgcatataatgagcaatgggtcgcagataaaatagcacaactcggagaccactcagtcctaactcaaccaacttcttttcagcaggatgattgggagaacaggacatttgcttttcgctccctagtacttaagaatgccgattttggtcttgggagaaatgcgacgcttactacaaatattatagcaaataactccaaggtgactttgggggacaaaagagtgtttatcgataaaaaggatggggctggtacaaattttaaacttgaagaaggtgagtcgaccccacaaaaagcatccgacaaaagcttatttaagggaggagtcaagcttgaaaacaactctgttctgaacattaatggagcattccgagggggtatccaagcaaatggcagtactgtaaatatatcatcaaatgatgctatactgggagatagctcattgtcagatacatctgttaatttggttaaaggggcaaacattcttgcaactaagggaattagttccaatagtgtaataaatatatctgatgccatatttaatatcaatggtcgtgctgatgaaacgtcccatgcacttcatcctgtgtataactcagccagttcatggaatctgaatggtgataatgcaagattaaatgtcggtccctacagcatattatctggagatatcaccgctcacggtgctggagttgtttcaattgggggagggggagagcttagcccggatttaacacctgaagaaaatatcttgctaagtgtatttaatggctataaaaatacctgggaaggagctttgaatgcagctaatgctcagatcagtatgactgatacgttatgggctatggatggcaattcaaaagcaggaaaattgaagcttaatagagcattggtcgggtttaatgatagtacatcacattttgtcacgttaacaactgataatttagattcgacagaatcagcttttgtcatgcgaacagatttcaagaattcagacaaactcgttattaacaaaatggcaacgggtgataataataaaattttgatgaactttcttaaaaaaactcctgattcaagcttgtttgacatccccattgtcattgctccgaaaggaacttcagatagtttatttacagcatcaactcagactgtagggtttagtgacatcactcccaacataaatatcagagagaataatgggcataaagaatggattttaaatggctataaatcaacgcaaaataagcagagaagtaatgcagcagcgacttttatgcacattaattacaatagctttattacagaaataaataatatgaataaaagactgggggacttacgagggataaatgataacacaggtagctgggttcgtttattgagtggttctggctctggcgctgaaggacttaaggacaactacactctgcttcaaatgggggtagatagcagacatgagttaaataacatgaatttatttacaggactcatgacaacctacacaaacacagatattagcacttcaacagctctgtatagtggtaatactaaatcatggggattcggtgtttatgctagtgggttatttccctctggtggatattttgatttgatagccaaatacatttacaataaaaataattacagacttgattttttaggtgcaggaattcaaaaatttcactcgcacacactttatgcagggactgaagttggataccgctaccgcctgacggactcgatatttatggagccccaggcagaagtagttttcgggggagaaccgggtcattcctttaactggagtgataaaggaatggatgtatctatgcagcgtgataaatccaatttactcatcggcaggactggtattgtatcgggtaagacattccttggtaaggggtggagtatgacaactaagctaggattgaattatgagtttgatataactaaaagcgcagatacttacctcatggatgctgctggtaagcatcagattgacgggaagaaggatggtcgtatgttgttcagtgtgggggctaatgttaacttgggtgataatacccgtttggggctagaaactgagcgttccgctttcggtaggtataacacagacagtatgataaatgctaacctccgttactccttttaa

SEQ ID NO: 109838 - DNA, 462 bp, Enterobacter aerogenes
atgacctgcgtcgtccgacgatggaggaaatcggttatcctaccggtatttttatcgctggacgggatcatcggcagccagcgcgaatatattcagtggttgctgaagactaggtccggcaagggtaagccgaaagatattctgatgaccgaagccactgacctgatggcgatgaaacttcgtacactgctgcaggtccagttgcacctgacgctggcggtggaagcaggatatcagacaggtgaaaagccgattaccgccacgctggttgaatccgtgctctcccgccagctggatgaccgggaaccaacacttacgtggcatggttaccagctgaaggatatggtggagcagttcgatgcaaaaccggctgaaataagggcattatttaacaatcagttagacccagcccgcacagccgagctacacgacaggatgctggctgttggtttgccgatatga

SEQ ID NO: 109839 - DNA, 366 bp, Enterobacter aerogenes
atgtggagtttacaggtgaaacatggggccttattatccggttcagtggtggaacgggccgattgtgtccatgctctggccagacagcttaacattctcatcagcgcattgtatggcagcgatcttcgtgtggtcctgcgcattgatgagttgcagcatcagccctttgatattcgacaatttgaataccactttcccatcgttattgcggtaaaactggcaattgccgacgacctaaccatatcactggctaggatgttggatgaagaccgggcgtttatcgacagtattctggctgagatgctaaaccgtagtgaagtactctcctgcatcagagactattttcgtaacggacaatcaggataa

SEQ ID NO: 109840 - DNA, 1104 bp, Enterobacter aerogenes
atgataccttcagatctgccatggtgccagctagagacattcttggtacaggggctttctgattacccaaccttgcggcagatttcagcaattgagatacaagcttactacaaaacgtctttaggtttgggtaaagaagagctcaatacggtttttgcattattacacgaacaatcaattataagctacgcgcggacacgaggcgttagcttaaagactctctatagccaaaaaaaatctgggttaaataaaatagtggcatatcatccacattttgcagcatattttcccggttttatacccaaacgcattttagaacaagatgtcactgagttgactgtttttgaacgtgaatttattttcgctattcatgcgaaacaaattttccaagtgtttcagcctatcgtggattattctttacgattaaaaggtggagaagttctgtctcgatggaaaaaaagtggtgttgttttatacccaggggagtttctcccttatattcgctcagagctcacttggtttttgcttactttttatatactgcaagaggcagtgaaaaatataaatcgttacaaagggatggtttatttttctatcaatattccaccctgtgttgccaatcacgataatttatgtcgtataatggatatagctaaaaaaaagctgaaaaatcagcagtgggttgatcggttagtattggagttttctgaatctattgatttccaatatcagaggaaagctgtagaaaacatcgaaaatcttcaacgagttggttttcgtatatttcttgatgattgcttttcactcagtagtgtggtacttcctgtgagaatgccaatttttaacggatataagctagatatgagcgttatttgtgatcttcagaataacccgaaaatttcacttttgataaaaagtttggtctattactgtcgcttagtgcagagtcactgcatcgcagagggaatagatagcttggaaagctttaatagattcaaagagcttggtgtgaaattttttcagggggatctgttttcttccccggttgctcaagaagatttagatgatgtctataggcgcttttatcacaatgtaaatagttaa

SEQ ID NO: 109841 - DNA, 195 bp, Enterobacter aerogenes
atgaatttcatggagtttaacgctcaatcgcccgttgagaaaaaaacggaattgcaccagcagtacattgatattcagctgttattaaaaggtgaggagcggattctgtttggcatggtgggcattgcgtgccagtgtgaagagtttcaccatgacgttgattaccagctttgcagtaccattgaaaacgagtag

SEQ ID NO: 109842 - DNA, 1185 bp, Enterobacter aerogenes
atgccgcaaaaaacattgtcctgctggccgcttgcgttcagcgcggggttactcggtgtcgggcaaaacggcctgctggtagcgatccctgtactggtgattcagacaaacctgggtttgtcgatttgggcggctttgctgatgcttggctcaatgctgttcttgccgtcttccccatggtggggaaagcaaattgctcgtgtgggcagtaagcctgtggcgctgtgggctttggggggatacggcgcaagctttactctgcttgggatgggaagcatgctgatagcgaccggcgccgtaacaacagcggtggggctgggaatattaatcatcgcacggatcgtctatgggattactgtgtcggcgatggtgccagcctgtcaagtctgggcattacagagagcgggggatgggtatcgaatggtcgctctggcaaccattagcaccggtttgagctgcggcaggctattcgggccgctgtgctcggcggcgatgctggcaattcaccctctggcgccgatggggctgctgatggctgcgccattgctggcgctggtgatgctgctgcggttgcctggaacgccaccgcagcccgcagtggagcgcaagaactccagcctgaggctggattgcctgccttatctactttgcgcgctgttattagccgcggcggtgagcatgatgcagcttgggctttctcccgcccttactcgccagttcgctacagataccgccgccattagccatcaggtggcgtggctgttagggctggccgcagttgccgcgcttacagcacagtttggggtgctccgcccacagcgcctgacgccgatggcgctactcttgagtgccggagcgctgatgatttgtggcctggcgataatgctcgccgaacagctatggttattttacctcggctgtgcggtgttgtcgtttggggctgctctggcaacacccgcttatcagcttttactgaatgataagctgacagacggcgcgggcgcgggctggctcgctaccagccacacgcttggttatgggctttgcgcattgctggtgccgctggtgtcgaaaaccggcgctgcagcggcgttgattgtggcggcttttttcatcgctgtattatttaccgtggtgtcaggctttatctggcacagcagctgttgttcacgttgcttagattag

SEQ ID NO: 109843 - DNA, 1725 bp, Enterobacter aerogenes
atgactttgccaactaaaacctcaaccttggatgtggctgctcagtgcttccttaattccctagttcgtgaaaccaaagactggcggctgacggaataccagccaacccaattgatcatcccgctgggcgaacagcaggcgctccatttcagagtggcttatttctccccaacccagcatcaccgctttgaatttccggcgcgtctggtcacagcatccggcagtcaccccatcgatttcaccaccctctcccggcttattgttgataagctccagcaccaactctcgctgcccgcgaccagttgcgaaaccttccaccagcgcgtgatggaaagccacgcccatacgcagcaagcgattgatgcccgccatgactgggcagccctgcgtgaaaaagcgttgaactttggcgaggcggagcaggctctgctggtcgggcacgccttccacccggcgcctaagtctcatgaaccgtttaaccagcaggaggccgaacgctacctgccggacttcgcgccccacttcccgctacagtggtttgcggtggacaaaacgcagatcgccggtgaaagcctgcatctcaacctgcaacagcggttgacgcgatttgccgcagagaatgcgccgcagttactcaatgaattaagcgacaatcaatggctattcccgctgcacccgtggcagggggagtatctgttgcagcaggagtggtgccaggagcttgtcgctaaagggctgattaaagatttaggcgaagccggcgcgccgtggctaccgaccacctcttcccgctcgctctactgcgccaccagcagcgacatgatcaaattctccctgagcgtgcgcctgaccaactccgtccgtaccctgtcagtgaaagaagtgaagcgtggaatgcgcctggcgcgcctggcgcaaaccgacgactggcagacgctacaggctcgcttcccgactttccgggtgatgcaggaagacggttgggccgggctgcgcgatctccacggcaacatcatgcaggaaagcctgtttgccctgcgtgaaaacctgctggtggatcagccgcaaagccagactaacgtactggtctccctgacccaggccgcaccggatggcggtgattcgctgctggttgcggcggtaaaacgtctgagcgatcgcctcggcatcactgcgcaacaggccgcccacgcatgggtcgatgcttactgtcagcaggtgctgaagccgctgtttacggctgaagcggattacggcctggtgctgctggcgcatcagcaaaatattctggttcagatgcttggggatctgccggtcgggcttatctaccgtgactgtcagggcagcgcgtttatgcctcacgcggcaggctggctcgacaccattggcgaggcgcaggcggaaaacgtcttcacccgtgagcagttgctgcgctacttcccttattacctgctggttaactccacttttgccgtgaccgccgcgctgggcgccgccgggctggacagtgaagcgaatctgatggctcgcgtacgaaccttgctggctgaagtgcgtgatcaggtgactcataaaacctgtctcaactacgtgctggaaaatccgtactggaacgtaaaaggtaactttttctgttatctgaacgaccacaacgagaacaccatcgtcgatccctcggtgatctacttcgatttcgccaacccgctgctggctcaggagggctaa

SEQ ID NO: 109844 - DNA, 1335 bp, Enterobacter aerogenes
atgacaaacactgtagattttattggcgtaggcatcggcccgttcaacctgagcatcgcggcgctgtctcatcaggccgaaggattaagcagccgcttctttgacggccgcccgcattttgcctggcatcccggcatgctggtgccggactgccatatgcagaccatgtttctgaaagatctggttagcgctgtggctcccacaagcccgtacagctttgttaactatctggtgaagcgcaaaaaattctaccgctttctgaccaccgaactgcgtaccgtgtcccgcgatgagttttccgactacctgcgctgggccgccgaagggatgaacaatctgcatttcaatcataccgttgagagtattgatttcgacgagagacgccagcggtttgtggtgcagaccagccagggcgaaagcgttgcccgcaatatctgccttggcattggcaagcaaccacacctgccgccttgcgtaaaaacggcgacgcaaacctgcttccacgccagtgaaatgagcctgcgccagccagacctcggcggcaagcgagtcaccgtggttggcggcgggcaaagtggcgccgacctgttcctcaatgcgctgcgcggagaatggggcgacgttgcagagatcagttgggtctcgcgccgcaataactttaacgcgctggatgaggcggcgttcgccaacgaatacttcacgcctgagtacgtttcaggcttcgtcggtctgaatgaaagcgcgcgccagaagatgctcgacgagcagaaaatgacctccgacggcatcacggccgactcgctactgaccatctatcgcgagttgtatcaccgcttcgaggtactgaggcaaccgcgtaacgcccgtctgctgccaagccgctcggtcaccgggctggaaagtcgcggccagagctggcaactgctgctggagcatcatctggataacggctatgacactctggaaagcgacgtggtgattttcgccaccggctaccgtcccgcgctgccgcagatactttcaccgctgatgtcgcgaatcgccatgcgcgatgagtgcaatttcaaagtacgcgacgacttcaccctggagtggaacggcccgaaagagaacaacatcttcgcggtcaacgccagtatgcaaacccacggcatcgccgaaccacagctcagcctgatggcctggcgctccgcccgtatccttaatcgcgcgctggggcgtgatttattcgatctcagtatgccgcccgccctgattcaatggcgcagcggcagccgggaaaaaccgcagccggaggctgcttctttaactcgctacacagcatctttgggctga

SEQ ID NO: 109845 - DNA, 339 bp, Enterobacter aerogenes
atgaggctcagcgtacggcagctgatgcgtatttatcagggcgcatcactgatgctggagcgcaggcgttttggctaccgccgcatctggcagttactgcgccgtgaaggctttcatgttaatcacaagcgcgcgtcccgcctttatcgtctcagtggtctgggcgtaaaacgcagacggcgtcgtaaaggcctgacaacggtgcgtctgccgctgctccgcccggtggctcccaacctgacctggtcgatggatttaggcatggacacgctggccaccagcctgacctgtgtggacgacttcacgaaagaggtaagcgtcaacggagcaccgtattga

SEQ ID NO: 109846 - DNA, 129 bp, Enterobacter aerogenes
atgcattcggaaaatattgcggtttacgtcgggctggatgtgcataaagaaacgttggcggttgctattgctgcacctgaacggcttggcgaagttcgttattatggtacgattaacaacgaagcctag

SEQ ID NO: 109847 - DNA, 831 bp, Enterobacter aerogenes
atgaatataaaatgccaggttattgcccctgcccggataccaaaatcaccgacagacagaatcaaaaatgatcatcgggacgcaatttctctcgccaggtttctgcgggctggagaacttacccctgtctggatccctgacctgactcatgaagctatgcgggatctaatcagagcccgtgcagcagctaaacgagacagcagagttgcccgacagcgaattctgagcatgctattgcgaacagacaaacattatgcaggaaagcactggacaggaaaacaccgaacctggttagctaatcaatcatttagtcagccatctcaacagattgcttttcaacactattgtcaaagtcttgagcagattgaagatcgcatacttcaactcgaccaggaaatatctcgcctgttacctgagtggtctctgtgcaatctggtctgccagttgcaggctcttaaaggtgttggtcagctaattgcaataactctggttgctgaactgggtgatttttcgcgattttccaatcccaaacagctcatggcttttctgggactggtgccaggtgaatattccagtggaaacagtattcgtcccagaggaataacaaaagttggaaacagcgaactgagacgtctgctttacgaagccgcttggtcttatcgtacacctgcaaaagttggggcatggcttatatattaccgaccggattctgtaacacaatattccaaagatattgcatggaaagctcaacaacgattgtgttctcgttaccgaacgtctgacagcaaaagggaaaaaatcacaagtagccattacggcggtggctcgtga

SEQ ID NO: 109848 - DNA, 639 bp, Enterobacter aerogenes
atggaaaattctataacaccagaagaattgggtgatatgattcgtcggtatttcagtcaggatttctctatggaagaatgtatccgggcgctgaattatttgcgcagggtacttcatgaggttagcccttttgagcaagaaccagtagactgtgttctgtgggtaaaatcggatgaggtggtggctaacgattacaatcccaatgtcatggcttcgggtgagaagaaattgctgacgcggtcactggagagagatggttttactcagccagtagtagtgtcggaggagagggatcattacttggttgtggatggttttcaccgtcagttactgggtagggaggcgaaaataggaaaacggctgaaggggtggctacctgtgtcctgcattaatcctgagcgaaagggagaggctgctcgcattgccgccaccatacgacataatcgcgccagagggaaacatcagataacctcaatgtctgatattgtcagggatctttcgcgattgggttggactgatgaacgcattagtactgaattaggtatggatatggatgaagtcctgaggctaaaacagattagtgggctggcagagttatttcaggaagaggacttcagtcaagcatggacggttcgttaa

SEQ ID NO: 109849 - DNA, 1359 bp, Enterobacter aerogenes
atgcggtggagatacagttgttatctgttgtttgagttgggtcacaaaatttgtaactgcaacttgttaaatgttttgtttttagacaaaggtactacatatactatatgtggatttagttgttgtatcgttatgtcgggaatcatagaaaaaatcagaatgggtgaagacgtgttgtctgcctctatgcaccggatcgagtgggtgttcgatacattttcttccgtttgtctgtctttctctggaggtaaggattccactgtgcttttccaccttgttgcagaggttgcccgtaagaaaaaacgttatttttctgtattgttcattgattgggaagcgcagtatcagcgcactatccagcatattcaggctatgcgggtaatgtaccgggatgttacagatcacttttactgggtggctcttcccttgaccacagtcaacggtgtctctcagtttcagccggagtgggtatgctgggaacctgatgtggaatgggttcgccagccaccagatgaggccattacagatatggcgtattttcccttttaccggtatgccatgacctttgaagaatttgtcccagctttttcttcttggtttgctggtaacaaatgtggtgtagccatactgactggagttcgtgcagatgagtctctgaaccgttttatgggacttgcatcccaacgcaaactacggtacgccgcagataaaccttggactacggcatctcctgacggtttttactataccatgtatccactatatgactggaaagcacgcgacatttggatatataatgccaaaacccatgccatctataacccactgtatgatctgatgtaccgcgctggcgtaccattacgcaacatgcgcgtctgtgagccttttgggcctgagcagcgtaggggcctttggctttaccatgttcttgaacctgaaacttggggacgaatgtgtgaacgggtatccggggctgctagtggtgccatttatgccaatgaaagcggtgcctattttgccctgcgcaagcgtatcacgaaacctgcacatcatacttggcgtagttatgcaatgtttctgctggatgttatgccggaaaaaacggcggaacattacaggaacaaaatagctgtttacctgcgctggtatcagactcgggaattcccgaatgatattcctgatgagcaggataatgacttgggcggccgggatattccgtcttggcgacgcatctgtaagacgctcataaagaatgatttttggtgtcggactttatccttcagcccaaataaaccccggtactatgaacgttacttgcagcgtatgaaggaaaggaggaaggaatggaaaattctataa

SEQ ID NO: 109850 - DNA, 207 bp, Enterobacter aerogenes
gtgaaaaccgttaaactcacaccgaaggccagtcaggatatggaggatatctggtactacagttgtcgccaattcggtgaagagcaggctgacagatatattaatcagatatccggtatttttcaggttcagagtgaaaacaatatctgtccccccggccagaactgggtgaatatatctgcacactacccgttgaacggcatatga

SEQ ID NO: 109851 - DNA, 720 bp, Enterobacter aerogenes
atgtgtgcgaaggatcgtagtcaaattgctgtacgcagtcaaacagattccattcattctatgcgcgagatgcttaatatttcatcttgccctgcctttattcgtgattcccggggcgacgtaattcacaccagccccacctttgataaagttttcttaacatctgggtgcgctggaacatttgatacacccagtgcacctggtaactggtttctggatctctcccttgaagtcaaactggaactgatgcagtcagaactgaaatcattttcagaaggttctgctgtactagtcaaaaaaatttggttggtagattctctttggactgtttttattgaaacgttcacaattaatgaggagacctacagtaaatgggtttttatcaaggagggtgatcagattcctcagccttcaagggaatataatgaattttcgaaaaaaatgcagggatatatcgaaagaattcagcggtcagcaaaatctgactgggctatctttaatctatatgcggttgggttttcacatgcttctatttcaaaaattattggtatagaggtacaaacatcaaagaatacagttagcaaaataaaaaaagaattgaactttgatagtcgtgattacattattttgtcatcaatttatacattaagttatggacggtttgtttcgaacgtgctgggtatattgaaagctggtgttaatggtttgttaaatcaatag

SEQ ID NO: 109852 - DNA, 984 bp, Enterobacter aerogenes
atgagtattgactcacgatttgaaaaattcatgctttcattaccttcaatagaaagcatagattcaatagaattgagtgaggaactcagaaaagagaaaaaggctgattatttgggaatgggaaggaagatcatttttgaacaaaaatgtataacacaagagcaatctcaaaaaatcgaacttgagttagagcaatatgtcaatgacgaaaactatcctgttttctatggtgaaagggatttcaatttagtcataaaagatcttcctaatagtgaagatatcaaaaacagagtatttgttcgaattacaaaattaattgagtcatatttgagtcaggcatgtaaacaaatagaatcatctaaaaatatttttaatttagataattcaattggtgtgcttgtcattttaaatgagaaaataaaaatactatcaccagatttagttgtttaccgattacaacaaagaatgaaagaaaaaaaagatggagagtatagatttaactctattgactatataatatttatatctgaaacacatgagataaacggtaatccagttgtgattattttagaaggttctaatgcggctaagaaccctgcagaaattaatgaatatttgaattatattgctaatgggtggtctcaatttaatggtcgtaatactatgaatattgacaatgccagagatttattcattaatttagaagagaaagaagagcctaaatcaaatagtttaactcgcactgatgaaagaaaactatggtatcgtaaaaaccgatatatgaaagattggtcagatgataaagttttacaggcggcggttgatcatatgaacaaaataatgccatttattttgaaaaatggaccaaaattaccagtggataagttaggtgagctaatgttggcatttggtgattttattgaagagtccaacatgcgtggcttagatctaaaaggacttaataaccttttcacggataagtga

SEQ ID NO: 109853 - DNA, 477 bp, Enterobacter aerogenes
atggccatcaccggctttgctgcgcgggcaggagaaaagctgcgtcaggaaaagcagcactgtcgtgcgatcagtgtctttatccgaaccagcccgttttcaccccgggatgcgccctgtgccagccaggcgacggagacgctactggtagccactcaggacagccgggacatcattgccgctgcccagcgtgcgcttgcgcgcatctggcgtgatggctaccggtacgcaaaggctggtatcatgctggccgatttttccggccgcgaggcacaacttaatctgtttgatgaatgtgctccccgtcctgacagcgaagccctgatgaatgccgtcgatcggattaaccgcgccggtaagggccgcattttttttgccggccaggggatcaatgtggggttcgcgatgcgcagggaaatgctgagtccggaatacacgacagactggaacgccttgccgcgtgctttcatgagataa

SEQ ID NO: 109854 - DNA, 642 bp, Enterobacter aerogenes
atgaaagtgaattatctggcaccgttattatgtattggcgtgttggcgctgaccggttgtaacgatccaaagaaaccctccgaaagtaatttcaaagaagccgcacagcagtatctggatactgtatacccggcatgttatatcaaagctaatttcccttacaaaacagatggtttcaacattaacaacatgccagaaatattgcatgcaatggcagaaaaagggttgttaactgaaacagaattatcgcgtaaacatattgatgccacatgggggattaaagaacgagatatagtcgttaacagttatgacctgacggaagaagggaaaaaatactacaagcaagatgcggctaaaaatatgcgaggtgagaatcttggtggattctgctttggaaaagcaacagtaacagacgtcagtaatttcactgaaccatctgatgcaatggggcagaaaatttcccgagtgacttttacatataaagttagtgatatacctgactgggcaaaatcacctgagattctgaatgccgaccgtcagataaaaaaagacgtaaactcagaacatgatggtgtgaaagtgaccaatgttttcctcctgactaataacggatggatacatcaaaagttatttggtaaatga

SEQ ID NO: 109855 - DNA, 285 bp, Enterobacter aerogenes
atgacccaagaaactgatatttttaatttattcattaagctcacgccgccgggactggcattactgctgtgggcgtacggggtttataatcagtcctcactgaagaaactggaaaccatgcagttacagaaaaggtggcctgaactgcctggcagtttaaccatacatgataaaaaagaagcactccacgcgatgatttctgcggaggaaaggaaaaccagagcatcgtttaaaatggcgattttctttactgccatcgccattttctggacagtttatatctga

SEQ ID NO: 109856 - DNA, 1059 bp, Enterobacter aerogenes
atgcagcgtctgaacgtccgcaacatcccagatgaaatctacaggcagtttgagcaggaagccgcccgccaggagcgcagcaccgaggcgcacgcccgttttgtgatcgcacagtccgtgcagcgtgaagcagctcttaccggcgccgatcgttaccgccgggagctgagcgcccgcctcaggcacctgttacccctggtcaacgaagcggcctcccgccccggccccaattaccagccgccgatggacgcggccgccctggcggagcgcctcggtgaggccaacccactggcggtgatgaactggttttccggccacgacgtcccggattttgagcaggccgaccgtctggccacttacctgggctgttccgcacgctggctgaaattcggcgagggacgcccgttcgcgttcggttcgcagcgacgccttaacggccacggcagcgcgtatgacgatgcgcgcgccctgctgacgccagacgccgccggcaatccggtctataagatcagcctcatccgcgaagactccccggaggggagtattctcatcctgcgtgagttccgcaacagcctgcaggcggagatcttctggactaacctccacctgagcgaacacgtcggcaataccggttttcacgatctgtgcgattttttcgccatgctcgagcagctgtatattttctataccattaacgatgtgttcgtgaaaagttacgatatcgcccggggacggctgaagtatgaatttgaagagaacgactgtcacccgctgctgatcacaaaacgctgcggccgggaaaacatctggtgggaggatatctggcacgaagaaatgctgggtaagcgcaatccggaacgcaacggcgggtatttctggccggacgatcgggagattatcaatagggtcatggcgcacctgaaggagaagcaacgtctgatggataaggacgacctggagatgctgacgcgctactctttcgggatggacgaacaacgttcccgttacaggctcgccacccacaccggtacgacagaacaggagtctgacgatgaatga

SEQ ID NO: 109857 - DNA, 126 bp, Enterobacter aerogenes
atgaagacgccaggcatgctgtttgtgctgcagctgtgcgccgggttcctgacgggccgtgatatcagacaggaagtgcgcgtgaaaaagacgacgagtccattttgcccttcagtgcctgtttaa

SEQ ID NO: 109858 - DNA, 486 bp, Enterobacter aerogenes
atgaaactaaaaggatacgtcaccgctctgccggtgctgctgctgacagggtgcgctgtgctacccggacaacccaccgattatgggcgcttctgtaacgtatcaggcatcgccagccacggtgaaacctaccgtgtcagtgacagccaggatttctggttaaccccgaacggccgctatctcagccaggctgagtacagcagcccggcagatacgcttcagaaactgacgggtgtggtcagtggtgaagatcctgaccaggcgcggaagaaggctgtcagggtacgggtgttccgagtcgaaagtgagagcgcgagtaaaggtgcgtgcctgcccgtgcgttatgacgacaacaacgcacggcggaaaatggattcgctgactaacggccggcgtatgaaggtgtacagtgaagatgctggtcagtccggccagcagatttacgataacagtcgcggtgccggcttcagttacaggttactatga

SEQ ID NO: 109859 - DNA, 861 bp, Enterobacter aerogenes
atgtcatctaaaaatactctcccgtcagtcgatctgatgtactgccagcatggcggtgaagtgatcccgtccattgctattgagcgcatcatctcgttgcgggatgaaggtatccgcgtctatctcgacggcatagacaagctgcgaaaagcgcgcgatctgatgcagcaggccggaggctgccagtacctctatgactacgacaaagccgtagagagcgccatcaaatggagcgacaccacgccagatcaggccgaaacggctatttcccgcgttatcgacggaaaaatctgggatcggctgatgacggaaaccggtatgtatacgctgatgagcaacaagcaacgtcaggaatgggatcggcaggtggcaggcaaagaaatgccgccgataacgctggataacgttatgagtacgttccggcacctgaacgcaagcaaggctgataccttcacgcaagggctgattgatatctttaaatccctgtcgtgggattataaaaccaataacccctgcatgtttggcaagcgtatcatcatcgcgccgttgctcgatgtctggcgcagtggctgggtgcgcttcagctcagacgggcacaccaaaattgacgatctggcgcggccgttctacgtgctggacgggcgtaacgtgcctgattaccgcgtttctgacggtgccagactggatgcctttttcagtgaaaaccagttcaacggtaaggtgttcgagtgtgattacttcagcgtgcgatattacaaaaagggcagcgcccacattacgtttaaacgcccggagctggttgagaagatcaataatctggttgccagtcactatcccggaatgttaccccctcgcgtgtaa

SEQ ID NO: 109860 - DNA, 234 bp, Enterobacter aerogenes
atggaactcaatgatactgcaaaattacctgactctgatgcacggaaaattaacgccgtagcgtctcaggcataccctcttggcctcctgcctaatctgaaaattaacttctactctattgacgccattcaacttgaactgcgtgacaacagtggtgatcttatctggcgagatttcacgttctcccgcgattttatcaacggttttatgccttatatcagaccaataaattag

SEQ ID NO: 109861 - DNA, 321 bp, Enterobacter aerogenes
atggtattaaccggtattgaaacagtaaaggtagcggtgatctgtacaggccacgtcagccatcaagattcagagattatccctgagtttctctggaacaactggaaagaatccggagagttctggataagcagtactgctcacggttggttatttcggttgtgtgctctgcccgatgaatgggaggagcgtctgaaaaattttggagtaagtgatggctgcatatcaaatcttagagtgctggaatgtgaaggatatgactgggttcatttccaggctgatgcacccatcgtggaggagcttcagcactgggactggtaa

SEQ ID NO: 109862 - DNA, 132 bp, Enterobacter aerogenes
atgtcattatccattctacagcttgccgaggatcttgcaaagggtaagcgaatgagagtaccaccgatgaacggaccggagtggcgacacttctgtttctggcttgaatattacatgggatacagtatgtaa

SEQ ID NO: 109863 - DNA, 312 bp, Enterobacter aerogenes
atggttgccaaaaaatcgaagctgtacagcacaacagacatcgaatctattcgaggtcagctggctgaactcccagatgtgacgcaagaaagattacagaaacgagatgtacttgattccctgaaaagtgatattgagacgctgattaaaaacaagggatacacactcagcgaaatccttgagcaccttaaaaactttggttttcatgacgtgacgcttaaagatttaaaagagattactgaaggaaaaagaacacgtcagagaaagcgggtctcttcatctactgatgataaaacgccagtccaggcgtga

SEQ ID NO: 109864 - DNA, 540 bp, Enterobacter aerogenes
gtgccttgcatgaatatcaatatacctgaactagcgcagcgtactccctttgtcatctggcatacaggttgcaaatttgctaaactcattcgcgaagttcaaaagcgggacaggatatgttttgtattaccgccaccacggtggcagcaatccaaaactcctggtcagggcgaagccccgacaccccagactgtgctaactgttggactgaaaggaagatttagcgtcatgagtaagagtgagcgacgtaacagaacagccactcttccgccggtaaggtgccttccggaagagcgggatgagatacgtcaaaaggcggaggatgcgggtctcagcataggtgcatttatgcttagggctgcgttaggaaggaagattgctccgcagacagatcacaagctcattaacgaactctcacgtcttggcggtttacagaagcatctctttaaagaagggaacggggtcggcagtaaggagtacgcagagatactgcaggccatcaaggcagccattttcaggatagagcaaaagaacgactaa

SEQ ID NO: 109865 - DNA, 1929 bp, Enterobacter aerogenes
atgaacgccatcattccacccaaacgtcgcgacagaaagtccagctttgttcagctggtcgcgtatgtttccgtgcgtgatgatgttccgttaaaagacgagctgaaagaagacgagcgtttccagcgtccgtcgcgttcccgccaggccatttttgatcgccttgttgactacatgaaccgtagtgaaggaacgatcattgaacagatttctgatatgactcctgaaggtgatatacgctgttctgttgacggtgttatctgccagcataacctgatgtcagttgaaacagctgcaatggagatgaacagcattgccatgcagaacacgcatgttaaggacgcggtttatcactatatcctgagctggcaggaagatgaaaatccatctgacgatcaggtttttgacagtgttaaacactcactcaaacgcctgggtatggaagagcaccagtacgtagcggcgattcaccgtgacacggataatctgcatgttcatattgctgctaaccgcgttcacccggtttcttatcgcgcggctaatgtctggaatgacgcggataaacttcagcgtacctgccgggaactggaactgaagcacggatttaaagtggataacggaagctgggttcgtgatgctgacaacaacattgtgcgggccagaaaagggtatcgcaatgcaccacgttcagcgcgacagcttgaacacttctctgataaagagtcccttcatcattttgcagtccagcatgttcgtaagcctgttaatgccatgttccgtgagaagaacgcgtcatgggaaaaactgcatcaggtcatgaatgatgctggtttaatgttagagacttccggcaaagggctgatcgtgcgtgatgtgtgtggcgacgagaaactggccgttaaatcatcgcgggttcaccctggtatgacgctttcccgtcttgagcctgcgctgggaacctttgttccctcaccacgttctgcggaaatggttaagcaaagtgttcagacgtcttacagtgacaaactgcatgtccgcgatcgtggtgcccgtgcggagcgccggcaggcacgcgctgacgcccgtatcgatttgcgcgaacgctacgagaagtaccgcaacgcctggaaaaaacctgaccttcatgccgctgaacgattccgggctgtgtccgctgcatttaaagaacagaagacccatatccgggataacgagaaagacgcgcatatgcgtaagctcatgtaccacatcgtggagtttgaacgtgagaagtcgatggcagcgctgcgtattgcactgaaggcagaacgccagaagttgtatgacgagggcatgatgcggccgctgacctaccgtgcctggaccgaacaacaggcgcttcacggcgatcaggctgcgctcagtcagttgcgtggctggtcttaccgacagaatcgtaaaaaccggacaccgcaggcctctgacaatattatttactgtgcacctgcagatgacacctcgttgctcaaagcagatggttacgaggcccgcctgcatcgtgacggcgcggttgtctattcccgccaggggcaggatgccatcattgatcggggagaccgcgttgaagtcattaatccgtatgatgacggtgacctcaacacgcgcattgccgttgacatggtggcctggaaatcaggcgagcgtgtcgaattcagccgggatggcagtttcgcttatgctgccggcgatgcggtggctgcacacaacctgcatcatcgtgacagtatcatcgtgccgagtgaccgggaacaatacgactatacgcgggagaagtttaaccagctgaaaggccggtatacggacagtgaacgggaagcacttcgtcagcaatatgacgatcgttattacgacgatgttcgccacaatgacgacagtagttataagccataa

SEQ ID NO: 109866 - DNA, 1695 bp, Enterobacter aerogenes
atgaaaaagaaattccttattcttttgtctggaatggcagttacattaacttttgttgtatcgacaatagttagatacgattctatgttgtctgacaagtctttttatgccataagcggcactcaggaaaactatgcatgggctattgcaaagttttcaatccaattgtctgagttttactctcttgttaagagcgaagacaaagatatggataaaatccgattaaagctagatatcctttattcccgcattcatgttattagagcaaggagtgagtcgacagagcctttatataatcaagaggggtacaagcagattattgattctatttattacaaaataaaagcggtagactcgtatataaacacccctaacccaaacattgaaaaagttattgagttagtcaataaaatcgagccagactcaaaatcattgaacaatatagcagaccatgcggaggtcaatcaaagaacaaaagcccttgaggattttaaagaaaaaaggcaaagccttattattttgctggcaatcgtaacagttttaatctttgctatgtttatcatagtagcttttcagctatataaaaccaataaattattagaagctgaaaaagctgcatttaataataaaaatgcttttttgggtgcattaggccatgaattaaaaacgtctctacaggcaatcacatcttcaattgaaataatatccttaaaaaactcagaattggattcaaaacatattgaaagactggagaatgccgcgaagaggatggaaaaccagatgaaagacctggcagagttcgctaaggttgacaatggaaatatagtggtaaacaacatatcattcaatcttgccaaacttataaaagatacagttagcgaatgtgaatcaatttccaataaacattctattgatattagaataggcaatattagcgatagtcatataataagcgaccctttcaggattgcacagatcacagaaaacttagtaactaatgccataaagtacaccgacaaaggtcacataactataaatgcttttttagaaggtgatagaacacttgtcatagaggttgaagatacaggaagaggcatcccaaaggataaactaaaatcgatattcctccctttcatacgagtagctgatggagtaaaagtccccggatttggtatggggcttgccattgttatgggggttgtcaaaacaatgaatggacgtataagtgtcaaaagtgagttagggcttggaagtctattcagaataacgctgcctgtaaaaaaatcgactaaagaagaattggctatttccgatgttattcgaaatgaaggttttacggctaacgacctcagcatattgataattgatgatgatgagttggtttgtgagtcgctcgcatcaattttacagggtatatttcaagtagaatatacctcatctccggaaagggcgctggagaagttgcgacgtaaaccatacgatcttgtgcttagtgacctgcaaatgccaatcatgaatggcgacgagctttatatggcagtaaaaacaggctcaggtcccaacacacaaacgccatttattttcatcagcgcttactccagcgagagtccagttgatggggttgagcttcttacaaaaccagtcaggcttaatgatatacgaaaaagtatcgagaaaatatattcagataaatag

SEQ ID NO: 109867 - DNA, 495 bp, Enterobacter aerogenes
atgcataagtttcaactttcatttttcgccacgattttgtttgtgacctctcaaacaatggctgcgactgaagatataaatattgacggaatgattagccataaaaacaatgacattggatacacactcacattcaatgactttattaaaatgccaatggcacacataaagacaacgacaccgtggacgaaaccaaaaactaaagtagattttgagggtgttagagttaaagacatattaaagttagtcggtgctcaagggagaacattaagaatgatcgcactaaatgattactcaatagatatccctgtctcagatgttgaaaattacaacatcatttttgcttacaaaatgaatggtaaaaaacttaaagtaagaaattttggtccttacttcgttatatacccactcgatgagcacgctagtgagataaacaacccattgtatttatcaagattcatttggcaggttaacaaaattacggtgctaaaatga

SEQ ID NO: 109868 - DNA, 930 bp, Enterobacter aerogenes
gtgtctccctatggagtgaataaaaaaaagcctgttggtgatcttgcaccattggcatataaaacagtatataacaatgcattaaacaaggttaaggttgattataaaaaaataaaaaaagtcaccataattaatggattaggggtaacccttggagattcaatcattggaatctctgctctacatgcaattaaatctataaatccggatattcatataacattgattaggccggagcattgccaggactatgtcgaacaaatttatcacatggcatcaggcattattgataagttattatacttacctttcgacatctctaaaatcaaccatacagacgttaatatagatatgggaaatcagctttattgggaagattttgatagcatcgagatgcatgatttttttctaactaatcttggaatcaaccccaaaagcattaatgataacatcaaaaataactcctggcttttaaacacagatgtaccagattttgatctgggggagtatatactgttttgtcctaacgcgagtacaaagataagaagcatcccctcacgatttcatgttgaaattgttgaagaattgagccacgagttcggcgttaaagtattaggtttcaatgacgtagatcaccctaatttctttaatataagcaacatatccagtgatacgttatctttcgcaggaatcataaaacatgcatgttttttgtatacctgcgattcttctgcgcttcatttaggagcaggctttaatatacccacaaggtgtatatttaccaccgtcaaacctgagttgcgtagtctttactatactaaatgtgaatcaatttatatcggaaataaccataccgcaggtgttcattgcagcgaagatgattatatgctggaagtattaaataaagaatttgaggaattttatgcataa

SEQ ID NO: 109869 - DNA, 843 bp, Enterobacter aerogenes
atgaataacaacacaaactgggtcggagatctggttgcaaaagttctaacgagtggtggcgtaccggagaagaaacattcaatgcatgtggggcatgtccttgagatgtcttctactgcggccactaaaaaattggcaggaggaagtgaatggcgagttcagcagctgcttgaagttgtgcattccgttggtatgaggctggatgatttttttcgactttactatcaggaacaatctaataaggatgttgaagttcatgaggcagtttggagcgatggggaattgaatgagccctgtaagatctatatttctgaaaacccatcggaaccgacaaattactctgcattaaaaataaatgatgtgtggcatgttgttaaaacaagcagtatccgtgatgatgtgctatttgaatcaaaaatgaatattgatttaatcgaaattattcccaaaaaaatagacaaagaaaagcatagaattgctgtgcttgatgacgataaaaatatcgttcagagcctatcatctcttcttgaaggggatagatacacaataaaggaattctatagtatagatgaattagatgatgctatcgaacaaaccccgttcgatgcatacatattagattggattgtagataataaaaccgttttcaatacaattaaaaaaatcagatcatcaggaaataagcatgcgatggttatggttttaacaggacagttatccggggcagttgatagcgagatctcaagagctattaacgaacttgatattattggcccctatgaaaagcctataaaatctttcgttataaaatcaaatgtagataagttttttccaaacaaatag

SEQ ID NO: 109870 - DNA, 228 bp, Enterobacter aerogenes
atggcaattaatgcgccgcctgaaaaaagaaaaaaccgtacatcagataatgtcatttacattggtgctgaacgtaaagatagaatagatcaaatgactattgagatttcttacagtaccaagaagaaagtctctacagctcgttttttccaatttttaattgatcattatggagaaaatgcaaagaatgaatttattgaagcgataataaagtcggatgattcctga

SEQ ID NO: 109871 - DNA, 606 bp, Enterobacter aerogenes
atgaaacatctacttccagggctgcttatccccgcagttctggctggctgtgtctcacactcagccagcactgacgcccctgccagcatatacatcgatggtctaatcgcagacagcgctcagactatcagccaggcccagacaggccttcaccagacaggaccgaatccggcccgaccggtatcccctactgcactgattaaaccgttaccaccttcaacgcctgtcagaccaggagtgatcgaaccttaccgaagcccgtcccttccggtatcgcaaaacgttcagctgccggcactgagccatgtttcctacaacgggcgcccgggacctttatcattcccgcaacgcgctggttacgcccggaacattaccgttcaggatgccgcacaacgcatcattcctgtcggctggtcagtcaactggtccccgggtctggaaaaagtgcgccggcaacgggtgaacctgtctcttaacgatcagtggccgcgcgtactcaataatctggtctcggcgaagtcgctctacgcgacggttgaatggggacagtcacgaatcacgataacctcatacagcccccgacctcgtctcttcagccatcagtaa

SEQ ID NO: 109872 - DNA, 480 bp, Enterobacter aerogenes
atgaaactgccggcaatttttctttgctccctgctttttctgccccaggcgcaggcctactgttttaactatgccgcatcgaagtacaaccagaacccgctcgtcgttgaatccatcgcaatctgggaaagcagcctccgccctgacgctgtcggccgtaactacgataaagccggcaggctgctcagctctgattattgcctcatgcaaatcaatacggcgaacgtccgggcgctggtatcgatgggtgtcatttcttctgctgacgatctgttaaaagacccgtgcttatgtgttcaggccggcgcctgggtgcttgcaaaacacctgaaaaaatgtggtaacacctggcgttgtctcggctcctataacgccggtttctcagatgacccgaaacaggaaataaaacgtcagaactacgccgcagaaatccgctccatctacgaacgcctgtacgccaggcagcaccgtgccagttaa

SEQ ID NO: 109873 - DNA, 468 bp, Enterobacter aerogenes
atgatagaaaagcttctggccacggtagtggcttcgttcatgctggccggctgccagcaaccgaaatccgtcattacggcgccgtacgttccgccggaaaaaacgtcgcagaacgtctcggtagtgcgagctcagcaataccagctctgggacgagaaggtcatcaatatccgcacaccgctaccggcagacacgatatacgctaacagcacgcgcctctcactcgactgggacggcgatgcgatcgaactgctggcccagttggccagacagcgcggtcttcagtttaactacagcggcgtccacctgccgttaccgctgaacattcatgtccgcgatatgacgttccagaatctgctgcgccttgtcgaatcgcaaatcagctggcgtgccacgctgcaccagtatccgggcctgctgcaggtcgagtttatgccggtgaaagcaacgccggggggccgccgatga

SEQ ID NO: 109874 - DNA, 819 bp, Enterobacter aerogenes
atgaaacataccgctatcgtgctgctctgtctgtgtgtcgccggatatgcgatggcagacgacagcgagccgtcaatcccacagggtatggaacactacctggacatcagcaatgacagtgagagtgacatcactgacgcccgggccgccatcatccgatcagcaggtcacaccatcggattccggggcgggaaagcgcaacgtgcatttgagctggttaacgcgctgaaggcccgggaaagcgcgctgaatgccctgtatgacttcagaacgctcgtcagtcaggaaggctggttaccgcctgtcatcgacgaagcgcaggatgtggcgcatatcaccgacgatcagatccgcaccgcaagccgcgtgtaccaaatcattctgccggaacgctttgtcagtaacccgccgtcctggcgccgctggttactggcagggttgagcacgacatccccctctggccaggaaggtggcgtcatccccaaaaacagtgatgaacagaaaatctggcaggaagcggtggagaaaggctggcaggacggacgtgacggtgccgatcacacgctggaggccaactttaaccgcctgacccgggattaccggggcatgttgctctactcacgcctgttgcgggaaggctatatctctcgcccggaaattaccgagcaacaacagagcgtcagcggcggccataaaaaactggtcacaggcgatcgcgtccgcaatctgcgcaggcatgccgagttcaatccaaataaaggtcactggaaaccggtcatcaacacggagtcacaccatgaatcccaccaaaccttctga

SEQ ID NO: 109875 - DNA, 1188 bp, Enterobacter aerogenes
atgaatcccaccaaaccttctgatccctccacccccgatcttgaaatgtttgatttcggtggtgcggttaatgtgcaaagttacaaagcctttctggtatgggcagccaaaaatgccgtcagcgacattcacgttcagggcagcaaccccatcgtcatcgaacgctatggccggatggtaccggtgacgcccttctcgttaccggacaatatcctctcggacattattgacggattatttgacccggaacttcgcgctaaggtccggggaggaaccccccaggaccgggccatacagctcgatggcgatcagaataaacgctatggcctcgatcgcggtgaacgcctgcgctttcgctgcaatgttgtgcaggcaaccgcagccaacatgctgaccacctgtgccatgacacagcgcgttatcccgacagccattcctgagctggaagcgatggggatcgagccggacctgtttgaagcactgctgccccataaaggccttggtctggtctgcggtgaaaccgggtcagggaaaagcaccctgctggccgccatttaccgttactgtgcgaacctcttccctgaccgcaaaatcaccaccgctgaggatccggtggagtacattatcggccgtaaaggcgatgtgctgccggcgacacagctggagctcggccgggatgttgccacctttgctgaagccatcagggcggcgcttcgccgggcaccgtccattatcggcgtcggggaaatgcgcgacaccgagaccattctggccgccgtgctgagcgcactgttaggtcacctgtgcctgagcaccctccacacggattccgttggcgaaacgatcccccgtctgttagccggtatcccgattgaaatccgggaggcgacggcacgcgatgtgatgggcacgatgcagtacatcatcgtccagcgtctgctcagaaccacagacggcaaacgtcaggcggtacgcgaatacctggtattcgaccagcctctgcgaaacgaaatggctcaggtgccttataccgaatggggccacctgctgaaccggaaagtgcgggagaagaaaggccgcatcgctgataaagccttcacgctgctccgggagggcatcattgaccgcgatgaaatgctctccgttgtatcgcctgcagaacttcgggaaatggaggcctgcgtatga

SEQ ID NO: 109876 - DNA, 267 bp, Enterobacter aerogenes
atgagaagcgtggaaaaccgctggcgtgaatccagccggccgctgaccgtttacggtgtcccggtcgggatgttcctgatctatctcgtctggtgcaagttcccgaccttcatgacgttgtggatctgcacgggcgtactgacgttcttcggcgttatcgcgcatttcggctggtcgtggccggtgttgctgcaacgtcttctacacatggtgcggggaagccggaaggccggtcgtccctggtggtatcgccgcttctatgaataa

SEQ ID NO: 109877 - DNA, 3306 bp, Enterobacter aerogenes
atggctcagcatgctcaggtcgcagaccgacgtttgtggctcgcagtaccccatgaagaaaaagacgaagccgtcgccgcaggcggcctcgccagtgacggcagacccaatatcagctggtcaccggacgataagctctggtatgcacgggaaggcaccgccttagccggcatccggttatggctccctgatacttccgcgcgggcaacgggcgacgccgacccccgggtggagtttgctgacaggttaaaggaagccggtttcatcctggaaggcctccccgtcatggacgggaaatggcaccgggccagagtcgaagaggataaaaagggtaaatctcaccgagaagggggcggtgcctataaagggttcactgacggccaccccgccggcatctttgtgaattaccaccgctcgtcggaaaaagaagtttcccggtggcgggctcaggggggagaaacggacccgctgacacggctgcacattcgcgctgcaactcgccaggcgcaggacgatagcgaacgtgcccggcagcaggcctatgcggaaaaagcccgtgcggccagccagctttatgaccagctggccccggcgacagactcacatccttatctgatgcgtaaaggcgtttccgccgatccggcattacgtgtcacccgcaacaaccgactggtagtaccgttttataaccaggacggtgaatttcagtccctgcagtacatcgccgaagacggggaaaagaaactctattctgaagcgcccaaagccggcaatttttttatcaccggcggcatgccggtgaatggccagcccattttgtatgccgaagggtatgcgactgccagaagcctcactgcagcgacaggcttcccggtcgtgatggccatcgatgccggcaatatgagaacgatagcggaaggattcggacagcggttccccgacagcccgcacttcttcatggccgatatggacctgaagaaaaacgataacaaagacgatctttaccttgccattcagtcctcccgttttgtccccagcgatccgggtttctatatggatgaagaaaaactgaaggaaatgaagggattgtttatggcgttacaggccgccgatcgtgtgcctgacggacatgttgtgataccgccatttactgagcaggaaatgaaagcagggctgtctgatttcaacgatctccattcagctcgcgggctagattcactgaaaaccgtactggcggagacacccggccttgctgcacatctgtatcacccggagacgcaaacaatgacagttccagttgaaaagcaggcacctgcgcagcccttccctgagccggtccccgcgtatgacaacgtatcacaggaagggcctgacaataccagcgcagatatggagagttatgaagccatgatggctgtggaagcagcagcggcgccggaagcaacagcggcaccggaagcagcagcggcgccggaagcaacaacggcgccggaagcagcagcggcaccggaagcaacagcggcaccggaagcagcatcggcgccggaagcagcagcggcgcccaccttcgccagccttctgaaagtgacctcagcgcctgcggaaccagaggtatctgcagatccggcggcagatgacaatctggcaccggtaaaagcaaaaaccacggcagaaaacgcgacgaccgctgcgaatgagccggatgaaactgaaaatgccatcgtatgggggccccgcgcgccgggcgaaggtaacttcaccccggagacagcgcccgcatcaaccttaattgataccaatgccctgcttcagcgcatcacgcatgaaatgcagaacaacacggtgctgtacaagctcgatggccagccggcatttcgcgatcatggcaaccggatgacaatggaaaccccggatgccagtaagcaggatgacatggtgatggccgcactgctcacggcaatgcagcattatggtcgcaggatccagatcaccggcagcgagacctttcagacgaaagttatcgggctgattgcatcacacgggctggatgttcagatgcgcgatccggtacagcaggccatgttaaacgaggccctgaaacaacaggccgctgacaggccggatgtccgcgacagtatcaatgccacgcccgtgatgcctgcggatgcgtccgttcagaccagtcccggcaaaaacgcgcccggtccagcaccggcaggagaacaaccctccccggtcccgcccggtggtacggccgaaccgccggttaaggcctctgaaccggcggggcaaccacctttagcgacgaaagccgaggactttaaagacggcgtgaaggggcgcctgctggagcatggccgggcgcattaccagttcaatgaacggaacagcatgaactattacgttcatctcgaaacccgcgagggagtccgggaggtctggggaaaagagctggaacaggccatcaatcagagtcgcgtcagtgaaggtcaggtcgtcagtctgaagtttgaagggaataaacctgtcaccgtcaatcagcccgtcatgaaggacggaaaaatccagggatacgaacagatcacggcgcacagaaattcatggagcatgacgccgctggttaatccccgcgttcgcccgccggcgacacccactaccggggaaaccctctccgcgtatgacctccatgagtacagcaaaatacaggcccgtctgttgcgcaccgtgcaggcagagaacgtgccaccgatcgccgggcagaaaaataacctgctgtggatacggcccgacgggcggggaacgggcgatgccggcgacccggccacggtaaaacttccggctaaagatggccagtccacgaccccggtcgtcagcgcctggcgggatgacggacagctggcactgcacctggtcaaagggcatggcccttacctgcagggcattgcgcagattaacggacagtaccagcacgtcctggcttccatgacgggaaatcagagcaatgccagtctgattatcaacgcgataacccctgatggcctcaaaaccgtgggatacggacaggccttaaacaaggtggaaggtaagcccgttgcgcgggatgccatggcctttcgtttcgcgggggagaccgacacggacaaaaagctgattggtaagctggaaaatccggaaaccttaccccggactatccacgccagactcggatttgatgaacctttccgtcccgacaccgactacccaaagtcgcagccccgggcagaacatcatcacaaggccgcaccgggagccggacgcccggggtaa

SEQ ID NO: 109878 - DNA, 354 bp, Enterobacter aerogenes
atgccagtacaaaaaacactgggcgccctggttgtctgcgccctcttcctgacgcccctctcgctgcaggccgccacctgccgggctgccaccgcggccgagacaggcagtgacacgggataccagacagcaaaaaaagcggccgaagcctggtatgaacgggaatcagatgtctctgactccctgcagagttgcctggataaaatcaggaccctgtccattaccatgccgaatttcagcagcttatcttccattctgaacggttacgcggatgaaatttgcagctcagtggtcagtgaagtgaatagtcacatcccgtccagtattgacccctgggatgagttaaccaactaa

SEQ ID NO: 109879 - DNA, 705 bp, Enterobacter aerogenes
atgaatacacccgcgacagggggcacagactcgtctgtgcctcagacaacgcgttccctttcagcgcaggaacaacaggtctacgacgaagccattcgcctgcagaatgagcaggcgctgggggcgaccttcgcccgtaagctgctgacatcaaacctcattctgggcaccgcgttcctgctcatcacttccctcagcggtgtgacgctgtggaaagtgtatcacccggataatcactacttcgccacggaaagcggccgtgtcacaccgatttatccgctgaacaaaccggcctggtcgatggaagacattgctggcttcggcgccgacaccatccagcgggctttcacgatggacttcgttcactaccgtcagcagatgacatcggtgatgacgcgctttaccaatcagggatacgccgattattacaaggcgctgacgagctcgaacgtgctgaagatggtgcgcgatcaacgcatgaacctgtccaccaccgtctcgccgggggtcgtacacagccagggcattattaacgggatctataccgtcagggttcagtatcccgtctccctgaagctcgatggccaggagcgcagcctgcctgcagcgaattacatcatcgagctgactatccagcaaaccgatccacgggaaaagcccctcggcctggaggtcaggcagaccatcatgacttccagtcattaa

SEQ ID NO: 109880 - DNA, 1104 bp, Enterobacter aerogenes
atgaaaccgtattttgcactctctttactcgccgtgatgtgctgcaacgtcggggcggtggagactcaacagaccgtggtacctcactctgccgatccgatactggtcactgacggcccccaacaggatgccgcgctgatgaataaagccggattaccgccgcagcccgctgaacagccaccggcgccgccggtgcaagcgccagaaaccactcaggccgcaccgccatctgcatcaacagtcgccgcgccacaggccagttcgcagacggacccggcaccggcggcgacgccaggcagtgacgaactcccgccgccttcgccgctgtacagtgccgcgcagaagcaggttgcgcccctgacaccggatgaagtccgacaactgcgggggcagaaagagaatatcaaccgggcgctggcttccccggcgatgacggtggtaccccgcatcagtgcgcagacggtgaatctgtcaccgggttccagtctgcctctggtccgcacagcggtaaaccatcccagcaacctgagttttaccgatgctacgggcgccccctggcctgtggcaggcaagccgacgaacccgatgacgaaggactttgatgtgtattacatcccggactcacccatcgtcaccattgtggccaaacggccctatgcgagcggcagcattaccgtcctgctgaaaggcctgtccgtaccgatttcggtggaagtcaccagcggtgacaccgacagccagtcccgggtgtggaccgtcgataaccgtctggatctgcgcattccgcagcggggaccgtccgcccgcccgatggccgcgccggaatcgaaaatcggcctttacgacaacacgcttcaggccttcctggatggtacgcccccgagggaggcacaccgcctgaaagcgaccgggcaggtgcctgataccaccgtctggcagctgggcgacgacctctttatccggacgcgcgctgagatagtcgatgagtttgatcagacgctgtcctccgctgacgggatgcacctctttaagctcccggtcacgccctatgtgacgttctccgtgatggggcgttctcaggcactgaacattactctggagtga

SEQ ID NO: 109881 - DNA, 1341 bp, Enterobacter aerogenes
atggccaacgaaaatgacgcaagtcgcgataagacattactggtcgggctggctgccctcgtctgtgccggcgttgccggagggggctacctgctctggaaccacttttttgccccgccgccgacaccttcccgtatcaatgtgaccaacgttgccagtgccgggaaacaccagagtgcagaaactgagcagtaccgtcagctcctgcacgaatacaaccgggagggcgccagtgccgcacgggcggataattccagtttcatcgccagtatcccggtaggcgggagcaccccggtgcataccgtggaagcccccccgaaagagaaaaagcggaagcccgctcacgaggaaaaacagcaggagaagaaaaaggacgagggcctcagtaagtcagaccaggcagccctgaataaactcctcgcatcaatggacacgtcggcacagtcgccggatctgcagcaggtctctctggccgtggcaaccgagccgggcgctgccgccgaaggcagtcaggccaaatcggcttacgctgactggacatcgtccatcatgccccggacaaccggtgggggattatccggcgggggggaaagcacggccccggtcatcgagctgatcccggcttatacacgtgtgcccggctcagtggattttggtattgattccgacaacaaccattcgccggcggtcgtcaggctctataccggcccctatgagggtgcggtgttgaaagcctctcaggcacaactcggcggggacggcgtggtgatccacatgacaaccatgtactggaaccgcaaaaactaccgtgttgacgcctatgcgctgaaagacgacacgctcatggccaatgtggccactgacgtgaatcaccactatatgtcccgcatcctgttgccgtcgattgctgccggtatcggtaaagccggtgacctctatgcggatgccaataccgagatcctgaccaacggctacagcacggtgaccagccatgccgggatgccggatggcgaggcggtggccggcgtggtagccggtggagccgcatccaatgctgctgacgtactgaagtcggacgctgccaaaatttcaccgactcaggtcacggtggatgccggccaggccgtttatgtcgagtttatggctgctgtcaccacggctgatgaaatcaagcctcgcggtcagaacaccaccggcaatacggccaccccgctggcaaacccgcaggacagccataccggcaacgcactttcgccggtcagccctacgctcgcacagctacgggaacaaacgcagtcacgcatccggacccagtcacagcctgaaaaaacgtcggagtaa

SEQ ID NO: 109882 - DNA, 720 bp, Enterobacter aerogenes
atgaatgaatttaatcatcccgccacagacaaggatgatcagccagatatatcggccatcgtgcagcatgagaaaccgagtctgaaatatcttcttctggagaaacagtatgttctgggactgaacggtccctggcttatcggcattctcatcgccgccaccctggccatctggtatctctttggcaccaccaccccgtcatcacaggatgagctgaatgcggcggccggctttgaaaacgttcctccggctgcctcacaaccagacaaccggtcattgtcctcaacactgtcaccgccggccagcgataacgtgaaagaggaagtggccacgatggtgaacggcgtcaaaacctacgcggaagccaaccgtacagccatccagcggctgtccgacaccgtgaaaaccttgcagcagcaggcggccaccacgcagcagctgcagagccagtatcgggaggagatcaacatcctgaagtcacgggtggcgacactggaggtggagaaggtcaacaccgcaacgtccgccccccatcgccagcgcctgctgacgtcaggcatgaaggtcagttcagtccaggacggtgcggcgtggattttctggaaaaacaaaacctgggccgtccgtgagggcgataccctcgctgacggtaaagtcagcatcatccggatcgattcggcaaaccgccaggtattcacgactgaaggcgtgatccgttaa

SEQ ID NO: 109883 - DNA, 534 bp, Enterobacter aerogenes
atggttgatgccctgacggcactggtcaacctggccagtgcgatccacaccagtggtaaccggttcatcttcgccctggctgttgtgcttggcatttatggggtgatgttcgcactgaccaaagaggcccgactggcccgccaagtgccgggccacaacggtacgggaaaaatcatcggcgtcgtcattctcggcggcatgctggtagggctgtcccagataatcaatgccggggccgcccagctcggctggtctgatgtcacctttgatgaggtctcgtatgtttccaccgacacctttggtcagggtgccgatgcggccaatgccctgttgacgcttctccagacgctgggtatagcctatgcactgtccggcacacagcgcattaaacgttcactgaaagacggccacaccggtctgtcagccggtgaagatgtgggaaccggcgccgtgaaattcattaccggggtgtttcttatctgcgccccgacactgctcgatgctatccagaccagcctcggtctgtctctctag

SEQ ID NO: 109884 - DNA, 402 bp, Enterobacter aerogenes
atgtctgcaatcttcgatcgtgtcttaaaagcttccatcactgcacatgagctgcgccattccatgaaacgtaaattcactgccggtatggcaagcctggtggcgttaaccccgctcagcgcgctggctgacggtaccctgaccgacatggttgatgagggtgcgagcgggatgagcgatgtggaaaaagacgcgctggttttcgccgaaggggtcggtgtactgatcgtgtttgcgaccatcattgccatgaagaacaaggagaaaagtccgcacatcaccaccaaaggcatcattatcggctgggttgtcgggatcttcctcatcgggctgggtgaaatcgttcgccgttcgcagagccaggtgggcctgaccgaagtcaccgtcggttccggtagctaa

SEQ ID NO: 109885 - DNA, 564 bp, Enterobacter aerogenes
gtgacacaaaaaggtgttgatgatgtcgcctggctggatgtcagcggtgatgacacgccgccctcaccggttcaggtaaatgctgaatgttgctcacggtgccggtggcccgcccggcggcttttccggctccgtgaagcagagaacgacgcggtttgtgcagtctgctggataagccacaacctggacacggcctcagcacaccagggcgacctgtgctggttaccggggcttcatgccgccgacgtcgtgaacctgcaacggatcgcctgtatcgcgaccatcgccggcaacagtcacgcgaaaaaacaggggcagcgggtacttctatggatgcgccgccacaaacgggaaaccgaacgcgcctgggatacgtcccgcccggctgaatttgcggcagtgatgtcacgcttacacccggacgaccggcgggcattccgtcagcgactggcaggctgtcatctggtcctgccggccaccgtgttcagcgatctcacattgctgctgcctgccggcatggacgcggacaccctgctgaacactctcacactccccaggctgtag

SEQ ID NO: 109886 - DNA, 3048 bp, Enterobacter aerogenes
atgtcattaatgaatgcggttgaagatttcatcacctcggtcagccggcacacggtttcgaatgccatgccggactactgcgacctgcggaccatcgtcaatctgacggagtcagatcgcaacttctatccggatatgcaggtcccctttatcgccgttaccgacgccggccattatgcctctacctttgaggtacagggtggcttctgtgaaatggacgaggacgcccccgccagtcagaaattcagttttgacgggtttatcaataaagtggctacggcaatggccacggattttaaatcgacgggccacaaaatctcgatggtgatggagaatgaccccaaccagggcaaggcggaactgaagcgcctgctggcacaccagtaccgctccattgcccgcaccggtgtgggcatggcggacattctggatgaaaagatcgccaaaatttccccgtgggtcagccgtgaacgcgtctggctgacctgctggacggggcgagaaaccctttcgcctcaggagctgaaaggcgacatgcgtcggatcagcggactcgtcagtaaagcgcccggcacgcagtttggccaggtccccgcgttctccgaactgacagggctgaaaattcgccatgacgcctttctcaacacgataaaaaccgccctttttgacgggggggatggtcagcttatcgacctgatggatgtccatcagctcggtcgggaaattcgccgccaggtggacagaaagggcaccgatgaaacttaccggccggtactggcgtccgatcgcgtcaggcctcacggaaaacgtaaccgggaagacgcttcaccgctcttcgccccctggctgaactaccagctcatgggcgtggatgccgacgccgaaaacaacttcattaacattaacggcatgtggcacgccacgctctccgtgtcgatgggcccgcagcagctattaaccttcgcccagctgaaagcccgcatcccccgctccgtgccgtaccgtattcgcatggacgtcatgccgggaggactgaagagtctgtcgtggaaaggcaccctgctcacgtataccgcttatatcccgccactgcgccccatctgggaagcggtggaagaactgaagaagcgcgacagtcacgatccggtctgtgtgatgacgatagtggcttcaacctggggagaaacgaaggaagaggcaacgctgaacctcaccctgctgaccaaagcgtttcagggctggggcgtctgtgaggtgaccagtacgtttggtaatccctaccgtgcctgggcgtcaacgttactggcggcccggaccggtggtggtccacacaacctgtatccaccgctgaaagatgcgctcagcctgctgccgttaagccggcccgcgtcagcctggtccgatgatgcctcgattgttttcccgacccctgacggcaaaatcattccggtggggctggcgtcagctaagcagaataagcacaccgaggtgattgtcggtgaacccggttcgggtaagtcgctcatcatgaacatgctcagcaatgctattgtgtgcaacgcccagcaaaaactgccctttatcgcggttgtcgataagggctacagcgcccagggacaaatccagcttatccgggacagcctgcccccggaacgcaaggatgaagccatcggctgggcactgcgcaatcacagcgatcactgccgcaatatgtttgacatccagctgggtgcccgttaccccatcgccccggaactaacctggatgaaaagcatgctgaccgcgatgtgtattgactccaacaccggtctgccgcctaactcccgcgatatcgacgtcctgctggagcgggtgattacgatggcctatcgcgataaggatgaaaccagccccaataagttttcagacggcgcatcgccggagatcacccgggcgttaaaagcgtccggcctctggacccggtatgacgaggaatggtgggacgactgtccctggtatgacgtccgcgacatgctgttcagcgccggctacgtgaaagaggcccagctggcacagttcctcgccgtaccggaactctccgacatgagcgagtacatcaacagcccggagatcaaagcgagcttcggcaacgtctgtcgtgataactcccaggagctgctgacagagtatgtcgcccgcgtgatcggccaggcttgtaacacttataaaatgctggccggccggacccggttcattattaacccggccacccgcattattgccatcgacctgaataatgtcgtcggggataaaagtgccgaagggcagttgcgtactggcatcatgtacctcttcgccggccaggtgagcggcggagacttcatcctgccgcagtaccgtaaagagctgatggccgcggtaccggagatgtaccggccgatgcacatggaaaaactggatcagcttgaccaggaagtgaagtcgaaatactacgacgaactccacaacgcttcggacgtgccgttcatcttcccgatgctggaaacgcaggaccgtgaacagcgtaaatttggtatccgtaccgtgttgtgctcacagtacctgaccgacttccctgacacgatcctgaaatcggccaactcggtgtatctcatgcactgccgccccgaagatgagcgggcgcttgtcgatcacttccaggtaccggaagtcaccatccggaagttcatgcaaataccgaaaggcccggccgctgatggcagcgggacgagctttcttgccgtattccgcacgaaagccggtcgcatcgcccacattctgaaaaacaccgcgggcccgaaagaactctgggcgctgagttcatcgccgggcgacaccgcccttcgggattatctgtatgaggaactggatggcgccaccgcgcgcgacattctggcggaaaactttgagcacggttcggctcagcgtgtcattgaattccgtcgcaagaaggccggcgaacaggacgccgggaacgtcacccgccatctcgcccgggaaattatcgaaaaacgcggttaccgcctctga

SEQ ID NO: 109887 - DNA, 1197 bp, Enterobacter aerogenes
atgaaacgaaaacttttagccgccgcattgtccatcgcatgcggacaggctcttgctgcctacccggttagcgttgtttccagtgtgccgatcacaagccaggttgtgccccatctgacaacgatgcaaaccacgctggcagaaatcctgaccaccaacacggaaatcggcagcgccattacccaggcgagcgataaaaacacggcgaccctgacagaaggcttccaggcacaacgtcaggcggacaatttcggccgtgaaaccgaacgtctggaaaaggcacgcgccagctttagcgtgccggacagcatctgcagcgaatcggcgtccggcgtggcgcatcaggttcataatactgcccgggccaccgcgtcctctctggcgtcaggaagcgggatcagcaactcggccattcagaaagccgtggcttccgcgccggttctccccgcgcaggatgattaccgcagcgccgccattcacgcgaattactgcaccagtgccgaatacgcggtgtatggcggcaccgcgctgtgccagtcggtgtcctccgacatgcctggcggtgacatccaggtccagtcgctctatgacggtgccggcgccgcgggtaaagagccggaactcaccttcagtgatgaccagatcgatgccgggatggcgtacatgcggaacagcgcgaaacacagtcccgggcgcacgctcggcaagggagaaatcaagaatgaaaccggctggcagtaccagggcctgctgacgcagtacaaggcgattcagagtgccgcccagcaaccgcagttatcgatgattgcggacagtaaacccaacagcagcacgaccaccgcgctgaaagaagcgctggaaaatgcatccgccaggtcgtatttcgatgacaccgcgtcagatctggccaaaagtaactaccagatgtcagcccgcgagtttgaaagtttcgaagtcggccgccggtatgccaataccgattaccaggaagacctgcaggcaatggatggcgataacctgatgcgcgaactgatccgggtacagtcactgtcaaattatctgcagctcggcattaagaaccagctcagggaaagcaacattatcgccggccagcaactcgccctggcggctgaccgggaatatcgcccgcagctgcaggcactgatgcaggaaatcagcggaggcgtcgccaaatga

SEQ ID NO: 109888 - DNA, 582 bp, Enterobacter aerogenes
atgacacacaatgcccatgatgaccagaccgaagcggccggacaggcgccgcgttcaacggcagtaaaaagggcccgcaaggccctttccttgtcggtctcgatttttacgcccattaacgacatgcgccgtatggggtcggacgtcagccagtccgtgaagaccagtatctcccggctgaaggccttccggcgtcaggcgcgcgaggaaaaacgcgagaagctgacatttgaacaggctgtccaggccagtggctacagtctgccgcagctgctgtggaagtatcgttttctcaagcgactgtggtgggtggtcgccggactgttcctggtcctgacgcccgtactgatgagtatgatattgctgacggcgtccaccctgcccccgatgacgttctggcgggcgattatttttgtggtgatcttcgctgcgctggccagtctggcggcactgaaagtggtgatatgtcagtaccgcctctggcagctgcagcaacgccgcgtcagtgacgaagaaggcggacgcttcagcgatttcctccaccacgcacactggatcaaagacgccctgaaccctgtctga

SEQ ID NO: 109889 - DNA, 2145 bp, Enterobacter aerogenes
atgaaactatttaagcagcccctgcagggtctgttgctgctgctcatctcgttgccggccctggccgatgacgtgacgtacagcaccattcgtgacgctgctgaaaattcaagtgacctctcccgccaggcgttggttaccatctttggcgacgtggtgacgtcgccctttacttcaacggataccaccgtcatcggttccctgttcggcatcctgaacggcgttatctgtgccattgctctgttctggtttctgactgtcaccctcaaaagcattgtcaaagcgggtaatgccggcaaagtcttcggcagtacgcgcaccgcgatggcgcccctcatgtcctttgtcgggttcatcactctggtaccgacaacgagcggctggtcgctttcgcagctggtcatgctctgggcggcctccatcatgggggtgggcggcgccaacctgctgacaaacaaagctgtggatatgatggatgacgggtattcactggtcacgcaacccgtcgccagctcgacgcgggatgcagcccagcagatttttgagatgaacctgtgcaagtatgccatcaacgaacagctcagcggcttctacgacgatgccggctcggcgagcacgtcagagatgagcacctccggcagtgacggcagttatgaaaccagcaacggcagcgcctattgtgggaccgcgaaaatccccacgaccacgcgcagcagcagctggtcggtcttgtttgattccgatgtggatactgacgccatcgtcagcgcacagaagtccgcactggataccatgcagacgaccctcgacagcgccgcacagacgtttgtcagtacctatatcagcaaacgtgatgatgactccggtacgctgaccgatgccgaaaccaccatccagaatgcagcaaccgcctatgagaacaccattaactccgcgctcaatcagattgactatgaagacaccctgcagagcagtctgaccagcaacatgaaaacctacggctggatcgccctgggtgcctggtatcagacgtttgcgaccgcgaacgccaagacctccgacgtaggtaaatcagcaccgaccgtcagcgggccgacaggactgggggaaatgggcaacaccgacctctaccagcaggtgttcgctgcctacaacgcccagctgcagaacagcagctacactgcagcactcggcacccagaccagcaagaaagacatcgaaacggggcgggcaaaagatccgaaatcggtgttcgtcgggctgtttaacagcccgatgcaaaaattgaccaactatattgcgacgaaaaatatcggacaaaccgataacagcagtgaacaggttaatccattgcttaagatgaaagccatcggggactacaccctagacacggtcggcacggccctgacggcctatgtgaccattcaggggtcgattgcatggagcggtaataatatcgtgggacgaatcacgaacggactgaccggctggaaagctacagtcgcggcggtggtgcaggcgctgtcccctccgttctacttcctgctgctgatcctgttctcggcgggcttcagcctgtctgtgttgctgccggcgatcccgttcatctactggatgaccggcgttctgaactggtccgtcagcgtgctggttggctgtgccgccggcccgatgtggtccgccacgcacctgggcaccgaagaggatcggggaagccgcgcggcctacggctatgtctttcttatcgacatgatgctgcgccccagcctgatggtgctggccttcttttttgcctctgtagctatcgtggcggccggtacgatcctgaacctgctgtttgcctcggcactggccaacgcacagattgactcctggaccggcctgtttaccgccgtcggttggctgcttatctatgccaggatttgcaccaccgtggccaccaaggtgttctcgatgctggtcgtcattccggattacgtcatcggcttcctgggcgggcgtgaaggggcctcactgttcagcggcctgagcgattcggtctcgaatatctttgccggcgtcgggcgtacggttaaccctggccgtatcccgggaatggatgctaaagagcgtactcccggggacaaagatggatttaaggggtga

SEQ ID NO: 109890 - DNA, 624 bp, Enterobacter aerogenes
atggcaagccagcgggaacgtaccggcatggagaccttcgtgtcactgttaaaattctgggccgcgatgatttatctcccgatatgcctgttttttgccttcttccacacgatttcttcagaagatggtgatggggaaatagcgctaatattttgggctctttttgtcgcaccgttcatcattcggcagtttaccctgcaaaaacgccgccgcgccctgaacagcgtggtggaggccgtcagtggtgaggagtttatgccgcagaaagggaacgtcatcatctcgggcaaccggacctatctgggtgtggatgccatccggggaaccctgctctacgtcagtatgcgccgcaagggagaatacgatgtgatggggatggacatgtccagctggacgcgggtggcgtataagggcgatgtcatcaccctcaaaaccaaaaacccggaactccccagcgtcagcgtcgatgcaccgggcggtgagaaatattctgccgcgctgtatgacgtcatctgtgcgatggagcaccggcagtatgccgacctgcagttccctcagaaggcccatgagcgtgcccgtaccgcccgcaaagagaccggtctgacggtgttcagctacacctga

SEQ ID NO: 109891 - DNA, 1419 bp, Enterobacter aerogenes
atgtctcagaaccgtcaggccacttccggccatgatgacgcctacggctttctgctgatccctgccgccctcgtgattatctgctggctgtggttcagtaaatttgtatgggtatcgtgcctgctgctctactggctctgggggatggtcgattttcagcgtatccatccctgggtcgcggaaaaaatcaacctgctggcccgtaccggcaatcacgcccagtctatctcctggcatgactggttcgccgtgatgaatgaaacgtccggcatcctgctgatttttcttctccccatcgccatcagtgcgctggtcggcatcaaaaaccatccgtcccggcccatgaagagcaagcgtatcgtcaatatccacacgctgccgcagatcatgagcaaatggtcgccggccattgtgccggtgctggcagaaagccggtcgccggacctgttaatgaacgatgacggcccggaacgccgctgggcggaaaaaccggaagagttcgccgccaggcatggtcttatcgcctcgcgcatactggaccgggaaaaagcccgtgacgtttttatctctcagctgggtacacggttgtctgcctctccggacacattgcaggattatgagaaagccctgtttgccgtgttcggcctgcaggtgttgatgaatgaccgtaaggctgccaaaaaactgctggatgatctgaaccgcagctgcctcccgcgcaaccgtaaagaacgtaagcgcacgaaaaatctgtaccgtcctgatttttcccgagcagaaaaagcctttctgacggtctggcaggcggaggggatgaaagaaatccatgccacacaccagtacgtcagaacggctctcagcggcctgctgggccacgatattcgcctaccgccgtcacagtatctctggctgaagcccatcgatcgcacgctctggtatgccctgcacggtgccgataccgccagcgtgtttgtggagggggcaggcgtcattgctcagacgcgttttgaaatcgtggtacgaaaagagaagctgccattgcagatcgattatgtcgaatccgccatcgacgggctgcagtacgagctggaagggctgggtctggtgcatgagcgacgcgtgaaaaaaaccgaacgccggaagaaagcacctgactggttacccccgacgctcagccaggacagctttactgacctccagggcgatgaaccggaacctgcagaagcagaacagcctgaagataatgctgctgcagcggaggcgcatcccgaccaggacgccgggagacacaccgggccgtccactccccccctcactgataccgcctcagctgccgtatcgaccgttaccacacctcacgtatcacatgacgccgcagcctgtgaggcgacggacgacgatgaacctgcttttatataa

SEQ ID NO: 109892 - DNA, 1122 bp, Enterobacter aerogenes
atgaacctgcttttatataaggccccaacgatgatgactccgacatttaatgcccgtatctccggtaatcacctgattgcttcactgaatgacgacacaccgattttttccctcaatgtgagtgaggacccgagtttctggatcgaagggggcacgctgatggtcagcctgaataccgacagtagccatccggtataccgggcgctggactacaaagaggcagaacaactgctgtctgtcattacacgggtactcagcgatcgtaagccgaaaataaagtggaagaaaaccctcctgcccgcggctgcgctgctggttagctgttttgccgtctggcgttttgcgcctgcaacaccctcagcgggcatgccgccgttcggacaggaagagccccggaatgcctcggaggaaacagccgcagcgcgcttccagggactaccggagctgcgcaaccctgcgccgggtaatccctattttggcaaccacacaacaccgaatgccgacaatggccagccgatgccgacagcttcccctgtccggccctcagcaacccggccggtttccgtggccagtcaggaaacgctgagcccacacattatgcagaacctgcagaaagcagcaggccgcggctatttcaccgtccccctgtcttccggacacgaacggacactgtacgtttttgccgatccggagtgccctaactgcaaaaactgggagccggtcgtcgaagcattaggtaatgaatacaacgtggtggtcttccccgtctctgcgattggtaaagagaaatctgtccggaaaatccagtctgtcctgtatctggagacggcgcaccgcgctgcggcctggaagaaactgttttcggttgacgagggcatgctcaccattggcaaaaagaaaaccggtgacgatcaaaaagaagccccggtacaacccgattataaacgctggaaaatcgccggcgaggcgctggccattaacgatgtcgcgttcaggcaataccgtatccccggcacgccctgggtcattgccgacgacggccgccatgtaccgcagtcaacgatgaaagatccggccaccctgcgcgccttcatgacagagcacagcaacgcggagaactga

SEQ ID NO: 109893 - DNA, 2193 bp, Enterobacter aerogenes
atgcaacagaagcagaaaccggtcgatgccgcccggctgcagcgtcaggtacatcagagcatggtcgaagagatggcgtatcgcaccggccccctgctgctcgccattatcgccatatttggtgcggcaatagtctggcctgtccttctgtgggcggccattccggtcatgctggtctgggtcccgatgttcatgctgaatgaattccgaatgccggcgaggatgccaatggacatggacaggctggatccgtcaacggaaaccatgcgacccggcaaactgctgggctttctgcccgtcactaagcttaaccggcatatggaaaaggcggcgggcgtgttctataccggatacgaacgcacgctcgatggcggccgtgagatatggctgcgcatggatgacctgacgcgccatctcattcttatggccaccaccggtgccggcaaaaccgagatgttgcttggttttgtgttaaatgcactgtgttgggcgaaagggctgatcttctctgacggtaaggcccagaatgacgtctggtttgctgtcgcctccctgtcccgccgctttggccgtgaagacgatctgcggttgctgaactacatcaccggcggccagagccgctctcagcgcctgctggagaatgacaaatcacgccagcagtccaataacacgaacccgtttgcgctggcccaggaaacctacatcacgcagctgatggattccatgatgccggaagccggcaacgaccgtacctggcaggagaaagccaaggggatgaaccaggtcctgacaaaggccctgatttacaaaagccgcaaggaacaaaaggtgatgtcgcagcggctgatccaggagtacctctccctggataagttcgcggagctctatctgcaggctgaagctgaggaatggcacgaagaaattcgaaccgggctgcgtaattatctctcaaccagcgtgccgggctttgatatgagcctgatcaccaagccatcagagtggtcgcaggaggcgcgtaaccagcatggttatctgacgagccagtacaaccgtatgctgtcactcttcagcgatacctatggccacgtgttttcatccggcgccggcgatattgacctgcgggatgtggtccacaatgaccgtattctcgtcatccttatcccggcactggagctctccgcgtcagaagcgctcacgttggggcggctgacaacctcccagctggcgatgatcctgagccaggacctgggcgaaaggatggaggggaaagcggaagacatactggttatcaaaaaattcagggaccgctttccctttttatggctggcagatgaggtcggttcgtactactccgataccatcggtcagctggccacccaggtccgctccctcggctatgcgctcgttctggcaggtcaggacctgcagaagctcaaaacggccgtgggggataagctctggacgctgctcggcaacatgttcacccgcatcttcgggaccatcatcgatccaactgaaaccgcagagttcgccgcgaaatcagccgggatggaataccaggccattcaggacagtatggaataccgcgccggcgcgatcggggggagctatgccgataccgggcgcgttacggtccaggagaaaccgaaactgccctttgatgaactgcaggctttaaaccagggggagcaggccacggtcttcaaaggggccgtcatccggaacaacgccctgtacatcgcggatgacgacaaaatcaccgacaaggacgtccgcatcaaccggtttgttgaggtggaatggccaacgtatgacagcctgtctcacctgctgccggcaaaagtccgccgtgaccgccctcgtccggccagtatcaaccgcattatggccatcgtgaaaaatgacaagatcaggcacgcccctgacagcatgatcattcaggatggcgtgctgtatgccattgcagatgaggccatgtatttcgacgaagtcgcacccacgccccccaatacagtccagcgcgcgacgcagctgctcagcctcgccgccgctgtactgaccgagaccagaggccgttaccgcgtcgaatacccggagccggaaaaactgtccgtcaaaaaggatgagctggaaaaataccagcacattcaccagtcggccgtcactcaacaggctgacggtttctcttactga

SEQ ID NO: 109894 - DNA, 534 bp, Enterobacter aerogenes
atgtttaaaaaaatactggtagcagccgtgatggccaccacactctcttcgtccctgtcagctatcgccgccccttccgtgcaggtcggtttcagtccggaagggaccgcacaggaactggtactgaagaccattaacaatgcacaaagctctgtgcgtatgttgggatataaccttacggctgcggatattgcgaaagcactggcgtccgccagtcggcgtggtgtggacgttaaagtcatcctggataagagagaaaaccagaacaaatattcgaaagccgcactcaatatactggtgaatgccggcgtgaaagtccgtctgacggatgcctataaaatccaccatgacaaagtcatcatcatcgaccagaacacggttgaaaccggctcgttcaacttcaccaaagcagcggaatatacgaattcagaaaatgcactggttctgaatgatatgccacaggtggccagcgtctatctggaacactggaagtcccgctgggacacaggacgtgactggaaatcgacgtattaa

SEQ ID NO: 109895 - DNA, 252 bp, Enterobacter aerogenes
atgtctgaaaacacacaaagaaaaaatccctgccgtcataacgatgtgcaaatcaggacgcgcgagtttgcgctcatgctgggagtaccagagcatgaactcggtgtcgccgcatccaccactaatatatttcgcggaataccattaccggcgccggtaagtcagttaaagggaaagacaaggcagttctggctgtctgactgtctggattttgccgaacagttaaaaggaacatccgcagaaaataaataa

SEQ ID NO: 109896 - DNA, 627 bp, Enterobacter aerogenes
gtggcttcgcgccgccgccgccggttcctgaaccggttgatccggtcactggccacgcctgcggggcgtctgaaaatcacagcagaactgcgccgccgcatccggtataacaagtattgggtcaatgaggcaaaccggttcggactggaaacgctgtgtgaactgttgctggccatccttgacgatcttgattttagagactggcaaaccagacacaacctggaaacgctggccgaacgtgccggcttggccacgcgcagtcaatccggccatgtgtcgatctcccgtgccagccggggctgtgaccgcttggtctggctcaacgctatcattacagaaaaagcccccttcaatccttatgacgcccgctgtgcctgtaagcacatcgaggtcacagaagatttctttgccattctcggcgttccgctcaagcaggtttaccgggagcgcgcacggctgctgaacgtcgatcagaatgaagtcatccactctggtgatcagcggttaattgcgatcaaggttgaaaactggatgcgtaaggccgctgccgggttagccaggatgaaatcaaagcgtgacgccgcacgccagctaaaacaagcctactacgctcttacacccgcctga

SEQ ID NO: 109897 - DNA, 615 bp, Enterobacter aerogenes
gtgaatcagtcaggaaaatcggcccatctggcgtggtgtgccctggtggcgctggccttagccaggcagaacggtgacgtggtgtcaccggcacaggaaaatctctttctcacccgctggctggcgaccgcgctgagacaacgtcgtttttcgcgcgatgtcgcttccgacattgagtggctgcttaaacagggccgtcagctgggcgtcaatgcgcagctggccagtaagctgaattacctgtggcattcctgtaccggcgagttgtctgagcaaaatgatctgttccggctgaaccatgcgctggaggcagcgaaggctatgaactggaattaccgtgtgttaagcgaccgggaatggtccggccggaatgccgtaaccctgaatgccggcgtgaacggcatttatctttcacgctccagtctcgatgccgcatttgacgacgacggccgacagataaatcctttgttggtgcgtctgacagggaatgtaccgggactggtgacgctgtttatccgcagtgactggcaggtgcagcctgaaggtgatgcctccctgacttatctgcaccgattgttggcccgatcggctaagccgcgcgacagcgcaccttag

SEQ ID NO: 109898 - DNA, 426 bp, Enterobacter aerogenes
atgcttactatcattgagccccgacccgacacgctgctgccgggccggccgatctatacagaacgcattcctgcaggttttccatctcctgcagctggatatgaaaagcaggatctgaacctgcatgaatattgcgtcagacatccctctgcaacctattttctgcgtgtggaaggcaacagcatggaagacgcccggattcacgatggcgacgtactggttgtcgatcgcgccctggagcctgagcacggcagtattgtgattgccgccgtggacaatgaatttaccgtgaagcgactgctgctgcacccccgcccctgcctgatgccaatgaatcctgcctacagcccgctctatttcgatcctgacagtgacaccgtgcagctgtggggcgttgtcagccattctgtgatgagacatctgtag

SEQ ID NO: 109899 - DNA, 780 bp, Enterobacter aerogenes
gtgtttgccctcattgatgtaaacggcatgtatgccgcctgtgagagtgccttccggcctgacctggccagccgtgcggtatgttgcctcagcaacaacgacggggcgatcgtggcccggaaccggcttgcaaaactggcaggactgaaaatgggggaaccctatttcaaagcgaggccgcttattgaagcgcataacgtggccgtattcagttcaaactacaccctgtatgcctccatgtcagcgcgttttgcggcggtagtggaatcgctgtcttcccgtgtggagcagtattcaattgacgaactctttgtggactgtcgtgggatggaaacggcaatgaacctggaggcattcgggcatcagctgcggcgtgaagtgcaacgtcatacgacgctgacctgtggagtgggcgtcagttttaccaaaacgctggcaaaactgtgtaatcacgccgccaagacctggccagccaccaggggcgtggttgccctgactgacgagcgcagactgcataaactgatggccattctgcctgcggccgaagtctggggagtgggaaggcgcatatcagcgcggcttgaaacgatggggatcagaacggcgctggatctgatgcgggctgatacccggtttatccggagtaatttcagtgtgacgctggaaagaacggtgcgggagttacgtggcgaaatctgctttggcctcgatgaaaacccggcaaccaaacagcaaattgggggaaccgcagaattcggaaaaaatcgtacgctaagctaa

SEQ ID NO: 109900 - DNA, 819 bp, Enterobacter aerogenes
atgtcgattgaacatatctcaggtaatcggatttataatgccagtgtttctgtggtgattacatgctttaatgattcgcctgtattcactcgttgtcttgaaagtgtgcttaatcaaactgttaaaccgcaagaaataataatagtcgatgattgctctaatgattctgaaaaaatagaagaaataatcaattcgtataatgataacaccattatatacattagaaatgaggtaaataagaatggagcattttcaagaaacagagggatgtcaatatctacctcggattatattgcattactagatggtgatgattactggaaaaaaaatcatattgaacaaaatttgatttttttacagagtaagaaaatagatttcacatattcagatgtcatagaaattcgggctaatggtgaagaaaaactaaggaaagttaccgacatagccactttagaaaataaaaatgacattttgttctattcaccaccacaaacaaactcatttttctttaaaaaaacagtctatgattttgtaaagtttgatgaatcactgaggcgacatcaggactttcagtttcttatcactgctataaacacacaaaatatagaactagcgtataataacattgccacatcgtactactgtgagtcacacagaccaagtgctgcgagagtcgactatgactctatctttcggttttgggacatacactctgaaaagttcacaaagttattattgaatcattttctaaagcagcaattacacagctgtatcgtaattaaaaaaggggaaggaattatagattatcaaaaaaaataa

SEQ ID NO: 109901 - DNA, 225 bp, Enterobacter aerogenes
atgaaattttcgctgattgtctgcacgttaggtcgttttgatgatattgatgtgctattcgcatcatttataaagcagaaatataaacattttgaggttattcttgttgatcaaaatgaagatggctatctgacgccaatactaaacaagtatgaaggagcgtttcctcttactcatgttaaaagtcctaagggattgtcgattgcacgaaaaaatagtaaatga

SEQ ID NO: 109902 - DNA, 609 bp, Enterobacter aerogenes
atgcttcatactaccaatcccctcattaaacacaaagccggtttgctcaacctggttgaagaacttagcaacgtatcaaaagcctgtaaaatcatgggcgtttcgcgtgatacgttttatcgttaccgcgaactggccgatgaaggcggtgtggatgcgctgattaatcgcagtcgccgcgtacctaaccttaagaaccgtaccgatgatgcaaccgaacaggctgttattgattacgccatcgctttcccggcacacggtcagcaccggaccagcaacgagttgcgtaaacagggcgtttttatctccggtagtggtgtccgttctatctggttacgccataaccttgagaatttcaaaaaacggctaaaagcactggaagaaaaagtggcccgtgatggcattgaactgaccgacagccagagcgcagcactggagcgtaaagcgtgtgatgacgaggcctgtgtggaaagcttctttcattcgctgaaagtggaatgtattcacggagaacgctttgtcagccggggaataatgtggaattgtatcgagtgtgattacaatcactggcgtcgccacagtgcgtgtggagatctcagccctgaataa

SEQ ID NO: 109903 - DNA, 336 bp, Enterobacter aerogenes
atgcaacgtaagcagatgcaaccgttgattggtcgcacaggtattgaatttggcaaaacattcaggggtaaaagatgggaaattacggcattgactctggtttattatcagtacgatttgcttaagcctggcgtgacaacattcaaagctctggtcggtaatacatatattaataatggtaaagatagcagagtggtattcaatattggtctaaataataacttaaaagaaaacgctaggataagtccgaatatggagcgttctgagtttagtttttacaatgctgataagttaattaatgccaatattagttatgcattttgggtagtagagtag

SEQ ID NO: 109904 - DNA, 486 bp, Enterobacter aerogenes
atgagcgttgctctgataatggttacaaaagatatttatttgaaaaatggtatcttatattttgcagaccaagatgaagggtataagtgttttgaattcagtggccgtggctctgtgtatgaggccgttcagcgatatagtcaagtttatatcgcttgcgataataatgattattttttatacaaccttgttttttctggggggggggctgttaaatgcatatgtgctgataatgtaactatacacaatgaaaatcgtttatcaattgattgcacatacccaccagagcaaattttacgcgctcttaatgatattgaacgagagatcctttatctctactttattaagaggaggaaaataaaggaaatttcaaagcttacatgtttaagcgtaagtaagatttcttataaaataagaatgataaaaattaaatttgatgctgaaacgacacggaagcttccaattctttttagacgctacctgtaa

SEQ ID NO: 109905 - DNA, 831 bp, Enterobacter aerogenes
atgaatagtcaaaatgctttaagtaatatgaggcttgctgttagaggggatatatcctgtaactctacattggttcttaaaaagattagattctacaattgtgctattatttatcttcgcaacgcccaattactggttaaaacaatagacggggaggttattaatattccgcctgaatcaatatgttatattgagaaaaatacagtcattgatgttacacttaacgtgttaggtaaaggcatgccttatgatattttccatatagacaacaatatattaagctgtatctgcaaagtcatggaaccattgttactgaatccacataaagttggttctatgcgaagtagaatttttaattgcacggcggataagacagatgtagaaatatttaaaataatcacagaggcgaatgtcccacatcatagactaatttataacattacttatttgttatctaaagttgatgatattgaatctttggtttgctcattatctgtttcaacagactctaccttcacagaaaaattaaagttaataatagaatctgatctgtcaaaatcatggcgattagttgatctggcaaatgttttacatatgtctgaagtctcaattcggaaaaaacttgaaaaagaaaataataattttaataatttgattttagatattagaatgcaacatgcagcaagattgataacgacgactgaaaaacatattaatagtatatctgatgaggttggatatgttagtacatcatattttatccgtaactttaaaagttattttggtataacgccaaaacagttttccttgaaagtgaaaaggaaatcataa

SEQ ID NO: 109906 - DNA, 1041 bp, Enterobacter aerogenes
atgcttcatactaccaatccggtcatcaaacacaaagccggtttactcaatctggctgaagaacttagcaacgtatcaaaagcctgtaaaatcatgggcgtttcgcgtgatacgttttatcgttaccgcgaactggccgatgaaggcggtgtggatgcgctgattaatcgcagtcgccgcgtacctaaccttaagaaccgtaccgatgatgcaaccgaacaggctgttattgattacgccatcgctttcccggcacacggtcagcaccggaccagcaacgagttgcgtaaacagggcgtttttatctccggtagtggtgtccgttctatctggttacgccataaccttgagaatttcaaaaaacggctaaaagcactggaagaaaaagtggcccgtgatggcattgaactgaccgacagccagagcgcagcactggagcgtaaagcgtgtgatgacgaggcctgtggcgaaatcgaaaccgctcatccgggatacctgggttcgcaggacacgttctatgtaggcaacctgaaaggtgtcggccgtatttatcagcagacattcgttgatacgtactcgaaagtggctcactgtaagctttacgtcaccaaaacaccgattacagcggctgacttactgaacgatcgtgtactgccgttttatgcttcacagggcctgccgatgctgagaatactgaccgacagaggcacagagtactgtggcaaagtggaacagcatgattatcagctttatctggcaataaacgacatagagcacacgaaaacgaagacgatgtccccgcagaccaacggcatctgcgagcggttccataaaacaatactgaacgaattttatcaggtaacgttccgtaaaaagctgtacggcgatcttgatacattacagtcggatcttgatgaatggctggctcactataataatgagcgaacccatcagggaaaaatgtgctgtggccggacgccgatggaaacgttacttgatggaaagcacgtctgggctgagaaaaatttagaccagatgtaa

SEQ ID NO: 109907 - DNA, 552 bp, Enterobacter aerogenes
atgcgtgaattatattgtttttatttctttgtaaaggatatatcatttatgcgtagtaaattatccctccttattcttgctttgatgacgtgtggtgccgcaaatgccgctgaaacagctataggtgatgttgctactgtgcaggctccattagcatttggtgcacagaataccatcaacgcaacctggactcaggatccctctgtatctggtacctcagttacggccatgcaaaaactaggtacccttaatattcaattaaccggttctcacgcaggggtctatgttacaggagatgatacgggtgtaagtggcggcctcgcgactatcccatttaaaaatgctgcaggtcaggtttatgtacgtggacgtactgatggctcaattccacaacttagcagcacaccaatcgcaggccataatggaccgggttggaaattagtaaataccggggataacattaatcttgacattagatccttccaaaatgggaataatattcctgctggaacatatacggcaacattctacattcaacaatatcagaactaa

SEQ ID NO: 109908 - DNA, 762 bp, Enterobacter aerogenes
atgtacaaatatagaaaaatttttatccctgttttatttttaacttcttttttaagtcacgcgcaaacagcaaatacttcggttgcgaaatcaaatgccattgtcaaaatagaagataaaatctatggcttgagattaggaagtactcgtgtaatttataatgagggaatgttagcgtcatctttttggattaaaaatgaaaaaaaatatcctataattgtgcaatctcaggttttctctgatgataaaaagacgaaagccccatttatcataacaccgcctgtattaaggcttgaaagtgaaattcaaacgaggttaagaattgttccggtttcaaatgttctgaaaaaagacagagaatcattattctggatatgtgtaaaaggtattcctccagaaaatatatcctcttatgatactgaggacaataataaatcaacacatgttaatataaacgtaattactaatagttgcattaagctactaaccaggccgaaatcagttgacatatcggtagaagaagctaacaagaaattaaaatggggtattaaggagggagaattgttagtagaaaacccatcccccctctatataaatatagcaagaataactgtcaatggaaaagaggtcgctatacctgatggatatattgaaccttacaaatccgtaagtaactttgctaaagccagcaaaggagacaaggttaattcggttgtattggatgatataggtgctgaaattaataacgaagtgacgctttaa

SEQ ID NO: 109909 - DNA, 2448 bp, Enterobacter aerogenes
atgaagaagaccattcctgttttaatccttacatccatcattaattccggagattcttttgcaaaagaatataaatttaattatcgctacttagcaatggatgaaaatgcagatttaaatttttttgacagcaagacaacccaaggaaactatgttgttgatatatatatcaataatgaactaaaagaaacaacagaaatatattttaaaaatataggtaataatcttgctccttgcctgacacaagaaaacctaattaaatatggatttttgcaaaaaaaaattgatgagtttatttttgatgatgagcaatgtgttaatctagacaaggaaaatataaaatacctctttaacccaacaaatcaaatcttactgttaaacatcccatcaggatttttagctgacaagaacagcgagattgctgatgaatcgctttgggatgatgggcttaacgcgttgatattcaactatcaggctaattatctcaaatcaaacaataaacgaggtgattcatattttggtcaaatagaaccagggctcaacgtaggtccatggcgcattaggaatttatcaacttggaaaaagtcaaaagaaaatacagattttgagtcagcatatacatatgctgaaaggggtattaattcattaaaaagcagattgattattggcgacaaatatactaacacgaatatttttgacagcatctcttttcgaggagttacctttaataaagatgaaaatatgattccgtattctgcgagagcatactcgccgaaaatccgtggaattgctaaaactcaagctgttgtggaaattagacaacaaggctatcttctttattctacttctgttccacctggtgaattcgaaattaacagcaatcaattcagtaactttggaagtggcttatttgatgtcaccattattgaaagtaacggacagaaacaaatgtattctatcccttacacaatacctgttatttctctggcaaaaggttattcaaattatagttttacggctggtaagtatcgcaatacagatatacataaatatgaaccaatattcgcagagggcacctattcttacggtcttccttatggtttaagtatatttggcggtgttcagttagccgatatttatagttcttatgccgttggtataagtaaggatgctggtgaatatggcgcaatatccttcgacatgaagtacgctaaatctaaaccgtatgaaaaaacctcttttataagtggtagcgcttatggcataaggtatactaaaaatctcaatactacaaatactgatatatctatcgcaaaccattacaattattcaaaagactatcgcacactttccgaaacaatagatagttacaatgattatgtatattacagcaagaaatcaacaatttatgcaatgttaagtcaaccattgggcgcttggggggcgattaacttaagttataatcatgataactattggaaaaaaaatggaagcaactcaattgcagtttggtatggaaaagatattggaagtacatctctatccttaagctatacacgaacatcctttaagaaatatggaaagaacgataatgaagacttgtttaacataatgttaaatattcccctacaagacttaacaaataaggagatttacgcaaactatcaattgacttcatcgtctgataataaaacaacacatgatataggtttcaacggcatggcatttgacaggcgtatgagctggcaagtaagggagcaaatccaggaagcctcaaaatataaaaaattcagttattttaatgcatcgtggaacggaacgtatggaacacttggtgcaaactataactatagtagcactcatcgtgaagttggcttagcactctctggtggtattttagcgcattcatcagggataacatttggacagcggatttccaatactacggctttagttgaagcaaaaggtgttagtggggctaccgttttaggacttcctggtataaaaactgattttagaggttatacattctctagttcactaatgccatatatggacaatacagtatcaatagatcctagttcgctgccaaataatagcagcattaaacaaactgatattaaagtagtcccaactacaggggcgattgttaaggcaaaatataataccagtatcggagtgaacgcactcattaaaatcagtaataaaaaaggaaaacatctaccttttggcacaattttagcagttaaagatgaaaaaggagtggtgcaatcaacatctattgttggcgataatggcgaggcttatgtcacaggtctcgatggaacacaggaaataaatgcgacttggggaagagaagcatctgatagttgtaaggtcagttacaaccttacaggacatcacgcaaaagtacaatcgctaactttcctgaatggagtttgtaaatga

SEQ ID NO: 109910 - DNA, 450 bp, Enterobacter aerogenes
atgaaatgcttcttattaaaagaaaactacagtctattgatgctattactattttcgttattaacacattcaacgatagctgcagctaaaaaattggaaattagcatcaatatggataatgaaaaactcaacgaatccactcagaacaaccatgttttgggtacaggttatgtaaaaagtgatggtaaatcatatgtcatagtaagttctagtgcagaaaaagtacccggacaacaagcaacatacatatttagaggtaaaaacaatccacaaaacagaatagcaataaggcttggtggcgaaggctggcatccggataaaactggactaggaattagttcgcgcatcaatatgctatcaaaatttgaactatatttttcaaataattacagagttaatccggatgtttatttgatacacctgtttgctaaagaagttaaaacagattga

SEQ ID NO: 109911 - DNA, 978 bp, Enterobacter aerogenes
atggacgaaaagtccctctatgcacatatcctcaacttgtcagctccgtggcaggtaaagtctctttctctcgatgaaaatgccgcttctgttaccgttactgtcgggatcgctgaaaatactcaattaacctgtccagcctgcgggaaatcctgccccgttcacgatcaccggcatcgtaaatggcgccacctcgatacctgccagttcgccacaatagttgaagccagtgtgccccgtgttatgtgtccgaagcatggatgccagactttgcctgttccgtgggcgggacccggcagccggtatacgctgctgttcgaatcattcgtgctttcatggctgaaaatcagcactgttgatgcagtcaggaaaccactcaaactgagctggaatgccgttgacggcattatgagccgcgcggttaaacgaggtcttgcacggataaaaaagccattagcagcccggcatatgaatgtggacgaggtcgcttttaaaaaaggacatcgttatataacggtgatctccgatcgtgacgggcgggcgctggctttaacggatgatcgaggtaaggaaagtcttgccagttacctcagaaccctgactgacggacagctgcaggccattaaaacgctctcaatggacatgaatgcgggctatataagagccgcgcgcatccacttaccgtgtgcagttgataaaatcgcctttgaccgcttccacgtagcgaaacagctgggtgaggtggtggataaaacccgccagaatgaacatccccgtcttccggttgaaagccgccgtcaggccaaaggtacccgcttcctgtggcagtacagcgacaaatggatgactgagtcccggcaggaaaagctgatgtggctgcgggaacagatgcagcagacaagccagtgctggacactgaaagagctggccaaaaatatctgggatcgcccctggagcacagaacgcaggaatgactga

SEQ ID NO: 109912 - DNA, 363 bp, Enterobacter aerogenes
atgcgtgaacccgaggaagttgaacgtttctggtttaccttttcccctgctggcgcggttttcggctgcgaagcgcccgaactccatcagtcgggttttcttcggatgtaccgtgagtccgaactccttgagtctgcgctgcatggctatacgaaagcgttgagcgtcgattcgcttgtcgaacccgatgactatgtcatctgcgtatctgaccatgaccacattgcctgttgcatggcggcgtcgccactgatgcgcccacagatcgaagacatagtggaggtagatgtttgccagcagcggcgagataaccgcaccctgtggggtgccttcctccgatgcccgccattctccttcctctga

SEQ ID NO: 109913 - DNA, 333 bp, Enterobacter aerogenes
atggtatctcgttttgtgccggatgctggcgaccttatctggataaattttgatcccgtggaaggacatgagcaaggagggcatcgccccgcagtcgtgctgagtccgtttgcatacaacaacaaaacaggtttgttgctgtgcgtaccttgcacaacaaaagtaaaaggctatccctttgaagttgaattgccaggagaacgcgatggtgtagctcttgcagatcaaataacgtgtgtagactggcgagccagaaaagtagaaaagaagggaaaggttgccaccggagaattgtcagaaatcagagctaaagcaaaagccttaatcggttga

SEQ ID NO: 109914 - DNA, 246 bp, Enterobacter aerogenes
atgtcacaggcaacgttcaagaaatggggtaaccaggcaggaattcgttttccggcagcggtgatgaaagcagcagcgcttaacgtagatgatacggttgatattgaggtacaggaagggcggattgtactcataccaacgaaagaaaagacctattcactcgatgccttattatccggcatcaccgaagaaaacatgcataacaaagctgacttcggcaaaccgacagggaaggaaatgctctga

SEQ ID NO: 109915 - DNA, 414 bp, Enterobacter aerogenes
atgttcaccaaatgtaatatgccacacctcaccttaattttacccttgctgattactggatgttcagctaaccagacaagcgtggagcgaaatgccagccatgcagtatctgcaatcaatcggatccagtttgaccccaacacacgacttctgagagccgacagcataaaagtgatgaaacctctgatgcagcaatattatgaacagggtaaaaaagataagcaaaatggtctgacgctctcgcaggctaagcaacgagtggaaaatttccattgtccagaatcatatactggtggggacaaaacagtaatcctgggcaaggaatacgatgccgataatccggaaaagcaacagcaaattatactcagtgcagccatctcagcatactgggatggctataacgggaaaccatga

SEQ ID NO: 109916 - DNA, 399 bp, Enterobacter aerogenes
atggacgaaaagtccctctatgcacatatcctcaacttgtcagctccgtggcaggtaaaatctctttctctcgatgaaaatgccgcttctgttaccgttactgtcggaatcgctgaaaatactcagttaacctgtccagcctgcgggaaatcctgccccgttcacgatcaccggcatcgtaaatggcgccacctcgatacctgccagttcgccacgatagttgaagccagtgtgccccgtgttatgtgtccgaagcatggatgccagactttgcctgttccgtgggcggggcccggcagccggtatacgctgctgttcgaatcattcgtgctttcatggctgaaaatcagcactgttgatgcggtcaggaaacaactcaaaccaaggtggtggtggtag

SEQ ID NO: 109917 - DNA, 132 bp, Enterobacter aerogenes
atggttactttcgagactgttatggaaattcatattcttcataaacgtggaatgagcatccgctctattgcctctcaactggggggttcccgtaacaccgttcgcaaatatctgaagagtcaggtgtattag

SEQ ID NO: 109918 - DNA, 249 bp, Enterobacter aerogenes
ttgctggcactgctcacgccctttaacattggaatgctgaccactgatgagtgggggagctatgccaaggcgcttccgaaagaaaagcacctgaccggcaagatttttactcagcgcattgagcgcaataacctgacgctgagaacccgaatcaaacggctggcccgcaaaacgctctgtttttcacgtcctgttgagcttcatgaaaaagtcatcggttccttcattgaaaagtacatgttctactga

SEQ ID NO: 109919 - DNA, 576 bp, Enterobacter aerogenes
atgagaagattgacagccgaagaatgcaattgcatttatggtggtggtgttggattgggtgaagctttagagaccatcatcgatgggatcgttgaagccacccatgcttcggaaggtgctttgtctttagctgaggcgctcggagcttttgacggtaaaaaggattttactgttccaaaatatacaacagataaagatgtacttcagatggacgtggatgttgctaacagctatatgcatgagctacagacacataccggtagtgataaagtttctgatagcgcccgggaagcctgtattaatgagttacaaaatgatggtcgtgtttattacaatcctctggaacacaaatttgacattttagggggagcgcctgaatctggagctgtcactcaacgtgatttaaaagatccagatatccgtaacttctataattatattatggaacaggatgttaagaacattaactcttcagatcccacgactgctaaaaacgctcttgaatcaatccagtatagtaccagagaaggagtatatcattatagcgtgactcaagggaaatttgtgctgggttaa

SEQ ID NO: 109920 - DNA, 1221 bp, Enterobacter aerogenes
atgcacagaaatataaaaaaaaaccttctaggagatgtttttattcctgacaatttaaaaataaagcgtatcattatattgtacactttcataatattatgtacaggcacagccctgctctttgcaaaatacacacaaagaaagacaaccgctggcattatctacccggaaaagggaagtttttcaatatatagtagcagaagtggcgtaattcataacctgagtattgttgaaggtgcacatgttaataaaggcgatgttctttataatatagactccagcgatacaagcagagagtttgataacagtgagaaaatatattctcaacttctgaaggaaagaataaaatcagcaaccaatgaaaacaaaaacgagattgatacttacaaaaaacaaagtttattaattgataaggaaataaaaaatgaagaaagcagcatagaaagagcacagaaggatattattacaatagataattcaatttcggtgaataatcttgcgtataaaaaattaatagatgcttacaataataaagtaataaccattattgataaaaacaatgcagaatctcaacttttggagaagttacttcagcgctcatctgttgagcgggaaattgatgaaaaaagaaaaaggatgagggacttaaaaatacaacttgatgatattcaaagcaaactttcatcagcagaaaacaactacaaagaaaataaaatagatgacctaatccaatattacaataatgcagagaaatatgattacatacaaaaatctccactacagggcgttatttcttcagtcacgaaaaaaaatggtgcacaaatccagaatggtgaatatataatgtctattatacctgaaaattctaggtatcaggctgttatgtttatttctccggaaattattggtcgactgaagttaaacagtgacattacgctacatatcgattcatatccttatcaacgttttggggttgtttatggaaaaataaaaagcatttcagatacgccactaagcgtagaaagtatttacaataactataatactaaagtcgaacatccatcatacatagttgttgccagcattgaaagaaatgaccaatctctcaaactaatccctaacatgacctttagcgcagatataccactggagacgcgatcattattcaaatggatatattcctctctatttaagactgaaacaggtattacgtttaaatga

SEQ ID NO: 109921 - DNA, 2145 bp, Enterobacter aerogenes
atgattaatgacaaattgaaatttaactttaaaaaacaagtcccgttttattttcaaaatgaaaactcagattgtgctttgacctgcatcagaatgttagcgtcttattatggcaaggagaacatactggagtatacgcttgataaagtggatgcaagaaaaaacagtttgtcggtaagcgacataatgtatattttgcgcgcaaccggaataactccaaggccagttggattagatatggatgaattccatcaattaaagttgccatgtattcttcactgggatatgaaccattttgtcgtactagtaaagagaaagggggacaagtatattatccatgatccagataaaggcatccgtattctctccctgaaaaaaataagcgaatcatttaccggagttggtatcgaggtttacaatgacgaatcgctgtctcctgagcaaaacaggataaagaaaaacaacaaaaaagagagagcgatttatcagtacattatcagtagtctttattcaggaaagaaaacacttatctgtctttttattcttattctctttgctgaaattattaatatcacgataccacaaataacacagttaataattgataatgttatcgttaataacgaccatcgattattgattacagcgataatctttttcctgttcctgaatgttatgagtatggctattctttccacaagggactggcttgttacatggttaaatgcgaatgttggcattcagtggtcaacaaatatttacaacaggctcatgtcattaaaaatgggatatttccttgcaagaagtgttggcgatatattatcaagaataaattctcttgaatatatccgaaatcttattgtatcccagttgacgaaaatgtgtttagatgttcttatggcatttggtgcatttgccgtaatgctttcatatgacatcaagttgactctgtttgtttttttatattcatttctgtacttcattgtaaaagctatttacttctcatcactgaagtatttaaaccttggcaccatcagtattaaggcaagacagcaaagcgcactgattgaatcaataaaatataatcatactataaaactctattttcctgagtacatgtcatcatcggcgtatatcaacagcatggttgatggaatcaacacaaaaacaaagatggatatattaaatattattttgtcatcttcaaataatttcctgtcaacattaaagaatatatcaatattgtattttggtggtttacttgtcattaattcatcatttaccattggcatgcttgtagccttcattgcatattccgaacagtttagcaggagaatgataaatattattgagttcattttccaggctggaattatcaaaattcatgttaacagggtttcagatatatgcgatgcaaaatgcgaaagccagttttcactctcaaaatcgcttcataacatcgtagggtctgtaggcgttgagtgtaataatttgagtgtaagatatgacaacagtgaaaaaaacgttttaaagaacatgaatctgacaattcatccgggcgaaacagtacttctcagggggagatccggaggtggcaagagcacgcttctaaatgctattctgggtttggttgatttaagtgagggctctgtttcagtcacagatgaaaacgccagtaataaaatagaatttgtcagaggtatatctggtgctgttttacaaggagatactcttttgaatggaacaataatctataacataacatttaatgattcaacaccgtcatctgaagttattgatttaacaagaaaaatcggtgttcatgacattatagaaaatctcccgatgggatattttaccccggtgaatgattgttgcaatgttctgtctgcaggccagaaacaaaagatattattagccagagcattattcagaaacccaaaattattagtgcttgatgaagcaacaagtaatcttgatgcccagtctgaagatgaaattaatcagcttatattgtctcttgactgcacaaaaattattgtgagccataaggatgaagctatgagcattgctgataaaattatagatatagacaatggagaaatcaaaagcactaccgttataaacaacaaggcagggtattaa

SEQ ID NO: 109922 - DNA, 372 bp, Enterobacter aerogenes; identical to SEQ ID NO: 82765

SEQ ID NO: 109923 - DNA, 219 bp, Enterobacter aerogenes; identical to SEQ ID NO: 82766

SEQ ID NO: 109924 - DNA, 315 bp, Enterobacter aerogenes; identical to SEQ ID NO: 82768

SEQ ID NO: 109925 - DNA, 429 bp, Enterobacter aerogenes; identical to SEQ ID NO: 82769

SEQ ID NO: 109926 - DNA, 258 bp, Enterobacter aerogenes; identical to SEQ ID NO: 82763

SEQ ID NO: 109927 - DNA, 345 bp, Enterobacter aerogenes
atgtattgcgatgaccctgaactcagctatcctagcctgaaatccctgcaaaaacatctggatgaaatgtatacctacatccggaataataagatgatgatcccaaactacggcgaaatgcgtcggtacggagagccggtatcaaccgcgtttgtggaatccacgatcaatgaagtgatcgccagacgaatggccaaaaagcagcagatgcagtggagcagaaaaggggctcattatttgttacagacccggaccgccgttttgaataacgaactgcaggataaatttgtctgctggtatccgggttttcaaagtgacgggaagggaccagcgatggcagcatag

SEQ ID NO: 109928 - DNA, 234 bp, Enterobacter aerogenes
atgacggagctggaaaaacatttgctgaacgcattagagcaactgcaacaggactatatgcagcggctgaacgaatgggagagcgccttcgtggaattgcagaaaatgttttcgcttacgcaacgggacaacgcgatgctgaacgagcgggtcatgaagttgagtcagcaggtgcagcacttgagcgagcggacagaacgcttgagccagttatacagcgagaacaggagataa

SEQ ID NO: 109929 - DNA, 531 bp, Enterobacter aerogenes
atgagcaatcttttacagacgggcgcggagttcgagaaaaagctgaaagagagagccgaatctacagagaaaatgctgaacgacgagttcaggaagctcgaagaatctgtaaacagggaactgacctcaaacgaatctttaatcaggaacgctatcaacgaccatacaacagccctgaaagaactgctggagagatatcagaaaacgaccgtcagcacgatggatacacattggcaaaccgtactgaaaatgagcgtgaaacgctggctgtggctgattatcgtctcagtgctgatgtttgccacgaccgggagtctgctgtggtatcagggcatgaagataaacgtaaacatgaatattctccgcgagcagaaagagagtctggagaagctgaacgcgaagacatggggcgtgcgttatcacgaggacagcaacgggcgttttctggtgttgccgaaggggatgaaagccgaaacgaactggacggaggacaacggcaaactgaacgcagtgagattggtacaggagtga

SEQ ID NO: 109930 - DNA, 357 bp, Enterobacter aerogenes
atgggggtaatgataccgatgaaacgcgagaggatgctcacgatacgggttactgatgatgaacatgcccggttactggaacgctgtgagggtaaacaactggcggtatggatgcggcgggtctgcctgggggagccggttgcccgttccgggaagctgccgacactggcaccgccgttactgcgtcagctggccgccatcgggaataacctgaatcagacagcgaggaaggtgaacagcggacagtggtcttccggtgaccgggttcaggtagtggccgcactgatggccatcggggatgagctgcgccggctgcgtctggccgtcagggaacaggggacgcgggatgatagttaa

SEQ ID NO: 109931 - DNA, 192 bp, Enterobacter aerogenes; identical to SEQ ID NO: 4489

SEQ ID NO: 109932 - DNA, 630 bp, Enterobacter aerogenes
atgcgtcacatattctttttgctttattttttctgcatatcaacaatagcttcaaatgaattaaaaattaacaacatgcctatagagttaatttttaatgacgggagcagtgcaaaaatatcatcttgcactgaccttcagaatcagatgtcactaggaaaaaaaatagagtcaatacctaacatttcagacccagattacaatgatataaaaaataaaatatttatatgcaggatgcaaaattacatatcaaatcatcgaatgacgagaatcaaagactcattatcaatacatgacgttttgagtaattttccagcaacagcggcatattttataagtcaagaagaaatggataaagtttctcgtgaatacagcaacaagacaattttagaatacacaccggatcttattattgataaaaataaagcaatatcacaaaaaaaatacacaagctactcactgcctgaatattatcactttaaaaatagtgatggtgatgaaataaaaattgttattttagcagggcattcaattggtggtacagctagctcacgctcatactggcgtatagatgatgctcattcacacccctggacagtcactgaacttgatgaaaatagtttcttataa

SEQ ID NO: 109933 - DNA, 762 bp, Enterobacter aerogenes
atgcctggatttaattatggtggatatggtgacggtactggctggagttctgaacgtggtgatggtccggctccaggaggcggttctcatgggaatagtggtcgagacgatcatcgtggtgaaagtggttatggttatcctggtcacaatgggatatctgggcctgtgagtctcaggacaacagatagttatgatggtgatactatgtcaggttatattaacaacttaatcaatcatgaaggttttaaaaatacaatgtatagggataccgaagggaacataactgtcggtattggtcacttgctttcatcaccggagatggcggctggattaccgtttaaccgaactagaattacacatggacatggtgatgaaatggaacatgagttttctgtatcgcgggaagatattacatcttcatttaatgcattgagagataatcctacagctatttctggtattcacatttcaaacgatgcagtaattggtcttgctattagcgatgtagaatcgacaatttcaggattaaaagggctttattctgattttgatagtttccctcgttcagcaaaaaccgcattagttgatatggggttcaatgtgggagttggtaaattacgatcggactttccaaactttaataatgctgtaaataagaaagattggaatactgcggctgatgagtctcatcgaactaagataggtgaaggccgaaataatgatacgaaagctcagttccaacaagcagctaatggtaactaa

SEQ ID NO: 109934 - DNA, 387 bp, Enterobacter aerogenes
atgacgggcagatcgcgttcacagttttaccgtgatatgcgcgcaggccttgtcagttaccgtacgagccaggacggacgacgggagtttgaaaccagtgaactgatccgggcatacggcgaattaaagcggaatgagacaccagaaaggcacactgcgggacaggcagaaaaacctcataatcagcagacagaacgcattctccgggaggtgaacgagctgaaacaatgcctgacgctgatgcttgaggataaacaagcccaggatacggagcgccggcgccaggaagcagaacgggaacaactacagaatgagatagtccagctcaggcaggcgctggagcaggaaaagaaacggggattctggtctaggttgttcggtcgctga

SEQ ID NO: 109935 - DNA, 429 bp, Enterobacter aerogenes
atgaaacgttctggcggcacacgctatatgtatcttagcgccctgataactgtgacagcagccctcacagcctgtaccccaaaaaccagcctggaacaacatacccggcattatgtttatgcttcagatgatgggtttgatcctaacttctacaccaagaaagctgacaccacacggatgatgattccgttctttcagcagttccgggagatgggggtgaaagacaaagcagccggagtatcagcagaaaaggcacagcaacgcataaaagaattccactctgaagaattccttcagtcactgagaaccacaaccaactttgcgggcagaaaatacacgaacagtgatacgccatcaccggaaaaaatgaagctgctggctgacacgatttctgcgatttatctcgatggctacgagggaagacagtaa

SEQ ID NO: 109936 - DNA, 321 bp, Enterobacter aerogenes
atgcttcatactaccaatcccctcattaaacacaaagccggtttgctcaacctggttgaagaactcagcaacgtgtcgaaagcctgcaaaatcatgggcgtttcgcgtgatacgttttaccgttatcgcgaactggccgatgaaggcggcgtggatgcactgattaaccggagtcgccgcacaccaaatcttaagaaccgtaccgatgatgccactgaacaggctgttgttgattatgccattgaattcccggcccacgggcagcaccggaccagtaacgaactgcgtaaaaagggggtttttatctccggcagtggttga

SEQ ID NO: 109937 - DNA, 555 bp, Enterobacter aerogenes
atgacgacgattttcgttgctggctctataaccattaaagaacttgatccgctcatcattgagcggttgaagaagattgtagacaaaaagtatcgtgtggttgttggtgacgctaacggcgtagattcatcagttcagcgagcgcttattgcgttgaattgtgaaaccactacagttttcagcagttcgccaaagccgcgaaacaacttaggtgcgtggcccgtaaatgttgtcaaaacagattacaagcgcggaacacgtgagttttacactgctaaagatatccagatggccgagcacgcagactgtggcctgatggtgtgggactgcaagagtcctggtacgcttaataacgtagtagagttgcttctgcgaaataagtattcagtggtgttcgtcaacaaaatgcgtgactttattaaagttaaaacgcctgacgatattgatacgctgataaaaatgatgaaaaccaccgatctggaaaaggcagaagacaaaatcagtttaagcggcaagctggcgcgtttgaaaaacaatcagatgtctttgctgtaa

SEQ ID NO: 109938 - DNA, 582 bp, Enterobacter aerogenes
atggaagtgaacattaaagacattgtgggcaactggaatcgtggtgtggtactggacaagcacagcaagtacagcgtggttatagggcaaaacgagtggggccataacatttacgacactacgcgtactgaagtgggcgaagctctctttcagcttaagtacagatctgactggagtcaggttcatccgctggctcaatgcctttatgatgaagcatatccactgtttgaaaaggttgggttcatccttcctatggctgcttctaatgtccgtgcacgacaacctgttacagagattgctcgggcactggcaaacttagccggtgttccctgttatgacaatctcctgttgaaagctcctggtggtgtttcacttaagaatctgcataccaaagaggaaaaagttgaagccattgggaacagcttttccgtgaaccctattatcaccaatcaaggacaatcgaacgttttagtgattgatgacctataccatacgggagcatcaatggaggctgcttgtgcggcgctaagcggctataataaaatcagtaatatttacgttgcggctcttacttggagataa

SEQ ID NO: 109939 - DNA, 570 bp, Enterobacter aerogenes
atggcgaagttaccactgccactaccgatagcgtcccccccaacagtaagcaatagtggctcagaaagagcgaagaagtcaggaagaagaactctttcagcaaaaaggaaaaccttgttagaagaactatggggagacgaacttgaacaactcaaggtatggaatcgccatgagcatgacgggtatacaactgtgccaagaacgctgacatatatcagtcgaattctcgattatctcggaggaacgggactgccattgtcccaaacatatctggctctttggtgcagggtatttgatgagggctttgtggaaataagagataaagatggatttgcttatgaagctggttttagtggacagcgagcagtaaccacatggacagggaggatgagaaaactaagagatttaggtttcataactacaaaacctggcacatcaggtgagtttcaatatgtgattttgcttaacccactgactgtcattaaggagttatacgaaggtaaggaaaaagatgaaagatacaatgcattagtgggccgtatgcaggaggttggtgctaaatgggagtaa

SEQ ID NO: 109940 - DNA, 546 bp, Enterobacter aerogenes
atggctagctatttcccgacgttagacatatctggagaagagttcgatttcactcaccttgagccattcattatgcacgtaaatagcgatatggctaaaaaggtattaaaagtacacgttaggttcacaaatcattgttttacaaaaggttatgaagctttttatcacccagcaggagaacagataatttacgaccatagcgggaatgggagaacgttttgcccaattagatatagattatctttggcattacctgagattatcaaccgtctatgcgatccagcagaaaaggtgtatcaaacatcagcaaagagaaactgggcctactcgattacgattgatgatccagaggggccatatcacttattttttgaaataagacgcgcctcgcgtgatgagaaacacctacaagatttgaacatggttatcgagagtgcctatcctgaagatcgagggtacgggcctccgtccttactagggcgaattggctttgtagggttatgcggtagggtattttgtgggaagcctctggcgactaaaagatga

SEQ ID NO: 109941 - DNA, 210 bp, Enterobacter aerogenes
atgaaatccatcaaaactttcgttgcagttgccgctctatccatgatgtctttcggtgcctttgctcagagcgtcagcgctaccgcctccaccctggatcgtgctgaagcaaaaattgccgcacaggccgctgaacaaggtgcgtcatacaaaatcaccagcgctcagttcaataaccgtgtccacatgacggctgaactgaccaaataa

SEQ ID NO: 109942 - DNA, 414 bp, Enterobacter aerogenes
atgattagcgatgccaataaagcggtgaatgacctggcgagtattgtccctctgctgggtggcagttcgtcccgcaaagattacgaagaggcacgtaaactcgttgaatatcttctggaacatgatccggacagcccgctggttgatatgctgactgcccgcatcgatgcctgggaagataacgcggtggaatttgaagaatttaatacgcgcttcgaagcaggcaaaaacggtgtatcgttgctgcgggttcttatgcagcaatacgggctttctcagtccgatttcgaaaacgagataggtaataaatcgctcgtcagccggatcctcagtggtgaacgcagtctgacctttgatcacatgcgggcgctggcaaatcgatttcaaatcccggtctcgatgtttgttgactga

SEQ ID NO: 109943 - DNA, 279 bp, Enterobacter aerogenes
atgaaatataaaacccttagccaggttcataccgaagccatgaacgatcatgagtacagcgcggcattcgaggcagaagaagcctcggagctacttcgggaaaccttagcaacatggagaaaagaagcgggtttgacgtcggcacaggttgcagaacgtatgggcatcaaagcgcctactatctcacgtatggagaagaacgcttcgcgaatgagtattcagacgctggttcggtacgccagagcatgcggtgttaactttaaaattcagcaggtttga

SEQ ID NO: 109944 - DNA, 321 bp, Enterobacter aerogenes; identical to SEQ ID NO: 95262

SEQ ID NO: 109945 - DNA, 225 bp, Enterobacter aerogenes
atggaacacgtgaaaagacaaatccagcagggggcagggaacgcctattatgcggggaagcagtggcgcggtattacactcggacacgccgatgctgcagcgcttaatcagtttgatatcgatatcagcaaagctcaggcacccgaagcacgcacttggttgcttcagaacaaagcggaattcatagctcttatgctgggtattgagattgtaaagatcgggtag

SEQ ID NO: 109946 - DNA, 213 bp, Enterobacter aerogenes
atgaaagtatacggccatcaacactcatcagaggttttttcccgggaaacttccccatcctgttttgaaccaaaagcggaaaaggtgatcgcttttcatggaaaggatgccagttacgcctataacgtgctggccgatctgaaagccgcaggtgcttcatatacgcgccggaatatcatcgccgatatgttccgccgtctgggtgtggaatga

SEQ ID NO: 109947 - DNA, 357 bp, Enterobacter aerogenes
atgagcacacaaaacgtcaacgtaaaaccctccaccaaagaaagcacaaccctccggactgacggttttgtgcgcaacattcattcccgaaacccattcgatgttatccgcgccgatgtagtgctggaacgtatcgagaaaaaggctggtcggtgctgcgggatgcattacgagctgtatcaggcccatctgctgggtggtgcgctggattatctggatgcgctgccgttgaaagaccgtccggtgttaatgggcgctgcggcaaagcgcggctatctgctgacgctagccgaagaggaacgcgcgctggaagcacgggatgtactgatgagtgaactggcggcaaacgactgctga

SEQ ID NO: 109948 - DNA, 546 bp, Enterobacter aerogenes
atggtctggcgtcggctgagaattgctgccgacacgtcactggccgcgcttcacttcattttccagatagtgcagggctggggggacgaccatctccatcaatttcacatttatggcaaagattacggtatctcctacgaaggaggcatcggttttgtcgataatccgttccgggtcgtgattgatgattttgcttttgatgctggcgatcgctttacctatgaatacaatttctttgagcactggcttcatgacattcgtgttgaggccatttatgaaaactctacgctgaaagcgccgttttgtataagcggccatggtatgcccggagccacagctgcggatgagttcgataaaaccctggcgtttcttgaagctatcgttaatgcggatgatgaaacaacggtcggcgagatccgcccttttgctgacgacctggatgctgtcaggttcaaccgccacaaaatcaaccggcaactgagcaggctcgaccttgcatctccggtactggagcctgaagttatctggctgggccgtcgtcgctga

SEQ ID NO: 109949 - DNA, 573 bp, Enterobacter aerogenes; identical to SEQ ID NO: 21679

SEQ ID NO: 109950 - DNA, 1392 bp, Enterobacter aerogenes; identical to SEQ ID NO: 21680

SEQ ID NO: 109951 - DNA, 996 bp, Enterobacter aerogenes
atgcaaaaccctaagctacagaacctcaccgactacagccccgacgataagccgtgggatgctcataagtcacaatctgatgatgttggctgtatctatctgcgtgctgctgaatttgagtcttatgcagcccgcatgcgcgattgtggcggcctcctgcgttttggctggtctacccttaaagacaccggagaaacgcgtttacggctccgtgaggcgcatttctgccgcgttcgtcactgccctgtctgccagtggaggcgctccctgatgtggcaagcccgtttttatcagtctctgccgaaaattgtcgctgattaccctgatgggcgatggatgtttctgacgctcaccgttcgtaactgcgccattgaagatctcggagaaacacttaccgccatgaatgcggcattccagcgaatgaaggtgcggaaggaatttaaacccgtacagggatggattcgcaccacagaagttacccgcggccgagatggttctgcgcacccccactttcacaccctgatgatggttcctcctgggatgctgaacggtcatgactacgttaagcactaccgctgggttgaactctggcgtgactgcctgcgcgttgattacgatcctaatgttgatgttcgggcagtgaaaccccgtaagcctaaagatggccaaacgctggcatgtgcaactgccgaactggtgcgcggtgccgttgctgaaaccctgaaatattcgacaaagccggctgatatggttgccgacccggactggttcttagagctgacccggcagacgcataaacgccgctttgttgcgaccggtggcgcgcttaaggacgttctgaaactggaacaggaaacggatcaagacatggtgatcggggatgatatttccgatggtgaagacgatggttcacgcctcgcctttggctgggattcgacgccaagaaaatacgtccgcttgcctgagcgcgataagtttaaatcagatcctgattag

SEQ ID NO: 109952 - DNA, 873 bp, Enterobacter aerogenes
atgagcattatttccaccaaatatcttctgcaggatgcccagtgtaaaggttatgcggttcctgcatttaacattcataacgccgagacgatccaggcgatcctggaagcatgcagtgaaatgcgatcgccggtgatccttgccggcacgccgggaacctttaagcatatcgcgctggaggaaatttacgcgctctgccatgcctactccgccacctacgcgatgccaattgcgctacatctcgaccatcatgaatcgctggcggatattcgtcgtaaggttaatgccggggtccgcagcgcgatgatcgatggcagccattttccgtttgcagagaatgtgaagctggtgaaatcggtcgtcgattattgccacgcgctggattgcagcgttgaggcagaactgggacggcttggcgggatggaagacgatcttaacgttgatgcggaaagcgcatttctcacagacccgcaagaggcggaacgctttgtcgaattgaccggtatcgacagcctcgccgtggcgatcggtaccgctcatgggctatatcaaaaaacgcctaaaatcgatttccaacggctggcagaaattcgggaagtggttgatgtccccctggtgctgcatggcgcaagcgatgtaccggatgactatgtccgccgcgctatcacactgggaatttgcaaggtcaatgtcgctacagaactcaaaatcgcgttcgccgccgcggtgaaaacatggtttgctgaaaacccgcaagggaacgatccgcgttattacatgcgtgttggcatggatgcgatgaaagaaatcgtgaaaagtaaaattaacgtgtgcggttccgctaaccgactattacaggccgcagaagcctga

SEQ ID NO: 109953 - DNA, 474 bp, Enterobacter aerogenes
atgagcgctgctgatatagccgttttaaaccacggcccggacgccatcgtttcggtgcaggtgaatggctacggcgggccaggcgctaactcctacggcggcggcggcggcggcttctgctgtgtgatggtgccggatgtctggcggccgggactgacggcaaaaatcacctggacctccgatcctaacgcatggatagacccgaaacatatccctggcgatcatgcgagtcactaccagcaccatggaccgatcaccgtgccgattgaacgctgggagaaagggcaggcttgtggttttgatatccatattttcccttgcgataaggtgcggatagtgcgttcctgctacggtcgagcggcccctgaatatccgatacagcctgaggctgacggactaaaaaaagcgcaaaatgtgcttataaatcatattaaggaggagatcgtatgtccgacaccgcagactccacgctga

SEQ ID NO: 109954 - DNA, 174 bp, Enterobacter aerogenes
atgataaggcttaagactatcacactattctcttcattcttgaataacccaaaagataattctacccaagggattgatatcgatataaaaaaggaaatgagggataatttcaaatatagaattgatcttttttgcccattgtatttttttattaacccattggacaaagtgtaa

SEQ ID NO: 109955 - DNA, 246 bp, Enterobacter aerogenes
atgttccacaacccttatcccttcattattcatcttgagaatttcatctatcaacgaggcatagaaactgaagtattcctccatagaaaatgtgaacgatgctttttgtgcaaacccatagggactgacaggtcggataaacatgtccttgatgccaagagacaagtgagccttgacaatcgattcaggatgcctaatgagatctttagtaactgtagtaaccgttgcaacgcgaccagcgcctaa

SEQ ID NO: 109956 - DNA, 249 bp, Enterobacter aerogenes
atggatgagaaagaagtgaatttttcactcagctatgagcagctgacccggatagcggaagagcgtatccgtgaatgcaatctggacaagaatggttatttgtacggccgggaactggagaaagcctcagccttactgcttttctggcaccggctggcaatttctggatatacgagggtgaccggaaatgaacgcgttgaggccgacctggcgcgcctgaaagcccttatagtcggaaaagaggtctga

SEQ ID NO: 109957 - DNA, 288 bp, Enterobacter aerogenes
atgaaaaaacaaaactactcaaccttcacaagttatctttctaaaacgcacaaaaatgtagatctttatagattgtacaacccacatttttcaagcttcagcaaaagctacacttatgaccatgatttctatcttacctatttctctcgtcatatgattacggagagaaacattctaactatattttcaatttacactcacttctcttatggcatgaccaagaaagaaacgatcagagatttcatactgtttcttaaaaatattaactcagttgttttctggaaataa

SEQ ID NO: 109958 - DNA, 123 bp, Enterobacter aerogenes
atgataacgctgcgggcggtcaatgccgcccgcggcgccgacatcctatccccaaaaggcccgaaacagacacgtcgccaggcctttcagaaagttatcgcgatcaggcgtgatagttggtga

SEQ ID NO: 109959 - DNA, 1986 bp, Enterobacter aerogenes
atggcagagaaatcatttaatgtagaagtacagatggattatttagataaggtttctaaatcttctgcattacaagcaatcgctgagttggtatggaatgccttagatgctgatgctgaaaatgtatatgttgatttgacagagtctgagttaggactctcgcatatatttatcagggatgatggtaatggtattccctatgagaatgcagaaaaattatttagttcactgggcggatcatggaaaaaagacaaggttttatcagaaagaaaatctcgttttttacacggaaaagaagggcagggacgttttaaggcattctcaataggtcgatatattgagtgggatactacttatttacttgatgatgtatattatgaatataaaataaaaggaatagctgataataagaaaaagatttcagtttctgataaggtagtatcaagtgaagttaaatcaggaacagttgtttctatattggaattggtgaaaaacttcacctctttgacacctcaaaaactatctgagtttctttccactacacttgctttatatcttagtaaatacccatccgtaaaagtatttgtaaatcgagaacaaatcgatccaacagcacagattttatttgatacaagctataaattagatgatgtagtttattgtgatgaattacattcatatgagttacaagttattgaatggaagtcagctaaagaaaatgagatttttttatgcgacaaagaaggttttcccttaataagttatgagaagaaaattagagggactggtacatattcttattctgtttatttgaagtctacacatttgaccaaactttcccatgagggtactttgtcgctcatggatttagagccttctttaagccctgtattaaataaagtcgaaggtttgataaaggaacacttccggaaaagagatcatgaaaagtcaagggagttaattgataaatggaaaaatgaaggtgtttatccgtatgttggtaaggccgaaaatattgttgaggatgctgaaagaaaagtattcgatattatggctatcaatgttataaaatacataccacaatttgataatggcgaccttaaacttaagaaatttcagtttaaattactcaagcatattgttgggagttgccctgatgacttgagaactatattagaggaggttctctcgcttcctaaggaaaaacaagctgaattggctgagatattaagggatgcctcattgtcagctgttattagtgtttccaaaataattactgatagattgaagttcatatctgggcttgagaatgtattatttcatccgaatacaagaaaagtattcaaagagagaagtcagcttcataaaataatggcggataatacatggttttttggtgagtcttttacattgagtgtcaatgataagtcactaactgaagtattaaaagtacatttggaaaagcaagggattgatattccagttgatgagaaagtaacaaggatagatggtagtgtaggtattgttgatttaatgcttactagaagtataggcaaaaattacccagatgagcgtgagcatattattatcgaattaaaggcacctaaagtaaatataggtcaatcagaaatagaacaggttaaatcctatgcgtatgcagttgctgaagacgcaagatttaatggtttaaaaacaaagtggaacttctgggttatatcgaatgagctcacaacttatgctctcagagaattaaaacaaaaaaaccttcctgaaggtgcaatatatcaagctgaagaaatgactatttggataaaaacttggtcccaacttattcaagagaacaaacatagattgggttttctacagaatcagcttaatatttcgtatgaccgtgaagatggactacagttcttaaagcaaaagtatgctgagtacactgagggcgttgtatttgaaaatgaatcacaggatgagtatatagattaa

SEQ ID NO: 109960 - DNA, 540 bp, Enterobacter aerogenes
atgacgtacttacaattagcaaaaatctacggatacgatcctgcaacagttagccgagattggaaagcaaaaggtttagatataaatggaacagacgatgagatctatcaatgggtacaagataatgtactaacaccattgagaggacaaacagatttaaaagaagaaactcagcgtgaacaattacgattagcaaaagctaaagcagacattgaagaaatggaagctgatctaaaaagaagaaacttagtagaagtgggttatgtaactgactcactttcaagttacatacttcaactaaagaacatgttgcgtagtattccaaacacaacttatgtagaactctttgcaagtgaagatgcaaaccaattaagggaaacgctaaaagataaaattgatgaagtactcagagatattggaaattatgagtacgaggaagatgaatatgaaaatggattttcagaatcagaggaaattaataacgatattgaatcaggcggtgaaaaacatactaccgccagagaagatcagaccgagtga

SEQ ID NO: 109961 - DNA, 675 bp, Enterobacter aerogenes
atgggaaagttaaccttcgtttgccttagtaagtccaagaaaccaggtggctactgcgtagcgggtaaaattattaaccaagatggttctattggtgaatggataagacctctaaataaatccggctctataagtgatcaagattgtctttatgaagattctacttatgctaagcctcgtgacataattgaagcggagtttttaaaagctattcctgagagtttccaaactgaaaatcatcttatcgattctactaagtattggattaagaaagatgattacccttttacccataaagaaataatgaaattatgcgattatcccgattcactgtggtcaaacaaatatcaatcaaaaactggcaaatgtgatcaagtacatccgaatgaagcaaccaagtttaatgaaagcttgtattttatttatgtagacaaaattcagttccaaacttcaagatgggaagatgatccaataaaagtacgtggtgaatttacctataatggtgtcgtatataatctccgtgttactgatattgtttggattaaccactttgaaaaaagggcacctggagtttataatgaaacgggtagatttgtgactgtcagtttagcacatgatttgcatacaagcgtaagtggcgattatcactataaattaatagcagaggttatgtaa

SEQ ID NO: 109962 - DNA, 438 bp, Enterobacter aerogenes
atgaaagtgttttcaattggctttactgaaaagactgctgagaaattttttaccttgataaagtcacagccaatcaaaactctggttgatgtccgtctaaacaatgtatctcagcttgctggttttgctaaaaagaaagacctcgaattttttcttcgcgaactgtgtggggtagactacgcccatgttccagacctcgcaccaaccaaagagatgctcgacccttataaaaaaggaaaagtctcttgggagatttatgaagataactttttgaatcttatggcaaaaaggaatattgagcgtattgataagagcttaatctctgacggttgcttgttatgtagtgagcacaagccccatcactgtcatcgtcgtcttgtgatagaatatctaaacaagcattgggatactgattttgaggttaagcatttaatatga

SEQ ID NO: 109963 - DNA, 591 bp, Enterobacter aerogenes
atgatgaaagtacttattatgtatcatcctgattttgcttcaaagggtaagtttgagcgaaagcttacccgtatcttctcagaatcgagtgaatacgaaatcttctattttgaggatcaccaggatttaatacataactatttttcttctaatttaatttttagacttgatcatgataccctcgctgacccatttaaaataggtttgacgcacgctattatttttgattcagcattgaaaccggagttcacaactgtttttgaaacgttatcatcacaaattcctgtaaggtatataaaggataaaattacgtttgtttccaataaagataggggcgaacacttcgatgtatattgcggtcgcggtactttatggggtaatccctatgcgattggagccgatggtgatcgtgatgaagttataagaaagtttaaatacgactttgatagaaatttcttaaaaggcggggaagatttcaaagaaaagcttaaagcacatagagggaaaatccttggctgccattgcaaaccttatccgtgccacggagatgttcttgccagatttttaaatgaattagatgatggtgagtaa

SEQ ID NO: 109964 - DNA, 675 bp, Enterobacter aerogenes
atgatcacaacaaacttcatagcagaaccaatcatgactacatcaggccagctcgtaggatgtgaactgttaacccgcttccattgcgaagatctgcctgtgcttaacagtaagtacttcatcatggctatgtcggtcgaagggaagaaggaactactgaaacaacaattagagactgtagattttcatgcgtcatggttcagagagcaccggcttttctgtaccgttaacgttgataccgtacaggcacggctatgtgtgtttgacagggagattattcagctattggataagttggaatttgtgaggctggagatctcagagaactttgaagggcttgaccttggtatcaatcatccagtacttaaaacactgttaaacgttggctatcgattgttccttgatgatcttggttcaggccgtgtcaacgtcgccgcactaactactggatgctatgaggcggtaaaacttgatagggcgttctaccatcaggaagtacagaaacctacattcaacgtactgatgaagaacatcatgaagtactgcccgtatgtgatcgttgagggagtagagcagcggcaggagctaccagtactacgtgatgcgggagtatcagcggtgcaaggatatctttatcgttcagtgaacttctctaaggtgacatctcttttataa

SEQ ID NO: 109965 - DNA, 336 bp, Enterobacter aerogenes
atgggtaataagaattcgtttgattcaagcgttagaaaaggtgttcaggtgtattggcagtgtggacaacggatagtggttgttcatcctggagggtacttagaacgtattgaagacgggcaatatgtcttgttcgagacaacacctcatgaggatggtactcgtttgtactggttcggtgtgacttcaagtaacgcatactactttatgcttgaggtagctaagccagtggatatctttgctgttggtagttggttctacgcacagcaagctatgttggaggcacatgataaggatgatgctttcagtgatatgcagggtgaattacctttttga

SEQ ID NO: 109966 - DNA, 564 bp, Enterobacter aerogenes
atggattggggcaatggttcagatctgattagtgctggatgtaatgctgtaatggcaggtgtagctgtgtatgctgctgcaaaagctaaagattggctttcacctaaaatcaatgagcgaaaatttaaatttgcagatgagcttattgatcagttttgtaaaatacagcaggaggggttttacctgcatagtgatgtgaaacaaataatcaatacagatccagatgaacaaggtgatgctgagatattccgaaaacgctggaacgcgatataccagagggaaattgaatatagaaggaatattatcaatcttcgtaccacaatggaacgtatggatttatggggattaaaacctaaaaacgaagtacacttcaaagaccttattgattcacatttaggcctggcatataaaatagaggaatcgctatctattggggcagatgaaaccagattacggttacaaaacagctttgagtatgacagacaaatcagtgaattttacaaaattgttcgaggctcgcacaataagataatgaaacactacagtgaattatttgttgattaa

SEQ ID NO: 109967 - DNA, 606 bp, Enterobacter aerogenes
atggcttggtatgatattactggcactgtagctgattgggttatggcaggtgtagctgtatacgctgctgcaaatgctaatcagtggttctcacaacgatcacacacaaaaggttttgataaagccgaacaactgttatccgatatcgatgaacaatacagtaaaaccaaaaagtacatatctgaattacatgatgcgtttgagtacttgaaagctgtcgatgaacgcataacttatgttgatggaaacaaagctcatgattatcaaatgcttattcttaaccacacgtttgatattcaaagaatagacgagctatcagaaaatttggaaatgattgaaaggtggtcgttatttttgaaaaacagagacataattaatgacgtgctaaagaaacttcgtgattcaagtgtctccgcttttaatgcttcttcattagcaaaaagttgcatatatcatgctgaacatattggcatggatgaattcagtacttcattcaagcaattcaaaatatattataatgagtatgttaaggacttcgcagaaacggaacagaaatttattaagttcaaaaaaacaaaatttattgaattgtttcaagtaaaataa

SEQ ID NO: 109968 - DNA, 735 bp, Enterobacter aerogenes
atggaatataaaaatctaaaccaaacaatacttgcagttgtattgattctttcattacttttgatttgtgtcatcttgaaagcacttttttttggaagtaataacttcgaatggggtagttttaccgattggatcagttctttatcgacattgggtactttgggtgtagcttatgccgcatatagaaaagcccccgaatggctgtctcaaaaacattacgatatagtttctaaagttatcgaagaagcaatatatgaagacttacgaaagttgtcatcactgagcattcaatataaaagctatattgttcatacaagtaaaacgctaaaaaaccatttaaacgataaagaagaactgccaaaagatataggcgaaacttttgataaaattgaaaatttgcttatcgaatttttcaacttatcatattcaatacaaaatagattaaaggcaattcagaggtataactgtaaaatcacaccttatacagtgaatataatgaacactataaaacatattgcagattgttacaatcgactacaaactcaatttgaactggcagcctctgaagttccaatgctcatgtatgctgatgaagaagctatacgtttaacagcaaaagaaattattgatatacaacttgaagctatcgaattaaaccatagcttacaggattatgttaaatcaatttatgatgataataaaccaataactgaatttatcgaagttataaaataa

SEQ ID NO: 109969 - DNA, 270 bp, Enterobacter aerogenes
atgataagaatggaattcaatacataccaggatgatatgtactactttctctacattaccgaggaagtaaggattgaaactaatggcgtatcaggcatacagttacaaacccgcgattcgagggtaaggaatttaggtgatccgttccagtacttaacactgcgagaacgaaaagatgagtactttaatgaaagtcttatcaatccgtatgtagatgaagtgattaaagctgttgaagtacttgttcctcttttgactttagatgattaa

SEQ ID NO: 109970 - DNA, 1395 bp, Enterobacter aerogenes
atggcaaagtataaggcgtatccggcgtataaaactacagggcttggatggctaacggagatccctgaccattgggaagttaaaaaattaaaatacctaggccaggcaattataggtttaacatattccccagatgatgttgttgacgaaggcgaaggtactctggtcttacgttcatctaatgttcaaaatggtaaattagaatttttagataacgtttatgtcagaaaatcaattccattacatttgaaggtaaaggaaggtgatattcttatttgtgctagaaatggtagtcgagcactaattgggaaaaatgcaaaaataactaaagatgctgaggggatgaccttcggtgctttcatgtcaatatttcgtagtagatataataattatttatctcatgtgttcgcgtctgcattatttgaataccagtccggttcatttttaactgcaacaataaaccaacttacgacctctaatttaaatagttttgaaataccattaccaccacaaacagaacaagatcgaatcgtgaacttcctcgatcacgaaaccgcaaaaatcgataatctgatcgagaaacaacaacaacttattgaactgctgaaagaaaaacgtcaggcggtgattagtcatgccgttaccaaagggctaaaccctgatgtgccgatgaaagattctggtgttgagtggttgggggacgtgccgcagcattggagaagatcaactccaattaaatatttatcatctcttaaaggtcgtttggggtggcagggccttaaggctgatgaatatagagatgaaggcccatatgtagtcagtagtgctcattttaataactatgaaattgattggaatagctgcccacgagtttcattagaaagatataaattagactcaaatatccagcttgatgtaggtgatattttgctaatgaaagatggtgcagcaatgggcaagctttcatatgttgaccagttgcctggtgaagcttgtcttaatagtcaccttttgttatttagaccattaatggaaggcgatcaaaaaacatatgacactaagttcatgttttatcttatgcagacgaatcacttccagtcttttataaaaaataatggtactggctcaacatttttaggtatttctcagcaggctataggcaatcactctttatgccttcctccttataatgagcaagtggagatatctgattatctcgatgatgagcttagtaaaattgttaggttagaaactatgcagttggagatgaaaaatcttctaactgaacgccgcaccgccctgatctccgccgccgtcaccggaaaaatcgacgttcgcgactgggttgcccccgacacgcagaacgttgaggagccacaggaggccaccgcatga

SEQ ID NO: 109971 - DNA, 3498 bp, Enterobacter aerogenes
atgagtgatgatagctataaatttcaaaagttaacgccgttcagcgatgttgagctgggtgtatataaaaatgcgatagattttgtttttgccaatgacgatctaaaaaatgttgcgatatcagggcaatatagcgcaggaaaaagcagccttgtcgaatcctataagaaaagtcattcgaatataaagtttgttcatatctcacttgctcatttcagagcgatggaggaaactgaaactaatgaaccaagtaaagatataaatgaaatcgcgttagaaggtaaaattcttaaccagttaattcaccaaattaatgctgatgatattccccagacgcattttaaagtaaagaaaaaaataaaaacgagcagcgttgtgataaataccatcttcacggtgttattgatcgctacggtattacacatcactctatttaataagtggtcgaagtatgtttcacttttatctgatggtgatttaaagacactacttacattatcaactaaatacgatacgcttttaattagtgggtttatatgtactatcctatcttgtgtttttatttacaagttaataaaaactcaaaagaatcgtaatgttcttaaaaaaataaatttacagggcaatgaaatagagatttttgaagaaagtaaagagtcttattttgacaggtatttaaatgaagtattgtaccttttcgagaacgttgatgctgatgccattatttttgaagatatggaccgttttaatagtaataacatctttgaacgtcttcatgaggtgaatagactggttaatattcaacggggcatagcagggtacaaaaaatcgacgttacgttttatttacttacttcgtgatgacatcttcatttcgaaggatagaaccaaattctttgattatatcattccagttattcctgttgttgatagttctaactcttacgatcagtttatctcacattttgatgttgattgtaataaaatgctggccattattgcctataaaaatattttcccacgagattttagtgagttgcaacttaatcaaggtatggtttttaccatatttagtgaaaaggataatcttattgtaaaagaaataaaggaaatagaaaaagatattagcgatagaaaaaaagagattgaggtaatcaacggtgaaatactcaattccagtcaggaggttgatgccatatatgataaggaactgtcaaaatataataattcttactatcatcaggctgagaaagctgatatagaaaagagaagggcggctagaaaagaaagtgttgaaaataaaatcaatgggaaaatagaagaaatcaatgagcttatatcaaggtcaagagagaatttggtttattctaggaataaaaagcttaaagaaataataacaagagaaaatattgatgaaatttttaagctcacctataccaatgaaattggagaaaaaagagattttaatgaaataaaaagcagtgagtatttcgacttgcttaaataccttattcgtgatggctatattgatgaaacctatgccgactatatgacctatttttatgaaaatagcctgagtcgaattgataagatgtttttacgcagcattaccgataaaaaaggcaaagagttcacttatcaactcaagaaccccaaactggtcgttgcccgccttcgagaggttgattttgaacaggaagaggcgcttaattttgatctattagcttatctgcttcaaatgccaacccaagtaaacttaataaaacgtttattcaaccaactaagaaaagatagaagagttgagtttattcgtggctactttgaaactgagagggttcagccaggtttcataaatcgattaaatacgcagtggcctgagttcttttcttatgcgctgacagagagtgaattttctgctgattgggttagacgctactctataggcacattctattattctgccagtaacgacattgaggccattaacattgataattgtctgactgattacctctcggattcggcggattatttggcaatatcagagccgaaggttgacaagttaattagtggttttaagttgcttaacgtctcttttgtcagtattaaatttgaaaacgcaaataaagtactctttgatgcggtttatcagcattcactttatgatattaattttgccaacctgaccttaatgctgagtaaggtttacacgcttaacagtgaagatgatgttcgccataagaactatacactagtgatgttacagcctgattctcccttggctagttatgttaataaccatattagtgactatctggatatggttttatctagttgtgatggttcaatcgtggatgatgaagccattgttttatccgttcttaataatgagaaaatatctgatgaacaaaaagggcagtatataaactctttgcaaactttcgtgacttctctgagtgaggttgagagcgaatccttatggtcatctttgttggataaagatagagctgtttgctctgaggaaaatattgtctcttattttgaacatgttgatggactggatgagtcacttatcgaatttatcaatagaactaatgtagagctgaattttcaaaatattaacattgataatgagcttaaaaataaattatttaagtcgattgttatctgtaatgatttatcaaatgataaatatgaaaaattaatttgttcactaaatcttatttataaaacctcctttagcgctagtaatatcgcgagtgataagttcaaaatattagtggataaaaatattattcgcatgagtattgtcccacttaatttcatacgagataactattcggagcagcttttctattatattcataagaatatcagggcatacgttgaattaatgacgattgataactttattttggatgaggctatatcaatactttcttggcaagttgatgatgatttgaaagttaagctactcgagtttattaaaacaccgttggctattcatggtaagaattactctcaggtcgttaatgactatattttagagaataattttaaaccagatgaacttctaatcttgacgtcatcttataaaaattggggaacctctactcagtcgctcatcttgagtcgagcaatacaggatatatcagcattgatagcaagccctaatgatgtttctgaaccgttactaaaaaacctgtttgtggcagagggactgaatatgcagaataaaatagcactgctaatcgctttgttgccgggtaaggatttgagtaagacgacttgcaaagagtatcttgatctgcttggtttatcggagttcagtaaaattttagggcgaggcaaacctaaaattgaagttgattcaactaatcaaagtttattaacagcattaagagataaccacttcttctctgattttgaggtggatgatgaaaatcccacttattataaaataacaaggcggcgctctatgtttggctcagatacatag

SEQ ID NO: 109972 - DNA, 1020 bp, Enterobacter aerogenes
atgaatacgaagacaatgaaagcgtttacgtttaaacgctatggtaaatctcctgagttgggatttgataacatagattatccttccatcggtcctgacgaaattctggttaaggtttacgctgtaggcctcaatcccattgacaacatgatccccaccggaattttcaaaccggttttgcattttaagctgcccgcaacactgggtagcgacctctccgggattgtgattgcaacaggaagccgggtgacgcgtttcaagccaggcgacgaaatcttcgcgagtattttcgatagaggtacaggctctcttgccgaatttgccgttgttcctgaaagtctcgcggccattaaacctgcaaatatcgattttgtgcaggcagcttcactcccaatggtaagcctcaccgcctggcaggcgctcacagaaagagcctgtttgcagtctggacagaaggttttcatcccggctggttcaggaggaattgggagttttgccatccagttggcgaagcaccttggcgcaaaagtgggaacgacaacaagttcagtcaatgtcgaatgggtgagtcgtcttggtgcagatgaagtggttgattacaaaaagcaggagtttgaaaatgtgctgagtggctatgatattgttttgggcactgtgagaggagatacgatagaaaagtccactcgaattcttaagccaggcgggaagattatttctctcatcgggccgttagatgctgcttttgctcgggatcgacaattaaacctctttcttcgttttctatttggcctgatgagccgcaaaatcatacgtcttgcaaagaagaggagcctaagctattcatttctctttgtaaggccagatggcgctcaacttacacagataagtaagctcatagaagcggaacatatcgtcccggtaatcgacaaagttttcccgtttgccgcaatcaaggatgctcttgcctatcttgctggaggacatgcgaagggtaaagttgtcgttaagatacaagattga

SEQ ID NO: 109973 - DNA, 396 bp, Enterobacter aerogenes
atgaaattttcgcgactggctatcctggcatcagtgttgtttttcatcctcgctacggtatggatgattttcccggaacagctcctcgccttgtgggggattgaaagcacaccaggtaccgatgtgctcggccgacgttctgctgcattcttcgctggaacaggagcaatgtgtgttttagcgaggaatgctgagccttctccaacccgatatgctctggccaccggcattagcacgatatctttcatgttagccgtgtctggcttgttcgaatggtacaaaggacatgttaacgggcaaattctttttgcggtatttatcgagctgctactgggaaccgcttttttactcagcaatattggcacccggaaaatcgacaggataaacaacaaatga

SEQ ID NO: 109974 - DNA, 858 bp, Enterobacter aerogenes
atgagaaatctcaaacaaatcataaaggtctcgttcagtatgacaacaaaacgtgtagcgctggttacaggcgcttcgtcaggtatcggcaaagcgtcagcgactaaacttttagctgcgggttttacggtatacggcacaagtcggcgtggcgcgctggcgggaacacatccttttccgttattgacgctggatgtgacggacgacgtctctgttgaggcagccattgatgagttgctgcgcctggaggggcggatcgatcttcttgtaaataatgcgggtttcggggtcgctccggcagctgcagaggaaagctctctcgatcaggccaggcttattttcgacaccaattttctgggcatcgttaggttaacacgtgctgttgtccctcatatgcgccgtcggggcagcgggcgtatcattaacattggttcgatactcggtatcgttccgttgccgtatgtggctctttatgctgccagtaagcatgcagtcgaaggatacacaggagcacttgatcacgagctgcgcacgcagggtatccgggtttctgtcattgaacctgcttacataaagaccgagtttgaagccaataatatcgaaccggatgccaggcttgaagagtatgaccttatccgggctaagctgacgaaagtggtgagcaaagcaatggccgaagcggaaagtccggaagttgtggcggacgtagtggttaaagctgctgaggatttacgaccaaaagtgcgttataccgcgggaacgctggcggctaaactgaattttcttctcaaattcgcgccctcaaaaatcctggataaggtagtgagaaatagtcttcagcttgatgcgagagaataa

SEQ ID NO: 109975 - DNA, 783 bp, Enterobacter aerogenes
atgactaacgcttcagttctcattacgggtgcatccacaggtattggtgctgtttacgctgaacgatttgcccgtcggggacatgacctggtactggtcgcccgcgacacagcaaagttagagatactggccgatcgtctgcgacgggaaaatggcatttctgtcgatgttcttccagccgacctcacgcaagcggtcgatttagcgactatcgaagcgcgtctgcgtgaagacgagcagatcggtattcttatcaataacgcaggtatcgcgcagtacgggagttttacagagcagacgcctgaatcgatagaacgcctaatcgcgcttaatgtcacggcactgacgagactggcaaatgcagtagcaccacgctttgtaaaagcgggtgaaggttctatcgtcaatatcagttccatcgttgggctcgctccggaatttgcaatgacggtttacggtgcaaccaaagcctttgtgcttttcctgtctcagggaatgagtctggagctgtcatctaagggtatttatatccaggcggtactgcctgccgggacgtacacggaaatttgggatcgtgcgggtatcgacatcagtaactttgccaaaatgatggaagtaggtgagttagtcgatgcagccctggtgggttttgatcgtcgcgaactcgtcaccatcccgcctttacagaatgctgcacactgggagaccctcgatgcttcccgtcaggctctgctttcagacatcaaacaagatgaagccgcagagcgatataaaacacgttaa

SEQ ID NO: 109976 - DNA, 1092 bp, Enterobacter aerogenes
atgacgaaccaggcattatttcaaccttatgatcttggccccataacacttgccaaccacatcgtgatggcccccctgacgcgtaaccgggctggtgccgggctggtaccgggcgaactggcagcgacttactacgcccagcgagcttcagcaggattattgattaccgaagccacgcagatttcgccacaagcgcagggatatcaggatacaccggggatctatacgcaagctcaaatagagggttggcgcaaagtgactgacgcagtccatgccaaaggtgggcgtatatttgtacagctctggcacgtagggcgaatttcgcatgtcgatttacagcctggtggcgctgcaccagtcgcaccgtccgctatccgcgctgagacgaagacctttgtgaacaacggttttgctgatgtttctgaaccacgtgcgctggaagtggaggaaataaaggggatcatcgatgatttcagaaaggcagctgcaaatgccattgccgccgggtttgacggagtcgaaatccatggtgcgaatggttatctgctggaacagttccttaaagatggtgctaatcagcgtacagatgaatacggcggctctgtcgagaatcgtgctcgcctgctgttagaagtcactgctgccgtaaaagatgagattggcgctgaacgcaccggcgtgcgcatttcgccggtatctcctgctaatgcaatttcttgcagtgatccgcaacctcaatatgactacctcgctgagcaactcaatgcattaggcatcgtgtatctccacgtggttgaaggcgctacgggcggcccgcgcgatgtatcaccgttcgactacgactcactacgtcgacgctttaacaacacctggatcggtaacaatggctatgacctggcgctggcgaccactcagcttgagcaaggcaaagccgatctgtttgccttcggtcgtccgttcatctccaacccggatttggttgaaagactgaagacgggtgcgccgctggcctcacttaatcctgaaacgctttatggcggtggtgcacaagggtacaccgattatccgtcgcttaccggaaccagcaagtag

SEQ ID NO: 109977 - DNA, 549 bp, Enterobacter aerogenes
gtgaaagtgtcaaaagagcaggttcgcgagaacaggatgcgagttgttgaaacggcctcagaactttttcgtgagcgtggttacgatggtatcgggatatcggaactgatgtctgaggcagggttaactcacggtggcttttacaagcattttggttccaaggcagatttactgtctgaggccatgagctgcggctttatgcgatccgcagaaaaaacggagggtgttaatcgggaaaaatttattgaatattatctctcccgacaacatcgtgatgacatgggaaaaggctgcgtgatgtcggctctgggtactgatgcagcccgtcaatctgaatcaatcaaagagacgtttgcggccggaattgagcggcaactggaagttttaggaaccgaaaatggcacgcgcgctgacttaataaataccatcgcgcatcttgttggcgccctggtgttgtctcgtgcctgtccagataattccgctcttgctaacgaaattctggatgtttgtcgcgcgcgtcttatcagtcatgactcttgtaagggatga

SEQ ID NO: 109978 - DNA, 1074 bp, Enterobacter aerogenes
gtggttgactacagagatctgaatcttaaccgagaaaaccttgatctcaatatccagaactttctggaatctcacggctatcagcttgatggagatatacaaacatttcccaaaaggaaaagggtggtttttggctctactgggtcggaattctcaactgttgattttcacctcaaccatacaggtacaactacgattcagtggaaactaggtaaaaatcaaccagttggtgaaacacttgcttcatatttaagggatacaatcgacccagcagaatttgaaaacgtcaattattcattgaaaggaataactacagaatcattcgatcctatattagaatgcgttttggaggctggtgatattgaactcaatctcttacgtgatgaggacaactgtaagcaggtaacgctgaaaagtattgcacatcaagaccacttaactctcactcaccatcgacgcacaagagttttacaaatacagggtaaacctttgtcatgttatcgtcgtgttattttcatgcttacagatttactggatctcaaaggattagaacaagtcttatatcgtaaagatgatagtagcgctgagatagttagaaaggagatggccgatgactatataaaaacggcatttcctagaagctatgaactcttacctgaatcagtaaaaaaactgctaatctctagctgttgtgtgaaattagcctcaccacagttaccagattattgcctattactctatccggacctacgggctctcgaaggagtgctgaaagagcagatgtgcatttacaatatgtctgttgaagatgcagaacatggttttggcgacttttttgatatcaatcgtgggttatgtactttaaaacctcaatacagtgcaatggttagaaatatagggatgcaggatgctttgaataacggctatacattctataggaaacatcgtcatacacttttccatatggaagagtttgcagatggcagtcgcatgatagatacccttgaaaaggcaataagtttatctaaaaacacatattctgcgatcgatagcttatatacagcgagaatgtga

SEQ ID NO: 109979 - DNA, 273 bp, Enterobacter aerogenes
ttgcgtcaattaaaaggtctggcaattgaactcgatcaacttggttttgagggtgtagtgctgtttgacctattagctgtaaatggcttagcagagaaccgctttgcatctataaaatttaccaatagaaaatttgttcgttcctcgttcgtgctagaatccaatgtaaatccaagtatcaaaaatgaacaggatgcttttgctaaacaagatcagacatttctacttgggagcgtactctcatccactgagattgaaaagttcacacactaa

SEQ ID NO: 109980 - DNA, 1221 bp, Enterobacter aerogenes
ttgaaatcagttaagtgtaagagcaatggagagaaagccccagtagcacaagcctttaccccagaggctagcttaaaacgcaaaatacgctcacattttacacaactggggtttcaaaaagggccggatggaacactagttcgtcctgagtcaggaaaagaatctatccgtcaactgcacagcgctcaacgtgaagaacgtctacgctcctctgagcaatttatatctgaattcttgccaagtgccataccatattttgccaacggaaatgagattgatccaactaagattcgcttatcattgataaaagtttctgcgaattcgttcgaatccaaactctttagggcagcatctttaacctggtctgttccagtatcaaatggttacggtcgccgcatgcggtacctcgtgtgggacagagggcatgaccgacttgctggaatatttgcattaggagatccagtttttaacttatctgtacgtgataatttaatcggatggacatctaatgatcgatcaagtcggctagttaacatacttgatgcttacgttcttggagcggttcccccctacaatatgcttttaggcggtaaagcgattgcctgtttaatccgctcacgagaagtttatgacgatttcctacgaaattatggttcaacgacgggcattatttctggtaaagataaatacgctcacttactcgcagtaacaacaagttcttccatggggcgttcatcactttataatcgactgaagctagatagcataagttattttgaaccaatcggttataccgtcggctgggggcattttcatattaccgatgagttatttggggagatgcgtgaatatcttcgactcgcagagcacccgtatgccgatcaacattgctttggcgaaggctcaaattggcggctcagaactatcaaagctgccctgaaacaactcgggattaaccaagcggttttacgtcatggaatccaaagagaggtatttttctgccagctcgctgaaaatgcaaaagaaattctcgcgactggtaggggtacacccgacctttcaaccttaaaaactattgatgaaatatctgaacttgcgcgtaagagatggattgaaccgcgagctctaaggcagggttattataagaactggagacgggacgatatatccttactaattaaaggattaaaactggacgtaataactagtaaaattgcctaa

SEQ ID NO: 109981 - DNA, 2826 bp, Enterobacter aerogenes
gtgaatctagcagaacttcaagagaggctataccagcattattctcgactacgtgatctgcggactaccgaaaattatcccgtttatgcgatcgagcatggtctgagcgaagcagagatttctactgctcaatcgcttctcaatgccaacttgaatacaacaaaacgtgctactcgcactttttggctggtatggatcgctgccgctgctgagataggttacacatatgacggaaccgaatattgggattcctttgctatagcctttccctcctggcctaagtttggagaccgtgatcaaatccgtatatggtatagacgatttactactgattttaatagtgtcaccccctccgggtcatgggcacagcagttccctattatttcttggccaatcacgcaagccattctgccaagatatctacaacgtttttttgccgatcacctatacaatcttcgccatttactgactagaagtggtgagcttacattagaagaaataggtgaactactaagcgatgaatatcatggtggttcatctcggttcgagggtttcttacaacaaaaaactctaacagcacgaattgtaatggcgatgcgtcttgaagatgtcgttgatgctatctcccccattgagaaaagcacattgcgccgcatcatagacgacttcgataagcttggttcatttggtactcgcctaaaggaagtaagacgagtactccgtgaggctcgtttcgtcaatttgtatagtacaagctttatatcttcttcaaaaagtatccaagaaaatgtaactatctcgaaaacttgtacagtaaaacctcggctaattgcacggcaaagaggtttaacagagtggaacctaaggctcgtaattcccgacattgcaacatctcttcgtcaggccggactatccccgcttgatttagaacactctcatatgcgctttcgttattatggtggaggcaatgcatggatgccgggccgggcattattttcttacaccggaggaacagaagaaccactctcggcatacccaactgataatcgttctgttttcgaattcgatcgcccttttgaaaaagttacagcctctttgcaggaaaggctgcttttccctgcaacgactttacggctactaaaggtacgttcagatggtacggctgttgaagtcacgggacggcatgtaaaagctaaccaagcttatttacttgtctgttcgaatacagtgcccactgaagttatcgatagtctatcgcttactcctgttcagtcacagacaactggagccgacgtttggcaattttcaattcctacgaaagtagatgctagaaaaatagcagcattatcgtcgattgggcttggatataagttaggcatacgagccgaatcaataggtatgactgcccgatggaacaatgtagatgacgcgctggagtttcttgacacagaagttgtcatgttttacctagcatcggatgttgaagccgacgaattacagatcattattaataaacatcctcctgtacatctgcgtccggaacccaacggaaaaacgtttatttcgctcggtaagcttccaataggtttgtattatgtatctttatctgcactcggcgtagctaccggcagcaacataataagcgaagaaatcctcattagggtgcgtttagcagcaccttggcaaaagactgtctccggaaaagcaggggttagcctcaagcttgaaccgcagggagccacattagagcagtttcttgaccacgcagccaccctgaggtttatggctcctgccgggcgtattgttaaactggaaatccgtttcttcaacgcagacggcacgctttttcatatagagccgattggcaattacaaggctcctgttgacgatgagagaatatctaaacttatcgtacagaaactgacagcagacaactacattgaacatgttgatcgttccgcgtgtatagaattgctcatatcgttggacgaatatggcctagagagcgtgcgattcgacaagaaagcagaacctttacggtggctacgtttagacaaacgtactatccgactcaccgatgatacagaggaaacaagtctgccttctgtaaagagatatgatttgaacgctgttgaaattggtcacgaagtggactatgaacaggctctgtccggactagagcttcgtggtaagggcggtttgtttgttgcaagcatcaatgatcaaacttacgaagtgatcgctatggcttcgcagcgccaaatttctgattttcgagatctgaatattctgactcatgtgtccgcagaagaaccacagccgctaaccattatcaatgctctgcggtattggcagggagctcggaggctgataggaccaatggcttttttggctcggcgcaacgctattctcacacttgaaaaagaacttgaacgatatctatgcggtaatgactgggcagaagatataaacaaggttcaaactggtaaaagggacattggatttctttataggcgagtttattattcacaaggattcgcttcaggcttattgagcgcacaagattggcaatatgatcatgatgcagaaactgctgaactagaattctttcgactggctcatgcttataaaattccggaaacagacatcctctatcgtcttgcactgaaattggcatttcaaccgcatactgtgaaaccctcggacctcgcatcaccaaatgcattcgatatgctacggaaaaactctgcgctaatccgcggagcgtattttgcgcgtctagtggcacactgccagaaaacgagcgctaagacggaggtcttatga

SEQ ID NO: 109982 - DNA, 1065 bp, Enterobacter aerogenes
atgaacaatattaaaatacttagccgggctgattgcctaaagtattcatctcgctcattaggacttcctgacttgcaaaaacttgataatgcattaatcgctcaagcgttgcggagaaccgttttcattgaagctccttgttcgattcggacagtatgctcactcgtaatgaattccctaggcccattaactgacgagcctgagaacttaaagacactcatctacgatattattgacgaccttgtcaacttgggtgatcttcttgaaatgcgggacgaaatcgcgggggaaacgaacctcattttgcgccctgctccaccggcgtttgtgcttcgaagagatgggacattcattatagtgggagtggctggtgatgatgtcactccgccacaggtaaatgactttaatctcgtttattacccgagtggtttaagaatactcacaccaagcaatacgcaatcatgtcggcaaacacttatcgatctaggacttattgagttacctatgattacatggctacgtgcaccagtttcgattacagccgacaaacttgtaaaatcgtggatcagcagactccccaacgatatacacccggaaaaaatagagaattttgagataattgatattagcaatacaacttcatactataaaggcagatggcagtcactaaacgaacaacatgctggaatttatattgcccgacgcccacaacgctacggggcaagactgtggtgccttgccgaaattcgggacggattagtccaacgcttcgttgatattcattcaggagatgcgcgctttcgagattgtgatgaagcctggcgattactcgctgcgatggatgcacttactggctctccgcaacaggtcagagttgtttatgaaaaggagataactgtgctgtcctttacatctcctcttccttcttgggcgattaggcgtcttagtctggtcggtgaacgtttaaagcctcatcgcgccttgctgcaattttcactgcctttacataatagtgaagaagaacttcattggctagaggaatccctctggctaactcgggattag

SEQ ID NO: 109983 - DNA, 5541 bp, Enterobacter aerogenes
atgaaaacagccacaatacaacaaacaattgacgaattacggcagagcctgacgcattatatcgaggcgacatatcacatcggccacccttccatagtcaaacagcgtcgtgaactattgaatcagatcggtggcatctatcaggctccatatctggaatcgactccccgctataagagcgccagtccttataatgagattgatagtttgccaccagcggcacttgaagcattgagagttctttctgacacaaaatcaggaaaaccagtaatttacccttccccctatacccatcaattggaggccctacaagagattctcaacaataatcgaaaccttatgattatgacgggaacaggttctggcaaaactgaatcattcctcttaccgatattaggcaagttcgcaattgaagcctgcgagaacccagagcgctttaaaaaatataatgctgttcgcgcattagtgctttatcctatgaacgccctcgtgaacgaccaattaagtcgattgcgaacaatgttcggttcccctcaaaccgttgctctattcgaaaaatgggctaagcgtcccgtcctcttcgcgcgttataccagccgtaccccatatgcgggcctgcgcacacctaataaagatagtaaacgactagcatctattggtgaatttttcggggagatcgaggatgcgaaacgacgctatgaacattccccttccgacggggaagaataccgcgcggctaaactctttgataccttaaaggtacggggaaaatggccatccaaagaaagtgtttccgactggttgggtaaagctcctgtgccttgggcgaagcgagcaatctgccgtccacacgattctgaactaattacacgccatgaagttcatgcatctccacccgatcttctcattacaaactattcgatgcttgaatatatgatgatgcgtcccattgagcgtggcatatttgacgcaacaaaagaatggttggacgcttgcccggacgagaaatttcttatcgttcttgatgaagctcatctttacagaggagcacaaggtgctgaagtcggattattgatacgtagactaagagaacgtcttggtataccagccgagaggttccaagtcatatgctcgaccgcaagcttcagtgatgagggtaagaaaaatgctggtgtattcggcgcacagctttccggagtatcggccgaatcattcgtgtcaatagtaggagaactacagttacgttctcctgaggaccgtggatcaatggtcgatataaacacccttgctgctgttaatcttaaacagttctattcagcagaccatagtcaacaattggcagcgattgagaactttctaaagtttcgaggggtatcagtcaaagatgtaagtgatgtggacgctaaactttatctggcgctgtacgattacgcgccatttaatcgacttgtaaatgagactatgactgctgcggtatcgctctccaaactaccagaaataatctttgacgatacaataccatcgaatcttttggaaaaagccacaacggtattactcgcgtttgggagccgcgcgaaaaaaacaccaaacgaagctagccttcttccatgcagaatacattcattcttccgtggacttcctggcttatggatatgcatggatcccaattgccccgatgccctcagagacaggcgaagccctgccggaagattgttctcgcaaccacacgagcgatgcagttgcggcgctccggttttggaatattatacttgccgtcattgtggcacttcatatgccagggcctatacaaatgatgttgcgcagccacgctatttatggtccaaagaaggtgaaagaattgagactgcttcagggcttatagaggctcttcatcctcttgatcttcttattgaagaaccgccatcggatgataaagccaaagccgcttactatgatcttgtatcggggcagcttaatccagatgtactaggagagaaatatcgaaccgtcttccttgctcctgcaaagcccgtaacagatggctcgaaagatacaacccgtggagcaggtccagggcaattcgctccttgtgcatgttgcaaccagatggcaggtcatggacaatctagcgttcaagatcatcagaccaagggcgatcaaccgtttcaggctttattgggatcacagctaagaatacagccccctggtccacagcaacaaacttcttttgcgccacttcgtgggcgtaaggttctaatcttctctgattctcgccaagtagccgctcgtctggctggcacacttcagaactattccttacgtgatgctgtgcgggcactccttccgttgggttataagattcttagccgcgatccggacttctccaaaactcttgtgctcaaccatgcgtacttatcagttttagtggctgcccataagttaggcgttcgactaaggccccaacttggtgatgcagaaacactttcagaggtagaaggaccaagtccaggcccatctcccgcaggtatacagctctttcaactcctcagttcgttgtcccgatgcccgcagcgtcttatgcaggcaatctccgatacgtttaaacatacgaacatgggacttgatctggaggccttggcgatcgccacgattggcgagcctccacaaatctcgtccaagattgtaaaacttcccgatctaccaggagtcgccgaaaccgaggaggctaaattgacagtctgtcgagcttggctgcgatgctggacgcttgatccgggaatctggttttcagacatgcctgactcttggtggaatgaacgagtgagatcccatcaaggggtatttactgccatgaaccgagttcttgtatcgaagcaatcgaaatcaatattcaaaaagaattggcttccaactcttctgaccatttttaccgagcaaacaatgggagggggacatcgtttagttgcttcgaagctttctcttcatttaaatggtcagtggcagcgatgcaatagttgcaaatctgttcatcgcccagtcggaactctcagtagatgtattgactgtgaaagttctgatgtgagcaactttgatcccgctttagatgaggtttacaaggcacgtcgtggtttttatcgcgaccctatcgcttcagcacttgatgttgaagatccccaactaatgaccattattgcagcagagcacacagctcaacttggagcggcacagccggatgaagccttctctcactctgagcgacacgaaataagatttcaggatatcgatgtcgcctggagagataaggaccgccctggtgaacccgctattgatgtgctttcaagcaccacgactatggaagtaggtattgatatcggtgatctttcaggcgtggcacttcgtaatatgcctccaacccgcgccaattatcagcagcgtgctggccgagcaggccgacgtgctaatgcagttgcgactgttgtagcatttggcagctcggacagccatgacgaccattattttacggatccagaggaaatgatacggggtaatgtcattgatccacgcctcacgttagaaaatccggaaataacgcgacgccatcttcgcgcctacctgcttcagcgctatcatgaagaccgtattcctggattaatcccaggtgccgatcctaatttgttttccgttttgggcaaagtcggtgatttcaaaactcggggacctttgctcaatcgttatgattttgctaaatggctagaagataatgcacaagacctcgctaacgcggctgatcgctggctacccactgagttgtcaccagatgatcgccataggttgattgctgaaatgatggttgacgcgacagatacgattgacgaagccatagattttattcaatcagagaaccaagatgtcaacgccgccctagaaaaaagtaaggacgactctggtgatcaaaccgagaatgagataatgaccgagtcagaggataacgtgcatattgttgatcccgccacggataaactacttgaccgtctcctttaccggggagtagttccacggtatgcgtttccaaccgatgttgtggcatttcacgttttcaatcaagagagatcaaccccgttcacatcggttatagattatgctcccgctcaggggcttgcactggctctatctcaatacgcaccaaacaagcaactctggataaacggcaaacagtatacatccaaagctatatattctccttatccagccgaacgacgggacgcttggggaaaacgaaaactctacttcgagtgcagcacttgctcccatgcaaggactgacgattacttaaaagagagggagaacacgacagagacttgtccagcctgcaacacacccaactctttcggcccggcaagggtctggttccgtcctgtcggctttgcgcacccaatcgatacaccgccggaaactgagccagactcaccaaacgagaccgcaagagcgacgcgtgccaagttagtcatgcaaacgcctaatcctgacaagaactggattcaggtatccgagcgggtgcgtgctttcaaagcgagagaatttctcttagtatcaaatactggtgtcgataaagatggctacgattattgtctcgcctgtggtcgaatcgagtcatcggcggctcctgaggaactactctcacaaccacacgctacgccattccgcagtgaagaaggctccatctgcccaggaggagcggcaaaacgtcacgtaattcttgggactgatttcaaaactgacattgcattattttcattcccgctaacagagccgttccaactcttgcccggcagtatagaagctgattctgtacttagaactctatgcgaagctatggccaaggctgcgtgtcaaacactagatattgaaccgggagaagttctagccgaataccgcccagctttgacagaaaaaggcgcaagcggtaacgaagttgaaattttcctatatgacacattggcaggaggtgcagggttttcgaccgaacttgtgaatcgggcaagagaattgtttgagcacacgcgaaatcttctagcaagttgtccagaaaactgcgacacatcctgctatcgctgcctgcaaagtttccgcaatcgaatggaccactcgctcctagatcgcaaactcggcattcagtttattgaacatgcgtttgatggtggatatccgccttatcctgccgagcgtactcgacgatcgcttgatcttctcgcccgtgatctgattcggcagtatggaaccgaattttctttctctcgtgaagttcaacgatatgacaatgaagctggagaaatagtaattccaattgttgctacacgcctggctacgggtgcagaaacttggatatcactcagttctccactagccccggcgattccgacagatcataaactccagaaacttagtcctcaagggtcagaaaaaatggagtgcgtagatgaccttattattcgtagacatttaccagaggcaagtttgcaacttcgaggaaaactgagataa

SEQ ID NO: 109984 - DNA, 1620 bp, Enterobacter aerogenes
atgctaagtaaaataatctgctcacttttcaatcatggtggaatatcattcaattatggcttgaatgtaattcttggcgatgataatgctaaaaactcaattggaaaatcctctgctttgatggtcattgattttgctatgggtggtatgtctcttttggatgataaggctggtattatcaagtctatggggcaccatagttatatctttgaatttatttttgacgatgttgtatattattttaaacggtcaacaagtgaatccaatgtggttcatgtgtgcaatatgcattataaagtaattgatgaaattagcattggtgattatacagataaactcaaaatactctataacttagagcatctaaaaagtagttttcgttcacttgttagtcctttcagtcgaatatggaataaaggtgctttagaccctgagcaaccattttctggcgatgtgaaagaatcagcaggagtagctattggacgactcatcgatctctttgaatatacggaagatatcgctgaagagaagtctactttagatgaatataatgaaaggaaaaaactcatatccaagtcgatgaatgctcaaatcattcccaagatcaacaaggctcaatacaagaccaatcagaaaataataactgacaacaatgatgctattaaagccttgaaacaggggtttacgggagctctaagcgcctatgaagctctctttgacgaagaactgcgtaaacttcatcagcaaaaaaatgaattaggtagccaaaaaaatgatgtgctaataaaaatagaacgaattaatcgagatatctcaggggtaacaccgagattaactgctaatattgctcttattaaggagtttttccctaatgtagattcagaacgtcttgagcaggttgagtcttttcatcaaaatatcactaaaatagtgcaaaaagaacttaaaaaaggtcttgcattgtattctgaaaacttattgcaaatcaatactaagatcgttgctttggagaataaaatacgaactggtttggcagcaaaaggaacgccagatgatttgttcatgcgagtgttcgaactaaaagaacttgcagataaagctgctgaagagaatagcttttatgataaaaaggtagctatcggcagggacgcgttactatccaaagaacgtttggaagcgatatactttggtatattccttaatatagaaaatgcactaaatataaaattaaaaaacttcaataaagtagtttacgggccgagcagaaatgcatctcagcttaggataaaaaatgcaaattcatacaacttcatctcgcccgaggatactggaactggaaagtcttatgcaggcttagttgcattcgatcttgctatgctttcactaactaacctgccgttcataatccatgattcagttatctacaagaatattgaggttcctgccacagggaatataatccgaattctagcatctgttaaacgtaagcagatattcctttcatttgatgaagccgcaaaattcggtgccaaagttgaacgattgctgcggattcataccgttctcaagttgagcgataacgatctgctctatacgaaagactggagggatcagcaatag

SEQ ID NO: 109985 - DNA, 225 bp, Enterobacter aerogenes
atgctagttccaactaaattcacgagtcttgaagagtcgaccatttttaaaatgctagtcattttaaaaaacaaagtagacgacgaaaaattgtcggatttattgacaagaacttcggcgagctttcaagatgcttcggaatttttacatgctttagatatcctatatgttcttggtttgattgatgttgatgtttcgatggaaacgataaaatatgctaagtaa

SEQ ID NO: 109986 - DNA, 780 bp, Enterobacter aerogenes
atggcaaatataaggattaaataccatgctaatgaacacagcattctatatgcggagactggaggctgttgcccgctctgtacatcacctatgatgttcaagaaagcaagttctagacatcctagtataggatatgagattgctcatatttatccattaaatccgaataaatcgcaggcaaaggctcttgagcaatattcagtacctgatgacatcaattcccttgaaaatgtaattctcttatgcccaaattgccatacaaagtatgacaaagatttcaaaatcgaagaatatcttaggctttataatattaaaaatggctatcttagtgagacaaaggcaaaacaaacagcttctcaatatgctctgcaagatgaagtgtgcgaaatattagatctcattgtgcttggtgatgataattttgcaaatttttctgagactaaactagatgtcagttcgcttaatgaaaaactcaagaccgatatgagtcctttgcagaagcgagaaattcgttcaaatgttatcgactattttgtacctattaggaatcatatccgacttctcgaacagttggatcaagccgccatacgaatactacagaatcaagtaaatacctattatctgataatggaaaagcaaaaccctaagaataaggatttagtttttaactatgtttcacaatggataagcttgaagtctggtaaatccattattgcatccaagatccttacatctttttttatccaaaattgcgaggtattcgatgctagttccaactaa

SEQ ID NO: 109987 - DNA, 180 bp, Enterobacter aerogenes
atggtggtcattctggtggtcttgacaacaagtgaattcaagtttagcttatgtattagcctgttactggcaaaggcgatcccagtcagaggagccaaatttagaaaagcctgctttcgagcaggctttttgcttttatttgctttatacaccttctgctttgattatcacttgcgttaa

SEQ ID NO: 109988 - DNA, 2160 bp, Enterobacter aerogenes
atgtcttctattgtgaatcaaaaaaacacacagaattcagatgaaatagatctgggacgtatcataggtgaattaatagatcaccgaaaactaattgtaacgttatctatattttttacggctatagcaattatatactcattgtttgctacgccgatatatcaagctgactcattaatacaaattgaacagaagcaaggtaatactctattaaatgatttaagtcaaatgttgcctgatagtcagccacaatcagctcctgaaattattcttttacaatctagaatgatcttgggaaaaacagttgatgatttaaacttacaagcaaaaattgagcaaaatttcttcccaatatttggtaagggttgggcacgattgagtggtgaacagccagctaagataaatgtcagtcgtctttatatagatgcaattaatgggaaaacaccaaagctggatttgactgtattagatagtcgtaactttaaaattgaaattgaagatactgatactgtaataaacggtaaagttggtgaattaattaacgaaaagggtatatccttacttgttgatgagttggatgcaaaagtaggggatagttttacaattacatatttaagtagattaaatgcaataactgatttacaaaaaatatttactgtaacagaccaaggaaaaggggccggtatattaagcttgacgctgactggagaggatcaggttaggacaacagagctgttacggagcattagtgagaattacctaaatcaaaatatagctcgtcaggcggctcaagatgagaaaagtttagagtttctcaataagcaactaccacaagtcagaatggagcttgatcaagcagaggataaattaaatacatatagacgacaaaaagattctgttgatttgacaatggaagcaaagtccgtacttgatcaaattgtgaatgttgataatcaactaaatagcttgacttttagggaagcagagatctcacagctatatacaaaagagcatccgacttataaagccttagcagaaaaaaggaatactcttctacaggaaaaggcgaaattaaataaacgagtctcaacaatgcctgcaacacaacaggaggttttacgtctgggccgagatgtagagtcggggcgtgccgtgtatatgcagttgttaaaccgacaacaagaacttagtattgcaaaatcgagcgctattggttatgtccgtattatagatgatgctattacagatcctaatccgattaaaccaaagaaaactttgattgttattattgggttttgtttaggaatcttaatatcgattggtgtagtaatattaagggtattcttgcgaagaggtattgaatcaccagaacaattagaagagattggtatcaatgtgtatgcgagtgtgcctgtttctgagtcacttgcaaagatgaaagtgaaaggaagaacattccgtcatgaggataagtctttacttgcacttgataatccagctgatttagctatagaagctatacgtgggttacggacgagtttacattttgcaatgatggaatctcgtaataatgtattaatgatttccggagcgagcccaaacgtagggaaaacttttattagtacaaacctcgctgctataattgctcaatctggtaaaaaaatattgctagttgatgctgatatgcgaaaaggctatgttcacaagttatttaagggggacaataaacacggtttgtcagagcttttatcggggaaaactgaaattaataattctgtgcaaattatcaaagatgctggatttgattttatttcaagaggagttattcctcctaatccggcagagttacttatgcacaaaaactttgccgaattaattagttgggcaagtgctaattatgatttggttattattgatacaccacctattcttgctgtaactgatgctgcaattattggccgctatgttggtacaacattgttagttgcacgttttgaagaaaatacggttaaggaaattgatgttagtattaaacgctttgagcaaagtggggtttctgtaaaagggtgcattcttaatggtgtagttaagaaagcaagtagctattatggatatggatataaccattatggttattcatactcggatgaaaaaaaataa

SEQ ID NO: 109989 - DNA, 132 bp, Enterobacter aerogenes
atgttacttggtcattggatgggacaaaaggacatcccagatccatataggcaaggaaaagaggcctttgagtttgtttatcagttgattgagcaatcatgccagcaatgggctgaaaagctaagtagctaa

SEQ ID NO: 109990 - DNA, 1134 bp, Enterobacter aerogenes
atgaaaattgcaattttaacccaacctttacatactaattatggtggtacactccaggcatttgctcttcaatatatcttaagggatatcgggcatgaaccagtcacaattaattaccgcaaaactaaacctactattcatccagtacgcttagttttatccaggataaaacaaaaaatttttcatggaagaattatatattcctttaccgatgatgatttattaataatatcaaaataccataatgaatttatcgataagcatataaaacacactgattctatatatggtgttgatgaattgtgtagacttttttccatagaaaactttaatgcagttattgtcggtagcgaccagacttggcgacctagatattcgccacgtattgatagttttttccttgacttcctaagtgaaaataaaaacatcaaaaaaatttcctatgcttcttcatttggtacagataattgggaatttactaaggagcaaacagctaaattttcaaagttgttacaaaggtttgactctatttcagtacgtgagagttcagctgtaaatttatgtgcaaaatatttaggtgtttcatcagaacatgttctggaccctacttttttactcgataaaaaggtttatcttgagctcattaaggatattccaccaagaggtaaagggaaggtttttagctatgttctcgataaaagccaagagaaagtaaatataattagcaatgtttgtcgtctgcttgggaaggattgttttgaaacatatcctaaatactcggaaaaggaagcccgaagaataaaggattacgctgagtatcaatacccttccattgaatactgggttcgctcgttttatgatgcagactttgtcatcaccgattcttttcatggaacagtgttttcaatcatttttaataaaccgtttatttcaataggtaatgaaagtcgtggcaaagcaagatttacatcattacttagcaagttcaatcttgaaaatagattgattagtcatgagagtgagattacttcggaattaattaatgagtctattgatttcgccatggtcaatttaaaactgaatgagttgaaaaaacactcgctcactttcttaaataattctttatctgattga

SEQ ID NO: 109991 - DNA, 1329 bp, Enterobacter aerogenes
atgacgataaaacaaattgtagataacaatctttgtactggctgcggtgtatgtgtatcggaggataaaaataaagcaactaagatgacttggaatgatctgggtttctatatcccagatttaaacgaaaataccgatgctaccgagatggaaaaagtttgcccttttagtcttcaaaaagatacacatctcgatgaggatcagttagctaaggagtttttggagtcgtcgatattctcagatgctcaaattgggttatatacgggactctatgcaggctattctgttgagtatcgtgagacctcctcctctggtggaatggcaacatattttttcgagcaacttctaaaacaaaaaattgttgaccatctttttattgtcagagaatttgaagggcgttatgcatatcaacttttcagtgatgcagatcagataacagaaatttcaaaaacacgttactaccctgtgaccatggcgtctctttttgattgtttagacaagctagagggtaagattgctgtttctggcgtagcttgttttatcaaggctatacgtttaaaacaacattttacaccagctttaaaagaaaaaattccttttttaataggaataatatgtggcggtttaaaaagtaaatattacacggattttttagctcaatcctcaggctgtaaggactcttataataatgttgagtaccgagttaaaaaccctaagagtgtagcattagattataagttttcctgcaatcgtaaaaatgacaatagaattcatgttgttgatatgcaaagtcttggggatatgtgggggactgggctttttaaatctaatgcatgtgatttttgtgatgatgttacaacggaactagctgatgtttcactcggagatgcctggataccaccttacaataaagatgggttaggtaatagcattgtgatttcaagaagtgccgtggctgacagcataataaagcaggggataaattcaggcgatttaagactagatgttttagatttgccaaaaataaagtcatcccaacaaggtagttttaatcataggcataagggattattatacagacataactatgctaaaaaaaacggctctcttgcaccagagaagcgtaagcgattcctccggagacaacatgttttacttaattttattcagtaccttagaatgaaagttaggaaacaaagtcttgaagtatgggtaagagttcgtaatgttgaagatttcaataccgaaatgaaacctcatttatcttttttaaaacgcgcaacaagacttaatcataaattagggaatattaagaatttttttaaataa

SEQ ID NO: 109992 - DNA, 546 bp, Enterobacter aerogenes
ttgcttagcactgaacaattattgtctctttggcttgttaatatacctgaatatactgttggatttgttcggtttgttattcttgtggctttaattgatagtttttcttctagcgtaattactgggatacaagctaccggtcgcataaagaaatatcaagttgttgtgggcttttttgtatttataagctttcctgtcacctacattctttatcgtttaggtgccccgatttattcagtgtttattcctttaattattacatcaatattgaatatgtttctcagagtttattttatctcatctctttcagattttaagtctacacattttttcaagtcggttgctttgccttgtgccttgtctgcattaatatctttatctattggatattatattagtaccagtatttcatatggaggagtagttcagttgctgtgttttagctctttatattcctttatatctattttgtctatttttatcttcgtcgttagcaaagatgagaggaaattgatagttaaatatttcgggagcaaattcaaatga

SEQ ID NO: 109993 - DNA, 486 bp, Enterobacter aerogenes
atgaatgacggtaaaagcattattaataaatatagatcaatgagtgactctgagaagattgaatatcttcgaaggtttaatagttcactagatctaatgcttgctaattttttggttgatattgtcaaagacaaatcagaagatgaacttttacgaatagaagcagttaaaatattagggctctatagaggggagtataatgatgagcgtatcaagaaagaattattaaaattgattgttgatgaagatgatgatgaagaactcaaagtatacataattaatgcattttcactgatgagtatcagtcaatcggacatggattttttcttgagtgttattcgtggtgagtattacattctagtaaaagaggcggcattttctttgttggtttatcataaaaattccactcctgctcataatgcattgaatgaattattaaatgatgaggcttttgggaaatcagctaagagggaattaaacctttaa

SEQ ID NO: 109994 - DNA, 627 bp, Enterobacter aerogenes
gtgtggtcagagaagacgggcgtatggggagagaaaggggaggtctacgccgatcgtatcagcaacccgctgcgttttcagggccagtattttgacgctgaaacggggctgcactataatcgacatcgttactatgatcctgaaattgcgggatttattagccaggatccgattggattagccggcgggctgaatgtttatcagtatgcgccgaacccgctgggatgggtggatccgtgggggctgagttgccgaaaaaaatacatgggcagaacccccagcaaaaatagcaaaaccggacgtgaagtcattgcaagaatgcgaggtgaagggcgaataagaggctctggtgataggatgcagtttaaaagttcaactgatggagtatggtaccgtatacaggatgctgatatggcacatttaacggatgcagttaaatattggaaccaaaaaggtgggtattacggacctaaatctcgtgaggtcagagcttttatgagagactccagaaattatgagcttgaatattatggtcacaatcgctctcagggagccttgcttcctgacagatataaacattctggagattttattggcccagaagaaaaatctcagtatttccagtaa

SEQ ID NO: 109995 - DNA, 2250 bp, Enterobacter aerogenes
atgcgtaaatcactgggttccaagcgtaacctgatgggtgaagacgatatcaagctgatcacccagaccttcggtgattttaaggtagtggatgccacaaccctggaagaactggggctggaaaaagccgccgagcaaaaatccagccgtggccgccaacctgccaccaccaaaaccgaagcgccgaaaaccttcgccagcaaaatctttaacgtcaccgactttggctatcgccgcctcaccattgaacgcccgctgcggttatccgcacaggtgaccgatgaagcgattgcgacactgcgctttgcgccgaagccgtttaacgcgccaatggaacgcctgtatgaagaatttgcgtcccaatggcaggcggataactacggtgatttctccgaactggaggcagaagcgcgcgccatcatcaaagccgaatttgccgagctgaaagagaagcagattaaagatctgctcgacagcaaactgtggctggcacaacgcgggttaatggaaaaagcgcagcaaatacagacggcactgggtacgcaggcgggtggcaaaacgctggtaagcaatgacttcaaccagttccagttgaccctgaaaggggccatcaaaacggctggcgtgaagctggacgcgaaagaaaacaagcagtttatcgacgctatcaccaccaaaaacccggaagcagagccggtggtgaagaaggtgctgaaagaagccgcccagccgctgtacggtgcatttgaatacaaaggcaaagtggttgagttcgaacaggacggcgagctgcgcgataacgagaacgtgccgttgaatccgacagtctccaccagcgacctgattgaaaactacttcaaagctgaagtgctgccactggtagctgattcttgggttaatgctgaaaagcaagataataaagataataatgtcggaatagttggttatgagatcaactttcattcctgtttccaacgaaaacacaacagagataagcttcttcaaggaaaatcggttcgtttaaaagaaatagtgcaaataaacaattcagggctttatgtattggatcaattaactggaaagataaatgaattttcttccttaagtgaaaagacaattgctctcaatccagttcgctttgattttcacaatgaaactctcattcctgagttttataatatatttttacaacaggaagaaggtgtggactggcttaaaaataattttaaagcaccttctatattctcaagaattatatcaatgtcagcatggttaaatgcgaagttctcgcttccaaccgtaggtaatcagtcagaattaatagagttttggaatgagtgtgaggcagtgttagctcgtgtctcgttacttaaaaaatctgttttttcaaattttatctcggcacaagagcaattgctaccatatcagagtgttgcgcatagatatgaacaagaattctcagcaatgttgcctactcctttagccatcctgtgggagctagcagagtcaaaatttaataatagagaacgatgcgagtctcttatcaagttttttgaatatcttggcttgtattttgtctcatttgtttttggacataaaaagccgtcaaaagaatgcttttgtaaaaagaaaaaagacttgccagatattacaatggcctttagtcacaatcgaattaacgactataagaatatatttgatttaagcgatggcaatgtcagtttgatatgtagtgacagaattgtaaatattctccgtgaagccaccgagctaagaaatgatatttctcatagaggattaccctctgctacagctgtaagttcaacaaaagaggttattgagaatttagttaatcgtatgcaacttgaatgtcgacagttttttgaattaaccactcttataaaaccaattcaagcaaaattcgatggaagtggatttttgaatgaagttgaggttcttaaagggttaggaattaatccgagtaaaactacgcaattcaagacttctgagcctatgatatccggagagctatatcttgcacatggtgatttagcagccaatgaaaatataagcgtaaccaaaatgtttcctttaatggttatgagagaaattttacccgaaagtgatataatgggtttttacttctatagtgacatttttgacgataatcttcgttttgtttgtccttatcctaacgtgactacttacgtatttctcgaccaaaatattattacggatagcctagggtga

SEQ ID NO: 109996 - DNA, 735 bp, Enterobacter aerogenes
ttgattaagttgggtagcgctcgttctggtgcatcgcaggtctggtgttttgtgaatgaaattcaaaagagtgattgggttattacctattcgccagccaatcgtacttatctgttaggtcaggttatatccgatttccaatatcatcctgaatgggtgaaagaaggtataggaatcgttcgccaggttaaatggaataatgaagaaatcgaccgcgatcgattgtctgttgctactaaaaatacactgggctctacgctgacggttttccagctaccagagtatgcgttagtagagcttttacgggataagaaacccatagtagacgttattacccagaatccagttccaatggatgaggataaagttgtttcagatccgcttcgtggtatggaaatgcttgcatttgaagggattaaagatcgaatcaactcactcgactgggatgggatgcaggaccttgtcgccggagtcttacgcagcatgggatataaaactcaggtgtcacccgttggagccgatcgtggtaaagacatcatcgcttcacctgttggatttggttttgaaaatccgcgtattatcgttgaggtaaagcaccgcagagaacagatgggaagtcagcaaatccgaagttttattggcggccgtcataaagacgatcgtgggctttatgtcagtactggcggctttacaaggatgctcgatatgaagtcgatcgttccacgataccgctga

SEQ ID NO: 109997 - DNA, 468 bp, Enterobacter aerogenes
  misc_feature (228)..(237): n is a, c, g, or t
atgcagaacacagcgacggggtatataatgttagctgggttaggtaggttaatgatgttctcactaaaaggcggctataaaacaatacctttatttctgggcatcatagcgatttatgtagggtatcttgtatatgattctttatggatgtatatggggcgatttggtgtcttgtttgtagataaggtaaatggatttatcttcggcgcggatacaagttcgatagannnnnnnnnnacacaaattgctatccttttgaaggatatggaaagctatttcgtatatgttctttttggtaaaggtggaaatgaagcatatttggtcgaaagtacatattatgcattctatggtttttgcggtttggttggacttagcctttttattttctctttattgttgtttctttttaagttgcctaattcattcaaaaagaaaacgtattattgccattctttatacaggaagtaa

SEQ ID NO: 109998 - DNA, 615 bp, Enterobacter aerogenes
atgaatttagaacctgatcaatacgataaaatattattttccttacaaaggagaacaaaaaaatcaaaaattgcaacctattccatcatctccctttcattatttatggtgattttattcctttccagcattttgtattatcacactcaagaaaagaaatcaggaagtctgcaagacttaattgcaattattgaaaaaaccaattcagcggtcaaatcgttaagtgatctcaatcaagaaataaaggataacaagttaggtataaaacgcagcggttttatcacaacagctagcgaaacatctgctgaaagcactattaaggaagcaatttctgttgctgcgccgtacctcatattcttcacagcaattatgtttataggctacacgcttagactcttaattattttcataaaatacaacatgcaaatgactaatgattatgaaaatcaaacaatttcatttttactttccagaggttctacttctgaattcaaagacctaattcaaacccttagaaaacacaatataaattttgaaaaaacgcccaacctccctcaagaaaaactaatttatgagttaatagatttggcccgatccaacaaaaataaaaactaa

SEQ ID NO: 109999 - DNA, 708 bp, Enterobacter aerogenes
atgaacccgacttttatcaactctttttcaaagacctgcattaaaaccagagctatcccgtttaattaccagatgggatggaccgcaggtatgcggcgcaggaatcgcgtgctaacaaaaatgaggcagtgcggtgctgattggtttttctcgcttgaggcgctatcagatgcactgactaccggacgaaaccagattttcctggggtgcggcgatgctcagtctcagattaacagagcctacatcaatgcacttctgaatcgggccggaccacaactgcgaagccgcgtatcgtgcatgacagaatcccgtcttgaactgaccaacggcgcacatatctacttcatcgacccggatagtctttgcgccgcgctgcatggaaacgtctacgcgtcagagtattcctgggcagattccccgaaaaatatgattttgctcgccaaaagcctgtccatgcacgcctgctatcatgctacctactacaccaccccaagccccagcccggaagcatggcaggaatacaaaaagctgattgccagcaacaacacaaccagaatgatttttacggctgaagacgccgcaacgtcaggggcaacgctctttgatgatgaatggctgaatacaatgaaaagcgaattatcagcagcggactggagaatgatgtttatgtgcgaatggccccaggctgataaggagcaggtggcatga

SEQ ID NO: 110000 - DNA, 1209 bp, Enterobacter aerogenes
atgtataatcaaacaaaaaaacaatttaagggcgaatgtccacactgcgagaatatcatcgattatcatgaattaaaatttccagtcacaaatgataatggggagattctcgcaagatgtcaaaactgcaaagaaatgtttggaattcaatgcaaaaaccccgctgaatcatatattgtaagcggtgctgaaaaaatagattatttggattatgaaggtgaatccccatcaacctttcataagttaaaagtatcatttaagtataatggcgatgtattcagaaataatccaaaatttgatttcgaatcttacaatctttataagtgcccacattgtgatgacaacttagagaaattagcacacgaaaaaatggtcaatgactatcaagagtgggggccgcgaatttgccaatatatatcagaagacatttctggatatggatatgatgcagaaaaatcaataataaaagtcgatttctcttgcacttgtgaatgtaaacactctgcattattttacaaaaatttcgatcatcgcgatttttcagatgacgatttcctgctcggacatataagtaattgcatttctcttgaggaaagaatcgatggaaccattacaaaatcagatttcattgagttgataaaaaaattaatgattagatgggagcttttatttgaaaagacttacctgatattcccttacgtcgggcatacgcgttcaaagagtgatgaactattggaactgtggggagaaataatatcacaatccgactcaaacaaacttaagattataaccaaaactcaaacattgaattcttataaaaatgcagtatctgaagctattcatgattataatattttgagcaaatttaaattcacaccaaaggtaatagatgatgctattaggaacactcgattccatgcaaagatttattgtggcgtaaatgacaattatgttgaatgcctaagcggttcagccaatattgcaaaaggcccaacacatgaacaacttacgtttaaaagctatgatagttacgatactttttatgaaagatttttgaaagtgtttgatactcgtaaagttgcagatgatgtatttagcattgtagagaagaacaactctaacaaatgccatgttctgttcgatcaatcagaaggttatcatcactcgcaactagaaaaatcatcactcatcgcactcatcaaaagttaa

SEQ ID NO: 110001 - DNA, 1878 bp, Enterobacter aerogenes
atgaagaataacatattttatgattatatagacaatgaacttcaggctattattaacagtgaggtttattcgggtttctttgataacttaaatcaagagcagcaaaaaaaatcattttcttttcttatatggttcctgaatagttatgcgaatatttcgaatgtggagcaatatataactgatggtcatgatgactcttcttgtgacattatattagataaggttgattcgcaaggagagaaatcattttatatagttcagtcgaaatggaatgcagttggcaactgtaattctgattttgatagtaaagaattgaagtcattccttagtgacattcatgctgttcttaaaggtgagaagcaaaagggtgctaatgaaaaatttaattctcaatatgatgctctgagagagcacgttaggaagaatggccgagttaaaattatttatttgtgtttgaaaaataactgtaaggatgcggatgataacatcaaagcacttaagaatgctatcggtgggaatattgagattgaaggctttgatattcatcgtttgaaaattgattatatcagtcgcgaatataagaagagttttccacctaatcctttggagaatgtatacaaccccgaactagataatatatctgtatccatattgaggggcgagggaagtaatagtattgaggttcattcaccatttaacgcttacgtattccttgttcgtcctaggttaatatacgagcttgtaaataaatatggtgtgtcattgtttgagaggaatgttcgaaacccactaatgtcctcaacaattaatgaggaaataaaaaatactttactaaaaaacccatcttatttttggtattataataacggtgtgacgggcattacaagaagaatgccgagaataaatagccaagctgaagaatttaatatccttgggttgcagataattaacggagcgcaaactgcatattcaatttatcgtgcatataaagagtgtagtttagaggaacgtatgattcttgatgatgaagctaaaattacatttagacttttgaagtcaggtggcagtgatttcgacctcaaggttacaaagtacacaaattcacaaaatcctgtgtcagagagagatttttggtcaaatgaccctgtgcagaaaaaattacaggactatttcttcaatactcagttatggtatgaaaagcgtgacggtgaatttagagaagagcctgaggatgtgtatgtcattcccaacaggatttttgcaagtgcttatatgggcttttggcttctgaaacctgttgacgtcgtgaaatcagctctcgcatataataatgatgaaagtgataggatttttacatcgagaacagaaagtgctgagggattatatgaaactatctttaactctcaaatagatcctaaaattgtccatgcttcttttattatgttcgacatattaacagatgttagaccgtttagaaaaagaagggatggtatattcttcacaaatgtattccacgtgcttagtgtaatcagaattgtaactgaaaaatatatacgtgaaaaatatgattctaaagctaatttaatctcctttattcttaagaatagcgatgacgataaagatgagatactaaagcgattggtagcatattctctggatttattaatcgccgaagtggaatcaaagcctgaaaaggaaaggggggattatattttttcaatgatgtctaaacaggcttatatagatatgttccttgaggatgttagaaccaaagatataactcccgaaatcattgaaagtcaagagctcgatattttcattttagaagatgaagatgaagatgaagatgaagatgaagatgagaaaataaacaattag

SEQ ID NO: 110002 - DNA, 3324 bp, Enterobacter aerogenes
atgaatatttccacatggtccattcgcaaccctatacctcctatcctgctctttctggtcctgagtgttgcgggtttttattccttccggatgatgaagattcaaagcttccctgatatggacgtccccaccgttacggtctctgccgcacttcccggagccgctccgccacagcttgaatcagaggtggcgcgcaaactggaggatgctatctcttcggtgcagggcctgaaagatatgcgtaccaccatccaggatggtctggtcaatatgtctgttgaattccggctgggaaaaccggtccaggaagcggtggatgatgtgcgctcggccgttcagggcatacgtacagatttaccggcagatcttcgggatccggtcgtccgtaagctcaatattacgggaaaaccgattctggcatttaccgtcagctccagcaagatggatgaaagcgaactctcctggtttgttgacaataccctttcccggcgtcttcagggcttgtcgggcgtggggacggttacccgtgttggtggcgtcgatcgtgagatacagattgagctggatccggtcaaattggaggccgcaggtatcacagcagcggaggtttcacgccagctacgtgatgttcaaatggaggcgactggcggtaatgccgagtttggacatggaaagcaaccgcttcgtttttttgcccgcgtcaaaaacattaatgacttatcagcacttgaactaccgctgcccggcgggaagcactttcgcctggacaatgtcgccacaatcaaagacacgattgcagaacgccgcgcgctggcttcgcttgatggtcagaaggtggttggattcgaagtcacacgcgctaaaggcgccggtgaagtagaggtcggagacaacatagcccaggcattaagacagataaaagcagaatggcctgatctgcaaattacccaggtctatgattttgtccagccggttcaggaagagtttgatgcatccatgcatatgatctacgagggcgccatactggcgatccttgttgtattcctgtttctgcgtgacattcgggcgaccttaatttcggcagccgccctgccgctgtcaattttacccgcctttatcggtatggacgcgatgggcttctctctgtccatcgtaactttgctggccctgtcactggtaataggccttttagttgatgatgcgattgtagaagttgagaacatcgaaagacacattggtatgggtaagcccccctaccaggcagcaattgatgccgcctctgaaattggacttgccgttgttgcaacaacctttgcgctgatcgcggtctttctgccaacggcttttatgcccggcgttgccggaaagttctttcagcaatttggctggacagctgcgctggccgtttttgcctctctgatagtggctcgcttgctaaccccgatgatggcggcgtatctgatgaagccgcacgtgcgcccgcagcgggatccattctggatggcggcatatctgcatgcttgtcactggacattacgacatcgctggctcactttgtcgctggcgggaggattttttattggctcattgttgcttatccctttacttcctaaagggttcttccccgctgacgataattcgcaaacccaggtgacgctggagctgcctcccggcgccacaatagatcaaacacaagccctggcggaacaggccaggcatcgtctgggaaatctccgtcatattcgtcatatctatacaaccattggtggaggcgcgacgggaagcgatatcatggcggccgacggcaatagtgatgtaaggatggcaacgcttacgctattgctggatcctcgtaaagaacgaccagagaaacacattattgagaacgacattcgtgccgcaatggccacattgccagggacacgtagcaaggttggttttggtgcttctggtgaaaagtatcagttggtgctggttggagatgatcaacaactgctctctaaaacagcagaagcggtattacgcgatttgcgtcaaattcccggcctgggaaacatcacttccagcgcggggcttacccgtaatgaaattatcctgcggcccaatttctccagggcagcagagcttggcgtgtcaggagcagcgattgccgatacgctgcgtatagcgacggttggcgactacgaccaatttttgtctaaattcaatgttgagcaacgccagatccccattgtcgtcaagttatcaaaggcgctgcgtgaacatccacaacagctcgagaagctattggtcccaggaaccaaggggcccgtgatgctcgatcaagttgtcacgctggaacagggtagcgggcctgcacagattaatcgcatcaatcgggcacgcagcatctcgctggatgtagagctttcaggtatggaactgggaaaactgaccgcaatggtatcgacgctcccctctatccagaatttaccgccaggcatacatcaactcactcagggtgatgaagacatgatgaatgaactttttgctggcttcgcgaccgccatggttgccgggattctggccatatatgtcgtactggttctcctgtttaaagacttcttccagcccatcaccattctggtagcgctcccgttatccttgggaggggcgtttgttggactgctacttgcaggccaggcgttttcgatgtcctcgctgattggtttgatcatgctaatggggatcgccactaagaactcgatcctgttggtcgattatgcgattgaatcacgtcgcggacacgttagcccggatggagccacaatcgtcagacctttcagcagaactgaggcagtgcttgacgcctgtcataaacgctcgcgcccggtcatcatgacaacgctggcaatgggcgcaggtatgcttccggttgccatgggctttggcagtgcggatcccagtttccgcagtccaatggcggtagcggttattggagggttaatcacctccaccgtgttgagcctattggttattcctgtggtctataccctgattgatgatcttgagaaaggaatacgtaagttacctgcgctggtgcgtgagagtaaattgagtttcaggaagaaagcaggttttaccatgctaggactggtgctggtgtactggttagcttttccgtttattcctttactcaatattcccaataaaattgttgtcgtttcgatcgtcgctgtagttggtgaaatcctgtttatattcgccgttacgcttctcggtaaagaatattggaataagattaaggcatggctgcgaaagcgattattcaatcgagggaattaa

SEQ ID NO: 110003 - DNA, 336 bp, Enterobacter aerogenes
atgaaaatagtaagtaagctcacctttttaggtatcataattttcttttctataaatgcctatgctggtcaattagatagtagtgggctacttgattctttattagataagtttcaacaagtagccagtacatggacaacagtaattgctgactatgcaaattggctcttctgggggctggtattaataagtatggtttggacatttggtatgatggcgatgcaaggggaagggttgacaggcgtacttgctgaaatagttcgcttttttgccgtcattggtttttttttattatcttttaatcaacggcccatccatatcgcaatccataattaa

SEQ ID NO: 110004 - DNA, 417 bp, Enterobacter aerogenes
atgaaaaatgttggcattgaaattaccggtgggaaaggaaatgtttttggtaaaactgatattcaaatagaaggtgatggcgaaaataaagcaatcatattaacaaacactgagtcaaacgaatttcatgatgtaaaaataaatatatcatcagctacaatttcaattgaaaaagcacaggaatttttatcgaaaataaatgacaacacagttcacccagaaaagcaaaaagcattcaaagaatgcataaatgaagatttgaatcatctcaagaagatcgaaggcaaagattctttcatgaaaggaattgataagttaatgggaactataaagttatggggtatgataaaatctgatttgctaccagatctttctaagctaagcgagtatatcactaacattatagaaaacatctga

SEQ ID NO: 110005 - DNA, 348 bp, Enterobacter aerogenes
atggactacaattacggaccaataactgtaacaatgcttggaggggggcggccggatgttataggcatttatttcgaaggagtgagtaactttagagctgagttgttaggtgcctctggtatgggcacgggaattgttctaaaagatacgaacaatggcgagattagtaatatcaccactgataattgcacaactggactgagcatgaccaattgcagttataataatataaaaatttttagccatgataacagtaacattatagagagggggagtattctacctgcaacagaaggtatttcacacatcatcacaacctatttaaatgcaaaaggttatgtaaaataa

SEQ ID NO: 110006 - DNA, 3135 bp, Enterobacter aerogenes
atggcaacaccattaccgactcctacgcagaatccagttccaagcacggatatcagagatgccgtctacgccggcgcgatgatggataacattatttcaagcaatgcgaagacatatgtcgatcgacttggcaatgaacggtataccgttgaagggatccgccagaatcttattccgctgagtcgtcagtacatgacacttgcagatgcacaggcggatattgccaacatccctgccgggagcgccgtctatgttcgcagcgtggatggctctgtgctggcggatgagtatattaataatggcggcacgctgacccctacagggcgccaaatgccatcgcaacgaactgttgaagccatcattccggaactgatagacccgggcgtgaatcttttcaacaagaatacggttacccctggatattatttgttcgaaggtacgggcgtaccgacggcaaacccggattattgttattcagaacggataggcattgttggcgatgccccgtacacaacccgaatcagcaccaggattgcgacattttttgatgctgatggcatgtatctctctgatgtcagcaatgttacatcttttacagctccagccagtgcagcgtttgttgttgtttctgtactaatcagtaatctggatgtattccagttaaactttggcgtcggccagatgccgtacacgagttacaagtccatcatcagccctgtcattaatggtgctgcaacaaatggatatgtcgcgctgggttttgcgcatgggaaaaacttctttaacccctcgctggtatttgacggccggcatttatcatcgaccggaacgataaccaatgacagcgacacgtcaatgtcggtgtctggctatatgaagattgacgcaaccaaaagctactgctctaaccagcagtggcgtgcagcggcgtattacgatgctaaagggcggttcatcagcctgcagacagtagatggttatggctcgaaaacgatagccgcacttgttatccctgctggcgcagtgtttatgcgcattgaggttcctactctggttgttccggcggcgatgattgaagagaacagcctggctactgagtttgagccgttccggcaggttgcgcctgatgcatttgacggtgtacaggtcacgttcgctgaggagcctgaggagaccatattatttggccccggcgtaaacctgtttaacaagaaagccgccagttttgggtacatcaatgaatggggctctgtctatccggtgcagggttcgtcaggggctggctatgtctattctgactatatccgggtaacacctgccactaaatataaagccagtgctcagttacggtttgtggcgttttacaatactgacaagcagtacatctcaaccgtttcactggttaccgagttcaccccgcctgcaaattctgcctacgcacgcatcacgcttgcgcagaatgtaatggaaaccatgtttttgtcagaaggtgattatcttgcgtcgcgagctgattaccagcatctgatggagaccgtagctacagatggttcagcgctaagaataccgggggaaatggtgctcgctgatgggcttgatattaacttcgttcagcaagggcttcttgtatcggggaaaaacctctataacaaaaacaccagaaaatctggctttatcgatgagcagggggtaattcatgagccagattcccggtactactactcggattttatcccggtaacgccgggggcaaaatacgcctttaactctgactcccgattcgtagcattctatgcccggaataaagggttcatcagctctctgtcggatacgggccagcatatccgggtgattaccactcctgccgattgctattttgtgcggatcaccacgtccgttgctatcagtgatacgttccagatggaagcgggcgaggtgtctatggcgtatgaaccctttacctactctttgctgtcagcgatgcccgacgggacgccggttactggcggtggttcccagccggaaatcgtgaccgttcctgattcatacggacttgagcggttacgtgaaactcatatgcggctgaacaaactgacctatggcggaaatgtgcagttttcctgggcgatgattggtgacagttacacacggggccaggtacgttatgcgctgaagtgtgcgcagaagttatggcatctctataacggtactgcgccggtagtctctgtcccacccattggcttcggatatcgctcgttcggttatgaccagttcggcgacaataccgatattatcggcacagaaatcacgcaaacgggttttgcctgtcagtacaacactgggtttggactggatatctcgtcagtctccagcgcaacggttggggcgacaataagctggacggatgatttcagtctgggctttacgtatacgctgtatgcgggcggcgggagcggagttatcagctacaacgcaccggggatgtcagcacccgtggagattgacctttccacttaccccgttgcagtacagatgatcccaatgtcggcaatgccaactgcggggagtggtacagtaacgataacagtaatttcaggcagtgttgtgctgtatggcgtacgcatccagaaggagacgcagccgggtgtcattgtgcacaagcttggtggcagtggttctcatactaacaactgggtgaatgccgatgaaacacgctgggagactgcctttacaaccctgaaagcgaatcttgccaccatcatgttaggaaccaatgaccagggcatcaaacttgctccggagacgtttaaatcaaacctcctgacgatgattaaccgcatccgcacagcgtcgccgaccacggacattatgctaatttgtccggcagagaataaccgtccgggcggtaacgccatccctatgtccagttatgccaggaagatgtacgaactggcgcttgaacaggatgtggcgtttttgaacctgcaaagctcgtttggcgtaaacccggcagattatgcctatggctccgcacgtccgtggatggtggcagatggattacatcctgacccggatactggaggatatgcgattgctgccgcactaatgaggtcgctgtcactccccatggtttag

SEQ ID NO: 110007 - DNA, 822 bp, Enterobacter aerogenes
atgcgtttagcttctaaatttggacatactcactctattcggctggaccgtcctttaacaaatgaagaattgtttacagtagtaccatcaatattctctgaagaaaaacatacttcacgtagtgaacgttatacttatattccgactatcacgcttcttaataagttgagagaagaagggtttcaaccttactttgcttgccagtctaaagtcagaaatgatgataaacgcggtcacactaaacacatggtgcgtttacggcgtgagggtaacaaccagggtaaagaagtaccggaaattattcttcttaactcacatgatggttcttctagttatcagatgatcccaggtatttttcgtttcgtttgtactaatggtctggtttgtggcgattcttttggtgaaattagagtgcctcataaaggtgatgtagtagggcaggtaatcgaaggggcatatgaggtagtcggtatttttgacaaagtggaggaaagtgttgatgccatgaagtctatacaactgacaaaagaagaacaaagattgttcggtcaggctgcattaacctataagtatgatgacgagcagaaggcaccagtaagtattgaacagattattcatccaagacgatatgaagataaaaaagaggatctgtggactacttatcaacgtgtccaggaaaatattataaaaggtggactgcctggtataacggaaaaaagaaagcgtacaacaacacgggcagtcaaagggatagatgcagatgttaagctaaataaggcattatggttgatagcggagcagttccgcacatataaaaattag

SEQ ID NO: 110008 - DNA, 318 bp, Enterobacter aerogenes
atgcacattaaacgaactgtaaccacccgcgaacaagttaattttaatgggatagttcgagagagaacagctacccatatagcagttgatgcacatggttatgtaacactttgcaccagtggccataatataaaacgtgacgataataatgaaattattgctgacttcgttattcttaatgagaatcagtttcctgtaacctgcaaagcctgtttcattctctggcatgctgttagcacgtttaacattagtgatttcatgccagaagaagaaagaagcgatttcaaggatacagaactaattaaagtgaagttatga

SEQ ID NO: 110009 - DNA, 483 bp, Enterobacter aerogenes
atggtctcaaaaattgcgggggcagcccttcttctggcgatcatgtccaattatgcactggctgattgttttgatagagccggatcttactacagtattgatcccgattacttacgtgcaatctcctggcaagaatctcgcttcaataacgctgctatcaatgggaaaagtgcaggaggtacgaccgactactgtatgatgcaaatcaatagtagaacccttgcggatttacgaagagaatatccttccctcaacaaggataagctctactcaagtccgtgcttgtgtattcatgttggtgctatgcttttgcggcgtaattttaacaaatatggtttaagctggcttgcggtaggtatgtataacgcagggatgagcaacaagcagacctctgtacagaaccgatataattatgcaatgcttataaatgatcactataaaaaaattaaagcaggtatcattcagcggccacatattgaatga

SEQ ID NO: 110010 - DNA, 402 bp, Enterobacter aerogenes
atggcagatgaacttaaaacccgcacaaatagagtaaacctgacaattccatattctgaactggaggtaattgaccgtcatgtttcagcgaaactcgaagatggtgaaagccgtgatactgcgaacagatctgcatttgtaatggaaatgtacagactcggtttacgagtctatgaaagccgtaagaaaaaaggtgacggtgaagtttcgttgaatgatcaactaaagttcatttgcagaaatttactcattacctcttttctgacggaagctgtataccatattgaaaaagaaacagtagacaagagcaaggttgttaaaagtgaattgtatattgatgatgaattcttaacgatgatcaatgaacgggtggaaggtaagataagtaaaatgttcaaatag

SEQ ID NO: 110011 - DNA, 1719 bp, Enterobacter aerogenes
atgaaactcaaaaaaaagatatgcatccaatatcttatagcacttactctgctaacaggttctttttcctggatgtacaataaatacttttccactgagcacaatatcagttcggctggcccccaggaaaactacgcctggactatagcaaaatttgccatacgtcttgctgaatttgaggccagaactgagcgccagttgcgattaacctcgctcagtaacagtgatatgaagatggaactggattttttattttccggttccaatgtattgatgacaaaaggtgatgccacccaatatctttacaaagaacagggttacgatgcaacgattgcatctatacatcagatgcttgaagttattgataatgagatgaaaaaaaccaagccaaattacaacataattctttccacggttaataaaattaaagataaaaacacagatcttatcttcatagccgatcacgcggaggtcaatcaacggactgcaatttttgaagactaccttaaaaaaggtgactcttttaaaatcccgataattgttacgtatatattgttacttattatgcttatcatttctttcagacagctgacaacactcaatcgactgcttgaatctgaaaagaaagcattcaataacaaaaacgctttccttggtaaattggggcatgaacttagaacaacactacaggctattgttggctcgatagagtcaattatatactcgccacaaaaagcccccgatcaaaatacattgcacagacttgagaatgcagtttctcaaatagaacgccaaatgaatgaccttgctgagtatgctaaaattgacaacggggcactcaaaataaacaaatcaactatcaacgttgctgatttagttacaaaggttgttaacgattgcaacgccaagtacaccaataaaaatatagatgcatcggttgttaaccttccctctgtcaacattaatacagatggtatacgtctttctcagattctggaaaacttgctaacgaatgcatttaaatatacagaacaaggttcaattaccgttgatgtttcaaccaatcagtcgcatcacagctcataccttcatattaaaatttcagacacaggaataggtatagataaagaaaaacaaaaaataatttttcaaccatttgtaagaatcgaaaatggtacctctcttattccaggatctggaatggggttggctattgttgagggtatagtcaaagcgatggatggcaaaatcagtgtcatcagtgaaccaggtaagggaagtatatttacagtttcaatacccgttgaaattaatagcaacgatagtatgacaaattcctctccattgaacgtcatggagacttctttgaagggactgtctgttttacacatagatgatagcgaattaacatgcagaacaatggcctcaactttaaggagtgttggctatagagcagagtcaaccagctctgttaacagagcaattgaaaaacttatgcgtattccttatgacattatactatgtgacttacaaatgcctgtcatgactggtgacgagttggtagactacattcgtactcgtgaaggtcctaatagaaatacacctgtaattttcatcagcgcttaccctgacaactacttacacgcagagataccgcttattgttaagccagctagaatagctgatataaataaggagatatcaaaagccataagataa

SEQ ID NO: 110012 - DNA, 504 bp, Enterobacter aerogenes
atgaaaaaatttaaattaactcatttgattggaatggttctgcttttttggtccgcttcgccagctgttcaggcggtacagcctgattacaaatacggcgatcttcgtgttactgaccaaaatacacacagagaggttatcatcgacaaagcgacttttgataccctccctgtctcagaaattgttacatcaacaccatggcaaaaaaagtcgacattttcaggagttagcttcagcgacatactcaagtatgcaggcatgaatggttctcgtcttaaagtgcatgccctgaacgactactgggtagaaatcccgatgagtgatgtagttaactacaacatactactggccagtaaaattgatggtaaagcctttagcattcgtgattttggtccttactttgtcatctacccggttgacgaaagacgagaagaactaaacagcccggtaaagttcagtaagtttgtttggcaagttgacagcattacggtggttgacaaatga

SEQ ID NO: 110013 - DNA, 996 bp, Enterobacter aerogenes
atgaaaactgaacttgtagaaaacagtggaagtcttcttgaaaatcatacacatatcacttcttcattcgatctttcaaaaggatcaaatgatggagtgataaccaaactcgcattagataatgtgctaaaccattctataaagggattcaggaaaaattatctaaatgagaagaacctcaatgttatcaatggaatgggagttacacttggtgattctataattggaataaatgctctggattgcataaaaaagattaataaaaatatacagattacgcttgtacgaccagccacctgccactcttacgtagaagagatatatagtattgccagcaatcttatcgatagattggaatatatgccatatgatataaagcgcctaagacgcgatgcggtaaacattgatatcggaaatcaactatactggcacgattttaacaaccttgaaatgcatgactttttcttgaaaaatcttggcgttgactttgaatctattcctgacaactggaagtgtaattactggttaaaggacagccttcccaaagacgcaaacaataaaaatcaatatgtgctcttctgtccgaaagcaagtactagtttgcgctctattccagaaaggtttcattatcaaattattgataacttatatacatcttttgatttacctgtgcatggatttagtcccattacacatccgatgtacaaggacattagtaagatgtgttcaaatacagctgattttataaaagcaatagctcatgctcaacatgtttatacatgtgattcctctgccttacatgttgcgtctggttacgatattcccaccacctgtatatttacagcaataaatcccgttcttagaagcaggtattataaaaactgtaaatctatctatataggtgatgaaattactcagaatctgcatgagtcggaagaccctgcaattattgagcatgtagtttcacgatttgaggctttttatgaaaaaatttaa

SEQ ID NO: 110014 - DNA, 846 bp, Enterobacter aerogenes
atgagtacatctaaatcgacaccaattgaacttaagattagtgagatgttaagcaacatcatgaatgaaaggggtatttcaaagaataaacatactactcatatagctaatgtactcggtataaccatcactcacgcaaaccgtaaaatgaaaggctttgcgtcatgggaaaactcacagctggaaaaagtcgctaagtcattaggtgtaagccttagtgatttatttaaaatggttgaggacagctatgaggagaaacacgcaggaaaatatattttcaacaaggaagaattagagggagagataacctttagtcccgacacagaaagaacatattctgcagttaaaattaacgatcaatggcatatatttaaaacagatgatattgaaggcaacgacatttatgaagaatcgcggcagggtgttttaagattttccattgagagttcagtaagagacaagtctaagccacgtatcgctctgctagatgacgataaggagattctgacaacaactgctgaactactgaagaaaggtccatataaaattgacaccttcaccagtagtgaagatctgatagcaagaattcaatcaagcccatacgatggatatatactggactgggtcgtgaatgataaatcggcatatgatgtttgtaaaaaaattcgcgaatcaaaaaaaccacatgcaatgattatcatcttaacaggacaaacaggagattttatagatcaggaaattgcagaagcgtttaatgacttcgacatcttaggcttttataacaaacctttgcgcatcgctactattcaggtcaatatagacaaatattttagaaaccgaacatga

SEQ ID NO: 110015 - DNA, 249 bp, Enterobacter aerogenes
atgttttctagtacctacagcgaacatacttacaagtggttgaaaatgagagacaaagaaccggaatccgaacatgattttcaaaaggcccacattaatgtgcagcttccggcagaagagaaccgcctgcttacccttgctgccaagcgctctggccgaactaaacggcaagagctgcttatcaggttgtccgatcaccttaaaaatttcgaggacattgctgctgaaggcaaacgttttaacaattag

SEQ ID NO: 110016 - DNA, 306 bp, Enterobacter aerogenes
atgaacggaaagattcgcacgttctttaataacccgcgcaatttgggtgcggtagctatggcagtaatgtttgttgcgcttatgatgacgccatcattacacgcgcacgcagtggatttgttcaaaaacggtaaaaccaccgtcaaagatacctttggtggtagttcaacggtgatctggattttgtacgtcatcgaaatcctgagtgctcttttcacctacaccaaaactaaaaacctggccgttttctgcggtatcgcggcagtgatggtattcgttaacgtagtcttcggcctgattccgtaa

SEQ ID NO: 110017 - DNA, 297 bp, Enterobacter aerogenes
atggaacaacgtaaccgatataagtttcccggtacgttttccgatcagaagcgctacgtggggctgccactggatgagctggttatttatttgccagttgcgttgttagcgatcttcgttaacatgtggatattcagccccacacttgctgcagctgttatcgggattcgattactgaaaaaaggcaagggttcatcctttcttcttaaccttgcctactggttccttccaactacactgatgcgcttttttatatcagttcttccggaaagttataaacgtcactggattgcctga

SEQ ID NO: 110018 - DNA, 576 bp, Enterobacter aerogenes
atggaatacagattaaaagcatccaataaccgcaacgtggctattggcatagtgatatgccttgtaattgctattcttgctttgggggtgtgttttcggcttattaaaatcaaccagcaactgactgaagatttagttaataaccgacaagttattatccagccactgggggcaaataaggaattttcatttagtggggctaaaggggatgctcgctaccttcggttaatcgcgttgagctttctcaatttaagactgaatgtcagtaaagaaacagtacaggctaaccatgatctccttcttgcctatgcctgtgaaggacaacgtaaagtcatgttacccgccctggcagatgagaagaaacgtatcacgttaacggagggaagttcagtcttttacccacaggttctacgtgtggccgctgatactgggcttgtagatattaccggggacctggtattcacttatggtatgaaatcagcggacccactaccaaagcactaccagatacgaatggacacccgtaatgatggactttgttataacgcctttgtggaggtacccgttgaaaattaa

SEQ ID NO: 110019 - DNA, 759 bp, Enterobacter aerogenes
atgatggactttgttataacgcctttgtggaggtacccgttgaaaattaaactggcattgcttatatcggcatctctcatgtccggatatgcttttgctgattcggtcaccgttaattccttcgccaccatttctactggggtgagcaacaataatcccaacagtattactgtacccgatgatcgaatcacgtccctgcagtcaacgcagggagtgctaacagcacgtgaggcaacagcaaacggaagtgttgtgttttcaaccttggcaacgaaacctttcacgatgtttgtacagacggaatccggctttagttttacggttaacgcaaccccacgtaagcaacagggcatgtcgctggtcgtgaacaataaagaggtaaaagggactgaagatgctacgacctgggaaggatcacaaaatacttatagtgctcttataactggtctcatttctcgatttatcaataacgataaaccccaaggattcgtatttagtaagaatactgacgttcagttatcaccttcagtacaaagttattttaacgttcgcccggtaacagcatggcgaggcgataaattgaggattatcagactagagctgacatctcgttcttcttcccggcttgagctgaatgaaagatggttctggcaagccggtgtaatggcggtgtctttctggccacggctggatgcgatttcacctggaggtaaggtctcagccattattctcttgcgtgagaatggagggcaacaatga

SEQ ID NO: 110020 - DNA, 1332 bp, Enterobacter aerogenes
atgaatattaataaacagatcctgaataaacaaaggaaactgcttattattattgtcggcgcaatagcgctggctgttaccgctttatgggcgatcaataaaaaagcatctacagcaaataccaaagagtccgaagcattaaagtcggacattcccgaaccggaaccagacttaaccggtgctgtgaccaataccttcaatactgcagttgatggtaatgtcattctcgatgctcagatgcaacaacaggaagcagccaaaactttaaacgctgttcaggatcagcttaaggagcttaaacagaaccttagtgatatgagtagtgaaaatgctgaactaaagcagcagctgacggctatgcaacaaaaagtggcagagcagtccgcggcaccggcgccacaaagcggaatgagcactggtcagtatcagcctcccaggacagaataccgtcttaatgcacccagtgtgaaaaccggtcaggttgacaacgctacttttgattacacgaaagttgatcagcggaagaaaaaggcgacggacagtttctacgtacctaccggtactttttctaatgctattgtggttgaaggtgcagatgccagcgcgtcagttcgtgggtccgaaaatctggttcctatgcagttcaaactcactggccttgctcatatgccagggaatcagcgtctggataaactggctaactgttttgtgactgcggccgtatatggggacatttcaagcgagcgagcattacctcagttacaaagactttcctgcattattaatgggaaacatatcgaccaggaagtaaaagggcatgttgctttttacggaaagaacggtatcaaaggtgtacctgttatgcgtaacggtaaaatccttggcctggcgtttgccgctggagctctatctggtcttggccagagtgtctcacaggtcggtcagacggttgcaggcgtcggggcgacaaccagtatatctggaggtgatgtagcgcgcagctctattggaggcggtgtcagttcggcatctaataaactggctgattactacattgagcgatccgaacaataccacccaattatacctattggcgccggtaacagagttgaggttgtgtttatcgagggatttaaagctgaaactctggaagataaagaaatcgcagaatcccagaaggagtctccgcaaactactactgataatgctgataacaaattgatgaatgccacagggaacagtgggttaccgcctgagttactcggaaaacttggtgatgctgatcatcttaaattgggagatttcgtcaccccttcatcatcagcaaattga

SEQ ID NO: 110021 - DNA, 390 bp, Enterobacter aerogenes
atgaagatgagcgaaacattgcttaaatggttagatgctatttatcttttagtttactggttaattatggctctaattgttacgtttttacggtctgacggcattttagaaatgtcaactgagacatatacaacgctgatgatagggatgccgtttagtgctgtctgctctctctatttgatccctgactcttctgaaaaattacccattattacagcaagtttgcttttagctgcaatagtgtttggatgtgcttatgttttgtttttgataattagattatttacaagcgacttaacgctgactgacactacaggtaatgcttttgtcgtatatattcttctttgtatgtgtgtcattccggcgtttcaagttcaaaaaaccagataa

SEQ ID NO: 110022 - DNA, 531 bp, Enterobacter aerogenes
atgaaaaccaggaaaatagctgtcgcaatgatgactgtattgttaagcggctgtgccggtatgaattcggagtttgaatttgataagcccgctaaagatagtgggatatggatggctgaagctgatgacatgacagtttcaaaagtgtcagcaaatggtgacagaaacaaccatatcagcctcgaaggataccgattactgaatacaggaaatatcaggctggatgttcagccagcaatgactcctggctattctggctcggttcccggttatccgattagtgtcactccatcccgtagcgggacagtattcaaacattcagcaagttatactatatccggctttgcgcgaaactcaggagtaaactgcaacgctccacgttgttaccctgaaccatcttctgcattcaggacaccggataaccttgtaagggtctggatagcgccttatgtttcaccagatgataacgcccacatgggagaaattgtttattctgtcgctaaaaaggctgaatggaatggaataatgtag

SEQ ID NO: 110023 - DNA, 2622 bp, Enterobacter aerogenes
atgaaatttgatttatcaaactttaaattcgatcctctgaatgtaattgaaacagtaaacagtattatgggggagcgagacactacaaaagagacacaacaaaaacttgatgatttagattatccacatatcaaagacttgttgccctttgaagattatgacagcgcatcacagttatttatcaataagggttcaataggatttattattgaatctcagcccttaattggtggtaatgaagcgcttgtcaaaagtctggattctttactgcaagataaagtacctcgcggcacaccattgcaggttatcatggtcagtacccgagcgattacggaacagatcaaatcagggctcaaagatttttcatggaaaggataccgggccgatgagtgtaatgatattaccatgcgttattatactcatgcggcgaaagaaggtttcccaaatggtctgggcgaaccgctaacacttagagattaccgattattttttacctggtcgcagaaagtaaaacgcgtaaatgagagcgaaattctgaaagtccgtgatgtccggcgaaatttacttgctgcccttaataccgcggatatccacagccatgtagttggggttgaagaatttctgagtgtcatgagagaaatattgaatcatgacaccgagagaatggattcctggcacgttccttacgatcctgaatcaagtctggctacacagatggtagatagaaccactgcatgggaagtcaaaacaggtcatattcgggtaaaaggtgtcaaccataaacagcagccattctccagcaggatggtcagcatgaacctcgataagaaccctgcgattcactatctctggcagaatggtaatatcgtgacagatctgcttaacccttccaaagggatacattgtccctttgttttcactatgcttctcattacggaagaacagatgaaaagccagggggaagcaaacaacaaatttctggctctcgatagtcgtgtcaatacctcatatgcgaagtacatacctgctaccaggcgccagcatgctgaatggcaagaggcgcgtgatgccttgttgtctaatgaagaagcgattaccagttatttttatgggatcacttttttctgtgcagatgatgatgatgtgatggcgcaggagacagaacgaacaaagaatgcgtttgaacaacaggggctgaaggtagttcgcgcagatttcatgcaaatacgtaatatccttgctgctattccctttactgcgactaacgacaagctatggaaagattttaagcgtactggtgctgttcaacgtggctacagctttaatgcggctaacctgatgccaataattgctgacaataaattaagcccttcagggattttgttaccgagttaccgtaatcagatagcttttctagatgtttatgataagaacttacctaatacaaactttaactggtttatgggtgcaacatcgggcgccggtaagtctgtattatctcagtcaatctgtcgttcagtacttgatatgggcggtcgggtaagcattaccgatattggtgattcctataaaaaatactgtaaaagtgccggtgggatttacattaacggggaaaacctccgttttaacccttttgctaatgtaactgacataagtcaggctgcagaacgtatccgtgatcagttatgtattcttgccagtccgaatggacttctggatgatgtacatgaatcccttattctggaggcaataactgaatcttggcctcattatgagcaggatatgaggattgatcatgtcgttgattatatgaaggtcaagcaaactgaaatttctaaaatgcactctgcacaaattggtggaagaatcgatgaaattgtaacgttgttgaataaatatacaactcgtgggctctatggtgaattctttaacagcagtgagccgaccctaagcatggatgagcaattcgtggtgacggagttaggggacttaagaaaaagaggtgatttattatcagcggtactatttaccctcatgatttggaacgaaaatatgatgtatagtacatcgaggaaactccgaaaaatgagtgtcatagatgaaggctggaagttattaggtggttccagtaaaaagatcagggattttattgaggaaggataccgtactgcacgccgccataatggttcatatggcactataactcagtctattcgtgacaaaaatttgagtaccgcttcactggcagcctatgacaacagttcatttaagtttaccgggatgcaggacgctaagtctctatcgacgttaaagcaggaggaacctaatctttataatgaacttgaatggacgttgatagagaaactcccccctgctaaaaaagcgaaattcagtgcttttcttgtcagtgtaggggcttatagtagttttcaccgactgatgctggacccactttcagataaactattttcatcaaaaggtgaagactttgcctacagtgaaaaacgactgcaagagaatgctgacattaaagatattatttttgaaatggtcgagaatgattcggagaacaattttgaaaaacgagattttctcaattatcttcgtgaaatgtccatctaa

SEQ ID NO: 110024 - DNA, 378 bp, Enterobacter aerogenes
atgtcttcgttgataagtgatgtgaaagaatctgagctgataaaatataccctagtgataatcgtttcttgcttgataagcgttatagtttcgtttgtcttatggtctgcatggctaaaaccccctgttattgttagtttcgatattaaatccacaactaataaatttctattgcaaagcgcgaagctgacgttaaacgatgagcaacgtaaggaacttgttcaacgctttaatagagcattaacagatactctggcggactatgccgcagcgaacaatgtcgtcgtcattgttcaacccgcagctgtctcaggcattcaggatgtcacgcctcagatacgaaccgagctttccaaagctatgtcccgtaaccagtaa

SEQ ID NO: 110025 - DNA, 633 bp, Enterobacter aerogenes
atgaagctaaattatgtggccggtcttggcttcctactcctcccattttccgccctcagttctaacctgggaacttacggagacgtatggggtatagctgagacagattttctgacagttgtgcagcagaagctgggcgattacatcaaagagaacggtgaagagaaactgcaggaggaaatgaaagcgcgggtacaggaacacgccatgcggccagcaccggtggaaggcgttcatcgcggcaaggaaacacatgtgaaactgttcgatccggctttcgaagttacgcgtgaccttgctgatcagaacggaactgttttcgcccgtaaagggcaacgtatcagcccgttcgatgttatccccgtatttaatgaaactctctatttcattgacggtgacgataaagaacagctggcctggatgcagcagcagaaaccgcaaactccgatccataaagtgatattgattaacggaaatatcaaagataccgccgatgtactgcactcacgaatctactttgatcagggtggaacgctcatacaaaaattcggcatccgtcaggtgccggcaattgtggaacaggctccgggtgaacagttattgcgtatcactgaagtgggattgaaaggatga

SEQ ID NO: 110026 - DNA, 999 bp, Enterobacter aerogenes
atgaaactgaaaagcactgtaatttctttactgactgccggcctttttgcaacagctggcgccagggcggctgatcctacctgtgacgggcgctgggtcaatcctattaccgatatctgctggaaatgtatgtttcctatgagtatcggcagtgtacaggttgcccgtggtgacttaccggatacgccgaacccgtcatcaccgatccagttctgcccggcacctccgcctatatttgagcgaccggggctggccattggattttgggaaccttttgcaatgacagatgtgacgcgggctcctggctgtatggtcaatatgggcggttttaccattccgatcccctttgctggcactggagccggcactaaaactgcaaatgaccatccgggcacattctataacgtccactggtataaatatcctttggtatcctggttaaacattattacctctgtcgcctgtatgcagggcggtgaatacgatatcgcatatatgtcagagctcgacccaatgtggaaagatgaccagcttgctctgtttaccaacccggaagctctggttttcgctaacccggtcgcacagatggcgtgtgctgctgatgctgtggctgcagaagccggtaagccactcgatccgctcttctggtgtgccggtggccacggcagcatgtatcccttcacaggtaatctggtgaatgaaagctctggtctgaacagtgcagctctcctcagtgaaaggatgaactttaaactccatcgccagggtatgatttttgattcagtgggtgaagatagagctgtctgctacgaatacccgtcagcaatcattccgaagtctcggtaccggtatcaaatggtcaacactattcctgatgccaaccagtgccacccgctgggtcgcagtgtaatgagatggcaaactggtaaagaaatgccgaattccaaaaaaaactatgggtatctgatatggaaaaaaagaaactgtgttgtgctgtaa

SEQ ID NO: 110027 - DNA, 429 bp, Enterobacter aerogenes
atggaaaaaaagaaactgtgttgtgctgtaatattcataatgctgccgctgtttgccagcgccgaaggatcaccatcttatgacgatgtccaaaatgaaaaagcatactttctttcctcatctataccggaaaaaacgctggtagcgttaatgcagtcagcggaaaaaaatcaggttccggtatatttcagagggcttatctctgacagcatggagaaaacagcaaaatacattcaatacttatcctctaaatacggcgtctcaggtgttcagattgatcccgtgcgtttttcggagtatcaaattaataatgtacctgcttacgtggaaaaatgtggagcgaagtttgatgtggtattcgggaacgtatctattaaaaatagtcagatgatgattaagaaaagaggtgattgtaaaacaccatcctaa

SEQ ID NO: 110028 - DNA, 1938 bp, Enterobacter aerogenes
atgaaatctaatgggttaaaaatatccgttgtactcatgacgggatggctactttcttttacggctttggcatccagtatggatcagtcgatgaaagagggtagagatatagcgggttctgcactcagttcaggtgttgaggcaactaaaaattttaaaccggaagatgaatttgaaggatttaattctaaacctccggaatccggatattatcacggcgtcacctccagtggcagcaatattggagataaaggaaacagtgaacttgcaacctctgatttaggtaagctaaccagagagtcatttataaataatcctgcagacaaaattgacagaaactctgatatgattaaaaacagtgattctatcagggataatgctgaagtgattgcagcaggcacttctcagcaatgcgtaaagcaagatatatctaaggttacattcactagtcatagctgctctcaggacaaaagtgtttcggctgtttgcacaaataccggttcaatagatgtacgaacaacaaaggtatggacttcagaaacactgcgacttgaagttaatatgaagaagtcaggaaaaggagtttggaccggtaacgtttccttgcccgagtctggccgctttaagaatgtaaatatttccggttcaactgttgttgttccctataatggacagtgcaagaaagaggccggagttacaaatgaatgccgttccagtatagatgaatcagtaagtctgatggccagaacctttcctgttagtataactaaatatccatcaataacgagtttgtgtagtggtgggcagaatacacactgcaccactacatataacaacggtacaggaagcattaatgccacattttcaataagtgatactttttcgcaggggcaaagtataaccgttgtaaaaaaatctagacttgatgactcttccggaaattcatcattcaaactggtgttgacccttggtattgaagtagagaaaacgtcttatcagccagaaattgtctggaatgaaaactgccctgtcgataaaggtaatgcggtcaaagtccgggaatggtgtagccagcccggtggcaccaggaccgtccagtacaacggccagcctttcaacatgtacagcgattgctggcaacattctgaggaatgggttgtttcctctgcagataccaatacctgcagccagtgggaaaacgatgcgaactgtacggtagggacacgtgcatgtactgcttatatcgggagctattgtgtgaaggaaaatatcagctaccagtgtcagcataccgtgaaaagtgagggatggctgtgtggtgacagcttctactgtgcggatggaaaatgtgccgctatgcaggaaaatcagaatagtgatttcagccaggctgtatctgcgttagccgctatcgccgccgccggcaaagatgttgctgaaatggacccatcgaaagtctcagcgtttaccgggaaaggtatgtcctgccgaaaagctgcagctggcttcagcaactgttgtaaaggcggcggctggggaagcgatgtaggactggcgcactgtaacagtgaggaaaaggcgatcggtaaagctaaggaaaaactactgactatcgatgtcggggagtactgctcacgtaaagtgctgggtatttgtcttcagaaaaaacgcacctattgtgtatttgactcaaaactcgctcgtatcgttcaggagcagggacggggtggacaacttcatatttcctttggcagtgccagtagcccgaattgccgtggcgtaaccgtggcggaaatgcaacatatagactggaaagtgattgactacagtgatttctattccgagctggaagataacatgacgttaccggattcaggttcgctgaccgatcgtatcagagaagaaattcaaagccagatgaatggagtaaatcagtga

SEQ ID NO: 110029 - DNA, 774 bp, Enterobacter aerogenes
gtgattaaatattccaccttagtatttctctgcataccgctattgtgtatggcagatgaaccaaaagaagatggctaccattataaacccgctgttggatggtactggtataaccaacctaaaaagaaagaagaaaagaaacaggagacaaatccggaatcgccatcgcctcccgcatcgtattctgacgtgatgaaagaactacatgcaaaacgtgaagagttactgagtaaagcgattctgacaggaaatgttgaagatgtaattcgatataaacagtttcaggatttccttgttagtaaagtcagtaaattcagttcacgctgggaatcagctttattaagtcatcccgaactggactataacttacagcaccctgtttacaatggtgctgcaccgattgaatatgcagcgcaaagaaaaaaacaggctgaagcaatcaactacattaatcaaaagtatggtgtttttttcttctacaggggtaatgaacccctggataacaaactcgggagtgttgttaaagagttttctcagcagtatggaataccctttattgcagttacagttgatggtcgtgtgaatcctgatctcccggatactcgacaagatcagggccaatcctcccgtatgcaaatcacacattttccggccatctttcttgttgagccggttaagcaaacgtataagcctttatcgtatggttttatcactcaggatgacctggcacgacgtgtccttaatgttgttaccgatttcaaacctatcgattga

SEQ ID NO: 110030 - DNA, 555 bp, Enterobacter aerogenes
atgaaaggaaaatggctttttaaaggcggtgcaatattgttttgtaccattttatcttttttcacctgtgctagtacactcgatgaaattgctaggcttgataataataaaaacgttacaaaaaccttaccagaccgtaatgatacgcagacaaatgtcgttccagaaaacaaaccggtctggctaaaacttgctaacgggaagacaatagatattcagcgctggcagattgtccactttctaagttcacaatgtccatactgccatcagttcaatccggtgttaaaaaaagtcagtgatacaatcggcataaatgtttttgtgtacagcttcgatggtgcaggtgatgccgtattccctactgtattgccaactacgactgatattctgaataacttttttgcagaattaccaaaagttacaccaactgattttatcgttaataaagataccctggtgactattcctctttcccagggggctatcagtgaagaggcgctcgtacagagacttaatgaatcgtttacccttgctgaccatatgggggtgttatga

SEQ ID NO: 110031 - DNA, 1365 bp, Enterobacter aerogenes
atgaagtactccacagcaactgcgctgttaactgccctgatgctcattaccttgcagtcacaggcaggcgtaaatgatgatctgaataaattctttaaccagatgggaggaggaggcgctaatgtctccatgccggcggcgtggaagggccaggctgcaggatatatgacaggtggtaatctgtttttgcggacaccagtaagaaacattcagctgatatctgtcaccctgcctgacgtgaaatctggttgtggtgggatcgacgcttatcttgggtctttttcatttatcaacagcgaccaaatcaaaataatggggaaacaaatactgagcaacggccttggttatgcttttgatctcgggctggaaactgtatgtccgcagtgcaaatcagtaaaagattatcttcagaaactggccacggatgtgaacaatatgaacatctcaacctgccaggcttcgcaggccatagtaggaggtctatggccgaaaacgcaggaggccagcaagaaaatatgtcaggatattggtggcgcccatgatgttttctcggactgggcagcttcccgccagggctgcggcgttggtggtgaaaccgataaggtattcagtaaagctactccggaagaaaagaaacgtatcccacgtaaccgtaaccttacctggtccactttcgaaaaaattaatcagttcattagtaatgaccgcgaactgaaagaacttatcatgtccctggttgggaccgtcatttatgatgataaaggtaatcccacttttctggcgccgcgcggcggcagtgattctattttcgacactttactgaacggtggtacagctaagatttaccactgtaatgataataatgaatgcctgaagcccagtgcttcagagttcacgctaagttcgtcacaaggtatgacaaaccgggtaagaactatgctgcaatctatattcgctaaagggcgtactgatacaaaacttaccgataatgaaaaggcgttaatatccagtacgcgggttaaaatacttcgctatgccattgactcggcctctttaggaatggatgacagtgttctgacgagtctttcagaatatatagctagcgatatggtaatgtcctatataggagggttaatcgaccttgcggaaagttccgcgtccggctcacttaatactgaggacgaaaatacccgtttccgggataatcttctttccgtaagaagtcaacttggccaacgtgtatcacgcatacagatgcaacaaaacgggttaattgaatttgataacaaccttaatcaaatgcgtcagcaactctccagtaatatgtccgacaaagtattatctaattatgattatggtggctaa

SEQ ID NO: 110032 - DNA, 2871 bp, Enterobacter aerogenes
atggggcttgatatatgggtagtcagtagcggtgaaatgatcgcaatgggcttaaacgccgttgccgctctgctgaactctggtggctggagtactgtcctgtggattgcggaaactttaggcatactctgctgtgtggtcatgtacctaaaaacgcatgatctacgtgggatgtttgcatggggcttcacttttgtattggtaactgcgctgctgctgactcctaaggtcagtattatagtgaatgatctcacccgtccggacaggatagaccgggttgataatgtgcccgttggcctcgctgtcccgctttggatgctgacaggtctggaatacaccattgcaacaggatatgaggacttttttcattttccggatgagcgagcatataccaaaacgggaatgttgttcgcctcaaaattacttgaagactcttacaccatggtgggggagaatgcagtactgcaggataacttcaatgaatatattaaaaactgtaccattccggacattcagctcaatcacaaattcacaattaatgatgtaatgcgttctacagatgttgcaacgttaatattcagcaagccgagccccttaagaggaatatattaccagactgaaaacggtgcagactttctgacgtgcgccgatgctgttccacgattaaaagcggcaatggaagcagattcccgacctggcggaggtaccttcctaacccatgcagtcaatatgttgccgggaaataaaagcgcacaggctatctatcccggtatgctggagggatcatataattatttttttaacgcaagtaaatcctcaactaatattatcaagcagaacgtggctatcgcagggctgcgtagagggtttaattcctactctaaatcgatgaatgatactgcgtcactggttgatatagcatctgaatcatcactgatgaagttgcgtttgtcgcattccgtaagttaccggattgcctctgaggtacttcctcaactccacactgtatttatgctgctgtgcatcgctattttcccggtgatgatgctggcactttatatcaaagaggtggcttgggcagtagtgaaaaactatctcaatctgatgggaagcctgatgctctggcctgtcatgtttgcgatctttaattttgcagtgaatttcagcacgcgggtgggttcgtcaggagaacctaccttgtccaacatgaaccgtttaatggagaccatgtcgacgacggccgggattgcaggctggctgatgatgtctatcccgtttatctcgttcaaactgttcacttcactgggtcaaaacattgccagtgccggttcatacctcggtaactccctgggtggagcggcaacggcggattctgctgctgtggcgtcagggaacctcagttacggtaatgtgcaggtggataatatcaacggctttaaacgggatacaaacgtggtgaaccgcgatggtatggtgacgaaccagttaccgaatggcgccatgatcaccgagaccgcgggggggcagacagttgtaaatgtgaccgaggctaactctaaaatggccacggatattaattttgaccatcatttatccagtgctgcgcagaaaatgacacgggaaagccaggcgcaaacgcagaccgctctggaagggtataaccactcagttacacagaatgctgcacagctgaaacagttccatgaacagtttggtaatagtgatgcgaccacacttgctgcgcagaccggtatgtccgtcacggatgcacagaaagttaataaagctctatctctggcacagggttactctgaaaggaatcatatcagtttcgatcagggcttcagtgaactggaaactaaatctaaatctgttgaaggaagagttggggttggggcctccgtgggcgtaagtactgataaatcagcacttggtaaaattgcagagctggccgttggtgccacaggaaaaattgatagtcatactggagtagactggaaaggggcaagtgggagcacatcccaaacatctgaggggggcagtaaccgtcgtgattacgggcatgatgtatcagctcaggatatgcagacctttaacgaagggatggatgtcctgcgaaattacagcgtgacctacaatggcgcccatgtcgataacgccgcttctggtctgcttaatcagatctctgtaggtgtgaataccagtgacagccattaccagcaatacactaccagtctggcgcgcacacacgaatatcagcagatggcttctcagaccgataccatgagtgcccagatgcgtgggaattacaatcaggaatttgtggaatgggttaaaacccgcatgcctacctctgaatggcaaccaattgtggctgataccggtaatcctgaactgcgtgagcgaagggaacaacttgcagaggcatttatggaggataaattacgttcacgcgttgaagggcattatgatcaaagtgctgcacatgttggagataatatatcctcgcctcgtaacgttgccggtgagcagtatggtaatgcatatcgggcaaattcagctgagattgatcagcgtggtcgtgatgccggtattcgccatgatgtgaaacaggatgttaaacgtcatgttgataccactcagaagaatatggatgacactgaagatgtggtgaatatcgacaaaaaccacatgacaaaaggcagggaggtaagcgaaactggttataataatgccaatactgatttcagggaaaagcatgcaggagcaaaaatgcatcaggacacaggttttgacggtaaaaacgtccttaatagcttgacttacaaggactataccaggcagttgggacagaagctgaaagatgaataa

SEQ ID NO: 110033 - DNA, 564 bp, Enterobacter aerogenes
atgcttactcatgaaaagattagactagaaacagagcagattataaagttgcttgcgacatctgacagaccagtaacgtcattcttccatattttaaagcctgggttgactcttatgacgatacccaacttactggcaacggtattgcttatccttgaatggtataatggttatattacttcaggcgtagggccggtggcttacttgggcaatctggttctttcttttttactggctgcaatgctttcaccgtatgcaaactttttctacatgctatctatgagggaggtggaaaaacttgagcttattaaggtgttgcgacagaaaataaaaatctactttattgtcctttctgtattctggatactggccagtattccattggtgatattaggtggcggagtcattgtaatccccatcatggtaatggtgacattcatactcggtatgtttgttttttctttagatatatcaaggtatcagctttcaggtgtatttggcgcactgaagggtgttaaagacgttataacaaacgacggaaatactgatagattaaataattag

SEQ ID NO: 110034 - DNA, 2133 bp, Enterobacter aerogenes
atgagccttaactcccgtgactttacacagggtgggcaggtattgaaatacatgattggcatgtttttgcaaatcatgaatatcgccacctactatatattaatgatttcagcgcttgttttttttggctggttacttattaggatgagcctgcagcaaatttggcatggtacctgttactggctcataagatattgcgttattccactgcgtgaacattcagtaaatcaggagtggagtccctacgttttccactttacgaaagcaactggcgaggtagtggaattctctcgtactgccgtccaggtcatggttgatccatactttatcggtgtagcgatgaagttaaaagatacagccttctgggggtggggatttgcttcatttacctttgttggcggaattctggctgtcacttggtatctgggtgacaaaggaaagaaacaacgaagtgatgaaattcttggtggaagagacctggttgatgatgtagatgtggttaacaaaaaattaaaaaaagaaggtaaatattctccgcttaatttatctggactgcattttccaaaatattcagaaatgcaaaactacgctctacacggtactgtgggtacagggaaaagtaccgcaatgaatgattttctgtctcagatccgagctaagggtgacagggttattatctatgacaaagggaataactttgtgccgatattctaccggcaggacagagatgtgttgcttaatccaatggataaacgctgcgcagcctggaatctttgggatgaatgccagagcgcagtagacttcgagaactttgctacaacactccttccagactcaggtaacggcgatcccttctggctgctttcagcacgtcatttatttgtggaaaccgcccgacgactggcaaaggaaggcgaccgttcgatttataccctgctgaataagttgctctcgattacgcttgcagatctccgtgaatttcttaaaggaacagacgcatcaaacttggttgaaggtagcattgaaaaaaccgcgatgacaattcgaaccgttttaaccagttatgttcgttcactgcggtatttacaagggcttgatgatcaggggaaacgcccctttaatttacgtgactggatagctacggaagatccagagggagataattcatggatttttattagcagcgatggccgtaaccataatgctttaaaaccgcttattacagcatggctttatatgtctatggtaaatatcctcggcctgtcagccagcagggaaagaaggatatggttgttccttgacgaattaccatcccttcataagttaccgaaccttccggagttctgcgcagaagccaggaagtttggtgggtgtacttttgttgctattcagaacttccctcagttaagacaaatatatggtaaggatttcgctgaatccatatgggatttactcaatactcgtttcttttaccgcgccccaagtggaccagtggctgaatttgtcgaaatagaactcggtgagaaacgaattaaaaaattccgtgatcagtactcatatggtgtagacattatacgtgatggtgttcagttctcgaaagatgatgtgcgcgataagctggtttcgtattctgatattcagcgacttaatgacctgcaatgttacgtgaccttaccaggtgattatcccgtcgtaaaactggacctgaaaagaaaagagtatagagatattgctattgggcatataccaagaggtgatgattttcttgatcctgaggtcgaaaagcagcttgaaaacgcttcagaagatttaataggcaatgcatctgttattcttaatcgacttttcagttcatctcgtcaggaaggcgaatctgttttgaatgcggttaatcaaccaaagaatttccgaaataattctcaaggtacgggagcgggaggctcttcagaaaataacgctgaagctgaagggcggggaaataacctgaacgctgaacaagcagtccatgaattacctgaggatattgaccctgttaaaaacgaagcacccgcagaagaaaaattacctgaacgcgctgatgaaactcaaatcaacagacgtattgaaatagggtctgaattggagaggtggtaa

SEQ ID NO: 110035 - DNA, 5175 bp, Enterobacter aerogenes
atgctttccgtttctacggtaaaaagtgcatcaaaagcatccgtttattattttgaagaagacaattattactttcagggcgaacaatccacagcctggtatggagctggcgccgaatctcttggactcgaagggccagtaaagcaagaaatgtttaagcaggttctggagggaaaactgccggacggcagtgatttaactcatatggtaggcaatgaaaataagcatcgaccgggttacgatcttacattttctgcgcctaaatccgcttcaattcttgccctggtatatggcgataaaactgtgctcgatgcgcataaatgggccgttgaacggaccttagacgaagtggaaaaactcgcatcgactcgtacttacagtggtggtgaaactacatttgaacaaactggaaaccttgtaattgcgcagttcttacatgacaccaaccgtaattctgaaccacacatgcatacccacactgtcgtggccaatgcaacgatgaacggaagtggctggaaaacattatcttcggatactaaaagtgggaagggatttaccgatactgtctggaaccaccaggtagccattgggtcaatctatcgtcgattttataaagggaaactggaagctgaaggttatcccattgaggagaagggaccacgtggtgaatgggatattgcaggtgtgcctatcgatgatttatcgacgcgccggcaggaaattatcgaaaaagtgggtgaggatgccagcgccaaagcaaaaagtgtcgccgcgcttgatacccgaaaaacaaaggatttcaccgatatcgaaaacgtcaggaaaggctggcgggaaacaatggaaaaggccggtttcgattatgaacaattcgaaactgaacgtctggaacgtgtcccaggaacatctaaggttcccactttgaccgcgggtagtgaccttcaaaagggaaatgcgccagcagacccccacagagtgaatattacgccgcaaaatgtacccggagtgatgcatccggggtctgatcgccccgaacctcagcctgtcctggaaaagcaagctaaagagaataccctgtcagctattgttgataaggctatcgagcaggtttcaagcaagaatgtcaggtttacatacgacaacgtactgactaacgtgcttaaccagaccgaaattaagaaaggtgtgtaccaggaagcgcgccaggcgcttgatgccgcggtcgagaaggggagtcttatcgcagttgatacaaaacagaccctttttacctcggccatgcatgttcgtgacgaacaaagactatcccaaattgccggccgtatggccgaacaatccgctggacttacggcagatgtcaatgcccgggatatcacggcaaaaattgcagaccgtgatcgtgctctgacgctggtcgatgccaggggtgggggggaatttcagagcaatttattaagccgaatgaaagaactggcgcaaaacagcagtaaaacgccggtactgattgccggtaacgtcaaagataagaaccagtactcagaacaccattcagtgatggccataactgtaaaagaactggccacaaccgaattacctgaaaatacgatgcttatcattcctgaagccgaaaagctaaacgtcccggccatgtatgaagtcctcaaaacagcaaacgccgtcaatgctccgacagttgtcattgatacgcatacccgcagggcgacgggctttgccagtgaagttttgagaggtgcaggcgcaccggtactctcatcttcgccaggaatggaaaagagctccttaacgttagttcagaaagatacagttgacgatcgcctcaaggttgcagccaggtatgtcagccagcagaaggcggccggcattcacgtcgttgcgcaggcgggtaatgaacggtcaagaggacagttaacccgcgagatacgtaatgctcttcaggagaacgggatacttggtgagacggtggcaactatttcaacgctttcaccggtatggcttgatggtgccaaccggaaccttcggagtacatatcagaccggtatggtgcttgaacggtatgagggaaaggaactccaggagacgttgaagatcaccggtatcaatgataaccacaacactctgcgagtagtaaatgaacatggcgaaacgcaggggctcagattaaatgcgatcgacagtcagtatcgcctgtataaacaacgtgaactggagataagagaaggagagcagcttaaagcaacaggtgcatcctcccaaatgaaggccggcgataacttcagagttagtggtgtgcgtgacggtaactggttgttacgcgataaactcgtccttgaaactgctaatggtaaaaccatcaaggttcgcatggatcagccactcaagctcgattatgactatacagaagggcttggcgccagccgtaactccaatggacacgtagtggctgtactcagcagtaaagaagtcacggactcaacagttaaccagctgcgccgcagtggcgaaaatatcattgcttttactccgctcgatgaggccagtataacagctcgcctggagtatgaacggacctctgtcagcgtaactcagggaattaaaaacctctccgggaatgacgatatcacgcttgcgctgcgtgaactccagaacaaccgtctggcccccagagaaagagccgtaagacaggcgattgaacttgtgcagggtacaaacgttacgttttcaagtctaaacgtggtaagtaccgcgcttaaaatggatcgttcattatccccgcttgtcgcccaggccgaacttcagcgtctggagagccgtggtgaaattattgccctggatgccaaccagggacgcttcggtgattatgtgcagcgtgaaaactggcaaaacgaaaagactatcctgggaaatattctgaaaggaataaacgctgtcgatccgctgattgccgatgcccggcaggtaactgaaggtaagggactaactgatggccagcagaaagccgcgaagcttatcctggaatcacgagatcgttttgtcattgtgcaggggtatgccggcgtgggtaaaaccacacagtatcgggtagtggcagcagcagctaatcaggtggagggattagaattgcgcggcctggcacccactcaccgcgccgtgggtgaactgcaggccgccggcatttcgtcgcagaccgtcgccagttttctttcagagcatgcggagcgtcaggcaaacggccagacggcagattacagtcgaacgctgtttgtgattgatgaaagttccatgatcggaaaccgcgatttggcaacattgaccgatataattgaggctggtaatggcagagcggggattagtggggatgaggcccagaagaagcctcttgagtccggtgttccgttttcactgacgttaactcgaagcgcagcggatgtagccattatgaaagaaattgttcgtcagacccctgaactgagacctgctattgaacacatcattgccgggcaggttcaggaagcactgaatgtggctgatttggttagcccttccgttgtaccacgggacaaagatgcgccggttccggagaagagcatcattgatctaaagggcagtggaaaaattgcagcctatgagatcgctactgatttcaccagccgaaccagtgaagcacgggataagaccctgattgttgctgaactgaacagggaccgcatggaaatcaataaaagtgtgcatgacatgctgcaggcgaaagaggaactgggtgacagtgtaacggtaaatcaccttgtccgtgtcagtaactcaatggctgatttaaacctaccgggattctggaaggaaaattataagaataccgttcgtatcggggagcaatatctgactattggccaggttgatccgaaaagcaaccttgtagagcttaaccatccggagacagggagcaaccggtggatctctccgcttgaactccgtgcgtctaacgtagcagtcttcgaaaaaaaagaaatagaggtttctgtcggtgaacgtattcgtttcacggccacagaccatgacagaaaggtgaagtcgaatgacttagccgttgttaccgaaattgataagggaggtaaaatcacgctcgatgccggcggtcgtaaagtcgtcctcaatccccgggagcagcaaaaagaccagcatatcgattatggctatgctgtgactacctatagctctcagggggcatctgtaccctatattattgggctggttggcgttgacggtgccagagagcagatggccaccctggacagcacgtatgttcagatgtcgcgtgccgtcgaacatatacagctatacgcagatgacctcagcaagtgggttaagacggtgaaggagcgttctggagagcgtgaaacggtccatgatgtgatgttgcgtggtgaagatctaaaggccactaacgaacttaatttatggaaacgtagccaacctgtttctgcgacccggctcgctgcaaaaatcgaagacggaatagcagatgccgcacatttccggagtggaaagacgccggagctgctgtatgcggtactgaatgaacatggacgccagaggggcaactggcatgtgccagtttcgccaacgactggcagactcgatgttgagaatgcttactatgctggggcgagtgacggtgtaatggttgtcattcagcagggagatagtgaagggaaaccgatttatacagataacctgccgcaggcgctgtccgagatgacggagcatcctgataaagctgtcattattctcagggataccgacagaaatgaaacgaccgacgtcagcgcagctgaaacgattgatataaaactggaagacgaaattgaaaaagaaaaaattaaagatctgctaaaaatcgacacagaagaaccgctaaaaggtgatgagttaaaagataaaatagagtctgagagagacactaaagagctaaatgatgagaagcttatagagcaaatcaacagggaaattaatgaagaggaaaacaaagagcgacaggagaactatcatgttgagttaatgaatgacgagctaaatattgtccgccatgataaagagaaagattaccagcctgattaccagcccgaaatcatcagagaagtacaaaagacgattgaataa

SEQ ID NO: 110036 - DNA, 591 bp, Enterobacter aerogenes
atgttttaccatattgttcccaaactatttcatttaatggcaaataagtgtacgttagaatcagtatcagtgcctgaattaaaactcacactcgaagcagacgcaataaaaacttgccggccatttcccaataaaaacatatggagtggaatgattaaaggcagaaaaaccgttaatggaatattgataaagagtgataagattttatcggattttacagttcagtatatctggaatattgagggaatgggtctgataaagcataaagtgactacctgggtggaggatcaagagtatgacctggtgtcacaggatatactgcttaatcacgcttttgcaaagtgggagagtcgtacgcacgccagttatcgaactgaggcaccggtatacatacagccaatgatggaatcctatctaaccagaaagcattctagagagtctcatgacgagtggacagaatatgaatgggggaacttcctgaatgaacgagaagagagccttttgcttcataccatccagtcagaaagattatcatcagatttttcagtctttcataaagttccttgtttacatgatgcgttaacgatctaa

SEQ ID NO: 110037 - DNA, 360 bp, Enterobacter aerogenes
atgttaagaaagttctggaaaaagaaaaaggaaatacaaaactatcggcgtatggaagatgttcttatcgaagaaaatagagaattaagtaatattctaagtgtgcttgtaaaaaatagtgggccaggaaggtcaattattgaacttcgagatatagaacgtgctatcaaaaacccagagatagagccaagagagctaacaataagaagaatactatatgttgaaaaatatctaacagacctgttttatgaagcgtataaagttcgagattgggattctgggtttatacagttcaaaagatatttggatgaatatgttcgaaaagatgatggggaattaatggaaagagcaaataattaa

SEQ ID NO: 110038 - DNA, 549 bp, Enterobacter aerogenes
atgaaatcacaattaattacccggaaaatgctggtagggctagtatctctgacattatttaccactcaagtactggcggccgaaacggaaattggtttttcgcctgaaggtagcgcgctacagctggtactcaacaccatcaattcatccacagaaagtatcaggctgatggggtattcgtttacgtcaccagaagtcgccggcgcgctcgtcagagcaaaacagcgtgacgtcgatgtgaaagtggttctggacgggaaagaaaataccggcaagcaacaccaggcgagccaggcggccatgaatcttctggccaatgccggcatcccggttcgcacagtttcgcagttcaaaatcatgcatgacaaagtgatcattgctgacggccgtgatgttgaagtgggttctttcaactacacccgcgctgcagatcgctctaactctgagaatgtgattgtgatccgcggcgacagagccattgcacagcgttatctccagcactgggaaagccgctggcaaatgggaacagactggaaaccaacgtactga

SEQ ID NO: 110039 - DNA, 267 bp, Enterobacter aerogenes
atgtcgcagatagtcaatgcagtaacttcctcaacgaatgcaagacgtggttaccgaaagggcaatccgatgagcgctgttgaacgtcagcagagtcatcttgccagaaagaaagaaacgcataaggaaatgcgggtatacgtcaccagtgaaattaaagatgagtttcgccggatgtgtgaagctcaaggtgtgacacaatcagaaatgattgaaaagcttataaaagatgctgttagtcagcacaagggctttgttaaggattga

SEQ ID NO: 110040 - DNA, 858 bp, Enterobacter aerogenes
gtgactgatctccttcaaaatcactattcacaggtaaaaaacccgaacccggttttcacgccgcgtgaagggaaaaagaccctgccgttctgccgtaagctgatggcgaaagccgaaggcttcacgtcccgttttgatttttccatccatgtggcgtttttgcgttcgctgggtaagcggcacaggatgccaccactgttgcgccggcgtgcaattgacgctcttctgcaggcaatgtgtttccactatgacccgctggccaatcgcgtgcagcgctcgattaccaatatggccatcgagtgtcgtctggccaccgagtccaaaagcggtaacctgtcgatcacccgagccacccgggcgctgaagtttctggccgagctggggctgatcacctatcagacggaatatgacccgcagattggttgtaacatcccgaccgatatcacgttcaccccggccctgttttccgcgctcgacgtttctgaggtggctgtggtggccgcgcgccgcagccgtgtggaatgggaaaataagcagcgcaaaaaacagaaactgaaaccgctggagatggacgaactgatcgcaaaagcgtggcggttcgtgcgtgagcgttttcgcagctaccagtctgaacgcaaaagtcacggccgaaagcgggcaaccgccaggcgggatgcttcacggcagcgtaaggatatcgagacacgcgtgcgtcagcaactgacccgggagtatgccaccggccgcttcaggggcgatcatgaagcgctcaagcgtgaggttgagcgtcgtgtgcaggagcgcatgctgctgtcgcgcgggaacaactacacgcgactggccacagtccccatataa

SEQ ID NO: 110041 - DNA, 324 bp, Enterobacter aerogenes
atgaatgggtatatcgtcacaatcattatcgcattcattttcggtcccattctggcgttaccggtaatgttcttaggtttgtttaatataatggattttgcgctgtattcattccccatatttttcttttgtattatggggtacaggcaagataagaaggttaaggatgcttttaagggattaataccgggcctaattgtatctctgattctgacgacttttgttctgtttgttaaagatcagagcgactgtacgaataaatatgactcaggcagtctgtctgctgctgtgtgtgagagacttgagggaccaggattcagataa

SEQ ID NO: 110042 - DNA, 264 bp, Enterobacter aerogenes
atggatgagaaagaagtgaatttttcactcagctatgagcagctgacccggatagcggaggcgcgtatccgggaatgcgagctggccagccagggcgctaaatacctcagcgaatcgggtaaggccagcgccattctgggattctggtatgaactggccattaccggtgcgccagtgaaaaattacgaacaaaccaaagcactcattgacgccgatcagcagcgcctcagacaactcatctggccggaggcggataagcaatga

SEQ ID NO: 110043 - DNA, 837 bp, Enterobacter aerogenes; identical to SEQ ID NO: 84320

SEQ ID NO: 110044 - DNA, 774 bp, Enterobacter aerogenes; identical to SEQ ID NO: 48585

SEQ ID NO: 110045 - DNA, 186 bp, Enterobacter aerogenes; identical to SEQ ID NO: 48586

SEQ ID NO: 110046 - DNA, 1176 bp, Enterobacter aerogenes; identical to SEQ ID NO: 48587

SEQ ID NO: 110047 - DNA, 1476 bp, Enterobacter aerogenes; identical to SEQ ID NO: 48588

SEQ ID NO: 110048 - DNA, 885 bp, Enterobacter aerogenes; identical to SEQ ID NO: 48589

SEQ ID NO: 110049 - DNA, 543 bp, Enterobacter aerogenes; identical to SEQ ID NO: 84313

SEQ ID NO: 110050 - DNA, 351 bp, Enterobacter aerogenes
gtgaaaaaagagatctcccgcaacccctctttcacaccttcgcctaagctgcgagcacatctgaactcccaccgggaaggggtgactgaacggctgaataatatctttgatcgctatgcgcatctggttcgggtctgtgcccttcctctcgatgacgacgaaacacaggttctgcttaatgtgctgagtggctccgttgtggaacccgcctttattgaatatctggctcaggaaattcgggactcggatgattatctggaagggatacccgcagctaaatcactgtacgaaaagtgtcagtcagcgacctatccgcaattgctggccaccgtcgaacgcctggaacgttaa

SEQ ID NO: 110051 - DNA, 273 bp, Enterobacter aerogenes
atgaacttcacgataaaatcccgtaaaaccggcgaaattttcaatttttacgcacccgacagtggtggctatgttcacctggagtctcagggacactctggtaactcaggtgctcagatttgccgtgggggagggtttatggggagtacgctgtgctgtgacgcttctgaggacgatcttgccagtgttgcccgtaaatggtaccgacagttcgtgagggagcggcgcaaattcttaattttgtcgggccagtattctgaggataaccagtga

SEQ ID NO: 110052 - DNA, 297 bp, Enterobacter aerogenes
atggctatgttcgattcactacctgcttttattcgaatgttctttgtaatgatggtcattgtcgtggggtatggatatcttattgtaagtatgattaccttacgtaggctggatgttgtcctccagttgttgttcctcaccgcactaagtgctcttttctcatttctgacgttcagaacagacagcatgtggactggtgagcctgaaatcttcctggcattactgacgggaatgttcacggcaacggtcttgttttatatggtcaaagtgttagtacgtgccgtagccggcggatga

SEQ ID NO: 110053 - DNA, 372 bp, Enterobacter aerogenes
atgaagtttatggtggtattaatttgtgtgattttagtgctttatggattttacgggcttaccgtgcgtgaatcaatagtgtttacatttttggggttcagcatttcagctatttttgctgcttttgctggaatgtggattatagctatggccgcaacagtgtctttattaggtggttctatgatgaacgcaaggataattgcatgccagttatttgccatagctatgtggatgttaattattgatgttgccggagtgactgaatcaacgcaattgttaggtgtgagcatatataacattggtaatgcttgtctttttgcgatgacggtgctgactgctatctatgtgatttgtctggtgcgtgccgaataa

SEQ ID NO: 110054 - DNA, 192 bp, Enterobacter aerogenes
atgctgtgtgcctggatttttgtggggacaagccgatccgtcgctggagtgaagaacaaaaagctgcagctcgccgacgcaatctggcgaaaagagtatatcgtaccgccccactgtttgctgatgaactcatcgaaagagaactggaggctcggcctgattattttagcggtaaaacagtccgttaaatga

SEQ ID NO: 110055 - DNA, 723 bp, Enterobacter aerogenes
atgatccattcatcccgttcccttgttaccctgcaacctgctcgacaggctgcactgcaggccatcatgactgtggaagatgctcgccagcgcggcgctcgtctgccatcgatgccacatgtgcgaacttttttgcgcctgctgacgggcagcggccgcattaacaacgaagtggcgcgacgcattcccggcttatatcgtgatccaaaggaccgactctcaaacctgaagcaggtggaagaagcgctggatgtattgattgccagcaatggcgagtattgtcctttgccattgtcgcaggatgtgcagtctgaactgttcccggaggtgaggcacgcccgtggagagcggagaactcagcgtcagaacatcgcattcacccgcaaaatgcggcgggaagcgcggaaggttgaacagtcatggctactgcgccagaatttgctcgggcaggctgtcactgagctaaatttccagtcgccggaaacggttaacagctggtaccgccggtggagcgacgagtttgacgcgagtgagcttgaaccggccttctggcgttggcagacgcgatttacatctctcagggatcttcgctggctcctttgtgctcatgcccccttgtatgaggttatgcatgaaatccgtttcatcgttcaggaatcggaagaggccatccttgagagggagcgctggctggtaccaaacaaacttatctgcagaggataa

SEQ ID NO: 110056 - DNA, 432 bp, Enterobacter aerogenes
atgaaaactgtgctgaatcttgatgttctgaaaaccatgtctaccgaagaactggaagactatcgtaacgccggtgaggattttcgtcgtgaactgagccatgcagtcatgcgcgatttaacggtaccggatggctgggcagtaaatgcggaataccgggccgaatttggggggttctttcctgtccagctccggtttagcccgtctcatgaccatttcgatgtagcagtatgtagtccgggtgatctcagtcctgtgtggataatcgtctttattacccgtggaggccagcctttctctgtcgtttgctcgatggccagatataacccggaacggattaaccatgcgctgtcccttatcgcgcgcctcgatgaggacggatattcatttgccagcatcatcaacaccctgaaacaggagggcgaacaatga

SEQ ID NO: 110057 - DNA, 2010 bp, Enterobacter aerogenes
atgtccgtgaccgagtctaaagcaaaaacatctgtcaaaaccagcaaaaaaaacgtcaaacctgccgaagcagcggctctgaaagaggcgcttgaagcagcacagattgaactggtgccgctgtctgcgctgattaaatcgccactgaacgttcgcactatcccgtacccggttgagagtgtccgggaactggctgaatccattgagaccattggtctgattcagaatctggttgtgcatactctcccggaaggtatgtcaggggtggctgcaggtggtcggcgtcttgcagccctgcagttattactcactgaaaaccgcatcgatgccgggtatcaggtgatcgttaagcgggttagtgacgaactcgcggttgtggcctcaatggtggaaaacaaccagcgtgtggccatgcatccggcagaacaaattgccggattccgcaaactctccgaacaagggaaaagcccggcgcagattggtgaccagttggggtatggaagtcgccacgttcagcgcatgctgaaattggctcatctcgccccggaaatcctcgaactgctggcaaacaatacccttgatgtggagcagtgccaggcactgagtctggaaagtgatcaggcgcgtcaggtgcaggtatatgaacaggtgaaagctgcttacagcacggtttcggcacatctcatcaagcgggtaattacagaaacggaaatttccgttacacatcctcgctttgtcttcattggtcgagaaacctacgaagcagcaggtggtgtggttcgtgaagatttatttagccaggaggagaatgacggtactgcagatcgcgtgctcgtagaccgtctggttatggaaaaactggagactgctgcactggcaattgaactgaacgaaggctggtcatggtcaatagggcgggaaaacccactgcagaactatggtgaagatcgtgaaaattaccttctgcttcctgtgccagaaccgcagtacacaccggacgaacagcaacgactcgacgagttgtacgctacacaggcggcaacggaaacctacgaggatgaagccgctattcaggttctgatcgacgaaatagaaagtcaggcggcacaccgtcaatggactgacgaacagaaggcaagctgtggcgtagtagcctgtctccataatggtgagctttgcattttgcgcgggattcagaagaaggttaaaacgcccggggaggcggatgccgctacgcaggcgaccagccgtgacctgcatgtgatcgaccgtaaagagccggatgccgcagaagggatcagtctgcccttactcaaaaaaatgtcttccgaacgcacactggctgttcaggctgccctggtacaacagccacagaaagcagtggccctgatggtctggcggctgtgctcctgcgtatttgaatactgccttaccacccgtcacccctttgtaatgcggatggatgttcatcacagtgggttggtcagcgaagccccgaccggaaaagacggtctggcgtggcaaactcttatgcaggagaaaaaccgtcttgaaggcctgttaccgcaaggctggaagaaggacttttccacatttttcacactggacggtcagaccttgatggctctgatggcgttctgcacggcctgttccgttgatggggttcagacccgtgagcatgggcataccagccgtagcaaccttgatgaggtggagacggcgatcggattcaatttgcgtgactggtggcagcccactgctgaaaacttcctcggcctgctcagtaaaaaccagatagtggaggcgttacaggaagctgggctggattcagtcgccgtcgaagcggcgaagctgaaaaagggagatgcggcgatccttgcagagcgttctctgtcagacacccgctgggtaccaggctggatgcagccacgggatacgaaaaaatcgggttcgacaacgacgcccgataccgatgctgataacgaagacaacacggcttgcgccgcctga

SEQ ID NO: 110058 - DNA, 243 bp, Enterobacter aerogenes
atgacagacaacacgaacacattacttaagtgcctcgccgatggctcgttcacacgcgaacaagccacagcggtggcagaacagtttcagaatgtcaccattgaagacgatcagggtacacatttccggctggttgttcgtcgagacggtgaaatgatttggcgggggtggaattttgaaaaaggggccgcctactggctcaaccgctacatcgaattctatggcatccgtaaaacgaagtaa

SEQ ID NO: 110059 - DNA, 513 bp, Enterobacter aerogenes
atggcaacacgtggcgtcaataaagtcattcttgtcggttatctcggacaagatcccgaagttcgttatctgccttccggtggcgcagtggctaatttcaccctggccacgtcagaaacatggcgtgacaaacaggatggacaaatgcgcgaaaacactgaatggcaccgtgttgttgtgtttggaaaactggccgaagtggccggggaatatctgcgtaaaggtgctcaggtctatatcgaaggtcagttacgtagccgcaagtggactgatcaatctggtctggagaagtacgttacagaagttgtggttaacgttgggggcaccatgcagatgctgggcggccgccgtgaaagtcagcctcaatctgatccgcaaacgccacctcctgccacctccggtgcagcgaaagggaaaggtaaggctgcaggtaaaaaatctaacactgctccgcagcaaccaccttcgcagcctgatccgggtcacgattttgacgatgagatccccttttga

SEQ ID NO: 110060 - DNA, 858 bp, Enterobacter aerogenes
gtgactgatctccttcaaaatcactattcacaggttaaaaacccgaatccggtattcacgccgcgtgaagggaaaaagaccctgccgttctgccgtaagctgatggcgaaagccgaaggcttcacgtcccgttttgatttttccatccatgtggcgtttttgcgttcgctgggtaagcgtcaccggatgccaccactgttgcgccggcgtgcaattgacgctcttctgcaggcaatgtgtttccactacgatccgctggccaatcgcgtgcagcgctcgattaccaatatggccatcgaatgtggactggccaccgagtccaggagcggcaacctgtcgatcacccgagccacccgggcgctgaagttcctggccgagctggggctgatcacctatcagacggaatatgacccacagatcggctgtaatatcccgaccgatatcaccttcaccccggctctgttttccgcgcttgacgtttcagaaatggctgtggtggccgcgcgccgcagccgtgtggaatgggaaaacctgcagcgcaaaaaacagcaactgaaaccgctggagatggacgaactgatcgcaaaagcgtggcggtttgtgcgtgagcattttcgcagctaccaggctgaacgaaaatctcacggccggaagcgggatactgcacggcgggatgcatcacggcagcgtcatgacatcgagacgcgcgtgcgtcagcaactgacccgcgaatacgccaccggccgcttcaggggcgataaagaagcgctgaagcgtgaggttgagcgccgtgtgcaggagcgcatgctgctgtcgcgcggaaacaactacacgcggctggccactgcccccctataa

SEQ ID NO: 110061 - DNA, 234 bp, Enterobacter aerogenes
atgaagaataagaaggtaataactttgataatggccgcagccgcatcatgctcgtcagtctatgccgcgacattaccgaccagtgaggtagacgcatacatacttgcgatgaacaccatgtcacctatcactgcaaagtacaccatccagtacaagcaagcggttgagcagaaatgcaatacagccctgagcgttgagcagctcaactcaaaggcattcaccaatggtgagtag

SEQ ID NO: 110062 - DNA, 531 bp, Enterobacter aerogenes
atgcagctctttcatggcaccagacagcggtttgaaaaatttgacgtttcattcatggggacgggggaggccggtgagatacccgcttgctggtttactgacaattttaaaggtgcgaggcaccacgccctgcgtgtcaatcgcaaccccgggcaggcgcttgtttatcagtgtggtcttaaaccgggggcgattattgccgattacagcaaacccctgacagaacaacctgcagtttatgaccgtttgatcgcgggattacctgtgattattagtagcaacctcagtaccggcagggactggcacctattgaacagcccttattacggcaaccataaaggccgggtgtggtatcaaggaatcagaggcaaggccgacgcaaccattattactcttttcagaaaatgcggcattcatggagttcatgactgggagcttcataatactgatgcgcattatcagggaccaacgattgtgatttttgacactgaggtactagaaattcaggacatcgttgaggttaattactga

SEQ ID NO: 110063 - DNA, 288 bp, Enterobacter aerogenes
atgtccattaaaattaaaactcctaaaatccccactaccactacggacaccccttccgcgcaagaaatggcacgcttcatagctgacggagataaaagaccaaccaaaagtggaaagagtgtatcaagaacgtatcggcttaaccctgtgttcattgacataatggaaaccgatgcggccagaacagggcaaggaaataccgatattttaaaagcggctcttgctgcctggcagcatatggatgaaaacaccaaaaatcattggctactggaagccgcaaagttgtag

SEQ ID NO: 110064 - DNA, 663 bp, Enterobacter aerogenes
atgggtaaaactgcggtttttggttctgataagggtggcgtcggtaaaacgactactgtgacgaacacggcatcgatgttagtcagtaagggacgtactgtaggcattctcaaatcggataagaacaatgatctgttcaactggaatgaaagacgaaaggagaatggacttacccctatcccgatccacgaagcttacggtgatatcagtaaagaaatcaaaaaactggcaccaaggtatgattatctgctggcagactgcgctggtcacgatagtcaggagtttcgtagtgcgcttacggtagctgatatactcattactctcattaaaccctcatcgagttttgagagggatacactgaccgatctgactgaacgcgttcgtaaggtacaaacggttaaccccaaattacagccctgggtattgttcactcgtattgaaaccagtaaagccagcaaggtcaaagatgctatcgagctcgataaagtactccgttctgatcaagtctggatacaaccgctgaaaacacggctatcagcattagatgtatttgagagcgcttgtaatgaaggggcaggggtacacgatctgcagcgaggcccaagcctgggtaaagcaaaaggtcaaatagaactttacgccatcgaggccggattagtatag

SEQ ID NO: 110065 - DNA, 429 bp, Enterobacter aerogenes
atgcagtatatgaatacatgccctgtcctgaatgttgaggagtccgaccgcctgtccttcatgccgtacctgttcggcacggatttcatgctcgcggaattacaggtgtacgctctggccaaaaaatggatgcccggatatgagggcggcttctggcatttcatccgtctgccggagggtggcggctacatgatgccagacagtggccgggtacatctggtcagtggcgaaaactggtttgatcgcacagtcagcgccgacgcggcgggcattattctgaccagcctggcgattaatcgccgtctggccgcccatcatgacagcagtaacccggcactgactcgcctttatatgctgcgtgatgcccagctctggaatcacattacctttcacccggaatgcagtgctatctacgccgcgctggactga

SEQ ID NO: 110066 - DNA, 597 bp, Enterobacter aerogenes
atggactccctgttaacagaaaggattctcatactactggctatgaatttttatattattacagacaacacatacctgtttgcaggggtaaaacatttactctcggacttgccagtttcactacatagagtagcgactaatgatatacattctttggcgtatccaagggatgcaatattattgcttgatggtgctagccataatatatcggttcgtgaatataagcatattaatcaactaaacacacctgtttactttatcctcaatataagaaatgaaattttatctcatcttgcaggcataaatatacttaacgcgtatggaaccgcggaggagctgagaagaagactgattaatattttatgtggagatattccttcacatcatcgtgtttatttaacccgcatggaatccgtcattcttcagctatatgtaaacgggttgtcagctttacagataagtcaggaaattactgtaaagaaaagaaccgtatccactcatctacaaaacattctccataaaaccggtatcaaaaagacataccatttgatgctgttaaaaaacatcctcagttttcacctggcacaataccgttaa

SEQ ID NO: 110067 - DNA, 225 bp, Enterobacter aerogenes
atgcaaccgtggttaaagaagatgttgacaacttgtggtgttcccactgacggggcaaagcatgtacgtcgtaaaataggcggccgtttctgccttggcgctgtcttttttgtcattcctgctatgttactggatctgccattatggggggtgttgcttacccaaatactctatggcttgtctatgtatatcggtatttcgctggcattcgataagaaaaagtag

SEQ ID NO: 110068 - DNA, 555 bp, Enterobacter aerogenes
gtgtaccgcactgatatcatcaaactgtccgacaatcacaccggcatcgagcgtggttccgccgagatcaataatcagtgtggtctcagcgggtccgggcttcaactccgcgagacgggagaacgccgccggcagagattccggcatcaccttcacgtccgttacggtaaatgccctacccttattcagaaccagctcacgcatcaggttttcccgtttgcgtcgaatattctcctcgttccgctggcagtccccgtcataatactcactcagggggagcgtcacggtcaggctcaccggctgaggctcaagtccgctgttcagcagcgcatgatgcacggccagcaggttgagatcaccgtactgatattccacgtttgttgtcgggatggcatcccggctgacgctgtcccaggtatatttcagcgtacccacctgatagttgaacgttgccgcactgaattccgccactttccagccatgccggaaagagttcgcagagactcgtgtctgaagttcatctccttcaaaccatgccagcttaacattagttga

SEQ ID NO: 110069 - DNA, 285 bp, Enterobacter aerogenes
gtgcgcaacattcattcccgtaaccctttcgatgtgatccgcgctgatgtggtgctggctcgtatggaaaaacaggcaagtcgtgggtgtggtttgtactacgagatttatgcgtcccgtctgttgagtatggctatgatttacctggaaaagctgccgctgaaagatcgtccggtattcattggcgcggcggctcaacggggttacatgctgacgctggcggaagaagaacgtgctcatgatgaatgtgccgaccttatgagcgagctggcagctgattactga

SEQ ID NO: 110070 - DNA, 348 bp, Enterobacter aerogenes
atgcacttacacctcaccgaatcctcagcccatccgggaatgctggctacagcagaagcagagcgcgaatactggttgagcctgcagaaagcagcggtaaaagccccctcagaaatcgacgttcacacattccatgacgcgctgggcctgatgtatccgctcaactggtcaacgagtgagaacggcgagtgggaaacgttcatgctgcaggagatggtttgcggtgacgtgacagagatctatgcccgctacggagccagatatttccggctgcgggatgtgtgtaacctgagccatgcgcagatcacaacgcgcattaaggagggatttaacctgaccgaaaaatga

SEQ ID NO: 110071 - DNA, 312 bp, Enterobacter aerogenes
gtgcatgttatatcacgagccccttttgatgaggcggcgagacactatccgaatgatgctgcggccatcgatgacacctatcgagtactaaagcgtgttgtcgcaaaaaaaccggatgagctaaagcgatactttactagtctggatcgcatgaaataccgggaaaaatggtgggttatcgatatcggcggtaataaccttagaatgatgttttttgctgattttgagcgcggaaagatattcgtcaaacacataaccacccatgctgaatatgatcgcttaacgaaatattatcgggagcacaaagaatga

SEQ ID NO: 110072 - DNA, 621 bp, Enterobacter aerogenes
atgcactatttaaagactaactatgaaatgttgataaaagataaaaaaatattggaagttctgagcaacggatatgacgatagcatatttaataatgaaaatactcccgataacagacgggatgctatctatattggagccctagataagcgctttgattttgatgctctcaattatttagcaaatgagtaccctgacgataagtttgatatctatgggccgatagcgcaagagtatcaacaacaagttcagttaatatctaaaaatcgaagcaatgttacttttttcggggcagttgattatcagcatacaccttcattgttgaaaaaacattgtatcggtttattactccttaaaaataatgatctgaataggggaagaagtccaatgaagctatgggagtacatatcatgtggcttggttgttgtatatggtgcagtcgatgttgaagaaaaatataaaaaatcagggccactgtttaagtataatgataatgaggatcttattcaaaaatacaatcttgcaaaagaaagtaatgggaccaactatcaaattgacctacaggaacatagttggtcatataaagtgaataaattgaaaatgttattatccactgaataa

SEQ ID NO: 110073 - DNA, 375 bp, Enterobacter aerogenes
gtgtcacaggtcacccgtgcagctgcaggcgcgctgcgggcggcagacagcgaaaccagcgcgcttattgctgacacggtcatccgcaaccgcaatgatcgtcagtatctgcagcgtgtgatcaacgatgccggtaaaattgacgaggttcggaacaaaataacagaggcaatcacttccctgggggcgcgtgtcaccagtgagctgacggccttcaggaacgttaaccgggtattcctggtcgggggaggggcttccctcatagaagaagctatccgtcaggcctggcctctggctcatgaccgtatcgaggttataggcgatccgcagatggcgctggccagggagattgccctttacaataaagaggactaa

SEQ ID NO: 110074 - DNA, 258 bp, Enterobacter aerogenes
atgaaacttcaagatatacagatagataataccgtaaggagtggccttaattctttcactgatggggtgattattcgtgatacaaatgtattgatcacgctcaatctcccggatggacagaaaaccactattgagggggaatggcggcatatgtcagacgccaacagattgtcagaacgtattacgatgcttcagcatgcgatctatgagcagtatgaggaatacagagcagatattcccgtcagctggtccagataa

SEQ ID NO: 110075 - DNA, 255 bp, Enterobacter aerogenes
atgctttgcggcgtccaggcgggtggcaaggtgttttgcctgctggcgcagctggttaacattgctagagagattagcggcagcagcgcgcgctgcagtggtttgggcttgagcatcttgtacggcctcatcgcgggcgatcaagcgcccctgttcaatcatccgggcggcggtttgcgcgttaacttcctgagccgattcggcgctatcacgttcagcccaccgcttttcccatgcccgatcgctccaggctaa

SEQ ID NO: 110076 - DNA, 429 bp, Enterobacter aerogenes; identical to SEQ ID NO: 95248

SEQ ID NO: 110077 - DNA, 222 bp, Enterobacter aerogenes
atgaacagacaaccgctcgcgccccccgcgcattgcacctttgaaccccaggactggctgcggctggcaaaatgctggcatccggtggcgcgcagcgctgatatcggcccgcaaccggtgaaagccaccctgctggatgaaaaactgattatctatcgcctgcacgaacgagtcgtagtcgcccgcgatgtctgtccccaccgcggggtacggttttcatga

SEQ ID NO: 110078 - DNA, 573 bp, Enterobacter aerogenes; identical to SEQ ID NO: 92629

SEQ ID NO: 110079 - DNA, 300 bp, Enterobacter aerogenes
ttgtttcgtgaccatctggccggcgcggtgatcccttcgctgctggtgctcgcctcgctggatatcggtcatatgatgctccacgtagccgggatgtcattcctcggcctcggcgtcagcgcgccgacggcggaatggggagtgatgatcaacgacgcccgccagtacatctggacgcagccgctgcaaatggtctggcccggactggcgctgtttatcagcgtgatggcttttaatctggtgggcgacgcgctgcgcgatcgtctcgatcctcagctgatcgcggagcataaccactga

SEQ ID NO: 110080 - DNA, 1611 bp, Enterobacter aerogenes
atgattattttcgatgaaaaaagacacttgtacgaggccttattaaggcataattacttccctaaccaaaaaggctctatatccgaaataccaccatgtttcacgtcaagaacattcacaccagaaattgccgagataattaccaatacgccttcagaaaaacgcccactaggatatgattgcgttgagtactcttcaactagatataacaatttccctagggtgttatcattaattcaccctagaccatactcactactggctaagcacttgtataattcttgggaagaaataaaagttattaaagaaaacccgaacagcatgattaagccagaaatgcaccctgatgggcgtatctttatcatgaactatgaagaggccgaaactaaaactctaagagaattaaatgatggatttggaagaagatttaaagttaacactgatatatccggttgttacaacaacatatactcacactcaataccctgggcagtcttagggattaacaccgccaagaattcactaacaaaacgccccaagaatgaagagaaacattggagcgatcaactggattttttgcaaaggcacgcccgcaggaatgagacacatggagttccagttggcccagcgacttcaagcattgtctgtgaaataatcctaagctctgttgataagatattaaatgaaagaggctttgtttttagaaggtacattgatgattatacttgctattgcaaaacacatgaagaagctaggttctttttgcatgtattaggtgttgagctttctaaacttaagctttcattgaatttgcataaaacaaagataactgcgctcccaagcactttaaacgatgattggatttcattgctaaacataaactcaccctcaaagaaatatttccgaaatccagaccttgaccgtttgactttgtctgaggtcatcagtttcttagattatgctgtacaactcaatataaccaatggcaatggaagcattttgaaatttgcaatatcattgataataaacaaaattgatgacttaactatcaatgaaacctatgattatattttgaatttgtgttggcattacccaattttgattccatacttggagacattgcactctaagatagacattgatgataaaatcaaacttaaattaaacgaaattttaaggatgtgcgcagaaaacaaatattccgatgggatggcatggattctatattttttcttaaaatacgatattgcaattgaagaagatattattgataggatattcaccaatggcgactgtctgagcttatgtattttagacaaaattggaacttatgaggaaaaaatccaaaatttaacaaaagacattcttgcgcaagattatctatatgacgttgacaaatactggatattattttaccagcgcttttatgctggcaaaagtgaaaatccatataagaatgacagttgttttaaaataatgaaagactatgatgttaatttcatgccaaataatgatgaactaacaaaagctgaaacttattgtcacttattaaataatccgttccttgaacccggtgatgaagtaatcagttttgagaactatttttcgtaa

SEQ ID NO: 110081 - DNA, 2232 bp, Enterobacter aerogenes
atgaactggtcagacttggaaaatagagtaaaacaattctcaagattaatttacaacagggactcaagctcaataagtataagtgggatgcaattcgattgttttactaagattgaggaagatcactatgtttgcattgaagtaactaaaaatcacacgctcgaaaaggtaaggatggatataaacaaactcatcactttaagaatgagaaaagcctctgaaggtgcatttgtcaaatgcattttgattttagaaagagaacctacagatttaatgaaaggaactgctttcgattccaaaatagagctattgactttggatgaatttgaacgaaaatttttagattacaaaaattatattttcactcgcaaacagaaaaatattggcagcgcaattgacccatggacaggtgaattagacaacaacccctacgtccctgttaaatatgtagaaacaaaaacagacaaagagtttaaaataagtgacattaaatcgcttttagataaaggagcaaaggtaatattgacaggtagttttggttcagggaaaagcaggtgtttaagcgaactttttgacaattattcagagcaacctgatccatcatactgttttgttataaatttaagagaaaactggagcctcaagagagctaatgaaatagttagaaggcattttgaagatttatcgttccctcctgaaatagtaaataactctgtaaaactattaaccttcaaaaaatcagtatttatgcttgatggttttgacgaaattggttctcaaaactggagtaacgaaccaagcaaactaagtaaagctaaacaagatgctttaactggggtgagagatctaataactaatgttcaaggaggattactgataacaggaagagaaaactatttcaatagcgattcagagatgttctcatttctgggcttaaatgagaaagatacgatatatataaaatgtaaagatgcatttagcgaagatgaaatgaaagagtacatgttaaacattggatgcccagatttaattatacccccatgggctccgtggaaacctctcatatttcaaatgatcgcaagtatatcagagagattagcattattatccgaagataatgaatacgagttttgggatagattattagactttatttgccatagagaagcaaatatcaataaagcaattctagattcagccataattaagcaggtattaatagagctagcaaatcttaccaggacaaagaataatgattttggaccaataagcaataatgagcttagtgttatttttaataatataacaggaagaacggttactgatgagtcagcaattatgctatcccggttaccatcttttggacgcgtaggtaatgatagctctgattatcaatttatagatatgtacatgctcgatggtttgagagcagagtatatggtcgcacattatgactccgattcaataataaaaaaatcaaactggataaatccgcttagagaatttggtcaaagattgtttttttataagattgatattaatgaagcaactaaaatagtgagcaaaatatcttattggtcaaactctaactcccaagcagcagctgatttactttgtgcattcctctcagaagaagagagcgacaaattagtcgactttcgcaatattcaaattaaagattgcttcatcgaaaaaatagatttaagtagtattcctttgggtaacttgagtattaattcttgcattatcgaatccatagatattagtgactgttttatcgagcctaaaaatagtttactcattgatgactgcgatataaacattgtatcaggggtatcagatgcttcggcacttcctaattacttcactaactgcaaggttagccaatttagctcagttaacaccacttcaaaaataaaatcgctaggttttggcactcatcaaatggcacttctttcatgcattaggcgagtttatcttcagcatggccgggggagaaaggagcgttccttcattaaaggattcaaaaatcagcaagaaaagaaagcaattacattgatagttgatctgatgctcaaaagtaatgttatcgaaaggattaacggggatgagggatatatttataaacctgtgaattcagaaagacatcggatgaccctaattatgaaagaaatgaacacatctaaagacaaattatggcaggaagtcagcaggttagattctctatattga

SEQ ID NO: 110082 - DNA, 1248 bp, Enterobacter aerogenes
gtgagtaaatataataaagttgacttggcatatgattttttagtttcgagagagaaaaatcaagagtcgtttacgatagaggagttagcagctgctactggatggaaagtccaaacatgcaaaacatacccaaccaagacgtggaataaattcatttctagagatggtcagcaatacactactcttggaataaaatatattagcaaggaagactttcgacacataaattctcagaaacatatggactctattcctcagtcagagcgaagtattaatttaaaaaaagcaagggaatttgcattgcttgcagtttcaatatataataatccttttactgaattcaaaacttttggtttcatagttaatatcattattgcatatacatcactttttcatgcgatcttttctaagaatggtacacaatattgttatctcgaaactgatggaaaaccaaagttggtcgatgggcaagagaaggcttgggagttaaaaaaatgctgccaagaatattggtcaggcattgaatcagcagaaaaagcaaacttgcttttcctcatcggattaaggaatataattgagcatcgagggcttcctgctattgatttattagcatttggggagtgtcagtcagcaattaataattttgagaacattcttataaaggagttcggggaagaaaatgcactgatgattaatttggcgcttgcaatgcagttaaccaggacaagtcagcaagcacaaattgatgctataaagcaatttcaaacagaaaattttaatgtagtaaaaaaattcatggatgattatagaaatgagctttctgatgatatagttcaaagtcagcaatatagattaagagcgttactggtaccattagtcgggaaaaacgccaaacaatcagacttggcaattgaattcataaatgtcaataatctaagtgaggatgaattagaaaagtatgagtctggcatagccttcataaaaaacgttgaaaatcagttcaaattaaagccaacaaaagttgtttcattaattcaaaagaaagaaaaaagcttcaatgttacaactcatactaaattttggaaacattatgaagctaggccaattggaattgacaaaacatttaaagggaaatactgtgggtatattgaaggatttgatggatatctatattgccaggaatgggttcactttattctggatgtctacaaggataaaacagagttaaaaaaagtactcgcgttataa

SEQ ID NO: 110083 - DNA, 2265 bp, Enterobacter aerogenes
atgcctgattccacagtcctggcatggagctggaatgccccacggcgggctattaatccaagcgacgccgaagagcctgcaattgagtatctcaccccaaaaggcgagcgtaaggcacttgcctatagcgatcttgttgatgttgtttatcgggtaccgttgcgccctcgtgatggggaggcgcgcagggctttttatcgcgcaagactggcgcgtcatctgcggcgccgcgtccaggctctccctgcgtttatccgcaagcgcttttcaatgcacctggaaactctggacagtagggaccggaaagaggctgtacgctggttattcaacacgtttgagcgccatgtattgcgtcgtgttgatgcggtaaacgcacaatatctgccgcaaagtaatctgcctgcaattctctttccgctacgtgatgattttcatctgctgccatgggcagataaaaagcgcctgaaacgactggcctataggctcgccaatctgatgaaaagcgagtttatgcgcgagtttgattttcggtacgagaaaacggcagatgtggagttttccacgatctacgcttacggcgctattgccagtaaagcgtcctcactcaatattgcgatccctggctggaaacagtattgcgatgaagcactgacagcagaagatgcattgcgtgttattgccagacttcaaacggaaaagtggtggttaggtaagctccgcaaaatccatgaccgctggcgcgagcacctcctgatcgccactagctacgtcagcaaagtggcatcaccctattgctctgagccttgcctcagggagtggatagctcaaaaaaaaaccaactttgaataccttcaggcgatggagctggaagaccaggacactggcgagcgtacctccttgctcgataaggtcatgggcagcgtttccaacccgaagatcgcccgtcatgaattgatggtgcgcatgcgcggttttgaggatatggctaacgagatgggactggttggcatgttctacacgttgaccgcaccgtcacgttatcacgccacacatgtgcattccggcaagcgcaacgataaatactgcaatgccagcccacgcaaaactcaaaagtacctttgcaacgtctggtcacgtgtacgcgccaaatggggaagggaaggcatccgcacatttggtttccgtgtagccgaaccacatcacgacggaacgccgcactggcacctgctgttatttctccgcccggaagaggtggagcttgccactgaaatttttcatgagtacgccctccaggtggatggaagcgaacccggcgcggctcagtatcgttttactgccaaaccaattgatgaagagtttggatcggcaacgggatacatcgcaaagtacatctcaaaaaatatcgacggttatggaatggatggcgagtttgatcacgagtcaggcaaacccgttaaagagatggcaaagcgcgtgcgggcgtgggcttcacgctggagtattcgccagtttcaacagattggcggcgcgcctgtatccacatggcgcgagctaaggcgcctaggaagtcgtgagcttgtcttgcacccggaacttgaagctgcccgtgctgctgctgatgcgcccgactggccgggatacgtcaacgcccagggcggcccgtttgtaactcgcgattgtttgcgtgttcgtctcaattacgaatacaccgaaaacggcaatgattatggtgacacagtcgccaaaatcagcggcgtctattgtccttttacggtcagtgaatcggtcatttatacccgcaccaacgattacaaaatcgtactgaagcataagccatcgtcggtcgagaatttgaccttagaaggccgtgacgcggccccttggagttctgtcaataactgtacggcgagcgccggggtgtacaaaaaaacaccatcagaaaggattgaacttccgcggaatattgaagatttaagactatattcacgccagcaaagacaggaaatcaccagaaggctaagaaaatacccacgggaaagctcagagcaagccttcgcacgcaatgcgagtgacttacgcatatcgattgatgaggaagctgcgctgacatggaggccaacagtcactgctgtaaaagatatgagcctaaaaccggaagaagcagagcagcactgccgcgagcagttactgattgaaacgaaaaaagggcagaaaactattcgagcgaaacagaataagaaaggcccgcgacctaataatccgtaa

SEQ ID NO: 110084 - DNA, 300 bp, Enterobacter aerogenes
atgtcaaccccagttcatgaaaaaatcaagctcattagggaatccgaaaggctaaacaggaaagaaatcagtcaattaactggcattgcttatggttcattttgtggctatgaagcgggtgataagaaaccaggcgttgaagcgataatgagactgctacaacaccccaaattcatgaaatacacactgtggtttatgaccgatcaggtttcgcctgaagccggtcaaatcgcaccggccctcgcacactttgggcaagacttaacaacctcgcagcactcagaccaaaagactggttaa

SEQ ID NO: 110085 - DNA, 804 bp, Enterobacter aerogenes
atgacaatccctgcatttggtcttggcactttccgtctgcaagacgacgtagtcatcaactctgtaaaaatggcgctggagctgggctatcgtactatcgataccgcacagatctatgaaaacgaagccgctgttggccaggctatcgcggaaagcggcgtgccgcgtgatgaactgttcatcaccaccaaaatctggatcgaaaacctgactaaagacaagctgatcgccagcctgaaagagagcctgcagaagctgcgcaccgattatgttgatctgacgctgattcactggccgtcgccgaacgatgcggttgctgttgaagagtttatggctgcgctgatggaagcgaagaagctgggtctgacccgacagatcggtatctctaacttcactattccactgatggaacgtgcgatcgctgccgttggcgctgaaaatatcgcgaccaaccaggttgaactgtctccgtacctgcagaaccgtaaagtggtcgattgggcgcgtgaacatgggatccacatcacctcttacatgacgctggcctacggtaaggcgctgaaagatgaagtgattgcccgtatcgcggcgaaacataatgcgaccccggcacaggttattctggcgtgggcgatgggagaaggttatgcggttattccatcttccaccaagcgtgaaaatctggcgagcaacctgaaagcgctggatctgaagctggatgatgaagatcgtaaagcgattgccgcgctggattgcaacgaccgtctggtaagcccggaaggtctggcgccgaagtgggattaa

SEQ ID NO: 110086 - DNA, 1560 bp, Enterobacter aerogenes
atgaaagaaacatatccagaagactttttcggaggcagcgtaagcgatattaccgcattgttagggattaatggggcgggaaaaacaacatctttagaattaatctgtagacttataacggaaagttttagagtaagaagtgatttcattattatttacaagaaaaacacacaatattatattgtgaagaggatggaaagtgatttgacttaccctgagtcattaatattacctggagatattaatgacttgaaaaaaattagagttatgtttttctcgaatgtcttcgatgcaaattacattgactttcctgatgaagttgttgatatatctttgaactcaaaaatgaatcctaaaaacattcataaaaatagctttaggagattagaaagcgatcttgaaaagcagattagattcttgaattctcatgcggcaagaaaaataaaattacaaccacctactaaaattgaatatcgaataaataggacggtaaaagaaagcttgcgaggattgagtcggaaaaataactttcgaagctcaaatgatgaggcgagtagtgaattaagttatatttcagagggtttacagcgaatttttttaagagaagttcgtaagattggtcgtgctaatcattttaatttatccattacaattataaaacagcagttcatagccagtttgataaatccagactcaaaagttgattattgcattgctgatatattagaaatagtttcacccttattacgtgatgatgaaacatctactgacgttattctgcaagcgatcttggacgagtcacagtcaagagacagtatttataattacacagaaaatcacattatgagtgagattgttggttatgttttactcaacctggaatctatttttgaatcgttaaattttactcctgattcgtcattaagaaactcaaagataattttttcgttagactattctgaatgtagtaattggcaacatcaaaaactttcgagtatgtttgaagtattttggggttgtaatgcatcctggtccggcttaagttcagggcaaaaggcatatctgaatatattcagtttggtttgggcggcaatctctgaaggtgaacattcgcgcgatgaaatggatagtgttatatgtattgatgaaggagacttatatttgcatccacagtggcaaatcgacttcttgcaaacacttataagaagtcttcctgaaatatccaaaggtaaaattcaaatagtttttactacacactctccactgttagtatcagatgttcccaaacaatgcttgttaatacttaatggtaacaactcacagttgaatatgctagaagatattaatacgtttggagcgaatttttatgatatttactcaaaggcttttggtcttaagggggtgcgcagcgcatcaatctcaaactcttatatttcagaaatactgcatatacttgacaaagaaactttaacaaaacgcgatattaaaaaattgaatgaatcattagggttaattggtgatgagttggtcttgcatcatattctgaaaaggctttcttaa

SEQ ID NO: 110087 - DNA, 1059 bp, Enterobacter aerogenes
atgattagcatacagaatcatattaaagggcatggaaaaatacctgatttactcattgaagagtctttggagaaattgtggttttttctgaatcaagtagatgaaaaaggtcttttcaaaaaaagctcattaataatgagagtgagatctttaaaaaaacacgtcataactgaccaatataaaaatgataaccaagaaagtttttctagacatttttcattaatgaattatttagatgatgaggtcgttttaaaaagaatagtattttctaaacctgaggtttttaaatcaattaagtctgacattaataagcacgtgaatgatagtgatttattcacaaaaacaaagaactcttttgtaaagacaaatttttgcaagttattactttctcgagtgtttaattacgaatcatatagaagtagcgctgctctctatgatatatacgaaaacatgttttttgataaagctacttgtgtatattgtaatgctgattctgctttaattatcagtcagaaggatggagggttaaataataaacaggctttattcgaattggatcatttttatccgaaagctaagtatccttatttagctttgtctttttacaatcatataccatcatgttctaattgtaatggaaagttgaagcgttcacgggatttcactgtcgaaactcatatacatccgtatgttcgttgtttcgatgatgagtacgatttcgttccaaatatggatgtttttaccggaggaccactgaattttgttaagatgagaattaaaaacggtcaaactgattcattagttaaagatttaaaacttgaatcaagatattcaaagcttttatctgtgtcttctgctaatgtatttattgaaatattgcataagtatgaagatataattagagacggctcagcagatcctaggtatgaagatatgttgctcgatttaattaagagtcatgtatctcttgaacaaaatgatgttttaaagagaagttacagtaagcttaagttagacttgctacgagcctttgacatcaattcaagaatagtaaaatga

SEQ ID NO: 110088 - DNA, 357 bp, Enterobacter aerogenes
atgaacaatcactcagaatccggtagcaagccggagaatcccgtctgcccgcagtggggacttaaacgctctattacaccttgttttggtgcccgtctggtacaggaggggaaccggctgcattttctcgctgaccgggccgggtttaacggtgctttcagtaacaacgatgcattgcgccttaaccaggcatttccgttgatgctcaaacaactggagttgatgctttttagcggcaagctcaatccccgctatcagcactgcgtcacgctttatcacaacggactcacctgcgaagccgatacgcttggtagttgtggctacgtatacattgctgtttatcccactcaactttaa

SEQ ID NO: 110089 - DNA, 546 bp, Enterobacter aerogenes
atgaataccgttttatccctggtatcatcacaatccgaactcttcccatttacggcgctacctaaagcgactgctgaattactcccgatgacgaccggcatgacgccctatgcccaacggaccatccgccgcgctatcaacctgctggataaatatttgcgccagcctggtatagcctttacctcaagcactgctgcccgtgactggcttcggttactgctggcgggacaagaacgggaagtgttcatggtgctttatctcgataaccagcactgtttactggagagcgaaacgctgtttgccggttcggttaaccaggttcaggttcatccgcgtgaggtggtgaagtcagcgcttcgcttcaatgctgcagctgtcgtactggcgcataaccatccctctggcgatccggagcccagcaaagccgatcgccagttgactgacaggctaaaggaggtgctgggactggttgatgtaaaaacgctcgatcacctggttgtcggtcaggatgacattgtgtcgtttgcggagcgagggtggatatga

SEQ ID NO: 110090 - DNA, 438 bp, Enterobacter aerogenes
atgaccgacaccacaactgaacccaccatttccgccactgttgttgccgacgagcagcgtatccacttctggccgcagtactttggcagcatcccgcaatggataatgcttgagccccaaatcttcgcctggatggaccgtctgtgtaccaattatcacgggggcatctggaccttttacacgcttaataacgggggcgcttttatggccccggaggctgacgaggacatcgaagataaatggacgctgtttaacagcatgaacggtaacgaggctgaactcacctgcgaagctgcaggggtagtcgcatgtctgatggcatacagccaccatgcctgccgtaccgaatgtgacgcgatgactgagcactattatcgcttacgcgactacgcgctgaaccatccagaatgcagcgccattatgcatctcatcgactga

SEQ ID NO: 110091 - DNA, 264 bp, Enterobacter aerogenes
atgaccgcgcagaaagaaaagggccagagcctgcttccggccggaccttttacccgccaggaagcggagtgcgtcaccgcggcataccggaacatcttcatcgaggatgaacagggaagccattttcggctggtcctgcgtgatgcggatggtcggatgctgtggcgggcctggaactttgaaccggaggccgggaccgggcttaatgtgtacatccgggactacggcatcctgcagggccctctcagccgcctgccttattaa

SEQ ID NO: 110092 - DNA, 276 bp, Enterobacter aerogenes
atggcgaaagcggcactgatttaccgttttggggaagagcatcagccggtcacggagtcacaaattcttgcgccacgtcgctggcaggatgagagcaatgacctgtggaccacgtatcagcgcattcaggaaaacctgattaaaggcggtctgtccagtagaacgagcaaaggcaaacgggcccatacccgcgcagtgaaaggcatcgatggggatgtgaagctcaatcgtgccctttgggtcatggctgaaaacatgctggagctcgcatcatga

SEQ ID NO: 110093 - DNA, 537 bp, Enterobacter aerogenes
atgaaattagccagtcgttttggcgcggtgaacctcgttcgccgtgaccgcccgctcacccacgaggagctggcgcactatgtgccgagcgtgttcagtgaagacaagcatgaatcccgctcagaacgttattcatatattccgaccatcaccctgcttgaaaacctgcagcgtgaagggttccagcccttctttgcctgtcagacccgcgtgcgggaccccggcaaacgtgaacacactaaacacatgctgcgcctgcgccgtgaagggcaaatcaccggtaagcaggtaccggaaattatcctgctgaacagtcatgatgggtccagttcctatcagatgctgccggggctgtttcgtgctgtttgtcagaatgggctgatatgcggggagagttttggagaagtacgtgtgccgcataaaggcaacgtggtggagaaagtcattgaaggggcttatgaagtgctggggatatttgaccgggtggaggagaggcgcgatgccatgcattcactcctgttaccgccacctgcttag

SEQ ID NO: 110094 - DNA, 705 bp, Enterobacter aerogenes
atgtatgttaatttacataacttgtatgttttaaaaatgaacagctactactcagctcgccaagccaaaagcatcggtaaatcctttacgacattattccagaatatttctgctgacggctcggtcaaggccctaaaattctcttttgtgataacacctctggatggaaaggccgcttatcctgacgacagaggtgctgaacatgcaaagaaggttcatcttgcactaaagctctttttgaaccacatgcgggtgcttaaatacgggaagtgtgttgccgggtattcatggttaatgtgcaacgaaaagcgcgcaaatcgaccctatatttatatgctgttttacataaccgggagcactagtgccgataaagttgcggaatgcctgcgcgatttatggatacgttcggttgaaaaggcgagcctgaaagaaggctggtacggttacccggtggtgttcaactataatcttgaattgggcaacaaggttttttgcaagggtaatcatgcactactggatggtaatgtcgagtgtcagagcggatcattcattttcgatgacctttgtggcggtacggctaattttaaaattagctcggataatccgaaattgttcctgagttacttgggttcactcagattgagcatgcgctcaatttccggtgtgagagcatggggctgctcgcagctaaaagataaaaactaa

SEQ ID NO: 110095 - DNA, 588 bp, Enterobacter aerogenes
atgtcataccgcgacattaacgatatcaatcttagctatgttcagcacccgaccctgaaccgaaagctgcgacgtcatcaggatcaattatttgagcgttattccaagctgctgatgctacgggtggacttctcgtatctgcaggacagtgattcccatggtgagggcgatattcactctacagtggccgatatcaccttactgattcaacgtagccaagatattaaggggctggtgggctacgcatgggtactggagcataccgagcgacatggttttcacatccacgcggcgttttacctcaatggtcagaaacaccgccgtgcatggaccgtctatgaaacgctcagggatacctggaaatacgtgacatggggagaaggacatacacaccggtgcgagcccagggaggagtacagagcacggggtgaatgggtaacgccctacgacgacattaagggccgcaagagtatgcagtacatcttgagctatctcagcaagcaggagcagaagactttgggcgttatctgccagttaagtgacatccctgctccaccggcagcgggcagacggcggaaggtcagttaa

SEQ ID NO: 110096 - DNA, 936 bp, Enterobacter aerogenes
atgaaaaataaaatcgacgttagcatcattatccctgtttacaacgccgctgcgaccattggttgtctggttaataaaatccttagcgaaaaccacgtagctattgaacttatcgttgttgacgacggttctaccgatggtaccggcagcattatccgacaaatccacgatgaccggctcattctgatcgagcaggccaatcaaggtgtctatgctgcccgaaatactgctctagccttgcaccagggagagtgggttatattccttgatgcggacgacgatatagcagatgggttcattgaaaaaagatggcaagcagctagtgcattgcaggccgacgtcatgatctttaatggctggcattctgatgctgaccaccactatcgaagagcagtccaccgaaagcaaccatatggggcgattctgtcagggcatgagtggataagacactgtgtaacacgccgtgaatggccacattacctgtggctgcaaatggtcaggtcatcctatgtcaggcagcattcactgcgcttccagcctggtaggagccataaagacattctttggacggttcatcttgcagcgagcaatggccggttctgcgtgttggatgttaaggactatatctatatcagtactaagacctctatcacacaccgaccggattactatgatgttcgtgctataagctatgttgaagtgatcgcggaaatcatccagttagcggaacaaaacaaaaaaataaaggtatttttgtaccggcatgcgctggtggaggctcgtcactttttggggctttaccgcaatcgcgttggggataaatcgggcatgaaggactacttcaaagcgaacatattcgcagcccatttattcagaggtatcagcagttttagcgatgtgtttttctttattaagctgctgggcaagctattctga

SEQ ID NO: 110097 - DNA, 387 bp, Enterobacter aerogenes
atgacccatgaataccagcggcaaagcctggaacaactaattactcagcaaacagcagcgcccagaagcgctgctgctgtatttaacgagaaccaaactctctggcaaacccttggctttagccagtctcaagtttcgctatggcttgcctcattgcctcaaagtaatcatctaaaagagttcacaacggcaacgtaccaggtaacacctgatgttgcggcacatttagtatcattgttacaacaagctggtgggcgcatgcccctggcacaagtactgaaaaagctccctgctggtattacgaccagtgaacagcagatacgcaaactggcgcagaaacacgcgcagttagagattaaaggccccttgctggtattgataaattaa

SEQ ID NO: 110098 - DNA, 2154 bp, Enterobacter aerogenes
atggcaaaagaaacaaaagcaaaaaaacaagccccacaacagcagctagaagcactgttcaataaactggtcaaacagcactccgagtttactcagccattggtcgaattacctgaacatgaattcgccaaggcgggtctcattcaaggccaggttgaaggcaacttaacgccaccggtcatgttgattgcgctggcagaaggccattgggaatacgccgctgatactgcaaagtttgatgatttagcctaccagctgttaagcgatatcgaaggtgactggccagtatttgccgttgtggacgatggcataaaccaacgtattttggccttgttcggcgccgatggatctgacggtacccacggtgccgataccctgccaagtctggaagaattacgtagctttgatcgcatggagcgtgatccaacctttcgctggtcgatgcgtgtttatacacgcttaatgcagcgatttgatgcgtttcatgaaaatgtttaccgtgtcacaaaagacaaggtaaacgacaagaacgacattattgaggaagtggctaaatttctatttttagaaactttccgtgtgcatcacgatgaagaccttacctttaaagatgatgagggaaataccctgcgttttcgtgacgtctatgattggcaatatgtggccaggcacggcgataaagccgttgcacaaatcaaagcagcgtttgaggaatttaaaagccacgaaaactacgttgtgatctcagatgatggctcacgtaatcccatcttcagtaaagaaacacatctgcgcctgtccgttgcgaaaaactatcaggatttgctggaagcaatacaaaacctggggccggtaaaaaccaacgatggcaaaaccgctaaagaacacggcacgttggctgatgtgtcaggagatttactcggtagagtatttgatgtcttcctacgcgctaactttgaatccaaaggtggccttggcgtttatttaacacctaaccctgtaaaacaagccatgctagaaattgctatgcacgacatcgacgatgacgatgaaatgcgatcgcgcttagccaatggtgattttcgtttctgcgacccaacctgtggctcctttggttttggctcggtggcgttaagccagattgataaatggatcgattttaagctggtgctggccgacgataaaaaagaatcactgaaacaaaaattacgcgattgtgcatttaccggtgccgatgctgcaccgcgcatggtgatgctggctcgcgttaatatggcattacaaggcgcccctaaagcgcagattttttataccgacaactcactcaccactaacgctctgaaacccaatagctttgacctcatttgcaccaacccaccgttcggtacgcctaaatttgataaaggcaaaaatggtcaaaactcaaaagccaattacgaagccaatatggagcaagtgcttggtggcttccgtccggccaaaaaaatcgtcgatagctacaatgcttattacgaccacgtaaaaatgaaatggcaagataccggcgatttagagctgaatgacaacggcgaacctaaatgggcgggttatcgtaccgatttacgcaaaacgggcggtacagataaaaaaccgttttacagcttgcagccaacaaccggaggactggcactgggcagcaaacccgatagcaagggcaattggcaacctgtgggtgccaccatcgacccagctgtgctgtttatcgaccgctgtctgcaactgctcaaacccggtggtcgactgatgatcgtgctgcctgatggcattttatgtaactccggcgaccgttatgtacgtgagtacatcatggggaaaaaagacgaaaaaaccggcgagtttgttggcggtaaagccatagtcaaagcggtgatttctctgccaagcgactgctttaagctctccggcacaggcgccaaaacctcgattttgtatttacaaaaacgccatgctaaccccaaccaaccagagcaatttttacccgagccacaaaccgatgtatttatggcggtggccgaaactctgggctacgtggtgaaaaataatattgaagactataacgctggtgtcgcaaacgatctggataagattgtgtcggcttataagcggggtgagtaa

SEQ ID NO: 110099 - DNA, 1524 bp, Enterobacter aerogenes
atgtttgcaaaaagatataacgctgacgaattaatcgacattatcgctgcgccagcgtatagccctgaacttattgaatatgtaaagaaagtagcgaacgctccgtatctatcacagtttttgtcacaaaaaccaaagctaggaataacaggcacaatcgcaaaagactatgttagtgctgataccaaagatgcagtcccgtatgtatcgactaagcaagttaagggacttcatgcttacatggatgatgctaaatacatatctaaagaggcagatattgagtgggctaaatgtagagtagaagatggtgatattatcattaataaaagtggtaatgtcggtgcggctgctgtcctgtgttgcgcaccatacaaatacgtaaactctgtttcagacattataaacattaaactcgataagactgcctctatagaccgtgattttcttgtcgtctatctaaatagtccttacgggcaaaagcagttacaacgcctgagtggtggcgcaatttttagtcatgttagtttgcatgccatacctgatattcgcgtttatcatcctgatattaaagcccaaaaatacatcgcggataaagttcgccaagccgagcagctacgcacttgggcgaagcggttggagaatcagttccaccagaagcttacagaaaattatccagaggcatttgaggataaacgaactggtaagaagcattcgaaagcaccagtggatgatatttcgtacacattgaatcctggagcttttgatgaagaacgactgagaatacgcttatatttaaagaaacttggtgcagtaaaattaagcgaaattgcaactatagagggaccaacctgttctagttactcacctcaaacaaaatatattgggctagattcaatcagttcaaatagttgtgcactttcaccttcgactattagggagagcgatgttactggtacgtcaaggctgctatccgaaggccctgttgttgccaagctgcgtccgtatctaaacaaagttagctatatccctaaatcgtttgctggcgctgttggttcgaccgagcttctttgtgtgaaagcaacaggtgctacaagtaattggtatttatacggggtattgaaatcagatattacgctgcaacagctcaaaccagttgcaagcggctctactcatcctcggatcgaccaatatgatttatatgatttagtactcccaatacatcaggatcatcagataataggatcatggattgaaaatgctcaattagcatacttcgctgctgcacaacaagtgaacgccgccaaaaccctggtcgaagccctgatcgaaggccagctgaccgagcggcaattgatcgaagcccaacaagccctggaagatggtgacaacagcttagatcaggcgattttaagcaaactaagttctgaggggtatgccattgaaggtgccacaccgctatttagcgatgtggatgagttatacagtttgctggaagaggcggcgcaagcggaggctgaagagtaa

SEQ ID NO: 110100 - DNA, 1287 bp, Enterobacter aerogenes
atggacagcagtacaaccaggcaacataacgaccccgtaaatagcgaagcggcacttaacctctgcctgcagctttggcaacaaggtggtttgaacgccaacaaagcagcgttgttactggcggctgtgcctgcccttaggtcactgctacaaccaataatactgccgcaaaagaacgacgctgaaacggatatcgttagcgcctttagcctcactgcaccattgcttgatgcctttaacgatttaagccagtcaggtgaatggcaattaacgttgctgggcttaaacccagatgttcgccaacattggataaatttagccgctgctcgctgccgggaagcaggcgcgatgaatgacacaatggtattggttaaactcattcagcaactaagcaatgccagtgaatgggtcttaaccctgttggaaaattcagactcctcaccacaaatcattgcaggtccattggcgcaaaccgaacgcgatttactcggccatagcctaaacgataacgcagccattcccgctttatgtcgtattttgcacgcctgtcatactttgctgaagctaagcgaacaaaatgaaccacaggcacctatacaagcagtggatttaaccgcaaaacagcttgcaaacaattggtgtagcgggcgtttgttagcactccctaataccttgcttgatgaacatgaccttaaacccaatgccgattggttattggtctcccgctcaggtcatgatagcgtgccgcttaccgagctatttgcccaacaaccctggttatttttactcagtctcattatctttgtgcaagatgcctgggctgccgagcagcgtggcggcttgttgctcactttacctgtcgggcaaaataccttcgcacccggtcaaataaatgtggcggtacaaggtattgaaggtgatgaggtgagcctgggcagtttggctgagtttcttgtgcttctgctcggtgagctcaatatcaccctctacccagcactcgatgcgaacacggaaagcatcaaccgcctaaaccgcgtcctgagttcattcattgccgaactgttagcacaaaaaatctggcaatttaccgaggcgggtcgtggcgagtctggccaatatcgaattcacacaagcttcagcgatgcctgttatagcctgccgttagcaccgctatttggctacaaaagccaaacgttacaacgggccattaagcaactggcgcaaaactgctatgccaataaaaaacgcgccgccaatagaataaaccttcaaggatcgtcgttatga

SEQ ID NO: 110101 - DNA, 4287 bp, Enterobacter aerogenes
atgagttttgaattaaacgaacagatggttgatagcctggcaaaacaacatcgctgggcggcgacgggcgtatcagattatccacctcgcgacccgttagtgggccagagccgcttttttaaacgctttcaaacctttttgcatacggtggatcacgacgatgatcgctttgcccatgtgtttgccgtcgaagccgaatggggtcggggtaaatcacgtttaggccatgaattggtcgcacaaattaacgactgctccagaggctggtttgtccgcgacgaacaaggccaactacacgataagcagctgtttaatcgcgacacgcaagacaaatacctggcgctctatattcgctactcgcaagtggcatcagattatcaaaactcggataactggtttgcttttggtttatatcaggcgctattaccactggccactcaaacctttgatggatcgattcaaagtgaaattgccaaacaagcctatgaacgcttaatgccatttggctttaaatctgaactgttagcagatgccttacagttgaacgccaaccacagcgaagaagacctctatactgaccaaacgctggtagtcagtttggtgcaagccgcctataaagtattaaagagctttggcgtgcagtatatgttggtggtgctggatgagctggaaaccgttgcagaagccgctacttttggcctggaagatgaacaagataaacgccttgatggccaggccatacgcctgattggtaaagcaattaaagaggaagaccctcgccgtaaacttccatggttgcgctatgttgcactgtgttcaccactgcttggccagcaattgcgcgaaattcaatcggtcgcacgccgctttgagttagtagaacttgagcataatgcctttgccgatgtatcagactatgtggcaagcctcttaaaagacggcaagctgggttttaattaccctgcgggtttagtggaagccgcttacgccatgagtggtgccaacttcggttggtttaacgtggtcatggctaatgtggatgcagtgctgagtcaataccaacaagcaggccacagtatcaaggatgtgggcgatttatttgaagctgtgctggcaggttctggccgcgtggccaggcatgtgctggataaaggtgcgatagaaggcattcaaacccgcgaccaggcactattgaccgaatgccgtagtttgctctacggccaattacccgtgcgcttaactgaaatgggctatgccactgaattgctggcgctgaaaaacgaagatctggaacccatagccgctcattaccgcaaactgagcattgaccggctacagtgccgacaagccctggagcaagccaaattccgccgcgataaagatgaatggtactaccctgcagtagatcaagcgctgagcttagatactttgctggataacctgcgtactttttcgattaaagaacaagccgcaagcggcgataaaggcgcagtattgctgcctctgtcaaaaggtgagtttaaatacttactcagcttgctgtatgaccacccagcaattgaatttgctgccgatgccttatggcacaagctagtgggtgaaactaccgaactggacgccagcgaagcaacgcatattggccccagtgtggcgatgttactgcgcctggatttgcgctatcgcagtgcccagcaaaactcactgatttttaaagatcccgccctgggcgatgctcatgaacaggcgatgagtgaactaagcaaacaaagtagccagaagccactcatcaaggcattagcccgtgtaacgggctttgtgagattactggataacaactggacctatgatgaaaacttgctgagtaataaagcgggtagcgacgatgcacctctggccattttaaccgagccacgtggccgccagggtggtttacttaccctggatggatttaagcttcacccagaaggtaaagccttgtttgcctgggtcagtaacctaattgaactgaacaatcttcacacctttgcggcaaaccacagccaccaaaatggtcgcacgccagtattagcgttaaccgcatctgcacatctcatggagcaatacagccgactggatgaaagaaatgagttacgtgatgcgatactgctgcattatgtcaacccaagcgaagcagaccagttagagcgtattggcttaagtctggcagtatgccagttgcacggcgtgaatttaactgccgacagctttaccgcgaaattcaaaaacaagctgcatgccctgactacctttgccacggatgccattcacaagtggcgccatcgtttgcagcagcgcggtttaattgcctggccgttaaaggtggatggtaagttatcaccgaatgaccgtgacctgttctttaaaggctggtatcagctggccattgctcaccctgagttaaacggcattctcgatttacagcagcaacacggcgtgccagtgaatgagctgagcagcttgttggataaacttaaagtgccgggcagctatattgccaaaggctatacggccgatgaacatgccgggctatttactgaacttaataatgtgcagcgaagcctagcgcagatcccattatttttagcccgtattgctcaccctaataaaaagcacaagtggcaattcgaaggctttaagcagcagttttatttcgcctatgtggctgaaacgagtattaccgccaaaggcgtgtttaatgactggatgtggtggtgtggagagctgaacttactcactttaaccaatccaaccgaaaaacaggcaatttgggagcactacccgcgcacccgcttagaaaatgccattagagaagcacaaaactggttcagcggtaacgatatgggcagctacgcagccaatgtggaagtcatgagccgcgtgtatggttatgcacgcattaatgaaatgttcgcgcctctgggtacaaataagctaggttttgtcaccgtggaagctaaagagcagctgggaaaagcacaatcactatttaacgtgctcaaacagcaagaagaacaactggctgatattgccgaggccaacgacacgcaagtactggctgagcttatccacaagcgtgctgaagtgctggagctagtagcaaaggttaaaccgcttaatagttccaagcccatgctaaaagatgcccatattcttagcttagaagacaaaacgacctcgctttatcaacggattgaacaggcctgtttatttgccgaatttgttgagcgcagcgctgagcgtatcaacaaccgactcgctgatttaatcatagatgttgaaacagagtgtgccccactgacgaatttcccgaaacgtctgtacaccaacacgctgcgcaccataggtcatattttagacggcgcgttaaaagacgataccagcagtgccactggacaaaaagagcagcaagcagacagtgataccttactgcattacctgcgtaaactcgacttaggcaaagcgcaagacaagctttcagccttagcgcaagaagtgggtttaaacctgtacagtgaccaacagctgccgatagcggagatccagggacatattttgtctagctaccgcaactgcaaagaacgatttgggaagctagttaataaccttacagagcaaaaccaacgcgcccaacagctgcaaaaatggcttagtagcgccacggctgagtatgagtacgctgatgacattgcagagataccaaaactggtaatgaaattacagctcattgaagacgctattgccgatctccccaacgatgccgagagcaagcgtcaaagtatgcaaaacagtttgcgcaatgggcagttttcatcgttacgggatttaccagaagagctcttaaaaccggcacgcggtcaacttacaccgattcaaggccagctacttaaaattgaagagcgtcttaaccaagtaagacgcaactccatcgagcaggtaaacagctggctgccgttattaaaaccgctattggcttctcaaaagcaagcggaaccagcagcgttgactctgggggatgtgagcaatttgggggtcagtgaacttcaactgatgtgtgaaagcacccaggccaaatggcagattcaaggtgagcaaatattaaaagatacaggcttaacactggcggattggcaaccaatttatcaggctttgagtcaaaaccaagaacccgcgttaacacctgagcaacagaaaggacttgtagacaaaggcattgtaaaaatgcgccttacctttgccactggtttatag

SEQ ID NO: 110102 - DNA, 849 bp, Enterobacter aerogenes
atgagtctttatttatctgcaccactggccagtaatcgtaaaggccggtttttgcaaactgttgcgggggcaacccccttaacgaaggattggattagctcgccgccagccagcggtttgttgttagtacaagcagaagagttgactgacgctaatactatgcaacgcctgtatcactgggctatgcaggcaggttgtgccgctttggtgataaacctgaaggctgaacaatttaccttattagcgcacttgtcatccccactagattggcagttagtaccagcggtcttgagggtgcaagagccagggctaaccgctttgctagccagtgaaacagaccaagctattgctggctttactggcagtgcagatcgccaccaacaccaggctggcgatgtggtgcatacccgttacatacgaaaacacagcaacagtgggctagtagcctttaccacgttacctttatggtcgctaaatttactcgatcatagtgagatcctggtgagctggttgaattggtttgtggaccacgctggcgttgctgaacgaatcatcgaacctaacgcgccatcaactgactacacaccagataagcacgatctggttgtattgctactactctacgcaggaactggcatgagcttacaagcgttgtctgagcataatgcggttaagctgatgtttgatgttagcagccttaatattgtcaagcggggtgagatgttgcggcagcacgattttattgacgaagcgggcataacagccgccggtaaaacatgcctacaagcctcgcgatattgggcttatgccccattacttagcgagcagctaaacacaggagcgctatga

SEQ ID NO: 110103 - DNA, 1158 bp, Enterobacter aerogenes
atgaatgagaacaaaacgatgaatttagcgcaatctctcgccatcgatagtcagcttcgcttaccgggaagcgcaggacgcttgcttaaacaggtccgtgatattgagcaagtggcgccgctgttccgtgatgctggcttagtgaaggcggtcccgaagcccacaatcgttaatttacgcgtagctggtattgcgactaaatcgtgcttagacaaggtattgggtggttttatttatgccagtgcggcagtgcgcacagatttgctaatagatgacaataaagtcagcacggtgggtagcgactcggtatcagaactggatgatattgattttgaagcacagcgtaaacgacttgatttaattgaaattcgtcattcttatcagttagttgagaaaaaacttttaagttatgagccgggtgatttaattttgctggatacgccgttgtttttagcacgggatatggctccactggagcgcaatgttcgtcataaacatgagtacgaaaaaaccaggcaagtgatagaaactttttggcaaaaccatcgctctaaaattttcccctggaatcaaaatggtgtagtgcttgcgagcattttggctgagcgctttagtgcaatagtaagtatcgccaaacaagatttacgtaccgaacaaggccgcaaacaaattttagcatctgatgggttttctaaagagttgatgcaaaatctggcagggcttgatgaaagtttggtgggcgtgggggatttgcgatttatcaatggcattctaggcaactattcgcgcaccatcgcatttcgtttgtctgagcaagaaaaccgcattgaacccaacattgaagctaagcaagggttaattggttttcacttccgtagtgcccgaggtggacagataaaaatggtgcaattagcgggtgacgaaccagaatggaaaagtgctgacctcgatttagttgcctctcgcctgatagtgctggatatgcaaaacaaaggtaatgcaatgccgttgccacaattacttggctatcaacagcttggcattttacctaaatttgctacgttttatcgccagggtttacaccaggctctaaagaataatgatattgaggcagggtggttggcaggcctcgatgagggattgaataatggcttataa

SEQ ID NO: 110104 - DNA, 1686 bp, Enterobacter aerogenes
atggcttataaagttttaggtaaattagtcggtaacactggtgatgccagccagttaactatggttgtgcaagactcgttttcagtacgccgtggtgagtttgtacgcattatgcaccaggaacgcaaagatgaggggcaagtcgccgtactggggcgagtgaccaagatcagtcgtaccaatatgctctacaacgccggctttggcgatggagtgactgagcttgagcttttgcccggtgcgaatgtaactggtgagaatatgtttgctcaggtcgagctggttggttaccgcgatcctgttactcgtcaaatcaaaattccacgtcgcccacttaaccctggtaccgctgttgaaaccgtcgatttccagtttttgagtgatttttacgaatttaatgaacactccagtttgcacttgggcaacctagtaggctacgacaaaggcgagaatacagttcctgtttttattgacgtgaacaagttggtcactgagcatctggcagttctggcaatgacgggttcaggtaagtcttatactgttggccgcattattgagcgtttagtcgcggttaataacggtactgtagttgtatttgatccgcatggtgaatatggtaaagccctcgctggcggtaatctgcaattctcaagcttcttagaagccactgacgataagcgtgatcaagaagcactaccactgataaaacagacctttgaaaagctgcaagccgccggtgcaggtattcaagtttactcgccgcagcacgaatcttttaaacataaatacgctagtaagaatacgccattagcgcttcagtttgaccattttgaaatggacgatattgctgaaatattacctggtttaacggaaccgcaacaacgggtactcgatgttgcaattcgttattggcgctctgcagataagaccgagccacgagatattaaccgcctacgcttcttattaggtgatggcattgaagagttaaaagagtgggacgacctttctgaagctgaggcgaaggcgttatcaggccgtagtgccgccgtcgcctcgatgaagctttcacgcgtgcttaatgaagccaaaagtttttacagtgcaacgatggctgagccaactgatatttacaaaatggtgggacgcccgagcaatcaacaagggcgtttagtcgttgttgacttacaaggtttgagtgataccgctaagcaagtcatttgtgcactgttatctagtgaaatattaaaggcggcctcgagcaaaacggacccgctgcgcccatgctttatcatttacgaagaaggacataattttgctccggccggtggcaatgcagtcagtcaccgcattattaaaaagatcgccggtgaaggtcgtaaatttggtgttggatttggcattgtgagccagcgtccatcgaaattagattcagatgtgacctctcagtgcaatacgctaattacgatgcgcttaaagaacccagacgatcaacgatttatagctaaagcatcagatatggtgagcaaagctgacctggaggaacttccgagtttatcaaccggtgaagctctggtgtgtggtcgttcaatccctgcaccactgcttgttaaagttggtagtaaggcattaattcacggtggtgaatcaccggaggtattgcgtgtttggggctctttcaatggctaa

SEQ ID NO: 110105 - DNA, 543 bp, Enterobacter aerogenes
atgcctgaagtagcttgggtaaatgagacgtttccacttttagcaagcggtaagctattggaccaggatgtattggtccacagcttaggctgtagcgtttggaatacattcgggcatgaacagtcatttatggcggtagtggaatgtccggctccaggtacatttggtgctgatattcgctcagactcgggctggtttcataaatcatctgcatcgcctatgtgtttaatcgaatttgaacgctttgatggttcagcgaaggggcagcaaaagctagaagaaaaattaaaaaacttactggaagcagcgcagcgctggaatcattgccccaaaaccctggtcctcagtgcctggagccaaggcttagtaggtgcacctgatacccgaaaactgaaagacatttgccgcatgggtttcacttcgtccactggtacccaagtaagcgccgctcctgatgttgaggtggtgtttagtcgctttttatttatcaaaaatctgagcatgattgttttggacagaattcactatgaggtgttgatgtga

SEQ ID NO: 110106 - DNA, 1470 bp, Enterobacter aerogenes
gtgaatataaaatcagcacattttttgccaggtacgaataaacgccttggtgacaaatacctgttacttgaatgccttggcgatggcagccatggttgggtatggcgggcggagcgcctgcaagatggaaaaattgtcgcagtaaaaattcctaaggatattactcgggaagaccgtcagcttgccgaaggtaaagagcttttagacgtcgagccgcacgaaaatattgtgcaaatttttgatatgggccgtatagataatgaatggttctatattgaaatggaatatttcccaagccaaaccctggcgcaaaagctcgatgacaggcagcgtaattttggccagacctatgaacgtttattcagaatatatcgtcaagtgctctgtgctgtacattatttggccgatctaccagtgccaatatcccatggagatattaagccacataacattttggttggcgaacgggacctggtgaagttgacagactttggcagctcagctttaccagaagaaatttacgttcgtacccgagaaaatggcgggactgtgttgtattcggccccagagttctccaacgtcgatagccgtagaggcagtctggaagagctactattgggagacatctacagcttaggtgttttgctataccagctgctgacaggaaagctcccccatgatacgccagcacaagttcagcgccacgcacctttcaagcttccgacagagattaatagctctattcatacggacctggagcaagtggttcttacctgcttacaaaaacgagcggaggatcgcttttcaactatttccgacttaattcatgcatttgatgcagctaccactaagcaactaaaagttagtgctattgctccagtttttcagactaaacttgatcaggactggtcaagtgcggtacttgaagcaatgtccaatcaatcttaccaaaaggctgcccagttagcgtcgcaggagtatggccgcagtaaagatctacaagctttacatcagcaacttattgccttgtaccgcgccaatcgcttattcgactttgaaaaagttgtagaagataataaagcgatcttgctcgagggtaaattgactcaaccagcggctttgttcgagctgatagttaagacaaacctacagttgcgcaatatcagtcaagcaaaatcctggctgttgcaacgaaagcaagttgaagcagaaaacgcgactacgatgtatttagaatcatctatccttggccttgaagcaaaatatcctgaagcaagagcactattggagaaagtaaaccaaacaactccaatgaagttccatgtgttaagccaactcattttagtttgcgagcaaatgcgtgattactctggtgctgcagcttatttgaaagcagcattacgagttgcaccattggataacagcatgaaagagaaaaaagaattgtatgcaaagcttggggttatttga

SEQ ID NO: 110107 - DNA, 273 bp, Enterobacter aerogenes
atggccgtgaaaaataagtccgtggaactggaagaaacggttgcagaggatagccatgcgaccgtggtcgcacaggcggtaagtggcccagaacgcgaagcagtggtgtttcttggaccgcatcatcgttattcccgtggtgatgttgcgtgttttgaacgccagcatgcggaagaactggttgagcgtcatattgctgtgtggccgaaggatgccaaacgcgcgatggcaccaaaaccgggggacgacgactttgatactgacattggatga

SEQ ID NO: 110108 - DNA, 1287 bp, Enterobacter aerogenes
atgccacagattgaagaattgcgtcgtcagcgtgcgggtatcaacgaacaagttcaggccctggcaaccattgaagcgagcggcgggacgctgacagcagagcaactgaccgaatttgcgagcctgcagcagcagttcaccgatatcagcgccaaaatggaacgactcgaagccgcagaacgcgccgccgcgctggttgcgaaaccggttaaagcaacacagcaggctccggggattgttgtgaagcaggagccaaagcaatacaccggtgccgggatgactcgtcttgtcatggccgtcgctgccggggcaggtaatctgcaggacgccgcaaagttcgctgcagaggaactgaatgatcagtcggtatcgatggccatctccacggctgcggcatccggtggcgtacttattccgcagaacctgcacagtgaagtgatcgagctgctgagtgaccgcaccatcgtccgtaagctgggtgcccgttccattccgctaccgaacggtaatatggcgctgccacgcgtagccggtggagcaacggctggctataccggtgaaaacaaagacgccaaaacatcagaaacgcgcttcgatgacgtaaaactgacagcgaaaaccctgattgcgatggtaccgatttccaatgcgctgattgggcgggccggatttaacgtagagcagctggtactgcaggatattctgacagctatctccgttcgtgaagataaagcttttatgcgtgatgacggtaccggcgacacgccgattggtatgaaagcgcgcgcaactcagtggaaccgcctgctgccgtgggaagcagatgcagcaatcaacatgaacacgattgacgagtacctggacaacatcattttgaaggccatggacggtaacagcaacatgatcaatagcggctggggcatgtctaaccgtacctacatgaagttgttcggactgcgtgatggcaacgggaacaaagtttacccggaaattgctcagggattactcaaaggctacccgattcagcgtaccagcgctattcctgccaatctgggtaccggcggtaaggagtctgagatctactttgccgacttcaatgacgtggttattggtgaagacggcaatatgaaggtcgatttctcgaaagaggcctcttatatcgacgccgatggcaacctggtatcggcgttctcccgtaatcagtctcttatccgcgtggttactgaacacgatattggtttccgtcacccagaaggtctggtgctgggtactggcgttctgttctaa

SEQ ID NO: 110109 - DNA, 1722 bp, Enterobacter aerogenes
atggccacatatccgaacgtcaatgcggcgaaccagtatgcacgggatatcgttggcgggaagattctggcatgtcagttaactattcttgcctgcaagcgacatcttgatgacctggaacgcgcgaagaatccgaactggccttaccggttcgataaaaataaggcagagcgatttcttcgttttgcacaaaaaatgccacataccgcaggggaatgggcccgccgaaaactcaggatagaatttgaaccctggcaaaagtttgccctgggagttccgtttggctgggtaaataaaaaaagtggcctgcggcggttcactgagatctatatcgaagttcctagaaagaacggcaaatcagcaattgctgctgccgttggcaattatatgttctgcgctgacggtgaacatggtgcggaagtgtactgcggggccacgaccgaaaagcaggcctggaaagtgtttgctccggcgttgttgatggtgaaaaagctgcccgcattgcggcagaaattttctataaagccctgggcaaaaaaaatgactcgcccggatggctccatatttgcacccgtgattggcgatcccggtgacggtgattcgccgtcatgcgccattatcgacgaataccacgaacatattaccgatgccctgtataccacgatgacgacagggatgggggctcgcgagcaacccattacgctcatcatcacgacagccggttatgacattacatcgccgtgctatgagaagcgggaacaggtggtggagatcctgcgcaaaacccgcaatggggaagagaatgagggcattttcggcatcatctatggtctggatgatgatgatgactggacacagccggaagcgctcattaaagccaatcccaattatgggatatcggtaaaagagcactttcttcgcgcaaaacagttactggcgatatcgaaccccagtcagaccaacaagatcctgaccaagcattttaatcgttgggttagcgcaaaaacagtcttttacgatttacagaaatggatggctgctgctgacaagagtctgaaattgtctgattttgccgatgaggaatgctggctgggaatagatctcgcgtcaaaggtcgatcttaacgccgttattcctgtttttcgtcgcgatatagaaggtgttacccatttctactgcgtaggccctatgttctgggtgcctgaagacaccatctattctgtcgacccgaagcttaagcatacctctgaacgttatcagtcgtttgtgggacagggcgttttaattccaactgagggcgcagaagtagattatcggctgattttcgaatccatcctgcagttacgtcagaacgtgaaaatcgcccagtgtcctatcgatccttatggtgccacttccttgcgccatctgcttgaggaagagggactggaacccgtcgaaatcagacagaatttcacccatatgagcgaccccatgagagagattgaagctgcactggcgtcggggcgattccatcatgacggaaatcccatcatgaactggtgcatacagaacgttgtaggtcggtatttgccgggcagcgacgatattgtccgtccgacaaaggaggggaaacaaaacaagattgatggtgcggttggtttaatgatggggatagggcgcgccatgttgaacagcgcagtcatcaaatctatctatgatgaggaagacgtagcgtgctaa

SEQ ID NO: 110110 - DNA, 234 bp, Enterobacter aerogenes
atgaaagttgaaatcgcaatcgatcgcaaaaagccattgcctgacggtgcagtttgggccttagaaaaggagctactgcggaggctgaaccagaattttaacagctgcagtttgattattcgccgaaccggtactgatggtctgagagtgtttggtgggatggatggggacaaaaagcgggtggagctcatccttcaggatacctgggaaagtgctgacgactggttctattga

SEQ ID NO: 110111 - DNA, 1086 bp, Enterobacter aerogenes
atgacatcagcagatatcccaattaaaacagagcgtctacacactgtagccccgtacattgggaagatgcgacccgaaatcgctggctgggccatcgaaaccgtatccaagccaggtgatttagtgtatgacccattctgtgggtcgggtactgtactccttgaaggctggctcaaaggccggcacactattggtactgatctaaatccttacgcctgtctagtatcacgcgccaagctaaatccgtatgaacataacggtgttgaagcggtttataaacttctaaataaatattctgcttctgtagataagataaaattaacgatcaatcttgaaacaactccttgttgggtaagggatttttataaccccgaaacattaattgaattgttggcttgggttaaagttttaaaagaaaataacgatgaattcgcacttgcctgcctgctttccatagctcatcatcaacgcccgggctttctctcatacccgtcaagccatactgtgccttatctcagaacaaaaaaattccctccgagtgagttcccagagctttacgaatacagagcagtccgtcctcgactcgaaaagaaaattttacgagtgtataactcattaccctcggtcgatccatcattgactcgaaacgtatatcagcaagatgcttcgacattgaatttagatcgtaaaattgatgcaataattaccagcccaccatacatggggcaacttgattatgctcgtgataatagattaagactttatctcatgggtattgaagaatggtcaacccttaataaaagcatatcaccgagcgctactcgatttgtcgagcaatttagtatgtgtctaaactcatggcgaaaaaatttacgtcacggtggaaaattggcaatttttgtcggaacaacaacaaacaccactaaaaaaagacttgacgacattgttattgatttaatcaataataattggcctgactacgaattaacagacagagtatcaagcgagataccagaagcccggcgtgcaaggaaaaattgcaaaggaagtgttgctgaatctcttttgatctttgaatataaataa

SEQ ID NO: 110112 - DNA, 1044 bp, Enterobacter aerogenes
ttgaaatcagtggctatgtttaacaataaaggaggagtaggcaagactaccttgacttgcaatttagcctcttttatagctatgaactttaaaaaaagagtgctagtagttgattgcgacccacaatgtaattctactcaacttatcatgggtgtagagcagtcagcagaattatatatttcacaagataataaaattagcactatcaaagatgttcttcaacctattgaagatggcgattcaacaataaatacaaaattaacgtttctcaaatcaagcgaaaatagatttggcgttgatttgctacctggacatccttattttgctataattgaagacagacttggcacggcttggggacagcttagagctagagacaggcaaggttttagacaaacaaattggaacacactgctttgtaactacttggaagataagtatgatttagttatgtttgatttaggacccagtttaggctctatcaatagatcggttttaatgggttgtcagcattttttaacccctctcggttctgatgtatttagtatcattggtgtaaaaaacatagcctcatggttaaataattggattgatgattataaccattcttggtctgcactcactactgaagaaaaagaggatctgcagggcagattttctgtattagatgccccaagaataaaaaaaggttttattggctatacagtccaactatacataactaaatcatatggaaaagaacgaagagctacaaaagcttatgaagcaatcattggtaatgtcgatgatgaaattagaaactctttaaaagatttttattgtgacaatttgctccaaactccgcaaaactcgaaacttggagatattcaacatttatatagccttgttccattagcgcaaaagcaatcagttccaattcatgcactcacaagcactgatggattagtaggttcacaattttcagcagtccgagaattttctaataagattagaccaattgctgaaaatttacttagaaatcttgggatgcaatttaagggttag

SEQ ID NO: 110113 - DNA, 870 bp, Enterobacter aerogenes
atgatacattggccggattccttaatagatgaactagctgcccgcagatgtgtaatatttctaggctctggggcatccgcacccgcaactaaacaagtcggtgaagagttagtacgccctccaacttgggctggcttgcttaaaattcttttagataaatgcccgaatgatcctcaggggtccaagaataatgctgaaattttgctaaataaagaaaattatttggattgtgctgagatcatcagagaaacatgtttatcaaccgcagagtacaatagatgcattagccaaacattttccggatatgaagcaactgatattcataaggctgttgagatattagaccaaaaggttgtcattacaacaaattttgattgtttatatgaaaatcattgtagacaaggagaaggaagggacggctatgctatattacgctactacgatggtggattaatagcacgtatgcgctccccaacaaggttgataattaaagcacacggttgcacaagtgagccggagagaacaatactgacgaagtcagatttctttaatgcccgaagtgaccacaaaggcttttttgatgcattagaaagtatatttctaacgcatactattttatttatagggtatagcattaatgacccggaaatacagttaatcttagaaaacaacatcattacttatccaagttcaaatcctcactatgccacaatgcctaaaggttctcatccatccatactctctgcattcaaaaaaactaataacattgatattctggaatacgacagcgcgaataatcatgccgagttattggactgtttaaacaacctatgttcccaagtagaggaaagaagatcagtcatggcctaa

SEQ ID NO: 110114 - DNA, 144 bp, Enterobacter aerogenes
atggacccttcactggaatacgcctgcaagcgcgtgcaggaactggaaagtcttctgctggtggaacagtatagtctgccgaagtcagtatggttttcacagaatactaatatgccggggaattcccggcatagtagctcttag

SEQ ID NO: 110115 - DNA, 1704 bp, Enterobacter aerogenes
atgtttcagatatcagctggagtgttctttgatttagataaaatagaaaagcacgatggcacatttgttttttattcaaatgttgacgtatttttctcggtggaaaacacctccccttgttttaaagtgaataaaattagtcatgatggtgtaaactgttatgtggttaactacattctcttgaccgaaaaaccagaacgaattgaagctggagtagtagttagggctggtgatgaggattatatacaacaatttattttgttatgggagttctattttgattgtgtggctagagtagagaaagaatcggttaaaaaaatatgcacattatcaaattttaataaacatcactcaaagattgcgcttgaagttgcgccatatttagtggatattaatcgaagagtttcatttgatgatgtctctagattttctgctttcattaaagatgtagtgaatctaaatagatctgcctttaaatccttaatggctgcgttaaaaataattagtgattcaaaagagtcattatcaaccaactttgacctgacttattccatgttagtctatgcattggagtctttgtctcaaagaaatgataactataagtctgattgggaagactacgatcaaaaaactagaggagagttagagccgatatttaatcatatgtctggtgaggatgtttgtaaaatcaaatcaatacttattgaaggcaagcaattcagattgcaaaaaaggttcaaggatttcatattaaacaatcttgaagaagattatttcaatgaaacagagcgatatccaatccgctatagcttccttagtagggctttagataatctatacaaaataaggtcttcttttgtccatgagcttaagccgctcgatgcgatgatctcgaaagcttacaaccctattggagattgtctggttctttttggcgaaccttactttagttactctggattgcttcggcttcttcgccatgtgataataaatttttgccgtaaaaactacagccaaaaaagagagtctgttaattgggtgatggaaacatctggtgtaatggttgcagaggtatctgcacaacattggctctggaatgcagacggatttacagctaaaagtatagcaaagtggtttagtgaatatctaaatatgttaaatttagataaggtcactgatttgcagtctattatgaaaaaaattgaaataatctatgatcaatcaaaaaaagaatataaaaatgggttgttgaacttttattacttatataacataattcataatcgagataagagcgaatggcttgaattcgcgaacaaacgaagttccatacttgttgaagatatatattggtattcatgctcaccatatttatattcatcatttactaatgttccaaatgctgttgctgatacaacaaaattgaaagattttttatcttgctttgacgaatatgataaaaataagtttaagccaaatcgtttaaatcttcctgcaatgactgaagtaattatgttagcttgcgcagcaaattcattctttagaattggaatgtatcaggattatattgtaatgggtaataaagcactgagagaaatcgcctcagtaaaaaatgtatttgattatataaaagaacgattaagtaattcgcaactgattcaattggacgagtgcttaagattgtatagaaaaaaggggggctaa

SEQ ID NO: 110116 - DNA, 876 bp, Enterobacter aerogenes
atgcgtcatcataatttctcaacatatactgttgatattccaggtataattccggaagaaatgcattatccgcaatatctccgcgtatggtatgccgtgacacaactaaattccgcttctgctaaaaatattgttcagtggatccgtaacagcaacgcccccctgaaagagagcgagattcgtattcaactggatgcattaaccgttaatagcaactcccgatatcgatatcttggtagccgaaaaagcgcccggactgacctgggtagcccatacgacttgttatttcgtagcggaaacctacaaaatacacggtatcaacagtatgtgcaggagctgcacggcatatgggacattggcgatgatggtaggacgccaattcagattgccgccccaaggccaggcgatcggatggtagttgaagcgagagatgaattattcaatgaattgcctgacgatgaaggtgactttcgcctcaaagcactacgtgaggtcattattcgagaagggcaaccagtatttagacgaaagctcattgaagcttatgagggtaaatgcgcagtaacgggctgttcaatccaagtgttgcttgaagctgcacatatcaccccctacgcaggagcttggcatacccgtgctcagcatggcctgttactgaaaacagatatccatactctatttgaccgaggtttgctctggattgataccgagttgaaaataaggatatcagaacagttggccgggacagaatatgcagagttagatggccgatatctcaggttacctaaagataagcaaaactggccgttaacaactcatctgataaatcatcgacaatattggattgaaaatcataatgatgttgagagtgcttaa

SEQ ID NO: 110117 - DNA, 843 bp, Enterobacter aerogenes
atggaacgattgagggagcaataccaagaaagaataaatagtgtcctccttgacggctttgagaaggaattattggactctgcctttattaatcttttgacaccgaacccacttaggctgaacaactttgcatatgctctacgtgaactaacaaggcatgttttacaccggttagcaccagatgatgagcttcagcaatgccaatggttttcgccggatcagacatcatcaacaggaattactcgaaaacatcgcattaaatttgcgattcaaggagggctttctgatttctatgtaacgaaaaaactttgcattgatgagatagatgaggtatcaagcgaattgattgctatcatcaatcgtctaagtggatttacacatatagaagaagccacattcaaaagctcaatcgaaaatactgaaagaaccgcagatgaatgtctttcagcaactcttgactttgttaacaagattgatgaactgagagccgaagttgcagataagctcttcgatgacatcaatggagttctgatcgacagaataaacagcgaatcggttgttgagttaatggaaatatcgacccatcagtatattgatgaaataacagcagaaaacatttctgttgttaaaattggcgtaaactctatggagatgcatgtcgatgggagaataggagcgaccttaatgtacgggtcagcatccgatcggcgtaaaggagatggggctgaaattccggcctcgtttcccgtatacagtgaaatggaagttctatttaaacaaccattgggtagtgccattaaccttaatcagtttagcgtagatatttcaagctggtatgagtaa

SEQ ID NO: 110118 - DNA, 321 bp, Enterobacter aerogenes
atgaaagacgatatttattttgtcgtgtttagaagcggtcagaatgatgttggaaacggaacagtcgttgtaaaggatggcgcggtcaatggcggtgattttgggtttacctatcaggggcgcattcaggatgggagattgagccttcacgtgtcacgtcataatccttcagcacaaaacgtcattgcaggtcttaatgactatttgatggatttgtctgtgagagatattggtgacggatattaccttgagggtaatattgcaggcgtgccaggcgccagcttagctgtacaagcaaaatatatcggcagtttaatttaa

SEQ ID NO: 110119 - DNA, 249 bp, Enterobacter aerogenes
atgaaacgagctattggaaaaaaagagttaatgcaaatagttccgctgtctatgagtacgatcgacagactggaacacaaaggacaatttccaagacgcttttatattaccgacggacgctgtgcctgggatggagatgagatcgaacagtggcttgacgaaagaaaggccgcgaacaccggtaattttggtggaaaaaagccacctgttaacaaaagagtttctcgcccggtaagtaaagcaacgtga

SEQ ID NO: 110120 - DNA, 153 bp, Enterobacter aerogenes
atgaatcagctgcagcaacttgaagaagacggtcatgacggcgccgcggcggaattcacaactatggtgagctatattgttggtgttagccgatgcctgcaggacatacgcagccacgcgcagtacatcaacaatacctcctctgagttctga

SEQ ID NO: 110121 - DNA, 864 bp, Enterobacter aerogenes
ttgctagctctgttaatcattcctattctggttagcggttacataatgataactgctaaccaatatcattatttccgtttatatcgtcatgaaggccaacttctttatatgaaggttgcggctcttgggacttactgtttagttgcctccgcagttattgcagcatgcattaaatatgcttatcctgattttcatcttgtttttgacatgttaaaaacgtttaaagtgacatcaaaacaagaaacagacagaatttacatgtggttaattctcctgtctgcaacctctattagtttctcattgtgttatgtcactatagtatggataaaggattttttgtttggttgcatttataagcgcaatgtttatgacgagataatgcaggcaatgagagcaagggtattacgtaaaacatactcacaaggctctttagatttacttttgctggatgcaattgaatcagaccccaaaaggccaatgctgatcaccctttcatcaaacaaggtgtatgtaggcgtaataaatggttcaggtgaaccaactgagaatcagggaccacaccagcatatttcatttgtaccattgatgtcaggatacagaaataaagaaaatttatcagttacattcactaatgcataccctggagagatacaggttaagcgaaatgctgctgttatgggtgttagtaaaaagaaagtgcaaggtctggaaattatggtatccattgatgagataagctacatatcatggtttgattttcaggtataccaggccaccaataacaaggttgaaagcagggggcacgttattggcgttacaagaaatggaagaaatatttatcgcaaagctagaagtaaagaataa

SEQ ID NO: 110122 - DNA, 312 bp, Enterobacter aerogenes
atgaaaaaatttgctctatttgccctgctttcgttgccattttcagcatcagcaattgttatggggggaagtaaccttggattcagtggctatcctgagttctcagaaattgctccgacgccaccctattctgatgatcagtacgtctgggacagttaccggcgtgaagtggctgagtatgcagagaaggcaaaacagtaccttgaggactcaaactctgacatgaaaaggattcaagaggcacagcaggatgctatccaaaaagctaacgatgttgtagaagaattcaacaggaaggctaaagggtactga

SEQ ID NO: 110123 - DNA, 213 bp, Enterobacter aerogenes
atgcttaagcttttttccacatgggcaggaacgccctctaaagatggtgttaatgattttgccatgatgctttcggttggtatctcgtatcgcgcatcaccagcaaatactaacgttggtaaagctaacactatacagcatagtatcgaacgcatctgtaacctccgttacgtcattagtattgtaaaaatgattactggtttagtagtgtga

SEQ ID NO: 110124 - DNA, 222 bp, Enterobacter aerogenes
atgataatgcagagtaacattcctttgactgagagtatcgaaaaacggatcgccattaccaaatggagaacaatattttttcacaatcatgttttttgtagcaacattttgaacactatctggaaggtgagattcatttttaggctttgtagtatctatagctcctaccttaataaaaacaatgatgtcatcattcgtagcggagatgctttttatgcttaa

SEQ ID NO: 110125 - DNA, 2895 bp, Enterobacter aerogenes
atgcctatctatccgcaatctgatgttccgcctagcgtaatggataatgctcttcaggcaccaactggttttgatgtatcgctgccagaaggaactaacccggagccacagcagcaacaaccgtcagtatggaatgctgcttttagtcagaataactcacttgttgggatggttcgcctacctaagcagtttgaagtctccgcagggtataacccttattctgataaaaacgaactcagaggttacgagcagtggggaacggcttttgctgattctcgatcgccagaggaaaccgcctggattaaaaaccagatagatcaagaaaatgaaaatagaaaagttactgctgaggctggctgggaaggaactttagctaacgttgcatctggtatgctcgaccccgtcacagtcgcatcgatgtttatccccggtgtgcagggaagcctggccgctcgtatcggttctcaggttgctattggtgccgccggtaccgcgcttagcgaggtagcgctcaataacgagcagtacaccagaacagccagggagagcgccgcacacatcacagccggcgcacttctcagcggtgtatttgctaccgctggcgcgatgatcaccccgtcggtaagaaacgcggccacccgtgaagtggcggaggcgctcgataatatgaacgcctcgccaacgattaacgacgcagccgatgccctggcggatactttaccgaacggtggcagcgtcggtgctatgcgtattcgcgaagctacactggaagatcttacgccagtgtctggcggcccgctcggaaagctggctaaaaaagccggtagctatctgacgccgatcacccgcctgatggaatccccatcaaaagaagcgcgccggacagcgctggagctggcagagaataacttcacgctggaaggcaacctgcgcggtattgaaacgccggttgcagctgagacgcgcgtacgtggctggcgccgcgaagaggcggccgtcgttactgcgaataagcaggcatacacccagtacaaagccgaaggcggtgatctgggttatacggccttccgtgaacaggttggcgaggcgctgcgcaacggcgacgtgcacgtcaatacgaaagtgcaggaagcggcgcaggcaatgcgtacagtcattaaccgcgtgaagacagcacagcaggaactgggcttacttccgccggatgccgaactgaaagcgatgggacagaccagctatttcccacgcgtgtacaaggtagggaaaatcgttagcgagcgcgataaattccgcaacatgctggttgactggtggtcacgcggtgagaaaaccatgtcccgcgaagatgccgaaatcgccgccgataccactatcaaccgtatcgttggggccaaaattccgcaggagtttgccaacgtctttatggtgaaagcgccgggcagcactaaatcgcgtacgttgagcgttcccgatcgcctgatgaaagattatctggagagcgacgctaactacgtcctgcagcgtcatatccgcgaagcctcggcagaaatcgaattaacccgcacctttggcaacaagtcgctggattcgcagctcgccgccatccaggacgagtacgacgcgctaatgcgtttacgcccggcggaacaggaaaagctggcgaaagcacgtgaagccgacctgcgcgatattctggcgcttcgcgatcgcctcgtcggtacctacggtatgccggatgacccatcatcatttttcgtccgcgccggtgctttcctgcgtagcgccaactttgtaacgaaactcggcggcatgacggtatccgctatcccggatctggcgcgcggcatgatggttaacggcttcagcaataccatgcgtggatatggcgcgctgatcacccgctcgccggcttacctcgccagccgggcggagcagaagaaaatggccgtggggcttgaaaccatactgcatacccgcgcgcgtacgatgggggatctggtcgataactcttcacgtacgacagctgcagaagctggcatggagcgtattaccgatgtgttcggcaagctgaccatgatgggccactttgacgatatgaacaaatcggtgaatggcatgatcacgtccgacggtattctgtccggcgcgttccctgcgaagcgcctggcaaaactcggcatcaatgagaagatggccgaacgcatccagcgagaatttcagaagcacggcgaagttattcagggctggcatatcggcaatttcgaaaaatgggatgaccagtacgccgctggcctgctgcaatctgctgtgctgaaggatgtaaacaataccgttatcacgccggggattggtgatacgccgctatgggccagtaccccgctggggaaaaccgtattccagtttaagtcttttgccacggcgtcatataaccgcgcgacgctcggcggcctgcaggaaggtaccgcgcagttctattacggtaccgccttccagattggtctgggctctttgacctatgcgcttaagcaggcggctaacggtcgggaagttgatttgacgccgcagaagatggttctcgagggcatagaccgttctggtatcctcggcccgctgatggaatataacaacatggcggaaaaggcatccggagggatgatagggttagggccattactcggcaccggtacgcagtcccggtacgccagccgcggctttatcggttcggcactggggccaactttcggactgttggatactgttacagacgttaccgcaggtgtgctgaatggagatgccggcgatcgtgttctgcacaacgtgcgtacggtgctaccgggaaataacttgttctggatcgcaccattcattaatcaggttgaccctggtatacgctaa

SEQ ID NO: 110126 - DNA, 2691 bp, Enterobacter aerogenes
atgccaatagtaccaactgtacaaggtcgccaaattgaaagtcgcggcgtgcagaccggagggtttcaggcattcgatcagccaaatatcactgacgcattggctggtgctggtcagcaagccttgaatgtttttggtgaggctaaacaaaaggctaatgttgccatggcgcaaaatgcgtcacttaagctaagccagaccgaagaggaattaaaaactcagttgtatggactgcaaggacagaatgccttagggaaagggcatgagttcactcaaaaatataatgagcaagttcagacattatctgactcgcttcctgatgacgcttccagacaaatgttcatgcagcaagcaagattgcagcagattcaattccaaggaaatgttaacagatatgaaataggtcaaataaactcttttgaaaatgatcaagtaaatgcaacccggaagttacaaatacaaaaagaagctgatgcatgggataacccgcaggaagccgcgttagctaaaaatataagaacagtttcaattgcaagatatggcgcagcccgcggatggtcgcaggagcaaatgcttgcagaaatagaaaaagataatcaagaggcgacagaattacgggcgaaaaactatgctgtagcaaatccaattggctggcttggaggcaattttacatcagaagatactggcgagttagatatgcgtgccgttggcctggtagaatctggtggcaagcaccgcaatgctgacggcagtctagtcacgtctccggctggagcccagggggaatttcagttgatgccggataccgggaaagaactggcagctaagcgtggggtggaatacaacccggaagatccggtgcagcatgcgcagcttgcgcgagactatgccgggcaacttagtaaaaaatatcagtctgaaacgttggccggagcagcatacaactggggaatgggcaacgtcgataaactgctcgctaaaatcggggatcctcgcaagggcgatatcagtatcgaggattttgtaaagcaattaccgtcagaaactcagggatggttatcaaggtacaaaaaaaatacgactggtatggacccattatcaatatataaaattgataacattgcacattctcaaatagagaaacaaaggagtcttgtccttaaagaacttgagcctgcttataataacacaatggcccaacttaataatggcgaggtcccggattctatcccgtcaattccatcgataatgtttggttttggagagcagggcaaaaaaatggtaattcagcttgatattgccatggataatgccaagacttttcaggcaatccaatacctttctccgacagagcaaaaagcggaacttgagaaggtaaaacctcaggttaatgacccggattacgcattaaagtttgatgcgtatggaaaactaaatgcattagtagccagatccaatgagacgattcagtccatgaaggactccaatcgttttaacgaggctttagcaattggtgaaaagcttgacccaagcaataaatccatgaagaaagctgctgacaacactccatctgcgcttaatttccgcattaatgatgccactacccatgacgcgatcgtgcagcaggtcaaccagaccggcattattcctactcaagttacatctcagctaaatgccatctcccgctcaagtagtcctgaagtggtcaagcagggagcgaatctgtttaattctctgtacgaaacagatcctgcctctgtgggtgacatgcctaaggatatgcagagtttttacctgactgttaagcaacttaccgattctggaatggcgtcagacgaagcggtgaagcaggcgcaaaacgttacttataaccagtcagatgcccttaaagctcagctttcttccattcagagctccaaggagtataaaaaagaacgaaacagcgccatggattcagccagagatagcatggctcagtggttaagaattgatcctgaagcagacgatacaacaacagatgctgttaatttccgcaatgactaccagacgctttacgacatcaactatcgtaattctggtggtaatgctgacgttgctaaaaagatgactaacgttcagatttcccgtacctggagcatcagcgacgtgaatggtagcgctcaatttatgaaatacgcacctgaggcgctctataactatgggccatctggttggcaggcttcgcagtggaaagaagaaaaagaacggctaacttatggtgagcggggagaagaaatatcaacaagcccaacccagctaggcatcacatcaggctcagcgccagttattaagtctaataccccagagtccagaataggtggtgaactggaaatcacccctgatgttctaaccacgcataatggtgattacgccattatggttaggatgaaagataaagatggcattgagagcgtgcagccttattacgataaatatggacgccctatgcgttggaagccgtctctggaggattggaagccatatcaggatatgcaaaaagagagcgaggtaaaaggccagcaagagattattagaggccaggaaataagaaatttcaaagataagcatcgggctatggatgagcaatatcgtaaattccataacgatcgtgttaaccgtttcaaaaactatttttcatgggatgccgaataa

SEQ ID NO: 110127 - DNA, 699 bp, Enterobacter aerogenes
atggtgacgttagtagacgactgtccaaggtgtggttcacagaaaattacttttgatgttaatggattgaacctcatgaaggtttacacaaaccttggtgcaggaaaaactttccagtacgagatttactgcgtttgccgagaatgtcgacaaacaactatgtttgtgtgctggcctttagaaaaaaataaaactttagatggttataattggggtggtggtggttttgggctaagagatgttgcagaagtgggcagacctatttcaccagctgacatagccgtagaagatccaccagaatttttgcctgagcatattaataaagcatatgaggaaggagcaaaatgtttgggaattggctgctataacgcagcggcaacaatgtttaggctgtgtcttgattacgcaacaaaaggtctagttcctgatggtgaacatgggccagcacagagaatcaagagaagcctggggttaagaatggagtggctttttgacaaccaccttttaccagagtctttgagggaactggctgaatgtgtcaaagatgatggaaatgatggcgcacatgagggggttttggataaggatgctgctgaagatctagaggattttacctacctttttttagaacggctttatactgaacctcaacgccttatcgaagctcggacaaggcgtgagcaaagacgaaaaaaataa

SEQ ID NO: 110128 - DNA, 714 bp, Enterobacter aerogenes
atggttaacctgtcaaaacctgtcactttccgggccactgatagtggctctgttgaagtgtatttcgggaccagtacgcgcgcgggtaagcgttcggaaactgactatctggaagatagcgtgtccggcgccggcgccggcggtggatgtgggggccatcacaccaccaagcttaaattgccgtatcgtgacaaaaagggcttgcggtctgaaggtaacccggtctatggttatagcacgccagcaaaatctggtgtcgggattggcgtcccggagagtttacaggcgacctatgacgcgccacgcgtctttttttgtgtcgttaattcagtacacccttttttctgcgttgcgggtataatccgcgtcgctcacaaaataatggtgggctggatgggggcggagaaatccgcgccggtttcctgtaacgccggttacgccaaccctgttcagtccaccaccagcgaaattggcgtttccggtggtgggtttcagacccagttacaggaggctgccaccatggctactatccctacccaaaatccacaatttatctggatcatcgctgctatacgacgtgatagccaatccgtcactgtaaaaatcttccacgttaccgcagtatctgaacgcgaagcccgtcgcactttagtgcgtgatcacgtttgttttttcgctggccgcatccgtctgacggaggtggatcatgcgtaa

SEQ ID NO: 110129 - DNA, 561 bp, Enterobacter aerogenes
atgactatcaaaaatgcccgtgccgggcagggcttcgcttaccctgaaaatagcagcgatgatatttcggtcattaaatttgaggatacaaaagttcgaattgttaagatctttggcgaaccttggtttgtggcggcagatgtatgtgcggctttggaaatcaccgatcacaaggttgctttgcggcgtctcgatggtgatgaaaagggggagtgtttaatacccacccttggcggaaagcagactatgcgaattatatgcgagtcaggtttctacaaactgattgctcgcagccgtaaggccacaatgcccggctcgtttgctcacagcttcagcaactgggtattccgtgaggttgtcccctctatccgtaaaacaggatcctacggtgtgccattcgcgttcttgaatgaccatacccgccgcaaagaactctatatgaagaaggctagcaggcgcggtaaagaccttcagtcgtgcaagggtgagaaagctcgcttggccgccgaagaaattgaactgtggcgtaagttccagccggatctgctggaggttcactaa

SEQ ID NO: 110130 - DNA, 213 bp, Enterobacter aerogenes
atgtctaatacccttatacgtcttcctgaagttcaacgccgtactggctacagcaaggcgtggatctatcggctaattagccaagaccgttttccttcagctgttaagatcggttcccgggcgattgcatttgtcgaaagcgaagttgatgaatggataagccagcgtattgaagaacgtgatgcggtaatttccacaaaatctcaactgtaa

SEQ ID NO: 110131 - DNA, 678 bp, Enterobacter aerogenes
ttgattgcgcatgaggtgttgattcttgagcgtgtcggtttggatgttttacctggtgtagggatgttcccacagtggccatgtttgcgtgttaacgctgaaaagattcttgatgccatacacaatggagaaattgcttatggacgagatggcaaaactgtatctccgggagagcaggtagctaagcatcgccttactattcgtcactcagatcttaaaacatggatggcgaaaaattatcccaatcagaagccctctttcctttttgataccgttgagcagcaattgcatgcgggaattacagttgatgcatatcagacccttcaggctgaaaacaagcgtcttaatatccgattagataatgctgtaaagaccttccaacaacagaaacatgaaatctctgaattacagggggagcgtgactcgttacgacagatggtagataactcggtacaaaatatcgatgggcgttcagagactacttatttgaatataatcggtgggctactttctttgatgctgggcagttcaccaagcggtgaaaaactgtccaggttcgccaaccaggcctcaattatcagctcgatgcttgcccactttgaggggattcccggtataagtgttagaacgcttgagaacaaattttctgaggctaacaagagcctaaaaaaacgttga

SEQ ID NO: 110132 - DNA, 324 bp, Enterobacter aerogenes
atgccttttcaagagaactacagctttttgaattgtaagacactcgacgccacctcacgccctctgattttggcggctatgccagcccgcagaggtgtacgggttttcggggatcagcctagacatagcctattctttgttcgtctacccaagtctactatcgtctttatatactgtctatgcatccagttaggcacgtttcccgaacgagccatgcaccacattttcaccattctccatcgcctgcatataatcggcataccactggagcatttcccgccggccgtccagatactgagcgtggttgtatgtcccgcggattga

SEQ ID NO: 110133 - DNA, 1215 bp, Enterobacter aerogenes
gtgaagctcacagcccgccaggtcgatacatctaaagctaaggacaaaccctataaactgtctgatggcggtggcctttacctcttggtgaaccccaacggcgctcgatactggcggctgaagtaccgggtcgccggtaaagaaaagtcgttggctttaggtgtataccctgaagtctcgctggccgatgcacgtcaaaaacgagcagaggctaaaaaagtactggctgctggtggtgacccggggcaggaaaagcaggaaaaaaaacatgctagggcgatggccgtatcaaacagctttgagaggctagcgctggaatggcatgaacataaatcgatgaattggtcagcaggctatgccagcgacatactggagtatctgagaaaagatatttttccttatattggctcccggtcgatcactgatattaagcccgttgatatgttggctgttcttcgcaagatggaacaacgtggagtacttgataagctcaaaaagacacgtcaagcctgccggcagatcttcacctatgctgtcatcaccggcagagcagaacataatcccgtggtcgatctcgccagtactctgaaagcaccaaagcaaaaacacttccctcatttatcggttgaacaaatacctgactttctgcgagctctgaacgactatagcggcagcgtggtgactcgaaatgctacccgcctgcttatgcttactgggctcaggacaattgagctccgtgcttctgaatgggttgatatcgacttcgataaggggatttggaatatccctgcagagcgaatgaagatgcggcggccacatctcgttcctatctcaactcaggttcgcgaactgcttgaagaaatccaccagcttaccgggcgagggaagtatgttttcccaggacggaatgatgccggtaagccaatgagtgaggccagcattaaccaggtgattaaacgaatcggttatgacggtaaagcgaccgggcacggcttccgccacaccatgagcaccatcctccatgaacagggatataacactgcctggattgaaacgcagttggcccacgtcgataagaactcaatccgcgggacatacaaccacgctcagtatctggacggccggcgggaaatgctccagtggtatgccgattatatgcaggcgatggagaatggtgaaaatgtggtgcatggctcgttcgggaaacgtgcctaa

SEQ ID NO: 110134 - DNA, 1140 bp, Enterobacter aerogenes
atgtttcagatcttcattccggtgtacatgcgccacattttcggcgggaaacgcctgtaccggaaatctacgggaaccaaagaccttaacgccgctaaacacttccgtaatcacatgctgatcgagtggaagacactcaaggaacagtattccccgaatacggaggaacggcgcatacaaaacgccatagccggattgcataagcagaccacgctacgcgccccactccagaccgtaccaacattaaccgccatacgtgatcaatacgctgaaaaatacagtgataagcgctcattctcgacgctggctaaatctgctcgcgccgtggaggtgtttcttgcttcgcttgaccgtgcagacattcagatcacggagatcagacggtcacaagtggcgatgtttatcaatcagcaggacaagaaagcccctcaaaccgtgcagaactggctaacgtgcctggggagcctgtacgaatacgcgcggagaggttacgacgacatagcaccagataacccgtttcacggtcataacttggaagcacgagccagcattgttagctatgagccattcgagcctgatcagatgcaaaagctacttgatgcagcagagccggagatcaggaacattattataatggggctgttttcaggatgccgccttgatgaactggcaagcctcaagaagtcagagatccagatggtggaaggtgtgcgctgtttctacatatcgaagtcaaagaccaaagccgggatcagacatgtggcgattcattcccgattagctgcaattgtcgatgactacctgaaccacagttacggcgaatacctgttcccacaggcgaacaagataaacaggaaggatggtaaaaaaggcccatactatagccagaatttcaccaggctacgtgacaaggttttacctaccgctacagatcgtcaatgcttccacagcctgcgcgggatgttcatcacctgcttagaccgcgcaggggtgcaggaaaccaggatcggcagtataaccgggcacaccgaacagaaagccaaaacggaagcgttccgcacctattctcaaggagcaagcatggaagagttagccgggtatgtggaattggtagattatcctgatatcgctatcccataa

SEQ ID NO: 110135 - DNA, 285 bp, Enterobacter aerogenes
atgtttttactttttcccttttttcgaagggattttcactgtttcagttacggtagtaccgggacgacgtttcgcttctcctggcttgacgaactgaccagtaccagcatcacgaactactttttgattagccataaaaacacctcatctcagagtgaaaggatgaactgcaccaaccttttaagcgtaagcggcaaactgaacagagtcaaacaaaaataccacataagggagaaaatacaatcagcatcacaatatatggtgttttattggtggtattgttag

SEQ ID NO: 110136 - DNA, 1863 bp, Enterobacter aerogenes
atgcttgaaataaacgcctcacgtatatcgaacgtgatcacattttctgttgatcagaatagtcttagagatgcgaagaaggccggaaaggatttacagaagtattttcagtctctggctgagcctaagctgaggttttctgctcagaagcaacgtagacagaaagcgcgtgaacaaatagcggattcaaaatccgccattcctaaaacgtctaatgccttgaagcaacagcgtattgctgagaaagccaccaaagcgcaaaccagggaagcggcaaagattgccaaaagtaatgaaatggccgatctgaaattccgtagtgctaatctccagatgaaaggcatagccgggaagtacggcgttgacccactaaagcaactggaatttgctcgcttcgccaaacaacagacagagcttttccgtaataaccagatcagcagcgcgaagttaaattatgaactacgtgaaagaatcgcactgatgcgccgtgaggcagcgttacaagctaaagtgacggcatccactcaggcacaagcggcagccctgaaacacgccaaacgcacggactacaaaggcgcggcggctggtattaaagagaaggggctgaatctgatcggtggtggtggtgctctgattggtgcaacagcggctttcgctggcggcgctggtgtcctgtcccgtatccgtgacaaagggaatgagaatcttgagcttgtccgtatgtcggaactcacgaagttaaacccaaatgcagtgaaaacgattgtagcttggggccaacagcacggcgttgactcggcctctgtggacaaaataacggatgggtttgggaaagatacccgcgagagaatcagcgaaacggtattaaacagccagttcaaaggtggtaaatggtctggtggaaatagtgccgttgacgaagtgctcaataagtttggttggggcaaaggcgatatttccaaattcgcagataacccactggattacctacaggcagtagtaaacgaaggtcaacgccgtgggatgaaagacggtgagatcgggcatcttctcgaaaatacttttgatgatggtatgcactaccttgatctcttcaagaataacggcgagcagtttatttctactcttaaacagcttgtggactccggtcagacattgaacgatgagcaaatccgccaggtatccgcttacggcgatctgtctgtggctatgggtaacttgatgaacggagtagacaatcagttgtttacaggctggatgaaaggcttcgccgatgggggtgatgatctcgtgaagaacaccagagtgattacggaagcggcgggaagcctgggagagggattaggcaatctctcgaaagaaatcaccgggtttgtgggcgaaatctccagtgtggtgtccgatctgaatgctggtctacggtcacgtttcccttcatggtttactgatagcgataagccagcggcccaggctctttacgatggtgctgtgggtggctctgcgaatgcggcggctgattgggtacaacaacaaacaggggtggacacaaggacgtttggcccagcaatagccgaatggctcggatttggtggtggtaatgccggaacagccgccagtcagtacagcctttcaggtgattctctgcgtgattctgcaatgtctcttggtggtggcaatgcgccagcgtacacgctgaatcctacattcaacctcacagtagcgccgtccgtaccactgacgatccaatctgacactggaagattagctgattacatcgacttcaacgctaaagcgtcagcagcaagtttcgaacagtcgttaacgttagctattagcagcggtcagagcagcactggtggctaa

SEQ ID NO: 110137 - DNA, 198 bp, Enterobacter aerogenes
atggaacttattataaaaagcgccctgcgtggtgcagtaaaaattgatgatgcaacggagcttttaacgcttcgtcaaatatgcctgatctacggtgtgtcatatgacggtgtaagacaacgtatgcaccgatattctgaaacgcctaacacggcgataaactacttcgttcagaaacaaggcggtggtgatgcttga

SEQ ID NO: 110138 - DNA, 1041 bp, Enterobacter aerogenes
atggcaaaagacctattttctggtgtggtttatgactcattcaccagcccgtttactttcagtactcagttaaacaccatcatttctaaccttgggcttttccgtcaggaaaaccacacggttaatactattgctcttgagcagattacagatgttaaaaatctggtggctaaggaaaacagcccatacgcccaaagcgattggaacagcgcccagcgtcctacgttcaccaatgccctgtatcagatgaaatactttgcgactctgaacagcgtcacttctctggatctgcaacagtatgccgcgcgtggaattgccgacactggcgatcaggtgagcattgcactgaatgacttctccgatagtcagtattcaatggctaacaatgccgtagagattgaccttgttaatgcgctgcttggtctgcgcgtggattccgatttcgccggacagggtgatcttgatttcctcgctggcggtagtcgcacagagtacaccctcgacgtgagcgacacggcgaacatcttcgaacaactaagcgaaattgcccgtattcaaaacgtggctcttggtgaagggctggcacaacaaaaacaaggtgctgtgatcctggctgctggcgctgctgctaaagcacttcgctatcatccttcaatcaaagatttcatggtgtacacgctgaacgttaacgcaagtgacaacttctatacacgagcggtagcggataaccctgcttatgaggtgtggactctgaacgggatcacggtgatggatgttacaggatatagcttgatcactgacaaaatcggtgtggacggcttcgcttacataccacgtatgtctgacagtgctaatgcgctggttctccatactggtgtgggagttcgtcatctgacgcttggtaagagcgccaccttgcataatcaatacatcgtatccgacagcaaatggcagttcccatcaattgcaacggaatccagttttttagcgatcaacaatattccaacggctattgttttcggcagcgtttcagcaagctga

SEQ ID NO: 110139 - DNA, 378 bp, Enterobacter aerogenes
atgaattttggaacatttcaaacattaaacggggataacagccacgcccgttacaaagtggtggcatattgcgacgacgcaattctccaggacaagctgatccgtgtggaatccggtgtatctgccgatcttattgttggcgaccttgtggacgctacaggcgctttagcaactgcccccggtgatatcgcttatgtggtggtggagccagccagcgcgggaagcaaagcctttgttgtggcttctcctactcacgtcattctatctcttgcagggattgaatttggctctatggacgaatcattagctcaggcacagcttgcaacgcttggattcactttctctgatttcaacactgtagcgcttcgcactacgtaa

SEQ ID NO: 110140 - DNA, 234 bp, Enterobacter aerogenes
atgtttcttatgaactatgaccgtgtgatcactcataaatcatcttcacttgtcctcactgaaaatatgatgaaacaagctgctgacgctttcggcgtgagcgtcgagaccattcgacgggctacagaagaatactggcctacatccacgatcaccaaatcaaaagaaggttctcacccgttaaacgggcttgagcaacgattaaaactattagcaaaaggaaaaaccaaatga

SEQ ID NO: 110141 - DNA, 303 bp, Enterobacter aerogenes
atgcagaatgaatatgcagcctgggcgcaagatatccttgacgttttccacgaccagcaccatatgccacttcttgaggcagtgaacgccgtctatcgggcaagccctgagaatctccctgagagcatcgcagaggcgtttaatcagataagccttgccgctgcatccctgcacgatattagcttcttctgtgagcttgtggagagcttacgggatgaccaggcattgcttgaggagcttaacgggctggcgctgtccgtccaggattgcgctgtacagctttcagatctcatgaatgaataa

SEQ ID NO: 110142 - DNA, 210 bp, Enterobacter aerogenes
atgattgacgaaatcacacaacagcgacattttaaagaacgtattgaatacgtggaatacctttttgaacaagcgttatctatcgaacaagagaataacgtagaagaaattgatcacttagtcgatattctggctacagaggccgcgccattcctggcagggattcaggctatcaagggtatcagggagcgtatgcagaatgcagaatga

SEQ ID NO: 110143 - DNA, 375 bp, Enterobacter aerogenes
atgagcaaaagagaacgcagtaacattctacgaatcggtaaggcagcgcaaaaacagcaacagcgattattaatcacttccctcgaagaaatccccggcactttgatagaacacgttgaattagtggattcacccccgccagacggtgaaacgtgggcggcgatgaatgacattctttcttcgtgtccgggcgtttattacaaaccacgtaaacgcaaagtttacacctgggacgatagccagctaaaaaaatggcaaatgctgggcttctcatctctcaaccactatttgacgtataacgcgatgaataacaccgtggcaggagtcagagaactggacggattattttttatggagaatgacaacaatgattga

SEQ ID NO: 110144 - DNA, 816 bp, Enterobacter aerogenes
atgccaaaaaagaaaaaactcgtacctaattcaggtaaatctatttcagagattcagcaactacccggtaatacctatacggaaaatggtgtttcatcgctgacgtttgccaaacacaacgaatactttaaagacataaactgcatttattcggaagaatacccggaagggaaaatgctcgaacttgttcacatcgttttatactgtcgcttccagagttttcaagcgaatgggaagaaatgttatgaaagccaagggaaattaggtcaaatctgtaaatgtgaccctgggacgataggcgataaggttaaagagttggtaaaaatgggactggtgataacagacgaacacccagatcccaatatttcatcgctgctttacactgcattaccacttactgatgctcacgttatcccaccagatcaactaccagcagcgcccattatcgtttctgccgtgaaatctaaccagccagcacaaatgccagcccctgagccagttaaggccgcagaggaacagtcagttcctgatgatgaccttccttgtgtctgggatgaccctgattatcaatcaacgccaacgatcccgacgcagcaggacaagccagagcttccctggggcggtagaaagggatttaaaactaatggagatccagcggatgaaggggtgcagtgggcattaactgaaacaatgggcgatgaagaaaaagcctaccaacttctttccagagttttatctgaatactttggaagagcagaagtatttacgccgcgaaccacggtagtctacgacgaattcggcgagataccattttaa

SEQ ID NO: 110145 - DNA, 156 bp, Enterobacter aerogenes
atgaatatccgatttaaccccgaggtttttaacgctctgcgtgaagaagcggcccgaaaagggctgagtattcccgcactcgttaatgccattgtcaaaaatactatcctacaaactgaggaaccaaatgccaaaaaagaaaaaactcgtacctaa

SEQ ID NO: 110146 - DNA, 195 bp, Enterobacter aerogenes
atgaaactcttaattgtgctggcgctggcattcatcagcgtacaagtccacgccggaaagataacactgattcttagtgacgaaattgaaacatctgatggtaagatttgcctctacgagaacgcagttagaagtgagcaagtaaaagtggctgccagcgctcaatgtcgccacacaatgaccttcgaggattga

SEQ ID NO: 110147 - DNA, 198 bp, Enterobacter aerogenes
atgagtaacaaaaactacgaaagccaccgtaaagcaattgttagcaagggaattccttccgacctgttaaaacggatcactgattccgacattcaggtaatcaatacctttctgacacgaattaacaaactggaactaacacagcaggaaaaagaatggattgttgcacaaattataggaagggagtttaaggtgtaa

SEQ ID NO: 110148 - DNA, 579 bp, Enterobacter aerogenes
atgggaagtgaattggcttcgggtttgttaggtgctcttgttggtggtttatttacgttgttggggacattgatcgagggtagaagacaaaagcgggcactggaagaagaggcaagaagcaaacagcgtagtgtgcttatcggaataagaactgaaataatcaccttgatcgatctttataaatcaaggatgtcggatagtattgataactacgatgggagtgagccattttcaaatatattcccgctttctcaaaactacttctcattttatgataccaattctctttcattggcttcaatcaatgaagaagcattaaaatcaatagttatgttttatggcagtgctaaaggtcttgttgatacttacaaaatgaacaatgatgttgtagatgaactttctaagttacaaacgattttccatgaaaccaatatggatatccataagttcaattgggaacaaacctatcacattgccattgattacggaaaatcattaaaagatattcacaacgaagttatgtctcgtgttcaagtttgtcttgaaaatattgagagtgaagttatagcacttggctaa

SEQ ID NO: 110149 - DNA, 555 bp, Enterobacter aerogenes
atgggctggtcttcgttggttaggataaccattggtacatttctgttagctgggttgtcgttctctgcatacgcgaagaattgcaagaagggtataccatgcggtaattcgtgtattgcggcatggaaaacatgcggcggtagttcgcgttcgtcttctacttataaaaaatattcttatccgtcatcttctcttcatagtccaattcccaaatcctactcggattccccatcagcaaaggttgacggaaaaaacacaacttcaactgcgaaaacttatctctgtcagtattcgatagcaacaataaagaatggcagaatgggcgctttacgtgtgctggggagtgctgaagtaacattgtatgttgatagcttcaaagctaaccgcttaaacggtacatacctgctatcgccaaaactgaaaactaatggcaagttgatgacggcagatgataaaagcaaagtgtacgcctatgattcatggctgatgaactttgcaattagtgatcgaatcgcaaaaacgactgagcaatgggatcattgtcgtcaaaaatga

SEQ ID NO: 110150 - DNA, 225 bp, Enterobacter aerogenes
atggataaaattcacgcaatgcaactctttattcgtgtcgcggaactggagagtttctctcgcgccgccgatacccttgggttgcccaaaggtagcgtatcgcgacagatccaggcgctggagagccatctcggcgctcgcctgcgtcaaccgcaccacccgccgggtgcagttgacgcaggacggcatggtctattacgaacgcgccaaagacctgttaagtaa

SEQ ID NO: 110151 - DNA, 498 bp, Enterobacter aerogenes
atgagtcaaacgcctttattgagcatcgtggccgccgtgtataacggtgaaaaattccttgcgcaattctttgaatgcctcgaacagcaacagttggcaagctatgagctgatcctggtgaacgatggttctaccgacggtagcctggcagttatcgaccaatggaaagacaggctgcagaacgtcaccgtgctggagcaggagaatcagggcgtctcggtggcgcgtaatacaggtatggcggcggcaagcggtaaatacctcgccttcccggatattgacgataagttctatcccggcatgtaccgcacgctgctggaaatggcggaaaagggcaatcttgatgtcgcgacctgcaatggccgctatgtgtacgaaagccgcgacgacattcatccgattttcccgccagaacgcctgcagtccactggcgtcctgccgggttacgtctggctgaagcaggcgctcgactcgcgtaagttcctgcacgtcacctag

SEQ ID NO: 110152 - DNA, 282 bp, Enterobacter aerogenes; identical to SEQ ID NO: 5229

SEQ ID NO: 110153 - DNA, 222 bp, Enterobacter aerogenes; identical to SEQ ID NO: 8585

SEQ ID NO: 110154 - DNA, 297 bp, Enterobacter aerogenes; identical to SEQ ID NO: 5319

SEQ ID NO: 110155 - DNA, 255 bp, Enterobacter aerogenes; identical to SEQ ID NO: 5118

SEQ ID NO: 110156 - DNA, 1869 bp, Enterobacter aerogenes
  misc_feature (615)..(624): n is a, c, g, or t
atgtattttagccaagatgccgtgctacaggcaatacataaccttaaaaaagttcatcccttttttgggataacttttttagtttgtaagatgaacaaactacctgtgggaagcagcataaaattccctttagatgctgaaaacaaaaatttcttagaaaaaacacacaaaatttcgcctgaatctgatttctattatcagccatttaaatcaatcagtaattggcttaagaatgattatgcttcatctggcttacagtcaataaatactcgttcctttattgatgcatttattcatgaaaaaaacactcaatattgggggtggggaaataattatcttacttacctttcatctcatcaatccataaaaaagaataagattccattactctcgttatgcatatggatatataaatacaataattttaatgagaaaacctcatatcaagatattaaagccctttttgtttctgactttaacattacagatgaagaattaagtttattatttgaagaccaagatacttcaattgaaaatttacttttaaacgaatgtatcacttggaataaaattaaaggaaaactgcctttgccgccagattcagaaccagaaaannnnnnnnnnggtggcacgctatcacttttatctattgaaaacataggtcccgctaaaaacctttctatagaacctaaggtacgtttgaatattataacaggggataatggtctcggtaagtcatttattttagagtcagcctggtgggcattaaccaatacatggacagatcgagaagcttatccagatcctcgactgcgtggagacaggataagtttaacttattcgattaaaggtaatgaaaactttaaaacagaaaacacagtaaattatgactgggaaaacttttgctggccaacgcaaaatgatcgtccaactatacctggtctaattgtatatggtaaggttgacggttcttttgccgtctgggaccctgcaagaaaatattcatcacagccctctaaaaacgataaagaaaaagctatatttacaagtttcgaaatatggaatggtcagagtggtatattagaaggactcattagagattggattacgtggcaaaacgacaaaaatagccaacatttcatacatttccaaaatgtattgaaaaaactatccccacctgatttgggtattttagtccctggaaaacctgtaagaatacctgatgaccctagaatcatacctacactcgtacacccttacggtgaaatacctataacaaatgcgtctgctggggtaagaaggattgttgcattagcatacatgatcgtttgggcatggaatgagcatcaagttatttcaaaaatgatgaatatccctccccagaataacatggttgtacttgtagatgaattagaagcacatttgcatccaaaatggcaaagagcatttttaccttctttaatcgaactaaataaagtattttcgaacgaattaaaaatacaatttattatagcaactcactcacctttagtaatggcatcttcagaggaagtatttaacgatgaaacagatagtcttttccatttacaacttgacgagtatggtcttataaccttagaggagttagattttataaagtacggagacatctcttcatggttaatgtcgccgatatttgaacttcgtcaagctcgttctcaagaaggagaatcggctatagaagatgcaaaaaaattacaagaatcttcagatccaagtattcgttcaattgaacagatcactttaagattacgtaagtatctatctgcttctgatcggttttggccacggtggatgatgtttgctgaaaagaatggattcgacatatga

SEQ ID NO: 110157 - DNA, 351 bp, Enterobacter aerogenes; identical to SEQ ID NO: 15282

SEQ ID NO: 110158 - DNA, 744 bp, Enterobacter aerogenes; identical to SEQ ID NO: 15283

SEQ ID NO: 110159 - DNA, 417 bp, Enterobacter aerogenes; identical to SEQ ID NO: 15292

SEQ ID NO: 110160 - DNA, 1449 bp, Enterobacter aerogenes
atggacgtgtgttacctttgcggaaatgattttaatgaaaattctacagtagaccatggagagcatgttatacaacaggccataggtgggagtttagtcagcaagggcatcctttgcaaaaaatgtggtggcgagctcagccgtaaaatagataatccttttaatgctatatttgaaggaatagcaacacggcttgatataaaaaaagataggaaggcaaacaaaagcccgtccatacccggtacgatagtaagcgaaaaagatgcttatggcatgaaccttaaagatactaaagttttttggaaaaattttaaagtctctcccatcaaaccctttcataggtttactgaggattataaaaaagtcattatctactcccaaaagaaaaattttgagaaccataaatcaatagttcaaaaagaaatccagagcatggaattggatacccctcctgaaataatcatgtgcgacgacattgattgcaatgtgcaatatcattttcctatggataatattgcttttaaaaggggggttgcgaaaattgccattggttttgcctgcacacacggaatttcaagagagactttaaatttagcgttaaaaatctcagaagacaatcacggatatattgatgaagaaataattttagttcaatatgctcctttgagtataattgatagaatcattgaaaatgataaggcaagtttagctaattacccttcacataatttaatactatttacttcgaaaaaagatccttctttattatggtgttatattgagttgttttcaacctttcagtattatgtactattaagtgatagttatgatggcaagcctgtttatgagtaccattatcaacgaatcgtaaaatcagatgactatgtttttactccagacagaagacattataaagagcgtaatttaattttaggaggattgggaattacggatgagcgcatccaatcagcatatgaaaaacagaaagataataaaaataaaaaatcattagaacaaatcgaaatagatataatcagggaagagactaataagcagaaaaataaggcggatttcgaacgtgatatcaataattttgtcgattattgttcgcagaaaatattattaaataatgaccttgatattgaatttatgatgaattttaagaggaacttttcgctattcagtagggttgccttcaatgatgaggatgaagttgaaattttcgatatatcaagctaccgacgttactacatcgaaaatgaaaaacttgtagattaccctgaggccttaaatttgatgaaaatgtgtgctggatcagaattgagaaaatatagtttctacaaatttaatcagctcgaaagttatagtcaaaacaaggtgttaagagagaaagtaaggcaggtaaaaaaccttattgaaaaatcaaaagatgaaaatcacactgaatga

SEQ ID NO: 110161 - DNA, 498 bp, Enterobacter aerogenes; identical to SEQ ID NO: 15298

SEQ ID NO: 110162 - DNA, 576 bp, Enterobacter aerogenes; identical to SEQ ID NO: 5316

SEQ ID NO: 110163 - DNA, 387 bp, Enterobacter aerogenes; identical to SEQ ID NO: 15296

SEQ ID NO: 110164 - DNA, 477 bp, Enterobacter aerogenes
atgaaacaaattaccatgagcgatatgcagcaacagagcgcagcggctgtgcaatcgcctcggctccgcgcgcaccgtaatttccatccagaattaagcgattcggtccaacgtctggctattgccatggaacctgggacctacgtgcgcccgcaccgacaccctcacaccttcgagctactgttgccattaaggggtcgtttcgtggtgctgaattttgacgatcggggtaccgtcacccatcgggcgatattgggggaaacctgtacggtgctggagatggccgcaggaacctggcatgccgtgctgtcgctggataccggtggcataatttttgaagtaaaacacggtggctatcaacccgtggctgccgatgactatgcgcactgggctccagcggaaggagaaccaggaaccacggagcttatggcctggtatgcgcaagcgcaggtgggcgacagcacttttgccgtctaa

SEQ ID NO: 110165 - DNA, 441 bp, Enterobacter aerogenes
ttgcaacagtgccgtaaaggcggccttatccaccatttcccgaacaagcaggcgctaatattcgccctgttcgcgcgtctgctggcaatcatggaagaagcgattaccgcgctgatgcaacaggatggcgtgagctatggccggtttacccgcgcctatctgaactatctggcggatctcacggacacccatgaaagccgccagcttatggttttgtcgctggcaatgcccgatgaaccggtgctgcgcaaatgctggcgcgactggatgctggagaaactggcgcagggcgatgagctggataacagcccaaccggcacgctggtgcgctacgccgctgacggcatctggctttcggagttgacggaagggatcaccatgagcgccgaccaccgtcgcgcgctggttgactccctgaataaaatgacgcttcccgcgtga

SEQ ID NO: 110166 - DNA, 789 bp, Enterobacter aerogenes
atgcgctacaacatcaatgcccgttttatctacgacgccaccgacggaaccctgacgctgccgcaaagcgatgaaccggacagccagctatccctcaccgccagcgccctgtttaactattttctgcgccataccgagattgtcagccgggaagatgttctgaaaaaagtctgggatgacaatggattaacctcatccaacagcaatctgaatcagtatctcagcatgctgcggaagacctttcgccattacggcgtcgataacatcatcgtcaccgtctcgcgcggctatttgcagcttaatcccgaggtcattatcgaagcgctggacgacgcgccgccggtttcaccacaacagacgcctgccgaaccgccgcccgttacgacaacgccagacgcaccgcgctccgcacatgctcgcgggatgtgctggtacatggccggagcctgcttgctcaccattgccctgcttctggttgccttcagtctggtcggcatcagtgaatcccagcctatcgcgctgacccgcctcagccatagccagtgcgaactgctggccagcgatgaaatgcgacgttcggtcagtgaagagtcctacggcaaaaacttcgatgaggtacgccagcggctgaatattgcctgtaaacccggtgaacgttttcttttcttctacggcgatcggctcgaaaccaacgggctggggcgcgtgttccttgcccactgcgccatgcatgaagataacccgttcagctattgcgataactacttttactactcctggaagccgtaa

SEQ ID NO: 110167 - DNA, 519 bp, Enterobacter aerogenes
atgagactcgcgccgcgtccgttctttgccctctgcgttctggtatttattgccgccgccgcgtttagcgcctggcggctgctgcctgccgacaacgcgggtgtcatgagctgttccactaagggcatcatgcgctttgagaacatggacaaagagaacgttaacggcaatattcacttcaattttggcgcgcagggtaaaggctcgatggtggtcgaaggttacaccgactccgccgccggctggctctacctgcaacgctacgtgaagtttacctacagcagcaaacgcatctcggccaccgagcgtcattaccgcatcaatcagtgggaatcgagcgcctcctcgattgatgaatcgccgaacgtgattttcgactactttatgcgcgagatgtccgacagccacgacgggctgtttctcaacgctcagaagctcaacgaaaaggctatcttgctcagctctatcaattcaccgctgtggatctgcacgttgaaatccggcagtaagctgaactaa

SEQ ID NO: 110168 - DNA, 417 bp, Enterobacter aerogenes
atgctgcagggattgaatcatctgacgctggcggtcagcgatctggcgtcaagcctggcattttatcagcagttacctggaatgcgcctgcacgccagctgggatagcggagcctatctctcctgtggggcgctgtggctgtgcttgtcgctggatgagcagcggcgtaaaacgccccctcaggaaagcgactatacccactacgccttcagcgtggcggaagaagagtttgccggggtggtggctctgctggcgcaggcgggggctgaggtatggaaagataaccgcagtgaaggggcgtcttactattttctcgaccctgacggccataagctggagctgcatgtggggaatctggcgcagcggctggccgcctgtcgcgaacgcccctacaaggggatggtcttttttgattga

SEQ ID NO: 110169 - DNA, 1026 bp, Enterobacter aerogenes
gtgcttcagtatattgtttacagccggttaagggagggggtcgagcaacatcacgcccagtcaggcgctgcggtgcttgtcagcgtaaacaccggcgaaattctggctatggcatcctatccgtcgtttaatcccaaccgtttttccggtgccacttccgctgaaatgcgtaacgtggcgattaatgacagctttgagccgggttcaacggttaaacccttcgtcattcttgaaggcctgcgccgccatattatcagcagcagcacgcttcttgacacaaggccgttcagggttgacggccatcttatccgggacgtgggatactggccggcgctgacgccgaccggcatacttcagaaatccagtgataccggagtttcacatattgccctggcgatgccttcggatgcgctggtaaaaacgtattcatccttcgggctgggaaaaccgacagggctgggccttcccggtgaaagtactggttactttccgttcagtcgccatcgatgggctgatattgagcgcgccaccttcgcttttggctacggcctccgggtaaccccgctccagttagccagagcctatgccactctcggggcctgtggcgtttatcatccgttatccgttacacggttatccgcgccggtgtacggtgagcaggtggcggacccgaagcttgccgatgctgtaatcagaatgatggaaagtgatgtgttacccggcggaagtggcgtaagggcagctgtaccgggctaccgtctggcaataaaaaccggaaccgcagagaagttaggtgccggtggaaaatatgacggggggcatattacctatacggcaggcgtcgcgccggcgagccgtcctgaagtggcactggttgtggttattaacaatcccaaagcgggacagcattttggtggctcagtggcggcgcctgtcttcggccagattatcggtccggtgcttacccggctgaagattgcaccggatgctttacgtgctccggtggtacaccgacagtccggctga

SEQ ID NO: 110170 - DNA, 858 bp, Enterobacter aerogenes; identical to SEQ ID NO: 21685

SEQ ID NO: 110171 - DNA, 657 bp, Enterobacter aerogenes; identical to SEQ ID NO: 21684

SEQ ID NO: 110172 - DNA, 168 bp, Enterobacter aerogenes
atgcgcaatccatttttttgcccggccgaactccacggcctctttgagtatctcggcttccatcgtctttttgcccagaaggcgctggagttcgcgaatttgcttattggcggcagcgagttcggaggccggcaccacttcctcgcccgatgcaacagccgtcagtga

SEQ ID NO: 110173 - DNA, 657 bp, Enterobacter aerogenes; identical to SEQ ID NO: 21682

SEQ ID NO: 110174 - DNA, 441 bp, Enterobacter aerogenes
atggccgcaagtaatacttttaataagatcgttgtgagtaagaattctcataatggaagcgttaacgaagcgaagttctcgcacaacaagattcgttctcattgcgtcagtgtcagattaaatgatgaagagctaacgcttctcaatgagagacgtggccgtcatcgtaaaggcgaatggcttcgtatggcgtttctgcataacctcccctcagttattccatcgattaatctcgaagcatggaaaacccttggtgagatttcacataagttaaacaggcttgtcgctcatctggatagcaagagcaatgatagttctctctcacaaactgaactctttgcagtgaagcgtcagatctcagagcttcgtttgaacctgatcacagccgacctatggagatcaccttctgatgaagggaatgcaaaaaatcagcaggggtaa

SEQ ID NO: 110175 - DNA, 1773 bp, Enterobacter aerogenes
atgtgtaattctatcacagcagggaatgtaaatatggttgctccaactactattgagcggttaaggcttatcaccacccggcaagaattagctgctttattaaatttaaaagctcatttcttaaccaacatcctgtatagaaatggagtcaacacacaatacagccagtttcgaataccaaaaaaagatggaagctttaggctaatatcatctccttcatctaaactcaaagatattcaaaagcgtttagcagaacttctttacgaatgtcaggcgaatatacattttgaaaggaaaataaatcctgtattatcacatggttttgaaaaaaataaaaccattgttacaaatgcaaccagacatcgaaataaaaggatattgttgaatattgatttggaaaattttttcgagtcaataaactttggccgagttcgtggtttttttattgcgaacaatgattttaaattatcaccattaattgccacaactatagcgcaaattgcatgttttaataacagccttccacaaggaagcccttgttctccaataatcagcaatttgatatgcactattcttgatataagattaagcaagttagctcagaaaaatggatgtcaatattctcgatatgctgatgatattaccttttccacaaataaaaaagagtttccccaagaactggtaattgataatgatgttgtgaatgtcggggctgtgttacttaaagaaattgaacgtgcaggttttagaataaatcatagaaaaacaaggttgctttattcaacttcccggcaagaagttactgggctaactgttaataaaaaagttaatgtcgacaatagatattacaaaaaagtaagagctatggctcataccttatacaaggatcaatcatttgctattataaaggaaaatgcaaaaccgcaaaaagggactttaaaccaattagaaggcatgatgtcctttatcgatagcatagataagtacaacaataaattaaaactagctaacaaacaacctcaaaagtatcaatcttttaattatggtttgaactatgaaggaaaacttaatcgtagagaaaaaacactgagtaagtttttatattataaatattttcatggattacatgcgcctaccatacttgtcgaaggtaaaacagatagagtctatcttaaatgtgctttaagatcactttttttaacttatcctacattagtgaaaaaaaacaatgctacaggcaatataaattattcgcttaatttttttagggaaagtacaagaacaagttattttctcgatatatcagggggggcggctgaatttgagaaatttatcactcgttatccagagcaatataagcgatttaatcatacccctttgtatccagtcattatgattttggataacgacagtggaactagaaccattgttcgaaaaatatctaaatccttaggtgtaactgaggactctattaaaaaaaatagcttcacccatattatacataatttatatattgtactgacgccgctccttcctggagatagggactcatgtatggaggatctttttgatagttctgtattaagtactgttattgatggtcggtcatttgataagtctaataattataataaaagcacgcactatggaaaaaatgacttctcattgaaggttattaaagttaatgaaaaaaatattaatttttcaggtttcttaccagtactaaatgctgtgcgagattgtttagtgcattataataacatctctaaatga

SEQ ID NO: 110176 - DNA, 1107 bp, Enterobacter aerogenes
atgttaattgaaattataaacacacaggatgtagatcttaataacgccaatatacactcatcattgtgcaaccttttttgttccttcagagaaggaaaacatttaatattgactgacgtagattttctacataaggtttccgactttaaagaattaggtagtttaacttgcaatacagctcaaaatctcattcaaaaaaccagagaatttaagcaattaaagaacctagtaagctactattgcaaagttgatatgaaaaattcctctagctcttatacacaagataaagatgaaggtaatttcttcactgttggttattcattctttaatgattcctctaaaatacagtatacaaaattgctatgtgaggacataagtgattataaattatacaaatccatatcaaagttttatcaacttattaatagaatgggtggtataaatattaactttgaagtgctcaatggtggtggggctaatacaaaatacaatttcgataaaattcttgaagagcgttttctttgtttatgcttgcttgatagtgataagaaacatccaaaatccggatatggttctacagcgtcaaaatttaatgacgaaagtgattctgctatatgtaaacattatacaattgaatcccatgaagtagaagccttaattcctactgaaatagtcgatcaatgcattattaataaaacaattgaagggaaataccttaatgcattggagcagataaaagctttgactaaccatagtcctaccacgaaattatacttcgaccataaggaagggtttacaataaggaaagtgattgaaatagatgaaaaatataaggacaactactggaaagatgcaatagttaacgctccaaatttcaaaagaaaaggctgcctggaaaagctacaatgtgattgtacacctccctgtatggccctcgatggttttggcactgggcttcttgaggcgtgttcaaccgttatcgaaagaatgagtcatataaaactgaacgagtcactttctccaatattaattaatgagtggaacaaaataggcttaaagctattaagttggggctgttcatcacacaataagactagaacctcttaa

SEQ ID NO: 110177 - DNA, 1770 bp, Enterobacter aerogenes
atgaataaggaatggtttgaattaaaagatgcaagacgaaaagattggaacaagtcggtctggataacccttcgtgctataaatacaattagcgaaaaaggaaaacgtgggcatttaggatatgaatcagagttttttggtttaggatctgctgcttttccccttgagcaaatggagaaagtcaaaaaactaggctggtctgatataggtatttctcacgagcatgctggttatgttgaaggagataattacataccatgcgatgttttttgtagttcatttaaggaagttgaaggacttaatctagttattgagcaaaaaggtgtaggggattttaaacgcgtctggtatctacatcctgatttaataactactctagggttatatagagaaggtaatgtatgggtatgcccgagagaaggatatgaagaagtcgttcgaatttcatttagtgagaacaaacctgtttcaattgagataaaaagcaaatatctgaaagattatttatgtgctcgtagtctttttttatatttaacagctttttattctcgtgaaattataactgaagatgatgttgcttccttatgggatgatgaaaacaagaatattaacgatggaaatcttcgttgggaaggacgtgttattcctattcatgaaggtggacatccttttggcagtaaaatgtccgttttccatgtttttagaacagatgttgaagaggacgatgaacttccagatttatcggctattccaagtgataacaatacccatagcgagcgatgggaaaaaacatttgaaggccgtaaattataccggatattaggcgagttatggagcaactcaattgtaaatccatctcaacagagtcgcatagtcaggggcgataaaataccgtcgagtatttatttcgttgctgatcttgaaggaacccgcttgtgtggggatgagcttattgagtcaggtaaatggctttggttcaaacctgatgtaatgaacgtgctaagtaaaaggagaggcggggagcttaacttttacagccgatatacaggtggtgtggcttgctatgatggttataacactcattttggagtgaatgagcttggtttagttaatgtctacgcaaaagatataggcttattgccagagtggcagcagcaaatttgggctggttacaattgctctcctgaaggaggtatttcaaaagagttatacatgtcccaagttcgtaccgaaccggctgaaagccaatctccagaagaatactttcctatagttttaaatcaattaaatcaaaaaacacaagagctgtttggatttaatttgttcagagagcatgaatctatacctgaaattataaaaagtataaatagattcaggtcattagatgagacttctttctacgatcttgctaaggatcttgcaagagttattgctgataacattgacgcttcagcaatacagaaagttgttgctccgccaaaaggcgaaaaatgggggtctttgaaatcgctcgaaaagttattgacctcaaaatttgataattcggtagtgagaaaagttacagctccgttagttggcatctatgagcttaggcatgccgacgcacacttaccaagttctaaaattgaagaggcattcaaattaatagaaattgatagaagtttaccctttgtcattcaaggggaacaaatgctacacattgtagtgtctgcactatacatggttcttgaaggctttaagcaatggcatggacacgatgcacgtagttag

SEQ ID NO: 110178 - DNA, 480 bp, Enterobacter aerogenes
atgaaaaagacccttagaaccctgtttggacaacgagtaaaagcattgcgtattgccaccggaatgagccaagaagcctttgcagatcgctgcgggtttgcacgtagctacatgagccgcattgaacgtggcggttctaacgcgtctttggatgcaatagaggctctggctggggctttaggtgttgagccgtggcaattgttagcgtccgaatcatctcaaaatgatgacctggagctattggttccctttgcagctgatggttcatgtttccatcctggtttggcaagcacacgcgatggttcattcgtagtgggtgataaagcatctcagaagcgttttgccacgttttccgaagctcttgagcatttgcgtagtatggaaagagcaaaatggcgtaggcccaaccagagcggaaattggggcatcgtttctgccgttaggtgggataggctaaaaaagaaggtggcagatgaataa

SEQ ID NO: 110179 - DNA, 753 bp, Enterobacter aerogenes
atgttaaaagaccagattagaaaaccaggctttatgtgcaaggcagcattaggcgctctactaatcacagcatcaacaacgtctttcgcaggcgaaagcattgaccaactggctaaacgtatcggaatggatcactttcgtgaagcgattaaaaagggagaccgtaatgcctacaaaactctaccggcaaaaggttataaacacggcctaaccgggttattagttaaaaccaatacttacgttaatcctgaatacagctttgctgattgcgacacagacacagtgatagtttctgttaataaaaacaagacgttacccggttgccgaatctcattaaagctagcaaccaaagacgccgatggtagttaccacgataatggcattcgcatagaatacggtatcgccactgattccaaaaagtataccgccaacaattcagcgtgggcgcaacatgccattagcggtgataaggtgcttgaaggtgccctccacccggagaaagcgagtaacaacatagatcagatgtgcatggatatggcgcattttaccgcaaacgtaaccgaaggccgaaacggtggtatggccaaagatgagtattatcagcggcttgatgatatgaatggtaaagctggcatcactccccagatgatcgcgctctataagaccttcgtagactacgtatatgaaaattcgagacaagacgccaagacttcggcggcatttatttacaataactgcatgaaaaatatgtga

SEQ ID NO: 110180 - DNA, 1116 bp, Enterobacter aerogenes
atgagcgttggtattgtcacatttcacaagcatacccagcttggtttttatcgttatggcaatgatgattattgtgagccacttgaaatgaatactcttctctcatccctccacgtgtggttccaagatagagtctcacttgaagacacgcttctttgggatgacgagactcctggctactctcatcgtaaaaaggtttatctaaaagcaatcgaaaaggatgagcagactggtgaatatatcctagttctctggagagctgttgggagtggcgatggtgtttatggtataaaagctgatgcacgacttgatgacaacactctatatgatgccaataatgcagcagatggagagcgtgtcatttggggtgaagcctcctattactggtttatcccatcaaaaaatttgtttgcgtcaatccgattccgtaactcaatcgcagataccaatttgatgaatttatttttcagggattatgtctgcttacacgctgatataagagaaaagcgacgagaagttaaagaaggaaaaacaggagcttacacaaccgtatcgttcccagcgcagcaagctggtgaaactggaaatctgtggttccgtattagctcaaaacaatatacaaaactcacaacaaaagcagatcttggagctatcgcccgtgacataacgcattttgtaaagcgtgaggtgattgctgcaagagaagtcgatcaatccgactggacaaggtttttcggaaggctcccttttgtctctgctgaggttacaaaagatacccgtaaagtcgagataaatattgaagcgaaaccaacggcagaagaattgcagcaaattttcgaacaatatgctgaggattacaatggaggcttagacggttggcgtaaccttggtttcaaaaaagagggtgtcggtggtatttgttggttaaatagctttgtcgtaaaaaatgtgctgccaatagatgatacaactggtggtggtgtggacgaaacaggtcattataccgcgcagcgactctttactgccctacaattcaaacgcgatggtttactagcaccattcggcgttggcgcagcggaagctgctgccccccaagccgttcgggaattaccatga

SEQ ID NO: 110181 - DNA, 528 bp, Enterobacter aerogenes
atgaagaattacaaaattatagtttggcatctgctggtagctatggcagtaacttatattagttattgctttaggttagatattaattataaagatgttgatccaataatttctatattgcaaaacacatcagcaatgatttttacaatcatgggcatctggattgcttatgtttatccaaatgctgtattaaagattgttcaaccttcaaaagtaacagcaattttctcagaagatgatctaagaagagtaaaactattagttggagtggtaatttcatcagcgctaattttattactgttattggctggagttacattaaaaacattcctgataaaaactaatcttttcacacaacactggcaagtattttcaggcattggcctatggtgtctgttgtctctaatttatgcacagttgttttgtatttatgcggtaatcgcatcaagtgtcaacttcattatcgacttaaaaaacctcaatacaaagaaacggttatcggaaaagcttgatggtaaacagaaataa

SEQ ID NO: 110182 - DNA, 486 bp, Enterobacter aerogenes
atgagtaatgtattcaaagtgagaacagccagcctaaccaatgacggccgccgcacatcacttaagttcgatgaaaccacatggaagatgattgaccatattgcagagaaacgcggcacgggctggaaagagtgggcgagacagttgttcagggcaaacccggacgcaccgaacaaagctgctgttctacgtgctgcgctggcggaagaattgatgagcgagcaatttaaagcagcaaacgagattggtgaggttgaggtaaacacacctcatgagattatcggtagcggttactggcgtctcaatgacgagcaactcaaaagtgagctggaaggtgcggtaattaccatacgggataattcatttacagcgttcactttcatcatgggctatcgcaacaaatcagccggtggtgaaccgttcgttatcgttcagaacgagctgcgtgacggtctccacttgatgatagctcccactgtagactga

SEQ ID NO: 110183 - DNA, 354 bp, Enterobacter aerogenes
atgaaaaccacattagcggttacaaccagcgatgccgcgttcatgcttcactataatctcggccctgttcgcgactggactcaaacactggaagatatgcgcgggaaagagaaaaattatttgaaaatgagcatcaagcctttcggaaagctaaaagtctgccgctcataccgcccggcataccgtgtaagcgaagtgcataacttcattgaggaagcccggttgcgctcaggtataacgcttccagttgctgccgttccgtcagacaaaatcgccccgcagctcgttgaagacgacccagcaaatacggcgcactggaaagttcgcaaattgacaccgtataccgctgcgtaa

SEQ ID NO: 110184 - DNA, 930 bp, Enterobacter aerogenes
gtgcattcccaagagcaacaagcagcaaactcggccctgaagcaattcagggctaccgccgttatcgactggatcgacgttgagattcgcactgaacgccgcacgcagcactggcacattcgcgcagcactgaaagagataaccggcgttgatcgctggtgggctggcgcaatggacgtccagcagggaagcaccgccgagacattccgcattcgctttcatgacgagctggcaaccaactatcagcagctgtgcgccgcgctcgatgcgttagccaggcgatttccgtttgcatcagaaccgaccattgccgggatagagatcagctgtgacttctggcacaaacagcagtcagttgaagcaacacgcgccctcacctaccgcctgcaaacaagcctgtttgctcccggcaccaatcaccgtcaatataacagcgatagcaacagtaaccagtttctcgataagcccggccatcgcataaacccggcgtataacctgcgtatcggcaacgagctggacgccatttcatggcagagctatcacaagcgcaccgacagaaagcagccgctgccgctttgccagcaacgcgcccgcgttgaggtaacattgcggggtgatgcgctgcaacaatacggtttcggccttctctccgggcttcaatatttcccgtttgaaacgctcgccagcttgttcacgttccgccgtccgatagctgccgcaaagatggcaaagggggatctgttccggcttgtggcaatcaactggattcgctcacacgaagatgcagcagcggagcgcggcattcattcgttcagtaaagtaggacaacgcgacaagaaaggcagaacacgggcagagagcagccacctgacagcagacaaagagctgagcaaccgggttagagctgcactgcgcaacctgcatccctga

SEQ ID NO: 110185 - DNA, 1911 bp, Enterobacter aerogenes
atgtctcagcgatataaactctatcgtcgaaccagcggcatttatgttgtccgcatcagcgttccccaacgttttcgtcgatacgcaggacagtgtgagattcacacttcaacaggcactcatgaccttcatgaagcaaagcataagtccgcgctcctgttggcggtctggtatcagaccttacaagagtatgaacaattggattaccgatctttaaatgactgcgccccgctgcttgccggagagggcatgatctcgctttctaactttgctcagtcaatcgagctgcccgttactcagttaattcaggcggtgatgaaccgcaatctgcccatgttttggctagcgacggggcaggctggcttttatgttgatactttatctgaggtcgagttagaccctctcgatggcagctacgtgcttaactatgtcgaagcgcagggtatggaaggggttgttaaaggttatctgcaactcattgctcccttggcgcatttacgtaacatcatcagcgacgggcattcagaagcctcgctgtttaaaattgctggaagcgaagctaaaggcggttggtttttcacctccaattgcccggtaataaaacccgatacgctgttgatcaataaagtccatgcagaaagtctccgacttgattggctggctaagaccacaccaccagctgttagcgttcatcccgctgtgcctcttgctactccatcccccgttatcgttaacgagtatgttcatcgaaagtattacactaagagcctgtcatggttatgttcagagtatgtaaagcatcggcgcaagggtaaagtctcggagtcggcaattaacgatatccgtaactacttcacctttatgattgaagcgatgggcgacattcagttggaagactttgatcgcgatttcctccgagcttatgagagcaaactacgcacgatccccgcaaatcggaatctagcgaaagctaaatatggggtgaaaacactggatgagttaatcgctaaggcggcggaatgcggcgataagttgatgactgaggaatccgtcaggaagtatatcaacggcctttatggtgcaatgaagtgggctgttgctgatggcaagctactgaaatcgccatgcgaaaactttttcccgcgcgatgataaagacgagcgagaccaagatcacactgacgtgtttgaacctaatgaagttaaggcaattttttcgctgccgtggtttctggctggaacaggagaacgtaacgcgcaagggcgattccatcaatattgcccgtttcactattgggcacctttgctggggctactgacgggggcgcgagttaatgagatcgcgcagttacttctagatgacatactagcggaagatgacgtttattacctgaaccttgaaagcgatagcgaaagtggaaagaaactaaaaaatgccaatgctcgccgcaagattccgattcattccacgctgatttatctcggtttcatcgactacgttaacgccttaaaaaatgccgggtatgcccgcctgttccccgagcttaaaccgcataagactaaaggctatggcaggccagtttccgcatggttcaatgaatcgctactggcgcgtagattgaatgtagagaggaacagaaccaaatctttccattctttccgccactctgtttcgactttactaaaggagaagggcgttagcccggaattacgtgcgcaattagttggacatgtgcgcggcgaaacggaaacagaagtgcgatatagcaaagacctcaaaccgattcatatgattcaaactgtggagaaaattgatttttcgttgcctgagatagcgaaattcaacattcctgacggattggatgctgtcagagatgcgctgcgaagaaagcgaggtaaacaaacggagtag

SEQ ID NO: 110186 - DNA, 174 bp, Enterobacter aerogenes
atgtggacacttaagcatgatccgactttgtatggatatggttggatttattcaaaaccgaccgagtcagtcagctcatcaggagagcttattaaattcgaaacctgttggtggttccctgttaagcccaccaagaagcaactacgccaggcacgaaaaaacaaacttcattaa

SEQ ID NO: 110187 - DNA, 462 bp, Enterobacter aerogenes
atgagtcgtctaacagccatcatctgtgccgttgttatcttcctcctggcttccatgttatgggcgattaatcactaccgggacaacgccatcacctacagagaccagcgcgataaggccgctgaacaactcagcctggctaatgccaccatcaaagacatgcagaccaggcagcgagatgttgctgcactggatgccaaatacaccggagaacttgctgatgccaaagctactatcgatcagcttgagcgtgatgttgcttctggcaagcgtcggttgcagctcaacgcaaaatgtcccacgagcggagcgtccggaaccggcagcgtgggcgatgcttccggccccagacttgctgacgccgctgaacgggattatttcaccctcagagagcgaatcgtcacagtgacgaagcaggttgactatctgcaggaatacgtcaaagagcagtgcttaaaataa

SEQ ID NO: 110188 - DNA, 732 bp, Enterobacter aerogenes
atgaccaaatcaaccataaccagagagcaaatcactgcctggatgaatgatgccaattacgcacttgaggaaccattgaacgctgatgatgcggcggccgccagagcgattctcgcgatgggcgatgagttattggccgcaatgggcagcgagccggtggcttggatgagcaaaggtggaccagtgctgaacggaatgaggcaaagcgcccatgattttgcccattacaacattccgctctatcgtcacgcgcagccagcgccggtagtgcaggatgaagttaccgccgaagattgcccagcacttgtcaagtgtgacgttactgaagttgatgaggcatgggctcgcggttttaatgcctgccgcgctgccatgctccaggctcagtccagcgacgacggcgagccaaccgacgatgagtgcattatggctatcgaggggattatcccgccgatatcggctggcaactctccggtaattccggatggctacgtgatggtgcctaggaggctaactgctgaaaacggcgctaagtgggagctatctggtgagttttcagaaaccaagttcgtaaactgtccagaatgttttggtgatgatgagtgcgaaacatgcgacggaagtggcagaattggaatcacggtaccggttacctggacgactatcaaagaaatctgggctaaaggcgttgagcatttcgcagccgcccctcaggaggtgaaaggtgaataa

SEQ ID NO: 110189 - DNA, 534 bp, Enterobacter aerogenes
atgacgaccatgcctatgcaaacctcacttggtatcatagatattttatcaaaatttattgttccattgcttgttgccgcattagccgcatatttttctaccaagtttgctttgaataagttttataaagaaaagtggtgggaaaagcgattggaagctttcacagaaatcatcaatattgcgtatcggattaagatgagtaatgactacttcctcagttgtgaatatgcgcaaatggaacctggtgattccaggtttaagccacatccgaaagagatcgaagagaagttaagagctgagtattggcttgaccttcaagagcttgaaagaatagcgcagttagcagactttacattaacaaccacagtaaaaaacatgctcgactcctatgttaattcaagaaagaaagtgatggatgattggtatgatgacgctattgaaagcattgacgcgtcaataaaggatctcaaactctctgaaaagctgctcagtgatttagtcaaagaagccaagcgagaattaaagattaaataa

SEQ ID NO: 110190 - DNA, 465 bp, Enterobacter aerogenes
atgcaagcaaccctcccggcattccgcctcaaccgcaacgccctgttctacatgggcctcttcgccctcctggcgttcttcctgctggccccccagcacgcattcgcctccgagggcaccggcggctctctgccgtatgagagctggctgaccaacctccgcaactccgtcaccggcccggtggccttcgcgctgtcgatcatcggcatcgtggtcgccggcggcatcctgatcttcggcggcgaactcaacggcttcttccgcacgttgatcttcatcgtcctggtcatggccctgctggtcggcgcgcagaacatgatgagcacgttcttcggccgtggcgcggaaatcgccgccctgaccgatggcgcgctgcaccaggtcaaggtcgccgcgctggatgtggccggcttccccggcgaagccgtcatgcgctgggccgagcgcggccacatcgcggggtaa

SEQ ID NO: 110191 - DNA, 963 bp, Enterobacter aerogenes
atgaccgaccagaaaccagaacacaacagcatcaaggaacgggcgaagaagaagctcgaacgcgacatggggccggagctgctggccgccctcaacgatcccaagaccgttgaaatcatgctcaacgcggacggcaagctctggctcgaacgcctgggcgagccgatgacgtgcatcggcacgctgcgcgtcgcgcaggcgcaagccatcatcgaaaccatcgcgggctaccacggcaaggaagtcacgcgctccaagccgatcctagaaggcgagctgccccttgatggcagtcgcttcgccggccagctcccgccggttgtgcccgcacccaccttcgccattcggaagaaggccgtcgccatcttcacgctcgatcagtacgtcgagcgcggaatcatgaccgcgccgcagcgcgaggcattgattgcagcggtgcgcgcgcaccggaacatcctcgtgatcggcggcaccggctcgggcaagaccacgctggtgaacgcgatcatcaacgagatggtgattcaagacccgaccgagcgggttttcatcatcgaggacaccggcgaaatccagtgcgccgccgagaactacgtccagtaccacaccagcatcgacgtgaacatgacggcgctgctgaaaaccaccctccgcatgcgccccgaccgaatcctggtcggcgaggtgcgcggccccgaagcccttgatctgttgatggcctggaacaccgggcacgaaggaggtgctgcaaccctgcacgcaaacaacgccaaagctggattggatcggctcgccatgctcatcagcatgcaccccgattccccgaaacccattgaaccgcttatcggcgaggcggttcacgtggttgttcatatcgcccgcgtcgaaggctcgcggcgcatccaggaaatcttggaggtttccgggttcgccaacggccagtacatcaccaaaaccctctga

SEQ ID NO: 110192 - DNA, 363 bp, Enterobacter aerogenes
ttgtacaactacatcttcttcacgaacgtgctccggctgctcgatgagcggcacatgacgaaaaaggagctgtcggacaggtcgggggtttcgatctccttcctgtccgatctcactactggcaaggccaacccctccctaaaggtgatggaggacattgcgcaggcccttgaaactcccctgccgctcctgcttgaatcgaccgacctggacaaagaagcccttgacgccctagccggcggcaaggcaccccgaagcctgccgccaggcttcgagcgcgtggcggccgtgctgcccgaacatcaggcgttcatcgtcaagaagtggggcgaagcggcaaggaagaaacttagagggagttga

SEQ ID NO: 110193 - DNA, 342 bp, Enterobacter aerogenes
atgagccacaacctgttccagtttatcggtaatcttacccgcgataccgacgttcgccatagcgaaaacagcgcccgcgccgttttcgacctggccgtcaatcgcgtgtggcgcaacgcagccggtgcgaagcaggagcagacggacttcttccgcatcaagtcgttcggcggcctggccgagaacgcgggcaagtacctgggcaaaggctccaaggtgttcgtccagggccgcatcgagccgacgaagtacgagaaggacggcaagaccgaatacgggttcgatttcatcgccgaggaaatcgaatacctggacaccaaagcgccaggcggcggccagtaa

SEQ ID NO: 110194 - DNA, 1221 bp, Enterobacter aerogenes
atgccaaacgagttcaacgagcaggaatacaggcgcaagctcatcgagggcgggcttagtgaagccgacgccaccgaccttgccgcccgtaccgccgccgctcgcagggactcgggcagcgccggcggggccttccgccccgccggttccctcttcgagctgccggccacggccggcgacaacaaggcggccttgccgccgaagccaccgacgccggcaagcgccgccgtcgagcgatccgagcgcatggcgcaggaatcggccgagctggcgcgcacgatgggcctgccgcccgaaccgcgcaccgccgtgaacaagatggccgagcagatcggcgcgctggcccaggacaaacggagtagtgcgatggcgaccaagaagcgaacggccggcggcgagctggccgagaaggtcagcgaggccaagcagacggccttgctcaagcacacgaagcagcagatcaaggacatgcagctctcgctgttcgacctggctccctggccggatcacatgcgggcgcttcccaacgacttcgggcggtcggcgatcttcaccgtccgcaacaagaaggtgccgcgcgccgcgctgcaaggccagtcgatctaccacgtcaacaaggacgtggagatcacctacaccgggatcgagctgcgcgccgacgacgacgagctggtattcgcccaggtgctggagtacgcgaaacgcaccgcgctcggcgagccggtttccttcaccttctacgagctgtgccaggacttggactggtcgatcaacggccggtactacacgagggccgaggaatgcctgacgcggctccaggcgtcggccatgcagttctcatcccagcgcatcggccggctcgaatcggtgtcgctgatccggcgcttccgcgtcctggatcgcggcaagcgcacgtcgcgctgccaggtcgagatcgacgccgaaatcgtggtgctgttcgccggcgaccactacacgaaattcgtgtgggagaagtaccgcaagctgtcgcccaccgcgcggcggatgttcgactacttcgccacccacaaggagccttacccgctcaagctggagacgttccggctgatgtgcggctcggattccacccggccgaagaagtggcgcgagcaggtaggcgaagcgtgcgacgagctgcgcgaaaacggcctggtcgaaagcgcatgggtgaacgacgacctggtgcattgcaagcggtga

SEQ ID NO: 110195 - DNA, 429 bp, Enterobacter aerogenes
atgaacacccaagaccaacccgtcaccgcttccctggtcgccgaggcccagcgcctcgacttcctgcccacctacttcggcccgcgcctgatgatgcgtggcgaggcccttgtgtacgcctggctgcgccggctctgcgaacgctacaacggcgcgtattggcactactacaccctgtcggacggcggtttctacctggcccccgacctggccgagcgcctggagatcgaggtagacggcaacggcttccggggcgaactgtcggccgacgccgccggcattgtcgcaaccctgttcgcgctcggccagctcgcggccgagatcgccgacacggacgcggccgacgccctgatcgaccgctatcacttcctgcgcggcttcgcggccggccaccccgaggccgctgcgatctaccgggctattgactga

SEQ ID NO: 110196 - DNA, 1209 bp, Enterobacter aerogenes
atggcgaagcgaacgaagcaaccggcccaggcgggccaggactggagcgcgccggcggccgagctgctggccgagctgccggcagaccgcgatggtctgctggctgcggccgttgcggccgtggtggagatcgacgccgctgtcatgcgcggcgacggcgcggcggccgagttggccggcgaacgatacgaggcgatcatctggaagctgaacggcggcacgaacttcgggtgcatggccgacgacgaggccgccggccgcgtcatcgagcggcattgcgcggcggtgccgggcgaggtgcccttgtggggccagcgcggccagttcctggccgtgacgggcgatatgcgcgccctggtggagtacgaggccggctatggcgggccgctcaacgcgcacttccagttccacgcggttgacctggacgggccgtttatctcggcgacgggctatcgctcgcacttcgacacggcacggggctgcatgaccgtggacgaggttgcgcgcggcatcttggcggccatgctggccgagaagaagcggccggtgctgatcgaggcgagctaccgcgaccgcctggccgacgctcccctgcccgactggctggccggcctggtgccgccggcgcggcgcgagccggcgaccgtgacgattccgccgggcttcgtcctggtcgatgtggtgctgcccgcgcacaaggcgttcatcgcgcggcgctgggcggccgacgcggcgggcaaggtcaaggcggccagggccgccaggtcgaacgccaaggaaaaggccggaggccgcgagcgagatcccgcatcgacggaagcggcgatgcgctgcagcaccgccaaagctgacgatggcgagcaggccgagggcgggcctgtatcgccagaagcgacgatgccgggcgctggcgaagcatcctgcagcaccgccaggaatggcgatgcaggcccggccgacctggtggagttcacgcccgcaccgggtcaacggtgcgagatcgtgagcgtccaccatccggtgttcgccaaggagatcggcaagcgcgtcatcatcgtgaaggtgcatccagacacccgccaggtgtgggcgcacgatgaccggccggtgacatacaagaccaatcgcgcgggccgccgcgtggtggattcagacccgagctgcattcagtcgatctacggcttcgaccaactgcggcttatcacgtga

SEQ ID NO: 110197 - DNA, 258 bp, Enterobacter aerogenes
atgacgaacgacgcgaatatccggctggagtgcttgaagccggccgagcggtgggcgcagccgaccggcgaagaggtgcgggaggtgctgcgcctggctggcctcaccggcggcaaggccgcgaaagtgctgggcctcggcccgaagggagatcggacgatccggcgctgggtgggcgaggacacgccgatcccatataccgcgtgggcgctgctgtgcgactacgccggcctcgggctgatctggaaagaggattga

SEQ ID NO: 110198 - DNA, 237 bp, Enterobacter aerogenes
atgagcaagaacaagatcatgccttgggttgacgccctgccgaacgtgcaaaccaccgacttccaagcccgccgcgaccagatcgaggccacgatggccgaggctgccgagctggtgaagcaggcggaagagctgcgtggcaaagcctatttcgccgccttgagcctggaggccagtgccaagggcgaatggtcgagccaggcggtcgagcaggccaagcgtagcgtcggctggtaa

SEQ ID NO: 110199 - DNA, 216 bp, Enterobacter aerogenes
atgagcaaaggcaagatcgagatcatcgagacgtgctgccggcgctgcggcaagagcatccgcaccttgagccacagcatcatcggcgccgatgatgcccgcgagaagttcggcagcatctgcggcggctgcatcacgccggaggaagataacgagctgacggaaatgctgctggcggcggccgtgcgacgcatgagcggagcgacgctgcaatga

SEQ ID NO: 110200 - DNA, 330 bp, Enterobacter aerogenes
atgtccaacatcgtcaagttccccagggccagcaagccgccggcttccgagccggtgcagcctgccgcgcccgctgctgcgcctgccgcacccaaggccgaaggccggggcctggtggccggcctggtcaagttcgtatgggtggcgaccgtgctggtctggccggtgctcaagtgggtgctggcgatcatcaccttcttccagttcgtgctgatgctctaccactggaacacgcccggcgtgtatgccggctggtcgttcctggcgtacttcacggcactgaccgcgatcacctacttcgtttcgatctacaaaccgaaagggctttga

SEQ ID NO: 110201 - DNA, 531 bp, Enterobacter aerogenes
atgggaaagcagaccctcccctacccgcctggcttcgtggagccgaccactggccgcgtggccgtcctggtgcgcgagtacgcggacagcgacttgaacggcgacgcgccggcctactggtacagcgcgcaatccgaagaatggggccttgacccctggcgtctcgtggagggcgttgatccgcacgtgggcggcggttccttcgatgtgtgctttgccagcggcggcacgcgcaccgtaggcccgctgatgacgttcttcctcagtgccgcccatgcggcacagctcattgacgccaagggggaagagtttgccttgcagcgcgccaccctggcggtcatcgcggccgggctgggtctgcctgccgaggcgctgcgcatcgaggcgaaggtggagggccggccggccgtgttctacgaccaggacggggccacgctttgcgcgtgcgcggtggattccgaccactggcggcaggcgcgggcgacggccgcgacggcagcggccatcgacaaggcacggacaaatttttag

SEQ ID NO: 110202 - DNA, 312 bp, Enterobacter aerogenes
gtgcaatccatgaagaaacggctaaccgaagcccaattccagacggccatcaaggggctggagatcgggcagcagaccatcgacatagcgcgcggcgtgctggtcgatggccggccccaagcggagtttgtcacttcgctggggctgaccaagggggcagtgtcgcaggcggtcagtcgcgtttgggcggcagcgggggggcggctccccgagggcttcgagcgagtgacggcggtactgccggagcatcaagcgttcatcgtcaagaagtgggaagcagacgccaagaggaaacaggaacccaagtcatga

SEQ ID NO: 110203 - DNA, 765 bp, Enterobacter aerogenes
atgaaaacactggtcacggcaattcagaagggcggtcagggcaagacgttcgccacctgccacctggcattcgacttcctggagcgcggccttcgcgtggccgtgatcgacctggacacccagggcaacgcatcgttcacgctgtcggcgtaccaatcgggctacgtcgccagccagttgttcaccggaaacaccgacgaccttcggtattggttcggcaagcgcgagggcgagagcctggcgctgatcgcggcagacgccaacctggcgaacctggacaagatggagctgtcccaggcggccgccgcgctgcgggccagcgtggccgcgctgggcgagttcttcgacgtgtgcctgatcgacacggccccctcccttggcgtcgccatgacggcggccgtgctgacggccgactacatgctgtcgcccatcgaaatggaggcgtacagcttgcagggcatgaagaagatggtcgcggtcatcagcaacctgcgcaagcagaaccccaagctgcgtttcctcggcatggtgccgaacaaggtggacgcgcggaagccgcgccacgtcaacaacctggcgacgttgcagcaggcatacccgcagctcatcttgccgttcagcatcggcgcgcgtgacagcatcgccgaggcgctgggcgagcagatgccggtgtggaagatcaagaagaccgccgcgcggaaggccacccaggaggtgcgtgcgctggcggattacgtgttcacgaagatggagatcgcgcaatga

SEQ ID NO: 110204 - DNA, 1050 bp, Enterobacter aerogenes
atgagcgccaagaccaacgccaagaagaaggggcaggacaagccgcaatcgtccgggctgggcctggacgggctgggcgacctggccggcctgctgaacgagcagccggcggccaacgccggcggcgcaggcccgcaggagctgccgcttgacctgatcgacgaagacccgcaccagccgcgcacggccgacaaccccggcttctcgccggagagcatcgcggagatcggcgagacgatcaaagcgcgcggcgtgaagtcgcccatcagcgtgcgcgagaacccggacgcaccggggcgctacctcatcaaccacggcgcgcggcgctatcgcggctcgaagtgggcgggcaagactacgatcccggccttcatcgacaacgactacaacgaggccgaccaggttatcgagaacctgcaacgcaacgagctgacggcgcgcgagatcgccgacttcatcggccgcgagctggcgaagggcaagaagaagggcgagatcgccaaggagatcggcaagtcgccggccttcgtcacgcagcacgtcacgctgctggacttgcccgaacccatcgccgaggcgttcaacagcggccggggcaaggacgtgactgtcatcaacgagctggtgacggcctacaagaagaaccccgacgaggtggccgcctggctggccgacgacagccaggagctgacgcgcggctcggtgaagctgctgcgcgagttcctggaggacaagcgcagtcacgaggacggcgaccgcgatcccaacaccgtcgatgcgctgaccggcaagaccgacgccgaggccggcgacggcgagcaggggccgcaggatgatgacgccaaggggaagaaggagccgaaggaggccgaccccgacaagctcaagaaggccatcatccaggtcaagcacgacgaccggccggcacggctgatcctcaaccgccggcccccggccgagggctgggcctggctcaaatacgaggatgacggccaggagttcgaggccgaccttggcaccgtgcagcttgtcgcgctgctggagggctga

SEQ ID NO: 110205 - DNA, 969 bp, Enterobacter aerogenes
atggcgatctcgaaggagcagatatttgcggtggccgacgaactggacgcggccggccagaaccccacgctggcgaatgtgcgcaagcagctcggcagcggcagcttcaccaccatcagcgaggcgatgaacgagtggcgggcacgcaaggccagccaggccgccccgatccgcgagccggcaccgcaggcgatcaccgacaagctggccgagctgggcggcgacttgtgggccgtggcgctggaaatggcgaacaaccgcctggccgccgagcgcgaggcgctggaggccgtgcgccaggagacggaagcagcgcgccaggaagccgcagagctggccgaccagctcaccggcgagctggacgaggccaaggcccgcgtcgcggccctggaggccgtcgaggcggccgctaagggcgaggccgacgagctgcgcggcaagctcgcggcgaccagcgagcgcgcggccacggccgaggccagggccggcgagctgcgcacggagctggatcacgcccaccaggaggcccgccaggcgcgcgcagagcgcgacaaggcccaggagcgggccacggccagcgccgaccaggtggaagccctgcgggccgacttggcggccgctaacagccgtaccgccgagatcgagcgccgcgccggcgagctgcgtgccgacctggagcgggcgaaccaggcgaccgaccaggtgcgcgccgagctggtgaaggtgcaggccaaggccgaggcggccgagcaggcccaccaggagcagcgcaagacgatggcggccgaggcgcaccgcctggccgagcggctgaccgccgcccagggcgagcgcgaccaggcgaagcgcgacgccgcccaggcccgcgaggaagcggccgggcttcgcggccggctggaggccctggaaaccgtcatggcgcaaggccggccggccgatccggccagcggcggacgcaaaaagacctga

SEQ ID NO: 110206 - DNA, 348 bp, Enterobacter aerogenes
atgaaagaacgcctcttggtcatgaacggtcagcgcatcgttcaggccgaaaaggacggcgcttggacgaatcagaaagtagacaaggcgggcgcgttgaagcccggcatctacaacctgtacacggcccaagcggccgacaagaagcagacccacgccggcgtgatcgtccacgccgacgccaccaacgtgtaccagcagatcggcaagaactttgtcatgcacgctcggtcagatttcgataaagtacctgaaattgggagcgcaaagagcatcagctacaacgcccagggcaaggcggcagtcgccgcagaggccccgaaactgacgcgggggcgctccatgtag

SEQ ID NO: 110207 - DNA, 654 bp, Enterobacter aerogenes
ttgaaacgactcaccatccccggcagcggcaccgagagccgcgccaccaagccggcccgcgtcagcgccccggctaccctcggcggtgccgccttcggcgcttcgcgcgaggacaccggagccgacttgctggaggccgcccaggcggccgagatcgagcagcaggccaccctagatgcggccccggtcgagcagtcctaccccgaaaccttggcgctctacgtgcaggccaagcacgaccaggtggagcacatcgaggacaggctagaaaacctgatcgaccggcagcaggcccgtttgcagcagacccaggcgtccgcgcctggccggctgtccttgcccggctctaagcgagcctggcagaaccagcaggcgcagcagcaggcccgcttgcagacgcttcacgcgcgcctggaggccgtccgcgagatcaaggaaggcatgggcctgcactcgccgaagatcgaagagcttgcgacgcgcaagatgcgcgccgagaaccccgagctggcctccgattgggatgccatgcgcgaggccgcccgccggcatgagctgctgatgcgcaagcaggagcaggagcgcaagcaatcccaggcccaggagcggccagggagatcgcagtccttgggcctgtcagccaggcccgcataa

SEQ ID NO: 110208 - DNA, 441 bp, Enterobacter aerogenes
atggcggccgacgacaagatcgaggaactgatacgggagatcgcggccaagcacggcatcgccgtgggccgcgacgatccgatcttgatcctccagaccatcaacatgaagctgatgcaggacagcgcatcggcgcagcaggaaattctggacgccttcaagtcggaactggagtccatcgcccaccgatggggtgatgacgccaagggaaaggcggaaaggacgctcaacgcggcgttggcggccagcaaggacgccatgacgcgagggatgcaggagggcgcgaaggcggccgccgaggccgtgcggcgcgaggttgaggcggtgacggcgcagctcgtcgcgccgatccgcgaggcgcggcgcgtcgccatgatgaacatggtcgcggccggcatggcggtcgtggccgccggcctggccctttgggcctcgctgtag

SEQ ID NO: 110209 - DNA, 726 bp, Enterobacter aerogenes
atggcgaaaattcacatggttctgcaaggcaagggcggcgtcggcaagtcgatgatcgcggccaccatcgcgcagtacaaagccggcaagggacagaagccgctttgcatcgacaccgatccggtgaacgcgacgttcgagggctacaaagccctcaacgtgcgccggctcaacatcatggacggcgacgagatcaacacccggaatttcgacgccctggtcgagatgatcgcgtcggccgagggcgacgtcatcatcgacaacggggccagctcgttcgtgccgctgtcgcattacctcatcagcaaccaggtgccggcgctgctccaggacatgggccacgaactcgtggtgcatacggtcgtcaccggcggccaggccctggtggacacggtgagcggcttcgcccagctcgccagccagtttccggccgaatgcctgttcgtggtctggctgaacccgtattgggggccaatcgagcacgagggcaaggggttcgagcagttgaaggcgtacacggccaacaagggccgtgtgtccgccatcatccagattccggcgctgaaagaggaaacctacggccgcgacttcgccgaaatgctccaggatcggcgcaccttcgatgaggccctggccgattcggcgctcacgatcatgacgcggcagcggctcaagatcgtgaaaacccagctcttcgcccagctcgaaaacgcggcggtgctctga

SEQ ID NO: 110210 - DNA, 399 bp, Enterobacter aerogenes
atgccaaagacctaccccgaagagctggctgaatgggtgaagggacgggaagccaagaagccgcgccaggacaagcacgtggtcgcgttcctggccgtcaagagcgacgtgcaagcggcgctcgatgcgggctatgcgatgaaaacgatctgggagcacatgaaggaaaccggccggctgcgctgtcggtacgaaaccttcacccagcacgtgaagcggtacatcaaggccgcgccggtagcttccccgccgcctcccgccactcccccggacagccagcccaagggcgcgaagcccgagccgaaggccgccccgccggcctcggaatccaagagtgaaccgcccaagatcggcggcttcacgtttgatgcgactccaaagaaagaggatttactgtaa

SEQ ID NO: 110211 - DNA, 375 bp, Enterobacter aerogenes
atggagaacgacgagaaggaacacggccgccggcggcggcagcacctgcgggtgccggtgttcccggaagagaaagacgagatcgaggcgaacgccaagagggcgggcgtcagcgtggcgcgctacctgcgcgacgtggggcagggctaccagatcaagggcgtcatggactaccagcacgtgcgcgagctggtgcgcgtcaacggcgaccttggccgcctgggtggcctgctcaagctctggctgaccgatgacgtgcgaacgctccagttcggcgaggcaaccatcctggccctgctgggccggatcgaggccacccaggacgaaatgagccggatcatgaaggccgtggttcagccgagggccgagccttga

SEQ ID NO: 110212 - DNA, 2241 bp, Enterobacter aerogenes
atgatcgccaagcacgtgccgatgcgctcgcttggcaagagcgactttgcgggcctggcgaactacatcaccgacgcgcaaagcaaagaccaccggctgggccacgtgcaggcgacgaactgcgaggccggttccatccaggacgccatcacggaggtgctggcgacccagcacacgaacacccgcgcgaagggcgacaagacctaccacctgatcgtcagcttccgggccggcgagcagcccagcgccgacaccctgcgcgcgattgaagaacgcatttgcgccgggctgggctatggcgagcatcagcgaatcagtgccgtccacaacgacaccgacaacctgcacatccacatcgccatcaacaagattcacccgacgcggcacacgatgcacgagccgtactacccgcaccgggcgctggcggaactctgcacggccttggagcgcgactacggcctggagcgcgacaaccacgagccgcgcaagcgcggcgcggagggccgggccgccgacatggagcggcacgccggcgttgaaagcctggtcggctggatcaagcgcgagtgcctggacgaaatcaagggcgcgcagtcctggcaggagctgcaccaggtcatgcgcgaaaacggcctggagttgcgcgtccgcgccaatggcctcgtgttcgaggccggcgacggcacgatggtgaaggcgagcacagtagcccgcgacctttccaagccgagcctggaggcgcggcttggcccgttcgaggcttcgcccgaacggcaggcgcaaaccaccgcgaagcggcagtaccgcaaagaccccatccgtctccgcgtcaacaccgtggagctgtacgcgaagtacaaggccgagcagcagagcttgaccacggcgcgcggtcaggccctggagcgcgcccggcatcgcaaggatcggctgatcgaggcggccaagcggtcgaaccgcctgcgccgcgcaacgatcaaggtggtcggcgaggggcgcgcgaacaagaagctgctgtacgcccaggcgagcaaggcgctgcgcagcgaaatccaggcgatcaacaaacagttccagcaggagcgcaccgcgctctatgccgagcacagccggcgcacgtgggccgactggctcaagaaggaggcgcagcacggcagcgccgacgccctggccgccctgcgcgcccgcgaggcggcccagggcctcaagggcaacaccatccggggcgagggccaggcgaagcccggccacgcgccggcggtggacaacatcacgaagaaggggacgatcatcttccgcgccggcatgagtgccgtgcgcgatgacggcgaccgcctgcaagtctcccgcgaggccacgcgcgaagggctgcaagaagccctgcgcctggcgatgcaacgctacggcaaccgcatcaccgtcaacggcacggtggagttcaaggcgcagatgatccgcgccgccgtcgattcccaactacccatcaccttcaccgatccggcacttgagagccggcggcaggcgcttttgaacaaggagaacacccatgagcgaaccgaaagaccagagcatcgaggacgaactggacgcggcgctggcggccctggacagcggccccctgccgaccagcacgctaccggagccgcagccgtcgcccgagcaggcgacggccggccagcagccggccgaggcgaccgcgccgacgccggcattcacgccgccagcgtccaccggaagcccgacgttggacgccttggaagaaaaccgccgccccaaagccagcaccgtttgcgagcactgtccgaactcggtgtggttcgcatcgccggcggaagtgaagtgctactgccgcgtgatgttcctcgtcacgtggagcagcaaggaacccaaccagatcacgcactgcgacggggaatttctcggccaggaacaggagtaggccagacgccgccgggcgtcgtcgctgccgacaagtacatcgccgagcgcgaggcgaagcgcctaaaaggtttcgatataccgaagcattcccgatatactgccggtgaaggtgcccttacgttccagggcacccggaacgtcgagggccagccgctggccctcttgaagcgaggtgaagaggtcatggttatgcccatcgaccaggccacggcccggcgcttgacgcgcatcgcggtcggcgatgccgtctcgatcaccgcgaaaggctccatcaaaacgtcgaaaggaaggagtagatga

SEQ ID NO: 110213 - DNA, 1914 bp, Enterobacter aerogenes
atgaagatcaagatgaacaacgcggtagggccgcaagtccgaaccgccaaaccgaagccgagcaagctgctgccggtgctgggcgcggcctcgatggtcggcggcctccaggccgcgacgcagttcttcgcccacacgttcgcctatcacgcgaccctcggccccaacgtgggccacgtgtacgcgccctggtcgatcctgcactggacgtacaagtggtacagccagtacccggacgagatcatgaaggccggcagcatggggatgctggtttcgaccgtgggcctgctgggcgtggccgtggcgaaggtcgtcacgtccaacagctcgaaggcgaacgagtacctgcacggctcggcccgctgggccgaaaagaaggacattcaggcggccggcctgctgccgcgcgagcgcaacgtcctggagatcgtcaccggcaaggctgcacccacggccaccggcgtgtacgtgggcggctggcaggacaaggacggcaatttcttctacctgcggcacagcggccccgagcacgtgctgacctacgcgcccacgcgctcgggcaagggcgtcggcctggtggtgccgacgctgctgtcgtggggcgcgagcagcgtcatcaccgacttgaagggcgagttgtgggccttgaccgccggctggcggcagaagcacgccaagaacaaggtgctgcgcttcgagccggccagcacctcgggcggcgtctgctggaacccgctggacgaaatccgcctcggcactgaatacgaggtgggcgacgtgcagaacctcgccacgctgatcgttgacccggacggcaagggcctggactcgcactggcagaaaaccgcctttgcgctcctggtcggcgtgatcctgcacgcgctgtacaaggccaaggacgagggcagcaccgccacgctgccgtccgtcgatgcgatgctggccgacccgaaccgggacattggcgagctttggatggaaatggcgacctacgggcacgtagacggccagaaccatcacgccatcggctcggcggcccgcgacatgatggatcgcccggaggaagaagccggctcggtgctgtccacggccaagtcgtacctggccctgtaccgcgaccccgtggtggcccgcaacgtcagccggtcggacttccgcatcaagcagttgatgcacgaggacgacccggtaagcctctacatcgtcacccagcccaacgacaaggcccgcctgcggccgctggtgcgcgtcatggtgaacatgatcgtgcgcctgctggccgacaagatggacttcgagggcggccgcccggtggcgcactacaagcaccggctcttgatgatgctggacgagttcccgagcctcgggaagctggagatcatgcaagagtcgctggccttcgtggccggctacggcatcaagtgctacctcatctgccaggacattaaccagctcaagagccgcgagacgggctacggccacgacgaaagcatcacgtcgaactgccacgtgcagaacgcctatccgcccaaccgcgtcgagacggcggaacacctgtcccgcctcaccgggcagaccaccgtggtgaaggagcagatcacgaccagcggccgccgcacggcggcgatgctgggccaggtgtcgcgcacctaccaggaggtgcagcggcccttgctgacgcccgacgaatgcctgcgcatgccggggccgaagaagaacgcccagggcgagatcgaagaggccggcgacatggtgatctacgtcgcgggctacccggcgatctacggcaagcaacccctgtacttcaaagacccggtgttctcggcacgcgccgcgatccccgcgcccaaggtcagcgaccgcctgcgcgccgtcgcacaggccgagacggaaggggagggcatcacgatatga

SEQ ID NO: 110214 - DNA, 537 bp, Enterobacter aerogenes
atgagccgcatcctgaaacgcatcgcggcaggcgtcgccatcgcgggcgtggccgccctgctgctggcggccggcggctatgccgccggtgcccgcgtgaacaccaccaagagcattcctgtcggcctgtactggacgagcagcgcgccggtggagaagggggcctacgtcctcttctgcccgccgcagctcggcgtgttcgatgacgccaaggagcggggctacatcggggccggcttctgcgagggcggctacggctacatgatgaagcgcgttttagccgctaaagacgatgccgtggccgtcgccgatgacggcgtgcgcgtcaacggcgagctgctgcccctcagcgcgccgatcaaggccgacaaggccgggcggccgctgccgcgctaccagtccaacagctacaccctcggcaattccgaggtgctgcttatgtcggacgtgagcgccacatccttcgacggccgctacttcggcccgatcaatcgttcgcaaatcaagaccgtgatccgtccggtcatcacctggtag

SEQ ID NO: 110215 - DNA, 2064 bp, Enterobacter aerogenes
atgcgccttttcatcgcagaaaagccgtccgtcgccaaggccatcgccggcgagctgggcgcgaccggcaagggcgacggcttcatcgagtgcggcaccgacaaagtgacctggtgctttgggcacatgctcgaacaggccgaccccgacgagtacacgcccgatgacgtgccgcgcggccagtccggcaagaaggtctggcgcgtcgatgagctgcccatcattcccgagagctggattctcaagcccaaggacgacgcgaagaagcagctcgccgtgatcggcaagctactcaaggaggccaaggagatcgtcaacgccggcgaccccgaccgcgaaggccagttgctggttgacgaagtgctggagcacttccgcaacagcaagccggtgcgccgcttttgggtgagcgcgcaggactccgtttccgtcaagcggggcctggccgcgttgaaggagaacaccacgtatgccggctgggccgacgccgcacgcgggcggcagcgcgccgactggctgatcggcatgaacctcagccgcgcgtacacgctgcgcgcgcagcgcggcggctcgcgcgccctgctgaccgtgggccgtgtgcagacgccgacgctggccctcgtggtcgcccgcgaccgcgagatcgaggcattcaaggccgtgccgtaccacaccatccgggcggtggtgcagcacgccggcggcagcttcaccgctgcatggaaggcgaaggaggatcaagccggcctggacagcgaaggccgccttgtcgataccgccgtcgccgacaccctggtggccgccgtcaagggccagccgggcaccatcgccgcgtacaagcaggaggccaagaagcagaaccaaccgctggccttcgccctgtccgacattacggccctggcctcggccaagttcggctatagcgccgaggacgtgctgaacacctgccaggcgctctacgagacgcacaagctgacctcgtacccgcgcaccgactgcgcctacctgccggagtcgcagcacgccgacgcgccgcgcgtgctggaggcgatcaagcacgtcaaccccgagctggccggcctggtcgatggggccgatccgcgcatcaagtccaagacgtgggacgactccaagatcaccgcgcaccacggcatcgtgccgaccatgcagaagggcaacaaagccgccctcagcgagcgcgagcgcaacatttacgacctgatcgtgcgcgcctacctggcgcagttctacccgctgcacgagtacatgcagaccaccgtgggcgtcgagatcgcgggcgagaacttcgcggcgagcggcaaggtggtcacgcgcaacggctggcgtgacgtgtacagccaggccgacgaggaagccgagaaggacgacgacgacgacagcggcacgcaggccctgccgtcgatggcccagggcgacgccgtgacctgcacggacgccacccgcaaggacgccaagacgaagccgccggcgcgcttcaccgagggcacgctgatccgcgcgatggagaacatccacaagttcgtcagcgacgccgagcacaagaagatgctgcgcgagggcgacggcatcggcacgtccgccacccgcgcgtcgatcatttccgagttgaagcggcgcgagttcctggccgtcaagggcaagcagatcatcagcacgaccctcggccgcagcgtcatcgacgcgctgcccgaggttgtgaaaagcccggtgctgactgcgctctacgagcggatgctgaaaggcgtcgagcagggcacggccgccctggacgccttcatcacgaagcaagagacgttcatccgcgaccaggtggcgaaggccaacagcggagccgtgaccatcgccggcggcaaggaagccgcgccggtttcgtcccttcacaagtgcatggcctgcggcagcggcttgtcgcgccggccgagcaagaagaaggggcaattctggtggggttgcagcaacttccccacgtgcaagcagacctaccccgacctcaagggccggcccgactacagcaagggccgcaacggcccggcatccgaatga

SEQ ID NO: 110216 - DNA, 390 bp, Enterobacter aerogenes
atgaacgagcaaaccaccaccaacaccgccgcccacgacgagccgctggccgtcctgccgccggttgacgacgacgccgccggccgcgaggccgtgcgcgagaagatggccgacgcgctgacgcccggcttccaggtcgagttcgaccccgacgaagccgagcgcgtgggcgcgttcgtggaggacgcgctgtccgagcaggacgccgccgcgagcggcgacgacctggtggaagtcgatggcgcactggagccggcattcctggacgacgaaggcccgagtgccgacatcccgccgttcatcaccaccacgaacgcccgcgagctgtacgacctgcggcccggcgagacggtggcccaggccgccgcacgcaaggcgtcggagggctga

SEQ ID NO: 110217 - DNA, 4347 bp, Enterobacter aerogenes
atgccgatcacgaaagccgaggcgcaaggggtgacgcgggctttcgtccgcgactaccccggcgcgctggagctggcctacaagttccgcgcggacgcggccgagctgtacgggccgcgtgcggccgaggtgccggccgacatgaagggcggctacgtgcccaaggagacgatgcacgccggccgcgcctaccgtggccgcgtggacgtgcccttgcagaacgtcgagagcgccggcgacctgctgatgacgttgcggcacgaggtgttgggccactacggggccaacaccttcgcgcccggcgagaagcgcgccttgctggacggcctggcggccgcccgcaacgaacccaccctcaagccgctatgggatgacgtgaatcggcgctacgccggccagtccctggacgtgcgcgccgaggaagtgtttgccctgcactgcgagggcatcgagccgagccagcaccaggtcgccgaccaggtgcagcagcgcggccaacagtcattcacggaaacctgcatcgcccgcgtgcggcccatgcaggccgacgacctgcacaacatcgtgtgcatggtcgcccagggcctgcgcgaccgttcccggacgcagcagaacttccctcagttcaacgagctattccgaagggacgagaacatggagccgaagaagccgtttcacgaagtcgtggccgaaaagctgatcgagcagctcaaggccggcaccgcaccgtggcaaaagccgtgggagccgggcgaacccaacgcctacctgccgatgaacccgaccaccggcaagcggtacaagggcatcaacgcgattcacctgatggcccagggccgcagcgatgcgcgctggatgacctacaagcaggcggccgccgtgggcgcgcaggttcgcaagggcgagaaaggcacgccggttcaatactggaagttcagcgaagagcaagacaagctggacgacagcggccggcccgtcctcgatgcgaagggccagccggtcaaggaaaccgtcatgctggagcggccgcgcgtgttctttgcgaccgtgttcaacggcgagcagatcgacggcctgccgccgctccagccgaagaaggaacagacctggaacgcggtcgagcgtgccgagcacatcctgaaagcctcgggcgcaacgatcacccacgccgccggtgatcgggcgttctaccgcccttcgaccgacagcatcaccctgccggagcgcggccagttccccagctccgaccgctactacgcgaccgcgctgcacgagctgggccactggacgggccacgcttcgcgccttgaccgcgacctggcgcacccgttcgggagcgagggttacgccaaggaagagctgcgcgccgagatcgcttccatgatcgtcggcgacgagctgggcatcggccacgatccgggccagcacgccgcctatgtgggttcgtggatcaaggcgctgcaagacgagccgctggaggtgttccgcgcggccgccgacgccgagaagattcacgactacgtgctggccttcgagcagaagcaggttcaggagcaagaccagcagcagagccaggcccaggacgaagccgtggcccaggccctggccgtggacattgccgaagtcctggacaacccggacgtgtctttcagccactaccaggcattccagggcgacaccctggaagacgccttgcgcagccgtggcctcgaaaccgtgggcagcatcaccggcaccgatcccgagcagttctacgcggtcgcgcatgaccggctgtcgccggtgttcggcatcgacccgagccacaccgacaccgacaacgcctacttggagcgcaagggcctggcgcaagagttcgccaacatggccgaacagctccacctcgcgcagcagctccagcagcacggcgaacagatcgtgtccggcatcgacgccgaagcccggtggagcgacggccaacgcatctttgcgttccacgaccaggacggcgaaccccaccaggttcgcagcctggacgagctgaacaactacgcgcccgaccagttgatggccctgccggcgctgacccagcagcaagcggccgtcgcagaccaggaggcgaacatgaccccaccgaccaacgaccaggcggccgccctgctggccgcccatcctgccgacgcggtgcagggcatcgagcaggccgccgccgcgcgccggcagctcgccgccggcgagatcgacggccaggcgttcgccgacgcgacccgtcaacaccttggcgtcgagctgccgcccgactggagcggcgagctgcgcatcgtcggcgtggccgaacaggacggccagaccgtcgatgccgcccaggccggcatcgagccgcaggcgttccaggtgtacgcgcgcaaggccgatgcgcagttcggcgagggcgcttttgccttcgtggccggcacccgcaccgagggccaagccgaggcgctggccgagcgcctgcacctggtcgatgcgctgggcaccgacaaccagcacgagcgcgccgccaagctggcccgcgtgcaggaagagcgtgtacggcgcgaccctaacgcgaccgaagaggacatttcagccgctaaagaggctcgcaagaccgccgaggcgtcggccatgctcaacgacaccgatgcgcagcgccgcgcggccgagctggagcgccaggagcgcgagcggcagcaggcgcagccgcagggcgagaagcccgaacggcagtacatcaacgtgccgtacaaggaaaaggacgaggccaagggcctcggggcgcgctgggatcggcaacaacagtcttggtacgtgccgccgggcaccgatgccgctcccttcgccaagtgggcgcagggagccgctacagcggccgtagagccgcgttcggcccagccggcacccgaagcccagggcgaggcgcagaagccctcgcagcaggcgcagcaggcccgccagtacctggcggtgccctacgagcagcgcaacgccgccaaggccgccggcgcgctttgggacaaggccgcgaagtcctggtatgtcggcccgcgtgccgacgcggcgaagctcgaacgctggaagcccgagaacgtgcaggcccagcaagggccagcgatgacgccaagggaggagttcgccgaggccatgcgcagcgccggcctgttcaccggcagcaacgcccagggcgatcacccgatcatggacggcaagcggcaccgcgtgccggtcgagggcggcaagaagggcgcgctcgatggcttctacgtgggccacctggacgggcatccggccgggcggatcatcaacaacaagaccggcacggacattacctggaagagcaagggctacgccttgagcgaccaggagaaggccaagctacaggccgaggcggccgagaagctggcacagcgtgccgtcgagcaggacaaggcccaggaggccaccgcgcagcgcgtcggccggcagatggccgacctcgtgcccatcgagcagccgacgccctatctgcaagccaagggcatccaggcgcaggccggcgtgatgaccgaccgcgaaggccagaagacctacatcccggccttcgacgcagatggcaagcaatggacgatgcagtacatccaggaggacggcaccaagcggttcgccaaggactcgaagaaggaaggatgcttccacccggtcggcggcatggacgccttggcggccgcgccggcgctggtgatctccgagggctacgccacggcggcccaggtggccgaggccgtgggccacgccacggtcgccgccttcgacagcggcaaccttgaggccgtggcgaaggcgctgcacgccaagttcccggacaagccggtcatcatcgccggcgacgacgaccgccacctggtcatgacccacggcaacaaccccggccgggagaaggccgaggcggccgcccaggccgtgggcggcaaggcgatcttcccgatcttcgcgccggccgagaacacctacccgcgcgacttgcccgccatcacgcccgacagcttcaagacccacctccgcgccgagcagcgccttgccgacgccgccgccggcaaggtcgagctggccggcgacgaggcggccaagctcaaggcgtcgatgttgagcggcgcgcagatcgcggcgctgtccacgatgaagcagcacaccgacttcaacgacctggcgcacaagagcgagctgggcatcgagggcgtgaagcggcagatcggcgcggccatcagccaggtgcagcgcgacgagcagcagcaccaggagcagaagcacgtcgagaaaaagcaacagcagatcgagcagcgcccacggcgggccgctcgcatcggataa

SEQ ID NO: 110218 - DNA, 675 bp, Enterobacter aerogenes
atgagataccccggcggcaagggcggtgccggcgtctaccagacgatcatcaacaacatcccgcctcacgacacgtacatcgaaacgcacctgggcggcggcaacatcctggagcgcaagcggcccgctgcccgcagcgtcggcatcgacgttgatcccgaggtgatcgaagtctggcggcagctcgacgtgcccggcctggagctgcaccacggcgacgccgtggcctggctggagtcccacccgttcaccggcaccgagttcgtctacgtcgatccgccctacgtgatggacagccgacgcggcggcaagctctaccgccacgaatacgacgacgccgaccacgtgcgcctgctcgacgtgctggccggcctgccgtgcgcggtgatggtgtcgggctacagctcaacgatctatgacagctctcccttggcgtcatggagaaccatcgacttcaacgcgatgacacgcggcggcatcgccattgaacggctctggatgaactatcccgagccggccgagctgcacgatctgcgctacctcggcagcaacttccgcgagcgcgagcgcatcaagcgtaagaaagcccgctggcaagcgaagctcgccaagctcgacccgctggagcgggcggcgatcatggaatgcctgcgcgagctggaggcggccgagtag

SEQ ID NO: 110219 - DNA, 432 bp, Enterobacter aerogenes
atgcgaaaacccgttcttctggccctctctatggcgttcctggtcagcgcgcaaagcgccctggccgccggcgacgccggcaacttcggtacgccgatcaagtcgggcgtctcggtgtccttccccgacagcagcgcgacattccagcccacgcccgaggcgctggagctgctggccgacgccaggaacgcggcgatcatctacatcagcgggcgcaccagcacgttacggcccagcgcggccgacgaggcccttgcgctgcgccgcgcgctctctgccaggtcgtacctggtggcgcgtggcgtgtcgccgctcaagatcatggtgaacttcgcatcggcggccgacttcgtggccgacaactcgacggccgagggccggcgagagaaccagcgcgtggacattgaggtggtctacatcccgacctactga

SEQ ID NO: 110220 - DNA, 699 bp, Enterobacter aerogenes
atgaaggccctgcggattcctgatggaaccgtcgaagcgttgaagtggctcgcgctggctctcatgaccggcgatcacgtcaacaagtacctgttcaacgcgacgctgccggtgctgttcgaggccggccgcgtggcgctcccccttttcgtgttcgtcctggcctacaacctggcgcggccgggcacgctcgaacgcggtgtgtacggccgcaccatgtcgcgcctggctgtgttcggcgcgctggcctcggtgcccttcgtggcgctcggtggcctgtacgccggttggtggcccctcaacgtgatgttcacgctgctggtcgtcacggccacggcctacctggtcgaacgtggcggcaagctgcacctggcggccgccggcgtcgtgttccttatcggcggcagctcggtcgaatactggtggccggccgtggccttcggcctggccgtgtggtcgtacacgcgccggccgagctggtccgccgcggcggtcgcggtgctggcctgcgcggccctgtggttcatcaatcgcaacctgtgggccttggcggccctgccggtgctcttcctggcctcgcgtgtcgatgtgcgcgtgccgcgcctgcgctgggccttctacgcctattacccgctgcacctggccgcgctctggttgatccgtatccccatgagcaaggccggctacctgttcttctga

SEQ ID NO: 110221 - DNA, 267 bp, Enterobacter aerogenes
atggacaaattccacgccttcatgatgcggtacacgctgggcgtcggccggttgcttcaagcctattgcaagtgggcggaagggcaggccaagaaccagctcgatttgcttctgctgggcctcggcccgatcttcgccttgggccttctgctgtgggcactgccggcgtggatcggcaagcccatcgccttcgtactctcgctgcccgcgctctacatcatcttcctggtgctgcgcgcctacgcgattcgcgggggccggcgctga

SEQ ID NO: 110222 - DNA, 645 bp, Enterobacter aerogenes
atgccgttcttcgccgatctgccgccgcagctccaggagcgtgtcgtctgctcgatctcggccgccgtcaagtacgaggtgccggtcaacatcgtgttggccgtcgccgagaaagagggcggcaagccgggccagtgggtgcgcaactcgaatggcacgcatgacgttggcccgatgcagttcaacaccgcgtacctgggcgacctggcccgatacggcatcacggcgaacgatgtggcggctgccggctgctactcgttcgacctggccgcctggcggctgcggatgcacatccgcaacgacaagggcgacctctggacgaaggcagcgaactaccactcgcgcacgccgcaatacaacgcggtgtaccgggccgacttgatgcgcaaggcgtcgaagtgggccgattggcttgaagcccggttcgtcacgctcgacgtgacgaaggccggcgccacgccctcgatgccgagccagcccgttccggcggccaccgtggcccagcaagccacgccggcggccaggccggcaccaacaccccagcaggccgccccagcggccgcagcagctcgcagcgtgtcggtggccggctacgtgccccgcacggtgtctttcaacacttcacgcgaggggtcggccgagtag

SEQ ID NO: 110223 - DNA, 588 bp, Enterobacter aerogenes
atgaagaagaaactgtttgccctggccgccctcgtggcagccctcggatcgaccgccggcacggccagcgcgcaagacgtgctgaccggcgacacgcgcctggcctgcgaggcgatcctgtgcctgtcgtcgggcacgcgcccgagcgaatgcacgccgtcgctgtcgcggtacttcaacatcacgaagcgcaagctgtcggacacgatccgcgcccgcctgaacttcctccagctttgcccggtggcgagccagacgccggaaatgcagtcgctcgtgtcggcgatctcgcgcggcgctggccgttgcgacgcgcagtcgctgaactcgacgttggtgatgtggacgggcggctacgacgatgggcgcacgtacatcagcaaccagttgcctgactactgcggggcctacaccggccacgcctacaccgacttcgccagcagcggcacgctgccgcgctatgtcgggacgccagagcggggcgggtattgggtcgaagcgcgcgactatgaccgcgccttggccgagtacaacgagcgcatccggcgcgaggacgaagagcgccgccgtcagtcctggctgaactga

SEQ ID NO: 110224 - DNA, 1719 bp, Enterobacter aerogenes
atgagaatgccagccaatctaaaaaccctcgccctgccgctgttcgtctggctggcgttcttcgcggtcgatgcccacgcggccatcgacaacgccggcgtgttcgatagcgtgctggatcgctaccaggccgccgcgagcggctgggccggtgtcatcaccacggccgcaacctggctcttctggacgctggttgtgatctcgatggtctggacgttcggcatgatggccttgcgcaaggccgacattggcgagttcttcgcggagttcgtccgcttcacgatctttaccggcttcttctggtgggcgctgaccaacggccctaacttcgcctcgtccatctatgcgtcgttgcggcagctcgccggcaacgcgacgggcctgggcaatgctctgtcgccctcgggcatcgtggacgtgggctttgcgatcttcgacaaggtgatggatcagtcctcggtgtggtcgccggtggacagcatggccggcatcctcatggccgtggcgatcctggtcatcctggccctggtcggtgtgaatatgcttctgctgctcgcgtcgggctgggtgctcgcctacggcggcgtgttcttcctcggcttcggtggttcgcgctggacttccgacatggcgatcaactactacaaggtcgtcctgggcgtggccgcgcagctcttcgcaatggtgctcctggtgggcatcggcaagaccttcctcgatgactactactcgcgcatgagcgccggcatcagcctcaaggaaatgggcgtgatgctgatcgtcgtcatcatcctcttggcgttggtcaacaagattccgccgctcatcgccgggatcatcaccggcgcgagcgtgggcggtgccggcatcggccagttcggtgcaggcgctgcgctgggtgccgcaggcatggcggcagcagcggccgccactggcggcgcagccctggccgccggcgcagcctcggccgccggtggtgcctctgccgtcatggccgccttctcgaaggctaatgagaacgtgtcggcaggcacggacgttatgtcggccttctcgggcggcggcagctcgggcggcggtgcgggcggcggcggcgacgccggcaccggcagcacgcccttcgctcaggctgcgggctttagcggcagctccggcggtggctcttcttcgggtggcggcagcccctcgaccggcagcagctcgggcagctcgaagggcggcggcaaagccgatgccggcggccagggcagcagctcgacggccagcaccggcagcagtgccgacaaggccgccaagaacgaacccaagcccgccggcggggcagggcaagggcagcagggcggccagcaggccgcaccgggcagcaccggccccggcttgctcgcatcggccgcatcggccctcggcacggccggccgcatcgccgccgacgccggcgcgaacttggcgaagggaaccgccgatgttgccaaggccaaagccgcgagcctgcgcgaagccgcagccgagcggatcgccgacaccactggcggaaagatcgccgccgcgatcaaggcgcaaggaagcggcacggccgagaacatcgacgtgcccgaccagcagcccgcgccgagcttcggcgacaacagcctggcaggcggccccgccgatgccgatcccgagtccgaagtagctgcgttcgccaaccgcgagcaaggccgcgacggcacaactgcgtaa

SEQ ID NO: 110225 - DNA, 228 bp, Enterobacter aerogenes
atgaaagcaatcaaggctctgtccttggcctcggccgccctcgtggcggccttggtcgccggctgcgacaacaagccggccacggcccccatgccggaagtgaacgacgagaactgcaagcccgagaacatcgccaagatcgaggacaagggcgtccagcaggctttttcgtcgctgtgcttgcgtcgtggtggggatttcaagcccagcccgaaacgcgaatggtga

SEQ ID NO: 110226 - DNA, 765 bp, Enterobacter aerogenes
atgaagcagaagtttttagccgctaaattggccctcgtcattgctgtttcgagcacgctgacggtcacgcctgtggaggctggcatccccgtcatcgacggcaccaacctgtcgcagaacatcatgacggccatcgaatcggtggcccaaacgctcaagcaaattgagcagtacagcacccagctccagcagtatcagaaccagctccagaacacgatggccccggccgcgtatatctgggatcaggcgcaatcgaccatcaacgggttgatgaacgcggtcaacacgctggattactacaagacccaactcggcagcctggacagctacatcggcaagttccaggacgtgaactactacaagaactcgccgtgctttacggcggcagggtgctccgacgcggaacgcgcagcacttcggaatgtggcccagctcgcgagcgagtcgcagaagaaggccaacgatgccttgttcaagggcctcgataggcagcaaacgaatctcacggccgatgcagcgacgttgcagcgtcttcaatcggcagcgcagggcgcgcagggccaaatgcaggccatcggctacgccaaccagctcgccagccagcaggccaaccagctcttgcagattcgtggcctgctgatcgcgcagcagaacgcgatggcaaccaagatgcaggccgacgccgacaaggaagcccagcaggcggcagcggccgcacaactgcgccagggcagctaccgggccagcccggcgcgcacctggtaa

SEQ ID NO: 110227 - DNA, 1422 bp, Enterobacter aerogenes
atgacagaaaacgccgatcagatggcacctgacgcttcgcctggcgaagtgtccaagaaggcgggcgtccgtcgcgtcaacaacatgcccatgtacatcctcggcggcgtcctgctgtcgttcgtgctggtcatggctctggtcgcggcggatcgcgcggccaagcagaacgcgccggcggacggcccgaaggagaaggccggcaacacgtcgatgttcgccaaggagatcgccggcgataagaccggcggcttgatcgagccggcaagcccgctcaaggtgcccgacatgccaaccggcccggcctcggccccgctggagatcgcgcggccgtcgaacccggacgcgccgccggcaccgccggcgaaccccggcaacccgggccagccggtgaacgatgacgaggcccagcgcatccgcatggcgaaaatgcagatgttcggcgaggccgtgaaggccaagaccaccgtgcgcgtggatgccccgcgcagcaacggctccgcgccgggtggcccgagcacctacaccgccacgccgcagacgcgcgatgaaatgctgaaccgcatcgcagcggtgcagcagcaaatcgacgcgcagcgcagcaacgatccgaccgccgcctatcaagcgcgcctggcgcagattcgcggcatgggtgtcggtggtggcggtgcggccccggccggcggcggcatgggcgcgggcggtgcgccgcagctcctgcaaacctcgaccagcggcggcgggcgcaacagcatggcgcagttcggccagggcgggcagggcgaccgctggaagctggattcgcagccggaagcaccgcgcacgccgttcgagctgcgcgcgggcttcgtggtgccggccacgctcatttcgggcatcaactccgatctgccgggccaaatcatggcccaggtcgcgcaggacgtgtacgacacgccgaccggcaagcatctgttgatcccgcagggatcgcgcctcgtcggctcgtattcgagcgacgtggcctacggccaggcgcgcgtgctggttgcgtggcagcgcatcgtgttccccgatggcaaggcaatggacattggcgcgatgccgggcgcggacagcgcgggctacgcgggcttcaacgatcaggtgaacaaccactatgtgcgcctgttcggttcggccttcctcatgtccggcgtgacggctggcatcacctacagccagcgccagaaccaggccacgaacacctacggcgcaccgagcgccagcagtgccctaagcgaagccctcggccagcagctcggccaggtcacggcgcagctcatcgccaagaacctgagcatttcgccgacgctggaaatccggccgggctatcgcttcaacgtcgtggtcacgaaggacatgacgttttccaagccgtaccgttccttcgattactaa

SEQ ID NO: 110228 - DNA, 489 bp, Enterobacter aerogenes
atgcgcaagatcgtctctctcgcgctgctcgccctcgtcctgggcctcggcggctgcgcaaccaccagccagtacggcaacttcgtccagtcggccgcgctcgatcagcagaagctcgccaccgacgcggtgcagcagctcgccacgctgtacgcgccggcgcgcacgcgcctggagctgcaacagccgacgcccgatccgttcggccaggctctcgtcaagtcgctgcgcgacaagggctatgccctcctggagtacgccccggccggcgcttccacgcaggccccggcctcggcggcatcgcaggcgagcgcaccggccaccacggccgcgtcgggcggcctgccgttgcgctacgtgctcgaccaggctggcgactcgaacctgtaccgcctgaccttgatggtcggcaatcaatccatcacccgcccttacctggcgcaaaacggcacgttcgcgccggccgggtactgggtgcgcaaggagtga

SEQ ID NO: 110229 - DNA, 900 bp, Enterobacter aerogenes
atgaagaaaaccctctccgctttgatcgtgggcgctgctgtggcggtgccctccctggctctggccgcccctggcgacgacattgccgacaagtatttcaacaagaccaacccgacgctgaccgctcaagagcgcgcggcgctcgccatcgccaaacggtgggaagcggggtcggcgaccggcatcaagccggtggccggctcgggcggtgccatcaagttcgtgtacggcgcgcagcagccgagcatcgtttgcgcggtgctccaggtgtgcgacgtggccttgcagcccggcgaacaagtgaactcgatcaacctgggcgacacggccaggtggacggtggaaccggccatcaccggcagcggcgcgaccgaggttcagcacctcatcatcaagccgatggacgtgggcctcgaaaccagcctggttgtgaccacgaaccgccgcagctaccacttccgcctgcgctcgcatcgcaccgagtacatgccgcaagtctcgttcacgtaccccgaggaagcgcaagccaagtgggacgcgatccagcgccgcgagaagcaggaacgcaccgacaacaccctgccggcgacgggcgagtacctgggcgatctctcgttcgactatgagctgtccgggtcggcgagctggaaacctgtgcgcgtctacaacgatggccgcaagaccatcatcgaaatgcccggcacgatgcagcagaccgaagcgccgacgctcctggtcgtgcgcaaagagggcggcttgttcaccgacgacgaaacggtgctggtcaattaccgcgtgcagggcaatcgctacatcgtggacacggtgtttgaccgcgcgatcctgattgccggtgttggcagtagccaagaccgcgtgaccatcagccggaggaagtga

SEQ ID NO: 110230 - DNA, 783 bp, Enterobacter aerogenes
atgagcatcgccgacaccctcaagggcttgatcttcaagaagcccgccaactccgccgagccgcgcgatccgcgccgctcgaaggaaccgctcgccggcggccgccgtgcgggcgaggccgagaacccctacctggccgcgcgccgcacctggaacgatcacgtgggcggcgtcgtctcgcaacgccagacctggcaggtgatcggcatcctgtcgctgttgatcgcgctggccggcgtgggcggcgtgatccacatcggcagccagtcgaagttcatcccctacgtggtcgaggtggacaagctgggccagacggtggccgccggcccggtgcaggccgcagggaaggccgatccgcgtgtcatccacgccgccgttgcggactggatgagctgcgcgcgcatggtgtcgcctgacgtggccttgcagcgcaagtgcgtgttcaaggcgtactcgatgctcgcccccaacgatccggcgacgccaaagatgaacgagtggttgaacggcacgcccgattccagcccgttcaagcgcgccgaaaaggaaatggtcagcgtcgagatcaagaccgtcatcccgcaaacgcctgacacctggcaagtcgagtgggtggaaaccacgcgcgaccgccaaggcacgctgaaaggtcagcccgtcacctggcgcgcgctcgtgactacctacatcgccgaggtcacgcccaacaccaccgatgagcaactgcggaacaacccgttgagcatctacgtgcgtgattactcctggtcccgcatccaatga

SEQ ID NO: 110231 - DNA, 2559 bp, Enterobacter aerogenes
atgatcgaagcaatcgcaattgccattgctgtgctcggtgcggttctgttgctcatcctctttgcccgcatccgggctgtcgatgccgagctgaagctcaagaagcatcgcgccaaggatgccggcctggccgatctgctcaattacgccgccgtggtcgatgacggcgtgatcgtgggtaagaacggctcctttatggccgcctggctgtacaagggggatgacaacgccagcagcaccgaggaacagcgggaaatggtgtcgttccgcatcaaccaggccctggccggcctggggaacggctggatggtgcatgtcgatgctgtgcgtcggcctgcgccgaactactcggagcggggcgtgtcatcgttccccgactccgtttccttcgccattgacgaggaacgccggcgcttgttcgagggcctgggcgcgatgttcgagggctactttgtcctgaccgtcacgtggttcccgccagtgctggcccagcgcaagtttgtcgaactcatgttcgatgacgatgcggtggcccccgaccatacggcgcgcactacgggcctgattgcgcagttcaagcgcgagatcaccagcctggaatcgcgcctgtcctcggcggtcaagatgacgcgcctgcgcggccaaaaggtcgtgtcggaagagggcagggaagtcacgcacgatgacttcctgagctggttgcagttctgcgtgacgggcctccatcacccggtcatgctgcccagcaatccgatgtacctcgatgcggtcatcggcgggcaagagctgtggggcggcgtcgtgcccaagatcgggcgcaagttcatccaggtggtcgccatcgaaggcttccccttggagtcaacgcctggggtgctctcggccctggccgagctgcccagcgaataccgctggtcgagccgcttcatcttcatggatcagcacgagtccttgaagcacctggacaagttccgcaagaagtggaagcagaagattcgcggcttcttcgatcaggtgttcaacacgaataccggctcgatcaaccaggacgccgccgcgatggtcggcgacgccgaggcggccatcgccgaggtcaacagcggcttggtggcggccggctactacaccagcgtggtcgtgctgatggacgaggatcgggagcgcctggcggcctccgcgctcctggtcgagaaggccgtcaaccgcctggccttcgcggcccgtatcgagacgatcaacacgctcgatgcgtacctgggcagcttgcccggccacggcgtcgagaacgtgcgccggccgctcatcaacacgatgaacctggccgacctgctgccgacaagctcgatctggacgggcagcgccacggctccgtgcccgatgtacccgccgctgtcgccggcgctcatgcactgcgtgacggtgggcgctacgccgttccgcctgaacctgcacgtgcgcgacctgggccacacgttcatgttcggcccgaccggcgcaggcaaatcgacgcacctgggcatcatcgccgcgcagctccgtcgctacgccggcatgtcgatctacgccttcgacaagggcatgtcgatgtacccgctcgcggccggcatccgcgcggccacgaagggcaagagcggcctgcatttcacggtggccgccgacgatgaccgcctggccttctgcccgctccagttcctcgaaacgaagggggatagggcctgggcgatggagtggatcgacaccatcctggcgttgaacggtgtcaacaccacgccggcgcagcgcaacgagatcggcaacgcgatcatgagcatgcacgccagcggcgcgcgcacgctctccgagttctcggtgacgatccaggacgaggcgatccgcgaggccatcaaacagtacacggtggacggctcgatgggccacctgctcgacgccgaagaggacggcctgtcgctgtccgacttcacggtgttcgagatcgaagagctgatgaacctgggcgagaagttcgcgctgccggtgctgctctacctgttccgccgcatcgagcgcgcactgaaaggccagccctccgtcatcatcctggacgaagcctggttgatgctgggccaccccgcgttccgcgccaagatcagggaatggctcaaggtgctgcgcaaggccaactgccttgtgctgatggcgacgcaaagcctctccgacgcggccaactcgggcatcttggacgtgatcgtggaatcgaccgcgaccaagattttcctgcccaacgtctacgccagggatgaggacacatcggcgctctatcgccgcatgggccttaacgcgcgtcagatcgaaatcctggcgactgccattccgaagcgtcagtactactacgtctcggagaacggccgccgtctctatgaccttgccctggggccgatggccctggccttcgtcggtgcgtccgacaaggaatcggtcgccaccatcaagagcctcgaagccaagttcggccacgaatgggtgcatgagtggctggccggccgtgggctgaatctcaacgactacctggaggccgcatga

SEQ ID NO: 110232 - DNA, 648 bp, Enterobacter aerogenes
atgccccgggctttgttgtttttgcagcatttccccggcggcgctgcgcctggacgggctactggctggtggtgcggcctgtgggattcccggcggcgttgtacctggccgggctactggctggtggtgcggcctgtgggattcccagcggcgctgcgcttggccgggctactggctggtggtgcggcctgtgggatacccggcggcgctgcgcctggactggctactcgttggtggtgcggcctgtgggattcccggcggcgctgcgcctggactggctactcgttggtggtgcggcctgcgggtttcccggcggcgctgcgcctggccgggctattggtggtgcggcctgcgggatgggtagcccgggcgaggcatttatgccgaccccgggaaggtttacaggggccatatgagaaaagagcccgtactttcgtacgagctctcatctcgaatatggcggtgagggggggattgtctcgcttcgctcgcccctgcggggcagcccgcttactgcgttcgcggtctgtccaactggctgcgccagttgtcgaaccccggtcgggggttctcatcccccccagcggagaatataaaagaaaaaagcccgtactttcgtacgagctcttatctcgaatatggcggtga

SEQ ID NO: 110233 - DNA, 582 bp, Enterobacter aerogenes
atggaacaacattccctgactaatgatacaccggagtcaagacgggttttggaaggacaactcagggagtgttatggccgagtcgtgtactcacataagacacatgagaaatgttcagacattcttttgtctcgtctatcaactatcaaagtatggcaaattattctttccgctttaactactggaggatttctcgctactttttttggtgctggtgagattggtactggtgttggcatcattgtttcaactttgcttcttatacttaatgcctacacaaaggattatgacctcggtgagttggcgcagaaacataagcaagcggcaaatgagatatggctcatccgagaacagtatttatcacttctcacagatttggcaatgggagaaaaaccaatcgagcaactacagtcagaaagagatgcattgcttgaaaatttgcactctgtgtattcaggctctcccagcaccacatttgaggcttataagaaggcacaggatgcacttaaaacaaaagaagatttgacattttctgatgacgaaatagatgcattccttcctaaagagcttaaaagaagctaa

SEQ ID NO: 110234 - DNA, 882 bp, Enterobacter aerogenes
atggggttagctgagtggttccgtggattttgctccaatctcacggtaaaagatggcgggacaatttcggttcgatacaaaaatttaaccaggcgtttaaatactgattattggggtagcatttctgataccactcatagtctttacgtagggtcatatggacgaaacactgccacacaaggctttagtgatttggatataatttttcagctaccatattctgaatatcaaagatacaacaattacttaggtaatgggcagtcagcattacttcaatcggtcaagagatctattgaaaagacatacggaaaaacaaatattaggggagatggacaagtaattcaagtgccattcacagacgggataacttttgaaatcgtacctgcttttctaaataacgataatagttatacatttcccgatgcaaatgatggtggtcggtggagatcaactaatccaaaaccagaaattgctgcgatgaaattaagaaatcatgttaccaacgggaatttagtgcaactttgtagaatggcaagggcatggaaacgtacatgggacgttcctattggcggtttacttattgatacgcttgcttatcaatttattgagagttggccacataaagataagtcgtatctatactatgatttcatgagccgtgatttcttcaaatggctcgccgaacaggatgtctctaaggagttttggagagcacccgggagtggtcagtatgtctatgggaaaggactttttcagtataaggcaaaacgatgttataatatttcactcgaagcaatagagcatgaaatggcatcaccaaaacgtgaatggtctgctaagcaaaaatggcgagagatttatggaacaacattccctgactaa

SEQ ID NO: 110235 - DNA, 171 bp, Enterobacter aerogenes
atgtttgctctggttgatgtgaacagcttctatgcgagttgcgaaaccattttcaggccggatctgcgagggaagccggttgtcgtattgtccaataatgatgggtgcgtgatagcgcgttccgctgaagccaagaaacttggcatcaagatggggggatccgtactttaa

SEQ ID NO: 110236 - DNA, 417 bp, Enterobacter aerogenes
atggtaagagtcagtattactattgggttataccagcaagccgcagcgcataaatacgctatgatgctggctcaaaccatatccaatgaaacacaatactggtgttttggttcacatggtggctttgaaagaagctacgaagctatggccgcaaacatcaagaagatacatcttaaacttccaggcgataagccgtggcctccagagtactcgcttagccagagaacctgcgataattatctggtttacgctaagcatctttataatgacgaacactaccaagtagtggccataatcagccctaacgcacatgatcagattgatgcaatgctgccatcgatcattaagcttgtagaagagacattctctgaacttcctcaagatgaacttgataagctaaagacatacaatgcctaa

SEQ ID NO: 110237 - DNA, 573 bp, Enterobacter aerogenes
atggctatcagtcaagcgattgcattggctgcgataactcaacaaatgaataaggttcaggatgctgttaatagcgcattcaagcccttgatttctaatgcctgtgaaatgcctgcgagattaaatgcggaagagtctctgcgcaggtgtacagcagttgtcgcaagcatcaagctgatagaagatatggcaaaagaaggcatgcatctcttggctaatgtgcgctctggagagattgatttagggagcgcgcctgaagggctcattgagatgatgaacgctttggctgtggcatgtaagaatgctcgcggtcatgttgtggaaatgtttgcatttgctgaaagctctcccatgtggagcgggcatatcagcatgctcagaccactaaagaaaaaatatgtcaaggcactttctgcagccgaaaacatcgcaaaccaaatgattactgaagtcaaagaggcaaaatcagcgtccgccgatgttgaatctttagatatacgtcgtgacgacgcgatttcattaattaaaacttcacatatcatgttgggggctgattctcccaagtggatgtga

SEQ ID NO: 110238 - DNA, 342 bp, Enterobacter aerogenes
atgttccgatggcgcaagcaagaggagctcaaggccaagcttaactttaaaatggcggttgcaaactactctttccagcttacgcaaatgcctgaaaagttggatagtgcaaagatacggttctcagttatacaagatgccaataggcttaatgagctacttgccgcttgcaataatgcatggatgatttgtgaaggattgctggacggaaatgtcgaagttaaaaacttttgggaatatattttcgataacaacaaactttatttcaatggaaaaattgattcgggattgcttgggcaagcatgtattggaatattgcagaacaagttcgttttcaactaa

SEQ ID NO: 110239 - DNA, 405 bp, Enterobacter aerogenes
atgattacaatcactatcaatactaatgaacctgaagcacgtttcaaaatggacaaggaacaagctaagtctttctttgaattcgttgaaaagaaagccacagagtcagggtttaaggttcagcgcgacagttgcaactatgttgatgaagaaagcgagcgctttgttcaaaaatgctttgaggactatcaaccagctaagacgatcgatgaatacgtagatatgtattttaatggcaacaaatcagcatttgcccgtcacatgggggttaaccctcagcaggttactaaatgggttaatgatggatgggttgtcgataatcacacgctctatagcccccggcgttgcgtgccagagttcactgtccctgaaaatgttaatggcggcggctctgcgggtaactga

SEQ ID NO: 110240 - DNA, 1773 bp, Enterobacter aerogenes
atggaactaatatatacctacatccacaattacaaaggcttaaataagctatcacttcccacatcaagtaaatttacctttagaaataatggtggcactctaaaaatcgcaaaaaaaaattcaagccgtaattattacagcaacaccccctgtacattaattttaggtaaaaatggtgttggaaagtcatcaattttagacttcattaatagctttatttatgactttgaaggtagcggttattgcatatggcatgaaaatgaaaaactcacaattataacaagcaactgcgagccccctgtaatattgtctgaaatgcaaactgagctgattgataacaatgaacacttctttagaaaaaataaaatcaatctaataaagataaataatacaattgatctcaaaagtatgctgattggacaaaaaaagagaaaaaacaatgttatatctaaagatttatcactatcatatttcttgcagggtagcacggcacgtaataaaaaattactcaagcaactaatttcattttcagatcatagttcatgggctcgcgataacttatcaagacttaattctaaattccaattcgaaattgaaaactcgcctacatacaaaataaactccattataaaaaacaatgagattggtgataaagggatttttagctctcttgaatattttaataatacattacacaatataattaaaactaaaaaaatacccagatacgtagaaaatgatttagagtctctaggtatttctcttgtagatatccctaaaagtgaaatagattacgatgaaaatttcattgtagacattctctttaacaaagaaaggccgtcaaatttactcgcaacattttcatatcaaaaaataatctttttaatgcttttacctgcaataacctggcatttgcttaaggcatcaaagatatctaaagatatatgtgagacaatctatttattttgcttatgtagagcatacctcgaagaaacagacccagcccaaattatattagatacattagatgattataatcataatgataataaaaaattaaacacaaaaataataaagttatctgagcgcatctttgagattatagtcaatatagccgacatattagaaaatataccgaaagacctgagtgataatttttctttcacggttgaagaaccacagcagattatggagttaataaaattagtcgatagattaccaagtggtatctcatcacgtttcaagtatggttgggattcactcagctcaggagagtttgcaaaattaaatctattcaatcaactttatgattcaatagaacatagcaatagcaaaaaccttataatattattagatgagtgtgatctatatcagcatcctgaatggcaacgagttatcttttcagaaattttagatttagtattaatgcataaaacaaataaaaacattcaattagtatttacaactcactcccctatactcgcaagtgattttttgccctcagatataatatatcttgcaaaagataatgaccaaaagacttacactaagaatgtagattttgggttcggggcaactatttcagagttatatataaatggtttcttcattgaagctaccatagggcaacatgcacataattatctaaataccattataaataattctgaacttggtaatttaaacaaagaccaaagaactatattatcacaaatcaaaaataaactcctcaaagaccttattaatctgaagttaaacaagacaactgattaa

SEQ ID NO: 110241 - DNA, 1137 bp, Enterobacter aerogenes
atgataagaattaataaaaaattcaagcgacagaagttactagataccactcccgatgagctggagtttctaaagaccattaataaaaaaacgattagaaagttagttttctccaaaccaaaacaattgaaaaatttaatcttaaaaatttacaacaaacaccctacagtatgtgagtactattcccctgattactttcttagaaaattaaatttacaccccatgactaacctgcatttacctttaaacacaaaagaaaacaagggagtagtttttcatgagttaatgcatgcattccaaataattcaatcattctctcaattaaatcaaagcctaatacttgaagatatattaaacacacctttcacacaaaaatcaatgtctgcctttagagataaagtccgtaatcttataagcattaagaatggcggagctttaactgaaaatttcataaatttatttccagtatgggttactaaaatcccggaaacatttaaatactcacttattgatagagaaaccgcgtatcaattaaacagttttttagacataagcatatgcccgtattgcaacagtgaagaaattgaacaaatagaagaggatacaggtaatagctacaggccagcatttgatcatttcataccaaaatgcaaatatccactagtttcttttagtttattcaacttaattccgagctgcactaaatgtaacagtacgtataaaaaaacactcgaccccatcatgactccgttttctaatcctttcatcgaaggcattaatgacatacaactttttaactttaattatgacattaattatatatatagagatggtcatattgataatgaacaaatcgaagttatacttaaaaagcaaaaaaacaacatcgatgaaaacatgagtaaacttcaaataaagaatagatataactcactcagtagtaaacaagcggcaaggttaattgcaaagagagcatttgatcttaaagcttacgaagaaaactttaatatagaaccaactcttttcgctactttcagttacgagactgatgtcgagccactaaaacacaggcataaaaaattctttcaagatgcaatattagtattttgtaataagaaagtaccatggattgattaa

SEQ ID NO: 110242 - DNA, 2097 bp, Enterobacter aerogenes
ttgctcagtttttaccagcaacaatatttattcaataggaataaagataagttaggcgaattcaacattgaaaaaccattatgggtctttgttggcaacactgtcagtggtgaagactcggatattcacgcagtactgcgtttcttagcatggtttttaaacaatgaagtacaagcaaaatcatggattcgggatcttgttgaaaataaagccagaattctggataccaaagatcgtaacatctttgaaaaacgcttcactgctctaataaatggaccggaagatatctatttggatatccttgctcgcctgtttaataccacacattcaggtcagcggttaagagtattaaatttgatcggaagtaaaggtgaacttgcattacaggtcggtgaagccaaaccttttggcttgatcaatatcggcgattcaccctctctttataaaatgtgtgaagatgatacgacgtttgattatcaaagagacgattttgccaaatctctgtcccaactgcatatcttaattgggtcccgaaaatttactgagggctggagcagttggcgtgtatcgacgatgggtctactcaatatggggcgtggggaaggttcacagattattcagctttttggacgaggggtacgcctgaaaggtcgcaactattctttaaaaagaagcacaccaggagagcgtcctaaaggactgcatctggagaaattagagatactgaatattttcggtgttcgtgctgactatatggcaacatttaaacaatatctcgaagacgaaggaataacgccaagtgatgagatcctagagctaaattttgaaactcggccaaacatgcctaatacaaagcttaaaacacttaagctcaaagatggctacaaggataatcaaaaaaatggcttcaagcgtgtttactttcctgagctttatgaggttcctgctgaactgcaaggcaagataaagcatccacacatcaaactcgatttatatcctaaacttgagtcgattgatacgagcaggaagggtgacaatacacctgttaatgtcagaaacgaggctaaattagattataaagtaatcagtgcgtttgattttgatcgtctttatctcgctattcaggcctataaactacagcgtggatggtcaaatttacgtctagataaacaacgattgatcgacttttgccttggaaaggcgaatatcgcaaacaattggtacacgctttcaattccggcatcggagctcgaaattaagcagtattccgatattgctaagcaagaagatattatgcttcgccttctgactgattataccgaccgcttttataatgcattaaagaatgcttatgaaggtcaattctatgaaataactcaagtcaatgaagacgatccatgcatgatcaaaatgtatcactttgaaattgaagagtctgatgacggtctggattatacaaagcgacttgagcaattgcagcagatcgtcgctcaaggtgatattggtaaagctaaatcctggaacgctcccggcatgattgctgtaaccttcgacaagcatctatattatcctcttctttcaattgagaaaaatgctgatttaccgctaaaaatgcgtccaaccgcctttgatgcaccgagcgaaattaccttcattaaggatttacaagaatttattgaaacaccaaaaggtcaaaaaaccatcggcaataagagcttatacttgttgcgcaatgctgattccaaagctaaaggcttaggtttcgctactgcaggtaacttctatcctgactttttattgtggctagttgacgatgaaagtgggaagcaatggttaagcctgattgacccaaaaggtattagaaatctgaatcttgacgatgctaaatttggcttgcacaaggaaataaaagagcttgagaagaaattatctgatgataaattaagcctaagtgcgtttattgtttctgaaactcgtttcgttgatttaataaatgtatccgaaactaaagataaaattgaagagcgtaacgtactctttctagaggatactggttctatttatctggagaagcttttcaaaaagatggttgcttaa

SEQ ID NO: 110243 - DNA, 762 bp, Enterobacter aerogenes
atgagaatatcagatttcgaagatttcaaggtgctgttggaaaagacaaaaaatgaaagccttggatttcttgatagcataaaatctattaatgattttatgacgatgtcgggagatagagaaaaggaggatatgtttagaataatatcggttccaatgatttattcttcttgggagggtttttttacggaaacaatgtcagtttgcttaaatacattgaaactttcagacagagaggcatttaaatactctgccgaaatccgggctctttggttgcaacgtgaaccattttatagcagatatgtagatatgataaaaaatatttatgatgctgactcacaccgtagcattgtccataatggtgctcaaataaaaaagaaagttacgaaaggtgcgtttaaactgactagcgatgtaattcaacacattgacacatttaataaatcaacattatcagattgcgatgtttctgagttagttatgacattttctaatgtgaacgaaatagtcgttaagataaatttcgatgctatagggttggattattcatcacttgatttatcgcaactaggtgaggttgttggtcttagaaattctttggggcatggggagtttaaaagtagcgttaaccctaggaaattcaattcaataattgcgtatgttgaaaggttgatcaacgatttgaatcagtgtgctatagattggttggataaattagaggacgaaataacaaagcctgaagaaaacgaggctattcagtga

SEQ ID NO: 110244 - DNA, 1113 bp, Enterobacter aerogenes
atgaatgatatgactaaattgctatctcagatagatgaaaaaagagatgaggtagtaactgattcttatactatctcatggcgcgaagtaattaatctatataaagaaaatgagattaccatttctcctgactaccaaagactttatcgttgggataactcaagacaaagccagtttatcgagtcattattgttaaatattcctacgccaacactttttttctacatcgataataatggtaagcaggaggttatcgatggattgcaacgtgtgagtactataattagatttttttcagaggatatttttagtaaggaagaaatagacaatgcaaagagacaaaactctgtaaatgatgtccgaaatccaacggttcttgatgatgtacctatcattacagaattgaatggatggactgcaaaaggattaccggacaaagttagccgaactataaaaaatgcacgagtcaatgttgttattttagagcaagaaacaaaacctgaaactaaatataatgttttcaaacgattgaatagatctggggttcgtttgagtgaccaggaaatacgtaattgcatggccagattagctgggaatgaattcgcagatcgtttacgcaagatagctgaaattgatggtattgtgcaagcgcttggaataaatgaagaaggtcaaaaatcccaaggtgttgaagaggctttgctacgagttatggcatctttgacttatgcggataagtttagccatagtgtgactgactttttagatgaatttatgttcttcgcagcagaaaataatgttattgacattagttttgaattaaaaataaaaagaacatttgatttaataaatctttccggtttatcaggcaaagcatttaaatttagaaagaatggtgccccaagtggttcatttagtactaatttattagatgttgttgctgttgggatttttagtaatgtagataatttaacaccaactgaggtgacaaaaagatttaactatttaatggatgatcaggtagaagaattaagggcttgcactggttcaggttctaatactaaagccaagttagagaaaagaattgctcttggaaagaaggtgttcggataa

SEQ ID NO: 110245 - DNA, 1266 bp, Enterobacter aerogenes
atgagcctcaattgtaaattttgggtaagtggtttaaagatgattgcaggcgcgaaaagagggagaaacgaacgcaaggggcttcactcttggcatccatactatgcgggctattcagaagcatttgtagcttctgttttgcaggctgaaggagttaagtcgtccggtattgtacttgatccttggatgggaagtggtaccacaggtatagtttgtcaaaagcagactataaagtgcattggagcagatattaatcctgtaatgagttatttcgctgctgcgaaaagcagggggaatatttcatcactggatgataccggagaacggatcctggaaaggatactactttgctttagaaaaaaaacaaaaaatatagctgaatcatcgaagggttacccccttattgaacagttacagcagttttataaatgtatctgtgatcaatttattgacaatagacatattgacattgtaaaccctttaaaagcattttattgcagtgttttattttatactgttcgcaatgtccttgatgttaaatcaacttcaaaccctacatggatttctaaaaaagtagattttaataataactttgatatttgttttgagtatggtaaaaattttaaaatgatgcgtgagcagttaaatgagtattatggtgacgctaagagtgaatcatattactctattttaaatgcagatagtaaaaagttaaatattaaaagcaatacaattgatcttgttattacatcgccgccgtatttaactcgaatagactatgccgtttcaacgcgccttgaattggaaataattttagggggtgagggttataagtctttgagaaaagaagtaatgggcacgacgactgtgcctaaagttgcggatgatattaatgaaaaatggggttccttgtgtatggatgttttgtcggcggtgacatcgcatacttcaagagcctcagggagttattatcttaaaaataaaattagatatttttctgatgcgtatgattcattaaaggaaatatttagggttttaaagattggctgctctggttattttgttatacaaaactcatattataaagagatagaaattcctctctatgatatttattgtgaaatggcactctctattggatttacagaagcaaaatgcgtgagggaagatcaggttaaagcaatatttgggcagataaataccaagtcgaaaaattacattaaagataagttttactttgaaaaaatcataaggataacaaaatga

SEQ ID NO: 110246 - DNA, 174 bp, Enterobacter aerogenes
atgaaatatatcattccactcattctgtcggcgttctttatcactgcttgcgatcaaaaaaccgaacccagccagattgattgcagtaagtcagtatcaaagatgactgaccaggaaaaaaaccagtgcggtaaatctggcgagtttacaaaaagccccgaaaagaaatggtga

SEQ ID NO: 110247 - DNA, 879 bp, Enterobacter aerogenes
atgacagataacaaaacacattcagaactcgataagctgaaagaggctgcactggcccagcgtaaaaaaactatcgacgaaaagaatacacaaaagcagctgacgcttttcgatattgctccatggcctgattccatgcgagcactacctaacgactatgcgcgctctgcgctctttactgttaaaaataagcgtcagccccgcgaagctctgcaaaaaaaagaaatttatcatatcaataaggacgtgcgtatcacgtataccggacttgagctaagggccgatgatgacgagttggtatggcagcaggttctagagtacgccaaaaggaaacccatgggagaacccattactttcactttttatgaactctgtcaggatttaggatggtcttacaacgggcgttacatcagtaaagctgaggagtgtcttacccggctccaggcaacggccatgcagttcatttctgatcgcgtcgggcaattggagtcggtttctctaatagggcgatttcgcgttattgagcgcggtacgcggttatcgcgctgtgaagtgatgattgataaggaaatggttttactctttgccggggaccattattcgaaatttgtttgggaaaaatatcgcaagctctcccccactgctcgccgcttgtttgactactttggttcccaccgcgaaccctaccctatgaaactggataccttcaagctgatgtgcggttctgattcagatcgcattaaaaagtggcgcgaacaggtgaataaagcctgcgttgaacttaaagaaagcggcctcattcacagtgcctgggtagataaagatcgtatctactgtaagcgaagcactgacgagcctaaatcagatggcgacacttga

SEQ ID NO: 110248 - DNA, 123 bp, Enterobacter aerogenes
atgtcctataatatttgtgaaggccgggtaaatcactcaggtcagcagccggagaattccgatgaaaaatacacttatccatactcactgcaagcgttgcggctgcagtctcaccatgcttaa

SEQ ID NO: 110249 - DNA, 357 bp, Enterobacter aerogenes
atgacagagaaacagacacggaaaaattgcacgcctatcaaggtgtactgtctgccagaagaaaaattgcaaatagaagcgaatgccgctgcgacaggtttaagcgttgcggcttttttgcgaaaaattgggatgggttatgaagtaggcggcattgttgatcttgaacaagcgcgtgaaatggtacgcatcaacggcgaccttgggcgtcttggcgggttattaaaaatgtggttatccgatgatcctcggactgcaaatttctctcccgctgttttgaaaacattgctgaccaaaatcgaaaagactcaggatgagttacggactgttatcggtactgttttaaacgataactaa

SEQ ID NO: 110250 - DNA, 330 bp, Enterobacter aerogenes
atgtcacacaatccttacattgttcagttcccagatggttcccgactatatggcgtgagcaacggtagcggcgttcttctgcgacccttgtttctctcgccagaagaggctatgagttttccaagcgaagctctttacgatgcaacggagccgtgtgaggcgtctcatacagacgttaaagtcatcatcgaaccaggagaggcctgggagagtgagaatcgagcctcattgaaattaatgtggcttactggccctcagaccagtaacgagcgattggcagaagagtcaaatagtgaacatgaactctatggcggtattcaatgggagtaa

SEQ ID NO: 110251 - DNA, 258 bp, Enterobacter aerogenes
ttgcccgttgacctgctcttactcaagaacagacaaatcgatgcccaacttgctgaagtcatggagcagaacaatgcgctctttgaactggaacgagataagctggaaaaatgggcagaggatatgatttatgctgcggaagaagcattacgcgatacgaaaatgcaaatcaagtctttgaagagagacgcaagactggcacaatccattgaagagcaaaaacaaaaccaagaaagactaaaaactgctgtgtgttaa

SEQ ID NO: 110252 - DNA, 2421 bp, Enterobacter aerogenes
  misc_feature (2394)..(2403): n is a, c, g, or t
atgatcggtacaactccctaccatgctaaatattttgcgcatgagctttctatcctccattcaaacaatggcgtggatcgtctttctcagtcattgtttgatgccagcgttgatctcaaccctcaccaaattgaggcggcgttatttgctatagagaatcctttaagtaagggcgtggtacttgccgatgaagtcggcttgggtaaaaccatcgaagcgggattagtactttgccaatactgggcagaaaggaagcgaaaactactgatcatctgcccagcgtctttacgtcgccagtgggcaagtgaactaattgagaaattcaacttaccttcacaggtattggatgcaaagactttcagccagctgcaaaaagaaggtgtctataaccctctaaataacaaatcgataacaataatgtccttccactatgcagccaggttagaagagaagctggtagctgaaatgtgggatctagtggtaattgacgaagctcataaactccggaatgcacaccgcgacagtaacaagatgggacaagcattaaaacgcgcgctttgtggccgaaaaaaaatgttattgacggcaacgcctttgcaaaattcgctaatggaactgtacggcatatcgacacttattgatgagcatactttcggcgaccctaaggctttcagaaagcaatatatgcagacagacagtgatatggtggagctgaaagggagactggcgcactttatcaaacgaacattacgtaagaatgtactcgagtacgtcaagtatacggaacgtaaagctatcacaatcccattctatccaagtgaacaagagcatgaactctatgagcgtgttcaaaatctgctggaacgtgaggatagctacgcgctgcctaagcgacacaggcatctgacagggcttattctcagaaaactgctttcgtcgagtacgaaagcagttttgaataacttacagatacttaagattcgtcttgagaaactaaagcacaaaggcatcgttgaagatgagctagatatcattcagcagattattgttgatgatgatcttgaagatgacatcgttgaagatgacgaaatgttaagcgctgatacagagcgcaaaacaatcgatctagctttacttcaggctgaaatcaatgagcttgagaccctcatcttcaaagctgaagaaattggtgttgatactaaaacaaaggagttactccttggcctggagcaaggttttgcacagcttgcagaaatgggggcagcaaaaaaagtcatcatctttacagaatcgatgagaactcagcaatatcttgctcacttcttagaaaatcatggttatctgggtagagtggttacttttagtggtaccaacaacacgccgcagacaaaccaaatttatcagcaatggcttgaagaatatcgtggttcttctcgcattacaggttcggcgcagattgataaacgttcggcattgatcgaccatttcaaagatcatgctgaaattatgatcgctactgaagcagcagcggaaggggttaacctgcaattctgctcgttgctgattaattacgatttgccatggaaccctcaacgcattgaacaaagaattggtcgttgccatcgttacggacaagagtttgatgtagtggttattaacttccttaaccaaagaaatcaagcagatcaacgtgttctggaattgttgactgagaaattcaatcttttcgatggtgtgtttggggcatcagacagtgttttgggcagcattgaaaacggcgtagactttgaaaaaaaaattcagtccatttatgagtcatgtcggacacctgaagagattgaggccgcctttgaaaaactgcgaaaagagcttgaagacgaaattaacctcaagatgcaaaagactcaagagcagctactcgagcattttgatgaagatattcacgatgttctaaagatcaggcttgatgaaacacaagagcgcttagataaggttggccgctggttttgggcagtgacacattaccaacttaaacattgtgccaattttgatcatgagcatcaccgtttcacattgtgcgagccagtcaatgggttaccagtagggcagtatcaattactacgcaaaagtgttaaccaaaaaagtgagttacaaaggcaagaacatcatagttttgcgtatcgtatcaaccatcctctcggtgagtatgtgattgataacgccaaaaggctagatacggagaaggcaaaagtcatcttcaattacagtgaccatgcaacgaaagtttccgttgctgagcaactaaaaggacaggcgggttggttgacgctgaacttgcttactgtagatgcgtttaacacacagcagtttttagtctttcttggttttgttttnnnnnnnnnntactgtagatgcgtttaa

SEQ ID NO: 110253 - DNA, 666 bp, Enterobacter aerogenes
atgaataccgctgaggacttcaaccggctttatgccgacgtagggcgtaacattgagcaaacattagctgatattgcagggcttcatgttgaaaacgaagatggcaaaaagcagcttaatgcgatgacggcgcaactacagattctgcaggatactttcaatcagaaattggcttatctacagcaacatgccgaatgggacaagtttacccttgctttttttggcgaaactaacgctggaaaaagtacaattattgagtctttgagaatcttgttcgatgaaaccacccgccgacagctgctacaaaataatcaaaatgacctgcataaggcggagcaagagttgcgcgaaaacttaacgcagttacgaaaggactttggacgggtctatggcgatgtggtcgataaaattagcagcatcagcttttccgccatgcgactgcagcaaattatcgccaatgaaagcgccttacggttaaaaatggaagaagaggcgagtaaagcgcgcctgcttatcgaacaaaacgaaagccagtctcgtctgaaaattttgcagcggcaaacgcacgtaaaagcgcgtttaacgttattggcgatcgccattgtcagtttgtttgtaggggctggtggtgcagtggtgttgcttaatcagttggcggggcactaa

SEQ ID NO: 110254 - DNA, 1704 bp, Enterobacter aerogenes
atgagcagcacactgtctctagcagagaatgatccagaacggttggccgaggtgtgcaaaccggctatcgatattcagcacttgctggatcaaagcttgtcgcgtcttactcaatctgtcatccgaacggaaaaattaaaaaatacgtcaaagcgcgtcgacggtttaatcattggcactggtgagtcggattttaccaaaggcaacacccactatgacttacatatcgatgataaaatcttccagctgatcgatgtgccaggcattgaaggtaatgagtcccactacgtacatttggttaaagaagccattgcgcaagcgcatctggtggtttacgtcaacggtaccaataaaaaacccgaaacgacgactgccaagaagatcaaatcctatctggaatatggtactcaggtttatccgctgatcaacgcgcgcggttatgctgatgactatgagtttgaggaagatcgtgaggatctttgccgtcagagcggcgctgataatacgcttcgccagaccgttgatgttctggctccggtattaggggcggaggtactgctggaggggcattgcgtgcagggaatgctggcattttcagcgctggcgtatgacgacagcacgcaaagtacgaccattcatccctcccgggagcataatttggcggtatcgcagcaggagtacttttcggtgttcccagaccctctggaaatgcgggcatttagccaaattgatgccgtagcccggacaatcagaaataaggttgccaccttccgggaggatattgtcgaaagcaacaaaggcaaagttcgcgagatgctggggcaatacttacaggtgctggaaacacagttagccggacaccgtacctttctgaaaggtgcagagccagagtttgataagtgccgtgccgcgttccggaatgcgattgctgagtttgaacggcgtattgtgaataaccgtcgcaaccgctggaataccttttttaacgggttgaacgaggccagtgacgctatcgtggaagacgatttcggcgatagtgacgcgatttcgcaacggattcagcgcgagtttaaaacgcgacgcaccggcgttgaagcagacatgctgaaggatacggaacaggctgtggaggtattgcagcagcagatgctgcatgcggtggaacgtctgctggaagatatcaagcatgtggaatttcaacaacgggtcggttttacgcgtagcggcggtctcgattttggcaaggatatggtgttggggtacgacctggggttaggcgattttggctcaatggccttcaaaattggcagctatgcgatgacgggcggcacaattggtagcgcattcccaattgttggaacggcgattggtgctattgctggtgcgctggtcggcgtggtgatgacggtgatcggcttttttaccagcaaagcatcaaaaattcgcaaagcgcagggaaacgttcgtgacaagttggatggcgcaagggagaaggctctggacggtgttgcagatgaagccagcaggctggtggcggccataaatcaggaacttgagattggcctactgaagaaagtgaacgacatgcagagtgccttgcagcagccaattaccatttttgaaacccaaatcacccgaatcactcgattaaaaaatcaattagagaaaatgccttatggaacaattcaagcagttcagtattga

SEQ ID NO: 110255 - DNA, 1731 bp, Enterobacter aerogenes
atggaacaattcaagcagttcagtattgagaaacaggcggccattgattcgctgttacaattgcgcggtatgttagaggcgctgggtgaaatggagatagatattggtgatgatatacaaaaaatatcctccgccattaccgccgttgaatctgatgtgctgcgtatagcgttgcttggcgcgttttcagacgggaaaacgagtgttatcgccgcctggttgggtaaggttatggaggatatgaatatctccatggatgagtcctccgatcgattaagcgtttacaaaccggaaggactgccgggtcaatgtgaaattgttgatacgccgggactgtttggtgataaagagcgcgaactcgatggtaagcaggtgatgtatgaagatctgaccaaacgctatatttctgaagcgcacctgattttttacgtggtggatgccaccaacccgctcaaagagagccacagcgatatcgttaaatgggttttacgtgacctgaataaactttcttcaaccatctttgtgattaacaaaatggatgaagttgctaacttgacgaaccaggtattgtttgaagagcaggcggcgattaaaaaagagaatctgaaaggcaaattacagcgcgccgcaaacctcaacacggcggaatgcgaacgattgaagatcgtctgcattgcctctaacccaaatggtcgtggcctgccgttctggttcggcaaacctgaatattacgaaagccgctcgcgcattaacgatctcaaaaaaactgctgctgaaattctgaaagccaatgtccccgaagtgctgttggcgaaaaccggcatggacgtggtgaaggatatcgttaatcaacgcgttacgcaggctcatttacagctcagtgaactgaacgcttttgttgaaaaaaacgaagaggatacgcgccgcttttgtcacgatattaagcagagtcgtaccgaggttaaacggctggccggtgagctatttgaagagctgaacctgatggaaaaacagctcatgagccagctgcgaccgctcagcctagaagatatccgcccgtttatggatgatgagttgggatatacggaagagggagttggttttaaacttcacctgcgcattaagatatctgtcgatcgctttttcgatcagtcaacgatggtcacgcagcgcttatcggatgacattacgcgtcagctgaactccagcgaaagctttttaagcggcctgagtgaaggtgcatttcgttctctgggcggagcctttaagggcgtgtcaagaattaaccctgcaacactcaaaacaaccatttttgctgcacgcgacacgattggcaaattaaccggctatgtttataaatttaagccctggcaggcaacaaaactggccggaagtattactaaatgggctggcccggcgggtgctgcgtttacgataggctccgatctatgggatgcatataaagcgcacgagcgggagcgggagttggaagaagtgaaagcctcgttagcgaaaatcattaaagagccctttaaagaaatctatgatgtgctgagttcagatgaaaaaatgttcgctttttttgcgccacagattcaaaacctggaacaggtggtcactgagctgaccgcgaaaagccaggttatccgtgataaccagcaaaaactgacgattatccagtcaaagcttgcccagctaacctcactcgcgtcggaatccccgtcagtttga

SEQ ID NO: 110256 - DNA, 1230 bp, Enterobacter aerogenes
atggtatctgcgctaggttggcttgatcacgattcagacgcacggactaaaacgttaaatattcttgcgctctttcaacaaaaagagagccgtgatgaattaggtattggctcgatccgagatagttttgctgaacagttatttccaggaaccagcaccatccagacccgtttacgctacatgctttttattccatggatctaccaatacctcgagaataaacgcatacccgccgcaaaatttggtactcaggccgaccgtgacgaacgcgccttaattatcactctctcccggctcgaagaagattcggccggtacatttggtaaaaactcacgcgagaagcttaaacgcctgcccagctccgtttactggtccgggctgcagcgctggggtattcgccagattctgtggtcgcaggaggaatatcatcggcgtgtggatgaactgtatcgtgcatgcacggaaatcagcgagcgagaatactatgaaaaaaatcggtgcgatatgggcgacacaagcgcgtataaaccagcccagagctggcactccagcctgcctgcgccaccgtccaactttcctgatgaggcaacattcgccctaacacggcaggaagccagttttcttcgcgaccgtattcaatcgtcatgcaaaggcagcctgctggcatggttaaccctgcatagcgaaccagcagacgtaagcgcaccgtgggaacacccggattacgcgaaattcccggacgctctccaggaactgctgacccacgcgcggattttttcttatacgatgcacggcgcagcattgctatataactatttgcttgccaaagaacgagcagataacgaccttctgtctcaacaccgtgacaatttcgtcgcctggttttccgaaccggttcgcgagaagatcgctacctggccactcgaccgcatgtgggaacttactgctgggcctggctatagcattagcctgaaaactcgccgttttgtggagcagtggattgcactgatccgacaatcctctgggacattactcaccagtaaagaagcctgtgcacttatccgtgcccgcgaaatagccctcaaaggtccgcgttcgcgctttaaaaacagacgtgcactggagcaatggagtggatatgcgggaaccctgcggctggtctatcgctggcataacgtccagataatacttaacgatctggcgcacggtctcaggagagaagaatgctaa

SEQ ID NO: 110257 - DNA, 1797 bp, Enterobacter aerogenes
atgctaaaccccaacaatcgcagtttatatacttcggcattgacctctccgccctgcatggtgtttgacgaagccatcgcaaccagcttttcacttgacccggtatttttattacaggcaccggtctatttggctttcacggcaaccgacagcaatcgcgctcaggatccgctatccatttttgaagccattcgtcgttattccgaacgtatcacggtgtacgttcaaaaaggtcgcattcaagttcccacaaagctcaagcctaatcccttgctcggtttgcttgaagatatgattgttgaatcaaaagccaaaggccgcggggtctttcaccccaaaatctgggcgattcgttttatcaatcctgaaacagacgaagtgatgtaccggttggtagtactgagccgaaatttaaccaccgattcgtcctgggacctctcgttgcagttggacggctaccctgtaaaacgtaagcaaagtgccaataaagcactggtgcatttattctccgtattgcccaaacgggcgacgggaaaaatggcgaaacatcgctggaagcaggcgcagcgcttcacagatgaactgttgtatgttgaatgggaatgtcccgctggttttgataaggtcgcatttttcttgcccggagaaggttacgactggaagccacccgaagcggatcgtgcggtggttatatcaccgttttgcaccgatgaggccctgcgccacatcgtggaacattgccaacaagctgatgccctgatttcacgtcctgacaccctgctcgccttgagtaaagagacgctcaaccttttcacgcaccagcttcatcttgacgatgcagcagaagggcagatgcacgacgagatctcacctgatgaaatcattgcctccggtctgcatgccaaagcttatctgtttgaaaatggccgagacagcgaactggttctgggctcagcgaacgccaccagcgcggcgctactggggaaaacaaactgcgaaattttagtctcgcttaagggtaagaaaaagcacacgggcactattgatgacctcattggcagcgacgggatgggaagctatctgcaagatttcgaccctggccagctgtttgagcccgatgccctgcgtatcgaagcagaatgccatcttgaacaggcgcgtacgttgcttgctgaagctgcattgagtcttcatagtcaccccggtcaaaacgaccaaagctgggcattgtggcttattggcgagattcctaagttaccgggagttgttcaggcaacagcatggccaataacggtatcagaagtgttgagttgcaatctacaggacccgaataaggagaataaaagagaactcggagagttttcagtccaggcaattaccggactgacagcgttttcccttaaaacatcgcacccggacgtatcgctcaggttcgttctcaatctgccaattgatgccttaccccccgatcgcaatgcaataattttacaaaactgcatgcagaatcaggattttctacgttacttgttgatgttgataggtgaaacggggcatcaatccttctttgccgaaaataccttcggtgatggtcatttctttacagggctagccagtggagaggaattcagcgttctggaagagctgacacgtctctatagccgcgaacccgagcgtttaaacgatatcgccgcgctggtggaaaatatgcgaaaagggaagaacgacatgattccgcaagattttcttgcactgtgggccgtgtttgaatcagccatgggaggacgatatggccgataa

SEQ ID NO: 110258 - DNA, 3150 bp, Enterobacter aerogenes
atggccgataagcatcccagtattattgccccactcacgggcttgaaagatttccagcaacgcaccgtaaattatgttttccagcaattttacggtgataaaccgcaaaatcgctttctggtagccgatgaggtggggctgggcaaaacaatggttgcccggggcatcatcgccaaagttatcgaacatttgcaggataatgtcgatcgtatcgacatcatttatatctgctcaaatgcggctattgcggcacagaatatcaaacgcctgaatgtcagtaatgaggcgcaattttcacactcaacgcgcctgacgtttttgccaaagcaggtgcggtctctgcgccaaaacagaataaattttatcagcctgacaccaaacactgctctcgatcacacccgaagccgtggaggtcacaaagaagaacgcgcgatcttatatcgcattttgtacgatttaccgttggcaaaaggcatgcgccgtgaacgtttacgcaagggaatgcttaacttgctacaggcagcagcaggcttttctggctggcattccacggtagaccggctatctgttgatgacattgacacggaactggcaaaagattttcgtcgcaaggttctggacgataccgaactgtacgctcaactcaaagaaggttgtgaatgctttgccgatgatgacgaggacagcgaaattcacgattctgaactgcgctacacactaatcggaaaactcagaagtaaactggcttcggtgtgtttgtcagcgctggagcccgatctggttatccttgacgaatttcagcggtttaaagctttacttgatggtgacgatgaagccgcactgctggcaaaagcactctttgaacagccggacgtacgcgtgctattactctccgcgactccgtataaaatgttcactctcgatcaggaaagcgaaggggataatcactacgcggactttattcgcacattgcagtttttgtacaacgatagcagtcaaatcaagggtattcagcagcacttactcgatcaccgtactgcattgcacgcttccacaaatgccgcagaaacgaaaaaaacactggaacacgctttattacaggtcatgtgccgtaccgaacgggtaacgatgacgcaaaagcttgatgcgatgaccaaagaagttgcacaaccggcaatgattacgctctccgaccttcatcacgttgccgccgttgatgctatcgcaatggaggtacaagctcgcgatatcatcgaatactggaaatcaatgccttaccttctcaattttctaaagcattacgagctacgtactcttattgacaaagcactggaatacccttccgatacattgcgcaaactcgtcaaatcaataaagcctcagttactgtcgaaggcgaaattagagcgctacaaaccccttgatgctgcaaatccccgcatgcgaatgctgtttgaagacacgctggataaagacatgtggcaacttttatggatgccaccttctctgccttacattacgcctggtggggtctatgctaacaaaggcagcttgactaaaacgctggtattttccgcctggaacgcggtacctaatgcgattgccactgtttgttcttatgaggcagaacgacggatgattggtactgatccccagattctacatagtcagttcaaaaagaaagtaaaaccgctgctcaattttgcaaaatcatcaaaagatggtcgtctctccgggatgcctgttattgcctggatgttgccatcaccgacactcgcccgccatattgatccgcttgaaattgctctccagcatgccagcgagccgttgagtgtaaaggccgcaagggcgattgcaacggctaaatgtgaagcactgcttgaaactctggataacggtggaccgggtacgcgtgtggacgagcgctggtattgggcagcaccggcattactggatgctcgtaccgaaacgccagactggtggcagggcgaacattactggtacatagggtcaacgaaaaatgagagtgccgaaaactttcaggaacatatcgacctttttatccaaatggcaaatggcgagatctccctcggcccacgccctgatgacctggctgaagtgctctgtgacttagctcttgctagccccggtacgtgcgccctacgggcgctcaatcgcatcgacaatggcctggcaaccgattcagcagagatgttatccggggcagcacagatcgcttctggatttcgctcactctacaacctggcggagagcatttcgctactacgcggcattggcgatgacacttactggcggctaacgctgcgctatggcatcgatggcaatatacaggccatgctggatgagtatgttcatacactgttagagtcgatgggattacaacatgaatccgctgaagcgcagttagcggctattgcatcacgcattcaggccgtggtttcgctgcgtaccacgcaactgaatattgatgagttcaaaacgaaagggggcaattattcctggggcgatttgcacacacgatgtcgctttgctttacgctacggccagcagagggacgacacaaatcaagccgtcgcacatgcggagtcggtgaaagatgcgtttaactctcccttccacccctttgtattggcctccacctctatcgggcaagaaggactcgattttcatacctggtgccacgcggtgatgcactggaatttaccgtcaaacccggtcgatatggagcaacgtgaagggcgggtgcatcgttataagggccatgcagtaaggaagaacattgctgagcattatggtttgcgtgcacttcattcgttggcagaaagctcagatccatggacacagctcttcgcacttgcggcaagtcaccgtaaagcaggacaatcggagctggttccctactggatttttgaagaggggacatcttgcgttgagcgccgggttcctatattgccgtacagcaaagagagcattaagtttaagcggcttaaacgagaactagcactctatcgtattgtattcggccagccgcgccaggaagatttattgtttggcctgaaacaaagtggtaatgagtctttaactgatttgtcagagtggcttatttctcttgaaccgccaaagatataa

SEQ ID NO: 110259 - DNA, 675 bp, Enterobacter aerogenes
atggaaaataataaccctcaaaatgttgatcagaaaataaagtccactgtcgttggggctaacaacacgacaattattgcgcaagtcattgtcaatgctagtaatccacacatcgatgtaaatgcaatacaaaatagtctaattaaagagataagaagctctttgaaagaagagtttgtatccacagaatataatattttactttgttaccctaacaagataattagagatgaaccaactataagaatcatagaggaactcaaacaaaaattaaatgatatgggtgcaatagtttatgagggaggtgggaaggcagcattgccaaaaactcaaataatgtatccgcatcttgcggaattggaattcataaaaaccgtcaagtgtgacacggtgataatttttgcattagatgaagtaacactatcacaattgacattaatcagttattttaaagtatcaaaaaaaattgacactaccgatatgataataatatccagcgatgatttaaaaaatagtgatgtttttttatctaatggcacgttccaatactgtgatgataacaactgcaagttatactctttgagttcactagatgatgctgggttaaactctgtaatttcaagaattgaaaataaaaaaataattcagcggaaaggcggcttgttaggagattaa

SEQ ID NO: 110260 - DNA, 1500 bp, Enterobacter aerogenes
atggaagagtctactaattataaattgcttgtatggggtttgtccgtgatccagcctgcaacccctaacgaagttttgaattatcttacgtccactttaaatgataatggattattacctgatattgaaaaaatgatacattatttcgaattacttgatcaacttggctatatacatcaagtatcaaaacgaaataacctctattctttaactcctcgaggaaatgaacgtctaactccagcgttaaaaagacttcgtgataaaattagactatttatgcttgacaactgtcactccacaagtaaattaggagtgctggcctcaactgatacagagaatatgggcggtgattcgccgtctttacagttaaggcacaatttaaaagaggttccgcacccaagcctgtcttgggctgcagggaccctgcccagcagcccaagacaggcttgggtgcggatctacgagcaattaaatattggttcgatgtccagtgatgaggccagcaccccaacaaccgcgagaaatgcaccattatcttctgttggccgattaggcttttctttgaattattattcatttaataaaatcgatgaacctttatttaacaatgatggcgtgactgctatttcttcctgcattggtatatctccagggttgataactgcaatgataaagtcaccaaagagatactatcgaacattcaatttacgaaaaaaatcaggtggatttagaccaatactggctcctcgtaaatttattaaaacgatacagtactggttaaaggatcatgttttaaatcgtctgaaagtccattcttcttgttactcatatagaagcggagtaagtattaaggataacgctatcaatcatataaagaagaaattcgttgcaaatattgacatttcagattactttggttcaattaataaaaaaatggtcaaagattgcttttacaagaataatataccagagcatattattaatactatttctggcatagttacctataatgacgtgctaccacaaggtgcacctactagccctataatatcaaatgctatactttttgaatttgatgaagaaatgagcttccatgccctaactcttgattgcatatacacgcgttattctgatgatatatctatcagtagtgatgataaagaaaacatagcgatacttataaatattgctgaagctaacttactatcagctggttttacattaaataggcagaagcaacgcatcgcttcagataatagccgccaagttgttaccggaattcttgttaatgaatcgataagacctactagatgctatagaaagaaaattcgttctgcatttgatcatgcacttaaagaacaggatggaagtcaattaaccattaacaagctaagaggttatttaaattatctaaaatcttttgaaccctatggttttacatttaatgaaaaaaaatacaaagagactctggattttttaataacgcttaagcaaagctag

SEQ ID NO: 110261 - DNA, 699 bp, Enterobacter aerogenes
atggataagactagagactttattcttggagggctttctcgctttggcttggcagatttgcccggcagaccttacgattctgcttttgaattaatagcctccccacccatacgcaaacgcctcattgtgatgggcttcaatggttcgtcagctgattcccatatgaccaacagccagtctattattcaggatcattcaaagcctcttgtctcgaatgtccatttagggacgcaaggggaatggggaattactcacctagctaagcgactacaacagatacctatcagcctcggttacagatgggaagacgtagtatttacgaatgctctaatgatgtgctcaaccaatgcctcagaactcaaacaagaggcgagccgacacaaactaactgtcgaacaactcgtaaaatactcaacaagattttttgagaatgtcacaatccctctgtgtaagcctgaactgattatcgcttatagcaacagtctacaatccctttcagcagcaaatattttgctaaaacacttcggtgatccaagcaccctcatctatacgcagcagaagggttattacacaactttcgctttctcagccgtactaaatgatgtgaaaatacctataatatgtgtccgtcatatgtctagatttaaaccttcagaagagttaattgaaacagctctagagatgatgaaggggctttag

SEQ ID NO: 110262 - DNA, 327 bp, Enterobacter aerogenes
atgttccggctgctggtcattatgtatctggttttcctgggcgggcttggttatttattgcggagtgaaacgaatgttcccgttaaaccagtcactcaggagatgggcgtcagatatgacaccacccgccatgtatttggggccgtttcattccccataccgcagcagaacgccatacgggcgctgaatattcagattgccgaccagcggggggaactcgacgcggcgaggaaatccggcaatctgaaaagactcaggaatgcccagaataagctggacaccctgcttgctcgcttaaaaaccgcagagggagggacggcgatgtaa

SEQ ID NO: 110263 - DNA, 609 bp, Enterobacter aerogenes
atgtctagagcacatacggtctttaaaaggaatatagcagaagcaaaacaactgtctgcgctgcatgaatttctaaataaaaacatgaacttgccgatgtctcatgatgatattcttcgagctcaactcgtaaactgcgtgagtgcgtttgataagttgatccacgatttgatattagatggcgttttggaaatatatttgggtaggaagcctcctacctcaaagtatctcaatgaggctcttccattaagcacgtacattcgcatgcaatctgcaacgatacctccaccagagtatttttttaaggaggcgatgtttactaaattaaaaactgtttcgtatcaagatccctctaaaattgctgatgggctatcttatatatgggatgaaagtcacaagtgggttaaaatcgctaatgctatgggtacgacagatgatgcattaaaaagagatttaaggctaattgcaactcgtagaaattccatagtacatgaagcagatctagatcctgtaacgcatcttaaattagatgtggatgctccaaccattattactaactcgaattttctagaggcttgcggcgatgctattgaaaacttagtgagttaa

SEQ ID NO: 110264 - DNA, 1026 bp, Enterobacter aerogenes
atgtctaagcgaatagtattttttaaccacaaaggtggagttagtaaaactacgtcggtctataatttaggctggatgttatctagaaactatcgagtgttagtagttgatggtgatcctcagtgtaatctttctagcctcatactcggtgacagttttgaacaatactattcagaagataatacgaagaaacaaaacataaaagatggtgtcgaggttgcttttaaaggtaagccgcaacctataactgctgtcgaatgtacaactccagttcgtgctcctaatctttatctacttgcaggccatgcaaatctttcagaatatgaagcatcattaacatttgctcagacttccggtaatgccttgactacattgcaaaacttgccaggcgcattttctgagttaattagattaacagaagaaaggtataatattgattatactttaattgatttaaaccctggactgagttcgataaaccagaatttatttttgtgttctgatgctttcattatccctacaaaccctgatcctttttcaattatggcgatcgatacactcaagcaagttttgccgcgctggatggattggaaaaagagcaatttttcattttttgaagatagcgcttatccattaagggaatcacaaacgaacttcgtaggtatgctcattcagcgctttaatgttaggaacggaaaagcagcaagaccgtatcgtgacaatatcgctgagatcaagcgtaaagttgctgaggatttgataccatctttgacaaatataggtatgacatttgaagaatatcctcaggaactaatggaggatggttattgtttagcagaaataccagattttcaagggttattacctaaatcttatgcggctgaagttcctgtttttgcattgagagatgaagaaattggtgagacagggcctgtttttgaacaaatgtcctctaacagagaccgattccatttacaatttgaggagcttgctgaaaaagtagtaaggacgctggagaatgtctag

SEQ ID NO: 110265 - DNA, 267 bp, Enterobacter aerogenes
atgcgtctaatttttgcagttttattatatgttttggttttacccaatgctttcgcagaaaaactgcctgcgccaacaggtaaacccgttttaaccatttcaggaaagattaccaatacaaacgaaggtgataccgccgtatttgacattgccgcgctagaaaaattgggcaatgagacagtgatcaccaccactccgtggtattcagggaaagtgcgctttgatggtatttcacttagcaaacttatggacttagtgggtgcgtaa

SEQ ID NO: 110266 - DNA, 213 bp, Enterobacter aerogenes
atggcccttaacgattataccactgaggtaccggtggaggattttcataaattcccggtgatcctggcgctgaagatgaatggtgaatatatgcgcattcgtgacaaagggcccctttttattgtttatccctacgatagtagcgcggagttacagaaccaaatctattattcccgctcggcatggcaggtttcaaagattataattgagtaa

SEQ ID NO: 110267 - DNA, 699 bp, Enterobacter aerogenes
gtgattccgattccgacagcgactcggactccgacagtgattccgattccgacagcgactcggattccgatagtgactccgactctgacagcgactccgacagtgattccgactccgacagcgactcggattctgacagtgattcggactccgacagcgactccgacagtgactccgactccgacagcgattcggactctgacagcgattccgactccgacagcgattcggattcggacagtgactccgattccgacagcgattcggactctgacagcgattcggactctgacagtgattccgactctgacagcgactcggattccgacagcgattccgactctgacagcgattcggattcggacagcgactcggactccgacagcgactccgactctgacagcgactcggattccgacagtgactcggatagcgacagcgattccgactctgacagcgactcggatagcgacagcgattccgactccgacagcgattccgactccgacagtgactcggatagcgacagcgattccgactctgacagcgactcggatagcgacagcgattcggattctgacagtgactcggattcggacagcgattcggactccgatagcgattcagattccgatagcgattcagattccgaaccgcaggcaaatgatgatacgcatacggcagctatcgataccgtag

SEQ ID NO: 110268 - DNA, 570 bp, Enterobacter aerogenes; identical to SEQ ID NO: 92007

SEQ ID NO: 110269 - DNA, 660 bp, Enterobacter aerogenes
gtgtatggggatctgcacggcaccgatgatctgttcactgaaacgaccccttacgcgccaagcagcccgtactcagcctctaaagccggcagcgaccatctggttcgcgcctggaaccgcacctacggcctgccagtggtggtgaccaactgctccaacaactatggcccgtaccacttcccggaaaaactgatcccgctgaccatcctcaacgccatcgcgggtaaaccgctgccggtgtatggcaacggcgagcaggtccgagactggctctacgtcgaagaccatgcccgggcgctgtataaggtagcgactgaaggacggaacggtgaaacttacaatattggcggtcataacgagcgtaaaaatatcgatgtggtccgtacgatttgcagcatcctggacaagttggtggagcagaagccgggcaatatcagccactttgctgacctgatcacctttgtgaaggaccgtccgggtcacgacctgcgctatgcgatcgatgctgcaaaaattgagcgtgaccttggctgggtaccgcaggagacctttgaaagcgggatcgagaaaaccgttcactggtatctgaacaacaccacctggtggcagcgcgtgctggacggctcgtatgccggtgaacgtcttggcctgaataactga

SEQ ID NO: 110270 - DNA, 273 bp, Enterobacter aerogenes
gtgtgggtcaattcgcgtaaggggcgcatcatcacccgcgcgcaggtcagcgatcggccgaataaaggcgcggtgtacatgacctaccagtggtggatcggcgcctgtaacgagctggtgtcggagaacctgagcccgataaccaaaacgccggagtacaagtactgcgcagttaacgttgagcggattgccgatcagcgcgcggcggagcagtacgtgatcgaggagtacaacaagctgaaagcccgcctgcgcgaaagcgcgatgggttaa

SEQ ID NO: 110271 - DNA, 711 bp, Enterobacter aerogenes
gtgttccgccgtatcagcaaaaagcttgagaccatggggataaaaaccgtcctgcagctagctgatacggatatccgctttatccgcaaacacttcaacgtggtgcttgagagaactgtccgggagcttcgcggcgagccgtgtcttgaactggaagagtttgcgccagtgaaacaggaaattgtctgcagccggtcgttcggggagcgcattaccacctatgagcaaatgcgtcaggctatctgttcatatgcggccagaggcgcagagaaacttcgtggtgagcatcagcactgtcgttacatctccacctttgtgaagacatctccctttgcactgaacgaaaaatactacggcaacagcgggtccattaagttactgacgcccacgcaggatagccgggatatcatcaatgcagcggtaaagtgtcttgatgcgatatgggtcgaagggcacaggtatcagaaagcggggataatgctcggtgatttctatagccagggtgtcgcgcagctgaacctgttcgacgagaatgcgccaaggcagaacagtgagaaactgatggaagttctcgaccacctcaacgcaaagggcgggaggggaactctgtattttgctggacaggggatccaagccacctggcagatgaaaagggaaatgctatccccgcgctatactacgaggttctgtgacctgctcaaagttagatga

SEQ ID NO: 110272 - DNA, 582 bp, Enterobacter aerogenes
atgtttgctctggttgatgtgaacagcttctatgcgaggtgcgaaaccattttcagaccggatctgcgaggtaagccggttgtcgtattgtccaataacgatgggtgcgtgatagcgcgttcagccgaagccaagaagcttggtattaagatgggggatccgtacttcaaatgcaaagacctgtttcggcggcaaggtgtggtttgcttcagttcaaactatgaactctacgcggacatgagcaatcgagtcatgacgacactggaggaaatgtgtcccagagttgaaatctacagtatcgatgaggctttttgcgatctcactggtgtgcgtaattgccgtgtgctggaagagttcgggcatgagctgaaagataccgtttaccgcaataccaggcttccggttggggtggggatcgcacaaacaaagacgctgtcaaaactcgccaatcatgcggcgaaaacatggaaagccactggcggggttgtcgacctgtcgaatgtggaaaggcagcgcaaattaatggctttacttccggtggatgaggtgtggggtgttccgccgtatcagcaaaaagcttga

SEQ ID NO: 110273 - DNA, 171 bp, Enterobacter aerogenes
atgaaaaataaccctgaactgattatccttacgttaatttgtctgctaacggttatgatgtggatcccctgcgcgttaacgtcgcgcccgcagcgggtaatggccattcgccatcaaccgggctggcgccctgggcgcagcgtgcgcaaaaggcgcacgccaacgcggtag

SEQ ID NO: 110274 - DNA, 162 bp, Enterobacter aerogenes
atgattttttccatcaccatggtctggaattattttcgattccatctgcgtacatgcagacagaaggacagccataccagcaaaagtatatgtcctgcggatttgtttagtcaggaaaaacacatcggtaaaaagattcataatgggtcattcgccacttag

SEQ ID NO: 110275 - DNA, 738 bp, Enterobacter aerogenes
ttgttaactccaaaggttatcataatggaaatattctctagggtttataaaatgaaatggataaaacaatatagtaaagagtttgaaagggatgctttaaggaaattaatttcaaaagtcaattggaaacacttcaaaccatctatcaaagctagccttataggtatagctgaagaattgaataaaaatggtatagaggtaagtgtttatgaccagcaagatgaaccagatggatttggctttgattcgttgagtttgcagtttaattctaaatttactggaaatatgcggcaggtcatagaaacagataaaataacttttaatcaccatatgcaatctggtggggtgttatccattacatatagtgctgttggtcatattcatattcttgttgaacctcctaaaactgaagactctgtcgcagttcatagttatcttatcctttaccaaacttatgatgcaaaaaatatcacaagtaagcgtattgaaaaaagtgttaaaaacttcatccattaccaaaggtactcaggtgttctttatagaaagacatttaaagatagatgggtagtcagatggcttaaagcaaagatgtactttattcaatatctagaacccaaaaataaatttataagatattcagctttatatattccgcttattagtatgattgttgcaacaattgcggcagtcgcaagcctgatagcagtatatctgacctatttgagtttaaatcattaa

SEQ ID NO: 110276 - DNA, 1878 bp, Enterobacter aerogenes
atgaacgaacgctacccagtggacttagttatttcgcttcaggacttcaatgcttcaaactggaaggattcaattgcgcaagctacccgtgagggttatccagctatgtggcaagcactgtcgagtgctgcgcgtgaggctattgatcaggggagaattgaaaatggaaaggtattatggttgcttgcagatgcctgttcgatgatgctttcgctatcaagtcctaatgaacccttcaaaccttatgctgtctaccatgaccgcaggtcagttattcctgatgatctttctaattcagatattcaattcttcgctgatatcattgatgaggtagacaatgattggctgaaagcacgactcagtgatttagtttggttgaagagcaaaccacgtaatatccgattcgccctgaaggctatcgatgcttaccgcagtcttcctctagacactgaaacatggctacatggaggacgagactgttggcctcgcgccatagtcttggcccgaatgcttagagacggagctggtgatagactccagcaaatagagacggcaattgttgctgcgtttaatgcgtctatccgagccgacggttttcttggattgtggttggctgaccttctaaaatcgaaccgtttagggttgtcaaatctgacggatatctctacgaagctagaaatactggctcgcgagtttgatgatgagggggatttgcataagtcgagggagtatttttctgctgctgccagttggtataagttgattcctgacgaggcaaaagctgcagaaatgacagtattactcgctgaaggatgggtaaaagaagccgttgagcgaaccgcatctgaaagccctagccacatggtggcggcgagcttttatgaaaatgccattcagatatacagaacagttcctcgggccgtacgctcggtttatcaggtcgatgagcgaattgccgagttgcgaacccacctaaattattctggagagagagctctaggagagatgagtgtatttcaaactcgtggagtagatcttactcagctcatcgaaaacgcgagggaatctgtcacagggaaatctgcagaaaatgcgttgctcgcatttgcgaacatatatcgtggcgtaaatgcagataaaatgcgcaaaagtgcattggaaagaatgcgtcaacatcccttacaatcattgtttgcggcaacagtgatgagtggtgatggtagagtcattgctaaacgtccagctatggggctcggtaaggaattgtcagaggaagatgaaattgctattcgagctgagatgattcgtgattatggaatcttagttaatattgtcgttcaagccgacatctggcctgctcttgaaatacttttgcttgagcatcggttgcgcgaaagtgattttatcgagttagctcgctcttctcccattgtgcctaaagaccgagttggcctttttggaaaggcactctttgcaggttacgaacgtgattttgttaccgcgcttcatttattgatccctcagatagaacacttggtgcgaatgcatcttaaacaagcaggagccaagaccactaatctcgacaaggatggtatcgagaacgaaaatggtatgagcacgttgatgggattgccagaggccgtgcaagtatttggcaaagatcttgtctttgaattcgaatcgttgttctgtaacgcctttggtccaaatttgcggaacgaattggctcatgggctgctagatgaggatggatgcaattcccccttcgctatttatgcatggtggttagctttaaaaataacattcaatacatggtggaactcagttaaccctattcctgccactcaagacggtagtgaagaacaagctgtggactag

SEQ ID NO: 110277 - DNA, 372 bp, Enterobacter aerogenes
  misc_feature (215)..(215): n is a, c, g, or t
atgcctgttccccggtggcgctgcgcttaccggggctacaaagcggagctggccggcaacccggataaggcgcctgccgctatccgggtacatctccccggtggcgctgcgcttaccggggctacaaagcggagctggccggtagcccggataaggcgcctgccgctatccgggtacatctccccggtggcgctgcgcttaccggggctacaaantgccgctatccgggtacatctccccggtggcgctgcgcttaccggggctacaaaacgaagctggctggtagcccggattaggcgtcagccgctatccgggtacatctccccggtggcgctgcgcttaccggggctacaaagcgaagctggccggtag

SEQ ID NO: 110278 - DNA, 669 bp, Enterobacter aerogenes
atgaaatttcttcacagagagtatccaggtccagatgttttaagaaaatatgactttaatactcaaacttgggatgatgttacatcatcagataaaagagaaatttggttagaattagttaaaatgcaaggtaaaacatgtgcctactgtgaaaggaaaattgatctaaataaggctggtgataaacatattgaacattttaaacgaaaaggattacatagggaattaacttttaattgggcgaatctctttggttcttgcggtgaaaaacaacgatgtggattttacaaagacaagcaaaattataatgaggacgatctgctaaaagcagatgagttggatcctaatggatttttcttatttgtctcaagcggtgatgttattgtaaaaccacatattgatgaacgctcgaaaaaaatagcagaggttactcttgctgtatttaatcttaatcccactaatggaggggttaaagcagaaagaagaagcgccttagcgaaagggatgggtactatgaaggaatatataaaaatagctcaagatctcataaattctggtgatgatatcgaagatgtcaggcaatatattaagggtagctattatgaatatattgaaaaaatggattttatgtccgcaagaaaacatgtttttgaaacgtttcttccataa

SEQ ID NO: 110279 - DNA, 1629 bp, Enterobacter aerogenes
atgaatgaagcaaagaaaagagtggataatgtcttctcggattttgttgagttaattaatgacgaacataccgaggagagtcttaagtcttcttctgttttaaattttttaaacgattctttaaataaagataacctatatttgaagaaaatagctattgtagatttcaaaaggttaagagatgttatagttaatcttgaggatgatttgactgttttcgttgcagataatgggtatggtaaaactacattgctcgatgcaattgcaatttctttaagttggcttcgttcgaacatacaaaagaaagacaagccagggtcatacattcgtgaaatggatataaataactccaaggatgcattgtatgcatccattgctgctacatttaaagtgcaggagttacatactaatgttttaattacaagtgtaaaagaaggtgtctcatttaaacgtagtaatgatttgcaagaaattaaattattagccacaatgtatcgttatgttaatacatttttagataattctagtttgccagtgatggcttattattcaatagtacgttctgttgttggcggaggtatcgataataaaaggaaaaataataaaaacaaagtttcttggtcaaaattcgatgtttatgacgactttatattcgatagaaatgattttggggaattcctaaattggctaatgtttctgtcaaataaatccagacatgaaaatgctatagttactgataatccggaatcgctaaaaaaagaaatagaaagcatcagtagcacgattgaacagttgagagctgtttctaatattgattcaagtatcataaataatttggaaattagccgcgaagaaaaaagattgcaattaaaaaaaattagtaacgatgggattttaagctcatcagttttatataagaatgtaataaacgcgatcttaaagtttttacctgagtttgaaagtatcaatcttgtttatagtgaaactgattttaagttagtccttaccaagaatggaattgaattagatgctcaacagctttcgcaaggtgagaaaaccattcttactttagttggtgacttagctcgaaggctatcattacttaacccggagctacaaaacccttttgaagggaaaggtattgtacttattgatgagattgatttacatcttcatccgatgtggcaacaaaaaattatagagcgtttgttaacgacatttcctaatgtgcaatttattctttctacccacagcccacaggtcttatctacggtaccagccagaagtataaggatcttagaagaagttcaggatgaattaggtaatacttctataaaggctattaagcctcgctatcaaactaaaggtttgattaatagtgatgcattactttatggtatgggtacagaccctgtacctccagttaatgaagttaaatggttggaggattataaagaagctattgagcttgatcagtttgacagtgaatctgctattgccttgaggagaaacatagtcaagcattttggtgaagaacatccattagtgattgaatgcgatcagatgatttctttaatgaaatttaagcgagaaatacgaaataaaaaaaataataaggagagggagtaa

SEQ ID NO: 110280 - DNA, 939 bp, Enterobacter aerogenes
atgcagcttgaaagaaaactatgtgataaatttaatcttacccctttgcagctttctattctttcatcaaaagctcccaaaaaatatcgtgtctattatatacctaagagaacttcagggttaagagcgatcgctcaaccgactaaggaattaaaaaacatccagcgttttttagcttcggaattggagccttattgtcctgtccacccttcagcaatggcttataggagaggcataagcattagagacaacgctgagtgtcataaaaataatccgtacctattgaaaatggattttcagaatttctttaacaagattaaaccggatattttttttgaaaaattaagttctcttgatgttaaatataatgaaaaagataagagatacttgcataattttttgttttggaagcctggaaagaaaaggagtattactcatattttaagtgtgggggcgccaagttctccatttgttagtaattttgtaatgtttgatttcgattttgaaataagtaaatggtgctctgagtataatgtggtttatacacgttatgcagatgatataacgttttcaacagctagaaaaaatatactatttagtgttccaaagatagtgaagaacattctatcaatacatgcacctggcatcactattaatgaagctaagactatttttacgtctaaagctcataatcgacatgttacaggtgttactatcactaatgaaggtaaactttcgatcggtagaaagaaaaagaaatatcttttttctctggtgtttaaatatagtatgggcgagttaactagagaagaaattttttatgcaaaaggacttatgtctcattgtatgcatattgaaagaaatataatttcaaggttgaaaagaaaatatggtgcagttgtaattgataagtttctaacggaggggtgtgatgaatga

SEQ ID NO: 110281 - DNA, 198 bp, Enterobacter aerogenes
atgttaattatatttaatggtttacctggtagcggtaaaaatacagttgcaaaattgttatccaaaaaattaatggtgtgtatctacgggttgattcggttgagcaggcgattcgttcagcatctgaacagaacaaaaaaattggccctgagggttattttgttctttatgagttggcgcgtgaaaatctacagttag

SEQ ID NO: 110282 - DNA, 561 bp, Enterobacter aerogenes
atgatttattccaatatagacatcatttcaaaagttgaggcaggatcgataacgattgctaactactctgatgaatgtatgaggccatcaagttatttgctcaggatggacaaaaaaatattccggatgaaaaaaactgagtcattcatagatactaaacatacagatacttcagtgttttttgatgagattgacttggacgataatgggataataattcatcccggggagtttgtattagcatcatcagtcgaaatgatttcattggatcatacagtttgcgccgaactttaccaactatcttgctatgctcgtataggtcttggagttaattttagctcatgtcatgttgcggcatcttttggtgaaaataaaccatcatcaattactttcgaaataattaataactcttgcaattcaattaaaatatatccgggtgtaaaattttgtcatttaagatttcatgatcatgtcacgccagctactaagacttataatgggatatattcagagaagaaggaagcaatgcctgctaatttcgccttgaagcctgccagatag

SEQ ID NO: 110283 - DNA, 534 bp, Enterobacter aerogenes
atgtataccaacttctctaatgcaattaatctggatgataaaattacatcggaagttggatgtgaaattgtgagcgtcctgcataaaattcttattggaagtttaattgaacgtgatgtacaagtttgtcctgtggaagtcggtctggacggcttggatgatcccaattatagtaattattcatgctatttcattaagcccaatcccaacactctatcaactgatagccttgctgccagtgttgcaccaatagttgaagccgatcttatcctatttataaaggaaggtgcgccaacatattatgtaggttttgatacacccaccaaagtgactgagtggagtatagagaacattaggttgaaatctgtagaggtggttgggaattatttactggactctgaagctttagatatattagaaaatgtaaaaccaaaagcactaattattcctcctgagatattttctaacttttcttttaataaagaatcttatggttttggtagtaaagattactacacggagattaagtcatga

SEQ ID NO: 110284 - DNA, 1848 bp, Enterobacter aerogenes
atgtcaattgtaactcggcgtgttattacatattgttttatatttctatgtgctatgggttttcttaagttatatttaaatcaagaagttctatacagttgtctgggatcgtttataatttcgctaatttcaataccaatagcagaccctaaagttttagataaaataatttacttcagtaagagagaggtgtttaaacgcaatttaaagaaaactattgatagttatcaagaaagctttaacattccaagtctagtttcgaaactaaaaattgatgttaaaaaatacttcgaaaaagaaattcttgataaaaaattcattgataagtcttctgactatgagtgtgcagcgctaatgtttgcaatgcaggatgaaaaaaatccattcacgatagcacctgatctttctgttagtgactttagagaaatagctagaaaggcagctatgaatattcagtataggacaatacttttgtctaattccttgcaaaacttagggtgtaataataaagaaatcttacttttaaatgataacaaatatcatgtagctgaagaattgaaaagtgaatcggatgattcattttataaacggatcttagcttctaaagatgacgagataattatctttagcactacatcgcaagtgtcttctggaatgataaatattatatcgagtcatcattctagtataaaaaagtttaatttctatatttgcagtccttttatactgaagcatggtgcaataagaagtatgttttctgagtataataacccttcgtttgcaacgccaaaaatgcagtttatccaaaatgaaacagggactgttgatatcgaaatggatgcgacgaggcgtgtattgaaaataattagctcaattcataatttggttgagttttctaatgaaaaaaaagtttcaatagaagtgaatatttttaaaaaagagtatccaggccttaagttgaaggtgttaaaaaatagcaagtttatacagattcaaccagggaatctttcatacgcaaataacttatataggtttggagttgagaccgactcatcaagtctatttaatgatgttttaaataaagttaacatatataaagagaatagtgagtttgttgaggaagtacccttaatttctgataggttgaataactttgaaaatgaagcgttatctgagctaactctttggcttctagaaagaggagtgacacctgaaaaaatgctaaaacatagagatatgttaatggcaaaaattgttgatgacaaatttcttttgagaattgataaaataactaattctcttcgtaaagccagagatgaagtgaaaattagcttagaattaaatcttgacttatgcgaaatatatacaaaaaggtataactcatgtaaaactccgggaatctttgttggacaaaacaatattgggaatttatatcatataactgttgctacaatatttgttaaagataacaacttgttgatgattaggaaatctgacaaggcttatggtaataaattaagtatagtagccggtcatttagaaaatggtgaaagtccagtagaggcgataataagagaggttagagaagaaattgggattaagttggatagctattgtttcattaaaaaagaagtagaagttcacgataagtgtcgacatggtttagacttgcatgattggtatattttttattcaaatcaaattaaagatattagcaatattgattttgatggtacagaaatagaatatcttgaatgggtgcctttagataaattaagttcaatgaagcacgagttcactcaaggtgcatcattaatcatggagagattggggtatataagtgaataa

SEQ ID NO: 110285 - DNA, 489 bp, Enterobacter aerogenes
atgagcttgagcatgacagatattcaaatcctccaacagttgcagcaggacgcacgcatcaccaatcaacacctcaccgatgaaattggtctctccgcatcgccgacctggcgcaaagtccgaaagctggaagaggacgatgtgatccaaggttatcgcgtcgtgtttaatcgaaaaaagattggccttaatgttatggtatttgtacgcgtcaccattgatagctacatcgaagccgaagcacgcaaattcgaacaagaagtgatggcgctagataatgtggtttcctgctacagcatcgttggctatgcggatttcttatttcaagtggtcgcggcagatatgggtgcgtatgcggatttcgcgatgtcggtgattcttagattgtcagtgattaaagagatgcagagtatgtttgtgttgaaggagatgcagagtaggtttgtgttgaaggagatgcagagtatgtttgtgttgaaggagatatag

SEQ ID NO: 110286 - DNA, 1668 bp, Enterobacter aerogenes
atgcaaccagtaaaatgtttttttcatagtttgtgttttgttccacccgacccactagtctccggcattaaaatatttggattttctgagttcctggcgtcactagcacttttggttgttgtattcactgtaacggatacaaggtacaaatttcgtatttccatcgccccactacctctttacattatcacttttattataattgcactcactgggtttataagccttttgtcagacatctggagcgcaactggatggtgggtgcttgacacaagctttggcataaaaatcgcaacgcaatcaatacttggcttttgttttttgctttgcttcatgctatggatatattatgcctttttaaggccacctacatttagcaaaagaaatcaaataaaatatataaatgcactttataaatacattacaaaaggagttgagcaagaactagccataataacagatgagttaggtcgctcggccaatatgttaataaaacattctggcagaggagatggagtgacaactcaaattgctaatgatattttatttttaataggaaataagaatttttgcaaggtgcttgctacgacatcaccacgcactgccacatactttttcgtcagtaccggcacttacagaaattatgacatcccgctgcaccagttttctgcgaacatatcgcaagaggtgataaaaaacaaaaactctataatttatcatgaagataatagctattactctggtttaatgggtgagattcaagaatggtcaaaaagtttttatggcaattacttgttagtagactctctgcatagagggcacctttccccttttgatttcaattacaaatcatttttggattttgatagtgaacagtgggatacatacttcagagttggtattatatatttaaaagaaaagctacaaaaagaaaaatttattgatactagttccgtcctgaattcaataatagacaaaataaagtactgcactcaaaatacttacatgatagataaacttgaagatgaatctaaaaaaagcgaactgatgaataaattacaatcatctatcaattttattgatgatatgtttgatgtcacatccaaatatcaagctaaatcaatttatcaatatagcgtcaaggatcgagacaaacatgttttcgatatgcattattatgtatctgagactttattagatttgttatttaacgcatcaaaatgtcaggcagataatttttccacttggcacattcaaaataacatcgtttgggatgggatattttctcaacggaaggaaaataacggggatttttataagaaatcgaaaagaaaattaatacgaaaaatatacaacgaactcaatgaaattatcagaattgccaacttcaaaaacactcgaattgcaggacttatattaaatgtccttggatttagccctggcccttgctatgccaccaagagtgataggcgattggtcctgatcaagaacctcacccagaacatcataaaagaacattttttgaccatattagaacaacaaccggaagttgcacaaaacatgtttccaaaatgcatatcatacgatctggagaaaaaatgtctgatcaaaacctactccagaggaatcaacaaagaagcacctaaacattacctttacctcgattag

SEQ ID NO: 110287 - DNA, 204 bp, Enterobacter aerogenes
atgcgccggactggcgaaatccgttgtggcggtatgaggatggatctgtcgccgaatggtaaatgcgcgtcatacttcgcactggtgatgcgttggctgcattttcttaccctggtcacatactattgtatgctcccagggatgcgaaaatttgccgcctttccccagcacgaattatttagcgcatcgcaacatagttattaa

SEQ ID NO: 110288 - DNA, 204 bp, Enterobacter aerogenes
atgtcctcggacgattacagatacaaaaaagcccgcaaaggcttatgccatgcgggctttccgtacttcaccggacgtatccggatcaagatttggtggagctggcgggagttgaacccgcgtccgaaattcctacatcctcggtactacatgcttagtttgtctttacattcgcacgccagctgcggacagacacgccactaa

SEQ ID NO: 110289 - DNA, 1461 bp, Enterobacter aerogenes
atgaaagataatgaaattttttatggcgaattttcaatacatgctgattgtgactccgtcggcaagctaacgctcgcaaaagaaaatacgaatatcgaactcacagtaaagtcaaaaaatataatacaagaaatcccaaatataattaccgggaagttagaccagctcaagaaagctacttgcgtagactgcatcatcactagttcaggcacatcaaataattcacttggtgatagcgccaattatttaactatatttccacatcatgtccttattggagatgatcatttagatccaaatgcttcccacataaaatcatttagttttcacacacaagatacgcgaagcttattccaagacaatcaagattttggcaaaatttatccacaggagaaaattgttgattttataaacaaagaatatcacgataaaatcaaattacatgagtatccaaatgtattctttcactcagggcgcttagatattataaattgtgaaacatctactggttgctttagagtttataataaaacaacgattcatggacttggcactaatggtaaattcctcacaaacaccgtcagaattgaatatatttttcaatcacctacgacatttagcaattgcgtaagcagtctcttgagccatttaagacttttgacaattcttgccggaagagagcaatccgttgtggacttccaagtacacgtagcatcaaacacctcaccaattgataaaacatattctgtacactcttcttatttgaattgccataatgaaaacgctaatagttattctcttaataattttccaattgagccatccagagatgtaagtacgttcatcgaaatttataaagcatggatgtcaaaagaatcagagctactaacatcgagaattagatataacaatggaataattaagcataactcttacgatgtagatcgattagtatcagctgcaaatatatttgatattcttccagataactacaaacccactaaaaagatgattagcgaagacctcaacgccgcgaagtctgaatgcaaaagaatattcaaatccttacctgagtcggttgaaaaatcgatcatgctcggggcacttggaaggcttggctcaccaacattaacggatatcatcctccaccgagcaaatataatattagagagatgcgggtggttattcccagagcttgacttagtggttaaaacggctgtaaaagtaaggaattacttcgtccacggaacagcaagctacccaccttataaaatcgaaagtacaattccatttctgactgatgttctggaattcattttcatttcttctgatttgatagagtgcggatggaatattgacgcatgggcaaacaattattatagcttaaatcaccctttcaacaaccttagacataaatataaaaatgagcttcaaaatttaaaactcgcaattcagaaatga

SEQ ID NO: 110290 - DNA, 1341 bp, Enterobacter aerogenes
  misc_feature (1326)..(1335): n is a, c, g, or t
ttggtttattctaggaataaaaagcttaaagaaataataacaagagaaaatattgatgaaatttttaagctcacctataccaatgaaattggagaaaaaagagattttaatgaaataaaaagcagtgagtatttcgacttgcttaaataccttattcgtgatggctatattgatgaaacctatgccgactatatgacctatttttatgaaaatagcctgagtcgaattgataagatgtttttacgcagcattaccgataaaaaaggcaaagagttcacttatcaactcaagaaccccaaactggtcgttgcccgccttcgagaggttgattttgaacaggaagaggcgcttaattttgatctattagcttatctgcttcaaacgccaacccaagtaaacttaataaaacgtttattcaaccaactaagaaaagatagaagagttgagtttattcgtggctactttgaaactgagagggttcagccaggtttcataaatcgattaaatacgcagtggcctgagttcttttcttatgcgctgacagagagtgaattttctgctgattgggttagacgctactctataggcacattctattattctgccagtaacgacattgaggccattaacattgataattgtctgactgattacctctcggattcggcggattatttggcaatatcagagccgaaggttgacaagttaattagtggttttaagttgcttaacgtctcttttgtcagtattaaatttgaaaacgcaaataaagtactctttgatgcggtttatcagcattcactttatgatattaattttgccaacctgaccttaatgctgagtaaggtttacacgcttaacagtgaagatgatgttcgccataagaactatacactagtgatgtcacagcctgattctcccttggctagttatgttaataaccatattagtgactatctggatatggttttatctagttgtgatggttcaatcgtggatgatgaagccattgttttatccgttcttaataatgagaaaatatctgatgaacaaaaagggcagtatataaactctttgcaaactttcgtgacttctctgagtgaggttgagagcgaatccttatggtcatctttgttggataaagatagagctgtttgctctgaggaaaatattgtctcttattttgaacatgttgatggactggatgagtcacttatcgaatttatcaatagaactaatgtagagctgaattttcaaaatattaacattgataatgagcttaaaaataaattatttaagtcgattgttatctgtaatgatttatcnnnnnnnnnnatatga

SEQ ID NO: 110291 - DNA, 588 bp, Enterobacter aerogenes
atgagtaatagagacaaagaactttttgccataaacagggatgatgttgtgtttatttttgtcgaccttcaggaaggtctgatacgaaagagtaaaacaatggagcctaacgcactgtcctcaaacacggcaggtttggctcaggttgcccatgcaatcagtgcccctgctcttttttttaccgttcctcaggaggctaaggaaggtgagccactgccaaaactccagggatatgcaaatgacagtaataccttttatcgagtcatcgccgatccgttcctggtcaattcaatcaccatcgcactggataatttagcgcgtaagacattgattatatgcgggtatagcgcagaagttggagtgttgctgactgcacttggaggccttcgtcaggggtataacgtatttattccggttgattgtgttggtagccagtcactgagaactgaaacggtggtacttaaacaggctgaaaaggctggcgctgtaataacatcccttgcaacactggcggcacagctggctccggacttttccagagagccgggaaagacaatattatctgtcatctcaaatgccaggtgttga

SEQ ID NO: 110292 - DNA, 894 bp, Enterobacter aerogenes
atgaatatattaaaatgcgaaacagtaaaggttaaacataacctttcgtatttattgagatgtattttgaatgaggatttctttaatttttattatgaaaagaaaccttatcatgcaactggggttgatgtttttggcgttcccattacaaactccttctttaatgaattattgtgccataataaaaaaataactaacctttctttagttggaaatggtgttgcgataaaaagaggggagtatgttgatatcaacaacgaattgaacgtggaaaaaacattagaactacatcaatcaggtgctactgttgtggtcaatgactttcacaattacgacgaatcagttttactgttgaaatcatattttcaaggtttatttaactccccgtgtggaatcaacctatatttaacaccaaaaaatcaaaaaggattcaatgcacacttcgatccgcatgatgtttttatttttcaactgaaagggacaaaacaatggaaaatatatgaagccgcaataaacttacctcttaaaagtcaagagtatactatccgcaatcatgacttgggaggattagctctagaaaaagaaatgaagaaaggcgatcttctgtatatcccacgtggttgggtacacgaagcaaccaccgttaatgaagcatcggttcatataacattaggtgtgttttcattcacaagagcagatgttttactagaaatattgtcagagcatatactttcagatatttcatttagaaagtcttttccgccgtgtgcaaagaatgaaagtgagagcattgatggtttaagtaatgttattttggaattattaaagaaaatatctgaaggtgatattattgaccaggtagttaaacgttacactaaacgtttcaatgtttag

SEQ ID NO: 110293 - DNA, 168 bp, Enterobacter aerogenes
atgccaatgggcgctgaaatgcagaacctcttggaaagccgccataagggtctctatgccaagataattcgcattttgattttttcggtaggcaaaccaatgaaatactatcaagctgtacaaatggccccattatggactctgctgaatccaagactaacgagttaa

SEQ ID NO: 110294 - DNA, 549 bp, Enterobacter aerogenes
ttgcgctcccgaaatgtcttctgcgttatggctctcatggcgcagggagcgcacaaagggcggccagtcgccgccgccctctgtactcccgggctttggccgccaaaatcgccacttcgtggttccttcgacttatcccggcaggcttcgggtcgggccgaggcagcgtccctgcaaatcacggccctcagcccgcatccatgcgggctgccccggccttccgggaacgtctcagcgattttgaggccaccaacaccggcagtttcagccagcgtggtgaataaattaaaggcagaccgcacagaccgtaggccggataaggcgcagccgccatccggcgcaaaagcggcacctaatccgtggatattgcccggcggcgctgcgcttgcgtgggcctatggaccgggtccgttggcaaatttattgtcgcatgtagccccggtaagcggtagcgccaccggggatttccctgctcgcgctgcgcttagcagggctacggttctacggaatccaccgccgggccgcggtaatcgccgccgagggctttaa

SEQ ID NO: 110295 - DNA, 1467 bp, Enterobacter aerogenes
atgaaaaagacactcattgcatcgtctctcgcaatgctgtttatcggtcaagcaagcgcatgtaccactattctggttgggaatcaggcgagtaaagatggctcatttattattgcccgcaatgaggattactcagcgacaaatgccaagcatatgctgatccatcctgctgtgcataatcagacaggggtgttcaaggggcatactaacgatttcacttggccgctgccaaaagacgctttgcgctataccgctattcatgactttgataccaatgataagtcgaccggagaagcaggttttaactctgtaggtgtggggataacggcaacagaaaccatttacaacggccagcaggcattaaaggttgacccttatttggaaaagaccggcatcactgaggatgctattcagaccgttttactgccgcgtattcacagcgctcgcgaaggggcggagttgctggggaaaattattgaggagaaaggggccggtgagggttttggtgttgcctttgtcgatcagcatgatatctggtacctggaaaccggtagtggtcaccagtggatggccgttcgtttaccgaatgacagctattttgtcagcgcaaatcagggccgtctccagaattacaacgcgaaagatagtgccaactatatggcttcaccgacactggtagattttgcaaaacagcatgggctgtataatccgaaagatggcgcctttgattttcacaaagcttattctcaggatttagctaatgatgttgtgtataactacccacgggtttggacgttacaacatttgttcaatccacagttgaaaacgacgattgatgatggaaaacatttccctgagtttctcaaacctgcagaaaagatcacgctggatcaggtgaaagaagctttacgcaaccattatcaaggaacctcgcacgatccttatgccaataataatccgaaggagccataccgcccagtctcagtcttccgtactcaggagtcccacattttacaggttcgccctgatatgcctaaagaaataggtgaagtggaatatgtggcttatggtatgtccgccttgagcgtctatgtaccttattatcagggaatttcgcattatcttccggggtatgacaaaggcactgaccatgcaagtgatgattctgttaactggaagtatcgtaagctgcagacgttggtgatgcagaactacaatgagtatgcgcccgatgttcagcgagcctaccatgcttttgaagaacagacagccgtgcgccaacatgagatggagcaggactatcttaaactgtataaaacccagcctaaacaggcacaagcgcttttacagggttttgaggataaaactatgaaagatgcgctggcgctgacggattcactgaccaaccaggttttcagcaagctgacacatgacacagacatgaaataccactttgaaggtgcttga

SEQ ID NO: 110296 - DNA, 567 bp, Enterobacter aerogenes
atgaagtatgaaaatttaaaatcagactggattctgaatcttgctgggcttactggtgtttcagttatgctgctaacagcattttactatcaattttccaaagatgaacttccctgtcctctatgtcttcttcagcgcgtagggataattattatcggttttggatttttgtttaatcttcgattcggtattaaaggacttcactactgtttttctcttctggggtgtgtacttactggcattattgctggtagacaggttttattacacattacgccaggtacacctggttatggttcggcgctgtttggattgcatttttatacctgggcactggtagcatctgtgggtatggttattgctatatctgtcatgatcgccgtaggtggcagagcgttgtgtttaaggaactccttaattcttgcatttgtaaataaatataagcaaattctttatattgtattcgctttgctgattgtcggaaatttgctgtccacattgctggagtgcggcactgggcagtgtgctgataatcctgtcagctatgaactccttcactggaagtaa

SEQ ID NO: 110297 - DNA, 159 bp, Enterobacter aerogenes
atgtatatgttcttaccatttttgatggcattgattgtcatggtcggtgtgatatttaataaagcgcggcttagttatatatgttactttttgttatttgttgttgcaattctttcgtttgtgcatcacgtcagtgacccgcttaatttactcttctga

SEQ ID NO: 110298 - DNA, 513 bp, Enterobacter aerogenes
atgatgaagaagttacttaatctcattttcctgttgttcgtttatcttatttccttctatgcatatgctggacacaatgtccaccatctttggtatcgaagaaatcaccataaaacaacttatcggcatattacggttaatgtcattaagaaagatattatgcgagaatattacaaatggaagggtgtaaaatatcgttggggtggtaatagtaaaaatggaatcgactgttcagcattaatgcaaagattctttcgggaaacacatttattcacactccccagaacaacattaggtcagataaactatggccacaggatacaaaaacgtcgcctgaagcccggcgaccttatctttttcaatatcaagaaaaatgttcggcatgttggggtttacatcggccataacaagtttgttaactcagcaaaaagtaaaggtgtgactatctcggatctacgaaattgttactggcgggcacattattatactgcaaggcgtatccttagctactaa

SEQ ID NO: 110299 - DNA, 237 bp, Enterobacter aerogenes
atgggtttatgtcgggccggcaggacgttatcgctgagcaggacggtgtatttttatcagcccgatacccggcgtaatgaatcggtgatccatgccctgacaggactgacagaacgctacccgcgctacggttttaagaagctgttgcaactgctgtgcaggcagggtaatacccggagccataaacatgttcaccgggtttactgcctgctgaaacttatctgtgcagaacgctga

SEQ ID NO: 110300 - DNA, 2607 bp, Enterobacter aerogenes
atgacctatctcagcgacgagcagaaagaagcggctcatcaggcggtgaacgacgccaccgacattgcgggcctggagaaagccgaagccgccgctgccgcgaaaaaccttgaggaaggtaaagccgacgccaataaggcgatcgacgacatgacctacctgagcgacgagcagaaagaagcggctcaccaggcggtgaacgatgccaccgacattgcgggcctggagaaagccgaagccgccgctgccgcgaaaaaccttgaggaaggcaaagccgacgccaacaaggcgatcgacgacatgacctatctgagcgacgagcagaaagaagcggctcaccaggcggtgaacgacgcgacaggcgtggcgggcctggagcaagcgctggccgatgccaccagcaataaccttgatggcgcgaaagatagcgccaacaaggcgatcgacgctatggataacctgagcaaggatgaaaaggacgcagcccatcaggcggtaaacgacgccactgatattgcgggagtggagaaagctcaatccgacgccgccaccctcaatgctgaaaacgaaccgtcattcctggaagatattctcagcggcatctggaatgcgattattgccattccgaaaggattgttagaagcacttaaatcggttattccgatgttaagtgattaccactttttgctcgaatccgcgcctgcggcactgaccggcgtcgccctggtcgcctgggaagcactcgttgaagttattcacgtgccattaagctttatttccaatatggttcagtgggttacaggatttatcaccggtattctgggagggatatggggaccattaggaaccattccacatatctttaatggtatactgattctcgtagatggcctgggtaacggcttaaaaattattgtagagagtatcggtgttggtcttattagcctgcctgcgatcgttaccggcgccatcggctgggtgataaccctggttaaaggatttaccgccttactaaacggtgattcctccgcgatggaggatttcgtcgctgatttctcgcaatcgctattgcaaaacccactgattccattagtactgggcgatttgttcgtcgcagttatggctattcctaagctaggcgttgaagttataagcgtcattgccgaatggattctgggaattattacaggattcctgcagtttataccgggattaatacctattgccagtgtggtttcagatttcacgctggctattgacggcgttcttattgctattcattatggcttaagtaatgttgtcaacctggtcacgaaactgggcatggcgctgatcatgggtctcccgatcgccatgagtgctgggacatcggcggtaaccataatcgaagcctttataaaagggatgctgggtttaaactctgattccgatactccagatacgccgatcaataatttcattgactccattattgactttatttcttcgccgatcgaaggcctcaagaatattttttcttctatttccaatagcattcaggatttctttaaagatccactaggctttattgggaatatgatccagagtgctattgatgttattcttgcgccatgcaagtttattattgatacagtaggttctattattgattttattgccgcgccgtttgaggctatcggcaaagttattggtaatctcatagaatgcattggtaacttcctcagcgatccgtttggcgctattggtaacatattccaggatatcatagatattattcttgcgccgtgtaagttctttattgatacggctagctccatctttaactttattactaatccgattgattcgatattaaaactgctcggcgatcctcttacattgatggtcaaatttattagcgacccagtcggaacggttacagatattattaactcggtcattgatgccatcttgagtccatttaagggaatcattgattttatctccgaagttatttatggcatcactcatccgctggaaacgatctctaatatcattaacgatattgtcgcgaaaatttttggcggctcctccaatgacaatgtggccgccaatgcgctcaatactttagctgattccgttgaaactgctgccgaggcggcgaaaccagcggctgaaacccttgataaactgctcgttagcgcagaaaaaacggttgataatcttctggaaaaatctgtgggtgaaggcagcgagaaaagtttgtctactgatgatttggccaccatgaccaatacgcttaatgagttagccacttactctgatagcaacgtaacttcgcttaacgaaatggttgattcgcagacttctcaggcttcacaggcttctaaggaagcagtaaacgaagagttgactgatgaacagctcgcttcgctgacggaggaaaataatgccaacgatatcaatttggattctctggtaggtgaagaaaacaattccgtcgtggcagaaaacaaagttactgaacagcaacaaggtgctgaagattctggagaatataacgcactgaatcaaatcgtcaatcagctacagctaaatgaagaaagttatcagtatgctgctgcttaa

SEQ ID NO: 110301 - DNA, 669 bp, Enterobacter aerogenes
atgtgcgagttcgtcgacgataaagcgtcggtatttccgttcgaagagctgcaacgctgcatggtcgacagcctcgagaaatgggaggactacgcgccatttgccgaccggccattcggtcaccgcccggtgtggattggctacgacccgtcattacgtggtgacagcgccgggtgcgtcgttatcgcgccgccggtcgttgccggtggcaaattccgcatcctcgagcgccaccagtggaaagggatggacttcgcccaacaggccgaatccattcgcgagctcacacaaaaatacaccgtggaatatatcggcatcgatgcgaccgggctcggtcagggcgtcttccagctcgtgcggtctttctacccggcagcacgtgaaatccgctacacgccggaaatgaaaactgcaatggtgctcaaagcaaaagacaccattcgccggggctgcctcgagtacgacgtcagcgcaaccgatatcacgcagtcgtttatgtctatccgcaaaaccatgaccagcagtggtcgcaactcgacctatgaggccagccgcaccgaggaagccagtcacgccgatctcgccagggcaaccatgcacgtattaattaatgagccgctgaccgccgcgaccggtgagcagtcatccagcatcatggagtggaactaa

SEQ ID NO: 110302 - DNA, 1011 bp, Enterobacter aerogenes
atgagcaagaaacgcaacgagcgccagcagccgccgcgcccccaaaaccacaccgccgcaccggcacagagcatggaagcattcacctttggtgagccaacgccggtactcgaccgccgcgacatcctcgattatgtcgagtgtatcgacaacggccagtggtacgagccgccagtgagcttttcgggtctggcgaagagtatgcgcgccgccgtgcatcacagctccccaatttacgtaaagcgtaatattctggtgtcgacctacatcccgcacccgctgttatcccgtcaggacttcacaaggtttgcgctcgactatctggtgtttggcaatgcgtttattgaagagcgtcgcggcctgaccggcaaaccgttaaaactggaaacctcaccggcgaaatacacccgccgtggcatcgaggatgatgtgtactggtacattcaaagctacacacagccgcaccagttcgcgcccggctccgtcttccacctgctcgagcccgatattaatcaggagctttacgggatgccggaatacctgagcgcactcaattcagcctggctgaatgaatcgacgaccctgttccgtcgcaagtattaccagaacggcgcgcatgcgggttacatcatgtatgtgaccgacgccgcgcaaagcagcaccgacgtcgaggcactgcgaaaggcgatgcgcgactcgaaagggctcggcaattttaagaacctgtttttttacgcgccgaatggtaaagctgacgggattaaaattgtgccactgagcgaagtcgccacgaaggatgatttttttaatatcaaaaaagtcagcgccggcgacctgctcgacgcgcaccgcatcccattccagcttatgggcggtaagcccgagaacgtcggctcagtgggcgatgttgagaaggtggcaaaggtctttgtacgtaacgaactgaccccgctacaggcgcggtttatggagttgaacgagtgggcgggtgaagagattatccgcttctaa

SEQ ID NO: 110303 - DNA, 639 bp, Enterobacter aerogenes
atgcataaactttcaaggtgtgcttccccagttacgttgtcagattatgattacaaagttcataaatgggatgattatattcaagatgtaaacaataaaaatgatgtgtgggatggattgtttttgatgcaaggacatagatgtgcttattgcgaatgtgaacttttgacttattataaaggacatgttgagcattttgttcaaaaaggtaggtttcctcagtacacatttgagtggggcaatctctttggttcatgtcgtagaagtgatggttgtggcttttataaagacaatcaaccttatctgcaaggtgatattttgaaggttgatgaagatgatcctgatgattatttcgactttcttgatgatggcagtattgtcatcaaaccaaacttgacgccccaaaatgcgcatcgagcgcgtgaaacgttgagggtttttaatcttgatgctgagcatggggcgctgaggcagcagagagctacagcaaggaaactctattgtaatcttattgatgagctgagtgagtactatgataaatatggtgctgatgagaattttgaagagcttcttgatgagaatttagctgcaatagaaggagttccatttcaaacggctattcgtcatggattttattga

SEQ ID NO: 110304 - DNA, 1677 bp, Enterobacter aerogenes
atgaaaagcagtttgaaatcaaactttcagcttattaaggatatcactgaaggaaaggttgagactaaaggagatggcattgctgatgaaattgtaactttggttaaagaaaagatttatagtaaaaggttaagagtaagtcaagttggtgtctacggtgttcgcggaattgaagatatcacgctgagcattgaggatgaccttacggttataatcggtaataacgggtcgggtaaatcaactatactcgatagtttaagtttgacattatcatggctaaaagcaagtattcttaaagaagagggggtgggaacttatttaagagaattggatataaataattcgagggatgtttcttatggaagtgtaacatgtcgactttgtttagaagaagagaactttaatttcctttcaactaaatcaaagccggggaggtctttgagtaggcgtagtgctttgcaagagattaaagctttaggtggtctttatagacatgttaattctcagtttgctgattctaatcttcccttggttgctcattattctgttgcgagatctaatgaaggcacaaaagatgattttgctaaggtggggtctcagattggtatcaaggacaagtggggtaaatttgatgcctacgaagacgtacttaaagacagacatgatttcaacgagtttattgtttggttagggagaatagacagcatagctcgtcaaggtggcgggataaacgaagaaatcagtaagttacagtctgaaataaatagtacaattaatttacttaaaatgtttaaggataagggtaatgaccagtcctttattcttcctttggaagagataataaaaaagaagaataaagaaatatccaatatatacaatgagaatttcaatcgggatgaggtgttggcctctaaggtgttcaaacacattaaacaggctataacaattttcattcctgatataaatgatgtcagattggtatatgaacaagaaggcgttaaattagttttatataaaaacaataaggaaattagtgctcagcaactatctcagggtgaaaaatcgcttttgtctttgattggtgatttgactcgtaggttagtgcttctaaacccaagtcttgacaatcctcttgaaggagaaggaatagttcttattgatgagatagatttgcacttacatccttcttggcagcaaactgttatacttaatcttcaaaatacattccctaatctgcaactgattgtaacaacacatagtccacaagtgctcagtaccgtctactctaggtctatccgatcacttcatgaagtgaatgatgttctaaatacaattccaagtcttgatgttaataataaaataatagcgtctgaaactcctgagtttcaaactagaggagttatgagtactgatattttatctaaaatcatgggtattgatccagttcctttagttaaggaagcgaaatgggtccaagaatatcttgcagcaattgaatatgataaaaatactgaggggtattacgctgacttgtgggcagatattgttgagcattttggtgagaatcatccagtggtaatatcctgcaaaaatgctgttaggttaaaaggtatgagaggtaagatcagggagatgaaaaaaaataaaaatgaagatatcaaaaagggaaaggagtga

SEQ ID NO: 110305 - DNA, 930 bp, Enterobacter aerogenes
atgtttttttcagatagactttgcgatgagttaggatattcaaagcgtcaactcaattctttcctcaaaaatgcacctaggaaatatcgggtctactctattccaaagcgcacagtcggctatcgcacaatcgcccatccttctaaaaaattgaaggaaattcagcgcgtctgtgatgctcttttgcaagatatgttaccagttcatcattgtgcttatgcttacaagaaaggctgtagcattaaaaaaaatgctatgcttcatgtttcccaatcatatttgctaaaaatggattttagtaatttttttaactcaattacaccaaacatgttttggtctaaagtagacagctttaagatcggtataaataaaaaagaaaggggcaggttaacaaaagtaattttttggcaaccgaacaggcatgattctgacaagctaaagctaagcataggtgcacctacttctccactaataagtaattttgtggcatacgagtttgattgctttttgtctgagtggtgtatttctcaagggattgtttatagccgctatgctgatgatttgacattctcaactttcaaagctggtatcttattttctgtccctagagttgttaaggcgtttttggctaagtattttgatgggattactgttaatgaagcgaaaacgaagttttcttcgaagaaacataatcgccacgttacaggaataacactaactgatgatgggagaatttcactgggtagaagtgaaaagagacgtatctttcattttgtccattcattctctcttggaaaacttgacccagatttgttacctaaacttcgagggaaaatatttttttatgaacatattcagccgggatttattaagcgtctatcagaaaaatatactgaggaattaatttcatctttattaaatggtgattaa

SEQ ID NO: 110306 - DNA, 594 bp, Enterobacter aerogenes
atgactttattcactgaagaagatcccacccaacgccgctatgttgatttgattaatgaggtgacgcctttcgaagctacgaaagaaccaatgaagatcatttccgcatccgacatgctgggcatttgcgatgcttttcttgctgacactcaatgccacatagcagaccggctacctctttcaatagctggtcggcgtgagctaggtcggaaaattgagtggaattgtccacatagctggaaaccacgcgaagaatggtcaacacatgttcggcacgccttacaaattttaaatcgacgttatttggacaccccagtatctccacaggatgactggcagacctgggaagaactatcgacagatattcatgtgtcggctcgctgtgttcggctaactgttgagttttatcgctctggaaatccccagcatttaccgatgtcgactgagctttttgctgttcccgaagttttttcaaaatttgtagcttcgattgtttcaggtgacattcatcctgtttggatgtggcatgctgacgcagccaaaacgccgaaatgctttgatgggctttatcccaaatacacgccgctttcttaa

SEQ ID NO: 110307 - DNA, 1743 bp, Enterobacter aerogenes
atgtctgaaaaacctagcgctcaccttgaaagtatcactttttcaagcgggcaaacacttgtgcttaatgaaaatgataaaatattgattgttggcccaaacaatagcggaaaatcacaaacattacgtgacattatttctttaataacaaaagacttgcctcaaaacatggttataaaaaatctctcgttaaaaagaaaaggtagtagagaagatttcagtaattacataaaagaaaatggagaacttcatgggaattattactacttggggcaggccagtatttatcatgggtacattgactcatggcaaccaggtaataggctgaacgatttatcacctctatttattaaaaacatcacagcaaaagaacgtttgagtatatgcgagcaacaagacagcatatctagagaacaacaaaaatctaaaccccagcatattctctatgatgacagtgagctaatggataaagtcagtagcatattcaaaaaggcattcaataaagatcttatatttgattacagagggggaaacaagctcccaattcatattgctgatcgtgatgaattcaaagggattgatgatagggtcagtaacgcatatatcgagaaattaagaacattccctcttttagaccaacaaggggatggaataaaaagctatgcaggaattctcttcgaaactattgcttttaatcttaatatttctttaatcgatgagccagaagcatttttacatccaccgcagatgcggaaacttgggcagacattagccgaagaggttaacggtcagcttattgttgcaacccatagcagcgatattatgaggggattccttgagggtactcgaggaaacattaggataattagaattcaaagagatgataatgtaaatatgatacatgaagttgatcaacctgccataaaaaaattgtggtctcaaccgaatctaaaatattcgaatgctcttgatagcatattccatgagcaagtaataatttgtgaagatgatagcgattgtagattaatcaactttgttgctgactatatatctgaaaatgaagaaacgatattccctgatacatcattcattccctctggggggaaacatgcaatatcaggaatagctgaaatcttaaggcttgcaggtgtccccgttaaagccatttatgacttcgacttaatatcggaaagaaatacatttgtgacagcattgaaggcgtttggatgtagcgaagataagaaaacagagattgttaagcaatgggaaatgataaactcggaggtgcttcaaaaaataaaatcaaaatcagcttcagaaatcaagcaagcattgctagatacaatcactagtacgactccagataaaatatctaagagccaaattgaagaaattttcaagcagaaaaaaccttggagcgaagtaaaaaggcacggcattggtggattaccacctggttcaatacgaaaaaccttcaaaacttttaatcaaaaattgaaagaacttggtattttcttagtgcctgtcggtgagattgaaaatttcagccctgaaactggttcacacggtccgaaatttgtctctaaatttttagaggagcgtgaattatcggatccagaactatctccattaagagattttgtgattgatgtgttccatagtaaaattatcgtagaggatgtcccaacccaaaaggacgaggaacagcgtacaactgaaagtggcgataaaatggcggtttga

SEQ ID NO: 110308 - DNA, 450 bp, Enterobacter aerogenes
gtggtggcctttaccacctccgaatccaagcgcgacgcggccagagcgttgggcgcggatgaggtcgtagtgtcgcgtaacgaagacgaaatggcggcccacgccaaaagcttcgatttcatcctcaacaccgtggcggcgccgcacaatctcgatgccttcaccacgctgctaaaacgcgatggcaccatgacgctggttggcgccccggccacgccgcatccatcgccggaagtgttcaatctgatcttccgccgccgctcgattgccggctcgatgatcggcggtatcccggaaacccaggagatgctcgacttttgcgccgaacacggcatcgtcgccgatatcgagctgattcgcggcgatcagatcaacgaagcctgggaaagaatggtcaagggcgacgtgaaatatcgcttcgtgatcgacagttcgaccctcgccggctaa

SEQ ID NO: 110309 - DNA, 1023 bp, Enterobacter aerogenes
atggttgaaataaccccgacagcagcgacgccccccgataacgactcgcgtgaattccatccgatgcgcggcgtgggcaatcgtcatctgcaaaccatgctgccgcggatcatccgccgcaagctccgatttacgccgcactggcaacgccttgagctgccggatggcgatttcgtcgatctggcctggagcgaagaccccgccggcgcgcgccacaaaccgcgactggtggtctttcacggtctggaaggcagcctgcacagcccttacgcccacggtttgattcacgccgccatgcagcgcggctggctcggggtggtgatgcattttcgcggctgcagcggcgagccgaatcgcaacagtcgtatttatcactctggcgaaacggaagacggtacctggttcctgcactggctgcagcgcgagttcggcacagcgccgacggcggcggtaggctattcgcttggcggcaacatgctgggctgtctgctggcgaaagaaggcgacaatattccgctcgatgcagccgtcattgtctcggcgccctttatgctggaagcctgcagctaccatatggacaaaggattttcgcgcgtctatcagcgttacctgctcaacctgctgaaagccaacgccgcgcgcaagctaaaagcctatccaggctcgctgccggtcgatcttcgccagcttaaaagcatgcgccgcatccgcgaattcgacgacatgatcaccgccaaaatccacggtttcgccgatgcgctagactattaccgacagtgcagcgcgatgccgcgcttaagcgatatcaccaagccgacgctgatcattcacgcgaaagacgatccgtttatggaccatcattcaattccgccgcaggaacaactgccggctaacgtcgaatatcagctcacggaacagggcggtcacgttggctttgtcggcggtacgctgcgaaaaccgcaaatgtggctggagcaacgtattccggattggttaacccgctggctgggaggacaagcatga

SEQ ID NO: 110310 - DNA, 1983 bp, Enterobacter aerogenes
atgcttaacattccagtgttccgcccatggcgctcgatttgggacactcaactcagcgataagatgactaagcttgatgctattgccgcgcggaggcagcgagggcgccaaagacctccagcacttgagggtctgagtgatcacaccctggttcttgctgctcttaatttatcacgggcgcgattggactcccctgagatattgcaccaaaaaatcgaacctttgcttttggcatgtgtctggccacgctggttgctcctggaagaggcgttagaccaagcctccaccacaggtgacctacatttggctgctctagtgcttcgaacccagatagaagaactcgatgcattaaatgtcgttgcggaactctttgaatttggcaaaaagactccatttgacagtgaggctgtggcggataaaattcgttttctccaaagtcgggtcttacctaggctggaattaaaaaatagggaggagctgactaatcaggcttcagataaagagatagccgataaacgtcatgaaagtctgaagctggctttcaaccaacttagtgaatatgtccatcctaactatggtagccacattttatctgtgaggcctcactctactgaggccgcaactattgtagctgacgcttttatcgtgatttatgaagcgttttttcaattgccatgggttgaaaatgacaattgcgatcatattgtttttttacctttgaatcagacatcctcaaatgatcctttccgtatcttggcggatgtcactttacccatcctcaaaaagacttactctgtggaaatggggcatagagaagcagattggaaggacgcagaggggacttttcaccattttgctaactgcgagtctaactgggaaagcgcttttggtactccgccgacttggccaacagatattgaggcaatcaaggctttgagagagagccagctttcaccaagtctttggcctgactcacttaagacaatttcagggcagaatcgatattcgttcttaattcaacaagaacttcgacttgctcaagctgctaattctttacctataccgaatgggtcgtatgagagtaatgagcagctctcgatcctagttccgagtttgagcttcagcatcgaggtaattgagtacaagatgtggtctatggctcgtcaagcggcgagacttgttaacgcagatagcgttctcggggtgacgctactcgtgcgctcaatgcttgagcatcatgcattggcattcgagttaggggaaaaattaaccaaagctaaaaatgaggtggaaaagtctgcccctaactccggaaaaatttcggaattattggcgaacgctgagaaacaattggcacgagttcttgcgggaagctcgaacttgtctggtgcaacgtccgagtggcggcacttgtggcgagagtctatcaaaaagccgtataacatactaactccactagggacaatgaattcaaaacaaccaggggtgctcagcttgtacggtttcttgtcccatgttgcgcacggtacaattgctaccggaggtgatcttttggggggcgggggagaagggtggaagtcaggtcataagataattctggcgcaattgacacttatgctttcaacgctatgtgggattgaggcgatgatggatcgccaagtagcctctatgctgaccggatcttggctcgactcgttgcgagaaaaatcaactgacctcggaaaaagtatcaaggcgaagcgaatacttgaaggtcaaaaattgaaatttggaagggatatttttggagttggaaccaaagatgatccttaccgctttcgcgaaggattggactatcatccgtcattttatcactacttgtcacaagaaggtttaaaggtggacagtcgcagtgttgccctttttaagggagcatttggagatgaggtcaagctcgatgatggaagtgtgctgtactttatgaattcccagttgaacatctga

SEQ ID NO: 110311 - DNA, 180 bp, Enterobacter aerogenes
atggataactggctaaaacagtgtgcgatgaagaaccagctttccgtcgcatccagcatgtttgtctgcttcgacgatgctaatgtgatggcttcctactcgctggcttccagcgctgttacaacaaatactgcccccgtgcgcttttgtcgcaatatgtctcatccaacccccttctga

SEQ ID NO: 110312 - DNA, 234 bp, Enterobacter aerogenes
atgctgggacgcctggagggggataaatcgctacataggcaaggtatggggctgacactgatacgtgatgccgagttgcgggtaatacaggtggcggaaaccatcggtattcgcgggacgctggttgatgcgttgtctgacgaagcgcgggaattttatctgcaggtagggtttgagccgttgccgatggatccgatgttgctgatgggggatttggtgagaagcgctatctga

SEQ ID NO: 110313 - DNA, 1086 bp, Enterobacter aerogenes
atgagcagtgtttttgagagagagaacgataatattcgggtcctttcacttttctccggttgtggtggtatggattttggaattacctcagctggtggagacatcgtctttgccaacgatgttgcagagaatgcctgcaaaacattagggaactatttccccgatagtgatatcaggcatagtgatatctctcaaattctgtcttttccggatgttgatattgttgttggaggctatccctgccagtcattttcaatggcaggtaacagaaaacctaacaatgacgacagaacaaacctttataaacactttctacgggtattagagactgttcagccgaagtattttgttgctgaaaatgtttctggcttgaaacatttaggggcaggtagctttctggaacaacagctcacggcatataaagctgccgggtaccaagtcagctatcatatggtaaacgcgagggcttacggcgtgcctcagtcgcgcaagcgtttgtttattattggcgtcagaaacgatctggggcaatactttgaatttcctgctgaaacacatggcaaagcgacaaaaaagaatcctcatttaaaaccctatgtttcacatggtgaggctattagggatttaccactatggcctgaaggtgagttttacgaacgaccacatgatcctgatgggcatttctcatggtatttcatgtcccgaaatcgtaaagctctatgggacagccctgcttacaccgtcgtagctaactggcgtcatgttacattacatcctgccagcccggtgatgaagttaacatggtcaaacctagaggatggctggaagcagcgctgggacttttctgatgaatatgagcatctagttgttgatacttctcgtcccaaactggaacaggcaaggcggttatcatggcgggaatgtgcacgaatacaaacttttccacacggttttgaacctgtaggagacgtcgagtcaaaatttacccaaattggtaatgctgttcctccactgctggctgaggtactttttcggcatttattttctggtgctggtttgaaaaagatgacagcgaacggtaattag

SEQ ID NO: 110314 - DNA, 2766 bp, Enterobacter aerogenes
atggatgattttttcccggttactttagaagaatggaatgctgaactagtaaagatcgtctttcttgagtcttcgcatacgggctcgactttaagccgaattgatactacgggacgcatttttgagcaacttgcaggtccacgtagcaaagaggatgctaagcgaagtttcctgatttcgtttggaaaaaaagcgtctaaaatccaggatgctctcagggatgagtctcgattagacattttagcgcaaataaaaggataccctacttattttgccgttttatatttaacattacttgctgccagtgctgatgatgaaacacatgacgaaggggattttcgggttcgattttctgtgctgcttggctttgataaaaataaaaaatttgtttttactgaattacccaacttatgggaaaggttagaaagatggagtagtaaaagacaaaactgtacccgtttaatcttgccaaggccatcaaaacatgaaagattgattggctactccaagagaattgcttttccatgctacaaagatgaggtctttttacggaatgttctcatcgataataagttagataactattcaacttttgaatcagttaataaggtagtacatcaatatatatcttgttttagcgaagtttttaaccaagagtttattgagttcagaacattactttcaaaggctgccatgcagcaggcttatgactctcctttttggggggctgttcgtgatatcactgtacatacagagagagaacaactcaaagagaatggtaagtattgtattcacatggagtttaatgattcagataatcctgagatttatcttcttatggatgacgctgctgctacagactcagaaatccagcgttattactccttgcctaatgaaatagagagctataataatatatattacgaacgagacataggcaccacattaaatttcttggattttttattaaaaaaacggaagggtcatttctataaatcacgagtgggagtcgcactgcggtctgggtgtttgccgctttttcgtgatgatttttgtcatattagttcagagggagaatattatgaaaattctccaatctatttaatacttcatcatacatatgcagacagtattttcactgtcttgaagaaggttggtgaaagagtacaacgtcgggatattaaatctaccaaatggtcaatagtttcttccgataaagttggcaggcaaacgctggataagatagcccgtttgttaccagaagaagcccgtcgttttctaatacagggatggcagcctgctcgacctcgtatgtcaggcgcagcgcgatttggacaggctatactgcttaaccctgccagtacaccgataattcatatgcctgaagtactaagaggatgctatgtcatcagcaataaagacggagaagaattaattcatggctcgctatctcagggagctgaaggattattcattccaccagaggagttgatggaaatatctggtcaggcattttgtcgctacgaacttacgttagcgcattcagatatcccagtaaattttgatgtacacgtgttagatcacgcgccttacgccacttattgtaaaattacagagccacatgattggcttattgatggaccatcgggagtattaatggcgttaggggatacggcagtgatccgcccactaaaacgcgaaaaaataacaccattgagtggtgctcagatgttatggcagtatgaaaattgccttcctgtaacatgccaatataccgagttacataatatacccgcagcatttgactggctcgctgaggcgctggcattgcgttttcaacgtcgtagcacattgtcttttggtgaattaaaacaacatattgaccccgtatcacaggtaacgaggataccagagtggcaattgcgtcgcatgctctttgctgctggctggctttgtgtagtacaacgacgtcatgcgccatattcgttagtctcattagctgaaagaactatttccgttgatgtcactgagcagggaattgttgcccgaattctggggatgtttacaagaagtgaacgtaatcttctccaagaagcactgaatgacggtgagcgaatagggcgtcggttggttgaggataaaggttgttcaatgggttgtattgaattgcatctatcagccagagagcgtattcatgctttcattgaacagtttgggttacgtttggttagtcacgacgatttccccgtaaatgctttgagcggagtattgctaccactgtctcaaatgcagtttatcccggctttacccccggaactctatgtgtcgctatggcaagctgaaaaataccaatggtcagaagaacagcggcttactcaaacggctaataatctattgatacggtgtcaggaaaagcagagttatcgttattttattcggcagaacaccggatactggcaaactgatagcttctcctgggcattaatggctcagatgatatgtacaggagaaacggttggcgtgcaaaaaggcgatactgactggtgctggtcaaagaaaatctttgcgttaccgccctccgttttacagtggtggatccatgttgcccatggatgcttgtcgataacagataatggtggctacttatttgcaggggggaaatttccactctgggacaatgtaatggtttccccttcgtgccaacgcgcgttggaacgacggaacagagcgctaacaacatgcaagctgcgtagaaccttacagtaa

SEQ ID NO: 110315 - DNA, 2781 bp, Enterobacter aerogenes
atggctaaaaagcaaagtattatcagcgaccggctgggccaaatgtacagcttcggtacagaatctcatgaattgatcagatgcttgcaagagtgcaagcaaaggctcaccagaaatggcgctaaagcagataatttaccgaaaggaccagagaaaaggttacattttctccgtacgttaccacctaaggccaaacttgttgtgtctgattggcttcgtgaaaatttaacgttttctgaacaaaatgacccagaaaatgttcttagagatctgttagaagcagaaagtaatgcggaaaatattgaactctgcaaaccgttatggcgcactattctgggattctatatttcttctgactgccctgaaattataacgaaatttctgaatggtgaagaaatagatttaccccaacatggtgtttctgactcttcgacaattaatttcatggatgaagacattgaacattgtgccttaattagtcagggtagagaaattcctaagccagagcgcactataccgctgtttgttgggggattggttgatgcactcaggggaacgcgaacagccgataatcgatggcggacaaagctatcagaacattctttaccgatggcgcgaaaattgggtgagcttatcgatcagtttgaagccagttacgaccttaaaacaatagatggtactagtgtaatacaggctcctcccgttgtttccaaagaaatcgacagttcgatggacgaagttatgttcattggaaaagtgttagcgttaaccgcgaccggcgctttttttgttatgccgattagtctgttaattaatggcaacctacgagacctcccggaggaactggtaaaagatttttttccccatggaggtgaagccattggttttgaaagctatttcagcaaaaaatttactcggggtgaaatagcaatatggaaagcccgatatcagccgtctgataaacccgcgcagtatgttattactgactacatgtcgcgcgtttatcctgtcgttgcgctgcctcatgcctctgatgagccagatgctgtcagagagtggttacttacccgctaccagccgcaaaacgatacggcggtcatttttcacctaagtgatggcgtatccctaagaataccgggtgacttgtctgatcctaaaaaatatgactttgatatgccgctagagagttatcgtcaggtttctcagacactacttggttctcatgccctcagggtgatcactgaactccctcaggtgagtaaaaaatatgattgcgctgaagccagcacgtggatcaaacgcctgcttaaacgcactgattcagcaaaagatttccctcagttcagtaaaggacagctacaaaatttaacccactttattgctgaacatgagtctgataatcaggcatcctatcttcgtgctgtatctcacctggaacagatagcagatacaagatcctttcttaacgatacgactcaacagttattggctttacctgaggttgaagcgcaaattaatattgagaaacaagaaatactgactcgttacgaagaagaacagtaccagattaaacaatcaataaaggtattatctgaaaagaaaatacagcttgaaaatgaaatcgacgaccagaagaaaaaactgaaaaaagagaccgatcgtattaataaagcgctacgtcagcaagaaaatgaacttgaacaacggattaaaaagaccttcgaagctgcgtctcaagcgggaattgaaacgctggcccagacagcgttactgcgtacgataattaaaaatgaaacagtacaggaacaatctgcccaacgacaaatagcaccagaacctgtagccgaatcagtaaattctaattttccattagcagaggcgaatgccctgactcgcaaacatcaactatcatcggctatcgaaaaacaggctctggcgacgggactaagtgaatctttattatccagcatgattgccgctgcgagtgttacacccgcagtcggattgatgggaaaacagacgaaagagactatcgcctcactagcgaacctcttagccgggaatgtttggggagaagtatcggtacatagcgatcattttagcttcagtgatttaatgaactcccccacattgatccgtttatccggcgatactaataccatgacgctaggcgattttttgacccatcaacaagaggcagggctggtgagcatcgttgaattgcgtggttttaaccgcactcctccagaaacgctgctccctgaactccaagagtgcttattcagaactcgccatcctgccgcatgcagttggacggatcggcggcaggctctgcgacatttgcccatccgacacccgattctttttttactcacattcaccaccgggaaaagcacgtttccattacaggctcctcttgcttaccagttacccctgtttcttgcagaaaatatatggtcggatgaacggccatttgagcaaaatactgacatcacgccttctcgtattacccttgaactatggcagacaatctatgtggacaacccccagccagagtaccaagcttgtgcgccaagggaagtgctagaagcagcgctactctctttacttcctgatgaacaagcacaagctgttgcccgtctggcttatagcctaggccgtagtacggcacaagatattgcgaccacgattgacgctcttgccccgcagttagggccatatgttcaggaaatgactaccggtgaatctgcaagcgtacttgagacccttttccagttataa

SEQ ID NO: 110316 - DNA, 5949 bp, Enterobacter aerogenes
atgaataacccactggaaacatttgaatcaataagagatttttatatttcataccttgaaacggccttccgtattggttcatcagacatacagactgaacggcgagcattactggaacagcaagggacattatgtgccgatctatttcttgagccgatgtcccgatatcagaactatggcttaactatcagtgcattacgaaatgatgctcatggtcagacatggttgccagggtttaatgcgcaacaaagggcggcattcatcgacctctgtttaggtggacttctgccccgcaataaaacggattcaactaagggacgttttaatctttatacccatcaactggacatgctgaaaagaggggtacagccagggaaaccgggcattgtcacctccgggaccggttccggtaaaaccgaatcatttttattgccggttctggcacagatcgcaaaagaagctaccggctggccgcaaagctcggcgttgaagcgctggcaaccgtggtggcataaggtagcggataaacagcccagcttcatgcgcgagcatgaagccgctgctcgtccgaaagcggtacgggcgctgatcctctacccgatgaatgccttggtagaagatcaactggtacgtatgcgacgggcgctggattccagcgaagctcatgatgtcatggatacgtatttcggcggcaaccggatcttctttggccgttataccagcgcaactaaagtaactggctggcttaaacatccccgactcagtgaagaaaaaaatgagaaaaagcgcgtggctaaaaaaatcactgagctgcgtgaatatatgcaattaacggaagagacccatcaggaggcggtacgacaagcgcagcaggacaaggataacgaattatcgtttaatttcccccgaaccgctggcggagaggttctcagccgctgggaaatgcaaaagacaccgcccgatattctgatcaccaacaccagcatgctctcaacgatgctggttcgcgaggtggacgatcctatttttgagcaaacccgacagtggattgagcgcgatcctgatgcctatttttatcttattcttgacgagcttcatctacagcgaggaaccgcgggtactgaagtcagctacttgcttaaacatttgatcaaccgtttggggctggatcaggaaaaacaccggcacaaattgcgtattctggcctccagcgcctctttacccgttgaaggggctgaaggtgaccaaagcgtcgaatatttatggggaatgttcggtcagcggggattacccgccggtgcctcttccaacgactggagagaatgtattattaaaggtgccactcttcccccgggcaatatgtctcttttccagggggatctggaggcgttttatcacgcagtgcttcagttacagcaagcaccacttacctcattacaacactggcagaatgtcgcccgcagcatgggaatgatagtcagtgaagcctcaacagaacaactagcgcaacgggtcgttttacaggcgggcaacctgcttgaaagtggctgctatacggaagatcattctccgagagctacgtcaatcaaaatgcttagttcacgccttttcaacgcccaaccccttagtgacaaagcgctccaggcattaatctggttacgttcgactgagggagactggccgcaatggttttcacaagcctttcctgatgatatcggtgcgccacgtttccgcgctcatgcttttttgcgcgctcttgaggggttatatgtcgcgccattgcccgtccctagcgctgcatctgcgcaagacattaatcacagatattttggcgatcttaccgtggagtccggcttacgttacggcaaagataaaaaatcgcggcgtgtcgaattactctattgtgaatgttgcggtaatctcttttgggggggtaaaccttcggtcttttccggttcagaaagtcgaattgaacttttacccaacgaccctgatacggaacaactgcccgaacacgcaaaatcagtcatggtagaacgccgatctgctgaagaatacgcgctatttatgcccgttgtcgaacgtttctggccgaaaggaaatgaggagctaaacagcgataatgacaatacttttggtacttgggtaaaagccagctacgatccatttaccgccactattcaacacccagtatcgctcttaaaaccgctaccggaaaaccatatagcgggttggttctattacgttaaacccggtgaatttgcctcctcggaaagaggccagtcatccagccagtcaccgggaacggcgctaccttttcagtgtccggcgtgcggtacgtcctataaatacggcaaaggtaagctctccccaatccgtagctttcgcgtcggtttttcaaaaacgacacaactactggccagctcgctaatggcggaactacagcgatcgggtaaccgtgagcaactggtaacgttttcagacagtcgtcaagatgccgcaagggcggcgctcgatctggaatcgggtcaccatgacgacgtccgacgagaaattgttgtccattcgctacagactattgcggctgataaaccgtcccataaccaactaaaaatacgccaagcagagatagagaaccggaacaaaacactagttaacctcagcgtaaggtcggatgaggaagaggatgaattggatcaacttgctgatgaacgaaagaaaatcagagggttattatcaaagcctgaatctgacagcatacctctgcgtgaaatcctcgaacctgaatcaccggatgcaggtcaaccacttggcccgctgttaagggcgcaggtagatgcaggtattcacccttccgatcgtactggcatcgcgcctgttcccgatccagaaaaacatgaagaaggcacgctgacctttgcatggcaacaactctttgaaaagaacacgcagggggagtggtgctggaaggcgcttccatcctatgaagacaacctgcttgtggcacgacaggagatttcacgcgatctgaaacggctggtaggggaaagcgtattcagtaaaacctacttcgcgctggaagagtccggttggggttatccctgccttcccattaccggaaacgactcacgggaacatctcgcgatttatgacgcaatgtttcgtgtgttggcggacgcataccgggttaccccttcacaatatacaaagccagaaactccatggagttcagcgcgcgatgtcaatcgtagaaaccgcctgtaccgttttacacaggagatatgccagtgttcaggaggcgagcctttatctttaattgatagttttctccggcgactagagctggcgggtcatcagggcggtattattgatattggtaaaatgcactttcgcctggcggaacctacagatcgcgtctggcgctgctcccgctgtgggcgtatacacatgcacaccggcgcgggaatctgtactcgctgctactctcctttaccagaaacgccgtgcagtgaggcaaaaacgctccagatgcaacactatctcggcaaacgtctctcacattcttctggtattcacaggatgcgctcagaggaactgactggaatgaccgaaaatccggcggcaaggctacgccggtttaaaggtattttgattgccgacgacgatgatattttaccagaaggaatgaaaaattttgagcccgatcgagatcttgaccgggcagctcgggtggttgatgtgctttccgtaaccaccaccatggaagtgggcgtggatatcggtgatttacgtgcggtctttcaggccaacatgccgccacagcgctttaattatcaacaacgtgtcggacgtgccggacgacgtggacaagcgttttcattcgtattaaccgcgtgtcgcagtaagagtcacgatctgttttacttccgctatccggaaaaaattacaggcgacctccctccgccaccgtttctgactacaaagctggaaatgatctgccagagactggtacgaaaaatctggctggtgtcggcattcaaatggttaagacagcaaacggaaaaagccgatcacccatggccggttgacgactacgcacacgtccctgataaccatggtgagtttttcccggtacactggctgaaagaaaaccaaacggactggctgccaaaaatccggcaggccatcgaagcaaccatcctggcgcgcgatgaatttgcccagactagcacacagcaaaacccccatttgttccagaaaattattcagcctttgacgccggaacagctgattcaggatatcaacgccgtactgaacgacagcgcgatggaggcgaaaggattggctgaagcgttggcggaacacggtaaattcccaatgtatggcatgccgacccgatcacgccttttgctgacaaggcctgtaagcacaggtggaaaagaaatcgaattcgccagcatggatcgcgatctggatattgcgatacaggaatttgcccccggaaaaattctggttcaggataaacgacgctactttacagcaggttatagtggactgcttaaacagagcagaaaaaatccacgatcattttattcaaatgcctgcgaaccgggtgaactcagaacaatgaccgcctgtccggtgtgcaacatttgggctccagcaaactctctggctaccgaatgtactatctgcggtgccgttatggataaggcagagcgctatcaatgctatgttccttatggatttatcactacgctggaaccaaaatcggccaaagaggattttgatcagatcttgaccacggccagtcgtgtatcaattgcagaagcctacgctttttctgcaacgcccgagcctgacgttaatgtggcgatacagcttcagccacagacatgtttgcaccgcctgaatcggggaatttataccaataaaacatggcgtggtttcagcgcaacacaggggagcctatcggtccctttcagaaagcaggggacctaccagccgctttgggcgaaccgggtttggatggatagtcaaataattgaggccgacttgttagttaaaaaccgctttaccgatcggggagaaacgcgaaacacattttatcttgccgcgcctaaagtgactgatctacttgcgctgatggttgcccaaatcccgccgggtctccggctacagtattccactctaactccggcattcagagctgctgcgctctcggcgtcttctatcattgtgaattatgcatcaaaagagctactggatattgatcctgaagaaatcgaaattctggaaccccgtgttcaaatgctgaaaaacggtaagtcggtaccggttctgcaaatggccgatcgtctggttaatggttcagggttatgtgaacggctacagcagaagggtgcatccggttctctcattatccttgaggtcatgaagaatattttaaataacaaaacggcctacccgctggctgagttcctgcaacccgatcatcgcgaacgctgctttcaggggtgttatcactgcctgcaccggtacggaaaccagccgtatcacggattgctggactggcgtctgggactggatgttattcaacttctgctggatcaaacctataacgccgggctgaacggtgattttacctctccgggcgtagctgactggtcagaaaatgccttacgattagccaaagaggccgcttcgctatacagcgacagtgccgcagaaatgatggggaatatacccgtgattcgcaccggggccgggcgttgggctgccgtactacatccattctgggatcccgatgctgcatttgctgcaaacccggaacttgaggcattttcatatgaggtggacgtagacgcgacgaatacttttgcattatcccgccgcatggggactgaaatggcaaaattacggactcaggcgtcctcggctcaggagtga

SEQ ID NO: 110317 - DNA, 1149 bp, Enterobacter aerogenes
atgaatgaaatgacgctatcgcgtactcgtccggtgcttccttctctgttggggagcttcgtcatttgcccggcgaaatacctgctggaaagtgaagctcattcttacgcacgtttaccgctgcacccgggagtgattctgggccaggtaatacatcaacgagtcaattcagtgatacgcagggaggccgcttttgggaattatactctcaggcaactggaaaatgatttttcgatcgagctgaaagccaatcgacgtgccgggccggtagcaaactggatatatgaccgtcacggcgttgccgggctggtgtcacgccaaatgcttgttacccagatccgctacgtcagatcgcttatgccacctgttttcgtaaaagggggccctgcacacgaaaaaacattacccgttggccgggaggttatgctgaccagcaatgatttcgatatgcatgggcgggccgacctcatatatcaggagcgacccgatcggctaaacgtagttgatttgaaaactggaaaggtaacagacgaactaaaccagccgaaagaaactaacctgttacagattgcggcctatggcataatggtaagagagcgagcacctgatatgaacattgggttagttctgacggggagccgtgatagttgggaaggggcactgaatacagacctgattgaacgggtcactacgattatcaaaaatattaatcgacttttgccacggaatatcccactttcagtatatgagttggcttgtccaggcacgtactgctcccattgttcctgccgttgctcgtgcccggcctggacagaaaagcttcgcaagcagatgcaaccgtctctttctgatcatcagcatggcggaatcgatatcagtggaaaattacttgatgcggaaagtgacgatcatcttcttacgctgaagatcctgctacccgataattcagttgttaaggtcttttgtgtgccttcttgcaccatcccagacccaacggaaataacaggaaaacaaattgcattgtacggattaaacaccttcagtgagacaccaacagagtattttccccgcaacttctacgtcatcaatatgcaggatacaagaagatcggcgtttcagtttcactggcagagtgaaggagagaattag

SEQ ID NO: 110318 - DNA, 1017 bp, Enterobacter aerogenes
ttgactatagattttaaatgctcagctggaaaggttgagctattttatagcggtacttacctgatggatagtccacaatatagtaagctacaagtaagcgggactgattttctgtcaaaactgaacgggacaagagttgaagatattccgcctggcattagtttttatataggaggggttcaagaagtttatccttccttgtcagctctctctcttgataactcagaaagagggatgacgataactatgcagacgaaatatatgaatatcggcgcttgggttaagccgttttcttttgatgaatatcttttgaaaatacagtcactaatgagtgatattctcccgccaataaaaaaatattatcagcatgacgatgtaacacttattaattacaccgtattgggagtgtttttttcaattagaaacggagatctgttagatgctatttcaagtcgtttggagagcttcgctcgcgcacagcgtgaagctgagagaatgctatacaatcaaaccttatcaaattatacatatctggcccgagagttgaattttgttgagggagaaaaattttgcttggaagaagacttgacagtggagttcaaggaggtcaaggggaataatccagtaaagtcaattcagaacttagtagatgaatatattctagctttttttaatagccaaggtggtagcgttttttggggggtaaatgatgatggcatagtcacaagcttgaaattgacatctaaaatgaaggatgatatcaggaagtctgttagcgataaaattaacgtgattgagccgcctatagatcccacgcagataggtgtgttttttcacaaagtatcaaacactgatagtggctacgtgctggaagtgaacgtaccaagctctcaatcagaactgctttactttaactcatctggagaaacttgggttaggttaaatggctcgaaaaaaaagattcagggttctgcattgcaagactatattatcaagcgaactcataagagttcctga

SEQ ID NO: 110319 - DNA, 156 bp, Enterobacter aerogenes
atgaatatgaccccggagtcggcgcaagcgcctcgtccgggctacaccgctacaaccgcatcaatgctgactgaaactgccgatgttggtggcctcaaaatcgctgagacgttcccggcaggccggggcagtcgttgtaggccggataaggcgtag

SEQ ID NO: 110320 - DNA, 465 bp, Enterobacter aerogenes
atgaaatttaaccgcaagatggctggcatgctggccgtatccgttctgctggcggtcctcgccggctgcgataataaaaaagaagagactaaaacctttgcgctgaataccaacggcgtcgaacttagctttacctaccactatgacggcgacaaagtgctgcgtcaggatgccgacaataccattccctataaatcgatcggcgcggaaaataaagaacaggcgcgggcgattatcgagccgatcagcagcgtctatcgtaatctgcagggcgttgagcagaccatcgactataaagattcctacgcgcttgaacatctgaccgtggatttcagcaaagcgaaaatcagcgagctgtgcaagctgccgggctcgatgttcaccgactgctcacagcagtttgtttcgctatcagtatcgactaagctgctggaatcgcagggttttgaagaagtgaagaagtaa

SEQ ID NO: 110321 - DNA, 798 bp, Enterobacter aerogenes
gtgcaggatcgcaattttgatgacatcgctgaaaagttttcgcgcaatatttatggcaccaccaagggccaactgcgtcaggcgatcctttggcaggatctggaaccgctgcttaagcagatggggccagggccgttgcgggtgcttgatgccggcggcggcgaagggcaaacggcgatccgcgtcgcggaattaggccatcacgtcacgctatgcgatctttccgccgaaatggtggctcgcgctcagcaggcggcccgcgataaaggtgtgatcgacaacatgcattttgtacaatgcgcggcgcaggatattgctcagcatttggaaagccccgtcgatctgatactgtttcatgcggtgcttgagtgggtcgcggaaccgcaggaaatgttgcgcacgctgtggtcggtgttgcgcccgggcggcgcgctgtcgttaatgttctacaatgctaacggcctgctgatgcacaatatggtcgccggaaacttcgactacgtacaaatcggcatgccgaaaaagaaaaaacgcacgctgtcgccggattatccgcgcgatccgcagcaggtttacggctggctggaagatctcggttggcagataaccggtaaaaccggcgtgcgggtgtttcatgattatctgcgtgagaaacgtaaacagcatgacagttttgcggtgctgctggagctggaaacgcgctactgtcgccaggagccgtatatcagcctgggccgctatattcatgtcactgcgcttaagaaagatccaggcgcacagccgcagatgcaaggataa

SEQ ID NO: 110322 - DNA, 513 bp, Enterobacter aerogenes
atgacattaacttccagtgacctaataacaatcatcgcgtgtgctgtaactatcatttttggccttcccgctcttcttacatacatcccacaaatcaaagagagtagaaggttacgcagagagagatattcgcagattttaagaggtaaaaactggaataatttaggaataatacatggttttcctgagccctcactggacatacggattaactcaattgacagtgcaggctctttggaaggtcaaataatcaattgccaaagccaagttattgatttagacaagactactttcagaattattggtaatttgacccacaacggaacagcatccataacattgtgtactgagatcggctctcatttagtgccggtaggtgttgccaaattacaatatcgagaaaaagatgcaactcttgatttcttctatctacatgatcataaatccaatccaaccttgtcatgggaactaagcctccctcggtttactacctatgggctagttggctgctga

SEQ ID NO: 110323 - DNA, 1740 bp, Enterobacter aerogenes
atggaactacatgcttatacacgaactatttcagaattattgtccgtaaacagaaaatatgttgtcccgagatttcagagggaatattcatgggctcgggagcaaataaatgagctttggtatgatgttatatctaatataaaacctaacgctgagcaaatatacgttaataatgaatattttataggttcactagttctagttggtgatgaaactggccgggagatgcaaatagttgacggtcaacaaaggttgacgaccttaacaatttttttatcagttttatgtgagtgtttcataagtgtcaatcagcgtgggttggcggaagcattatttgagaattacatcgaaggtagggatgatgaagggagaaagttttttaagttgattaatgaaacaccaaaacctttctttcagaaaaatattcaacatatcaataaagcagatgagcaaccacaatcacaggaagaaaggaaccttttagctgcttataaagaaatatcggttcttgcgtcaagggagagattgggtagatactttgttaccgatttaacaaacgatgaaaactatacagttgttttgaagtttgttcgtgatcaaattttaaggtatttaaagattatttttattactgtaaatgaggaggatgaagcgtacacaatatttgaaacgctaaatgctcgaggtatgaatttaagttttgtggatttgataaagaataaattatttaaagctttaaccgatgagcatccaaatgatgatgcgaaagataattggaaatcaattcgtactattctaacagatagaaatggtgtgggtaccattgagagttttatgagacactggtgggtttccaaatatgcatatgtcagcaatgagaatttatataaatcatttataacaaagtggcgaaaaggagatatagatccagctgcatttattcaagaactaaaagatgatgcaaggttatatgtattaatatcctcaccgcttgatagcgattttcctcagcaggaagacaaacctctttatcagtcactaaacgcattacgacttttcagtgtgacacagtgcaagccttttttacttgctttaatgaaagcgaaacgtgcaggtaaactcaggcaacgtgatttgcttagagctttgcatactattgaaaacttccatttcatttttaatgctgtctgctcattacgtccatcagggatcgaaggtgcttattcgaaggcggcgcgagcaataaacgcaccccaatcgactaaagtaacgaatggtgaggttattgaacaactatgtacactcttaagtaaccgtaagccagagttgaccgttttcattgaaaacttccgggacctgacatttactgatgagaaaaataagcaaaagaaactcattcaatatattttgagtaagtttgaaatgtctcggcatactggtgatgaatacaggcctcattcaataaccttagagcatgttttgccccagagtaatggcggggggaaggagattggtatgattggcaatattattcccttgtctaaggagttaaatgaacaagcaggcgataagtcgttggcacgcaagatccctatctatgaacagtctgaatttatctttacagaggaattcgttcatgagctagggtctatttatggtggggcgtggaattccgatactatcgtaaatagaactgatagacttgctggagaggcttataccacgctttggaaccactaa

SEQ ID NO: 110324 - DNA, 642 bp, Enterobacter aerogenes
gtgcaacatctccttttggcttgtggtgagccggaattagaagtgatttactcacgtttcgggatttttatggatttacgcaaaggtggaaaggcagctattgaccgcatgttggaagcatacggatatacaacgaagcaggtgttgtgtgatcaattgggtatcagtagtagtactttggcaaaccgttacttgcgagatacatttccagctgattacgtaattcagtgtgcgttagagacaggtgtcgccctggaatggttagttaccggtgagggttcaaaaataccaggtgctttgtcgtctaaaaatctatatgagctacccgcttatacgttaagcaacggtatccttgttaaagacggcactatttcttttaactacaaattattaccagtagattctggaaacattcatgtaatcaaagatgcaaataaaatttatttcgttgattattctggaagtaatttagttgatggtttttggttaatatctattgatgataatctgtcgtttaggaagatttatcgcttacctgcaggacaactaaaagtcgagaataaccacaaaaactttataagtaatttaaatgatatctcaatgaaaggtcgagttatatcaacactcgaatctcaactttaa

SEQ ID NO: 110325 - DNA, 1467 bp, Enterobacter aerogenes
atgaatcttggatgggaagacttagaaaatatccaatcaaaccattggcaattaaaagaaagcgatcgtattttaaacaactttcactctttcgaaatatttcgagacgacaaacttagtttaaaattaaaaataacatacaaacttgttaatcaacatttttccgatgattacttttataaagaaccagaaagaagagctggtgaggtatacgtaactgatggttttcttaccttagaaaatattttcgatgaaaatgtcatgttagaaatcactggcataacattaattaataaaaatatcgtacacaatgagcatgaaatcgttgctacaattatgtgtgccataaataacctaaaaaaatcaaatgatttaggaaataatttaggaaagaataaattcacaattgactggattacaaatctgaatattgggaattatcattggagttcaagtgttaccgaaaaaagtgagaaaaagacaactagagatttcaagtcagtaaacaacaccatttcattcactgagaatcgagataatttttcgagcaactcaaattgctgtaacattcggattaatgatttggatattttttttggaaggacagactgtccaaacattgataaaaaatacaaccctggattcattctttatagtgaaaagtgtaactccgaactgagaaaaaaaataagaaacgcattatcatttatattgggttgcaaattaatccatatttcaagtgttttaaaagacgagaattataattctgttgaatacgaaatccatacacaatcggcaataaatgatctttatcattcatcttatagccttcctccttcaccgctacatcctgcagatacaaattatttactccttggagaaaacgaaattggattaatggttcagaagattataacttcttatgatgattatgatttttcacatttttcatggctctattggcatgccgtagcttctcctttacacctcaagggtgttgggtttggagccagcttagaattcatccaacgtaaatatatagaaaacaatgccactgacttcaaccaaaaacttatcagcaaagctttatggaagcccctttataaatcgttaagtacaatcttagaggattccaccggcttatctgaggatgaaaaaagattactttcaaataagctatcaagtttgaatcaaactccacactcaattttaacaagtagattttatgaactactaaacctttctttaggagatttagaattgataagcttcaaacaacgcaataactccgctcacggaaacaaatctgatgaggacggaatgatcccgttggttcgtgaagtgaaaattttgaggatattatgcaatcgtataatattgagaatctacaacctttccgattattacaatgacttttatagcttaggctttcaaacacgacatctgagtgattcaatccccaaataa

SEQ ID NO: 110326 - DNA, 687 bp, Enterobacter aerogenes
atgatatttaacggtgagatggttcgcgccatcctcgacggtcgaaagacgcagactcggcggatcatgaaaattcagccagaacattcagggcttgggttacgccgggtgactgactccaaaaacggtagtgatgacggtaagtatttttggtcatcgtctgatgcgtgcggcctgaaagcgcgctccaaatcgttcacctgtccatttggtgtcgtcggcgatcggatctgggtacgtgaaacatttcaggggccgttattcgattacgaacagatggagtcatacctcgaagatagctcgaaattcgaaaagccagaattttgccagtatgccgctgatggcaagccagcgccggaatattacgacgctgacgacaacctgcgtcacggatggcgcccgtcaatccacatgccgcgttgggccagtcgaattctactggaaattacagacgtgcaggttgagcgcctcagagagataagccaagcagatgctgaagctgagggggttggaaaactgaagaaaggtttctggaaaaactatcagccaagctggactgagtttcaacttacagcgcgtggctcgtttgcaactctctggaaatccatctatggcgatgaaagctggtatgccgatccatgggtttgggttatcgagttcaagcgcgtaaaaggcggtgcagcatga

SEQ ID NO: 110327 - DNA, 447 bp, Enterobacter aerogenes
atgaataacgaaatcgaactcacagcagcactgttaactatcgagaagagcaaagaggcatcagactgcccggctggcgtagacctgcaggactgggttaagcggctggcggcggagaatgtggcgctgaaggaatacagacctgaaccgtacggaattgcaatgatggaggcgctggatgcgttctttgccgatgaagaggttccggagcgcgcaatgatggaggcattcgaaatcctgtgcgctaagcgaatgccggttcaggccaccgatcgcatcgtagccgggattaaggctgatggggcattgcagtacgccgaaaatcttgacagtgccgcggatgatgcggagcgaaatggctacgatgacgccgttaagtttttgcggtcagaggcttcggcggtgcgcttgtttgcagcccaactgcgcgagggggccgacaaatga

SEQ ID NO: 110328 - DNA, 2403 bp, Enterobacter aerogenes
atgagtgacattaatgaatatgactataaccacgggatacctccaaaggatggattggtatggtcacctgctgatgaagatgggcctggtagatgggcttgggaaacaaatggtgttgatacccagccttttcccggaacaaatcaacctggtatgattgtttggccaaaacgaccaaatgatatcaagcaatggtatgaccctaaaggctaccagagtggtgttttggggattgggtggtcggattatagtctagatggggtatctaactcgcaaaacaccgtcatgcacggctacccgttccgagcaacgttgaaccgggagattgagttgggggagcctccaggttggacggtttatctatatgaggggacaacgcaaactgatgcgactgctgccgccaggaaagcgcttgatcaggggttagcatcagggcttcctgacgcgactcgtgccggtgtggtgccgtttgcgagacttgatcctgatccttctaatcctgaaaaaataagccgtattatgacagtattaccactcggcgcagtcaccgatgtgccggcttcttccctgccagctatgccgggtacggttaatgtgcagcggagcgtgtcagatattgtccaaaatggtaaacagtatttggtcatgaatggtggtaaacaattttccgttcccgttgtagatgcggcacctgttaaagacaagactccacagacaaaccgatatgttccagacgtctggcaggctgtcatagcaccgggcttgcctgcaatgatcttcgccacagaccgacttcacaatactcgccttcttccccagccatacggaccggatacaagtggcatgcatgtagaaatcgggagttatgggccatctggctatacgtctgctgcaaataatggagatgttataattcgttttccggcatctaccggagccagtcctatttatgtttctaccattaaggtccttgatcaggacgcattgaaccagcgacagatagcagagaatacacttcggaatcgggctgagacggcggcaaaggaagaagtagcaaggcgggaagaagaagctcggagggctgaagaattacggcgagcagaagccactcgcaaggaaaattatgcgaaggcgggcgttttggacacgccgttctacactccggatatggtgaaatctgctggcactctgcttggggctccgggagcaatactacttaatcgggcgccaggaatgatacaattgtccgctattgctgctcgggtatcttcagcaatttctggggcggcgagtgctgtaatgactggtgctgcagacttatccggatggatggcttcggctgtttggcgagcagctaccggcgtggccggggttgctactgtcagcactgccggagtcagcgtagctgcagttgcgatgggtttctggccaggcaaggccggtggtggcgatgatagtaaagtacctggccgtgatatcaatatgcttgcagcacaagctcgtttgtttactgctggcaaagtgagcattgagcccggaatgacaagcgtgaacttaccggtccgaggatttatcactaccgaagcaaacggcaagcaatctttaatgttggtcaaaaccggccaaggtggcgtatctgccacagtaccagttttgagtgccgtgcgtgacaccattagtggtcttgataaaattaaggtgccttctgttgcaggggttcctggacgcacgattttgattaacccggtaccgattggcccgacagcgccatctcatactggtaatagctcaccagtaccagttacaccggtgcatacagggacggacgtgaaacaggcggacagcatcgtcacaaccactttgccggcagcagatattccgccactgcaggattttatctactggcagccggatgcgacaggaactggtgttgagccgatttatgttgtgatgagtggtatttatggtgaaacaaacgctaaaggtaaatccagcggacgtccatttaatactgacagagcaggcggtcccattcagagcttggactggaaaacagcagtgattgaccgagaaggcgtgaataaggtgaaacttcataccggccgatttactgagtctgatgccaataaagtaatgatagagcggctggaaaaaattctctccggcgagttaaatgcaacagacaccgataagcgatactacacacatgaaatcagagagttggagcggtatcggaatcttggtgtagcagatgggacccttcctgctaacgcagcggaagtgtggaataatacccatacggctaccctggaggactataaattaggtaacagtgaaactcttttatacactccagaggcactcaaggcagcggaagaacaagaactaagggagttaaaatga

SEQ ID NO: 110329 - DNA, 285 bp, Enterobacter aerogenes
atgcttagcgcactgatcgccttcaagcgcctgcctgatatagataacacgcctctcacccgcctgggaaagttcgttctttgcattctgggttacccgggaaatgtcattgatgaggttcattgcagtgactacgctattgctaacggtctcggcggtttccgccctgaccgttgctttatcgcgctgctctttgaaggtgatggcgttgtcgcggtagtggttaatcgcccaagccatggaaaccagcaggcagataacgacagcgcagatgatttcggttaa

SEQ ID NO: 110330 - DNA, 183 bp, Enterobacter aerogenes
atgggcgaccatcttgagagttttaccacccgcgtctgggacgttggagtctcccgccattcgggtctagccggatggtcaatgcatgaagagccaaggggctcaggtgacgttgagatgtttgaccctatgctgaccatggtgtcagtaaggacaattggacacctcaataattcgcattaa

SEQ ID NO: 110331 - DNA, 1317 bp, Enterobacter aerogenes
atggctaagtataaggcgtatccggagtataaggattctggggttgagtggttgggggagattccagcccattggttaattaaaaaactaaaatatttatgcaaagttcaaaccggtagtagagatacagtaaacgctgttgaaaatggaaggtatcctttttttgtgcgttcacagacaattgaacgtataaactctgttggtgctgaatgcgaggcagttttaactgcaggtgatggtgttggcgtcggtaaagtttaccattactataatggcaaatttgattttcatcaacgtgtctatatgttgaatgaatttcattctataacaggtaagtttgtttattactatctgtcatctaacttctataaagtggcattagagggtaatgcgaaatccactgttgattctctacgcttaccacaatttttgaatttcgaattttccatccctaaactcgatgaacaaaaaaatttaattttgttcatcgagcacgaaaccgcaaaaatcgataacctgatcgagaagcaacagatactgattgaactgctaaaagaaaaacgtcaggcaatgattagccataccgtcaccaaagggctaaacccagatgcgccgatgaaagattccggtgttgagtggctgggggaagtgccagctcattgggatatttgtttattgaaattcaaatgctccgcaataactgatggtgctcatatatctcctgatactaatgaaggtgagcattactttgtttcaattaaggatattaaaaaagggattattgattttaataactccttacttaccagttcggcgagttataagtatttagtaaaaactggctgcaaaccatttagtggcgacatactctttagtaaagatgggactataggccaaacagcgattgtgccagacgacgttgactttgttgttgcatcatcgttaatcatcattcgggctgataaagaaaaagctttaccagccttcatggacttacttctgcaaagttcgctagtaaaagagcaggtggaaagttttgtaaaaggagcagctttaaggcgtctatctattcagaaccttgaaaaggtattcggagtatttccaacactgagtgaacaactgatgatatcagactatatttacgctcagttgaacagactagatgtcttagaaagtaaagcggtagcccaaatccaattactggaggaacgccgcaccgcccttatctccgctgccgtcaccggaaaaatcgacgtccgcgactgggttgccccggacacgcaagacattgaggagccacaggaggctaccgcatga

SEQ ID NO: 110332 - DNA, 1014 bp, Enterobacter aerogenes
atgtcactcaaattaggtgtcatcggcgcaggcgccatcggtaaagaacatatccgtcgctgcacccaggtcttacagggggcgaccgtggtcgccgtatccgatatcaatgccgataacgcgcgtgtggcggtggcgctgccgggtgtgctggcggaagtctatgccgacggccatgatgtgattaaggccagcgacgtcgatgccgtgctggtcacctcatgggatccaacccatgaagagtataccctggcagcgatcgctgccggtaagccggtgttctgcgagaagccgctggcgatgagcgcggaaggctgccgccgtatcgttgatgccgaaatgaaagccgggcgtcgcctggtgcaggtcggctttatgcgtccttacgatgaaggctatctggcgctgaagaaagtcattgatgacggcgatatcggcgcgccgctgatgctgcgctgcgcccaccgcaaccagtcggtcggcgagaactacaccaccgatatggcgatcaccaacaccctgatccacgaactggacgtactgcgctggctgctgaacgatgattatcgttcggtgcaagtacgcttcccgcgttcgacctcgcatacccatgcgcggctgaaagacccgcagatcgtctcgtttgaaaccaaaaaaggcattctgattgacgtcgaagtcttcgtgaactgccagtacggctacgacatccagtgtgaagtggttggcgaaatgggcattgcgcgcctgccggaaccatcagcggtggagatgcgtaaagccgccagcctgtctaccgccatcctcaccgactggaaagaccgtttcatcaaagcctacgacgtcgaactgcaggcattcatcaatgatgttaaagccggcaagctgcagggcccttccgcctgggacggctatgcggcatcggttgccgccgacgcctgtctgaaggcgcaagagtgtaacgaaccggtagcagtgtcgctgcctgagtgcccggcattctaccaacgctaa

SEQ ID NO: 110333 - DNA, 669 bp, Enterobacter aerogenes
atgcggcacgccaaccgcggagaccgtatccagcagccccataaactcgatactgatggggatgcccatcagggtcgggccgccgggtaccaccgcccccgccggcagcatatttgtcgcatcgagcggcattttagcgtcatcgagcagcgactccagcccacgggcgaaggcgcgggcggtggcggccccccggcagtagccgtagacgaacagcttgattttggcgatgcgccgctgcgagcgctggatatgcagccgcgtcggctgccgcggccactggttgaccacgcaccccagatgcttactgcagaatttgtcaagcgcgcttttacggttgaacttctgggtcaaccgcgagaagggccagacggtggccatctgaggccgaaagatatccagttcgctgtcttcgatcctttcctttctcaccgcataacaaatactgctgtaggttttaagcagcgcctggttgatacggtcctcaccgccgttggcaaacagctcgccgtccagcgaatattcgttctcgccaatctccggaaagcttgccccacagccggggaagtagtaactgaagtagccgtcactctcagcagcttccttctgatctttccagttggctgcatgatagaggcggccgatattggtcagcggcggattacgtga

SEQ ID NO: 110334 - DNA, 489 bp, Enterobacter aerogenes
atgagaccgggcgccgcccggtgctactgttatcggtttgcaacggttttgtgtacggaaaacatgcgctttgtgttaattcagagcacattgcgctcccgatatttcttctgcgttatggctctcatggtgcagggagcgcacagagggctctggccgccaaaatcgccacttcgtggtaccttcgacttatccctgcaggctccgggtcgggccgaggctgcgtccctgcaagtcacggccctcagcccgcatccatgcgggctgccccggccttccgggaacgtctcagcgattttgaggccaccaacaccggcagtttcagccagcatggtgaataaattaaaggcaggccgcacagaccgtaggccggataaggcgaagccgccatccggcgcaaaagcggcgccttatccgcggatattgcccggcggcgctgcgcttgcgcgggcctacagatccagtgcaatgagtggcccagtgccatag

SEQ ID NO: 110335 - DNA, 2568 bp, Enterobacter aerogenes
atgaatgatgatcttgataaggacttctctagccacacgccgatgatgcagcagtatctgaagctgaaagctcagcatccggagatcctgctgttttaccggatgggcgacttttacgagctgttttatgacgacgccaaacgcgcctcgcaactgctcgatatctcgctgaccaaacgcggcgcttccgcgggcgaacccattcccatggccggcatcccccatcacgcggtggaaaactatcttgctaaactggtgaatcagggcgagtcggttgcgatttgcgaacagattggcgatccggccaccaccaaagggccggtagaacgcaaagtggtacgcatcgttacgccgggcaccatcagcgatgaagcgctgctgcaggagcgccaggataacctgctggccgccatctggcaggacagtaaaggcttcggctacgcgacgctggatatcagctccggtcgctttcgcctgagcgaaccggccgaccgcgagaccatggcggcggaattacaacgtaccaatccggcggaactgctgtatgcggaagattttgccgaatcttccctgattgaaggccgccgcggcctgcgccgtcgcccgctatgggagttcgaaatcgacaccgcacgccagcagctcaacctgcagttcggcacccgcgatctggtgggcttcggcgtcgaaaacgccccgcgcgggctgtgcgccgccggctgcctgttacagtacgtcaaagatacccagcgcacctcgctgccgcacattcgttccatcaccatggaacgccagcaggacagcatcattatggatgccgccacccgtcgcaatctggagatcacccagaatctcgccggcggcgttgataacacccttgcctcggtactcgactgcacggtcacgccgatgggcagccgcatgctcaaacgctggctgcatatgccggtacgcgataccgcggtgctggttgaacgccaacaaacgattggcgccttacaagaacgctataccgagctgcagccggtactgcgtcaggtcggcgaccttgagcgtattctggcgcgtctggcgctgcgtaccgcccgcccgcgcgatttagcccgtatgcgccatgccttccagcagttgccgctgctgcgcgagctgctggccgacgttgactgtcagccggtgcaacagctgcgcgagaaaatgggcgagttcgccgagctacgcgaattgctggaacgcgcaatcatcgatgcgccgccggtactggtgcgtgacggcggcgttatcgctccgggttataatgaagagctggatgagtggcgggcgctggccgatggcgcgaccgattatctcgacaaactggaaatccgcgaacgcgagcgcctgggccttgataccctgaaggtcggctacaatgccgttcacggttactacatccagatcagccgcggccagagccagcatgcgccgatccactacgtgcgccgccagacgctgaaaaacgccgagcgctacattattccggaactcaaggaatacgaagataaggtactgacgtctaaaggcaaggcgctggcgctggaaaaacagctctatgacgacctgttcgaaaaactgctgccgcatctggccgacttacaaaccagcgccagcgcgctggccgagctggacgtactggtgaacctcgcggaacgcgcggaaaccctgaactactgctgcccgacctttatcgataaacccggtattcgcattaccgaaggccgtcacccggtggtggagcaggtactgaaagagccatttatcgccaacccgctgcagctggcgccgcagcgccgcatgctgatcatcaccgggcccaacatgggcggtaaaagtacctatatgcgccagaccgcgctgattgcgctgctggcctatatcggcagctacgtaccggcgcagaaggtagaaattggccctatcgaccgcatctttacccgcgtcggcgcggcggatgacctggcgagcggccgttccaccttcatggtggagatgaccgaaaccgccaatattctgcacaacgccaccgaacacagcctggtgctgatggacgagattggtcgcggcacatccacctacgatggtctgtcgctggcgtgggcctgcgcggagaatctggcgaataagatcaaagcgttgaccctgttcgccacccactacttcgagctcacccagttgccggagaaaatggaaggcgtggctaacgtgcacctcgatgccctggagcacggcgataccatcgcctttatgcacagcgtgcaggacggcgcggccagcaagagctatggcctggcggtcgccgcgctggcgggagtgccgaaagaggtgatcaaacgcgcacggcagaaactgcgcgagctggagagcatttcgccaaatgccgccgccacgcaggttgatggtacgcagatgtcgctgctctccgcgccggaagagacctcaccggcgctggaagcgctggagaatcttgacccggattcactgagcccgcgtcaggcgctggagtggatttaccgcctgaaaagcctggtgtag

SEQ ID NO: 110336 - DNA, 1302 bp, Enterobacter aerogenes
gtgaaggtaagtttgacgaaaaaaacgtatgtaatccagagaagagtgtcttccggtgatcgtagtgtgagtgaaggtaagaaacctagttctgtgctcaaagtaaaagttggcaatgtttctgattttccgaatatcgatcaagctcgtgaagtagcccgacagttggttcagaccatgatcgcaacaaagaggaatcccaatagaatcaagcgagaaacagaggcttctgaactcactatcagtgaagtgttcgcccaataccgccaacatctgttaggaagaccaaaaccagccaaacccaacacacttagtgtgctgaacaaagcagaaaatcgcctgaaagagtgggaagctttacgagtaaaggatctcactggtaatgaaattcttcagaagttcgatgagatagcatctagggccagaacagcagcagaacagacgtttcgttggataaatgtggcagtgaaacatgcaatcgaaatcgaagctgggaatgctcaaacccaacaaaggcaacctacgctgtcttacaatccttttaacatcctaaaagtgcaaaaaaagttcaggactcgttctgaactggaagatagctatcgtgcaaaaggtgttagaaatccgctttctccaaaagatacattagggagttttcttaccgcattacacaacaagcgaagcttaaatcgattaggttgtgattatctgttgttgacggttctgttaggtgcgaggaaagaagaaactgcttccctatgctggcgtgaggctctaactgaagaagaagcaagaacgaccagttatgttgatcttgaaaaccgaatgattcgattctacgacaccaaaaaccgtaatgaccatgaactgccaatctgcgatgcgacaaagcgaattctggaagatcgaagagatatcgtcaacgataacgaaaagcgagcagataaacgcaaatgggtttttccagctcgttcatcacgaagcaaggttggacactattcagatagtaaaagtttacgcgaaaacctgtgccaagaggcagggatagtgaagttaggtatgcatgatcttcgaagaacttttggtcgtgtagctgaagaactcacctcttacgcagttgttaaaaaattgcttaaccatcgaaacaccactgaccctacagagcgatacgcaaacccagatcaagatcgtgtttatgaagccctacaacgtatagaattaaatatgttgttgacttcacctgaattatataattcattattagcgtcatccaagtatccaccaattctcaaggggaaagtatga

SEQ ID NO: 110337 - DNA, 249 bp, Enterobacter aerogenes
gtgggtagagcttgtgttgtctatgataatggtgggtgcaattcactaattaaagacggctataatggttatatagttgaacgcaaaaatgtcaaagaactggccgcgagaattaaagcattaataaatgaagatgctgacagacagaaaatgggtatcaatgccagggaaaatattgtcaatcattatacatcagaaattgttattgataaaacattacaagtatatgaagagctgtttcagcgctga

SEQ ID NO: 110338 - DNA, 675 bp, Enterobacter aerogenes
  misc_feature (20)..(29): n is a, c, g, or t
atgttattcttgatgaagcnnnnnnnnnntgatgaagccgcgaataaaggcaccggtaagtggacaagccaaagttctctcgatttaggcgaacctttgtcccttattacggaatcagttttcgctcgttatatctcgtccctaaaagagcagcgtgttgcagcgtctaaagtcttgacgggcccacaggctaaacttgccggtgataaaactgcatttatcgagaaagtccgtagagcattatatttaggtaagattgtttcttacgcccaaggtttttctcagttgcgagctgcctcgaatgagtatcattgggatctcaactacggtgaaattgctaaaattttccgtgcagggtgcatcattcgtgctcagttccttcagaagatcaccgatgcttataatcaggatgataaaatagccaatctgttattagccccgtactttaaacagatcgctgatgattaccagcaggcattacgtgatgtcgtagcttatgcggtgcaaaatgggatccctgttccgacattctcagctgctattgcttattatgacagctatcgctctgctgttttgccagcgaacctaattcaagctcagcgcgattacttcggcgcacatacttataagcgcactgacaaagacggtgtgttccatactgaatggattaactaa

SEQ ID NO: 110339 - DNA, 783 bp, Enterobacter aerogenes
  misc_feature (771)..(780): n is a, c, g, or t
atgtccaagcaacagattggggttgttggtatggcggtgatgggccgaaaccttgcgctcaacatcgaaagtcgtggctataccgtctctgttttcaatcgctcccgtgaaaagactgaagaagttattgctgagaatccaggcaaaaaattagtcccttatttcacagtgaaagagtttgttgaatctctggaaacccctcgacgcatcctgttgatggttaaagccggtgccggcactgatagtgctattgaatctcttaagccatacctggaaaaaggcgacatcattattgatgggggtaatactttcttccaggatactatccgtcgtaatcgtgaactctctgctgaagggttcaattttatcgggacaggggtatccggcggagaagaaggtgcgttgaaaggcccttcaattatgccgggtggtcaaaaagaagcttatgaacttgttgcgccaattcttaaacaaattgctgctgttgcggaagacggtgaaccttgcgtaacttacatcggagctgatggggctggccattatgttaagatggttcataatggtatcgaatacggtgatatgcaacttatcgctgaagcctatgcattgttgaaaggtggtttaaatctttctaacgacgaattggcggaaactttcaccaaatggaatgaaggtgagctaagcagttatcttattgatattacaaaagatatcttcaccaggaaagatgaagaaggtaactatctggtagatgttattcttgatgaagcnnnnnnnnnntga

SEQ ID NO: 110340 - DNA, 555 bp, Enterobacter aerogenes
atgatgctggcgagtaacctgatcgcatggacacgaaattttctaaaaatgggcggaatggaagatgcctttttcttccttctgcttttttgcctttccgcaaaatcaataagttcgcccatttttataccctccggttatatcttcagatcatcaagtgataaaccactatcaagcagctctttgagccatgtgggtcggcggccagtcccggaccaggtattttctgcgttcctggggtcgcggtattttgctggtctatgttctctggggttggctacgccctgcatcttcatggcttccaggctaatgccagcgtccaattttgcagttagccaggccgggcgcttccctataccagtccacgtattaaaagggttatccgggtcacgatacacgggttcgccttttggtcgtttttctgatttcaggggaaccagcatcaccttccttccttcagcggttttcttttcgtttcttcttgacacgatctcattagcccttatcataaacaaaagtcgtcgaaattacaattacgcggtgaaacataaatga

SEQ ID NO: 110341 - DNA, 1566 bp, Enterobacter aerogenes
atgctgtcactgtcagttggcggcgtcctgctgacgtccattctgcttctgagcgctctcactctggtgcagaaaggaaatattgagaacagcctgctggaaggtaacatcgcttatgctcgcaaacttgctgacacaacggaccattatctcagtacggcccaacaggagctggcctacagcgcagatctgattgttgattttcaagatcggaaactactccaggcagaagctgatcgcctgcgtctgcagtcaggtttttttaactccgttctggtcgtcaaagcgaatgcggtagtagctgccacttctccagagagcctgagtctggtcgggatgcagctgcattctcctgccagccagcagtcgatcatctctcataaaccattcatatcactgcctttcacctcagtgacgggtaactacgttgtgtttctttctcagcccattttttcacagaaaggtcagtatcagggctatatcggcgggactatttatcttaaaaagcacagtatcctcagtgagatccttggacagcatttttacggcaatcaggctgaagtcagtattgttgccgctgacggccgcgttattaacagccgggacccgaacgctgtcgggcggctgcttgatgtccaccagacacacctcacattactgtcaaaagagaagagcggccattttgtcgatcatcatgccggcgaggagcatctcatcggttttgctagcctgcagcaagctgactggaaggtttttattgcaggcacgtcggacaacgtatcccgaattcttaagaaaaccataatcagtgccttctggttcactctcgttatcatcatcttggctaactgtgcggttatatatttttctgccagaatctcccgcccgcttgagagactggccagctttacccgtatggccgacagtgaaaaggcgctacggcagctggcgcaacttgaacctggctatcaggaagcagagcttctaagggaggccgtcagccagcacctgttgtctatgaccagacaggtcagccttctgactgatgaggcgatgaccgatcctcttaccggtctgctgaacagaaaaggcttcactacgcggattaaggcgctgagtccgctcggaaatcattgcgttatcgcaatcgatattgaccatttcaaacatatcaatgatcgctatggtcacgacacaggagataccgtactcgtcaacctaggccggatgctgagattgctgacccgccagaatgacatagtgtgccgttttggcggagaggagttcattattttactgcctgattccagcctgaaggaaacattttttgtggcagaacggatccgtagtgtcacagcggaaacctcgtttgcggaaggcatccacttaactctctccgctggcatcgccgcactccctgactgttccgcagatttcagccagttgcttcgtcaggccgatttagccatgtataaagccaaaagctcggggcgaaaccgggtatgtacttacgaatctggtgactatcgacatcccgagaacccatccgaaaatgacacccgctga

SEQ ID NO: 110342 - DNA, 1728 bp, Enterobacter aerogenes
atggttggttttttacaaaaagcaactttctttcaacgagtcagtcagcaaatagatatggaggatactgacaccttaaatttaacttttgagtatgggaagcttaaggataataaaaatactacatatgataccattgttatgcctcccattccgaagctttctgatgagcaaataaatatattatcattatctttgactgcttctggtgatagctatttatcagtacttattgataagctcggaaatgctgattggataagaactggtttagaatatattgaagatgaacattgccctttctgtcaagaaaaaacaataaatgaacgctttaaatctgaagtaaagaaaatatttgatgattcgtatgatcaaactattcatgaaataactaaaatatataccacatataaagaagcaacacacaattatgtcgatgcgataaaagcatctgtgtcatcaaatagttatatcaccgataaaaatgaaatttttaacattgttgatgattgtaatgtcatttttcagtccaatctaaaatctatacaagaaaagttagataagccttctcaatgtatagactttgttattgaaaatccaagtttagatatccttattcaaaagatagaaaattataactctgaaatacatgagattaatttaaaggttaataattatgatgtcagtgtcaatgaacttaaaacaaagttatggcgtgcaataagatttatttgtaatgaccttatagaaacttatggcaaacaacttttagacctaaatgctgaaagggaaagtattctttcaaaaaacaggggggttttagacgatatagagaaattaagctctgaggtcattagtttgagccagaaggtatcaaatatagacgagacaatacgtaaaataaatagaacacttaaatcgcttggtattgttcattttaagctaaagaaaaaagaggaaagtgattttttccagatttgcagagataatggtattgaaaataatatttataaaacacttagtgaaggtgaaaaaaccttaattacattcctttattttcttgagttgtgtgatggtcggttgggttctgagacaaacagctctaaagaaaagttaattgttatagatgatcctatatcaagtctatcgcatgactatatttatgagatatcatctctgatccatcatcgattaattaaaaaaaatgagaacactaaaattgttatcctcacgcacaatttgtttttcttccaagaattaataaaagttgctccgactaagaaagatttatttgataagaaataccaactttaccgtgttattaaagatcagtatagtgatatattaactataaacagagatgagataaagaatgaatatgaagctctgtggatggttttaaaagatgttaaacaaggaaagcttaatcctatagtattgccaaatattatgaggaatattcttgaatattatttctcattctcttgtaaaatggaaaagttgagtgaggaacttgataatcttgttagctctgaaactgacataaattataaaactttttatcgttatataaatagaggttcacattcagattcaattaatataagtaatttaggtcagatttcagctaataaatatttggaaatgttcgagggtatatttaaaaagactaatgatgaaaagcatttcaataaaatgttaggattagaaattgaggaggttgtttag

SEQ ID NO: 110343 - DNA, 948 bp, Enterobacter aerogenes
atgcggcacgccaaccgcggagaccgtatccagcagccccataaactcgatactgatggggatacccagcagggtcgggccgcctggcaccccggtccccgccggcagcatatttgtcgcatcgagcggcattttagcgtcatcgagcagcgactccagcccgcgggcgaaggcgcgggcggtggcggccccccggcagtagccgtagacaaagagcttgattttggcgatgcgccgctgcgagcgctggatatgcagccgcgtgggctgccgcggccactggttcaccacgcagcccagatgatcgtcgcagaaatcatcaagcgcgcttttacggttgaacttctgggtcagccgcgagaagggccagacggtggccatactttgccgatatctggtcagctcactgtcttctatcctttcctttttcaccgcataacaaatgctgctgtaggttttaagcagcgcctggttgatacgatcctcaccgccgttggcaaacaactcgccgtccagcgagtagtgctcttcgccaatctccggaaagcgcgcgccacagccgggaaagtaatagctgaagtagccgtcgttttccgcagtttcatcctgctctttccagtttgccgcatggtagagcctgccgatattggtcaacggcgggttacgcgagccgtatatctcatcagccccctctttagtacagcaggtaccgtcgaagaacaggctgatatgcaggctggccgggcagcccggttccgtttttttacccgattgatgatcggactccccgatatacccttccaggtactgcctggcgtagttgccttcggtctgcgttctgttcgccggcagtcgaccgcgctcgttgtattcggctttctgctgtgtagatttatcggcaggcttttctccctttttatcatccggcccgggaaactttggtggtaa

SEQ ID NO: 110344 - DNA, 318 bp, Enterobacter aerogenes; identical to SEQ ID NO: 93130

SEQ ID NO: 110345 - DNA, 1173 bp, Enterobacter aerogenes
atgaaagggatgcaaaagatcaaaagaggaaaaacctttaacgggctaatttcttatttattaaaacctgcttcgcaccacaagtcagatccgtatgtagtcggtggcaatgtcatagaaagcttcgcagaagcactaagtgcagagttcaacgctacgaagttcctacgatccgatgtcagtaaacctgtatggcacaattctctgcgtctgcctgctggtgagagtctacctatacaacgatggaagctgttagccgatgactatatgaagcgtatgggcttctctgaaacgcatctacgtgcatacgtgcttcatgatgataaagatggccaacatattcacatagtagcaagtcgcatagatgctacatccgggaagctctacttaggtaaaaatgagaaccttatcagcacacgtatcatccaggaacttgaaaaggactaccagctaacaagaactaaaggaactgatgctatgaaaccttcttcctcacctgccaaacgtaaaaaatcacgtaatgaggctatgttagaggagagaactggtgaaccatgtcctaaatccatcatccagagggctatagattcgataacgctaaatcctatagcaattgatgacttcgttgaaaagctgaatagcatggggattacggcgaaaagcaatatcgcctcaactggcaagatgaatggattttcgtttgaatgcaaaggtgttgtgttcaaagcttcccaacttggcaaaaagtatagttggaagaacctggaaccaatgatatcgatgaattccagctcaaacattggagaggaaagacctgtcatccctgtacctgatacttctcgcagcaacgaagctgtcatatctatagtggaagactatccagatggaaagatctacccagagatagggttacccttaccaagacctggcatagcccccacaaaacccacaaacatgacaatgcgttggatcgcaaccattccttatctggtgagtgttgttggcgcacttaaaacgatacgtatcccatttctgaaagcgttcaatggtccaactaagttcttttccatgtccatgattcacctgtccctgagaagcctgaaacagactaaaacggatagtttggaaccaaaaagctcccaccataaagcccataaacccctacttccctga

SEQ ID NO: 110346 - DNA, 387 bp, Enterobacter aerogenes
atgagatatctcatgatgaagcgtgtaatgttagcaatccttcttccgtttcttgttggatgtttatttggtgctaaagcattatcagagtattgggttgtgtggttttttgtttgtgcaatgttgatgatcacagcctggggcgcgtggttaaaaaataaaaacagaggttccagctttagctacctgaatgataatgaagatggtgtatttatctacaaattccataatcaggagatgcgtttagataaagccaaaaaacagctttatttaaaagatgggttaaacgaaaactctacgctttctccgatgttgaaagctgggaatataacattagcgcaggtggtcaaatcctcacttcaggtcttaaccctacaaccaacttga

SEQ ID NO: 110347 - DNA, 948 bp, Enterobacter aerogenes
atgcggcacgccaaccgcggagaccgaatccagcagccccataaactcgatactgatggggatgcccagcagcgtcgggccgcctggtaccacggtgcccgccggcagcatatttgtcgcatcaagcggcattttagcgtcatcgagcagcgactccagcccgcgggcgaaggcgcgggcggcggcgcccccccggcagtagccgtagacgaacagcttgattttggcgatgcgccgctgcgagcgctggatatgcaaccgcgttggctgccgcggccactggttgaccacgcaacccagatggccgtcgcagaactcatcgagcgcgcttttacggttgaacttctgggtcagccgcgagaagggccagacggtggccatactgttccggtatctggtcagttcgctgtcttctatcctttcctttttcaccgcatagcaaatgctgctgtaggttttaagcagcgcctgattgatacggtcctcaccgccgttagcaaacagctcgccgtccagcgagtagtgctcttcgccaatctgcggaaagcgagccccacagccgggaaagtagtaacaaaagtagccgtcgttttccgcagcttcatcctgaattttccagtttgctgcatggtagaggcggccgatattggtcagcggcgggtttcgcgagccatacacttcatcaccatcttcttcgttacagcaggtaccgtcaaagaacaggctgatatgcaggctggccgggcagcccggttccgtttttttgtccggttgatgatcggactccccgatatacccctccaggtactgcctggcgtagttgccttcggtctgcgttctgctcgccggcaggcgcccgcgctcgttgtattcggctttctgctgtgtagagttatcggcaggcttttctccctttttatcatccggcccgggaaacttcggcggtaa

SEQ ID NO: 110348 - DNA, 219 bp, Enterobacter aerogenes
gtgccgctgaaggccaaagcgctggaggtgatgctggcggaccagctgagctggatcaccgcgtggcgcaccgagcgctttgccagcccgcaatacgccgataagtattatcagcaggcgctgaatgagcaggccagcgcgctgccgtcgtcggcgtggggttatgactttgcccataccggtatcgtggcgctgctggatattattcccactacgtaa

SEQ ID NO: 110349 - DNA, 1056 bp, Enterobacter aerogenes
gtggctaacggaaccgtagtaaccgcggttagcccaggtgttggcaaggctatccggcagtttgaatttagcggcgatttcatcgcgggtcagcccttcgttggccatgcgcagggtctgatcgttaatgtaacgatacaggtcacgctggctcttcagcaggttaaccacgttttcgttgccccaggtcggccagtggtgctgagccataataatttcggccttgtcgccccagcgcacaattgcttcgttgatgtacttcgaccacggcagcggttcgcggattttcgcgccgcgcagcgaataggtgttgtgcagggtgtgtgtcacgtcttccgcggattcaatcagttttttctcttcgatgaaccagagcatttccgacggcgcttccgaacccggcgccagcatgaagtcataggtcagaccgtcaatgacttctttctgcccgtctttttcaatgatattggtcggcgcaatcagggtcacggtacccgccgaggtggtggtgccaaggccggcgccgacctgtccggtggccgatggtttcagcaggttaccgtacatgtagctggcgcggcggctcatgacgttaccggccatgatgttttctgcgaccgccgcttccataaagccggacggtgcgtaaattttcactttgccggattttacatccgcttcatcaactacgcctcgcacgccgccgtagtggtcaacgtggctgtgggtatagataacggcgacgaccggtttcttaccgcggttttggtaatacagatccatgcccactttggcggtttctgccgacaccagcggatccacgacggtaatgccttctttaccttcgatgatggtcatattggagagatcaagattgcggatctggtagacgccatcggtgacctcaaacaggccgctaatattgatcaattgagactgacgccacaggctcgggttgacggtatctggcgctttttcaccttcttttatgaaggagtactgctgcggatcccataccacgttaccctgttcgcctttaatcacttcggtcggtag

SEQ ID NO: 110350 - DNA, 642 bp, Enterobacter aerogenes
atggatagatcattattatttttttattgcctgtgtgggtttttcctgacttactttttatttaaatttgcaaaagaaaaatataaattacaaagcttaacatttatcttttcgttaataataagtttagttatcgcatcttctttttcggttttatcaacaggagaatggtttttagtagtaatagcatcaacggttacccttttatttttattaggattcttcacggctctactaaaacaatttgtaatgtaccgatacattcttcgttgtgttgataatttgaaacgtctatcccctgccgaaatggttgaatctttaattaacaaccataataaaaaacagtggtacgttttatattttcctgtagaaggcgtcattgagattggcgttaatttattcgctgaaaaccctattgttggcagaagattatacattagaactatgacaaaccgccaaatgtacattattcctgagaacatctccagcactatagatttacaatctaatatagcttgtacgttacatgaattttacaccctcgccccgcaaactaagagtttaattgaagattatttaaccagaattaaaaatggtcatttgcagccatggcggctaaatgcagaacccgatgaaaaataa

SEQ ID NO: 110351 - DNA, 282 bp, Enterobacter aerogenes
gtggaatgtataattgatgagaaatttgatagttcatttgatcttgagaaagactcagagctggctcacttatttttggactgcatgagctgtaagtatatttctctgcattttagagagaaatggtataagaaatttctaagtaagttttctcttcaacgccagcaggcagagattgaaagtgatttatcttaccttttaactaagtattggttcgtcaaatgggagcagcataacatgctcaatttacttgaaagaaaagagttgagaactgcttattga

SEQ ID NO: 110352 - DNA, 1686 bp, Enterobacter aerogenes
atgagcattattcacgtaaatcaaattggaagcaaaattaatgcgttattcgctgataaaattgatagcagtgatctcaatcctatagataaagaaatacaaactaaaatattaacccgttgtctttctgcctacgccgtttattgcattggagatacatcgatagatgaagctgcgtcagcagttgttgatggtgccgatgataatggtattgatgcaattcattattctccttcaagtaaaagaatgatcattgttcaatctaaatggaaaaaagatggaactggagagcctgataacggtgatttaagaaagtttaaagatggtgtattggatctcattaatcttgaacttgataaatttaacaataaagttaatcttaaaaagcagatgattgaaactgctttaggtgaatttgatacgaagttcgatcttattttaattcatactggttcaaatactctaagtaaacataaccagcaagtaatggactcaatacttaatgagttaaacgatgctggtgatggtactagtgaggatgttgttagtttccaccatctaaatcaggcgataatacatagtgggcttgcatctggtatggatggtgaaccaatcgatcttgagattggtctctcgcaatggggaaaaattgaagaaccacatcaaggtttcttcgggattgtagctggcgaagaagttgcaaattggtgggtgaaaaaagggaaaagactatttgccaaaaatattagacaaatgttaggtgccactgaagtaaatgatgaagttaagagaacaattgaagaacaacctgagaatttttggtattacaataacggtgtaacaattgttgccgaatccataaagaaatcaatggttggtggaaatagtagagatattggttcgtttaaagcgaataatattagtattgttaatggtgcacaaactgtaagcgtaattggtaaatatgcgcaggatggcggggcgaaccttaataaattacgtttacctatccggttaatttcactagaaggagcgcctgaggactttggtgctagtgtgacaaaaaccaacaaccgtcaaaataggatcgagagtagagactttgtctccttagatgacgaacaaatacggttgaaaaaagaactgtcactggaaggtattgagtataatatagtcagaagtgagaacgttaaaacttctaccgctataattgatttatctgaggcgaccattgcattggcttgcgcatctacgcaagttggtctggcagttcaggcaaaaagagaaattggtcgtttttatgacaaccttaagaaagcgccatataaaaccattttcaacccacaaactaatggtatttacttgcggaatactgttttcgccttgcgaaaaatagatgaaattattggttcaatgattgcaaatctacctaaaaaatcgggtaaggaatatggagttcttgttcatggcaatagaatgttagcatttctagtttttagaacactggcaatccaaaaaattgcaaataactttgattttgatattaatacaattgactggcagaaaagcacagtatgtatgcttgagaagttaatgttagaaattgaagagaactacaaagataaattccttgctactttatttaaaaacgcaagtatctgtaaggctatatctgagaaaatataa

SEQ ID NO: 110353 - DNA, 432 bp, Enterobacter aerogenes
atgaaaactcatgagttaatctcgttatttgattatatatctaagataatgtctcactatccaaacaatagtgtagagtatgcactggatgatatattaaatttgctagaaacacgcaacagcgaaacatcgctcaccaataaaaaagaaccaaaaacgcaaacacaaataaatagtagattatctaaatctataaaagacagcatttcactacaatatgtctttggaggaaactcgaaaccagacgataaaactagtgaatcattaagtaatttatctctcgccgagttaaaagaaatagcaactaaaatgggcattaggacatcatcaaggcaaaataaaggtgtgttagttatgaacatatccaaaacaatggaacggcgaaagatagattcaacaattaaagataaagataaagataaagataattaa

SEQ ID NO: 110354 - DNA, 951 bp, Enterobacter aerogenes
atggcaaaaataataagcatgattaattggaaaggtggtgtcggaaaatccacattatctttgcatcttggcgttggactgatgcttggctctgaaaaaaggccaaaagtattacttattgatttagaccctcaatcaaatttatcatatttagctctaggagtagaaaaatatgtacgacacgtatacactcaaaaaaaaccaacattaaaaaacatatttgatgattattttgaaggtaaaacattcaatactcgtgatgctataatagaaacccccataaccgccagtcctggaaaagtttggctcaacgttgatctattaccctctcatcatgaactagttcttgttgacatgatgttagcaagggaaaagaaaagtgcatcatctcatcaaaaggaaaccgagcttgaacttgataaaatggcaattattaaaaaggccatagatcaagttgcagctgactatgattatattattcttgactgcccaccaaatattaatctcgtcacacaaaatgccttctttgcaagcgagttatatctaatacctgcaattccagattttctttccactgtaggtatttctctaataaaatctgaaatggacaagctaaataataattttagaggaatgattcaatattcaaattcaaacattgaatttaatgatactgaaatgcttggaatcatatttaatatggtagatgagtatgccgagaagccaaaagcaactcacgaagaaacaatagaagatgtaaaaaaacagcatcccaacatggtatttgagaattatgttacagatggggatggaatatctgtcgcatctgaaaataacctgactgtctttagccacagctctttgcctcgctctaaaccgaatgcagaaaaacaaagccaatatttgactaaagtaattaaagagctttacgaaaagctggagattgtataa

SEQ ID NO: 110355 - DNA, 237 bp, Enterobacter aerogenes
atgatatatatacttgtctttattaagaaagagttttttagactattaataactatcgcatatataggggggatcatattgggggtagttaactatgatgaaaatatacgctatatgaatgtgattatcccatttgttgtctctgctctgatagcattgtttcctttttttctaatgtattttttcattcctctttatcagaaatttgaggatattgtatttctcaaaataatttga

SEQ ID NO: 110356 - DNA, 510 bp, Enterobacter aerogenes
gtgagctcaatcgttaaacgttgcagtgtggccgcagtgctggcactggcggcattgttgcctgactttcgtctgctgcatacctcgcctgatggtctggcattgattgccgaccttgaagggtgccgcctggcaccttaccagtgcagcgcgggcgtgtggacgtcaggcatcggccacactgccggggtggtaccaaaacgcgatatcaccgagcgcgaagcggcggcaaatctggtcgccgacgtgctgaataccgagcgccgtctcgcggtctgcgtgccggtcaccatgccgcagcctgtttacgacgcgctggtcagtttctcttttaacgtcggcaccggcgcggcttgtcgctcgacgctggtctcttacatcaagcgtcatcagtggtggcaggcatgcgaccaacttagccgctgggtgtacgtcaacggggagcgtagcaccggacttgaaaatcgacgtcagcgagagcgtgcttattgcctgaagggggtgaaatga

SEQ ID NO: 110357 - DNA, 222 bp, Enterobacter aerogenes
atgggactgagtatggaaaaaatcactacgtttatcgcctactggctggccgtggcgctggcgtatttcggggcaatgtcgccagaaaagctggcgttatatgtgggtagtctgtgcgccatttttacggcagcggtgaatttctggtaccggcgcaaaacctttcgctatctgaccgaaatgggaatcgacaaaggggtgacccgtgagctcaatcgttaa

SEQ ID NO: 110358 - DNA, 204 bp, Enterobacter aerogenes
atgaaagcctatgcgatgcagggcgatactctcgacgcgctttgcgcccggtattacgggcgcactgagggcgttgtcgagacggtactgcaggctaatccgggtctgtctgaactgggcgtcattctgccgcatggcacgccgattgacctgcccgatgttgagacatcgcccacagcggagaccctgaacctatgggactga

SEQ ID NO: 110359 - DNA, 195 bp, Enterobacter aerogenes
atgcaaaattccatttctagtgaggataagtgggttaagcgctggtcgaagcacattacctgtctggcgcagaacaatgaccttagttcacgagaggtcgacagctataccgctaagctggtcgaacaggcaagcagcgaagagctaggcaaggtcattaaagacctactgaatcacatcagaatgcaaaaataa

SEQ ID NO: 110360 - DNA, 360 bp, Enterobacter aerogenes
atgataacccggccagcactgaaagcggtttcagtgctggccgggttgaacaacgagtcctgcgaggcgttagcttgttaccagattaacaccgagtgtcagcaaattcgtcaccgcacctgcaatgactcctggggttccatccttcaccgcactgataatcttatcgcccatcgtttcattaccgccaagcgcctcaggctttttgttgagcacggcgagagctttctcggtcagacgcacatccataaaatacgtttgatggtcggtttcatactggatgtatccattttcaccaagaaaagtgaatgtaccttcaaccacactacgcaattgatttattgctttcatttccggtga

SEQ ID NO: 110361 - DNA, 951 bp, Enterobacter aerogenes
atgaaaaaacggaaaaagcttaagatctccactaaaaataaatcttatgacgtaaaggattcgccattttataagctcaaaaccaaaaaaaaacttgccggacttctttgcgttagtgtgaatgatttatctattttgagaaaagacgaaggtaattactctgtttttgaacagctatctaaaaaaggcaagccacgaaaaatacaaaagcctttagagaaattagatgtagtgcatacgcgaattgcgagtttattatcgcgcattgcgttaccagaatatctgcattcaggtagaaaaaagtgttctaatgtaacgaatgctaaagctcatcttaaccatgaaaagatgatgacaactgatattaaggcctttttcccttcaacaacaagggtaatgatattttcatttttcttttcagtgatgaaaacgtcatctgacgttgctgatattttgtcgcacatatgcacctgtcatgaccggttgccaacaggaagtcggattagtatgcctttggcctactttgcaaactctagaatgtttagtgaaatgtatgagctttgccaaaaattaacagttaacatgactgtttatgttgatgatctgactttttctggcgctaacgtaaatcgattattctgtgctgtgattcgtaaggttatctgcaagcatgggcatactatgcatcctgataaaacaagattatatgctaaagaccaacccaagttggtaactggagttattgtattaggtgactgtttgaaagttagaaatgagcaacatcgcctaatggctagagatattgagtattggaaaataattaaagatgtggaaagtgctaaagaaacatcgattgcaaaaacactctttggtcgtttgcattcaatgggagttattgaacaacggtataaatcgaaagtcctcactttaaagtttaataccgcaaattaa

SEQ ID NO: 110362 - DNA, 309 bp, Enterobacter aerogenes
atgttacataaagcccttcgtttaataaggcaataccataaagaatcaatagttgaattatcaacatctttgggtattccaaaagaaaaaatagtagaacttgaaagcggagtttggtcgccgtcgattgaagttttacagcgttatgcatctcattttgacataccagtatcttccttagtgtttttttcagaatcattaggtactcaagggcgtttgtctaagagtttacgcttaaatttagcaggtaaagttctggatatcgtagagtgggtaagtaataaaaatgaaaaaacggaaaaagcttaa

SEQ ID NO: 110363 - DNA, 156 bp, Enterobacter aerogenes
atgaagaatgataaagtaaccaacgaacagcaggcgcagagcaagtcaaaccggaaaaagtgggctgcttatgcgtgggaagcgatcaagtggggtattcgactgtttgatttaatcacacgattagtaaactattttgaagggggagatgagtaa

SEQ ID NO: 110364 - DNA, 441 bp, Enterobacter aerogenes
gtggatagagagttgagagagctcgtcatgattgagcgtgtcgaaatgattgcgcgtctgacggctgaaggtacttgtcaggagcgagaccgagaaattgccttaaatttgattgcggaaatagcaaaaggcaacctaatgaaaaacaataatttttccgttgttttttccgctctgcctgtcgatgagacttttgcaaaggagggcaaggtgaaggtaaatatcacgttagataaagaccaaaaaataggccagccggtaattgatgcttttcaatgcgaattgaccaagcgaatacagtctgttttcccgtcaacgtgcgtaacggttaaaaagggatctatgaccggtgtcgagctgatggggttcgataaagattctgaccgagaggcgcttgatagtatccttcaggaagtgtgggaggatgagagctggcgttaa

SEQ ID NO: 110365 - DNA, 279 bp, Enterobacter aerogenes
atgagcattcgaatcgaaataggtgataaatggattattaccagcgaccagtatcaattcatcctgaatgaaaagaaagtcgttaagtcaggtaaaaaaactggtgaggaatggctcgacacaatcggctattacccgaagattaaccagcttatttccggtctggcacatcactacatccataactcggagcttcaaactctgaatgacattgcctcagaaattgagaggttggggatgttatgtgagtcagcctttcatactgggattgcgaaataa

SEQ ID NO: 110366 - DNA, 1038 bp, Enterobacter aerogenes
atgactgtccgtaaaaatccggctggcggctggatttgtgagatctacccaaatggtgcaaaaggcaaacgtatcagaaagaaattcgcaactaaaggcgaggctctggcgtttgaacagtacaccgttcaaaacccatggcaggaagaaagggaagacaggcgcacgttaaaagaactggttgattcatggtatagcgctcatggtattacgctgaaagacggcttgaaacgccagttagccatgcaccatgcttttgagtgtatgggagaaccactcgcacgcgattttgatgcgcagatgttttcccgctaccgagaaaaacggttaaagggtgagtatgcccgttcaaacagagtgaaagaggtatcgcctcgcacgcttaaccttgagctggcctactttcgagcggtattcaatgagctaaatcgcctcggagagtggaagtatgaaaatccgctgaaaaatatgcgcccattccgcactgaagaaatggaaatggcctggctcacaaaggaggaaatcgcagcgcttcttgacgagtgcaaacgacacgaacatcctgatttagtatcaatcgtgaaaatatgtcttgcgactggtgctcgttggtctgaggccgaaggactcaagaaaacacagctatcaaaatataaaattacttataactacactaaaggtaaaaggaatcgcacagtaccaatcagcaaagaactttatgaagaattacctgctaaaaacaaggagcatggtagcttattccagaattgctatggtgcttttcgttcggcactacaacgtactaacattgaattgcctgccggacaacttacgcatgtattgcgccacaccttcgccagccactttatgatgaatggtggcaatattttggttttgcagcgggtactcggacatacagatatcaaaatgactatgcgctatgcgcactttgcgcctgaacaccttgaagatgctgtaaaactgaaccctctacgttatcaaaacaataattcaacactggaaaaagatggagcctaa

SEQ ID NO: 110367 - DNA, 1338 bp, Enterobacter aerogenes
atggagcctaacgtggcaacgaaaaaatacgaactaacaaaggagtattccttccatggcgaattttggcagtctcctgataataatcaaggcagattttcggcacaaatagaatactcgccatatcaaggattgattttagattattgtatttctgatagtgatagtcccgatacatgtgatagattatatggggtgttaaacacaggtgagttatgtactttaatcggtccattcaatttctctcatggtaattttcattttggtaaaggaacgaccctgacggggcgacatggatttcctataatgcttttcagtggattttatgatgcaaatacaaaaataaaacattgtgatttatctctacatggtctacaggaattcattcaccctcaaggttttatcaatcaattaaaattttcagaacaaccaatttttactgctgaaggaagtgactggaaacttcgacttgttaacaatgcaacatttaacgcaattggtgacaatctatcaaatataataaactgtcaaaacaagcatgctctagagaaattttacgtaagtttacaagaaattaaaaaatcatatcccgatgcttttttctctatcagaaaaactctcactttttactatcgattagaatccaaaaatcaaacaaaaataaatgacttcatatcaatgagttggaatgtatcagggttactttcaattcttattgataagccagtgctaccagaagaactatacttcaaatttgaaggtagtgattttagaaccccctgtcttttatcaacccgcttcgagcaaagaacgatcgatcttgctcttaagcaaataaatcatcgcttcctgccaattaactggaaaaacattaatattaaagaggtattctgtaaatggtttgagctcgcagatagatatgtatcattaacggcaacctatcaatatgaaacaggtttcagaacactacatgaagctcatgctgatattatactatttgcaacccaactagaagcaataaatttaactatgggaggttcaaaaaatgaaaaatatataaaacccatcaatgaatatgcctctccattgctcaagcaaaaacttgaacagttttttataaaaatcaacagcgaatcattaggcgcaaatattgccacgcttagaaatgaacttgcacacgttgatcgcaataaaaaactaatgaaagcattaactattggtgattatattaaaatcggtatgtatctcaaaattatcgtgacctctcatttactttcaaatttaggtattgataaagataaaattgaaaaatatcaaaatcaggtagcaccagaataa

SEQ ID NO: 110368 - DNA, 4518 bp, Enterobacter aerogenes
atgaagggaatcgagctttcgcttttgcaacgcgtgctggatgcgctggaagaacaagaaaatgcgctcctggtatggggcgacacgggcggtttttttaatctggatgagctgttaagcactatcggacgggtgttacctgaagaagatgctgaaaaggttctggatgagatgctagacgccgccatgttgattcaggtgccgcacatcagtggcacgcctgtctggcgaacccgaatgggggaaacggtccatctcatgcgcaacctacgccagtggatgcatgagcaaaagctggaacagagcaaaacgctggtatcggactatcgctttattcgtcgaccgcgcagctatcccgatcgcgtttacgaaccggcaacgctgattaccggctggaaaaaacagctgaacttaagcgatcgctcctgtgacattatgcgccaggccctggcgtcagataagcccttcttgctggcgggttttcaggttcgcgcgaccgaacgcattatgcagtgctggctggaacatcaggtgaaaagcaatacggccagcgggacaatcgtctgtgctggcaccggtagcggtaaaacgttgtcgttttacctgcctgcgctaacccgccttgccgaagagatttgtaacaaccctgagcgcaaggtgcgcattctcgccatctacccgcgaaaagaactgctcaaggatcagtttgccgaaacgttttcacagtgccgcaagcttgacgaatttatgctgatggccgccggacgcaagattcgtatcggtgccttttttggcgatacaccggtgaaggcggaatggtcgaagaaagacgttaaggggaagattggtctaccgttcggcctaatgaaatgccagcagccccacccgcagtatcctaagcagacttgcggaggggcgctcatttggcgtcgtgaagacatctttgacgagcgtgaggtacttacctgtacgcaatgccagcatcagctggatcagagtgaaatcatgatcacccgtaatgcgcagcaacatcgcggcgacgccccggacattctgtttactacgacggaaatgctgaacctccagatgaactccacttggagcaaccatctgtttggtgtcggtgaaggctatgggccaacgttggttctgctcgacgaggtccatacatacagcggaaccaccggcgcacaaaccgcgctgctgctgcggcgttggatgcagcgtaccgattgtttgccgcattttgttggactatcggcaacgcttgctgacgcgcagcacttctttgccaggctggtgggtgctcctgaagaggaggtagccctgatccagccctacgcggaagagatgatcgaagagggggctgaatacctgctggcactgcgaggcgatcctgtctctgaaacggcattactctccaccaccatccaagctagtatgctaatggcgcgcatgctggatagcaaagcgaacaagtcacaaggtacctgggggaagaaaacgttcatcttcactgataccctcgacggtaacaaccgattgtaccacgacctcagcgatgccgaaggctgggagacggggccaggacagtcgcgcattgatcattcaccgttggccgtgttacgtagtccttttgataaaatggcatctgagcggtcgaaaactgaactggggcagaactggaaggcggctatggatattggccacgacctcgcggaaaacaaagtcatttcccgaacgtcgagtcaggatgccggtgttgatgcatcagcagatgtcgtggtcgccacttcttctctcgaggtgggatataacgatccgttggttggtgccgttcttcagcataaggcgccgaacgatgtcgcctcctatttacagcgtaaaggacgtgccggtcgtccaagaggcatgcgcccctggatgctggtggtgctctccgagtttggccgcgatcgtgtcgagttccagcgttatgaagggctgatgagcccggagatcaaacgtcagggcctgccgttgggtaaccagcacgtgcagaaaatgcaggccgcaatggcggccctcgactggatcagcaaagttggtaaattcaaagatctgtggggcatgctgaaaaaagctgagcataatcagctgaaatatgatcgaatgtatgctccgcttatccgactgattgaagaggtactgagcggtggaagacggctaaacgagttgacgcgctaccttcaggacgctctgcaattatctgacggtgcggtgcaaaatatcctttggagctcgccgcgctcaattatgtttgagtttctcccctccctactgcgtaacctcagaacgcgctggtcggttaagggcgtggagtgggccggtctgcgaccgagtcaaccgaatgacgagagcgaacaacatcggagcaattcacccgctccggaatatatcccgcaaaatctgttcagcgagttgaatttgccggaactggacattcgcctgaagcgtggacgtgatgacgaagaacagtgggaaaccctctcgttctggcaggggatgcgtgagtttgcgccagggcgtctgtctaaacgctacgccattaaatcgaacaaaagtacggattggctggttccacaaacctacgagccggtggcaggagaagggcggcaatatgttgatttccagataagcgatgcgttcggcgatagctggcaaaaagagtgtgaagtcgagtatcagggaaaaacgatcaaggttgttaaaccgtcaaaggtcatgaccacccgggctgatattcgtcgtataaatgataaaagtaatgcgcaactgcagtgggtactccacgtcattaaccctgcggttgcgacgcccgacgaggtgccaaagggaccctggaagcatactctgcacgatatcacgttttacaaccaccagcatatgacgccgctggaactggttcgcttttctaccggatcgcaggcgtcgctccggttcagaaataaggaacgggctcacgttgatttcacttggatgaatggagaggaacaggttggcgtaggaagtcgtcaatgggtggatgcaatgcgtttgcgttttaacctctcgtgtgatgacgtgatgggcctgctgctgcaggcagaaatccagcgaggcatgcgccccgtttattttcaacatcttgtaaggcagtcatctgaatttgaatttgatagctttaacgcggactgggctattgaatgttttatggctcagcttgcggagacattggcaagcggcgctcacacctcggttgagtcggcgctgcgagaaatggcttccgaaaaagggatgaaaaggctggctgatatcccggccagcctgttccagccggataccgaaaatgaggctggcactgaccaagcgctacagatcggcctccataaactccttgaaagaccggatatacagcaactgctgttgaactgcgcacaggcactctggaaacccttggctgagatcggcggctttgtcgaatgggcgcggcaggtattagcggacaccttggctgcgggtgtgcagcaaacgctgagtacgctacttccggatgttgatgagcgggcggtcgtgacagactcctgctggatgagcgatctccgcacgggagcagaatggctggaaatctggctctgcgagatggagtcaggcggaagcgggattttgatccgtttacagaagaagtgggctgaagaccctgtatccttcctcaatgtgcttgtgcgaaatctttcagccagcgactacgagcagatcgattacgatctgcgcaccgtgttgcagatgctgcaaacagattacgcgcttcgtatggcgatctctgccgttcgtgaagccagtaacatggacgcccggcgggaggcgaacaagaatcttcatttgctgctttcacagcgcggtttgcgcctttcccacagctttacaacggtgctgtactcgcggatcctgcgggcgggtagcggcgatgacacagacgcccagctttatcagctactgtcggactggtcgtctcttgaaacaagaatgggtattgagttcagtatgaataccatggcgcacgcactggcggtgaatgcgcttggcgtcaaaaccgatgcatccttagtgtttaacgcgcagtgccggaaccaaaacctgctctggccgcgtggttacacggtccggcaggcagaactcggtttttacaatatattttgctcgcgtaaaattacgactgagcgcctgcttgccggcgcgctatttagtgagcagatcgaaaagatctcccttgatgaggctgactggcttgggcaactgcatatggcgctgtgtaaagccggtcgagctgagctacaactcacgcgcgcgcagcgaaatcaattacatcaggtcattaacaccgtgcaaattgaacccgtcgatcatttaggactgctgctatatccacgtcttggtgaagttcgtcgcgaacaggatgtactcattttacgtattgagctggcggaggcgatgcaatga

SEQ ID NO: 110369 - DNA, 735 bp, Enterobacter aerogenes
atgacaacgcttaagacccaatttacgcaactgcgggagcagtatcagataaaacagcaggttcagtcgctggaagaggtctacgatcggtaccgcaccatacgtgacggcttgctggatgttgccgaaccgctgcaaaaagcccaaaagaaatttgaggtgatcggcatgctaccggaaccacattccactatcgatttttcgcaagaggcggcgcttttcggcggtgccaaaacgcagttggatgcgttgacggcacgcttcaaagaaagtggcgataaaaccgagcagagcgggttttgggaaacggtgcgggttctgaagagtgtacaggaaagtgttgatgataaggtggatgcaacctggaaagcgtttgttgccgatcttgaagcacgcgcaatgctggattccgtctttctggaacaacagcgcacgctggggaacgtgttggtgtatgacgattatcgcaaagcgcgcgataactttaatcggcagaagttaagcggaccagacagcctgtcggtggtaaaaaacctgcagaagtatagtgatgagatggtcgcgcttaaacgttcaatggacccggatgcaccagacgatgttctgcgcttttttgaggcgttggacagacataatcatgcctcgcttacgctgttgacgccgggcgtgattgcctggctggaagaaaaaggtatgctgccagcgtttaacgtgacacgtaagagaatgatttaa

SEQ ID NO: 110370 - DNA, 3153 bp, Enterobacter aerogenes
atgagaatgatcgattactggccttccctgcaaaatatcaatgaatgtattcgcaccgaggcggaagagctggcggagtacaccttactggcagtgcatcaaccggtgaatttgctgcgtctcgataaagacggcaacaacctcggacatgcgaaagaagaagatttgctcaagcactttctggaaacgccgcgcccaattccgattgtgggcaaagccggagtgggtaaatcacacatcatccgctggctggatgcgaaacttcgactgcgtaaggagtacaaagacaagaagtggcatattgtccgtattccaaaaagtgccagcttgcgtgaggttctcacctctatgctggcgggcctggagggcgagatctttgacgaagcgcgggaagacatcaataaggtgtcggaaaaacgtacgcctcgcgagatcgctgaatggctgctgatgctgatggggcaagagctgcgtaacctgcatgaacgtaacaagcaggatatggaagcgctgaaaaaacagatggcgggtagtacgcctgagcagttaatagctatcaaaccacaggcgacccggctacagaaaatccacgtccacgctgaagataatgcattgccaacgctgattaacgatgcttacttcaagcagtttttgctgaaagaagagcattgtctctatcgccttgccaaccgtctgaccaacggtgcaaccagcagcgatcttgacgagggggaacagcaactccaggccaaagatcttgatttcagctttaatattaacgatctcagtctgcctgcgcgtcagtatattcagaaaagccgcctgaatacgcatgaggacgggcgcaaagatgcttcggagattctcaacctggtgctggttaaagcgacgcaggcgctgtttaaccagctcttcaacttccgtggccgcagtttctctgacctgtttacccagatccgtcaggcgctacatgaaaagcagatgacgctgatggtgctggtagaggatatgtcgctcatcaccgcgatcgaggatgtactgatcgacagccttgaaagggaagggatccgcgacgggaaagaagtgctatgcccggtgtgttcagctattgctgttactgacggttatcaggggtatgcccgccgtcgtcaggggatgctggatcgcgcgaagggtgaatgggtgatcgaagaggtagggagcgggcgcgaagagacgcgactgcgtattgtcgatttttgtggtcgatacatcaacgcggcccgctttgggggggaagccttacgccagcgttgggagcaatctactgataaatcacactggccacctgactgggaagccagcgcaaacggcgacgaaatggctgaagtgtttggtcgcagcgagcaaggcttttcgctgtttcccttcaacacaaatgctatccatgcgttggcagagacattctgccgtgacgatcgcaacgaattaaaattcaacccacgtcagatcatcaaccagattctgttgcgtgtactgcagcactgtcgccgtgacgccgatgagggacgttttccgccgccgcatcttggcgatgttgcggcgccagcagggcttcgaagctggctgttccgtcagggcttcgccgacaccgagcgtgctgaatccgtggtcgcgctgtggggttatcccgccgattccgatggcactctggcaagcactctgccgcctgatgttgcccgcagtttcggtctggacgatctggcgcaggtgttggaaaacacaaaaagtgctccggtccatatgcagccggtggtgcctacgcgggtgaccaaagttgagccgcaggttaaaaaaactgttaagccagaacccacaacagttaaaccgaaagtgatagaagataaagatactttggctatccgagcgctggatgcggcggtgggtgactggatgctgaaaggtgcgacgcttgagatcgatcccgcgcgttatatcaaaagctccctggccttcttctttgataagcgcgtcgtggcggaatgggctggcagtacctatcggccaacactttggttaggtaaatccaactttgtcgccgttgagttacctaacgcacagggcaaccgtggcgtgcatgtggtgaaatttattcctcaggccgaatacgataagcgctcggtgcaactaacggatgccgcgatggcgttagcacggtttggctactacagagaaaactccttatctaaaaccgaggactggagctacgcagatggcaaaacggattacctgattattcagagcttctgcgatcgctgggttaactatgcgctgacggaactcgttaagcataagcgcaacgatctgccgctgctgctcagcgagcagattgcgctggccgacgcgctgggcgccattaaaacggcggatggttcgaaagaggtgcttgctcgactgctgcaaaacagcaaaacgctttctgtgcagtttcgttccgggatcacgaaggcaatcactgaactgcgggcagaggcattagcgaagtgggatgatgcccaagacgcatggctcagccttgtggcgctaaacgatcatgcgctggaaggcgatctcctgctaagtgcgatacaaaaggcattgaagaaacgctcaaaaaatacacatgccgccgtggtgaaaaagtcgctcagtgaaatccgccccatactggataccgctgctctgtttgctgattgtgaaaatgcggatgatttttccgaactcgtcaccggtttggctacgttagttaaatctcttggggacagcggcgattatcctgcggatatatccccggacagcagcacgctgacggattcactgaatgcgctaacggagggggggatctggatgacgatcctcaaattgcgaggcattaatcaatctgaagatccgctgcgtcaatggcaactactttgcgaactggacggtgttttaattaaccggctcatgatgacaatgcaaagctggcagcaggtacacaaacgtgtactggcgaatattaccgcctacaaccattcacacggtgggcatcagatcagcgaatttcgcacgcagattgaaagcacgttgcaggaacttcatcaggtcctcgacgccatgcagtccgttgcaggggaacagtatgacaacgcttaa

SEQ ID NO: 110371 - DNA, 900 bp, Enterobacter aerogenes
gtggcaattaccaacaacgctgccgcaggaagccagatccgtctgctctgcatgatcgatcgggtgctgaatcggcgactcggagaggccatcccgatggcagatttgattgaattactgcgcccggagatgctgcccgtcagcgatggggcgagaaaacgcctgcctgccgaagtctctttctgggcaaaagaagggttatggaaaaatgagagcgctggcctcagtcaacagtcgccactttccagcgaacgtaatctgcccgcacgggttttgcgtacgctaattgacagtgagaaaacgacgccgctgctgaccggaacgcgcggccagcccttgctgatgtgcgttacctccatgctggcgcaggacaaatatacgatccgcggaaacacgccgctgacaaaagaggcggtgccgttggccgttggcccgatgattaacaataaattagccggtgaggggcgacgtaacctcaacgtctctaacgaagcagagccattcctcgattactcatatttcctcggttttacagaaccttatctggatggctgggtgatggacccgacccgcgccattgaaggggttttggataacctgtcgcttaccgccgcgatgccaattcagacattcctcagccaactggcagagcttctgccaatgctggatggaggggcctaccgccagcaggttgaaccgatgatctccgctgacaactggcaaccgctggagaaacatatgatcagcgccgcgttgagccaggcgctgctccggcttgaactgacaatgcagttggttttcaccactcgttccgatgaccttgacgccatggtcctgcaagctccggatggcagtctacgccgtatcagtaccgtgagcccagggggggcaagaaaatga

SEQ ID NO: 110372 - DNA, 2451 bp, Enterobacter aerogenes
atggaaaatcaatggcaacaacttcgcgcggttctgaatggagaacatagcgaacgcgatgggctgagtggtcagttttttaaccgcctgctttactgtctggatgatgtacaggcgggagaatgcgaccgcctgcacgcattttatgatgcactgcaatgcgcacgggcatttgggctgatgccgttaaggctgccgtaccgacaccttaccgaaggcgcaatgctccagcattttggtttgagacgggatcgtgactacccaggtgaactgtttctgacgcgcgaagcggaagagattgatccctccctcttaccggtctggaaaggcgagcagcgccgttttctggaaaccccaccgctggatgtccttttgccctctgtactcaatgatccgcgttatacgcactacacatctgcagggcaacagcaggcggtacgcacggtgttgaccagcgacagagataaaacgctgctggtgaatctgcccaccggagccggcaaaacctttgtgattcactcccagatgctgacttcaccgcgcaggctcctgacgctggtgattgtgccaaccgtagcgctggcaattgaacaggctctgcgggcgcaagaggtgatgcaacaggccgggcaggatcacggtggcagctacgtctggcatagcggccagtcgattgaagaacggaatatgatgaagttgcggctggcatccggcgagcagcgagcgttattttgctctccggaagcagcgacaggcgggctcttgttacagctgttctcgcttgcggagcgcggactactgggcgccgtgatagtagatgaagctcaccttatcgatcaatggggggcggaattccgtcccgagtttcagctactggcacccctggtgcgaacgttgaaggctacctcttcagacggtgtcaaagtcgttctgctttctgccacgtttagtcaaagcaccctgaatacgctcaaagcgctctttgccggtaaacgacaggcatcagtgattgaagtgaacggcagttttctgcgtccggaacccgtgtggtatgtcagcgaagctgtcagccacgaggattaccttacgcaggtggaaaacgccattgctcgcttgccggcgccaatgatcctctacaccaccgaagtggaacaggccaaattctggtaccagtatctacgtgagcgtggttatcggcgatgtggattattccatggtgcaacgccaatgcaggaacgtgaaggtcttatccacgcttggcgtaacgatgggctagatatcatggtggcgacgtcggcatttggcgtggggatggataaaaataatgtccgttccgttctgcatgtcgcagtgcctgaaaattttgatcgtctttaccaggagagcggtcgtggcggtcgtgatggtaaagcatcggtcgctcatattattttccatcacaaacaactacagatcgcacgcaacattaaccgaaccaaactgatcggggccagcaaaggatatttgcgctgggccaagatgcaccagttgcgcgagcagcatcaaccgggtcagttcaccgtcccgctacgcgcgaagcatgccgacattcgcatggattcgcagagcaatctggactggaatctgcgtaccttactgttaatgcagcgcgccggttttattgatatcacctatccaccgccggatcttagcgcaatcgccccggacgagcgtgatgagtccagggtccatgcgtggtttgaccattatttcaaccatattcagatttctgttctccgtgacggccatatggatgaagcgcagtggcagaaggagattcaggcccaccgttcgcatgaactggcgatgcgaaaacagggatttagcgcgttagaagggtggctcaatgaccccacaatatcgttgtgccagacgttagcgcaattttataccctcgatggctttgtgccggaaatatcctgtggcgggtgtccggcctgtcggagtaaagggtatcctccctttactccgacgctcggtcgtatagcacacgtgacgggcgagacgatgcggaacgtcatgggaaatgagcaacgcgtttattattctactacgctgacgaaccggttactgctgcgtcagtggagtgactggattgcccgactgctggccaatcgccagattcaggctatccgcgccagccagagcgtgctcgcccggcttggtgaggtcctgcccgcaggtttgcctttctggtgttcacttgccgttgatgaagaaaacacctgctgggatgaactggtactagtgttgcccggcgaaacgatgcctgaactggacatcttcgccagcatcaatcgcattattgttgcaccggaacgtttacaagaaccgggctaccgcgggcgtcgctggtgggatgttgataccggtgccgtggcattagaacaatttcagaggaatatcagctag

SEQ ID NO: 110373 - DNA, 3057 bp, Enterobacter aerogenes
atgactacacatactggcgcgttttccgaaggtgacctggtaacatcgtcattatttgacggtattgctaaaattgtgagcattctctctactgagcgtgcggagatagcttggttctactctcctttagaggtggaggttaaccgtcaggaggtggacattcacacactggcggttgctcctctatatgaggagagcaccatttacttccgctcaccagatagcggtatctggtgcaggggccgatatggcgggccacgaccggacaataagcatttgctgattatccgttcgggcgaccacgcggtcgttgatttggcggagatgtactaccccaactatgggcaagggcaggcaatgaaccccgctcattttctggcggcacgctcaaatgatgccccctatttctaccccctgcgggaaaaatttgtcagtgcgtggatcaaacagcgtgctgcctgtcggtcaatgtcgtcgttaatcagcagtcgtgtagagattgaacctcatcaaatagcggttgttcgccgcattcttcaggaccagaaccctaaatatctgctggcagacgaagtcggattgggcaaaaccatcgaagcgggactggtcatccgcgagcatattctggaatgtaaacgtgaagcccgcgtactagtggtggtgccgcaggtattgcaaggacaatggacgcaggaactggtcgatcgctttgctctacaggaagtaatgagcggagggcgaaacaaccagatccgcttgtgctctccggaagaactttgccagccagaactgatcggctggaagcccacaatgatggtaatcgacgaggcccatcaattagcccgacaggcatgggtcaatgatgaagacgaacaggcacagtatgccgcaatgactgcgttgtgccatcaggcccgcattgtgttgctcctatctggcacgccgatgcacggtaacgaacgtcacttcctggcaatgctgcactgcataaatcctcaggcgtggcaacttaatgctgtgggaatcgaaaaatttatgcgccgcgtggcagagcgcgagcgtctggggggaatttacagttccttgacccctgaaacgccaaatggggtactggaagaggttatcgaagagttacgtcagctttttgccgatgatgagcaactgcaggcgcggattgatgtgctgagtcctctggtcgacttttttgctcctgatgaaagcgaagagcgaacagcggccattctggtattacgccagtggatcggcgagcgctaccgtctttttcatcgcttgctacgtaaccggcgtgaagatcccgcgttggaatatctctttcctgggctggccggcctggaaaaatgtgtctggcccgtcgcctcgaccgagctcacgctggatgaaacctttgatgcctggcgtgccgcagccttacgcaatcccgtgcaacaccaacatctagatgccacgacgcttgataaatgggtagatgcgctatttctcaacccgctggtgatgtcccgcctggctaaaaatgcactggcaaacgggactgccagcgaagaagagtccaattttcttgagcagattattgaaacgtcccagcaagagcagaaagccaaagatgcggtgctaatgaaggcgctgaccggttggtttgaaaaatgtcctgatggcaaagcggtcatcttttgcggtgaaagctctgaagccgccttcctatctaccaaactgcaaattcaggccccctgggcggtggttcgtcattcgccggacttgcgtaagcagagcgaacttccggatgacagttggcaggtactgatctgtgacaggcgcggtgaagacggactgaatctgcacggaaaaaatcgtcttgcggtccattatagtctgagccgcgactttaaccgttttgaacagcgattggggcgctttaaccgctattctggaaatctacgcggcgttaagcctgtgaaaagcctgattttactgccggagcgtgatgggctacgtgctgactgggtgaaactactggacgaaggcacgggattgtttcatcgaagcgtcgccagcctgcaatttgttctgtctgaacaattagagatggtatggcgtgattacgtcgggcaggggcttaccgtcttccatgaggcgcaacagcgcctttcgggagaaaacggcttcatcgcccaggaacgtaagcgcgttctggctcaggaaaacttgttatccatggagcaggaggtcatcgctgcacgcgagttttctgagcaactggccgaatctgaagatgaggctgaagcgcaggcaaaagatatgctgacctggatgcgcaaggcattagggtttaagcgagagcaatattctgaaggaggatttcgtctgcgcttcgagcgtggcgaatatcaacggcaaacgctggtggacgtaggaacgtttattgataactgcctgcttggtctggatttttcagaaggataccccccttccacagcgttgatgagcttgtctcgaacggaagccggtaaccacaaacacgtttaccccttgcgctatggacagccttttgccgaaaccgtatggcaactgatgcagagcgatccgcgaggagcaagtatggcgctgcttcgggttctctccccagcggttgcgctgaagcaaccgcgcacctggttccatttccagtggctgagtgaagcgcaggttgaaggtgaaaaccagctagccgcgcagcgtcgtggtgatgagtgcttcagcccggaggttcataatttctggctggatgacggtggaaaagaggcggatccgcaggtcgttgtttccctgctggataaaccttacgatgaagatggtaatagcttgttccaggatattaatcttcgggaagaggtttggatgcgaatgccggattggtttgagccgcataactggaaagagaccgtacttgctgccgcggagcaggcccggagaaacgtggatgctcactatggcgatcgtcccgtccgccatcaattgcttgcaatgaaggcgattattctgtgtacccgcgacatgctgtaa

SEQ ID NO: 110374 - DNA, 633 bp, Enterobacter aerogenes
atgagcgaacaacgggccccaccttcgcctccaccacaagggccgattggctggctattgtcactggccggacggattattgggctggttattggggcgctggtgttgcgggtggtgctggaactggcggggctctatttctggtggccgcaggaggggagcaggcatgttttacaggtgatgaggcaggagcgggcggaactggttattgcgctacaaccgcatccgctgaggaatgaaatggtgatgttgctggagaacgggacaactcacgggcttttggctaacaggttcctgcagaaaccgttcatcgccctagcttatacgctggtgagttttatgcagcgcctgatatggcttatcgccatgcagcctctgttttgcctttgtgccttaacctcgctggctgatgggctggttcaacgggacttgaggcggtttggctccgggttggaatccgtttttctccatcgttatgtcatcaggttcggcagttcagtcacctcaacggtttgggtgttttatctggcacagccgttgtttctgcccgcaatgctggttttactgcctgccgccttatggtttgggataacggtgtggatggcggcagggagttttaagcgatatatatag

SEQ ID NO: 110375 - DNA, 840 bp, Enterobacter aerogenes
atgaaaaggatgaataaaccaaatgacaatgctatggaggtatttgctctttgtattagcaaagtaaaaaatgtgaatttaaagagaaatcttgaggatattaaacaattgattaatcaggctgctatagaatatgatgagcatgcacaaaatgctgatttataccgcgttccacaatcgataaatattaatgataacataacaaaagtagttatggagaaagtatacacacaacgaatggctaaagcatcttctccgggacgaaacgtttatgaccgattacgttcatctgctgattttaatctatgtccattatgtggacataggcaagttaaaacattagatcattacttacctaaatctaattattcaaagcatgttgttatgccttttaatttaattcctgcatgttcagactgtaataaagataaattagacgtagttgctgtggataaggaaagccaaactctacatccttactatgataatgtaactgaatatcaatggttatttgcagagattatcgaaggtgagcctgcatctgctcatttttacacgcgtgatgtccctgaatatgatgatgttttaaatagtaggattagaaatcattttgagatttttaagttaaactcattgtatgtttctcagtctggtgtcctattgtctaatctcagatatagagtgattgatttatatgaaagaggaggttcagaggctgttactgattatttttgcgcagaagcagaaagcagggttagatattgcctaaattcatgggaaacagctatttacttagctttgtcagagagcgaatggtactgtaatggaggatttaggtaa

SEQ ID NO: 110376 - DNA, 1563 bp, Enterobacter aerogenes
gtgagatttaaacgtgttcctcgaaattttaagttgtcagatataggtgaacccataatgtatcttattgacgataactgggatgattttagttttcgaacaacgttcaaaagtgttgtatatgatgaggaaaataaaaggcatgacttgggaattttaaaaatcggttgtatagggcaagatgaaagccgaacagaaatagatgaaagtttttccgtgctaaaggataactatttttctttagggcaaagtgtcgattattatttaggtgttagaacgttaagtaaagcattgcaaactaaaatattaagcggtctaaatgatgttgtatataatgctgacttgctttcaaaggtatcaaatgaaagagtaatgacttattctttattaagagatgttagtctttctacagttaaaaatcaatttagacgattaatagatggtggtgatattcttactgaatatcattttggttttgtttcaggtaatgctaaaagcacgatggatcttgattttcatgttattccagaggcaaatccaccgactaatattcatgtgataattggttcaaatggagttggtaaaacaagtttgctcaatcatatgattgaatcagtgttaaaaatcaaaaaaataaatacaaaacactctcaattttatttgactgatgaggatgatgataagacaaaaattaatgatattaatgaaatattttctggggtcgtatcggttgcttttagtgcattcgacccatttaccccacttcctgaggaaaaagataaaactaaatcggtaaaatattcctatattggtttgaagcgagtaaataatattgggggtaaaataggtactcacaaaagtaaaagaatgcttgaaaatgagtttgccgaaagtttatacagttgttgtaaaaaagagaagtcaaaccgttggttacgttcaattcgcattttggaatccgatgttctattgaaggatcataactttggtgatttgattgatttatatactcaaatggatgtgagtgatagtgatgaagatacattcaaaagaaactgcagaaataaattcaggaaactgagttcaggacatgcaattactatgttaacaattactaagcttgtagaggttttagaagaaaagacattagtcctaatggatgaacctgagtctcatttacatccgccattactttcatcttttattcgagcagtttctgagctattgatatataaaaatggtgtagcaatcattgcaactcattctccaattattctccaagaagtacctaaagtctgtgtgtggaaaatcaaacgcttcggtgagatctctaaagctgaaagacctcaaaaagagacatttggtgagaatgtcggattactaacaagtgatatatttggtttagaggttactgaatctggattccatactttattaaataatgaaattagatctaatcccggggcaagttataaaaaaattctgaggaaatttgatgggcaacttggttcagaagctaaaatgattttgcaaggattgttgtattccgaaggagaaaattga

SEQ ID NO: 110377 - DNA, 714 bp, Enterobacter aerogenes
atgggattaaacgatttagataaaatacaacactcctctataaaccagttgatattttacatatctgcaggaataattatacttttgattggattaattatctcgtacatcaaagccctatcaaatgaaagagcaaaaatgaacgctatcaatgctaatttcaatatattaaaggaacaactaattgaaaacactaaagccactaaatcaatagaatcaagcatctcacaaaggcaatgggttaaccagcaagcatggctcaaaaagcaagtttgctatgaggagattttcacatcacttttagactatgtttcttatgtccattatctacacggaaaatttgaatatgaaagatttgtaacagaaggtcctgatgtttatatagatcaatatacccaacctgaagaaatagaagaatgggaaagacttaagaatgaactggaaagagaaaaaacatctgacaaaactagagaaaaggaaagcaatttactcctaaaacattcattagccgaaaaaaaattggcagattcgctttttatatactcaattttcttagatccagaagtcaaagaaaacctaacaagggcaatagcttcagtcggcttaaatattgattgggaaacagaagaagaaaatatttcacgtagattaaaagatgtcgaaactgcaattgaaaatattcgattggtttgcagaaaagaacttcaattatag

SEQ ID NO: 110378 - DNA, 300 bp, Enterobacter aerogenes
atgttgacgcatcgtctaaaagaagcgcggattagggcgggtttatcgcaggaacgtttaggtatacttgcaggaattgacgaagctactgccagtccaaggatgaatcagtatgagcgggggacgcatgcgcctgatttctccttggcttgcaagtttgctgaggtattgaacgtaccggcttgctatttctatacggttgaagatgatttggctgaattgatgttaatcttgtggtcaacatcagaacaaaagcgtacagatatgattgcttatgctaaagataatattattctgtga

SEQ ID NO: 110379 - DNA, 165 bp, Enterobacter aerogenes
atgaaattatttattaacggaattattcacttgtatcacctttttattttagcttctgaaataccaacatccatatttattaaaaaacgcaaaaatattataagacatcagtttgatatgataccttgggatattaacatagatgtagaaacgccttcggtataa

SEQ ID NO: 110380 - DNA, 1041 bp, Enterobacter aerogenes
atgctcacttattgtgtttttattactctgttaattatcttattgtctattatactatataaagtaaatcctaaatacatctattattcttttttattttataagaaaaaaataagtcaagataagaatttatttggtaaatgcattcagtatataaccaccacttttttgtttacagttctctatttttttattgaatatgttccattctcggattttcttggcaaagttatgccattattgcccgactatgttagtgctttattactgtctctaaaagggaaaggtgcgtcaataacaattatattggcatcaatagaacttattggtttgttatttttgttttttattttcatgaagatgccagcatcgtcaaaaaataaaatagtcaatgaggtaagtgttgataagattctaagctatagaaatataaatatattctcatattttggatcgatagaagatacaagggatattcaagtaattgtaacgtctgagaatagtgatttagaattagctagcttttcaagtacatcaatatctggcagggtaagaaatatggcatcatcaaaggatgatgttgggaatgttatatctgatccattgtatgaaaatattgttcgttttaaaagagcacataacaaatataatgattttaatctagggacatgcatttcctcacaacctttgaagttacaaaaacatggtgtgaagcgtgttattcacgcgatcgcgatcaaaaaaaatacagacaatacaataagttacgacgctattgctataaaaaaaataatttcctattcaataaagagttgtatcaacgactcttttgaaagcatttttattcctatctttggtatcggaagcgctcaacaagaccctacggatttaattattacacagttagaatcaataaaatccgtgctggatgatgagttaatgtgcaccacatccacgttgagtttgaatatttatttgggcgtttatcgcgaattggattgtttatttttaaaaaaatcagcaataaaaaaatttaggtag

SEQ ID NO: 110381 - DNA, 555 bp, Enterobacter aerogenes
atgttaacttcaaaggaatttacatgttatcatggtaccacattgagcgccattccgtccataataaataatggatttaatttgagtcaatcaaatgaggattggttagggcatggcgtatatttttttactgatggtatatcagaccctttaaaaaatgcaattgaatggtctaaaaataaaagtaaaaacgatgatatctgcataataaaagttaaggtaaaagtcgatgattcagaagttttagatttgagaaccaccaaaggtttaaatgtatataattttcatagggatagtatcattgataattactatgatgtattagctaagagacgtgacatcactataaaaaaaagaaaagataccagagtagatgattgtactattatggatatcttacagcagaaattaaattataaagtaattatacataatgtttatataaagaattatcaccaaagaaaacttgcattagagtcaagctatccaaatagtactgttttatgtgttaatgacctttctggcataaatattattgatgttataaatatttaa

SEQ ID NO: 110382 - DNA, 1497 bp, Enterobacter aerogenes
atgagcctaccactactctggtcgccgtctcccatgacgttataccatgcattacccagaatcggcggcttgtgggcagggatgatttttttcctgacgattcgtcaggtaacgtttactgataaatataagctcattttattttatgcgctgatacttgcgggggtgaccgaagcactgattgttctcttcgaaatatatgcacccaccgcctggttacccctcatctggcaaaaactcacattaaaatatggccgttacggtgtaggtgtttttcagcaagtcaatgtaacggcgagttttttggccgtatcactgacggcttgcttgtttactttttgtgccacgagtatatcttttgccaataccagattcgaaatcatccgtcgtataagtctggcagcaatgattgtcttgttatccgccgtattgacgctactttgctctcgtattggctggctcgccagtatttgctctgtaggtattacatggttgattgttaattttagtcagtttaaaaatgaaagccgtcatcaaatactggtgttattactgccagttgccgggggaatgctgggttatcatttcatgcataacaccattggccaggcactcgccgctcattcaggttcgaatcatcagagaatcctgacgctctatcagactctgctctttgccagtaaacaccctctgctgggctatggcgccggtacatatgaaggatattaccaggcctttatggctcgattactagatggaaacgtatccaaagaactaatgggtcatccacataatgaagtactttaccaatattcagaaggcggtattgtttccctggcaggggtattaatctggtgtatattatattttaggttatggttcaagacgagaaacttcattcagaaggcagcattactcacaatacttccttttatcctacacacccaggttgaatatcctttttattactcagccccacactggattatatttttggtgttcttgagactggcagatgatgaaaaaaaaatctcatcaacagtgatgaaaacaaacatcaaacgattggtaatcaagactttattatttgctgtcgcattgtatggctcaattatatctattcaggcaaactacaatagtggaataatgatgaaattggaaagcaatgaaattgcagatactaacgccattactcatatgcatatatcctggttgcaacgttttcgttaccaaaaagaccgcaatcttatacgtcttcttgattttcaacagacgcatgatccagcgtatctacttttatttaccgagaaaaatgaaaagatcattgccgttacacctgaacctgaattatacagtaatcaaatagctatccttaattatcttcatgactataaagcagccaatgaatggctgttgcgagccagatacactttaccctgggaatcccaattccggccgattcgctccgtaaagaaccaatctatatcaagagattga

SEQ ID NO: 110383 - DNA, 561 bp, Enterobacter aerogenes
atgtctatcaaaatgaaggccctgtccatcgctcttctggctactgcatcatttgcttctgctggcgcatttgctgcagcttctgccaccactgttgcaggcggcactgttcattttacgggtgaagttgttgatgcggcatgtaccgttgataccggtagccaggatcagactgtagcactgggtcaggttaaaatgtccagcctggctgcaaaaggtgatattgctaacaccaagcagtttgatattactctggatgattgttctaccacgacagcttctactgcagctgtttctttcaatggtccagtgtcttctgatgatccgactgcgctgactgtcagcagcatcaccactccgggtaatgcagccaccaacgttggcatccagatcctgagcgatggtactgcgatcacgccgaatggtggtgcaacgggttctccggtaactctggttgatggtactaacactatcccgctgactgctcagtttatcgctcttggtcaggcgactgcgggtgctgctgatgctgatgcgaccttcaacatcacttataactaa

SEQ ID NO: 110384 - DNA, 552 bp, Enterobacter aerogenes
atgcgaagggatttgatcggcaacgtaatgcgatttttacttctctttcctttgttaagtggtgggggagtaattgctcatactgtcactcttcctggagggatggtacatatgaccggatccgttaacggaggtgcgtgtactgtgagtaccgatagtgaagataaaaaggtattcatgggacaggtacggagcaaccggtttgatgacgttggaagttgggcagacccggtatcctttactcttgacctggtgaactgtgatacagcaataagccagcatgtgggaatgctgtttaccggagtaactgatggcaaggatccgttggtttttcaagccggagaaggtaatggcgcggccaaaggtatcgggattggattatttgacagttccgggaacttgattgttcctaattcaaaaaacaacaatttaacgcagctaaataatggaacggtatcagtacctttaacagcaaagtatcgctcaactgacaggattgtatctggtggtgatgccagtgctgtaatttatttctctctgttttacccgtaa

SEQ ID NO: 110385 - DNA, 708 bp, Enterobacter aerogenes
atgaatattaaaccaatgaccctgtggctctccctggctggaagtactttactcatatcctctttctccgctttggctgccggtgcgggaggggttgctctgggggcaactcgtataatttatcatgaaggacaaaaagaaacgtcaatttcgttaactaacacaactaaatcaggcagttttttgattcaatcatgggtagccgatggtaaacagaaaaaaaaccaggactttatcctgacaccgccattatttgtcagtaaacctaaatcagaaaatacactgcgtctgatgtattccggtccagcattacctcaggaccgtgaatctgttttttatttacatagtagagcaatcccgtctgtagaccccaaaacagttaagggggcgaatgtgcttcagatcgcggtggaaagtgtaattaaagtcttctggcgtccagatggattgaaaatgacagaggccgatgctgaaaagtcattgatctgtagtcgtgcagggaatgaggtgacattaaaaaacccgtccccttattacgtttcaatggtcaatatatacagcggtaatgccaaactgcccaatactatggtcccacccaaaagttctactacggtgaaagcaacgggaacaggtatgggggtcgttaaatatactgcaattaatgattatggtgcagcatcaccacaaataacctgtccaggaagttaa

SEQ ID NO: 110386 - DNA, 2733 bp, Enterobacter aerogenes
atgattcgtataaataaaacatttacaagtgaaaatggggtcagcgtcagatatcgactttggcgtcgatcccctattgccgtgtcattattattagcgttaagttcatttcacgcatttgcggataattattttaatccagcgtttctgaccggccttgacggctctggtacagatagtgtggcagacttatcgcgttttgagaaaaaccaacaagcgccgggaaattatagagttgatgtttatcttaataataacttcatcactcgccgcaatgtaacctttaacgccgtaaagcctgtttctgaggagtccaaaggggcaacagaacctaataacgtggctgatactggacgccttgcgtctgatgaaaagggtgatgagacaacggaaaccacctcagatggtacaggcatcgtagcgtgcattacggaaaaaaatctggaggtgatgggggtcaatattaaggcatttccggcccttacaaacctgcctccggaagaatgtgtcgacttgcctgcagtcattaaggatgccagtacatcacttgactttgaacatctacgactggatatcagcattcctcaggctgcactgagcaattccgcacgtggttacattccgccttcgcagtgggatcaggggattccagcattgttgctgaactataacttttccgggagccgaaataccggagactcaaccacaaacaattactttttaagtctgaatggtgggctcaatatcggtccatggcgtttgcgcgatacctcgaactggaattacaccagcggaaaacacggcaaaaatgcgagtcatgactggcaacatgtgtccacctatattgagcgaactattattgccctgaaaggagagctgattgcaggtgatgccaatacctcttcagaggtgtttgatagtctaggatttcgtggcgttcagctcgcctcggatgacaatatgttaccggatagtttaaaaggctttgcacctacggttcgcggcatcgcgaaaagtaatgcacaggttaccattaagcagaatggctatacgatttatcagacttatgtacctccaggtgcgtttgtcattaatgatttatacccgacctcctcaagcggtgacctgacggtcagcgttcaggaggccgacggcagtgtgaattcttttaccgtaccgtactcgacggtccctattttgcagcgtgaagggcgtctgaaatatgctctgactgcaggtaaatttcgcagtggtagcaatgatgaggatgatcctgagtttttacaggcgacggctatttggggcggccccaagggatttacattttatggcggtgcgcaatactctgcagattataacgcctgggctctaggtctggggaaaaacctgggtgactggggaggaatctctttcgatgtcacacaggcaaacagtacactggcagacgacagcgaacatcacggttcgtccttgcgctttttatatgcaaaatcgctgaacgcctgggggactaacttccagttgctgggttatcgttattcgacgaaaggttattacacctttgaagataccacgcataccatgatggatggttataattatatgaatgaggatggaaatgaggaatatataccatcctatactgattactataacctctattatacccggcgtgggcaacttcaacttaatatttcacagaccattggtagtgaaggttctgtatatgtcactgccagtaatcagtcctactggcacacggatgaaaccacgtcattattacagattgggtacagtggtgtttggggagatattaactatggcctgaactatagctacaacaaggccactcagcaggatcatgctgacaaggttttttcttttaatatctcattgccaatcagtaaatggttattgccgggcggaaatgatgttggcacacacaattcggtatatgccacatataacaacagcactgacgcagagggcaatatgacacagcaggcaggtgtcagtggtacgttactgagggacaataatcttaattataatgtccagcagggatacagtaatcatgatggcggtggatataacggtatggcgtcactcagctatcagggaacttatggtaacagcaacgtcagttatagttacagtaaagggtatcggcagtttagttatggcgcatccggcggggttgtggttcatcaaaatggtgtcacattaagtcaaccgttgggtgaaaccaatattttggttgcggcgccgggggccaagggcattgatgtggagaaccaaaccggtgttaaaacagactggcgaggctatgcggtgattccttatgggaataattaccgactgaatcgagtggcgctggatacaacgacgctcaatgagcatacggatattgatgaagctgtcaccacagtggtaccgactaaaggtgctctggtaagagcatctttcaaagcacgtgtgggggttcgggcaatgctggtgttgactcataatggtaaacccctcccgtttgggacgacggtgagtaccgatgacagtgacaatgccggcatcgtaggggatgacggccaggtatacctttccggattatcattaacgggtaagctgaaagcacagtggggtgacggtccggataaacagtgccgtgcccattatgaattaccacaagacagcctgagcagagcgcttgtacgggcatctgtacaatgcgattaa

SEQ ID NO: 110387 - DNA, 1044 bp, Enterobacter aerogenes
atggtcaacttgaaaaaactactcatcttgattttatccgtctgtttgccagcattcgcagatgaaatgataaacattgattttactctgcattccagtgataacgtagttggcggaagctcagaaagtacgtttacttatgcgcttggccctactctaattaacgggcaagttggcatcaaggaatgtgataccagcggggatgactcctggtgtaataaccatgcgtattcacccatgccaacttcccagccaacctggacgtacaaaaaaagttgtactggaatgcagtattgtatttctctggcatctgcggtgtctactcctaatggattgctttacacgccatataaatcgacctatgcgcaagaaggatattcaccgcaaccagacggttcatatattataccttcacgggactatcatatatccgtgaagcttgacagtgtattacccgtagggcagcatgatttcccctcggttagggtggataaacttattatttgtaaatctacaccgaacaaaggttcagaagtttgcactgcgaacagtggtaatatttatatccagtatcttacggccgatgtccatattacggtccctcagtcctgtacggtaaatagtggtcagacggtaaatattgatctggattcagcctccggtagcgcttttgtcaaaggaggtgccgggaattctcctgctggatttaacgagaaaacggtcagtgttcctattcagtgtgagggcggaggggccgggacggtaatgatgagtttacatggtgccaatgcagaggcgttcccttccaatctggcgacctccaatgctgatgtgggcgtcagggtgacagaccgtactgccggtagcggcaataacggacagcctattattccgaacaatgattcatcatacagtactattcagcttggtcaggacggcaatggttcagcaactctgggagtggcaccggtatggcttggtactaatcagcctgccaaggggaattataccgctcaatcttatttacagctggactatgaatga

SEQ ID NO: 110388 - DNA, 531 bp, Enterobacter aerogenes
atgaaaccgttaacgaaaaccttattgctgctgccattgcttttgggcgtagtaaaaatcggtattgccgaagataaaacaccgaatctgataattacaggaactgttacaacggattcctgcactgtcagtaccgattcccagagtcttcaggttcctctgggtgatgtggttaccggtatgtttgtcaggcctggagacacaagcccggcgaaaaggtttgtgattagattgaccgactgtgatgaaggtgttaccggagcaactattacgttcagtggaacaccagattcatataatccagatttattaaagataacaaaagatactgattctgcaaccggtattggtgttggagttattagtgatatctcagctaaaccaatacctttaggtaaagcgacagctacgaaagcgttaacctccggagacaataccctcgtttactggctacgttatcagtcaactttggatactgttactgcgggggctgcaaatgcagtgatgtattttgatcttacatataaatag

SEQ ID NO: 110389 - DNA, 564 bp, Enterobacter aerogenes
atgtattataaaaactattttagtactcacgttaaatgtcttgtttttttatttactggtatagtgttttttctatcaggtcattcttgggcctacgatggcaccataaatgtgaccggtaatatcattgatggttcctgcgacattgatacggattcaatcgatgttaatcttggtaatgtgccagtatcttcatttcaaaagacacatgatacaagtaatcctgttccgttcaatattacgctgagtaattgttctgcttcaattaaaggggctgacattatgtttgttggtgtgcctgatgacaaggattttactctcctgaaattaactcaagatagtggggttgcagggaatgctgcggttagaattactcaaccaagtgcctacgatggtagtctacgtaatattgttgtatacctgaacacccgttattcggcacgtgaagatatcaaagacggaacctttacaatgacttatgctttgcaatatcaagccacagcaatgcccgttaccgctggtactggtaatgcaattatgtatttcaatatttattaccgatag

SEQ ID NO: 110390 - DNA, 591 bp, Enterobacter aerogenes
atgcaattatgtatttcaatatttattaccgataggttaaataaaatgaaatgtatatgcagattatgtctgcaatttctttctctccttccggtgatagtgtcttgtttattatatataagctttggatgtgctgctagcgacggtgaggtgaatatatctggtaaaataacagcgaatacctgtaccgtcgcgacgagtgatatgacagtggatatggggaaatttgacagtagcgattttcaggaagggagaagcgacattggaatcccggctataccttttgcaataacacttaagggttgtaatggtattgcatccggtgttcaagtaggtttttttggaaatcccgatgaatttcaaccggatatttatgctcttgatgaggggggggctacaggtattggtattaagctgttggataatgacaaagtaaaaatacccgtaaattcatggtcaaaattctatccacttgatgcagattcgagtgacatagcattgcagttttatgccctctacaccgctgacggtaataccgtcactgccgggcgtgctgacactctagtggcgtttcgtctggcttatgattaa

SEQ ID NO: 110391 - DNA, 765 bp, Enterobacter aerogenes
atgaatacacttcggttacatctgaccgctgcactggctaccgcgctcagtctgttttcactgtctggccatgccggtatggtggtgggcggcacgcgctttgtcttttcagcggatgaacgtgggaaaagcatcccggttaaaaatacgggtaaggaaggttttctcgttaaatcgcaaattgttgcggatgacggtcatgaacttagcggcacggtcaacgatcgcccggggaataacgccagggaagataatccttttgtgatcacgccgccgctgtttttgctgggggcaggtaaaagcaatcagttacgcctggagtgcttaaactgccagtctttacccaccgatcgtgaatcactgtaccgcctggggatcagcgctattcctggcggaaaaccgtcagccaatagcgtgcagttagcggttcgttcgactttcaagctgttttaccgccccaggggattacctggtgaatccggaactgcttatcagcagctagagtggaagcgggaagggaaaaatgtagtggtgcgtaatccgacaccgtactatgtcactttttttgaattaacggtaaataatcaggaaatacatagctcgggaatggttgctccttattcctcacggacgcaagcctggtgtccggcaacgggaagctgtgagattcagtggaaatcaattaatgactttggtgggattaccccagcctggtcggtatcgccggataaagtgaacaaatcaggaaccgcaatcgcgaaataa

SEQ ID NO: 110392 - DNA, 639 bp, Enterobacter aerogenes
atgacgcattcatttgatcataccgaagaaattttctcttcaatggattttagttcgttaaagaaggaaatctttcaggttggccgggaattaacttaccctgagggcacggttatccgcccgaaagaaaatgaaatactgatcttatcatcaggacaaatgacaacatcagcaacgcaaaatcaggagttggtcataggtcatacatttcctttaatgccaatcggtttacttgaacgttattttaaactcagaatttattatcaggctgaagttactacgacgctgttccagcttaccgatgaggagtttgataggattttttatcgcaaccctggccatgcggagaaactgagccagctattactattcttgtcttcgcggttacttcatatttatcacgaacgaaacaatgactctggttatgcaacaataagacaaatgctttaccgttatctatataaaaatgaggagggaagtgtcaacaatgagggggtagcatcatttatacttaagaggacacatctatcacgaagttatatattccaaatattatccgggcttaaagctggggggtatatcacagttaagaatggcaagctaacctctatcaatcgggacatccccaaaagattttaa

SEQ ID NO: 110393 - DNA, 411 bp, Enterobacter aerogenes
atgaacttcggaaagagattgcaaagggctataaaagatctcgacatatcacaatctgagctagcccgcaggttgggagttaaggctcagtcggtaagcggctggtgtaactctgatattctgcctagatctgaaatcttaaatcttctgccggcagctactggttatccgctttcatggttttttatggaagatggcgaagtatctaaagatagggatccgtgggagacaaacgttcaaatcaagccgtcttctgaactccaggcaaggctgcttaatgcgtttgaacagttaccaactgaagaggaaaaagagaagattatcagccttatagacatgcgtcttgaagaacttgataatttcgcaaaggcctatctacaaaaaagaaacctaatcccccctactaaataa

SEQ ID NO: 110394 - DNA, 3417 bp, Enterobacter aerogenes
atgtcggtaccaaaccagacaccttataacatctatacagccaacgggctgacgacggtatttgcctaccagtttatgataatgaatgctggcgatatcgaggtttcaattaacggaaccccgcaaaccagcggctataccgtacagggagcagggcaaactggcggggggcaggtggtatttatgacgccgccggctaacggttcagtagtcatgttgctacgtaaattagtcattaagcgcgataccgattatcaggataacggcgatctactggcggagactatcaacgccgatttcgaccgcctctggttagctatgcagcaggcgtttttaagcgatagtttgtctcttaaacgcccgttgcttggcggggattataacgcgggtaatctgaagattatcaaccttaaagaccccacggccaaacaagacgcagcaacgaaaggctgggtagacctgcaatattccatccctacttcagaagccaaacaggctgcggaagaagctaaagccgcgcgtgatgaaacgaaggagatagccgataaatttggtgatgtcgatacagcggttaccgaagcgcaggccgcgcgtgatatttcggtaaccgcttccggggtgtctgtcgaagcggccgccagagcggaagccgcgaaaggcgcagctgaggctatcgcaaatacgaacagcacatttcctgatgtaccatctggtatcgccggcacaacaagcgggcagtacttccgtatcccccaaacacctggcagtctgtattctttcaaatattatctgaataacgcgggtaccgctgttctggtcgcagtccagcccggcgacggggctatcgcttatgtcaatcaaggggtatacccttttgacaattcggcatcctggcagataactaatgacctggtcattttcactgatggaacaaccagcgccaatactgcatgggatgcctattttgttccagtcgccgctggcgatcaggttcaatatttcggtgtaacaaacacctccacagctggtgagcttaacgcctggctgattcagtgtgatgcaaataaaaactacgttaaagccctgtctaataccgtttctagcggcgatgcaaccgggcagagcaccgtccgggcgaccgctacacagtccgggtttatgtatgttcgtgtgcgtaaaacgaccaacccgaactggaatattcttttcctcaagcattacctggtgactgccgcaaatcttgatacggcagttggctatatcaataaaggtctgtacccgcaaagcgcatcgtcggtctgggaaataaccaaaaagtttgtactgtttagcggtggcgcatctggcacctataacgactgggatgcttattatatcccggtaaaaaaaggtgatcagattgaatatttcggttctgcaaataccgcgaccgtcggagaacttaatgcctggttaatacagtgcgatagcaacaagcaatatgtgtcagatctggcaacctgcatctcaaatggcaatcctgctgcgcaaggattaatgaaaggaactgcattccaggatggttatatttatgttcgtgtgcgcaataatacaaaccctgtctggtatataaattactttaaaaagtatctcgttacttccacagaggtcggcattgctggcggtgttgctgaatatgatgttttaaaagcaatcagcgataacggtaaggtaaacgactatacaaataacggtcggtattacgtaacaggtaccgtaatcctgatcgatggcacagtgaacagtaacgcaggaaatggctggctggccttctacatcccggtctcagctggcgatcgtgtcaccatgtcagggatatatggctcggctaccgtcgggcagtcaatggcctactttatccaactggatgatgataagaactttgttaagcctttatacgtttataccagcaccggccagcaagatgtgcagatgacccgtagtgtttttgcatcccaggatggtgtgatgtatgtccgagttcgccgcattcttgacggggttgttcagagttatagcgttactgcttttcagcgcagctataaacttttgcaagatttatacgcattgcaagctgaagtcgatgatcttaagaatcacggcattgtgcagacgcctttcattggcgccactcttcagcagttacctgttaaattcgatgtacgttttaactataactctgcatcgtttattcaggataacgttgtaaaatctggcgactatacctttattgtcggaaccactgaggggcagaaacctggaatactcaggctaaataatttaaccggtgcctggtggttcttcgatctttccaccatcgcggggaatcctctggcgtcaccgacaaccggagacagccataacgtgtactccattggcgttacgcgtgatggatatattttagttagtggaaacatgcacgttaacgcatgtcgggctgttatttctaacagtccatatgatatttcagcatggacggcaatctcgtacacaagctccactgaggtaacttatccgcgtttcattaaataccctgatggcactactcaggcattctggcgacagggcgtatctgctgctggtcagtatttttctgcactgtttaatgacacgacaagaacgtttgggcctgtattccagattgcagcgactgaccttaacgcaaatgcctatgagcaacgcctgggtgttggccgtgatggaagtcttcatttctgttttgggctacgcgtcaacgctaacgctgctgatgctaaccgtgggcttttttatgccaagagtacagataaaggactgacgtggactaatgctgcgggaacgataagctatccggcaccactgacagaggctaacagcgagcaaatagccgatattcctctttataccggctatgtaaaccagtgcggtggggcttgcgattttaacagccgctaccatacgacgctgtggcagaacgacgagaataaccatacgcagatagcccatatatggtttgacggctcggcctggcaaaaagaaatcgtcagtaattttgatttcaaaatggatacttcccagccgctgctgacgggttcgctgagtcggccaatcatcggctgcacccgctacaacaaaacgtggatcttttacagaaccactgaaatggggcgcggtgaacaaatcagagctattgatgtatcaactcctggcgcaccggttgagcatatacttgccgggtttaatgctggttatatcgagctgacgataaacacggatatcctcatgagggataataatgtgctgatgcttgccacgcgtggtgccataggatttgcgcagccggactactcaaaatatatagcggaaactggttatcttatgctggccgctatgccgtaa

SEQ ID NO: 110395 - DNA, 435 bp, Enterobacter aerogenes
atgcaaaaaactgtcctcttatcgctagccgtattagcttcacctttagccatagcagcaaatatgtgtacaccaaacctgaccggctttgatgtttgcgaaaaagcgaaagaaatagctagccaagttcgtccgcaacttcccttgacgctctccgaaaacgttaacatgtatgatatccgcagcgatcaaaataaactgatcgctaaagtccgcttaggtatgacggaagacgagatgctggaggcagcagcgcagaatcacatcacaccggggatggctaaaaacagattaggggaaatggctaaaagtggagtatgtacgggaaaaaacccgattgggtcttttattcgattggggggtgagatgcgctacatctacacccacccttctggtgctacttacaccactgtagacattacttcatgcaaatag

SEQ ID NO: 110396 - DNA, 186 bp, Enterobacter aerogenes
atggtacaggtgggtacaggtgggtacgagtccaacatgcattttattgcgggtagcgatatgaaatcaccaattaacgccctcaacggcgattcagcggcgccggattctcaacaaaaccgctctctatgctcgcgcgtgcgcgcgttttgcgaggtgacctatgccagtcgtcgtcacagttaa

SEQ ID NO: 110397 - DNA, 384 bp, Enterobacter aerogenes
atgccagcggggaggtatagcacctttgtggatgcgctttccgacaggaaaaaaggcccgctgtgggaggcgggcaaagactacacacagcaatgcaatgggcttaatgaagcgccgaaacgacgctatataagctcactgcacgccccatcatcggagcgtttcaacttgcgtgacttgtcagctcgccgcggtgtcgtcctctacgcttaccgtacgcatacggactcggcgcttacctcgatcccatcgggtgctatttcgttttgccaggagcactgcggcttgcctgtcacgcggttctgtttgttaaagagcggtacttcatttgctgtaaatgtacaatttgaattgtatttcgtaaaccacaaatgtggtatttaa

SEQ ID NO: 110398 - DNA, 687 bp, Enterobacter aerogenes
atggcaatggtttccttaataaatattccttgcccacattgtctaaggcacaatgcggttttagaagttgagggagaaacctatcaatcacttaaaggcacttacgctttgatggcaatttgcagaagttgctctggagcggtggttggagaatttagagccagtaatatcgttgaaattaatggaggatttcgtcggtatgcgaatactactaatcgagatatagtcctcaactgcattccctataccgatagcggtagtgggcgagttgagcaaatctatccacttccagcaaaaattgaggctcccgacgcaaccccagctaggatcggcaagtttttcatcgaagctaaagacaattttgctcgagggaattttgaaacttgcggtgctttatgtcgtaaagtaatagaccttgctacaaagcatatggcgattgcagaggatatatctgcatggaagttgcaaaagcgtatggagcaacttaaggctaagggagctataacccaggagatgtatgattgggctgatattgttcgattagatggaaatgaacaaactcattcagaggatgaatttgattcgcatagcgctaaagctgttttagattttactgaaactttccttctatatgcttttactctgcccgctatggttcaagcaaaacgggccgagtcagaagagtaa

SEQ ID NO: 110399 - DNA, 762 bp, Enterobacter aerogenes
atgatgcaggatctcaatgaaatggcactcaaatatccctaccctgtcgaaacttttcatcaatttttagtcgaatccggctttgatgtcaccggagaagaaaacaaaggcagtcatgattgttatcgtttaagtaatggtgccatcataacgctttaccataccggaacgattttgattcaaggctcacaagcagcaaagccagaggttgaagccgttattaatgaacgcttgggtaacgcaccagcccaacgagttcagccagccccagttcaagatccagcaaaaaagatcttcatcgttcacggccatgaccatgcagcaaaggagcagcttgagctcattcttcataagcttgggttgcctgatcattttattttgcagaatactggtggtactggacttacgataattgaagagcttgaacgtgaaattggtcaaggacagacagcgactcgtttcggtattgttctcctcactcccgatgatgtgggttactccaaaagagacggtcaggaagctgccctgcctagggctcgtcaaaatgtagttttagaaatggggatgttgttatcttcactcggccgcagtaacgtggtcatcttgcagaagcaacaccttgagcagccttctgatgctgccggtattctttatctcaactttaatgatcatgttcgggagaccgtaccccgtttaatccagcgccttaaacaggcaggtttcacattcaatgaagctcaaatagcgagcgcttcatcttga

SEQ ID NO: 110400 - DNA, 525 bp, Enterobacter aerogenes
atgttttctgtatactgtgaaaaaatgaaccaggcgggtttggatcccgcctggataggtgttctaggcgtattgattggtgcagttattggatttacctcctcttatttcactcagaaatggcagcatgaaaataatttggaaatagagcaaaacaaaattatttctaaactttatgcggatttcacgatgagtgatttgtttaaatatatagacttagaagtggattatatacagcagttatattacgaggctgttcgaggttcatttactaacgatttagataatggtaaacacagagagcagttgactaaacataaggctatgctcaaaatgtttggcgatgaacaacttatcgaatcttttgataagctgcttaatattagagtcgatttccattccagaaattttctggatgaaaaaggtttatttaaatacgacccaacaatattacttgaccaagcagcagctttggctggtgaaattaaagtggcgatgtttcagcattgctcaattaaacaataa

SEQ ID NO: 110401 - DNA, 363 bp, Enterobacter aerogenes
atggaacttggtttctttaagagtagcttgaaatacaatgcaggagcaacgatcttctgtgtttttgcattatatttatcaatgcctatttttgaaaatgttaattttatctcgaaccatccaattatcgtctcagtactatttatattattagtaaattctttacttttaataatttactggacatcccataacaaaaaaacaaattctcaaccgggtataaaaggaaacaaaataaccggaaataaagcaaaaaatattaacatactttccaatggggaaatcactaaaaacaccgttagtaataatgaaagcgatggtgacattaatattggacagggcttcaaaaatggaaaaaagtga

SEQ ID NO: 110402 - DNA, 582 bp, Enterobacter aerogenes
atggaaaaaagtgaaggcctagtcatatctgataatgaaataactaataatagtccaggaagagatcttaacgttgggacacacataagtttcaatgaggttaaaaatcggagcaatgcactagcaaatttattagaacgttctaaaaaactttgtgagacagatcaagaatatagatacatgctcgaagagttgcaagagtatcttcagccacgtcccggtcgtaaaatcatagggttagaagaaaaactaaaagaaggcaatcgtcttgatttgttagaagatgcggcttatttagaaaataagtttgcaaggcgagttagcaagcatcagttttctatatcagaagaaataatttactgccattgtttaagtaaaataaactcatctttttcacaatacgtcaaaccactgtttaaaaacacagtaaacactgctataattgacagagtcatttatgacagaatagttgaacctctttatgaagaagtgtctgaagttagtaccgccatttctagcgaattaattagaggcatgattttcttcttaacgggtaaatgtcacttacggtgggttggttaa

SEQ ID NO: 110403 - DNA, 492 bp, Enterobacter aerogenes
atgattatttatcatccatttaaagatgcaaaccattgctcatatcgtattataagtttgctatataaaaataatagtaagattagggatgagcaccttaattttatggatttttattaccttttcccttgtcaaatgcagaatattgatgggtggccgcgctcaaattcaaaacttgcacgccaaatttctactatagcgcactcttatgaaacaattgaaaatcctcgtagaattttctttgaattaaatataatacgtaaaaacaccttggcacatttattttcaaagggaattctatctttgatagatgaatatatcttcctgaatattgaaagaataccagcatccctgattaatacgcttgaagctgacacctttagagctagctttgaatttactaccattgctaacgaaataccaaaactggcaatcaaaggcaaaaaaggcctcaaggcaaaaactaatttaatggaatatcgttatgattaa

SEQ ID NO: 110404 - DNA, 1926 bp, Enterobacter aerogenes
atgattaaaaaaccttcatatctcaaattaaatagattagtcataactaaagcaggaaaacagttatatgacgaaaaatttcacgatggaataaacataatcagaggagaacactctgtaggaaaatcaacaattttagatatgattttttatgttttaggtggcgaattaaaaaaagacgactggaaatatccagctgatgaatgctcgaatgtcaatgcagaaattacaatcaatgaccgaattattaccttaaccagaccggtggatcctagtggtgcaattcctcatattaaaatctatgagggagagtatgaaaaggcgatgaaagatgcagatggctggttagactatggtccaaggagaagcaatgagcgattgagcttctcagaaatgatgtttgaacttttcgattggggacaatataaatctgacagctatcaaaatttaactatgcatcaaataatgcgactcatttatttaagtcaatcatcagattccaacagaatatttcgcaaagaatctactcgctctgacaatgaaaacactagaacagccatcgctgagtttcttttcggtcttgatgatttggaaactcactcagttcgtcaaaatctattgaagtatgagagagattatgaaaatactggaacagaattaagagcatatttcgagcttttgggaaatgatgctagtctaaccgttgaaataattaaggaattattgaataaaaaatacattgagctatccgaaatagactcaaagaaagaaatattattacgttcaacagataatattgatagtaacaacgaatataacttagctatcgaacgcaatgacatccttttaaaaatacaatcactaacaaacaaaatatcattgaataacaatgagttaagctcaaacaagactgagattcaggactgtttgctttttgggcaaaatttagtatatcgtttaaaatctttaaatgaatcacaagaaacatataaaggtttaggtcgaatttcgtttgaatactgcccttgttgcttaacaccaatatcagaacacgataacactgataatgatagtggttgcgcactttgcaaatcaacagtcaacaattcctcattagaggagaaatacattgagtcactgaacgaactgcaatatcaacagcgtcagaatgataagatcatagaaaaactatatggttcagcagaatacatagagaactatattcaagaactccgaaaagaacttgaaagtttgcaaaatagattatttgaaatcaacttggtttcaaatcatcgtgagttggctataacttcaatcatagaagaaagaactgcaaaactaattgaaatcaactccctacaagataaaattgattcaatagctaaagttgacgacttaaaattaaaacgtgaagacatcgcaatgcaaatggaaagttgtcgttcacgaataaccgctcttgaggcaaaaagccagcatagaaaagaatatgtttactcaaaactatctgagttttccacttttattcttgaaggagattcggggaatgaagagctatttaaaacagcaactcaactctcgtcagagattgacttcgcaaaagatcgctggcttttgaatgaacgggtaaattattcagatagttcaaacgttgtcaaaaaagcagctctgcatttagcattccttattttttcaatcgttgattcagcttgccgatatcctcgtttctccatcatggactttgaatgtggggatataaatgaagctcgaagccataacctccaaaaattaatcactacaagccttagtaattcaaaaggctttcaacttattatgaccacatctaaaattgactcatctttaaataacaacacttacggggttggtcgttattatgacaaaaatgactacattttgaaaatttga

SEQ ID NO: 110405 - DNA, 465 bp, Enterobacter aerogenes
atgcgacttctccgggctaccaaatcgcacagcgctgtagatactgttatcgatttgcaactgttttggtccgggaaaaacagttgttttttattatttcagagcacattgcgctcccgaaatgtcttctgcgttatgtctatcatggcgcagggagcgtccctgcaaatcacgtccctcagcccgcatccatgcgggctgccccggccttccgggaacgtctcagcgatttttaggccaccaacaccggcagtttcagtcagcatggtgaataaattaaaggcaggccgcacgaaccgtaggtcggataagcgtagcgccatccgacaaaaaatcagtagcgcacgcacaccgatttggtttcgcaccagtcgtccagccagtccgggccaaaatcgcgcccggtaccggactgcttcattccgccgaacggcaggttggcatcaatcagcgtatggctgttaa

SEQ ID NO: 110406 - DNA, 591 bp, Enterobacter aerogenes
atgacggcggaaggccacctcttcttttctatcgcctgtgcggtatttgcaaaaaatgcagaattaacccccgtgctggcgcagggggactggtggcatatcgttccttccgccgtgctgacctgcctgctgcccgatatcgaccatccgaaatctttcctcggccaacgtttaagctgggtctccaaaccggcagcccgcgccttcggccatcgcggttttacccacagtctactggcggtattcggcgcgctggcgctgttctacctaaaagtaccggagagctggattatcccggcggatgcgctgcagggtttagtgcttggctaccttagccatatactcgccgatatgctcaccccggccggcgtaccgctgctgtggccttgccgctggcggttccgcctgccgatcctcgcaccgcgcaaaggcaatcagctcgagcgcgcgctgtgcatggcgctgttcatttacgccgtctggatgccgcaaagcattgccgaaaatagcgccgtgcgctggtcatccaatatgattaattcgctgcaaataacctttaatcgctttattaaccatcaggctgaacgataa

SEQ ID NO: 110407 - DNA, 981 bp, Enterobacter aerogenes
atgaaggaatcggttagtgcatcattaatcattcagggtagacataggttctatagtttaactttacctatagaaattatagcaagttgctgttcccctaatcctagatctgaagacccagaggaaggatttcaacgaagcttagatgagaaccgagctgaatctatcgctaattatatttataatggtggtgtgataccttctagtattattctttctgctcaagcatctgctgattttgagtataatagtaagaaaaaaacattaagcttcaataatgatattaaatcgtttctgattatagatggtcagcatcgtgcatatggctttagaaaattatatgaaaaaggttttgatgataaaaagttacgtatccccgttgttattttttcagagttgacgcctatagatgaagctaggttgtttattgatgtaaatactttacaaaaacctgtgcctaaagaattattattggatatcaaaaaactagcagaaacagagaatgcagaagaagaaatgctagatttgatttttactctatttgaaaagaatactacaagtgcattggtagggaagttatctaggtttgagaaaaaaagaagtctaatatctaaggtaacgttttatgaagcttttaaattaatattacgtgcatttgatatttcaagcccacagcgtttatttgaaattgttaatgcatatctattcgcagccgaggatttgttgaatgctcaaggtgttagttttgatgaggtaataattaaacccacgtcatttaaaatattaattggccatagcaaagctgttatcgcaatgatatttgataattcaccagaatcctctggtttgatcagtgagcataagaaatatcttaacagaagtttaaatggaaatatagctactgtcttaaataacagggctactgctaaatctatagagttacttgataataagttacttaaaagaaatattgtgatatga

SEQ ID NO: 110408 - DNA, 933 bp, Enterobacter aerogenes
atgacaaatcttgttaagattgaacgactatttaaagctatatcttgccccccaattctgggggcaagtagagtagcctatgggagaactattgaaaaacttgatagtcttaatttcgcattgacaggtgtaacggttcagcctaatcaagttttgacattacaaatgcttgatcctaaagaatttgcatattatatgtcaggagaggccaacaggttttttctcgcatcaatggtttctttagatagagcaaaaaatgatgatggcgaaaatttatcttggcagattgttgagcattattatgctgcatactatgctgttcattacttgattcgtatatctggaacaagtttaaccaatattgatagggcggcacttaatattatattgaggtcgaatatgacagggagtgtttatcaaggcttatcaagtgggttaaattttatgcattatgataatttatgcgaaaatatatccttacacaagcaagataaaaaaggtggttctcatattgacgcatgggcgtcttgggttcgtgtaattgaaaaactactattagcggctaatttagatattgcagagtatacagaaagtgcagtatcactttctgagcatcttaaatttattaaacgaagtaatgatacttttagtcctacggtgattcgaaatgaaataaattatcaattctcgaacaacgcttggtgttttaatgatttaactagaaataagattaatagtgttagacgtgccttggttgaaaataacatatcgcttaacaataatggtgatttgctagaaaatcttatctgcaataataatcttattatttctttggctaggaaggtgttcttatcagcctcggaaaataattcaaaaagtatttgtagaagcctattgaataagtataaaagaaaaatccccgccttggtatga

SEQ ID NO: 110409 - DNA, 141 bp, Enterobacter aerogenes
atgagcccgtacgtagttgaactcatccgcgaacgctggcacaagctccgcctctgccggcaccgcggaaccatcttagttgactaccgaattttgaagaatttcgtccgcatctatcaggcttcaggagagaaagcatga

SEQ ID NO: 110410 - DNA, 684 bp, Enterobacter aerogenes
atgtcatcttgggaatgtccgtattgtggccgcctgtcagtcgcgaccaagattcaacaaaagtataataactatgttgttgacgctgatacgaagatagggaagcttttcgtgcaatcgtgggttcacgtctgtccaaatcctgattgtaaggaatttacttataaatcagagattggttctgcgaaaattgaagcaaacaggtatgttatagcagagcctattgaaagctggatgcaccgccctcaaggagtagtgaaacagtttcccgattacattccgaaagcaattcttaatgattacaaagagtctgcaatgattgctaagctctctccaaaagcatccgcaacattagcgcgccgatgtttgcaggggatgataagagacttttggggggtaaaagaaaaaaatctcttcgaagagattaaagctattcaggacaaagtcgattctgatacatggcatgcaattgacgcaataagaagcattggtaatattggtgcccacatggaaaaagacatcgatctgattattgatgtcgacaaggaggaggctgaactacttattagcttgatcgagacgttgctgagtgattggtatgttgagcgagaaaacagacgactcagatcggcgaaaatagttgcagcagctgcaggaaaaaaagaaattaagcaacaaaattga

SEQ ID NO: 110411 - DNA, 621 bp, Enterobacter aerogenes
atggaaaacaaagcagagttattccttcgagtcatgagagatttggacagagcagataatgagatcaaagatcttttcatccaaatgcaaggcaaggattttggttatgatttccttttagcggctggcatcgccagaagaagctgcgctataacttcaggttttaaatctatggtggatgcgaaaaattctctatgtgcgcttgctttagtacggatgcagcttgacaactctctgaggctttatgcagggttcttctcaaaagacagaacaaagttctcaaaagatgtcttgaaaggaaaagtgatcagcaaaatgaagtcagatgataatcagcctatgactgacaattatcttgcccgcagagtaagcacaataaacccatgggttataaatgtgtacaaaaagaccagtggatacatccatttttcagaagaacatattaaggaggcgctgcgtcacaagggtggcgaacattatgaattagttatcggccctaatgatttcgacagaaccgaagaacacttcttagagccccttcagtgcttcacccatattacgatgatgataaaaactcaactagaagattggctagggcttttggacaaaagcaagtactaa

SEQ ID NO: 110412 - DNA, 783 bp, Enterobacter aerogenes
gtggattcaattgaaacgaaattatttggaagaatcaaaacgcccaagaatttagggcaactaattgaaataacagaagaacatgcagctaaccgaatgaatgtttatatgtggagagggcagggaaacgttgattgggcgattcacagtgctgcttatcgacggttgaagtttactcaccgtaatgtctctgagcgaagaatgagaaactacgaggttgagttgttaagaaaagctcgccacaagggttatgggtatgaagagggaagacgtctagctgatttcgaagtacttgctaagcttcaacaccatggtgcagctactcgtttaatagatttttcaaggaatatgctggttgcattgtggttcgcttgccaatcagaaagaggaaagccagggttgctgtttgggattcattcagattctatatatgggcaggaaggagaaacagaggagcgcaactatgatcagatatttgagaaagggataagcaatggtggtgctacaacatgggagcctccagcggtaactaaaagaattgcagctcaaagtgcgcaatttatgtatagcatcgtaagtgatgacccaatgggaagtctcgattttgatcactcagaagaggcctatcttccaattgctatcacggcaagtatgaaagaagagtttttaaggcttctagaaggtacttttgatgttcgtcagcttactctcttccctgatcttgatggattctgccatgccaatacagaaaagaatgggcgctgggacaacgaacgatggtaa

SEQ ID NO: 110413 - DNA, 294 bp, Enterobacter aerogenes
atgataacagagatatactcattaaccactacagaactcaatgtcttgaaagtcatggcagaaaaagacatcgactggacatggatgatactggatcgcacccttgctacaagagggattcccgggtttggcaatgttgcgaacatagtaaccaatctgatgaatgaagggatggtcgatgctttttatagttatagcgaaaacttatcgagaccacgttatcgcgtattagagcaaggtcatcagttgttgggtcaaattgacgaggttacaagggattacgacatctcatga

SEQ ID NO: 110414 - DNA, 372 bp, Enterobacter aerogenes
atgcaaaccatatcatcacacccgacatgggcggctcagccctgcctgtcacccgttgaaatctggcagttgctgctgactcatctgttgtcgcagcactatggtctgacgttgaatgacacaccgttcagtaatgaaaccaccatactggaacacattgatgctggagtatcgctgtgcgatgcggtgaactttcttgttgaaaaatatgaactggtaagaattgactgtaatgattgctctgtcatgaagaagtcaccgttcatcaccagtatcgatattctacgtgcccggaaagcctccggtctgatgaaacgcaacagtcacaaaactgttaccagggtaacggcaggtcaacttcaggagctataa

SEQ ID NO: 110415 - DNA, 606 bp, Enterobacter aerogenes
atgtctggtagccacaatgatagtaacattagtgcacactctggaaatgcgcagaacaaagctgaagttgttaaagcatctttaaacataggcagtgcgctattggtcgcaataatcgcagctttagggggaatggccggctcatatctcacgggttcaaagttagttgaaagtacaagagtcccagcactcatcaatgccagaacgatttgtactactgctgttaacgaagatgaatacaaatttcgtgaaaaagcctctgattttttggctgtggtagctgcatttgatgctgataaatctcttttatataaagctaatcataatcaactttaccaaccagcgaaatcagccataactaaagcaatgtcgataagttcttattcttctgaacgtctatcagtactggcagtaaatattgcatcatctataaaacaacttgcaatttctgatatggattatgttatttcagatagtggcgcttataaaaaactatcttcctcaatggaggaatggccagaggcatataatgaatatatgaaaaccttcgatgtaaaacgtgcttcttgcaactccgatgctataagctataaatcagaaaaataa

SEQ ID NO: 110416 - DNA, 1119 bp, Enterobacter aerogenes
atgttctttgatgctgcagttggaggaggacgtagagagctttattctaccgaagaagatctttctggtttaaaagacaacacccttattaatacttgccgaaaacttgaattaatatctgacgttgtttacaccaagctcaatcatatattgactatgaggaatgacattggtgcttcgcacccaaattcatactccataaatgcttttgaacttcttggctggctccaaacatgcgttcaagatattttgaacgacaaaccgtccgcgtctgccatacaaataaaatcattccttgagaatctaaaaagatccactgatgttcttgatgaagccacaattcatagcatggaaagacctttgaatgatctgtcgcttcagaatacagacaatctactcaatagtattttcggcatatatacagctgactcaacaggaaatgttgtcagaaaaaatatcgctctttttgctccgcatatctggaataaaagcagtgataacgtaaaatacaagctcggtgtgacgctagacggatacaagaacaatcttcacaacgagaaacatgctttaggtattgagttttttacgttttgtgatggtaatcgttatcaatcattagactctagaattatatcactggacggccatgccgacgatctcttagaggctaggtatgcttgggataacttttataatgaaccccctcatatgcggaagattctttcgtatttaaagactgaaaatgacatacctttagagagggttcataagcttataaaaacagttttgatttgccgtgttggtaaaggaataccatataatactggtgtttctccggcgggacgacctttgtatgatcagttttttggcatgcttggcgatcaaaacattatcaatacagttatagcaatgcactctaatgaagtgcgagtgaatttagacaacaaatactgccagcaacatatggtaagcgttttgactttgttaagagccaatgctcgtagcgaaagaattcaagaaattatagattttttgatcgccaaccaaacgattctccataaagtacacaacgataagagatatagagatctaactaaaaatcacatcagttttggctaa

SEQ ID NO: 110417 - DNA, 213 bp, Enterobacter aerogenes
atgttttcttacgtgatgctgggtactaacgatctgccacgcgccattacattttacgatccgctgatggatatactggcgtatcctcgcggcggcacggacgagggggtaccaggcctacgtccgcatttcggcgaaggtttctacagcgcttacgtcagagatcccgatggcaacaagctggctttcgtgtattacaccgcacaatcctga

SEQ ID NO: 110418 - DNA, 321 bp, Enterobacter aerogenes
atgtacgccaaatcctttatcgctctcgacggtaacggtcgtctgaccggtgcccgtattgcgcagactgccccttacgacaggtatacctgccaccattgcggaagtgcgctgcaataccaacctggatacgacacagaacgcccgtggtttgcacaccggcacggcgatctaacagagaacgggcgacagcactgcccgtatgtaaatcctgattcgggtgaaaggcaattagccagacggctacagcacttcctccccaatgctatcctcagggtcagtaaagccgactggctctgcgcaccatgcgagaccagttag

SEQ ID NO: 110419 - DNA, 2256 bp, Enterobacter aerogenes
atgaacaacgctgatagcgaacagttcctgcgaacctttttccatagagaaaacaatattatctcttgggaaaaaatcgcgggtggcctgctagaagcatcaacccaacagcggttgaccccctggcttgacgatgtccgcaacggatgtttcccggtgatcctgccgcgcgtagtaaagggcagcaacgacaaagtcacctggtatgcaatggccgatgaagaacgagactatgcggagttgcgcgagttattagacgcgcacgtcggtacctcgtggtcagactttaaccgccagcgcacgatgctggatccgagcgacccggtggaaaaagcgttgatagaccactatagcgatagagtatataaatttagctctctttctctgtcgaggatcccggagattttcaatggcatagagcgcttgcgccaacaactcgccagccgcccgagttaccagctcacacttctgcgcccgcgtggccgtattctgcgtgatattcgtgccgccttgcgccgtcgtgatgtgccgcagactcgcctctatctgcaggaactacgtgaagctggtggcataggccatattaacgaactgtttatcgaactgcgctgtatggctctggaaggtgacgccaaaagcctgctggattcgactcagttgcgacaggtcttggatatgccgcacccgttggtgttggctgaagaagtaatgacagtcttctatcagcagtttctgctgaagtatgagcagttgagcgacctcgccgcccaacgacaagcatttaataatttgctggtgaagaacgtaccgcgcctgttccaagtgacgcagggtatcaacacgccatcggcaatcaaaaatatcctactgtggttactatctgacacacaaagtgatccggcaagactgagggaacaggcacaacaagtggttgccggtatgaagggggcaacagacgatgacctgcactggatccgccggttgctggaagcattcccgaccgttgcagtggcctccctaccgacggcgagcatcgatgaattgcttgccagagccgatgaatatcctgaaagcgttctgaaagagttactgttgctaccggtcagcgctcgcggcgcagccattgctttgcaatgtgcctgggtcgtaggcagtgcagaagctgctgtgagtgctgtcagttatctgcaacaactggcgcaacaagagcgcgacttgttactggcgaaaccggccttccagcgttattacactgccttacagttgatgctgccatccaaacgaacagaacatgatactgcaggtatcaataactggcaggactggttgaaggaagtcttaaataaccctcgatggtcgggggcgatagaagcggtagaacaggcctgcggccaatggaacgcagcggctttccagcccgaggcatttgtttcgttgctggataaaaccaacaactgcgccagcatggtgttgcgcgatgccattccagttctgctcgagtggctggataaccatcaaacaagtgcttcttggcagtctgtccggttagcattgctgcaacaattggcactggacgacaatagttctcgcgaagatatctttactgcctgtgatctagcacgcggttatttagagggcgatagtaatgcgcacgattaccgcgaactaatagaaaacctgcagatgatgatcgagagttcaggtaccaccagcgctagcgcctggctggatttgctggaactgttcttggtctacccaactgctgaccaacttgccagagaacaattattcaatctggtactcaacatgttttaccgcaacccagcccgctatagtaaattgcagtggagcctattggctcagtttgctggtgagtgcggacttgtctgtgaaattcccccacaaattttagaggacagtggggagaaaaatgatgaggttcgtgtcggatcaacattgaatgacaaggtagtgggcatttatacattgactgagtcggtagcacagcgtgtgaaaaaacaactactagccgattatcctcaggccgatattcgcctcaacaacgataaaggcggctcaaccgtgctgcgttcattggctagagaagcggacgtatttatttttgcttggcttagttctaaacattctgcttattacgcgataaaggaagagcgaggggataaaccattattgcaaccttccggaaaaggcagtacgagtatgctggactgcatacgtagttatcttaaattgtag

SEQ ID NO: 110420 - DNA, 543 bp, Enterobacter aerogenes
atgaatacccgtcgtatctttaaatccagaacttcacgccagagtgaagttcttgatgtactcagctccttgttggtagcggagatcgctcagcccagcgcggaattgtggattgtctcgccgtggatcaccgacctcgacctgctggataatcgcaccggccgtttcgactacctcgaaccggcctggggacagcgtcaggtgcagacctcagaactgctggcgcgtgcggtagccaacggcggtacgcttaaagtgatgaccaacgagacccagcataatgcacgctttttacgccagttaaccgaacgcgtcgccaactacggcatgctggataacctgtacattggccagaaagaggtgctgcataccaaagggtttctcggagatcatttcttcctaagcggctcgatgaatctgacgatcggcgggatcgtgatcaatgatgaacaaattaacttgaccacagataaaaccgccatcgtgcaggcgttgttggcgtttaacgacttttaccaaccggctcagggaggtgtgcaatga

SEQ ID NO: 110421 - DNA, 4530 bp, Enterobacter aerogenes
atggaacagattattcgcgcagtacttgatgggctggagtcgcaggaggcggtactgctcacttggggtaacacacaaggttttttcactgagtccgagctccgtaatactatttctcaggtcctacagaaccacccgctcgacgccaacggcctaactagttttggcatagtgaaagttatgatcgatcgcggattgctgctgcgccaccagcaaaatggtgtttcggtgtttcgtacccgcatggcggaggcagtgcggctttatagccagttgcgccagatgtttcctaagcacggctttaatgataactggcgtactgcaccgacgttggtgtccgactatcgcttcttacgccgccagcgcaaatacccgaagcgtgaccagcaggctgctgaagttttgcagcaacttgatgaaatagcaggttttacttctacgcaccgccaactactatcagccctgctcagccactcgagcggaatgtataacctcgcctactttcaacaagaagcctgcaaaaacgtactgcgcggattgcagcagagccagcaccgctcgactgctaccattgtctgcgccggaactgggactggtaaaactttggcgttctatctgcccgctctgacctttatcggcagtgaactggtcgccaaaagaaaagacgcggtgaaggctctggctatctacccgcgcaacgaactgctgaaagatcagtttattgaaacgttgcggcagacgcgcaaattgaacactgaactggcaaagaaaggtgtgcgcaaagtgcgtatcgccgcattgtttggtatggtgccaactaataaagaggcgatccatcgcgactacatgaaagatgcctggtgcaggcatcgcaatggcatggcttgtctgtacattccctgcccgacagagagttgtcgcggtaaaatggtctggcacaccgccgattatgataaaaaccttgaacgcctgcattgcgaaagttgtagccagaccatcgagcctgacgaagtgatcctgacgcgtaagcgtatgaaaatcgaactgcctgacattctattcactagcaccgaaatgctgaataaacagatgggcaacccgtttctggcatcgctgtttggcatcggcaaaaacgtagccccaccgtcgatgatgctgcttgatgaggtgcatacctattccggcgtcagcggtgcacagaacggcatgctgatccgccgctggcggcatctgtccggtgccacaccgcactttgttgggctgtccgcaacgttggagcaggcgacgcgctttatggcttcgttaactgggctggaagagtacctggtggcagaagttagtccgattgaagatgatatggagacagagggcgcggagtacatgctggctctacgtggcgacccggcgtctcgttcaagccttttgtccaccactattcaggccgccatgctaaccagacgtatgctcgacaacgccgcagtgccagtcagcaacggtatgtatggcacgcgcagctttatattcacagatgatattgacgtcattaaccgcctctattttcagctgctagatgccgaggggcgttactcgaacggcaatatcaatgccaaaaaagaaccgctggcgatgctgcgcggcgacgctccaaatgaagataaatttacctttggtcagcagtggccgctggccaaaatgattggtcatacgctcgattccgctgaccggagcaacgttaagcgcacctcttcgcaggatgctggcgttgaccatgctgcggatctgattgtcgctaccgcgtcacttgaggtcggatttaacgacccgaatgtcggtgccgttatccagcataaagccccgcgcgataacgcccaattcctgcagcgtaaagggcgtgctggacgtcaacgaaccatgcgcccgtggaccgttgttgtgttgtccgactatggtcgtgaccgcatggcatttcagtgctacgaaaacctttttgagccggtactaaaggcacgccagttgccggtcggcaacagctacgtactgcgtatgcaggcggcctttgccactatggactggctctccagccgtaacgagtatcttaatcagtggaatcgcggtatctgggatgacctttccgtcccgcaggacaaaggtaagccatctgaagctcagtcaaagctggccgatctgattgaagaccttctgaacagcctgaaaacccagcaggagtttaacacatggttggctgaagctctggggattaaggacgaaaaacagctgcagtcattgctgtggcaaccaccgcgcgcgattatgaccgcgtttcttcctacggtacttagaagactgcgctcgaactggtcgcgccttggcattgagaaggccgataactgccgcaaaagcacgccgatgcctgattttataccttccgcgttatttaacgacctctgtctgccggagttacagattaacctgtcaggtgaaaacggccaagagcccaatgcgtacagcatgccgattttgcaggggatgaaagatttcgccccggggcgtattagcaagcgctttgccatcaaaagcattcgcgaatgccactggctggtgccgaaaaaacttgagctgaaagatggtacgcatccattcccgatcgatgattactgcccgccagacaaacgggagtccatgcccgattgtcacattaccactcgcactggcatggaggttatcccctgcttccgagcctgggaagtgactgccagcacgccgccagatgatcttaaactgagtgaaacctcaaatgcgtttcttaactggcacagcgagatccgtccacctcagaacggcatccctgcggaagtgccatccaacaatgtctggcaggatattttccagcaggtggagttttacagccatcagcagcactgtccgatcgaagccgtgcgctttgctaccggatcacgtgccaatattaaattcagcgaccagcgtgaagacctgcagattgacttcaagtttgaacaccaaaatgaacccgctgcgtttggcttctcactatgggtagatgcggtaaaattccagtgtcggctacctaattttgatttcgctagcatcagcaacaaccgtgaactggtagccggattacgcacggtgcgcttcctgtatgaggtcagccacgacgaggccatctgtgttaatactttcctcggcggttggctggcagaaactgtcctagcaggtattggcagcgaagcagtattgaaaaactgcactctggagcaggcgttccgcgcaatggaacacaacagcgcagggatcgccttgattgacgttccagcacggatcttccagacgttgtatgatgcgcagaccggtgaagatatagagcaggatttgcagcaaagcttgcgtgaactgctggcccaggctccggtgatggcaagaattgcctactgggtggaactgctgtggcaaccgctggataacacttggctggagtggttgaccctcaacttcaccaacacgctgggtgcggcgctgctacaaaccgctatgcagttgtgcccggatgccgacgacaacgacctaatccttgacctcaacggtgggccggtgcgcactgcactgctagcgcctgaccagcgagaaatctggctgtcggaaaccaccgtgggtggtggcggcatcattgagaagatccaacagatttatcgtgaagatccgcgcagtttctttgatttgctagactttaacctcagtcctggcaactacgaaacaatggacaataacgtctggcacctgctgcaaaccatggtaaacccggcatcatccctgcctacgtgtatgaacgaaatgcgccgtgccaacaatcatgccagcctggtccaggcgcagcgcaacttgctgggagaattgcagcgcagcggctttatgaccagccacagtttcctgtcggcgatcaacacccgcctattacggccggggaccgatgccagcagcgacgtctttttactgcaactgcaacaggattggcgacagcaggagcagcgactgggcattgaactaccacagcgtgtctatgcctttacctgtagtcagtccagcgcgcttgaccagcaactacaacaagcgagccaagggcagtacaacttggagagttggcgcttaaatacctgtaatggcctactgtggccacgtggccataccattcgtgatagctggctaacttggtacaacccttacagctttgccgggccaaccgagcgcctcctgctggcccatgtggtgcagcacagttctgccctggtagatctcagccaaccagactggatgcagcagtgtcaccagcatctggaaaataatggcaaatgcgagttagtggccaaaccgggcgatgcgataaatggagccatcgcaactctattagtcaccccagtagaaatgtatgggttgttcttctacccacgcgtcagtgccctgcgccgccacaataatgacaccttcgccatgattgaaattccggaggcgatccaatga

SEQ ID NO: 110422 - DNA, 792 bp, Enterobacter aerogenes
atgagtgaagtaaacatcaatgacgtggtaactcccgtagccagcgtaccggaagaacgcggtatttttgcacggcgcagcggtgattttaaagcacgccttcaacgctaccaacaaatggagaaagctcaggatatccgcgataatctgctgcggatagcaaaaaaaatcgatactccgacccaaacactagcacaggccctctgtagctatagggtgttaaggcaggtccgcgacgatgaaactggtaagccgattgttggtccgtttgaccgtgcgactttcggcaatccacaaatcctgctgacggccttttgccagcagtacgcgatgcataaacatgatgttgagcaagagggtgaacttgccctgcttactcaagaaattaggcgcttagccagcgaactcagcacgcacaccgccgcggcgtgggttaactatattcgtggattaaaagcgcagtgggaagtggatcagagactgttcagtaacttggcgcatcaggaaggacaacgaaaagtacaacagcactacagtgatctcgtggagaagttcaccaacagtagccgggggctgccgaaaaccattgaagaatttgagacggtgagagacctgcatgagaaactctgccagcaacgcggagcacttaagctggatgtgccagaagaggtcaatctcttcctcaaagccgtagccgggcaaggtgccacgctcgatatgttgacgcctaatgtactcagttggctgactgaagaagacgacccgacgcgctatcgtataagacgcctgtaa

SEQ ID NO: 110423 - DNA, 3057 bp, Enterobacter aerogenes
atgccacaactacagagctactggcccagcgagcagaacgttactgcctgcatcctaaccgaggctgagtcactggctgacagccagttgctggcggtgcatgaaccgatgcgtctcgaccgcattgagtttcaaagtggtaaggtcacgcaggtgggagagggggcgctgctggactttctgcttgaacataaccgcccgctgccgctaattggcgcttctggcgtggggaaatcccacttggtacgctgggttcatgctcagctcaaacgtcgtgaagatcatgcgaaataccacattatccgcatccccaaaaatgcttctctgccacgtgtacttgccgccattctggaaggtcttgacggcgaggagtatcagagtattcgagaaaaggttaacggagttggaaagcaattaatccccgaaaacgttgccgaacatattgctcttaaattgcgtcaagcgctaaacgcagcatatacagatgccattgaagagcttcgccaagaaaaaatgggaaaaattcagctggaagaaagcagaaaaaagcagctggaagaaattcaacaacacgcagcatcatcccgactgcccgcgctgttttttgacagcgtgatgacgcagtatttcactgctcctggcgcctgtcttcacaatatagcgcagcgcttctgccagggagctaacgacgacagtattgccaacttgcggtatgaaatgtctgcggaagacttcaccttcaaaggactggacttcaggcaggtttcaccaacagtgcttccctacctgcgcaaccaacagttgcttaccagtgatgaaaaaaagcaagcagcggctcgcgttgtcaacgtggtgcgcagccaggcgttagaagacaccttcgtcgaactatttagctttaaccgggccaatttccaggatctgatgcgtatgatccgccgacagttgctggcagaaggtcgcgacctgatccttcttgtggaagatcttaccgccacctcggcgattgaagatgtcctgatcgcctgtctgatagaggaagatgagtacgacggcaaaaaggttttatgtactctaagatcgattattgcggttactgagggtcacgatagctttaagcgcctacgtaatacactaggcacccgcgcccgctacgaatgggtgatccagcagcatgccagcgaaaacgatgtcgcgctgaaaaaacgcgttattgacttttgcggccgctatctcaacgctgcccgtcacggcgctgctgctctggaaacttatcacctccagcaggacgcgcagtgttatcaggagattcctgtatggcaggatcaggaggtgctggagaacgaatctgctgcgccagcgctggccagttttggcagcagtagcattggtcatccgctgtttcccttcaacccagcagccattgggcagttggtagaacgacactgcaaagttaaagaacaaggcctagtgtttatcccgcggaatattttgcatgaaattttgcgcgagccactgaaaaagtatcgccagaattatctggacgggcagttcccgccatcacaatttgctgagattgtatgtaacccggcattacagcagagggtacgcctggaaggcctcagccagcctgagcggattaattcactgctggctgtttgggggggaaatagtacaaacctggcaggtcttacgcccgccatctgtaaagagtttggtctgccggatgcggcagtactgttggggggcggtggtacgccaccggaaccagcaccggaaccagcaccggaacctgtaccagtaccggaatcagtaccggcaccaccatcaccacttgatgaatggaaactcgtgctggataaatggcaccagagcaagacgctcgagcaaaccagagcccgcgacattcgtaagtggctcctggaagcgctgaatgcccgtatcgactggtcaactgagcttatccagacctctctcatggccagctcagcaaaaactcagggtaggatccacttacccggcgtgcttgtagggaatcagtcacatccgctggtgaagcttgaagatactcctgagttgcgtagcgcctgtctggcgatggcgcacttcaaccattatcagagttgggattatgacggcagtgagatcgactacgccgcctttcatagtttcatggattgcattgagcacgaagtaaaactcaaggtgttgcaggaagaacgcgaggagctttctagtatcatcaacgatctgcagttaagtggtgcattccttgggttggatggattatcagcatcccatccggccacgctggtgcaggcactgttaacggaaccgcaagtcgcaaacagcaaccatacactgctggatgagttcttaacccaagcgcgcgataccgtgattgatgagcatctgaaacgtcgcgagcgtttaatcgcgcttacggcggcgaaaaaaccgggtgctcagccgtatgctattaacggcttaatgctggtggaggcgtctaagaaacaaccgccagacgctggcaaacaaccgggcaagatccatgaagtcaaaagtaagctcggtggctaccgcaccctgctattgaagacccaagagagcatcactgaacgcctgagcgacggcaacagcgccagcctggcagcggtgaacctctgcgacaccatgaaggagatagtcgaactggcgaatagcgcggacgtcgcccgtccaatgggtgaaactgtaccggtactgctgaagctgctgaagagctggaaagatccagagctgaaaaaactgatcagacaactggaaaaactgacgttgccagccgataactcgcacatgttgatgagagagatccttgccatcaatggcgagcagtttgaggcgtttcgacagttattagagacttggggcaagttcgaagacgccaccgacaagtatgtgcaacagcgtataagcgataagggcggagaccaagttgaggatgcagaaaaccaagttacagataccctggcaaacctggctgaacagttaacgctgctggaggcggacttatcatga

SEQ ID NO: 110424 - DNA, 906 bp, Enterobacter aerogenes
gtgtcgattatcaataatgcccatggtggcagccagtatgccgtgctggccgcattttatcaggtgctgaaagccagcccgaagaaccaactaccgcgtgaaaagctgatggcgctctgtgcaccggaaacattgcaaaccggcgactcacaaaatgcacgtggtaaagcgtctcaggaattaagagcatggctggacttggggttactgacggaagaaaaagtagaagagacaacacaaatcagtttcaacgcgaactatttcagcacaaaaagtatgccgctgcgccaggctgcgcgccgctgtttacaggcacaggaaaataacagtgacctgagctcacgcgatgaacgcgccgtcgaccttacccttttggctgcattgctgctggcgctggatgtctatcagaacgcagaaatcaaatcgggcaaccttgaagtgctggtgaacacgtttatacctgattttcgtatcaacagtaatgaaattgctgtcgttccggggtatctcagttggctgggctttgctcaacaactcactcgcgacagttacgccattgaccccaccgattctattcgtgaagagttaccgttccttatgcgtgttggcgaacaactttccatcggcgaagtgctgcaacgtcttaatcgggcgctcccggtgctagatggtggcagttatcgccagcaggtcgaggagcgtatcagtctgtatggctggcactctcttagccctaaccgcctttccacctcgctgtcgcgtgcgctgctgcggcttcagctttctggagtaatcaacatgaaggctgagtctgacgccagcggcgcaatgcagttaaccggccggaacggcagcgtgctgcgtaccgtaacccatctgaccttaaatgatgtgggagtccactaa

SEQ ID NO: 110425 - DNA, 2568 bp, Enterobacter aerogenes
atgaatctggcgcaactgattgataatgatgttatttcatcaaggttgagtgagtgcctgctgccagaggcgactgccggacacctcgaccgccgggcgttgatccgtgactggctgtaccgggaaaaacatgcccaccacaacaataacgaactgaccatccctgatgacagccaccctggttggccaagacaggaggagtgggaagccagcggtattaactgtcaacgactaggtcagacctttctgctcagcgctggccctgcttggtgtccgcagtggctggagcagggaaacggcatgcctttcctcgccagcgatcagcaccaattctgccgccaggacactcgagtaccgatggactatgtcctgcgccgttacttcaagaaggacaactatatcagctatcaggcaccgggccagcgcgatgcggtacgccgggctctgttcgccccaccgggcagtacgctgttggtcaatttgcccactggcaccgggaaaacactggtagcgcaagcattagctctgacagcctcagctcccggggcactttgtgtactgatcgccccgaccacggcgctggtgttggagttggctagccgtttccggaagttactgattgaagcagggaacaaagcagaatctgtcaccggctggtatagcggcttaccggcgcaggataaatatgatacgtacatgcgtatccgtgtgggtgagcagcggctgatcgtcacatctcctgaagcgacctgcagttccctgcagttcgccttatttgaagcagcaaaacagggagggctgcgccatgttattgttgatgaagcgcatattgtcgccagctgggggaacgactttcgcccgcatttccagcaacttggtggcttaattcgtgggctgaagcgcatcagccgtgaagcgaatcttacaccgtgctcaacactgctgatgagtgcgactatcaccgaagccagccgtaaaatcctgcgcgataccttcgatcaggagatgagcgaagtccatgcctgccatctgcgcccggaacctgcttactggtgttatcgggcaaaagaccacagcgacaaacgggataaggtgctgcaatcgctggctcatgcgccacgcccgctgatcctctacgtgacgcgaccgaaagaagctgaagagtgggcgcaacagttgcgtttgcaggggtatcagcgtttggcaacatttaccggtgatacaccgagtgaagtacgccgaagcctgctggaaaaatgggataaaaaccaactggatatcatgattgcgacctcagcatttggcgtaggtatggataaaaacgacgtgcgcacagtgatccatgccacagtgccggaaaacatggaccgcttctaccaggaagtgggacgtggtggacgcgatggctatgcctgcacctcactgctaatttacaatcatcaggatgtcaaacaggcagaacatctgtcctcacaaaagttgattggtcttgagttgggcctggaacgctggaaaaagttatggggtagtgccgaatcggtgggcgacaacctgtatcgtattgatatagagaggatccatagcggccttaatttccgcagcaaacaaaataaattatggaacttgcgtaccgtactgatgatggtgcgtgcaggagtgctggaactggatgccgatctacaaaacccgccagacaaaaaagactttgccgatgttaatcgctacgaagcggcaaaagagcaaatcatccgacagaacggaaattcactggtagtacgcatcctgcgtagtcaccacaccggagaagaattgtggaaaacacgtattatcccttcccgtgaagagacgctgcaagctgcaagggctaaccataatgcattaatcaactggctgcatacgccactgagcagaccgctgtgcgaggcacttgtggatctctactccatggcggaatttattccgggccacgcctgtggtggttgccctgcctgtcgcgataatcaggcgcttactagtaattatccgagcccaccgacgctgttgcttaacccgccagcgtcggtggcacagcaggcgttaagccgctggcaggcgctcagcggcctatcttactccagttgctttatcacctatccgccagttaacgacgatgagtgggaacgtgagaactggtatcaccgcatcgcgacgctactggtgcaactgtatcatagaggcattgtccagcgcgtctgggcagatcctgccttgttgcatagtatatttagcgccattccgcgcggtgagcgcctgatcttgttgagtgacgaattgcctgcacgtgatgagccagcgccggataacgatgtaatggccgagttggcagagttggtacttcccactcaagagtcctgcgccaatggttacctgccgcctttcaacccagcaccattacaactgacgctgatcccgcatgatatgcccgatcctcaccatcctggcggggtgcattacgttcttctcgataatcacaattggatcaccatcgaacaacttcaaaggaaactagacagtgtcgattatcaataa

SEQ ID NO: 110426 - DNA, 3156 bp, Enterobacter aerogenes
atgccccttgaagttggcgatctcgttgactcgccttatggaatcggcaaacttattcgcattaacaataatgatgctctaattaagtatttcgattctcccgtaaattatgaaggcatagagcaaactgttgaagtaaaacacctaaaaaaagccgaactccacgcggaaagtctggtttatcgctacgactacgaggttgcacactggcagattgcacgtgttgttggtgccgtgcctggaggggtgcgtttgcattttcctaacaagcagcaggaagacgtcagcttaaatgatatctttgtgcgctgggatcgccctatcagcgatgctgcggcccttctggccgagcgcattacctatacccccttctggcaagatgcccgtctagcttatcagcatcagatgctgaaacaacgcaacgcttgtgctgggattacctcttcgctgtcgtccagtattgaactcgaaccttaccagttggccgtcgcgcgtcgggtgttatctgaccctattcaacgctatctgttggctgatgaagtcggcctcgggaaaaccatcgaagctgggctgatcgtgcgtcaacacgtcacggaaaatccgctcacccactgcgtggtgattgtggcgcctggagttctgcaccggcagtggcagcaggaactttctgcacgttttcacctggaggaactgcttaataagtcgatccatatcattgatatggccgccttcagcacagcggaccccctgtcgttccgccccgatatgctggtgattgacgaagctcatcaggtcggtgcctgggcatgggatgcagagtacgagcagcgctacgctagtgtgaactacttggcgcaacaaagtgaaaaattgctattactatcagcgacacccgtaactggcaatgaaaagaacttcctggccatgctgcatctgctggatgctaaaaattacccactgactgacactggcttactgaaatttcagcagcgtatccagcagcgcgaagaaataggttcactgttctacgcgtttaactgtgataacgacaacatgacgctggaagagaacctggaagcgttgactaggatgtttcctgaggatgaagtactaaacgggatggcttcacagttgcttccccatttagatatgatgcaaccgctgcggagtgaggcgcgtgatctgctgatcaataaaatccgccactacattggtaaccgttaccgtctgcaccaccgcctgctacgcaaccgccgtagcaaccccgccattagtgtcctgatgcctggcttgtccggcctatcactaaaaaaatatgccacgacgaacgccagcaacgacatgatgatcgcctggcgcgaatcggcaataatgatgcacccacaagaccccacgttggcggcaatttatcagttactgtttgaagccgctatcgctacgccggaactactggcccggcttgcaaactatcgcttacagcaggagtcacttggtgccgcgcagggctttctctatagtgattcacagctcgcgctgttgcagcatccgctgtttgatggcgagaaggagatcctgcttgagctgatagaccgctgcaaaatggagtgtgacagcaagcgccagcgcttaattgatgtattggaaaaacttctggatagtaacgtcagagaactcccttatattgtggtgttctgtgaccagccatgggtagccgaccaggtatttaccgacctgatgataccatttattggcaaaatccagcgccataatcccgacaaagaagtgcgctttggcaagggaagcaaatgccagatcttagtgtgcgatcgccgggctgaagaaggtgtcaatctgcacggcgggcgcaagattgcgctgcattacgacttgttgctgtcgcctaaccgtatggaacagcgtcttggccgcttgaatcgctactgcgcgactgagagtgcaactactatcctcagcatggcgctggtgagtgaagcagagggtctgcaaaatcagtggctgactattctcaatgaagtgttcaatgtcttcgaagagtcgattgcaagcctacaatacttgattgatgaggaattacagcggcttatttccaatctttacccgctgggtgaagagagcatgatgcaactcagtgcgcgtctggctggtgaagatggccgccttacggtggaaaagcagcgcatcgaaatgcaggaagtcctgctgcaaattgatggcgatatcatcgaagccagagagtatgccgatgcactggcgaatatagatgagaatgaagaggaattccgccgctgcgctcgtaatctgataggtaatgtactgaaattcgattttattccagatgagaaagatccatcgatattccgctatcgcttcaaccctggtgatagagggacgggcaccttagtcagcccacagcgcctacaaaaacactgcctgctgggctttgatctcaaccaatctagcggaagttcgcccatgacttggccacttagctactaccgggctgatacctctcagggtaaaatccgcccggctcgcttgggtgaacctttccatgatgccatcctacaaatgctggattttgaagaacgcggtgttgctagcgcgattatccgcatcacaccaggcatgggcgatgaaaatatttttttccgctacgattttctgattgaagctgatgtcaatacaccagcactgcaacgactggccgaccatctgatgcctcctgaaaccattaccttgtggctggaccaggccggcgagcaggtcaccaacgcagaggtgttgatgatacttaatgaagactataaaccgaaggataagggcggacgccacctaaatctcaatgaggaacgctgggcgcagatctcccattgcatcagcgctaaagattggcacacctggtgtaacgatagctatagcatagcccagcgactggcggtggaacagttcgccacacaacaggctctcagcctgagccgactggaacattatctaagcagcgccgcgctgcatcatgctaaccggcaggagacagggcagatgctgcgccagggtattgcacagccgaaaatgacctgcctggcgacgcgtgccttaatcattgcatcagaagctatattggatgaggactcataa

SEQ ID NO: 110427 - DNA, 537 bp, Enterobacter aerogenes
atgaatcaacgcattggatacgcccgcgtttcgacggacgaccagcacctagacctgcagcgcgacgcgctccagcaggccgggtgcagcgtgatctatgaggaagcggccagcggcaagagcgcggcacgcccggagcttgagcagtgccgcaaggcgttacgggccggggataccctcgtggtgtggcggcttgatcgactcgggcgcagcctgcatgacttggtgcagatcgtggccgagcttgaacagcgcggcgtgcatttcgagagcctgaccgagaagatcgagacgggcagcgcatcgggcaagctgcaattccatgttttcgcggcgctggccgagttcgagcgcggcttgatccgtgagcggacgcaggccgggctggcagcagcccgcgcccgtggccgggccggtggccgcaagccgaagttagacgaccagcaggtgcgagagatcaaagccctgttgcgcgatccagatatggcactgttgcaaatagtcggtggtgataaacttatcatccccttttgctga

SEQ ID NO: 110428 - DNA, 390 bp, Enterobacter aerogenes
atgaccggtgctggcaagctggttgccgatcatgttatcggcatgttgggccagaactcttccccgttcatgttgatggtgatggtctttgcgctgtccgtcatcatgaccaactttatgtccaataccgctaccgtcgcgctactggtaccggtgagtttgtcgatcgcggccggtatgggcgccgatccgaaagcggtcctgatggcgacggttatcggcagttcctgcgcctacgcgacgccgatcggcatgcccgccaatatgatggtgctatcggccggcggctataagtttgtcgattacgccaaatccggcctccctctgattatcgtttcgaccattgtcagcctcgtactgctgccaattcttttcccttttcacccgtaa

SEQ ID NO: 110429 - DNA, 324 bp, Enterobacter aerogenes
gtggataaatcatcacgcctgtgggagcgtttcgaagatgctgcccacgataacggtcagcagatgaccagtattgctaatgatgcaattacagcactggaggccgcagagagccgcattgtcgaacttgagcgtaaacaggaaactcttcgcccggtcggcgtaatgagcgagaaagcatttcaccgtcttgaaaacagagaatcccgctttattgcactctggcctcgccccgagatctatttaccgcgtaagcgccctgatgatggcgtcattgtttatgcacgaaccgtggccccctcaatcaacaaaagggagggatga

SEQ ID NO: 110430 - DNA, 261 bp, Enterobacter aerogenes
atgagtattccaatgaaaggtctatcaaagcgtggcaggtataatcatcttactgactcaatggaatttaaatatttcaacggtcaaacagaaatcagtgaatcaacctttaaagcactctgtgcaggtaataagcctaaaccaactgtgaagccagctaaagcggtcaccacgtataaggtgaagcctaagcaatcgtttgaacagcaacgagatgcagctttaaaggctgctattaaaaagatggtaagcgggggctaa

SEQ ID NO: 110431 - DNA, 567 bp, Enterobacter aerogenes
atgaatactttaactcaagctgtaaaaattgaatcacccgttgcaagtatcagtcacctgttaccgtttgaacagaaagagcatattgaacgtttgtactttccaaaggtacaacaggctactgacagaatgaataaagctgaggctgaatatcaggatgctgtagaaactcgttcagtgttgattaatcagaaagctgctgaatatcttgctaacccgtctgaaagacacggattcattgtgaagcaggtttatccaactaaccagcaacaagtgattcaaggcatggccgattctggctacatggtgtaccgtgtatctgttggaatggttacctttatccgtatgcccaagaacgctaaagataatcctcttcaggaaatcacagataaagctacagcagaagctgaatcaactaccgacaagatgattgaacgtctgaaggtaaaagcctctgaagctgtccaccagcgaaacaagattgtgattgaagcccgtaaagctctggatgctgtaaaagactttactgattacctgaatgtgattgtgactgaggtaaccgaataa

SEQ ID NO: 110432 - DNA, 2088 bp, Enterobacter aerogenes
atggctaactatacagttgatgaatttattattcagttgggctttaacgaaaacgtttcaaaaaacctccagcgcctcgaaagtcgaacattaaaagtagctgaacgaattgaatcacgattaaacaaagcattcaccccaaagggtaattttaatggtgtgattcaatccgctaatatcgcttcaaagaatatcaataaagcattctcaaagagcatgagttttgatgaaactggtaaatcctctgtgaaatctgtagagaatgctgctaaggcttctgcaaaacgcattaaggatatgtatcaggacgcttacggggctaaaggaaaaggccgctcaaatccaccagccggaaagccacaaggcagaggctcagatttaacagccgctaattcaatccgttcactcgctaatactcagttctattcgaatctgacaagacgcttagagggtatgggttcaactggacaagcaagggcgatgaaattacgccagcaggttcacggattgagagatgatgctttagccaatccctcagccagcctgaaccagttccgtttagcattacgtgcagccactgatagcgcgtctaaatgggcttctcagaaccgcaagcaggtatctaatgcagaagggttatcaagctcattcgggcgtctggtaagcgtttcagcggccttatacggggcattcgaagcagtccgtaaggtggttgaaacaggtgtggcaagggaaggtgttaacctctctgctgatgctgttttcaaggggcaatcaaaagacgctaaaacgttcgctgctggtttctcacagcagattggacagggcgtcacagagacattgaaacagtacactggctttgctgctggcgctcagaactcgttaggttatcagggtacacaggacttctataagaatgctgctgtattcggtcgtattcgtgggcttgatgctgaacagcttaaaggcatcatgacagcattcacacagatggcatcaaagggacgtgtacaggctgaagaactcagaggccagttaggtgaccgtttaccgggtgctgaacagatgttcgctgatgctttaggtgtgaacactcagcagcttgataagctcatgagtaacggtaagttactgtctaaagatgtccttccccgtgtatctgctcagatgaaaaaaatggctgatgaagcagggggattagagaccgtttctaatatggctgtaacaggtatcggacgtgttaaagcagcgatggagaatgaccttaacaaggctttcacaagctctgaaaagggtttaggccagtttaacgcttctgtagctaacatgcttaacgatgcttcaccaatcgcagaggctttaggtcacatcctcggaaaagttgcctctatgacctctggggcggttgaccacgtggacgaatggagtcgtaaactctcagcgttaatcctcagaacttcagcgtggtacgatgacttatcagacggtcaaaagaaactggttgattctgctgaacagttcgctattggggctgctggtgttcttgctctggtgaaatcaattgctggagtaaccaataagttgaaatggcttagtgccctgttaggtggcggtgctgaagctggtgcggctgctggtgcaggtggaatgctcaagggtgcaacccgtttagctggccctgtgggtgtcgctctggttgctcatgatgctgtagacgcttcaggagttgaacagaagtacccaaccgctctaggtactgataaccctattgcaaaggctcttaactggctttctaacccttctcaggtgttaggtgcaactgaacaggactcaattactaatagcccgtttacacgcgctatgggttcatttggtgactggcttcagggtaacaatgcactgaacggtcagactaatgcatttgctgtaccatcaatgtataaccctgctcagacaactatcaagaatgaccagcgcattaatattagtgtgaacatggatagccagaaaattggaacattccagacacaggttttaactggtggatttgaagacctgaatattaacgctgaacatttgggcgattaa

SEQ ID NO: 110433 - DNA, 273 bp, Enterobacter aerogenes
atgaaaaaccgatttttgaatatgctaaacaatcctgtaccgcatcccgatttaacagacgcaatttttaattcggtatctgaaccagagttatgcttaacagtcctgaaaactcttccagagattaaccaaatcactattgctacattcttcagcggtcaaggcttatcactgataggtgctgcactgatttatgaaatggtactgaaagcacacgatgcaatgacagatttaatctggaatgaatatgaggtgaaaaccatgaatggctaa

SEQ ID NO: 110434 - DNA, 147 bp, Enterobacter aerogenes
atgtcgaataagaaagaacgctcagttatcaatctttcagctaagactcttgaactgctgaaccagttaagtgaaaagtatgatttgccacgacagcaaacattagcagtattactcaacaagaaaatgaaggaaatgaaccaatga

SEQ ID NO: 110435 - DNA, 132 bp, Enterobacter aerogenes
atgaaacactcagtaattcacattgcaccagcgttaatgaaaaagctggaagcgttatcagaattgtacggcctgaaccgtcagcagactttagaaattatcctgaaagaggaattgaataatgtcgaataa

SEQ ID NO: 110436 - DNA, 564 bp, Enterobacter aerogenes
atgaaactctatgaaatcccgtttacccccgcttatagtgatgtaacccgaatcacttctttcaacggtgttaagttatctctttcagctaaaatgatttacctgtttatggtaggtcttcaaagaaacggtcaagaagtcttcccctcaatcaattacctgtgtgaattgttcggtattgggcgaaaggttgctttaggggctttaacccaattacatgaatcaggtcttattagttctattcagcgttatgatagctctaaggtatacacagttgaaatcatgcctccagaattgattaaaagccaccagcaagaaaataaacctgaatcagtatctgaaccagaggccgcaatcaccagtgattccgataatgtcttacctttcccgttaatcgaaaggaatgaaaatccagttattgacgctgtagaagagattgaaccagttattatccgtctttctaaaccaaagcctaaaccagaaagtaaactgaattatctgtttgctactgatgcagaggaagacgacgagccatttaaaatgccaatttacgaggaattgtaa

SEQ ID NO: 110437 - DNA, 150 bp, Enterobacter aerogenes
atgagaaaagacatcccacaacaggtaactatccgtgttgaagtgtcccacgccattcaccgtaaaattgttgaaatggcagctaaacagggtgtgagctactcagccctgattaaaaacatgattcgtgaaaatgtagtcacagcttaa

SEQ ID NO: 110438 - DNA, 276 bp, Enterobacter aerogenes
atgacctcatacttatggtgtaaaggtaaagagttgagcaagttggggtgggtacttgccatctttaacgttgcggcctttttatatctgaatcacatattgcttattgacctgattcaacgtgtggctgatacgtctgatggctatataagcatctttgatgatgactttgtgtcggatgtttcccgcaacaccattcagattatgattacctatatagcggcttcaactgctggcggttactttggagcaaagaagaaatttaaacaggattaa

SEQ ID NO: 110439 - DNA, 924 bp, Enterobacter aerogenes
atgaaagaaaccatttataacatcttctgcttttgtcctgatggtgttcacatcacacattgcggaatcgttgcgcatgaacgagatggtgacgataatcaaaaactggaatttttaagcaagcagttagaaactgatttagcttcctgtagggcatttcatgacattcacccttctgtactcgatgatgacaaaaaactgacacttacaaggtacaacacaaacttgagagtgggtaatagctacgccccctttgagttggctcttgaggctgttaaagcccctgctaaccctttactaattgttacaccagttgttcagggtaagttacaatatcatattaagcatccggtagatgaacaattgaggaatgaacacacccctaactatcatattgagggggttcttgacattccagactaccttaataagtatttaacagggagtaaattccatctcaaaaagctgattaatgatgaccacatggagcctgtgaagcttctttttaatcaaaaacactatatatcgagctttaagctacttgtttcattaattgataccattgcttaccttgaatatggtgacgtgaaaaggaatttccaacaatggctcgatacctattcagaaatcagcaagttagatattacatccgatgaagtctatcagttgagaaactctttattgcacatgaccaacctcaactccagagatgttctgaagaaaaagcatcgacgcctgagcattgccatttgcaaaaaaggtcatccgactcagtatcatgatgaaattgtatatttcaactttacagactttttattcatctttgataaagctgttgatagatgggttgatagctacagagatagtaaaaagcagttaactttaattgaaagatatgatgaagtattgagagataacttctga

SEQ ID NO: 110440 - DNA, 387 bp, Enterobacter aerogenes
atgcaagtaatcatgtttgacaggcagtcaatatttattcatggaatgaaggtcggcttacaacaacgtattcctgaaattaatattcatagcacctgtcaggcagaacagctgtggcaactgctcacggctcatccacaagcgctcctcatgcttgatggcgatctgaacagtgaattttgttgctggttgctccaggagaagcagcagcgttttccgcatgccaaagtattattagtggtttcggatgataataaaagctggctgcaacgggcgctggcgtggaacgtgcgcgccattgcccaacgtgaggatagcgccgatatgtttgcccagatcattaatagcatcatgttgggcatgatgtgtctgcctggcacctggtaa

SEQ ID NO: 110441 - DNA, 2337 bp, Enterobacter aerogenes
atgcctggaacttatcacttaactattaaagtgaatcaagagcaattgggtaatgcccgagatattataataaaatcatcacagtcagcgtatgataatttattcagaaacgtatgtttgcctgctgatactattgataatttaggtttaaaacaagaagctattgagctgctaaaatattatgatgatgataaatgtgttgatttatccatcctggagggaacatctttagaaatcgacttgtcaagattaactatatcattgacaatccctcaaagttatttggaatacaaagatcaatcatgggtccctccttcacgctgggaagaaggagttaatggattcttattggactacaccttaaatgggtctttgacacggagaaattcgggaactgaggagtcttatttttccgcgaatggaacaagtggtattaactttaatgcatggcgtatccgagctgattatcaaacaaattatcgaaaatctactggtgattttaataatcattacagtgacgcagaatttaatcggttgtatgcctatcgttcattaaaaaacattgctgctttgttaacattaggagagaattattattactctcctgtttttaactcatggcaatatactggggtgtctattgaaacagatgaaaatatgatgccgccaaaattaactggttacgctccggaaattataggtatcgcccaaactaatgctacagttactgttaagaatcacaatagaattgttttggagactacagtcccggctggcccatttcgaattcagacattagacagttctgttaggggaactttggatgttacagtgcgcgaagaaaatggtaaggagcagaagtttagtcttacaaccgcttctttacaatatttaacaaggcctggacaattaagatataaaatagctgccgggaaacctcgttatgacggacatcaacttgaaggagatatgacttcgtcgggtgagttttcatacggattgaataatatatggactatttacgggggagccattttatctcaaagctataaatctattgctgcaggctttggacgtgatttatttaaattgggtagcgtgtcttatgatattactcagtcgcaagcgaaattgcctaaagaaaatttaacaggtcgaagccatcgactcagttattcaaagtcatttgatgaagcgagaacggatataacctttgctggctatcgtttttcagaagaaacataccgtacaatacagcaaactcttgatgagcgtcgtacaggttatggatcactgagtcaaaaagaaagttatcaaatcaatatcaataaatattttgatgatttttctctcggtagtaactaccagtataacacatactggaaaagtcaatcagaaaagcaatatgggttgtatttaagtacttctgtaaactgggctgctttaggtttaaaaaatattaaccttattgcttcagcaacacgctccaaaagggaagtctatcaagatgacgcaatgaatctttatgtaacgattccattaacgctaggaagtagtatcagcttctctgaaggatatattaaatcgagcaatagtcaacgtagttttacacataacgtaagttatagcggatacagtgacaaacgcagttataacctcaatgtgggatataagagtgggaataggcagaataaccagaaaagctttagtggttatataaaccagaacttgccgtatgcatcattgtcaggaaatatgagctatgttccaagcgagtataatgctattggtggttcattaaatgggggagttactataatcaaaagcggttttgccttccatcaaccttcctatggtggaacacgacttgtcgtagaaactcctgatgcgccgaaggttccattaaatggcggtgtatatgaaacaaattatttcggcatagctgtacttccgaacatcagtaattaccggaaaactagtgcatctatcaacaccagcaagttgcctgatgatatggaagcgctagagaccgtaacagatgttactttaactcgaggagctatcggttatcggagtatgaaagttattcaaggtgaaaaaacctttgttcgctttaagcttacagataatacttatcctccttttggagcaagtgttcgtaacaaaaataatatcgaactaggtattgttggtgagcaaggaataacatgggttgtaggtcttagggcaaaagaaaatctggaactgtattggaacaataagcttcaatgtcgagcaacattgccagatgctgtgtcacctaaagaaatatatacagatgtaatatgtcaaaaataa

SEQ ID NO: 110442 - DNA, 555 bp, Enterobacter aerogenes
atggggaagatatattttttcttttgtatattgataatgcttcctgtaaaaactgcaaaatcagaagttttttttaaactgaatggggaggctttgatacatggaagtattgtatcctctgcttgctctattgagacggatagttattatcaatatataaattatgagactgtaacgaatgatggtatatcaggggggaatagagagctagcaaggaagaatttttacataaaactaaaagattgcctgagcgagtatgataatggaccctacaaaggagttagaattcagtttctatcaccaggcaatacctttaataatgcaatggaaatgactggccctgagactggtgtagttctctacatctatgatgctgacaatagattattaatgccaaataaaagttacaagattttacccttattaagctctaatgataaaaaagataatggagtaaaggtattaaaatatattctagagctgagttcctttaacaaggatattgagcctgggaattactttgccataataaaatttaaaatcacatacgattaa

SEQ ID NO: 110443 - DNA, 258 bp, Enterobacter aerogenes
atgaagcacattaaattaaaattaacaactgtatttgttgcctctgttatgtctgtagcagcttttgcagaggggaactctggagaaattcattttacaggacaggtagtaaactcaccttgtaacattgaatcggatagtattaagcaagaggtttcttttgggcagttgtcacgttctttccttgaatccggaaagagtgcagagaaaagtattgctattaaactcaaggattgtaacttcgatgaatttacataa

SEQ ID NO: 110444 - DNA, 555 bp, Enterobacter aerogenes
ttgaattattatattttatgcgacaataattatttatcttttggcatgtgcgcttttttaaaagaaaaaggaagaaaggccacgattttatcctcaactaatgaattgaagaagttgcgtgatgaagatgtcctgattatttcgtatgaggaaataagactgtttaataagataaccaagctcatttcaagtactaatttgaaattatgtattattagagaactttgcccatcagtccccaatgaggatatttttagatatgtattatcacccaatgaatctttggataaaatttgctttaaaattgactttattgtcaaaaacaatcatataaggaatgccgttaaacggataaacgacatcgagagaatgattgccttgctctccattaataactacaccgtcaggaatatcgcaagaaaatttgatataagcgtcaaaagcgtctattattataagttaagtctgaagaaaaaaattagagcagagaatatcaatgatgttttccttttatattattattgccttgatcctttacatccaaactcaaactag

SEQ ID NO: 110445 - DNA, 528 bp, Enterobacter aerogenes
atgtatccggtcgtacattacgcttaccggggctaccaacggaataggtccgtagatactgttatcgatttgcaactgttttggtccgggaaaaacagttgttttttattatttcagagcagattgcgctcccgatatttcttctgcgttatgtccctcatggcgcagggagcgcacaaagggcggccagtcgccgccgccctctgtactcccgggctctggccgccaaaatcgccacttcgtggtaccttcgacttatcccggaaggcttcgggtcgggccgaggcagcgtccgtgcaagtcacggccctcagcccgcatccatgcgggctgccccggccttccgggaacgtctcagcgattttgaggccaccaacaccggcagtttcagccagcatggtgaataaaataaaggcaggccgcacgtaccgtaggtcggataagcgtagcgccatccgacaatacgctaactacgcagggcgttcttcgccagctgttcgtcttcggccatacaggccgcggcggtga

SEQ ID NO: 110446 - DNA, 435 bp, Enterobacter aerogenes
atggaatgggaatttaatccgaacgactggaacgaagacgaattaaccaatggaagttattgtactttcgtctatctaatgttatttgatgatggatatttttatgtaggcaagaaaaatatatatcgaggtataaaggatgcaaaaaatatcaagaagaccaccaaggaaagtaactggcgtgaatacgaatcgagttccaaaacagtacagaatcgtattgcacaaggttatgcataccgaaagatcattctatgggcgtatgccacatgcaacgaggcgacatttaccgaatccatgttgattggcgaaacatgtcgtagttcatatcgactcaataaagcagtaatggagaagtaccgaatcgagaagatcaacccccgtacaatgattgtactggattatttgaaggagacatacatcaatggcaggtaa

SEQ ID NO: 110447 - DNA, 330 bp, Enterobacter aerogenes
atgtacgataaacactatgacgaaatgacgccatacatattagtcgatggaattacaccatttgccaatagtatagcaacgcataatgtacatattgccgagggaagtaataggcgatgcaagaagaaacttaaacagatcagcaagaattacaatggtgaatatcatatgaatatcattttcgagaagaatcaatcattctcaacaggtgacatacttacatggaaattacacgacgaagtaatgaaactatgtgtaattgataatggaaagttatttgtgaaggggaaacactactatagtttttgttgtctaattattgaggaatga

SEQ ID NO: 110448 - DNA, 315 bp, Enterobacter aerogenes
atgttagatattatcaagaaaataatcaatattttgatgggtatgatcgccagtactaatgttactagtactgaaaatgttactacaaccaagacagttgatgataatgcacccattaaggaaacgaatgaaaccaatagagaggaaataaaaaatggtttaacatggcgtaatgcgttaggttacatttgtgttgctatactcgcttattcctatatattaatcccgattgcagattattttggtattgcattaatccaaatgccattgggtgatattattagaattatcattttattgaccagcggtggttga

SEQ ID NO: 110449 - DNA, 1506 bp, Enterobacter aerogenes
atggacctgatgaagataaaaatcaataacattaaaaacatcaaaaacgcagatatcgaacttcctattgaaggcggtttgtatagcttggttggaggtaatggatgtggcaaaagtaccttgatgttgatcatgtcggttttattaagttccaaacgttttaatatgctccaggatgaagattttgatgataactctactattgatgtctcgatttccgctgatgattacgaagaatctaaccactggtttgtaaaaaaaagacagcgaaataacgaaaacatgtggtggtgttctagcagaccgctttcatataaaggcgtttatgagggtagtttattttatggaacccgttttagagattcgactattgtcgacaaactactgcggaataaccaaataaaagacgatcaaattgttgatgctttcgattacgtaaaggataatttaagttatatacttcatggcgattataatcattacaaagacatgaagaaaataaaaaataaaaacatatcggaaaacttcgagttatctaaccttccttatttcatgacaactaaaaaaggggatctacttagtcaataccgaatgagctcaggtgagtgccttctaatttctcttttaaattatatttatcacaccttgatcaaccaaggtagaaacaaaagcgtaacagatagaacctttttcatactcattgatgaaatagaattggctttacaccccattgcgatttcccgtttaattggttacttaaattcattattagaatcatatccgaaattgtgtgtatatttaacatctcactccccagaagtcattcgagcccttaaaccacagaacatgtacttgatcaacaataatgaaggaacattagaactaattaacccttgttttccaagctatgctattcgtgaagtctaccgccatgatggatttgactatcttattttagcagaagacgcattggcatcattagtaattgatagtgttctttctgacacaggtttaaaaaacagcagattgatacacatatcacctgttggtgggtggcaaaatgttttaaatttgcacttagatttattaagaaacaatgttattggagttaacaaacagataattagtattttggacggtgatgttgtcactgacgttgcaaaaaaaaatgaatacaaaaaccttgccaaacttttccttccgatacaaagcattgaaaaattcatattcagcatcgtattcagcaaaggaaacgaaaaattaagaaaaacgatcaacgacaagtattttccaataaaatcactagatgatcttgctgctgaacaccacaagcaatacccaggaacccctaaaagccccgacaagttattttattttagaataaaaaaagaccttgagagtagaagtatagatgaatcatatttcataaggaatttaagtgaggatataaaacgggaagtagacttcacatctttcggcactcaattacaaaagctactttcttaa

SEQ ID NO: 110450 - DNA, 1152 bp, Enterobacter aerogenes
atgtcgctcatcaccgatctacccgccctcttcgatcaattctcagaagctcgccagaaaggctttctcagcgtaatggaactcaaagagcagaacgtaccgctggtcggtacctactgcacttttatgccccaggagatagccatggcggcgggcgccgtggtcgtctcactgtgttccacttctgatgaaaccatcgaagaggcggagaaagacctgccgcgcaacctctgcccgctgattaaaagcagctacggcttcggcaaaaccgataaatgcccctacttttatttctccgatctggtggttggcgaaaccacctgcgacggcaaaaagaagatgtacgagtacatggccgaattcaaggcggtacacgtaatgcaactgccgaacagcgccagcgacgccgcctcccgcgcgttgtggaaagcagagatcaagcgtctgcagcaggtgattgaaacccggttcgccacgcccattagcgaagcggcgctgcgtgaagccatcgtactgaaaaatcgcgaacgccgcgcgctggccaacttctatcgccttgggcaactcaatccgccggcgcttagcggcggcgatattttaaaggtggtttatggcgccaccttccgcttcgacaaaaccgcattgattgacgaactcaatgccatggcggaaaacatccgccgacaatggcaggagggaaaacgcctggccgcacgtccacgcattctgatcaccggctgcccgatcggcggtgcggcggaaaaagtcgttcgcgctatcgaagaaaacggcggctgggtggtgggctacgagaactgtaccggcgcgaaggccactgagcgctgcgtggcggaagatggcgacgtctacgatgccttaaccgataaatatctcgccatcggctgctcctgtatttcacctaacgaccagcgcctgcaattgctaagccagatggttgaggaataccaggccgacggcgtggtcgatgtcattctgcaggcttgccatacctacgccgtggaatcgctggcgattaagcgtcacgttcgccagcggcacgacattccttatattgcgatcgagaccgattattcgacggcggatctcggccagctcagtacccgcgtcgccgcgtttatcgaaatgctataa

SEQ ID NO: 110451 - DNA, 984 bp, Enterobacter aerogenes
gtggcagacttaacattaagcgatttgctaacccctccaacctcggctgatcctgtgtggttccgtagtcgtggtaaaaattttgagcgagtccttaatcagtttttattgaatgagaaaatggatcctcacacgagtatgcgtccaaagggtgaagaaattgatggttcatttgttttggatgatcgttactttttacttgaggcgaagtggcataaagatcctattccagcatcagatttatacgctttcaaagggaaggtcgacggtaagctaatcggaacaatcggggtttttttctcaatgtctgattatagtactgaagctgtagatgcgcttcttaaaggaaaagaactgaacataattctatttggtcataatgatcttttatcaatagaaaaaagaaagattactatgcgtgaagcattgaaaataaaacttcgctttgccgctacctatggacagcccttctattcaatagaatcttatttatcaaatattgtaacatcaaccaaattagaaaaagacctgaattctaagcgagcatggagtataattgttgaaggtgaagaggatgttggtacaattaaagcattactctctcgctttgaaatagatagtggttttactattttccctgcgggtggccaactatctgttccctccctttctgcacacttagtaaatactggaaatactaacgtagcagcgattgttacacccatcaaaaataccaaagttcaatcaatgcaaattgcagagcttaaagctcttgaaatagaagtaataattttaccagctccactcgaggattggcttgataattatgttacaacggaataccacaatgctactttcatgttgtctagcagaaaagggaaaatggcacgtcggtatgctcgtaatgcaaacgtagagcagctattatccgataacccatcttttaatgctttgataaataaattgaaaggctatcaaacataa

SEQ ID NO: 110452 - DNA, 384 bp, Enterobacter aerogenes
atgagcaatttaagccctgactttaccctgccgattaacttttgcgccaatccacaggacgcctggaccattccggcccgtttttacaccgacagccaggcgtttgagcacgagaaagagcgtatcttcgccaatagctggatttgcgtcgcccacggcagcgaagtcgccaggccgaacgactacattacccgggagatcatcggcgaaaatatcgttatcgtccgcgggcgcgacaacattctgcgcgccttctataacgtctgcccgcaccgcggccaccagttgctgagcggcgaaggtaaagccaaaaacgtgattacctgcccctatcacgcctgggcctttaagctggacggcaatctcgcccacgcccgcaactga

SEQ ID NO: 110453 - DNA, 1014 bp, Enterobacter aerogenes
atgcaattgcttaatagggagcaagaattaaatatcgcaaaatcaagtgtgattggtaatgtgcgtattgtagacaatgctattacatcaccccatccaattaaacccaagaaaactattattgcgctcttaggtattattttcgggttgatagtatctattggtctcgtacttttgaaaatcattcttaaaaagggtattgagaatccagagcaacttgaagagattggtctaaatgtatacgcaagcgttcctgtttcaaaatggatgaccggttctgatagtcgattaaaaaaagccaaatctggtaaaatgccaaaatatcaaattggcttattggctacgatgaacccaactgatttggcaatagaagcaatccgaagtttgaggacaacattacattttgccatgatggaagctcagaataatatccttatgatttctggtgcaagtccaaatgcaggcaaaacatttattagtagtaacctctcagctgtgatatctcagtcaggtttgaaggtgttatttatagacgctgatatgcgaaaaggctatatccaccatgtgcttggagtctctgaggaaaacggattatctgatttattgtcagggaagattaatgctgaacaagcaattaagaaagttaaagaccttggatttgattttatttcgcgaggcaaaatcccacctaatcctgctgagctattgatgcatcctcgctgcaacgaatttttgaaatgggcgtcaaaagaatatgatctggtaattattgacactccaccaattctggccgttactgatgcagcaattatcggccagtattcggggacttcattcctggtagttaaattcgaacagaatacgctgaaggaaatagcggcaagtaaaaaacgatttgaacaaaatggagtcataataaaaggctgtgtccttaacggtatagaaaaaagggctagtagccattatggatatggatataattattatgattattcttatactgaaaagaaataa

SEQ ID NO: 110454 - DNA, 132 bp, Enterobacter aerogenes
atgaagggaaccgaatcaaaaacagaacgtgtggatctacgtgtaacgccgagtatcaagaaatggttaagagaaaatggtggagcacagaagataatcgataaactaatacaggaagcaagaaacaaatga

SEQ ID NO: 110455 - DNA, 435 bp, Enterobacter aerogenes
atgaatatcaacctaaaaaacacaacaaaggatggtgtagtaacaattcatactttcagttataaagataatggaagttatttttccactggaaattttgaaatttataaaaatggtgaacttgttcgtaatatcagtactggaactgatagggttttaacaccaaacaataaaaaccataatggaaatggtaatggatataaacaattatgtctaacaattgatggtaaactattcaattatccgatccataaatggttaatggtcatggattataaaggccaaactcccgaaggttttgaagtggatcatgaggatggcaacattcataataatgatatttcaaatctacgagttgtaacacgagagtataaccgtaataaaggttataaagaattagtagatagtgcaatgagtaagtttttcataaaataa

SEQ ID NO: 110456 - DNA, 546 bp, Enterobacter aerogenes
atggctagaccaaaagcaacacgtgataattcgaatgtcgttacatttctaaatggtaagtcctattcaagattgtccaacaagtacaaagcgattattctaagcagtaccgataaatctaatttcggtaatactaagggaataaaagtaagatacgtattcgatgcattaagaaatgtatcagtactgacaaatgaaaatgttggtaaatgcattaatgaattcattacagaaacatatctttcaaaggtaattaataaatttagtaatgaagatatcaaatatattcgtaatagtatgcttgattctgatggtttcgttaacatccaatggttgaaatggtttagtaccgaatttgaaggattgaaattattaggtagggctagtattgaaaattatggaaaagcatgtagagaggcaagtatgaacattgagaaattgattaaggttccggtactggatgattcagttaaacagtacctggataatctattggcaaatggggttgaaccaaagctaataatggattatttaaagcgtaagtga

SEQ ID NO: 110457 - DNA, 663 bp, Enterobacter aerogenes
atgtctggattcgaagtctataattcggcaggtgcattaaccatcgatagtaataatcgcagtactgtatctagtcagttaaaatatattgatagaccactgatggattatggatattatacaacggtaaaatctgcatttggtactggtgctcaattgggttttcttccatatcaattttttgaaactaacaatccaacattatccgtatggtgtcaaatgacaattgatggtgaatatgcatttccaggtgcaggaatgttccatgcaactaatagtgcaaggttcatgattactcgtaatgatactgcaatatcaagtggttatttggattgttttgatggttccgggcgtttggtttggtcagcaagtgcagcgggaacaatgccacgtattgtaggcttttttacaataccggcaggttataatctggcaaatacaattacaattaacactccagcgaatccttggtttttatatagtgcaatgcctttcaatgtttctgatggtgaaggtgcacttggatatagtggtattgcagtaaaaagagttaatgcaactacatggcaattacaatatccaaatcaatatcaacgaagttacttggatgcggttggtaatagagaattacgtattccattggcatactttacaggttattaa

SEQ ID NO: 110458 - DNA, 414 bp, Enterobacter aerogenes
atgaaagatgatttagtatcgaaggtacgcgatgtaatgaacattcttatggatggttcagtactgaataccaagataaaacgtacagaaaaaaacaaagatatctataagcaaacctcatttaatttcgatactgcattggtaaacctctccaataggcgtggtggtacattcaacattcaatatctttattcttcagatcccgtaaatggggaagatccctatgcaatgtatgacacattaaaggggaattttgacgataataaagataaggtcttcagtgataatggattgaaactaattacaaccgattatgtaatgaatgacatgatcacagatccacaaacgggatcccaaagcattaatttcgcaataaatatcaaagtaatcgaaaaaaggaattatgatgagtaa

SEQ ID NO: 110459 - DNA, 693 bp, Enterobacter aerogenes
atgacaacaaatgataccgttaatattgaccgcttagttaataatggaccagtactattcaatcatgactttgacgaaccaatcggagtagttgaaaaagcatggattgatgatgatgaacgtaaaggacgtgcaattgtacgtttcggtaatgtaggtaaggctgccgaaatatacgaaatgattcgtgataaaatactatccaaggtatctattggttattcagtgctggatagtgttgttcaaggtgataatctaatttgcacagatataaatatacatgaaatatcaatagtttccgtgccagcagatgataccgttggtattggacgttcgataaatacaactaatatactaactaaaggtatggaaatggaagaaaatcaacaagaagattcagaggttgaaatgaccgagaatgaacgtgcaatcgagattaaagcaattgccgatgcattcaatgtcgaaattccacaggaagatatgtccgtcgaagaatttaaacgcagtattacagataaacaatccaaagttaatattaaggaagaaatccaaatggaaaaaaaccaatcttatgaaaatgcagttcgtggtctaaaaggtctatccgtagaagaaatgccaatggtagaaactacccttggtcgtcgtatgtcacggagtagtaccgaaagaactactaatcaccaataa

SEQ ID NO: 110460 - DNA, 297 bp, Enterobacter aerogenes
atgaattatctccgttatctgttttgttgtatttttatgcttattgcaagccccggttatgctgatgtttatattactatctctgcgaaactgattcgaccagcatgcattgtcacggcagaaaatggggaaaaagaattgttcattaattttaatgaagtatcttttgaacgtctaaatgattcaaaaaaatcctttggtatactggttaaagaatgcgatcttaaaaaagtttacaagtatatctctctcccagagaaggaaaagccatccgtattaatgatgaggttttattag

SEQ ID NO: 110461 - DNA, 222 bp, Enterobacter aerogenes
atgatgccaaattgtgaagaggtaatgttaaccactaaagactatccagaaagattacgtgtgatgtatcaggatcaagtagacaagtataaaaaagggaaagaaattacattaaaggaatatcttcacactatgcccgaattcaaaagcactggtaacgcagccgccgatgatctgatgatgaaaatccgtggtggtaaaactggttcgtataaattataa

SEQ ID NO: 110462 - DNA, 639 bp, Enterobacter aerogenes
atgaaattttggaataacatactgctttctaccgttcttgtattattcattgtagctatagttacatttattaaagttttaggttatggaactggtattacaaacttgattagtactatcgaggtaggtagccttacagatatcataagttctttgagtaccctcggtactctagtaattgcttatctcgcgtataaatcggctccactatggattcgtgaaaagcaaaatgaagaaggtttcaatcatgttagctcgatgcttcgagactatgatagcattgttttggaattgcgtaatatttactgggatgtgttccctggtgctattactgtttctaaccaacaagaaataaggaataatattaacaaatgtactgaaaattatttctcattagaatcaaaacttaaagcttgtaaaagatggaaaatcgagtacccacttgaagtagagacgcacttcaaaaaaattcttgatttttattcaaaggcattagacgttgctgccatccagcagtttggtgattataatagggcatttcaattgcaacaagatttaactggtatacgagatgagattatcaatgatagagagttttttcttcgtgatatcgatgatatcttcaaattccaacaataa

SEQ ID NO: 110463 - DNA, 156 bp, Enterobacter aerogenes
atggagaaattgctaaaattttccgtgccggttgtatcattcgtgcgcagttccttcagaaaattactgatgcttatgaacaggacccacatattgctaatttgctgttggctccttatttcaaacaaattgctgaccagtatcaatcagctctaa

SEQ ID NO: 110464 - DNA, 276 bp, Enterobacter aerogenes
atgatttcacaacaatatgaagaacagctacgacaacacgaattctcagttaaatcagcagtacagttgcgtttgcacgaacaactactagatatcaagaataaaattgaagacttgcaaaacgtttcggatattgtagatacagagcaggcagtaaaccagttgaaaacgcaatacaacaaaattgatactacctacatgctatttgtcaatgaaaacaccaacaaagaagcgagggcagcactacaaaaatatatgtatggaaatgaggaatag

SEQ ID NO: 110465 - DNA, 222 bp, Enterobacter aerogenes
atgtacgagaaattgaaagccctattaaacaaggcaaacgaagcactaaggccaccaagaaaaattaaaccctcggattgggtagaagaaaacctatactttcccgatggtgtggcaggtggtcagaagatgaaactattcgagtttcaaaaggaaccgatagaccagtgtattaatccagaagtacgtaagattgtcgccgtatctagtgcacaattatag

SEQ ID NO: 110466 - DNA, 660 bp, Enterobacter aerogenes
atgcgtaaattaaaagctgtttggacgtgggtttttcatatgaattttaaatttttcggcataattatcctttctgctttgatgttcgttttaggttttttcctcggtggctttaattgggggtgggctgataagaatcatgccggtgaggtggctttgtggagtatgctgggtgggtggttatctgcaattgcaactctacttgccgtgttagtctcattgtacatggcgtatcaagctactcagaatgagaatgaaaaaatcagggttactcacggaataagtgtggatgttactcatggtaagggggtgaattgcaatctcattattcagaatatgagaaatatgacggtgaatattacgggtgtttttttctctctggggggatcatcagcccgtttctctttagataatgttataggtcatcgtgatataacgctatcatataaaggtgaagcagaaagcgttaaatttacaatcgactctggggttgcttggtggtcgacgtatgcgttttttgatatgaataaaaatatagattttaaaaaaggtaagctatttataacaaccaacctcaacacatatgaatttgatttgccaaaggcatacttaaaagcttttgaggatgcctattctcgttatcaggcaataataaattaa

SEQ ID NO: 110467 - DNA, 573 bp, Enterobacter aerogenes
atggatattgtaattactattttatttctatgtctggctattttttctgcaactgtttacttcaggtcgcagggaaattcggcaataagatttatcaaaggtatctttgcattcagcatcatctttagagctattgatgtttataaaaatgaagaccaaatagctgcatttattatggttgcggttgttttctgtctttcttatcgtcgatttcatcttaataaagctgttacctcccccctatcagtaataaaaacgaaaatcgacaataatgacaaaacgtttaaccatgaagaaacaaatgtaatttcatcaaaaaagaaactcacaagctctgaaaaaaaagagcttaaaaatatatcttttggatataccgattcaaacaacaactctacttatagagaggttgacgttaaaaatgttgacgctgactacattactggtttctgtcactcacgcaggcagctaaggactttccgtatagacagaattgaaaatagtgaaattgtagttcgcaatactggcgaattaatcaatgtttatgactggattgtccagctatatgaagaatga

SEQ ID NO: 110468 - DNA, 1119 bp, Enterobacter aerogenes
atgtcggggaaagagtatacagcaatcacgctagatacctctatattcgatggtaatggtttgaagcttgagcagggtgtcttggggaagatgcggcaatttaagactatcccaatttgcttcgtcctcaccgatgtaaccgtgagcgaattaactcgtcatcttgaagaaaagatgaaagccagcaagttcgctcttgagaaagcattggaagattctaaaaaccatcttttaatacctgaaagcgatatatctacttttaaagaaacattctcaaattcaaacgatttcaaaaacgctgcttctcaacgtgtaaaatcctacattgagatgactggcgcgatagttttggatactgaccaatatgtgactatcgctgaaataagagacgcctatttcgacagtaaaacgccctttgctgaatcaggtaacaagaaaaatgaatttcctgatgcgatatctcttatggcattaagaaactgggctgaccaaactaatcaatcagtatgtgctgtctcgcgggataaggattgggaaagtttttgtgaagaagttgataacattgattgtatcaaggatttatcagaagctcttgactactttaacagtgaagcagtttcacgtctggttgtagaaaagttatctgaagccattgatagtgatgaaagtgcagcactatattttaaacagcaaattgaaagtatgttagaaggagcggttgagcgcttatccttaacacaagatgcagactcatcactagcttatgaagctgatggtgtagatattaaatttgtacagcttcattctatagagactgattttaaaattattgagcccggtgatggatacttaacagttgagaccacgctcaatgtagaattggaaattgagggagtattctctctctaccattatgattcttttgataaagattatattagtgcaggtagcgttacagctaccgtaaatgactcatatgacttgcgcgtgcttatgacgttagcaggtgatttctctgatattagcgaaattgaaataaattctttagagatagtgggtaacttaggcacggtgcatttcggttaccttgagccttattatgagccggactatgattaa

SEQ ID NO: 110469 - DNA, 870 bp, Enterobacter aerogenes
atgtctgataaaatagagcagggtattcatgcccttaaatcccatctctcatgccttcctgaacacttttcacgcacgatcattgatcgcattaatcaatgcattcattacgaacctgtcattggaattatgggcaaaaccggatcgggtaaatccagcctgtgcaatgctctttttgctggcgaggtatcgccggtaagcgatgtagccgcatgtacccgtgaagcactgcgttttcgtttgaatgtgggtgaacgcgttatgactattgttgatctgcctggcgtgggagaaagcaaggcacgcgatgccgaatatgcagatctctaccttgaacatctgccccgactcgacctagtattgtggctgattaaggccgatgaccgggcgctggcagtggatgagtatttttaccgccaggtgattggtgagcagtaccgggataaggtgctgtttgttatcagccaggcagataagatcgaacccaccagcagtggcaataaactctccacggagcagaagcaaaatatcagccgcaaaatctgcctactacatgagttgttccagccggtaaaccctgtctgcgcagtgtcggtacgtttgcagtgggggctgcgggtgatggctgaacggatgattcgttgcctgccacgggaggccagtagtcaggtggcagtacagctcagtgcgccacttcgtaccgatgccgttaataaaaaagcccgtgacgattttggtgaaacggtcggctcggtactggatacagtaagttccctgcccctgctaccggcccaggttcgggcagtcatccagtctgtgcgcgacatcgcggtatcagtcgcccgtgcagtctggaatttcttcttctga

SEQ ID NO: 110470 - DNA, 597 bp, Enterobacter aerogenes
atgaacaaatgcaatctccatactattttgcgcctaccaactggtattttttatgcccaaggtgttaaaactaacgtgcttttcttcactaaaggttcagccaaaaacaaatatcagaaagagaattgcactgagaacgtctgggtatatgatctgagaaccaatatgtctagttttggtaagcgtacgccctttggtaattctgacatcggattttcgaaagaagactacggaaaggatccgcaccttggtgcgtttgagaaagtgtttggcgacaatcccgatggcactagcatgcgtgctgaaggagaatatagctttggcgctcaagagattgaagtagataaagatgccgtagaagaaaatcagaatattgatgaacggctcaaacattcccgctggcgctgctttagccgtgagtggattaccaacatcaaaggggattccttagatattagttggttaaaagacaaagatagtgtggacgctggcagtttacccgaccccgctatattggctcgagaagctaaagaagaactagaaggtgcaatgaacgacttggaaaacttgctgactgctttagaagggacgaattaa

SEQ ID NO: 110471 - DNA, 1623 bp, Enterobacter aerogenes
atgaagcgagcaattttaccggaaggctggtttcgaactacgcttgataatgttgctaactggggctccggtggtacaccatccagaaaagaaccagcctattataatggtaaaatcccgtgggttaaaactggagatctaggcccaaaagctctttatacacctagcgaatatataactgaattgggtattcagaattccagcgctaaaatttttccaaaggggtctgttgccatggcaatgtatggagccaccattgggaaaacatctattcttgaagttgatgctgctacaaaccaagcttgttgcgtcggaaatccgatatctggactgatttatagtgattttctctactattttttagttaatgagaaagacaatttcatagctaaagcgaaggggggagcacaaccaaatatctctcaaactttaattaaaaaacatgaaattacacttcctccccttgcagagcaacgagttattgtcaacaaactcgataccatgttaacccaagtggaactcatcaaagctcgccttgaacgcatcaattgtatcttaaaaaccttccgccagtcggtccttgccgccgcactaagtggcaagttaacagaggagtggagagatgggcaatgcttctcgacaaagcatggaattgttggagactttgtttccatagatgttggccatgcgttcaagagcaaggaatttacagatgcaggcgtgaagctattacgagggcaaaatatagagccaggctcgcttaaatgggatgaaacaaagtatttctcaaaggataaacttgaagactactcacacctatttgttcgagccaatgatattattttggcaatggataggcctatcatatctacaggcctaaaattagcacgtgcaaaagaaaaggatttaccttgcgttctggttcaacgtgtagcacgtttttctaatttcgattatcttaccccagattttctgtatctcctactaagtgatacagggtttactaattatatccaattcaatcaaacaggtagcgacattccacatattagtggaaagcaaatcctgtcgtataagatagaaatcccaacaattgctgaacaagacgaaatcgtccgtcgagttgaagatctgttcgttttgtccaattttatcgaacataaaaccacgtctgcactagaacgagtgaataatctcaccccatccattctagccaaagcttttaatggtgaacttactgctaactggcgtaccgccaatcaggagctgattagtggagaaaacagtgctgaatcagtagttaaaaaatatatgactgaacgtgagtctattaaaaaacaacccaatctcaagcatactagtgtaaaaaagaaagcagggcaccatatgggcaaacaaatcataaaagtgatcgaagcgctaaagcaagccagaaaaccgctcagcgggcagcaattgttagctgctgctggttaccccaccgacagtggcaccgatcaacttgagcagttctttctagatatccgtgatgctcttactatcgaaaaatctattgtaaagcttgaacgcgatgagaacggccaagattggttcgccttggctaagactgacaccaataaataa

SEQ ID NO: 110472 - DNA, 1602 bp, Enterobacter aerogenes
atgaaagtcgataaattgcatatccgctcacgctttaaaaatctcgaaaacgtaaaagttgattttgacgaagaccatctaatgacagtcgtggtgggacgtaatggttccggaaaatccaacgttctcgaagcattagtggctatatttcgtaacctcgacttgggtgaagcaccacctttttcttacgagataatttatcgactgggtgaaagtcataagcccaatcatgttagtgaaagatggcttgaaatcacgattgatgcagatccggagcgcggcacgcttgccaagcaatacgaagtacgtgtgcgaaacttgttaaatgaagaaattccaaagcatgaatgtgataagcagtcttcaggcatcgtcattccattttcaaaagtgaagcgagatagaagtggtatagcgccatatctacctaactatgtatttgcgtattattcaggtccaagcgatcgacttgaaaatcattttaaaaaacaccgtacggatttttaccgcaagttacttgaagataagcttgatttaaaaggtgatatccgaccgttattctatgccaaacctcaccacagtcaattcgttctactcgcttttttcctatctgaacaagacagcaaagataaagcatttttacgagaacacttaggaattgaaggattagacagcattcattttgtgatgcgtcagccaggatgggctaaacagaagggcgaactgttttggggggcccgaggcgttgtacgtcgttttctggatgaactaataagacatacattgtctcccataaaagttactcgacaagaagatacctcattaacaggtactaatattcgcaatgaattttttcacctttttttacctgatgtaaatgcactgcgcgaatttgccaaagttctcagtgcagacgaattgtttaaaatgctcgaaagtactctactatccgaaattatctctgaagtcagcatacgggtaaaagtctccagcagcaaagaacctctcacttttagagagcttagcgaaggtgaacaacaactactaactgtattgggtctgctcaggttcaccggaggaaaagactccttatttttgctcgatgaacctgatacccatctcaacccatcatgggccgttaagtacttaaaattcctacacgaatttgtacctaatcacgagactagtcatttgttgatggttacccaccatcctctggctattgcagagctcaagaaagagcaagttcaagtcatgaggcgcgatgatgaaaatcaaatatttgcaaaaatgcctgaagaaagtccacgtgggatgggaataaatttaattttgcgtagcgatatgtttggtcttcagacaacgcttgacgatgacactaacgataaacttacaacaagaaatgcactcgcagcaaaggaaatattatctaaagaaagcatagttcgggagcaaggacttcatcctgaggatgaagagcaatacctggctaggcttaattctgaactcgaaaacctggggttcaatctagcaacagacgacccagattaccttgaatttcttcgtattaagtaccattccaaacatgaggaaaattactaa

SEQ ID NO: 110473 - DNA, 810 bp, Enterobacter aerogenes
atgcgctggatttgcaaggaagagatagaggaatgcttgactcaggcgtggagagatatggctgcccaagcaaaggctgagttaattgctgctccagacgaagaaacaagaaaaactatattaaaaagagtcgcgtcctcgaatgtttggcgtgagtactataatttgctacctgactcattaaggcgcaaatgttggtattgcgaagctgaggaaatccggtcagatatgccagtagatcatttcagacccaagaacaaagtcgaagatgataggctgcatgatggatactggtggttagcattcgattggcaaaactatcggtgcgcttgtacattctgcaatagccgtagagtttttgatgaaactgagggcggtaaagcatgccgattcccgcttgaaaaccctgaagagagagcttttgcacctgcagatgagatcaaacttagcaatgaacgaccgtactttcttgatcctttcaatccggatgatgaaaaacttctttggtttgataacgatgggttacccaccgctagtccatcagcaacggctgagcaacaaacaaaggttaataattctgttgaaatatttcatcttcatgaaactagaatagtaagggcgagaaataaagtacgcttagaagtggaaagacaagttaggaaaattaggaataatgatgatgtacaagccgccaaagctaagttgcgacgcatggtaaaagatactgaaaagttatcgcgcgctgcggttgtttacttacgagcgcatagagaactccctgaggtgaaagacatattaaacttggattaa

SEQ ID NO: 110474 - DNA, 621 bp, Enterobacter aerogenes
atggaattatatcaaggtactcatggcgatcacatacttgcctatcgggatagaattgctcagacagttagtaatgctatcaatcagtttcctcgtacaatggcattaagagtggatcttcattacccgcctattttggataatggtgatacggtatgctgctttcctaatcttgaaccaggtgcaatatctcgttttctggattcgcttaaagcgattctggaagcaaatgagcatcgcagaaagtttgtagggatcagagttaacaaaaatgtgttacgtaatgtttgggcaagagaatattcgaagagtggtaaatgccatttccatatttgcttattctttaacaaggatgcttactaccatctggggcatattcagcacagtggtacacttagcaacatgatagtcagagcttggtatagtgctctcggactagaagttgaagattgtcgtgaacttgttcatttccctgataactgtcggtatatacttaacgtaaatgctcctgattttgacacaatctacaatgatttgattaaccgactggaatatctgactaaacttgatactaaagtatttagtgagggtgatcgtaatttcggttgtagccgaggataa

SEQ ID NO: 110475 - DNA, 1410 bp, Enterobacter aerogenes
atgtcgggagatcgggagttccccatacatgtgttccccgcaagagtgggacatgcaatctatgaggtagtgcaacatactcaggcaccacttcctatggttgcagcagagatactgggtgtcatttctcttgcttgccagaacagaattgatgtttgtaggttgaataatctacgtggtccgacatcactttttattgtgactattgcggaatcaggagaacggaaaagtacggtaagtaggctgttaatgcagcccatttaccaactagaggaacagttatttgaactatataaacaggaattaattaagtggcagtacaacataaggattttcaaggcggaagagaaagccttgatgtcaaaactgaagtcagagatccgaggtggaaaagatccaaccataacacgtcgaagtctgagtatgctgcaagatagttatcctgtggagcctgtcagatataagttgacgtttaatgataccacaacagcggcgataaaagagtatctctgtgatgactggcgatcagttggcattttatcagatgaggctgggaccatatttaatggttatgcattaaatgaattaccgtttgtaaacaaaatgtgggatggcgcaacgtattcggtcgaaaggaaaaacgcacctgagaggttaataaaaaatgccagattgacattatccctgcaggttcagcctgtagttatcaatagatatattgaaagaaaaggggatgtggcaaaagggataggtttttttgctcgtacgcttattagtcgtccattttcaacacaaggatatagacaaataactaaccctgttgtttcaagtgaacatttacctctgttccatgaacgactaatggagatcgtcaatgagagtattacaaataaagatgaacgcatttgcttgcatttctcgccagatgcaggacagaagtggattgcattttataatgaagttgaaacagaaatgcggctaattggttttctgtcagactttaaagattacgcatctaaagtcgctgaaaacatggcaagaattgctgcattgttacactatttcaatggtgatgaaggtgatatatctcttactgctgtagacgctgctatagagataagtagttggtacgtcaatgagtatataaagttattttccaaaccacaggaggtaaatattgttaataccgatgcagatgagctttattggtggataaaagagtattgcaatcgaaatttcataccctatatgaggaaaaataccatattgcaaaatggtccagataggtttaggaaatgtagtaaagcaaacgaattattaagtatcctttattctcagggtaagataagtgcctataaaaaaggtaaaactctttttatccaaccaacaagtactttaaatgttatttag

SEQ ID NO: 110476 - DNA, 237 bp, Enterobacter aerogenes
atgagtacaacatctatcattccaacccctgaacaacgactgcaaatcttgcatgtctatggtgagaaaggtgaccgtctggtgcgggaaaaagagcgccagtatatcacttcaatttctcgctcaacagcctggaagcttgaaaaggcagggaagtttcctcaacgtaaatcacttggggcgaagtcgtgcgggtggttgcttagcgatctactctactggattaatgaacgctaa

SEQ ID NO: 110477 - DNA, 1002 bp, Enterobacter aerogenes
atgacaagtaattctgatttttttgatgcgtctgagctgtttaatattcctgagcaattcgatatccctgaggctttttatcgcgtcgacgagttttcgaaaaaatttaatgtaagactggaagatattatatctacatggctgggtaataaaatcagtctctatgtcaatcttcgttcagagtactgtcgaataattcgttatgcgaataaaaaagaacatcgttatgatacatttgatatcagggctggaggagacttttatcaacatgaaacaagccctcaatctaaagtaaggaagtttattccttgtggacaatctgaaataaaagaggattgtaacttcagtggaagtagtttctataagtatatttacaatggctatgccagtggtttttggcgactacaccctacgagcactacccactttgcaacagataatttcaatcttaaaaatgctagtgaatcttggggggaaattcctggagaggttagagtttctggtcggaatgacaaggattatctgatgtttaataaggatgcttatttttatttagtgcagtgttatattactgattcagaatgtgaaatgtttcttgagcaatttccctctaatgaaagaaataaaacagaagagtatgatccacctcataatagagttgcgatggttctgctcataaatgaactgtttagtgttcgtgggcatgtgacttattctaatgtttgtactattcttgcgagtcatgggattaatgttgaacaaacgaccataaaacaaattcttgaaggaacatcagaaaaaagagataagccctacaaaagccagcctcagcattcgaagatatcttcgtgcctgatctcactctattgcaaagaaaaaaatattaggaaaacaccatcgaatgtggctcaaatattaaacgatctttctaagtcatccccaagagcatgggggatcgtttttacaacagaaattgctgctaacattatgaaagtaaggtaa

SEQ ID NO: 110478 - DNA, 666 bp, Enterobacter aerogenes
atgacggctcatgcagcggagttttttacattggatgaagttaaccgactcaaaatcattcaggatgttgttgatcgccgtctgacaactcaaatggcagctcagcgactgggcatctcggatcgccagtgcagacggcttctgtcgcgttaccgtgaatctggcccacttggtatggctaatcgtcgtcgtgggaaacccagcaataatcagttgcctgatggccttgcgcggtatgcactcagtatgatagatggctgtgaccaccactggttcgagaaccgtgctccagcctgtaccgcgctggtttacgttgatgatgcaacgagccgactgatgcagctccgctttgtaaaatcggaatcaacattcacctattttgaggccacacgaggctacctggaaaaacatggtaaaccgctggcgttatacagtgacaaagccagtgtattcagaataaacaacaaaaatgccactggtggtgatggctttacccagtttgggcgtgcgatgcatgaactgaatatccagactatctgcgcgaataccagctctgccaaaggccgcgtggaacgcgctcatctgacgcttcaggaccgactggtaaaagaactccggctcaggggaatttcttctgttgacgcagccaatgagtatgctgattaa

SEQ ID NO: 110479 - DNA, 546 bp, Enterobacter aerogenes
atggacgattataaccggcgctttgccaaagctccgcgacatgactttgatgtgcatcggccacttgaacatgatgatgatctggctgcctttttcacatggcgggaaccgcgtcgcgtttcgaaatctctgacggttcagtatgataaagtgctctatcttattgatgacagtgaaatcagtcgcaaagccatcgggaaatacatcgaggtctggcattatccggatggccgaaaagaactcaggcttaacggcgttgctcttccctactccacttatgatcgcctgtcggaaatcgaccagggagctatcgtggacaacaagcggctcggacgtacactagaatatattaaactggttcaggacaaacgcgacaataaccgttctcaggcaatacctgctggcgatggaccttcacggcggcgcaggaaaccaactgataagaaatcccagcgatcactgaacggcgatgatatgctggaagctttgaaagttttacagagtcgttccggtgaaatattcggttctaatactcaaaaaacatag

SEQ ID NO: 110480 - DNA, 1254 bp, Enterobacter aerogenes
atgaatacatcagtagaacacacgtcgtacacagcgaaagctggttacatttggcgtaagcgttatgacaaaaatacactctcaattgcccttcagactaaggatgtaattgaggctactcgtcgtagtgcgtccatgaccatgcgattcatgcaattggaattgctgaaaattgagtttgcagcggttcggcaggcgctgaaatcataccgtgatgaaataattcggaacgaaaaaattaaaattttgcaggcacttgctgctggttcgggggcacaggaagcctcgcaggggattagtccacctcaagtaactcagtctaccaatttgaatgacagaatcgctcagatcgtcttacagggtgaactggagcaaaccgaagggcattctctggaagaggccaagactacctattttgacgcacatacaggagacttcattggagcgtggacgactaaaactgttaaagactatagctcttgcattgaccgatttattgtctggtgtgcagcgtcctcaattgcatcagtggagagcgtggccaaagagaatattgtctccttcaagcaatacatggatgagcaggggttggccccaaataccaagcaaaagatactcacccgtcttggaagcatgtttaagtttgttgttgaggtgaaggagtggcgggataaaaacccagtcacaggcctgatgtacaaaaaggtgggcgttgtccataagaaggaagaagtaacacctgctcaattcaatgcagcaatggagcagaatgctacaagaaacgacctgcaaacatcgtgggcgatgcatctgttatatcactgcgggttgcgtgtgtcagagctttcacagttaacgaaagctgactaccgtgagattgagggtatcaaatgcatcagtattaatactgaccacggcaagactgttaaaaatgaaagttcaatcagaaacatccctctgaacgaggccttgttagctctcggggcttgggaggaaaagcctgtaatgaaatatggtgataacaggacaatggatagagtcagcagagcatttaagctgattgggctgaaacgttcaacgcactgttttcgacacagtctgtctaatcgcctgcgtgatactaatgcaactgactccaccagggcttacatcttaggccacacccaggcaaatataaccgatcgcgtttatgtgacccgtgacccgcttattcagatgaaggtggctctggattctactggaagttttgagtag

SEQ ID NO: 110481 - DNA, 573 bp, Enterobacter aerogenes
atgagccgtacctttgcctactgccgtgtctccaccagcgagcaaacaactgaaaatcagataattgcaatccagagcgctggctatcacgttgatcctcatagggtggtgagtgagacaatcagcgggaaggtaaaagcgtctgaccgtcctgagtggtgtcgattgattgaccgtttggagagtggggatgaactgattgtcctgaagctcgaccgattgggtcgtgacaatatcgatgtgcagcagactatatcaatgctggtggagcgaggaatatgtgttcgatgcctcgacctgcctgttcgagatttaagcagcagtgaggggcgactgatgttgcagatgttttctgcttttgctgaattcgaacgtaaccggatagcagagcgaacccgtgaaggtatcgagagagccaaaactgaaggcaagaaactgggaagaccagaggccaccagcacaacgaaaaaagtgcaggaatgcaaggctggaggtatgagccagcaagaggcagctaatcatctgaaaatgggaattgctactgtcaagcgacattggaataaaaatatttga

SEQ ID NO: 110482 - DNA, 198 bp, Enterobacter aerogenes
atggaaaacaagagcattgaaaataataaggtgggtcgtcccttcgccatcgagacaacgggccgtgtgcaggaactgaaaggcaagggctggaatcaacggcagattgccgaattgatgggggtcagtattcgtactgtcaaacgccactggaaacgtgcagttaatgcaccttccttacccctggaggtgatgtaa

SEQ ID NO: 110483 - DNA, 1839 bp, Enterobacter aerogenes
atgaatccggaatacaagacgttaatcgctgagattaagagcagggggacaaccacccttgagcgtgacacctgtccgaaatgtggcatctgcaatcactactatgcaaggcagtcaggggctaaaaatggctgcgtatggtgcatgcataaagaggggcgtacaccaaaatcaattactgaaacattggagattaaagctgatggaacatctatttatcatggtaagcgatgccgtaactgtggttctaccgagcgtctatctgatgctgtttttggggctaaagtgggggcttgttacgcctgttcaatcgcaaaagcgtctgaaaaaatagccactactcaagtaaacaggttgcaccagaaactgaaaaatcaggccaataagttcatcatcaactctatcgacaggtcgggtactgaggaagtggcaccgtcatctattggtgaatattatgaggtgagagcactgatggcgaagattgaccgattcaacaaaatcgaggctgataaagggtctggtgttgtctgggaattgggtcataaattccctgcctctggtggtggtagtggatggcgaggcaagagcattgcatccaatctgtaccttgtccgttttgatgaaaatcgacagcagggtgatgaactgccagataactggagcaataaacaggttatttgggttggtgatattgtgagcagtgttgacagctacaatgctggcaaactgtggcaaaaaagaatgggctgggatgctatggataaagcccagaaaacgagcctgaagcaacgagagaaggagcggaacgagaagcactatgaggctatgtctcctatccttgcgtcgattgtcgatgagctggcgaatgctggtgaggctgaatggcaatccctctatgacgatatgactttgcgtttggaaaaactacaaaagcgaatgagcaacatcgccctgaaaaatggcaaggctggcaaggatatgtggcagtctgaaggtggcttgattgaggaagcgttgcacggtgtgaatgcccgtgtccgggtggtgcataacaccatgagtcagttaatggattgtgttgatgctaccgtgtcggaatcctcaatggatgataatagttattgcaccttccttacctctgtcggtctggttaaacaggcaatgctgatgtgggcgagggatgcgctggtaaatccaaaatatgaaattaaaggcttcacccatccactgttaagcgaaatcgctgctactgaaagttggggatgtgaggttggaattgatggtcgtcactggctatgcggttggaaagaaaagcctgacgctgatgatacccggcctttcaatgaagacggcacggtaaataccatccctgttaacgttcgagaagggcgtaatgctgaatatgtccgtcgctcgtatcgtgaatgggaagctgaccagaagcgtcgaattgaggtagtgactgagcgtttggctgagttagtggctggtgctcgtgtctatcgtgacagcttacctgatagcatcgagattgatggactccagcagggggagtcgaagtatagctatgagctacggctttgcgttaaatggttgaaagagaaagacctgaggaatatgaaactaaatgtcgagatggcaatcggcaaggccgaaagctggtttgctggtatatcgaaaggcaagtgcggtgcatctgaagttgaacagggggtagaggaacatcttgctggcctgagccgttatcaggggcatgctgtcatcgaggagccatacgaacttctgatactcaaatcaataaagagtgaggagttccagcgttacctttgccccttttaa

SEQ ID NO: 110484 - DNA, 2103 bp, Enterobacter aerogenes
atggatccaatatcagttacaacagtatcaatttatgtcgcaacaaaatttattgatcagttcattgcagaagaaggttacggatggttaaaaaagaaattattccccaaaaacaactatgttaaccagctctatagaataattgaagaaacggctattgaattcgaaaaaaaattccccatcgatagtataaaaattccattttaccaatctcaactattgtttgaaacattgaatgagcatattttattcaaagaattaccagataaagattatttgttgcaaaaattcagtgaatatccaaatgtcatcccaccaactcaagaacaacttgaaactttctataaaatttttttactaaaaataaacaactgtaaagaattaaaaaaactccacattgaggagacttataaagataagatattcgatgtaagcaatgagatcattcagataaaacttttgctgcaatcatttgatgaaaaatttacttttcacttaaacgataattggttaaataataaaaatagagaagctatagctgatttaggaggacgttacacacccgaactaaatttaaaattagagatcgcagatatcttcgaagggcttgggaaaactaacaaattttccaaaatattttacgaacatatcgataatttcttgatcaaaggaaacaatcttcgaaactgcgatgaaatacgtgagcagttagctttgatttctaaagccttaacagacacctcaattctgtttctaaaaattgattttcacgaatccaaaaacattccaatcaataaatttaatgaatatatctcaaattgtcaaaaatacatttctgaggcggagtcgacactatggaaaatcgaggaaaaggaaaatccggataagacaacaagttttagcgataagtattcatcaattttgagagacttaagagaattttattatgagtgtgacactttatatatatttctcaattctataacggtaaaattatcgaataacccatttctgctccttgaaggagaagctgggattggtaagtctcatttgcttgctgatatcatcgaatcaagaattcaaacaggatatccatctctatttttattagggcagcaacttacaactgatgaatccccttgggtgcaaattttaaaaaggctacagctaaacactgtatcctcagaatttcttgaaaagctaaatctctatggtgaaaaacaagggaaaagattcctgatatttattgatgcaataaatgaagggaatggtaacattttttgggaagataacatcaatagcttcgttgatgaaataagaagttttaaatggcttggccttataatatcagtcagatcaacatataaagatattactatctcaaacgaacggatctctcgtaataattttgaaatttatgaacacttgggttttaagaataaagagatggaagctgttaacttattttatgataattataatatagaaagaccatcatcacctaatttaaatccagagtttaaaaaccctttattttttaagttactatgcgaggggataaagaaaagtggtctgacaaaagtccctgtaggatttcatgggatttctaagatcttaagtttttttgttgaaggcgtaaataagtcactatcctctcacaaaagatataatttcgatcctagtttcccattagttagtgatgctctcaataaattaattaaagttaaactagctaatggcagaaatagtattgctcttaaggatgctcatacagctgtccagtctgttgttaaagactatgtgaacgataaaacatttctcagctctatgatagatgaaggaatactgaccaaaggtatcgttcgcaatgaagacaactctgttgaagaggtcgtttatatatcctttgaaagatttgatgatcatttaacagttaactatttattaaatggtgttgataacattgaagatgaatttaaaacaggaggttctcttcaaaaatacttcaatgatgaatacagtttttatcgcaatcaaggaatcattgaggctttatctattcaatcaccagaaaaatatggaaaagaaatttatgaattatga

SEQ ID NO: 110485 - DNA, 219 bp, Enterobacter aerogenes
atgttgcagagcaactggctcctgccaatccgttcaacttatatcaacaccttttttcaaatcgagattttgatctttacgaagaaaatggcgattgggaagaacagagaaaaaaactcgaagcaaggcgcgaatcagcaatttcagaaattcttaagcaagatggtgcagaaggcgttatgcggtttgctgaacacgtttctgcaacccatcaaatag

SEQ ID NO: 110486 - DNA, 1233 bp, Enterobacter aerogenes
atgcggtttgctgaacacgtttctgcaacccatcaaataggaagtgtactcggcactattaacgatgatgtgttcgaaaaaattcttttgcctcatttcctggatacaacagaaaataagtataaggcattggtaggcgcttttatttggaaacgtttctatctcaaaggttgggagtggtacgacaatctggataaaacagactggactcctgaacagttaggtcaattcttggcttatctgccttttaacaaggaaacctgggcccgagtctctcatgatcttcaagcttccgagaacgaatactgggcccgcaccgatgcaaatccttaccagggtgaaggtgatcttactcatgccatcgataaactgattgaacatggtagaccacatgcggcaatcaactgcctgtactggatgcatcaggcggagcaaccaatcgacactgaacagtgtatccgcgctttgattgctgcccgttcaactaacgaatctagctccaacatggatggttacaacataacgactcttatacaatttcttcagactgaacccaaagtgaatccggatgttctatttcagatcgagtgggcttaccttccattgctcgatggccgccaaggtgctgaacccaagctccttgaaagtcggatggctaatgacccagaatttttctgcgaggtaatccgactcattttccgttctgacaaagaagaccagacggcgagtgaaccaacagaggaattgaaatccatcgcaacaaatgcatggactcttttgtacaattgggagacaccgccaggaagccaagcagacggaacgttcaacggagaacgctttactgaatggcttcagaaagttaaggaaatttctacaacgtcaggtcacttggacgttgcactcagcaaagttggtgaagtcttaatttctaccccctccgacccgaatggcttgtggataaacagagaggtcgcagttgctctgaacgatcgtaatgctgagagtatacgtgaaggctacagaataggaacctacaactcacgtggtgctcattgggttgacccaactggaaaacctgagagagagctggcgaaccagttccgagcaaaagcagaggaagtagaaaacgctggttttcagcgattcgccgttaccttaagagttttagcggatagctatgaccacgaagctgaactggtcatcagtgatctaaatgttggaaaggatgattaa

SEQ ID NO: 110487 - DNA, 2259 bp, Enterobacter aerogenes
atgaccacatacaaaaccggaaatcccctaggttcatccgcggcaaaggatttatttgataatgctgaaaacttggactttgcggttaacagcataactcagactatctggattgaccgccttgggaagccgcgtaaatcatggtttgggatggagtcggcatttcttgctcaactcgccagccaggaagcgcgctttaatgccttcatcgagcgatctggatatgaggtcatcggtgattatgccgatggtccactgactgtcactgaatataaccagcttattcgttacggtaacgagttgtggaaactgaatgccgatacagatttaccgtacaccacagcaggaactacagatgaaacatggaatgctactgactctttgcattttgtttctgtaggggatggggctcttcgtcagcagcttgcaacgcctagcagagtatctggtgataaaactggcggcgccatggttgccactccaactggcgcgactgtggatgatgcacttcctgacgtatatctacctgcatatggtgttttacttcagccggcatcaacgattagtaacggtactgctattgatatggcggataagctacagcaagctatcaatgacgctaagcgtcttggcgttggcttggttacaggaattagatccattcatggcccggcgccaactgggtatgttcatgtaactaaatcgtttgatgtcaccaggctgaagagcgtttcagggtttttaccaataggggtaataccagaaacattcacgccaacattatttaccgcagagacgccttccagaggaatggtaatgcgcaatatgaatgctcgttatgattcaagcggaaaacaatatgcatattcgacagaggtgggcccagattttgacagtctcgccatctatgcattaagagacatgccggagaatatcatcggtatggttcacacaactgcgtacaatcactttcatggtcaagtttgggcgcgaagatttgctaccgggatctatcttgcaaatacttatgatgtatctattgctgcgcaatgggccgcggttgactgtgggtcaatgaattaccctccattaatggttggttcttatcctgccgcagatgttccagatgaatcgaatagtattacttttcctgacttgttgttgcattccaataaatatcgtgatgctgagattgttggtagtaaaataaacgtcaatcggatacatggcgaggcatgtgttattggtagtcttgccgggatgattccaaggccatttgaccaatacgcaccaaacggtattgcttctttagtaatagcttcagttggtggaagtgctggaaatattaactataacatcagtaaggactcaacaagtaacgcctgtcttttaattaatactatgggggaaggggttagtagcatttattgcgaccgtgctgaaatcgacacggtaattagtgatatatatcaccttaaacgtggtggtcatgttggtaacatatacaccactggtaatttgtatatagatggtggttctaaactcgtcataggagaagctacggtaggtaaaaacctatataataaagctgtgaactcgcatattaccaatgcagatgtcagcggggatgttcttaactctggcactattgatactctagtttgcggtggttcattatctcaggaccagtacggaaaagtaaatggggggagtgttgggggcaacgtaacaatggtgtcatcaagtaagctcactgatgtcaccatcaatggtgattttatttcctcagcagctaaacctcggctgacgcgagtaacggtaaacggacaatggagagtaacaggtggtggagagttttatgactgcactgctcctggttttggtatacagtcagtaagcctcgctccaaattatgaaaaatgtaactttacatcaaccattactgcaccagtagccaattcccgtgcagtgttcaataattgccgtgcaccttataactttgacaatgctgtaaatcctgatgtcaggatatataatggttcctcttctggcttatcaatggagaacgttaccactggggctattataattgatggtcttgtttttacggcaggtaactcaattaaaggatggtcaaaaccagttagcactggtgcaggttatggggctaaaactgtcaatccatatactggtaaaggttggatgttgttagattataatagtgctccagcgtggctccctattaacatatatcaataa

SEQ ID NO: 110488 - DNA, 135 bp, Enterobacter aerogenes
atgggttggcccgaagccgtagtggaagcgctgcgcatcctaaaaaaaatgcctaagtggatggcgggaatggtcctttttgtagcgatactgctttctataggttacatcatcgaaaaattaacaggaagataa

SEQ ID NO: 110489 - DNA, 258 bp, Enterobacter aerogenes
atggccggattgaccaaagagcagcgtgctgaacgtgctgcagcaaaacttgcggccacgcaggttgatgccaatgctcctgaacagcaggaacagcaggaacagcaggaacagcaggaacagcaggaacagcaggaacagcagctggtggcgatgattaccgatttccaggcattccccggcgcccccaatacagccaacgttcaccctgatgaagtggagaactggaaggcgcacggctggaaagaaatggagtga

SEQ ID NO: 110490 - DNA, 1137 bp, Enterobacter aerogenes
atgtcgaacactttgaccgggttgatcccgactatctataccgctctggatgttgtttcccgcgagcaggtaggttttattcctgccgtcgcccgtaacaccaaagcagatgctgcagcaaaagaccagacggttaccgcaccagttgccccggtagcagtaactgaagacatcgtgccgggcccttcggctcctaacacgggtgatcagaacatcggtaccgtcgatgtcaaaatcactaaatccaaaatggctccggtcaaatggaatggtgaagagcaactggccctcggtccggctggtacttacaacaccatccttgctgaccagttcaagcaggcattccgcgcactggcgaacgaagttgacgcagatctgggggcgctgtacttcaacgcatcgcgtcaggttggcacgccgggtactacgccgttcggtatcaaggaagacctcagtgatgccgcgctggcccgtaaggtactggaggacaacggctcaccgactaccgatctccagatggttctcggttcagctgccatcgcaaacctgcgcggcaaacagtcagtgttgtttaaggtgaacgaagccgggacggaacaactgctgcgtgaaggtacgttgggccgcctggagggctttaatatccacaactccgccggcgttaaaactcacacggcctcggctgccgcgggctacctggttaatggagataaggttgaaggcgatcgtatcattgccattgatactggcacaggggctttcaccgctggcgatgtggtgagttttgatggcgacgacaacaagtatgtagttgtagctgcaacagcaagcactatcacccttgctcagcctggtctgcgtcaggatttggcagataacaccgctattacccgtggtgcaggatatgtggcgaatatggcgtttgaccgtaatgcgctgctgttggcatctcgcaccccggcaatgccgcaaggtggtgatactgcggatgatgtgatgaacgttaccgacccggtatcaggcattaccttccaggtggcactgtaccgccagtatcgccaaatccgttatgaagttggtctggcgtggggtgtcgctgcgccagttcctcgtcacagcgtcattattgctggctga

SEQ ID NO: 110491 - DNA, 765 bp, Enterobacter aerogenes
atgaaactgaaaacagttgaagtaaacggcaagagctatgcagaagttgatgcgaacggtcttcccgtttatgtacatgacgacggcaaagagatcggcttcgatgctgtgcaggccgttggaaaaatctcttctctgaacggtgaggcgaaatctcatcgtgaagccaaagaagcagctgaagccagcctggcgaaattcgccaaaataggtgacccggcgaaggctctcgaagcgctggacatgatgaccaaaatcgaccagaaaaaactgatcgacgcgggtgctgttgaccaggtgaaagcggatatcaccaaatcattccaggcacaactggatgaggcccacaacaaaaataaaacgctggaaagtcaactgtacgattcgatgatcggcggtagcttcacaggttccaaatttatcgccgataaaatcgccatccctgccgatctgcttcaggcccgcttcggtcagtcgtttaaggtcgaagagggtaaagttgtcgcctatgacggcaccggcaacaaaatttactcccgctcgaagccgggcgagctggcctcgtttgatgaagcgctggagttcctggtggagcagtacccacagaaagaccacattctgaaggccagcggaaaccaggggggcggctctcgccagtctcagcatcaggcagggcagaaaaccatgaagcgtgatgcattcgattcgctggatattgcaggcaaacaaaatgccctcaaagacggtgtcaccatcgttgattag

SEQ ID NO: 110492 - DNA, 240 bp, Enterobacter aerogenes
atgaagattttcttaaaaggtgggcctcgagatggtgagtccgtatcccttcacacggatgactacggagtgccattagaacgagtgcaatttcctcagcctgtttctgatgcatccccattgtttaataacggatttgatgcctgtgatctcgaacaggatattctgatatatacgctagaaaggatagtaatagacgggaaactgcatcactacgaataccactatcaaggtcgctaa

SEQ ID NO: 110493 - DNA, 429 bp, Enterobacter aerogenes
atgaagaaatttctaactaatacactcagtgaggtcgtttattgcaccctgctggtggctttgatatttgcaacgtttactggtcaaaacaatattctcagcgttgcagcagcggcatcctgggtggttattgcactcaggatcgttttggggccactgaccctcattcttgctcatggcgctgagcaatttcgcaacgagaaatccggacatgaggcgttggaagcggttaaaaaaaccaccaagcggaaaaatgtcgttgctcgcttgtggggatggttttgtatgttgcttaccatcgtcctgttggcttatagcggctgggtattcaccgcagtttgctatgcattgtcatcgctgctcgttcgcttctgcgtgtcgatttcacgcagcagggtagagaagatggaaggtgctaaattgacgtga

SEQ ID NO: 110494 - DNA, 258 bp, Enterobacter aerogenes
gtggattcttcactggaatatgcctgcagacgcattcaggaattggaaagccttctgctggtggacgtgcctgaaactgtgtggcccgcagaagtagctatggtcctgtcagaagtagaaaacgccggggaactccaggcgcaccaccagcgccgcctgcagcaccacatcaaccggatgtggctggaaaaaatgccggtaccgtcaattatcgccgcggctcgttcgctggccagcgctatggagaaatacgcgtga

SEQ ID NO: 110495 - DNA, 750 bp, Enterobacter aerogenes
atgatccccgacattacttcattaatcactgctggcgcgctgtttgtctccaatcattctggcggcaaagacagccaggcgatgctcatcaatctgcttgaggtcatcccgccgaagcagctcgttgtcgtgcatgcgtcccttggcgcgatggaatggcccggagcgctggagctggctcagaaacaggcagaggcagcaggcataccgttcatcgtcgcccgtgcacacaagaccctgctggagatggtagagcgtcgattcctgaaccgcccggaggttccgagttggccttctgcaagtacccggcagtgcaccagtgacctgaagcgcggacctatccagcgcgaggttagagcctatgcgaaggccaacgggttcaaggtcatcgttaactgcttgggcctgcgggctcaggagtcgccaggtcgcgcaaagcggcaggcgttccggaagaacgagacagactccaattccgttctgacctggtacgagtggctaccggttcacgatctgcaggccgacgcggttttcgcaatcatcagcggggcaggacaagagccacactacgcctacgcactgggtaacgagcgcctgagctgcgtgttctgcatcatggcaagccgcaacgatctgaagaacggcgcaacgcatcaccctgacctgctggagcagtatgcggcactggaggcccgtactggctacaccatgcacatgaatcggatcccgattaaggagcttgcagcatga

SEQ ID NO: 110496 - DNA, 792 bp, Enterobacter aerogenes
atgaaaattatagaaaattcactatttggtaaagttttcgcgccaactagtttttctgaaattttagacttaacagcggaacatgcaggagaacgattcaacgtgtacatgtggagggggcagggcaacatcgaatggccgattcatagtgccgcctaccgacgaatacagaatggcagagaaaggttcgttagtgagatcgaaatgaggggctacgaaactagacttctcaaaagagcacgccatcaaggttatgggtatgaagatggaaaaaaactttcagattttgaggtattggcaaaattacagcatcacggggctgcaacaaggttgatagatttctccagaaatatactggtatctttatggtttgcatgtagatcggaaccggaaaaaaccggggttttattgggaatacactctgaaactctcggagggatggaaggtgaaggagaagagagagactataaagatatattccccaaccgagagtatacaatagataaacacccccaaacatggcaaccgccagttgtgagtaaacgaattgccgcccaaagcgcacaatttctatacagttctgtttctgatcatccaatgggcagtttggcattcgataaaggtgatgatgcttacattgcgatcgccatcaccccacaatttaagctggaacttctgaccttactggaaggtacatttgatgtgaggcagttaacactttttccagacatagacggtttttgttttgcgaatagtgagcgctttgagcaatacagcactgaacgttggtaa

SEQ ID NO: 110497 - DNA, 285 bp, Enterobacter aerogenes
atgaacgcacaactcaccgaaatcatgcgccttatcaccaacctgttccgcaccgggactgtaaccgaagtggatcgggacaactggctgtgccgggtgaaaacgggcgaccttgaaaccaactggattaactggctgacaatgcgcgcgggtaacccccgcacctggtggaaaccgtctgtgggtgagcaggttgtgctgttcagcctaggcggcaatctggaaacctgctgtttatccgccagtgacaggggaaaactgcccgcggaaagccactgccggtaa

SEQ ID NO: 110498 - DNA, 1755 bp, Enterobacter aerogenes
atgaaatttagaacgttgtcaaagtgggactctcctgataactgtaaagccctcatatttttcgcgcaattattagacgaaatgctttttgactatactttggatacttacaaaccctccgtcatgaacacacctactttgggagttgaaacacttaatactattaaagatgttgatgccggaattattcaaccgaaaaatgttgatcatttaattgctgagttaattcacaacctctctaatgacatggtcgctcaatctcttcttggcgaagcttatactgcatttctcaacaaacttaaaaacccaacacttggagctaaggaaagaaaatcgattatcgaaatgattgtaattcaactcccgccaaaactatacaaggaaaaaagcgaagagttaattttacaagagataatgtctgatgactggactcgaagcgccataagaagattaacacgaaattatatcagcttattactttatattggattcagtcaaaacaatctaaagaatttaacacaaaaatttttctattacggtgaaaacagaattacaaacaattctgatgcaaaagtattcatggattctatcaaacttgaaaccaagaaacacaaagtctatttcattgtagaacctgtatttttgggagcggaacctaccttcagaaggctttcgttagcaaaagaggaaaatcctccagaggatcttgcagataaccatttctttagaaacttacaaagaaagaaaataatttcagtgtcggatattgatgctttagactcatattccgcgcgagaaagagcggagaactacctaaaactagcatcctcttttttaaacatctatcatcataaagacaagccaacatggtcaaatgaagctttagttatttctgaatttaattcattgaaggtttctgaacgactgaacccaatgaaaaagtgcaaggatttaaaacatgaaaaagcacaaaaacgcctagaatccttgatgtctgagttctctctggataacagttcgtttgctaaattcctaagaagcatacaactacattcgatggcattaaaaagtgaaagtgtagagaaccaattactaaacttatggatagcattagaatccctcgtcccaagtgagaccaagtcaaatgatcaagcaaccattgagcatattactgacagcataattccatttctaaatataatttacattgactccttgattgaaaatcttgcccgggatttactgctttggaacagacacactttgaatacgcatttcagaggaattcctggcacaaaatcaaaacataaacttgcaaacataatgatactacctgaatatgaagcaacaagagactctctatcatccaagtttcgtgactacagcctattatccgaccgattcgaacatataaaaaacatggtatctacgccagaatcaattaagtcaacattggataaccataaattaagattggagtggcaattcagaagaatttatcgcacaaggaataacattgtccactctggtaaagggcagcaattcacaccactgcttgtcgagcacacacataactatctagacaaaatatttgaaatcctcgttttcttagcatccaaacctcaaaaaataagatcagtaactcaaggatttcgttatattaagataatttacggacaaaggtacgacacaataacaaagaagggatttactttcaatatagacaacataaaagcgaacttgctatgggactaa

SEQ ID NO: 110499 - DNA, 291 bp, Enterobacter aerogenes
gtggatgagttgcagaaagtcgatgtctggctgactgcgctgctggcaaatcttgagccagcggctcgccgccgaatgatgcgggagctggcacagcagttgcgccgaaaccagcagaacaacattcgcctgcagcgcaatcctgacggaaccgactatgagccgcgccgggtgactgcccggacaaagaagggacgaatcaagcggcagatgttcgccaaactccgcacaactaagtatctgaaaaccgcagccaccgccgattctgccagcgtggagtttgccgggtag

SEQ ID NO: 110500 - DNA, 429 bp, Enterobacter aerogenes
atgatgcgcgccctggctgtgatactgactgttgtagtggcggcattgggctggcagtcgtggcggctcgataacgccagccatactatcgagacgcagcgcagggagctaaacggcaaaacccaggagctggcgaagaaaaacagtcagttgatcggtctgtccattctgaccgaaaccaacagccgggagcagactcggttctatgcggcggcagaggatacgcgttctttactgcatcagcgccagaacaggatcgaggagcttaaacgtgaaaacgaagatttgcgccacagggctgatgctcttttgcctcctgatgttgtcaggctgcgcgaaagacccgccatcaccggaggtgtagcttaccgtgagtggctgtccaaaggtgacgcagtgccgcctggaaaggtcagcgccgtgcagtaa

SEQ ID NO: 110501 - DNA, 216 bp, Enterobacter aerogenes
atgacgcttgaaagattcagcgcctttatcacgtactgcatcgccgtagtgctggcctggatgggggtcctgtccatcaaggatgcctcgacggtgggcggtgtgttgattggcgtgctgatgctgctgatcaactggtactacaaacacaaaactttccagctgctgcgtgacgggaaggtctcacgggaggcgtatgaatccatcaatcgttaa

SEQ ID NO: 110502 - DNA, 270 bp, Enterobacter aerogenes
atgaatgagctaaagaaacagggcttagaactccgtactaaagctaaaaaattggctcttgctgttttggcaatgcatcctgatggatgcataaatggtaaaggcgttaaacaagcagaaatatttcgtctctgcggtctggactggggagattaccctaaagccccaagtacacaacaacaatattgggcagtagcccttctccgcgaacttgaggcagagggaaaggtggagcaagtagaggagaaaggcccctggcgtttaaagtaa

SEQ ID NO: 110503 - DNA, 561 bp, Enterobacter aerogenes
atgcctgtaaacgagaggattaacgcgacatccgggacacgtattaagcccggtggaacgaggcttataaccactggtgagattgggttagcaagaacgctatacagctacggtctccggtacaatacagtgtggattcatcgggaaagttatttgccattcaatctacagcctactgatattgctatgagccctaatggcgaaatgtggtttagggaagacacctactcccatgatttttcaatggaagttgatgtgcagaaaaaacatagattcatgcatgagttaatgcatgtatggcaagcgcagcacggaatgtttgtcagaaccagagggttgttctcccgatttgctgattacagttatagtttagacaaggaaaacatacgacattatagcttagaacagcaggcttcattagttagtgattactggttgttgcaagcttacggttttaaaaattatctgtatctgcctgcattacgagattatgatcataaagaatctgactatacattgcttcaaaaatataaattagttatgaagggatttccacaatga

SEQ ID NO: 110504 - DNA, 834 bp, Enterobacter aerogenes
atgaaggagtttgagtggcatatcaagaccatccttgagacaaagatcaccgaaggtaaacgagcgctaatcgttgaagggaaaaccgatgaactcgtttttacccagcttttaaaaaaagtcgatccccaatgggaaaccaactgggttcttgccgaagtcggcgggaaacgcaatgtggtagaaattttgtcaaaacaatctgattggttgggcattgttgatcgcgatgagtgggatgatgcccagttgagccaacggcaacaacaattgcctaacctgctagttttgcccagattttgcattgaaaactatcttgttgtcccgagtgagcttttacatgggctgccgctcaagcaaagaacaaaactcccccgtgagagtgaagaagcgataggggctattgcttcatcgattactgcagctttagacagttggattcagtttggagctgcatgggctattatcaacccgctttgggatgaactgcgattgctcggatttaaccgagacctccttgatcctcagcaggtgattactgagcagggttttctgactcattgccagcgttggtatgaacatctggatcctgcgctgttgctgcaaagataccagaacaaactgtccgaaattcgccagttgtcagtggatgaccagttgcgcaccattgttcatggcaaaaaattttataaggacgttgtgacccctgtattcatgcaattacttgctattcagaaagccatttcagtggatgtgtggttcagggaaatgccagtcccagcagatctggcattagtctggcaacgcatgaatttaaccccagaagataattaa

SEQ ID NO: 110505 - DNA, 3630 bp, Enterobacter aerogenes
atgaatacgtcaaacatcaaaaaatacgccccggtggcacgtaaacagttccgcgatgcggtcatgctaaaactgactacgctgggcattgaagccgataaaaaaggcaacctgcaaattgcacaagcaaccgatcttggcgaccaggtgcgttatggtcagttctcgctggatagagcactggcgtcacgccgtgagcgtctggtcaagcgtgcagaaaagcagggctacgacgtgctggtggagcacatcgcttacacctggtttaaccgcttttgcgctattcgctatatggagctgcatggctatcttgatcacggtttccgtatgctgtctcacccgacgctggcagggggttttgaggttctggatcatgtgcaggaagtggctgatgctctggagctggacaaagcgcgcctggtggagatgaagctggcgggagatcgtgacgaagagctatatcgtgaactattgcttgcacagtgccatgcattgcacggtgcaatgcctttcctgttcgaagcggtcaatgatgatatcgaactggtactgccggataacctgactcgcaccgactccattctgcgtgggctggtagatattattcctgaggaggactgggaacaggtcgaagtaattggctggctgtatcagttttatatttccgagaaaaaagatgatgtgatcggcaaggtggtgaagagcgaagatattcccgccgccactcagctgtttaccccgaactggattgtgcagtacctggtgcagaactcggtgggtcgccagtggctgcaaacctacccggactcgagcctgaaaggcaaaatgccttactacattgagccagcagagcaaacgccggaagtgcgggcacagctggcagctatcaccccatccagcattgagcctgaaagcattaaagtgctggatccggcctgcggttccgggcatatcctgacagaagcctataacgtgctgaaggccatttatgaagagcgcggttaccgtacccgtgacattccgcagctgattctggaaaacaatattttcggcctggacatcgatgatcgtgcggcgcagctttccggatttgcgatgctgatgctggcacgccaggatgaccgtcgtattctgggccgtggtgtgaggcttaatattgtctccttacaggaaagtaagctggatattgctgaggtttggaccaagctgaacttccatcagcaggcgcaacgcggcagcatgggagatatgtttacccaagggacgtcactggccaataccgacagcgcggaatataagctactgatgcgtactctggcgttgttcactagtgcaaaaacgctgggatcactgattcaggtaccgcaggaagacgaagcggcgttgaaagcgtttctggatggattgtatcgtctggctgttgaaggtgatattcagcagaaagaggctgcggcagagctgatcccatatattcagcaggcgtggatactggcgcaacgttatgatgctgtggtcgcgaacccgccgtatatgggggggaaagggatgaatggtgagctgaaggaatttgctaaaaagcaatttcctgacagtaagtctgatttatttgcgatgtttatgcagcatgcattttctttgctcaaagagaacgcttttaatgcacaagtgaatatgcagtcatggatgttcctgtctagatatgaactccttcgtgaatttttgttagaaatgaacacttttatatcaatggctcatttaggtgcgagagcattcagtcagataaatggagaagtcgttcaaacaacggcttggattattaaaaatagacggttggaaaactataagccaacatttttccgattaatagatggaagtgaagatgataaatcaaaacgtttgcgtactggtgagtgttcctacagttcactcaaacaaacagattttaatgttattcctggctcacctattgcttattgggctaatgaaagtttaactaatttattcaagacaggtagaagaataactcagtgggtcgaatctaaagatggacttaccactggaaataatgagaattttattcgctactggtgggaagtagattcacatgatatatatactcaagcaaaaaaccatgatgaattttgggaaagcaaaaaaaaatgggctcctctgattaaaggggggagttatagaaaatggtatggaaatatcataaatgttattaagtatgacaaggctacatatgaaatactttcagttgagggcaataaattaccctcgagagactattactttaaaccaagtttaaattggacaaggatttctagtccttcaggttcgtttagatattctgaaggtggtactgtatttgaaagcgctagtttgacagcatatgctgatgatactaacaatatcttcctggcaatggctgcagcgaattcaaaaatggttgagccgcagttagatttggtcaacccaacagtgaatttcttgagtggctattttgatatgctaacattgcctagggatatttcgctgtatcaaaataaattaataaataatgtagaaaagcttatcaatatttcaaaagtagattgggatagcaatgagttttcattgggttttaaatcactattcccctctgttgataaaaatgtaaaaatagagttattccttaaggagttatataaaaattgtagtgattgggtacgtttatctcaagaaatggaagaggaaaataacaatatattcatttcttcttctggcttggcagagtccatcaattatcatgtagataaagaaagaattacactttctaataattactctgaatgtgatgtatttacatctgaaaaaactgtcgagatgttaagctatataattggctgcatgatggggcgatattccgtcaatcgcgaaggtttggtctacgcccatgaaggtaacaaaggtttttccgaattggtcactgaaggtgcctacaaaaccttctccgccgatgaagatggcatcctgccattaatggattccaactggttcgacgacgacgttactgcccgcgtgaaagagttcgtgcgcacggtctggggtgaagaacatctgcaggagaacctcgattttatcgccgaaagtctctgtttgtatgcaatcaagccgaaaaaaggcgagtcttcgctggataccatccgtcgctatctttccatccagttctggaaagatcatatgaagatgtacaagaagcgcccaatttactggctattcagctcaggtaaagagaaggcgtttgagtgcctggtgtatctgcaccgttatagtgaaggcacgttgtcgcgcatgcgtaccgaatacgtggttccgctgttggcacgctaccagggcaatatcgatctggttaacgatcagcttaagaattctgagtccggtgcggccactacgcgtctgaaaaaagaactggatgggttgaccaaaaaattcaacgagctacgcaattttgacgatcgcttgcgtcactacgctgatagacgtatcactattgatctggatgacggcgttaaggttaactacggcaaatttggcgatctgctggcggatgtaaaagccattaccggtagcgcacctgaggagatttga

SEQ ID NO: 110506 - DNA, 381 bp, Enterobacter aerogenes
atggcacgattagtcagaaaaaattatccgcaactgggggaagttaacgctccttatgttcatgcagttgcacaccaggggacgctatatatatcgggtctgacagcttttggttctgaggcgcagagtggtgatgttgttgcgcaggcaagtgaaatattcaggcaacttaaggtgatagcaacagcggaggggattacgcttgataatctgattaaagtgacgatttttgttacttcaattggttcgctgaaagcattgcgtcaggtattgtatgcaaactatggcgagagcctgcccgccagttctcttgtcgaagttagtgcactgttctccccgggtcttcatattgaaattgaagctgtgcttgcactgcaatga

SEQ ID NO: 110507 - DNA, 1152 bp, Enterobacter aerogenes
ttggacaacatttctagaacacatgccgcattatattttgatgagtcaggatttactgggaacaaccttctacacaagcaacaaaaaatattttgttacgcatctttggaatgttcccataaagatgcagaattttttacagaacatattataaaaaaatataaaatacaaaatggtgagataaaaggcagcaagttattaaaaggcacacgaggaaagcgagcagttgatgagataattaataattttaaagggcggtttaaagtttcagtatcggataaaaaatatgctcttgcagggaagttctttgagtatattttcgaacctgcaatatctaacgccaactctattttttacaatattaactttcatcgtttcatcagtaacattcttcatcttgagttctctgtaagaggcgcaatggcagaagaaatatttgaagactttgaaaatttaatgagaacaggtgattttgaaggtcttaaattcttattctcagaatcacaaggcaatggtatttcaccagttttagggaaaatatgtgattttgccattttaaacaaagaatcaattattgaagaactaaatggctacattggtacaggtgcagggaagtgggttttggatttaacaaacactgcattatttagtcttttagcagcctgggggaaagaatacgatcagttaactgcatattgtgatcagtccaaacctctcagcgaagatcaaactatattcaatgccatgataaatcgtgaagataagaagttcacgcatattgcaggtattgaatcaccattgacatttaacttaacggggccactaaatttggtagattctaaagtagttcacggagttcaacttgcagatgctatcgccgctgcatttgcatatgcatgtgatgcagaaaatcaggatgagtacgctattaaatggcgagatctgattgaggaaactactatttttggaagtgtattccaagattatgattatcttgatttaagtaaattagaagttcaaagaaatgcaatattattagaagagctagtcagacgtagtaaagcaggcatcagtttaaccgaagatattggtcattttattcagtggcttactttaacattagaaaaaacaccccttgatataccaacataa

SEQ ID NO: 110508 - DNA, 1473 bp, Enterobacter aerogenes
atgccgctcgatgcgacaaatatgctgccggcgggcaccggggtgccaggcggcccgaccctgttgggtatccccatcagtatcgagtttatggggctgctggattcggtctccgcggttggcgtgccgcatatcctgccgtcggccatcgggcatctgggctgggcggccaacagcctgcggctaccgaccaccaaaggtttcttaaaaagctgctaccactttgtcgccggccacgagcagcatggcgacctgccgctggactctatccgcggcccggacggcaaatacccggcgggagcggtggaggtggtctatcccgggatgcatgccgatgtcggcggagactgtaagcccgcggagctcggcaaggtgcagaccgacgcccgcagcctgctgtcaaagattgtgctgcacgatatgtatgccgccgcctttgatgccggggcgccgctgagcgtacctgaggaggtgatgcccggcggcgccaaagagaaaacctaccggataatgactaataatttactggaccaattcaaaatctccgaacaggccatcaccctgtttaacgcctggcagcaggccggggcgcagcaggcgggggcgaagaccgaaacgccggccgtcaatgaggcggaggtggtggccatcgccgtggcccagggccgggatccggttgccgcgctgaagacggctcacgacaaggcggatagcgataaggcgaaagccgccgccgccgcgaagccgccggagaacggcccgctgggcaaactgccggatccggtgtatgtgccgctgaaggccaaagcgctggaggtgatgctggcggaccagctgagctggatcaccgcctggcgcaccgagcgctttgccagcccgcaatacgccgataagtattatcagcgcaagcctttttatcagcaggcgctgaatgaatcgtccggcgcgctgccgtcggcggcggcgcccgcggaaagcgaagggccgcgagaagtgccgtttatcgataaggatcggctggaccgcgcggcgtggggctatgactttgcccataccggtatcgtggcgctgctggcccaggtgctgctggatgtgatccccaccacgcaaaccaaccagcttggcggtccgctggtggcggcgcaggagtcagaatatatccagatcaagaaaagcggcgatgcccggcgggcggcgctgatgggctcgccgacgatgctggatttttacgataactacgtgcatgacacgctggccaaatataatcacgacccgctgcactcctcgttttcgcatggttattttgcgtcgcggacgatttacgataacgatgacgatacgtgggattcggtgaaacaatttggccagcgggtaaaagcgattatagatattaatgttggcgatatattagtgcaggcgcgaacggatatgaaaatacagctgaaggtatttatagcggccaattttatttga

SEQ ID NO: 110509 - DNA, 549 bp, Enterobacter aerogenes
atgaaacagttaacatgctttaaggcctatgatattcgtggggagttgggcgaagaactcaatgaagatatcgcatatcggattggccgcgcttatggcgagttactcaagccaaagcaggttgtagttggtggtgacgtacgcttaaccagtgaagctctaaaattagctttagcccatggcttaatggatgctggtactgatgtgcttgatattggcgtaagcgggactgaggagatttattttgctacttttcatcttggtgtcgatgggggcattgaggttacagccagccataatccaatgaattataatgggatgaagttggtacgtgaagatgcgaagccaatcagtggtgatacgggactgcgtgatattcagcgtcttgcagaagagaatcggtttgggcctgtagataaggattgtcgcggtaccttgcgtcatatttctatcttaaaagaatatgttgatcacttgatgggctacataaacttggctaattttacccgtcctcttaaattgcatcctcctgacgcattctctccttaa

SEQ ID NO: 110510 - DNA, 123 bp, Enterobacter aerogenes
gtgggtctggaagcggacgggcagaacttcctgctgatgcacgcgatgggcccgaacgtggccggggtgatcggctcggcgatcgccgccggggtgatgctcaagtacgtgctggcgatgtaa

SEQ ID NO: 110511 - DNA, 276 bp, Enterobacter aerogenes
atgaataagtcaatgcatagagagcagctagatgaaaaacttcataatgttatggaggatataaaagaacttgttgttgatgcagccaatgaccgggatggcgaattttttgggtaccctagagcattcgcttacgcgatggatttgatttactccaaagaaacccaaacgggcgtgcaatttataaacgccgaatctgccacagatgaccagatccagagcacaataaatctcgtagaggaatgcattgccgactggaaagcacagaaccaatag

SEQ ID NO: 110512 - DNA, 330 bp, Enterobacter aerogenes
atgacatcttatattaaaaatatttccgcagttgattgctcagtcggtgtagttattgacccaaggtctaatttaatcgtgggtgagctagaagcaacaaactgcgacatcggattggcagagattgagtatccaacagtctacctacacaaagagttccctgatgaatttttggttttaaaagaaagcataaacaaatatcaggttctaaataaacgcaaaaagaagagaataattgaggaatcagatttttataaaatagtcagtgatcaatgtggttctaatgatgcccttcggattaccttaatttatctcaatgactttggttaa

SEQ ID NO: 110513 - DNA, 327 bp, Enterobacter aerogenes
atgcctacctacgtaaagattaaaacaacaggtgtagaacacagcgttgtagtgccttcaacatctacatctatattccatgaaatcgatgtggaacggggcaaaactgcagtgattgaatatacatctgaggaagttgttcatgcactaatgaaaacaactcaatcccacgaaaaagaattagcggaactaagattgttattaactgaaaagcagttagacacaaaagaaaaagaagccatcattaaagagtcaaagatttttgagtacctttctgcagcatcgaatgcagcaactgcattaacattcctagttagtctcttctaa

SEQ ID NO: 110514 - DNA, 615 bp, Enterobacter aerogenes
atgaaaatagtactactagttgtgttgagtgcattaatctttctggctggctatttcttcggtagcgtcagcctagattggactactcagaaatatgctacgacagtagcgttttgggcgatgatagggggatggttttcaagcatcctaacattcattgcggttgctatttctttatttatggcgtatcaggcaactcagaatgataaagaaaagatcttactgaagacaaaaatgatgggtaagagtttgtttggcgatagttggactgtttctatcgagcttattaatttaagagcaattcaaacaaaagtagaagatattttattaataattgatcctgcaaagcctataagtattagccacataatagagggtggtaatgtgccgttccagctaactttcaaaggagatatgatccggctaaaactaacaatagactcaggaaataactggtggccaatctttatgaagctagatgaagcaaatcatgtgaaatttagaaaaggattctacttaattcagtcaccgtttcaaacttataaaatccccatttcacaagaagtgttagaattaataaaaggaagatatgaacgattcaaggcaatgccttaa

SEQ ID NO: 110515 - DNA, 1215 bp, Enterobacter aerogenes
atgactaaaccaacaaatatatttgatgaaactaaagatgtttattacatgtatcgtgaagtatttgataacctttcctcaataccggatctgcagcccccattcatagccaatgaaaatataattagagactttgagcgccgcataaatctatatttaaaaactattgacgaaataaaaagcaaagataacctgattattaaagaagtcaaaaaaagcataaagagcactaaatcactagctgataaaataatagaaaccttgcgcctatacttaaatggaaatattagagaggcttataaaacatttgacatggcaataactaacacaaggataaatgatcacatatataacatgaccgttccgctaagcgacttttgccactcatccaaacctctttttagagttcgtaaaagtgatgctatcattaaggaacgagaggatatttttcacattccatttcctaagcgccatctggttggggctcagcgatactctgtatcaggtttgccttgtctttacttaggaacttcaatatttgtatgctggcaagagatggaaaaacctgattttgataaactttatgtttcatcattcataagcgaagttgcaacaagtcatcggatacttaatattggatacaatcttaaatccgcattaaataagcccgtaatagaactgtggacagaaacagatcaggaaggaagcattaacagagtcatatcaaatcttcttgcatggccactggttttggcatgtaactacacaaaaaaacataacaatgccagctttaatgtagaatatataatcccaaacttacttatgcaatggattagtggtgatgataataaaagcatttcaggcattgcttacagaacaacaaagattttaaatcagaaggatagtgatattggtataaatattataatgccgcctaaaattgataacatagctgaaaataacttaaatttttgccctcatcttagaagcatatttaaatttactaaacctgtatcatggcaggtatttagtacgttaaaccttgaaccaaatggaatggaaggttactcccctattgttaataaagcatcgactggctctggaaatatcgatgattttgatgaatcattagttcattattacaaaaatacatcttttaaaaaaattcaactacttttacaaagcctgatgaaacacgattacctgaacgaataa

SEQ ID NO: 110516 - DNA, 186 bp, Enterobacter aerogenes
atgccttcctcctcgctgaaagtactttacaacccgaaggccttcttcatacacgcggcatggctgcatcaggcttgcgcccattgtgcaatattccccactgctgcctcccgtaggagtctggaccgtgtctcagttccagtgtggctggtcatcctctcagaccagctagggatcgtcgcctag

SEQ ID NO: 110517 - DNA, 930 bp, Enterobacter aerogenes
gtggcgtcgccactgcatattacccggaaaaaaaacctgctcgcccgcacgacccgctatccgaacctgtgcattctgcacgaccgggtgctgctcccgcgtaattttcataccgcggtacagcacttcggcgatgatttcccgctgaccgggtttcagtcgttctggttcgccggcgccggacagacgctgccattacggtattctgattttgggatgaccccttccctgccggcaccggaatggtctgccgcacgcccctcaagggaagagataacctgtctcgccggtcagccactgtatgcccagcaccctgcccgcagcgatttcgggcgggattatctgactggtagtctgtatttatgcaagcgcagcgtatgggctcatatcccgcagaacgaagcgctgttctggcaggactatgaagatctggagcaggccttcagtgccgcacaggccgggatcccttcccgggtaaatccgtacaccctgacgcagagcctgtcttaccggagcgtgatgcactacatggggacattgtacgggatcacccggtccggctggccggtttcggaacgcccatggggaacatttctgctacctcacaggccacatcttccggtccgggaaaccgaaggatatcaccgattacgccagtttgcgtcccgctatacgaccgatgccctgaaggacagtattcctctgtccctgtccggtatacagcgctatcgccttattgcccgcttactgtgggcggctgagggcaatacggatacgctactcagaggctggtatcagctgatcctttgcgaatcccccgccccggacgaagcggcgatgctggaagacacgctcaacggcgcgatgacgccggcagaaaaaaaaagccgcgctgctgcgccacccgacacttgtccggctgttgtttaa

SEQ ID NO: 110518 - DNA, 387 bp, Enterobacter aerogenes
atgtgtccagtcccgttgctggctcaggctgtagttccccgtcaggataagggttactcccggggtctctgcctgtgtggtggcgcagagaagagccagggcgggccagataacctgtggtggtgtcatcttgccggtctggaacagcacgacaacacgtgcccggctgccctgctgaaggggctccgacatcgcaggacgcttgccgcagagcgtcagccacagagcactgagcaggctaccgactatccgtccgaagcgggaggccatgtcgggaacatccggttgaaacggggagctgaacacgttattaaacaacagccggacaagtgtcgggtggcgcagcagcgcggctttttttttctgccggcgtcatcgcgccgttga

SEQ ID NO: 110519 - DNA, 492 bp, Enterobacter aerogenes
gtgcataatctcagtattgtcttccagagcccggcagatgtgatatctcctgccctgtatcgaggcctgcagcgaacccaggacacgtttcctgacgccgaaatcattgtgtccacctggcacaggacaccggtggaagatcgtctgttgcagatccgcctgcagtcaatgcagatccgcctcatcctgagtgtcgatccggggcccctgatcggtaccgatacctccgggcgctggacgattaacctgaatcgcctgttgtgctcaacccgggctggcctggcagcggccagccatcctctggtcattaagctgcgaacggatacctggctctcttcccgcgccatgctccgctgggccacgcagtctggacgttttctgcgccctgcacacctaaggccgccagctcaaccagcatccgcacatccacgtctccgtcacccgcggcgggctcagcgtgaagcacggcgtctggaaagacatcttctttaa

SEQ ID NO: 110520 - DNA, 342 bp, Enterobacter aerogenes
atgagccatcaaagaatccctaccaactggacgatcaagcgttcgaccccattcttcacgaaagaaaacgttcccgccgcccttctgagtcaccacaataccgcggccggtatttttggccagctgtgtgtgatggaaggaacggtcacctactatggctttgcaaatgagcatgctgttgaaccagaagtgaaagtggtgatcaatgctggtagtttcgcaaccagcccaccgcaatactggcaccgtattgagatgactgatgatgcccggtttaatattaatttctgggcagatccatcattcaccggcgaaaccgtatacagcagtaaaaatggttga

SEQ ID NO: 110521 - DNA, 402 bp, Enterobacter aerogenes
atgctggactggttcagggatcctttactgcgtcgacgcgtacaggcggggctgaataaaggtgaggctcgcaatgcccttgcgcgagcggtctttatgcatcggctgggtgaaatcagagatcgggggctggagaatcagagctatcgagccagcggtctgacgttgctgactgcggcgatctcactgtggaatacggtatatatagaaagagcgatagattctttgagacgaaaagggatcccaattaatgagcaactgattacccatctgtcaccactgggatgggaacatatcaacctgagcggggattacgtctggagaacgaacctcaaactgggacagggtaaataccgcgcattacgctcagtgaatagtaatctgtacaaaaaacaggcttag

SEQ ID NO: 110522 - DNA, 240 bp, Enterobacter aerogenes
atgagtattgtcagccggaagtttgatcggaaggaggtgggaacggtatttcgccatgcggtgaccgggaaagtattgtgccgtctggaggtaaaactgacttcagaagacagggaggaattactgtccttaatcagtctggtgtatcgcgtaggagagaacgccggtagtgaacaacgggctgctgaaatccggcaggcgctgggtttacagacagaaaacgagtcagggggtgtttga

SEQ ID NO: 110523 - DNA, 231 bp, Enterobacter aerogenes
atgatgagaaataacccctgcaaaacggagttgagggtggcccgcagccagcgcaataaactgcataccatctcttcccgacttaaagaaatgacctgcgaatgggatgggctgagtggctggctggaaacagaaacagagcggctggttgaatatgtcgatcagcatattcaggcgctggatgaacaaatcagggactggtctgcaggaaaaagcgacagggagttctga

SEQ ID NO: 110524 - DNA, 153 bp, Enterobacter aerogenes
atgctcaatcgaaaccatccagctttctgccgtgcgcctgcgcaactatataaaaagatgctcaatgcgctggggggacaggagctaattaaactgggtgcagcgtgtagtgatcagtcgttgctcaatatgggccaggataagtacctatga

SEQ ID NO: 110525 - DNA, 189 bp, Enterobacter aerogenes
atgacatgtaccaccaaattcagggaagggatgctaacggaatggaacagtccggataagcctttgcagctgcattttcccagtaatttgaagaaatgcaccaagaatccgcatattgcttctgcaaggatagagaggtataaaggattgctacaatatcagactaccccccgtttaaggttagtctaa

SEQ ID NO: 110526 - DNA, 285 bp, Enterobacter aerogenes
atgaaaaaaaaattaacatggctattaatgttactggaattaagtctgggtattaccctcattgtttacggattagtaaaatatttttcacaatcaacaatttacaaagtatgtacagaaacctcactgtgtgccgcagacacaatgagtttcttcaccctctggctttatcttactgttggcgtaatgctgatatgtctgtggtatcttaccacctggcgtccttaccagaacagagtgcagaaggtggaatcatcactcaagcctgaagaccttgtaaaataa

SEQ ID NO: 110527 - DNA, 399 bp, Enterobacter aerogenes
gtggtgaaaggaccaaccccgaacaccgccagcccggataccgtgcgcgcgatgacgccggaaatgttcttcgactatctggcggtgcacatcaacggcgagaaagcgggtaacgcgaaatcggtctttaatatcgatctcggcggcgacggcggcaagtataagctggagctggaaaacggcgtactgaaccataccgctaatgcggaagcgaaagatgccgataccaccatcgccctcaaccgcgccaccctgaataagatcatcctcaaagaggagacgctgaagcaggccgtcgataacggcgacgcgaaaatcaccggtaacgccgataagctcaatgaaatgctgggctatatggataagttcgaattctggttcgacatcgtgactccgtaa

SEQ ID NO: 110528 - DNA, 780 bp, Enterobacter aerogenes
atgaaaaatatgcttagtggttgcattcttgtcttatgtgcgggaaatgcatggtcagcagacggtggtaacgcagcgcaggcgaacaaccctctggcaaacatgactgcatttaatatgcagaactattatattggtgatataagcggaacagataaagatgctaaccagttctggctacgttacgctacgccattctcgttaggagaaagtgactggttattacgagcatcactccctgttaacacctatccagccccgccagatggcggacataaaactggcgtaggagacctgaacctgtttgcttcctggctcgtagatactggtaaccctgcggtcagttttggatttggtcctcaggtgacattaccaacagcaagtgacgatgctgttggaacagggaaaacatcagcaggcctggttaacgtgctctttgatgccagcaatcctaaattccagtatggctacctggcttcatggcaacatagcataggtggtgaaggtgatcgagaagatgtcaatatagcaacatttcagccatttatgttttatcaactgggcggtggaacctatttgcgctctgccccaatctgggtctacaacctacataatgacaattatagcgtaccattaggactaggcgtgggacaagttatcaagcaagggaaaaccgtctataacgtctttattgaacctcagggttccgttgctgatcacgggccaggtcagccgcgctggcaaatttttgccggattaaatctacagtttctgaattaa

SEQ ID NO: 110529 - DNA, 621 bp, Enterobacter aerogenes
atgacatatggtattcatggtctagtacctctgaaaaaaatattcagcctaagtgccgcaggacttgcgctaagggaggttcgtccatcacatcagtataactgccgtaatcaccctcgccacctggctgggaccacggtcccactgtcggaattccccctgtgttctggctgggaccatggtcccactaccggaattccccctgtgttctggctgggaccatggtcccactaccggaattccccctgtgttctggctgggaccatggtcccactaccggaattccccctgtgttctggctgggaccatggtcccactaccggaattccccctgtgttctggccgggaccatggtcccacagttggtattcctcctgcatcctggctgggaccacggtcccactgccggaattccccctgtgttctggccgggaccatggtcccacagttggtattcctcctgcatcctggctgggaccacggtcccactgccggaattccccctgtgttctggctgggaccacggtcccactgtcggaattccccctgtgttctggctgggaccacggtcccactatcggaattatgctcaagtccccccaggtatctcggtttcaataa

SEQ ID NO: 110530 - DNA, 207 bp, Enterobacter aerogenes
atggtgaacgcctgcgacgcccctgttaaccacatgtccagaataatgataaaacatataattaacattgagttccaaattcagcaacatttctgccggaggaatagcgcggtccgctgttcgtggaggcatagggttttcagcccctatttgacaaagctggacaaattcccgcccagaaatccggcccacaatgccaccacataa

SEQ ID NO: 110531 - DNA, 306 bp, Enterobacter aerogenes
atggtcaaagaagccattctgttaagcgttgagtgcctggtcgaagatgctgggcgcagtgttgacgaaatcaaagatgctggctatatggtgtacacagccgatcccgaatataaggattttgttagctggttcatgatcgaggttgatttttctgagttctcaggcaaagctcaaagaatcaacgtttcactgccggatacgctgattaggcgcattgataatgctgtaaaaggcaacagcaattaccgcgacagaagcccttttctggccaaagctgcaagccatgaactcaaaagtcagtaa

SEQ ID NO: 110532 - DNA, 255 bp, Enterobacter aerogenes
gtgctacaccatgacgagcagcaatatgcttacgccgggcagtgcggcgtcatgttgtattaccaccgcaccaccatcgagaaggtgggaggcttcgattccgtttacattcacggaatgtatgaacatggcgttctggcgttacgtatcaacaatgccgggctgacgacatgggcgttcgctgatgtggagtgttccgaaaagctgatttactcactgggcgaacacgaagccatcaagcgccgggagccatag

SEQ ID NO: 110533 - DNA, 204 bp, Enterobacter aerogenes
atgaaccttggccgtctggcggcgtgcaagcgttgcgaaataatcaattgctacctggagacgtcgaaaaaccaactgaaaccaggaaatttattattttttactttatgtgatattgccggagccagaatgtctgccagcaagagaacaggcgagggcaaaaacaaaaccatcctgtatattacaaaagacacgacacgatag

SEQ ID NO: 110534 - DNA, 309 bp, Enterobacter aerogenes
atggggatgtttgacacggtcacgtttcgataccgcctgccggacggggtaataggtacagcattccagaccaaagatcttaactgcgaatgtgaattttacgagatttcctctgaaggccgtttgcttcgctggatggaagacggtacccgaaccgatacctgttttgacggaatactgacccttagcgccgatgacggttatcacctgtattttgaacatgggatggtaaagtggattgaagtgtactcctggggggaaaaacgctggccgtttgatcctgagcgcgttatggcagaacgtaactga

SEQ ID NO: 110535 - DNA, 213 bp, Enterobacter aerogenes
atgagtcggcgtggctactgccaggataatgcggtggccgaattgttcttcagctcgctgaaaaaagaactcatcataaagaggatctacaaaacctgggatctggtacgggtggatatcttcgattacattgaagtgttccacaaccaggtccggcgccacagtcatctcgacggcttcagtccggagtccttcgaacaggcctcgtcgtga

SEQ ID NO: 110536 - DNA, 1686 bp, Enterobacter aerogenes
atggccagtacaattctggtcatcggagtggcaggctattttagtttcctgttacatgcaggatggatgaataacggagggagtggggttgagctcccctataacttgatagcctggtgttttgcctcagtgcttagcgtggtgttctggctttttttgccttctgcaggcaaacccgttattacgcctttatttttattattacttgccggcgctctgctgatgagccttcccctcatatggtccccctccttcctggcctttcacaatgcactacccagggccggggggttatgggctggtatgttctttctactgatgctccgtcaggccattttcacagaaaagcatacacaaatactactttacagtctggtatttgcaggtgctgcagaagcagtgattgtgttatgtgagttatatacgcctggcgcctggttacctgccatctggcaaaaacttatcatgaaatacgggcgttacggtgcgggggtatttcaacaggtcaatgtcacagccagctttctggcaacaacgctggcaatctgtctgatgctttttgcttccggtacgttttcttctgacagcaacaggatggaacgatttcgcctgacagtgattgccatcgcaatcctgctgttatcgtcagtacttacacttctgtgttcacggattggatggttgagcggtttcagctccgcaggaacggtctggctcatactcacattcagcaggcataaaaagcaaagccggcatcagggattgctcttactcctcatggtgacaggaatagttctggggtaccagctaatgcataccagcattggacaggctcttgctgaacattccgggtcaaatcatcaacgaatccttaccctgtatcataccctgatattttccagtaaacatccattcattggctatggcgcagggacctacgagggatattatcagtcctatatggccggactactcagcggcaatcagtccagagagctgatgagtcacccccataatgaacttttgtaccagtattcggagggcggagttattgctttagccggcgctcttatctggtatgctgcttatctatggttatggttccgtgcgaagaccagcattcagattactgccctgctggctatactccccctgctcctgcatacgcaggttgaatatccgttgtattactccgttccccactggcttaccttgttgcttctaatcaggctggctgagggcgaaacaggcccccactccgttattgattttaattatcaggccgggtgcttcatcaaatctgcgtaccttctcctgtctgtatatggagcctttgtgtcacaacaggccatcagcaacggaaaaataatgagtcagtttgaaaatagcgaattaaccagtacgcaccccatcaccagtatgaaagtatcctggatccagcaatttcgttatgagcaggaccttaatcttacccgtctgattgattttcagaagtcgcataatgtggattccctgcagacttttgcagatatgaatgcccggatcatttcagttcatcctgcgcctgaactctacagcaaccagattgccgttctgaattatcttcatgagtacaggaaggcaagtgaatggctgcaacgagcccattatactttgccctgggaaactcagttttctgttaactaa

SEQ ID NO: 110537 - DNA, 552 bp, Enterobacter aerogenes
atgcgaaggaatgttatcggcaggcttttacgatttttacttctcttacctttgctgtgcggtgtcggagcaatagctcatacagtcacgctccctggtgggattgtgcatatgacgggatccgttaccggcggcgcatgcacagtgagtaccgatagtgaagataaaaaggtattcatggggcaggtgcggagcaatctgttcgaggatgtgggaagctgggcagacccggtatactttacactcgatctggttaactgtgatacggcaataagccagcatgtggggatgctgttcactggtgtgacggatggtaaagatccattagtttttcatgccggtgagggcagtggagcggcaaaaggtgttggaattggtttatttgacagttccggggatttaattataccgaactcaaaagcccgtcatttaacgctgctgcataacggaacggtatctgttccattaactgcgaaatatcgcgctacagacagaattgtttctggtggtgatgccagcgctgaaatttatttttctctgtattatccataa

SEQ ID NO: 110538 - DNA, 2676 bp, Enterobacter aerogenes
ttgcgtagatctcctgttgccgtgtctttgctgttagcattatgcccttttcacgcattcgcggataattatttcaacccggcatttctgacgggccttgatggttcaggtaccgacggggtggcagacctgtcccgatttgagaaaaaccagcaggcaccgggaaattaccgtgtcgacgtttatctcaataataactttatcacccgacggaatgtgaccttcaatgcggccaaacctggatccaaaggtgtaaaagatacggttacagaaacagataatgccgctgatgataagcagcctgcgtctgaggccgcgcaagatgcgggcgagcagagcaccccggatggtaccggaattgtagcctgtattacggagaaaaatctggaggtaatgggagtcaatattaaggcattccctgctcttgccagcctgcctccggatgagtgtgtggatttacctgcggtcatcaaggatgcgggtacatcatttgactttgaacacctgcgactggatatcagtattcctcaggctgcgctgagtaattctgcccgtggatatatacccccctcgcagtgggatcaggggatcccggcattgttgctgaactacaacttttctggtagccataacgcaggtgattcgacaacaaacaattactttttgagcctcaacgggggactcaatatcggcccatggcgtttacgggatacatcgaactggaattacaccagtggtaagcacggggaaaatgcgagtcatgactggcagcatgtatcaacttatattgaacgaaccatcattgcgctgaagggagagctgattgcaggtgatgcgagtacatcttctgatgtatttgacagcctgggattccgtggcgtgcagcttgcctccgatgacaacatgctgccggacagcttaaaaggctttgcaccaacggttcgtgggatcgcgaaaagtaatgcacaggtcacgattaaacagaatggttatacgatttatcagacctacgttcctccaggagcgtttgtcattaacgatttgtacccgacatcctcaagcggtgaccttaccgtaagcgtacaggaagccgatggcagtgtgagttcattcatcgtgccctattcgactgtgccgatcctgcagcgtgaaggacgtcttaaatatgctctgacggcggggaaataccgcagtggcagtcatgatgaagacgaccctgagtttgtgcaggcaactgctatctggggtgggccaaagggattcaccttttatggcggcgcacaatatgctgcggattataatgcctgggctctgggactaggcaaaaacctgggggactggggcggcatctcgttcgatatcactcaggcaaacagcgtgctggctgacgacagtgagcaccacggttcgtctctgcgttttttatatgcaaagtcgctgaacaactgggggaccaatttccagttactgggctatcgttattcgacaaaaggttactacacctttgaagataccacacataaaatgatggatggctataattatatgaatgaggacggtagtgaagaatacacgccttcttattcagactattataatctgtattataccaagcgtggccagcttcagctcaacatatcccagacaatcggtgatgaaggttcggtgtacgtgaccgccagtaatcagtcgtactggcataccgatgaaacgacgacattatttcaggtgggctacagtggcgtctggaaagatattaactatggcctgaactacagctataacaaggcgacccaacagcagcatgcagacaaaatatattctttcaacatttcgctaccgatcagtaaatggctaatgcccggcagcaatgacgggagctcacataatactgcctatgctacttacaataatagtattgacgccgaaggtaatatgacgcagcaggcgggggttagtggtactttgctgagtgataataacctgaattacagcgtccagcagggataccgcaatcatgccggcggcggttacaacggtatggcatcgctgagctatcaggggacttatggtaacagtaacgtgagctacagctacagcaagggatatcgtcagctcagctatggtgcttccgggggaattgtcgttcatcaggatggcgtgaccttgagtcagcctctgggggaaacgaacattttagtcgcggccccgggggcaaaaggtattgatgtcgagaaccagaccggaataaagaccgactggcgcggctatgcggtgataccttatggcaatgattatcgtttaaaccgtgtggcgctggataccaccacgttgaacgaccataccgacatcgatgaagctgtcacaacagtcgtaccgacgaaaggtgcgctggtgaaggcctcatttaaagcgcgtgtgggggtgagggcgatgctggtgatgacacataacggtaaaccactaccctttggttccaccgtcagtaccggagacagtgataatgcaggcattgtaggggatgacgggcaggtctacctttcgggcttgccattaaccggtaagttgaaggctcagtggggtgacggtccggataaacaatgcagtgctcactatgaattaccaaaagacagcctgaccagggcaatcgtccgggcgacagtgctttgcggataa

SEQ ID NO: 110539 - DNA, 804 bp, Enterobacter aerogenes
atgccaaaatcgcagtcgacctggaagtataaaaagagctgctcaggatcttattgtatatctatcgcatcggcaatatccaccccgaatggtttattatacacaccctataaatccacgtataaacaggaaggttatactgcccagtctgatggttcgtatatcatcccgtcacgagactatcatttctccgtaaggttacaggatgtgttaccggtaggggaacatgtttttccatcggtaagggtcgataaacttattatttgtaagtccacaccgaactacggggaacaacattgttctaccaatacagggagtatcttcgttcagtatctcactgctgatgttcatatatccgttcctcaatcgtgtacggtaaacagtggacaaactgtaaacatcgaacttgatgatgcttcggcttcggcttttgttaaaggtggtgccggtaacccacctgccggatcgaatgaaaaaaccgtcagtgtacccattcagtgtatgggagggggggctggtagcgtgacgatgagcctgcatggcacctcagcgcagaattatgcttccagcctggcgtcttccaatgcagatgtaggagtcaaggtaatcgatcgtacgtccggcagcgggaataacggccagccgattgttccgaacagtgcttcgtcatacagcacgattcagcttggccaggacggaaatggccaggcgactcttggaatatcgccagtctggcttggcgagaatgaaccggcaaagggtaattatacatctcaatcctatttacaactggattatcaatga

SEQ ID NO: 110540 - DNA, 528 bp, Enterobacter aerogenes
atgaaacatttaacgatgtcgctattggtgttgaccatactgatacaaggtgggggggcatttgctgaagataagacaccgaatcttattatcaccggtactgttactacggattcctgtactgtgagcacggattcccagaaccttgaggtttcgcttggcgatgtggttaccggcatgtttgttcggccaggtgattccagcctcaaaaaacaatttgtgatcaaactgactgactgcgatgaaggggtcaaaggggcaatgattactttcactggtaccagcgatcccgataatccggatttactgcaaataaccagggatactaattcagcgaccgggattggagtggaagtattagaagacaagacaggtgattcaattccgcttggcaaggcaaccgcaacgaaggcgttgactgcgggagataatacgctttcatactggttacgttatcaatcaacgcttgacactgtgactgcaggttctgcaaacgcggttatgtattttgagcttgcttatcaatag

SEQ ID NO: 110541 - DNA, 567 bp, Enterobacter aerogenes
atggattataaaaatatgttaaataaaaatcttaaaggaatactgtctgttgccgtaggctcagtgcttttcttgtctgcttcatcctggtcatacgatgggacgattaatgtgaccggaaatattgtagatggttcctgtgatattggtacggactctcaaaccataaacgttaatcttggaagtgtacaggcttcgtcctttgcgaataaaggggatgtcagtaaccccgtaccatttaatattgagttgaagaattgctcatcttctgttcatgaagcacaaattatgtttttagggaaatcagtggaaggtaatcaggttcttctagaattaacgcaagaatcaggtgttgctgaaggagtaggaataaggattcgtcaaccggcttttggtgattatactaatatgataaatataccgcttaatatgcatcttgttgcagaaagtgatttgcaagctggtgataatactctaacttatactctgcagtatgaggcaattagtactcctgttacggtcgggacaggcaatgcggtaatgtattttgacctttattaccagtag

SEQ ID NO: 110542 - DNA, 549 bp, Enterobacter aerogenes
atgcgttatcactttagacgcaccctgccgtctcattctatctttcagataataatttttgtttgtgcattattaacaataacacaaacttatgcctatgatggggaggtaaatgtttcaggtaagattactgcgaatacctgtaccgtttcgacgcgtgatatgacagtcgatatgggaaaggtggacagtaaggatttccaggaagggaggaatcccgagggaatacctccggttccttttgctataaccctgaaaggctgtaatgggatcgcgtcgggagttcacgtcggtttttatggtaaacctgatgtgaacaaacctgatatttacgcactggctgaggggggggcgacagggatcgggattcaactgatggataatgacaaaggaaaaatacctgttaataccttgtcaaaattttatcccctggattccgatgcaagcgatatcgcattacagttttatgcactttatacagcagatgggggcgtagttcaggcgggacgcgcagatacaacagtggcttttcatctgacttatgactga

SEQ ID NO: 110543 - DNA, 753 bp, Enterobacter aerogenes
atgaataaatttgtatacggtctggcaattgctctcggaggaattgcctgtctttattcagctcaggggcacgcgggtatggttgtcaatggcactcgctttgtccttactgcttctgaacatgccaaaggaattaccgttaaaaataccgggaaagatggttttctcgtcaaatctcaggttttcccagataatggtggtgaacttgaaggaaccgatcacagtatcagaactgcagctgttggaaatccatttgtcatcacgccaccactttttttactgggcgcaggcaagagtagtcagttacgtctggaatgtctgagttgtcaggagctaccgaacgaccgagaatctctctatcgccttggtatcagtgccataccaggcggtaagccagcagcaaatacggttcaactggcggttcgttcaacattcaaattgttttatcgcccggcgggtctggcagggaatgcggctcaggcttaccagcagttaaagtggaaacgtgagggaaagaatgtggtaatccacaacccaacaccttactatgtcactttgtttgaattgaaaataaacaataaagaagtacatggctctggcatggttgcacctttctcttcccggacacgggcctggtgtccagccacaggtaaatgcgatattgaatggaaatctttaaatgactttggtggcattacaccggcatggacggtgtcaccggcaacagtagctaaagccggacatggtgtgtaa

SEQ ID NO: 110544 - DNA, 639 bp, Enterobacter aerogenes
atggaaatcctattcaagcacaccgaagagatatactctttaatagatttcagctcacttaaggaagatatgctaagagtcggtcgtgaactaacagttccagcaggaatgattatcaagccaaaggaatctgagatcctggtactgatagcaggacaaatgaccggttcaataaatcagaaccaggatttgatcataggtcatacttttctttacatgcccattggtctgatggaaaggtattataagctggcgatatactaccaggctgaagttgatacaacactaattcagttaaccacggaagagtttgataaaattttctttaacgctccacaacatgcagaaatgttggcgcgaattttagcctttatgtcatcccgcctgattcacatttactatgaacgtaataatgattctggctatgcaaccataagacagatgctacaccggtacctatataaaaatgaggaaggtactgttaataatgaagggatcgcctcatttatcctaaaaaggacacgtttgtctcgaagttatgttttccagatcttatcgggtctgaaatcaggtggatacattacagttaaaaatggaaagcttatcgctatcaatcgtgaaatcccgaagaggttctga

SEQ ID NO: 110545 - DNA, 264 bp, Enterobacter aerogenes
atggcgccggtaacccgtggtctggctgaacggattgaaagccggttcggtacaagttcggactggctgaccactggtgacgggatgatgttcccgctagtgatactgggggcgtactccggcgacagctgggaggaatttttcttcccggatgatgatcaagaatatgtctttgagttcatccgcatcgacggcgggcaccataatggcaccctatactcctgcgccagcatgagaagaacagtcgtgtcactgcaggaatag

SEQ ID NO: 110546 - DNA, 906 bp, Enterobacter aerogenes
atgtctgtcagtgttaatgagattgatcattctctctccgcgctgaatgctgcgattaaagagcattatctgtgggcggagaagctgctgtgcctgaacctgtttggcggtgaagctgacgatgacatcatggacagccattcacacctgcactgtcattttagtgagtggctgacgcgtcgtacccggaaagatgctctggacagagatatggtactggcgattagtcagtaccatcaggatatgcacagcatggcccgcattctggcagaagcggtaatttcagaaagcaccacacgggtgctggtcagtcgctaccacgaacagcaacaggcctttattgacagtatcgaaacgtacaaatcatacctttttgcttaccgcaaccagcatgatactttgaccgggttgccgttacgccagctgttataccaggaatatcccggttttctcagccgttgtcagcgaaatcataacatctcgtatgtgctgctcatggacattgaccggttcaaatcgattaatgatacctggggacataacgccggcgatgacgtgctacagcaggtggcacagcgtctgcagaccggttctcgcgataccgatcgactgtaccgctttggcggagaggaatttattctgctgctggaagccaaaaatagcctggcggcacaatcagcagctgaacgaatacggtgtcatctggctgatagcggtatcctggtttcagggcaacgggtgacggtgaccgtcaccgccggactggcggaggtgcggagccgggaagaattgcatgacgttattagccgggccgacaaggccatgtactacggcaaaaacaatggccggaactgttgcgtggtgtcttcagctgatgcagacaacggcacgtatcagatattgtag

SEQ ID NO: 110547 - DNA, 348 bp, Enterobacter aerogenes
atgcatgtcttcgggggttgtttgcggtgttatcaaagccagatcaacttcaccccgagacaactgctgatacattcgctcattgtccacggaccgcacggcgattttaatatatggtgcacgatgtttcagcttagccatcaacggaacgatgatagccttaagtgcatagtccgttgcgacgatggtataagtcagttccaccgtcatgggatcaaatttatttggtttcagcaggatagcgatatcggtgaggatttattctaccggcgtagaaagttcgttggcccgcatattaccaggcagatacacaagataaacattagggatgcagttcaggtttgttag

SEQ ID NO: 110548 - DNA, 294 bp, Enterobacter aerogenes
atgttagcaatcgattgtaattggttaaaccggattggtacattttatacccagggattcctgtttatttttgtatctctgttgcctgttggccagaaaaccgtagtagtgaaccattttaaaatgcttcgccgggatatgactgatatagcgcccgatcatctcttcctgcgacagcgtctgctgccggtactgctgcgtccggtagtcgtaatagtggtgcactaccgcgccgccgctgtagtatggcaggccagaaaaacaggggcgtaccccctacagtgtggcctgtaa

SEQ ID NO: 110549 - DNA, 396 bp, Enterobacter aerogenes
gtggtcaacgtggctgtgggtgtagataacggcgacaacaggtttcttaccgcggtttttgtagtacaggtccatacccactttggcagtctcagcggataccagagggtcaacgacggtaatgccttctttaccttcgatgatggtcatgttggaaaggtccagatttcggatctggtagacgccgtcggtcacctcaaacagaccgctgatgttaatcagctgcgactgacgccacaggctcgggttgacagtatctggcgctttttcaccttcttttatgaaggagtactgctgcggatcccacacgacgttaccttgttctcctttaatgatctcggtgggcagggcggcaataaaccctttatgggcgttggtgaaatcggtgttatctga

SEQ ID NO: 110550 - DNA, 306 bp, Enterobacter aerogenes
atggtagaaaagaaaaaatgcaatatttttcaagaagttgatagcttcgacattcttgatgtaactgtagaacacacagctactaaagagatacgcaaaaagattgatagcaatgggaatatcgttgaaatttcaaccgtagaaaccattcaaacaatcttgacgcccaaagaagcgcctaaagagagtacaggtataaaagcaacattgatcgtaggtggcggtttattcgttactttgataggtgtgctttcagatctgcctggtgcaattgagtttgcggggaaaatcctgcatctcacctaa

SEQ ID NO: 110551 - DNA, 210 bp, Enterobacter aerogenes
atgagtgtaaaaagacttcagatagatatttctgagaattcttttgaaagacttaagtctttgaaagataaatcagatgcttcttcatatgctgaggtaactaacaaagcttatcgggtttacgatttttttgttaatgcccagattgaaggtaaagaaataaagctgatcgatgccaaaggtaatgaaactcttgttgagtttttataa

SEQ ID NO: 110552 - DNA, 228 bp, Enterobacter aerogenes
atgaacgaaaaagcactgttagtcgaaatgctacgcctacacgaagccggcgaatctctatctataggctttgcgactgagaacttcgacggtctgaacaaactatggggacaggggctaagctgctatcaagtcacaaaagtggtggcaggtaatgtgaggtccagaagagtgttccctggcgttttaacccctgctggcatcgagaaagccaggacccttagttag

SEQ ID NO: 110553 - DNA, 216 bp, Enterobacter aerogenes
atgacggagctggaaaagcagttgctgagcgcattagagcagctacagcaggactactcgcaaaggctggacgaatgggagagcgccttcgcggaatggcggaggatgtctgggcttatgcaacgggagaacgcgaggctgagcgaacgcgtgtcggacttgagcgagcaggtgcagagtttgagcgaacagctgcgccgcttgtacgggagctga

SEQ ID NO: 110554 - DNA, 516 bp, Enterobacter aerogenes
atgagcagtcttttaacgctggcgaaggacttagagcagaaatcgaaagcgcagcagcagagtaccggcgagatgctgaaagccgcattcagcgagcacgagcagtctgtcagagcggaactgagcgcaagcgccaggagaatcagcgacgccatccgcgcccacgaggagggcatgagcggggccatggagaagaaccggcggagcgtgctgcggtcggccggccggacatggctctccgtcctgatgacggcgggcctgcttatcgggacatgcgggggcattctgtggtggcagggccagcagatcctcgacaattacacggcccttcgccagcaggaggacgccctggcgaaaatgaccgcccggacgtggggggtgacgtatctggaggacgaaaaaggacgttttctggtgctgccggcggggacgatcgcggacaagaagcaggactggacggtcagccgcggcagctcgcagcagaacgcggtgagactgataaaggagcagaactga

SEQ ID NO: 110555 - DNA, 615 bp, Enterobacter aerogenes
atgtttcgccccccgtccgggtcggcaatgctgatactgctttttgtagtgcgcaccacctcaaaacctgaccgcgccagcgccgcagtgacgtcctggcgcgttttcagctccccggacgaggctaaggccagcaacccctgcgtgatggcctgtgcggcttcctgcttcgtttctggcagggccgacgccgtgaccagcgcccgccggttttccggcgcattcgggtcgtgcagccccagccggccattgaccaccgtctgccaggcatcgatgcgcggccggtcggcgcggtcaaagtacggctgcaggcgcttcccggtcagcagctcggtgttggggatcaggaagttcagctccagacgccccttgtcggtgtgctccacccacagaacgctgtactggtccttatcaagtccgggcatcagaacccgctcgaagctggccatcagtttttcccgttgcccgggcggcaggtcggcctccgcgaacgacagcaccccggaggtgtatttcttcgcgtacggcgaggcgtcaataagctcccggacctcttccggccgtccctgcaggacgctggcaccctcgcgctgccggtctttcccgagcagataa

SEQ ID NO: 110556 - DNA, 348 bp, Enterobacter aerogenes
gtggtcaacgtggctgtgggtatagataacggcgacaacaggtttcttaccgcggtttttgtagtacaggtccatacccactttggcagtctctgccgacaccagagggtccacgacggtaatgccttctttaccttcgatgatggtcatgttggaaagatccagattgcggatctggtagacgccgtcggtcacctcaaacaggccgctaatattgatcaattgagactgacgccacaggctcgggttgacagtatctggcgctttttcaccttcttttatgaaggagtactgctgcggatcccacacgacgttaccctgttcgcctttaatcacttcggtcggtag

SEQ ID NO: 110557 - DNA, 2448 bp, Enterobacter aerogenes
atggcgactaccgacacacagcaaacggcacagttcgcggcagaggcatccgtgagtgccgcagaggcaaaacagtacctgatcgaggtccagcagggctatcaggatattagcgccaccactcaggaagcgattaatgcggcgacagcggcagaagcagcgaagactgcggcggaaacatctgagcaaaattcctcagcttctgcagttgcctcatccgaatcggcaacggcagctgcaggttctgctgcacaggctgaagagtatgcaaataacgcttctgactacgcacagaataagttcacgttctataaaacctcaagtgacccggatggaactatagcgggactggcggctacaaccaatgggcagtcgtttcgcgtagctcagggtgtggatggtatggatgctttcattacctaccagaacgacaatggcgtagcggtagcgcaggctgcgcagcctggaaccgcagcagtaacggggactattcgcgaatttcctacactggaagcagcacaggcagacgcagatgctggcaatatcccggttgggtcaactgcttattaccgcagccctgatgatactgcgcttgctattgaggttatcaacaatagtggaactctgtcagcgacgggtagggttatgccatctcagggttatgttgatgtcaccatcagtgagtccattgataaaaatgatgacagtaacttatcaaaatccattacctcagacggaatcacaactgagctggagactgagtccggagaaaaattcttctccggaatgaatgaaagtcttcaggaaatggcatcgcgaagctggaaagacaacacctctaatcttcattcagctacagatagagacggggtacagctcgttattaccgatgcagaaggtaaaatccgtatccctcttactaattttccgttgcaggatctgctggctcaggttcagcctgtcccggggccgtttctcaacacgctgagctccgctgacaaggcggcatatggctatattgatgagctgggcggtcttaatctcccgggtcttccgacatctgttaacaatatgctgaatggcctgtcccgccgcgtacagcagcaggcagatggccggtttctcacaagtatcaaggactatggctgggacccaaacagccaggaagatgcacgacaggtgattcagcgcgcaatccgggatatggcccgaaacccttacggcgggggaatttatctcccaccgggtatttaccggttgagctccttcctcacgcccgcgccgaacgtatcgattattggcgccggtaccggcaaaacaatcctgatgccgtatggctcatattcggcgctccagttcaccacatcaccgacgaatcccgtcccggaattgacggattttgtgtattccgattttgaggtggattgtcaggaccaggtgttgcctgacgaaggttatctccccaggactaaggggctgtattttaacttctaccgccgcggccacctgcaccgcctgcgggtgaggaactctggtgcgacgggtatcggcatcgattttgctcgcgattccgtgattactgaatgcgtggtggagaatttcggtcggctggcaccgtcgggtaacgataaccctgcgggggcatctggtctcgggttaggggctggcggtacgcagagcgagccgctgtatgttgctggcaacttctgccgcaacgggaagaatttcggcatcttccttgagaaacagcatggtacaaatgccccttacagctctgaacacaccatcatcatggggaatacctgcaccggtaataacggcgggatgggggattgcggtgtggacggtatgatcatgatcggaaataacttctccgaaaataattatggtgtcgttatcagtccaggaaccgtactggcataccccggttcgcgcgggcgcctgcagggcaatattatcgccaaaaattccaggcatggcgtctattacaacagcacgacagagcagcgtgacggcgaataccagatcgatggcaataccatccgtgataatggagaagacgggatcaactttaaagccccagggcaagaagtgcgcagcatgtttattcaggggaatgatgtttaccgtaacggtcgccatggtttccatctggaagacggcacagccatcaatatggacgtagttaataaccgcttctggaataacggcctgaccgctgccggaaacggaattaacctggcctcagaggtaaaactcagctcgttcagtggcaataaaattcgcgacatccaggctacacccactcagcaatatccagttaatgccactggcgcactgaccgacgtcgatatttcgtttaaccactgcgttggcaatgcacagaacacgcttaatctgaccggcacacaaacccgcgtcaccactctgaacaatccaggaatctga

SEQ ID NO: 110558 - DNA, 789 bp, Enterobacter aerogenes
atgaaaaaattaatagtcatttcagcatttattctttttgccttatctccgccagccatatcaaagcagataacatcacatttaaaaatggttgatggttattttaatggaatcttaacggcaaatgatgacgagccgatatggtttggtatcttggagtttgactttttaggcagtcagcacctaacctgcagaatggactcaatgcacacctctggagatgcgccggacaggatgtcgtcagtaaactaccgttgccaaaatgggttttctgtccaactatcaaaaaatgaaaatgacaggtacgctattttaaaccttcaaaacataaactttgaaagcggagaggaaagccagctaggtagttacaaggtcacctcatcaattcctttaacgatgattgaaaataataaatataatgatgatttgtttaataagaaaaatgccgagagggagcggtgggtaaaggaaaatactgttgacgttttttccgcatgcgacattatcatgtcatcccaccttctggcttatcaaatggttaatgctggagcacaaaataacagcgcaggcaggaatgaaataaggagtgcgttgtcaaaactttacccaaaaaatgcggatgaaatggcacaatcatttataagctttcactctggcgacaaagatccttttggaatgccgcttacatttggagtcaaggggcgcatgattaaaatgtgcatggatcagccaggtgattacatacctgagtttggttcgctggtcatgtcaggtaaaatattcagataa

SEQ ID NO: 110559 - DNA, 588 bp, Enterobacter aerogenes
atgctaactaaccagactcctgagagcgtgtcatcgcagggtaatgccatattatcgctgctacattcagcgctgaagggaatgacgtttgtcgatattgttctggttagagaggttgagggcgatgtgttgaccgttctccccctggtcaatgatgtagacgtttctggccgggccattgccaaccaggacgtttaccagatcccatacctcagacttcaggcgggaaacagcgcggtaaaaatggagccaaggccaggagatattggtctggttgtggtttgcgacaaggacacgacgaacgttagggaaagcagagcggaaggcccggcgccaacgcagcgccggcactcgtattccgatgcgatgtacataaccgcaatagccagcatgaatggcgagccgactgaattcgcagagtttaccgggagtggcataaacataaagagccccggcgttattaacatcaatggcttgaaagtccatcccagcggacagcttgagcttgtcgatggttctatcgttgatggacactctcatggcggagtacaattcggaggagacagaaccgatcctctggagccgtga

SEQ ID NO: 110560 - DNA, 1959 bp, Enterobacter aerogenes
atggcagcaacggtaattgatgccctcctggtaacgctgggccttgatacttctcagttccgcaaaggccagcaggaagtcagtgacgacctgaaaaagcagcgcgaagacgccaaaaacaccgccaaagaaatggcagagcagggcaagaaagccgcttcgttcttcagcagcataaagacggagttgctggcgctgaccggcgtgactgtcaccgctggcggcctgatgagctttgtgaaaagcaccacctccggactgatggatttatcgatccagtcgaaagcactggggctatcagcccgtgagcttgatggctggtcgaagtcagcggaggcggcagggagctcggctgagaagataagcgcttctctgcagggttttcagggcgccatacagggggccagggtaggcgattacagtagctctatttttggtgggctggcgcaattaaatgcgctgacgagccagaattttgacgtttggggacaggacgccagttctctggccaaaacatcccttgatgcgctacgaaaaattagcgatccaaaccttcgccggcaggttgggttaagtcttggatttgatgatgcaaccttgcagcgcaatcaggaaggaaaattcctgcctgatgttgaccggctgaccaaaagctccggtattacagacgcctcaaccaaaggcgcaaaagaatttacagccgcatgggcggagctggggcaaaacctcgacacggtaaaaaaccagatttacgtgggtttgataccaactattcgcgatctgaatggtctcctcattgagtggtcgtctggtaacgcaaaatcctcttcattcttcaaagagctgaagcgggacattaacgacataactggtattgacctgggtagctggacgctctcaagcgatcttcgtaacctcaaagataacttttccatgctcgggaaagtgcttaaccacctgggtaatgctttaaacgagctcaataatggcaacttctctaaggctgccgatgagtttaaaaaggcgtggtatggcactgaagacggaaagcctactggtaatgatgcgctgccaggggtgaccaaggcagccgagcaggcgctgaagaaaaacggcggcacactggattttaaacctgatcaggactctgcgtatctaagcccgcagcagcaggcaacgcagaaaatgctggatgcagttaagtttcagccgcttcctgaacagcgcaggcagcagcaggatgagagagactactgggaaagcaccaaaaatctcctttcaaaaatcgctgacgccctgatctctccagcgggcgcggcaacaatgcagccggatacctcgggataccagccaaacgtcccgcttaacgcgcaggctgctcgccttggcgccaaaggaagggcatttcttcaggcaatggctggcgaattcggggcgctggaaggtaaatatggacttcctgccggactgctttcttcgttatcagccgctgaatctggtggcgacccctacgcagtatcacccaaaggagcaaaaggcccattccagtttatggatggaacggccagggatttgggcttgaaaggcatggatgtttatgacccccacaagtcagctgatgccgctgcaagataccttcgctatctgctggatgctactggtggcgatctggaaaagacccttgcttcctataactgggggctcggaaacgtccagaagaaaggtatggataacctgccgtcggaaactcgcaattacgtccctaaagtcatggccggaatgcgccctggcgccgggatggccgtagaccgtgcgatgccagggcagtccggtgcgacttatcagttttatggcaccaaaatcaccacccaggcccagaacgtggaacagcttaccagcgacatcaaaaagcacggcgacaaccgtgtcatgcttttggctggttactcaggacaataa

SEQ ID NO: 110561 - DNA, 531 bp, Enterobacter aerogenes
atgaaatatccaaccgtatcagtaaacggcgtctccgttcgtgttgatgactatgggcgctacagcctgaatgacctgcacgcttccgcggtatgcagtggccaggctaaagaaaatcagggcccgagtcagttccttcgctctaagaaggttaaggaatttgtccacactttagccagaatgcaaaaatgcactctggaagaaaatcaaccagttaaggtcgttaacggtggcctgaatcaaggcgtctgggctctggagatcgtcgctattcgctatgctgcatggctcagtgctgagtttgaaatccgtgtttatcagacattccagtctctcgtccgtcagggatttgatgctatgtcccgcttaaataaaatcgaccatgtgataaacgctgaaacgaaggaagttagtcagtgcgcaagtcgaatggggaagtggggcgcaggtggaagaaagcgcctgcttatggccgcccgcgcccgtgtggtagacgaggttcagatgtacctcccaggatttgaggcgtga

SEQ ID NO: 110562 - DNA, 225 bp, Enterobacter aerogenes
atgaaatttatcaaattaagccaaaggggaacggtagagcgccagggcaaatatggctgggagcctgaaacagtctacgagcctgtatttgttgccgcaggtcacatcgtcagcatgtttttcgctggcgtgacaattctgaaaatgacctccggagaacgcattgacgtgaaagagaccccggaagaaatcatcgccatgcttaccgaaggagcctccaaatga

SEQ ID NO: 110563 - DNA, 321 bp, Enterobacter aerogenes
atggagaatgcaatagcccgaaagttagaaccgccaatcctcaaccctattgagatagaaggcattttgctaaaccgccttttatccattggccagaaggtttttgcagaaatgcggggagtgagtgagtcaacaatcagtcgccggaagagcgaggggtattacgccgaaatggcgaaagaaatatcagcgctgggcctgcaggttgttccaccggaggcggtggtagtttcccgccattacctgcagtcagtagagactcttgctgatatcggattacgtgcagagcggtgccggccaggaccgttagggtgggactga

SEQ ID NO: 110564 - DNA, 216 bp, Enterobacter aerogenes
atggaaaccatttcgcaacgcctcaaaaaaaagcgcgaagagatgaatctttctcaggcgcaattagcaaaaaaagttggcatgaggcagcagtctctgcaggcaattgaggccgggacaaccaagcgcccacgttatttgttcgaactggcaactgcgctccattgcgaccctaagtggctgctttatggcgagatgccatctcaatctcaataa

SEQ ID NO: 110565 - DNA, 633 bp, Enterobacter aerogenes
atgagccttgcagatcgcgtaaagcaaaagagaattgagctcggtctaacgcagaccgaggcagcattgaatgccggaataacgcagcagtcatggcagagcattgaaaagggagacacaagaaaaccgcgtaacattattggcatagctaaggcgctaaagtgcgatcctgactggctaatgaatggcggagcctttatgcctattgctgaagttagcagcaagaaggtacctctcataagctatgtccaggcaggcgctctcgcggagaaaaaccctattgaggcatttgatgggagttttgagtacatccttacagacaacgaagtatctgattttacttttgctttacgtatcgaaggcgattcaatggagccagacttcaaagctggagatgtgatcatcgtagaccccgaagttgagccaaccccaggggagtttgttgtggccaagaacggtggggctcaagcgacgtttaaaaaatatcggccaacttacactgatcacttgggctgccagcatttcgagcttgtgccattgaatgatgactacccgattatcagtagcgagcatcaaccactaacaatcatcggcgtaatgattgaacacagaatctatcgaagaaagcgctaa

SEQ ID NO: 110566 - DNA, 516 bp, Enterobacter aerogenes
atgagctatacaacagtaattaaagtctggcctggcgaaaagcaggaagaagatgaagagcttcgcaatggctggggcagcggaccagtgatttgggacgacatggcaatgcgttatctcgcgctgcccaaacacgcctatatgtcaaaaattgacgacctttggcctctagctaaccgcctcgatatcccataccaccatcgcgcagtccttgcaatgacatatgaccgcatgtatgtgaaagctgagcattacaagctggctgctgactgcatccgcaaatatctaaacgactttccggtgaatgagaaatacgtaaatcactggccgcgtatcgctgaaatttttgaaagctcccccgactgtccggcgattggtctttggctaacgtcagtatgcgaaaacccatttatggggttttgggatgaagaattgcaagattacgggcagccagattggtcgcgctattggagcctgtttgatgacctggaagtgggtgaaggcggtgcagcatga

SEQ ID NO: 110567 - DNA, 381 bp, Enterobacter aerogenes
atgaagattaaaacggaagatttagtaggcatccagcttgattatgcggcagcactagcaaccggtcagaaggtagattttgaagctgataccgggtgtctttggtttgaagagcgcgatgtgtggttcacttggagcccttcaactgaatgggctcaaagcggccctatgatggagagcttttcaatcagttgttaccagtcagcagacccggcaacaggaaaagcttatcactgggttggagttaatgagcttatagcaccaggacgtcgccgcgggctcattgcagacaacccacgcgtagctgtgtgccgcgccgtcgtcttcgcaaagtttggcgatgaaattgagctgcctgatgaactggaaggtgcagcatga

SEQ ID NO: 110568 - DNA, 219 bp, Enterobacter aerogenes
atgagcgcagaaatcatcgatcaggccaacgagctggcagagcgccggctggagctgaccatccagaacatgcgcatcaaccataacgctgtttcggctactcactgctgcgattgcggggaagagatcaaaccaaaacggcgggaagcggtgccgggctgtcagcgctgcgctgattgtcaggaagagtttgaagaacgtggtaagcacctgaggtga

SEQ ID NO: 110569 - DNA, 135 bp, Enterobacter aerogenes
atgtgggtaataatgaagcttaaacgcactggagaagaggtgtttttccagtattacgacagcagggaggcggctgaaatggcggttaagattatgaactccatcgccagcggctgggaattctatatcagataa

SEQ ID NO: 110570 - DNA, 735 bp, Enterobacter aerogenes
atgtctactccagctaactttaacggttctcgtccggtgattgatgttaacgataccgcgatgctgttgattgaccaccaaagcggcctgttccagaccgttggcgatatgccgatgccagaactgcgcgctcgcgccgccgcgctggcgaaaatggcatcccttgccgggatcccggtgatcaccaccgcttccgtgccgcagggtccgaacggcccgttgattccggaaattcatgagaatgcgccgcatgcgaagtatattgcgcgtaaaggcgagatcaacgcctgggacaacccggagtttgtcgccgcggtgaaagcgaccggacgtaaaaccttaatcatcgccggtaccattaccagcgtgtgcatggctttcccggcaattgccgccgtcgccgacggttataaagtgtttgccgttatcgatgcctccggtacctacagcaaaatggcgcaggagatcaccctggcgcgagtagtccaggccggcgtagtaccaatggataccgccgcggtagcctctgaactgcagcgcacctggaaccgtccggatgccgccgagtgggctgaggtgtataccaaagtcttcccggcgtatcagttgctgattgaaagctacagcaaggcgcaggacgtcgtgaagaacaacgaaagctggattcccagcgttaaaatagctgccccgtcgatgaatcgacggggcagtgttcattgcttaaccgaacggtaa

SEQ ID NO: 110571 - DNA, 1182 bp, Enterobacter aerogenes
atgcgtggtgatttctacaaacagttaaccaatgacctggataccgcgcgcgcggaagggttgtttaaagaagaacgtatcattacttcggctcagcaggcggacatcaccgtcggcgacagccacgtcattaacttctgcgccaacaactacctgggcctggcgaaccacccggaactgatcgccgcggcgaaatccggcatggacagccacggcttcgggatggcctcggtgcgcttcatctgcggtacccaggacacgcataagcagcttgagaaaaaactggcggatttcctcggtatggaagacgcgattctctactcttcttgctttgatgccaacggcggcctgtttgaaacgctgctggggccggaagacgctattatctctgatgcgctgaaccatgcgtcgatcatcgacggcgtgcgcctgtgtaaagcgaagcgtttccgctatgccaacaacgatatgcaggagctggaagcgcgtctgaaagaagcgcgcgaagctggcgctcgccacgtgctgatcgccaccgatggcgttttctcgatggacggggtgatcgccaacctgaaaggcgtctgtgacctggcggataaatatgatgcgctggtgatggtcgatgattctcacgccgtgggctttgtcggcgaaaatggccgcggttcccatgaatattgcgacgtgatgggccgcgtcgacatcattaccggcacgttgggtaaagcgctgggcggcgcgtcaggcggttacaccgcggcgcgcaaagaagtcgttgagtggctgcgccagcgttcccgtccttatctgttctccaactccctggcgccggctatcgtcgccgcttctatcaaggtgctggagatggtggaagcgggcagcgaactgcgcgatcgcctgtgggctaacgcgcgcctgttccgcgaaaaaatgaccgccgcaggctttaccctcgcaggcgccgaccacgcgatcatcccggtgatgctcggtgaagccaccatcgcgcaggaattcgcgcgtgaactgcagaaagaaggtatttacgtcaccggtttcttctatccggtggttgcgcgtattcgcacccagatgtcggcggcgcatacccctgaacaaattgaacgtgcggtggaagcctttacccgcatcggcaaacaactgggcgtcatcgcctaa

SEQ ID NO: 110572 - DNA, 426 bp, Enterobacter aerogenes
gtggaaaatcatgacgtttatatatacacaggcgatatacatcgggatggttaccaagaccttaccaatgctataaagatacgaaaagctaagcatgggctgagaaaagatgttatcttttgcttagccacctatggtggggatcctaatgcaggttatcgtataggtagggcattacaacacaactacgacgatgttactttgttagtagttggtccatgtaaaagcgcgggaacattgattgcgattgctgccaataagcttgttataggggatatgggagaattaggcccgttagatatccaactgaaaaaaaatgatgaaattggcgagatgagttcaggcttagccatcatgactgctctagatgcgttaaaagatcgctctatttcagcgtttaactctcatcttgttaaaataagataa

SEQ ID NO: 110573 - DNA, 234 bp, Enterobacter aerogenes
atgtacgaactcacactgtcaccagtggaaattgctgaaattactggatacagacggtacacagaacagcagcgtcaacttcgatgtcacggcattccgtttactacggatagaagaaatcgcccaattgtcctgcgtagaagtctggcacctaatattactgaattgccaaaggttgacgagtatgttgcaacagaacccaactttgacgccatctatgggaagaccacgtaa

SEQ ID NO: 110574 - DNA, 282 bp, Enterobacter aerogenes
atgactgtacatgccgaaaaacaagcaagctttcttctaaggctgcgcactcaagatactcctaccggagtaagtagtgaaacgcttgatgctttaatgcaaaaaaccggcctgagcaagacagaagttacacatttggctctgcgtagtttagctgatgcatatctgccgcattacgaaagagacccagaagctttaacccaagctcaaatccagaaaatccgcgaggtttcaccatcacgggatgtgccggaggagagtttcactatgacattgttctaa

SEQ ID NO: 110575 - DNA, 429 bp, Enterobacter aerogenes
atggccaacacacaaaagcataacccactaccaacaccaggcgatattgtttggtgccgcttccctacccatctcaagattggggaaccggggccctacagccgacctgctttggtttatgcggtatcgcctgaacaccatacggtgaaagttgtatatggaaccagccagaagacggacaaaatttataaatctgaattcgtggttaaaaaaacagatgctaatttctcagatagcggcttagcatttgataccaagtttgatatgaaccatatcgttcagattccatatgattatgaatggttcgagatggcacccgtgaaagatggccaaaaacccaccacaaatcctaaaatgggcgtgctacatccaagctacatccctaaagtaaaaacagcaatgaaaaacgcccctctcttagcggcctga

SEQ ID NO: 110576 - DNA, 225 bp, Enterobacter aerogenes
atgaatgataataaacataatccagataaaccgtgcacccggaagtcagggtttgacaatcgtccgcgcccggcacgagaaagtatcaaggacgattctctggagtatggcgaatacagtcctctggactacggtggatacaagggtattattgtaactaactcattttcaccgccagtacgcccggagaaaggagacaacagtgaagacaaatctggctcgtga

SEQ ID NO: 110577 - DNA, 249 bp, Enterobacter aerogenes
atgattctggtgccagaaatcacagaggaaagcctgcggacgataacttcggaacgtctgtctattgaaaaagacgaaccgccagttcttcgcgttcttgacagtatctgttacaacgagcagatactgtcaatggattaccctaaagaccagatgattgtggttggattctggcagcgtctgttttccccggttctggattttcaggcaagtaagctacgaagagttaaagatacgagcaatgtctga

SEQ ID NO: 110578 - DNA, 549 bp, Enterobacter aerogenes; identical to SEQ ID NO: 7256

SEQ ID NO: 110579 - DNA, 1317 bp, Enterobacter aerogenes; identical to SEQ ID NO: 7257

SEQ ID NO: 110580 - DNA, 1464 bp, Enterobacter aerogenes
atgggaaacctgaatgaaacagaaaagtgggaagaaaatatctatcaactggagacatcagatccggttctgggtggtgctgacgggatatcaaatcgagccccccggcaactggcaaacaggacgaaatggctgaagaaaaaaacggaggaagccgcacagtcactggctgaacacgtacgttcccgtaaccacccggacgcgacactgacagctaaggggttcacccaactgagcagtgccaccaacagcacctctgaaacgctggccgccacaccaaaagccgtcaaggctgcatacgaccttgcagccggcaaggcacccgtcagccacactcacccgtggagtcagataacgggagtgcctgctgccttgctgacggcaaaaggcaccgtacaactgagcagtgccacggacagtcaatcagaaactgaggctgccacgccgaaggctgtgaaaatcgcgtatgatctggcccggggaaaatacacagcccaggatgcaacaacgacccgtaaagggatcgtacaactgagcagtgccaccaacagcacctctgaaacgctggccgccacaccaaaggccgtcaaggctgcatatgacctggctgccggcaaggcgcccgtcagccacactcacccgtggagtcagataacgggagtgcctgctgcctcgctgacggcaaaaggcaccgtacaactgagcagtgccatcaacagcacgtctgaaatactggccgccacaccgaaagcggtcaaggctgcatacgatctggcaaacggaaaacaaccggcagatgccacgctcactgctctggcaggacttgccactgcagcagatcggttgccttattttaccggagcagaccgcgcagcgctggcaacccttacagctattggtcgcgctattatcgctaagggcagtataaaagatgtcctcaattaccttggtttaggagaaggctcggcgctacccgttggtgtgcctgttccgtggcccaccgccacaccgccagcaggctggttaaagtgcgacgggcgcgcctttacaaaagaacaatatcctgttctggccagagcctacccgaccctccgtcttcccgatttacgcggtgagtttatccgtggatgggacgacgggcgcaaagttgatacaggacgtaagttgctgtccgcacaaggggcaacgctgttaagaacagcaatgctggattattataaccaggacactacgggaacctcggggatagtcggcatgggattcaacaatgaagattccattacagaccttcgtgagggcagctttaaaatgccggacgggacaacattcagcgatcctgtcatggcaatgtcagacaatggtatgcaggctactattctgacctctatcagaagcgggtatgcgaagggtatcactgtcagaccccgtagcattgcacttaattacattgtgagggcagtttaa

SEQ ID NO: 110581 - DNA, 2622 bp, Enterobacter aerogenes
atgccagtcgtacctaccgtcaccggccgccaggtcgaaagccgcggcgtatcaacccagggatttcaggccgtaaatcagccaaacattaccgatgcattgggcgcagttggcactcaggcgatcgatgtgttcggacaggctaagcaacaagctgaccttgctctaacccaagatgcgactcaaaggctttatgctgctggaagtggattgatggacgatcccaaagaaggtttgatgactctccaggggaaaaatgccattggtcaggctcctgggtatatccagaaatttgataacgagatacaaactattgctggcacgctacctgagtccgcacgaaatgtgttcttaaagcaggctcagcagcagcgaatgcaatttgccactcaagcagagcggcatgaattaggacaacgcaggcagtatgagtccggtcagcaagacggttatttatccttgcaagctcagcaagctatatctaatccacagttgttcaaccaatcagctttgaatgccagagcctcaattatggcttatggaaaagctcatggacaaagccctgaagagatcgaggcaaactgggttcaatggcgtgagcaggctgccaaccgcgccagcgaagcatggtatacgcctatttatcaacagatgatggggccggaaggcaagatcgaagttacggacacgccgagtgaatcgcagctcttttccgccatgatctggcaggagtccggcggcaaccagtacggcaaagacggatcgcctctggtgtcacctaaaggcgcggtcggtgtggcacaggtcatggaagataccgggccggaggctgcgcggcttgctggcgtcgagtgggatcgtgataaatggctgaatgacccacgctataacgcaaagcttggccaggcatacttcggcgcccaaatgaagaagtatgacaataacccggttctggcggtggcggcgtataacgctggacctggtgcagtagatggatggatcaaaaagtttggcgatccgcgtactggtgctatcagtaatgagcagttcgctgctgcgatcccttacgatgaaacccgcaattatgtggcgaaagtaaccggcagtgccccggccatcccaggaacagcgacaatgcaaaatctcatcaaccagccattctgggatgcaatgagtccacagaacaaatcttcgatgatgagtaaggttgctggaatgtacgacatgcaggccgccgcaggacgagtatcactgcagagtcgtatgcaggatgacatggcgaagctggaatccggtcagccagtcaatcctatctctgagcgggaatggctggcggttatgccgttgcaagctagtccagcagaacgcattcagatgcgagagtcattcaagcagtatcagcaggcgatgacgctgcaaccggtttatcaatccatcatgcaaggttccgcgcagcagggtatcgctgcggtgcagtctatggtgcctcaggaagatgaccctgacttcaaatttaagcagagcctatacgcaactgcccaggcaaaattgaatcaggtaattaaagcgcgcgagtccgacccggggacgtggctgcaaaccaactctccagtggtgaaaaacgcctttgagcagtaccataacaatcaggtgtccggtgaatatctggtttcccgcctgcaagctgagaaagaccgcctgggaataaacagtaagaaggtacttcctgactcgatggtaaacagccttatttctcagatcgacaacaataaggaatccagcgttacagccattcagtcggtggcacagtcctttgggaaatactctgatcaggtcatgcaacaggtgcaaaaaagcgcctacccggcgttgcaggtcatcatggcgaccaataacccgcgtgctgccaacgccctctggcaaaaccgcagcgtcaaaaccgctgatctacgtggcagttttgaaaaaaccgacgccgacagcgccgactcatcctggaatgaccaggccaaagcctttgccggaacgatggttgtccagcctggtggagccgccgtgtggaacaacttcaacgagcagggtaaacgtctgacctacacctatatgcagcgcggcatgtcgccaggcgacgcggcaaagcaggcatatcaggacgttctgggcgagcagtatcagaccaacggcacctggcgcatgccgaacaacgccggacacgatattcgcgatgttaacgatggcgctaactactacctgaaaaaactgtcagtcgaccagatcatgccgcttatcggtgattcccgcctgccggatgaggttaaccgcgagcagagcatttcacgcattcgtgataacgctcagtgggtgactaacagcgacgaaactgggcttactctgatgatgaacggtctgctggtcaacaatgctcagggacagccgatcaccgtgccgtttgctgatctggcgaaacttggcgctggcaaccgcaccacctggaacagcctgaccaaattcgtgcagacgccggttaagtacacgcctggccagtcgaagaattacacggcggaaagtcagcgcgacaacctgatcaacattatccagaacggccagcagacgggacgataa

SEQ ID NO: 110582 - DNA, 735 bp, Enterobacter aerogenes
atgcaagaaaacctgcagaaagcttatgatgcagttaaattagcagaaaaaaagaagattgaaattgaagagccttttcagggaaaaacatgggacaacgcaacattggtggtcgttggacctacacaagcttactatgagactctaatccctgattttgcaagaatgcctgaaaaagcagttgctacatcgggcacggaaagtattaaaagtgcctataattattttgttgagaaagctaaggaattggttaaatatgttgccgattggttctctgacgaaggaattgatgataaagatactacttccgcacaaaataactcaagcgtaattataaagcttgaaattgatgggaagactcttttgtttaccggggatgcagggattactgcattagatatggctgctgaccatgtaactagttcatcgctagcatttattcaggtgcctcaccacgggagtcgaagaaatattgggccagaagtgctaaataaacttgtcggaaatattgttagcgagggggggactcgaaatatttgcgcgtttatttcttgtgcgcccggttcggaaaaacacccacatcaatcagttattaatgcgtttactaggcgtggcgtaaaagtaattacaacagaaggaagcaataaacgccattctaacaatgctccggcaagggaggggtggactactgcagcccctcgctcatatttagctaattataatgtggaagaataa

SEQ ID NO: 110583 - DNA, 594 bp, Enterobacter aerogenes
gtgatagccagattcgcgcacaatgagcttgccgctcacttccacgttgtacgatgcaaagcgcaggtttttagccaagcgcgcattcaccacgtagttttcacgcgggaaaatgcagtgcaggaaatcgaatttgtcatcgggctttttggcggccgcgtcgcgaatcttcttgctgaccttatccgcgccgaattctttaatcgcctgctctgcggtgagctggtagcggcgataaatcgtgtccacgatgccgtcgcgacgggtggatgttacatagcattgcgccagcggccactgctggaacgagaatccgccctcttcgcggtcttcgtcgatgtacagcgcgaaccagccggcgcacaccacatcaagatttgcctcgtagccttcggcgtcgaaattggcggcgtggatgttttcccatacgagcgttgcgcaggtggacaaccacgcggcggcatcatccggcagcgattcgctgtcgagattcagccactgcgcatttgctggggtcatgccagacatgagcgcagacgccagcatgcgggcgctgtcggtggccgtgccgtcaagcagccgtgccacctttga

SEQ ID NO: 110584 - DNA, 1371 bp, Enterobacter aerogenes
atgaatattttgccattactcgacaggccgatcgccttccagcgcagttttattcgtctggatattggtgtgacggctgcgctctttctgtcacaaatgacctactggactaaccggtccgacgatgacggatgggtgtataagactcaggaagaatgggaagaagaaaccggcctttcccgctatgagcaggagggggcgcgtaagaaactccgctcaattggtgtactgctggaaaaaagaaaaggcgttcctgcacgacttttctacaaagtagataataacgttttatatcaggtgcttgcggctgcaaacaagaatgcggaaaaaccacatactggaatgcggaaaaccaccaaacaagtcaggggaaaaccagcaaactttcttacagagaatactacagagaatatagatccctctaaatctcccgttgggagaggcgaagggcatgtattgcgtgaacaactgatttcacttctcgaaggtcaattcgattttgataaagctggtgaacttcacgatgccgttgaagctgtgattgttggtgctggctttgactgccagcgtgaatatccggtcgctgatcgtggcgatggtcgcagaggccgcgttgatttactggtaactggaagcaatggcgaacagtgcggcattgaaatcgatcgcatcaacgtgcgcgataaatccgtgacaaaattaaaacagctgagcgacggttttattctggtacgagatggcgtaatcacagaacgctacgaatttgacgggatcgctgtaattggcgcacatccggcaacatcatctgttgcgaatatatcccgcgagcaactcctttctgatgcgaaaaaagcgctggagttttacaacgttcaaaccggtacccgttgccgtgacatgaaaccattcctgatgctcatgacccctacgacaacccgcgacggctatacgctggacgatgttcagctagttattcgatgggttctggctacatggcgtcgccggggcgacagtctgccgaaaccggcaaacatctgccgtgtatgccgttttgatggttatcttactgacgctgagacctgggctgttctggaagctgagatcgaccctgaagccgtcatgagcggcttcaacgaaatttttgctgatacgttgccagcggcagagctggacgacgatcgccgtcggatgattaccagactggccgcccacatgaaaaacaaaaccacgggtgcattcctgggttatttcgaaaaattccgcgctgacgcctccgatttttactttggtgaaaatggcggctggcgcgccagctttgactatctgatgaaaccagagacattgcgtaagaccagggagggcgctttatga

SEQ ID NO: 110585 - DNA, 303 bp, Enterobacter aerogenes
atggcctgtaactgctttaaagaaatcaaagaaaaaatggacgctcgtttacgcgatgccgtcgccagcaattgcgccgaagttgatgaatcggactttgacaatcgcgtttttattctcgaaaaaggcgatttctgcaacgtaatgctgccatatcgctttcgctactaccgccgtaagaagaacggccaacccgaacagcgctgcacaaacgccgataccagaatagcaatcaactattgccccttctgcggtaccaaatttaacggcaaagaacttactgacgcggaagcgtcactatga

SEQ ID NO: 110586 - DNA, 213 bp, Enterobacter aerogenes
atgaaatcaatctttatggtgatggatagccgtgcgcagttcgatattgatcgcgccagtgttcttgaatgctgcggtaacaaacagccttcgtggaaatcgctccagagagattggggcgaacaaggcgcggttttggttcgcttccgtgttgtagcaaataccaacggtgaagttgctaccgaccccgaaatcgtcggcatcattgattga

SEQ ID NO: 110587 - DNA, 1896 bp, Enterobacter aerogenes
atgccggacaccgggaaagagctggcgtctaaacgtggcgtggaatacaacccggacgatcctgtgcagcatgcgcagctggcgcgtgattatgccgggcagctcagtaaaaaataccagtcagaaccactggccggggccgcgtataactgggggatgggtaacgtcgataagttgatcgccaaagtgggcgacccgcgcaaaggcgaaatctcgatggcggatttcgttaagcagctgcccgcagaaacgcgcggttggttgtcccgctacaacaaaaataaaaccggtctcgacccggtagcagtaaacaaaatcgacaatatcgccgaagcgcagatccggcagcagcgtacggcgctgcgccagcagattgacccgattctcaataatacaatggcgcagctgtataacggcgaggtgccggatgctatgccgaacgcctccaccattttgtttgcgtacggtgagcaggggcaaacagcggtcaagcagctggatatcgcgattgataacgccagaaccttccaggctattcagtacgccaccccggcagaacagcaggccgaactggcgaaagtgaagccgcaggcaaacgatcccgattttgcgctaaaacttgatgcacacggcaaacttagcgcgctggtgcagaagagcaacgccaatattcaggcgcagcgcgactccgcccgctttaacgatgcgctgctctccggcgagaaactcgacccgagcaataaatctatgcagagggcggcggacaatacgccatcggcgcttaatttccgcattaacgatgcaaccacccacgatgctatcgtacagcaggtaaatcagaccggcattgttccgtcgcaggtaacatcacagctcaatgctatttcccgctccagtagctcagatgtagtgaagcaaggcgctgaaatattcaataggctttacgactctaaatcttctaacgtcagtgatatgccaaaagatatacaaagtttttatctgacaattaagcaattgaccgaagctggtatggcttctgatgaggcagtgaaacaggcacagaatataacctataaccagaacgatgcattaaaaaatcagttaacttcgacgcagagcactaaagaatataaaagcgagcgagatagtgctatggattcagctcgaaatagtatggctcagtggttcagaattgatccaaaggcaagcgatacaacaactgatgcagttaattttcgaaatgactaccagtccctttacgatatcaactatcgaaattctggtgggaattctgaaattgccaaaaaaatgaccaacactcaaatctctcgtaactggagcattagcgaagtgaacggcaaggcccagttcatgaaatatgcaccagaagcactatataactttggtccgtcaggttggcaggctgaactgtggaaagaaaaaaaagaggaactaatgtatggcaagcgtaatgaggagatctctaccagcccaacgcagttaggaatcacgtcaggaactgcaacaaatattatctcaaacacccccgagtctaaagttggtggtgaattggaaattgtgcctgatgtatatactccaagaattaaagattatgcaatttggattcgctttaaggataaagatggtaatgaaaaggctcagccttataacgacaaatttggtaggcaaatgcggtggaggccatccctagaggaatgggggccttaccagaaaatgcagaaggaacgagagcagaaagaacaggatgaaatttcgcgcggaaaagatattcgcggatttaaagcgaaacatcgagcattggatgagcagtaccagcgtttgcatgatgagcgacttgaacgtacgaaaaattatttttcatggagtaatgaataa

SEQ ID NO: 110588 - DNA, 246 bp, Enterobacter aerogenes
atgcacgtcgccgttacgcagcgcctcgccaacctgttcacggaaggccgtataacccagatcgccgccctcggctttatactgggtgtatgcctgcttattagcagtaacgacggccgcctcttcgcggcgccagccacgtacgcgcgtctcggcagctaccggagtttcgataccgcgcaggttgccttccagcgtgaagttattctccgccagctccagcgctgtccggcgcgcttcttttga

SEQ ID NO: 110589 - DNA, 132 bp, Enterobacter aerogenes
atgtttacacctacccctccggaacattcttcaatgcagttactgttagttcgtgtaactaggctatcaacgcataccgggatcgacctggttaatcagcggcgcgatccagaacaggttattgcccggtaa

SEQ ID NO: 110590 - DNA, 954 bp, Enterobacter aerogenes
atggctgtagggctggaaactattcttcaaacccgctcgcgtacgatgggcgatctggtggatagctcttcgcgcaccactgcgatcgaagcgggcatggagcgcattaccgatgtgttcggcaagctgaccatgatgggccactttgacgacatgaacaaatcggtaaatggcatgattacttcagacggtattttgtcaggtgcgttcccggcgaaacgtctggctaagctcggcatcaatgacaaaatggccgaacgcatccagaaagagtttcagaagcacggcgaagtcattcagggctggcatatcggcaatttcgaaaaatgggatgaccagtacgccgccggcttgctgcaatctgcggtactgaaagacgtaaacaataccgttatcacgccgggtatcggtgatacgccgctatgggccagtaccccgctggggaaaactgtattccagtttaagtcttttgctacggcatcctataaccgcgcgacgctcggtggcctgcaggaaggtaccgcgcaattctattacggtaccgccttccagattggcctgggctcattgacctatgcgcttaagcaggcggctaacggtcgcgaggttgatttgacgccgcagaagatggtactagagggtatcgaccgttcgggtatcctcggcccgctgatggaatacaacaacatggcggaaaaggcatctggcggcatgataggacttgggccattgctcggcaccggtacgcaatcccgttatgccagccgcggctttatcggttctgctctggggccaacctttggcctgctggatactgtaaccgatgtgaccgctggcgtgctgaatggcgacgctggagaccgggtcctgcatagcgcgcgaacgctgttaccgggcaataacctgttctggatcgcgccgctgattaaccaggtcgatcccggtatgcgttga

SEQ ID NO: 110591 - DNA, 603 bp, Enterobacter aerogenes
gtggcctttaccgcagaagaacgcctgcaggcatctatccgcaaaatcatgatggccgaccaactgcaaccgcaggacggcccggcgatgaccgccaccgaagtgcatgtgcgagtcgcgctgattcgccagctgctcggcccggtctatggccgcttccaggctgaatacctgcaaccgttggtagaacgctgctttggcctggcattccgcgcaggtgtatttccgccagcgccggatagtctgcaaaacgcaaatttcaacgtgcgctatatctcgccgcttgcccgcgcgcagcagctggagaacgtcaccgccattgaacgccttggcgcgaacgtggcgaatctggcgcaggtatcacccgatgtgaccgacctcgtagacaccgacgaagcaacacgcgtgatagcggatgcgctgggcgtaccggcgaaagtcattcgctcgtctgatgccgtcgaacaacttcgccagcagcgacagcgggcgcagcagcaacaagcagggcaggcgctcatgatgcaggcaggtagcgaggcggcaaccacagcagggcagcaggtgggcgtagcgctgggccaacgagtagcggggggctaa

SEQ ID NO: 110592 - DNA, 651 bp, Enterobacter aerogenes
gtgggcgaggacggaaaactcagtattgaaagctcagcccgcaaactggcggaaaattactctctccttgaaaaacgcatgggcagcggcgacgcgccgccaaaaactgctgatgactatgccccagaggtaaaggccgaaggcttcaactgggaagaattcaaagctgacccacgcatgcagtcgtttatgaaatcggcgcacggcaaggggatcaccaacgaccagatgagtttcatcatcagcgagtatgcgcaaatcgccccgtcgctggtcaacggtgcggcggaactggatgctgaatccgctaccacgcagctgcgagaagtctggaagactgacgccgaatttaacaagaatatcggtctggccttccgcgcattcaattccctgaccgatgaaggtgatcgcggccgcatcgatgaaatcggcaataaccctatggtgatccgcatgctggcgaaaatcggcgcggaaatgcaggaggacgcaccggcgggcgccgacagcaacccggcagagcagcagaccatccgtgacctgatgaagtccgaagcgtacatgaatccgaagcataccgaccatgagcgcgtatctgcacaggtgaaagcgtactaccagaagcgttacggcgatcaaaccgtagcgtga

SEQ ID NO: 110593 - DNA, 213 bp, Enterobacter aerogenes
atgacgctgcaggacgtaatttgcatcgctctccagatagtctttcatcagacgatcgggaacactcaacgtacgcgatttagtgctacccggcgctttcaccatgaagacgttggcgaattcctgcggaattttggccccgacaatacggttaatcgtggtatcggcggcgatttcggcatcttcgcgggacatggttttctcaccgcgtga

SEQ ID NO: 110594 - DNA, 297 bp, Enterobacter aerogenes
gtgctggtcgccgaaaaagacgggcaggttatcggttggcttggcggcggtattgccgagcagtttttttcccgccagttgatggccttcgagtatggcttatttgtcgcgccagaacatcgaggcggcagcgccggcccgcgactggcacgtgcgtttatcgactggtcaaaagagcacggcgccgctgttatcaacatgggtattaccactggggtgcacgcagaacgcactggccagttgtattcgcgtctcggcctgcagcaaacaggcctgctttattcgatggaggtttaa

SEQ ID NO: 110595 - DNA, 435 bp, Enterobacter aerogenes
atgtcacagacttcttttaaccaggctcagtttcaggctgcactgacgcgtcagtggcagcgtttcggtttatcgtcagccgcagagatgacccaacgccagtggtggcgcgcggtcagcggcgcgctggcggagcttttggcggcgcaaccggcggcggaagccgttaaaggacagcgccacgttaactacatttcgatggagttcctgatcggtcgcctgaccggtaataacctgctcaacctgggctggtatgaaggagtgagcgagacgctgaaggcgtacgacatccagttgaccgacctgctggaagaagagaccgatccggcgctgggcaacggcggcctgggccgtctggcggcctgggccgtctggcggcctgcttcctggattctatggccaccgtcggccagtcggcgaccggttacggcctga

SEQ ID NO: 110596 - DNA, 2013 bp, Enterobacter aerogenes
atggccaccgtcggccagtcggcgaccggttacggcctgaactaccagtacggtctgttccgtcaatccttcgctgacggtcagcagatggaagcgccggatgactggggacgcggcagctatccgtggttccgccacaacgaagcgctggatgtgcaggtgggcatcggcggtaaagtcagcaaaagcggcgaatggcaaccggctttcgtgattaccggcgaagcctgggatctgccggtgcttggctatcgcaataacgtcgcgcagccgctgcgtctgtggcaggcgaagcatgcccatccgttcaacctgaccaaattcaacgacggcgatttcctgcgcgcggagcagcaaggtatcgacgccgaaaaattgaccaaggtgctgtatccgaatgacaaccatctggcggggaaaaaactgcgcctgatgcagcagtacttccagtgcgcctgctcggtggccgatattctgcgtcgtcaccatctggctggccgcaagctgcatgagctggcggattatgaagtgatccagttgaacgacacccacccgaccatcgctatcccggaactgctgcgcgtgctgcttgatgagcaccagataagctgggacgatgcgtgggccatcaccagcaaaaccttcgcttacaccaaccatactctgatgccggaagcgctggagtgctgggatgagaagctggtcaaggcgctgctgccgcgccacatgcagataatcaaagagattaacgacagatttaaactgctggtggagaaaacctggccgggcgataagcaggtgtgggcgaagctggcggtggtccatgataaacaggttcgcatggccaacatgtgcgtggtgagcggctttgcggtgaacggcgtcgcggcgctgcactccgatttggtggtgaaggatctgttcccggaatatcaccagctgtggccgaacaaattccataacgtgaccaacggcattacgccgcgtcgctggattaaacagtgtaatccggcgctggctgccctgcttgataagacgctgaagaaagagtgggccaacgatctcgaccagctgatcaaactggagaagtacgccgacgatgccaaattccgtcaggtttatcgtgacattaagcaggcgaataaagtgcgtctcgctgagttcgtgaagcggcgtaccggtatcgacatcaacccgcaggcgatttttgatatccagattaagcgcctgcacgaatacaaacgccagcacctcaacctgctgaatattctggcgcagtataaagagatccgcgaaaacccgcaggccgaccgcgtaccgcgcgtcttcctgtttggcgctaaagccgcgccgggctactacctggcgaagaatattattctggcgatcaacaaggtggccgaggcgatcaataacgatccgctggtgggagataagctgaaagtggtcttcctgccggattactgcgtatcggcggcggaaatgctgatcccggcggcggacgtctccgagcagatttccacggcgggtaaagaggcctctggtaccggcaacatgaagctggcgctgaacggcgcactgaccgtcggcactcttgacggcgccaacgttgaaatcgccgagcaggttggcgaggacaatatctttatcttcggccataccgtggaagaagttaaggcgttgaaggcgaaaggctacgatccgctgaaatggcgcaagaaagataagctgctggacgcggtgctgaaagagctggaaagcggtaaatatagcggcggcgacaaacacgcctttgatcagatgctgcatagcctgctgcaaggcggcgatccgtacctggtgctggctgactttagcgcttacgtcgcggcgcagaagcaggtagacgaactgtatcgcgaccaggaagcctggacccgtgcggcgatcctcaacaccgcgcgctgcggcatgttcagctccgaccgctctattcgtgattatcagcaacgtatctggcaggcaaaacgctaa

SEQ ID NO: 110597 - DNA, 222 bp, Enterobacter aerogenes
atgtattttgataacatcaataggcaaattattatttttgaatctttcttcgatcgcgtcaattacatgaccagctgcgccattcccagaattgaataccaattagcggtgatacaggccttcgacatatccaaatacttgcggaagaaaattcttttaaacctgtattatctgattgccgtgggagttataagaagatatcgattcaagaggcgtatatag

SEQ ID NO: 110598 - DNA, 147 bp, Enterobacter aerogenes; identical to SEQ ID NO: 92960

SEQ ID NO: 110599 - DNA, 2025 bp, Enterobacter aerogenes
atgtttaacatcagtagagacataaagttgagcgtacaagcacaaaaactccgacaactagttctttctatcttgcaaagcaactcattacatcagcaccaagtaacggcagccactaaagtttttgatgctctgacaggaaaggttcgagcagtagtaactgctgctgaaatgcaagctggtaaatcaggtattgcacttgcactatgctgtctgcaaagacttagtctctctgatactgttctttgcgatcgcaaacagctaaaagatacactctacctgattacaatgcctgatacagctctcaaggaacaggcggaagatgatcttaagcttgccaagaatgttgttgtaagtaattttgttaacttcgaaaaagcactagaaaacgaatttaaagggaatcctcctaaattaattattatcgatgaatgccactatggttccaatatctcagcggtccgttatagcaagatctttgattatttggaaaaagaaaatgatacctgtaaagttgtattcatttctgcaacccctttcggtgctctctatggagcagaaactgaataccaagaagctttggagcttcaacaagaagccgagaataataacaactcagaattgctaaccgaagctaaagaagtcgcggaaaaagctctaaaagattctatcttgcgtcgggactttaatactcgccttgtcttccataaaactagcaaggaatattatggtgtacgtgagatgttgaaaaataatatggtcacaggtcttgacgacgatagtcgaaattttctttttccttcaaaacaacgtgacagttttgttcaacaatttatacatcaccaagggacaggttggtctctagtgagggttcctgctgggctagcaatggaagcaaaacaatttctagtttcgcaaggcattgacgaaagtgtcatttatattttaggaaactcattagctggagtgcctgaagatgagcattgcagtattgaacggttcaaaaaagaatttgatgatgcgcagctatttgaagaaaagctaatcgctattactgtcgctggagcaagagcaggtataaacttcggtccaatgatgaaaaataatttaatatcaacttgggatagtaccgtagctagtgtcgccgcagtggtccaagcaaatatagggcgcgcatgtggttatcatgggaataatacttcagctcactatacaaatttaaatgcagctgaggcatatgcatgtatactagagcatcttgaaactacttgttctgatcaggcagcatctgactttgaaggtttaaaggaattttttgaagacatttgccaagagtatcacgttaatggattggatgttggtctaactataaaatataaacgtagacgccctattggtgatatcgaaacatataaaacagatagctatatagtcgtaccagctcagcttctcaaagagaactatgacgctagaaaatatactaatgatagatattttattcaggctattgatattcttcgtaaagagtttacagcaaaaggagcacctagtgttaaaggcaatagggctatgcgaggtaagggcaaaaattggataaaagctcactgggttaatggtgatagttataacaacccagaaaaagctccagctgatggcactcaacaagaaaagacgaagatgtatacccaaatgcttgaaaatggcgaatatttggagttcaacagaattgtaactcctgggtcaggagagcgatctgaagataaacttgtaacggcaactatcttcagcatctacaacatttctcgtcgtaatgtcgcgaaaaaaatcatgacactagctgatgtttgggagatgtgtgactactttggtgttgaacgcgatgataccctttttgttatatacaaacgcggagagtacgatattgaccgcactctcgaaaagagaaaatttaacgaacttcctgaaaagtcaggggatcttagtgatgagtctcacttttctaatgagatagattctttaaattaa

SEQ ID NO: 110600 - DNA, 1857 bp, Enterobacter aerogenes
atgaatagctcaaatagacagcgaaattatgtactatgttcaatagcggaaaatacttttgagcaccaacaaaacgccgcaaagaaagcatttgccaagcttatttcaggttataaagctgttgttattgcagcagaaatgcaatcaggcaagtcaggtatagcccttgcccttgcatgctttcagagactatctttatccgatgatttgttgtcagatcgtaaatacttaaaagacactctatatcttgtaacaatggcagaccttgctcttcaggagcaggcaaaacgtgatcttgattcatgtataaatgtagtcgtgagtaatttctcaaactttgaggctgctttaaaatataatttcaagagtcaccccccaaaactaattatcattgatgaatgtcattacggttccagcattgatagtgttcgctatgaaaaaatatttaattatctagagaaagaaaatactgaatgtaaagtggtctttatttctgcgactccattcagtgcactatatgcagccagtgcagattctattctacgtcataatttttcgacttcattagtgtttcacaaaactagcgatgactattatggaatccggcagatgcatcgtaataaccaaatagtaaaactcgaagatgatcaacgtgatttctgcgaagatacgctattgcaaaagagatttatacgtcagtttaaagagcatcaaggttctggttggtcacttattagagtcccgtcaagccatgcaaatactgctaaacaaatactaattactcaaggtatccatgaagagcagatatttatcatcggccaaaagttggccgatgtagatgagtatgaactttcatcaattgatgattttaaacgagagtacgaaacggcagtcatatttgatgaaaagataattgcaataacagtagccggttttcgagcgggaattaacttcggtcagaatatgaaaagctcgcttataaatacatgggacagttctattgcaaatatagctgcagtcgtacaagccaatatcggtagagcatgcggataccatcaaaacactcaagcgaaacattatacaaacctggaggcggttagagcatactctgagctgcttgatcatctcgaaagaaatgatgaatcaggaaatttcaatgggttagaacagatatttgaaaacatttgtaataaataccaggtcagaggctttgatcgaggaacagtaatagctactacaaaagaaaccaaaatcacaaaaaaactcgatgactcatcaacttactttacaaaaggttgccttattgtccctggaaagctgtctgagattaatgctgacttcagttcctacaccaatgacccagatctacttgaagccatacaattaattcgtgctgaatttctgtcggatggaactccctatccaaaatcaggacgtgctatgcggggggatgataaaaactggattaaggcgcagtgggtaaatggagtcacttataatgacttcacaccaagctgcgcaaaaaatagaatactggattttaataccaggctagataagggagaggaaatagaattcaacttaattgttaatcctggtggtggagaaatcaccgcagataaacgcgtcatggcgagcatattcagtatatataacctttcaaaacaagtagatgcatataaacgggctatggatattgaggatatgcacgaaatttgcactgctttaggtcatgactatgaagacacaataatagtactttatcaacgagggaattactcaaacacaatgacgctacaaaagcaaaagatacaagaaaaattatctcgtatacgtaactctagcgtattcaaataa

SEQ ID NO: 110601 - DNA, 2037 bp, Enterobacter aerogenes
atgcaagtaattgataaattgatagagcagctacgaggtagtgcaaaatttaatcctgcggtgcaagaggccccagcagcggttctatggacagatgaagcttgccaatggcaaagtgccatgcctttgattaaacaattcattcccgagctactcgagcttggtgaatatcaaccagagcagcggattggtccggctatttggttaaagtgtgctattgctggggtgttggaagaggttatgttacctgaaggtcgcacagcaattatctatcttcctaaaattgggcgaaaagcgttacgtgctatcgaagattgtccagactatttacgacctttagctgaattgcaatatcgcggatgttggtgggtctataatacagcaggtcgtgactggagtataagttcttttctgacaaacccacgcgttgggcttgaattagacgtagcaaaagataaaaacacattagaaattatcccccaaatcttgaaggatcttttagagtcccgtattgaagacttacaaggaaagcgattagaggctaaagattttcaatcattagtatttaatgatcctattaaagatctacttgggtggctgaataatcccgaagataagcgtaagcagtgggacgacaataaatggtcgcttttcagtaatacttgctcaagtcagtttggttatgaaccaacagatgctaattattctcaaatgctcgcagcccttttatctgcccagggagcgtggcaagaagtgtggcagcgctttgaagataccgcacataacctatcaggattaatccttgttcttcgtaatgtaacccctgatttagctgctgatttaagtcattatcctattgaaaatactcgtgatgaaaaaagccttgccgatgcgcttgctggccttcctcaacttgatgtaaacaaagttagaggaactatctgttcactatatcaacagaataaagagcgcgaaagatggctttggtatcgattaggggaatcgaagtatcttgagatattagctcatttggcaaaagtcgctgaattgacccagcaagtgttcaatcatcagtcaccggaagagatggcagagctatataaggagtgcttctggcaagtagatgctgcagcgttgcaggccatggcattggcaaaagaaccgggccaacaggaattagtcacaaatgtattaaaactaatctattccccttggttgaacgaggtatcgctcaacttccaacagttggttaaaagaaaaggatatcccgggaatactgaaattaaggaagcgacagctacttacccggctaaagggatggtagtgttttttgtagatggtttgcgttttgattgcgctaaagtattagagcgtaagcttactgcgcgtcatttgattgtcgataccaaaacacaatggagtgctctgccatctttaactgatacagcgaaagctgcggttactcctgttgctgcacttttgaacggtgcttatgacactcaggattttaagccttcagtagtggcaacgggtagtgagtttagtagctatcaattaaaaaaaacattggcacaacaggggtggcaatacctggaaggattggatactggtgagcctaatggcctggcgtggctacaaacaggtgacctggataacttgggacatcagcagcaaagaaaattacctcttggtattgatgatgttcttgaagaaattgctgatagggttagctatttatttgaagcaggatggaagcaaatccgtattgtcacggatcacggttggttatggctaccagatcaattacctaaagtagatcttgaaaaaccattggttcgtaagtacttatcaagatgcgctattctcaaggataatgccagtacgagtttgcctcaggtagagtggtattggaattccgcagtgtcacttgccatggctccaggaatcagtgcatttactgcgggagattactacaatcatggtggcctaagtttgcaagaatgtttaactccagtcctgagcgttactaataattag

SEQ ID NO: 110602 - DNA, 1800 bp, Enterobacter aerogenes
atgattaaatcagtattcaactatccggtgtcagccttgttggatattgaagcaggggtggtatatgccatcccacgttaccaacgggagtacacctggggtaaatggcaatgggatgccttgtttgaggatctattagaaaacgaccttaattactacttgggatcgattatctgtatcaaccaaagtacagatacgctggctctgcagcagttagagttagtggatggccaacagcgaatgaccacattgtcattattgttagctgccatttatgcaagctacaaccagttgggcattgaacttgagatggaacagcagatagagctgcataacctgaagcataaattggtgctgaaaaagaatgcggaccagccccggttagtacctcaggtgcaaaatgccaaccagcaggattacctagcggtgttgaaagaggcaggtattcttaaagaagctgagtgggtttccaatgcaggtaatcgtcgggtatttcgtgcctatcgacattttttaatgcgcattgaacagtatgtcagtgagagcgaaaccccattgcaggcactgaatgtgctacttgataaagttaatgcttctactctggtaaaaatagaggtggcaagtcattcagatgcttataccctgtttgagtcacttaacaatcgcggtgtgcctcttaccgcgattgatttaatgaaaaacaagctactggcgaagatcgaacagattgagccgggcagtattgataagtcttttattagctggaccaaagtgatggaagccctaggggatgattatggggtacaagagcgttttttccgtcaatactacaatgcgttcaagcctgagttaaaagatatcgtcaatgtaccagtagcgacgaaatctaatcttattcaaatttttgaaaaattgattgctcatgatccacatcaattccttcaaatgatgcgtagccattctaactggtatgcgcagattatagggaattgcgaagttagggatgaacctaaattaacaaaactgcttaaaagtctggatagaattcaaggagctccttcttatctcctgttgctaatgttgtttgccagacgacagaacttagcgttgagcattgagcatattgaaaaagtggtcactttgctgatcaacttctttgtccgtaggaacactacagatgtgcctgctactcgggatttaaaccgcatatttatggagttaactgaaatactgagaagcttccacggtgagcaggtcgttagtgctattgctaataccttagggtctgtcagtacctctgatgagcatttccgccaagcacttagtggtggtctatacgaagaaaatagctgggtctgccgctttatcctgtgtgctcttgaagaaagcatgatgaccaaggagaaccaagtagacctatgggcagtggaaggcaagcaatatgtgtggaccattgagcatgtttttccacaaggattaaacatccctaattcttgggtagatatgatagcggatggcgataaaacgttggcggagcaatatcgtcaaagccatgtgcataaacttggtaacttgactatttcgggatacaacagttctttagggaataagagttttttggaaaaacgcgatcgtacgacccgggataaacgtcctgtaggctacaacaatggtttgtatcttaatcaggagctggctgttgctgataattggtcaatagagcaaattgagcaaagaacagccgcgatggtagataaggctattactctgtttggtttaccgggtgtcgtcgggagataa

SEQ ID NO: 110603 - DNA, 837 bp, Enterobacter aerogenes
atggaactggctgatgagatgcttcactggcttggtaaatctgatgaattgcttaaactcgtggatgatgatggcatagtctgcctgccagcacttcgcggggaaaaagccgctgcttcccgcctggaggccatgctgcaggctgcctacgaagaggactggtcatccagtgttctcagtgatctgcttgccagcgttggtagtaagagccttgaaacctggctgcgggataaattctttgaacaacactgcaaactcttccagcaccgcccgtttatctggcaaatctgggatggtcttaaagatggattctcagtactggtcaactaccataagctcaattaccagggtttagaacgcctgatttatacctatcttggggactggatccgtactcaggagcacggtttcaaagagggcattgatggtgcagaaagtcgtttaatggcggctaaaaacctcaaagactcgctggaagccatccttaaaggagatgccatcaccggcaagagtggtctcgacatttttgtgcgctggaaaccgttacacgaacagcctatgggctggaacccggacttaaatgatggtgtgcgccttaatatccgtccgtttatgcaggcaccggatgtggataagaagggggccggtgttttacgcactaagcccaatattaagtggggtaaagatcgcggcaacgacgttgaatcggccccctggtataatctgggcctgcagtatggtgaaaaagagggggcgcgtatcaatgaccaccatatcagtcttgcagataaacaagctgccagagacgcacatgcaaataaggaaaatcacggatga

SEQ ID NO: 110604 - DNA, 3474 bp, Enterobacter aerogenes
atgttaaatcgtgaaatttataaactcgatcctctggaaagcaaactagccaataacggtgtagcggaagtaaaagatgacctctcaaaaggcgcacttgaaacattagattatgagcttcgcacgtttgtgtgtagcggggcttatgccaaaggcatggctgatgtacttagtaactacctacgaaacgtcaaaagttctggtgaacaacctgcagtttggatttcaggctttttcggttctggaaaatctcatctagctaaaatgctcagaactctttggattaatcaaaaaatggaaagcggagcagatgctcgctcattggttgagttacctgatgatgttcgacaatacttcgacgagctctcgacgttggggagtcggttgggtgggctccatgctgcgtcgggaacattgggcgctggggcagaagacaaagttcgattagccttgttggcgatcattttcaaatcagctgggttgtctgagcaataccatcttgcccaatttgaactttggttaagatctgaaggggtgctcgagcaagtaaaagcttacatccaccagcatgccaaaggtaaagaaggcgaggacctttggaagaaagaactgcgcaatctccatgtttcaccagtcatggcgaatgcgctgttacatgctttaccatctcttggaagtgatgctaaagaagtacgagatatgctgcgtgcgcaatacaaaattgttgatgatgtatcaaatacggaaatggttcagtcgattgttgatgcattgtcaaatgaaggagaaatgcccttaactttagttgttcttgacgaggttcagcagtatatcgctgatgatcccgatcgtgctcatcttgtgcaagagaccgttgaaacatgctgtaaagctggtgcacttaagtcgaaattacttttcgtcgctacagggcaaagtgccttatccgggttgcaaaacctgcaacgccttatgggtcgtttccagatttctgttcagcttgaggatacagatgtcgatgcggtaatccggaaagttattctccagaagaaagaaactgccagagctgagatcgaatccgtggtacatcataacctcggtgagattaatcgtcatatgagtggttctgttattgaagctcataaagacgatgaaagatggatggttgcagactatccgttattgccagtgcgtcgtcgtttctgggagcgagtccttcctgcgctggataaaaccggaactggatcccaactacgaaatcagttacgtgtagtgcatgaggctacaaaatctacggcacttaaaccgttaggttctgttgtccctgccgattttatctatgaacaaattgcaatcaacctgctacaaacgggtgttattggcaaagagatctacgaaaagatagctcgcttcaaggccggggacgaagatgaagtcctccagggtagagtgctttcgttgatactactcattagtaaactaccaacagatatcaatcacggcattgcctcaacggaagctttcctcgctgatttgctcctggaacatttaagtgatggtaagcatgaactgagagcaaaactgccacatttaattcaacaactggttgatgacggcgacttactgccaatgaatactagtgcaggtgttgaatacaggttgcaaacgcttgaaagccagcagtggcatgatactttcaaacaacaacaaaatgatctacgcggtaacccacagcgtttagaaacgttccgcagcctcgaaataaaaaatcgtgttaacactgctctagggtttggtagcgttaatcaaggggtcagtaacgaaccccgcaagatcaccgtatgtttcgatcaggaccttccggtcaatgctaaaaaaaatctctatgctcatgtgcttgaatgtaaagaaaaagctttcgaagatacagtgcgtagtgcgaaccctgatgacgctactattttcattcatgttccatccattcgccgtaatgaactcctgagcgcaattgtcgattttaaagcggcggaaacaactctggaagtgagtgggataccctctacggatgcgggtaaagacgctcgcgctgcaatggagcaccggaagtatgaagctgagcgcaccaaaaaactgatccttaaagaaattattgatggtatccaagtacaaatggctggtgggagcgaagtacctggcgacacgttagttgagcagttccagaatgcaggtaaaaaagcatgtgaacggctctacacagagtttaaacaagcagatcaaaaaggatgggataaggtatttgagcgtgcaagtaaattcgctgatgccaatgctctggaagctgtaggtcataatgatgaagtggaaaagcaccctgtctgtgtcgccattaaacgatttatcggtgttgcaaaaactgggggagagatacgagagaactttatgtctgctcctttcggctggccgaaagataccgttgatggtgccctctttaccatgttggctgctggtgtattgaaagcaagcgattctcaggaaaaatcagtcgatgcgaaaagtttggagcgtagcaaagtctctcaaacaaacttccgtcctgaaaccgtaagtttgacgccgcgacaattggcaggcattagaagtttgatccatgcgattggtttgaactgcaccaatggtgaagagcaatccaaattaagagatgcgatagaaatcgccaagcaattggctcgtaaagcgggaggcgacgccccattaccattaccaccaaaagcagaattacttgttgaagttgaaagactttctggtaatgaacagctaatggctgccttcgaacgacatcgcgatattatcgatgaagtggagagttggaaagggcttgctgaaaaagtattcgtcagacaagctcgctggggcgaactaaaatcggcgcttaagtattgccaaaatttagttggttttgacgagctcatgaacgaggtgcatgcgattgagcaaaaccgaagtctgttagccgatcctgatccagtacagccgttgctgaagcaggtaattgaaaaaattcgcgttgcgattttgaaaaagtacgaagattttcaaactgaatataacgagtgtctaaaggaattgcatgaagatccaatctggagccagctttctacagagcagcaggagcgattgctgacaaagcatcatctggataacctggaaatgtcaccattatctgataacgacagagtactcgattgtattgaaaatacctcgttagaacagtggagtgataaaacctctgctttggcaggccgttttagccgtatgcggcaggatgcggttgatatgttggtgcctaaagcaaaaatcgtacttttaccaaaatcagtcattgaaacagaggctgagctcgattcctggttggcaaaagttagacaagaagttatgtccgctttagctgaaaatcgtcctgcatcgttgaaataa

SEQ ID NO: 110605 - DNA, 543 bp, Enterobacter aerogenes
atgtctgacagattgtcaaaattattgaagagtttctccagtcatatcagtgttccgtggggtaacaatatctctgcggaagagaaagcaatctttgtcgtgtacgacaaagatgatgagcttaagctccgcgctcgcatgtctgagtttgagcatgcatgcattgaaagtgagcacccttggttattgttagatttgaccaatgaatttcccaactggatggctaaacaggagtacaaagaagcatatttcgaggatcctgagtacctggaaggaagttatgactatttcgctgaagaacttgtagccaaacttagtgaccagatcaataagcagcaaacatctgagtccgttatagcgcttatgggctgtggaactatgtttggttttatatctgtttcagcgctggtcaaatctctaacgcctcaagtacaggggcgcctcgtggtgtttttccccggggaatatcatgagaacaactataagttgctcgatgctaaagatggctggggatatcaagcaactgcgatcaccgtaggctaa

SEQ ID NO: 110606 - DNA, 774 bp, Enterobacter aerogenes
atgaaccatgagcggttagctcagtatggattcaagtttggaaaaaacggacctcatgcagcgcgttgcatgatgatcgaagaattgaagatattgctccaggcacggcctgagcacaccttaccagaagaatataggataagcattgtggatgacaatattcttcataaacccagttctagtgccaggaaactcacttatcggcacatggttggtctttatgggatgtctccgcacatacctttgttcaaattttttcgtcaactttgggagctatctgaagaagctcagcctttactcgcactgcaattggctattgcaagagacccactacttcgagaatctgttgaggtcattatggcgctgaagcttgggcaaatcttaccaagaagcgttatggaagaacacttagcgaaagacgaccccgatcgatttagccaagcatcacttcagtcatttgctcgaaatctaagcggcacctggactcaagcaggttatctttcgggtaaggttaaaaaacaccgtactgacccaaaagtaacttatgtgaacgtggtatttgcactacttcttgggcattttcaggggctgtcaggtaaacgtttatttgatagcttttggatcaaactattaccagttgatgaaacaactttgtacgagcttgcgtatagggcaactttgcgtggcctgataaatttcaaacaagccagcgatgttgtcgaagtatcatttgcacctttgaatctatcagttaaggaacaactcgatgtctga

SEQ ID NO: 110607 - DNA, 633 bp, Enterobacter aerogenes
atgagtgagcagcgaccgcctccatcacgcccagcacaggggccgattggctggctgctgtcgctgaccgggcggcttatcgggttggtgatcggcgcgctggttctacggatcgtactggaactggcggggctctatttctggtggccgcaggaggggagcagtcatgtcgttctggtgatgaagcgggaacagtcggaactagttattgcgttacagtcacatccgaagggggaaaaaatagtgatgctgctggagaacggggtatctcacgtgcttataaccaacagactcattcaaaaaccactcacagttctggcttatacactggtcagttttatgctgcgcctgacgtggctggtcgccacgttcccccagctctgtctgtgtgtgttaatcgggctgacagagggtctgatgcgccgagatctgaggcggtttggctccgggctggaatccgtttttctccatcgttatatcatcagggctggcagttcagtctccacaacactgtgggtgttttatctggcgcagcctctgtttctacctgcgaggttagttttattaccagccaccatatggtttgggataacagtatggatggtggcaggtaactttaagcgttatatataa

SEQ ID NO: 110608 - DNA, 573 bp, Enterobacter aerogenes
atgttacattttggtaaaatcctaaattacaacgataaggggtacggttttattgaaggctcgtgcttatccttaaccaacgtactaagtaagaaacaattttttcacatttcatcattgaaagcacttggcattacagagtctcttattaaagatccaaatataactatttggttatggtataacatcgaaaataataaaaaaggtcaagcgttaagccaagcttggttaaattacaatgaaattaacaaatgtgaggtgataaaaaacttacctttcttacattaccgttcttcaaatcatgacataagagtagggatagaagattgctatgaaataatgcattacgtccaaatatacaaagaaaattcatgcacagatcaagccgaagccaataaccttatatctcaggaaagaatttggaatgagttcccgcacatccgtagtttaaatgaccatacgatacatctgaacgtccctggtatattacctgtatactatgcaataatatgtaaacttcttaatataaaaggaggaagaggcctcccgcttactaacttcaggcaatactaa

SEQ ID NO: 110609 - DNA, 303 bp, Enterobacter aerogenes
atgaataaattactattattagtgatatttagtgcatctttctgggcctccgcctccccggaatccacccaactcgctctcgcgctgaaacaactcaatagcgttaaaacctcactggcgcatgcccaaaccagcgccagcactgacccacagtcacgctacttcttcgactacttacaggcgcagcaggacatctccgccgttgaacagggcatccgccgctaccttagcccggcgagagcgcagccgcgcgccgtccagtccctgagcgctagctaccagcgggagaaccccgatgactga

SEQ ID NO: 110610 - DNA, 561 bp, Enterobacter aerogenes
atgtctcaatatattaaattattgtctgatataagttttatggctggagtgataggtttttttgaatactacgagcgttatgaaattgctgattggttagaagattccaccgaccaattgcctgatcctcgaggtgctatcaatgatggcgaggctttttctcaaataaaagaattttcagatgagagtaatgctgatgctccggggaatagagtaacaggggccgataatgagcctcctgaatggcttgagttacttatgcttaaccagtggatgttcacaattggtgatcgtgattgttatccttcggtgccccatggacatttcaaggctaagacaaatgagtggcctaaacttaacccttatactggtcgtgtatttgtagcaggtcataaagaagattctgctaaacggttaagtaaaaaagaaatgatagacctttggaataatacgaagtttgttgaacattgccgtgagcaagtgctttggtatagcgattttgcaccagcttaccaatttccaagagctcgtcgagggaaactcatttttccaaagtggtga

SEQ ID NO: 110611 - DNA, 1359 bp, Enterobacter aerogenes
atggaactcgacagaagcctgaaagcccgccacctgacgatgatttccgtgggtggcgtcattggtgccggatttttcctcggcgcaggtgcggccatcgcccgtaccggcccgtcagtggtgctggcctaccttatcggcggcgtcattaccctgttcattatgctgctgctcgccgaaatggccgtatcccgcccggtctccggctcctttgaatcctatgcccgcacagctttcggtccgtggtgcggctttatcaccggctggacctactggctggccttcctgattggcccggcgtcagaagccatcgccgcaggcaccttcctcaacctgtggtttcccggcgtccccgtctggctgttctgcctggtgatcgcctcgtcgctcactgccatcaatatggtcggcgtccatttcttcggtgaggtggagttctggctgagcctcgtcaaggtggtggcgctgctggcctttatcgttgcgggctgttacagcctcggcctggatgaatcttcccccgccagcgtggcgaacgtcaccagcaatggcgacttttttgccgccgggctgcccggtttccttggcgcgatgctgatcgtcattttctccttcggcgggacggaggcgatcggcaccgccgcaggcgaaagcgaaaacccacagcgcgacatcccccgcaccctgcgcggcaccgtggtgcggatcctgctgctgtatgtcggctcgctgaccgtcctgttgctggtgatgccctggcaacaggctggcgtcagcagcagcccatatgtggaatcatccggcatgcttggcggcgatatggcgcggcatatcatgaattttgtggtgctgaccgccgcgctctcctgcattgataccggggtttacgccacctcgcggatgctgcacgccatggcgtctgatggctatttcccgaactggttcgcccgcctgcacccggcgcacaaaacaccggataacgccattctcgccagcagcctagtgctgtttaccggcgtcatcatcgccattctctcgccggatgcctatgtcatcctggcagggatttccggctttggcttcctgttcacctggctgatgattgcgctaagccagcccgccatgcgccggattgccctgcgcgacgggacgctgaaataccgggctccggcagcccggcacatccagccactcaccgtgggactgattgtgctggtgatggccgggcagttctttgccgacggcggcggtatcaccctgatcaccgtgctgatctggctggcactcgccagcgcgtactatttctttgtcgtccgtaaaaacaggagactgtccgatgaaaaaagttatgctgaatga

SEQ ID NO: 110612 - DNA, 780 bp, Enterobacter aerogenes
atgaaaaaagttatgctgaatgaactgaccggccgcgaaatccgcgagctgttgcagtccggcaaggaactcaccgccatcgtcagtttcggcagttgtgagaaccatgccgatcacctgccgctcggccccgatatgtttgtcccggaaacggtcgcctgccgggtggcgcagcgggtggacaacacccttgtgctaccctgtacgccgttcggcacttccgttcactacaacgcccatccgctggctgtcaccctgcgttatgaaaccaatattgcgctggcggaagatatcttcaccagcctgctgcaccacggcatccgccggatgctggtgattaacggccacgatggcaatatcccggcgattgagatcgccgcccgcaacgtgaaagcccgccacccgcaggcggcgatcgtggtggttccggcgtggtgggatctggtggggcaccatctcgggaagggattttttgactcatgggataacagcggactcgggcacggcggcgagggagagacgtcggtcatgatggcgttacttccggaactggtggagttacagcacgcgcaaaaacagatcccgaatgatgtgttcgacgattacggcgtaaaccggatctgggatatcggcgaaatcagctccaccggggcgaccggcgatccgcgctgcgcctcggcggaaaaaggcaggcagatcctgtcctgcctggtggatgtgctgtgcgcgttgctggccaaattaaatgcggctgactggaagtatggcccgggccagtaa

SEQ ID NO: 110613 - DNA, 747 bp, Enterobacter aerogenes
gtgcaacagttcaataagaatgccggtgcttacgatgctgttcgtggaaaaatcacttatccggaagcgctttatttctctctggccgcgcgggcgcctgcccatgacgctgcgctggatattggatgtggtaacggtgtatcaaccgggcggctgaaagcatggttccgccatgtagaaggctgcgatcatggtgatgccctgattgagcgggcgcggctgaattaccccgctctgctgttttcgctatccccggcggaaagttattctccccgacgccgatttgacctggtgaccagcgcaacctccttttactggatggaccgggtgcgggtgctggcgaacctgcgcgactggctgaaccctggtggggtgttttgtgcctataaatatgactttccggtggtgtatggtccgttgcgggatttcattgagacggagctggcggacagttggctggattatcgcgatccgcgactgatccagtatgacaatacgctggaactgatggatgcctgtgaccatctggtggattgtcagcgggaggttttcagcaatattcttttcctgacgccgacggagattgcgcaatttttcctctccaccagttatgttacacggtacgttaaagctgaaggcggtgaagattatgcggcccggtttatggcggcagtatgtgaccgggagcctgcagagaaggtggcggtaaattttgatattcatgccttcaccgccacgcttcgttga

SEQ ID NO: 110614 - DNA, 963 bp, Enterobacter aerogenes
atgagaaaaattttatgttttctgctgctgatgctggtggtttcaccgatcgcccgtgccagttgttcattttacagcggcgtgtccggagaagtgccgggatatctgaacttcggcaatgtggttgtccagcgtgatgcaccgataggcagtgtactcgccaccgcaataacaggcgcttataacaacggtaatgccattgcgggatgcaagcgggaagcatggaccgctcgctgggagctgacgcaatgggggacgctcagtggctatggcaacggcgtctacaataccaacctcgttggtgtcggtttacgtctgagtgcagcacaaacgggcaaagtactgccctatgaaggcagttacccctacaacgccggaggctcatgggcatctattcctggcgatggcatcaaaggggagcttatcaaaacgggagatatcaccagcggcacgttaaccgacggtatgctggcgcgcgcctcggtagtgaaccagttttatttcgctaacgttacgcttaacggtacgaatactgtcaccgcagccgcctgctcggtgacgtcgtcgaatgtggatgtcccgctgggcgactatgataagggggagttttccgggctgggggcgatcaccgcctggcatcctttcaatatcgatcttgaatgcgataaaagcgccagtattaatgtgcagattgatgccactcaggatccgtcgaatattgccggggtgatgaagctggataatgccggtagcagcggaacggccagcggcgtggggatccagctctggtacgtgcccaacggtggtacggcggtgcagtttggccagcaaagccactactacacctccccttacggcggccatgaaacggtgcagctacaggcgcgctattaccagacagcgcaaactgtgacggcggggcaggcaaatgccacggcgacgtttacgctgacgtataaataa

SEQ ID NO: 110615 - DNA, 192 bp, Enterobacter aerogenes
atggggtatgaggatgagtttttcgcggagatgcgcccgcaaatagcgcaggttatcgggaaagcggttatgcaactactgcttgaaaagcaagagccgtcaagagtggcgctgatagagatgattcaggtgttgtggcaggaagaccaggtcgatctggcactggatgtgctgatgcagaggaaagagtaa

SEQ ID NO: 110616 - DNA, 378 bp, Enterobacter aerogenes
atgaaagttttattatccattaagccagaattcgcagaaaaaattttggacgggactaaacgatttgagtttcgaaaaggtattttcaaaaatcaagagatcagcattgttgtaatctatgccacaatgcctcttggtaaagtcgttggtcagttccaaatagaaactatcctttccggagagccagagtctttatggaaagaaacgaaaaaatatgctggtatatcaaaacagttttttgatagttactactcgggcagagacaaggcatacgctataaagatcggtgaagtcgaacgctatcaggagcctctccccatctctgacttaggcggaaacattaaaccgccacaatcgtatctctacttacccgcttaa

SEQ ID NO: 110617 - DNA, 1062 bp, Enterobacter aerogenes
atggatagcttaaggtatgaaagtttctctcaatttgatcataacgacccattttttgattcattgaagagtgattacaaagagttccccgattggctcaagaaaaaagccgacgctaatgaatccgcctacatactctacgatgaaaatcacaaaattgaaggattcatgtaccttaaggaaaatgatgatgccgacgacatatgccccaaattgcctcatggtcgtcatttaaagataggtacatttaagttcgagtcaaaaggaacacttaggggtcagcgtttcttaaaaaaagcctttgaccatgctttttcatctggttctgatgacatatacgtcacagtgtttgataaacatgcccacctaataaaactcttccaaacctatggtttttatgttcatggtgaaaaagaaacgcataatggaaaagagtatgtatatgctcgctccttgcatgatgtctacggtgatatcctgttggattatcccagaatattaacagcgaaagtaaataaatatcttcttgctatatatccagaatatcatacaagactattccctgactccaaacttattaacgaatcaccagatattgttaaagacatctcgcatgcaaacagcatacataaaatatacatttgtgggatgccaacagttacccgcatgaacaggggcgatattatcgttatctatcgcacaggagatggacaaggcccagcgcactaccgtgcagtcgcatccactgtttgtgtcgtcgagtcagtaaaaaccattgatgattttcgaaatgaagatagctttgtcgaatactgccttcgctttagtgtattctctgaagaggaactcagagttttttacaaagataagcgttatccctatgttatacgcttttcctataacatatctttacctaaacgtccaaatcgtgctagtctgattgatcaggtcggtttaaacggtgctcgtggatttagatggagtcattttcaacttactgatgagcagttttttaagatcatagagttaggtcgtataaatgaaagttttattatccattaa

SEQ ID NO: 110618 - DNA, 414 bp, Enterobacter aerogenes
gtgatcgccgatgagtcggtgtcggcgctggacgtgtctattcgcgcgcagattattaatctgctgctcgatttacagcgtgaaatgggcatcgcatttctgtttatttcccatgacatggcggtggtggagcgcatcagccaccgcgtagcggtgatgtatcgcgggcggatcgtggagattggcccgcgtcgcgccgtgtttgaaaacccgcagcatccttacacccgtaaactgatggcggcggtgccggtcgccgatccggcgcatcgtcaaccgcagcgcgtattactctctgacgagctgccggggaatatctataaaccgggagaagaaatcgacagcgcgccgttacagctggtagcgccggggcattatgtcgcccgtgagcccgccgatgtactgagccgataa

SEQ ID NO: 110619 - DNA, 327 bp, Enterobacter aerogenes
atggggtttccctcaccggctaaagactacgctgaagggccactgacagtagataaaatttgtggcactggaccaaacacgagaaccatcaaaacggtatcagggtatgccgtgattgacgtatcgctcaaaccgaagcaaagagatacagttctgatcacttacgcggggcaaaccgattttgcaaaaattatgggaaggtcgttaatcaccagggaaggagaagtgattgaaggagaagcgcttcacgacgttgtagttgctggagttgtgacgttcattatcaactgtgcgatcatcgacgatgacgaatgcccagcgatctga

SEQ ID NO: 110620 - DNA, 195 bp, Enterobacter aerogenes
atgagtcgtatgacattagctgattacgccaagattcacggtcaggaaaaaactgccagcgactttggcgttatccaatgcgcaataagtaaggctattcgtagcggacgaaacatttatgtgaccattcaacaagatggaagcgttaagggagaggaaattaggcctttcccaagccataaaaaatcgtcttaa

SEQ ID NO: 110621 - DNA, 711 bp, Enterobacter aerogenes
atggaacccaaaaagaatctgacgacagaacagcttgcagatgcagcacgtcttaaagctttgtatgagtcaaagaagaaagcgctaggcgtcacccaatactcaatcgctgatgaactgggcattacgcaaggagctgtagggcactatcttaacgggagaaacgcacttaacctcaccgttgccgctgcatttgcaaagattctgcaagtatctattgctgatttcagcccttccattgatgaggaagcgcagaaaatattggcaaatgagacatccaatgtgaagctggtcggtccatataagcacggaaaggagtatccattgatcagctgggtgcaagctggagcctgggcagaggcaattgaaccttactccgtcggcgagatcgatgaatggttcgagtccgatacaaaggtatttggtaaagctttttggttgcgggtcgagggcgactcgatgacagctccaactggccttagcattcctgaagggaccttagtcttaatagatacaggccgggaagctataaatggcagcctcgttatcgctaaaatggttgatgcaaacgaagcaacattcaaaaagctcattatcgatggcggccaaaagtaccttaaaggactcaatccggcgtggccactgaaagaaatcaacggtaactgcaaaatcataggtgtagctgtgcaaaccatgatgcgcttggtttaa

SEQ ID NO: 110622 - DNA, 1113 bp, Enterobacter aerogenes
gtgccaagatccaggctaccttttgaaggcacccacatggcaaatgcgcaatacgagaaaggtaaaatagttctcgaatattcaaaaaatcaagtcaaaaaggctggcgagtgcatacgtaaagataatggggatattgaaaaagctatcgaaataatccagcaatatcgagcggcacacctttatccacttatgattattaaaaatctcgtatggaaacatgctcagaaaataaataaaaacgctataattgctcgtcgtttaaaacgacttcctactatcattgataaactaaggcgtaaaacccttgatggcgtaaaccctaactccattgccgtcacaagaatgagcgacatcggaggttgtcgggtcatcgttgaaaataggactcagctactccttttagattcttcattagataaaagccgtacaactcataaatcaaaggttaaggattatattaaaaacgctaaagctacggggtatcgtggaatacatcgtgtctacagctgttacgacaaggatgaagcacatcaatggaagggcttcgacattgaagtccaactaaggactaaacttcaacacctatgggcaacaactgtagaggtagtagatttatgtgaaggccgtagcttaaagacgaatccatttgagtcaaacccttcatggatagatttttttaaactaatgagtgagtttattgctgatgaggagggttttatttttttatcgcaaaacgataaaaatataattaagaaacgacttatcagcttaaatgataaattaaacgccattaataaattacgttcttttaatagaattttctctgataaagatcttggagtttcaaagctcaaagagggttacgtcattattgtcatgagaaataacaaggtttattacagaccattttcaccaaatcaaaagcatctagccgttgctgattactcaaacatagaaaaagatgaaaatgctaacgttttatttgttgaaatggacgacttgcaaaaactttcttacgcctatccaaactacttgatagatactaggtcatttattgaaaagtatgacttatataccagcactaagtattggtccaacccaaggcaataa

SEQ ID NO: 110623 - DNA, 480 bp, Enterobacter aerogenes
atgaacgtatacgaaatggaagggtttctgcgcggtaaatgcttaccgggcgatctcaaggttaatgaatcaaacgctgaatacctggtaagaaaactcagagcagtaagcgagttacaaggcgaagtaacagcgttagtagcgaccctgggaaaaagccgtgaggtgtctggatgccctgaaggtattgatctgcaggactgggtgaagaaactggcggcggagaacttggcaatcaaggcaatgaacgattgcctatctgaggaattgcgtggctatgagtctgatggcgcatttgagggaccgaagatgcatctgctgtggtggcaggtcgaattccccgccaccgaacgcattgtagccgaagctgaggcgtgtggagttgagaaagctatcaattgcattgtgcaaaccattacgcctaatcatgaaacgatactcaaagaattagcccagcagctacgcgaggggggcaaatga

SEQ ID NO: 110624 - DNA, 1020 bp, Enterobacter aerogenes
atgacttcagagagcaatcgaactggtgctttaggcgtaaactatgtagagggagttttacttgagtgggggtggggttttcaaaaaatagatcaagagaatgatgatggttttgatgggattatttatattcgttcaaaaaaagtagacccggctaagcctgacgatagaagaagacagtactgggaagggactggaggtttaatacatgtgcaaattaaaacaggtgatgggtatataaaaaaacaagacaagcaggaaataactcttggtttgaataatatacctgaaaagagattgttatggaaaaaatctgccttgccttgtattttaatttttgtttctagggatgataaaggtcattattattcgtattggtcagatttgaagtctgattcaacttatgttagtgacacgagtaataatgttaaggtttttcgaaaaaatagatttttcaggtcaccggaatgcaaggggcctttgcgtaagctttcacggtcttcacacgggtatattaataagccagtcattgatcttgctaaatatgactctttacatggcttaattgaacccaaacttcctggtggcttaaatgtaccgttaaaatatcgagcaattgaattttacaaagaatggaaaagaattggcgcagtcaatccatgcttcggaaatgttattattaatcggactggatggtctcatattactcgtaaagatagaccaatgggccgcatagaaaccagtttttcactcttgccatatgcatcgagaataattaacgatgttacaagttggcgtacgcttacttcaataagaaaatatgataaacgccaggataaacatattacttacgttgattttattggtttgacagcaaaggttataatcaaaaatagaggttcaactgaagtaatggtggttttgaaaagagaaactaaatttttagatggagatctaaatacaaagcctatcaatagggtgtggttctacacggtttatgaacctggacgaggaaagtaa

SEQ ID NO: 110625 - DNA, 837 bp, Enterobacter aerogenes
atggaactggctgatgagatgcttcactggcttggtaaatctgatgaattgcttaaactcgtggatgatgatggcatagtctgcctgccagcacttcgcggggaaaaagccgctgcttcccgcctggaggccatgctgcaggctgcctacgaagaggactggtcatccagtgttctcagtgatctgcttgccagcgttggtagtaagagccttgaaacctggctgcgggataaattctttgaacaacactgcaaactcttccagcaccgcccgtttatctggcaaatctgggatggtcttaaagatggattctcagtactggtcaactaccataagctcaattaccagggtttagaacgcctgatttatacctatcttggggactggatccgtactcaggagcacggtttcaaagaaggcattgatggtgcagaaagtcgtttgatggcggctaaaaacctcaaagatgcgctggaagccatccttaaaggagatgccatcaccggcaagagtggtctcgacatttttgtgcgctggaaaccgttacacgaacagcctatgggctggaacccggacttaaatgatggtgtgcgccttaatatccgtccgtttatgcaggcaccggatgtggataagaagggggccggtgttttacgcactaagcccaatattaagtggggtaaagatcgcggcaacgacgttgaatcggccccctggtataatctgggcctgcagtatggtgaaaaagagggggcgcgtatcaatgaccaccatatcagtcttgcagataaacaagctgccagagacgcacatgcaaataaggaaaatcacggatga

SEQ ID NO: 110626 - DNA, 135 bp, Enterobacter aerogenes
atggaagatccattgcgttggatcatttgtgtatggttttgggaggccgttgggatacttttcttctgctacttcagaccagtattcaaggtcaaatggaattttaacaagagtggcattagtgactttaattga

SEQ ID NO: 110627 - DNA, 369 bp, Enterobacter aerogenes
atgtctgcaatggaaaatctgttcgcccggcttgggcgttcaacgttccgctctcgtttccacctcggggtgaaagagcggcagtattgttatgataaagggccggagattatcgacagccacgcggcggattttatcgccaaacggctggccccggcgcagattgctaatgacggcaagcagacgccgatgcgcgggcacccggtatttatcgcccagcacgctacggcgacctgctgccgcggatgcctggaaaaatggcatgcgatcccgcgcgggcgggaactgagcggcgaggagcagcgttacgtggtacaggtgattcaccactggctggtgatggaaatgaacgcgcttaccaaccgttaa

SEQ ID NO: 110628 - DNA, 558 bp, Enterobacter aerogenes
atggaaagctatgagcgaaaggtagaagttattcatggtgaggtcattggaacgaaagacttttctcaacttacgctgacatggcttaaacctcgcgaagagcttgaaaacgaatggcagaaagccgacccggtgggttacagccagcactcatcgatcgttatgagcgaatttgccccatcccatgctatggcgtttgacctggcaattggtccatgtcgttcatttgactataaagcgggtaagttctgggaagatctactgcatcgtgcagactggcgcgatcctttgaataaataccctcaggctaaagaatactaccagaatggaaagttaaaccttcaggaaacgaaattctacatgaacaagcctgacgagatattgccgaaaggggattttggggtagtaaacgaatttaacaatgcgaccagggtgaggccatcccgcgacctggctgccggtaatcaggaagtggcaaacctgcagtgggagatgccgaaacccaaaagtgacagggaactgggtatcggaaaccaacggtcagcgctcgatatctag

SEQ ID NO: 110629 - DNA, 1392 bp, Enterobacter aerogenes
atgaccgaagaaatcactccaacagctgattttagtcccagcaaaaggttttttgtaagtatgctgactagggatatagacctgaacgatgccatcctagatctccttgacaactgtgtagacggtgctttgcgtactaaaaaaaccccaccaaatgcaccaaagccttatgacggcttttatgcaaaacttacaataaataaagacacattcattatcgaagataattgcggcggcattcctaaaagtttccgtgaatatgcatttaaaatgggacgtcctcaccaaaaagaagaagaaaatgaaggtaccgttggcgtttatggcatagggatgaaaagagccatattcaaaatgggaagggattgtttaatacagtccaataacccagatggcgcattcaacgtaactattactcctgaatggattgatggtgacggatggaaaataccaatgattgaaagcgccttcgataaagacactccaacaggtacgaccataaggataaaaaaccttcattccaatgttgcacaaaaattcagcgaaacaacctatctcagcgatctattccagcagataaaacactctctgtcttttattattcaaaaaggttttcacattgaattaaatggcgtccctgtcgaacataacccaataaatattataactgacaacacacaaatagagccgtatatttacaaagccatcattgatgatgtcgatgttgatttagttgtaggtttctataaaaacttagaagatgaaaatgatgatgcattagaaaaaagaagttctgatgatgctggttggactatcatttgcaatgaccgagttgttctgtactgtgacaaaacacatttaacgggatgggggtttgccaatgtcccaagattccacacacagtttattgccatctctggggttgttcggtttaccagtaaaaacccagaaaaactacctataacaacaactaaacgaggtgtcgaccttagttccacactatacaatgatgttcgtaacaaaatgatggagggcatgatgtacttcattcgctttactaaccagtggaaaggtgaacatttagaagaaggtaaaaaactacttaaatctgctcaggtatacgaagcccagactttatttgataaggacccggcaacaactccagaggacaaaaaaaataactggtcaaatcctaatagaaacaaaaatgagtggagatacacacccaagttacctacaccagtgaaaaaaaactcaagcgtgcgaattgtattttcaagagaaaaagaagatgtgagaattttatcttcatacttatttggacatgaaaacgcaagtgcttccgaagtaggtatgtgctgttttgatacgatgatcaaagaggtgaagtga

SEQ ID NO: 110630 - DNA, 990 bp, Enterobacter aerogenes
atgtctgggcaatacattccttatcacctaaggcataataaatcgattgatagagagattttcttagaaagtctaaaccttttatcaaaacgattaaacattcaagaatacacctatataggctttggcggaccaatgcttgaagattttaggatcatgcataatcgtatcgcattatctgatatgatctctcttgaagaacaagaagctacacatatccggcaagtatacaacttaccctataattgcattgattgccgattgatatcggcacacgattttataattgattataattttgcaaaaccctctattacatggttggattatgcttcaccaaaaaaaatccaaactgatttagatgatatacaacttctaagtactaaagtaagttcatacgatattttgaaggtaaccttccctattaaccccagctcttactatcaacgtagagtcggagaatctttagatgattttaaagagtccttcctgcagtcgttaaaatcattgcttgggaagaaatatcttgactttaaccttcagatatcaaatgtagatctctctgagcgtaaaattaaagctctattgatacgaataattacaaatgcctttaaatcagcagttgaacgaggtttgtctggtcgtaaagatagcattcagtattatccattatcattaaatcaatataatgatggaagtcatactatgctgacaatatcaggcttctttgcctcggaaatagaatatactgagttatctcaagcatgtaatttttcggattggaaatttttctcctctaattgggagcatattcaagaaatagccatcccgacgctaacagttaaggaaaaaataaacttagacagtaaactgcctgatgaagaagcatatcaggcagcagctgaagagtttgctttaagcgaaagcgaacggaataattacttcaaatattatagattataccctaacttccaaagaatcatggtgtaa

SEQ ID NO: 110631 - DNA, 1155 bp, Enterobacter aerogenes
atgaatgtaatagatttgttttcaggtgtcggggggctcacccttggtgcaacccgtgccggatttgatgttaaaatggctgttgaaattgataagcatgcaatagagactcatgcaattaatttcccaacaagcttgcacgtccaggaagatgtttctttgctgaatgcagataaaataatggagcttctaaaagataatatttctatacacggtattatcggtggtccaccttgccaaggatttagctctataggcaaagggaatcctgatgatagcaggaatcaactatatatgcatttttaccgtctggtttcagaattgaaaccattgttttttttggctgagaacgttcccggtattatgcaggaaaagtacgcagaaattagaaatacagcttttagccttgtaaatgatgattatgatatccttcaaccaataaaagtaaaagctgctgattatggtgctccgactgtacggacaagatattttttcatagggataaagaaaagtttaaaactcgatatttcacatgacattttcatgcccaaagggattgcaaaagttacagtaaaggatgcgttgtatggattgccaaacataattgatgctagctggcaatcagagtctgaaagttggaggccaatagtaaaagataaagatggtgtcttttacgataagctgtggggagagattccagaaaatgttggggataaagaatcaatcgataaattacaaaaaaatattatatctggatgtactggaacgttacatagctctttagttcagggaagatatgacgctttgtcttttggcgaaacggataaaatatcaagatcaactaggttagatcctaatggtttttgtccaacgttgagggctggcactgcaagtgacaaaggtagttttcaggcagttaggcctattcatccctactatccgagagttattactcctagagaagccgcaagattacaaggttttcctgattggtttagattccacagaactaaatggcatagttttagacaaataggaaacagcgtatcacctattgttgctgaatatatattgaaagggctatacaacacattaaagactagtgtggtacagcccaatgttttacaccatgattctttggaagttagggtataa

SEQ ID NO: 110632 - DNA, 207 bp, Enterobacter aerogenes
atgactgagtgcacaatggtttttaactctgagacggtgcgcgccattttcgaaggcaggaagacccaggcacgacgtgctatggtgattcaaacagatcatttagaacttgggttacgccgggtgactgctatgactaaactggcgctggggagaccgcctcaagcctcaagtgtgatgttgattagttgtatagcaatttactaa

SEQ ID NO: 110633 - DNA, 573 bp, Enterobacter aerogenes
atgggctggtcttcgttggttaggataaccattggtacttttttgttagctgggttatcgttttctacatacgcaaaaaattgtaaaaaaggcataccatgcggcaactcctgcattgctgcgtggaagacatgcggtggtagctctcgcacctattctacttacaataatcatttatactcttatccatcatcatcatcaattaagagttctcatccaaaatcatcggggcaatcaccatcacgggcaatagaaaacaaaactccgatttcaacaactaaaacttatctttgcaagtatgctattgctaccgtacaaaacggtaaattaggtgccttacgaattatgggtaatgccgaggtaacgttgtatgtcgatagcttcaaagctaaccgtttgaacggaacatacctgctttcgccaaagctgaaaactgacggtaagttgatgatggcagatgataaaagtaaagtgtacgtctatgactcgtcgctgataaactttgcaattagtgatcgtatagcaagaagtacagagcagtgggatcgttgtaaactggtacagaatcaataa

SEQ ID NO: 110634 - DNA, 498 bp, Enterobacter aerogenes
atgaataaattatttatagctttaacttttttactaactcctattttcgcaattgctaacggtgctgggtacggcaatactaagtgggatatgaccccaacacaggtagttgctgctcaggggaatggtgcgcatctgatatccccagaaaagtttaaggggagttttgggaaggtgcgaattgataatgtatcgattggtagcgatttgtataccgtcacattcctatttgataattctgatcgcctcgtccaaacgaacgttgccagcaatgaaaagaaaaatgaaggggttattgctcgtcaatttggtactttgaatcaacttttaacacagaaatatggtaaacctgagttctcagattctgataaggctacatggaagttatcagatacaactattgagttaagtaaaatggttatatctggaatcatggcgcagaccatcattcgctatattcccaacagtagagttgtgagtgatacctctaatctttaa

SEQ ID NO: 110635 - DNA, 198 bp, Enterobacter aerogenes
atgaaaaagctgattttgttgggtctattgattctcagtggtcaggctatggcggtaactgtaactctgccgttgagtgatgaaattgatagcagtgatgggaaaatctgtatctatgcagacagccagaggacagaagaggcagaagtccctaaagggtaccgctgcccgagtatgaagacgtttattgatgattaa

SEQ ID NO: 110636 - DNA, 180 bp, Enterobacter aerogenes
atgaaatattttaccgtagaacaggtagtcgaagcattaaagactggcgcagcacgccgccatcaaatttatgacaattttgctcaggcacggtatcgcggatttacagaacgcgcagccctatttaaaaccgcgctcgaaattttcgaccagtggaagaaggagaacaaaaaatcatga

SEQ ID NO: 110637 - DNA, 1575 bp, Enterobacter aerogenes
atggaacaacaaacaacaataaatacagtatcagctatctgtggtgcagggaaaagccacgcttttattaatcacatcaataattttccgtttgatcgaaattacatttattgcgtacccacgttggcattagcagatgaactcagcaaaaagatcccctcagcgttaaacctgacgtccaacaacgacacgattgaatcaatcggtggtgaaattgctgaggctgttcagcaatacggcgcacggcgaaaaaacataatcatcacccacaggggattaaaaatcctgtcgttgatcatcgaaaacagcgaaaacggtgaaattatccgcagggcgttggaaagttggatcctggttattgatgagacaactgaaccgtttattagcggaaaggtgatcccgcagggggaaattgcagaatcggtaaacatcctgaattatacaacccaagcagacgtgttcgaaaaactcagagatgcaaaaaccacccgaaaatccttgactgttagcgatagtctggcggtttgtgagctaatgaatgaagtgtacatctatagcacagagatccaagaactctattactccctgctgcacggcggcagtgtagagggggcgtttaatactgatctcaacctgtttacgcaatacgattacgtctgcctgagtcctgtatacgaaattatccccgcgtttcgtcaggtgcactgtctgggtgccagcattcaggatagcccgttctgtgtggttggcagagaggtttttaattggaaattccggtcgtctccagccgcgttccagccgcctattgagcgtcaggcacacgcaaatcaacacctgatcacggttatcagcggtgtcagcgacaaccccggattgacggctcacggcgaggacgagtgcaaattgttcaagagagtttgcaatgcattccaagagaaactcggcaacgcagggtttatttgcgcaagcaatcacaacaaacctacgggcaatttcaaaaaagaggctgatcgcatcttccgtaacggtgatcgtgttccgttcgtatcatccggcgtcaacctctacgctgggctgcttgataaaagagagatggggacaattccggctgaaaaacgggccgtatacgaacagggattctgtcatgctgtctggctgggggttgccctcctgagcacgacggcaaaaggccaaatcgggcggtatattgaatccctgggcggcaaacctgaaccggtgatcaaaagcatcgaggattttcagacctgtgaagccgcttatcagatgttgatgcggtgccgggccaggcggtttgataacgataaaccgatctacctgtacgtgataaaccagtacatcgccgactatatctgcgatcgctacctacctggagccaaacgggagcacctcaacatctcccacgtatcagaatcaaaagcgcgtagggctgatgttgaccgaaccatctggaatctgtatcaggatggggtgaagcaggtggtaattgcagagacggtaaaggtttccaaaagcaaagttgaaaaaacaatcagggcatttaaaaaagcagcataa

SEQ ID NO: 110638 - DNA, 792 bp, Enterobacter aerogenes
atgcgtctttcatactcgattttgccttcatttttatgccttgcctcatcttatgcctatgctgcccaagagcatgccccggatgcggcgcaggcaaacaaccctctggcgaatatgacagcattcaatatgcagaactattacatcggagatgtcagcggtacggatcaggatgccaatcagttctggttccgttatgcgcaacctttttcactaggtgacagcaaatggctgctgcgtggttcattaccaattaatacctatccggttgcgccgaccggggggcataaaacaggcttaggtgatctgaacttatttgcatcatggcttattgataccggtaatccggcagtgagttttggtttcggtccacaaatcacggcgccgactgctactgaagatgctctgggaacagaaaaatggtctgcgggtctggtcaacgtactcttcgatgccagttcgccaaaattccagtacggttatctggcctcatggcagcatagctttgccggagaagacaaccgaaacgatgtgaatctcggtacttttcagccatttttattctatcagttgggtggcggcacttatctgcgagcagcacctatctgggtctataacttccagaatgacagctacagcgttccgctgggtttaggtattggacaggttatcaagcaggataaaaccgtctacaacttctttgtggagcctcaagggtcggttgcggaccgtggtccaggacaacctcactggcagattttctttgggttaaacctacagttcctgaattaa

SEQ ID NO: 110639 - DNA, 1980 bp, Enterobacter aerogenes
atgagacttaagttgatcgtcaaaagtcttgcactggcagggttactttcctccactgcactgacacctttgttcgcgcaggaagcaccaaaaggtgccaccgcatcaacaaagcaagccaacgatgcactttataaccagcttcctttttctgataacaccgatttcacgaatgctcacaaaggctttatcgccgctttacctcaggacgtgattaaaggcgagcagggaaatgttatctggaacccgcaacagtatgcatttatcaaagaaggggaaaaatcccctgacactgtaaacccgagcctctggcgacagtctcagttgatcaacatcagcggtctgtttgaagtgactgagggcgtttaccagatccgtaacctcgacttatccaacatgaccatcattgagggtaaagaaggtattaccgtcgttgacccgctggtttcagcggaaacagcaaaagtcggcatggatttgtacttcaaaaatcgcggcaataaacctgttgtcgccatcatttacactcacagccatgttgaccactacggcggcgtgcgtggtgtggttgatgaagcggatgtgaaatccgggaaggtaaaagtttatgcgccagcaggcttcatggaagcagcggtcgcggaaaacattatggcgggcaatgtcatgagccgccgtgccagctatatgtatggcaacctcctgaaacctgaagccaccggccaggtcggcgcgggtctgggcaccaccacctcagcgggtaccgtgacgctgattgcccccaccaacatcattgaaaaagatggtcagaaggaagtcattgatggtctgacttatgacttcatgctggcaccgggttcagaagccccgtctgaaatgctgtggtatatcgaagagaagaaactcatcgaagccgcagaggatgtgactcacactctgcacaatacttattccctgcgcggcgcgaaaattcgtgaaccgctgccctggtcgaaatacatcaacgaagccattgtgcgttggggtgacaaagccgaaatcattatggctcagcaccactggccgacctggggtaacgaaaacgtggttggcctgctgaaaagccagcgtgacctgtatcgttatatcaacgaccagaccctgcgcatggccaacgaaggcctgacacgcgatgaaattgcagccaacttcaaactaccggacagcctggcaaaaacctgggctaaccgcggctattacggctccatcagccacgatgtgaaagcgacctatgtgctgtatctcggctggtacgatggcaacccggcaacgcttgatgaattaccaccggaagaagcggctaagaaatttgttgaatacatgggcggtgccgatgcgattcttcagaaagcgaaaaccgactttgaccagggtaactaccgttgggttgctcaggtggtaagtaaggtggtgtttgccgatccaaataaccagaatgcgcgtaacctggaagcggacgcactggagcaactgggttatcaggctgagtccggcccatggcgtaacttctacctgaccggtgcacaggagctgcgcaatggtgtggttaaaggcccgacgccgaatactgcaagcccggataccgttcgtgcgatgacgcctgaaatgttcttcgatttcctggcggtacatatcaacggtgaaaaagccggtaatgccaaagcggtatttaatatcgatctcggcagcgacggcggcaagtacaagctggagctggaaaacggcgtactgaatcatacggcgaatgctgaagctaaagacgccgatgccacgattgctctgaaccgtgacacgctaaataaaatcatcctgaaagaagaaactctgaagcaggctgaagataatggcgaggttaaggtcacagggaatggtgcgaagctcgatgagatgttgggctatatggacaagtttgagttctggttcaatatcgtcacaccataa

SEQ ID NO: 110640 - DNA, 1137 bp, Enterobacter aerogenes
atgaaagccttcacccgaacgctaaaaaccgcgatgccggccatgctgttattcgcatcattaagtggagtcacgacaatgagttatgctgattcaaccaatcctaatgcccctgtgtccatgacagataaatgggataaaacgttcgccgagagccagaaagtcgaacatcgtaaagtctcgttcccgaaccgatatggcatcaccttagtgggcgatctttacctgcctaaagaccgtggcgatcgcaagctggcggcgattgcggtcagtgggccatttggcgcggtgaaagagcaatccagcggcctgtatgcgcagacgctggcggaacaagggtttgttacccttgcgttcgatccttcttacaccggggaaagcggcggctatccgcgaaacgtcgcctcaccggatatcaacactgaagatttcagcgcggcggtggatttcttagggctgcaaaaagaggtggatcgcaaccgtatcgggctgctcggtatttgtggctggggcggcatggcgctgaacgatgccgcgatggatacccgcgttaaagcggtggctaccagcgtgatgtacgacatgagccgggcgatgggccatggtgtgggggatggcaaagaccgttattccaccgccgaccgtcgtgctgttctgcaatatctgaatgaacagcgctggaaggatgcgcagagcggcacgttcgcacacggtgctcatgatattagcgtcgacagcaacggcaaggtcagcgcgggcgagcgcgttctgccagaaacgctgccggcaaatccacatccggtactgaaagagttctttgactactatcgcatgccgcgcggcttccacgaacgttccgttaactcgaccggggcgtggacggcaacgatgccgctatcatttatgaatatgccgctgctgagctacgccagtgaaatcaccatcccgacgctgattgtgactggtgaaaaagcgcattcacgctattttgctgaagatgcttacaaggcggtcggtagtaaagacaaagagctggtggtggtgcctggggcaaatcacgtggatctgtacgataacgtggccggaaaaatacctttcgcgaaattcgaacaatttttccagaccaaactgaaataa

SEQ ID NO: 110641 - DNA, 1128 bp, Enterobacter aerogenes
atgaccctgtgcgtgtttgtgctgattgcttctgaatttatgcccgtcagcctgctcacgccgattgcccgcgatttaggcgtgacggaggggttggctgggcaggggattgctatctccggcgcactggcggttctgaccagcctgacgctttcaacgctagcaggaaagatgaatcgtaaattcctgctgctgggaatgacggttctgatggccgtatcggggcttattattgcgctggcttccagttatctgatgtatatgatcggtcgcgcgatgatcggtatggcgattggcggattctggtcgatgtctgcggcaacggcgattcgtctggtgccgcagcaacaggtcacgcgtgcgctggcgatttttaatgccggtaatgcgctggcgacggtcgtggccgcgccgctgggaagctatctgggtgccacggtcggatggcgaggcgcttacttgtgcctggtgcccatcgcggtggtcgcctttatctggcagtgcatcagcctgcccagtatggatgcgaataaaagccgcacgtcacctggcgatgtattccgcatacttagccgccgcgtggttgcggttggcatgctggcctgcggcctgtttttcatgggccagtttacgctatttacctatgtgcgcccgttcctggagaccgtgacgcgggttgattcctcaggcttgtcgttgattttgctgattatcggcgtagccggttttatcggcacgctggttgtttcgacattcctcaacagaaaattctaccctacgctgatggccatacctgggttgatggccgtcattgccatcggcctgatgctgaccgggcatctggtctggacggtttcgttgctgttagggctctggggcatgctggccaccgctgcgccaaccggatggtggacatggattgcgcgtacgttgcctgataacgcagaagccggaggcgggctcatggtcgcggtgattcagctctccatcgcccttggatcgacggcaggaggcatcgtgtttgaccacctcggttggcagagcacgtttgccatgagtagcgtgctgctcctttgcgcgggcgtactgaccttttttaccgcacgccagaaggccggtgcgcgttaa

SEQ ID NO: 110642 - DNA, 501 bp, Enterobacter aerogenes
atgagcgcatttgataaagaaaaagatggtattcggcagacaagacataaaccggcggaattggatgccattgaccgaaaaatattaagtgccctggcagaggatgcaggacgcagctacacggaattgagtgagattgtgaacttatcagccccggcggttcacgatcgcgtaaaacgactgaagcgcgatggggtgatcaagggtaccgtggcggtcctggatggctgcaagctgggacggacgctgttaacgtttctggttatcgacaccagtagctatcaggcgacgcgcgcccttttgcagttcaccagccgcaaggaggtggaagaattgcataccgttgccggcgacggctgcgtctttatcaaagtacgcgccgccgataccgaatcgctggaaaatttcctgatggagattcagagccttgagggcgtacgttccgtacgcagctatattgcgctttccacttttctggagcgcgggccctcgccggattaa

SEQ ID NO: 110643 - DNA, 1173 bp, Enterobacter aerogenes
atgcctatcgcacttttcgccctcgccgtgggcgcatttggtatcggcctgacggaatttgtcatcgccgggatcctgccacaaatcgcagcagaatttagcgtcagtatcccgaaggcgggaatgatggcgacgtcatacgcgctgggcgtatttattggtgcaccgctgttaacgattattggcgcgaggatcccccgcaaggccatgctgattacgctggcgggtatttttacggtcggtaatatcattacggccatcgcgccgacgatggcgatagcaattgtcggtcgtattattacctcttttaatcacggtgccttttttggtatcggctcgattattgccgcatcgctggtggcacccggacgccaggcaagcgcaattgcctttatgttttcggggctgacgttagccaatctgcttggcgttccggtgggtacgtggcttgcgcaaacctttagctggcggctggtattctggatcattgctggtatcggggtgctgacgatggcaagcatagccgtgctggttccgcatattgcgaaaggcaaagctattgctttacgcaacgaactgagagcctttgttgacccgcaggtgctgctggtcatggggatcacgattttcggtccggccgcctttttcacctcgattacctatattgcgccaatgatggtgcaggaggccggtttctcctcaggcggcgtggcagggttaatggtgctgtttggtctgggacttgctgtcggtaactggattggtggacgcttcgctgaccgctctctgtttggcacgctgttcgttaccctcgcggctcaggggttggtgctgctggtcttctgggcgggtgttgaaagccagtgggttgccggcatctcagtcttcctgatggcggccttcggcttcgcgacggtctcaccgattcagaaactggttatggagcgcgccagccatgcgggagccccgacaatggcggcctcggtcaatatcggcatgtttaatctgggaaatgcgctgggggcatgggccggtggggtaaccattgctgcgggttttggactggcttctccgaactgggcgggcgcaattctgtccttcattgcgttgggcctcgctgttcttgcatggcaaagtgcgcgtaaaggttatattttgccggtacttgaataa

SEQ ID NO: 110644 - DNA, 393 bp, Enterobacter aerogenes
atgtacgcaaaatcctttatcgctctcgacgggaatggtcgtctgaccggtgcccatactgcgcagaccgccccttacgatcgttatacctgccacctctgcggtagcgtgctgcaataccatcctgaatacatcaccgaacgcccgtggtttgaacaccggcccgacgatctaacggagaatgggcgacagcactgcccgtatgtaaatcctgtggaaaaggaagtaagacgaattcttaagttgcgccgttacttggcggatgctcaacccgtgatactcaggactgactggcactgtagcgcctgcggcaacaattaccacggtgaacgttattgcatttcatgtggtactggcgaattgagccatatgccggaagaggcctcacgatga

SEQ ID NO: 110645 - DNA, 570 bp, Enterobacter aerogenes
atgcaaaacaaacaacgatgggagccagactggtttctacagtcactcctgaacaaccatatcgacaaactggtagagcgctattcctgcctgctggcacttcgaacagatctgttttaccaagatcataccgctaagtttttcctgcgggatcaccggcaactcgaaagggatctccgaaagctggtgaaccgtatgatgcaactcgaagcagtggtcggttttttctgggttatcgaatggaccgaagaccaccactaccatgcccacgtcgtgttctggctggatggtagtaaaactcaaaatacctatccctgggcgcagcaagccggtttgttctggagcggtatcactgctcgggaaggctggtatcaccgatgtgagtttaaagagcattacgaggccaatatcaacattccggtacgttacagcgacccggacagtatcgacaacatccgtcaggtactgatgtatatgaccaaaattcaacaaaaagaggggatgccgttgtttggttgcaacgaagtcccaccccgcccaccgacaggtcggccacgacgcagtctctga

SEQ ID NO: 110646 - DNA, 750 bp, Enterobacter aerogenes
gtgaaagaacgcggaatgatttttaacagtgagatggttcgcgccattctcgacggccggaagacgcagaccaggcggatcatgaaggtgcagcctgagccatcgaaatcgcgaccaggggatttttggttttcatcgaaaaaattagaaagcatggtgcacatttctgactttgcgccgggtaactcacctattgccgattatcaccttttcattcaggagcattgctgcccgtttggtgctgtcggcgaccgcatctgggcgcgtgaaacgtggggagtagtcagccacgaattggatgaggatggtcgaatccaaccatggacgccagaccggccggctacagatattcacgaaatgccgtttggcaacggctattactctggtcacgccatttatgcagctgatggcgatttcacctggggtgatgacgatggttatgaagatggtcgttcgtgctggaaaccatctatccacatgccgcgctgggccagtcgaattctgctggaaattacagacgtacgggttgagcggttgaacgctatcagccaagaagatgcgcaagctgaaggcatggagcttaccggatggcggccaacatactctgacccagatagtggcggagaggtttggactccatatgacaactttgcgcgcctgtgggagtccatctacggcgaaggaagttggaaggtcaacccttgggtgtgggttatcgagttcaagcgcgttgaaggcggtgcagcatga

SEQ ID NO: 110647 - DNA, 171 bp, Enterobacter aerogenes
atgaaagataccattttaggcttaataatcatgattatcggaggcgcaggatggttaacatctgttatctctgatgcgtctaataatcgttttggatgggtacttgttgatgtgttagttttcccattaggagcgataagaggaatagcaatgtggtttggatggtattaa

SEQ ID NO: 110648 - DNA, 570 bp, Enterobacter aerogenes; identical to SEQ ID NO: 97259

SEQ ID NO: 110649 - DNA, 561 bp, Enterobacter aerogenes
atgcctgtaaacgagaggattaacgcgacatccgggacacgtattaaacccggaggaatgaggcttataaccactggtgagattgggttagcaagaacgctattcagctacggtctccggtacaatacagtgtggattcatcgggaaagttatttgccattcaatctacagcctactgatattgctatgagccctaatggcgaaatgtggtttagggaagacacctgctcccatgatttttcaatggaagttgatgtgcagaaaaaacatagattcatgcatgagttaatgcatgtatggcaagcgcagcacggaatgtttgtcagaaccagagggttgttctcccgatttgctgattacagttatagtttagacaaggaaaacatacgacattatagcttagaacagcaggcttcattagttagtgattactggttgttgcaagcttacggttttaaaaattatctgtatctgcctgcattacgagattatgatcataaagaatctgactatacattgcttcaaaaatataaattagttatgaagggatttccacaatga

SEQ ID NO: 110650 - DNA, 1266 bp, Enterobacter aerogenes
atggatcacaagagggtaaaaccgaaggataaacgcgatcgttatctgattctcgatccgtgtggtgtgtacatggtgcgaataaccgtacctgcgtacatgtctgcatacttcgggggcaaaatgtacttcatgaagtcaacggggactcgtgacattcgccaggctcgtctattccgggatgccgtagcattggaatggtacaagttgcgcaatcagcttaaaccagttcgttcaggttcacgggttgagcagatccttgatgaacttcgaggtatcagtaaacaggcaaaggacactccacccgcacaattgaactcccccgctcaagtgcaggcttgcccttctcttctggtaatgagggatcagtacattctccagttcagcgaaaagcgcaaacttaccacgctatcgaagacaaacaaggccgtcgaggtactcttagcacatctgaaaaaacgcgatgtgcagcttcgtgacattaaccgaacaaccgttactggctggttggataaactgaaaagcgagaaagctccccagactattcaaaactatatcagcgctctggctcaaatctgggatttagcccgtaaccgatatcacgacgcaccacaggataacccctggcgtggtcatgggttggaggcgaaaagcagcaaagtaagctatgaggtttttactcatgcagagttggcgaaagtctttgccgcgctagatggtgacacagaaatgcaggcggtgacgcggatagggatgtatagcggcatgaggctgaatgagatttgctccttgcgtgtagaaaatatccgtaggattgagggcatcctttgcttcgaggtcacagaaggcaaaaccaaatcagcagcgcgtattattccggttcacaaccttattatcgatctggttgaagcccttctccagaagccccacaatggctttcttttctatcgggcgtcaatcactgaccgtgcagatggaaaacgctcaacgtggcatgtaaaccggtttacaagagcaaagcgtaaggctctgggagttgttgaatcagaaaggaaggtatttcactcactacgccatgaggtggcccagcagcttgatcgcggtggggttgatgggaaaaatccagtccccgaagaccgtatagcccttcttttgggccatgagcgcggaaaaacagagacgttcaagacgtactcaaaaaatgcagcatcaccagttgagctatcaagatatgttgagttgatcaattacgatattgtcggatga

SEQ ID NO: 110651 - DNA, 231 bp, Enterobacter aerogenes
atgagcggtaaagattataacgtgtacaagggaagtgatggtgtctggcgcggtaagaggcaggatgcaacgcgggccagtgtcactggcacaacccaaagagaagtttttgaacaagtgcgagagttagctataaagaatggttcagaagtttctattcatcggggtgataacaatcaaatccgcgacaagaatagttatggtaatgacccgagaaaaaccaaaggttaa

SEQ ID NO: 110652 - DNA, 210 bp, Enterobacter aerogenes
atgaaattacaacttgtaggtaaaggcaatctgccgctactgacgtttattctggatggctgttctgatgacaacattcttaacctggcgagtcttgcacgaaagcttgagtgtagtcgttccagcttgcttgaccgcatccacatgtatggattcgatagcgcagtgagacactacctcaacgagaaacgaaagaagacgattaactaa

SEQ ID NO: 110653 - DNA, 1038 bp, Enterobacter aerogenes
atggctcttacaaaagatttttcatacgttgattacagttcgacctttgctaacgttccggctcgaaatcgtatcttaaccaacctgaacattttccagcgtgacgttactgaccagtttaaaaccagtctggacatcctgaacgctcaggctgacaccatcgcaccggctgcaaatcgcttttccagtgaatggggaagcacaccgaagccaaaagcatctaaccatctgatagaattgccgttattccccacccaggatgtcattacctcggcagacgttcaaccataccgtaaaatcggctcttcgctacaggccagcgttctggatgcagtcactgcgaaaagtctagcccaccatgaacgcttcgctgcgactcgtgaacgcatgttcgctgaaagcctgttccgtcaccgtgtcaccgatatggaatacaccgctgatggcccgatcctggattggtcagaggaatttggttacgaccagagtaccggaaccatctacacgggggttgctgctgatccgttagaatccctatccgatgaagttagcgccatgaagcgccgaatggggggccttgcttctttgctgaaaggcatttacctgttcgcgggttccaacttgttcaagaagctgcgttttaacccatcggttcgccagcttgtgcagtatggtgtgcttgatcctgatggtctggtattcaataaagagatcaacccggctttcagctattacgtcctggataacgtgactgtagtcgagatgtccgataccgatttctacggtatcggcgcagaccaaggctttatggttccggtcttcgataagccattgagcgctgatcaggcatcaccatttactaatctggtcggcccaacaagccgtaacctggaattggcatttgctgacgtagtggacttccggatctatagcagcaccgatgcgtataagaacattacgctttccagtgagttcagcctgttgccgatttgctaccgtccggatctggtgaccgccgttaccaatgatgcttcgtaa

SEQ ID NO: 110654 - DNA, 345 bp, Enterobacter aerogenes
atgaaaatgggcgaatcccaacgcacctttaacgatgtcgtgacctaccaggccgacgctaattttgcagtgaaaacaatcaatatcccaatcctggccatcgaagtgcagcccggttcagtcattaaggccgacggcaccgcatttacccctggcaacgacgcattactggttctaagccatcatcacgcaggtacagatgcaaacatcatcgttgctgatcgtggcgtctatattcgcccggaaaccgtcatcgctgttatgggggagactgtaggtgctgctgcaattgctgctctgactacatccggcaacatccgcgtagctcaggctgacgctcaataa

SEQ ID NO: 110655 - DNA, 669 bp, Enterobacter aerogenes
atgacgaccgagaacgtagaaactaaaatttacaaatcactaccgcagccgaacgaagacaaaccaatcacggttgatacattttccccctgtccggttctgatttctcgaatccgtaaatttaatggggtgaaaatcgatctcaatgttatcgcagtatacggttaccttctggggtggaagaaaaccactgggcgagtaacggtatcaatcccccggatcagtgatgattgcgcggggatctcagaatctacggtgaaacgtgctcgtaaggcacttaaaaaaatgggatggatagattggaaaacaatccctgacgagggcaaaagcaacacttctcactgtatctataccgtcaaagatcccgaggacatactagctgaactcaacgctggattgtcacagcagggtgatgcagtagttaccatcgcaaaaaaacagaaagttacaaccgaagagtgcagtaaagatgaacaaaaacgtgatggcgtggaatctgccgcgcctgctgctggaaaaccagacggcgtacctgttatggatattcctgtcgatgctgatgtacctgccaatgatgatgcggtgatcagcgactttaataatccttacctggatgctgtagtaaaagattggcagaaacaaaaacatagtggaggaataattgtgtga

SEQ ID NO: 110656 - DNA, 447 bp, Enterobacter aerogenes
atgggaaaacctgccaaatttgattatacacaggatgcacagtctatcgcatgggccgtattaaacggcgttacatctcttcaaaatctccacgcttttcgtaatcgcgtacctggcggcgcaaggcaggccgacaggatttatccggagacccgcgaagcacttcgattaatcggtgaggagcgtaaaaaggcgcgtgattgtaaagccctcaaggatcttctccgtccgttttcccagaaatacgccgcaggggaaacactgacagagattttagtccccgtgctgaagggctatcgccagatgtatcttgaaaagctgggtctcgaccttactcatgagcagataatcatgctgctaatcgctacggatggtgtggaacaactcgaaaagtacggttatagcgtaatcggtgattttccaaccgctacaactacccgccactaa

SEQ ID NO: 110657 - DNA, 621 bp, Enterobacter aerogenes
atgggtaatgcaatggttgcgctcaagtctgccgatgaggtgaaggcggttagcgcggagctggcgaagaacaaaagaaccaacctctttcgctgcctctgggcgatgcagttcgagagcgcgttacgtttctcagacgtggttaaactgacctgggatcagttcgcggagggcaaaacgcatcttctcatcattcagcagaagaagacgcgcaagggggtagacggtacgccagtgaagccgaagccgttgaagatagccattactccggctatgcgctctatcgtgcaggctcgacgggaagaggcagcagaccgcccaaacttcggtgaatacatattcagcctgtccgatctgaggtcgaagggccagccagtttcacacaacgcagtgctgacggagtacggcaagtgcggacgccgtgcaggtttccaggatgtgggaagtcatacaccacgcaagagtaagggccgcatcctgtttgaaagtggcctagctctggaacagatcagcaacctgctgggccactccagcccagcttctacactgttttacatcgggttcacgcaggagactgcggacacgatatcggaagaattttccctcggggaggaatggtaa

SEQ ID NO: 110658 - DNA, 234 bp, Enterobacter aerogenes
atgaaaaagcatatagcaaaagcagtttcagcaaccgttttaacagtgttgggcctgctggccagccagccagcacacgccggacgcatcacgatgcaactcactgaacaggaggagacagcaaacggcaaaacactttgtcgctacgagaattccatttactcattcagctatgtgacggggagtaaacactgcccaagcgtgaaaactttcgatacagcggattcaggttga

SEQ ID NO: 110659 - DNA, 261 bp, Enterobacter aerogenes
atgagattgtgcggaagaaatcatctggatgagttaaagaaaaccacaccagcctgcattgtttggatcaatgcttgggcagcagagttagattcagtggtttggaaatcagtccatgatgttatgaaccagtttccaaacgcctccagtgttgatggacgctctttcatattcaaagttgatggtagcaacatcgctgttgaaaccatcattgatttcaacatgttactggtgcttattacctcagtaaaggtaatgtaa

SEQ ID NO: 110660 - DNA, 1212 bp, Enterobacter aerogenes
atggatatcaaagttataaaaacagagcaacagcatcaggagtatttaaagaagattcactctttaatgctggaaatgccccccattcattccaaggcgcatgaagacttggagttgctaataactattgttgaagcatatgagaactccaagtatccaatcgaacctcctgaccctatcgatgccattcttttcagaatgcatgagaaaggtctaaagcaggttgatcttgtaccctatctgggaacaagaagcagggtttcagaaatccttgcccgtaaaagacctttgacggtgtcgatgatcaaagcgctttctattgggctgggcatttccacagatacgttagttgggataaatgcagataatgagcattcttctgacgatcacattgactggtctaaatttccagttaaggaaatgataaacagaggttggcttccagatatagttgatagaacgaagaaaaataccgaagaaattataaagagctttattgatcaagtgggttggcaggcaagtagcagcgtttcattcaaacggacgctttctggtgatgcttattcacctgcaacaaaatatgcgctgtttgcatgggtcagcagagtggtgcaacaagcacgtaagcgcaagaattcattaggtatctttaatccagatgttttatcagccagctttatgcgtgatcttgctcaattaagttggttcgaaaaaggccctttattagcaattgagttccttgaaaaacatggcatcgctatagtgattgagccatgtctaaagggaacaaggattgatggtgcagcgctaaaagacgttgacgggttgccgatcattggcttgagcttacgatatgatcgtttagataacttttggtttactttgttgcatgaagtcgcccatatatggaaacacattgattctaatgagattttcttagatgacatcgactccaacacagatgatagacaggagtcagaagcaaatcggcttgcccgggaggcatttatacccaggtcaacatggaagcgaagccaagcttattcatccccatctaaagaggcaattgatagcctctcaagagagctaaaaattacacctgcgattattgcaggtcggatacggcgtgaaagcggaaattatagaattttcaatgatctgattggtcaaggtgaagtaaaagcaatattggttccggccttcgataactaa

SEQ ID NO: 110661 - DNA, 1131 bp, Enterobacter aerogenes
atgtaccctacatatgtacctattctcaaagcaaaagcaggtgaattcgccgctttaaaaaacctgaaggctgcatactctgaaaaaatagcaccttttttcgagattcctattttagtaagaaaagaaaaagagccaaaatggctcatggaatcaactcagcctttgacagatcatctgcaaagaacggctaaaaagcttgtagcttcatgccaatctaacgcctttttctttgacatcacgcaatggaaagccgacagttatattgaaactggtgagcatgtactgagctatcttcacagagaattatccaaaagcggtgcgattattcaccctgtggtgggattcgatagatgggatattttagattaccaattagcattgaaagatttaaatatccctgatgggaataattattgtattcgaattgattcatcttcaattattgatgattcttacgatgtcgattatttcaccgagactcttgaaacaatcatggaagagcttggcttatcaagcaaagaagtcatgataatgcttgattttgatgacgttacaaacaaatcgattgaatcattaaacgctcacgtcaagcatgttttaaacattttgtctgattatgaattttcatgcgttattatttcaggcggttccttccccgcattcataaataaggcagttaaggacgagaattcatctgattatgtgacaaggcgcgaaattcacgtatggaaatcattcgttgatgattcaaagctacctcttgtattctctgattatggtatcagaaaccctaaagccgaagacgatattatagctcctaatgccaatggcaaaatacgatacaccattgaaaacaaacactttgttgttcgtggctactctaaactgaaaggggatggctacaaacagttgcacaaattggctgaaaagatcgtcaattcccccaactacttagggccagactttagttggggtgatgaatgtattaaggcatgtagcaaaaaagaaaaactcggtggtaatactgagtggatcagctatgacacaaaccaccatataagttatgtagttgaagagatcaccgaatttaatagagttagagttgctaaaaaaacagccattatataa

SEQ ID NO: 110662 - DNA, 153 bp, Enterobacter aerogenes
atggcgaaaaatgcggcagcaactaaacgcaacaaccgtaaaatccatgctcgtaagtttctggcaaccccagagggtaaagcctggcttgaacggaagaaggcagaggaggctgagttgaaaatggccgcagaggcccggacatttatctga

SEQ ID NO: 110663 - DNA, 1209 bp, Enterobacter aerogenes
  misc_feature (1135)..(1144): n is a, c, g, or t
atgaagcctaaaaaacgtgctcgatatgcggcggcagttacgctatcaaaaggaaaaatgtttgagtatggagttcctgaaggagaccatatagagcttcctgatgatctcaatttggagatgcagtttccattagctgttggtaccgtcggtgactttgcgtccgaagtggtggctaagaccatcggcaattcgattgaagcacaatcccaaaccccactggatgaggttattttttcggctcaagtccttcaagcttttgacgattccctgcttaacaaagaactctccttcaatcttcgcatacttgccgctgctggtttctatcttggcgatgtacccggaaatgctgcagtccaattatctaaactgagccaactagattttcctaagcacgatactttagctattgcagttaaaactgcgatggatcggccttgggagcataccaacgagacgctagagtcttcacgtgcaaaagatattttggatgttttgagccaacacttcagaaatggcctgaatggccgacagaaagcctatgatgctattaaatcattgcgcgaatgggcctatagccatgcgtctgcacatgacctacttatggccgatttgctcggagcgattagtgccactcgcatcgctaattctgcttggacattacttccacgctatagcaacctcccgcaagaaaagtgggagacatatttatcgcgttctatgtcaattaaggaaatgtggccatctcagcgcttgctaggagaggctggattgtataaagggacatcaggtgttgttcagatgccgacgagcgccgggaaatctagagctaccgagcttattattcggtcggcatttctttctgctcgtacgaaattggctttagttattgcccccttccgcgcactatgccaagagatagcaaacgatcttgaaaaggcattcaaggatgatggctatgacgtcaatcaacccagtgacgcgttgcaaccagatgtcgagttcgatttttctaacttatcagattttctcgatttggaatctggaatatttgactcagaggtcgaatcgaagccacaagtcattattcttaccccggaaaagcttctttacatacatcgccaagatagaaacnnnnnnnnnncgaataaggctttgcctcatagcatactcaagagccagacattgttcagaaagctggattggtag

SEQ ID NO: 110664 - DNA, 1239 bp, Enterobacter aerogenes
atgtacaatgatcaaacaaaagcttttgcgaagaagcaagaacaaaagctgattgacgcgctgggacatagccgtgagcatactagtgccagcactggagcccgaatgagagatgattaccagagagactatgcaagaattctttactcatcctcatttcgacggcttcaggggaaaatgcagctttttgaagttgatcctgaaaaatttaaccgaaaccgcttaacccacagccttgaggttgcccagatagcacgtagtattgcatcagatcttgaactgcaatatccagtggttgttgaactagcagccctagcccatgacatagggaaccctcctttcgggcactcaggtgaaaaaatgcttaacagtttatccgctaaaatcggcggatatgaaggaaacgcccaagcgcttcgtatcttgagaaaactcgagaaaaaatatgcccgctgtgcaggtttagatctcacttaccgtagtttactgtctgtcatcaagtatccaaatactaaatccacttcaaataaattcatttatgatgatgattatgcgttctatcagaagttgctagaagataatcaactagacatgaaggcaggtgaaaaaactattgatgcgcagattatggatctcgccgatgaaattgcatatgcagcgcatgacttggaagatgcattgagcaggaatatggtgactatcgaagatattgagtatgagttcctcaaatcaccagactacaacggtgctcttgagcacttcaatgaaattgtcaatacgtctaaaaaaactgcatctgaggcaaaactactgaaatcatcagaagaatttgccataatttttcgtaaagagctgacgtccaatatcgttaaccgtctggtcatggatattggagttgttgaaagtgacagtgggtatgaagagcttggatacaatacgttacaggaacttgctgaaggcctcaaaaaactgctattcaacgtcattatgcgtaaaaggaacatactgacttacgagtttaaaggaaataagatcatcagtgatttatatgagttttataatgccgatgataactataagtttctgtcacctgagcttaagtcttcattatctggcatagatccgtctcagctcgaaaataaaaaagctcgggctgtggttgattacatttcaggcatgatggatacattcgccgtcaaggaatgggaaactcattgtaagaaatcacactcactctag

SEQ ID NO: 110665 - DNA, 249 bp, Enterobacter aerogenes
atgaatagtaagaatgttgagctgaatgctgccaaagaaagactggctaaactgattgaaaatttgcacttgctaaagcttgaatacgacgaagcacttgaacatgctgcaaggtatcatggatctgatgagagaatagaaaatgccagagacgaaagggctcgcgatgtgtacatgaaaattaatgaagttcagaatgagattacgaatcaaactaaattgattgaagcgctagaagccgcccattga

SEQ ID NO: 110666 - DNA, 1242 bp, Enterobacter aerogenes
gtgccaaaacaaacaaagccgttaacagatactgaaatcaaagcagccaagcccagagagaaagactactctctttatgatggagatgggctaaatatcctagttaaaacaacgggtaaaaaaatctggcaattccgatattcaaggccagtgaatgggctacgagccaagctcactttcggtacatacccagcaatatccctcaaagatgcccgcgaacagcgtgacaatgcccgcgcactgatagccaaacaagttgatccacaagaccaccagcgcgatcagttgaggcaaacccagcaagaacgagccaatacctttcaggtaattgctaagctgtggtgggaagtgaagaaaacaagcgttaccgaagattatgctcaggatatctggcgctcattagagaaagatatatttccaatcattggtaatatagctatctccgatatcaagacacgaactttagttcaggcaattgaaccggttgaggcccgaggtgcgttagaaacagtccgtcgcctctgccagcggattaatgagatcatgatttatgcacaaaacacaggtctgattgatacggttcccagcattaacatcggtaaagcttttgagaaacctcaaaagaaacatatgcccagtatccgtccagagcaactaccaatgctgatgcagacaatgcggcttgcgaacattgaattgcccacccgctgcctgtttatgtggcaattgctgacactgactcgccctgctgaagctgctggcactcgttgggaagagatcgattttgctgctaagttatggcgtatacccgccagcaggatgaagatgggacgtgaacatacagttccattaacagaacaaacacttaatattttagagctaatgaagccactaagcgaaaacaaggaatatgtatttccgagcagaataaaaccaacccagccgatgaacagccaaactgtcaatgcagctctcaaacgggcggggtttagcggcatgttagtttctcatggtctgcgttctatcggcagtaccagactcaatgaagaaggctttccccctgacgtaatcgaagcagctttagctcatgttgataaaaatgaagtcagacgcgcatacaaccgcagcgattatctagagcaacgcaaaccaatgatgcagtggtgggctgattttgtcactgcggcggatagcggcagtattataaataatagtattcgaggattgaggtctgtgggatga

SEQ ID NO: 110667 - DNA, 843 bp, Enterobacter aerogenes
atgaagcgtaataaaaataatcataaagaatatgatcgcaattcacggcgtacaacaatgttcaagctaggaaataaggtgtctgctggtaaaaataatgcctttggtggtaatccagcaaaacggattagagacctgcgcatcattcatgactatatgaattttatgtctacaaaggaccatcctttagcagtaatgatgctatacaggaaagaaaattctgtgctttatgagcgcatatgtagctctatctgcaatgagactctatatgttgagtttggttatctggcagaacgcctctattatgaatatcatagaagaggaatgaagagttttagcaaagttctgaatccgactgagaaagaagctgtgctatttttaagcaatagataccatttatcagaggaagcaattcgttcaatcataaagaaatctcgttccaagccgtcaaaaaatactaattccataccagcattaattcatatgcctcctaaacgaatttatctggataatttaactcatcagcaacaattagaagtagagcagcaaaatatagaccacatggagtcagtgacagtctacgacatagaggaatcacaataccaaagtgaagatgacagacaagccgccattgaaagttcaaaactatattatgatgaattaaggaatcaactagcgtcattagaacgtagagcaaaagaagaacctgatgggaaagcctttttgacacctcccccccctcgtcctacatatctacatacaatcctcagctcagaggcttatcatgaatacgagcatcagaagataaaagaatataaaaagcgcaataaaccagataaataa

SEQ ID NO: 110668 - DNA, 210 bp, Enterobacter aerogenes
atgcatggtgaaatcactgaaaaattactgcgtattaatgatgttctgcgcatcattcctgttgggaaatctaccttctatgcttgggtgcaggagggtaaagccccccagcctatccgttttggttctcgttgctcgatgtggcggtactctgatattgaggcatttatcgcggcacatactaataatgagggggattgccatgagtga

SEQ ID NO: 110669 - DNA, 2706 bp, Enterobacter aerogenes
atgagtgataaacaccccatcattgaagcagctattgcactggcgaaacagaatattcctgttcatccgttgaaagctgggactaagctgcctgtgaataaaggttggtcatccgcgccgctcctgacagttgatgaagtagaaaatcaggctcccacatgggcagttaaaaattataacttagggatgaggacgggttatccactggatgatgacagtatattattagtagtggatattgatattcatggcgcagcactgactgaggatatgaaagacgaactgaataaccagctcagggcatttgggttagacccaaataatcccacggttattactggtagcgggaaaaattcttgtcactattacgtgtcatttacagataaagatctggccacccaagtaggtgcagctaagacgctttctaaatcaacattctacaatgatgaaggtaaaccttgctggattattgaactactggggaaaggtaaacaagttgtctgcccacccagtatccatccagatacaggcaagcactacacatcaatcaatgataggatcataaaagcacctgaaccattagttcattcactgcgaactatattggctaacaaacctgttctatgccataacattatgctttcagatatctctgaggatatgcagacgatttttcaccaatgttttgataaggcaatggatagtttcacggatgttgaaaaactgaaaagtgcattgaatacaatcagcgctgactgcgactatgttacctggcgaaatgtcgtctggtccatacgatcacataatattatggatgcagaaagtattgctcgcgactggagcaaatcctccagaaaatatgacgaagatgagtttactattctctggaagtcatacgccccaaccggaggtattggtgcaggtacgctttactatatcgcaacacagcacggctggactgggtacgaaaaaaatgcagtgagtcagacagtacagcctgtaccgagtagcaaccaatgcccttgctttcgtatttttgatagcaaagtttatcatagcactggtaattattgtgctggcgtatggcatttttatagtaatgaaaatgaagttaaaggtgagttagtttgttccccagtaactatcgatgctattacatgtgacacatcggaaagaaacttcggacggttattgacaattaccaaccctctcggaaaaaaacaaaaatgggctatgcctatggaactcctgagcggtaacggtgaacctgttcgtggaatattactgtctttcggggtgaaaatatctagtaataaacttttgaatatgtatttatccggtgctgttccggataaaaaaatacgttgcacaccacaattaggctggtttgaagatgttttcgtcatgccagatatcacctacggaatccataaacagaatgagattgtctttcagtcaacagatgatcctattaatatttactccaacggcggaacaacagaagaatggcgcaataatattgcagcacttgctgtaggtaactcgttattgaccactgccatttgttgtgctttctctggtccattgatcgaaccctgccacgcagaaagtggaggcttgcatttttatggtgactcatctactggtaaaactactcttgtccaggttgcctgctctgtctggggaagccctaactatatgcgtagctggcgagctactgcgaatggtattgaaggggctgcatctatgtttaatggtacgttgttggctttggatgaaattagcgaatgtaatcctcgtgaagtaggacaaattatctacgctctaggtaatggacaaggtaagcaacgcgcatcaaaaagagggacagcacgcgccatagctcactggaaaacagcagttatctcaagtggtgaattaactactgctgcaactattcaactctctggtgaaaatgctaaagcaggacaagccgtaaggttagtagatatttctgctcaacggattcatggtgcatgggataatcttcatcactttaactctggtgctgaactatcagaacaccttaaagcccaatcaaaaatcaattacggcgttgcagggcgtacatttctttctcacttggtgaatggcaagttaaaattatccactcatttccataagtttgaatccctcaaggaatttaacccagctaacgcgagcggacaggctaggcgtgttgccagacgttttgcattgctagcattggcaggagaactcgccactaaattcggactgacagggtgggaagtcggctatgcaacgaacactatgatttcaatgtttcagtcatggttaacatcagtaggtaatgtgccactggaaggacagaatattctccagcaagtccgtgattttattgagcgttatagtgacagtcggtttagcagtaaagaaggttatccatcaaacagatttattaatgaacgtgctggctggtgggacgaatccccgactggggggaaagtatatctgttcacttcggcaggatttcgtgaggccacacgaggctatgattttaagcgttctattaaggcattaaccgaggctggagttctgaaactccaagaaaataatcaaagtggtagtattcgggtaaggattgaagggcagcagtacagagtttatcccatttgtttttgtgacgctgaaaataataaggattaa

SEQ ID NO: 110670 - DNA, 630 bp, Enterobacter aerogenes
atgaatacatatttatcatctttgcataaaaggcttggaattaaccccatgcaacaaagtgagggggactctgacactaaagatatttatcttccatatactcaggcgctggcaaataaaatcaagatatggattaatcatcttgataccgagactcatgatagtattttttatgaatgtgatctttgtaaaacattcaaatgcaccaaagaagaccttgccatagctgctgaaaatatatctctctacagtcatattaaaaatattaatggtgtaaaaatccgctactatacagcaacaccaccttcaactagccagcaagaactcaccgatgttcaacaatttatgtttaaatgcttacaaaggggatatatctccacaccagaacaaggctggtgtctgattgttccatctttaaatctctatgaaattttcactcgtagtgaagaatatcggggaacaaatcgtacctcttttggacggaatctttctaagatgggtgttgccaaatctattctcgctggaagtccaccatatagatgtcgctcatttaaattcaaatcattgaatgaggcaagaatttcttttgcaaacgaggttttaaatgataggaaatacaaatgggaataa

SEQ ID NO: 110671 - DNA, 522 bp, Enterobacter aerogenes
atggaacataaaacagaattcgcccgtcaggcactgactcgccgtcacttgctgattgccggcatcacagctatcgctgcctcttttgtcgccacaccaggtttcgctcaggaatccgattcagttcagattatctccgcgggcagccaacctgtcgcctatggcgcacccgggaattttacagggcgcgtgcgagtcgacccgttgttccaggctgacaaaaatatcaatgtgtccggcgcttacgtgacttttgaacccggagcccgttcagcctggcacacgcatccggccggtcaacggctggttgtggtctccggtatcggcctgacgcagcaggaaggacagcccgctcaaattattcgaccgggtgatgtcgtggtgtgcccgcccggcgtcaagcactggcatggcgccgcccctgagggtgccatgacacatctggccattaccgggaatataaatggaaagacagttgactggatggagaaagtaacggatgaacaatattacgcccattaa

SEQ ID NO: 110672 - DNA, 762 bp, Enterobacter aerogenes
atgaacaatattacgcccattaaaacctccgcgatggtggccttgctgatgatggctggccagttcatggtttcttgcgttaacgcggcagaaaaagaggtcaccggaatgcaccaccaacaacctgcgtcagaaaccttgtctgaacgccagcaggcgatccccctgattgccgctgcgatggcaagcagccagatggggaaactgaatgcggctctgaatcagggacttgatgccggactcacgatcaacgaaaccaaagagatcctcattcagctctatgcctataccggtttcccccgcagcctcaatgcgctcaatgaactgatgaaggtggtggaggtgcgtaaacagcaggggcttcatgatgctgtggggaaagccccccaacgacagagccctgtcggagacgaactccgtcggatgggcgcggaaaatcaggctctgctttcaggcggaccggttaagggcgcagtttttgattttgcaccggaaattaaccagtttctgcaaactcacctgtttggcgatattttttcccgcgataacctcgactgggaaagtcgcgaactggcaaccgtcggagctctggcggccacgccgggcgtggaggcacagttattgtcgcatatgcgcgccagtcagcgcattggcctgacggtgggtcagttacgtcaactggcccgggtattgcgtgaacatggtgaaaatgaggctgccgttcgggctgaacatgcactacagcaggcactgacccgttga

SEQ ID NO: 110673 - DNA, 585 bp, Enterobacter aerogenes
atggaacacgatcctacccgcagaatgttgattactgccctggccgggttgactattgccagtactgtcccggtatcgtccgctgccggtaccgggtcagtacagaataaaagccgaactctggtcgtctacttttcccgcagcggtaacacccgggtgatcgccggtgtgatacaccgtagcctgacaacagacctgtttgagattgaacccggcactccctatccggaagattactttcagactgtagaacaggcgaaacaggaacgcgcgcatgggaccctccctgcactgaaaaacaacataggggatttcgcacgctatgagacggtgtatctgggattccccatctggggaaccagcgtacctcccgtcgtgcaaaccttcctgagtactcatgatcttgcgggaaaattgcttatccctttcattactcatggtgggtacggtaaaggggacagtgatgaagtgctggcacgcctcgctccggccgctcgccgggaaaggcctctggtcattgagtgcgatcaggaaaagaaaacaaccgagacagtgacaagctggttagaggcgatacgtagctaa

SEQ ID NO: 110674 - DNA, 852 bp, Enterobacter aerogenes
atgcaaatagtacaacttaacaacggcattaccatgcctaaacttggctttggtgtgtttcagatggcggatgccgctgaatgtgaacgggcagtcgtggatgccattgaaacaggctatcgtctgattgataccgccgcgtcttaccagaatgaaacccaggttggtaatgcgctgaagcaaagtggtgttgcccgaaatgagctttttgtcacgaccaaactttggttgcagggtgccagttacgaaggcgctaaagctcagtttgagcgttctctgaatcgcctgcagctggattatgtcgatctctacttaattcaccaaccttatggcgatgtacacggggcctggcgtgccatggaagagttgcaccgggcaggtaaaatccgtgccattggcgtaagcaacttccaccctgacaggctcgctgacctgatggccttcaacagtgtgatccctgccattaaccagattgaagtcaaccccttcaatcagcagctacacgcggtaccctggatgcaaagccgtggtattcagccggaggcctgggcgccttttgcggaagggaagaacgggttgttccagcatccggtgttaacggatatcggtgataagtatggcaaaagcgtgggacaggtcgtgctgcgctggctgtttcagcgcaatgttgtttcactggctaagtcggtacgcaaagcacggatggaagaaaactttaacatcctcgactttgaactgagcgcagaggatattctgaaaatcaccgcactggataccgcgaccagcgccttcttctcccatcgcgacccggccatggtggaatggttaacggagcgaaaactcgaggtttaa

SEQ ID NO: 110675 - DNA, 909 bp, Enterobacter aerogenes
atgagaaaaaatatagtgtttaaaaataaccagataaacctgtccggaacgctgtactttcctccagggttcgacgggacacaaacgtatcccacggtcatttgtgtacaccctgcaggctcggtaaaagaacaatccccggcattatatgccgcagccctctctgcaaaggggctggttgttctcacctttgacgcctcccaccagggagccagcgaaggtgaaccgcgctacctggaggatccctttcggcgggttgaggatatacgctgtgctgtcgattacatcaataccctgtcttttattcatccggacaaaattggcgtactgggtatttgtgccggggcaggttatgccatcagtgccgctacgactgaccggcggattaaggctatcgccggcgtcagcggcaccgatgctggcgcggcgatccgcgaaggctgggacgggaatcttcctgtggaagaacagattcatatgctggaagccgtttccgcacagcgaacggccgaagtaaaaggcgcaaccgtccggtatatgccctacgtcccggaaacggtggatgaaggcacatcggtcacgatgcgggaggcccacgactattaccggacgccccgtgccgggcatccccgatcgtgcaataaagtcatgatgacaagcctcgacaaactgctgacgttctccgcaacagaccgcatcgatacgttgttgacccagccactcttgctgatcgtgggagaacggtcggatgcccgccgttttgttgatacgttttacagcaaagccgccagccaggataaagaagtgtttgtggtcaagggcgcgacacacgtcgatctgtacgacgtgaaacattatgttgagccggccttcgaaaagattgccggtttcttctcggctaaattgtga

SEQ ID NO: 110676 - DNA, 663 bp, Enterobacter aerogenes
ttgaaagtcatcatcaccggcgccacgggaatggtgggggccggcgtgcttcagactgccctgaatgccgcggatgtggaaagggttctggtatttggccgccagccgacgggcgtcacccatgaaaaactgcaggaacttatcctcccggacttatttgaggtctcgggtatcgagaataagttacatggatatgatgcctgtatctgggctattgggatcagctccagtgggatggatgaagcggcctatgcgcacattacagaaacgttgacactcaagtgggcgaaaatgctgcttcgtatcaatcccggcatctcattttgttattgctctgctgccggagcgggaggaaagtccatgtgggcccgtgtccgccagcgggtggagtccgaattgctgaggctgccgttccgccatgcaggcgcggtgcgccccggtattattcgtccggtaccaggtgcacggagcagaacgcccgggtaccggattgtattacgcctcctcaccccgctatttctgttgtctcccgtctggttagtggtggtgccatccttgtttaccacatcggacatactgggacgcgccatgctcagtgttgtgcgggggaaagccacgtcatttattctcgagacagcggatatcaacaggctgggccggtga

SEQ ID NO: 110677 - DNA, 990 bp, Enterobacter aerogenes
atgcaaaaacgttatctcggtaaatcaggacttcaggtatcagcgctggggttggggtgcatggggctcagtcacggctacggcccggcgactgacactcgtcaggcgatcgaacttattcgtgcaggggttgaacgcggcgtgaccttctttgataccgcggaagtctatggcccctatctgaacgaggaggtggtgggtgaggcgttaaagccactgcgtgagcgggtggtgattgccactaaatttggcttcacctttggaaatgataaccggcagcaaattttaaacagccgaccatcgcacattcgtgaagcagtggaaggttcattacgacgtctgaaaacagacgtgatcgatctgttataccagcaccgtgtcgacccggacgtccccattgaagacgtcgcggggacggtaaaggatctgattgctgagggtaaggtgaagcatttcggtctttctgaggccggtgcacaaaccattcgccgtgcccatgccatacagcctgttgccgccctgcagagtgaatactccatgtggtggcgtgagcctgagcaggaaatcttacccttactggaagaactgggcattggtttcgtgcccttcagtccattaggcaaagggtttctgacggggacgatccgggccgggtcaacatttggcgaagatgattttcgcagcaaagttccccgctttgcggcacaggcgctggaggcgaatgaaaaactggtgtcactaatcagcgtgattgccgcagaaaacagagtgaccccggcgcagattgcactggcctggttgctggcgcagaagccatggattgttcccattcccggcaccacaaaactgcaccggctggaagaaaacctggcggcagcggaaatccagctttcgccaggcgaactggagaaaatctccctggccctggaaacagttaaaatccttggggaacgttatcctgccgcacttcaggcgcgcgtggggcggtaa

SEQ ID NO: 110678 - DNA, 894 bp, Enterobacter aerogenes
atgctcagagagaattttaacgagcttcagctctttctcgttgtcgccagagagcgaagctttactaaggcggcaggtaaactcggtgtcacgcaatcagcactcagtcatgccatgaaagcactggaagaacgcttaaacatacggcttctgacccgcacgacgagaagtgtggcgccaactgaagccggagaacggcttatcgcctgcctggaaccgcgcatcgcggatcttgagcaggagcttgactcccttatacagttgaatgggatcgcctcagggaatatccgcctgacctccggagagcatgcggcacgcagcctcgtctggccgaaactcaaaccgtttctccgggaatacccggaaatccacgtagagctcatggtggataacggctttgttgatatcgttgaaggccgtttcgatgccggcattcgcctgggggaaagcgtaaacaaagatatggtcgctgtgaggataggccctgatatacgtatggccatcgtggctgccccgtcgtattttgcggatcacccggcacccgaaacccctcatgatctccaggatcatcgttgtatcaatatgcgcctgcccaccgttggtggcctttatcattgggaatttgaaaaagacgggaaaccccttcgtgttcgtgtggaaggacaactgacttttaatctgttgcccgaacgaattgatgccgcactgtccggatttggcctggcctgtgtaccggagaacatggtccaggactatgtgaagtccggcgccctgatccaggtattacaggcgtggtgcccctttttcccgggctattatctctactatcccagccgtaagcagcatccgccagcctttgccctaatgattgatgcgttacgtcactcagaatag

SEQ ID NO: 110679 - DNA, 786 bp, Enterobacter aerogenes
atgaaaatattaattgtcggcgccacagggagcatcggtctccatgtcgtgtctgaggcttttaaaatgggacataaacccagagcgttggtcaggaatccccggaaagccaggctgttaccccacggtaccgatgttgtttatggtgatgtcgcgatgccggaaacattaaaggatgtcgtcaaagatatcgatgcggtaatttttacactgggctccggtgggcaaggtcgtattggcgccagagccattgattatggcggcgttcgtaacattatgaagcttctcaccggcgctgccgtccgcatcgtactgatgaccacgattggcgtgacagaaaggttggggacctggaatcagcgaacagaagtgcatgactggaagcgaagagcggagcgtcttgtgcgggccagcggacatccttataccattgtcaggcccggctggtttgattataacgacccggatgaacgtcaactggttttgctgcagggggaccgacgccatgccggaacgccggaagatggcgtgattgctcgtgaccaaatcgccagggtactggtttccgcgttaacggatattgctgcagaaaataaaacatttgagctggttgcggtaaagggcaatgagcaggccacgctcactccactgtttgcggatatgcttccggataacccaatccgcaatgatggagttcatgatttaaataatatgcctccggagaaagaacctgattttatcagggctgacttgtatgccattcatcctgattcgacagcggcgtga

SEQ ID NO: 110680 - DNA, 252 bp, Enterobacter aerogenes
atgaaatccactctatttattcttatagtatcaacactcgcgtcgttaaatattgccagtgcagcacaacaaattaccgatacaaccggtaaagaaaaaattggtgtcgtgtcagccggtaatgcgttatctctggatgaactgaccggggaattatcccgtaaggcagatgcccgtggagcaatctcattcaaaatattatcggcctcagggaataataaaatgcacggggttgcagaaatttaccggtaa

SEQ ID NO: 110681 - DNA, 993 bp, Enterobacter aerogenes
atgaaatataccaaactgggtaatacgggcgtggatgtgtcgaagatctgtatgggaatgatgagctttggcaaacctggtagtgaaaatggcctgtttccctgggccagagattttgacgacgccaagccgattttccagagggcgattgaactgggggtgaatttctttgataccgccaatgtgtaccagatgggaagcagtgagatcgtcaccgggcaactgatcaaggcctttaatcttgaccgggatgacattgtggtgacgacaaaggttaattttccgatgcgtccggaccgtcctaacgggggagggctttcccggaaaaacatcatggctgaaatcgaccacagtctgaagcgactgcaattagactatgtcgatttgtaccagatccaccgtctggatccgcacactcccatggaagaaactatggaggccctgcacgatgttgtcaaaagtggtaaggcgcgttatatcggcgcttcctcgatgtacgcctggcaattcgagcgactgcagaacatcgcggaaaaaaataactggacccactttgtttcgatgcaaaaccactactcgctgatccatcgtgaagaagagcgggaaatgatccccctttgcgagaaccgtggcgtggcgctcatcccgtggagcccgctcgccggcggccgggtaacccgtccatgggggacacagacgaagcgttctcagattgatggcgtctctccactggtctggggagcgacggaggcggcagataaagtcgtggtcgataacctggaaaaaatcgcacagcacaaaggggtgccgatggcgcaggtggcgcttgcctggcagttcagtaaaccgtttattacagcccctatcgtcggcaccactgccatcagccatatcgaagacgcggtcgccgcgctggatctcactctgagcccggaagagatcgctgtgctggaggcaccttatattcctcatgctgtactgagcgtattctga

SEQ ID NO: 110682 - DNA, 1002 bp, Enterobacter aerogenes
atgaaaaaaagtctactcgccgccgcggtggccggggccgtattgttatccgccggcgcccaggcgcaggacgccgttgcgccggaagggtatcaactgcaacaggtgctgatcatgagccgccacaacctgcgcgcgccgctggccaataacggcagcgtacttgagcagtcgacgccgaaatcctggccgcagtgggatgtgccaggcggccagttaaccaccaaaggcggcgtgctggaggtctatatgggccactatatgcgtgagtggctggcgcagcagaagctggtgaccagcggcgaatgcccgccggaaaatgccgtctacgcctacgctaatagcctgcagcgcaccgtcgccaccgcgcagttctttattaccggcgctttccctggctgcggggtgcctgtgcatcatcagccgcagatgggaacgatggatcccacgttcaacccggtcattactgacgattcagccgaattcgcgcaaaaagcggtgcaggcaatggaaaaagagcgtcaggggatgcagctcgctgagagctacaagctgctggaagagatgaccgactatcgtaattcgccatcctgtaaagaaaagcatgtctgctcgcttagcgacggtaaagatacctttagcgccaaatatcagcaggagccaggtgtttccgggccgctaaaggtcggtaactcgctagtggatgccttcaccctgcagtactacgaaggttttccgaaggatcaggtggcgtggggtgaaattgccagcgataagcagtggcaggtgctgtcaaagctgaaaaatggctatcaggatagtctgtttacttccgcggaagtggcgcgcaacgtcgctaagccgctggttaaatatatcgataatgcgctggtgggcgatggcgccgctaaggcgaaagtgacgctgctggtcgggcatgattccaacatcgcttcgctgctgacggcgctggactttaaaccctaccagttacccggctag

SEQ ID NO: 110683 - DNA, 1089 bp, Enterobacter aerogenes
atgggggatgaggccgctttgtgtcgggtagcggcttcgccttacccgacctacagaatggcgttccgggcaggaccggtagcccggccaggcgcagcgccgccggggaactggatgggggatgaggccgctttgtgtcgggtagcggcttcgccttacccgacctacagaatggcgttccgggcaggaccggtagcccggccaggcgcagcgccgccggggaactggatgggggatgaggccgctttgtgtcgggtagcggcttcgccttacccgacctacagaatggcgttccgggcaggaccggtagcccggccaggcgcagcgccgccggggaactggatgggggatgaggccgctttgtgtcgggtagcggcttcgccttacccgacctacagaatggcgttccgggcaggaccggtagcccggccaggcgcagcgccgccggggaactggatgggggatgaggccgctttgtgtcgggtagcggcttcgccttacccgacctacagaatggcgttccgggcaggagcggtagcccgaccaggcgcagcgccgccgggtaacaggatgcgggtagcggcttcgccttacccggcctacagaatggcgttccggccaggaccgatagcccgaccaggcgcagcgccgccgggtaacaggatgcgggtagcggcttcgccttacccgacctacggaatggcgttccggccaggaccgatagcccgaccaggcgcagcgccgccgggtaacaggatgcgggtagcggcttcgccttacccggcctacagaatggcgttccggccaggaccgatagcccgaccaggcgcagcgccgccgggtaacaggatgcgggtagcggcttcgccttacccggcctacagaatggcgttccggccaggaccgatagcccgaccaggcgcagcgccgccgggtaacaggatgcgggtagcggcttcgccttacccgacctacggaatggcgttccggccaggaccggtagcccggccaagcgcagcgccgccgggatggggttggattaacgggtggtgccgcgcagcttcaacacgctgggaacaaaaacgttaa

SEQ ID NO: 110684 - DNA, 321 bp, Enterobacter aerogenes
atgaatactttacctgcaataaatcagcgggcggttcagccatgcccgccgcctgtggttgtctggcaaatgctattgactcgcctgcttgagcagcactacggcctgacgctaaacgacacgccattcagggatgagacagccattcagaaacatattgatgccggtaccacattgggcaatgtcgttaattttctggtggaaaaattcaaactggttcgtatcgatcgcaggggatttagctggcaggagcagacaccgttcttgaccgctgtcgatattctcagggccagacgtgctaccggattagtgaatacttaa

SEQ ID NO: 110685 - DNA, 351 bp, Enterobacter aerogenes
atgtcggataagacactgacagtgaacgatgatatcgctgagccttggtggggacttaagcgtgatacaacaccatgctttggtgcgcgtctggttcaggaaggtaatagtcttcactacctggccgaccgggctagtatcacaggacagttcagtgaggcggatttacaccatcttgaccaggcattcccggtcctgctgaagcaggctgagttgatgctcaccagtggtgaactgaatccccgacaccagcactgcattaccctttgtgctaaggggttaacctgcgaagctgatacgcggggctcctgcggttacgtttatatcgccatttatcccacccaaagctaa

SEQ ID NO: 110686 - DNA, 465 bp, Enterobacter aerogenes
atgaataacgctacaaatctgcagaccctttcagataccgaaaatcccaacgccctcaccactacattattgtccgatgagcagcgtatcgacttctggccacagcactttggctccatcccacagtggataaccctggagccacatatcttcgcctggatggaccgtctgtgcgcggattacagcggcggtatctggtgtttttatacgctcagcaacgatggcgcgtttatggcaccggagcctgacggtgacgacgatgaaaaatgggcgctgttcaacccgatgaatggtaacggcgcggaggtgagcgcagaggctgcgggcatagcggcctgcctgatggcttacagccaccacgccatgcgcaccgaatgcgacgccatgacggagcactattaccgtctgcgggactacgcgctcacccatgtggaatgcagcgccatcatgcacatcatcgactga

SEQ ID NO: 110687 - DNA, 819 bp, Enterobacter aerogenes
atgcgattagcatcccgcttcgggcgaatcaaccagatacgccgcgatcgccccctgacccacgacgaattacaccagcatgttcccagcgtttttggcgaggacaagcacgaatcccgttcagcgcgctacacccatattccgacaattactctgctggaaaaccttaaacgggaaggctttgaaccgttcttcgcctgtcagacccgcgtcagggaccagagccgtcgtgaacatactaaacatatggtacgcctgcgacgcgcagggcagatagccagcaaacaggtaccggaaattattctgctcaacagccatgacggcagctccagctaccagatgatcccgggtctttttcgtgccgtctgcgccaacggcctggtctgcggtcagtcgttcggtgaagtcaaagtaccgcataaaggcgatgtggtgggaaaagtcattgaaggggcttatgaagtgctcggggtgtttgaccgggtggaggagaagcgcgatgccatgcagtcactgctgttaccgccaccagctcaacaggcgtttgcgaaagcagcgctgaattaccgctttggtgaagaacaccagcccattaccgaataccaggcattaagtgcccgacgctggcaggacgaatcatcggacctgtggacggtatacaaccgcctgcaggaaaatttgagtaaaggcggcttaagcggtcgcacggtacagggcaagcgcagccgtacacgcgcggtgaacggtatcaacggcgatatcaaactgaaccgtgccttgtgggtaatggcagaacaactgcagcaggcgctgagctga

SEQ ID NO: 110688 - DNA, 246 bp, Enterobacter aerogenes
atgcctgaatctacagccctacccgaaggaacgttcacccgtgaacaggccactaccgttgctgccgcatacaccaatatcgccatcgaagacgaccagggctcttattttcgtctggttatccgcgataccgacggcatgctcatctggcgcgactggaactttgccccggacgctggcgtgatgctcaaacgctatatcgccagcgatggtatcccggtgacccctgctactgacgacaattaa

SEQ ID NO: 110689 - DNA, 831 bp, Enterobacter aerogenes
atgaattgtgatcctgatgcaggtgataatgacatcggatacggttcctgcccctttctcggcagcatttacgatactgacccggcatttaagaaagaccttgatgacgcgctgaagtcagcaggacttaccgggttaacggggaaacaaggttcattgaacggtccagacagcggattaattccggtggatgttggtggcgagaagtggttgcagggctctgtttgtgaacggggtaactgcggtgaccattatctgaaaattctgtatatcccctcagagcatgttgttgcgggtttttattacaacagtggtgaggaaaagatgtttggtgacgccggagatgcagaagcacgaatattacgccgtgatgtacctgacgttacgctggtgcagcaggctccggcagtgacggcaacgcctgcagacggcgcaccagctgatactatctggccctttaagggagacggaggtaaatcgttatggcaggtctgcggcgggcagaacagcagttgcaccattatcgccaacactaaatattacgttgccattctgaaccgaaaatccgcgcacagttgcgcttttggcgacttctatgtggccgcgagggattcgtcatcatggcgacagtatgacacgggtacctgcagcccggatgcgtggatacgtaaaggctccatcaataacgggcaatacctgtcggttgatatcggtgtgaacaaccaggttgtacagcagtaccccatcggctactggtcaatgaagaaagagttttccggcagtcgccgcccttcatggtcaaaggttaaagagaaaaatcagcaacattaa

SEQ ID NO: 110690 - DNA, 411 bp, Enterobacter aerogenes
atgaaaacatttatattgtcattaatggtttctggttttttattaagtgcctcagccagtgctgctgcggttaaattgccccggacagtggctgatgtgaaaggcggcagtgagctgatgtgcggaagtgaagatgtgaaagacgggacctgcagcctcattagtgtctctgatgacagtcaatatgccctgctgagcagccctggcggttcggcctgttatgacccttatctcatcgttgtcaaccttgccaccagcaagggtaaaatgatggattataaccgtcatgcgacatgtagcggtgcggcaaccgcgaagtttgtccgttcacccgataaaggccatcttaccgttgttattttcgaccctaccatcaaaaagaatgtcggtcttaataccattgacttttaa

SEQ ID NO: 110691 - DNA, 216 bp, Enterobacter aerogenes
atgggattctggaagaccgccggtaaactcgccgttgaagtggcgaaggacacactcagcagtgcgcgtgaagtgaaggagacgcatgacagcctggaaggcaaaagcaatgcagagcttagaatgataaccactgacaatggttttttcagcagcacaacggaattggaaaagcgtctggcacgaaaggtcctgcgagaccggggggaacgttag

SEQ ID NO: 110692 - DNA, 876 bp, Enterobacter aerogenes
atgcataaatctgacggccttcaggccattgaaaaaccactgtcttcactgccgctcgctattggcgaacaaatccttaagcacatccacaagctggcaaaccacgaaccggtaattgggattatggggaaaacaggcgcaggcaaatcatcgctctgtaacgaactttttcagggggaggtgtccccggtcagtgatgtaaacgcctgcacccgtgacgtactgcgatttcgtcttcgcagcggtgatcgcagcctcgttatcgtggatttacctggcgtgggggaaagcgggcaacgggatcatgaatatattgcgctatacaaccgtattctgccggagatggatctgatcctgtgggtcatcaaagccgacgatcgcgcattgtccgtcgatgagttgttctggcacagggtgatgaaaaatcaccgccagcaggtactgttcgtcatcaatcaggcggacaaaatggaacccagccatgaatgggatgccgctaccggtacaccttccgtgctgcaacgggcaaatctcagtgttaaacaggccacggtgacggcgatgtttaaaccgtatcatccagtatgcattgtgtctgctctcactggctggggcattgaggaaatggtggagacgatgatgcgctgcctacctgaccacgccaccagcccgctggcaactcaactacatgacaggctctgcacggagccggtaaaaaaacaggccagggacagcttcagctatgccgtgggaagggggtttgatagcgtggagtcatcccttcagcttccggcaccggttcgggcgctcattcgtaccgtacgggaaaccgtggtgtcagtcgcacgggccgtctgggactggatatttttctga

SEQ ID NO: 110693 - DNA, 1062 bp, Enterobacter aerogenes
atggaaatggaaacagcaaaaatactaaaaatactggataaaaacacagcgtggttaaaaagaaacccgagagcatttcatttttatattttccgtgtgtgctcgttgatttcagaaggtattgagaaaaatattatccataatgccggggacagtaccggctcttccatttatcaaaggtataatgcgtttaacagagagatatcaaccgggccatattctcaggcctccccggatataattccatggtcacaggacttgcctgctgagttgaaggaaaccatcgataaacaatctggtattgttgatgccataagtaaaaatgagacctctttgccgatacccctgtcttcacagaaggagaaccccggtactgaaaaacagactcaaaaagaacagtccggtaaaattcctcctgaaaatatcagaaatgcaaacggactgctttttaatcgaattaagaatatcactgagaaaaaaatagacttttctttatttgttgacttgttgagatcttttgtaggagatctaaatacaatctcagcattaatcttctctttagataaggaatggcgtgaacagtacgatgcttacccctcacctttttcatgggttaacagcaaagatgaaatacaatgtcagtggttatggcggcagatgcgtgagcgatgcctgggtattcctttaaaacctattgacagtaaacagaagttttattttatctgcgctatctttgataactggaagggatggaccggagagcaggaggattatctcaacagtaaaaatagcaaacgtaagaagggaaaatttctggggaatggcattagtcaggaagagggtttcaacataaatcacaaagacattcttcttgatgagttaaaaaaggcatgggaacaaaaagtaagaagggccagaaaagctgataaagatattcccatcagcctgacaaaaattgccaggaagaagcttgagtttatcgcttcagtgaaccaaagcacacccgaagcgacacttcgggagctgattaatcatgcttttttgcaggtaaaagatacataa

SEQ ID NO: 110694 - DNA, 423 bp, Enterobacter aerogenes
atgtacgcaaaatccttcatggctcttgacggtaatggtcgtctgaccggtgcccgtaatgcgcagaccgcgccttacgaccgttatagctgccatctgtgtggtagtgccctgcagtaccatcctgaatacgacaccgaatgcccgtggtttgaacaccggcacgatacgctgacggagaacgggcgacagcactgcccgtatgtcaaaccggaagcgaaagagagccgccatatccggcaactgcaatggtatgtaccagaggcccgtccgctggttcatcaggccgactggcactgttctggctgcgacagcgattaccacggtgaacgttattgcctgacatgcagaaccggcaaatacagccagcaatatgctgacatgactggctgcacgccggaggtgacggcatgcgcatactga

SEQ ID NO: 110695 - DNA, 264 bp, Enterobacter aerogenes
atgcgcatactgaaatgctacctcgcgaatgatgcctcaggccgttttgtgacggcggatgatgccgcgagagcaccggatggtgtatggacctgcacgtcctgcggttgtgtgctttacctgctgacgggcttcgttgagaaaccgtggtttgagcacgaccagcagacggttgctgaacatgtgctgatgaactgtgcacatctggacccggaggtcaaagccgatgcccggggcaggaggctgcgcgtggtgtggcagtga

SEQ ID NO: 110696 - DNA, 258 bp, Enterobacter aerogenes
atgaataaccatcacaccgatgcaaccgctgcggatgcaccatgtacgcgcgtttttctgcagcaggctgtagatcattatccgcggctggcggcgttcagctttacgctggcgctaccgtaccgcgagagcatgcccgatcgccgatcattgattttgcgctttcataccgaagtctggcagcgtattggcgaatattcgtggaagcgccagcaggagcgcaggagttcaccgccgacgcggttacgctgggtatag

SEQ ID NO: 110697 - DNA, 255 bp, Enterobacter aerogenes
atgaatctggatacgcaggggatgatacaggatgcccctcctgccgccagtgtactgcaggggatgagtatgatcatcactgacgcagggcgggtagtaacagacgctgtcgatggcataaccggcatgtcttctttcatcatcagccgtgcagagcgtggtggttttacgcagtcattcaacctgttgcaggccagagttcaggaaatggcatccccggtggcgatgaccagaacgggcgtcatttgtccgtga

SEQ ID NO: 110698 - DNA, 627 bp, Enterobacter aerogenes
atgtctaatacctacagtaaatttggtccagtgaactcgtactatatgaaccgtataactgaaatcagcgataaggctatagaagcgcatgcaaaaacatccgtctttacattcgttctcagactgcctgaataccgcgatactggcgatagtattgcatgtgacccgaatctcaaggctggattaatagaacgcttcacgggggcgctgaagtcccgaatcgacgcccatcaagaacgtcgtcagcgtaaaggctaccaggtataccccacagacctgaggtatgtctgggtccgggaggtagggcaaagcggtaaatctcactatcacatagcggtattcgtcaacaaagatactttcaatacgttaggggattactctaaacgagacaataaccttgggagttacatcagtgacgcatggttaaacgcgttaggtctgttcgactttcctgagtacagaacactggtttcctttaccaatgcgccacactacctagagcgtcttcggcaagaccgctttgaacaacaacgccgtgagctgctgagccatctgggctatttcgctaaggagcgtactaagcagtgcagcaaggaagagcgatcatttgggggaagtatcaggtaa

SEQ ID NO: 110699 - DNA, 1257 bp, Enterobacter aerogenes
gtgccaggtaataagaatttcattacatctgagacgactcaaacatggctcgcacagttcgatcctcagtctcaaatcaaaatgatcaagatgctcgaggcaatgcggttggtatccagagatcaattttcggaatccattcgtacgaggatattacagatctctgaaaaggttgatggtcgcgttggcctatacgttgagcgtgagattccacccaagaaacagccgccaatccccttatttcagcaagtctctacgcggcctagacgagcttttggacaagggcctgccccgattagcccagatgaagataaaccagcagatgtggggtctgaaggaatcgtagcacagttggtatctgaattatgtcgagaatttcctaataagtttgtgaatcatccagggcctgatgcgcttcgcaaacaaaaaaaacctattaacactctgcttctagttacagatcttatcggaagcggggagcgagccgagcgttatttagacgccttttgggcggtctactctgtaaaaagttggtggtctggacgcagatcgaacggtctttcgtttgggatcgtcggttacgccgcaacgcctgtcggtatgaaacgagtgcaagctcattgtctttcacctaatgtttgtatcgttaccgagtgcccaacaatcgacaacgccttcgacaaagagcaggcaagcgaaattaagcaaatttgtataaagtacgattcatcatcaagtaatgttgaatcactgggctttcagcaaactggtgcattgattgcatttgctcatggtgtgcctaacaacgctccacgtatattgtacaactacagcggctcttggacgcctctgttcgctcgccgcaaaacttcagctacacgtgagaattttgatcatcggttgggacaagaggatgttcagcggctccttgtgagaatgcgccataagcgcctgtcggatgggcaagactggagccgagcacaaaaaggaactcttgaaacctatctagtactagctgccttatctcgcccccctcgaaacattgaggtcgtcgcacgtcgaactggattgactttgctagaggtagaatcagtgctcatcaaagccaaaaagaatgattgggtagataaacgtaatcgtttgactgatcagggacaggcctatttatgtgcggcaaagagtaaaaagcgtagctcgcaacttattgaaagtcacgctcaattatactacccttccactctgagagtttcagtatga

SEQ ID NO: 110700 - DNA, 1083 bp, Enterobacter aerogenes
atgactgctgttggaaagagaatcacgtcttataacagggaagtacagcctgttttcacgctcaaacatcttgcagtgttaagcggagtagattatggctttcttcgacatacagtaggcagggataccaatgcctatactgaatttcggatcagaaagcgctcatccgtccatgggcaaacccactatcgtactatctgtgtcccatccccctctctcatgaaggtgcagcgatggattgctcgaaatattctatctcatgtgccagcccatccgtgcagtgttgccttttccactggcgatagcctatataaggctgttgctccgcactgcccatctaaatggctagtgaaactggacattcgtagtttcttcgaatctattaacgaaatctcagtttatcatgtgtttaagcagctaggctttgagtcacttattgcatttgagatggctcggctctgcacacatgttggagctgaaccatcgcacgagcccgatatgaggtatgacagccatgtactacctgagcgaatcatcaaattatatcaacatccaaggcaaggacacttaccgcaaggtgcacctactagccccatgttggcaaacttggtttgtcgatcgttagacgagcgattgtctaccattgcggacgagcattctgttcgctatacccgttatgctgatgacatgacattttcctctaacgaggttgatttcggacgagagagggcagggagattgatcaagcttgtttatcagcaacttaatcgccaagctttgagaccgaatactgcgaagaccaccgtcgtttctcctggggctagaaagcttgttttggggttaagtgtagaagaggatgttccacgactgacgcggcaattcaaagaatcacttcgacagcatatctattatttgcttcacgatgacataggtccggcaaagcacgcagcgactcgtaagtttgcatctactatcgggttacgtaatcatattgaaggactactttcatttgcttctcagattgagccaacttgggcggcactccagattagccgttttcagactgtctcttggccacactag

SEQ ID NO: 110701 - DNA, 774 bp, Enterobacter aerogenes
atggataaagcagaagttctggagaaaaatggttgggttgcaaccaacatcgatgattttgcacaaagagtgaagggaattccacgggatagttaccctccattacgttgcctcgcttgtgaaaagccagtgcatgatagtggattggtaacccctaatcctgattatcgccccaggttctcgcattcagtacctccggagaatggagagctttgcccactaagtgcagagacacgccgtttcagcgggttagccggaaatgacagcactgcaacaacggagctagccagaacacggcgtgcgcagtttatggtcttcgatagtttatgtaaggcctatattgtctgccgctcactacggggaggaaagggtaagcttgaccaaaagtcgtttattcgattggtcaggatagctgatagctttgggatctggcgttatagctatctccctgaatggggtatccctcttcttttaatgctgatggacaatcatccaacaccgaatggtaagtctgcatttttctattcacttaagaaagacagagcccgccggggggttgagtggcaaaaccttaacgtttggctggaagcgcattgggttagcagtggtgaacttattgtaccaaatcctgagaagccagcttcgttcctgctggagattcccttcaagaaggatgttgttaatgacattttggggaaagaggatctttcgtggtgtacgaaggacgtgcttaaaattctatattcttttagtaccagtgcaaccgatgtttga

SEQ ID NO: 110702 - DNA, 2415 bp, Enterobacter aerogenes
atggatcatagtgtacacaacaagcttatctcttttatttggaacattgctgacgattgcttacgcgatgtgtacgttcgcggtaagtaccgcgatgtgattctgcctatggtggttttgcgacgtttggatactttgttagagccaaccaaggaagctgtattggcggaagttaagttccagaaagaagagatgcaggcaacagagctggatgatgagcccttaaagtcagccagtggctatgtgttttataacacgtcaaaatggacattgaagtcactgtttagcaccgcaacgaacaatcagcaaatacttctggcaaactttgaagagtacttacttggctttagcgataacgttaaagaaatcgttgaatgctttaaccttaagtcgcagattcgccacatggcttcgaagcaagttctgctggatgtggttgagaaatttgtctctccctacatcaatttaacgccagaaatcgtggaagatcccgatggaaacaagatgccagccctcaccaacttgggtatgggctatgtgttcgaagagttaatccgtaagtttaatgaagaaaacaacgaagaagccggtgaacattttacgcccagggaagtgatcgagctgatgacgcacttggtttttgatccggtgaaggacctgcttccactaaccatgactgtttacgacccagcctgtggtagtggcggtatgttgactgagtctcagagtttcattgaagagaaatatcctaataacaaccgggacatctatctatacggcaaagagattaacgacgaaacctacgctatctgcaaatcagacatgatgattaaaggtaataatcctgaaaacatcaaagtaggctctacattgtctacggatgagtttgcgtctacacggtttgacttcatgttgtctaatccaccttacggaaagagttgggcatcggagcaaaaacatatcaaagatggtagcgatgtaattgatcctcgctttaaagtatgcctgaaagactattggggcaacgctgaaatagtcgacgccacaccacgctcaagcgatggtcagctactgttcttaatggaaatggtcaacaagatgaaagacccctccgtcagtccactgggtagccggatcgcatctgttcacaatggttcttccttatttacaggggatgcgggcggtggagagagtaatattcgccggtttattatcgaaaatgatatgctggacgctattattcaattacctaataacctgttctataacacaggtattactacctacatttgggttcttaacaacaataagcctgcctcacgaaaaggccgggtgcaattgattgattccagcttactctatcgcaaactgcgaaaaaatttaggtaataaaaactgcgaatttgcacctgaacatatcaatgagatcacaaatacctatctttcctgcgtgaatgttgaaaggcagttggacacaaacaatgatcctatcggtattgccagcaaggtatttagtaatgacgactttggttactataaagtcactattgaacgtccagaccgacgtaaagcacgctttactcaggatgctattgcatcattgcgttttgataagcagtttagcgacgttatgacacacttgtattcagaatatggcgatgatgtatataaagaaacaggttttggcattgatcagaaaaagagtttcctgaaattcattgagaaagaaatcattatctggtgtgaagaaaacgaaatcagcttaaatgcaaaagccaaggccaaattgcttgatgtcaagcattggttggcacttaaaagtgttttggaaaccgctcagaaattgatgtctgatattggtaatggggagtttaatgattttaatgagttcacgagtcttgtcgataaatcacttaaaacgattggtgtaaaattatcttcatctgagaaaaacgctatcctgaatgctgtcagttggtatgacgagtcggccaaaaaagtagttaaaaaagtctttaaactaagcggtgataaattagatgagctgcttgaccgctatgaatgtgaattggatgatttacctgattttggctattacccaagcggaaaaaaaggtgaatacattacttacgagaccaacgctgaccttcgtgacactgaatctgttccattaaaacaaagtgtttaccaatactttcttgatgaggtgaaacctcatgtctctgaagcctggattaacctagattccgtgaaaatcggttatgaaattagctttaacaagtatttctatcgtcacaagccactacgaagcttggaggatgtggcaaaagacattattaccttggaacaaaaatctgatggattaattgcacaaattttgggtgtgaaattggcagaagtactgggggaagcctga

SEQ ID NO: 110703 - DNA, 1305 bp, Enterobacter aerogenes
atggataattttgtttcaatgccacaatatgagacctaccggaattcaaacatccagtggataggggaaattccaaccaagtggggcctagagaaagcaaaatggttattttataaagctgagagaaaacctctcgtagatgatgaaatagttacttgcttccgagatggccaagtaactttgagaaaaaatagaagaatagaaggttttacaaatgctctaaaggagcacggctatcagcgaatttgtaaaggggacttggttattcacgccatggatgcttttgcaggtgctataggtgtatcagattctgatggcaagtcgacccctgtctatgccgcgtgtattccaagggaaaaagggcgagtaaattcatattattatgcctactacatgcgcgacttagcattatctggttttattgaatctcttgctaaaggtattagggaacgttcaacagattttcgcttcaacaactttgcagaactgttattaccactcccaagttatgaagaacaaagcctaatcgtgagcttcctcgataagaaaaaagcacaaattgacgatgcaattgctataaaagaacaagaaatcagcctgctgaaagagcgtaagcaaatcatcattcaaaaggcggtcatgcaagggcttgatccgaacgtgtcgttgaaagattccggtgttaattggattggcaagattccagagcactgggaagttcgcagaagtaagtttttatttacacaaagaaaagagcgggcatggaaagatgacgttcagctttcagctacgcaggcttatggtgtcatccctcaagagcaatatgaagtattaacaggtaagcgtgttgttaaaattcaattccatttggataaaagaaaacatgtcgaaagggatgacttcgtaattagcatgagaagcttccaaggtggtttagaacgagcctgggctcaaggctgtattcggtcatcctatgttgttcttagaccattagaggacattgacgctgcattctatgggtatttgttaaaactaccatcctacattactgccttacaacagactgcgagctttattcgagacgggcaggacttgaattttgataatttttcccaagtagatttgtttattcctccaatccatgagcagcgagagattgcaagttatgtcagctcatttatggcttcttcagatgagggaatcgagttgttattggcgcaaattgagaaactcaaagaatacaaaaccactctgatcaatagtgctgtgacagggaaaataagaatcacgccggaaatggtttag

SEQ ID NO: 110704 - DNA, 3018 bp, Enterobacter aerogenes
atggttagtcaaaccaatgaacaagcattagagtcaaccattgaaaaatgtttggtaggtatcagtactgaggagctcaaaggtggcctaagcccccagttctccggtgcagggtatgtcattggtgcttctagtgactttaatatgcaatatgccattgatgagcgttttttctggcaatttctagaaaagacacaggaagctgaactgactaaattacaaaaaaataatccagcagattggcaacgcaagttattggaacggtttgatcggctcatcaaaaagcacggtattttgcacgtactcaagaaaggcctgagtgtagatgatgcccacttcattttgctctatccggcaccattggcgagcagtagcgagaaggtaaaaaaagattttactgataacatttttagctgtacccgacaggtacgttactcactagcgaatccattacaagaaatagatatggtgctgttcatcaacggcattccgttgatcaccctggagttaaaaaatgcctggacaggacaaacagctcgctaccatgggcaaaagcaatatcgtgacgatcgtgatgctatccagccattactgacctttggccgttgtttggtgcatatggctgtggacacagacgaagtttatatgacgacgaagttggcgggcaacaatacatttttcttgccgttcaataaaggacacaatcttggacagggtaatccccctaacccagctggccacaaaacggcatatctatggcaagagatattcaccaaagaaagcctagccaacatcattcaacactttgtccgtctggatggcacaatcaaagagccattaccgaagcgaaccttatttttccctcgataccaccagttagatgttgtcagaaaattggtcgttcatgctgctactcatggcgttggtcagacatatttaattcaacactcggctggttctggtaagtctaattcaattacctgggcggcctaccagcttattgagacctatcctactagcgaagctgcggcaggtggtaaaagcctggagcaacctttattcgactctgtgattgtcgtgactgacagacgtctgttggataagcaattgcgggataatattaaagagttctcagaggtaaaaaatattattgcacctgcgcacaaatcatctgagcttaagcaagcacttgaaaacggcaagaaaattattattacgacgattcaaaaatttccgtttatcattgatggtattgccgacctgagtgataagcgttttgccgtaatcatcgatgaggcacacagctctcagtctggttcagcgcatgacaatatgaaccgtgcaatgggtaaggctgaagttgaagaggccgaagatgctcaggataaaattcttcaggcaatgaagtcgcgtaaaatgcgaggtaatgcatcgtatctggcgtttactgcaacgccgaaaaacagcacgctagaaaagtttggagagcgtcaggaagatggtgcatttaaacccttccatctttactcgatgaaacaagcaatagaagaaggttttattctggatgtgcttgccaattatacgacttacaagagctattatgagattgaaaaatcgatagctgacaacccagagttcgatactaaaaaagcccagaaaaagcttagagcctatgttgagcgcagtcagcagactattgatacgaaggcagagatcatgttggagcattttgtgcctcacgtggtaaatgcgaaaaagctcaaaggcaaaggaaaagggatggtagtaactcaaaacattgagactgccattcgttactacaaagccatcaaacgtatacttgaagaacaaagcaacccatttaaaattctgattgcattctcgggtacgaaagaagttgatggaattgagtacactgaagccgatatcaatggctttgccgaaactgatactaaagatatgtttgatactgatgaatatcgacttttagttgtcgccaacaaatatctcactggattcgaccagccaaagctttgcgcgatgtatgtggataaaaagctagcgagcgtcttgtgtgtgcaagcattgtcgcgactcaaccgtagtgcacccaagtttggaaagaaaacagaagatttgtttgtactggatttcttcaattctgtcgaagacattcagtcagcatttgatccgttttatacagccacatctttgtcgcaagccaccgatatcaacgtgctgcatgagttaaaagatgaaatggatgatgtgggggtttatgagtggcatgaaattgaagagtttgtaattcgttattttaataatgaggatgcccagactcttagcccgataatcgatgttgcagcagctcgttttgactatgagttagaactcgaacctgacgctaaagttgatttcaaaattaaagccaaacaattcgtgaaaatctacgggcaaatggcctctatcatgccttatgaaatggtgacttgggagaaactgttctggttcttgaaattcctcatacctaagctgaaagttgaagaccctgatgcagatgccattgatgagcttttagattctgttgatttgagttcctatgggctgcagcgtgtgaagctcaatcacacaatcaagttgagcgatgaggaagcggagcttgatccacaaaacccaaacccacgtggagcacatagcagtgaaaaggaaaaagatccattagacgaaataatccgcaccttcaatgagaggtggttccaggggtggagtgctacgcctgaagagcagaaagtgaagtttataaacattgctgagagcattcgtaatcaccctgattttgagtctaagtataaaaataatcctgatccacataacagaaacttggcttttgagaaaatgcttaaagagattatgttgcaacgacgtaaggatgagctggagctttataagctgttcgcaggggactcagcattcaaagcatcttggacgcaaagcatgcaacgaatgatcggtgagtaa

SEQ ID NO: 110705 - DNA, 1041 bp, Enterobacter aerogenes
atggaaataatgagttttgaggaagtaattacttatttacataagaaatctcggccatactctctacttatggggaatggtttcagtatggcctatgataacgaaatattttcatataacgccctttataattttttaacgtcgagagacgatcaattaatcaataaactttttgatgtgataaaaactaaaaattttgaattagtaatgcagcaattagatacaacattggccttgttaaaggcttttggctcggatgataagttgcagagtgatattattttagcaagcaaaaaattgaaagacggtttgctaagttcgatacatcaacttcatcctgagcatgtatataaaatcccagagaaaaagataattgcttgtgctgaattcttaagtttatttattaaaagcggtgggcatattttttctacgaattatgacatgttattatattggacccttatgcgcaagcatgttgaaaatgctatcgatggctttggtcgagagatagaaaatcttgatgaagtgctccgtggagaaacacctgaatattcggatcttgtgtgggggccaaatatagagaaccaaaatattcattatttacatggtgctttacatatttttgactcaggagttgatattgaaaaggaacaatatgatcaaagtaattttttattagaaaagattaaaaaaagactcgatagaggaagttacccaatatttgtaacagccggaaacggagatgaaaaacttagccacattaggcataatagatatttatctcattgttttgataaattatcatcagtcgatggctctttgattacttttggttttaattttggtgagtatgatgagcatatcattgaagcgatcaacaaagccactcatgctcaaaataaaaccccaccaaaactatggagtgtttatattggggtttattctgataatgatgcggaacatattcgttcaatacaatcaaaattccacgcaaaagtaaaaatttttgatgcaaaaacagttaatgtttggggtgtttaa

SEQ ID NO: 110706 - DNA, 267 bp, Enterobacter aerogenes
atgaaaaagacccgttataccgaagaacagatcgcgtttgcgctgaaacaggccgaaaccggcacccgcgtcggggaagtctgcagaaagatgggcatttctgaggccacgttttacaactggaagaagaaattcgccggtctgggcgtaacggaactgcgccgtctgcggcaactggaggatgaaaatcagcagctgaagaaactggtggcagacctgagtctggacaaagagatgctgcaggaggtactgaaacaaaagttctga

SEQ ID NO: 110707 - DNA, 201 bp, Enterobacter aerogenes
atggaaaacccagccatcctgttacgccgtttaaacccttactgcgcccgcgccctggaaggcgccgcttcgctgtgtcaggcccgcgcgcatgcgcaaatccttcccgaacactggctgctaaagctactggagcagggcgagggagacctgaccgttttagcgcggcgttatgagtgggatatggacgctatctggtag

SEQ ID NO: 110708 - DNA, 1242 bp, Enterobacter aerogenes
atggcgtttgtcagtttgaaaccatgggaagagcgcagcggttcggaaaacggcgttgaagccattattaagcgtgccaccgccgcatttagccagattaaagatgcaatggtcttcccgttcaacatgccggccatcatcgagttaggtaccgcgaccggtttcgactttgagctgattgaccagggtggcttaggacacacacagctaactcaggcacgaaaccagcttctggggatggtaaaacagcatccggaacagctggtacgcgttcgccctaatggccttgaagatacaccgcagtttaaactcgacgtcgatcaagagaaagcgcaggcgctgggcgtctcgttatccgacattaacgaaacgatatcagctgcgctgggcggctattatgtgaatgactttattgaccgcggccgcgtgaagaaagtctatgttcaggccgatgccagtttccgtatgctacccggtgatatcaataacatgtatgtccgcagctctaacggtgaaatggtgccgttctcggcatttgttacttcacgttgggtatatggttctccgcgtctcgaacgttacaacggcctgccttcgatggaaatcctcggcgaagcggctccgggtaagagtaccggggaagccatggccttgatggagcaactggccagtaaactgcctgcaggtatcggttatgactggacgggcttgtcttatcaggaacgtttatcaggtaaccaggcgccagcgctatatgctatttcgctgatagtcgtcttcctctgtctggcagcactctatgaaagctggtctattccattctccgttatgctggttgtgccattaggagttatcggcgcattattagcagcctcagttagaggattgaataatgacgtttatttccaggttggcctgttaacaactattggtttatctgcgaagaacgccattcttattgttgagttcgccaaagaccttatggataaagaaggcaaaggtattatcgaggcgaccctggaagcatcccgtatgcgtctgcgccctatattaatgacttcattagcctttattctcggggtcatgccgttagtaattagccatggcgctggtagcggcgcgcaaaacgctgtcggtaccggcgtgatgggcggtatgcttaccgcaacgctgctggccatcttcttcgtaccggtgttctttgtggttgtaaggcgtcgctttacccgccacgcagaataa

SEQ ID NO: 110709 - DNA, 183 bp, Enterobacter aerogenes
atgtacgagctagggggtcgcatgtacgatcattgggggggtcggatgtacgtggataactttatgtttcaacagcttttttacagggttgttcaccttatccctaactttactcaaagagggggagcggcattaacccgaaataaaaaaggcccgtatgggcctatttttttgtttccttga

SEQ ID NO: 110710 - DNA, 216 bp, Enterobacter aerogenes
atgaaggatatttcaaattttatgcgtggtactgtaaagcgggtttatatagctgaaaataaatctggttgccctgcatttctggattggtgcagaaaacttaataaaaaagaaaaattaccacaggggaagttctttagaaaatatgaaaaattccagcaattttattcattgaatactgataacaaaaaaatagtcagcatcgactttgattaa

SEQ ID NO: 110711 - DNA, 306 bp, Enterobacter aerogenes
atgcgtcagcggcatcaggagctggtcgtctggcggacgctgggggccggtaaaaacttgctacgtaccacgctgtgggcggagttcgctctgcttggcgtggtgtcggggctggtggcggccattggcgccgaggtggcgctggcgatgctgcaaaccaaagtgtttgattttccatggacgccggactggcggctgtgggttatgctgccattatccggcgctatattattatcgttgtgcggcggatggttgggattacgcttattaaaaggaaaagcgttattccgacaatttaaccagtaa

SEQ ID NO: 110712 - DNA, 807 bp, Enterobacter aerogenes
atggcgaaagtgacgcgagcaattatcgttggcggcggcattggcggcgcggcgacggcgctctctctggcgcgccaggggatcaaagtgatgctgctggaaaaggcgcatgaaatcggtgaaatcggcgccggtattcagctggggccgaatgcgttttcagcgctggatagcctcggcgtcggcgaagtggcgcgccagcgcgcggtgtttaccgaccatatcacgatgatggatgcggtgaatggggaagaggtagtgcgtatcgagaccgggcaggccttccgtgaccatttcggcggcccgtatgcggtgatccatcgggtggacattcacgccaccgtctgggaagccgcgctgacccatcccggcgtggaataccggacttcaactcaggtggtggatatccgccagaccgccgatgacgtgacggtctttgatgacaaaggcaacagctggaccgccgatattctgctgggttgcgacggcgtgaagtcagtggtgcgccagagtctgctcggcgatgcgccgcgggtcaccggccacgtggtgtaccgcgcggtgatcgaggccgccgacatgccggaagacctgcgtattaacgcgccggtactgtgggccgggccgcattgtcatttggtgcattatccgctgcgcggcggcaaacagtacaacctggtggtcaccttccatagccgcgaaagcgaagagtggggcgtgcgcgacggtagtaaagaagaggtgctctcttactttaaagggattcatccgcgcccgcggcagatgctcgacaagccgacttcctag

SEQ ID NO: 110713 - DNA, 273 bp, Enterobacter aerogenes
atggcgctggaggatgcggtaacgataggtaaagcgctgcagcagtgcgacggcgacgccgctcgcgccttcgcgctatacgagtcggtgcgtattccgcgtaccgcgcgaattgtctggtcaacccgtgaaatggggcggatttatcacgcggcgggggtcgaacgtcaggtacgtaatcttctctggaagggcaaaacgcaggatgaattttaccgcggtatcgagtggctttacggctggaaagaggataactgcctcgaaccacgctaa

SEQ ID NO: 110714 - DNA, 255 bp, Enterobacter aerogenes
  misc_feature (196)..(205): n is a, c, g, or t
atgtcacttctcgtaaggaatatattagtcagcacatcacttgcgttggctgattttattggctttattgtgtctccatacctggctatggggatattagtatttattgcaaatgaaagtgatagggtgacgcttattcatcagacggatggatggtttcttttacatctaatactggcggtttgttgcgttgctnnnnnnnnnngcacctgctggcgatgtttgttgcgttgcttggtattcaatgagacttag

SEQ ID NO: 110715 - DNA, 309 bp, Enterobacter aerogenes
atgaataaatttctaactgacacattcagtcaggtgatttattacggcctgctggtgacgctggtatttgcaacgtttacagatcaagacaatatcctcagtgttgcggctgcagcgttctgggttgttatcgcccttgtgattgttcttgggcctttgactctcatccttgcttacggtgctgagctagttggcaacgagaaatccggacatgaggtgttggaagcggttaaaagaatcacccggcgaaaaaatgtcatcgctcgctggtgggggcatgttgcttaccatcgtcctgctggcctatag

SEQ ID NO: 110716 - DNA, 495 bp, Enterobacter aerogenes
atgggctggaaaagaaatccttgggcgcacctatatcagtggattagatatttggaccaagaaggttatagtgaacaaaagattcttgagacatttggtaaaaaccaagcaacgcgagctgttaactttgatgatcccagtgatgtggctttctgcaccacgttggtacgtgatgctttaggcttacttcctccaggcgaaattgataaatatattcagccttcatcagttacaggctttacagcagttaaaatcgcagatgaaggatatctgtatgtagctcacacccctcacgatgaagatgactttttgtttttggtcaacctggacgtattcccagatgcaaaaaaccaagacgatgttgacaaaatacttctctcaaagcatcaagaagtatgcgatttattgcttcgtaagttccacactaaaccgccgtatggtatgaacggtacagataaagtagcttctgcacgtattttcaaaagagagctttga

SEQ ID NO: 110717 - DNA, 576 bp, Enterobacter aerogenes
atggacgcatggattggctccatgattggtggtgccgttggtgctgtcataggccatataacgaatcattgcattggttggtataaagagaacaagcaatcatcaccagaaagaaaatttatttgcgctgagcttgtatttcttctagaagaatatgccaaaaaatgtgcagaaatttcagaggattatggtgaaaacactagagagttaggagacgctgaaccagcagtcacacctcctaatctactagattattcatcagttaagggtaattggcgttcattaagttctgacattatgtatcgattatgtagtttgcctgcagaacagaaagatgctcaaaaacatatctcagcatccttggagtatgtggctacacctccaaactacccagagtattttgaaacgcgacagtatcattactcaatcttaggtttgaaagctgcgcaaatcgcgtcagacatcagaaagcaaaataattttccagatggagatttatatcgttgggaaatcccggcgatgacttcgaaggtcaaagcgttagaaaaaaagcaactaaaggaagatgtgttttag

SEQ ID NO: 110718 - DNA, 486 bp, Enterobacter aerogenes
atggctgcactaaaaccagaagtgagagcctttatcgttcaggagctcgcttgctttgatacgccatcccaaatcgtcgagtccgtacaaaaagaattcaaggttcaggtgacgcgccagcaagtggcatcacatgacccgacaaaagtggcaggaaaaggcctggcgcagaaatgggtcgaccttttcaaccgcacccgtgaccgcttcctcaacgaaatctccgacatcccgatcgctaacaaggcctaccgcctgcgcgtcctgcagcgaatgtcgacgactgccgaaggtatgaaaaacctcggcatgacagctcagatactggagcaggctgcaaaagaggttggcgacgcctacagcaacaagcaaaaggtcgagctgaccggtaaagacggcggcccgctgaatcaggtgacgtacaccgctgaagactatgcaaaggcccagcagaagctggagggaaggttagaagggctggactga

SEQ ID NO: 110719 - DNA, 534 bp, Enterobacter aerogenes
atggctaacctgaaaacgaaactcagcgcggccatgctggcgcttatcgctgctggcgcatcagctcccgttctcatggatcagttccttatcgagaaggaaggaaacagcctgaccgcgtaccgggatggcagccaggggatttggacaatttgccgcggtgctacgcgtattgatggcaaacctgttacgcagggtatgaagctgacccaagccaaatgcgacgaagtgaatgctgtggaacgtaacaaggcgctggcgtgggttgatcagaatgtgcgggttcatcttacgccccctcaaaaggtcggaattgccagtttctgcccctataacatcgggcccggtaaatgcttcccttccaccttctaccgcaagctgaatgccggtgaccgaaaaggtgcctgcgctgaaattcgcaggtggatttttgatggtgggaaagattgtcgcgtgcgctccaacaattgttacggccaggtctctcgccgtgatcaggaaagcgcactggcatgttgggggatagatgaatga

SEQ ID NO: 110720 - DNA, 141 bp, Enterobacter aerogenes
atgaaccatctcgccatagagcgcatccgaggccgctggcaaaagctccgcctcttgcgtagccgcggcaccgttttggttgactacaaaatattacgcaatttcgtccgtatctataagagcctgggagaagcggcatga

SEQ ID NO: 110721 - DNA, 261 bp, Enterobacter aerogenes
gtgaatgacgtaaaatccaaaatcatgcaggtgatgaaagagggcgcggaccagcagaagcaatgggcacatggggattacccatttcgcttggctacctggaatatccgctgcgcgatggagcgcaaattccccggggtagagtggaagaccgcggacctgcgcaaagagcttatcgaactggcgaaagaggggctggtatcgaaagatgaataccatagccgcattggtcaggcagtatggcgattggaggtgaagtga

SEQ ID NO: 110722 - DNA, 309 bp, Enterobacter aerogenes
atgaaagaactgagattttacggtgccagcgatgaccttttcgagtgtgaaggcgctattcgtgaagaaatctgcatgtacagcaatcctggcgtttatcacctcaaatctactgacggcgaaatgctggttattgcctgttatacggacgaaggctgctgggctctcggagtcggtcaggtcaatgaagatatgccgcttccagcatggccggcttcatttaaccagcatgagagaggctatagcgttgttctgacgctgcaggttcctgacgatactcaattggtgctggagaacagcgatgactga

SEQ ID NO: 110723 - DNA, 207 bp, Enterobacter aerogenes
atgctaaagcctaatcacgtttatatcgaggtatcacgaaatcaaaccggcagcttgtcattgtgcgttagtgatgacaatggcggtttccgcatatcgggcgcgaaggttggcggctgcgaaaccctgaagtgctttgaggtcgacgcagatgaacttatcaaacaaataaacgcttacaaaaactcaaagggagaatcagcatga

SEQ ID NO: 110724 - DNA, 420 bp, Enterobacter aerogenes
atgactatcacactacaggcagtaaacgagctcatcgccaccctggagagcgcaggcgagctgtcgatcagagagcagaagttcctgaagctggcgaaagcgtaccagcagctggctgcggagaatgtggaggcaaaaaaaataatcagcgaatgccgggagtatttcatcgctggggtgatgaaccgtatcagaccaacgaatgaaggatacctgcatatgatttgcgacacgtttgcagacgaaaccccagcaaccgatcgcatcgtagccgggattaaggctgatggggtggatgagttcgtatccaacgccgtgcataagatttttgatgaaagcggagcagtgtcagctttggcttacctttcgctcgctaattcatacgtgaagcaactgcgcgagggggccgacaaatgctaa

SEQ ID NO: 110725 - DNA, 825 bp, Enterobacter aerogenes
atggaagaagactcacaacctgaaaagaacattactattcaagaacccttgtttagtcttgagattgtggattataagccagcaatgggcacagctcacctaaggcatacagttatggcctccgacggtttagagtatgcaataaaaggggtttctgatggtgatgcatccgctttgacagggattccccacccaaagcaaattccagcatcagaatggctatgtactaaacttgctgaatttagtgggcttcctaccccggcctgtagggttttgattgacccggatacaggagagcacttttttggatcaaaatatgacctggctgccatgagtaagccacaagaagaaattaactttgccgctgaattgatgtccggaccttctattctacggaagcaagtatggtcagtttacgccttcgatcagttcgtatttaatattgataggcatattggtaactatctgtacactaagaaccgatatggaaacctgactatccaagccttcgatttcagccttgcagctatggttatgggttggccgaacaaaaccgacgcagccctaataccaatgggctacaacaccacaaactgctggcaagcgatcaagcagttgacatataatgatgtttcgtgtaaagcgcctgcggaagctgtattggataagctatccagaattagctctagcacgatagaacggatttttgaagacatgccggaagcatggatcaatcctttgcagagggatgctctgctaacctggtggtcaagcgacggcagaatgaaacgaatcgacactgttagaggggaggtgctgaaatga

SEQ ID NO: 110726 - DNA, 819 bp, Enterobacter aerogenes
atgaatacatataaatacagtattgtcagaataacaccgaaccctgtccgcgccgagacaatcaacgttggccttgtcgtcatgaagccatctggcccagatgtgcgcgtcatagaaacccctactaaactaaaagctattacaaatgattttgggcttgaagcattagaaaatagccagaagcaactggagactattttaacttctggcttaagcatcgaacaggcttctctctttttccaaggtagctttgccttgtcaagcgtaggtacatttcatgctgccaatgaacgtgaatatgaattaaaaatcaatgaattaaataaattattcataacacctgagcgagcgaagaaaagaactgaagtttctcaaaaaagaattattaccgagcttaaggataggtttgaaaaagaaggagttatgggtaagaatctcaaggaaattagcgagcataaagtggttcaggggtatccgctttctgaatctgaaggtctttatgctgaacttttactaaaaaatggaatttatcatttaactgaaaccttagatctacggatttccaataatcgccaaaaaatgggtgagtcagcgtttaaagctgtgacaataaacgcagctaagaccaagtggaataactgcgtgaagacttttgtggtttatgctgctgatacacctcaggaaaaagcgcactctcagcaacttaacttggttggaggttatgctgacaatgtcttcaacttgctaagtagcgaagatatgtctaaatactacgatcatatgttagtcgctgccgggaaaagccttaattttaactaa

SEQ ID NO: 110727 - DNA, 537 bp, Enterobacter aerogenes
atgaaggtagaaaaaagcgatgttctggcatttaccatttccgatgttgaacgcctcgaccctgtcagggtgatgattgaaaactacgagccagggaagggccgcatcactgtaacctgcttcggaaaggcgtggaccggtgcctggtttgctatgggcggagacaccgttcaggagttcattaagcgtgtcagcaatgactaccttatcggctatttcgacccgcaactgcaaagcacagttgatgatgataacgacgccaaccttgaattcgtaaagggtgaaatcatcaaactccggcgtcagcaggaaatcgatgctgaggaagccaggggtatgtggattgaggcagaaaacgctgaggatgtgaaggaaagctgctgcgattgtcgcatcggtaataagttgcctggtctgcttggtgatgagccgtggtatgcaaaatggccggcagtgccaaaccacaattatcaatatctcgaacgcatcattgacgcggtacgtggcgggctcgcagaactggagcgtgcagcatga

SEQ ID NO: 110728 - DNA, 294 bp, Enterobacter aerogenes
atgaacggatcgtcatcacatgatgtagaatggttgtttaggcagatttttgactaccttacagaaaagcaaggtatacctggttaccagttaagtaaaattgagaaggttgttttggactcattgatcaaggatggcggaatcacttgctatgatgagcttgacgaggaattcgcggctattcaggcggaagtagtcgctgtggaaaatgaccctgggaaaaaagcccttaaagatgtacttctgcgttatgccatgctgctttggtatgactttaaaccttatcgctactaa

SEQ ID NO: 110729 - DNA, 765 bp, Enterobacter aerogenes
atgcataatgcccaaacatatatcaaaagtaattttgtgaatgaaactatgcatcattctgtagtgacaagttcagtgctaaatggtactttggcattggagttggataagaatttgaaaaatgatgcgttgaattacttatattcagctttgattacatattctgaagctattaagggtgttcaaaatgaattatatagttgggcaacggttaaattatactacagtgctttttattcattaagatcaattttatctactgatggtgtatgtgttttctatattggaacgaaaggctactctatttatacgcggaatggggagcgtcctgctaaagcaactggaacaactcataaacttgtgatgagtttatttgaaaagaaatatccatcaagtccatttgtaaatcaacaaattgatatggttgatgcatttcaatggttgatggaccagcgtgaacttgcaaattataaaaatggtaggttttctgaacctgaagttcctattatctttgaaaagtgcaatgctgggctgcaaaacctaatctctgcctatcttaatgataatttatacagttattgttttgatagtgatcacgcgatgttggcgctccctttagaaataataaaaaaagcatgtgagtcaataaaaagtaacaatatatttagattcaatagaagtgatgttatttatttaaaaaaactgttgcgtataaatggtcagccagtaagtgattttcaaaatttaattgatggattaaagtga

SEQ ID NO: 110730 - DNA, 1026 bp, Enterobacter aerogenes
atgattattaacaatgtgataaaaatcaagcaaacacatcgtgaatttatcttaactacattatctgcaaaagtgttaggtgaaataacatacacagcggttcgtggcgttgatgatgaagtcggtgctgttcagcgcatattaattgaacgaagaattaaaggcattaaagattttgtattatctggtggggattttccagcagcgattgtgttgaactggacggataaaaacaaaataaccgttaatgaaaactcaattgaatttccaattgaaagtagattggctcaaattatagatggccaacaccgagttgctggtattaaagccgcaataaaagaaagtgaaaaaatagaagatttacaaatacctgttgtaatttatattaatctttcaacaagagagtgtgcagatattttcttggcaatcaatacggagcaaaaaccagctcctcgcagcctagtctatgatctttatggaattggttcagatgcaacagttgatcccgcatcatcaagagcaagagatattgccgatttcttgaataaagatgaaacatcaccatacttttgtaagattaaattccccggagaaaaacgtcgcaaaggtgggatagccctttcgacagccgtaagtgctatcaaaccacttgttgaagaaaaagctatcttcgagcaggtaggcattaccgagttatcactgcaatataagtgtttccataattatttctcgtctatttcaaaagagtattctgaagactgggactcaacatttaatgtttttcaatatgctgcaggttttagtgctgcatgtgaatttttcgtgacaaaaataatcccttattgtacgcaaaaaaagtcatttgaacttgatactatctcggaagtgttaaatattagaaaaaatggccttattaaacaagatgaagtaagtaagaaatctggtaaggaagcgattagagttattattgagcggctagatagatcttttgaacctaaggttgaacaaaaggaattaagattctaa

SEQ ID NO: 110731 - DNA, 300 bp, Enterobacter aerogenes
atggacagccaggaattgaaacgcgtgatagctcttctgcttgaagattcaaagcgcttgcaggagttagagccaaacgcaggtacagaggcccgtgttttattagcaaagcaggcgttgaagactggcgagacacaaagccctacccgaaccaatttcatgactcacacgatcactcccctgccgtgcaaaggaaatggtgtgagccgtgtttatcacgaaacgatggttaaggctttaagaatcgagcttgagaggcttaggagtcaggtcaggataaacgaaatcgttgccaactaa

SEQ ID NO: 110732 - DNA, 342 bp, Enterobacter aerogenes
atgaaccagttttatgttcacgttcgattatttgaagccacagccgaacaagctaaaaaatttgaagaaattatgcttacctttctgtaccagaagacaatcaaagagtctgacgaaagctgctgcagactggctccggaaggatacatcctcaaaagcacaatgaactgccagcaaatcgttgatcaaacatttgcaattgctaatagcgctggtgttaatgcaaatatctttgtctgtaaatttgaacaaagtgcatgtttacttccatctgctgccttagttggcaacgatttcgtttatcctgacctgactcctaagcctctcaagctcgattcttaa

SEQ ID NO: 110733 - DNA, 366 bp, Enterobacter aerogenes
atgaacaatcattcagaatccggtaccaagccggagagtcccgcctgccagctgtggggacttaaacgtgctattaccccctgttttggggctcgtctggtacaggaaggcaaccgggtgcattttctcgctgaccgcgccgggtttaacggtgctttcagtgacaacgatgcattgcgcctcgaccaggcctttccgttgatgctcaaacaactggagttgatgctgattagcagcgagctcaatccccgctatcagcactgcgtcacgctttaccacaacggactcacctgcgaagccgacacactcggctcctgtggctatgtctacattgctatctatcctgagcagactgagccgcagtaa

SEQ ID NO: 110734 - DNA, 444 bp, Enterobacter aerogenes
atggatacacaaaaccttcagttcgctgagcagacagcaatcacggcctcagtggtccctgacgagttacgcatcggcttctggccacatcactttggctccatcccgcaatggataacacttgagccccaaatctttgcctggatggatcgactgtgtaccgattatcacggtggtatctggaacttctcaacgctcagcaacggcggcacttttatggctcctgaggcagagatcaatgagaagtggacattgttcaacagtataaacggcaacggcgcggaacttactggcgaagcggcagggatagtcgcctgcctgatgacatacagccaccacgcctgtagtaccgaatgtgatgcgatgactgagcattattatcgcttacgcaactacgcgctgaatcattctgaatgcagcgccattatgcatctcatcgactga

SEQ ID NO: 110735 - DNA, 876 bp, Enterobacter aerogenes
atgaaaaaatcagaaggtctgcaagccattgagaaaccgttagcgtcactcccacatgctatcggcaaacatattcttaaccatattcaaaaactcactcactacgaacctatcatcggcattatgggcaaaacaggggctggtaaaagtagtctgtgcaatgctctgtttcagggtgaggtcacgcccgtcagtgatatcaacgcttgtactcgtaatatacttcgattccgtctgaactgcggtgatcatagcctggtactggtagacctacctggtgtaggcgagagtgagcaacgagatagcgaatatgaatctctgtaccgaaatactctccttgagctggatttaatcctgtgggtcatcaaagccgatgatcgtgctttcaccgtcgatgaacttttctaccagcgagtgatgaatggcttccaacagcgggtactgtttgtgctgaaccaggccgacaaaatcgaaccctgccatgaatgggatatccacaccagcaccccctcagcacagcaacgggcaaatcttaaggaaaagcagtcagctgtgaccgcgaggtttaaaccacatcatccgatctgcgtagtgtctgctatgagtggctggggaattgaggatatggtggagacgatgatgcgtagcctgcctgataacgccaccagcccgctggcaacccagttgcatggcaggctctgcacggagccggtaaaaaagcaggccagggacagcttcagccatgccgtgggaaaggtgtttgatggcgtggagtcatcccctctgcttccggtcccggttcgggctgtcattcgtatcgtacgggaaaccgttgtgtcagtcgcacgggctgtctgggactggatattcttctga

SEQ ID NO: 110736 - DNA, 588 bp, Enterobacter aerogenes
atgaacgttaatccatacttaaatatccctgaatctcaatggcaagaacttacttcatacttagttaataatcatcctttaactccgcacttggttagtttggtcatggactcatggagaggtttatttaatacatcctttggaatgcataatctaaaaattggtgtggatattttccctaagcctcaaatcattggtgccattctgcatgagttaattccagctgctattgaagctcaatttcctcagcaatggagaaaagaagaaaataaaaatgataaagatatagtttgtaagtatgacaactctctttcaatagagttgaaaacttcttcaaattccagccagatttttgggaatagaagttatgcacagccgcaaaatggagaaggaaaaattaaagatggattttatcttgcagttaatttccaacctttctcccaagcaaacgccaccccacaaattttaaaaattcgatttgggtggcttgcacatacggactggattgcgcagtcatcaagcaccggtcagcaggctcgtttagcctctcatacttaccagaataagtttatcaccctctatggctaa

SEQ ID NO: 110737 - DNA, 876 bp, Enterobacter aerogenes
atgactagcaaaactatgaaaaaacaagtatttgaaaacattattgatacgttgggtcaaccattttatagggatgatcgaacagcgctttatcatggtgactgtattgatattatgtctcaaattccccataactcagtggatttgaccattacttcacccccttacaatatcggcaaggcgtatgaagaaatacaagatgttcataaatatgttgaatggtgcattacatggttgaaaaatatttatgatattactgcctataatggtgctcttgcattaaatgtgggttatctagaggtgccaaacaaaggctacgctgtgccaataccatatttattatgggataaaacaccattttatttacatcaagaaattgtatggaattatggggctggcgttgcttctcgcaaacgtctgtcaccaaggaacgaaaaagttctttggtttttgaaagatcctaagaactatacatttaatttagatccaatcagagacccaaatgtaaagtatccaaaccaaaagaaaaatggaaagcttaagtgtaatcctttaggaaaaaatccgtctgatgtctggcagatcgccaaagttacgtctgggaaaaataggtcatctcaggaaagagcccctcatccagcacagtttcctctggagttaattaacaggctgatgaatggtttttcgaacgaagaggaaattgttctcgatccgtttttaggatcaggaacaacagcagaaagttcaatgataaatggtcgctatgttattggcatagaaataaataaagaatatttactctatgccaaaaatagactacagcgtaaaacagaagatatttctctaacattggcccaacaaccattgttagtttag

SEQ ID NO: 110738 - DNA, 3315 bp, Enterobacter aerogenes
atgagcactgcacgtcgcaatgggaacagagttcggctatttatcggagagcgtatagaacacgcctcggatcgcgatgttttgggcaccgtttgcgatgctttagaaaaaggctcccagtgggcctacatattcgccaatttcaacgttaacggtcgtcaggttgatgttgcggtcttttccgccacaactacgcttgttattgaagccaagggatatacacaacccatcaaaggcagtgtcaacggccgttggacccaggccggagcgtatggcagtcgacagctacgcaacgggtacactcaagccctaggtgccaagaatgcattgcgtgacgtgatggccgcgctattcagcgatcttaccggctatcccaatgctttgctagccattacacctgtgattccgtcgggctcctcattgccaccgagtgatttcaaggtagtcactggcggactggatgcgatcgagattgctctcagttcaatgtcgggagccttactaaatgaagtgcaatgccaagcgctcgcagcccatttgaaccttgaacgcatatctgaaagagatgcagcaattcatgaaactgtgctcatatcggagcaaacagtgtcgagttataaatccgctttcttggagtatcatgggccaattggtgcacgactggtagaggaccaatacctccttgatgacaaactgatctcggcatctaagattcttgagatggctctgtcgtcgcaatctgcacttctgatcaggggaccgtcaggatgtgggaagtccttgctaagtgcgcgtatcgccacagaatgtatgcaggctggtgtgctgcctatccacatccaaggcaaagacttcgagggcaagcttcagaaaataattgatgccgagcttagactactcggtgcttccgtgcgcgatatattaagagcaagtcgtctccttttaaggcatattgtactgattctcgacggctataacgaatgcccagagcatttgcgaattactttaacgcgaagccttcaagtattttcactacgctatggtgcaggccttgtaattacctcacaaggcatcatggctaggcaagagcttctgtcagtagaagaggctcttgtcagcccgccgcaatccgcattgaagtcacggctcgcaaaacttagccaagaagatgaaaacttcacaaactgccagtctctccttgaaatagcactctctgggcttgaagctgaactcattgggcaggcagcagcttcactgcccgcaggggcaagtacgttcgttctattcgacacggttactcgcatgcgcctcggcaacttcgcaacggcgggaattcgcgctctttccggatttgcagaagaactgatctctcaaactgcatttagtgtgtccattcgagagtttgacagattttgcgatgcggcaagtgtgactgacgcggcacggtacgcggtccttgagtcgcggcttgtgtcacagcgtggtgacagacttagcttctcccatgaaatgtttttctatttcttcatggcggaatctgtaatccgggtagcgcgtaaagattctgagcgaatacaaactattctgcgatctccacggtttcatggctctaaggctcttattctcggcgcagtggaggacgattcgacactaaaggatattttggaaaaaaccactgataagggcatcctggagtcttgcgtccgaggagagtgtggagaagccgcgagacgtaccgtcaaagcaaagcttgacgtgctactcgccgaaatggtcgcagagatttctgaactgcacttccggatcaatggcgagggatggcatagctgttcgattgaaactggctatcatcggccaatcctctcgaagtttgaagtttttcttcctgctattggctggcttctaatgcagggagtccatttagaacaaatcatggcggcatgtcgcgtcatggaagtaaaaattgccgaagccaatcgggagctttataaggaagcaagggccaaaaaggtatcacttctgcacgagacatttagccaagcctatgtgttcaatcgtaagatcgcgctttcgcagcttgtgtccttcgtccatagtggtggcctaagttttcgccataatccagggagcgaatttggtgaagctctgaaaaaatcatggaaggaagcgagcacgcatagtgaattctacgtccttctcggaatcaccaagttcacgaatctcgctccgtgggcggcgccatgtgtgctgaatcttcttgagagactgcagagcttgccctaccaccttcagttagacacgatggacttttgtgtacacttgcgaaatgtggatgatgccgtaaaagcaaagatgatcgcggcgcttgaggactccatagacaaattgggcgtgtttatgaattccatgatttttgatgcactgaagggtttaggtggattagaaaccgaagaagaaaactacagaacggtggtcttagaggagatcgcaagtgtgtgctccgagacgggaccgcaggccgatacggaagcatggaatatcttctctcgacaatttgatcatccgtatgacggaatttattgggaagagataaataatctcgccagcgctcagaagcggcagttccttttcaaggctctcaaaggggcaagcaccgagtatgtttcgtttgtcgatattctgattcgtcagctcgcagatttcggtgactcatcagtttctgaggctattgaaccttggcttaggttgccagccaaaaagtcggttatgccacaagatacagtcgaggtgtttttcgcagcacacgaagcgatggggattttggacctcccacttcctgccactgtgacgtcgcctatcgatgttgatgaaactatgcgggcctgcggggaattagcttactgggcttgccggttaagcatttgcgaactcgagtcttcacctcagactctcgctgcacggactacattactggattactcctcttcggcaagtgccggagcactgtggtcttcaacatctcgaatgttatctacggatggtacaagaattaacgttgcagcgcgctatccgaaaacagccctagctatctgccgcgatgcattgaccaaccatgggtcgcagaagacgtaccacgaaaacgggttaatgaatgatctggcgcgcatagcttccttttccattcaagtgattgggcagtttggtgacgccgatgacctaggacgtttacgcagtctttgcgacgaagaggaactaggtcatgaagcacttaacgcgatccataagattgaagaccgtattcgttatcgaaaataa

SEQ ID NO: 110739 - DNA, 573 bp, Enterobacter aerogenes
atgcactgccatttataccttaaaatttcagatgcccaagatatcaatggcatgaagaatcatgctgcatatcaggcaatatgtgacaatttttctgtatccgccgatgatattgtatttgaaatagttgatgatcaaaaaccactgtctgaacaacgtttgcttaaggagttagtcacacaaaaaatcaatcgtaacgatacactaattattcctcatttaagctgcctcggcagaaatgttgaggatatagaggaagctttatttttttgctttcgaaaagagataaacatttactgttatcactcttatacaagaatcgaaccaacagctgagagctgcatatcattcctaatagctgttcagacaagtattgatattcacaatctgaaatcaaccagaagcaaataccgagggatgaaaaatactttggggaggaaggaaggtagtaggtacaaagccgacatagttaaacttaagacaaacggatacaaacagacagaagtcgcaaggttgttgaggatcagtatatcgacagttaagcgacactggaataccacaattattggttag

SEQ ID NO: 110740 - DNA, 759 bp, Enterobacter aerogenes
atgtcacgtttatctgtaacgattaaccctccatctattagacaaacaattgcaaatacagcgaaacgaagtaactgtactgaatcatctgttgtttcatcgtgcgtagctgcattcgccccagttctggaaaaaatgaatgatagtcatcaatccgtatataaccttaaaggaatgctgcagagattcatcataacggagacgaattctcaactaagagctcacccttgcattgcgcccgaagagctctgtagaactatttatcaaacatcaatcaagggtaattctttgataacccctgcagatagccatcagcaaaaacatagcaatgactcgatgagtaaaaaagaggcaacaactatcaaggaacaactaaaatcacttaaagaatcaaccaatgcaaaaaaaatcatatacatttatgaccttcgaaacatagcgccaagaaacttgtgcgtatatggccaagcaaatataattctaattaaagaagataagttcaatagctacttcttcgacttcgatcatattcagacattaccaacctctgatctaataacatatggtactactgaactcttaagaagggaaaaaatagttcttcctcatccatatatttgctggatagatatataccatgtaaataacttatcaataatgcttccggttgctcatgaaatcgatatatcaacatgcagaagagcatctgatggtgtcattgtcatcaatccattttcaaacaatttgaaaaatcgttga

SEQ ID NO: 110741 - DNA, 213 bp, Enterobacter aerogenes
atgaacacgcctaatataaaaattcttcgcctgcctgcagttcttacgaagataggcatagcacgttccacaatctacgactggatcaacccgaaatccccacgttacgacgctacgttcccgaaacagcgtcgcttagggcagcaatctgtcggctggctagagtccgaaattgatgaatggctcttgctccgacatcaagtcaaatcgtaa

SEQ ID NO: 110742 - DNA, 855 bp, Enterobacter aerogenes
atgttttctgaagcatggctgtgcgatgaagtgagaagaaaaaaagagaaacttgaacaagaactggagatgactgcttggaaagattatttgatatgttttgattcaaattttcccagcacggttgaaggtatcgacaggatgaggcggaaatattggggaaatgccgattccaggccattctgctattcaaaaagctataagaatgaatacacataccagaacataggggaaagatatttagatacaaaatcctattctaaagaatatgatccagtttacgctaactggagtgagattcgcagaaatatatttaaattcaatgcattatatgttgctcatggaaaagatcttgatagcatatttgaagttgctatggtatcagcttgtctagcttatcactggggcttatccatccttaatgaaaataagacaattgcatctgttgcattatatgaagcatcgggcctatttgatacttgcctcggaatggtatatgcgaaatcattggatgaaaaacaaaagaaaatatctaagaaaagggtaaaggcagggcgaaaaggcggggaaactaaggctgaagtttatgaactaattcaacaggagttaattaggttgttggttgaaaactgtcctgaaggccggtggaaaaccaaagttgctgcagtagaacatgtctttagttccttatggcaatttgtgaaaaaaatacaatcaatcaacataagcagccccttatcaaccatgactgaggacaaattgatggataggattgcggtatggtctactaaaggtgagcttaaagatgcattcattcaaactgttgcacggaggtataatagaaaaagtgattag

SEQ ID NO: 110743 - DNA, 2082 bp, Enterobacter aerogenes
atgagcgacatggaaaaacttaaattaagatatagtcataatattatagaacatttaggcttaaaattatatcaaaataaacctactaatgttattgccgagttaatatcgaattcttgggatgctgacgcccaaaatgtatggattgaaatagctcaagataaagtttccattacagatgatggatgcggtatgtcttacacagagttgatgaatgattatttaatcatagggaaaaagaaacgaagtaaagataacattaccgaaaaaactgcacgtcaacggaatatgatgggtagaaaaggcataggtaaacttgcgccttttggtattgccaaaaagttaacattgataacaataagtaaagaagaaaaactctataattggattcagcttgatctatccaaaatgttgtctgaagaaaatgatgattctcccaatgattccattatttatgaaccaactatattggctgataatatcccaatagaaaaaattgatacagctttgaagttagaatataaaaaaatattagataaattaaaagagtcaggaacggctataattctcgaagatttatcgcttaaaaaaatcatttcttctgaaaaattaaaagaatcagttggacagcgtttcaccgttacgctattaagtgatgattttaacgtctatattaacgagacaaaagttagtgaaaaagaagccctacctaatttctataaaaggtatccagaaagtggctatgaagatcaaaccttgaccattaatggtcaagatcgccaagtccgttattgggtaggctttgtggagtctgctgagtggccacaagatcaggctggcgtgggcatctatgcccatggcaagttagcacaagatcgcccctttgtatttggattgaaaggtagagagatctggacacgttatatgtatggtgtaatagaagcagactggttagatgaacttgaggaagatgtagtatcaaccgacaggacaagtgttaactggatgcatgaagataccctgcagatgtatgaatggggagctgggttagtaagaaaatggattagtgattatcaaaaattccaaaaagaaaataacaaagggaaagttattgaaaaaataaataaactacctacagacttaagagttacggaggtagaaagaaaagctatttccgacatagtatgtagtatgagtccaaaagtacagaaagatgaaacattacagaatgaagttatatcaaaactaacttcagcatggactcatgcaccaagccatatgattattcaatcactatggaataaagtaaaagacttggaggatgagcaagaatttattaaattgattgatcaaatcaatgatcatttagttcctgaatcaatgtcattatccgttatggtttcacaaagaatttatgcgctcactaaactggaacgtttgagtaaaacaggaacagagcctcaattgcaatctttacttgagcaatttccatggatattgggttcagataaaggaaaagtacatgcaaatcaaacgatgaaagagattgctaagaaagcagcacaggaagggaaattagcagcccatggttttacagctaaaagtgtttcagaacaaccggattcaggcactagaccagatttcacaattttttctgatacaaacgagaataatataatattgattgaattaaaaagtcctttattagatcttgaaaggattcacttaaaccaactcaatacgtatatgggatggtttgaggataattatgatgcgaaagtttacggctatttaattggtagaaaccctaacgcttggcgagaaaaaaaccataataaaaatattgaagtgctctcctggcatgatatttgtgttagatcaagaaaggactacattgaattacttgcagcaatgttatatggcgtatcggaacattatgatgatgcgagaattaaaagagctgttgaattcggcggctcagaatcaatcgaattactaaaaaaaatggcaaaagcgcaatccccattaaaagatttatttgaccgatttgatcataaaacaggaggagcattagatgtttaa

SEQ ID NO: 110744 - DNA, 438 bp, Enterobacter aerogenes
atgggcggtaataataattttaataagaccattataaatacgcgagcttcctgtagaagctcttgcgaaacgaagctttcacacaagcaaattcgtaatcattgcgtcagtgtcaggcttaatgataaagagctgacgcttctaaatgaaaaacgtggccagcatcgcaaaggggaatggcttcgtttatctttgattaatacgcttccagttgtagttcccgcaattaatatagaagcttggagatctttatctgacctttcactgaaactaaataagattattacccaccttgataacaaaagcccaggaagccagctgacacagacggaactctttgctgtgaagcgacaaattgcagatcttcgcttacatctcatcaccgccgacttatggggagactccgatgaagggaatgcaaaagatccgcagaggtaa

SEQ ID NO: 110745 - DNA, 849 bp, Enterobacter aerogenes
atgttaaatgacaaaaatatatataatatagaaaaatacaagctgcaaattcaaaaatatgctttatgctgtgatgattttagagatggggtatacagagcccctaaagacaaagcccttctaaagaaatatatttgttttaataacaaatcttttattaacggtttggtttttgatgtagatcacaaatatggagcgatcgcatgggacttagttggtttaccaataccaaatacgattatacaaaacataaaaaatggccatgctcatttactttatgctttaaaaaatccggtattaaaaacagacatggcaagagataagcctttaaaattggccgctattgttcagagtggatttacagaaaggttagatgcagacagagcttatgctgatgtcttaatgaaaaaccctctcaacattcatgaatggagaacgacatggacaaatacttcagcatatgatctacaatacctattagattttatcccagacaaaataagaatttcgagtaaaaagaaaagtgttatacatgggctgggccgcaacgttaacttgttcgaagatttaagaattattgcttataaagaagtattaagttttaaaaaaagtaaaaactatcgttgttttttttatgatatgctatcaaaagcgactttacttaataatcatagcaaccctcataacccattatctcatgaagagacaaaacaaatttgtagcagtatttgtaaatggacatggcgtaatttttcaattcagaaattttcgataatacaatcaataagagcaaaaaaaacaagaaaaacgcaaaaaaaattagaaatagcattggagacattattatga

SEQ ID NO: 110746 - DNA, 255 bp, Enterobacter aerogenes
atgataattaatggaaaattaatcaaagcaaaagacttagctaaggctgcaggtgtatctcgttcaacagtgattaaatattacggcattagccgtgagaattacgaaagggtagcaactgaaagaagaaagcttgcttttgaactaagatcatcaggtttaaaatggaaagaagttgctgaaaaaatgaacacgacaaaatatagcgcaattgcatattatagacgatatgtagcattagcgaaaaacaaatga

SEQ ID NO: 110747 - DNA, 735 bp, Enterobacter aerogenes
atgccaaaagcgattatgattgagaatgttcctggtttgatgactaaaggaagtgattttttagataatttcataaacgatcttcaatccctaggatataaggtagattataaagtattacaggttgcagactatggagttccccaagatagaaaacggtttgttctgcttgctggccatggttttacaataaaaataccagaagcaacccattcacgagacggaagggatgggacattaccctggaatacagtaaaaatggcttttgaagggttagatgctcctgtacctcacattgaagctgtgaaaaatggtggtccaagattatttaactggcatgttattcgaactttaacacctattaatattgaaagacttaagcatgtcaaaccaggcggtccaagatatgatataccagatcatcttcgtcctgactgccataaaggtaaaaataagggatactctaatgtttatggaagaatggacttcaatagtgtatctccaacaattacttgtggatgcacagtcctaagcaaaggaagattcggtcatccaacagagttaagaactatttcagttagagaggctgcacgtcttcaaacatttccggatcattttgatattgcaacatcatttatagacgatgcttgtcggataattggcaatgctcttccatgcgaatttgcgaaaataatgagcaatgcctgttatgaagctttgataaataaagactga

SEQ ID NO: 110748 - DNA, 555 bp, Enterobacter aerogenes
atgttgcgacacgactcactgaggagtgtcgatacatttacaattgatgactcaccagttcagcgtaaatcgcaagcctcttctaatatagagatatcaatgttcggattagatatcacaaaagatattttacgctctgtaacgggattacctcttaaagatgttcctttcaattatgtttgtggaggtgataataacctatcagtaaaaatagagatggcaccagacgatatcccagtttatgcaaatgaatgccttaagcgttatactgacacttgttatttggaacaattttcttgggttgacaatttaaaacgtgtaaaagtttcacagagaattgaatcacttgataatgagttgattgcagacattaagaaaaaaaacattaaacgaattaacatagttatcccagaagtgtttgatgaagcagaaattgattcgtttacatttacacggagcaaaagttccccttcgcactatatagataaagatatatatttcaatggattagatatagcttctgttgatatagaaaaaattaaaatcattttttga

SEQ ID NO: 110749 - DNA, 894 bp, Enterobacter aerogenes
atggagcatactacatttcataagaacctaaattttaacaagctgatcatcctcgattgcctgcctgaaaatgattatcaaacagcaaggcaccttcatgaaaatctaagcgacaaagggtttggaagtgggatttctttgcttaaggttcaggatgaaaatacatttagagaagtattgcaagagataagggagatgttcaatcctgaattaaatgttggctttcaaccaattattcacattgaagctcatggtaattcacggtcaatggagttgccagataaaagttttattccctggaatgatcttgctgataatctcagaataattaataaacttatgggcaatcaacttatcacgtttattggaacctgtcatggttatcactttatctataaaaatcacacaattaaagaattcgcaccagtttatttttgcatagcacctctagaagaaattcccgcttgtgatattgaacattcagcacttactttctatgaaaacttatttttaacaggagatttaacacgttccgctaaccttttggattcaacaaaactttacacttacaattctgattatatgtttcatcgagcttttcatgaagccatgcaaaaaaatcatagagggaaagccttaaggatcagaagagaagccttaatcactgaagctattaagattatgggtgaagattggaaaaaaatgagtccaaaagataaacgtgattatctcaagaaagcacgagaattactggatgtttctttgaaaagtaaggaatcgctcagagcagagtttgaaaaattttcaatcggttacatgggttatatagatggggatgttttcgaagaaatttggaaacatatgaaccataacaaacaagggaaaatatattga

SEQ ID NO: 110750 - DNA, 171 bp, Enterobacter aerogenes
atggttgtccctcataagcgaggagcaggcattagtgccgataacatatttaacgtgcatattagctatcattcgactgtcacactcaagattgatttcttaagtgtaaccccctttctaataatatttatatattcagctctgagattcatttttatctcgttaagctag

SEQ ID NO: 110751 - DNA, 4476 bp, Enterobacter aerogenes
atggaccccatatcaattacagtggcaacttatgtagcaactaaacttattgatcaattcatttctcaagaaggctatggttggattaagaaagcattattccccacagaaaaatatgtagatagattatataaactaattgaagagacgacaattgagtttgaaaaaacatatccagtagaaagtggagaaattccattttatcattctaagccattgtttgagatgttgaatgagcacatcttgtttaaagaactccccgacaaagagatattattagacaagttcaacgaatatcctagcatcacccccccgactcaacaacaactcaaccttttttatgggatgttgtcgttaaaaatcaataattgttcaacgttaaaaaagctacatatcgaagaaacttataaagaaaaaatattcgatattaatgaagagcttattcaaattaaacttgttttgcggtctatagatgagaaactaacttttcacttgagtgatgattggttaaatgagaaaagtagtcaagcaatagctgacttgggaggccgatacacacccgaactcaacgtaaaactagaaatagcaaagatatttgatggtctcggtagaactaataatttttctgaaacattttattcacatatagataattttctgatcactggaaataagttacatagttgcgatgtaatttcctcacaattatctgaaatagaccattccttaaaagaaattgcaaatacatatcaagaaattaatttttctaaattagatgaaatccctataactaaatttaataactatgtttccagctgcctgacagctattggtggggcggaatcaatattgtgggaactccaagaaaagtcagaacaagcaggtgaaaccaagcattacagtgataagtattcatccactctacgagtgcttcgggaacttgactatgcgtgcaatgatttacttacattcattaatacaacaacagtaaagttagctaataacccattcttacttctcgaaggaaaagctggaattggtaagtctcatttactggctgacgtgattaaaaatcgaattgtttcggggtatccttctctactcatactagggcaacaacttacttcagatgaatctccttggtcacaaatcttcaagagattacagcttaaaatcacttctcgtgaattcctagaaaaactgaatttatatggtaaaaaaacaggaaaaagattcttggtttttattgatgctattaatgaagggaatggaaataaattctggaatgataatataaacagttttgtcgatgaaatcagacgctttgaatggcttggtctgataatgtcagtcagaacaacatatagaaatgtaacaatttcacatgagaatgttgagcgaaataattttgaaattcatgaacatattggatttcagaatgttgagttggaagcggttagtctattttatgattattacaatatagagaggccttcatcacctaaccttaatcccgagtttaaaaaccctctatttcttaaattattgtgtgaaggcattaagaaaaatggcttaactaaagtgcctgttgggtttaatgggatttcaaatattctgaactttttagtggaaggtgtgaataaatcattagcatcgccaagaaaatatgctttcgatcccagttttcctcttgttaaagatgctctcaacgaaatcataaaattcaaattagagattggtagtaatagtatttcacttagagatgctcactcagtggttcaatctgttgttaatgattatgttgccgataaaaatttcctcagcgccttgattgacgaagggttattgactaaaggcatagtgagaaatgatgataattctactgaggaagtagtttatgtggcttttgagaggtttgatgatcatttaactgttaagtttttattagatgatattgaaaatatcgaaagtgaatttaagtcagatggtcgtctgaaaagttatttttatgatgaatgtgacttttatataaactcgggaatagtagaggctctgtctattcaattgccagaaaagtatggaaaagagctttatgaatttctaccagagttcagcaataatcataaattactagaggcttttattgatagcttgatatggcgagatattaaggctattgatttcgagaaaatcatacctttcatcaatgaacatgtttttgggtttgacaatagttttgatcattttctagaggcagtgatctctatttcaggtttagttgatcatccctttaatgctaatttcttgcatgattggctaaaagatcacactttgccaaatcgagattcgttttggactacaaaacttaaatataaatatagtgaagactcagcatttaggcatctaatcgattgggcgtgggacagaacagataaaagcttcatttcggatgagtcaatcgagctggttgcaactagtttatgctggtttttaacttctagtaaccgagaacttcgggattgctctaccaaggctttagtgagtttactcgagccaagaattcctgtactgagaaaaataattgataagttttatggtgtgaatgatccttacgtttgggaaagaatatttgcagttgcattaggatgtacattgcgaactgatgatgttaaagaactaaaatatttatccgaaactgtttaccaaaaggtattttgttctgagtgtgcgtatccaaatatattacttagagactatgcgagagagattcttgaatttgctaatcatcttggattggaacttgaaaacattgaattatccaagactaggccaccatacaacagcatttggcctgacgagattccttcaaaagaggaactagagtccctttatgataaagatccttatcggacactctggagctcgattatgggaggtggtgacttttcacgatatactattggaacaaattacaatcattcggattggtctggttgcaagtttaatgaaactcctattgatcgtaagcaagtttttaaaactttcaaatgtaaactaactgatcaacaaaaagagttgtatgatgccacagatcctgtcatttatgatgataaatgtgaagaaattaaatttggggatgttaagattaaatttggtagcgcgataggtagaaaaacacaggaagaaataaaggcgagcaaagaattatttaagaactctttgtcatacgacctgttaagtgagtttgaaaatgatatagagccatatctagatcataataataacctgctggaaactgataaacactttgatcttcgactagctgagcaatttatattcaatcgtgttgtggagcttggttgggatccggagaaacatggtaattttgaccgacaaataggaactggacgtggacgcagagagtcattccaagaacggattggtaaaaaataccaatggattgcttattatgaatacatggcaaggctagccgataattttattcgttttgaagggtatggtgacgaacgaaaggaaagtccatatcaagggccatgggagccttacgtaagggatatagatcccactatcttacttaaagaaactggaacgaaaaaaataagcaatcaagaaatgtggtggcttaataatgaagtatttgattggacctgctctaatgaagactgggttaaaagctctgctactataactaatccatattctttgattgaagttaaagatgataatggggatgaatggatagtattagaaagttatccatcatggaaagaaccaaaaattattggaaacgatgattgggggcacccacgaaaagaggtttggtgtcagataaaaagttatatcgttaaagttgaagaatttgaagattttagatgttgggcaatagctcaagactttatgggcaagtggatgccggaaggtactaatagataccaattatttaatagggagttctattggtccgaagcattcaagtttttcaaatcagattattatggtggctctgattggacttcggtatcagacagagagtctggagctaagatagctgatgttagtgtcacttctattaattatttgtgggaagaagagttcgacaaatcaaaaatagaaacgttgagttttttgaagcctagcaacttaatctttgaaaagatgggtttaaaaagtggggaagtagagggtagcttcaatgataaaaatggaactatggtttgctttgcagctgaagctgtgcatgcttcaaagccgtatctacttgttaaaaaagaaccatttttagcaatgttaagtgataatggttttgaaatcgtttggacattattaggtgaaaaaggtgttatagggggctcacttacatcaagtcatcattatggccgacaggagtttagtggagcattttattatgaagaaaggcagctaacaggaagtcataaaactagcttaacgagataa

SEQ ID NO: 110752 - DNA, 243 bp, Enterobacter aerogenes
atgagcaacatcctgattatcaacggggcgaaaaaattcgctcactctaatggccaattgaacgacaccctgaccgaggtcgcggatggttacctgcgcgacgtcgggcatgatgttaaaatcgtccgcgcggaaagcgagtacgatgtaaaagaagaagtgcagaattttctgtgggccgacgtggttatctggcagatgccgggctggtggatgggcgcgccgtggaccgtgaaaaagtaa

SEQ ID NO: 110753 - DNA, 153 bp, Enterobacter aerogenes
atggaaaacccagccatcctgttacgccgtttaaacccttactgcgcccgcgccctggaaggcgccgcttcgctgtgtcaggcccgcgcgcatgcgcaaatccttccagaacactggctgctaaaactatggagcagggcgagggagacctga

SEQ ID NO: 110754 - DNA, 714 bp, Enterobacter aerogenes
atgttaacgattgaatatctaattgaatcacttgaagagatgggagaaattcttagactaggtcgcttcattgaagatgactctcctttccgtaatgctcgcacacagttaggtcgtaatcctaaaaagtacgtaatcccttatgttaacttcaaagttgccagaggtaattatgtacgtggaggtgtatgggataaagatttggaaattaagatgcaggcagaaattgaagtgaataatacttttagtttcaatgatgcttccaggatgatcgttaacattgaatattcgtgcctaacaactgatggagagaaagaatgcaaaggatgctggcatatggattatcacgtacaggaaggaaagcctgaatatatgcatccggattttcacttccatcacggtggaagaaatataagtgaccttgatgattatggaagcttggttattttagataacccaagaataatgcatcaccctttagatgtttttttagctatcgacttcattatatctaatttctaccctgaaattgaatggagaaagatacgagcagatacccgttacacaaaaatagttaagatggctcaacttgcttggtggaaacctttttatactaatttgtataaatactgggaacattgtgatgcaaaagatagtattttatcaaagcaagaagtcgtaaaagcgcaaagattaaatccgcattttatctaa

SEQ ID NO: 110755 - DNA, 1143 bp, Enterobacter aerogenes
atgcctattaaatatctatacatagatgatgagcaaactagaactcttgctcctgtattaagactattaaatacaccagaaatagatattattcataaacaggtatatgaatcattttcagctgttattgatgatatcaaaagaaatgactataaaggtttaattatagaccaacaacttaattctgttagtgaggagggccataaagctgattactttggtacaaccttagctcagcagttgcgaaccgaaatggttgtaggtcatataactgcaattccattaatactgctctctaatgagaatgttattgttgagagttatctaccggatgattcctcaaaagatttatttgatttcgttattaaaaaaaatgagttagataatcaaaataaatcaactcgggccaaaaagatgctttcgtctttagttcatgtttatgatgtcgcacgacaatttaaaaaagaacccggtattgatttatctaacaacgagctttgtgccatttttaatatagaacttaagtctttagattatatggatacacgatttaatgactttattagatcaaaagctaatgatactcattcattagttgcatcattatattcttcactgatacagtcagcaggtatgttagttagtgaaacaatgcttttgaccaagttaggaattgcagaagattctaacaattggaacgatataaaggaaatgttagctgattatcaatacaaaggcccattttctgatttaaaatctagatggtggttttccggtatagaagaatggtggtatcaagttagtcctgagaatgttttgcaatcacttacatgtagtgaacgtgttaaaatccttaatgaaagattcggtcttaatttatcttctatacaattatcttacccacagggagaccaaagcgagaaactatgggtaaattgtgtggtatcagatgtaccattagatccctatgatgctttgcgaatacgtgaccctgatgccaaagcatgggagcatcctaaatacatagatctacgtgcatatttagatgaagattatgacaccattagatataaaattcatgttgacgacaaaagtaaagtgaaaaaattaatttcgaggttaaagcccaatgttaacgattga

SEQ ID NO: 110756 - DNA, 2319 bp, Enterobacter aerogenes
atgaataacgaaaacgaaatagctaaaaaacttattagcttgattaatgaacaagatggctccaaagactatggtgagattcttgcccttgcaactcaactttcttttttagacaaagagaatattagatttactgtcgatgctaaaattgttgaaagacttggcgaacaactcgtcgcaaaaaaaactacagcacttagtgaattaattaagaatgcatatgatgccgacgcttcgcaagtattaattgaattcaacggaacagaagaaattggtggaataatagaagttcatgacgatggtcatggtatgagtatagatgatattcaaaatggttttatgaccataagcacgtcagataaagttaataatccaagttcaaaagagtacaatcgagctaaggcagggaaaaaaggaattggacggttttctgctcaaaaacttggcagaaaattagaattaataactaaaagaaaagaagaaaaattttataccatcttaaatgttgattgggatatttttgtctccggtaaaaacatcgagtcaatccccaataagataacatatactcatgaggggtttgctttttctcacggaacaatattacgaataagtggagttagagaagcatggactttaagtaatataaaaacagcttttaactacatatcgtcaatattaaaagttgcggtgattactgaaagtaaaaatgatcctggcttcaatgttaaatttaattacattgataagcataacactaaatctgaattacaaattgacagtaataccgagtttttagcatatgcagatctaaaggctactgcatcaataagagaagacttgaaagttgaaataaaaatagagggtatgactgacagtcgatttactgaagtaattcacctggataataatgttgaccctgcacttttagacgcaaattatactttcgaaacatattatttttctttagcaaaaggtacctccaagtctaagccattaatatcatttctttataataatggcggtattaaattgtatcgaaatggattccatgttgcgccttacggagagagatataatgattggctaggcttagatgaatcatctagaagacgtattattctccctcctcattccaacactaactttttaggtaatgtgtatgtaagagatattcgcggtagcgtatttgaagaaacatcatcaagagagggttttatcgacaactctcactttaaaaatcttgttgatattacaacttccattgcaataaaaatagcaacacatgttgccagtgttagagaaaagaaaataaccgcatcgcaaaaaaattataaacccgcattaaggataaaagaagaagaaatagaaagcaaaatagataatattaaagaaaagctcattgtaaaagagaacttaactgataacaatcaattaggcaccttacataattcaactaaaagcattagtgtaacgaacttcacctccgatgatctatcgacagaaaaaatcctcgaagatattgcggaagttaaatcaactatacaagagtatgttgatgaaagattattatatagagttttagcgtccgttggtcttgcaatttctgagttcacgcatgaaatacaactttgtcttttgaatctaaagttaacgagtaacagccttacagaactagcagagaaatatattgaattgagtgagccagttgatgaatttatggataatttatcaatgcttgttgcttatactgattattttgatggtacccttcgtagtaattcgaacaaagaaaaagataattatgactttaggaagttagtcaaaaagtttgtgcatggtatggagccaacaattaaaaggagaggctatgagtttaggactaactttgatcgttggggaatatggacaaaaaaaatccacatttctgaaattatgtctattttcatgaacttatttactaattcctgtaaagcgattgaacgagcaggccaaaaaaatggcgttatttcaattaacgtccaaacatttgataagcatatggttatacgattcgaagataatggtgatgggatacctaagaataaatgggcccgtgttttcgaacctctgtatacaacttcatcacctgcccctgcttacgcttcagataatcagataaatcgaggtatgggattgggtttgtcaatcacagaggaaatcataaatgagatgcagggcgaaatttcaatcattgaaccctcaacaggttttaatacttgtgttaaaatagtattacctttagctgatgaagatgagttaccagaagatgcctattaa

SEQ ID NO: 110757 - DNA, 1692 bp, Enterobacter aerogenes
gtgattaatccacactcaatccaaaaaaagaaagaattgggtgcttactatacgcctccagaactgagtaaagtcctaactgactggagtattacagatgctgagcaattaatattagaaccaagcttcggcggttgtggttttttaaatagctgcattactaggttaaaagaactcgggaatacgcaacctaaaaataatctttttggtgttgatattgatgaccacgcttttaaaatattagatgatatgttcaagaacagttcacctaataataaaaagtttataaaatcggattttatagccgttaatcctgctgattttgaagtcgatgggtttgatgtaataattggaaatccaccgtatgtttccatgcataacatgactgataaacagcgcgagtcatgttccaatatcctaaaaaagtcatctttttcaagtgagacgatgggacgaaacgcaagtttatgggcgttctttttacttcatagtctagcatttttaaaaagtggggggaaaacttgttgggtactccccagtagccttttgcatgcagattacgcaaaaaaattgctagaaatttatagctctgtctttgagacaattaacattataaaattaaccgaaaggtttttcataagcgagggtgctcaagagatttccgtagttttagctgcatcgaactttaacaaagaacaacaacataaaggaagcataaaatactcattcgccgaaaacgtaactgagttacataatagtttgcaagaagcaaatacggcttctggatctatctctagtaattataagtttgacctactccctcggagtatccatttaaattaccaagactttattgataccaataagtctatatctatgggtgagatcgctgacataaaaattggtctcgtttctggagcaaacaatttcttcttattagataaagagactatgtcagaaaaatcgatagctattgaagctacgatgccaattgtcagtagattttcatatcttcgaggagttaggcacaataaaaaaaggcattctgcattaattgacaatggaattaaagcaagtttattgacgcccactgaaaaacaagtagcggaaagcgattcattgcagatttatttatctaattttgacgaaaaggccaaaacagagaacaggactttcaaaaaaagagttaactggtatgagcctaattatggtattgactcgttgattcctgatgcttttcttacttacatgattcatagaggtcctcgtttggtcttaaaccaagcgaaagtcaattgtacaaattctgtacataaagttttttttaagaaaaaaggaattaggtttaaagagcaaatagcaatcactatttctttgctatcaaccttttcacagttttcagccgaaatttatggaagagcatatagctccggtgtgttaaaaatcgaaccgacatcggctaaaaaaattcgactacttatcaacgactatataatcgaaaatttatctttgtgcgttaaagatattgagtatcttattactaaagaaaatttccctgagattagacattatgttgacaaagtattaattaatagtgggttgatatccgagtcacaaaacaaattgttcgaagaaggattaaaaatcttacgttccgatagatatagaggggtcaagacttataatgaataa

SEQ ID NO: 110758 - DNA, 306 bp, Enterobacter aerogenes
atgaccaagccgggttttattcagcatccctggacacgtcagcgtggggattccatgcgcgcagcccgtgttattgagcacattgaacatgaggcgatgcatggatgcggcctttattatgaaatttatcactaccgggttatatgccgattattgcaattactgcaaacgctgaacggcaccgacagaataacgctgacagaagaagccaaccggcgagggtttacgcttgatgaaaccagcattaaagaaagtcgtcagtgttattccgacgtcatcatggaaatcagcgagagccactattaa

SEQ ID NO: 110759 - DNA, 303 bp, Enterobacter aerogenes
atgaaaaaagcaatatcctccgcattattgctctgcattatggcgtcatattcaacctccgtcatggccactgacgcctgtgaagtggtgttatgcatgtacggtaaagccaccgggaacggcggcggcaatgaatgccattcggccgaacgtgcattctttaatatcgtcaaaaagaacaggcacggttttcttccagaccatacggccgatgccagaaaatcgttcttacttgaatgtgactcggcagacccggcaatcatcagccagattatcaataaatttggccgcgtgcgtggttaa

SEQ ID NO: 110760 - DNA, 1029 bp, Enterobacter aerogenes
atgaacgctgaaaacctgtcgctggattttatgaaaaaccagctgtttggtgattttattgcacaggacggcctgacggaaatagccgttaaccggccgggtgaactgcatactaaaatccgggggaaatggctaagacatgattccccggttacgctgcgtcagtgttacgcctttgccagagcgctggcgtcctggcaggacgagaatatcgacgacacctcgccgatcctttccgccacgcttgaatcaggcgagcgcattcaggtcattattcccccggcctgtgagcgcaatactgtatccattacgctgcgcaagccctcattcgggcagaaaacacatcagtcatggattgatgcgggattttataaccgggtcagcggtcaggagcgaacggaaggcaaagatgttgaactgacccgctattatcaaggtggggatatgccccgttttatggaaaaagcggtggaatacggcaagacgatttttatcgtcggtgaaaccggctccggtaaaaccacctatatgaaaactctgctgcactatattccccggcacctcaggctgaccaccatagaggataatcccgaaatccggttctatcatcacaccaattatgtccatctcttttatccggcggatgccggggataatgccattgtcacgcccggcagactgatacacgccaattatcgtatgaaccctgaccggatattactggctgaaattcgcggacaagaagcctgggatgcgctgaaaatcgttggttccggacatgagggattgatgacctccctgcatgcgggcagcccggaagaatgtattgaagggctcattgaccgctgctatgaaaaccctgactgccggaacatgcctttcgacgtgctgttacgcaaggtgcttaagagcgttgatgtgatagtcagcattgatattcacggtgacatacgtcgcatgagtgatgtttattttaaaccccttcatctcaataacatgagaggtgtattcagcaaaggactccagtaa

SEQ ID NO: 110761 - DNA, 897 bp, Enterobacter aerogenes
atgacgttatctaaattactgcttcctttgctgattgccgggaatctctcttctgcgtgggctgtcgagcaggttgttccgtcctctaccacctttcatgtcaccgctgatgaggcgctgaaaagtaagcttccgccggatatcgccaaacgcggatatatcgttgcaggcaccaatccgaatacgcccccaaccacttttttccaggaagacaataaaacgctcgccgggcgtgagattgatgtgatgaatgccgtggcggcaaggctcggtgtggaagtgcgctggcaggataccggtggtttcgacaatattattccggggttgaaatcgggtcgctatgacgtcgcactatccaatatcaacgccaccaaaaaacgtctcgagcaggtcgatttcgtcagttactacgatgcgtcgcgcctgggggtcatctcgcgtaaagacgccaatattgcgccatttacctcttttgaggctgtgtgcgggcaggaagtgggcgccggcgcgggcactacgcagattgggcgtcttgaagctgcaagcaaaatttgtactgatgcgggtaagccgccgatcaagattgccgtattcccggatcgcccttcaggcgtacaggccgtggtcagcggtcgcgtaccgatgttcttcggcccgtatgaaggtctgacctatcaggttagccaggtcaaaccgctgacgctgaccggcactattcatgttgatgatgcgcctgtctccgtggcgttccctaaacagtcggggctggaagaggcggtgcaggcatccctgaactcgctgatcaaggacgggacctaccagaaaatcctcgataaatggtccatcggttttggcgcagtcaaagagtcaaaacgtaatgaagagattttcggatga

SEQ ID NO: 110762 - DNA, 939 bp, Enterobacter aerogenes
atgagcagtgaaacacacgatcagcagccagaagaactgcggatcatcggtaaaaaatatatcgggcgctggataagcgccctgatcgtattgctgatattgctggctatggggaactccatgctcagcaatccgcgttttgaatggtcggtgattgccgaaaactttaccggtccgtcgatcattcagggcgtactgatgacattgcaactgaccgctatttccgtgatttttggctttgcaggcggcacgatcctggcgctgatgcgcctgtcatccaatccggtgctggtcgctgtcagctgggggtatacctggtttttccgcggggtgccgatgctggttcagttatttctctggtacaacattgccgcgctttacccgactatttcgatttcgctgccgtgggttggtgaaatctggagcgcttctgcgaactcactgattagcccgttcagtgctgccgtgattgcattagtcatgcatcagtctgcctatgccgcagagattatccgcgccgggatccagagcgtcggcaccgggcaagtcgaggctgcacgtgctctgggttatcgcccggcacaaatattcctccacaccattttgccgcaggcgatgcgcgccattctgcctccggccgggaatgaagtgatcggtcagttgaaaaccacagcggttgtctcggtgatttcattacaggatgtgctgttctccgcgcagattatttatcagcgcacctatgaagtgatcccgctactgctggtcgccacgttgtggtacctgctgctgacatcattgctttcagtgattcaatattacgttgaacgacatttcagccgcagtagtcaccgcaaggtaaaacgcaaagccgggaaagcgtcggcatcaggcgcggtcagtacccccagtatcagcgcaggagaaaccagccatgggtga

SEQ ID NO: 110763 - DNA, 762 bp, Enterobacter aerogenes
atgggtgaagccattgaatttcgcaaagtcactaagcgtttctccggtaataccattctggatgaaatcagcctcgatattccggccggttcggtcacggtgatcctcgggccttccggttcagggaaatccaccttgctgcgttgtattaatcatcttgaaaaactggatggcggcacgatccgtatcggtggcgaactggtgggttatcagcagaaagggcaggtattgtatgaactgagcagccgcagaatcgccgcgcagcgcagccgtaccggcatggtatttcagcaatttaacctgtttccgcaccgcaccgttttgcaaaatattaccgatgcgcctttgcgggtgaagaagcaaaaccgtgagcaggtactcagtaaagcccgcgcgttgctccggcaggttgggttagccagtcgtgaagatgactggccgcagcagctttccggcgggcagcagcagcgtgtagccattgcccgtgcgctggcgatggaccctgaagtgatgttgttcgatgaacccacttccgcgctggatcccgaactggtgggtgaagtgttgctggtgatcaaaaagctggcgcattcagggataaccatggtgatcgtcacccacgaaatcggctttgcgcgtgaagtggcggataacgttatctttatggaaggcggaaaaattgtggcatcagggccgacgaaaagcgtgctggatgaagcggagaacgtccgtgtccgtaatttcctgtcgacggttttataa

SEQ ID NO: 110764 - DNA, 1344 bp, Enterobacter aerogenes
atgacattaacgcagtcgctggcgaaacttatcgtcagttcgtccccttctcccgccgctcacgaagcagcacgcgaagggttgctggattttctggcggtcaccctgccggttttacgcggcgatttatccgatgcagggctgaacagtttgcatcaggtttaccgcactgacgatcaggcgacccgagcgttactgctcgggtatgccggtcacgcgctggattttgatgatttccatcccgattttcgcggccatcccggcgtggtgattttgcccgcgctgctggcgctggcatcacaacaacccgatatcagcggcgaactatttctcgatgcgtacgtgaccggcgtggaaatggccggacgcctcgggctggccgccggttctcagcattacaaactcggttttcacaataccgccacactcggcacgattgcggccgccgccgcctgtgcgcggctggtgaatgccgctgaaaaacaaacggctgtgattctggggatcgcagcgacacagtccgcagggttacgtgcgcagttcggcagtgacgtcaaacctctacacgccgggctggcggcacagaccgccgtcattgccacacaactgacactggcaggctttcacggccagccggacaacgtgctggacagttttttatcggcttattgcgccggtcagcagcagccggaaaagctcatctcgggctggggtgcaccgtggcggattgtctcgcccggtctggaatttaaaccctatccgacctgcggtggcacgcatagcgccgccgatgccgcacgggctctccgccaggactggctgcaaacgggcaacagcacggatgcgctgatcactgccctcgaacggattgaagtgtcttttccgcctggcggcgatattgcggcgtcagtgcgaaaacctgccaccggcgttgaagcccggttcagcctggaatacgtgattgcggcgtgtttgctgcgcggggaactacgcttagaggatttcactccggcaccggtggagacagagattgccgcgctggcagagaaggtggcacgttgcccggatttctccgcgccgccggacgagttcaaccccgccgcacgttttcatcaggtgacggtgtttttgcctgacggcaaccggctgcaacagcgtttcacccgtcagcaaagtctggcgatcccgtttgatttaccggcaaaactgcgtgcctgtttacctgaattctccgacgcacagcggacggagattgtggcactgagcaggctggaaaaccgcgacagtctgccgcggctggttgatatgttatttgcgaaacaaattaacgcagcgtcattataa

SEQ ID NO: 110765 - DNA, 1098 bp, Enterobacter aerogenes
ttgaatcagcagagacatttttcggcgcaattacttcgtcagcaagccatgatcattttgaccgggtggggaatgcccgaaaatattgcgcaggaaaccgccgaactgatggtggaaaccgatttgatgggcattgattctcatggcatatcaatgctgccacattacgacaaactactccaggaagggaaatggcgccctgatgcccaggcaactgtcgtcagccagacgccggtaactgcggtggtggacggcggtcatgccctcggccatgtcacggcgatgaccgccatgaaactcgcgatagccaaaagtgtaaataccggtataggtgccgttgttgtacgcaattctaaccattttggcgcagccggtttgtatgcccgttatgctgccgcacgcggaaaaattgcactggtgaccagcacaacgcgcagtcggatgctggtaccgagccgggcaatatttccggtgctcggcactaacccgatagcctttgctgcaccggcaggtgaaaaagaagatttcgtactggatatggccaccactaccgtcgcggccaataaagtcaaagtgtatgagtttaatggcagcgacctccccgcaggttgggtggtcaatgaagaaggggcgcaagttaccgacagttcacacggaatggattatgtttatcaccgtaaagaagggggactcactccgctgggtggtcttgagcaaagcggcgggcacaagggttacgggctggcgatgatggcgcaaattctggccggaccgctggccggcgcggcattcgccccaacccgcgaagccgggggaatgcccaatatcgggcatttctttctggcgctcgatccggcggcttttggtgatcccgatgtgtttaaagccgagctggatacaatcatcaacaccctgcacgccacgccatccgctgaccctcagtcgcccgtgttagtggccggtgaaccggaaaaccagaggcatcggcaacgccagcgcgacgggatcccgatttcagacgcccttctggcacaattgcatgcgctctgcgagcgtgaacatttcgttgatttattatctccggtcacccggacctga

SEQ ID NO: 110766 - DNA, 1185 bp, Enterobacter aerogenes
atgtcagatatcacgcaagaccatcagcctgtggcggcgttcattcaggatttccgccaccacatgcaccgctatccggaactgtccaacgaagaagttaacaccaccgccagcatcagggaggcactggagaagtatcaaatccgcgtgttggatttgccgctcaaaaccggcctggtagcagaaattggcggcatcaatcccggtgaactggtggtgctgcgttctgatatcgatgctctgccaattgaagaacaatccggcgtggattacacctcgcaaaatcccggtgtgatgcacgcctgcggccacgatttccacacctcggcggcgctcggcgcggcgattttgctgaaagcgcaggaagagtcgctttccggcacggtgcgcatactgtttcaggcggcggaagaaaccggtcacggagccccggcgctgattgataccggcgcgctcgataacgccgccgtcattttcggcattcataacgatccctctttgccgatcggcgttatcggcagcaaagacggcgcattaacagcgggcgtggatcgctttgcgatcgccatttccggtaccggcagccacgcggcacgtccgcacgaaggcaacgacccgattattatcgccggacaggtgattcccgcattgcaaaccctgatcgcccgtaatgtgccgtccgcacacaacgcggtgatttccatcactcaggttcacagcggcagtacctggaacgtaatcccggattccgcctggctggaaggcactgtccgcacctttaatcaggacacacgggaactgatcgagcgccgtttccggcaggttctcgcaggcatcgctgcggcatttgataccgacatcagcctcgactggcagccaggcccgccgtcagtggtcaatacggctaagtgggtggatttcgcgctggcgcacggtgaaggctccggctttgaagcccgccgcgttgaagccagcccgattggcgaagacttcgcgttctatcagcaaaaattacccggcgcgttcatcatgatcggctccggaggtccttacgcgctgcatcatccgcaatttcgcgttgacgatcgcgccctgtttccgactgcacattacctgtcccaactggcggtaaaggcactgcaaacgcttagtgcggaaattctcagcaaggaaaaaaaagcttga

SEQ ID NO: 110767 - DNA, 537 bp, Enterobacter aerogenes
atgacgcaccatttcaggcgtctgacgctggatgataaacacgattatctgacgctgatgctggccgcctacgcgccgattaaagcgctcgggattcagtttgatgctgccaccgccgatctggcacgcgtgacgcaacatctcgacgatcatgcggtgtttgcgctgtttgatgaccaacgaatggtcgcttctgtcaccctgcgtttcccgtggggcgcaatgccggggccgatgggcctgccgcatattggctggttcggcacgcatccggactacaccggtcagagcctcggcaaaaaactgctgggctggctggaagacaacattctgatccgcgaactgaaagccccggcttactccctcggcaccgccaccagccatccgtggctgcgagacatgtacctgaaactgggttttcagccggtcttcgaaagagacctcggcaaagggcatatcacgctgtacctgaaaaaaattctcgatgaaaaaagccatacccgctggctggaacgtcagccacctacaggagtttaa

SEQ ID NO: 110768 - DNA, 1383 bp, Enterobacter aerogenes
atgtcctcacatccgatagattttcttttacttggtaacaattttggcacacccgaaatgcgggaaatctggtcagagcaaaatcgcctgacacagcaaatcaatgtcgaagttgcgctggcattagccgaaggtgaactgggtgtaatcccgcaacaggccgcgctgaccattgcggagctggccgatgccggcaagctgaatattgaggatatcgccgcttctggctcgcagatgaagcattccctgatgccggtgctcagcgcattgcaagagcaatgtggtgacgcaggggaatacattcattacggcgcgaccacgcaggatatcgtcgataccgccacagttttacagctggcacaaaccctgaaagcgatcgtccgtgacagcaccgccgtggcgaatctgctgaaatctttggcgcgtgagcatcagcacacgctgatggctggccgcacccacggcatgcaggcgctgccgaccacgtttggctttaaagtcgctgtctggctggatgaatttatccgccatctcgaccgccttgccgccatcacgccgcgcctgctgaccggcaatatcagtggggcgatcagtacttacgccgcactgggcgacgcgggtccggaagttgaacgccgcacactgacgcgcctgaaccttaatacgccgaatatcggctggcaggccgcgcgtgaccgcttttctgaatacgcctcggtggcggtgctgatcagcggcacgctgggcaaaattggcaacgaactttacaacctgatgcgcaccgaaattaatgaaatcgaagaaccattcagcagtggaaaaatcggctccaccaccatgccgcacaaacgcaatcccgcggccctcgaaggtctcgccagcctgacccaaccgttgttgcacagcgcatctctgatttatcagtcaatgcacgtggagcatgaacgtgatgcgatgagctggcgcgccgagtggatcgccctgccggaaatctcgatttatctctctgcccagctgcaaaatgcccaagcgattctctccggcctgacggtcaataaagcccgtatgctggcgaatttacagatgcaggacggcctgctgctgtccgaaaaagtgatgtttgaggtcggtaaaaaactcggcaaacaaactgcacatcatctggtgtatgactgtgccatgcaggcgtttgaaaaacggcaatcatttaaaactgttctgcttgcgcatccggtgctggcggccagtattactgaacaggatcttgaccactggttagatccggctcattacaccggctgcgccgcgcaaaaagtcgatgacgtcatccgttttgccgtgcagtccggtcatctgagttctcctgaggagcacgggttatga

SEQ ID NO: 110769 - DNA, 1086 bp, Enterobacter aerogenes
gtgttcgccataaaatcaccgcagacctatcatcatcagcccggcctgctttcacgtaccggtgagctgcttgccgttcattcctccgatatcgcgatcatcaccagcccgaaagcgtggcgggcggtgaatccgcaactggaaaccagcctgaaggcagccggtattcgctggcagatcaattttctcaccacggaatgcaccgatgcggctatcgaaaaacatctggtcagcgtgcgggaacaaaacgccacgctggtgctgggcattggtggtgggcgggtgcttgattgtgccaaagcggtggcgaacctgctgaccgacgtcgggctggtgacaataccgacagttgccgcgacctgcgccgcctggtcgccggtcagcatcatttataacgagcacggcggacatgtgcgcagccagccgttgttgcgtatgccactgatgctgctggtcgacacgaatgtgattgcgcaaaacgatgtgcgttatctcaaagcgggcatcgtggatgcgctggctaaatggtacgaattccgcccgtataaacaaaaaagcgacgacagtctggcgctgaacctgaaagtgcaggcggcacaactggcggtggacgtctttgaacagtatggcgcgcaggcgttacaggacaatgcccgtcatgaagtcacaccggcgctgatgaaagttatcgatgccaatatcgcggtagcgggcatggccaacagtatgcgcgatgaaacccccgcgccgggcgtggcgcacgcgatccacaaccgtttcacccatcagccggaattacatggctggctgcacggcgaaaaagtcggtttcggcttgctggtgcagtcgttgatggaaagccataacggccagcctgagccgcagttgctggcgttattgcgtcagtatcacgcaccactggcattgccttcgttaaacggcgaccgcgatacgattattacggccattgcccgtgaagtgaaattctccgccgaaaatgccgcccgtttgccgttctcaatggcggccgaaaacatcgaaaaagccctgcgggcaaccgaaactcaccattattctcagggataa

SEQ ID NO: 110770 - DNA, 1338 bp, Enterobacter aerogenes
atgacttcttcttcaccttctgcaaaaaacacgcgtaaattgcgtcttggcctgtttgtgcagccgctcgggcatcacgtcagcggctggcgcttaactgaaaaccttggttcgccgaccgacatcgactggctggcgtggatcgccaaaaaagccgaagagggcaaattcgatatgttcttcatcggcgatgccctggcgaccagtgtctaccgtttgccgtccaccatggcgcggcttgaaccgctgaccttgctgtcggcgctggcggtacaaacccgccatatcgggctggccgccacggcttcaacgacattcagcgatccgtttaatctggcacgcagcttttcttctcttgatcacatcagccacggtcgggcggcgtggaacgtggtgacgtcgttttccactgatgtggcgcgcaatttcagccgtgacgatatgcccgcgcataccgaacgctacgccgtggcgcatgagtttctcgaagtgacgttcaaattgtgggaaggctggcaggagggggcggtacagccggacaacgccagcggtcagtatttcgtgaatgagaaaatccagccggtgaatcatcagggcaaatattttcaggtacagggcccgctgaatatcacccgttcgccgcaggggcgtccggtgattattgaagccggttcttctgctgacggccagaaactggcggcggccaccgccgaagttgtgtttaccgctgccgcgacgctggaagaagcgcaaacattttaccgtgcgcagaaacagcaggtgaaagaggccggacgtaatccggatcacgtgctgattttgccgggcgtaatgcccatcgtgggccgcacgcgggaagaagcacgtgaaacctggcgcgaactgaattcgctggtggatattgataacggcatccgccagctttccacccgttttaatatggatctgagtgcgtttccgctcgacgggccggtgccggatgtgcctgccggtgaaggtaatcagagccgtgtgaaactgctgaccgatctggcgtatcgcgaaaatctgaccttacgtgaactggctgcgattgctgccggttcgcgcgggcaccgagtgctggtcggtacggcggaagatatcgccgatgatttccagcactggctggaagaaggcggggcagacggtttcaacatcatgcctgcagtgatgccggaacagctttcgctgtttgttgagctggtgatccctgaattgcgccgccgcgggttgttccgtgaagaatacgaattcagcacgctgcgtgaaaacctcggcctgcctgagcctgatgttaaccttcagtctcacctttag

SEQ ID NO: 110771 - DNA, 1212 bp, Enterobacter aerogenes
atgacgatttctttgtcagaccgcgttcagcgcgtgtcactttccgccaatgcggcggcgaaacagcgcacccttgatctgaaaaaatccggggtggatattttggatctcaccaccggtgagccggattttgatacgcccgatcacatcaaacaggcggcatacgaggccattgcgcgtggtgaaaccaaatatactccgacgccgggcatttcggcgctgcgcgaggcggtgcagcagaaattgcagcgggaaaaccggctggaatacgctgttgcagacatcatgattgccaacggtgccaagcaggtcattttcaatgcctttgccgccacgctcaatgatggcgacgaagtgattgtaccggtgccgtactggccgacatttcccgacagcgtgcggtttaacggcggcacgccggtatttgtcgaatgccatctggagcagggctacaaactgacgccggaacagctggccgccagtattacaccgcgcacccgctggctggtgctcaatcatccgggaaatccgagcggtgcggtatattccaccgctgaattacaggcgctggccgccgtcctgcgcgggcatccgcaggtgctggtaatgctcgatgacttatatgagcacattctgttcgatggccgtgaacatcagaatctgctcaacgtggccgctgattttcaggcgcgcagcctgctggtgggcggcgtatccaaaacctatgcgatgaccggctggcggattggtttcggtgccgggccacaagcgcttattgccgccatgaccgtggtgcagtcgcaaatcagttccggtgccagttcggtgagtcaggcggctgcgctggcagcctttaacggcgggctggattttattgcgccacaggttgcggcttatcagcaacggcgcgatgtgataaccgacattctggcgaatattgacgggctggagttgagggtgccgcagggcggtttctttgtcttttgccgctgcgccggattaatcggacgttaccggccggacggggcgaaaatcgaaaacgaagctgacgtgctggattatctgctggaaagcggcgtgtccggcgttggcggcagcgcatacggcttgtcgccctattttcgattatcgattgccacagacaacgccacggtagctgaagccgggcggcgcattgcgtcggcctgcgcgaaactcagccccgctcagtaa

SEQ ID NO: 110772 - DNA, 441 bp, Enterobacter aerogenes
atgaacgctgaaaaccagctgtttggtgatttcattgcgcaggacggcctgacggaaattgccgttaaccggccgggtgaactgcataccaaaatccgggggaaatggcgaagacatgaagccccggttacgctgcgtcagtgttacgcctttgccagagcgctggcgtcctggcaggacgagaatatcgacgacacctcgccgatcctttccgccacgcttgaatcaggcgagcgcattcagccccattattccccggactgtgagtgcaataccgtatccattacgctgcgtaagccctcattcgggcagaaaacacatcagtcatggattgatgcgggattttataaccgggtaacgccactgaacccctgtagaacgctttcaacattttgcgtacaaacccattttaacgggacatgggagcagacagttcaataa

SEQ ID NO: 110773 - DNA, 1305 bp, Enterobacter aerogenes
atgaccgataaacctgtcccggacgaaccggaaaaaaccaccgcagaacgggaagcggaagcccgcgaacgcgcccgtgcggcaatggcgtatcaggaaccggaacagagaacatcccccggccagccggaagtgacccgttttcgtaaggtatccggtcgccgcacgctgatcgtcagcctgctgagtctgactctggtgatcgccctggcatccgtcggcgatcgtcttttcagtgcattcaaagggggtaatgagaaagaagccgacaccgcgccgccgccctccgccgggaagacgctgcatgagcgtcaaaatctgggcatggacagtaacccgtttggcctgttcgggccgcatacacaggacggaacagaccctgcccgccaggccgtcacttccgcacccaccctaccaccggccccacccgccctgaacaaggcagccgcactggctgacgggctgaacaacgcccgaacaatgccgggagataatgcacgcacgtccccgggtgaaacgcgcagcaatgcagacacgtccgacagtcggtcatcatccacaacgtacacatcctgtccatcagtactgacccgaggtaaagatggccgcctgcgctgcccggagactgcctcgccggaaacgggtaataacgacaatccgggcgtcgcccgtgtcaccggcgtcagacggctgggtctcgatcctgatctctatatcccggtggaccgttatatcccgtgttcgatgatgtggcgcttcgtgtccgatgtcggggggcatatttcctgcctgatcagtgaagatgtatatagcgccagtaaccatgtgacgctgatcccggcgggaacggtcgcccgtggcatctaccgcaccggggcgctgcagcacggacgcagccggatgtttgtgctgtggacggagctgcgtacgcctgagcccggcagcctgcaaatcccgctaactgatacgcaggccagcggcccgctcggcgaggcggggatctcaggctggatcgacaaccatttctgggagcgcttcggcaatgccctgatgctcagtaccgtgcaggacgtggcagcggcggcgtcggatgctgccccggggaaagaccgcaataccgactacaccgaaaacacccgcgccgccacggcggaaatggcgaaaacaacgctggataacagcatcaatatcccgcccaccctgtatctgaatcagggtgatgtcattggcatcatgaccggcaccgatattgatttctcatccgtctggcagttgcgactgaaaaagaggtggtatgaacgctga

SEQ ID NO: 110774 - DNA, 888 bp, Enterobacter aerogenes
atgctgaaaaacatcctgttcctgacgggcttactggcatcatgtgcggtatggagcgccgccaccccgcgtggcagcggctatgacagccggatgcagaacgtatcgtataacagccagaacgccaccgtggtgaatacccgccccggctacgtcaccacgctgctgtttgacgacgatgagaccgtgactgacgcgcaagcgggctttcctaaaggctggacggtcacgaaaagtgataaccgagtcggcgtcagcccgaaccccatcacccagccggtgacggacgccagcggcaacactgtcagtcaggtatttttgcccacggcgaaggactggaagaccaacctgttcgtggtgacctcaaaacgtgattacagcatggagctgaacgtgctggaccacgattcacgcgcgcaggcgttcgttatccgttaccactatccggccgaggttcgccagcaatccgccgccgccagcgccgctcgtcagacgctgcagcttgaaagacaggagaagcagcagatagcagcggcattcggacaggccagcacgccacgcaactggctctacaccaaacgggttgccgccggttcggcctccatcgcaccggattttgcctgggatgatggtcgttttgcttatatcggtttttcccccatcaaaaccctgccgtctgtcttccgggtggttaacggacgggagcaggcgctcacgccccggacagttaagcagggtaattacattgtgatggtggtgccggcagcgccacaactggtgttgcgttacggcacctcggtggtggggatcgaaaacgaaggattcgggcgcatcccaataacccgcagcgacactgtgtcaccgtccgttacgctggaggctaaatga

SEQ ID NO: 110775 - DNA, 141 bp, Enterobacter aerogenes
atgaaattcagcatcttgcttctggtgctgtgcgcgcttacgggctgcgcgcagcatcagggcgacctcccgccggtgtccggcgatccccagccggttaattcccccgccataatccaggagctgactcacaatgtctga

SEQ ID NO: 110776 - DNA, 1032 bp, Enterobacter aerogenes
atgtccggtggtatttttgttggtatggacaaaaacatcatggatggactcaatgccgtgttagaaggtcagtcttctacctacggcaccctgatcagtgtgattatcgtcagttccttcaccctgtttattacgtatcgcgggtatcagacgcttggcggcaaactccagacaccggttgaagatgttgtctgggatgtggggcgcatgttgctgatcaccacctttgttttaaaccgcgagggctggctggatgccatcattacggccattgaaggacttaaggacggtatcagtggcgatgataatgtctgggcgctgctcgatacggtgtgggaaaaggcacaagcgctggggcaaacgctgtttaatctcgatacctccacctacgttaaagtgaatggcggctttgccgaggtgctggtctgggccggtgcaatcgttctgttactggctgcaacctttgtcaacctgctcgccgaaatcaccattctgttaatgaccaccaccgccccactctttattttctgcctgctgtacggttttcttaaacccatgtttgataactggctgaagacactatttaccgcaatcttaacagtcatgttctctgccctgtctgtccggatcgccatcaactacctgaataaaatactggatgccgccacagcaacgtctgctgaaagcaatatggtgaccctggcggcgcaatgtttgctggccgggattgccgcaggcgtcgtggtgtatttttcagcgaaaatagccactgcgctgagcggtgctgccgtacaggccgtgttacagggtgcagccatgagcggactgagcgggcttgcgagcaaatctgccgacgtcgccagacccggcataaaggccgggggccgactgaccgccaaaggtggcatggccgcagcagcgacaaccggcaggttcattgccacaggtgcgggcaaagccgtgaacgcttggcagaaacgtgccaccgccatcgaaagcatgaaacggcagaatcagcagcgtcaccgttaa

SEQ ID NO: 110777 - DNA, 276 bp, Enterobacter aerogenes
atgttgaaacccgtattaaccttgtgcgtcatgtcaggcattctcgtcttatccggttgtaaagagacgaaatcagaagcctggtacaaagaacatcctgatgaaacctataaggtctatacgcaatgcctcacggatggtgaggcaagcgacaactgcgagtttgcgcaccgggcagcattaatgtttgcccagacagggaaacccggcattcgggaaaaattcgagacgctgtttcagcaggaagcccaaaaaagaaaatccgtcactcagtaa

SEQ ID NO: 110778 - DNA, 720 bp, Enterobacter aerogenes
atgcggttcagaaaactcatactggcattctcgctgttgatgtccacccaggcgatgagcgccggaataccggtattcgacgccgaacagaataccgaatccatgaatcaatggatccagaaactccagcaatggcaggaaaccgtcacccattacagaagtgaacttgatgcctacaagcagcaattagccacggcaacgggcgtgcgggacgttcaggcatttctccgcgaggcaaaaagtctgaaaaccgatattgataatctccgtcagaacggtatttcactggatgacctgctgagaaaccaaagcgggtcatattcgtctgaactgaatagcttgtataacaaatataaaacgttcgatacctgtaacccgtccagctcttcacaacgctatctggacagctgcaaacagatgatcctgaatcaggctgtagcaatagaaaatacctccgaggttgaaaacaagatcacgggcacgctcggcgatatatcagatttatcagaccgtattgctaatgcgcaggattcgaaagagtcacaggacctggctaacgccatcgcggccaaaagcgtacaattgaatgcgctgaccagccagtgggaaatgtcagtcaaacagactgaacagcgagcaacgctgctggagcagcaaaaacagaaagcctttgagcaacagcaattaacggcgcccgttgccgatctgaactctctatag

SEQ ID NO: 110779 - DNA, 2748 bp, Enterobacter aerogenes
atggctacgctgaacaaagcgctgacgcggcctgccgccatagccggtattcccctcgtaccgttcgtgatggtcagcggggccatcgtcctgctggcggtctatgtcagctattacctggtattactgcttatccctgcctggctggagatgaaggcaaaggccagaaccgatattcactatttcgggctgctctggctggccttcaaaacccgtggccggtttggcaccaataaacattttggtgccaatgcccttctggcaaaccgctatgacgccgtcaacgtctcggagtttattgaaaaaatgaagttaaacgagcgcgttacgctggataaatacattccgtattcctcccatattcacccgcacgtcatcagaaaccgccagggtgatttggttgccagttgggagctggaaggcaccgtttttgaatgcgaggacgaacatcatctgacgctaatggcgacgcatctcaataacgttattcgttcatacgaaggcctgccggtcactttctatctccaccgtatccgggaaaaataccacgatgcctttgacgcgaattcaggtattcccttttctgatgaagtgacccggcggtattaccagccaatcaacgaaaagccgttctggcggcaccggctgtttttcactctctgctatgcgcccttctctccgctggagaaaaaggccatgaagacgcagccatcgggtaaacgtaaagcggcgctggaggatgctctgaacgtgatgctggaacaccgggatgcgctggcttcggcgctgtcccgctataccgcgacgccgctgggaatatatgaagacaacgggcgggtgtattccgcccagctgtccttttatcatcgcctgctcaccggccagtggcaaaaggtggcggtcacgcgtgcaccgttttatgaaacgctcagcacgccggatgtcttttttaccaccgacaccgccgagtgccagacagtcggcggcgcccgcttttttcgcagtctggaaatcaaagattattcgcctgaaaccgcgaccggcctgctggacacgctgctgtatgccgaaagcgagtatgtgctgacgcagtccttcacctgcatggcccgcgatgaggcgcagaagcatattcgcctggcggaaaagcgcctgaactcggcggacgacgacgccatttcacagcgggaagagctgattgtcctgcgtgacctgctccagtccgggcatgtctcctgcgggaaataccacttctccctgcttgtatcttcagacagccccgagcaggtggtgaaggataccaacgcgctggcgcagcctttcgccgacctcggcatcatgacaacgctgtccacgctgtcgctgcccgccgcgtacctggcgcaactgccgggggtatatacgctgcgcccccgtctggtggccgtcagcagccagaactttgccgacctggcgagcctgcacaattttcatcctcataaacgaaacggcaatccctggggcgatgccatcgccatcctcaaatcccctggcggtggaggttattacctgaacctgcacgacagccaaagcgggcgggatgacttcaacgaaaaaacgccgggtaacgcagcgattatcggtaaaaccggctcagggaaaacaatgctgatgaccatcatgcagcaactgatgcagaagtaccgcaatccggcgacgttctctgaatcagccccccttaagcagctgaccacggtgtattttgataaggaccgggcggcggagatggcgatacgccagatgggcggacgctacttccgtatccgtaccggcacgcccaccgggtttaacccgttttcgctggccccaacccggcgaaatatcagctttatcaaacgactggtacgcatgctgtgccgccgcaatggcaagccgctcgatccgcgcgatgaggaacggatcagtgccgccgtagataccattatgctcgactcccccccggaataccgcaagttcggtatcacccggctgctggaagtcctgccggagccgccaaccaccgacgtccgcatcaacgggctgcgtattcgccttaaacagtgggcgcagggcggcgagttcggctgggtattcgacaatgaggaggacaccttcaacatcagcaacattgataacgtgggtatcgacggtacggaatttcttgatgatgacgatattcgcggccccatcacgttttatctgctttaccgcgttaccagcctgctggacggtcgccggctggtgatgttcatggacgagttctggaaatggctggccgatgtcgaattttcccgcttctcgctcaatatgctgaaggtgatccgcaaactgaacggcatcttcgtccccgccacccagtcacctgacgaaatcgtaacacacccgattgccccggcgattatcgagcagtgcagcacgcagatttttctcgccaacccgaaggccagccgggcggattacgtggaaaagatgaaagtgccggaaagcgtgtacgacatagtcagaaacctcgatccgggtgagcgctacatggtggttctgaaaacgccattacgcgcaggtgaaacccgaccgtttgtggcgatggcgaaaatggatttagcgggtctcgggaaactcaccaaaatgctgagcgggagcgaagacaacctgaaactgttcgacaccctgtatcaggaaggtatgcagcctgatgactggaaagccgccttccttgaacaagccctgtaa

SEQ ID NO: 110780 - DNA, 282 bp, Enterobacter aerogenes
atgatgaaacgaatacagtatgactggcccgtcctctcttccttgttaatgacaacccctgtgctggcagcagacagcgggtttaataaagccaatgagacgctgagcaacacctctaccggcttgctcggactggccgccgtcaccatcacgctggccaccatgtgggtgggatacaaagtcttgtttgacggcaagagcctgcatgacatgcgcaacatcatcattggcgccatccttatcgtcggtgcgtcaggtttcggtgcctactgggcatcataa

SEQ ID NO: 110781 - DNA, 648 bp, Enterobacter aerogenes
atgctatccaccacagcctttcttacgctgtcgatgcagtgcgccgccagcgttcacccgtccacggcgcttgatgtggcgcgggtcgaatccggtttgaatccgtatgccatcgctgaaattctgcccggtggcaaaggcgtgacttcacatttccccgccagcaaggatgaggctgtcagcctcaccggacggctggcggcacagggccgacgctattcggttgggctgatgcaaatcaccagcaccaatttccgccattacggcgtgagcgcccgcgaccttcttgacccctgtaccaacctgtccgtctttgagcgcatcctcaccgactgctaccgccgcggcggttccctcaagcgtgcgctcagttgctactactcgggaaatttcacgaccggccaacagccggaatcttcgtttaaccagaccagctacatccagcgcatcggctacgccgtaccgtcaacgcggcaagaccggcagcgacctcccgccgaaaagaccctgccggaaatccattaccccgccgccgtcatgcgtggccaggttaccgataacgccacatcagttctgacatccctgcgctaccccaacgccgtgatacgcggcgcattacccatccccggcccccaggaggaacaatga

SEQ ID NO: 110782 - DNA, 222 bp, Enterobacter aerogenes
atgcgaaaacccatttatcacgtatttgtcacccaggaaagtcaacccgatgcacagggcgaaataaacacgtattggaccaaggttggcgtggcgtttgctcataacggtaagtctggcctgaatatcatgctgacacccggtattgctgtctccggcaagctggtgctgcttgaacccagagaagatagcggcatttcgcaggataccgcctctgcttaa

SEQ ID NO: 110783 - DNA, 588 bp, Enterobacter aerogenes
atgaatatcccgtcacttaattacaccgtattaaccgatgccctgcatgcattaaaggatggcaacattcgttactgtgaatcgctaggattcactttcgacgaaatgaatgccctcaaccagttgtcactagacgagctgtttatcatcagtcgggagtctgcacagtttttggctgtgacggttcatcacgacgcattacgcctgcttctggcgaaatcacgtgaggaggttctgcagcaacagcgtatcaaccacgctatccggctgggtgggtcaattgcgatactcaacaagtattttggcctcacctccaacgaagtttgccttcgccgccggttactgggcgtccgtgtgccttatggccggacaccagagccggacgaagaggcggatgcggccatctggcggcaatggcaacaatgccgggtggccaacctggaatcgaccgatgcactggccgccatgatgcaggtaacgcaaaccctgctgccgaaagtcgaagggttgtcactgaccatcgtctggaagcgtatcgcactttgcgaacgggaggcgtcagaccggagggccgcccatgccagatga

SEQ ID NO: 110784 - DNA, 705 bp, Enterobacter aerogenes
atgtcagacaggctcgttttttttaagaataaaaatgtaaattcagactggttaactatcaaagaagcagtaaaaacatcaaagaaaaacggcatcaggaaaatacaagaaagtgatatctatcgatatactttgcagggtaaaatcctcctttcgatatactttcagtctcccattaccttgaggaaaataaaatcccataaccataaattaaagctaaaacctaaaaacaataacttaccggacgacaaaactttgttggatcaaagcattttttttagcgagagtaatttaacttttagcaccgaaggtaaatattttcatactgctcatggcgtcattgatacaagtctttttggatatgaatattttctcatacaatgcctacttgctcacaatctaaaaataccatcacctgtactaagagggaacaataattatggcattactgtttccttatcaggagaaagctttctggttcatgataaaatttcattatgtaatggaatgtcattaaacagcatagatttaagctttaatgatgcctatttacctatttataacttaccgaaggatgcatgttttgttatcaggcaaactgagttaaataaactattcaactggctggctggaaaaaaaatcaccctcggattcttccacacgcatatcatcccctctatcaagactattttggcttgcctgtag

SEQ ID NO: 110785 - DNA, 498 bp, Enterobacter aerogenes
atgcagccatttattattcgagacaatgaaggcgttccactttggttaaataacgacacctatactataaagctggataaagaaaacaccgggggaaatatttctattatccagggatttgtgggtccaggcgggggtccgatttggcatcttcatgaagacgctgacgagattttttatgtactagatggacaattaacagtaagagccggagaaaatatttttcatgccaatccaggcgattttgtttatgttcccaaggggatttatcatcaatttagaaataacagcattaaacctatcaagatattactgatgttctctcctgctggattcgaagggttctttagggaaacaggaatcgtagcaaaacagggcattataccaccactacatattcatgatgccgaagcaaacagacgggctattaagattggtgggaaatatctttcttttgttcctgactttgaaaaccccgattttaatccaaatttgtaa

SEQ ID NO: 110786 - DNA, 759 bp, Enterobacter aerogenes
atgagtgatattttttcgcaaaagaaaattcttgtaaccggcgcaggcagtggacttggcagagaaatagccttggcattttcacgacttggcggaaacgttattcttgcaggtcgaaatacgcagaaactcgaagaaacggcgcaagcgatctccgagactcctggcaaatcatgggttattcctttcgacgtaaataataatcaatcaatagacaacctgtttgatgaaataaaacataaagtcggcactcttgatattgccgttaataacgccggagtattttcttttggttttgtcgatgaaacctccagtgaagactttaatcacgtattcactactaatgtcattggtttgtttgaaagtctgaaacgcgaacttcagtcgatgaaagaaaaccgggccgggactatcgttaatatttcatcaaatatgtctatcgggctgaatattccgggcacggcggcctacaccgcttcaaaggctgccgtcgatgcattgacccgcgtctcggcaaaagaggctatcacgcacggcgtgcgggttttctcaataaaccctggcccattggccaccgaaatgacccaacttcccggcgaatcagcggcagaccgtgacaaaagatggcgcgatttgatccccattgggcgtattggcgatgttaaagagatcgctgaagccattatttggtcctgctccggccagtctggctacttagtgggttcgcgaatagttatcgatggtggtcattctctttaa

SEQ ID NO: 110787 - DNA, 1173 bp, Enterobacter aerogenes
atgataactcatgacattaatacatttagcaaaatattagttaatctaagagatttacgcggtgaattacgtaactcctctcgtgaaatagaagagcatcgcaggataccactcaatattattgaacgactacgtggcattgggatatttggaatgtgtttcccgcaatcatggggtggtgccggactgacgtcgattgagcaaatccatgttttggaagaactcgcccagggcgatacggctaccgcctggtgcgccatgatcggttgtgactcaggtatttattcaggtttcttggaagaaaaaagcgccaaagagatctttccacacgccaatctggccgtggcgggttggatacatccgcagggaaaagccgagatagttgatggcggctacatcgtcactggcaaatggcgttttgccagcggatcgcctcatggcgatgtcatctcggcaggttgcttcctctaccataacggcaatcttgtactggatgacaacggcaagcccctttggcgagtcatgctggcgcgtcctgccgactaccttttttccgatacctggttcaccaccggcctgcggggaagcggcagtcaggactactccacgcaaggattgttcattcccgaacagcacgcgttcaatttctcggcaccaaaacgtcaagggccactgcacaaaacgccggatgcaattttacgcaaaatgtccggtatcccgctggggcttgcgagagcctgtctggactatatctacgatgtcgccgacgaccgcacagacagaatcaatgatgtgaaatggcgaaactcaaagcgcgtacaggcggcggtggctaacgcagagaatcagttatttatcaccagaaacgcggtgctcaccagcgtaagtacattatggcaggcgctcgaagccgatgccgctcatgacgatattactcattggcgcgtgcagtcagctctgagtcgaagaaatgcctttcaaaccgcgcgaaccatcgtttcaagcatgtatgacctacagggcggcagttctatctacacccatgaaacaccttttgaccgcgcattacgtgatatcaacaccatttgccagcatgctgtcgcgcaggaaaaagtcctgcaggtgtgcggcgatattctccttggtggcaaagtcgaagattactttatataa

SEQ ID NO: 110788 - DNA, 1443 bp, Enterobacter aerogenes
atgaacaaaaagttcatctcctttctcgaacagcatttagatcataaaaacgtcgtcgcctatgtaaacacaccgaatgatgttggcgaatatacttccccatcggtttctggccgagtggatgtttccagtattgaacaagtaattcgtattgttaagcttgcagatcaatttgacggggaaacagcgctttatccctactcaactggatacaattgggggttaggttcaacaaaacctccgtcagacaacgccgtgcagttaaagctgaccggattaaataaaatccgcgagattaatatcgcagagggttatgctgtcattgagccaggtgtgacgcagggaacattatcgcaaaaattactgaacacccatcgctttattaatgtgacagcctcatctgcagaaacgagttttttaggtaatgctctcgatcggggcgtcgggttgaggcaccagcgtacagaagatcttctcggcctggaaattgttctcgccaacgggacactgcatcgtgtgggctggtggccggaacagggaaaacatagcgcattatactcccacgggattggcccttcactggtacaattattcacccaatcgaatctcggaattataaccggtggcgttgtacggctacttaatcgaccagaaaaatctcgcgtcgcctatatttccttttctcccgaaaacttagagtatgctatcaataccttccagcgttggtcagcacaagggttaattcacggtgtacttaaggtttatgatgaaacctcaacactgacgtatggtgcgaataagggcgagtttctcgttcacctgcccctttcgggagccgcctcagtagtgtcggcactttccaccgcgctggaaaccgagtttgtaaaagctggcgagaaattcatctctttgatctggagcgacagccctacgaatccttatcaagatgatatcgtcgccaatctagttaccgctgcctatcaaggggatactaaatatcatgatatacttctggagaagacgctcggtactacaccggctgaaatagatgccgtaggcaaaggctggatatttttcttgcctctgcttccttttaccggtcaggctattaaagaggcttatctacattttgacgatatcttcgagtctactggcgtgcgctgcggtgccacaattaatacgctgagtgatcagattattgatctcgtcgtatccattcgttttgaacgcgtggaagaggaaataaaaaaagctcatcaggctctgaaacttcttcatgaaaaattcagtgcttcaggtttttacccttatcgtttggacgtcgaacatcctctcgccaatagtcgtaatgccagaacgcttcgtgaaggcgaaatcatcagaagtctgcaaaaaactttagatccaaagggagttttcgcatccgggcgatatagttattaa

SEQ ID NO: 110789 - DNA, 1110 bp, Enterobacter aerogenes
atgaacagtgaaattaattcattaggctatgaaaataatattcaaactattccggtgtcacatttattttccgaaaataattataaacaaggaatcccaattatttaccacagcgagagtgataaaattattgaccaacgctgcgagacaaggttattagatgagacacccaacaagaagtcaatcacacataaaattcatgtaatacaaaaatgcaagccagaacacatcggggatattttcctgcgctcatcagaaaatgatgagaacagtattattttggatattaacattcatacatccttagaagaaaaaataaaaactggactatttcgaacactttcgatgcttttatttaaaaaatataaagcactgagaattgagacgcgaactctgattgacaaccataaagttattaatagtcttgtattgagtgggtacagttttgaaggcatttcacaaaaactcaattcaaaatcagaattacaggaactcgcagttttttccttattgagggatcacagtaatacggccaaaagtctattatttcctgcagtggatagcaatatttatcgcgatgagaaaattgcactgcgtttggctgaaccaaaagacacattttgtatgtggctagagcaatcaaatcctgaatcatctaagtggggtttattcgaaacagaatcgcttgatgaaatcaaacaaaaaattagtcgttgtgggcttaattcagccttaggccctaatattttgctcactattatagaatgctcaactggtaatgctgtaggaaaaattgttatccgtaatgttgtaccacctcatgtaggtgatgttggttacgggatattgccagaatatcgtggtttgggctacgccgttagagcactgaatcttttgaaaaaatgggcctttaatgaagctggttatgtacgtttagaacttggtgtcaaagaaggaaatatcgcgtcagaaagagtcgcgcaaaagggagggtttgaatttgaggggatgcgtctgggacgattgaaaaatcatgatggttcatacagtaatgaaatgcactatttctttctgaacccgaatattagctatcgcaaaatagaggattga

SEQ ID NO: 110790 - DNA, 1185 bp, Enterobacter aerogenes
atgaacaaaccacttccagcggcaatatatgttttaggttttactctatttgccatgacaacatctgaatacatggtcgcaggattaatcacatccatgtcatctgatttaggcgtttccattcctaaagttggatatttaattactatttattcattaggtatggttttcggtggtcccttgcttgctacatttttagttaaacttagcaataaagcagcattattgactattactggcatatttcttgtcgcccaagtcgtcgcaaccgtttctgcaacttatgatcttttagcagtagcgaggcttgcgaccggattatcttcggcagccttcttcggttttgctctgttgacagcggcaaaaatggttccaccggaacgctttggcgttgcagcctccatcgtattgggcgggatgatgatagcgacggtggcgggactgccactatcagcaatacttgatcagtattatggctggagagtttccttcgcattaattattgtccttacagctttagccggaataggtattatactgattgttcctaaattcaaggcggaggctaagggtagtattaaggctgaatttggttcaattataaacagatcaatctggggggcatttattacgagtttctttattattgctgcaacattcgcgacattcagttacttcgttccctattttgaaaacactgtcggtttcaatacttcatatatcccggctattcttttcgcttacggtgcattcacggtaattggtaacttccttgtaggtcgactagcagataaatcgccgattaaagttgttttcaccggtagcgtcgtgctagtacttgcactgtttgggctttataccttctacgacaataaaatattagtgctgatatctgtaatgattttaggacttactggtattactctcactcctgccatgtcctcacgcgtgtttaaagcagcaccaaatacctcattgattaacaccatgcatacttctgtcatttgtcttggtgtagtgattggctcttgggccggtggctatgcaatcgatcaaggctatggttaccgtgcaccggcgctcatcggcatttttttagccggattggcgattgtcaccctactccctgttttgaggaataaccgttacgatgagtctgctgttaatcctcaggcaaatatctga

SEQ ID NO: 110791 - DNA, 918 bp, Enterobacter aerogenes
atgagtgaatacgtgcaagcaattgtgaaatcagatatcggtggttttagattcaccgatgtacagcggccggtcagaaggacggaaagtgatattttaatcagagtttccaatatatcacttaatcggggagaattagactttccctgggaatcggataagcctgccggatgggatgcatttggtattgtgatcgaggccagcagcgacggtcagggaccaaaaattggggagcgggtattaacatggagtttttcgggtgcatggagccaatatcgcgttgtcgatcgtgccaatgtcgctatcgtgccagagagtgtatcagcagcggttgcagcagcgttgcccgtggcaggattaacggcgctgcgttctctgcggactcttcatttgcagccgggccagtctctggccgttaccggcgcaacgggcggagtcgggcatttgttggttcagttagcaatgcatgccggtattaaagtttctgcggtggcgcacagtcagcgtggattcgattggctgcaagccagcgacgttaaacccaacgaggtactattggctaaagaatatccttttgagggaacctttgatgccctggtcgataccgtcggtggcgatttactggctcatctattagacaatgttgtccctaatggcacagttctcattctgggcgttgcctcggggcaggtggcgagcatagacaccacaattttggtatcacgaggaatcgatctgatttcttataaggattattccccggccggagaagatttaaacaccttgctcactctcgttgacgagaagattattaaagtatacgcggataatattggtagttgggacaaagtcattaaacaggatttcctgcatcttctcgctccaggcaaagtcacgctcaacgtacctcaggactaa

SEQ ID NO: 110792 - DNA, 882 bp, Enterobacter aerogenes
atggatttaaacgcgcttaaaatctttatcaaggtaggggaaacgcagagttttaccaaagctgcgcaggcattgggcctcacccaatcaggggtctcacgtgcaattaccagactcgagctcgacctccgtgttaccttgcttaaccgcaatacccactctgtaagtctgactaccgatggcgtttttttatatgaatcctcaagaagcctgatgcatgaaatggatgaggttgggcattcgattaccggcagaactgtattccctgaaggcgaactaaaaataacgacaccttctgcctatggccgattggtaattattcctatgctcaaagagatcctggacagatatccggcattaacaattgacgcggttatgactgaccgattggttgatttggtggaagaaggctttgacgcggcgattagaattggcagcgtacaggactcacggcttatcgcaagaaccatcaagcatttacgttttgtcaccgttgcgtcaccggaatatttaaacagccacggaatccctaaagagccagcggaactggtacagcataactgtctggctgttaaagcacagaaaactgggcgtagcacaaagtggttttattatatagcgggagaacagcaggcttttgatattaagggtaatctggtcgtcgatactgcggatgtactgttagaggcggcactcagcgggatgggggttgttcaaataatggactttgcggtcggtaaatatctggaaaacggtaaactggtcgagctactacaagaatactccgaggcttcgattccgctttcattaatttatgcaaaatcgcgccatcgttcgcctaaaatcagtacattgctggcagcgttaggaataaatacttga

SEQ ID NO: 110793 - DNA, 285 bp, Enterobacter aerogenes
atgttactgacgggcggtctgttgtggttgggacacaccatcctgatcgaccatctgcagcagaaagcgctgatggcgtcagttgcgcagatgcccgcgccactgccggaagaggctttgttgatattgcataagaatagtccgctgtggctgaaagaaaacacccattggataaagcagacacaacagcaattggaacaacttaccaggacggacgccgggaaatcatcggtatgggcatcggtgagtcagaagccaaagcgttctggctggccttcctgttga

SEQ ID NO: 110794 - DNA, 396 bp, Enterobacter aerogenes
atgggcatcggtgagtcagaagccaaagcgttctggctggccttcctgttgagccttaaagagcgcggtctggagggggtgaagctggttatctccgactcgcacagtggtctgaaagcagcgatacagcaggtgttcgtgcaaaccaacgagaaaagcgcccatgccacctggcgtgagattgctggtcaactggagaagagcaatccgacggtcacagagatgatggacgaagcggaagcggacgtactggcgtacttcggcttcctgaaagcgcaccgtgtaaaaatccactcgactaacacgctggagcgcctgaataaagaggtgaagcgttcatgctttcaccgaaggcttgcgtgttcagctcgccgacacttccgtacgcgtaattga

SEQ ID NO: 110795 - DNA, 291 bp, Enterobacter aerogenes
atgaataaaggttatttaattgcgcatctcactgtatcggacgctgttgcctacgccgaatatgccaaggctgccagagaggcaatgcaggcgttcaatcctaaggtcatttcctggtctgggcagtatgaaaaccttgaaggagaatcccatgaacaacacgtcatttttgagtttgcttcttttgacgaggccaagcgtttttgtgaaagtcctggatatcagtcagccagagcaattcgtgcgggggcagcaaccggaacttttgtgctggttgaaggaagcgcttaa

SEQ ID NO: 110796 - DNA, 309 bp, Enterobacter aerogenes
atggacgggctcaaggctatgttcaatccgcgcctgctggcgggcgcaggtatcacggttctggcttatgctggttcgttcacgctctacacctacatctcgcttattctcctgcaggtaacgctggtcagcgaaagcaccagcagcttgctcatgctcggctacggagtaatggcgcctatcggcaacatttggggtggacgcctgacggaccgtaaggggcttatgaattcgtcatgtctgaataacgtaagaatcagtgtgttacccctctcaactgaacttaatgtccaaagcggagtatcctga

SEQ ID NO: 110797 - DNA, 786 bp, Enterobacter aerogenes
atgacagcaaataatactacatgggtgcttatcacgggagcttctggtgggtttggtgaagagttcgcacgccaatatgcagcacagggaaaatcgctcatcctggtggcgaggcggctcaatcagcttgaaattctggccgaagaattacgcgagcgctttaaggttgatgtgattgtggaacaggtggatctttccgtcatttacgctatcagtgatttgcacggtcgtctgcaggagcgcgacattcaggtcgatatattgatcaataatgccggtcacggtttacagggcagctttctggagcagtcactggatgacgcactgaatatgatcagtctggacatttccagtctgacagccatgacccgtctttttgccgccgatatgcgcatcagaggcagggggcatattctgatggtcgccagtctgttgtcctggcagggggtgaagaattttgccgtttactccgccgcaaaagcgtatgtgctcaggttttcagacgccctgcaccgcgagctgaaaaacgacgggatcgttgtcaccgcactttgtccgggcatctccgacaccggttttgcttctgttgcaaggcagaaactgacccctgcgttaaaagtggcgatgatgaaacctgaaccagtggtgcaggccggtatacgagccctggaagccgggcgaatgagcgttatacccggcctgggcaacaaggcgattaccgtgctgacctgggccacccctcgctggttgcatcaggccatcatgtcccgggtgatgggggtgtaa

SEQ ID NO: 110798 - DNA, 789 bp, Enterobacter aerogenes
atgaaaagaacaggcattctggatgtggacgtgttaactgaaaagctggtccggggattgtttcttgccgcacctgatgcacaggtatttctgttgtcgggaaacaatgaacgggcgcgtaagctggaaagagaatatccctgctggaccttagatacttatcaggatgtcatcgatgaggctgatgtcatcattaccggcgtggatcgtcatgctgtggatgaaattgcaaacaaggtgcaattgagaagcacgcaaacactggtgtcactggtgcccgggctcccgatacagcacctgcaaacgctgttcagacacaatgactgtgtcagactgatgctgaccttagccgctgaaatcaataaatcaagcgtgctcctgactcccgctgaccaggaggtacaacgcttattttccctgctggggccactgaccgtattacctgacgagtcggactttgattcagcaacggtaaacctctgcatgaccagtggtttctgtttcctggcggaaggtttacagtgctggctgaccgcgaaagggatggcggatgacactgcacggcaactggttcttaacgggctgaaagactgtactgaatatgcaaattttcgcttgtccaccaaccagggcgatttaggggacctggggcatgatatgtcatcagcggttccctttatgttgcaggggattgaagttctggcccagatgcaggcgcttaccccatggcgtgctgcttccgatacgcttttatcggccattcagagaaaaaccggctctttgaaatga

SEQ ID NO: 110799 - DNA, 1458 bp, Enterobacter aerogenes
atgttcacccaacgaactcttgcactggtggtgagcagcagcttactggcgggttgcgccgtcgggccggattatcatcagcccgacgcgccactggcgaaacgctatcaggcacagtctgccgtccagcagagaaacgcctccagacccgccagttttgccgtctggtgggaaggcttcggcgatcctctgttaagtcagtatgttaccgacgccctcgcccagaatctcgatctcgcgcaggccacggcacgcatggcgcaggcccgcgccggactgagcatggccaccgctgcgttgttaccgtcggggaacatcagcgggcaggccgcacgcgcctatcagtcggccgaaaccccgctgggtcaggttctcagcgcgacgccggattataatcgctacggcaacagctatgaaaccgatctgaatgccagctgggagattgatattttcggggggctgcgccgcggacgtcaggctgccctcgcggactatcaggcttctgaggcgggtgtcaccgcgacccgcctggccgtcgccgctcagactgccgatatctatatcaccctgcgcggattacaggcccggctgaccatcgcagagaaacaggtcagtacccggcaggacctgctggaaaaggtccaactcctgaacgctaaaggactggctccggcgtatcaggttcgccagaccgaaggggaactggcgcaggttcaggcaaccgtgccggttctccggacggggcttgatgcggcgatgaatgcattagatgtaatgctcggcacgcctcccggcacccatcgcagtcagttagcgttgccgggtgccataccgcaggcaccacagatcacctcaacaggcacccctgccgacctgctgcgccgcagacccgatattatcgtggcggagcgccatctcgccgcctcgagtgcacgtataggcgtcgccatcagtgagtattatccgaagttctcactcagcgcattgctcggcagcgccacggccgtctcgagcggcaacatgttcaccggcggggccagtcagtcagccggcgtgctcggtctgcgctggcgactcttcgattttggtcgcatcaatgcacaaatagaccaggcgaaggggcaggaagccgaagcgctcgccgcctatcgtctggctgtattacgtgccactgaagatgtcgaaaatgccttctccgccctgatcaaccgtgaagcacaggcagcaatgctggctaacggtgaatccgctctggccagcgcccgcgaatcgtcttttatcgcctggcagcagggaacggccagcctgattgacgtccttcgtaacgatgaaaccctgttgcaggcttctgatgcaaggatacaggctcggacagaatctgcccgtgcagcagtggctgcgttcagggcactcggtggtggctggcagccaccggaaaccgcgataaaggcaccataa

SEQ ID NO: 110800 - DNA, 615 bp, Enterobacter aerogenes
atgacaaagcagacaaaagtacagcccacacgagggccatcggaccacagcgtccgcgatcaggtcgtggaagccgcgactgagcatttcgggcattttggctatgagaaaaccaccgtctctgacctggccagggcaatcggtttttccaaggcttatatctataagtttttcgactccaagcaggcgatcggcgaggtgatctgcagcaaccggctgtcgatgatcatggcgattgtcgactcggcgattgcagacgcgccgaccgcctctgaaaaattaagacgtttattcagggcgctgaccgaagccggcagtgacttgttttttcacgatcgcaggctttacgacattgcagcggtggctgcccgcgataagtggccctcagcggagaggcatgaagagcgtctgcgacagctgattgagcacatccttgttgaagggcggcagacgggagagtttgaacgcaaaacgccgctggatgaggctgcagatgcaatatacctggtcatgcggccttatgtcagtccggttcagttgcagtacaatctggaaacggcaccggcggcggcggcgctcctgtcatcactcatcctgagaagtctgtcaccctga

SEQ ID NO: 110801 - DNA, 1107 bp, Enterobacter aerogenes
atgctcaggctcaaacctgtcactattgctttatgcctgctgccgcttgccctggtgggctgcggcgacacttccggcaccgacgacccccgtacccggccacctctggtcagggcggcaaccgtggtgagtgctgacgatgcctcccgcgcttttaccggtgttgttgtcgcccgggttcagagcgacctcggtttcagagtgcagggtaaaatcctcgaacgtctggtggataccgggcagaccgttaaacgcggtcagccattaatgcgcctggatccggttgacctgcgcctgcaggcacaggctcagcaacaggccgtcgcggccgcgcgggcccgggcaaaacaagctgccgctgatgaggtgcgttatcgtggtctggtcgcggcaggggctgtatcggcatcggcttacgatcagataaaggccgccgcggatacggccagagcggaactgagtgcggctctggcccaggcgaatgtggcgcaaaatgcgacgggctacgctgtattgcttgccgatgccgacggcgtggtcgtggatacgctggccgaacccggccaggttgtcagcgccggccaacctgtggtcaggctggccagggccggtcagcgtgaggccatcgtgcagttgcccgaaacgctgcggccagccccaggaagcgaggctcaggcaacgctctacggtacaggaaaacagtcttctcctgcgaagctgcgcctgctttccgatgctgctgacccggtaacccgtaccttcgaggcgagatatgtgcttgagggggcgctggcaggcgcaccgctcggctccaccgtgacgctccatcttgcggaagataaaacagcccatcaggtgatgcaggtgcctttggctgccatctatgatccaggaaaagggccgggcgtctggagtatttcaggtaaacccgccagagtgtcatggcgctccgttcaggtgctgggactgggggacgatgcggcaagggtgaccggttcccttaaaccaggagaacaggtggttgccctgggggcgcatttactgcacgacggtgaggccgtccgcaccgaacagcgcgacgtcggcgtcgccgggagccagccatga

SEQ ID NO: 110802 - DNA, 3090 bp, Enterobacter aerogenes
atgagcggggggcgattcaatctttcagcgcttgccgtgcgtgagcgctcaatcacgctgtttcttattatcctgattaccgtggccggtattctctcgtttttcgaactgggacgggctgaagatcccccctttacggtcaagcagatgacgattatttccgcctggccgggcgccaccgcgcaggagatgcaggatcaggttgccgaaccgcttgaaaagcgtatgcaggaactcaggtggtatgaccgcagtgagacctacacgcgtcccggtctggcttttaccacgctgtccctgctggacagcacgccgccttcgcaggtgcaggaggaattctatcaggcgcgtaagaagctcggtgatgaggccaaaaacctgcctgcgggtgttattgggccgatggtcaatgacgaattcgccgatgtaacctttgcgctctttgcgctgaaggcgaaaggggagccacagagactgctggtacgcgatgcggaatcgttgcgccagcgtcttctgcatgttcccggggtcaagaaggtcaatatcatcggggagcaggccgaacgcatctttgtatccttctcgcatgaccggctggccacgctgggcatttcgccccaggatattttctccgccctcaacagccagaacgtcctgacgcccgccggttcgattgacacccaggggccgcaggtctttatccgcctggatggtgccttcgacaaactggagaaaatccgtgaaacacccatcgtcgttcagggtcggaccctgcagctttctgatgtggcaacggttgagcgtggctatgaagatcctgccaccttcctgatccgcaatcagggtgaaccggcactgctgctggggatcgtgatgcgggagggctggaacggtctggatttgggtaaggcgctggatgcggaaacggccagaatcaacgaaggcatgccgctcggcatgacactgacgaaggtgaccgatcagtccgtcaacatcagctcagccgttgatgagttcatgatgaaattctttgctgccctgcttgtcgttatggtggtctgctttctcagcatgggctggcgcgtgggggtggtggtggccgctgcggtgccgctgacgctggctgtcgtctttgtcattatggaagcttccggcaaaaacttcgaccgtatcacgctggggtcattgatcctggcgctcgggttgctggtcgatgatgccatcatcgccatcgagatgatggtggtgaaaatggaagagggctacgatcgcatcaaagcctctgcctatgcctggagccacacggcggcgccgatgctggccggcacgctggtcaccgccgtcggttttatgcccaacgggtttgcgcagtccaccgccggtgagtataccagcaacatgttctggattgtcggtatcgccctgattgcttcctgggttgtggcggtggtgtttacgccgtatctgggcgtgaaaatgctgccgaaaatcaaaacggtagaaggcgggcatgcggccatttacgacacccgccattacaaccgctttcgccgggtactgacccgcgttatcgcgcgcaaatggatagtggccagtaccgttattgccgtctttacggttgcagttctcggcatggggctggtgaaaaaacagtttttcccgacatccgaccgtccggaggtgctggttgaagtgcagatgccttatggtacctcgattgaggagaccagcgccaccacggcgaaaatcgaaacctggctgagaaagcagaaagaggcaaaaatcgtcacatcctacatcgggcaggggtcgccgcgcttttatctggccatggcgcccgagcttcccgatccgtcgtttgcaaaaattgttgtgctgacagacagccaggaagcgcgtgaggcgctgaagttccggctacgcgaagcggcagccagcgggctggcgccggaggcacgcgtgcgcgtgacccagctggtgtttggcccgtactccccttatccggtggcttaccgcgtcatgggaccggatcccaccacgctgcgcgaaatcgcagataaggtcgaaaaggtgatgcaggccagcccgatgatgagaaccgtcaacaccgactgggggccgcgggtacctgtgctgcattttacgctcaaccaggaccgcctgcaggcggtggggctgacatcgaatgcggtcgcgcagcagctgcagttcctgctttcaggggttccgatcacctctgtgcgcgaagacattcgttcggtgcaggtgatgggacgtgcggcgggggatatccggctcgatccggcaaaaatagcgggctttaccctggtgggggcttccggccagcgtattccgctgtctcaaatcggggaggttgaggtgcaaatggaagatcctgtgctgcgacgtcgcgatcgtaccccgaccattaccgtcaggggcgatattgccgaaaacctgcagccgccggatgtatccacggccattatgaaacagttgcagccggtcatcgataaactgccggccggataccgcattgaacaggctggctcgattgaagaatccgggaaagccacccaggcgatggcaccgctgtttcctgtcatgatcgctatgacgctgttgattattatcctgcaggtgcggtcgatgtcggcgatggtgatggtatttctcaccgcgccgctggggctgattggggtggtgcccacgctgctgctcttcaaccagccgtttggcatcaatgcgctggtaggcttaatcgcgctgtcgggcattctgatgcgtaacaccctgatcctgataggtcagatccatcacaacgaacaggaaggactggcgccattccatgctgtggtggaggcgacggtgcagcgggccaggccggtgttgctgacggccctggcggccattctggcgtttatcccgctgacgcattcggtgttctgggggacgctggcctataccctgattggcgggacgtttggcggcaccattatcacgctggtcttcctgccagccatgtatgccatctggttcaggatacgccctgatgaacggaaggatgcagggcgccaggctacaatgtga

SEQ ID NO: 110803 - DNA, 1290 bp, Enterobacter aerogenes
atggcgctcgatagtcacaaacgaatagtcgtcaccggctgtggcattatcagtcctctgggatgtggaacagaaacagtctggcgcaggcttctggaaggtcgctcggggataagcagcctctcctcagagttcggtgaaggaacagggatatccgtcgcagggcgggtgcctgcactttcagaagatcccgaggcggggtatgagcctgagcgttttatacccgctaaagaacgcaagaaaatggaccgcttcatagaattcgccctcattgcggccggggaagcgctaacgcaggccggctggcatccgactgatgaataccagcagcaacgtacggcaaccattatcgcatcaggggtgggcgggtttggcgccattgctgaggctgtccggaccaccgatgccagaggaccccggcgattgtcaccgttcaccgcgccctcctttctggccaacatggcagcaggtcatatctccatacaacatggtttcaggggaccgctcggcgcaccggtcaccgcatgtgcagcaggagtgcaggcgattggtgatgcggcccgtcttatcagaagcggcgaagctgatattgccatttgtggcgggacagaagccgcaattgatcgtgtctctctgggatgcttcgccgcggcacgcgcgctttccaccggatttgcagacaggcccggcgaagcgtcaaggccctttgaccgcgatcgtgacggatttgttatggcggaaggagccggattactggtgattgaaacccttgagcatgcgctggcacgtggtgcgaccccacttgccgaactggtggggtatggtaccagtgctgatgcctggcatctgaccgccggtccggaggacggcagcggtgcccgacgggcaatggaactggcgctgggccaggcagatgtgaaggctgatgatgttcagcatatcaatgcgcatgctacctcgaccccggtgggggacagaggggaactggcggccattaagtctgtgttcgggagtgattccggtgtggccatcagttcgacaaagtctgctaccggccatttgctgggggctgcaggtggcgttgaagccatctttacggtgcttgccctgcgtgaccagatcatcccgcccacgctgaatctgcataacccggatgaggcggggcaggggctgaattttgtggcattaaaggcgcgtcctgctgccataacgcacgccttatcaaacgggttcggcttcgggggcgtcaatgcaagcgttctgtttcgccggtgggaaacctcaccatga

SEQ ID NO: 110804 - DNA, 1221 bp, Enterobacter aerogenes
atgaagccggaacattctcacactgttattgctcctgaaggtcatcacaccgatggacagcaactgacaggaaagattattgcgttactggcaggtctttcggcaatcggcatactgtccactaacattatcctgcctgcatttccggatatcggggagcagttaggtgtgtcctcacgcgagctgggtcttacgctatcgggattttttattacgtttgccctggcgcagctggttgtcgggccgcttgcggatcgtttcgggcgtaagaaactggtactgggcggcctttcggtattcattgtgggaaccgtcgtgggagggcttgccggctcactggaaacgctgatcactggtcgcgttatacaggctctgggtgtgtgcgctgctgcggttctgtctcgcgccattgcgcgtgatttgtttacaggtgaaaaattagcgcgggcactgtctcttactatgatagccacagcggcagcacccggcttctcgcctttagctggcagtgtattagctgccacgctgggctggcgggctatcttcgttgcagtgggcctggccgctttcgctgttgccgtattttatgccagtgcactgggagaaacgcaccccgctgaacggcgtgccccgcataccattcctggtgtgatggtcgcgtacgttaagctggccttaaataggaaatttatccttccggcactgtctgtaagcctgttaatgagtggtctgtttgcatcatttagtgcggcccccgccatcctgatggaggggatcggtttgtcatcattacagaccggtctgtattttgcctcaacagtgtttgtggtctttgctgcaggaatggcattaccacgtcttgcccaccgctatggagcgcaaaccattacggtggccgggatcctcacggcattatccggcggtggtctgttactgacggggtcctcagcaccagggctgggctggtataccctgtccatggtcatgttcctctggggtatgggactggctaatccattgtgtactgccatcactatgggcccttttggacatcaggccggtctggcatccgctttgcttggctttctttctatgggggcggcggctgtaacaacatggctggcctctgtgctggttttccccgcagttatctcactgggggtcatacaggcagtagcgtgcctgatatcgctgttactgttcctgttaagaaggaagtaa

SEQ ID NO: 110805 - DNA, 126 bp, Enterobacter aerogenes
atggcgtggctaacaacaaagtatggtttaattaccttccggataatgatttatttaaaactccttttcactgatggagtatttaaaatgaaaacattaagagatgaagttattaccagtacctag

SEQ ID NO: 110806 - DNA, 615 bp, Enterobacter aerogenes
atgccactacgtacgcttgatggaaacatagtttccgtcaacggctggtcggtaattttcacactgacagctgaacgtgaaccacaaaaatatcttgatgcagaagggaattatgatattgatcgcgactggaacgatcgtcatggtcgcgcacatatttgttactggtacgcaaaagatagtaagaactggatttttggcggccgcgtaatggcggaaggtgtttcacctaccacccgtgaatgggctggcacaccaatactgttaaacgaaaatggtgatattgatctttattatacctgtgtaacgccaggtgcgacaattgctaaagttaaggggagaatttcagctgatggaaatggtgtgtcattacacggatttgacacggtaaaacctttgttctctgctgatggcgtattgtatcaaacagaagagcaaaacacctactggggattccgcgatccttcaccatatattgatccagtgagtggccgtttgtttatggtttttgaaggtaatatcggtggtgaccggggctctcatgttattacgacagaaaatatgggtgacgttccttcgggcttcagtgatgtgggcggatacgatttcgtctga

SEQ ID NO: 110807 - DNA, 1269 bp, Enterobacter aerogenes
atgtcccttaccgacgtgaaaattcgcactctcaaaccttctgaaagaccctttaaagtctccgattcccacggtctgtacctgctggtcaaaccaggcgggtctcgtcactggtatctcaagtaccgtattaacggtaaagaatcccgcattgcactgggtgcctatcctgccgtctctctggctgatgcccgccagcagcgtgaaggtatccgcaaaatgctggcgctgagcatcaacccggcacagcagcgggctgctgaacgtagttcacgcacacaggagacagtgtttaaaaccgtggcactggcatggcatgaaagtaataaaaaatggtcacagaacaccgctgaccgtctgctcgccagcctgaacaatcatatctttccggttatcgggcacctgtcagtctcagagcttaaaccccgtcatttcattgacctgctgaaaggcattgaggaaaaaggcctgcttgaagtcgcgtcccgcacgcggcagcacctcagtaacatcatgcgttatgcggttcatcaggggttaatcgacagcaacccggctgccagtcttgacggtgtgacaacgccgcccgtcagacaccactatcccgccctgccgctggagcggctgcctgaactgattgaacgcattgagggctatcatcagggccgtgaactgacccgccttgccgtcctgctgacactgcatgtgttcatccgttccagtgaactgcgttttgcacgctggtcagagattgatttcacaaacagggtctggacgatacccgccacacgggaacccattgcgggggtgcgttattccggtcgcggtgccaaaatgcgcactgctcatattgtccccctctctgaacaggccatcgccattctgaaacggattaaggaaatatcaggaggccatgaactggtgttccctggcgaccataacccgtataaaccgatgtgcgaaaacactgtgaacaaggcactgcgccttatgggatacaacactaaacaggatatctgcggtcatgggttccgggcaatggcatgcagtgccctgatggaatccggattatggtcgcaggatgcggtggagcgtcagatgagccatcaggagcgtaacaccgtgcgtctggcatacactcataaggctgaacatctggaagcccgtaaggcgatgatgcagtggtggtcggattatctggatacctgccgggaagcctatgtgccgccgtatatccagggccaggaagacagccacaaagcggcataa

SEQ ID NO: 110808 - DNA, 1041 bp, Enterobacter aerogenes
atgacactaacagcaattgatcttttctgcggcgcaggtgggttaacctgcggcttaaaacaagctgggtttgaagtaaagttaggtgttgagattgaacatgttgccgcgatcacatatcggaaaaatcatccagaacatgttttatatgaagccgatattcggactcttgatccctatcaactaatgaaggatgtaggcttgaatccgggtgagttagatttattggcaggttgccccccgtgccaggggttttcgactcataggactcgtaataaaactacttctattgatgatcatcgtaatgatttaatattcgaattaatgagatttgtaagggtttttcagccaaaggttgttatggttgaaaatgttcctgcattagcaaaagatgctcgtattgaattggttctacaagaattaaatgaaatgggttatcaaattggtcctttaagtttgcaggttaaggatacagcatgttatggtgtgcctcaaagacgtaagagaatgatattaattgcctctaaatttggctttatatctgaaccaagtgtaattagtcctcagctaacagtaaaagatgctatttataatttgccattacctgaaaatagtactgataagttacatagtattatagctaagcattcagaaagaattaaaactatgattagccttgttccgaaggatggcggctctagaagtgatttgccaaaaaaatattggttgccgtgccatataagaaagcctgattgctatagagatgtatacggaaggatgtcatggaataaagtgtctccaacaattacaggaggatgtacgaacccttcaaaaggacgctttcttcacccagaacaaaatagggctattactcttagagaggcggcagtattacaaacattcccaatggattattatttttcattggtaagagggagagattttgctgctttaatgattggaaacgcattgcctccatcttttatttatgctcatgctcaagagattaaaaagcatcttgaaattataaccacacagtaa

SEQ ID NO: 110809 - DNA, 1626 bp, Enterobacter aerogenes
atgagtgacatattaaaaatgacatttgatcctaaaacgattgaacatttaggtgtcaaaatgtattctactcttcctccggcgttagcagagttaatttcaaatgcttatgatgccgatgcaagtaaagttgttttagaatttaaggaaattggtactaaaaaatttatcagtgtacaagatgatggtttggggatggattctgacgatatacagaagaaatttttagttatcggtcgaaatcgtcgtaaggatgatggagataatccaactccgcgatttggacgctatgcaacgggaaagaaagggttaggtaaactagctctttttgggttggctaaagaaatacgcatcgatacagtaaaaaataataaaagaaatagatttgttttaaattggaatgatctcttgaatgccagtggtgaatataatccgcggatagaaataaataatgaagatacgaatcaaccaaatggtacaacgattaggttagctgaacttaaaagacaaactccttttgatttagaatctcttgctgataatctttcgaaaatatttattgttgatgatgatttttgtattttaattaaaaagaaaaatggttcatttctggggataaataatgaaaggagatataaaggtttcaataaacagttcgagtggaatattgatagtcttattccagaaggaaaccaatataagggtaagttagagggcgtcttgtatacgtctgaaacgcctattcgtccaaattcagggcttagagggatatctattttctcaagaggtaagcttgtcaacaatccagagttttattcaaatagtacatcaagtcatttctttcaatatttaactggttggatatctgcagattttattgacaatcttgatgatgacgttatttctaccaacagacagtccatcgattgggataatattgaaatggctcatttgagagaattcctatcatcaattataagtaaggttaataatgactggaggaataaaaggaaagaaaaaaaagtgagtgatgttaaagacattacaggtattgatacagatagttgggttaatacaatgcctgatgatataaaagttaaggcgagcaagataattgattttcttgataaggaagatgcaattgaaaattattcaccaataattaaaaccttacatgaaataattcctgaatatccaatgttacactggcgtcatttagatgaaaaaataaaagatagaataaagcaatattatgtaaataaacaatacgggttagcggcagatcaaggaactaaaatatattgtgaaattattcgcgaaataactggtctcgaaattgatggtcgagccttaacagataaagttttttcagcaaataatcctgtaattaaaataagtgacctatcaactcaaacaggaaaaagcatgcaggaggggcaacattttttatcaacaggggtaatgtcctcattcagaaatgttgcatctcacatgcctgtagataaacttatacctggaaaattttctgaactggattgtctaaatatccttagcctacttaccttcttattggaaagaataaaaggggcagaggttaataaggaggagagtgaaaaaaataactga

SEQ ID NO: 110810 - DNA, 435 bp, Enterobacter aerogenes
atggtggatgattttaaccgcgaagcactggcgatagaaatcgacctgaatatcccggctcagcgagtcatccgggtgctgaacaggatcgtggcaaaccgcggctacccgcagaagatgcggatggacaacgggccagagctggtctcactggcgctggcacaatgggccgaagaacatggcgtgcagctcgaatttatcaagccgggtaagcctacacaaaatgcttttattgaacagttcaaccggacataccagagagaaatccttgatttttacctgttcagaacactgaatgaagcacgggagattaccgagcgctggctgagggaatataacaacgagtggcctcatgaatccctgaataacctgacgcgtgaagagtatcggctgatggctgaaaaaccggaactctcaaaaaatgcatggaactga

SEQ ID NO: 110811 - DNA, 1371 bp, Enterobacter aerogenes
atgaatgaaagactagtagagttaaaagataaattagataatataaatacaacactgactgcaatggcattccctgcagaatatttctcatctattggggcatatacacatccatttctgagtcaaaaggatttggctggtttacccaaaatgctttctgagcgaatttcccagatgcatgattttatgcctgcgacagatgatgttgatgttatagatgcgatgataaatgcattagaaaactctcaatcgaatattgcgcatattaatcatgggaatgctcaagtttctcaatttgcaatgtcggcatatcttacatcaatgctatatatttcagagaggataaataatttattctctttcgaaaaattaaaagataaatcacttttgcctaaagcgataacccgaaggcttgaattgtataattcaaatttatcatcgatagaaattaaagcagggaatgttgaagaaaaaataaaaataattaatgatgcgtttgatgctgctgaaaacttgccaactacagtaaaaaatctccgcgagacaaacgaagaggttaagtctgtttttgaaaaatctaacttggattatgaaaaaattagtaaaatccttgagtcggctaaaacaaactctacttctatcgaagatgcaaaggatttaatcttaaaacttaaaactgacactcaagaggaagcaagacaatacttagcatccttaaaggatgaggctcagacctatatagataagtgcgaagaagcctttagaacaactacgtcgaagggtttggctggtgcttttcaggacaaagctgaaaagttgaacaagagtatcagatggtgggtaggcggcttggttgttgctttaactgctggtgctttcgtcggctatacaaggctgcatgcgctagaagcatatttatctagtgcaaattcatcagggttaaaattaacaattcagctcatactctcagttttaagtgtcggtgcaccattatggtttgcttggctttcaacaaaacagatagggcaaagatttagattggctgaagactatgaatttaaagcttcagtatcaaaagcatatgagggatatcgaagagaggcagtccaactcgattctgattttacacaaagattatttggaaatgcccttacaaggcttgaggaaccgccattaagatttgtagaggaaacagcgtactcatccccaattatggagatgctgtcatctgaaaactttaagaagcttttagagaatggcggcgataagcttgattcagttttagatggggttggcctgtcaaggaaagggaaacctgaagctcaggttaaaaaggatgtacaggagataactcaggaaagtgatttgtga

SEQ ID NO: 110812 - DNA, 2652 bp, Enterobacter aerogenes
atgagtagtaggataaataaagtaaaggaaacagaaagtgatatcgaacaaaaaataatatatccgtttctgacaaagaaatctgttgatgggcttggcataaataaagagtatatactcaccaaaagaaatattaaaagcttagaaataggtaaaggtagtaccaaaaaaatatattatccagactatcttgtaattataaatggtgttcctgtcttactagtagaagcaaaaactcctggggaggatttagagagcgcttttcaggaagcacgattatatgcgctagagttgaatgcaaaatatgagagtggtatgaatcctcttaccaaaatcatagcaactgatggatatgagtggcttgcgggggaatgggataataaccagggtagttaccgattaaatgagatatcacctgctgataaaaattgtgcagattttttagaggaattttcgtttacagcactctcgaaattatctgaggaattcatagctaaatcaaagcctagaaaattctggaagcccaggagaatgatgggggggaaggcagctcagaacgaagaggtggggcataatacttttggtgcaacacttatatcagagtatggaaatatatttaatccaaatacactgaatgatcgacagtttatcgctcgtgaagggtatatttcttctaagcgcagggaccgttatacccagcccatagataaaattatcagggctgctcaaccagtaagtaatagtgactctaaattaattgaagatactgataatcctaaagaaataattgaaaaacttagagggcgatctccacttgaaaataagattttattaattgttggcagtgttggttcaggaaagacaactttcattgatcatttaaaagaggttgcgctcccaaatgatattattaaaaccactctttggttacgttttaatatgaatgaatctccggtttcttcaggagaggtttatgattggcttagagggaaaataattcagcaatgtaagttagcttacccggatattgattttgatttgttggataatttaaaaaaactctattccattgagataaataaatttaataagggtgaggggaaattactttctggtgatgaatataataaggaattatttaaaattataagggggtgtaagtcagatttgcatgaaactgcacttgcctatactcggtattgcgggaccgaacgcggtaaattagttgtaatagttcttgataattgtgataaaagaactttacctgaacagttactaatgttccaggctgctcaatggctccaaaatgaatttagatcactaataattcttcctttgagagaagaaacttatgataattatagagatcgccctcctcttgataccgctttaaaagatatggttttccgtatcgaaccaccgttgtttaattatgttcttcattcaagagtacagcttgttcttaaagaaatgacaaaaactagctctagtaatactctttcatattcactccccaatggttttaatgttgaatatagcaaggacgaacgttcatattatttaacatcaatcgcaaactctatttttgtacatgatgcgcaaataagaaggatgattgtcggtctttcaggaagaaatatacgaagggctttggagattttcttagagttctgcactagtggacatattactgaaggtgagtttttaaaaataagacaaagtgaaggtcgttatgcgcttcctttacatattgtgaccagggtgttattacgattaaatcgtagattttatgatagcgataactcatatcttaagaatgttttttcgacggaaaaagatgatgagagggctaatcattttactagatttgcaattttgaaatggttctataataatttcggggcaagtggtccaactggccttaaaggatactttcctttatttgcgttaaaagatggtttagtcaagtttggtttttctccaaaggttataactcgtgaggttgattatttacttcagggacaatgtttagtttcagaggattttagagaggctggaataactgatgaagacttactaagattatcctcggctggatttgtgcatttggaaatgctctcaaacattagctatttagccgcgttagcagaagatacactttttcctactgagcaaattgctagaagagtctctgaaagaatggggtcagttcaaaatcagtataataaagaaatggttagtgctaatgctaaggagttagttgattttcttgtaaatcaacgtgaaacgatagcaagtttttctggtgaatttattgctggagatgaatatcatgggctaactgatatccaacctgcaattgatgctgttaagtcatttgcggaaaagatacgcgatcctgagtgggcagagttcgaagctaggtatcagtcaggagatatgttagaaggtacggtacggaattgtgatcatagatatggtgtttttgttaactttacaggaaaaattacaggattaatacataaatcaaaactgcctgcagcttttaaccgtatgaatgagtattccaaaggtaaagtgctatgggtgcgtattgagaacgatttcaacgctgttgagcaaaagattagtttatctcttgtggagaaatga

SEQ ID NO: 110813 - DNA, 351 bp, Enterobacter aerogenes
atggacaggatcgtggcaaaccgcggctacccgcagaagatgcggatggacaacgggccagaactggtctcactggcgctggcacaatgggccgaagaaaatggcgtgcagctcgaatttatcaagccgggtaagcctacacaaaatgcgtttatcgaacggtacaaccggacataccagagagaaatccttgatttttacctgttcagaacactgaatgaagcacgggagattaccgagcgctggctgagggaatataacaacgagcggcctcatgaatccctgaataacctgacgccggaagagtaccggctgatggctgaaaacccggaacactcaaaaagtgcatag

SEQ ID NO: 110814 - DNA, 492 bp, Enterobacter aerogenes
gtggttgcttatcgacgttattacatcaaggggggaacctggttctttaccgttaatttgaaagaccgtagaagcaggcttctgactgaaagaattgcattatttcgctactccatctccgttgtaaaacaacgtcgcccttttatcattaatgcttgggtggtattgcctgaacatctccactgtatctggacacttcccaataatgatgacgatttttcttcacgctggcgcgatatcaaaggctgctttagcagaacattaaaacgacaacatatctggcaacctcgcttctgggagcatgccatacgtgatgaagaagattatcgccgccatgttgattacatatatatcaatccattaaaacatggctgggttacgcaggttatagattggccattttcaacctttcatcgagatgtccaacgcgggctatatcctgcaaactgggctggcgaaagctttgagcttagctgcggcgaacgccgatag

SEQ ID NO: 110815 - DNA, 216 bp, Enterobacter aerogenes
atggaatactctccatttgtcacttacatactcatcaatttcttttttgaatctatcaacggaaaatcgcaaggcgttgtttctgcaagcagtgggttcgaaatcatgttgctgttgttcgaattgattaacagccttaacaatatcgccaacttcctgatgctcaaagaaaattccggttggagcaagatttccatatggtcgaactgtttctaa

SEQ ID NO: 110816 - DNA, 222 bp, Enterobacter aerogenes
atggatttttcaaccaatcacgacaatagcgatctctttgccgattatggctttcggatttacgaagaaaccgaaactggcagcaactcagcagagattgctgttcgaattgaagagttcatcgactcaaggaaggccttggacatggaaatccgtaaacgcgctctcgaattcttgaagagggctgtaattcagttagaagaagagctttcagacaagtga

SEQ ID NO: 110817 - DNA, 444 bp, Enterobacter aerogenes
atggatacacaaaacctgcagttcgctgagcagtcagcaattactgcttcagtgatccctgacgaactacgcatcggcttctggctgcagcactttggctccatcccacaatggataacccttgagccacaaatcttcgggtggatggatcgtctgtgcgctgattacagcggcggcgtctggagtttttatacactcagcaacggcggcgcttttatggctccggagtcagagcacgatgagaagtggatattatttaacaacatgaacggcaatggagcagaactcaccagtgaagcagcagggatagtcgcctgcctgatggcatacagttaccacgcctgtcgcatcgagtgtgacgcgatgacagagcactattatcgcttacgcaactacgcgctaaaccatccggaatgcagcgccattatgcatcttatcgactga

SEQ ID NO: 110818 - DNA, 573 bp, Enterobacter aerogenes
atgcaaaacaaacaacgatgggagccagactggtttctacagtcactcctgaacaaccatatcgacaaactggtagagcgctattcctgcctgcgggcattccgaacagatctgttttaccaggatcataccgctaagtatttcctgcaggatcaccagcagctcgaatgggatatccgaaagctgatgaaccatatgatgcaactcgaagcggtggtcggtttcttttgggttatcgaatggactgaagatcaccactaccacgctcacgttgtcttctggctggatggctgtaaaacccagaacacatatccctgggctcaacaagcaggtttgcactggagtgatatcactgagcaggaaggctggtatcaccgatgtgagtttaaagagcattacacggccaatatcaatattccggtgcgttacagcgatccgggcagtatcgccaatatccggcaggtgctggcgtatatggccaaagttcaacaaaagcaggggctgccgttgtttggttgcaatgaggtccctgagcgaccagcaaccggacgaccacgcaagactggcttctga

SEQ ID NO: 110819 - DNA, 387 bp, Enterobacter aerogenes
atgtttgctaaatcctttattgctctcgacggtaacggtcgcctgaccggagctcgtactgcgcagacagcgccttacgatcgctatacctgccatatgtgcaacagcacaatgcaataccatcctgaatacaacacccaacgcccgtggttcgaacacaccgaaacgggtctcactagcaatggtcgacagcattgtccctatgccaatccggatgcgggtgaaatgcaccttgttagacgcctgcaactcatccactgcaatgccgctcccagggccagtaaagccgattggcactgctcacaatgtgcgatcgattactatggtgaacgctattgtctgacctgtagcaccggagacttcagccaaccaacagatgcagcatga

SEQ ID NO: 110820 - DNA, 2850 bp, Enterobacter aerogenes
atgtattcaaatcatcagcgtctctatctggcacagtggttaacgttaagcggcaaagccgaggactcacttacacagaccatcgccagcgcgcgggttgatatgaacccccatcaggtagaagcagcgatgtttgcactagcgtctcctttatctagtggcgttatcctagccgatgaggtcgggctcgggaaaaccattgaggccagcctgattctggcgcagaagtgggctgaacggcgtcggaaattattacttattgctccagccacgctgcgtaagcagtggagtcaggaacttgaagagaaattttcgctaccttcacgcattatagaagcaaaaagtttcaatcaaatgctcaaagatggatgtgcgaatccatttgatattgaaaatgcgaccggagagacagcaatatgcatttgttcatacgaattcgcttcccgtaaagaacatgaattggcccgtatcccatgggatctggtcgtcatggatgaagcacataaactgcgaaatatatacaagagcgatggcgctaaaacggccaaaaaactcagtattgcactatctggcaggaaaaaaattctgctctccgctacaccgcttcaaaacagtatccttgagctttatggtctggtttccgttattgacccacatttcttcggcgatttggcctcgtttaaggcccgttattctaggcagaatattgacgatgcagaattagcgttattaagggtacgtctgaataagatctgtaaccgcactcttcgccgacaggttcagcaggagggggggatcagttttacccgccgtcattcaataaccgaagattttcgcccgacggatgaagaagaagctctctataaacaggtttcctcttatttgcagcaagatgagctactggcaatcaaaagtggtgcacgtcatctagtaacattagtcatccgcaaaattctggcctcatcgtccactgcgattcagggaacgctggagactatgattcatcgtctagaaaataaaatgccggtcttagatgccctgactgattatgaaaattatgatgattacagtgatgaagaaggtatcgaggatgaagataccatcgatcctcgggctctacaggcagaaatcgaacagttaaaaagttataaaacgttagcggcatctataactaaaaacgccaaggcggaggcattgttaagcgttcttagtcgggctttcgagttcacagtagaactgggtggattgcgtaaagcggtcatttttaccgagtccgtgcgcacccaaacctggctagcgcaactgctttcagacaatgggtatgaaggcgaagtcgtgttgctcaacggcagtaacagcgatgcggcgtctagaaagatttatagtgactggttggagaagcatcaaaactctggccgggtttccggttcgcgtacggcggatatgaaggcggcgctggtcgaaaaatttagagacgaaggcactctgatgatatgtaccgaggccggtgcagaaggtatcaaccttcagttctgctctctgttaatcaattatgacttaccttggaacccgcagcgggttgagcaacgtatcggccgtgttcaccgttacggacaaaagcacgatgttgtagtggtcaatttcattaataaaggcaaccgggccgatcagcgtgtgtttgaactattgagccagaagttccagctttttgaaggcgtgtttggtgcatccgatgatatcctgggatcgatagaatcgggcgttgatattgaacggcgtatccatgagatttaccagcactgccgctccgacgagcaaatagaacaggagtttaatcagctccaggatgaactcaaagaccagttggaaaaccgggagaatgaaacccggcgttccttatttgaacatttcgatgtagatgtcgtcagaaatctaaaaactcgacgcacatcgaccctcgcacagttaaacgattaccaggaaaatctgctgctgctagcggaaatgtttctaagtgacaatagcgatttccagcactctgaaactggttttcattcctcgggaaagtattatgacgttagctggcctgttgcggatgaaaaggatgcagaatttttccgacctaatcagggatatggaaagcaactgattgatgtggccctacatgagggaaaagacctttccacattgccagtttgtcagaaactccatttcatctaccaacccaagacgggacaattggctgatgtaaaattgctttgccaacgatcagggcagttgttactagcaaaagtcagtatcggaaatcaagaacaacaacgagagcagctacttgtcgctgccgtaacggaaaatggtgaggtagtggcggaagaaaccgcatcccgtctgcttcgcttgccgttgtcagaggtaacatcaatcgaagaacagcctttgttacccactttaaccgcgcaatgtgaggttttacggaattcttttatccagcaggtcgaacgtgataacgaactttattacaatgaagaagtagaaaaacttgaacgctggtcagaagatcgtcgcatcgcgctggatctacgcatcaaacagctagatgcagaaattaaagaagcgcgtaaaaccgcccgccaacttccttcgctgaaagagaagatggaagctaaacgctcgctaaaggcactagaacgcgagcgtgacaacatcatgttgcagtatcatgatgaaaagaaaaaaattgagcaggaagaagaccgcctgctggaagaggttgaacaaaagctggcgacagaaataacgtccagccaattatttgcggtgagctggacgttgaattcaccttccgcatga

SEQ ID NO: 110821 - DNA, 981 bp, Enterobacter aerogenes
atggctaacggtaaagtattaagacagctgataaaagcgggcgcgacgggcgacactgctacgttccgtcgcgtttcagaagccattattgatgaggaacgtcagaaacagcaccatcttctggctaacgatctggagcatattctttatggcgatcacattgttcaggcttcgcgttcacctacgttgccgccggcaccggtagacaaagaaagggggctgccactgttggatctacggcagccgcagcgcagcctcgatgaaatgatccttccagctaccagtgctacagtgatcgatgagctccttgaagagcaccggcgtagcgatgtattgcatagctatgggatgaaagcagccagtaagatcatgtttttcgggccaccaggttgcggtaaaacgctggcagcggaggtcattgcctttgagctggacatgccgctggcaattgtccgccttgatgtattggtatcctcatttctgggtgaaacagccgcaaatctgcgtaaaatttttgattttattgcccaacatccgctggtggtcttgttcgatgagtttgatgcaataggtaaagaacgcggcgacagcggagaacacggcgaattacgcagggtcgtcaatgctgtactgcaaatgatggatgcttatcagggcaaaagtctaattctggcggccaccaaccatgaacatattttggacagcgccatttggcgtcgtttcgatgaagtgattgaatttcctctgccagatcagatgcagttacgcgagttgctggcgttaaagctacgcggcattcgccgacagtttgaactggacgatcatgagttgttatccttgcttcatggcaaaagtggtgcagatatcgaacgcattgttcgccgagccactaaacacatgatcctgcgtcaccaggaattcctgacgctgaaagatttaaaaaacgcgatgcagcgagagaacgccagaactcaccgataa

SEQ ID NO: 110822 - DNA, 2388 bp, Enterobacter aerogenes
atgacggcgaattatcagcatctaaatatttccaaagcccctcttcagaatgagcgacggacccgcagagtcaatatgcctcgtattcgcagaggcgatttacgtcagcatgggcaaatgttattgaaccagctccagactgtgcgcccgatgctgacgcaggtaccaggtagcgccgctgatggtcgatatatactcaagctgaactacagcggcacgatgaacttttcggcattgatacatcatggcgtagagtttgtcagtcaggaaaataaacaagtttgcgtagtctttagtgacgagcaagggctggctacatttgcagaacatctgtcatccctcggtctaggtaatacagaattaacctacaaacagatcctggaggcgcttgacggtattgagggctggtcggcggaagatcgcaaaagctgggctcttcggcattatggttttcctgtagcggaacgctttaaactggatgtggagctctggcctatcgaagttgcgcatcatcccaaacgtatcgatctttatacacgttttgagcactggttacaggagcaggatatttccaggcaggacaaagtcaatctggacagcctgttgatgtaccgggtcgaggtttcactcgcgcaagcggaacacctgttagctcatcgggacgttaggtttattgatttgccaccgtctagtggcattagttatcaacaaattaaccgggacatcaatactcttccggctcgcctgagctcgccagcggaaaatgcgaccaggatatgtattctggatagtggtattaatacaaaccatcctttgttaagcactgccattgcagaaagcgccagctttattcccgatcaggatgcgtttgatgaacaggggcatggcactgccgttgccagtattgcgctgtatggtgatgttgaggcttgtaaccagagcaatttctggcagcctcaactatggctgtataatggaaaagtactgaacgagcaggctgaattcaatgccgaaactattgaagctacgcttgcagccgcggttgcgtattttaccgatcttggttgccgcattttcaacctgtcattgggaaatgcaaatgcgccctacgatggcaaacatatccgcggtattgcgtacttattagatacattgtcaaggcagtacaatgtgctctttgttgtttctgcagggaattttgctggtagtgatgaacctccagtaccgcagaatagctggcgggatgagtatcctgattacctgttgcatgaggtaagcgttatcatcgatccagctcctgcactaaatgtactgacagtgggcagcatcgccagacataacgctactcaagatacgcaacggaggcctgaggatattcaacacctctgcccagccacagaaaaccaaccttcgccttttacccgacatggtccatcagtaaaaggtgcgtttaaacccgacgtcgtggcgcacggtgggagtgtcgcttccaacgttcgtcaagggcaatggcaggcacatatgcgtggtctgggcgtgttaagctgccatcaccagtttcagggtaatacgctgttcaaagaactcagcggcactagctttgccgcaccgtatatcacacatctggcgggtcgactgttaaacgaatacccggaaatgtctgccagtatgttgcgggcgatgctggtcaatcatgcatctgtttctcaggagattacgcaaactttcccggaggccatgagagacagctataaaaatacccctgcaacgagaaaccgggagattgagcgcgacgtgacgggctacggcatcattgatgaagatgcgttataccgttcttctgaaaatgtggtggtcatgcgatgcgaagagcaaatagaaaataacgcgcaccaattttttgaactgcccttcccggcttcttttttacgatcacagcgggctacccgagaaatccgcatcacgctggcatactcgcccgccgtgcgtactacccggctggattataccgctacgcgaatcggtttccggctggttaagggccgctcgctggatgaagtgcaggctagttttaatcaccagacgcagagcgaaacggaaacccgctccgatgatgctcaagctaaccgtgttgtatcagcccaacagcgggaacgtgggacagtacaatcgtcggtgtggactttccgccaacgtaacccggatgaaaaatggtttatcgttgtaacccgtcaagacagagattggggcgaagcattcagcagcgagcaggagccttacgcactggtagtgaccgtgaccgatcgcgataacgaacgggcacagctttatacacaaattcaggcgcagatccgtgaacaggaacgcgcacgagcacgtattggataa

SEQ ID NO: 110823 - DNA, 1701 bp, Enterobacter aerogenes
atgtcaacgaagcaaaaactagaacttaactggattggtaagcataagcgccctcgtctggagccgcgtattctgcttgaagacaaagaattgtcttacggcgatgcggataatgagaacctgctgattcatggcgataatctattagcactgaaggctctagagcaaaagtatgcagggcagatacaatgtatttatattgaccccccatttaatactggggaggctttcgataattacgaagatggcttagaacattctctttggcttagcttaatgcaccaacggttgaatattttaaaaacactccttaatgaaaaggggtcaatatttattcatatcgatgataatgaactcggctacttaatagtaatgtgcgatgagatctttggtcgtagcaatagacgttctgtaataacctttaagcaaagctcggtctcagggccaaaagcaaaaaatccaggcctagttacaacctcgaactatattctttggtatgcaaaagatcgtaccaaatggtattctaagaaatgttttaaaaagataaaacgcgatagtagatatagtaaatatattgttaattacaatgacaactacagtgactgggtgattgataatgtaaacaatgtttttgctcaaaaacatggcattagttctagagatctaaaaaaatattttggagactctcttgaaaatgagttagagaaatttgtcttagagaatcccgagcgcgttatacgtacagccagggttaaagacaaggatgtaaatgagtcagcgagagaagctttatctctttcaagaacacataagggagtattttgttctactagagaagataattctgactattatttcactaatggtgaacaattacttttttattcatcaaaaacacaacttattgatggtgaatatattactggcgaagcattatctaacaattgggatgatttattgtcaaataatcttcataaagaaggtgcagtagtttttcctaaagggaaaaaacctgagcaactaataagaagaattctcgaactatgtactactgaaggtgatcttgttcttgattcttttgccggctcaggcacgaccgctgcagttgcgcacaaaatgaagcgtcgctggattacaattgaattaggggctcaagctcatactcacgttcaacctcggctaaaacgggtggtcgatggagttgatcaagatggaatttcaaaagctgtaaattggcagggtggtggcggttttcactatttgcatctggccccctcgctcctgaaaaaagatcattggggcaattgggtgatcaacaaagaatacaacgctgaaatgctagcagaagccatgtgtaagcatatgaatttcacctatgcgccaagtcagactcaatactggaatcatggttacagtacagaaactgattacatctacgtcactaccggttctttggcttatgaacaactcaaagttataagtgaagaggtgggaactgaacgtacattgttgatctgctgcaaagcctttatgaccgaaggggcagactttcctaatctgacgttggtaaaaattcctcgtgccattctgagtaaatgcgaatgggatcaggatgactatagctttacgctaaatgtactatcagattcagaacaacctgacgatattgactacgacgaagatactgaaggcgaagaataa

SEQ ID NO: 110824 - DNA, 2871 bp, Enterobacter aerogenes
atgagccaaagcaacgccataaaaattgccaatcggattagtgcacgactgtcactgcgcgatccgcaggatgaatcattacgcatcttatgcgatgtgctcgaacagttcggtctcagtaaagatcccgaccttaatcgttggattgaattgctacgtcaacagtatcccactgtaaaagggtttgaacgtgccttcccttcactatgctttgcactggctacgggtgtaggtaaaactcgcttaatgggagcgatgattgcctggctatacttaaccggacgtagtcgccactttttcgtactagctccgaacttaaccatctatgaaaaacttaagatggattttttacccggttcgccaaagtatgtttttcagggcattcctgaactggcacaaacaccgccggttctaatcactggtgatgactatcaagaaggacggggcgttcgtctggattatgctattgccgaaagcaaaacgggtgatctttttggcagcgaaaccgctccgcacattaatatcttcaatatttccaaaatcaacgcactggaaaatgccaaaggtgctgctaaatccaaggtcgctaaaattcgacgtattcaggaatacgtcggagaatcttattttagctatcttgcaaacctgccagatttagttgttttgatggatgaagcccaccgttactacgctagtgcgggcgcacaagcgcttaacgatcttaatccagtattgggtattgaattaaccgccacaccgaaaaccgtaggtgcaaacccacgtgattttaaaaatattatttatcactatcccctttcgcgtgcactaaaagacggatacgtcaaaattccagctgttgccacgcgcaaagacttccgtgctgccaactactctgaagagcagttggaaaaaataaagctggaagacggaatccaccatcatgaatacgtgaaaacggaactaaccagcttcgccaacaacaccggtaacaaactggtcaaaccttttatgctagtcgttgcgcaggataccgatcatgcagacaggctaaaagtacgcattgaacacgacgatttcttcaatggcgcttataaaggcaaagtaataactgttcactctaaccagtcaggcgaagagtcagaagaaactatgcagcggcttttggccgttgagcatgacaaagacactgaaatcgtcattcatgtcaataagttaaaagagggatgggacgttacaaatctgtacactatcgttccattacgtgcttctgcctctgaaatcctgactgagcagaccataggccgaggactgcgccttccctacggcaaaagaaccggcgtcgaagccgtcgatcgcctgacgattattgcccatgaccgttttcaggagattattgatcgtgccaataacgatgactcgattatcaagaaagttctgtatatcgggctggatgatgatgaaaacggtattccagaagtaaaaccccagcaaattatcgtaccatcaatggctgaattcctgttgggaaatcaagtcattgataatgatgagttgcaggcttgtgaacctcaagcgatatatcagacaaactccatatcaaaaccggttctcaatacggaaactgaacgtaaagtcgcagaactcacgtttaaagtggtgtcagaagaagctaaacggttaaccagcagtcagcaactcagcacgccagaggtgaaagcaaacgtaactcgacgggtacaacaagccttgcgtgaatgggaagtgactcaacatcaaatctcatcgtcttcggatcaactcgatttgacggaaatgattgaagagcaagttgaacagccaagtttcctttcaatggaggatacggaagttcaggagttggtcgggacgatcaccgaaaaactgatggaatatactatcgatattcctcgaatcgtggttttgccagaacgtgaagtcaattacgggtttaatgatttcaacctttccgggttggatcgcattgcgctcaaacccggcagtaaagagctcttactcacgcatctggagaataacgaacagcggacaatcagttggcaggaaggtggagaagcggaagaaaggctagaaaactatctcattcgttatcttctcgaccatgatgaaattgattacgacgaacatgccgacatgctctacaaactggccggacagatggtgagccatttgtgcagttatcagccgcctgaagattcagaatccgttctgaaaaatgctggtcggcagctggctgaatttatatgggtgcaaattaaacaaaatatgtggacaacgccaacgggctataccgggcgtataactcagggctttgatgtaatacatccagcgacgttcaattttgccggtaatgaaaaaccgagagatttccgtgttgcagttcccgcaggagaaaaaaataaagtccgccagatgattttcactggttttactaaatgctgttacccttatcagaaatttgactctgtagatggggagctccgcctagcccaaatattggagaatgacccctcagtgattcgttggatgaaacctcgcccaggtcagttccgtatcgaatatgctaatggtagaaattatgaacctgatttcgttgtcgaaatggacaatggctattgcctgattgaaccgaaaaaagcgacagaaatcgacacaccagaagttcaggccaaaacgcgagcagctatccgttggtgcgaatttgcaaatcaaaatgctgaaaaacttaatgggaaatcgtggcaatatgcacttatccctcatgatgaaattgagttaagccgttcaatttctggactaatggctgattttatgatgactaatagtttatctgtataa

SEQ ID NO: 110825 - DNA, 507 bp, Enterobacter aerogenes
atgaatctaagaaatgagttccctaaaaagcagaatgtttataaaggcatgtggtatttaatcactaacaccaaccgatttgtattatccgcagccgaaaactcaatggcatttgagcttgagaaaaaagagtatcaacggaagctcgaacaaggaaattacagtcttgatccaaaaaatcatacctactctcatccccagaggctaaaagaattacgaactttgttattcaagacaacagtctatatttttagcattattattttaatagcaggcattggtttttatacaggagtattaaaaataacacctcatctatcatggaaaaatagcaccagcgctttaggcattattttaatttcatggtctacattatttcaattaggctggggaaatggctcatggagtggaacatgcctggacgaattggtaagaaattctctttttcgtcttatttttagcattggtgtatttttgagtttattatatttcgttctgccagaatga

SEQ ID NO: 110826 - DNA, 210 bp, Enterobacter aerogenes
atggactatccacttcctcagcttcctgagggttatcgctacggcgcagatcattctgctcaacttccaaaagaagggcagtattttgcgcctgaagggtgcattatcaagtctatagacaccaacacagggcaagtgatttatgtgcctgtacagaggtatttccctgagaaaaatacttggtacactgtcaacttgaacgttaagtaa

SEQ ID NO: 110827 - DNA, 231 bp, Enterobacter aerogenes
atgagcgaaaaaagagcgttcccatgctgtgattgtgggaaagagttctatcttgtttcccttagtgacgaagatgctgagagctacgacgaagttgtttctatgggtcgatatgatgattaccttggttgcatggttccaaatgttagctcatttgaagcgtggcttggcgagcatgaggaatatgaagacaattatcatgcctgctctgattgcggctcagatagttaa

SEQ ID NO: 110828 - DNA, 690 bp, Enterobacter aerogenes
atgaatacccagtaccttgagtatgttcgccagcagctgatagtggccaccgccgatctgagcgggtcaacgaaagggcaactggtagcctttgcagagaacgcaatgtttgaagcgacggcgcgcagccgcagcaggaagaaagtcgccgatccggtctccggccgcatggtaaacccatccagcccgccaatccccggacagcagtcccgcgccaaggggtcgtcgatcgctctcgttctgcccgttgagtattcgacggcaagttggcgccgcgccctcctgtcgctggaggagcatcaaaaagcctggctgctatggaactacagcgacaatatccgctgggagaaccaggagacaatcacccggtgggcgttggaacaattcagcgagaagctggccggcattcgcattgcaaagaaaacagttgatcgcctgcgtcagcttatctggctggcggcccaggatgcgaaagcggagctggcaggacgcgaccagtatcagtacgccgaccttgcggcaatggtgggtgtagaggtgaaaaactggtccaaaacgttcacgacgcactgggaggatatgcttggagtatttgttcagttggatcgagacgcattactctccttaacaaaaacacgttcggaacaaaaatcgacattttcgcagcagagtattgcaaaagtagattaa

SEQ ID NO: 110829 - DNA, 495 bp, Enterobacter aerogenes
atgtcagcgaatttcagcgaatgcggtaagtatcgataccgccttgatcggaaaattggagtctcgctcaagacggtagcgttcattggtataaacccatcaatagcaaatgatgtagataacgacagaaccgttaaccggatgttggaatttgcgaaggaaaatggagcaggcaaggtcatagttgctaatgtgttttctcttgtttcaacagatatcaatggattgagaacagatattcccctaaggggaaatgagcacgatttccacttccagcagattattagcgaggccgatattttagttccgtgctgggggagtagagcgaagctgagggcgggtaatagacatctcctggataattgcatgaacttactactgtcttctgggaagccagtcctttgctttgggaaaacaaaatcaggcaaggaccctttgcatccgcaaagactcccatcaggtaccaagctaaaggagtgggcattggatgagtga

SEQ ID NO: 110830 - DNA, 291 bp, Enterobacter aerogenes
atggctacacttcaggaattaatcgatcttactccagagcaacagcgagcctggaaacgactagaacgggcagtgagggacttcagggctgcgggaggcaagttctatagcgttctggacacactgagtggctataacggtgagcacgtcgccactattgataacgataccggacatcacaccgcaagcgtctatatgccaagcattgatgctccaggatttacaagctgggctgatgactggcacggcatcacgctaaatgagggcgttgaagtggaggacgaccaatga

SEQ ID NO: 110831 - DNA, 411 bp, Enterobacter aerogenes
atgacaactgatatcaccgaactggcgcagcaagagctggctcaactgcgcgctgagctttcaaatcaggcaattggaagtaaagaccatctgcgaaaaatcgcgttatcgttggtagataaactggagaaatatcgagatcgggagattaggtggctggccttgtcagacgagaaatcaaaaatcatcaccgatcaagaagaggcgctggagaaggcgcaggagacgattgcatttcagcaaggagaaattaaagcgcttttgtcgtcattggagtcccgcaccgccaccgtgaagcttccgaagaaaaacattggctgggaccgagacgaagacgattgctggaacaatgctattgatgcctgtgctgaggcgctaaccgagcagggcatcaagtgggaggctgagtag

SEQ ID NO: 110832 - DNA, 663 bp, Enterobacter aerogenes
gtgaaagaacgcggaatgatttttaacagtgagatggtgcgcgccatcctcgacggtcggaagacgcagacccggcggattgttaaaggggctgacggcaccgtgaagttctgcaaggaatgggacatcaacggaaaagaagttttcgttgtgctcggggaaaaagaccacacaggaatgaatcctgtattgggtgctatctcttgcccgttcggcgcagtcggcgagcgcatctgggtgcgtgaaacatttcaggggccgttattcgattacgaacaaatggagtcatacctcgaagatagctcgaaattcgaaaagccagaattttgccagtatgccgctgatggcaagccagctccggaatattacgacgctgacgacaacctgcgtcacggatggcgcccgtcaatccacatgccgcgttgggccagtcgaattctactggaaattacagacgtgcgggttgagcgcctcgctagcgtgagtgacgaagatgctggcaaagagggctatccggcggatccctctccgtttggtgggccgatggataaatggctgtggtttcgtcagttgtgggacggcatttatccagagcagagctttaaacacaacccctgggtgtgggttatcgagttcaaacgcgttgaaggcggtgcagcatga

SEQ ID NO: 110833 - DNA, 192 bp, Enterobacter aerogenes
atgactctcacaaagcctaccggcttgcacttgaggtggtgggaggacatggccgatagccaatatcagcataagactggggatatagcactccagaatcagcaagaaacagctctgaccagatatattttatcgcaaagaaattattttttgatgtatacagttattctgaaaggctacacacagcaataa

SEQ ID NO: 110834 - DNA, 231 bp, Enterobacter aerogenes
atggatgtaaattataaggctatcggtatctctcaattcgacatagaggaatataaccagaatgcatttcgcgcacttggcgaatgtcttgtattgctaatgtcaagcggaaaaacgataaataaagataacatattgaaaactataatttctgaaatggagaagcagcccgatgactctcacaaagcctaccggcttgcacttgaggtggtgggaggacatggccgatag

SEQ ID NO: 110835 - DNA, 207 bp, Enterobacter aerogenes
atgacgtttgcgctgtgtatcaatatgagccagccgactgtgtcgtgccgtctgtaccccaacttatttcccggtatcgccccgcttggtggtctgcaactgcgaattgaagtcgcgggtacgctcgttttacaggatacagaacagacagatgtccgcgacaagatgaaaagtattatggctatgaaaggcgtggtggtgaactga

SEQ ID NO: 110836 - DNA, 1998 bp, Enterobacter aerogenes
atggacgccaacctgcgtcgggatagtgatatttcgcgttacgttgataactcgttcaacaccggcaggattattttctttgcagagttacccgccaactcttcacggcgcttccgcctggagacgtacggcacccgaggtaaaaccgcagctgagtggaactatccgaagttgcgtaaaaacgtgacggtggaccgctgggagatcactgtaggtgaattcacctggcagtttcggacggatacaggggctattgcgaccgtcttaaaaggtgctgcgtcgatcggggtgcagacgctacgccgaattgttgcagtgactgatggggctgctgtagaaaacacggatattatcagtgcgtcattatcgcttattaatgccggtccagtttttgcggaggttgaacagacggtttatcacgctggacagggcggcgtacaggcaggagatattaaaagcgtcacccggtacaggctgtttaataatggtgcgctctatatctacaacgtgttccgtgcagagcgtgaaatcccggaaaataacctcttcggggttcgtcttgacgtgcaactgagtggtggtgctgatgccacgtacagcattcacactggcgcctcaatcgccactaatgtgccgtttgaggggcataatacatggaacctcgttaatgagtttgtcatgagcgatacagtgcgtgacaccatttcaaatgagaacacatggggctgcgtccgtccgtacactgcaacgatgctactgcagggtactgcgctaaggtcgcgcacagggtggcttttcactgcgctggacaatcgcaacctgctggaatatgtcacgccgaaaagctggacatggcctgcagggcattggctgttcccgtattccgtgggggatgcggagaacacaatcagcaaccgggtattaaaccgcccgtgcggagtgttttatcgcggcacacctactcatgttttgcgccagcggatttaccagcagttagaacggctcatggatggggtgtttgagttatataccaatcccgataacgggcagatttctgccacggattacagcggttatcggtatcctcaggtatacggtctgtacgatgccctgcgcaatggagaggattttgatacccgctatgggtatttcaaaacgtttattactgacaaaattggctcgtacagcaacgccgggaatgcgtatttaaccggggcgtggacgctgcaattttccgggcgcatgtgctttgccgcggtggagatgtattaccgctacgcgcagaaaataaataacacaacggtgatggatgacctgaaaatatttattgcgagtgcgtgcgacgggttggctcagaaaattgagacaagcggtgcggctccgctgggagggaacgagaataacaaaggcggtggcaactcaaacatggacgcataccgcatgctggcgatcgggatttatgccggggttgatacagccggtcgttatcaggctgcgataaacgttatcgttaatatgatgaagacgaatagctacgctactcacgcgtacccaacgctcatggacacgttcgacgcgtacccgttcctcaatcgctggctgtcttatgaggcccagggctattacacgtacctgagggcgtgccggctgctgaatactacccctgagttcgacaacagcaactacctgatgcggggtatgcaggggaacgggacagttgattacctcagattcattcgcgcagaggaccggcgcgggttctgcgaaacgcctggcgctgcggctatcggcctgctgatgcacggcggtgtatctggcataaacgcggccgcgctactgctggacaaattcgaaagggattggtcgatggaccccatcgcgcagccgcatttgtgcgatttccggcagctgacaacaccattgactaccgcatacgagggcttcgagcacgttgtgaatcagttcgcgctgatcctgctcgatagaaaaatcggatag

SEQ ID NO: 110837 - DNA, 756 bp, Enterobacter aerogenes
atgtgctttgccgcggtggagatgtattaccgctacgcgcagaaaataaataacacaacggtgatggatgacctgaaaatatttattgtgagcgcgtgcgacggattggctcagaaaattgagacaagcggtgcggctccgctgggagggaacgagaataacaaaggcggtggcaactcaaacatggacgcataccgcatgctggcgatcgggatttatgccggggttgatacagccggtcgttatcaggctgcgataaacaccatcgtcaacatgatgaaaactaactcgtatgcgacccacgcatacccaacattaatggatacgttcgactcgtacccgttcctcaaccgttggctgtcgtatgaggcccagggttattacacgtacctgagggcgtgccggctgctgaatactacccctgagttcgacaacagcaactacctgatgcggggtatgcaggggaacgggacagttgattacctcagattcattcgcgcagaggaccggcgcgggttctgcgaaacgcctggcgctgcggctatcggcctgctgatgcacggcggtgtatctggcataaacgcggccgcactgctgcttgataaattcgaacgggattggtcgatggaccccatcgcgcagccgcatttgtgcgatttccggcagctgacaacaccattgactaccgcatacgagggtttcgagcacgttgtgaatcagttcgcgctgatccttctagatagaaagatcggatag

SEQ ID NO: 110838 - DNA, 168 bp, Enterobacter aerogenes
atgatttcgtggctgttttataatgtgagttttacgcctaaacctgaacatatctctacgctgtggatcgtggcgagtatagccattcctgcaattatcgcttttggcgttggtttgtcattgactgttttagccgtcaataaggcatatcaacatatggggtattga

SEQ ID NO: 110839 - DNA, 2610 bp, Enterobacter aerogenes
atggcttctcaattcttgctgaatcaaaaaatagtagcagcgattcaatacattgttttaggtaatgattcttatgttagtgatactgcatttgatgcgatatctaaaagctttatgaagggaacattgacagaagaccagtacataagcaatttgatatcatctagtgcagggcaagctttatattcaggtaaaagtaatctggatatactgaaaggggtatataccacactttatggttcttctccggaagattcaatactcgagagtatcttacaatcgagtgatttgaatggcgccatttattctgttatcaatgagttattaaattacaatgggttcgactctactacccttgcaactcaaaataattttgacaatattctcgatgccatgatgtataaggactatggcacagccacgtgggatgtttggagtgagtctttatctcaacaggagcagattatctcagcttatctggccatcgctggacgttctgttgatatgagtggcttacgaggttggacgacctctctcacaatttcaaacaatacatttgatagtatcttagggcgaatgttaaattctgttgaattccagtctaaaggggcacaacttactggtgaagattttatcaagcatatattcaatggggtttatggtgttgatcctacgtcagagcaaatttctacatatagtgctttaggttcagacaaggtagccatcactaacgcaatcataaacgacctacgcaattccacagctactgataatgccaccgtcacaaaccaacatgccttcgagtatgaaataggtactggtttactctacaaaacaggcgctattcttacagctactgctggcggcggcaatgctactggcactgtcaacactaactctagtcatcaaattagcaatgctgaaacggccgttctgactaatgttcagctcaatgccaacgcggcaacaaccgtcaatttaaagtttgctgatcatctggctaaccttgagattggtggtggcagtgcggcaaccgttaacctctcggacaatggcgtgaatcctggcgttaatatcacagtcgacaacggtagcatcacgttaaatgccagttctggtgcagataagatactgttaaccactgatgcggttgttgcttcagctaccggtaaattcaacctgggaacgggtaatgattcgctgaaatggttgggcaatggagtttctaacggggcaaacacggtatctactgctattacggctaatggcggagatggcgttgatacaatttccgctaatttaatcactaaaaacgttgtgatgtcaggtaacgccgttacccgtacagcaactatcagcaccaacacttctcagttcaccaactttgaaaaactggatctggccggatatattggcaaggcgacagtaagttcaggttctaccgccgcgaaccacacctttgattttggtattcttacgggtaatgcggtatccgagtctagtactactggtgtgactaacaacgttgtacaggcagcgacatcaaccattggttcccaaggttttgtcctgtctggccttgccgaccaagtgcatgtaattaatgccactggtggcaattcagcacagctggaagtcacgggtaatgcaactgctgctagcagcgtggatatcactttcctcgcaaatgctacaaaccattttgatgtcaatttcacggcaacgagtagtagtgatgtaaatgcaggggcgttgtctttagtcagcagtagcactttgttaggtggtaacatcgcgttgagtactctaaacattggctctggcgggacaggtgattttgacaatattctgtcactaacaggcgcgaatacacaggtacaaactatcaatgtggctggcgaccatgttctgaatctgacggtcggtacagggtatagcaacgtccatgatattaatgcttctactaatactggcggattgaacctgacatctaatgttggcggtactggtgatggtattcttgttcagttgttgaatgctttaccgctcagcggcgtaacaaccacgatccttaatttattaggattaaatggtggttaccatttaagtgttgaaggaacttctgttgcagattccttcaatgttgttggtaacactgtagttacagggggaaccggcgaaaacctgtatcagctgaaatcgagcaccattaattctggggtgaccatctccgactttaacagtggtaaagataccatttttgatactgcctctggtttgacaatcaataatgatacttcgcacacagctatcgctgattatggtacccgagctacggatgtggtcgagtctttgttaggcaccttggttactggtattgttggtggtgtcgttggcctactggggcaaattctcggtattggcaataacggcgatctgacctctaaagttggactcgcatccgtcgtctgggctgataactcccatgaggcaagtaactacctgattattgataacaacaacgatcatactttagatgcgaatgacacagttgtttatctgaatggtcagacgcaccaacagttggttgatactctgcactatgcataa

SEQ ID NO: 110840 - DNA, 345 bp, Enterobacter aerogenes
gtgctggacaggatcgtggcaaaccgcggctacccgctgaagatgcggatggacaacgggccagagctggtctcactggcgctggcacaatgggccgaagaacatggcttgcagctcgaattcatcaagccgggtaagccgacgcaaaatgcgtttttcgaacggttcaaccggacataccggacagtaatcctggatttttacctgttcagaacactgaatgaagcacgggaaatcaccggacgctggctgatggaatataacaacgagcgacctcatgaatccctgaacaacctgacgccggaagagtaccggctgatggctgaaatgatctcctccctgtaa

SEQ ID NO: 110841 - DNA, 1095 bp, Enterobacter aerogenes
gtgtatgattatttgattgttggcgctggtttctttggtgcggtatgtgcttatgaattaaccaaaaaaggtaagagagttctggtcattgaaaaaagagaccatattgcagggaatgcttttacagaaaactgtaatggtattaatgttcacaagtatggagctcatatattccatacaaatgataaaaaaatatgggattatgtaaatcaatttgctgaattcaacaatttcgtgaattcccctatagcctgttataaaggtaatttatataatcttcctttcaatatgaatactttttatcagttgtggggaactaaaactccagctgaagcaaaaaaaatcatcagtatgcagacagttgagatgtctggtaaggagcctaataatcttgaagaaaaagctatctcattagttggtcaagatatatatgacaaactgattaaaggatatacagagaaacagtgggggcgtagtgcagtagatctacccccttttattatcaaccgactacctgtgcgtttcactttcgataataattatttcagtgatcgttatcaggggatccctataggtgggtatactaagcttataaagaatatgctttcagggattgatgttgagctaaatgttgattatttctccaacaaagagaaatatacagccatggctgataaagtcatatatacagggcctattgaccaatattttgattattgctttggtgcgttggaatatcgttcgctacgatttgaaaatgaagttttggacgaaggtaactatcaaggggttgccgtggttaattacactgaatatgatattccttacacacgaatcatcgagcataaacattttgaaggtatagagtctagtcatacggttataactaaagagtatcctgttgagtggaggttgggagctgaagcttattacccgataaataatgaaaagaacatggacgtttttaaaaaatacagagcactatctaaaaatgaaaaaggtattatttttggggggcgattagctgaatataaatactatgatatgcatcaggtcatagcttccgctttaaagacagtttctgagctaaattag

SEQ ID NO: 110842 - DNA, 237 bp, Enterobacter aerogenes
gtgaatgctgtacgtggcatcagcaccaccactcagttgcacatcaagacgaacgccatacaggttatttgccggaatttcacgctctgcacgaaacacgttgtagatatagagcgcaccattattaaacaggcgatatcgggaaacgcttttaatatctcctgcctgcacgccaccttgccccgcgtgataaaccgtctgctcaacctccgcaaatactggcccggtattaattag

SEQ ID NO: 110843 - DNA, 192 bp, Enterobacter aerogenes
atgagcactcatctcaccaccataaattgcatcctcacttctcattctttctttaataaaagcatgaccggttttagacatgacaggaatcccgcctgctttagtaacaatatcaatcgtattccaactcagtctaggatcatgaataatcctggcgcctgcgtgtttttcgagaaaagccttagcaagtaa

SEQ ID NO: 110844 - DNA, 609 bp, Enterobacter aerogenes
atgaaaacagaatgtgtaatttggccgcagtataaagatcgtgcagggtatggcactacttatcacgaaggccgtgtgcgtaaggctcatagggttgcatattgcctatttcataacatagcgatcgaatctattgatggtctcctggtgaggcacgattgcgataatccttcatgtgtaaaccctgagcacctgtctttaggaaaccataaggacaatacggcagatcgaattaaacggaatcgtagctaccatcccagcggcgaaaaaaatataggttccaagctttcagaggaacagattgctgagatacgtgccattcacatcccaaggaaaaagggattcagtacaagttgcctcgctaaaaaatatggtgtgtcaccgtcctggatcgggcgcgttattgctggaaatgtcaggaatggagaagcagaaggtccactttttctgacgttcgaaggaaaaacccaaaccccttatgaatggtccgaagatgaaagagtgaaaataggggcgagggcaattattgagagaaagcgaaaaggaatgtcagatgctgatgctctttttgctccggctcgcaaatggggaggtcgtaagcatggctaa

SEQ ID NO: 110845 - DNA, 1740 bp, Enterobacter aerogenes; identical to SEQ ID NO: 71843

SEQ ID NO: 110846 - DNA, 504 bp, Enterobacter aerogenes
atgccgggcaaccgcccgcattatgggcgtttgcctcaacaccattttgcgccatttaaaaaactcaggccgcagtcggtaacctcgcgcatacagccgggcagtgacgtcatcgtctgcgcggaaatggacgaacagtggggctatgtcggtgctaaatcgcgccagcgctggctgttttacgcgtatgacaggctccggaagacggttgttgcgcacgtattcggtgaacgcactatggcgacgctggggcgtcttatgagcctgctgtcaccctttgacgtggtgatatggatgacggatggctggccgctgtatgaatcccgcctgaagggaaaactgcacgtaatcagcaagcgatatacgcagcgcattgagcggcataacctgaatctgaggcagcacctggcacggctgggacggaagtcgctgtcgttctcaaaatcggtggagctgcatgacaaagtcatcgggcattatctgaacataaaacactatcaataa

SEQ ID NO: 110847 - DNA, 411 bp, Enterobacter aerogenes
atgactgactcaatgaaatatctatggctgcttttacgcgaagattcgtcatatatttttatgttgatgctgattgttggttctgccgtaatcgtgtctgccttttttcagagagtaatcacatcctggtggggtaaaaccctcagtgtgatactgtgtatggtgagtatgattactacagcaacaggagttcttgatcctgagtcaacatataaacaaattataaacaggaaagaaaatatcatctatacgctgaaaaactgcagagtctccgcatttgaagcgcagcaggcagggtttctggctaaagcaaaagatgcctggtcttgcccggatggcgtaacacggtatatggatgtgagatacagggataaggcagagattaataaactcagtacggaaggtaagtaa

SEQ ID NO: 110848 - DNA, 777 bp, Enterobacter aerogenes
atggaatgtgtatgtctcataatgattatggcacaagaaatttgtatgcaattaaataaattgatgactgttatggttgtcagctctgcgctggcgttgtctggatgtagtgcaatgggaaccgctattaaaaagagaaatctggaagtaaaaacccagatgagcgaaacaatctggctggaaccttcaaataataagacggtttatctgcaaatcaaaaatacctctgataaggatatgagtggcctgcaggcaaaaattgccagcgccgtcacttcaaagggatatcaggtcgtcagtaacccggatacggcgggctactggatccaggcgaacgtgctcaaggccgataaaatggaccttcgtgagtctcagggctggttaagccggggttatgaaggcgcagtgactggcgccgcgcttggggcagggattaccgcttacaactccagttctgcaggggcgactctgggtgtaggacttgcagccggtctggttggtatggctgctgacgcgatggtggaagatgtgaactacaccatgatcaccgatgttcagatcgcggaaagaaccaaaactcaggttcagactgataacgtggccgtattacgtcagggaacatccggcgcaaaagtgcagacaagtactgaaacgggtaatcagcacaaataccagactcgcgtcgtctctaacgctaataaagttaacctcaagttccctgaagcccagcctgttcttgaagaccagctggcaaaatcgatcgctaatattctgtaa

SEQ ID NO: 110849 - DNA, 558 bp, Enterobacter aerogenes
gtgaaaaaaattaaccgtacactccgcaaatgttgtctgtcggggctgatcagcctgactttgtgtgcacctgttccggccgtgtatgccgccagcatcgaggcgggtttttctccagaaggttcggcgctgcagctggtactgaatacgatcgtgactgcgcagcaaagtattcgcttgatgggctacagcttcacttcaccggaagtaacgcgagcactgatccaggcgaaacagcggggtatcgatgtcagagtgttacttgactggaaagccaacagcgcgaaagggagtgcaggtgtggcggcaatgaatctgctggccaatgccggtattcctgtacgaaccgtcagccagtttaaaatcatgcacgacaaggtgattatcaccgacggccgaaacgtggaaacggggtcgttcaactattcccgcgctgcggcgaacagcaactccgaaaatgccctggtcatccgggattaccctgcgctggctgatacctatctgaagcactggcagtcccggtgggagatggggagggactggtcggtctcctattaa

SEQ ID NO: 110850 - DNA, 261 bp, Enterobacter aerogenes
atgtcacaggtcgtaaacgtaattacttcctcacaaaaacctaaacgtccatatcggaaaggaaacccggtatcagcgaacgaacgccagaaggcttctctggcgaggcgtagtaatacccataaatccatacatgcgctcattcagattccgttaaaagagaaactggctcagtttgctgaggaggaaggaattacgcaggctcaaatgattgaaaaactgattaaacttgaagcagagcgccgtggaaatgatgtgtaa

SEQ ID NO: 110851 - DNA, 1089 bp, Enterobacter aerogenes
atgagccaaacgatgaaattaggtctggcgctttccggtggtggggcgataggtgcttatgaagcaggcgtcgtcaaagcgcttgcggagtcgggaaccgacgtccatatggtttccggcgcgagtattggcgcgttgaacggcgcgattatcgcctcttcttcagggctgtcgcaggcggcggaacggatggctgaaatctgggaccatctgggtaatagcaccgttttgtcggttaacaaatcagcctatttttcgctgctgttgcagtttgggatcggaatggggctctccccaatgctcagcaagacgggaagtatgctcagtacgatccttaatcgtgcggcgctgatcaccggtacgaaaggctttgaaaatcagcctttgctctcggatcaacccttgattgccctgatggatcgttatctggacatggatgcccttgcggtcggtttaccccttttcgtctcgttataccctactgaaggcggagtgcaggatattatcaactgtattgccgccgaactgggtctggattcaacgcgcgattccgaattttatcatgtgcaaaacctccccccagaacagcaaaaagaggcgctaatggcctcggcggcactgccgttgttgttcaaatctcgtgaagtcaacggtacccattatagcgatggcggaatgggcggctgggcgagtttgcagggcaatacgccggtcacgcccctcgtggaagccggttgcaacatggtgatcgtcacccatttgagtgatggatcgctgtgggatcgtcaggcctttcctgataccacggtgctggaaatccgaccgcagcgttcattacgccgcaacgatggggcgctgggaggtgcaaaagatctgctgggctttacggcgatgcatattgattcgtggattgaacagggttatcacgacaccatgagcgccctagacagcgtccgtaaaccgcttcaggcacgacgcactctacaactttccagtaccgcgcttgaaagcagtctggcagagaataccaccgcggattcggtcttaaaaaacgcaatatcccgacttaaagatggcattcaacgctga

SEQ ID NO: 110852 - DNA, 906 bp, Enterobacter aerogenes
gtgatcacctcctttcaggaagcacttccagacaatgaggcatgccagatcctggcatgcctgccggaaaagttcattgttgatttcgccaacggtatcgatatcacacaagatcaccttcgggtacagaaaaaccgcagcttctttatgcgagtgaaagaggggctcagcggtcagtcttccgcccgccagcacgcaattaatagcgcgctggcagatagtgttgaggcctcactgacgtggctcaccgaactcacctcctcgctggccaccaccaactatgctctgacgcaggtgaatgatagagtgacgtctctggttagcgataccgctacgctcgcgcactattctgccgacacccgtgagcagcttaacgcactgtctttgcaggtgaaccaaaagctgagccacctcgagcagcatcttcatcgcgtcgatatgctgcagcggggccaactgcatcttgaccagatattttccagctggagcgccgggcggtactctgccctgccgtttgccggacgttgctatgtcgcacttgaggaactgcgctggggagcattcggcgatgtgatacgccatggtgatacgcatcaggcaaaccagatgatcgacattctaaaaaacaaggccttagcccaactcgccgcagaccacggtagcctggcgagcgcacgccacgacacttacagctggctgtcatggcatgcaggccagatacagcaaaatgactggccagagacgctcaactggatggctgactggtgtactaaagatgcacatcccgttatctggtctgcaacccagaaatacgacgatttaccattacgtatgccgcgtctgtgttcagcagaacgcattgctaccagcatggtcgatgaaatattcagccgggaggccgcatga

SEQ ID NO: 110853 - DNA, 2232 bp, Enterobacter aerogenes
ttgaaaagaattgaagaattacagggcgaacgaaccaaaattatccgtaaagagatggtgctggccgtcgttgggaccatgaaagccggaaaatcaacgaccatcaacgcgattgtgggaaaagagatcctgccaaaccgcaatcggccaatgacctcaatcccgacactcattcgccacgtgccgggtaaacatactccagaccttcagctaaacaatatcgaccctatccatcagttgttgagcgcgctcaagaaaaagattacaactgacgaaggcaaaaagcgtgtacttgaactcgataaggatcaagagaaaagtaagttattgcgaattgccatggatgataattggttaaaaaatagctacgctggtgaagctgaaattttcacctgcctcgcctcgctgaatgacctggtgcgtctggcaaccgcgctgaatgtcgaatttccgttcgaagcctatgaagaggttcatgagcttccggtaattgaagttgagtttagccacctgacgggaatggatgatagccatggaacattgaccctgctggacaccccaggtcccaatgaagccggacaaccccaactccaggcaatgatgcgcgatcagttgcaaaaagcgtctgcggtactggcggtgctggattacacccaattaaattccgaagccgatcagcaggttcgcgcagaattgaacgatattgcaaacgtggcggcaggccgtttgtttgtcctggtcaataaattcgaccagcaagatcgtaacagcgataacgctgagacggtcaagcagagcgtgcccgccatgcttaaacatgacgtcctgaatagcgagcgcgtttaccctgtctcctctcgccatgcatatctggctaaccgcgcccgcagcgtgataagccaagccggaacgctgtctggtcaggaagactgggtgaaggattttgcgaaactggcctttggtttatcctgggaagaagaggatcttacgagtctggatgatgtcaggagaaacgccgataaaatctggcgtcgttcactttttgataagctcattaccgaagtgattcaggctgcgcatactaaagcggcagcactggccgtcgattctgccgcagccaagctggttcagaacgcagaaaacgccaatgaatatctctcggtgcgtcatcagggtctgttgaccagcattcaggccttacaaaatcaaatcaacggcttgcttagcgatatcgataatatagccacctgccagaaagaggtcgacgccgaggtgaaacgggccatgaaaggcatcacgcgtgaaacggacgcattgcttgaacaggccgagaaaacgctgagcaaagacctgaatgaatacttcaaaaatggaaaacgtcaggagaaagaagcattcgggatcgatcaaccgaaggaatcaacaagtctcacgatctttggaacgttctttaagacgctgaccggtactacccagccacgagagcgtgatttcgatccgaacaatccggaaatgaagtttagcgcgcgttctgatgccgaaagattcatccagcaaatcgaagactccgtcactagtttgctggcagagaccgaagaaaaaattaaaccgacgctgacagagatcgttgtcggcatcgaaaaaagcttccatggcaacgcgatcaaggctgtggaaaaaatcgcccatcaaatcaatactcgtcttgaagacgatggctttgcggtcaatattcgcttccctaaagtaagccagctacagactaatctttctatcagaactcgtatggccagtcttctggaggaaaaaaccttcagtgaaaccagacgtcgccgtacgagtggagtatggggaacggtgtgtgggtggtttaaaaccgatgactggggctgggaagattacagcgttgatgtcacccgtagtgtggtagatattcgcaagattaaaactgccgtgaaaaaacagactaaagagcattttgcagagttaaacgagaccatcgaggcgagtatcaatcagcctatattggtcgaaattgaatcattctttggagcctttaaaagtaaagtggagcagttgcgtaatacgcttatccagagcaccgaagatcataaaaattgccagaatgagcaggaacagctgacactgcgcctaagtgagctaaaaaaactcacaccggagatgatccgtgacggcaaagcgctcaaagaagaactggagccgatgctgtga

SEQ ID NO: 110854 - DNA, 504 bp, Enterobacter aerogenes
atgtcgcgccagtgcacgcattatgggcgttggcctcaacacgattttacgacacttaaaaaactcaggccgcagtcggtaacctcgcgcatacagccgggcagtgatgtgattgtctgcgcggaaatggacgaacagtggggctacgtcggtgctaaatcacgtcagcgctggctgttttacgcgtatgacaggatacggaggacggttgtggcgcacgtattcggtgaacgcacgttggccacgctggagcgtcttctgagcctgctgtcggcctttgaggtcgtggtatggatgacggatggctggccgctgtatgaatcacgcctgaagggagaactgcacgttatcagcaagcgatatacgcagcgcattgagcggcataacctgaatctgaggcagcatctgtcaaggctgggcaggaagtcactgtcgttctcaaaatcggtggagctgcatgacaaagtcatcgggcattatctgaacataaaacactatcagtaa

SEQ ID NO: 110855 - DNA, 504 bp, Enterobacter aerogenes; identical to SEQ ID NO: 110846

SEQ ID NO: 110856 - DNA, 342 bp, Enterobacter aerogenes
atgaaagcagaatttagcgttaaagttgatattaaaaccatcgtcaaaaccgagtcagtaaaaattgaccagttgtttattaaaaacagtaatggggaactggagtgtcttggatttgttgcattcaatgatgttgaaaattccccttatgctcctcccgtaatcactccttttactattaacggtgagatgaaagaggcgcactgtgcagcctgtgccgcttcagctctgtttgctggacggtcaaatctttatgctgaagatatacagattgaatcctctgattcaccgattgccagtcttttagctggcgtgtttagtgaagcagtcaagagacagtaa

SEQ ID NO: 110857 - DNA, 342 bp, Enterobacter aerogenes
ttgcatctggtcaccgataagacgcacccgctttacgacgagcggatccatctgccaatcaatgagccgatggtactaaacatcatggaccagggcgttcttgagccgatcatcgtctggaaagacccggagacagggcgctcctgtgttgtcgatggtcgccagcgtgtgcgccatacactagaagccaacaagcgtctgtcgattgagggcaaagaaccgttactggttccggcagtcactaaacgtggctctgctatccgcatggcgcaggcgatggtaagcgctaacgaaatccgccaggcagatacgccgctgggccgcgcaaaaaaaaatggctga

SEQ ID NO: 110858 - DNA, 228 bp, Enterobacter aerogenes
atgaaagcaattattaaactgagtcaaagagccaccattgagaaacaagggaaatatggatgggaatcagaatcaatttatgagccgatttttatcaatgtagatcggattgaaactttctatttcgcaggactgactcttattaaattagcctctggtgatcgggtagaggttagagaaacccctgaagaaattatcgcattacttgaaggtgaggtggcggcatga

SEQ ID NO: 110859 - DNA, 162 bp, Enterobacter aerogenes
atgaatgcccgtatttcaaatttatcgttggaaaaaatgcgcaaagacgctgaaaaaatgctctcccgttacagtcctgcagttgatgaggaatggtgggagagaatgctgtccattgttgttgaactgcaggaacgccgggctaaggaatcaggaaaatga

SEQ ID NO: 110860 - DNA, 432 bp, Enterobacter aerogenes
atgcgaaaagtcacacaagttgacctcgaaaccggagaggatttaggcgggtttgtcgccgtgatccgtccaaagcaaaaatcatcgttcgagaggcacttcaccatgaatcaggcagcgctaaaaatcatcgctacagaactgaaccatgagcagacaaaagtactcatgatgcttctcgcagacctggattatgaaaactacattcaggtggcacaaatcgacattgcggaatcattggtaatgaaaaaatcagcagtaagcagggctataaggcacttgcttgaatttggaataattcttgaggggccaaagattggccgcagtaaaacctatcgcctgaatcctcaattcggctggaaaggcacggtaagcaaccacaagaaagcgctcaaaaacggcctcagcgtcattcagggtggcaaggtgtga

SEQ ID NO: 110861 - DNA, 255 bp, Enterobacter aerogenes
atgactgacactaatcctaccatgcttgatttgattatacgccacaggaaggctatagacgcgtttatggcgttttcctcaatccatcccattgataatgaccttcatccccttgtagagcttctgagtgcgaatctggacgattctttcaggggtatctatccgcatctttgcggcctggattcgtcaaacgctaaatcgggggttccctttcagggttccgatttagtgattgacgacacgccggagaaataa

SEQ ID NO: 110862 - DNA, 477 bp, Enterobacter aerogenes
atgtttattgattcagaaaaacgactgaaacaactttcagatgaggcaaagaaaaacaccgaggatctcgaagaagcaaagaagaattcaaggtttacacaggtatccccaaaaggttgggaacgtgttcgagagctgctgaaggatagccaaggcatatcagcactgaagctgtactcatttttagcggagcatatcgatcctacgtgtggcgctgtcgttgcggatcagcaattcctagctgaaaaacttggagttagcagaagcacaattattcggtggctcaactacttagaatcaaaaaatgcgttagtcagaattcctgttgctggtaaggtttgtgcgtatgcactcgatccacatgaagtctggaagggatacaacacatctaaaaactacgcggcgtttgtcactaaaacactggtcaacaaagacggtgatattcagcgccgaatcatggccatgttttcaaattga

SEQ ID NO: 110863 - DNA, 504 bp, Enterobacter aerogenes
atgtcgcgccagtgcacgcattatgggcgttggcctcaacacgattttacgacacttaaaaaactcaggccgcagtcggtaacctcgcgcatacagccgggcagtgacgtcatcgtctgcgcggaaatggacgaacagtggggctatgtcggtgctaaatcgcgccagcgctggctgttttacgcgtatgacaggctccggaagacggttgttgcgcacgtattcggtgaacgcactatggcgacgctggggcgtcttatgagcctgctgtcaccctttgacgtggtgatatggatgacggatggctggccgctgtatgaatcccgcctgaagggagaactgcacgttatcagcaagcgatatacgcagcgcattgagcggcataacctgaatctgaggcagcatctgtcaaggctgggcaggaagtcgctgtcgttctcaaaatcggtggagctgcatgacaaagtcatcgggcattatctgaacataaaacactatcaataa

SEQ ID NO: 110864 - DNA, 378 bp, Enterobacter aerogenes
atggacgaacagtggggctatgtcggtgctaaatcgcgccagcgctggctgttttacgcgtatgacaggctccggaagacggttgttgcgcacgtattcggtgaacgcactatggcgacgctggggcgtcttatgagcctgctgtcaccctttgacgtggtgatatggatgacggatggctggccgctgtatgaatcacgcctgaagggagaactgcacgttatcagcaagcgatatacgcagcgcattgagcggcataacctgaatctgaggcagcatctgtcaaggctgggcaggaagtcactgtcgttctcaaaatcggtggagctgcatgacaaagtcatcgggcattatctgaacataaaacactatcagtaa

SEQ ID NO: 110865 - DNA, 249 bp, Enterobacter aerogenes
atgggcgccatagcgggcgtagccgctaaatttcaggccgaatggaatcgccatatccggcgaatcggcggtggtctgcgggttggtaataacatcgacctttttatcggccgcagcgtcgattttcgcctggcggtcggccagcgctttatcaaccgctttggcgacgatggcgtcgatctgttcctgagtaaaatcctgcgccagtacggaaattgggcacagcgcggcgataaccgccatggctaa

SEQ ID NO: 110866 - DNA, 810 bp, Enterobacter aerogenes
atggccgggccgcaggccacccaggatgatgtcagccgtatgcatacgcgcctcggtctggacgatccgctggcggtgcagtatggccatttcgttagcggaatgctgaagggggattttggcacttcgctgaagtccggtcagccggtctccgccgaaatgagcgaacgggttccttatactttaggcctggcgctgctggcgtggatgatggcggtgatcctcggtattcccatggggatgtgtgcggcgatttaccgcaatcatgttgccgaccatgtgctgatgctggtggcgattgccggcgcgtcgatagccaatttctggctggcgctgatcgccatggataccttttcggtgaagctgggctggctaccgctactgggcgccgaaggctggaaaagctatatcctgccgtcggtttgcctggggattttcccgatggcggtgatgtcgcggatgacccgctccagtatggttgatgtgttaggcgaggattacatccgcaccgcgagggccaaagggctggcgccgtttcaggtctatttcaagcatgcgctgcgcaatgcgctgatccccatcgtgacgattatcgcactgaacttcggcagcctgatcggcggcgcggtggtgaccgagtcggtgtttaactggccggggataggccgctatctggtggattcggtacgctatcgcgattatcccgtcattcagggagtgacgatgattacggtggcaagcgtggtggtgatgaacctggttggcgagatgattatcgccagaatcaacccgaaaataaggtttgactga

SEQ ID NO: 110867 - DNA, 2745 bp, Enterobacter aerogenes
atggcaaagctgctcaaggccatgaaacgcccggcagcgctgtggggggtaccaatggtgccactgctggctgtcacgggtgtaaccatcatcattgctgtctggacttccgtcgctctcctgttcttgcttcctgtgcaatttctggtgatgaagtccctcaccagaaatgaaccaatgcggttcagtctgattgccgtatggctgagagcgaagggaaatccggtagcaaaccgtttatttggcgcaacaacatttatgcctgttgagcatgatgctgttgatatcagggagtttctcgacaccatgaaactgaatcagtgtgccaccatcaggaaatacatcccgtactcatcgcacattcatcagcatgtggttcgttccccgaagagcgatctgtactgcacctgggaattgatgggaacgccgttcgactgtgagtcagacgaaacactccggttcggggcgaaccagttaaacgggctaatccgctcattcgaaggtatgcccgttactttttatgtgcataacagccgggaacagttcacggattcactccatcgaatttccggtaacgcatacgctgacaccatcagcgaactctattacacctctctggggaaacgaccgttccggcgcaaccgtctgttcctgacggtctgctataccccgtttgtcagccttgaaaaagcagaacgcaaacggatgaaagacggccagaaattaaaggagctggacggtgctttgctggagatgctggaaatcaaaagctcgcttgatactgcgctggcgcgctatggagcctgccctctcggtacgtttagcgaaggggaaatggtgttttcgtcacagctggcattctatgaatacctgctgacgcaccagtggcgaaaggtgcgcatcacccgcaccccggcctgtgacgtcatgggcgccgcagcgttgttcttttcggcagaatccggacagattaaccacgccagcggtacgcagtatttccgggggctggagatcaaggagttctccgaagaaaccgccaccggaatgatggactcccttctttatgccccctgcgattatgtgattacgcagtcttatacctgcatgtcacgcgaggaagcgaagaaggccatcaaacgcacccgccgtttgttactgagttcggatgatgacgcggtatcccagcgactggatctggatgtggcgcttgacctgctgacatcaggaaaaatcgcttacgggaagcaccatttttccatcatggtgtattccccgtcgctggaaaatctggttgcggatacgaacgaaatcagtaacgcgctgaacaacatcgggataacgcctgttccggctgagatatcgctttcagcggcgtatatggcacaactgccaggcaactttactctgcggcctcgcaaaggggcgctgagcagccagaactttgtggagctggccgcgctgcataatttctaccccggcaaacgtaataacgcgccgtggggggatgcgatggcgttaatgcgcaccccgtcaggcgacggatattacctcaatctccacaacacactggcagataaggacgaattcaacgagaagaacccggccagtacctgcatcctcggtacgaacggttcgggtaaaaccatgttgatgacgtttctggaaatcatgcagcagaaatacgggcgcgaagacagcttctccccggatgccagaaccaaacggctgacgaccgtttacctcgataaagaccggggcgcggagatgaatatccgggcgctgggtgaccgttactggcgggttatcagtggtgagcctacagggtggaacccgttctcgctgccggcaaccaaacgcaatatcaatttcatcaagcaactgatgaaaatcctttgtacccgtaacggtgccaccatcactccccgcgatgaacgccgtctgaacgacgcggttaatgccgtcatgagcgatgagccggagtatcgtcgttttggtattacccggctcagggaacagttaccggaaccggccacaaaggaagcccaggaaaatggtctggatatccggttgtcgcagtgggcgcagggcggtgagttcggctgggtgtttgataacgaatctgacacgttcgatatcagccactgcgataacttcggcatcgacggaacggagttcctggacgatgcaagcgtatgtgcgccgatctcgttttacctgctgtaccgcattaccagcctgcttgacgggcgacgtctggtcattttcatggatgaattctggaaatggttacgcgacccggtgtttaaggactttgcttataacaagctgaaaaccatccgtaagctgaacgggatgctggttgtcggcacgcagtccccggcggagatcatcaaagatgatatcgccccggcagtgattgagcagtgcgggacacagattctggcggcgaaccccagcgccgaccgcgcacactatgttgacggtatgaagtttgagccggaagtgttcgacgtggtgaaagggcttgatccgcaagcccgtcagtatgttgtggtgaaaaatcagttcaggcgcggcgataccaaacgttttgccgcccgtgtcacgctcgatctgtcgggtgtcggcagatacaccaaagtcatgagcggcgatgcccccaacctcgaaatattcgaatcgatttaccgggaaggaatgcggcctcatgaatggctcgatacctacctggctaaagcgctctga

SEQ ID NO: 110868 - DNA, 423 bp, Enterobacter aerogenes; identical to SEQ ID NO: 86739

SEQ ID NO: 110869 - DNA, 258 bp, Enterobacter aerogenes
gtgggcttctccccgtctaagtccattccttccgtcaccaaagagctgaacggcaaagagcatgtggttaacagcagtatccagaagaaaggcgatttcaccgtactggtgattcaggaggtgacgccacgcctagtactgcgttccggtaatgccgttgtgggtctggaaaatagcggatttggcaaggtacacgccgccgatggttccaccgtatcccggcaggtggaaagagtggaaaaaccggaatccaattaa

SEQ ID NO: 110870 - DNA, 477 bp, Enterobacter aerogenes
atgaacgaactggtgcacatactaaaaaatactcgccagcatctgatgaccggcgtctcacacatgatccccttcgtcgtttccggggggatcctgctggcggtgtccgtcatgttatatggcaaaggcgcggtgcccgatgccgccaccgaccctaatctgaagaagctctttgatatcggcgtcgccgggctgacgctaatggtgccctttcttgccgcctacatcggctactccatttctgaccgcgccgcgctggccccctgcgccattggcgcctgggtcggcaacggcttcggcgccggtttcttcggcgcgctgatagccggaatgattggcggtctggtggtctattacctgaaaaaaatccccgtacataaggttctgcgttcggtgatgccgattttcatcattcccatcgtcggcacctttatcaccgccgggatcatgatgtgggggcttggcgagccgcgctga

SEQ ID NO: 110871 - DNA, 444 bp, Enterobacter aerogenes
atggcgaccaaaaacaaaacgggccgcccttctgactatttaccagaggtggcagccgatatatgcgcgaagctagccgaaggtgaaagcctccgcactgtatgctcccgcccaggcatgcctggcaaggcaacagtatttcgttggctaaaagaacatgaagagtttcgagaccaatacgcaaaggccactgacacgagagcagactccatttttgaggaaatgctggagcttgcagatgacgtaaaagaggacggcgcggcggttgctaaggctcgccttcagatagacacccgaaagtgggtgctttctcgcatggcaccgaaaaaatatggagacaaagtcgtgaatgagcttgttggcaaggatggtggaccaatccagcaatcacactccgtagccgtagacgaaaaggcgcttaacagcatactgagcaaactatga

SEQ ID NO: 110872 - DNA, 348 bp, Enterobacter aerogenes
atgaggtggcatgcttacattattgttgcggtcgctgcggctctggtgtgcgtcattgtttggcgtgctgggtggtcgtctcacgctgaccacgttaacgccatggcagccgctaagcagaagaagtccgaggcggaaataaggccggtggaagaaaaggccgcagcctctacagctcaggctcaggtcgtctacaaaaccattacccgcgacgtggtgaaatatgtccagtctccgaatcgcactgtgtgccagtttgatgatgatgctgtgcagctgcgccagcgtgcaatcgacgctgccaacaccatccccggatttgatgcagcccccgtgcaaggcaagtga

SEQ ID NO: 110873 - DNA, 318 bp, Enterobacter aerogenes
atggctaaacgtatgcaagacaaagagagtatcgctggggtgtcctggttgattctgctcgtcatcgcctgttggggcggattggtcaggtatctgattgacgtgaagcagagcaaggctacatggagttggataaatgccatggcacagattgttgtatcaggattcactggtgtaattagcgggcttattggtattgagagtggtcttagtctctacatgatacttgcgacatctggaatcagcggggctatgggttctgttgcgctgacgtatttctgggagcgcctgacggggatgaagaatgcaagtcagtga

SEQ ID NO: 110874 - DNA, 618 bp, Enterobacter aerogenes
atgagtcggttaactccagttttcggtatggttaacttcacagatgatgctcatttccggcgagtctggaagcattccaagaaaaccattaaccctcgccagagagcatgggttcactacatgctgcaggtatggggaaaggtcaacgccggtgatgactctcctggtggtgcaatcaacgttattggtcgcctgatgattcgcagtcagtggagtgatgacaaggccaaacagattgagtcagtcgtcatgcgcctgtatgaagaagatggactgcgtggagatgccctctatcagaaagctcgcgaacttgtcatccctcaatcatcgttcagcaacatcatcgccctcgccaaagaatccgatgatgctgcttttgttgagcgggttatggttaaaacctttcacagggagagcccggttcgtgatgtagccattagacgatattgctcatgcaactgcacgcaagacattgctcgccaaatatcgcatgcaacaggaatggatatccagtcatgtaggcgtagggttgtatggtgtgagaatgtactcgactcagaaatcttttatgcaatgaagcgagagatagagaaggaggttccacaaattgcagcttag

SEQ ID NO: 110875 - DNA, 462 bp, Enterobacter aerogenes
atggctctcaagagggataagtttgatgacgttttctcccaacttgtcagggagcgaacaaactgggagtgtgattattgcggtcgaacattccaccacgaacacgccaaattgcactgctcacacttcaaatcacgccgacacaaagcaacccgataccatccctataatgcattcgctcactgcataggctgccatcgcaagctcgaagaagacccctacgaattcaccgcacatgcggagattgtctacggggagatgacaattgagcgcgtagcgcgtctggcatgcgttcctgtgcgtttaaagccatggcagatggatgagctataccagcgcatgaaaagcgaactgaagcgattacgtgagcttagatctggaggtgagatgggtcgcatcgagttcacgctacccgaatggtatcaggaggggattgtagttcatatgggggaggcggcatga

SEQ ID NO: 110876 - DNA, 189 bp, Enterobacter aerogenes
atgcttagctctcatgaattccaatcctatgagcagcagagcatacgtcgaacgttgtgcgctggctgcacgaaagagctatcagatggtgaggttcattgctgtgaagaatgtgcatcactggctatagcgtatcgcgaccctaacggatttatgacggaggaagataatggctctcaagagggataa

SEQ ID NO: 110877 - DNA, 399 bp, Enterobacter aerogenes
atgctgttaatccaaactggatttggactgagcataaagaaaggccatatgtttggtcagaaagagtccagcagaaaaatgattgccataaaactgccatttatctgcatttactggctaaacaaacacgcaactgcttattggtacgaatgtgccagagcggcattcaatgaccccggctggttcgtggaaaatcatcacgcagtacgacaagcaaagcgtagagcaaccattacctatatgaaagcttaccggcaagcatgggaagagcatcgggcgagataccagaaggatatggagaagcttgaagatgaaaatatgcgattgaagagaaaactcgccgaggcaatgagagatatcgaagcgctttccagaattgtagggagtaaagatgcttag

SEQ ID NO: 110878 - DNA, 582 bp, Enterobacter aerogenes
atgaaattcttaccagttgttggttgggaagatatttatcaggttaatgagtgcggagatgtcattagtctgccaagagtgattttgaggagggatggaactaagcagcgctttaacggtggaccgctaaaacaatttcttaatactaatggatattgcgttgttaggctgagtgatgcttcaaatgggatgagggaaattgcaagggtgcatagactagttgcagaggcatttctaccgaatccttatggtaagcctgaggtaaatcatatagacggaaataaggccaacccacacctaagaaatcttgaatgggtaactccacaggagaatagaaagcatgcgtgggatacaggactgagaaacaggtcgcatctgccggcatataaaggggaaatgcaggccaactcaaagctaaacaaccaaagcgtaagtgaaataagggtgctaagggggttgggcgcctcttttgggtcgctagccaaaatgtttaacgtgtccaaaagaacaattaggagggtggttagtggtgagtcgtggtctcacgtatcgctgccagccgccccgcaggaggtgaaatga

SEQ ID NO: 110879 - DNA, 738 bp, Enterobacter aerogenes
atgaccaaatcaaccaaagggcccctgttcgcagaggttcacaacgtgccagatgattaccatttcacagaagaggaactcgatcgcatcatcgcaggcgatatgtttacgccgcgacagggtgcgattatggctcgtgagctacaggaacgccgcaaggccgcaatggacagcgagccggtggcgtacattattcaggacaggtatgaaagagagggaggcgtagaggggcatcttagccgcagccatgtatcaaaatatgttagccaagaagatatcaatgagcatgagataatctgtacacctctattcaaggcgccctcattgacacattcaatccctgatgagtggacatttcaaaacacacagcgatacagggaagatacaggtagacaagatgcatggcctgcaatgtggggctggaacgcctaccgcgcagccatgctccaggctggcaactctccggcgcaatcagattgctacccggcgcaaaaccacgtttctccggcgcaaaacggaggttatccggcgcaaaaccaaggatggattccggtaagcgagcggatgccggaggatggtcagcacataatcatattttgcgatggtgcattcgttctatttgcccaatgccgcgatggcgagttttttgacattgtccgtgacaaggaagagttttttgaaactaccagtcgatgcgtcacccactggatgccgctgccaaatccgcctaaggagtaa

SEQ ID NO: 110880 - DNA, 369 bp, Enterobacter aerogenes
atgactgatatcaacagactgataaccagcctcaagcgtcgcgctgcccacgcaaaagagtttggcgacgatattacgtttgtaaagcttaaagacattgatgcgctggtagaggcgctggagaaggcgcagcagcggaacggcgagctggagaattacgcggaggctgaggcagtcggggcagacaaagctgcggaagatagcgtgtattggatgaagcgctgtaaagcgctggagtcccgcaccgtaatcgtgaagctgccgaaagagcgcagcgccaccgaatttatgttcccggtgcctgtttactccgttcaggagttgaccgcctcgctaaccgcgcagggcatcaagtgggaggctgagtga

SEQ ID NO: 110881 - DNA, 201 bp, Enterobacter aerogenes
atgacaagcaaaaagaagattgcagataagaaattccaggaagctatgacagccgttcataacgcaggagaagatagggttaattactgccttagctttattcgcggctacctggacagcattggaaaaactgaaatgcttcacgagtgggatgatgcttgcatgcgcatcaaattatcagcaggggagcaacttcactga

SEQ ID NO: 110882 - DNA, 801 bp, Enterobacter aerogenes
atggcaaaaaaaccctcaccagaccaggtaaaaaaggttcgatctggcattacaaagaaaatacgctttgaggttttcaagcgagacggcttcaagtgccaatactgtggaaactcggctcctgatgtgattcttcatgttgaccatatcaaccctgtcagcaagggaggcgataatgacatgatgaatcttgtcacctcatgcgacagctgcaatggcggaaagagtgataagttgctaaacgaccactcagtgatggagaagcaaagacagcaacttcaagagctgaacaccaagcgcgaacagcttgagatgatgatccagtggcgagatggacttaaaagtctgaaagatgatgttgtcgatatcgtcacgaccaaaattgaagattgtattacgccattcaccgtcaatgacaatgggcgaaaagcaataaagagatggcttcgaatatataaggtcgaagaaatacttgatgctatcgaacttgcagctgacaaaaaacttacccaagaaataacccatgagcttactggcgagttctttgaatacatacctcgtatagccgcgacaaaaagaaagcctccggaagagcaacggattctatacatcagaggaatccttaaaaaccgcatatacatcaaccaaaaccatgtgatgagttatctcaaagcatggatctcatacgatttagatctcgatgagcttaccgagtttgcgaaaactgtacctaactggacaacattcaaagagtgggtatctgaacgcattcgtgaagctcaagaagaaatcccgtactaa

SEQ ID NO: 110883 - DNA, 324 bp, Enterobacter aerogenes
atggaaaactcaattaaccgcaacaaggtcaatgcccggcgcattgaatcctggttgctcaaccgaatcgccatgaaaggtggaaataacgtagccaaagcaatcggagttgataaagcgcagatcacccgctggaaggaaagttggttgccgaagatggcaatgctcttagctgttctggagtggggtgttgtcgatgacgatatcgcccgggtatcaaagcaggttgctctgtatctggaagagaacattttgacgaacgtcagaaaagcaaaacgcccggcggcaaccgagcgtcaagaccaaattactttggatttttaa

SEQ ID NO: 110884 - DNA, 303 bp, Enterobacter aerogenes
atggacaggctatctgaatggcttaacagcggagaatacctccctcgatttatgcgggactttcacgatcaaaaagatatttttaaaactatgcataacaccattcataacgctgatgataatggaaatccaagggatggtcacatttacgtagtagatacttttctttggtatatggctcgttgcggatacaccctacaaaggtctcgaaaagacgtgccattcaaagagcttcaggaagatatagaccgatataaagatgaggtaaagaatacattttcatctattgtttcagttaagtaa

SEQ ID NO: 110885 - DNA, 396 bp, Enterobacter aerogenes
atgggagtgaatatcaccgcactggtgcagcgtatgaaagtggcagcaaagaatggatgttgtcacaccatcttaccggatgattgtctggagctggtagaggcgctggagaaggcacagaccatcaacgcagcagctgagaagttagtccgttgcaaaggtcgttatcacagcgagcagaactatcgcgcactggcggcgctgtttggcgtgacgactacagacctgccgccgctggatggagagtcccgcaccgtcactgtgaagctgccgtccctcccatgcctgggtgctaaaacaatatggtaccaaggctttgctgcaggagcagaagggatgcgcaatgactgcgcacatgccattaccgctgctggaatcaagtgggaggaggcatga

SEQ ID NO: 110886 - DNA, 138 bp, Enterobacter aerogenes
atggcgaagaaccgccagtcagtagtggaacaaaaatccttggtggaaagttatcttctgttcagtggagtgattaccgagacgatctcctttctccaaatcagagagatgtcgtcatcgaagctctcaatgaattaa

SEQ ID NO: 110887 - DNA, 285 bp, Enterobacter aerogenes
atgcttacacctgtaccaatcgtcactctgcaacaattcgtagagtttgaatgggtttctgagcgcaccgcttactactggacaaccggcgacaacccttgtgtagctggagaggtgatcgagcgtgttatgcttgagcgggtcgaaatgattgcgcgtctgctgactgagggggctcgtagggaaagagatagagaaattgctttatcattgatagttgacttggttgaatataaagatattgcaaactctaggaaaagaagaaatatgaagactgaagagtaa

SEQ ID NO: 110888 - DNA, 999 bp, Enterobacter aerogenes
atggctttagctcattgcatttgccctaattttatttctgcacacattggaaatacaagtatatttaatggaattttcttggggaaattcctgcaatctcaagaccaaatcatcctagatgatgacggcgagctaatgtgtaaatatgtcgaaagtattcaagacgatcagtctaaatatgaggtttttaaagtatggaggatgttgcttgaggcttcaaacaatggaaagctcttgttaacacatgttcaaccaactcatgagacaactcaattaatttattcattaattactaaatcagccactacattctcaaaaaatataatcgccaataataataatgattatgctgagtatgtagaggaactgaatcgacagcgtattagcttacttaacttacaaaatctagatacaacggcggtacaaatgatatcccaaagagacgttaattatgatctttttgacaacgacctaggctggattcttcaaaggttaataagacgctattctcgtacaaatactgaagatgaaagtaatgacttcataagagacatgctactttccaagcactacgaagtaagagatcaaacaagggaaggagcatcgtcatctggctcacaagctggtgaattagatcttttaattgaaaataaaaattcactattcagtattatagaagcaatgaggttagatagtgtggatactaattatattaacactcactataaaaaattgcttctgaattataacccactaatggttaaaataacatttctagtcagctattacgaaggaactagattcgatctctggtgggaaagatacacacaatatatagactcattagaaaaccctcatcttgaattagatgattcataccacataaataatatagagcatgttgaatccccctacttaggattaaagaaaatcattcagcacttttcatacggcaatgaacattttgcatgcatccattatggtgtaaaatgcaggtaa

SEQ ID NO: 110889 - DNA, 1677 bp, Enterobacter aerogenes
atgcttaaaagcttttcaggcaaaaattataaagcatttagtgagtttgaacttacacttaaaccattaacaattctattgggagcgaatagctgcggcaaaagcgccttaattaattcgttcttaatgctatctcagacacttgatgcaacatcattctccgagtcggcactcagactaaatgggaataaggtaggaatgggtgaggcattaaatttagtcaaagataaaaaagcagatacagttctatccttcacttttaatttcgatgaagacaaagagttaaaaaaagaactagatggattaaagcgtgattctaccgaggcacactttatgatagtgcgatatatgacgcatttatttagacaaaataaagatgtgtattcaaaattacaaaaatcacttgatgaaattgaaagcatttatgttagcaacgatagatttaacactaatcaacttggttcaatcgctgataagttctgcactttactgaaagcttatagaaatataaaaagtgaacttaagcgtaatagatatgcggcagaccccatccaagagttcatggacaacacatctctaaagaaaattagggattgcttaacggaattactcccaatttctgtaaataaatatgcagcaagtcgcattgactatgaatttaaatataatagcacctcgaaaaatttagtagtcaaaaaaataaccctcacaaacaagttcaacgaaacaatatcaaacatagcgattgatggtagaaataaaatatcaatcacatctgatatcatcgatgacactattttaagaaactcaaaaaaagacatcatatcattattaaaccctgactcattttatatatttaacattaattactcacgatatacaccttttggttttttcaacgactcatcgaatccagtagcttcttttttctgtcgaatgattcatgtatcattgaaaaaattaggtgatgaattctcgggtacaaacataaaccatgtcagcccgttaagagcatttccacaaagatattatttgttagacaaatcaatacatcacgcacaattgaatgctcttgatggaacagagcttgctgaagtcctaaaaaagaatattcaaataagagatgaaattaacaaattacttgcagagttcagcattgcaatagatgtagaaaaagtaaatgatatcatccataaaatcacagtaaatcaagatgctgtgaatctggagctaacagatgttggctttggtatatcacaagtccttccaatattggtgcaagcatatttatcaccaaaaaaatccataactattattgaacaacctgaaattcatttacatccaaaaatgcaagcttggttgactgatgcattaataaaaatagctttagaaggaagcaagcgctttttaattgaaacacatagtgatgcccttgttcgtagagtgcgcttaagaatagttgatgaagatagccgattaactgaaaaagatgtggccatttatcatttagaaagaaataaaataaagggattcacttcactgaacatagtccctatatcctctgacggagatattacttggcctaaagattttatggatgtagagattagggatactcttatgattcagaaatttaaaatgcagaaaaacatgaataacaaagaagggattcattaa

SEQ ID NO: 110890 - DNA, 339 bp, Enterobacter aerogenes
atgtatgtgactcacccggtgcagagcgcgatcgatgttgaatcgctgcgtgaggcgatgcgtaactcgaaggggctcggcaactttaaaaacctgtttttctacgctccatgcggaaaaccgaacagcaacaaaatcttgtcactgagcgaagtcgccacaaaggatgatttttttaacatcaagaaagccagcgtcgcagacctgatggacgcgtaccgttccaactcatgggtggcaagcccgagaatatcggttcactcggtgacgttgagaaggtggcgaaagtctttgtgcgtaatgaaatgtcgctactacgggacagattcaggaaggtaa

SEQ ID NO: 110891 - DNA, 378 bp, Enterobacter aerogenes
gtgctcgcaagcacctacattccgcacccgctattatcaagtcaggatttcagccgcttcgcgctcgactatctggtttttggtaacgcttttcttgagcagctccacagcttcaccggccagttaatcaggttgctgaaaccactggctaaatacacccggcgcggtgtcgccgattcaattttctggtttatggaaaacttcactcagactcacgagttcacccctgatacggtttttcacctgctggagcctgacatcaatcaggagatttacggcctgccggaatatctcagcgcgcttaattctgcctggctgaatgaatctgcgacgctgttccaccgcacggcgcacacgcaggttacatcatgtatgtga

SEQ ID NO: 110892 - DNA, 174 bp, Enterobacter aerogenes
atgaacgatattaaggccagcccggcgtacgtcgggcgttttcagcgagtctgtttgtacattgagaaccatcttgatgagccgctaacgctggaggcgctgagcgcgattgcgtatagctcgccttaccattttcaccggcaatttagcgcgtataccggcgttccgctgtaa

SEQ ID NO: 110893 - DNA, 2184 bp, Enterobacter aerogenes
atgagcgcaatatccctgatccagccggatcgtgacctattttcctggccgcaatactgggctgcctgttttggccctgcgccatttttaccgatgtcgcgtgaagagatggatcaacttggctgggatagctgcgacattattctggtgaccggcgacgcctacgttgaccatccaagtttcggcatggctatctgcggccgtatgctggaagcgcagggattccgcgtagggatcatctcccagccggactggaacagcaaagaagacttcatgcgcctgggtaagccgaatctgttcttcggcgtcactgcgggcaatatggactcaatgatcaaccgctataccgccgaccgtaagctgcgtcatgacgacgcctataccgccggcaacgtcgcgggtaagcgcccggaccgcgcgacgctggtttatacccagcgctgtaaagaggcgtggaaagacgtgccggtgatcctcggcggtattgaagccagcctgcgccgtaccgcgcactacgattattggtccgataccgtacgccgctcagtgctggtggattcgaaagccgatatgctgatgttcggcaatggcgagcgcccgctggtagaagtggcgcatcgtctggcgatgggcgaggtcattagcgatattcgcgatgtgcgtaataccgcgatcatggtaaaagaagcgctgccgggctggagcggcgttgactccacgcgtctggatacgccgggcaaaatcgacccgattccgcatccgtacggtgaagacctaccgtgcgccgataacaaacccgtgcccccgaaaaaagccgaggccaaagccgttgtcgtgcagccgccgcggccaaaaccgtgggaaaaaacctacgtgttgctgccatccttcgagaaggtcaaaggcgacaaagtgctctatgcccacgcgtcgcgcattctgcaccatgaaaccaaccccggctgcgcccgtgcgctaatgcaaaagcacggcgagcgttatatctgggttaacccgccggcgatcccgctgtcgactgaagagatggacagcgtctttgcgttaccgtacaagcgtgtgccgcatccttcttatggcgatgcgcgtattccggcctacgagatgattcgcttctccattaacattatgcgtggctgtttcggcggctgttctttctgctcgatcaccgaacacgaagggcgcatcatccagagccgctccgaagattcgatcattaatgaaatcgaagcgattcgcgacacggtccccggctttaccggcattatttccgatcttggcggcccaaccgccaatatgtatatgctgcgctgtaaatcgccgcgcgctgagcagacctgccgccgtctctcctgcgtctacccggatatctgcccgcacatggataccaaccatgagccgacgattaatctgtaccgccgcgctcgtgacctgaaaggcattaagaaaatccttatcgcctccggcgtgcgctacgacatcgccgtagaggatccgcgttatatcaaagagctggcgacccaccacgtcggtggctatctgaagatcgcgcctgagcataccgaagaggggccgctgtcgaagatgatgaagccgggcatgggcagctatgaccgctttaaagaattgtttgatacctattcgaagcaggcgggtaaagaacagtacctgatcccgtactttatttccgcccacccagggacgcgcgatgaagatatggtgaacctggcgctgtggctgaagcgtcatcgcttccgtctcgaccaggtacagaatttctacccgtcgccgctggcgaactcaaccaccatgtattacaccggcaagaacccgctgggtaaaatcggctataagagcgaagatgtggtggtgccgaagggcgacaaacagcgccgtctgcataaagcgctgctgcgctatcacgatccggcaaactggccgctgatccgtcaggcgctggaagcgatgggtaaaaagcatctgattggttcacgccgtgactgcctggtgccagcgccgacgctggacgagatgcgtgaagcgcgtcgccagaaccgtcatacccgtccggcgctgacgaagcatacgccggttgcgcatcagcgccagacgccagtcgcctcgggggcgaaaaagcgtatcaagccgaagacggcgtcccgctaa

SEQ ID NO: 110894 - DNA, 918 bp, Enterobacter aerogenes
atgggtgagttttctaaactagtaggggattatggtgaggatatagtctcacattttcttaatatattcggatgggagaaccatgcggcaaacaaatatgttgattgtcacactcgtaaacatgaaaaaaatacacatggtattgatgcattatttgtctataattcaccgttagaatcaaagactatagaaaatgtaatagtgtcatcaaagtattcttcaaatccttattataaagtggcttcaacctttaaaagtcattttgaagatattgctacaactattgagtgttatgcaaaatcctcgctaaaaaaagaaatcaatcagcaggtgatttctgcgggtcgatataatggttgtaaaaaagttgatacgggtgttcttttttatattaacaatgacagtaacccggataaacaagatattattagttctattaagaactcacaaattagcagtgatcttaaatatagaactatacatgttgtggataataaaagagcatcttttttatatgagagcattacttatataaagaataaatacgggtatgataaagttaattttttctaccctccaacatccctaaaccttaccattacgggtaagaggtatttcggaaaagtcttcccagttgaatatatttcttccccaataattccttttgtcattgaaagaggtaatcaagaacaacctattatttgtttagtttcttctgaaccattttccgctgatggcattgagcatttactttcatgtacccgggatttagtagctgatatatctaaaaatcttttattcgtatttagtcattataacaagctaaatgctaaagaggatttggacagattacgtttgtctcttgacagagagataagtattgaaattgattcttacaaagccgattttagagggtaa

SEQ ID NO: 110895 - DNA, 474 bp, Enterobacter aerogenes
atggactctatgattttgccaagcggcgataatttaaaaactctcttgtctcaatcaaagataagtaaaagtgaagtaaagtctgtattaagagggcggggggtcttttgctctagtgacgaaaaaaataatacagttccattattgattaaaactctagtgagtccatcggagtactattttcttcatgatagaattaaaactaaagaacatagcacaaaaattaacatgaggactctgaaatgggactcagaagagtcgttaattgattctataggtgatgatttcaacctgtctgatttgattgatgatcctttttgtaattatgaagtgacaaatgtttctgacttttatgtaaaagataatgatgattctatagctttagacttcaccataaaacgtatagacctaatgaatggttggcatgaagcagaacagtatttttctggtagaattgaattagaaaaaaaatag

SEQ ID NO: 110896 - DNA, 537 bp, Enterobacter aerogenes
ttgaagacccaaggacatattaagaaagactctgagatattaaagattcaatttaatcattttgataatgctaaaagaatacaatttcttgagaatattgcaaaatctcatatccaaaacgagttttattttcaaaaaattatagatgttgatttctacccggatgaaacaaccacttttccagatgatctaaagtggttggagagaaatattgaagaattaaagctaaaaggtactttaggtgagtcaatattcttcagaaataaaagtcttcacccaaatttgaaaatatcaaagcttgtggccagttacacaatgcaagacattgactatgatgcagagtgtaagatctcatatgaatttcctgagtattcaactaagaaatcagaagttgctgagcttgttattgattttaaagcgtttaatggtaaaggtgctcccatttctaaaattaatgaaattaaagccagcattatgaaaactattgaagcgaaaaaagtcaaagcctatgatttatataaggttatctgtaattaa

SEQ ID NO: 110897 - DNA, 1011 bp, Enterobacter aerogenes
atgccaacaaatgaagaaattgcattacctttgagcagacctaaacagattactcttcgtgcctttgagataaaaaatccaaatctatcaaaaacatcaagtaacgctaaaacgtcgttaacctccaggcttgctcaggtaaagttggctaaagaaaggtgcatggttcttaatccagaagaccctaaccaagaaagagatgtactctcttactttaaagaatcaactatatcaaattcagtgttttgtaccatgttaaggataacgtctgataaggatgttcaacacattaccgacacgctatttgagaaagaagttttctcgatggatgatatcgagactgctcatatcgacgcttcggcaatatgtaaaaaccattattatttttcaatgactgatgaatatttagtcactaatttaccattaaataaaaccatcgctcgtcttcaaacttatcttagctggttcactaataatgatttactagaatttacacctttaatttcagctaagggccaaactaagttaagcgatcttaaggcaattattgttagagatcctgaaccattgagtggccaggaagtgagcgtcgtacaagatagtaatgctacaagcgtacctgcaacaactgaagggaaaaaatcaattaaattgacccaaaaagttctagatatcataagaagttccatgtcagatactgaacagcttaacgatattgccctaagccagatgatatctgcggagctgttgattaaatttaaaaaaccacgaaaaatgactgaagatgagtataaaaaagctcttggtgcttacctaaaaccggtcagtgatcttgataacatttctttcaaacgtaaggataacaagaccgaagttaagggtaaggatttacttcttacaaaacgagtcagcattgaaacaacgcagtctggaaagttagtagaacatcaattgctacaggaaatgagcaaatttctggtagaattgagtaatgataagattattggttag

SEQ ID NO: 110898 - DNA, 306 bp, Enterobacter aerogenes
atgacatcaaaaattaaattaatagtgtttacctctattgctttgttgactggttgtaaggaagctgagatcgagggggtatggtacggttcagataaaaatttcaatagtggcattatcatgtcgttattcgacgaggtaaaagaagagcttgccggggaacaaattattatatcaaatttaaaaaccgagggggggtctaacacttttttggtaaccttaggtgaaaaaaaacattctaaagaatgggttgaggaaattcttaaaaaattgagcagcgacgaaaagataataagaccactataa

SEQ ID NO: 110899 - DNA, 1755 bp, Enterobacter aerogenes
atggcggtggaaaaactgattgttgaccatatcgacacctggaccacggcgctgcaaacccgctccaccgccgggcgcggcagctcgggcaagattgacctgtacggcattaagaagctgcgcgagctgattctggagctggcggtgcgcggcaagctggtgccgcaggatccgaacgatgaaccggcgtcggtgctgctggagcgtattgcggcggaaaaagccgagctggtgaagcaggggaaaattaaaaagcagaaaccgctgccggagattagcgaggaagagaaaccatttgagctgccggtggggtgggagtggatacaaattagtgaaattggtcatgattggggacaaaaaacacctgatgaagatttcacttacattgatgtcggctcgataaataaagagtatggcattattgaagagccatctattctttcagcaaaagatgcaccatcccgagcaagaaaaattgttcaaaaaggaaccgtcatatattcaactgttcgcccatatttattgaatatagcgatcattgagagcgtcttctccccagagccgatcgctagcacagcctttgctattattcatccttacaccgcgatgaatgctaatttcatatattattatctacgctctcctgtatttattaattatgttgaaagttgtcagacaggagttgcctatccggcaatcaatgacaagcagttcttttctgggataatcgcagttccgccgtcatccgaacaggtccgcataactaaaaaaatcaaagaactcatgtccctctgcgaccaactggaacagcactccctgaccagtctggacgcccatcaacagctggttgaaaccctgctaaccacgctaaccgacagccagaacgccgatgaactggccgaaaactgggcgcgtatcagcgagcatttcgatacgctgtttaccaccgaagccagcattgatgccttaaaacagaccattctgcaactggcggtgatgggcaaactggtgccgcaggatccgaacgatgaaccggcctctgaactacttaaacgtattgcgcaggaaaaagcgcaactggtgaaaaacgggaaaattaaaaagcaaaaaccattgccaccgattagtgatgaggaaaaaccgtttgaactgcctgaggggtgggagtggtgccgtattgatgacttaacgtttgtttctggcggaatacaaaaacaacccaaaagacgacctgttaagaaccattttccttatttacgggttgctaatgtccaaagaggtaatattaatattgatgagcttgagagattcgaactagaacctcatgagttagcattttggtcgttagaaaaaaatgacattctaattattgaaggtaatggtagtgctgatgaaattggtcgttgtgctatttggttggctccactagaaaaatgtgtttatcaaaatcatttgataagagttcgaggaataatggaaggatatcaagaatttattgcattatatcttaactctccatctggtattaaagaaatgcaacggctcgctgttaccaccagcggcctatataatctcagtgtaggtaagatcagaggtataacaattccattaccacctcttaatcaacaaaatttgattttgtcaaaaataagagaatatatttttatctgtgataatctaaaaatatctatccagactacccaacaaacccagctccacttggccgacgccctcaccgacgccgccatcaattaa

SEQ ID NO: 110900 - DNA, 234 bp, Enterobacter aerogenes
atgatcgaaaaaagcgatcttaatggcaatttaaatctgtttttttcgatgtgttggcggctgtatcatacttttatcgagttattgaccaacaaggtgagagtaaaagtgaaacatctgcaacgatttttcagtagcgatgcttccgggggcattatcctaatctgcgccgccgcgctggcgatgattatggccaatagcagcgtcaccagcggtctgtacatgcttttttag

SEQ ID NO: 110901 - DNA, 777 bp, Enterobacter aerogenes
atgacaaacgatgatggcgcgccggaaaaatatccggccggaaaaaaaccggcaaccgaaagcggcggcgctgcagcagtggatcgtgcgtttgccattcttgccgcattcgacaaggatgcctctcaactgacgctggcagaattagcgcggcgaaccgatttttataaaagtacgattctccgtttgcttaactcccttgaaaaagcaggctttgtgcgtaaatccggagatggtcgttactgcatcgggccggagccgctcaggctctcatcgctgtatcaggcttcattccgcttaagagatgttttgttgccacatcttgagcatctttctgctctcagcggagaaacatcctctttctacatcctggataatgactggcgggttattctttatcgcgtagaaccacggcgggcggtacgtgttgcaatacgagaaggcgatcgcttctccgttaaatatggcgcgtccgggaaaatactgagtgcgtttacatatactgatgaccctatttttgctgagatacggcaagaattatgggcggaatcttatggtgagcgcgatcccgaaaccgcttcggtttctgtgccggttttcggcgtgggggggattttacagggcgcattaacgctctccgggccaaaagaaaggttcaggccacaggacatcaggaacattctgggcactctttttcagagcgctatccactcaactaaagaactcggcggcgattattcattgttggtagaggcccggcagaagcatattgaatga

SEQ ID NO: 110902 - DNA, 1203 bp, Enterobacter aerogenes
atgaccactcagaaccagaaaaaactgccgctggaaggcgtccgcgtcgttgaatttgtccacatggtgatggggccgacctgcggtctgctgctggccgaccttggcgcagacgtgattaaaattgaaccggtccccaatggagataacacccgacgcctgacgggatcgggtgcgggttactggatgacctataaccggaacaagaaaagtctggccgtcgatattaaatcggcagaaggcctggaagcggttaaaaaactgatagccacggccgatgtgtttaccgaaaatttccgcccaggcgccatggataaaatgggtttcggctacgaggccgtaaaagccattaagcccgacattatctacagctcgatgaaaggctttttaccgggtccgtatgagaaccgcacggcgctggatgaagtggtgcagatgatgaccggccttgcatatatgacagggccggaggggcgtccgctacgggcgggcgcctcagtaaatgatgtcatgggcggaatgttcagcgcaataacggtgctggctgctctgctacagcgcggccagaacggacaggggcaattcgtgcagacgggactctatgagaactcagccttcctggtggcccagcacatgatgcagaaagcggtaacgggtaaatcagcggctccgatgcccagccggctctctgcctgggcagtctatgacgtatttaccacccgcgaaaatgagcaggtattcattggcgtggtgagtgatacgcaatggaaagtgttctgtgaagcctttggtatgcatgatttcgcggtggatgaaagcctggccacgaataatcagcgcgttcaggcccgcgagcgaattatgccggttatcagagcgcacctgctgacgatgtctaaacatgacgttatggcgttatgcgagcggtttggcctgccgttttctccaattcgtcgcccggacgatctgtttgatgatatacatcttaacgagtccggcggtatgaccggggttacgctgccagacggcactgaggtccgtatccctatgctgccttttgagatggacggacagcgtttcggaacccgtattaacgtacctgatgttggctgcgactctgctaccattcttgcagagctgggttactcatcagatgcgatagcgcgtctggaacaaggcggcatcatttccttcgcgccttaa

SEQ ID NO: 110903 - DNA, 936 bp, Enterobacter aerogenes
atgagcgagaacattatcgatattcttatcagtgaagtaggtccgcgagacgggctacagagcgtttctgcagttatgccgaccgctctgaaaaagcagtggattagtgatttagcctcagcaggtttaagagaaattgaggtggggtcatttgtttcacagaaactgctgccccagatggccgatacgggggagatcgtaaagtatgcgcggacgctaccgaacctgtttgttaccgcgctggtgccaaatctacgcggggcagtgtccgcgttcgaatcgggagtacagaagatcaccattccggtttcagtcagcgaaccccattcgctggcaaacgtgaataaaacccatgaccaggtttttgccgaggtggccaaaattgtctcatttcgcaatgagaaccaccccgaggttgagatcgaagctggtctatcaacggtattcggctgcactattcagggcgtcgttcacgaaaacaacgttattcgcattgccagcattatggctgagctgggcgttgatgaggttggattggctgacacggtaggttacggtacgccgcttcaggtacagcgcctgttccgcaggctgaaagctgaagtcggtgagctggctggcagcgctcattttcacaatacccgtggacagggactggcgaacgttcttgcggcgcttgaagctggtgttacaacatttgacgcttcactcggcggtattggcggctgcccgtacgcgcccggcgcatcgggcaatattgttacggaagatcttgtctatctgctcgaatcaatgggattacgtaccggtgtcgatatagacaggctgctctctgcgcgcgaaacgctcaaacgcggattgccggcagagccgctctacggctttattcccgatgccggggttggcaaaaattttcactatgcaggtaggaaataa

SEQ ID NO: 110904 - DNA, 1278 bp, Enterobacter aerogenes
atgacaatactaagctacctcatgataggcgtgttcatgttcctgatcatgactcgcaagctgtcagccctgctcgcgttaatcctcgtgccgctgttttttgctttagtggctggtttccacgctgaacttggaaaaatgatgatggacggcgtgaagttgcttgctccgacaggtgtcatgttgacctttgccattttgtatttctgcgtcatgactgatgccggaatgttcgatccttttatccgtctcattgttcgtatcgtaaaaggcgatccgcttaaggttatggtgggcactgcgattttggggattagcgtagcgttggacggcgatggcgccacaacttacctgatctgtacagccgctctccttccgctgtatcgtcggctcggaattaaacttcagtacatggcaaccgtgttattgctttctatcggcgtgatgaacatgctgccctggggaggcccgacggcgcgggccgccagcgccatgaaagtagacgtcagcgaactctttatgcttctgctgccggttatgctgtgcggcattgcctgggtggtactggttgccgttttttttggactgcgcgaacggcgccgacttggcgtcatcgaaattgacctgagtgaaaatagcgggaagcgtacttcagtaaccagttaccgttatctgttcaactccgctctgacagtggctttgttagtgatgttaattctgggcattctgcctatggcgacgcttttcatgattgctttcgcactggcgatgctggtgaacttccctgacatgaaacgccagaaggagcttcttgccaaacacgcggagaacgtgcttgccattgtggctcttatttttgcagcaggtgtttttaccggcattctgtcaggtacaggcatggtagatgccatgtccaatagtcttgtcgagtcgctaccggcctccgcaggcccctggcttggcgttatcacggcccttatcagcatgccatttaccttcttcatgacaaatgatgctttctactttggcgtattgcctattcttgcccagacagcggcaaactatgggatctctcccatgcaaatggccgttgcttcgttgattggacagcccgtacatctgctcagtccactcgtagcgtcaacttatcttctggtcggcattctcgaccttgattacgggttgaatcagcgcgccagcctgaagtgggcaataggaaccgttatctgcatgctggcaggcgcgatcctgctcggcaccttgcccttacacagctaa

SEQ ID NO: 110905 - DNA, 129 bp, Enterobacter aerogenes
atggacataaccccatcaatgcctcgcattgtaaaaagcatcaccaccgtaaaaaaacaatcctcaaaccttactaatctgataccagagacactcagaactcactgtgtcagtgttcgtctgaattga

SEQ ID NO: 110906 - DNA, 1074 bp, Enterobacter aerogenes
atgtgtgaaagttctatgggaaataatgaatccgaacaacaaaatgctttacaagatcaaattgcggaaattcttgtagactatgaactttccccatccgaaggcatgaactcagcacatgtaggtcgttggattgcgcaatttgaggagagagatcaaatttttattcttgagcaaacgctggagttacttcgaaattcatatatcagcaaaaaagattatgtagaaatgattgctctcatccttgggaatcagagaaatagaccgatattttcccaatcagctttccttgatattcaagaagctaatcgtgggactagtcagagagatttgctggagctgttagaaacccaagcagaggagttagaaggggtagatatagttacattatcaagatcctctgccaatcagagagttgcagaattcaatagttttatttatcttgacgatgtttgtttttctggcaccaaagccttgaatgatattacttggtttgtagaaaattttaaccttagtaatgtgactattcgcgtgtgtttcttgggaacacataaatatgcaacctatatgctagagacgactctcgcacgaagatttgaagggcgaaatatcacacttgttatcaaagaaaatggatttatcaaaacacgcgaaaatcgccttaggtattcttcgtgttctgaagttttctggttacgtagaaatggtattgacctaccagattggattcaaaatccggagatctatacatcgcgcgaaggcactgaaaggacccattttagcccaaacaccatcttccgcaacatggctgatcgctatcgttttgaatatgcactgactaaggctggtttttacatactacagcaaagtcaaaatcccgcaccgattctaaaacctctcggcttttcaacattccctggactagggtttggcggaacaatttttacctatcgaaattgtccaaataatactccactagctttttggtggggaagatatgagcgagatgggattccaaacagggcactggattgctggtatccattgatgcgtagaatcgggtataatcagtaa

SEQ ID NO: 110907 - DNA, 612 bp, Enterobacter aerogenes
atgagctacagaatttatccaaaaaacgaaactatcagtttcaggaaaacgacggaaaaatggggcgggctatctaacatggcgagaggatttccgctgtatgttaacgatattcctatccagtcgagtgaaatcctctatcaggcctgccgctaccccgactatccggaaatacaaaaggagataatcaccctaagtaacccctttgaggcgaagcaagtagctaggtactatgagccgaaaacacgtgatggttgggaaaaaaatcgagtgtccataatgaaatggtgcgtccggattaaactttgccaaaattgggaggttttttctcaactacttaattctactggtagtattaatattgttgaacattctgaaaaagaccttttctggggggctcgccgtgaatcagatggcagtttttatgggatgaatgtacttggtagaattctcatggaaactagagaaatagccagagttcgtggggaagaaggcttcaaatttattcccgcactacaattggataaattcctactcttggatgaaccaatcaaagggacttcctcacttaaactgggaccatctactgggaagacaatggaattgttttag

SEQ ID NO: 110908 - DNA, 129 bp, Enterobacter aerogenes
atggggaaattaaacaatttactaagcgatttaataataaaagttggagcaaggagacttggagttatgataaatttagttctggttatgatttttaatgtatatttcatcttaatagcaatccattaa

SEQ ID NO: 110909 - DNA, 2091 bp, Enterobacter aerogenes
atgcctcagcaacaagatgcacagccattccagttaaaatatagtcataacatcattgaacatcttggattaaaactctatcagaataggcctacaaatgttttggctgaacttgtatctaactcttgggatgctgattcagagaacgtatggattgatattgatgctaacaatcttgctgtttacgatgatggcacgggcatggacagggaaacccttgtaaatcactaccttattataggaaagagaaaaagaacctcaattaatattgaagattgctctcctaaaaatagaaaatatatggggcgaaaaggaattggaaagttagctccatttggaattgccaagagattgtctgtcgttacggtcagcgaaattgataatacttgttgctggttagaagttgacttaacagaattattgaaagagtcgaacgaaaatgaactgacagaattcagctataaacctgaagtaatttttgattcaactccaatttcagaaataacttttgaaaaagataagcatggatacgttaagaaattcgtcgaaaaaatagaatataaaagtggcacactaataattatggatgatctttcgttaaaaagaaagatccctaccaagcaccttatggaatccttaggtcaacgatttactgtaactttattgagagatgattttaatgtcatcgttaatgatgaattggtaacagaaaaacaatcattgccagaattttcatatcgagaaccagccacagggtttgttgatgaaacaatcaacattaatggtatagatcgaaaggtaagacattgggttggctttgtacgagaagctgaatggcctcaagatcaagctggtgtgggtgtttatgcacatggcaaaatcgcccaagatcgaccttttgtatttggcttgaaagggagagaaatttctactcgctatatgtatggagtaattgaagctgattggctggatgaattagacgaggatattgtatccacagaccgtacaagcattaactggaataacgattatacagaggaaatgtataattggggtaagaacctggtatcaaaatggatcgcaaattacaggaaatttcaaaaagaagaaaattcaggaaaggtattgcgcaaaattaaagaattgcctgatataccaaaaatcacagaagaggaaagagaagccattaaagatatggtttgtaatatgagtcctaaaatttataaagatgaacagttacaaaatgaagttatcacacaattaacttcagcatggactcatagaccaacacgaaacattattaaatctctctgggacagaatcgaagtttcggaaggggatgaacaaaatttcattgaaactttgaatgatataaccaagtatcttgttcctgagtctctttcattatcagtaagtgtttcacagcgtatttatgcattaacaaaattgcatgaacttagcatagttggcacagaaacccaattacaggcattacttgaaagcttcccatggatattaggctcagataaagggaaagtatatgccaatactgctttaaaagaattggctcgtaaggcaatattagatggcgtattgcccggtcatgcggatacgagtaaacaactggctgattcagctaatgcaggaacaaggcccgactttgcattcttttcggatgcaaataaatctacaatcattgtcgttgaacttaaaagccctcaggttccactacagtatgagcatgttttgcaacttttaacctattattattggatgaaatctcattatcccacttcaaaaataacaggttatttagtgggcaaaaatgccggttcaggaattgagtgtgacgatccgaatatacatgtaaaaacatgggatcagatctgcttacattcccgaaaagactatttagaactattagcttcgatgttaaatggtatatcagaacattatgatgactcgcgagtttatgatgtaatagagttgggaggcgaagcgacgaaagaacttctgaaaaaaatggcagatgtaaacaccccactaagtgagttctttgaaaacattgataaaaagttgagattgaaatag

SEQ ID NO: 110910 - DNA, 1071 bp, Enterobacter aerogenes
gtgtttagtgcaatagacctcttctgcggtggcgggggactaacagttggattgaagcaagctggctataatgtcttggctgctgttgagcttgattctgtagcggcagagacttacaaagcaaacaatcataatacaactttgatagaaagagacatcagacatgtttctggtgcagagattttaaagtcaataggtctcaaaaagggagaactaacccttttggctggttgtcctccttgccaaagtttttcaacgttgacaagaaattactctagtgaagatagtcgtaattcattgataaaagaggttttacgtttgatctctgatatagagcctcaaatgattatgattgaaaatgtcccaggaatgatgggtaggggaaagccgttcttaaaagaattcatggacggtatagaggctcaaggttacatagcaaattttggtgttctgcaagttgccgattatggtgtaccacaggataggaaaagatttgtcttactggcaggaaaagggtttgaaataaaaatacctaaggctactcatagcttaaacgataatgaaaatttaaaaaagtggataactgtaaaggaagctttagctggaatggttaaaccaatatccttagatgaagcaaataagaaaggagggccaaaagcttttaactggcatgttatccgaaaacaaagtgatatcaatattgaaaggctaaaatatctaaagcccggccgtccacgtttcgatttacctgatcatttaagaccaaactgtcataaaggtgataattcatcttttagcaatgtatatggacgaatgagttgggataaagtatccccgactattacagggggatgtaccgtactgagtaaaggtagatttgggcatccggaagaaaacagaacactatctgtaagagaagcggctcgtttacagacatttccagacaactttatttttaatactaattttatcgatagagtatgtcaaataattggaaatgctttaccatgtaagtttgcctaccatatgagtaaggcttgcttagactcattaaaaatgcttaaagaataa

SEQ ID NO: 110911 - DNA, 252 bp, Enterobacter aerogenes
atggatgaacttgatataaatctcatggatgcaattctgaagaaagaggtcgaggttcaaatagatgaaatgcaatcctttggtacaagtattgtttttgttgattctgactctaattacaaattgtttgtcaaagagaaggatagtcaaaaatgggcagcacgaacaccatctataaataatatttcaattgacgacattctaaattttatcagtaatgaaaaaattacagatctgaatgctgtattttaa

SEQ ID NO: 110912 - DNA, 546 bp, Enterobacter aerogenes
atgtcatatagtgatagtgttagactcaacgaaactaaagtagtagttagtaaaggtgcattatataatattcgaccctacgaaatcgaacgagctggatttaagataggtaagaaacttaataaattacctgcaaatgtaaaaaatacacacatctatcactttgatagtctggaacgtatatcgttaatagaaatatttggacagacatcaaatataattaacaaagagttttgtatctatgaaggtgataacttagaaaggatttattttaccagtgccggtatgctgcgaaacatctctttgtcagtatacaatgatggattgattgaaaaagatttcaattgggggatgtatgggtgcagtgtatctgattatgtttatgaagactctattcttaagaaaatatatgttcagcaaaaagaacatgcagaatcatcttttacagaatttgaagttgtattttcgtataaaaatgcgatcatcgataccattaaaaatgtatttcctaatggttatgaagaacgacgttatcctgcacgctga

SEQ ID NO: 110913 - DNA, 123 bp, Enterobacter aerogenes; identical to SEQ ID NO: 80537

SEQ ID NO: 110914 - DNA, 261 bp, Enterobacter aerogenes
atgaaaaataaacgattagcttcaaaagcgatcatgtcggttttagcagaaatggatcgccaggatgaaaaatggggtgctaaccgtgatttggatccctttttatgggctgcgattcttggtgaggaagtaggtgaatttaaccagtcaattttacatgatttctacggtggtaagcatgccggcacagcccgagaggagatggtacaaatagctgctgtagccatgcaaattattgaattttatgatagaaaaagctga

SEQ ID NO: 110915 - DNA, 1083 bp, Enterobacter aerogenes
atgattgttactcaggactttaacccagactgggtctccccgcccggagacacgatcatcgatctgatggatgaacacggtttgtctgatgagcagctaagcagaaaaatgggacttcctctgcctaaaggtcaaaagctgcttaagggtgaaatttgccttgatgaagttattgccaaaaaattacaggatatttttaacgtctccatttccttctggttaaaaagggaaatggcttatcggtcccaagtagcttacatcaataatgttaatgatgaatggttagcctctcttcccgttaaagatatgacaaaactcgggtggattgctaaatgcagttctaaagagttaaagttaaaaaaatgcctagaattttttgatattaactctgtcagagatttttacgataagataaatactgaagctccacttgttgcattcagaaaatccttaagcttcaagacggaacctatggctgatttagcttggctaacacgagctgcacaaatcagtaagcaacgggatcatgtagcctggtctaaagaaaaattaaaatctctaatcccagagataagaaaactaacgacagaacctaaattgagtacgtttattcctgcgttagaacaaaaacttgcaagtgcgggtgtatcttttgttgttttgcctactccagctggatgcagagcaagcggggcaacttgcttttttgaatacaacaaaccaactgtcattgttagcttcagatatctgactgatgaccatttttggtttacactcttccatgagctagggcatttaatcttacatgatgaactgagcgtgcggcttgaaggagatatcgatgtttctaataaagatgaacaagaggccaatcgcttcgctgcagacacgcttataccttgcgaattccgaaagcaattggaaaattgtagtgtaaagaactggaaacctatattgcgtatagcaagaaagatcggagtctctaaagggatttgcttaggttatcttcagcatagagaaatcatcccttatactcaccttaataagtttaaggtgagatataaaaaagaagatatcatttaa

SEQ ID NO: 110916 - DNA, 966 bp, Enterobacter aerogenes
atgagctatgaaaataccaatccgaggcgtcatgttgctgttccagatattatcaaaaaacttgaatatttctctgaacatgattttttgctaaaaggacttaaaagtgaaatgcattttgttacttttgcaaaacaaatcgctgacagtattagaaggattgaatatgtagaaaagatttctccttctcataaaaaaattcatgaacttagagcagatccgaattctgaaatatttgacccattgcgtgcagcatatatacatctaaataagggggagtacgatgaagcatgctggaatgtttttttggctactcactttggcaaaaatatatctacgaaatggcagctgtgtcgtgatatttatagcgggttaggaacggaaacatggagctggtataagataacagatgattttgtgggttttgaaaaatggtataacgatgctagtcaagaattagtcagaaatagcactctaagacaatatggcaatcatagaaagtatgagacactaaaggctaattcaaaacgttcaataccaaaagtatttaggtcttatttggactttataggaaatacgaaaagccatgaagcacgattcgaggaggcaaaaaccatagctaaaacacctgaagatctcttcagtctgttatattcaaatatgaattcagtgctttctttcggcagaactgcaaaatttgattatcttacaatgctaaaaaaaatatcattactcgatgttgaaccagggcatttattcttgcgcggatcgactgggcctgtaaaaggttgtaggctcttgtttaacggagataaattgaatggggatagagtggatttattagacgagaaattgaaagctcttgcggaaatattggatattccttatttaaaaatgcaagtgcttgaggattctttatgtaactggcaaaaatccccaagcgagtatttatatttcgttggttga

SEQ ID NO: 110917 - DNA, 975 bp, Enterobacter aerogenes
atgcctattttaatcaaagaagattgcattgatgatttgatacattctctacatgcggaaatcttagaaaacggttcgttagtttctccgacaaagggagaaaactacgaaatattaggggcttaccttgttcttaccaatcccatatccagaattagtagaactgagtcacgcagtaaaataatcagttgcttaggtgagctgctatggtatttttctggacaaaatgaattaggttttattaagcattatattcctaattatcatgagtttgctgaggttgatgataaagtacatggtggttatggcccacgtataatgaatatgcatgggaatattaaccagttaaagaatatcattaatacccttaaaaaaaagaactcaacaagaagaacggtaatccaactttttgatgcaaaggatttggtccctgaagataaaaatatagaagagtataaggatataccatgcacaatttcacttcagttcattataagagaaaataaactagagttatttgtgaatatgcgttccaatgatgcttttaagggttttacacatgatgtatttgccttcactatgttacaggagtttgtagccagattgctaaaatgcgaactcggtaattatcaccattatgttgcgagcatgcatatttacaagagtgatgttgataaaataaaaaaccttcaaaatgaaggtttcatgagtacaaagccgctcatgagagaaatgcctaatataagtgggctcgattttattgacaaaatcatgaccatcgagaagttgttaagggaagacaagatgctcgatattttttcactggatattgatgattattggaaggatctatttagaataataaagatttatttcttactaaagtcaaaaaatcaagtggataaaatttttgccgactatgaaataaagcagctttctaatactaattatagacttttctttgagagtagataa

SEQ ID NO: 110918 - DNA, 366 bp, Enterobacter aerogenes
atgcacacagacgtttatacgcttaaaactccactggacacgctcagctggctttgcctgcttgagagtgaactcctgagcatcagggcatttcagcgtcttgatctacatacggaccgggatgaaccgaatgaactgacgtttctggaagattccatcattgggaccggcacagcttatggctggtttgtctttttactcggggaaggcgatattccgcctttgcctgatacgtctaaaaatctgctcttcacgctggacgagctgggaaaagaaattaaccggcccttctgggagaaggccgtggatgaaggtatccaggatgcccggtgtgatcgggctatagcggctctcgaacggatgtaa

SEQ ID NO: 110919 - DNA, 330 bp, Enterobacter aerogenes
atgcacatttatattgtcagaatggaccatccggacggcagcggatggaatacctttgtgcgcgagcatgtgatttatctgaagggtctgatagaacagggcaaactgttagcgtccggtccgctcaaaaacacgccactgcgggcgggatttcttattttcagggctgagacgcgcgatgaagtccagtccatgatcggtgcggacccttttgcacgtgaaggccttattgcccaccttgatatccagcaatgggacccgctgttcgggcagctcagcagttactcaagccataatgcaagcggggatttgaagtatttaattgattaa

SEQ ID NO: 110920 - DNA, 894 bp, Enterobacter aerogenes
atgctggataaacttaccggaatgcgggccttcgtggttgtggttcagacaggctcttttgtcgcggccgcagacagactcggtatgtcgcctcagatggtggcccgccatatcgccacacttgagaagcagcttgaaacgcgcctgcttaaccgaacgacgcgcaggcaaagcctgacgccggcaggctcgctgtactacaggcgttgtgaaacaattttacaggccatcgacagcgctgaccgggaagcaagcagtacgagcggagttcttgcaggtacgctgcggctgaatgcgccggtaacgttcggccgttatgtcctggtggattttttgagcacatttcttgagcgctacccgaaaatgcgtattgaacttgttcttactgatgacgttattaatcctgcttcagaagattttgacctggtgatacgaatcggcgagcttgataagaaactccggcttgcggcaaaaccgttgcctgcataccgatttattgcatgtgctgctcctcaatacctgacaaagtacggtcatccagaacaaccttctgatctgaaacatcatgagtgtctggtttttgcaccctggtctgcggggttaacccattactggccttttgccagcactgaaggtcttgctgaagtgatggtaaactctcgcctggcgattaacgactggggagcaatccttgaggcggcattaagaggcacaggtgtgctgattggttatgaaaaagagctcaggcgacttatcaacagggaaaaactcgttcctgtcctggagaacttcactattccctcacgggaaatgcatttgctctacgacccttcacgggtaaatgaaagcaggtatcaggtatttattgacgaaatgattgattatcttagctaa

SEQ ID NO: 110921 - DNA, 906 bp, Enterobacter aerogenes
atggagctacgccatttacgctattttatcaccgttgccgagcataaaagcattcgcctggcctctcattatcttcacgtcactcagcccgctatttcccggcaaatacaggacttagaaactgaagttggggtcaaactctttattcgtcatcctcgcgggcttactctcaccctggcgggtgaagcgttttatcgtgatatcaaaaaaatgctcgctggactggatctttctgttgaacaggcgcatcgcatcgccagcggttttgacgggcatctgcgacttggatttgtggaaaacagcagctgggatgggattgtaccttccacgctgcgtcactttaagcaggttgtgccgcgggcaacgcttgaactgattccgctgaacacgccggagcagattgcattgattgaaaagggcgagctcgatggcggttttgtttatgggtttggcgccatgtctgaacagtgtcagtttaaaacgttgtatcagtacgatattcgcttagcgctgccaaaagcatggccggttgaggataatctcgacgttatatcgctacatcgggtggcgcacttaccgtttatcacctccttccgccgggtctatcccgcctattacgatcacgttatggccgcctgccacagcatgggaattacccttaacgtggtacaggaagcgcaaacagagtccgcaatactggcgctggtcaatgccggtattggcgtcgccctggttaattccgccactatttcacgtcttccggtaggggtgcgactagtccgtttgtcagatctaagtattatgatgccattaaaattcgcatttctggcagaaaataactctccgctggtgaaacgatttttagattcactccatgagtcattaaatatcttacattatccttag

SEQ ID NO: 110922 - DNA, 1011 bp, Enterobacter aerogenes
atgacctcaccacgttcgcttatcagtgccaccgtcgattttgataaagagggatttcaaaccggcgtgctgatgcttccttattcgcacaacacctccgcctatgggcgtattcccgttccgatcgccgtcctgaaacaaggggaaggtccaacggtcctgatgaccgggggtaaccatggcgatgagctggaaggacccgtcgcgttgatgaaaattatccaggaaatggcagcctggaaaattaatggcagaattattgtgattccggggcttaatttccccgcatttcagcagggtacacgcacttctcctatcgataatggcaacctgaaccgaatgttccccgggaagcggaacggcagcctgacggaaatgatcgcgcattatgttgatacggaattatttccgctcgccgacattattttagatatgcatgccggcggcgcatcatttaaccatgcgccggtgttattagccgcgcttccgaaaaacgcggcccagcatcgcgactacatcaagctcgttaacgctttcaatgcgccgacgaccatgatcatggatctgctgggagaagatcgtacatacggcgctgctgcggaacgtcacggaaagctttttctctgcggtgagtttgggggcggtgcctcctgtaacccggataatctgcagattgtcgagagtgggctgagacgcgttttacaggcatcaggggtcacgaagcatgcccccgtcgcctcacaaaatgagacgcgactgatgaaggtaggcggcgccggacattatctattctctgccgggcgaggggtgtttgagccctgttttaaacttggcgatcgcgttaaacaggatcagcttgccgggcgactctataacctcgatgccccctgggaaccggcaaaagagcactatttttccgggaccggagagattatggtcacgcgcacgttttctcatgtcgtcgccggtgattgtattgcggtgatcgcttcgcctgccacctggtattaa

SEQ ID NO: 110923 - DNA, 1332 bp, Enterobacter aerogenes
atgaatattcgatccggtgctagtcaagaggggaccacggtgggcgcatgcgcctggcctgttgggttattcctcgcctgctttgccttttcctatctcgatcgtcaaataatgagtatcctggttgagccattaaaagctactttacacatttcagatattcagataggtatacttcaggggttctcttttaccctttgctatgctaccgccggggtgattatttcccgaatggtggacagcgccaatcgggtaagattaattgcagtgtgcgtggccatttgggcatgttcaacgatgttgtgcgctaccgccggtagctatacggagctgttgatctggcgcggtggaacggctatagcggaggccgctctgagtccggccgtgttgtcgctgttcgctgatatgtttattgccagccgtttaactcgcgctaccggaatctttatgctgggcccctatattggcagcggcctggcactcaccgggggcggaatgttgttggggtggttaacccgcgaaatgggccatatgcccggtctggcggcaatgcatccctggcaatgggtctttttaatcgtcgggttacccggcatattactctccatattggtttttttcaccgtaagtgaacccgcccggcggaatcatcaggcgagtcagacatcggtggaaaagggaacgcctgcgttccgcgacgtacttaacgaactgctggtgaagaaccgtttttgcttgcctttttattttgcctacacctgcctcattatgctgttttattcgctgacggcctggttcccgacggtcatgatgcggcactttactctcacggcgggctatgttgggcaaattaccggaccggtatatatgtgtgcgggggttgtcggggttctgctggccgggaaattagtgcgcgcggcgctaccggcaaacctgctgcgagactcgctcaaagtgtctgcttgcgcgtgcggattgttgattattttctccgtactcgcctcttgtatgccattttctacggcgattatcttttatgccataacgctgttctgcgccagcatcaccatggcgctggcccccattccgttacaaatagcgatccccaacagaatgcgcggccgcgcgatttccctgctggtttttatgactaacctgttgggcgggggcattgggccgtttctggtcggatatttaagccagaaatttcacggaattgacaatgcgcttggtttggggctggcgatagtgagcgtcagcgcggcaacggctgcgactctgttttatactcttgccatgaagcgcagtgttacagctgtcagccatgattaa

SEQ ID NO: 110924 - DNA, 849 bp, Enterobacter aerogenes
atgtctacccccgcttcttatcgtctcggaaatgtggttattacccgaattactgaacagctttttagcatgccgctggctaaattattgccggatgccgcaggcgttcgttttcctgcagggatgaacgcgcaaacgccgatcgaaatgagcgtgcatagctggttaatcgactcgccgcagggccggatactgattgatacggcgaccggcaatggcaagaatcggccatttagccccttgtttcatcagctctcttcgccatggatggaaaatttaaagcagacgggtattcaacccgatgatatcgattatgtattgcatacccatttacacaccgatcatgtcggctggaacaccctctgggatggggaaaaatggcggcctgcgtttaccaacgcgacatgggtttgttctcaatctgagctcaattttgtctcatctccggcagctgccgcgcgcaaaatggtatttgatgacagcattttgccgattgttgagagcggccgtctggtgacggtagcggattccccgacggaatttctcccggggatcctgttttaccctactccggggcatagcgtcgggcatatgagcattgccgttgaaacgacagagggaacggcgattttttgtggcgacctgatgcataccccgctgcaggtgtctcatcacgccctgagttccgtattttgcaaggatagtttgcaggcgaatcagtcccggaagtggttcttaaactttgccgccgaacgtcaggcgacggtattcacaagccacttttcagcaagttctgtggggcgcgttaccggcacagaagagggcttcgtgtgggaatttgaacggtaa

SEQ ID NO: 110925 - DNA, 972 bp, Enterobacter aerogenes
atgctcccggaacaggcacaaaacgcacttgatggctggatcaccgccgccgcccccgtggtcaagaaactgtatggcgagacggaaaccgaatggccagaggttcgccggcaatatatgcatggcatgcttaatctctttccggccatccgcggcgtttcctacaatacaacaatgttgggatccacccccgctctctgcgcgacgccagatgatgttgagacagagcgtacagtcctttatatccacggcggcggttacgttcacggaggcgtagaagcctaccgcggccttacgggacgtctcgccaaccagctgaaggcaaaagtctacaccccggcctaccgccaggcgcctgacttcccgttcccggtgccaataaacgatgttttttctgcctatcgcgccctcctggcctgcggtagcgatccgcgaaaactcgttctggtcggtgattctgctggcggggcaatggtggtaaccatgatgcgtaaggcccgtgacgcaggtattgcgctgccggtggcgggagtcgccatctccccatgggcaaacctcacgcacagcggtttttccgcaacggtgcgcgatggaatagatccgctctgccgcgtggcgtttctcaatatcctcgcgcgcaccttcctcgcgggtgcgctgcctacgcatcccgatgcgtctcccgtttttgccgatgttcacgatctggcgccgatcctgattcagatcggtgaaaatgaagtcatgctcagcgacgcgatccgtctcgcgtcccatctgggcgaagcgcgggtacgcacgtcgcttgaggtctggccgggaatgtttcatgtctggcatctgttggccgggacgttacccgaagccgaccaggctctgcgtaatgcggtccgtttcctcgacgacgcgctgaggatcgctgaagctagcgggaagtctgcacaggtacgggcggcgaacgctcgcccgtag

SEQ ID NO: 110926 - DNA, 831 bp, Enterobacter aerogenes
gtgggactgacgcgttctgcggcgggaaaagcgctgtctcgtcttgaagactacctgggaacccggttgtttcatcgcacaacaagaaggctttccctcacaacggaaggccatgaattttattcccgctgcttacagataatcgaagatgtgcaggaagccgaagccagtatccggcatgaccatccgcttccccgcggcacgcttcggctaacggtttccgaaggatatggcaaagcgatagtgattccgtttctgggctcgttgctggccgcatcgcccgaactgagcgttgaggccaattttacggaccggattgtcgatcttgtggaagaggggtttgatctggctatcagggtgggcgaaggggtgaccagcactgaatatgtgacgcaggtgatagcgcgcgccaggccgcgtctttatgctgcgccgggctacctggaaaagcagggcgttcctctcagcacctccgggctggaaaaacatcaacgcctcatctacgggcttggcaccactaccaccgcgtggaacttcatcgataaagaaggtcagtcggtcagcgtcaacggcaggatttacgcccgattcgatagtggcgatgccatccgggtcgctgcgacagagggtatgggaatcggacttctgcctccctttgtcgtggcacgggaactgaacgaaggcaagctggttgaagttttgccgtcaataagcgcggcagagcttgccgtccatgtcatatatcccagccgcaggtatctaccggcacgaattcgcacatttattgatgagttccgaaaatacctgaacgataaggaaagtgaattctaa

SEQ ID NO: 110927 - DNA, 141 bp, Enterobacter aerogenes
atgatccccatgtgggtggtgaaggtgtccatcgaccagatagtcgatatgatcaccatgaggcacagcttcatggccgcaattcggtccatgcacatggcctggttcatggccgctgcaatggtggtctggcgtacatag

SEQ ID NO: 110928 - DNA, 285 bp, Enterobacter aerogenes
atgaagccagacttgaaggctgtttcccttttttttcatgccctgtctgacgaagggcgaatgcgcttagtcatgcttctggaaggcggagagaaaagtgtgactgaactttcagaactgtcgggtgagaagatagtgaacgtctctgcgaagttacgcgatcttctttatcatcgtttggtggtgcgccgacgtgaaggaagaaagatgatgtacagtctcgcagacaatcatgtcgccgatattattcgcaacgcatgtgaacacatcagcgaagatcattaa

SEQ ID NO: 110929 - DNA, 717 bp, Enterobacter aerogenes
atgaatatcagggttataacttttgcaatcgcctctcttctcactactaatgcttttgctgtaagtatcgattaccggcatgaagttaaagatactgctgaaaattctcagaaagaccgtctgctacttgcacaccgttttagtaacgggtttggtatttcatccgaagttaaatggaagactggcgactctgacgctcgtagtaataacgtttaccatgaaaacgtgagtgatggatgggaagctgttcccagctatctttaccgttttaattctctttttgccctggaaggtggtatcaacctcgctgttgacagcaattacacaaactatcgtccctacgttaaaagctacgtctattttactgatgatttaaactggtcgcttcgcctccgcccgttttataagcgctacagcgggaacattaatacagagaaaaatacgcaggaaaaaggcatgacgattacgtcagtgctgagctatcgcctgccgggcaactggggtatggaatatgaactggaataccataaaacgaatacccaagaatttgcgcccgtagctgataacaaagactaccagtggacgcatgacgtcaaggtttcctatgccatcgacaaaaactggaagccgtatgtggctgtagccaatgtgcccggcagtaaatacaccgatgagcgccagacgcgttatcgtgtgggagtgacttacagcttctga

SEQ ID NO: 110930 - DNA, 1617 bp, Enterobacter aerogenes
atgccaaaaaattgttttataaacagcgtgcttgcattggccgtcggtgcgtcgcttctgtcaggctctgctgtagcagaagagacgtcttcgcaggctggcaatacggttgtgatcattgagcgttttgagttggggcattataacccgcttctgggacacggccggagcggggaatcactcttttatcaggggttatacaggattgaggcaggtgtctttgacaggcagcctgacctggttcctacgctcgcttccggacccgctgtagcttcacagaaaaatagagtgtggaccattcctctgcgcaaaggcattaaattctctgatggcacgacgttcggcccagaggacgtagtagcaacctatcaggcattcatcgaccctcgttcggcgtcatctgaaatcgcgacgtgggacaatattgagaaagtagaggccactaccggtgccgtggtatttactctgaaagagccaatggctaactttgaccgccgtcttattaacggtatagccccttctgaagcgtttgattttgcccaccttaataaagcagaaatgtcctcgttaaatcagcatccgattggtaccgggccctatgcgctgagcgaattacgtccagaccaggcgatcctgactgctcgtacggattactgggggcctcagccccaggtggaaaaaatcgtcctgcgatacactcccgacgacagtgcccgcgcgcagcagctcaagtcaggtgaaggagatggaacttcgctacctgccgaccttgccgccacttttaaagctcctgaatacaaaaccttttcggtgaaatcaggagactggcgaggtgtaagcctgccagccgggaatccagttaccggtgatgatgctatccgtcttgccgtcaactatgctgttaatcgaaacaatatggtgaaatatgcgctgaaagggcatggtgttaccaactcaacctatctggctcctttctttggtgaggcttacgatccggctgaagagttcagctactcacccgaaaaggcgaagcagatccttgatgaagcaggatggaagaccggtccggatggcgtgcgggttcgtaacggacaacgtgcggcttttgatatcatctatttcccgaaccgcgaccgttcccgccgcgacctgaccctgatggtcgccagcgatctgaagaaaataggtattgaagtcacaccggtagcccgggattcaaaatcagtaacccgggacgtttatgccagcacctccgtgatggcgggaagtggagtgccttactccgtagacagccaagtttatcacattctgcactctaaatacgcggagccgggcgtgggcgcaagctgggataacgcctctgattaccgcaacccggtcatagatcgcctgctcgacagcgcccgtgcggaaacagcccctcacaagcaggctgatttgtaccgcgaactgcagaaggaatatcaccgtaagcccgccatgctgcagctggtttacctcaaccatatctatgttcagcgagaaatgggttacaaaaatatcaaggtcacgctggagccacactcccataacatcggatttggcccctggtttaccattgagtcctgggaaaaatag

SEQ ID NO: 110931 - DNA, 1005 bp, Enterobacter aerogenes
atggcattctcatcaggacggtggcatcgccgccgtcattccgtactgctgatggtgaaaaggcgcatccttttcctaatccccctgcttattctggtcacgctgggccagtttgcccttgcaaccgtcagcccctacgatccgcttgatgcttatcttggcgggcttgccgccgagatgacagcgtcacagcaggcgtcgctgtcagctgtactgaaccttgatttaacgtggtacgcggcatggtgggagtgggtaacaggggtattgtcaggaaaccttgggatttcccgcgcgtatcaacagcctgttaccgctgttatcagcgaccgtctaccgtggacagtgctgttaggctgcacggggctggtcatcagcacgagcgtttcgtttgttctgggcactgctgccgggctgaagcccggcggctgggcagatcggttaattaacctgtttgctatcattctgcagacggtaccgccatttgttctggcactggttatgctgggtatctttgccatttcatttaacctgctccccaccggcggactgacctatcccggacaggcggcaaccttcagctcgaccttggtacatctgatactcccaggcttggttctggggttaacacagcttccgtggctgatactgagcctgcgggagtcggtaaaggaggtgctgaattctgacgcaatccggggtgcacgcgttcgggggatccccttccctcgcattgtcagtcatcatatcatcccgaccgctctcccgccttttgtcgccctggtcggttcacggctggctgagttggtcgcaggctccgtgctggttgaaagcatcttttcctggcccgggctcggcagcgcactggtcagaagcgcgcagtccctcgactttgcgctcctgacacttctcaccgtggcggtaacgatacttgtcctgctgggcaacctcatcgccgatattctttttgttattctggacccacgggttgatgcagatgcttaa

SEQ ID NO: 110932 - DNA, 852 bp, Enterobacter aerogenes
atgcagatgcttaaaacgctttttatttccagaactcgcccgggcgtttcagccatcatcacctggatgacatttatggttattgttggcttcgccattgtagttccctggttcagccacgtagatcccctgataaccgacttcagcatggcagacctccctccgggtaaggatgccctgtttggcacagatgccgaaggtcacgatctttttatacgcgtagcgcaggggctacgcatttctctcatcatctctctggtcacggccacaacgtcctgtctgtttggtgttgtgctgggaacgctggcaggcatgagcgggggctggattgaccggattatcatgcggttgacggacggtatcaacgcgctaccccacctgctcatcggcatcctgatcgtttcacttttcaagggttcggtcattgcaattattgcatccttgaccctgacgcactggacctatattgccagagtggtcagagcgcagattattggcatccgtcacgccgaatttatcgaggccgcatggctttcaggcatgaaccgctggcgcatcattagggttcatctcatccccgccgcactaggacagacgctgattggcctggtactgctgatccctcacaccatctggcacgaatccacgttatcttttcttggtctggggctcccgccgcatatgccttcactcggcacacttctgtcagacgcgcagggtgccctgttactggggcagtggtggatgctgctgtttccctgcctgctgcttatcgcaacgacggtgtcagtatccctgataggcgggatactcaaaaaccgtatcaccggtcgccaggagacacttcgatga

SEQ ID NO: 110933 - DNA, 864 bp, Enterobacter aerogenes
atgacattaagaattgaaaacctgacggtcaggatcccgcttacacggggccatcaggttcatgctgccaccctgataaacatggaggtgataaaaggagaaatacatgccctgattggtgagtcaggatgcggaaagtccaccatcgcgcaggcaattacaggtttgctgccggttaaggcgcgcgtgacaggcactgtccgctataatggagaaaatatcctcggccgtcagtctggctacctgggaaggcacattgcactaatcccgcagtcagcagctacctttatgacaccggtcagaacgatgggtgcgcagttggcagaaaccgttgaaattctcaaagggccgctcacgccagaaaagctgatggcgaaagtcgatttgaacgctaacgttttgaggctttatcctcacgaaatttcaggtggtatggcccagcgcgccgcagtcgctttcgcactagccggcgccccggacgtcataatcgcagatgaacccaccgcgtcgctggatccggcccgtaaagaagggatattccgtttgctacgacagatagccaaccagggtgctgcggtcatccttatcacgcatgatatcagcacactgctggataccggtatcgttgaccaactgagcgtgtgttacgcctcacgtattgttgagtctggccttgccagcatcctgctcaatggcggagcagaaaaccgttacacacgtgatctgctagcggcactaccgcgcaacggattgcaccggatgcgcggcgtaccgccggagctaaccgacctctccgatgagtatacatatgaatcacgaattgctttaagcggaggactgagtgacaggtttgattgccagtga

SEQ ID NO: 110934 - DNA, 636 bp, Enterobacter aerogenes
gtgacaggtttgattgccagtgatgtggttgttgagtttaaccgacctgacggcaggccggtgcgagtgctggaccgggtaagcataactgtttccccgggcaaaattatagggttaaccggccagtcagggcgggggaaaacgacgcttggacgcgtcatggcagggctcattacaccggtgagcgggcaggtcacctgcaatagtaggtcagttggaaatgtccgcagccgctctggctgtcagactagggggcggataggcatggtgtttcagtccccccgtcgctcgtgcgatccccggctgacgctgcaggagactattatgcagacggccagccggagtgtggatattagccggattctcacagaagtggcgctgaccactgatctgcttcagcgctttcccgcgcaggtatctgacggacaactacagcgggcagccatggcacgaacgctggccactgaaccggactatattatcctggatgaaatgacttccatgcttgaccctgccacgacggctacgctgatggatgcgattaagcgatatacctgtaatggcggcggagtgctgatgataagtcatgatctcgagctggtagaggctatctcagatgaaataatacaactctga

SEQ ID NO: 110935 - DNA, 1188 bp, Enterobacter aerogenes
ttgtctagtagaaagcgtattgcagttgttggcgcaggagtactggggctctcagtagcccgttctctgagcgccagcggagctgatgtaacggttttcgagcgaaaccacattggggccggaaccagcacgacgacttttgcgtgggtcaattccaacggcaaaaatcccgcaagctatcatgcgctgaacgtggtggcgatgcgtgaacatgttgagctgcagaaaaatgcacgctcagaaggacagtggctgatgcagaccggaacctatgagtgggcgacggatagcgcacaacaggagcgactgaccgcacgtgttacccggttgcgtcaggctgattacatagcagaagagctgtcgcaggcacagctcaggaagcgggttccggagatacgtcttgatccccgggtagaccgcatctggcattttccggaagagtgtctgcttcatcccactgtgtttctggcgcacttatgggcagaagcgcgtcgccacgggacaaaattacatattaattccggcgtcagggatattacggaacatgagaacggtgtgaaactgactcttgaagatggttcagaatggaaaggtgacagcctggttctggctacaggccggtggtcacaggaattgatgtcacgactgggccttcagcttgcgatgattgacccgaaccagccggatcgtattgcctgcggttttctggcggtgaccacgcccctgctcatacaactgagcaccaacctgatcaccccagagcttaatgttaggccagacggaggtggaaggctgttacttcaggctcccgatctggatcacttcgccaaccctgtagcatctacgcctgctgaagggtatataggtcaggagatgcttcacaggctgcgccgtctgtttgataatgcccagtcggcgaaaattgagcgaattactgtcggacagcgttcgcgaccagctgacggcctgcccggcattggctttgccaccccacgtcagcgcgtatacctgatggtcactcacagcggtatgacgctggccccacttctcggcaagcttggagcagaagaaatcatgcagggatcgcgatcggtgctgctccgtgattattctcctgaacgattgttggggaaaacggctggcgactttccggctttttccactcttcattttcccgccgcacagtag

SEQ ID NO: 110936 - DNA, 852 bp, Enterobacter aerogenes
ttgattaagccaagcggaagcgatatcccccggcgcgagagcggtcgtcacgtctggccagtgaagaaggatgatacccaaagcaacgatatcgcgttttatgaaacagccttcagagaacaatccaggcgatgggggctttacgagattgttttgggaagcgttgttgagggcaaaatatcattgtatcagtccgtcaatcagggggccgacgttccgcacattctgattgcggcagggtttcatggagaagaacccgcgggatgctggggaatgctggattttctgcgcgagggctcccctgaattgtttgataacgtagccgtgagttttttaccgcttgtgaacctgtctggcctgagcgctggctgtcggctcaacagtactggacagaatccaaatcgcggctttaccaatggggcagaggtcgagccttcagttgaaggaaaagtactgcttaattatgaagcgcttctgaaaaacgcagccagacacggtgtgctctgttgtcacgaggatattcttcgccagcaggcgtatctctacacctttgaacatactgcccgtccaggccattttagcgtggcattacgtgatgagcttggacgttttttcccggtcatggaaaaagagcgggttgatggctgtgaatgtgaggatggcatcatctttaaccattttgattcgtcatttgaatcctggttgttttcttccggttccgacgtcgcagcgtgcactgaaacgccggggttgcaaccctttgcaaagcgaatagaggcaaaccgttatttaatcggcgcgtttatctcatccatactggagcgcaacagtatcgggggcgggatgtcatga

SEQ ID NO: 110937 - DNA, 423 bp, Enterobacter aerogenes
atgactaaacctacccgcgctgaacgagaaaaaatcctggctatgccgccagaagactacatgaaccctgtgcaacaggactacttccggcggcttatccgccacgaaaggcaggaggtactcgatcatatcgatcagatgaagcaacagttgcaggagaatcccgaaacgggtgacgaaggggatatcgccattcgtgaagagcagttacgtctgttgttcagacagatagacagggaaagccgcctgctgccgaaatatgatgcagcgctgatacggctggaaaaaggagagtatggattctgccgggatactggcgaacctatcggcctgcaacgcctgctactcaggcccaccgcagaattaagtattgaagccaaaaccaaggaggaaaaagttgaggttcagtaccgaaagaaataa

SEQ ID NO: 110938 - DNA, 207 bp, Enterobacter aerogenes
atgatccccaaaaattaccagcaatggtaccggtgcattacagaagaatgtggcattcccctgacgcaggcattcattacatcccgcctggctgttcttgaggaccccggacaccaggaaaccagacgctttgtctcgttatatggacaatctcatctgaacagtattgttcaatggtttaaaaaagtgcgggaagacgtgtcgtaa

SEQ ID NO: 110939 - DNA, 231 bp, Enterobacter aerogenes; identical to SEQ ID NO: 78334

SEQ ID NO: 110940 - DNA, 1788 bp, Enterobacter aerogenes
atgagcgaatcgctgtactgcaggacctgcgccagaattcaacaggtacgctacctgcctcatggcttaatgataacgttgttgtcacgggtcattacgctgttgggcatcattgtactgatagggatgctaccctggctttcaggtacggatccggcaatggcgttattgcgcgcgcgctccgctgaacaagaggcgacaccggaagcgctggcagcgattcgccagtcactggggcttgatcaggggcctgttcatttactgattaactggctcagcggccttttacagggcgatgcgggaaactcctgggtttcaggacgtccagtcctgcccggaatgatgcaggcagcccaggtatcactgacgctgatgctgatgtctgccgcggtggcgctggtgatggcagcaataatttgtctaccgacgttccgtcgcggactgcagggccacacataccgttcgacaggttttttcgcatcgatctttacctcattacccgaatttctcctggcctcctttttactggtcgtcggcgcggtctggctgaagtggtttcccccttacggctggagtggactgcattatgccgtactacccgcgctggccatggggatcccggccggagggtatctggggcggatattctctgacgcgttagccgcaacattcagcgaaaactgggtcattacctggaccgttgcagggatagtgcgctggcatattatttgtgcggtgctcaagcgaaccctctccacgataatgccgttattcggtcttattctggtgtcattgacgggaagtgcagtagccgtcgagaaagtgtttgccatcccggggctgggcagagcaacgctcggtgccgttgtcgcacaggatcttcctgcgttgcagaccggtattctattcctgctgattatcgcatttatgtttggcattctggccgcggggatcagataccttattcttggcagcgcattacgttcgtcatctctgccggtaaccactgagccggacgacagtaacagaaaactgttgattgtattaccggtgatctgtggcgtcgcactgactctccttctgctggccggattaccacgtgacccgtacacgtctgagtttctgcgcctggcaccgccttctctggcactgcccttcggtgcagacgccatggggcgtgatttactggcgagagtagcgcacggtacggtgcacacctgctttctggcactgatggtctcgatgatttgtttggttctgggattagtgattggccttttcccccgggtattcgtggggccaaccgagatggcgaatgccttacccccggttattgcggggttactggtcgtttcggtgagcggccccggcagttcaggtgctgccattgcaatagcggctgtcggctgggctcctctggcgacacacactgccgcactggcaacagagatacgtgccagagcttatatcagtatgctgcccgttctgggtgcgggctggctacgccagaatctgttctatgtttttcctgcactcattggccctcttttccgtcatgccatgctgcgattgcctggaatcgcgctggcattagcgtcactgggatttctggggctgggggcatcaccacctgagccggaatggggcagagttctcgcggaaggcatgccctatcttgaacgcgcgtactgggtcgtactagctccggcgagtgccctggcgcttttatccgtgatgggggtgagtctggcaggcctgaccagtaagaagcattcaaggatacaatga

SEQ ID NO: 110941 - DNA, 1527 bp, Enterobacter aerogenes
atgaatacgggtaaaaatctttggcctgtttatgggctcttgtcagccgccttattactgaccggctgctttaatgaaccgcaggatgaatcggtcggtgccagcgaaggcagaattaaagtggcacaccttcttccgccgcgttccggcctgacaccactcagcgatgatgcatttaaattatctcgctggagcacggctgaaacgctggtagtgctcaatagtgccggcgacgcgcagccagcgctctcgactaaatggcaacaaatcaacgatacaatctggcgctttgaactgcgcccaaacgtcaggtttcatgacaacagcgccctgactgcgcaggtcgttgtgaatgccctgagcgtcgccgccagtgccacaccgaaaccccgcattcttgatggtgtaaaactcacagcaaaagctgagggtgatgatgccattttggtgacaacggaaaagagagaccctctcctgccgcaacgtctttccagccctcaactggcaatcctgtccctgaatgcttacaaagaaaatggcgtggtggatccggttaatgcagggacgggccccttcattctgcgcagcgtgaatggtaccagcagtgcgtcactcgatcgtttcgaaggttactggggtgagaaggctaaagccaccggtatagacgccagttttgttccggatggcgccgcccgcgctgccgcattacgtaccggtacggcagatattattgaggcgatccctgtctctcaggccccccttctggaaccatccctggttcatgaagtgcctatgccgagaaccaacacgctttatctcaacacggcccagggcgtcatgaaagatcctgcgatgcgtgctgccgtccgtaacgcgattaaccgtcagcaacttgtcgataatgtctatgagaaacgagcagacgttgcgcagggactgcttggcccggccctgccgtgggcagcaccattgcgtaaatcggtttccagcccggtagccccgggggcgccagacggcgccaccattactctggcaacgttcagcgatcgcgcggaattacctgaagtcgcggtttatctggcacaacagctcaccgcagccgggtttaacgtgaaacaagtggttcgcgaatatgcgcagatagaagcagacgcgctggctggaaagttcgatgcgttcattctttccagagcaacagtcctggattccggtgacccggttgcctatatgtacagcgatttttcctgtgaaggttcgttcaatatttcgcaattatgtcgccctgaaattgatgctgcgctgaaaaaagccggtgaaactcccgcaggtgagttgcgtcgccaggccatcatggatgctgaaaatctgatcctggccagtgatgctgccattccaatgctacatgagcgagttattcagggggaaagcgcggcactgaaaaatgcgctacgtgaccctcgcgagcgcacgctgatcgacagccagacgcagttagtctccggcgaccagaatactgccgcgcagtaa

SEQ ID NO: 110942 - DNA, 1245 bp, Enterobacter aerogenes
atgactgaattgactttagggaagaaagcacatacttctccccccttactgctggccagccagtttattttcaacaccggattttatgcggttgttccttttctggccctttttctgcgcgatgacatgctgttgtcaggcgcagcgataggcctcgtgctcggtctcagaaccttttcacaacaggggatgtttctggtcggcggtgcacttaccgacagattcggcgggcgtgcggtcatactctgcggctgccttgttcgcatcagcggatacctgctgcttgccaccagcgcctcgttatggggcatcgtcctgggtgcctgcctgacaggtattggcggcgcactcttctcgcctgcaatagagtcactgatggcgcaggcgggtacgcagagtgaaaaggaaggcaagcgcagccgttcagaatggttcgcgttattttctgtttgtggcgaattgggctcagtcatcgggccgttactgggagcattgctgacaggatacagtttccagtacgttgcgcttggcggtgctggcgttttcctgtttgcgttgttcgccctctatttcatgttgccagcaggtgaccatcatagcggtaatcttagtattgccccctggtggacggcgtttcaacaacgtcgctttgttgcatttattgtcgcctatagcgcttacctgtttagctataaccagctctatctggcgttacccgttgagctacgtcgctcagggggcagtgaagcggaccttggcccactgtttatgctggcctccgtcatgatcattttcctgcaattgcctctggcgcggtttgcccgaaaacgcggcgccctgcagatgctgcctgcgggctttttgctgctggcattgtccttctttagcgtcgcgctgttcgctaataccacaccaccagacaacctgtggagactgcttcccgcagtgtcactggtcacgctactgaccctgggccagatgcttattgttcctgtcggcatggacatgatccccgtctttgcccgggataaaaatctgggtgcgcattacggggcgttgtcatccatgggtggggtcgccgttctgagcggaaattttgccctgggcggtcttctggacaacgcgctcaccccttcttcactggcttttgtgccatggctaatgatgggttgcattccgttatgcagcgccatcgccatgctgtttattttacgcacgtttaactccacctctgcaaatcaataa

SEQ ID NO: 110943 - DNA, 834 bp, Enterobacter aerogenes
atgagcaggatattacaagcggcatcccaacctttcattcaggtcgacagaatttcccgctaccgcaatcggcgcacattcctctggcagaaggctacccccgggaatgccattcttgacgatttttcgttaactctgggccagcatgaacgcgttggcctgctcgggtgttcgggctgcgggaaatcaactctactgaaagctattctggcgctcgatacggtggacggcggagcagtgtattgccacgggaaggtggtcaggcctggttctgcccgcacattacgctggtatcgccgccaggttcagtatcttcctcaggagccagccagcacgctgtctccggcaatgcgtgtcagtgatatcctcaacgagccgctaaggcatttaggctgtaatcgtaatacggcccccagtcttgtcaccgcgcttgaacaggttgaactcagctcaaaagttctcgaccaacgcgccggttcgctgtcaggcggccaggctcagcgtgttgcactggcaagggcgctgattattcagcccaattttctactcgccgatgaaccggtcagcggtctcgaccttcccctgcgcgaacaaattaaagcgctgcttttgcgaataacagaagagaaccacatggggctactgattgtctctcatgacatttctatgctggcggggttatgcgacagaacgctggtcatggaggccggcaaaatcatcgaagatcgccccacgctgcaaatgctgcatttgcccaatcatccgcatacacgccagcttctggacgcggtaccgggtcttttttctcatgtcccttcccgggcacatggctga

SEQ ID NO: 110944 - DNA, 822 bp, Enterobacter aerogenes
atgtgcattttgatgaataacaactacccttatccgcttcccgtgcttgatacaaaaaatgtgagtatcttcacgggtaatcgcgctctggtcagcgagtttagttttcgtctgttcgagggcgaacgggtctgtatcatcgggtcatcaggttcgggtaaatcccttaccgcaaaggcgatcattggcacactacctgccggattatcgttagagggaagtatccgcattaacggcgccagtgtcggcgggattcatccgtcccggaggcccggacatgcgttggtatctgccatttttcaggactcttccaccgcacttaatccactcatgccggtggggcgccagcttactctggcactgaaaacgggtgataaggccatgctgacgtccttactggatgcgctacagctgggcgatattcctcagttgctctcacgataccctgctgcgctctccggcgggcagcgtcagcgagtctgtattgcactggcactgttggggaataaccgtctgctgattgctgatgaaccgacgacggcgctggatgtgattagccagcagcaggttttgcaggtattaggccgtcgttcaacgctgaaaaatccccctgcactgctcttcattactcacgatatcgccgttgccacgcaactgtgtgagcgcggtattgtcatggaaaaaggtcggatagtggagtgtggcacaatggcacagctcctgaatgcgcccgagcatccttatacccgaaaactggtacaggcagcacgaacaacagaacaggtattgataactcactcaagtgaggcactcaccggatga

SEQ ID NO: 110945 - DNA, 714 bp, Enterobacter aerogenes
atgctagaatttccccaagtgtcactcctgttaaagaattcatttatgacgaacgctgatttcaaacgcccgcaactgaagctgccgaacggcgcagacaagctactgctgcactcgtgctgtgcgccctgttcgggggaagttatggaggcaattcaggcctcaggcattgattacacgattttcttttataacccgaatattcatccgcaaaaggagtaccttatccgtaaggaagagaatatttgttttgccgaaaaacatggcgtaccttttgttgatgcggattacgacaccgacaactggttcgaacgtgcgaaagggatggaatgggagcctgagcgcggcgttcggtgcactatgtgctttgatatgcgctttgagagcacggctttgtatgccgcggaacatgggttcagcgtgatcagcagttcgcttgggatttcccgctggaaaaatatgcagcaaattaacgactgcggacaacgcgctgccgcacattacccaggaatggcgtactgggattacaactggcgtaagcagggcggctcatcgcgcatgattgagatcagcaagcgggaacagttttaccagcaggagtattgtggctgtgtctattcactgcgcgataccaacctgcaccgtaaatcgcagggcaggccgctcatcaaactcgggaaactttactacggtaaagaagacgaagagcagtaa

SEQ ID NO: 110946 - DNA, 795 bp, Enterobacter aerogenes
atgccatccagactcgcccataccctgtttgatcccgatagcacgcggagcccggccgtcgcgcggcaaattgacttcgttgattatgcgcaagaagtaccggttcatacccaccgcaaggggcaactgatcgttgcgctgtatggggcagtgatttgccgtgcggaaaacgatatctggatagtgccaccagactgcgcggtgtggatccctggagggatccaccatagcgccaaagcgacctggaatgcgcatctcaactatttgtttattgaacccggcgccgccgcgctgccggagaaatgctgcacgctggcgatttcgccgctacttaaagcgttagttgaccgcttaacgaatgaggacgttgactacgcagcggagagccatgtcggcaggctgaccagggtaacgctcgatgaactggccaccatgcctcagcagaaactgagtctgccggtttcggcgcatcctaagatccgcgccatggcagatgcgctggtcagccatccggaggaccgcagcacgtttaaagtctgggcgaaacggctggcgctcagcgagcgttcgttagcacgcctgatgctgcgagaaaccggactgaccttcgggcgatggcgtcagcagctacatttgattattgcccttcgggagctggcaagcggaatatcggtgcaaaacgtcgcggctaatctggggtacgagtcggtaaacgcatttatcatcatgttcagaaaaacgacgggaagcacgcccgcgcactattttgccgatagaagaacggcagctccctga

SEQ ID NO: 110947 - DNA, 2040 bp, Enterobacter aerogenes
atgagcatattaacttcctcttacagccgtttttcgcacgtcataaggcgttggtcaggccacatggcctcacccgcgctgctgagcgacgcccgtgccctgctctattccggcaggagttttgccgccgcgatgctcgcatattatactgccctggcgattggccttgaacggccctcatgggccatcatcaccgtctacatcgtttcgcaaacttcggtgggcgcgtccctgagcagaagcctttatcgcctggcaggtaccgtggctggcgcgggggccacggtgttgattgtgcccacgtttgtaaatacgccgtttttgtgcagcgtgattctggcaggctggatcactttctgtctctggttatccctgcttgaacgcacaccccgcgcctatgcctttgtgctggccggttataccgcaagcctgattggttttcccgccgtcgccgatcccggcacggtgtttaacatcgccatcgttcgcgtacaggagatcgcgatcggtatcgtctgcgccgcgctaattcaccgctacattttacctacccggatatcagtgctgttcaacagcaaattagcccagacactgcacgctgtgcgtcagcggattgccgacaccctggcaggcaagtccgatgcgcagtcagatcctctgcatctggcgctggcgctacagtttctacagggcatcagccaccatattccgtatgattttgccctttcggttccggttcgccaggccagaaaagcgctccacgacaggctggcgcggttagtcatagtcaacggcgaatttcgcgatcgtttacatacgatcaaggagatgccggccgggatgcagccgctgctggatgatgttcaggcctggctgacctgcgaagataccgggaaacgcaaaaacacagcagatgcactacaacaacgtagcgcgcaattagcgcagcagctcactgcgcaggccctgacgtttgaagatgcattgcgggtgaatttcttacgctacgttgttgagctgattaccctcctgcaacagtgtgaacggctttctgatgccatccatcacgccaaatccgcgccagtgcaggcggaagataatacggggaaagggtatgttttccatcgcgatctccttagtgcagcccgaatggcgctgggcgcttttgtcatcatattgggcggctgtctgctatggatttactctgcctggtccgatggcggcacggcggtgtcaattcttggggtttgctgcacactgtttggcagtttcgacacgccagccccacatattgtgaaatacattatcggctctgtctggggcgtattaataagccttatctatagcttcgctctgcttcctccactcagcgatttccccgtgctggtgatggtgcttgccccggtctatctgcttgccggatcgctgcaggcgcggccccctaccacttttatggcgatggggatcaccctgacgctgcccgtgctgtgcgagctgggcgcgcactacagcggcgacttcgccgacgcggccaacaccgctatcgccctgtttttcgcgaccagctttgcggttatcggcatgagtctgctgcaaaccgtacaggcggacgcggcgataaagcgtttgctgaaactgtgccaacgcgatattcaccgcagcatgagcggtgtatttaaaggcgatgaaacgcactggacaaatctgatgatcgaccgggccgcgctacttctgccacgcttgccgcgcagcgggccgtcctccgccctggcgctcgatcagctggtgcactttctgcgcatcggcctctgcgttatgcgcctgcgccgttgcgaaacgcccgccggcagcgatatccacgatgtgctttatcgtcttacccgcacaacggagaccgaagccttgcgcgagcgcattgccaccatagcctgtctctgcttgcccgcggcgaatgaaagatcatgccagtttgtagacaggctggttgatctgcattgcgcattacgggcacagaacaaggagccgactcgtgatcaatga

SEQ ID NO: 110948 - DNA, 216 bp, Enterobacter aerogenes
gtgatcaatgacatcaatatcgggggggtttttatccccgggctgttgttaaccgcattcattgctcttttctgtacgctgttactcgtgccgcttttctctttcagcaggctttactgccgtttgcccttacgcccgttgattgatgtatcaacttttatcgtgacctttttcctgctcttgcagggcctgaccactctggggttattcgcatga

SEQ ID NO: 110949 - DNA, 864 bp, Enterobacter aerogenes
atgaaatttttactctctttgccaggtcgttacgcgctgacgttaatcacagtggcggtggcggctttcgtgacgtttattttctggaaacagtatgcgcagacaccctggacgcgcgatggccgggttcgggcagatgtcgtgcagattgcgcctgatgtttccgggccggtgagcagcgtggcggtcagggataatcagtgggttaaccgtggcgatgtgctttatgctatagacccgcgctggctgaagctggccgtgctcagcgcgcaggccgacgttgaggcaaagcgtcatgagatggtaatgcgccatgatgcggccgggcggcgtgcactcataaaaggggttatttccggcgaggacatccagcaatcaggcagcgcagcacgtgtcgcggcggccaattatcagggggcgctggctgccctggaactggcacagcttaatttatctcatgctaccgtgcgcgcaccggttaccggttacgtcactcatcttcggcttcgcccgggcgactacgccactatgggtgaaacaaaggtcgccattatcgatgcgcacagtttctgggtggtgggctactttgaagagaccaaactgcgtcatattcgtatcggaaacgctgcacaaatttcgctgatggggttcgatcagctcatctcggggcatgtggagagtattggccgggggatcgatgacagcaatgacgagacgggcggacttgggctgccggatgtcaatcccaccttcagttgggtgcgacttgcgcagcgagtacctgtacgtattcagttagataagataccggaaggaatcgaactcgtggcaggattatccgccagcgtttccattatgccttaa

SEQ ID NO: 110950 - DNA, 372 bp, Enterobacter aerogenes
atgtataagactcaagatgaacgagcttggcaacggggttacacactagctaggatttgtaagaaaatcaaaagacaatactcacgcgttgaccaccaatgtgtcagttgggccgtgagctacaatatgcctaaatggattgggcatgtacccatgctggggttgcttatgttgtcagtgatagcactgacttttgggagtttcgtgatcttgtgcacggtattgattctttggggccttgctctagcaagctcttttgcgaagggtggggtatctgacactgcgaataattctgatagtaatgattacgttatggaaagcgctcgccatggccaatatgacgcgccatacaaatcacctggagaggattga

SEQ ID NO: 110951 - DNA, 990 bp, Enterobacter aerogenes
atggccactgcctctcttcgttactatacttatgatgctaataatcaagctcgggagcgcttgcttggtatagagaacgttgaaaatattgacgaaatgctcatacctatcaatgagaagaatacacccatattcatcacgaaggcttttactggcatcgccagcaggcgatggcgcgtagagtttgttctgggtatagaaaagaatatatggggagtatggttaagtgagaaagatataagtaaagacgtttatttatcccagactatgaaaaaacgaagcatcacacatgctggcggtatcgttaaaagggggtgcatcgttatagttgaatttgggcatatatatcttacgctcaattttagcaacgggctctccgatagctcccgctatccctgttatcaccagtctggagaaatgcacaaaaggcgccctgctatcgttgtaagcgcagataaaagaggggttaaagttgttcccatcacctcccaggaacctgatggacacctttataacagagcgatttttgagctcgaaagcgcatcgactacctatatttctgaattcaaaagagataaaccttgttttgcattatgtgagatgattcagacagtttcccccacccgtatacttcctcctgaagcaaaagacatgaaaagcagcgatcgcaagtttcgtcgtgatgagtcctattaccgaaagctcagcaccaacgaccttcatgcccttgaggaggggttacttactgcagttgggatggcttctctccgtaaaaagaatgatactttgttgggggaaagagacaggttaaaaaactcgctggatgaacaagatcagatgctagttagcacatctcatgcgctggaacagacctgcatattgcatgatgattttaagaaaagatatgaggtccttgtgcagctttaccttgcttcttccgggcatacttccctacaaagcatagaagctgaaatctcagagtatttgtaa

SEQ ID NO: 110952 - DNA, 276 bp, Enterobacter aerogenes
atgaaatactttacttatctgactgcgctgatttcactgtctttcgtcggtgttgccagtgcaggggaagctcacgtttgcaaatcgccggcagtgtcgggaactgcggcgaatcccgctctgaatgatgataccgtctttacatgcggaggcggcgtgtcaggcaccattccgcaactggcaaaagagggctggaaaattgtgcagcaaactgatcaggctgattctcctgaccccaccaaaacttatgcgcaactgattatccagaaagactga

SEQ ID NO: 110953 - DNA, 687 bp, Enterobacter aerogenes
atgccaaaaacagacctgaatgttccgtttgatgaaaaagatgaagtcaagcggctgggtggacgctgggatcccgaaaataagacatggtttattcctgatggaatagcgcaggccccctttgagaaatggataccgttcagaaatgttcgcgccccgtactggtatattgcacaaacaatgggtacgtgctggaaatgtcatgagggtacgttgttaacagcaatactgttgcctgatgggcatgaaactcttgaagcggaagaaaatgaagttgacgacaatacaacgaattcggacaccatgcagacatactggctggcacaggataaacctgcattcatattttatatagatgatatgccccgggaagtgttgtcgcagctcggccgggtcaagcattatctgtcaagggattacagtaaaaccacagacagccgttactggatgaatcactgccagcactgccatgcaaaacaaggtgatttccctctgcattgcgaaccaaatggcttttttgtaccgttggaaattcgccatggtcaggatattgagctacatacgataaaaaccgcctttactgctgcatgtggcggcatctcacatgaccatattcatattcattttggcgactcaggggtgtcaaccgctggtgaaatgttaccctggatgaaaatagtaagctga

SEQ ID NO: 110954 - DNA, 384 bp, Enterobacter aerogenes
atgaatcggaatcaaatctggcgggctgtcgcttattcaattaacacctctaagtttcaggaagaggtttttgtttttgtcgatgcacccgatcgggaaaaagcgaaagagcggatttacgagcggctggcagaggaatggggtatcagtaaagcaggtcagtgggatgataagccggcacgtatcgaatttcataatctctgtgatgagaaagaattacgcgatatagctcttgggacacaagtaccgccaggtatgccgttgcttgagagtggctgggatggaaggaggacaatttatgatacaacacccctgattctggtcgcttctccgggtctccgtgaagtgctggacagtgccctgcaggaggtgcgtcatgactga

SEQ ID NO: 110955 - DNA, 246 bp, Enterobacter aerogenes
atgaccaacgttcagcaaggcaggaacgtagcggacagaaagtacggccataaagtccgctgtgagcgaaaagcggaatatcaagtgagctttttatttcctggcgattcgtctttcgggatcaaagaagaccattggcaggtgaatgtcacggtagcagcgtgcatcagcgtagtccctgcagggaaaaccagaggaggcgtcagtagaggaatcattatcagtctttcgcccatcaaccgttga

SEQ ID NO: 110956 - DNA, 2934 bp, Enterobacter aerogenes
atgactgaacaaacctcccgcctggccattgttattgatagctccggagcagagaaacaggccgataatctcgcaactgcactggtaaaaatgactcaggctggagaccgtgctgcttcgagcgctggtaaggtgacaaaggctacggacgaagaaaagcaggctctatctgaacttctcgatcgtattgacccggtgaatgccgccctgaataagctggacaaacaacaacaggatttggcgaaattcaaatccaaagggatggtagatacagatacatttgaaatttattcaaagcgaatcgaagagactcgtaacaaattaaccggctttcgtgacgacttgagaaaaaccgggcagtccgccgcccagactgcttttgcaatgcgcatgatccccgctcagatgacggatatcgtagtcggactttctacaggccaatccccttttatggtgcttatgcagcagggtgggcagttaaaagatatgtttggcggtattgggccagctattaagggagttggtacctatgttatggggttggttaacccttttacgattactgccgcagctgttggtgttcttggtctggcttactataaaggcgctcaagagcaggacgagttttataaatccctcgtattaactggtaatcaggtagggaaaacatccggtcaacttgctgatatggctgctcgtgcaggaactgttgctgattcaaccaccgggaaagccgcttcaacgttaaatcagttagtttcatctggaaaagtcgcaggcgattcactggaacgtgtaacaactgcagtcataaaaatcagtgatgcgacaggaatagccactgaaaaacttgtgagtgacttcaacgatattgcagctgatccggttgcggccattactaaactaaacgaccaataccattttttaactctggcaacctacaaccagattaaggccttgcaggatgaagggaatcagcaagaggcggcacgcgtagcgaccgatgcgtacgccaataccatgcagcagcgtgcaaatgatattcatcagaatctaggccttcttgaaagcgcctgggactcgttggggaaagcagctaaaggtgcatgggatgcgatgctcaacattgggcgcgagcataccctacaagacaagttaactaccttaaatgaaaacattgccgaggcgcagaaaggtcaggcggaaggaggtttttggaacgggttaaatgctcggtttagtaaccttccggagatgctcaaacaacgggatgctattcagtcgcaaattacagcggaagatacactaaatgatattttgtcagatcatgacaaagcagaacaaaagcgcattaaaactcagcaggaagcggatcgagttaaccttcaatacttgagcaatgctgataagcgaaataaagctattaagcagcagagtgagttcttgaaggctggcgctctcacggcagaccagtacgctaaaaatgtttctcgtattaacgagatgtataaagatccaaaagcaccaaagatcgcgaagactcctcaaggaaaagcctacgcagaggatgcagcgactcgacttcttgaccagatacaccaacagactgctgcgatgcagtcccaattggatgccagtgataagcttaatagctctatacaggcgcgtgttaagttcgaacagcagattgctgacctcaggtctaaaagacagctaaccgccgaccagaagtcgattctttcccgttcagacgaaatattgcaggcctacaagcagcaggaagccctgcaaaacaccgtcaagacgctggatgactaccggaaaatgcaggagcaaattgcaccgaaggaattgcgccaaaatgagacgctgcaaaaacgtctagaaattcttcaaaagatggttgacctgaagaaactgacgccagaggctgcagggaagcaggcgagtgacctgattagtaaatcggtgctgcctgattccgttatatcaggtgtgaacaaggccggtggtacgctgacgtctggagcaaccaatagcgacctgtcaggacagggaatgaacatgatagggctgcaaattgatccgcagctggaggttatcgaaaagctgaagcaagcccagactgattatgctgcctggctgaatcagcaacaacaggcgatcacacaaaacactttactgaatgagcagcagaagcagcagcaactgctggcactccaacagcaaggacaacagaaccagctggcactaagcaccgcagttaatgccgcacagatgcaatcagcgcaaaactccttctccagcatcactgagtcgatggggacgatgtttggtgagcaatcggcaatgtacaaagcagcctttgtaacgcagaaagcattcgcgatagcccaagcatctttgcaactccccatggcgatggggcaggcactggcggggttgccgttcccggcgaacctggctgctatcgctcaggttgtgggtctcatgtccacgattacctccagcatttccagcgctgcgctaacaggcatggctcacaatggtatcgactctgtcccatcgactggaacttggttgctggaaaaaggtgaacgggttatgacagccgatacatcggcacgactggactcaacactggagaacttgcgcaaaaatggactggacgccactctcagcaagccggggtttggcactggcgttcagaacgttagcagcgacaacagccggcgaaccactgttcatgcgccgattacccaggaatttaaccttcagggggtcacgcctgagcaacttaattctacgctcaaccagaataacagacagcttaccaagcagttgaaaggggagctaacgaaggaggtcatgatgccgcagggcgattttggccgcgctttaaagagtcgctacgtgagggggtataaggaataa

SEQ ID NO: 110957 - DNA, 822 bp, Enterobacter aerogenes
atggctaatttagcaataaaaccaaccgaatgcactatcaacgtcccgttctacggatctgagttgtacgtggttaaccacaacggcgagccatacaccccgatgaaaccgatcgttgagggtatgggaatggactggaaaagtcagtttattaagataaaacaacgattttcgaaaggtatggtggaaatcaccatacctaccgccggtgggtttcaaaagatgctctgcctcgccctgcgtaaactggccgcctggctgaacaccatcagccctaataaagttcgtcctgagatccgggagcgcgtgattcgttatcaggaagagtgtgacgatgtgctctatgactactggacgaaggggcaggcagttaacccacggaaatcagaaacgacagcggacgaacgcacaccgctacgaggtctggtaaaccgcatcatgggtaaaacgggcattcactaccaaccgctttataaaatgattcaccgcgagtttggtgttaaccacattgacgagttgacatctaaacaggttgctgaggcgatggagtatctggcaggcaaggtgcttgaaggtgagtttttgccgaaggagagtaacccaataccattcccgccagcaatgccgaccagtgggccggggcgaacgatgatttacaccgatgaaaaaggtgtggttcagggggcttatccgttgaatgaagatcaggtggtcatgtcatttgacgggttcgttaaattcttcagaagaaaaggatggctggtagccccgaaagaggaggtagcaaaaggattaataggagcgatacaaagtttgccttag

SEQ ID NO: 110958 - DNA, 177 bp, Enterobacter aerogenes
atgatgaataaagaagttaaaactatcaacccaattcaactaaggcttccgcctgagaacaaaaattggattgctaacagcgctgaaaaaacgatgcgaactatccatagcgagattgtttaccgcttgaaactgcttcaggagcttgaggagaagggcgttgtcactatccagtaa

SEQ ID NO: 110959 - DNA, 714 bp, Enterobacter aerogenes
atgaagcgctatgatattgatgatgaattttcaggaagaatatcatccgcaagagcagcaaaatcaatgactcaatcagagttagctgctaaggcgggtgtgtcacagcgccaaatcgcagcctatgagggttcgcaatccaaaccaagacgaggggtattgctaaagctcgccaagagtttaaacgtgactcctgaatggttagccagaggattcaaatccaagcaagaagacactcagaatagtgaagtggcatacgtagcatctgtgagtgagacacgaattatcccactgataactctagggatggtgtctgattggatttcatcccccggtgattttgatgattgcgatgaatatcatgaaacctcattaccagtatctgacaaagcctttgctataaaaaactttgatgctgctatgtcatcatctgactcagagggatatggcttcccacaaggagccataatcacattcgaccccgcagtaacgatcgaggacagggactttgtaatagcactattcagctcaggaaagtccatattccgccagtatctcataggctttggcgagtcaacgtttttccctctagattcaagatacccatctgagatatttgagaatcacgtgattgaagatgacattacattgatcgcagcagtccaagtacagctttcactgccagcgagcgaacggctgttagcaggagattaa

SEQ ID NO: 110960 - DNA, 357 bp, Enterobacter aerogenes
atgatagctacggggaaagaggaaataacgtcggaatgtaaaaaaggcgatgtttcctttaactgtgaattcctcaccggcgatttaaccgggacgggaaagtggcatcataccaagctgtacctgcataacagcgggatggtagatatgattattgacggcaaggcttactatcaaagcgatatcagcaatagcagctttgccggtcaggagactacttctttcacgatgaaaggcgttagtggggatcgcggcgaagtaaatctcgtgagatccaatgaagggaaatccttaaattttgaggcctataacaaagataataaacgatttgttatgggtggtgttaagttgcagtag

SEQ ID NO: 110961 - DNA, 552 bp, Enterobacter aerogenes
atgggggtaatcccccctatggatgaggcagaccctactagccatgcgcgctcgccatacaaaatggatatagtgcgttttgtaagtatgtttgcgcttagcccagcaagaatgaagatactcaaaggatttcttgattttcgtatgtcgttaagccaagcggggttagttgagggttttcagtgggttgatggcagcttcacagaaaacattgagctaattgagagaagatctccaaatgatgttgatgttgttactttttttcaattcagcgctggtgatgatgatgcgacggtaattggtagaaatcctgaactgtttaaccatgatcttgttaaaactaaatatttagttgattcgtactatcaggggcttaatgctccaagccatgagcttgttgaaatgactgtatattggtacagtatgtgggctcataaacgtgacttgtcatggaaaggttttattcaaatcccattgaacccacagcttgatgttgtggcaatgactatacttaattctgccactactggggaggcaaacaatgaatcgtaa

SEQ ID NO: 110962 - DNA, 930 bp, Enterobacter aerogenes
atgaatcgtaatgattatgttttcgctctcagtgaacgcgagcaaataagtaacttattaaaaaacatgccaatcggtcagtccatcagcaggaaaagcttagaagatcgattaaaaaatgttgaaagaataatttctcaagctgacgttcgagagcatgaaccgacgcatgcggtgttaacctttagaggtcctacagtcattggtactcacgggatttcagcagtgtttgggtcgaaagctgtatcctgttttaatgatgcaatagcctatgtggcaagtgcatttaacggccctctaccagcatcaggaaggataccaaacattgaaaataaccgcctgatgatcacagcatcagcaaggggttcttttggatttgtacttgaagagttccgacctgatgcgccacttacattcgatgaagaaacaccagtctctaaagctattgataagacaagaaaaatattgcaggccagcttagataatgatgatgaagagctttccgacgctttagaaaatttagattttcgtgcaatagaaaaaatccgtagtttcatacattatctatatgaaaataaaactgtttttactttaaaaaacaatgacttcaatattgtttttagagagccaaagcaactcgaagttgtctacaatcaactaagtagcgataacattaagcaggaaaagattgttgaaacagtgatatttttaggcactcttcctaacaaacgccagtgtgagtttattgtgctgggtaacaccgacattaagacagcaagtatcgataaagcaattggtgatcctggtatcattaacaaacatttaggtgttactgcttctgcggtatttgttagaaaaaccgttggtaatgggagacctagatatacattagtgtctcaaccagagtggaaatctggctctaacatttag

SEQ ID NO: 110963 - DNA, 174 bp, Enterobacter aerogenes
atgctacgcccgcaaaagctcgctaaagggcctttaaaggcctttaagggtaagggagagaagtgcgggatttggggtggaggaacgtttggtcatctgtatgggcaattccatcaaatccatccgcagccccctttactgtctaccgatacctacattcagaacgtcctgtag

SEQ ID NO: 110964 - DNA, 699 bp, Enterobacter aerogenes
atgcttgagtggctaaacttacatgtaggtactgactgggcaacttaccaaggatggatattgggtatcgcaggttttggattggcgctgtatgggctatatcgtgcagcaccaaccataaaacaaaaaataaacaatacaagaataaaacaaacagcaaaaaataccactggaaatttaaatcaggccggacgagacataaacaacactacgaacaatcatttttccggagttgatgagaatgctatattagcaaataaaaaacatgctcatgatttaaaaatcatagaagaaatactgagtttattaccatacgaagaaactattgaccaagttgaacgtagttacatagttggaatgttttatcagtttgctcgtgatttagaggatgcagaaaaattcgcagatgataaatatactctttataatgctaatgtcgaaattgcaaagcataaatttattgacgccttaaaagcattcaacaattcattcgacggtttcctttctgttgaccatccagatagaaaacccctccgattagatttaccttatgactggagaattaaaggaaataaaagcgaatctatttatcgaacacatcagaaaaatatgcgagagacatctggggtgatgatagaatgctacaaaaattttgtaagaacatttaagcagcataattttataacagacaagttgtaa

SEQ ID NO: 110965 - DNA, 1632 bp, Enterobacter aerogenes
atggcagtggaaaaactgattgtcgaccatatcgacacctggaccacggcgctgcaaacccgctccacggcggggcgcggcagctcgggcaagattgacctgtacggtattaagaagctgcgcgagctgattctggagctggcggtgcgcggcaagctggtgccgcaggatccgaacgacgaaccggcgtctgaactgctgaaacgtattgcggcggaaaaagccgagctggtgaagcaggggaaaattaaaaagcccaagccgctgccggagattagcgaggaggaaaaaccgtttgaactgccggaggggtgggaatgggtaacactggcgaccgtaggtgaaatagtcggtggaggtacgccaaagtcagataatccacaatactgggccaaaaatggtattaagtggcttactccggcagacctatatgggctcaaagggaagtacatttcgtctggagcccgtgatatttcacccgcaggactgtcaaactcatcagctaggttaatgccaaaagggagtgtgcttttctctagtcgagcaccgattggatatgtcgcgatagccgatgcagaactatcaacaaaccagggttttaaatcttgtgttccatatatcaaagatagtgcagaatatatatattacttcctaatggcatcagcaaaaaaaatagatgcagaggcaagtggtactacatttaaagaagtatcaggggcaattgtatctaaaatattatttcctttgccgccattgagtgaacaactaaaaatcgtctcaagggcaaatgaacttatgtccctctgcgaccaactggaacagcactccctgaccggtctggacgcccatcaacagctggttgaaaccctgctaaccacgctaaccgacagccagaacgccgatgaactggccgcaaactgggcgcgtctcagcgaacatttcgacacgctatttaccaccgaagccagcattgatgccttaaaacagaccattctacaactggcggtgatgggtaaactggttcaaagcactgatgttgtcgaatataaaaagctaaaaacgtttctttcttttggcccaagaaatggtttttctcctgtagaatcaaaaaataaaactcggttcaaagttttaaagcttggtgcaacttcttatggagaactaaatatacaagaatccaagtttgtagatattgacatcgatagtaacagccatctgtatattaaagagggtgacattttaattcaaaggggaaactctgcaaattttgttggctgtaatgttttggtaaaagaaaatcacaaaaatataatttacccagatctaatgatgaaaataagaacaaatgaagatctcttacccgaatatgcttctatttggctatcatcacctttagccaggggatttatgtgggacagaatgaccggaacatcgggaacaatgcctaaaatcagcaagaaagtagtcgaagacattccgattatagttccatctattgctacccagcaaaaatgtatagcattcgtgaatctggctatcaagatttgctccgatcttaaaattcgtctgcaaaccagccaacaaacccagctccacctagccgacgccctcaccaacgccgccataaattaa

SEQ ID NO: 110966 - DNA, 633 bp, Enterobacter aerogenes
atgtcaacgattatcatggatttgtgcagctatacccggctaggtttaaccggatatctggcaagccggggaataaagaagcgcgatatcattgaggtgcgtagcgcacagagtttgcaagagcgctgcgaatcgctgcgtccggcggttgtgtttctcaacgaagactgttttatacatcacgaagagagcaatcaacttatccgcgacatcattaccacctaccccgatactctatttgttatttttatgtcgctggccaacatccattttgatcactatttacttgtacgcaagaatttacttatcagctcaaaatcccttacgccgaaagaccttgataacatactgggtaattatctgcagaccgatagcgccaataatctaaaccaattacgcacccgcattcccactctatcgctcagtcaggccgaatcgaatatgctgcaaatgtggatggccggccacgctacttcacatatttccaggcagatgaatatcaaagcaaaaaccgtttcgtcacataaaggtaatattaagaaaaaaatccagacgcacaataaacaggtgatttaccacattgttcggttggctgaaaacattacttccggcatttacgtcaatatgcgctga

SEQ ID NO: 110967 - DNA, 582 bp, Enterobacter aerogenes
atgttcttcggcctgctgctgggatttatcctcgcactgatgcgcatgtcgtcaatctggccggtcagatggctggcgcggatgtatatctctattttccgcggcaccccgctgattgcccaactgttcatgatctattacggtttgccgcagttcggcattgagctggatccgattccggcggcgatgattggcctgtcattgaatacagcggcctatgcggcggaaacgctgcgtgcggcgattgcctctatagataaagggcagtgggaagccgccgccagtatcggcatgacgccgtggcagactttgcgtcgggctattttaccgcaggctgcccgcgtggcgctgccgccgctctctaacagctttatcagccttgtcaaagatacttcgctggcggcgacgattcaggtaccggaactgttccgccaggcacagttaattacctcacgtacgctggaagtatttacgatgtatctggcggcatcactgatctattgggtgatggcgacggtgttatcgacgttgcagaattattttgaaaatcagctgaatcgccaggagcgtgatccaaaatga

SEQ ID NO: 110968 - DNA, 696 bp, Enterobacter aerogenes
atgttagaaccaccaaagagttataatgaaatgttacctatgctccataaggcaacttttattactacatttatattttatctgtcattggttatttatggctacatcccattggttggcattaatgccaagtacattccacccattaaagactacgaagagtttattaagtggatattaacattcggcatattaccaatcgcattttcaattttttggaccgtgattagtggagctttagatctacataataacgtggcaaaaatcattgggataagaaaggtatgggataattatttaattattaagccattggcgaagatagccggcgttacgagaaagttaagtggtgatgaatcttacaaggtaatgagtaaactttattatccagaagtaaaggagttgaaagataaacattatgttgagcttttttggaacaaagtatattacttttgggttttctttgaacatacagttattgcatttattactgttttgataatcagtttcgctaaattaactaatctattctctgttactggttctttaaataacctttggtcgtggtttattttccttgttgccttcaattttcttatttttatagcatcggttaagccaagaactgaaagtcaagtaagacagatacctgatgataaaataaaggaattctttaatagtaacaatattatttaa

SEQ ID NO: 110969 - DNA, 666 bp, Enterobacter aerogenes
atggggttagttttgaattacaagataaatggaataattatacgttcagaaaatgctgccaaaccatatactatgccatctaattatctctgcaactatattgaaagctctattaaaagtggcagggcccttgattttggatgtgggaagcttaggtattcagaacaattggtaaataaatttgagactgtaacatttttggattccagaaaacaacttgaaagagtgcaaattatcaggggtgtacaaactacaatcccagagtatgtggctaataactataaaaatgctaatgctgttccttttgaaagtatagataaaataacgaaccattatgattttatactttgcgcaaacgtgctttctgcaattccatgtaaatccactatttacaaagttatcagtgcgattagagatttattaaagagtgatggggaggcaatgattgttaatcaatacaaaagctcttattttaagaagtatgagagtggaattaaacatttgcatggatatatataccaaaactctcgcaacgcttcctattatggtttgttggatgaaaatattgtaagtaaaatttgtttagataacaatttggtaataattaagtcatggagaaaagcaggcagttcatatgtggttgttggtaaaaataaacatatttag

SEQ ID NO: 110970 - DNA, 900 bp, Enterobacter aerogenes
atgattgacgcacttattagaaacttacagagagacatcgcgctacttcagctttatatcgcgcaacgcaaacaggctggctttcatgacatggaaagaatgattgagtcattgaccatctttatgtttcgcgcactaaaaatgggtgagcttgagaacatgaatcagattaaagttaactttcccgccattgatttagctgacaatcaaaacatggtagcagttcaagttactacgaatgcaagcccgacaaaaattaaaaaaaccattacagcttttgaaaagacaaatgatttaggtataagcctcaaagataaatactctactttatatatttttggtttttgtaaaatatcaaaaaactcagttccaagttattgtaaaataatcgatcccagctatttcgtgaatgaactttgcgataaagcagatgaagatatgatccatgatatgctcgatgctattcaacgccatcaggattatacgtcattacacccatggaatgataaagactcactcgaaataattctcaatgttattaatcgcaatgcaattaaacaccggatgagttgcgaaggcagcctatctgatatgcttaccggtttaaaggaaatcaatgaagtaattacaaagggaacaatccaacgtaagcaacgttcaaaatcgatatctgacttcaaagatcaaagcatggttaaatttctgagaggtgtaatggatgatctgtctgttattcaagctatagtgaacaaatctaaagttaaccaagatgatatggtttatatcagctatgaagatatgattagcattgataaattaaaagctaaaatagcaaaaaattcatctgagatttcaagtcaatataatattggaatgacactaaacattgttgatttataa

SEQ ID NO: 110971 - DNA, 183 bp, Enterobacter aerogenes
atgtcatttcagattaaatttcatcaaattcgcgctttcgttgaggttgcccgcgaggggagtattcgcggcgccagccgggcgctggcgatctcgcagcctgcgttgaccaaggcgattaaagagctggaagaggggctttccgcccaactgttgtccgccgcagccagggggtggcgctga

SEQ ID NO: 110972 - DNA, 846 bp, Enterobacter aerogenes
atgaagtctgcgaaatggtcggcaggttacgcgtcagacatcatggaagcgtttcagaacgatatttttccttatgtgggggcgaggcctgttggtgaaattaaaccgctggaactgcttaatgtgctgcgtagaatcgaaaaacatggtgcgttagagaaaatgagcaaagttaggcagcgctgttcagaagtttttcgctatgcgatagcaaccggaagagctaaatttaatcctgcagcagatctctccaaggcccttgaagtacatcaatccaatcatttcccgttcctaaaaaccgatgagatacccgattttctgtgtgccttagatagttacacggggagtcgacttgtccagattgctacaaaattactgatgatcacgggtgtaagaaccattgaattacgcgcagcattatggtcggaatttgatctagataacgctatttgggaaattcctgctgaaaggatgaaaatgcgcaggtcacaccttgtacctttgtcgactcaagcgttagatttactcaacgaactcaagattatgacagggaactatcgttatgtttttccggggcggaatgatccgtataagccgatgagtgaagcgagtataaatcaactaatcaaacgaataggttatggtggccgaattaccggccatgggtttcgacatactttttcaactatattgcatgaagcagggttcaacattatttggatagaattgcaactcgctcatgttgataaaaatagtattcgcggaatatataaccatgctaattatatcgaaagccgaaaagatatgatgcaatggtattcggacaaaattaaccagaagaattaa

SEQ ID NO: 110973 - DNA, 2127 bp, Enterobacter aerogenes
atgtatattaagaatttatcaatacgtaattttagaaattttcaaagtacaaatttgaactttaagaaggaatgtgtaaatacgatagttggggagaactcatcaggtaaaacaaatgtttttgaggctatgagattaattcttgatgactctcttccgtattataaaagatttctttctgaaaaagattttcacagagggtgtttgcctgtttttggtcagtggatactaattagtttggagttagatgacatttctggagatgaggagtctgaaattttatgccaattaaatacgacagttgatgcgggtggtacagggcgggtaacatatatttatcgtcctcaattttacataagagagaaactttttaaattatcctctattgaaaatgttgaaaaaagaaaggaggcttatgaaggattgttgaaagagtatgttatcgataaaaccacttatgaggctttgattgtttaccagggaacttgtgattttactgatgaaaatgattatattaaagttgtcggtgaattttctaattttattttttcgaatcctgcgattgagtatatagatctactaggaaatagacagcgaggctataacttgctggaccatattagctgcacttacgctagagcattaagagatgttgttagtgaattaaaaaataatagatttaatccatttcaaaagttactggattttatatctaaagatatttcaaaagacgacgaactcacaaataacattaaagatgtaaataataaaatatccacaatagcagaggttaaaaaactatccacaggtattttaacatctattactaacgctgttggttcgacttattctccattattaaatatttcttctgagcttccttgtgaagtaaaagaccttgtgaaggttttacaactcaaggccggggattcgttaagtgatggttatacgtctgaattgtcagaaatgagtttaggtggggctaatttaatatatcttgctcttaaactttatgaatatgaagaaggggtgagtaaaaacttattatcaaatttccttattattgaagagccagaggctcatattcacacacatattcaaaaaacactttttagcaacttaaaaaataaaaaaacgcaagtattcatatctacacattcaactcacatttcatcagtctctaatatatcatcaactaatgttttagttaagaagcttggatatactcaagcctgttctccttccttggggcttgatgagccaacaataaataaaatagagcgcttccttgatgcaatacgaacggatattttatttgcaaaaaatgtaattctaattgagggggatgcagaagaaatattgataccacatttagtaaagaattcttttggtgtaacattagatgaattaggtgtgtcactaatttcagtgagaggaactgggtttgaattgttgtcatcattgtttcatccaacaagaataacaaagagatgcgcaatacttactgatgatgatattaacatctataaaaacggaaagccggaatatgttactcaggtaatgtatgatgatgctgtttcctcagaaaaatctgggaaagatagaattaaaatattggaatcaataactgcgaataatgatcttattaaagctttttttacgaaatatacttttgagattgatttggctctaagtggttcccaaaaatattttgaggaaatagctagaaagtcttttgaaaaagagttttatttaacgccttatttagacgctttcatgtcatccgacgatattaaaattggttctttcgctttgaaattagcaaacaaacataaaaaaggttggtttgcaatgaaagtcgtagagaaacttgatcgtgatttccctataccaattgctttatgtaaagcacttggttttacaagtgattttaacaaactaacacttgcaagagtgatcaaatataggtctgattattatactcaaactactggggaaaatataattgaaagagtattctctgatgatagtcttgagtatatagttgaaaatatcgagccagtcctagacgtttttaaaggacattatagcagtgatcctctggtttatcttttaatggaggcatga

SEQ ID NO: 110974 - DNA, 1689 bp, Enterobacter aerogenes
atggataatgaaaaaaaagagttattaaaaattaaaaaaaatctatttgtctcagcttgccccggagctgggaaaactaaatttcttttagccatgcttgaagataatattagatatggatcagaaaataaatggcatatagttcttacacatactaatgctgcagctgatgaaataaatttacgattagataatcaaaatgttatcaacgatagaatttggtgtggaacaatacattcatttttacttgaatgggttgttaggagatatgcgggtgcaatggtacggacaaagaatgggtttagattaatatctgaacgtgaacatcgtgatataatacgtaagattgagaaggataaatttcccaattgtaaattaaaatttaaatgggatgagtacggtagatctcaagttgagcctttttgcttatgcaatgaacctgaaaatatattagatgtacaaaaaaatgaggagatggctcgagaggaatacgaaaggtataaaatggaatccagaattatagatttcaatgatatattgactcttagtcgtgatttccttgctaacaatgaaaaggtctccgagtatctatctaagttgatcggttatatttatttggacgagtctcaggatactagtcatattcaattggatgctctttcctcaattacaaaatacaacaggacaataatgcttgttgtgggtgataatgatcaagctatatatcaagatctgggagtatctataaaaaatgatgtcaatataaaaaagatattaaagctaaatgatttagccgttagacaacttactggatgttacagatctacaaaatcgttagtggagtattataaaaaatactcctactctaaatctgatgttcaatctatccgagaggaagtcggtaaatttcctgttatcagagatacgttgcaaactgaattggcagatagaataataaatcttatcagaaaatataataatcttaaaggtaatgttgagggggtggctatcattggtcctaataaatattacttaaatgctcttataaatgatttgtatgatagatcaaatgaatttgtatttgatttctattctactaatccgctctacacactaaaggatacagtttactatgatcttgttcgtcttacattacttgatgtgtcagttaaaaactatagggtaagacaagcattatgtacatcaataaaagataaaataccagagtttgatagtttatcttgtagtgatttaaaaaggacaataaaacagttcgaaacaaagcgaactgtatttattttttggttgaaggatttctatgattttcttttctctaacttaccaaattcccaaaaaataatttctgattatttaatttgtcgttctaatatttccgcttttcccgttagagctgatatagtttcgatacgaaaaataactaacaaagaagctaatgttgttaaagtaacaacaatacatggttgtaagggagaagagtatgattatgtaatctctatcggatatcatgatcaagtcgttcctcatgcctctgtgattgaaaagggggttgaatactcggaaagtgttgcaaaaagactaatgtttgttgcattttcaagagctaaaaatcacatgaatatatttatcgatgatcgaaaacctgttagtccttattttttgggaaattaa

SEQ ID NO: 110975 - DNA, 258 bp, Enterobacter aerogenes
atgaatagttgcaacctagaatttaaaaataataataagaaaatggacgtaaaaaataattccccattttattctacattggtatttctgtcggtaaatgggaaccgtgtatttttatctcccgaggaggcaatgatagcaccgtatagttcgcaatctatcagtatatcaacagatgcatccgtcgttgaatggattcgtattaatgattatgggagtcttgaaaaaaaatgcacctattttttaaagaacaaataa

SEQ ID NO: 110976 - DNA, 186 bp, Enterobacter aerogenes
atggggcgctggctcgctgtcaggctaatgaaagagcttgaactgatgagttgccagcaacccacccaccggtataaacggggtggtcatgaacacatcgctatcccaaatcaccttgagcggcggttcgccgtaacagagccaaaccaggtgtggtgcggcgatgtcctatatctggacgggtaa

SEQ ID NO: 110977 - DNA, 678 bp, Enterobacter aerogenes
ttggcaactcagagaggccatcagatggggcgctggctcgctgtcaggctaatgaaagagcttgaactgatgagttgccagcaacccacccaccggtataaacggggtggtcatgaacacatcgctatcccaaatcaccttgagcgacagttcgccgtaacagagcctaatcaggtatggtgcggcgatgtgacgtatatctggacaggcaggcgctgggcttacctcgccgtcgttctcgatttgttcgccaggaaaccggtaggctgggcaatgtcattctcaccggacagcaagctaaccatcaaagcgctggaagtggcgtgggaaacccgaggtaaaccagcgggagtgatgttccatagtgaccagggtagccactacacaagcaggccgttccggcagttattgtggcgttaccggataaggaaaagtatgagccgacgcagaaactgctgggataacagcccgatggaacgcttcttccggagtctgaaaaacgagtgggtgccagtgacaggctatataaactttagcgaagcagctcatgcgatgacagactatatcgtcgggtattacagctcactaaggccgcatgactataacggtggattacctccaaacgaatcggaaaaccgataccggaaaaactctaacgcggtggccagttttagttga

SEQ ID NO: 110978 - DNA, 192 bp, Enterobacter aerogenes
atgtggatcaagcgactgggccgtcaggtgaggcttattcatattgtcgatcccataaatgatcccttaagagatcctgttgagatcaaaaagagatccccggatcgttacagcccttgtcctgtctgcgctgagaggctgttcacattgactgaggtgggtaaaatattgactgccgtatggcttttctaa

SEQ ID NO: 110979 - DNA, 822 bp, Enterobacter aerogenes
atgaacgtttggcaaagtttctatgattggctttcgattccatccactggcagtctcatcggaattggcggtatattagtagcaattttatctgttttcttaacaagagctgtatcaaaaatttccagtcatcttgagttcaatagtttgattggtggttttgagtcaagtttacccaagaagatcaatattacatatgccggcgtcccagtcgaaaaagtttcttcatctgtttttatcatctggaattcaggtaataaagttataaacggcgaatcacttaaaaccattgaccctttacgcattgaggctagtcatggagttgagattcttcgatctaatattcaaagaataaacaacaaaacaaataacattcaaatcacaccagaccaaaacaacaaaagcaacttactgatttcatttgattatcttgaaaaaaagaatggcgttagaattgaaatacttcataccggcgatagtgatagtttacaagtcaaaggtacgttgatcggtgtaaagccactaaaaagaagaaaaggaatattacgtaaatcactcaatttagccttcactaatttcaaagtaattaagttttcaatggctgtctctgtagttatagctgctgcattatttttccttatgttactttatacttttattcaacctgacgcattcaaaatagccaatccaaagccatttaatatatggccaattcgaacagtattatttagttatttaattttaattctatttgtttttaataaaatcaagccaccttatccatcaaacctccgttcagataacagcaaagttaactcctga

SEQ ID NO: 110980 - DNA, 792 bp, Enterobacter aerogenes
atgattgataaaatactgagttatgcatcatcttttggcacattcatttcagctattgctgctttatatgcaatttggttaactatttttcaacgcaggatttcatacagaccgatattgataataaaagacttttatactcaaacatcaactgaaaatttcaatggatttgattttgaagtccctgaacaagagggaaatttaccgatagaaataaacaacataggtttgggtaccgccgtatcgctaaaatatcactgggagtatgatgtagaaaaaggtatagagcaataccaatcactattcaaagatacattttcaaaagacgatgacagtttcgttttatatagaaagaatagcgattttatctttgacgtcggtaacaagacatatttctatcctaaccgcacaacttcttacactatagatttcctattaccctacaactcaaaatcgacaaatacattattggatcttccaccgctacctataaaaataatagaaaacataaacttcctaacaatatttaataatgaaaattacaatgtaagaataaatggcccaacacttattgtcgaatttcaggacattgagggaaaaaccaaaataaacaagtgggatacttaccttgaaaaacattattcatcaattaccacaactggagaccttgaatgcaactatgcattaaggtttacacccagacctcatggctggacacaaagaagactgcaaaagatacgcaaaagctacgcagatttcattaacgagcatgattttaataaaaacagatag

SEQ ID NO: 110981 - DNA, 318 bp, Enterobacter aerogenes
atgtgcttatttgaattgctagcagccagagggattcattcttttttttattttccagatgaggcatctctatttgatgtgaatggaagaaaacttggtacattgcatcacaaaaaagatgcatgggtgatttatcagagaccattagggccggcattagaagttcacaaaaaagccaccatgattgcagatttagaaaattatgcagatatcgataatcattttagatgccataaaatagttgtagataattctggtaaattcctttttctgattcttttaagctgcactgttgatgcaatcgaagcccgcgcttaa

SEQ ID NO: 110982 - DNA, 219 bp, Enterobacter aerogenes
atgaataatttaaagaaactcaggaaggaggccggcatctcgcaggcttcgttagcttcagctcttgatgtgtctcagggggctatagctcactatgaaaaagggatacgtaagctcaatgtagagagcgcaaaaaaaatcattgaggcgcttaacgcaaatggcgttaactgcacttttgaagatgtattcccttctcaaaaagccaataaggcgtaa

SEQ ID NO: 110983 - DNA, 630 bp, Enterobacter aerogenes
atgaaagagctgggtatctctcaggagaaactaggcgagacgctgggtgtaactcagggggctattgcgcactggcttaacggcaagcgcgatcccggtatcgagaacatcgctagcatcatgcgagctctgaagatcgatacgattagccttctacctgatggaagcgttagaagtccacaagatgaattagagtatgcagggaagttaaaagatggtttggttccagtcgtcggtgaagcaatgatgggcgccgatggtgagtttgaaatgcaggaagtttctcagggttggctacgcatatacagctcggatcccaatgctttctctgtgaaagttaagggtgatagcatgtttccccgtattaattcgggtgaattcgtagtcatagaaccgagaacgcaggtatgccctggcgatgaggtgtttgtcaggactgccgaaggaaaaaacatgataaagcggttaggctaccatcgggacaacacatatcaatttatcagcgttaaccagcaacatccgcccttaactatcgacgatttcgcggtggataaaatttactttgttgctgctattgtgaagtcttcgcggtttatagataacatagccgaccttaacgccccagtctaa

SEQ ID NO: 110984 - DNA, 702 bp, Enterobacter aerogenes
atggtttggtcgcaattacttaacagcaaagagttttggggggctatggccgcggggattcccgtgttgaccgcacttattgggggggcagtaaaatccttaaaaggtgatggtacttctaagaaggcaaaggctacgcgcatccaagaggttttagaaaaaaataaggaatttttaggtaaggaagatattcgatttttggaaaatagaattaattattatgtaatgcagcctgtggcgaaatttcatcaaaagaggtatcgggcaaagtatatttttttgatgaatcgctcaaacggtcagttgaactctttaagatggcagaaattgatttcacatatccaatacgattttattagtaagaaatttttcttggattacacgtctagggaattcctcaaggaaaggaaaaaattgcgaaccgttgccgtattttatatgtcaatttcaatatttgtattgatttctatgttaatggataaaatggcgattcaacttccaattgatgaaagttacgttttcaattacaaggggataagcaagataaacgattacctgcgtttatttagtctcttgacctatatcccattctctgtttattgttggtatgggatgcccaatgataaaaaggctaaagaaatttctcgtaaattaaatgagattgatacaagcgattattcttcccagaccgatttttattag

SEQ ID NO: 110985 - DNA, 921 bp, Enterobacter aerogenes
atgaataaaaagccatcgttctatgggatgctatactttataaatataatattattttcgattatttatttttttgtattcgatgattcgtttaataatacgttaagttatcctgcgtctttatattttagtgtggtgacagcgacgacgcttggttttggcgatataattccatccttagaaaaggattctttactattaacaatatcttttgaagtggttttaggtgttattataatcggtttgtttttgaattctatttcacaaaaattaagtgatcaaaaggatcagcaagcaaaaatagaaagcgaacaggagaaagacaaatggatgtcacaagcaatgggtatgttacgtcctgtaattgaaattgagcttcgcactttgtcacagtattataaatttacaagtatagaagaaaaaataagatacaagcagattcccgaagtgcaatttactgatgaatactataagcaaatcgtggatataaactattttgcgagatttgaatattctaacggtagtgaattcatgtttttatattttaatagggagaacgataaatttaaagaaaaattggaaaaatttctctacaaatatgcacatgctatacctatggaaacgctggtacgtttaaataaaattcaggagcataaattccttgaatttcccaacatggctaaaatgacacatgtaatggttagcgaaaagaaaagagttccggtgtggccacaagattatcctatggatagcgaaggtatgacagagttcaaaatttcgacttgcaaagattttcatattttattgttggaagcgataaaagaaataaatttttatttcgtcgggaacccgattttgataaacatagaacttagcaataatattttgccaagagttggatgtgcaaggcaaaagtcataa

SEQ ID NO: 110986 - DNA, 633 bp, Enterobacter aerogenes
atgaatgagcagcgaccgcctccgtcacgctcggcacagggaccggttggctggctgctgtcgctgaccgggcatctcatcgggctggttattggtgcgctggtgctgcgggtagtactggagctggcggggctctatttctggtggccgcaggaggggagtaggcatgtttttatggtgatgaagcatgagcaggcggaattggttactgcgttacaaccgcatccgctggagaatgaaattcttgtgcagctggaaaaaggggcaactcgtgtacttatggccaacaggctcctgcagaaaccgttcaccgccctgacttatacgctggtgagttttatgcagcgactggtatggcttgccgctatgctccccctgatttgcctgtgtgttgtaatcgggctaaccgaagggctggttcaacgggacttgaggcgctttggctccgggctggaatcggtttttttccaccgttatgtcatcaggtccggcagttcagtcgccaccacgctgtgggtgttttatctggcgcagccgctgtttctgcctgcgatgctggttttactaactgcaggcttatggtttgggataactgtatggatagcggcagggagttttaaacggtgtttatga

SEQ ID NO: 110987 - DNA, 1677 bp, Enterobacter aerogenes
atggagttggtctttgtatatatcgcagagcataagatattgaacaagatatcttttatcacacaccctttatttaatgttgagtttattaataataaaatcaaaatcacaaataaaaatgacaaaataatccagtattataacggtgtaaaaattaaggcaataattgggaaaaatggatgtgggaaatctaccttcttggaattcattgaggaaagtttcaattacactgaatcaagtggattcatgatctggtttaaacgagacgataaaaattttttgattcaaagtgtcaattacgacactggtagtttgcactttgacttttgccaccctcattcaatatcaaccttagataaaaagcacctaaagaaatacaaacacaatatcgtaaaaataaataatcttagcactttcctaccgtatgtaaaatcaaagagaaacaacagtattatagatttatctttgagtaaacaaaattcccttacgggtaataccagaaatacaaatctacgcaacctaatcactttcttcaatgaaagttcatggttatataataaaaatgcaaattacagatataatttcaaatttaaaacaccaagcaatgtaataagaaactggatattcagcctctataaaaaggaaaaccccgatgttaaagaacatcttttaaaatacaagttcaatgattggtacgattattttttcggtaacaacaaatcaataagtggaaacctcgcaacccattattcaatatttcagtatttgatagaaagaaatatttttagttgtattcgatatatttcatcaacttctcttgtagacaatgaattttctgacaaactagcaagcaagataatacatcatatactcactgaaaatcatatacatcctaatcattttatatatttacttgataacgtttatactgaatgggaaggaaaaagagaaaacaaaagcaacattacaaaatttgatgctgacatattaaaatccaacatcagtcatatctttatgattttcgataaaatatcccatgtaattcataattatctatctacaactagcacagttatagtttctgatggtttaataattaatgaccctgaagttattctgcatttacttgaactgatagctaaactccccaaaaacattaataataactttagttatggatggatagggtttagtacaggggaactagcgaagttaaatattttctcatctatatataattacattcagaataaaaaaacagaaagcacgttgtttatattagatgaaacagatctatatttacatccagagtggcaaaggacattcattagtgaactaatatccttcctagaaaatgaaaccgacaccaataaaattcaactactaatcacaactcactcccctttaattataggggattttttacctgatgatataatttctctgcaattagattctaataataaaccctatcagagtgaatcatatggttttggaactgaaataacagacgcttatatatcaggaatgcatatatcatctacttttggcgagcattcacggaataaaatactggaattaatagataataaaaaagagaaccgtcttacagaaagcgatcattggttaatatcgaatttaaaagatagcagcattaaacggatgctaacaaaatga

SEQ ID NO: 110988 - DNA, 1170 bp, Enterobacter aerogenes
atgattaaattcaattatacactatgcccttctttaattattgatatcaaaaatcaatttattaacaattatatgcaagtaaaagcattagaggttcttgcaatctgtaaaacagaaagcccagaatggtacccagcgttacataagcatttacaatataaaagtttaataaaaattgtttttgcaaaggcaaacagcatactaaaaataaaagaagaattcacaaaagacctttctttaatcagtgaacgctataatccagaagtttttttcaaaaaactaatcattgacgattcgttagtgaatataaatattcaatcgactaaaaacaaacaagctattttagaatacaaaaacgtgatgatcgttgaattaaccagattggaaagaatagaaaaatcatattgtgcaagtcattttcgtaatcgtttaattttagcatctactgcgagcttagtaaaaaaagaattaaaatacattcaaaagctaaagaaaggatttccaaaagaagtgaaattaattattgatagtttattcccatcgtgggtcagtcaattttcagatatttttaactatgatctttttagctctaaatttggctatgacattgtgacctcaagtggacttttagtttgtcctttttgcaatgaagaaaaaataaatatagtaagaggtaggactaaaaatcatagaccagcattagatcatttttacgcaaagtcaaaatatccttatctagcagtcactttatataatctaattcctattggaggccgttgcaatacgtcttttaaatcagatatagatatgtttgatggctatatgaatccattactcactggtgtaaatgatcatcaggtttttgactttacatataacgtcatggataattccgtaaacttcaaaattaaggaaaatgatgatttcatactcaaccaaatgcttttcgaactcgatagtgtgtatgataccgaagaatataaaaagttatatttagactttcgttactcttttacttatcataaaggacttggtgttgaaccgccattttatgaagatatgaaattaatggattcaactttcaacatatcaaaaaataaaaactaccacacatggcaagcaaaaaaatttgagacagatgccctagaggatatattccgagatttgtaa

SEQ ID NO: 110989 - DNA, 306 bp, Enterobacter aerogenes
atgtgtcatagctttttatttttgctgactttgctcataggatctcaggtctttgcctcccctgaatccacccaactctccctagcgctgaagcaactcgacggcataaaaacctcgctggagcgcgcccaaacgagtgccagcacggatccgcagtcacgctacttcttcgactacttacaggcgcagcaggacatctccgccgttgaacagggcatccgccgctaccttgccccggcaagggcgcagccgcgcgccgtccagcccctgagcgccagctaccagcgggagaaccccgatgactga

SEQ ID NO: 110990 - DNA, 1707 bp, Enterobacter aerogenes
atggctacaattactgatttcatcattctaaacaagaaacttgaaaaatatttcagattactttgtgatataaccggctataatgaagcagaaaaactttcggacacaagcaagaaacgctttggtttctatctttatatattagaaaatgtttgtgatattgatggagataatgatggaattatagactctataattgactctgactttaacaagcgtttttttgacgaaaaaataaatgactcaggaatggatgccgtattcattgatgaagataagaaatgcgtaaaactatttaactttaaatatagagaaacctttaatagtgataaaacccaatgtttaaatgataacttcatatcgactaagtttttaaatttatgtctgagcaaagacaaaaagcagttcaataaatatccggaaaagctaaaaagtaaattaaataaattaaatgacatatttctaagacccaaggatatttgggatgtcacactttatcaagtgagtaatgaagctcaagaagttcgggagattgatgctgaattagagaatttatcatctctttatcaaataaaaatagaatctttagcgctgccaactatatctcaattcatgtctattcgtccaaaagatattaatgccagtatgattctgagtaaagatgcattaatgtgctacagtgaggataataaagcaacagcaaaatcttatatattaagaatcaggtgtgatgagattattcgcattacctctgacaatgaaaaattgagacttgaaaagaatttagaaaatatttcaatattagccgactcttctattgaatatggagtgttattcgataacgttagaggcttcgtaaaaaattcaaaatacaaccctaacattggtgccaccataaaagataatccaactaaattttttatgtacaacaatggcatcacaatggtcgctaattcaatatcagcaataaacctcgctggtaatcactcaatgcgtttggatatcaatggtttccaaatagtgaatggtggacagacactcagggctattcataaattcaacaaagataataaagataatatcaataactatttatgccaagcagaagttctactacgaatatttatgccggatattgaatctaatgatatacataagatagctgagtatacaaatagccaaaatgctattaaatcatctgacttgaaatcattatcggcagaacaaatagacatagaaagatatctcagtgaacatggcattgaatatataagaaagtcaggagatactggtaatgatgatagcagacattatgattatatgatcaaaatggaaacatttggtcaaatactaaaagctattagtggttatcctgacaaatcaactaacagtatgaaagatatttttgagaaagactatgactctttatttattaaaaatttcaaaatagaaaaatctccagatctcataattgattattataatataattaaatcatataaagcctctaattatcgtgggaatcaaataaaatatttttacgttctttatcttaaagctaaaggggtaaatgattcatatattaacatgattaataaacttgaaaaatgcatcaatgactataaggccgatgacatgtctattgttaggaagatgggactatctggatttaaagaatatgtcaatgagatattcatcataaactga

SEQ ID NO: 110991 - DNA, 630 bp, Enterobacter aerogenes
atgcccggtggccgacggcaggatatgcggcacaccaaccgcggataccgtatccagcagccccataaactcgatactgatggggatgcccagcagggtcggaccgccgggcaccaccgtcccagccggcagcatatttgtcgcatcgagcggcatctttgcgtcatcgagcagcgactccagcccgcgggcgaaggcgcgcgcggtagcggccccccggcagtaaccgtagacgaacagcttgattttggcgatgcgccgctgcgagcgctggatatgcagccgcgttggctgccgcggccactggttgacaacgtaccccagatgatcgttgcagaatttgtcaagcgcgcttttacggttgaacttctgggtcagccgcgagaagggccagacggtggccatactgttccggtatctggtcagttcgctgtcctcgatcctttcctttttcaccgcataacaaatgctgctgtaggttttaagcagcgcctggttgatacgatcctcaccgccgttggcaaacagctcgccgtccagggagtagtgctcttcaccaatctccggaaagcgtgcgccacagccgggaaagtagtaacaaaagtaaccatcattctccgccttatctaa

SEQ ID NO: 110992 - DNA, 174 bp, Enterobacter aerogenes
atgcagtacagaatggcatacctgttccgacattctcagcggctatttcatattatgatagttaccgttctgcagtacttcctgcaaaccttattcaagcgcaacgagactattttggtgctcatacttataagcgtattgataaagatggtgtgtttcatacagaatggctag

SEQ ID NO: 110993 - DNA, 774 bp, Enterobacter aerogenes
gtgaaagtgatgccaaaacgcctagctgacgacgtcgcaaatcgcgtccgggcgctgatagaagaacaacagctggaggcgggcatgcgtttgcccgccgagcgccagcttgccgtccagctcggtgtttcacgcaattcgctgcgtgaagcgctggcgatgctggtcaacgaaggggtgctgcttagccgtcgcggcggcggcaccttcgtgcgctggcagcacgagccctggtcggagcaaaacatcgtccagccgccgaaaacgctgctcgccgacgaccccgactacagttttgatattctcgaagcccgccacgctattgaagccagcaccgcctggcatgcggcgatgcgggccaccgacgccgaaaaagaaaaaatccgcctctgttttgaagccaccctcagcgatgacccggatctcgcctcacaggcggatgttcgcttccacctggcgatcgctgaagcctcacataatgtggtgctgctgcaaaccatgcgcggtttcttcgagcttctgcaatcctcggtgaagcagagccgccagcgcatgtatctggtgccgccggtgttcgcgcgtctgaccgaacaacatcaggcggtaatggaagcgatcttcgccggcgacgcggaaggcgcccgccaggcgatgatggcccacctcggttttgtccactccaccattaaacgttttgatgaagaccaggcccaccaggcgcgtattacccgcctgcccggtgaccacaatgaaaattccagggagaactcgtga

SEQ ID NO: 110994 - DNA, 141 bp, Enterobacter aerogenes; identical to SEQ ID NO: 36145

SEQ ID NO: 110995 - DNA, 141 bp, Enterobacter aerogenes; identical to SEQ ID NO: 36145

SEQ ID NO: 110996 - DNA, 327 bp, Enterobacter aerogenes
atgatggtaagttcgtttccttcacctgctgctgattatattgaatctgctctgactgtcacggctgcgtgcaacattggcgcgaactctcagattatagagactgatcgcggcttcgttgttcttgacctgtcattaaaagtgacgcaaggaagcgtcctgcttatccgcctggctggcgaactgcagtttgcaaaattgatggggcgttcttttatcactgtcgaaggcgagagcatcgaaggtgaggcgctggaagacgttgaagtactcggagtcgcaacccatgcgattaacgatttgaggcaggatgccagtcctgtttga

SEQ ID NO: 110997 - DNA, 240 bp, Enterobacter aerogenes
atgcttcgacaatcagacatcaaccaggcctttcgtgagtcgattcttcggaactcgaaaggctatcagtatctgcacacggtggattttgtttcatctatgcagcagcgtggcatccacttttcatactctgaagctaaccgatggatagagcgctatcagtcgtgcttcgctgacaaaactccggaccacaccgaaaacaggctttggattttaaggaatatggggaggatcatgtaa

SEQ ID NO: 110998 - DNA, 1632 bp, Enterobacter aerogenes
atgaatttcagacttgacattaatggattgcgtttctttgcagtgacaatggtagtgttgttccatttcaagttttcattcgcatatggtggattcgctggagtggatatttttttcgttatctctggttttttgatgaatgaaatatgtcaacggcaaattggaaataaaggatgggtgattgatttttatagaaagcggtttaaacgtatttatcctgcgttttttgtatccgttatggtgttttttattgtttcaatcgtaatatatccaccatccattactgaatctatatacaagcaagttattagcgcacttacatttacctcaaacatattttactggaaagacagttcaggttattttgtagatgatgcagatagccttttccttcttcacacttggtccctctctgctgaatggcagttttacttaatattccctgcatttatttatgttgcaagcaagataaagataagaaacataaaaccttacctgtatgccttagccgtaatcacttcgtttcttctctgcgtggttgttacaaaaaaaagcccaagtgcctcattctatctgctaccaactcgtgcttgggaattgttcctcggcgcatttgtatcttccttagcagttaaaaacaaatacccaaaagcaaccgagatagtatctctactggtaataattgctttcacattcacggtgaaagaaagtgccgcatggcccggtgtgatgacacttatcccaactgtagcggcagcagcattaattcacgctgctgttaaaaatgaagatagccttcttagattttcgccactacagtcagtaggcactgcatcatattccatttatctgttccattggcctattgtttctatcttttatctttatcagatagagttttcgactttcaatgcaacaattggcgttatcctgtcagtcgccataggttttgcatcttatgccattattgaaaagcggatgaggctgtccataccagtactgattacctcctctgtcgcagtaatggttgtatcttttgcagtgtctgggctaggtgtttcaaaatactggctaccgcaaggtgtcatcgcgcttgataaatatcataattattttgaaaccgaagaagggatgacacagtttggtaataacggtcgcacctgcttcctgactagtgtgcgcaacaatgcatctctattcgatgaagatacatgtcttattaaagacggttccaggaaacggcttttgctaatcggcgatagtcatgcggctcaattctatgatgctgttaaagaagcattccctgattatgatgtgatgcaggcgacagcctctggttgtttaccattagtttccccagttggtgaagagcgatgcacttcgttaataaataacgtttacgaaaaatatatcaataaatacaagatagatatggtagttgtaaccggaaactggattaccgaggagaaacgccttggtaatctggactctcttgttgagcgaatggttatatctaacgccgcattaacaaaatcagttaaaaacgtgttctttattggacagacaaaaatcttcaaatacccgatgtacagaacagtacaggttgggaatgaaagtaagcgtacagcctga

SEQ ID NO: 110999 - DNA, 321 bp, Enterobacter aerogenes
atggcgaatgctacaaaaatggttggcgcgttaaacgtgacggtaatttaccgcgttgatggtgaagtcaggaagttcagagaatcagtcgttgcaccaatcgctattgagcgttacttgcaactcgaatgtggtgaccccgttggtctgtttgtccctgtggggaatggtcagcaggtcaatgcgctgaatatcgaatggtttgagattgagcgcgtcagttcgcaagaaataatccacgccgggcctattcattacgatatcgacgtcgatacggctgaactgattaaaaatcgaatcggtggagagcggagggaatag

SEQ ID NO: 111000 - DNA, 453 bp, Enterobacter aerogenes
atggcaacgaagaagacgaagccaccgattctaccgcgtaactatcaggatccgacgggggctgatgcgctggaacgccgggcaatgaaagatttcgccaggcggatgaataagattggcaaagcgtacaaatcagcactcgacaaaataccttcctccctcgcagtaaacgccagatacgaataccagctaaacccaacattactctccatcatcctgaacgatgccagttatctggtagatcaggtgcttctggatggtaacgagtacgacctgtggttttacgagtatgtcgatttggcgtcagagaaaggaacggccagtcattctacaaccttagccagcagtcgccggtgtatgccgccgggcgtgaatcactggcctccatcctcgcaagtgacccataccagcagcgtatggcgctggtgcatgcgcgtgtgtttgaggaaatga

SEQ ID NO: 111001 - DNA, 180 bp, Enterobacter aerogenes
atgccgatatgcacgctttcagtagaagcaaaaagccgctggtggctgccgctctatctcaaaacgctgactttattttgccagatggttcagcgagaacctgatttcgtaaaggtgtcagcattcatcgtgaagtatggcatcagccagaagttgaaacatgaacctgcaaagaaataa

SEQ ID NO: 111002 - DNA, 141 bp, Enterobacter aerogenes
atgagccgtgacgttatcgaacgcatccgcgaccgctggcaaaagctccgcctctgccggcaccgcggaaccgtacttgttgactaccgcattttgaagaatttcgtccgcatctatcaggcttcaggagagaaagcatga

SEQ ID NO: 111003 - DNA, 516 bp, Enterobacter aerogenes
atgaaaatggaagctgaaatcacgcaggatgaattaaaggctcttgttcgttatgaccctgacactggatgcttccaccatcttgtagcaaggaagaatgtcagcgttggtgatgtggctggcggtttagatatggagggctatgtccgcctgagactgaacggaagaaggtataaggcgcatcggttggcaattttctatatgacagggaagtggccaaaggcggtagatcacaagaacaaaaatcgaagcgataaccgatggtgcaacatcaggccatgctcccttgctgaaaacaaccagaatcctggggttagcccaaaaaataagtcaggctgcgcaggcgtgcactggcatgggcgccagaagaagtggatagcagcaattcaaattgacaggaagaaactgcatctcggtagcttctcatcaaaagaagaagctgaggccgtggcagttgctgcttttcgagttagggaaaaaatgttggataccatgctcaacggaggtaagccatga

SEQ ID NO: 111004 - DNA, 465 bp, Enterobacter aerogenes
atgaaaaacgaagttgaacagattgcacagcaaaacgatatgagcattgaattcgtaacctggttctttaacgagaagaaggtggggtgcgggaatgtctggttcatgatgatggctgcaatgtgggagggttggaaaggttgtagcatcgaaattgataagctggctgcggagaatgtggaggcaaaaaaaataatcagcgaatgccgggagtatttcatcgctggggtgatgaaccgtatcagaccaacgaatgaaggctacctgcatatgatttgcgacacgtttgcagacgaaacccccgccaccgatcgcatcgtagccgggattaaggctgatggggtggaagaatttgcggcaaagctacgcattcctggcgatgacccgtttatggatgctattgcagatagtgttgcaggtgctgctgattcgtacgccaagcaactgcgcgagggggccaaatga

SEQ ID NO: 111005 - DNA, 738 bp, Enterobacter aerogenes
atgaaatcaatcgctgaaagcatgcacaacttcgaccgggaaaacttccagcgcgtggctgccgggcttcctgaaatgcaggacgagcaggcagtaaagcgccaggcggcaaagactgcggagattttcaacgaactgttccgccagttgctagctgtgttcccggcgctggccagcaaaacacccgaggagatgaacgagatgcgccggcagtggctcctggcgttcaaggaaaacgggattgtctccatggagcaaatcaatgccggaatgcgagttgcccgcaaacaggatcgcccattcatgccatcgccgggtcagtttgtcgcctggtgcaaatcggaatcagccgtatccgccgggctacctgatgcagtggaactggtcgatatggtttaccagtactgccggacccgcgggcaatacccggatgctgagtcgtatccgtggccagagcacaacgtcacgccggtcacgctgaagcacaaggcctgctactggatggttactggcctgtacgcagatatgcgcgcaaacggcctcagcgacgctgagttgcgccgcaaggctcaggatgagctgatgcgtatggtgcgtcgtttaaacgcaggagaagcgattccagagccggttaagcagattccaaaacttggtggtcgtccattaagtcaggagcaggggttaaacaaaatcgcagaaattcgggcgaaatttggactggggagagggcggtcatga

SEQ ID NO: 111006 - DNA, 1029 bp, Enterobacter aerogenes
atgaacaccgcagaaatactcaagtttcccggcgccgcgccggggcaattcaggagcaaccggatggaaaaccagaaatctggctacatcccgttgtaccggagcgttctcaagcagtcctgggcaaaagatgtttacctcagaaccctgtgggaaaacctgctgcttaatgctgctcgtcagccattcagagcgactttcaaaggtcatgagtggtcactgctgcccggtcaactggtggtcacagcggccgatttaggactgcagctttgcgaccggaaagggaatcctactagtcgcgattcagtggagagaatgctggctgtttttgtacgcgaagggatgatttctatcgaaggtgagaagcaaaaagggagagtgatcaccatcacaaattttgcagaatatgctcaaaaaacagacaatttacccgcacatgaagccgcacatgaagccgcacatacttgcgcacatgacgagcccagcaatggcgcgggtttgaaggtggtacccgcacatgatggcgcacatgaagccgcacaaacaaccgcacaacatgaacaagaaggtaataacaagaataaaaacattaaaagatcttcgtccgagaattctggcgaatcctctgacgtccgcctgaagaaatttttgtctgctcatcctgatgccgcggtttacacacccagcggcagcaagtggggaaccgcagaagacgttcgcgttgccgagtggattttctccagggtcaggatgatcaacccaacctgcaaagctcctgacatgaccacctggtcaaacacggttcgactgatgcgtcagatcgacaaccgcagccaccaggatatctgcgccatgtacgactgggccagcaaagactcgttctggcatcgcaacatcctgagccctgaagcgctgcgcaagcagtgggacaagctgaccatgcagcgcagcgcgccagggtttcaggttgccgggaagccaaaaatcgacctgaacaacactgactggatttatggggtgctcgaatga

SEQ ID NO: 111007 - DNA, 234 bp, Enterobacter aerogenes
atgaacccaaccattaaaaccgcaattaatattgtcggctctcagaaaaagcttggtgaagcctgcgatgtttctcagcaggcggtttacaagtggctccacaacaaggcaaaggtttcgcctgaacatgtaaacagcatcgtaaatgcaactaatggggaggttcaggcgcatcaaattagaccagaccttccaaagctgttcccttctccgaagggcgttccggccgcctaa

SEQ ID NO: 111008 - DNA, 486 bp, Enterobacter aerogenes
atgagagatgatggtgaagatgataagaagccatcacatatgaatcatgatgtgttcagggtcgacattttggatctggccgtcagtgctggcccgggcattgtgaatcaggagttcgtggagattctccactccgttgaatatgcgccagcggaagcccgccacatgttcgatggacgcaaggctgagagcatcaggatcatcaacgtcaggggcgatagcatgtctgggacgattgagccgggtgatctgctgttcgtcgacatcagcgttaagagctttgacggcgacgggatttacgccttcctgtacgacgacactgctcacgtcaagcgcctgcagaagatgaaggacaagctgctggttatctcagataacaagagctatgcagcctgggacccgatcgaaaaagacgaaatgaatcgggtgttcgtgttcggcaaggtgatcggcagcatgccgcaaacatacagaaagcatggttag

SEQ ID NO: 111009 - DNA, 1005 bp, Enterobacter aerogenes
atgagcgaaataatggatttagtcgtcatcgagaaaaagaacgcgatggcggttttcaccaataacgaccaactcgatccgcttatcgaagcgatcgaaaaagaggctcgcagtctggtgcctgacgtgaccaccaaaaaaggccgcgacgccatcgcatccatggctcacaaggtcgcgcgctctaaaacctacatcgacaacgcaggtaaagaccttgtcgctgagctgaaggctctgccaaagcagattgacgaaagccgccgcgttgtccgtgagcgtcttgatgcgctgaaagatgaagtgcgtcgcccgctgaccgaatgggaagccgagcaggaacgcattaaggccgaagaagccatgaacgcactgcatgccgaagcgctggccatgaatgaagagttcgatcggcagctggctgctcgtattgagtctgaccacgaaatggccctgctgatgaatgacgctttcgaccgcgaacaggccgagaagaaagcagaagccgaacgccagcgcattgcacacgaagaagagattaaacgccaggcggaagagaaagccaaacgtgaagcagctgaaaaggcacagcgtgaaattgacgctgcggccgccagagagctcgaggcgattttggcaaaagagcgcgcagaacgtgagcgcattgaagctcagcagcgggccgaacgcgaacagcgagaagcagctgaacgtgccgagcgcgaaaagcaggccgctgttgaagcggagcgccgcaaagcacaggaagaagccgatcgcatccgccgcgaggcagagcaacgcgaacaggcccgcctggctgaggagaagcgcaaagcagatgagcaggcgcgacgcgaagccgacgttaagcaccgcaaggctgtaggcactgaaatcgtcaaagctcttctggccaataccagccttactcgggatcaggctattgaggtgcttacagcggttaaagacggccgcattcctcataccggtatcagttactga

SEQ ID NO: 111010 - DNA, 285 bp, Enterobacter aerogenes
atgaacgcataccgcgcatatgacgtgatcgaagagcgtaagtgggccgagcaaacgctcaccgaagagaagcaaaagtggattgacgatcgggcgcaggaaattatcagcgcgctgccggatgagccgactcagctgttctatttaagttttcagactggccctcacccgtacgaagggcttcgcagtgataaagccggtgaagcgtataacgatttcatttcggcagtagcttacgcccaggcggaatacgactgggatcaccgcaccggatgcccgttttaa

SEQ ID NO: 111011 - DNA, 609 bp, Enterobacter aerogenes
atgaaagaacgcggaatgatttttaacggggagatggtgcgggccattctcgacggccggaagacgcaaacacgtcggatagtgaaactgcagccagatgaagacggtctggcaaaagtaactaatggaccctgggttgataccagcgaacggaattaccgctgcccattcggtgatgtaggcgaccgtatctgggtgcgtgaaacatttcaggggccgttattcgattacgaacagatggaggcatacctcgaagatagctcgagattcgaaaagccagagttttgtcagtatgccgctgacggcggccatcgacctgaatatcaagacgctgacgacaacttgcgtcacggatggcgaccatctatacacatgccgcgctgggccagccgcattctgctggaaatcaccgacgtgcgcgttgagcgcctacgcagcatgagccaggacgatgcacgcgccgagggtgttattgccgcatctggccctatggaagccggtttagctttccgcgagctgtgggactcaatctacggcgaggagagctggaaagccaacccctgggtttgggttatcgagttcaagcgcgttgaaggcggtgcagcatga

SEQ ID NO: 111012 - DNA, 141 bp, Enterobacter aerogenes; identical to SEQ ID NO: 36145

SEQ ID NO: 111013 - DNA, 441 bp, Enterobacter aerogenes
atggatctcagagggtatagtttcaaacagcatctttccgatcttctactgccaaataatgagttttactccactgtaaaccctgcatacctgaattctggcggtgtgtacgtcctgcgcagttttaatgatgccgggcaagcgctcaccataccgcgagtgttagatgatgaccgggacgggattttgtacattggtatggctaaactgttctgccaccgtacaggtgatctggctcgttcatttagttctcagtatcggcagagtaaacaccagaccgggcagcgctattggagtgatgaacgatatcagcagcgttatccgtttgaacacctgaaaatgtttatgtggatcagcgatcatcccgcgacgctcgaacaatcattctttcaaagctaccttgcgagatttggcgagactccgccacttaataggatttga

SEQ ID NO: 111014 - DNA, 141 bp, Enterobacter aerogenes; identical to SEQ ID NO: 36145

SEQ ID NO: 111015 - DNA, 141 bp, Enterobacter aerogenes; identical to SEQ ID NO: 36145

SEQ ID NO: 111016 - DNA, 141 bp, Enterobacter aerogenes; identical to SEQ ID NO: 36145

SEQ ID NO: 111017 - DNA, 141 bp, Enterobacter aerogenes; identical to SEQ ID NO: 36145

SEQ ID NO: 111018 - DNA, 141 bp, Enterobacter aerogenes; identical to SEQ ID NO: 36145

SEQ ID NO: 111019 - DNA, 834 bp, Enterobacter aerogenes
atgtcactaccgttcaaaccccatattatcgccctgctctgcagcgccggcttactcgcggcggcgggaacgctatatgttaaaagccgtaccccagagactatcgctgaagcgccggtgacggggcagcctgtgccaacgtcagcaccagcgactgcgccagcgcaacctgtcgccgccacctatacccaggcgcaaatcgaccaatgggtcgcgccaatcgcgctctacccggacagtttactctcgcaggtactgatggcctccacctatccggacaacgtcatgcaggcggtgcagtggtcgcaggataacccgtcgatgaaaggcgacgcggccgtgcaggccgttgccaaccagccgtgggatccgagcgtcaaatccctcgtcgcttttcccgccctgctggcaatgatgggcgaaaacccgccgtgggtagaaaaccttggcgatgcatttttagcccagccgcacgacgtgatggattccgtacagcgcctgcgcgctattgcccaacaaaccggaacattaaaatccacaccgcaacaaaaggtgaccgtcacggccgccgcgccggcctcttcgaggtcatcgaatagcagcacggtatcaacctcaacaacctcaacgccatcgccttcgcagatcatcaaaattgaaccgaccaatccgcaggtggtatacgttccaagctataatccttcgaccgtctacggcagttggccgaatagcgcctatcccccggtctatctgccgccacctccaggagagcagttcaccgatagcttcgtcaaaggttttggggctttgttgaataaatcagatttcgggtaa

SEQ ID NO: 111020 - DNA, 141 bp, Enterobacter aerogenes; identical to SEQ ID NO: 36145

SEQ ID NO: 111021 - DNA, 384 bp, Enterobacter aerogenes
gtgggctcgggttcgccggatatgcagggcggtgaagcggcgatggtagaactgctggggcgtaatttaggcctgaccgcggtgtttgcctataacgacagtatggctgccggggcgttaaccactcgcaaggataacggcattgccgtgccgcagcatctctcgctgattggttttgatgacattcccatttcccgttacaccgatccgcagttgactaccgtgcgctatcccattatgtcgatggcgaaattggctaccgaactggcgctacaaggggcggcagggaaactcgatagcgaggccagccactgctttatgcccacgctggtgcggcgccattcggtgacgcaaaagcaaagtgtggggccgatcactaactga

SEQ ID NO: 111022 - DNA, 594 bp, Enterobacter aerogenes
atgatcaccattcgtgatgtcgcccgtcaggcgggggtttccgtggcgacggtttcacgggttctgaacaacagcgcgctggtgagcccggatacccgggaggcagtgatgaaggcggtcgcgcaactgggctatcggccgaatgccaatgcccaggcgctggcgacccaggttagcgataccattggcgtggtggtgatggatgtgtcagacgcctttttcggcgcgttggtgaaagcggtggataccgtcgcgcagcagcatcagaaatatgtgctaatcggcaacagctaccatgaagctgaaaaagagcgtaacgccattgaggtgctgattcgccagcgctgttcggcgcttatcgtgcattcgaaagcgttaagcgatgccgaacttggcgactttatgcagcatattccaggcatggtgctgataaaccgcattgtgccgggcttcgcgcaccgctgcgtgggtctcgataacgtcagcggcgcgctaatggctacgcggatgctgctcaatcacggccatcaacggattggctatctctcttccaaccacggcattgaagatgatgaactgcgccgcgaagggtga

SEQ ID NO: 111023 - DNA, 141 bp, Enterobacter aerogenes; identical to SEQ ID NO: 36145

SEQ ID NO: 111024 - DNA, 141 bp, Enterobacter aerogenes; identical to SEQ ID NO: 36145

SEQ ID NO: 111025 - DNA, 141 bp, Enterobacter aerogenes; identical to SEQ ID NO: 36145

SEQ ID NO: 111026 - DNA, 141 bp, Enterobacter aerogenes; identical to SEQ ID NO: 36145

SEQ ID NO: 111027 - DNA, 141 bp, Enterobacter aerogenes; identical to SEQ ID NO: 36145

SEQ ID NO: 111028 - DNA, 177 bp, Enterobacter aerogenes
atgcagccgctagtggggacgctgttccagcttatcgatcaggcgcggagcacgccggtgcgtcagtttcgcgggctggtcgcgccaggcggagcgaaaaaggcgtttaataaagggaaaggcaagccgaaagggaaaaagccggcggcggacatcgcgccggaaagtccgcaataa

SEQ ID NO: 111029 - DNA, 141 bp, Enterobacter aerogenes; identical to SEQ ID NO: 36145

SEQ ID NO: 111030 - DNA, 141 bp, Enterobacter aerogenes; identical to SEQ ID NO: 36145

SEQ ID NO: 111031 - DNA, 468 bp, Enterobacter aerogenes
gtgaagagcctgtggccgttgttcggtatctctaaccagatgctggccgcggtggcgctggtgcttggcaccgtcgtgctggtcaagatgcagcgcaccaaatatatctgggtcaccgttatcccggctgcatggctgctgctgtgcaccacctgggcgctgggcctgaagctgttcagcagcaatccgcagatggaaggcttcttctttatggctcagcagtataaagagaagattgccgccggcggcgagctgaccgcacagcagatcgccaacatgaaccatatcgtggttaacaactacaccaacgccggcctgagcattctgttcctggtggtggtgtacagcatcatcttctacggcatcaaaacctggctcaatgtccgcaacaataaggtgcgtaccgacaaagagaccccgtacgtgccggtaccagaaggcggcgtgaagacctcgtcacatcattaa

SEQ ID NO: 111032 - DNA, 1686 bp, Enterobacter aerogenes
atggataccaaaaaactactcaagcacataccctgggtgattctcggaatcatcggggcattttgcctctcagtcgtcgcgttgcgccgcggtgagcacgtcagtgccctgtggatcgtcgtcgcgtcggtttccgtgtacctcgtcgcctaccgttattacagcctgtatatcgcgcagaaggtgatgaaacttgacccaacgcgcgcgacgccagcggtcattaataacgatggcctgaactacgtgccgaccaaccgctacgtgctgtttggccaccacttcgccgccattgccggggccggcccgctggttggcccggtactggccgcgcagatgggttatctgccgggcaccctctggctgctggccggtgtggtgctggcgggcgcggtacaggacttcatggtgctgtttatctcctcgcggcgtaacggcgcttcgctgggcgagatgattaaacaggaaatggggccggtaccgggttctatcgccctgttcggctgcttcctgattatgatcatcatcctcgcggtactggcgctcatcgtggtgaaagcgctggcggaaagcccgtggggcgtctttaccgtctgctcgacggtgcctatcgccctgtttatgggtatctacatgcgcttcctgcgtccagggcgcgtgggtgaagtgtcggtgatcggtatcgtactgctggtggcatccatctggttcggcggcatcattgcccacgacccgtactggggcccggcgttgacctttaaagataccactatcacctttaccctgattggctacgcgttcatttccgcgctgctgccggtatggctgattctggcgccgcgcgactatctggccaccttcctgaaaatcggcgtgatcgtcggcctggcgctggggattgttatcctcaacccggacctgaaaatgccggcagtgacccagtacattgatggtaccggcccgctgtggaaaggcgcgctgttcccgttcctgtttattaccatcgcctgcggcgcggtctccggcttccacgcgctgatcgcctccggcaccacgccgaagctgctggccaacgaaaccgacgcccgctttatcggctacggcgcgatgctgatggaatcctttgttgcagtcatggcgctggttgcggcctcgattatcgaaccgggcctctacttcgcgatgaacaccccgccggcaggccttggcatcgtcatgcctaacctgcatgaaatgggcggtgaaaacgcggcgatgatcgcagcgcagttgaaagaagtcaccgtccacgcggcggcgaccgtcagctcctggggcttcgtgatttcacctgagcagatcctgcagacggcgaaagatatcggcgaaccttcagtcctgaaccgcgccggcggcgcgccgacgctagccgttggtatcgcccatgtgttccataaaatcatcccgatggcggatatgggcttctggtaccacttcggtatcctgtttgaagcgctgtttatcctcaccgcgctggatgcgggtacccgcgcaggccgctttatgctgcaggatctgctgggtaacttcgtgccgttcctgaaaaaaccgactcgctggtcgccggtattatcggtaccgccggctgcgtcgggctgtggggctacctgctgtatcagggcgtggtcgacccgctgggcggtgtga

SEQ ID NO: 111033 - DNA, 141 bp, Enterobacter aerogenes; identical to SEQ ID NO: 36145

SEQ ID NO: 111034 - DNA, 141 bp, Enterobacter aerogenes; identical to SEQ ID NO: 36145

SEQ ID NO: 111035 - DNA, 141 bp, Enterobacter aerogenes; identical to SEQ ID NO: 36145

SEQ ID NO: 111036 - DNA, 141 bp, Enterobacter aerogenes; identical to SEQ ID NO: 36145

SEQ ID NO: 111037 - DNA, 141 bp, Enterobacter aerogenes; identical to SEQ ID NO: 36145

SEQ ID NO: 111038 - DNA, 141 bp, Enterobacter aerogenes; identical to SEQ ID NO: 36145

SEQ ID NO: 111039 - DNA, 2691 bp, Enterobacter aerogenes
gtgaccatagattccgttttccaagcggaccccatcttcagcgttacccgacaggtacgctacagcaacgaatccggcaacgagttagacttggccatcttcatcaacggtctgccggtgctgactttcgagttgaagaactcgctgaccaagcagaccctggccgacgccatcgtccagtaccagaccacgcgcagcccgcaggagctgctgttccagttggggcgttgtgtggcgcacattgcagtggatgatgtggaggctgcgttctgtaccgagctgaagggcaaggcctcgtggttcctgccatttaaccagggctggaacagcggcgctggcaacccacccaatccggatggtctgaagactgattacctatggaagcaggtgctgactcgcgagtcgctggccaacatcatcgagagctacgcgcaggtggtagaagaggaagaagtggacgctggcggcaagaaacgcaagaagcgcaagcagatcttcccacgcttccatcagttgcgcacggtgcgagcccttctgcgcctcgcccatgcggatggggtgggtaatcgttacctaatccagcattcggcaggaagcggcaagagcaacaccattgcctggctggcgcaccagttggtggagctgcgccgcaaggacgatccgctgacggtgcagttcgactccatcatcgtcatcaccgaccggcgtgcgttggacacacagatcgcccgcaccatcaagggttatgaccatgtggcggcgatcttcggccactccgacaacgcgcaggagctgcgcgagtatctgcgccggggcaagaagatcatcgtcaccacggtgcagaaattcccgttcatcctcgatgagctgggcgacctctcaggcaagagcttcgcgctgttgatcgacgaggcgcattccagccaaggcggcaagactacggcgcggatgcacgaagccctcggcggcaaggttgctgcggaggagttcgaggaggacagcacgcaggatgcagtcaacgcggaaatcgagaagcgtattgcctcgcgcaaactgttggccaacgccagctacttcgcgttcactgccacacctaagaacaagacgttggagttgttcggcgagaagaccctggtcggtgacaaggtgcagtcccgctcgcccgaagaactgacctacaccaccaagcaggcgatccaggagaagttcatcctcgacgtggtggagaactacaccacctacgacagcttctatcaagtggctaagacagtggcggacgatccggagttcgataaggtgaaggcgctgaagaagatccgccactacgtcgagtcgcacgacaaggccatccgccgcaaggccgagatcatggtcgatcacttcatcgcacaggttgtgggtaagcagaaaattggcggcaaagcgcgggccatgatcgtgtgcaacggcgttgagcgggccatcgactactggcgcgaggtgtcggattacctcacacagatcaagagcccgtacaaagctatcgtggcatattcgggtgatttcgagattggtggtcagaagaagaccgaggccgatctcaatgggtttccaagtaaggacattccggcaaatctcaagcaagacccgtatcgcttcctcatcgttgctaacaagtttgtcaccggcttcgatgagcccttgctgcacactatgtatgtggacaagccactggcgggcgttctggcggtgcagaccctgtcacgtctgaaccgggctcatccgcaaaagcacgacactttcgtgctcgactttgctgacaacgccgaggcggtgaaggcagcgttccaggactattatcgcgctaccatccagactggagaaaccgacgccaacaaactgcacgacctaaaggctgaactcgacgggcagcaggtgtatagctggcaacaggtggaagaattggtgaccttgtacttgagtggcgaagacagggacaaactcgaccccatcctcgatgtgtgcgtggccgaatacaccgacaagctcggcgaggacgatcaggtcaagtttaagggtaaagccaaggccttcgtgcgcagctacggctttcttgctgcgattctgagctacggccacccgacgtgggagaagctctcgatcttcctgaatttcctcatccccaagctgccagcacccaaagaggaagatctctccaggggggggctggagactatcgacatggacagctacagggtggaggccaaagcggcgctgaagatggcaatggccgacgccgacgccacggtcgagccagtgccgccgggcggcggtggcggcaagggcgaggcagacatcgacaaactttccgcgatcatcaagaccttcaacgacctgttcggcaacatcgagtggaaggacgaggacaaaatccgcaaggtcatcaccgaggaaatccctgcgcgagtagcgcaggacaaggcttaccagaatgcgcaggcgaactccgacaagcagaacgccaagttggagcacgacaaggcgctcaaccgcgtggtgcttgagctgctttccgaccacaccgagttgttcaagcagttcagcgacaactccaacttcaagcgctggctgacggacacagtgttcgatgcgacctaccagcggggcgcggtgccgccgaaagcaccgccgcagactggggcgtcggcatga

SEQ ID NO: 111040 - DNA, 255 bp, Enterobacter aerogenes
atgacgggaagaggcattaacacagtacgtatcggcgatgaagtgaagcacatcaccgagctcgatgcactaacactcatgcaagaatggtcaaagcttaaaaaagaaaatgcagacctgtatgactataaccgtcaggttaaccgggggtggcgcggctttattcttcgcctgatgggtatccatttgcctgaaaaaaaccgtgtttgtctttatggcattaatgccagaaaagaatccatctatcccgactga

SEQ ID NO: 111041 - DNA, 495 bp, Enterobacter aerogenes
atgaaagtcactgaacccgggctgaataagctgatcgataacctgaacaccctgatttgcgaggacagcctgctcacgagccaggagcgtgaaacgctggtactggccgtcgccgctatcggcgccatgaaagcgcgcgtcggcttgaaaaaaggcgatgcgccgaccgttgccagacgggaaaaaagggagaaaaaagaccgccagcctgatccgcgttttccgcgagccggtcatccctggcaggaagacgaaaaaaccttactgagtgatgcgctcgattcggtaccggacgaagagattggcaagcatctgttctggctttccgagaaactgggcagaacgcctttcagtgttgctttccagatcgcggcaatcagggagctgcaggacggctgggaggagcagttcagggagatttcggataacattcgcttgtccggtctgagcatcagtgattatcttacacagaacggcacgggccataacgcctga

SEQ ID NO: 111042 - DNA, 1002 bp, Enterobacter aerogenes
atgcagctggaagactatatatcggccgggcggctgaacatttacaccgacgtgctgaagctgaaacctggtgaagaactgggcgggtataactggaacaaagccgtttccgccgccatgcagccgctgatgcactgccttgaggtgactctgcgtaacgccatcgattacagtattcgccatgcccggctgcccggcgctgccggacactggcgaaccgataccaactggatctttgatttaccccgctatatcggtgacaagacctggatacgccagaacaagcgctacaaaaccgatgcccgtggccagaagctcatgcatcacgggaaaccggtttatgaccggacagcctgggaagaagactgtatccgtaaggtgtcaaaatgtatccgtgctgcgggcaaggcgccgacggcagagcgggtgatctccggactggactttggtttctggaccaattttctcacgaaaaactacgatgaaccgcggaaccgctcgctcctgtggccccagttgcttccgtcggtgttccccggcgccccggccggcaccccccgtcacgtgctggaaaagaaatttacccggatccgtgacttgcgtaaccgcctggcgcaccatgaagcagtctggaaattccaggaggaagatccggttaccggtgcgccggattacaaccgcccggtatatggtcttcaggcgtccctgcagctgttgcgtcgggcatggaaagatatgctggaggctctcagctggctcagtcctgcaaggcatgctgcgtttctggcagaaggtcatcatctgcgtttcgaggcactggccacgcacgatggtttgctgagtttcaccggacgggcacagctgatgcacgacctgaacgtgcggcgcagtaaagagatcagaaaattattgcgggggctcggacagcaaaaaatcatccgcctgaccagccgtacccggatcattgccattattggtcccgattttatccgtaccctctga

SEQ ID NO: 111043 - DNA, 582 bp, Enterobacter aerogenes
atgaaagatgccaaatcaaaagatctctctgagttgtttaacaccatcaccgtacgtaatgtgccagctgatgtggatgaagcgatcacgcggcaggctaaagctgccggcaaatcaaagagtgattttgtacaggagtttctgacggcaacgtttggcgatctgatcggcaattttatccggaccagtgaactggttgccctgatggaccaggaaatggcgaggatggccggaacagtactgagcgagcatgtttatgatctggagatgacccaggccggccaccgggagttctgccgtattctcggtataaaaaacaacgatgatttgcagcgcattatgctggcggggatgccataccttcagatccgcgccggacagctgagagggattgacagcctggcaagggggaactcgctgtatgccgcactgctggccaacgcagcgtcgcgtgatgaagagacggtactggcgctgcaccggtcactttttaatatgttcccggaaacggtctttcaggaaatgattaatgaactgcgaaaggcaatgcgaatggacgcttttgaatggtcacttatctga

SEQ ID NO: 111044 - DNA, 1011 bp, Enterobacter aerogenes
atgaacacgaagtcgtcaagcctgcaagagtttaccctgataatcttaggtaaagatcgccatcagattcgccagaaggtctttgatagtaaagacttcatcctgcctagtactcgggttggcactgataaccatgaacccgaaactcgtaaagagaagatgggcgcttggactactaccccgctaagtgagcggcacatcgcaatcttaggccttatgcatcggaaaaatcctttccatcatctcgcaaaggcaattgatacctcccggctcaccctttcgattcccaatcaaggcatcaagatcaaggtaaaagaccttcgcgaggccgctctgaaggttgcgccagaggggacaaagattaatgtggctttcgaaacctacaccaaagaacagtacggccattcctattcggatctaatcagcgatgcccggaacaaggttatagcccgattcaaggccgcatttgcggagaatcttgatcacgacacaatgaacgacgagtaccgcacggatgagaaaattttcttccacaaaccagtgtggacatccaacgattccatcaaggaatacaagtcgctcgcaaaacaaggtcatgtttactcccagtatctggccggtgtgttccttgcctcaaatgccggtggctataaggttgagtgtgttgagtacctgctaatggcgtacgaaaacaagcaacccgaagccatgcgcgtgctagctgaattcctgcatttcaaaaaagactactatggtgcggcgcagtgtgcgcttctgtctattgacggcggcgatgactactcgaaaacaatctttcgtgaagtgctgggtaatgcctccgatttgattatacagatgagtcatggtgtagcaccgctcagctatgggattatggagacccttcgtgcaaacggattcgactcgattctgaaggagcatttcagtgagttcaatcctgatccacagcccgtaatgcatattcctggcttcaatcaaggggggcggtcatga

SEQ ID NO: 111045 - DNA, 261 bp, Enterobacter aerogenes
atgagtagcgtaaacatatgttctgatgaagcacaggagttcaagtgcttaagttgtggttgcactacatccgaggctgatttcgaatctgttgatgatgagttgaatcagcaaaatccgcgctgtcctgactgtcagagctggtaccgaatctcccgcgcaacctgcgactgtggccaaccggccacccatgaggttgagttaggttttgtttgcgacgactgctatgagcactatgtcagcggttacatacgagactaa

SEQ ID NO: 111046 - DNA, 417 bp, Enterobacter aerogenes
gtgaacaaaacttacatgctcgataccaacatctgctcgttcatcatgcgcgagcagccggaagcggtcattaagcgcctggagcaggcggtactgcgcaatcagcgtatcgtgatctccgccattacctacgcggagctgcgtttcggggccaccggaccgaaggcctcaccgcgccacattgcgctggttgacgctttctgcgcccgcctcgatgctgtcctgccttgggaccgcgccgcagtggacgccacgacggacataaaagtggcgttgcggctggccgggatgcctattggtccgaatgacacggccattgccgggcacgctatcgccgccggcgccatcctagtgacaaataacacgcgggaatttgaacgggtgccgggcctgatgctggaagactgggtgaagtga

SEQ ID NO: 111047 - DNA, 231 bp, Enterobacter aerogenes
atgcgcacagtttcaatttttaaaaacggcaataaccgcgccatccgtctgccccgcgacctggattttgagggcgtcagtgagctggagatcgtccgagaaggggacagcatcatcctgcgccccgtccggccgacctggggctcgttcgcgcagctcgaaaaggccgacgcggactttatggcggatcgcgaggacgttgtcagcgatgaaggacgatttaatctgtga

SEQ ID NO: 111048 - DNA, 300 bp, Enterobacter aerogenes
atggctattaaattaaggaatttacgatctgcagctagtcgttacggaagattttttgttgctaaatcacttaatgaagctgtagccaaaaatcagcaaactgcttttttatgccatagccatcaagaccatgaattagctaaaggcctccaagttttattgaaagagaacggatgggatttatacattgattgggaagatcgtgagatgccgaatactcccaacaaagaaacagcaaacataatcaagactaaaataaagaccactgattggggtaatgctgccaacttactgatttag

SEQ ID NO: 111049 - DNA, 294 bp, Enterobacter aerogenes
gtggcgcacgtcttcggtgaacgcactctggccacactggagcgtcttctgagcctgctgtcggcctttgaggtcgtggtatggatgacggatggctggccgctgtatgaatcacgcctgaagggaaagctgcacgttatcagcaagcgttacactcagcgcattgagcgacataacctgaatctgagacaacatctggcaaggctgggacggaagtcactgtcgttctcaaaatcggtggagctgcatgacaaggtcatcgggcattatctgaacataaaacactatcagtaa

SEQ ID NO: 111050 - DNA, 486 bp, Enterobacter aerogenes
atggctaagattccagttttttacagctttcattttgataatgatgtaatgagagttcaacaaatacgtaacatcggtagtattgacggtaatcctccaacttcgccaaatgagtgggaaaaactcaagcgtactggtaaaaaagcggttgaggactggatagatgaaaatatgaaatacaaacgatgtattattgttttgatcggtagcgaaactgcttcaagaccatgggttgaacatgagattattaaggcatggaatgacggaaaagctttgttaggaattcacattcataacctaaaatgccctagaaatggaattagtaggaaagggaagaatccatttgatctgattaaatttactgatgggagggcaatgtcaagtgttgtaccttgttacgacccgagctctgtcaatacttaccaagacatagcaagtaatatttcaagctggattgatcacgccattcgacacaaggcaaattga

SEQ ID NO: 111051 - DNA, 1617 bp, Enterobacter aerogenes
atggcaaacacacggcgtctgtccggagtcagagttcatctgtccggatctaacaaagaactgcgaacagacatagctgattttgtgcagaaaattgcagcgaaagtcttcagtgaagggggggcaattgttcatggaagccatccttcgttcattgaaccactgcgtaaagctgctaaagatttcatccaggccggagggagcaagggagcgcttacactagtgcgggcgaagagctactcaactgatgagtacactgctgaaattgaagagcagagagcattcgcttctgtagaaattgtacctgcagataacagcgatggccaagctgcagacggcttgaccccaatgcgtgattggatggctgatcgttcggatgtagtcatatgcgttggtggtgcttggtgggacattaataaagtaaaagcaggcgtccccaatgagctggatgtaatgcttgatcttggaaagccaggatttgttgttgcggggtttggcggagctatcgcaggctatctcgaagaagacccttcattgctatctcgtttgcgaaacgggctctctcacgaaacgaatgcgatcatagccaacagtgtatcagttgatcaggttgtgaggcttattgttgaccagctaaagaacctaccacttactcggcgtactttctcgagcggtcgcaattttcgtattttagcgctcgacggaggggggctcagaggtaccttcactgctgcagttttggcaaagtgggacgatatgttgaaggccggtggtggaagtgatctaatttctcatttcgatttggtagccggcacatccacaggtgctattttggcgattggactggcaatgggcttacatccacgtgaaatccttgagttttacgagaaaaatggcccgcagatttttccgaaggatcggaaacttcggcactggctcaaatccaagcatgactcagcaactcttcgtggactattggccgaggtgtacgggaacaaaacgctggctgctgattcccgctgccgcctggtgattccgactgtgagggccaaggaaggtcaagctgaagcgattgtcactccgcatagccccgatcggactgcataccgaaatatttcagcggttgaagccgccctggcttcctccgctgcaccgacctattttgatgaagttactttcgatgggcctgttgcgttggagacattcctcgatggtggagtatgggcaaataaccccatactccctgcactcgcggaagcggttcgatacctgaatatccccctggaaaggattgatgtgcttagcatcggcacactcagtagcgaaagcgatttcactgaccaactcggaaagggcaaagccggttgggcacctcacagtgtagatctcttttttgccgcccaggagcatggtgctctggtactcgctcaaagtttcttgggcccaacacgtcacatgcgagttaaccaacagaccagggatgaaattaagatggatgacaccgaagctattcaagacatggcacgacgcggtaatgaggctggcaaagaacactttaccgaggtccgctcccgattctttgacggtcaacacgttgaggcatgggagcggttttaa

SEQ ID NO: 111052 - DNA, 1143 bp, Enterobacter aerogenes
atgtcattcatatatagtttagctgttttgggcttacctaccgccactcaactatccgagcttgaaaacgctgtcgccgatgctgtatccatgtttggattgagagtgggccaggagattggctgggaaattagccctgatactttcatccctaatcaacaacgatcctctgctgttgtatttttcggcgggttaggtgctgatcatcccagcttacctagtttgctgcgtagcggtgtgcctgttgtccccgtcgtgtctgacttatgtggagttgcgaccgaagtcccggaaatcctacgtccattcaattgtttgtcctacgccaatggtggggcgaaaagggtcgccaccgcgcttttggagtgcgcaggcctgcttccgaggcaacgcagggtctttgtcagttatcggcgagacgaggctcgtcaggcggcactgcagatgttcgatgctctttctgctaggcattttgacgttttcctggatacacacagcattgcgccggcagaagattttcagaccatgttatggcatcgactttgtgactctgacgtgttattgatgctcgacacacctgactacttcaacagtcgatggactgcagcggagttcggaagggccttagccaagggtatcagtgttcttcgagtagggtggcccggaaccctacgctcggcgcgcttagcgactgcaagcatttctgaacttgatgcgagcgagttagatgtcgtatcgggacgtattagtgaccatgcgattgagcggatctgtcttcagcttgaagaagtccgcagcaagagtcatgcggtgcgaaccattaatctgatgagtaatcttcggataggcattgagactatcggtggagaagtgataggtatgggcaccggccgagggattcgggtgtgcctgcccgatgaccgcatggttgtgatttatccaacggtaggcgtgccgacctccacgactatgcacgaagcatcaatgaactctcctgacgaatccgtagccatactctatgatcatgtaggcctgcatcctcagtggctgagtcacttggattggttaggtcaatacatccagactacgcggtgggttaaggcttgcgaggcgagttggcaatttgcagattggagggtataa

SEQ ID NO: 111053 - DNA, 570 bp, Enterobacter aerogenes
atgggggcgattttcctctcagcaagtatccccgtgatcggacgagggcaatactacgagaccactgacccatttcttatccagtgcgctgttcgcgaactgaccattgcgactgttcgcaggcacaaaattgtatggggcggtcatcctgccattacccctatgatttggagcatctgtgaagatcttggggttgactacacaaactctgtcatcctgtatcaaagccgcttcttcgatggccgttatccggaagagaaccaacggtttgataacgtggtttatacagaccccgtacccggcgacattcaaggtagcttgcacctgatgcgcgaacagatgctctcaaggaaagatctgattggtgcagttttcattggcggaatggatggtgttgaggtcgaatacaacatttttaggcggttcaatcctgaggcattcgtccttccagttgccgcaccaggcggtgcagcgcttaatctcgcacgagattacggctatttcagtggaagagagcttgatgatatagatttcgccacactctttagtcgatatttagctgctcaatag

SEQ ID NO: 111054 - DNA, 645 bp, Enterobacter aerogenes
atgtttaaatattttattctgcgcacacagcagcagctgttctgttatttctgcggtatcgtgcttgcgatggttcttatgctcctgttcccttctgttttacgggggagtgggttttatctgcttttatcgtctgttgcgctgttctgggcaggccttgccctttatacccgtcacatcgaccggatgagaaagccagaggtcacaccgctggtcagtattcgcgacggtattcaggtggtggccgaggtgccgcgccatgaaaaggcccgactggaatgggaaatactccgggatgatgaggtgtttcgccagcaaaggtgggagcttactggcctgaccggacgggttatcagccgggggctgttgtatacgccggcggtgatgctgggcggtatcggtattctcgcctggggttccccacaggatgccatccggctgattaatgctcttcgtaatatgcctgctgcggaactggtgcatcagattggttttgtcctgtgcctcttcctgcagattagcgtcatatcagttctgattgctgatgttgtagccgggagaggattaccgaatgtatttcgccgcgcgttgctcgacaggctgccggcagagttctgccttatcagaagagggacagaaagatga

SEQ ID NO: 111055 - DNA, 1392 bp, Enterobacter aerogenes
atgagccgcaaatttgatgtgattgtcgttggcgcgggaccggcaggaatgagtgcggcgatccggatgcggacgttcggactgtcagtgctggtcgtggatgaacagccgggaccgggcggccagctctggcgcaatattgaaggtgttgccggttcgcctctgggacagatcctgggtaaagagtatgaatcaggtgcttcagtggcagctgatttcagggcctgtggagccgtttatgagcccaacacccaggtctggcagttagagccttcatggcgggtatttcttcgcagggacgggaaaactgaatccgttgaggccaaagagattgttctggccaccggcgcacaggaaagacctgcgccgttcccgggatggacgctgcccggcgtaatgccggtgggcggcgcacagatcctgctgaaaaatgccagacagatacctgaaggcccgacctgggtcgtcgggagtggtccccttcccattctttacatggctcaggttatccgggcaggcggcactatagagggctggctcgataccagcgcgcccggagaatggcgccgtgcgcttccctggctcagggaggcattctggggtcgtaaagacattctcaaaggtctcgtctggctgaaccagataaagcgctccggtacgcgtcgcattcgtggcattcagtctttccgcgcgctgggtgaaggccgtcttcaggaactggaatataccctttccagtggtgtgacccgacgggtcagcgtgaatgccgtgcttgtgcacgaaggtgttgtcccgtctgttcacgtgacgcgatcgctggggttgcaacatcactggagtcatcagcagaactgcctggtgcccacgcttgatatctggggaagaggcagtattgctggcatctctgttgccggagacggcgccggtattggcggcggactggcggcctgtacacgcggcgaaattgtggcgctgggcattgctctccgggccggccttctggcgcagaaaaaggcagatgcgctggcactgccgttacggttaaggttgaagaaactgctggggattcgccccatgcttgatgccctttacccgcctcctcagcgtctggtctcaccggcggacgaaaccattgtgtgccggtgcgaagaactcaccgccggcgacatccggcgggcggccgctctggcctcaccgggcataaaccagctgaaggcgtttacacgcgcgggcatgggcccctgtcagggcaggcaatgtggatacaccattgccaatatcatcgcctcagaacagaaacgtcaggttacgcagcaggatttttaccgtattcgaccaccgctgaaacctgtcacgttgggtgaaattatctctctacaagtagacgactaa

SEQ ID NO: 111056 - DNA, 300 bp, Enterobacter aerogenes
atgttcaggaagcttaatcagccagccggctctcaaaagcttgttatctatatcgacggagtggcaacggaagcggaagcaggcgaaaccgtcgctgccgtcctgctacgccagagcaaactgatgagccggaccacgccggtacagatgagcgaacgggccccttactgcatgatgggcgtctgttttgactgtctggccgtggttaacggacagggatcggttcagacctgtctggtcaccgttgaggacaatatgcatgttgagcgccagatgggccgccggagtctgaacaaatga

SEQ ID NO: 111057 - DNA, 1128 bp, Enterobacter aerogenes
atgcaacgtgagtatgacctgatagttgtgggtgctggtatgactggcgcagctatcgcctggggactatcaaagctgccgcttcgcgttctgatgctggatgccgaagacacggatctccgggccgctaaagcgaactttggtctcgtctggtcagcaggtaaagggcttggggatccggcctatcagcgcctctccgtggaggcggtctcacaatggcccgcctttgcccgggagctcgaagacgaaagcgggctcaccctcaattatgaaaataatggtgggctggagttttgcctgagcgaagaagaattttccaacttttcccgtgagatgagtgagtggattgctcagatgccggaactctcgcatccagtccagatgttacgccgcagcgaactgaacgcccgctttcccgatatcaggctgggcaaagacgttgtgggtgcgtgtttcggcccgactgacggacacgtcaatccactgcgcctgctttcggcgcttcataaagcctttctactgcgcggtggctttattcagaataacagccgcgtcagacagatttcatcccttgcagacggtggctttgaggtcatcacagagcatgcgagtttccgttcgggtcaagtcctgctggctgcagggctgggtaacgtaacgctggcaccaatggtggggcttgaagctcccgtcgccccccttcgcggccagttgcttgtcacagaaaggctggcatcgttccttccactgccatcaggcgaaattcgtcagactgctgaaggaaccgtgatgatcggtgccacgcatgaagatgtggggtttgacctctcgacaaccactgccggtgcaacccgtatggcggcgagagcgataaagacactgcctgcgctctcaggcgcaaaaatagtccggcagtggtccgctctgcggatcatgacgccagacggcagcccggtatatgcctcttctgtaacctgcccgggcgcgcatcttgccgtgtgccactccggcgtcaccctggcgtctttccacgccagccagtacgcgcggatcctggcatcaggcgacacctacccggacagcctttcaccttttcattacggacggttccatgttcaggaagcttaa

SEQ ID NO: 111058 - DNA, 831 bp, Enterobacter aerogenes
atgaaatttgctattgcaaccctgtttgctgctgctgcgttttcaactttttcaacttatgcgcaggatactattcagattgctactgaaggggcttataaaccttggtcgttcgtcaatgacagcggcaagctggatggttttgaaattgacctcacaaatgcgctttgcgcacgaattaaggctgaatgcaaagtatcagctcagaactgggatgggatgatcccggcactcaaatcaggcaagtttgatgcgatcgtagcggcaatgacgattacgccaaagcgacaggaagttatcggattttccgaagcttacgcagcgtcacctaatacgtttatggtgctaaaagatggtcctcttgcgaacatgaaatcgaccggaaaaacgttcgatctgtcagacgctggaaacatggctgatgcagaactggctaatatggcacgggaactcaggggaaaaacggttggcgttcaggtgtccacaacagcggcctctttcctgcacgacaaattaaaaggggtagaggttcgtgaatataaaacgtttgatgagtctgaacttgatttgcttgccggacgcgttgacgcagtcatggcaaacatcaccgtattgagtgatgcgctcaaacggaaagatgcaagtattgcccagcttgccggtcctacgctggtggggtcgccgtttaactctgttgcaataggactgcgtaaagaagatgctgcactgaaatctcagctggatgccggaattaaatctctgcgtgacgacggcacaattaaaaaactcagtgagaaatggttcggggtggatctttctcctcgctcctga

SEQ ID NO: 111059 - DNA, 912 bp, Enterobacter aerogenes
atgcaccagacgcaccgcctaaatctaagacaggtcgaagcattccgggcagtaatgctgacaggacagataaccgccgcggccgagctcatgtttgtgactcagcccgccgtcagccggctgattgccgattttgaaagggcaactaatcttcatctgtttgatcggcgcggcaaccggctgcttccgacgccggctgcgttcacgttaatgcgggaagtacagagtgcctttgtgggactggaccggataggacgtgcggcgcaggatattggtcgtaacttcgccggtacgctgcgaatatttgccatgccagctctggcagcgggtatgcttgcgcgctatgtagggcgctttgtccggggccgaaaaggtctgcacgtctctctcgaagcagcgacgtcacccgctgttatcgaaaaagtcgcctcgggtgatgctgaactgggctatgtggattttcagttcaaccgtgcaggtatgctttgtcgccagcgttcaattgatgccgtggtggccctgccgcaaggccacccgctggctgaaaaaatggtgctgacccgcagcgatcttattggtgaaaacatcatcgaagtggatcccggctcaacctattcaaaaagactgagtctgattcttgagggtatcgaacgcacatcaacgattgaaaccaaccagtcactgacggcctgttcaatcgtgctcgaaggtggggctattgccgttatcgaccactttgctgcatccgagtttctggacagaggactgatcatcagacgttttgaaccctctcttgaagcgggtttcacggagcttagcgcggtggaatcccgccggggtgatttgacaacggagttttcagatggattctggagatttttacaggaagagctgatgctccccaaagagtag

SEQ ID NO: 111060 - DNA, 720 bp, Enterobacter aerogenes
atgtcgatatttgaacttttctcgttcggagagggagggtggggttatctgctgctgagtgcgttgataaccacgcttggcctcgctatcgcagggatgtgcctgggtgcagtgtttggcatttgtggcgcgctttctgccttatctggcatacacgtgttgcaagccttgacccgtgtttacaccactattatgaggggcattcccgatctgctcgttgtttatttgttttacttcgggtcatcaagcgctctgacagcgatagcacatttgttcggggcaaagggatttgtcggagcgccggaatttgccattggcgtctttgcgctggggattgtttcgggtgcttaccttacggaagttttccgtggagcgattcaggctatcgataaaggtgaaatagaggctgcgctggcttttggcatgcgccttcgccagcgaatggttcggattgttctgccacttgccttccgacatgcactgtccgggattggtaatgtctggcagatggttctgaaagaaacggcgttgctgtctgtcattggcgtggtcgaacttatgcgacagtcgcaaattgccggcggttcaacgcacaaatattttacgttctacctggcggccgcgctgatttacttcgctatttcatggatatcagggcgtggttttgcccgcgcagaaaaatataccatgcgatcccttaaccgcaattcagggcaataa

SEQ ID NO: 111061 - DNA, 720 bp, Enterobacter aerogenes
atgctaaacgaagccacgttcatctatgaaatgtttattcgcatgctgcccggtattcctctgacactgcagcttgcagcaacgtctattgcatgcggtggttgccttgggctggtgctggccctgatgcgaacctcaggctgggcattgctggatgcatttgcgcgtgcctacatcgcccttttccgtggaaccccacttcttgtccagatttacctgatttattacggtctgagccagtaccctgagctgcggtccagtgtgctttggccgctcctgcgccagccatggtggtgtgctgttctggcgatgtcactgaatacggcagcgtacgtcgcggagattattcgcggctcaattatcaccgtgccaagagggcaggttgaagccgccatggcttgtggcatgagcaccgtactgatgtaccgccgcatcattatcccacaggctctggttcgcatgctcccagcatatggcaatgaaatcatcctgatggtgaaagccaccgccctggcctcaacaatcacgctgatggaggtcacggggcttgcagcacaggcgatttcagaaacctatcgcccggtcgaagtttttgccgctgccggtgttatttatctgggactgaatttcctgatggtcagcattattcggttgcttgagaaaaagacctcaacggaggcatcgtccgggaaacaaacgctcaaacgaagctatttctga

SEQ ID NO: 111062 - DNA, 837 bp, Enterobacter aerogenes
atgaaactagcccttgccacactcattgccattctctccgcagcagcagttcctgcacaggctcaggacaccattaaaattgcaaccgaagcctcttttgccccctggtcctttaccaacgcatcaggaaagcttgatggatttgaaattgaatttgcagatgcgctgtgcacccgtattcaagcgaagtgcctggtcagcaaccagagctgggatggtctgatcccctcgctgaatgccggaaaatacgatgcgattgttgcctctatgagcattacgccgaaacgcctggaggttattgacttctcttcaccttacgctgcctccactaactcgttcctggttttaaatggaagccctgcaggcgatttagactccaccggcatcaacctgggtctggaagcggataaagaaaaagctgataaagccatcggaattatcgataaacaactgagtggaaaaatcgttggggtacaggcttcaaccacgggagccacattcatggcatcacgcttaccgtcagctgaagtgcgcgaatacaagaccatggatgaagccacgatggatcttgctgctggccgtattgatgcgctgctgggcaacgtcactgtactgcagacgtcgcttaagcgggacgatatgaaagatgcgaagctgaccggtccgctcttccagggtaaagctttcggggaagtgggcatcggactgcgtaagggcgacagcgcgcttaaagaacagcttaatagcggaattaaatcactgagtcaggacggtaccctcaaaaagctgagcatcaaatggtttggtgtggatataacaccgtctgccgttaaataa

SEQ ID NO: 111063 - DNA, 1230 bp, Enterobacter aerogenes
gtgaacgagacgaatattcaacgcagtaatttcgacagcctgatggttcccgcttattcgccagcagaatttattcccgtaagaggaaaaggttcccatctctgggatcaggccggtaatcagtatatagaccttgctggtggcatcgcggttaatgccttgggacacgcccatcccgtagccgttcaggcgctgcaggagcagggcaatcttctctggcacctcggtaacggttataccaatgaaccggtattgcgtctggcaaaacaactgacagagtcaacctttgccgataaagccttcttctgcaattccggtgcagaggccaatgaggcggcactgaagctggcccgtaaggtggcgcgcgataacggccagccaggtaaaaccggcattattgcctttaacaatgcctttcatgggcgcaccctgtttaccgtgagcgccggtggtcagccaaaatactccgaagagttcgcaccgttaccacagggcattgaacacgtgccttataacgacctggcggcagtcgctgacctgatcagcaacgaaacctgcgcggtaattgttgagccggttcagggggaaggtggtgttctcccggctgacgcggattttctgcagggactgagagcactgtgtgacaagcataaggcactgctcattttcgatgaagtgcagacaggcgtgggacgtaccggtgacctctatgcgtatatggcctatggcgttgtgcctgatgtgctgaccacggcaaaagcgctgggtggtggatttccgatcggcgcaatgctgaccactgatgcactggcggcatctatgtcccctggaacgcacggcacgacatacggtggcaatccgctggcgtcagcggtggctggcgccgtatttaacttcatcaatacgcctgaagtgcttgagggcgttcgtgaacgacaccgctattttgttgagggcatttcgcgcctcaacgagaaattcggtgtgtttaccgaaatccgcggcgcaggcctgctgctcggttgccagatggaaagccggtttagtggcaaagcgaagcagctcacaacgcttgccagcgaagaaggattgcttttgctgattgccgggccgaacgtcgtgcgtctcacgccttccctgatcattccgtttgctgacatcgatgagggacttcaccgtcttgagcgcgcgatgacccgattcgttgcaacacaggcaccgcagtcatga

SEQ ID NO: 111064 - DNA, 1029 bp, Enterobacter aerogenes
atgatgcttatccgccacgcggaaccccgcgatctggatgatttgctgattctggctgaaaaagccggattcggactgacgtcactgccggtcaatgacgtcacgctggccgcacgcatcgaacgtgcacgaaaaacgctgcgcggagagctcgataaaatggatcagggctatgtgctggtgctggaagatacggcggttggccgcgtggtgggtatcagtgccattgaggtggccgttggtctctctgagccctggtataacttccgcgtcggcaatcaggttcatgcctcaagagaactcagtgtatataaggcgatgcctacgctctatctgagtaatgacttaaccggtcacagcgagctctgcacgcttttcctggacccggattaccggcacagccacaacggcaagctcctgtccaaaatccgtttgctgtttatttcggcgttccgtgagcacttttctcccaaagtcattgcggagatgcgcggctactctgatgagaacgggcgctctccgttctgggccgcgctcggacagcactttttcaacatggactttgtccgggcagactacctcagcggtaccgggcagaaggcgtttatcgcagaactgatgccgcgaaacccgctatatatcgacttcctgcccgctgatgcccgtgaagtcatcagcgtggtgcatccacacacggaacccgccagaaagctgctcgaagctgagggcctgagctatcagggattcgtagatatctttgatggtggccccacgcttgaggctgaactcagcaagctccgggtgatgcgtgaaagcaaatgtctccgggctgtctgcggccagccgccggccgagggggtgctttgtctggtttcaaacacaaactacctgaactatcgcgctgttctcagcactttcaccccagaagcagacaccgttgctctgaccgaggctgactgcgacgctcttggcatcggtgaaggggatcaggttcacatcgttgcgctcaactcacgggaaacattatga

SEQ ID NO: 111065 - DNA, 1479 bp, Enterobacter aerogenes
atgaccagtcacgcctcactttatatcaatggcacatggcgacagggcagcggaaatgccctgagcaagtacgagccgctggataacctgctgctctggcagggcaatgaagccagtgctgaggacgtatcagaagcctgcgaagcggcacgaaaggcctttcctgcctgggctggtaagaccttcgcccagcgtcaggaaatcatcgctcgttttggtgagctgttacagctgaaccgggacgagctggctgccactatcagccgtgaaaccagcaaaccccgctgggaaaccctgaccgaagtgcaggccatgatcggcaaaatatctatttcacagaaagcctatcaccagcgcacgggagaggtgatctctgaaatggccgacggcgttgcgtccctgcgtcaccgccctcatggcgtgctggccgttttcgggccatacaacttcccgggacacctgccaaacggacatatcatcccggccctgatcgctggaaactgcgtggtgtttaaacccagcgagctgacgcccctgactgctgacgttgtcatccgtctctggcatgaggcgggcatcccaccgggcgtcattaacctggttcagggtggacgaaaaaccggagaggcgctggccagccaccctggcacggacggtctgctctttacgggcagtgccggcaccggctaccaccttcatcgtcagttcgccggtcagccggaaaaaattctggcgctggaaatgggggggaataacgccctgattgtgaatgacgtaacggatctggatgcggcggttaaccttgcgattcagtctgcttttatctctgctggacagcgctgcacgtgtgcccgtcgtctgcttgtcagacgaggcaccgagggcgatgcgtttatcgatcgccttgtcagtgtatccgcaagactggttacaggccgctgggacgcgacaccgcagccgttcatgggcggggtcatttctgctcacgcagccagccagatgatagccgcgcaggaaaaacttgtagcgctgggtgctaccccgcttcttgagatgacccgacccgaaggagacaacggtctgctgacgccgggtgttctggacgtgacgggcgttaccggcattcctgatgaagagtatttcggaccgctcacctgcgtgacgcgatatgaacattttagcgaagcgctccagattgccaacgatacccggtttggccttgctgtcgggctggtctcttctcatcgcgaactttttgaacagctgctgaccgaagcccgggcgggcattgtgaactggaataaaccgctgacgggtgcctcaagcaacgcgccttttggtggtgtgggagcatcaggcaatcaccgcgccagcgcctactatgcggcagactattgcgcatggccaatggcatccttggaagcagaaaccgtagcgatgcccgcgatgctttcacccggtgtcgtattcagtgagtaa

SEQ ID NO: 111066 - DNA, 1338 bp, Enterobacter aerogenes
atgtcaggaactgaagtcaattttgatgggctggtaggcccgacgcaccactatgcggggctgtccttcgggaatgaagcgtccaccaggtaccgtaataccgttgccaatcccaggctggcggcaaagcaggggctgatgaaaatgaaggcccttgccgatatgggcatgatccaaggggtgatggctccgcatgaacgcccccatattcctcagctgcgcaggctgggattcagcggcagcgatgaggccattttgcagcaggcgatgcggtattcgcctcagttgttatcagccctgtgctcggcctcttccatgtggacggcgaatgcggcaacggtctcgccatcagcggacagccgggatggtcgtgtccacttcacggcggcgaatctgaataacaagttccatcgctcgatagagccggagacgacctccgcgcttctgcgcgccatgttccgaagcgaggcccatttcgcacatcacgattccctcccgcaggtggcaatgatgggggatgaaggggcggccaaccataaccgacttggtggagactatggttcgaaaagcgttcaggtcttcgtatacggccagcatatgctcggctctgtgccggggccttcccgttatcctgcccgtcagacacgcgaggccagcgaagcaatagcccggctgcatcagctggatccggattacaccgtgtttgtgcagcaaaaccctgacgtcatcgatcagggggtgttccataacgacgtgatagccgtcagcaatcagcaggtgctctttgtgcaccagcaggcttttctgcagcaggcgtcggcgctggatgaaatacgtcgcaaagtcgcgctgaccgggcgtgagctggtcacgattgaggttccatcagacagcgtttcggtcccggaggcggtgagcacctatcttttcaacagccagctgctgacgcgccgtgacgggggtatgacgctggttgtgcctgaagaatgccgtcagaatccgcgcgtctgggcatatctgtcagaaatgacgtcaaccacgccggtggaccaggtctgtgtgtttgatctgagggagagtatgcgtaacggcggcggacccgcgtgcctgcgtctgcgcgtggcgctgacggagcaggaactgtccgctgtaaacccagatgtgctccttgatgacgctctgtacagcaggctggaccgctggattgagcgccactatcgcgaccggctgacccaggaagatttggccgatccttcactgctacgggaaagccgtacggctctggatgaactgaccatcattctcgggctggggtctgtttatccgttccagcaataa

SEQ ID NO: 111067 - DNA, 1002 bp, Enterobacter aerogenes
atgaattttttcctggaagatactctccggagcaccatacctcagcttcagagaggagagaggcaaaatctgcactggcgctggctgggggaggggatcatggagttgaccccgactacgggataccgggagtccgtggttatttcggcggggatacacggaaatgaaacggcaccaattgagctgctggatcttattctgagcgatttgctctccggaaagctggcactgcgcgtacgtcttctggttatcctgggtaatcctcccgctatgcgtgctggtaagcgatatctgtcgacggatatgaaccgtatgttcagcgggcgccataaagattttacgcccagttacgaaacagagcgcacgcgcaaactggaagccgtgatgacagctttctggtcaacaagctcatcggtaaagggcgcctctcgtttccactacgatttacacacggcgattaaaggctcccatctgccgcgcttcggtttgcttcccttccagaaccgcccatatcaccgtgaactgttaaaacgacttgaagcagccgatctggatgctctggtaatgcaccaggagaccggaaataccttcagtcactttagcagtgagcagtttctggcagagagttgcacgctggagttgggcaaagcgaatccttttggtgaaaacaagctatcggatttcagggcaatagaccgtgtgcttcgggcccaccttggtggcctgccgtttccgcacagaagtttgccaccggtacgcctcttccgggtggatcgtacgcttgtcaaacatgccgatgactttgagctgggggtgccttcagagacgcttaatttcactcaatttgaaaaaggtgcagtcctgtgccgggaaaatggttctgaacagcgcgttgaaaacgatcaggagtggatgctctttccaaaccccggtgttcagaccggtatgcgggcggggctgatgctgacggaacttaaccgatgggttcattcttcgccctaa

SEQ ID NO: 111068 - DNA, 774 bp, Enterobacter aerogenes
atgtcagaaacaaaattagttgtaaccgaactgcacaagaaatatggcgaacatgaagttctcaaaggggtatccctcacggccagttcaggtgatgtgatatcaatcatcgggtcatccggttcgggtaaaagcacgtttttacgctgtatcaatttccttgaaaaacccagtgagggaacgattcgaattggcaatacagatgttggtctggttcgagacaaagatggcgaacttcgggtctttgataaaaatcagctgcaattgttaagaacgcgccttgccatggtattccagggcttcaatttatggagccacatgacggtactggaaaacgtcatggaatgccctgtgcacgttttaggcgtcagtaaggaagaggcccgtaataaggccgtagcctatctgaataaggtcaatatcagcgagcaggctttcaaccgacatccatctcagttatctggtggacagcagcaacgcgtgtccattgcccgtgcgctggcgatggagcctgaagttattctgtttgatgaacctacgtcagcactggatccggagctggtaggcgaggtgcttaaaatcatgcagcagcttgctgaagaagggaagacgatgatagtggtaactcacgaaatggagtttgcacgccatgtgtcgaacaaggtggtgtttctgcatcagggcaaaattgaagagcagggctctccacaagagttatttgataatcctaagagtctgcgtcttcagcagtttttatcaggttcactgaaataa

SEQ ID NO: 111069 - DNA, 357 bp, Enterobacter aerogenes
atgagtaacgatattcaaagaatacagagtaatgagcgtctcagtcgggttgtagtccacaacggtatcgcctatttgtcaggtgtgacagcaaacgatacgacaaccggcgtaatggcgcagacttcggatgtgttgggcaagattgatgcctatctcgaattggctggaaccgacaaatcccgtcttttgtccgtacaaatttggctgagggatatcgacagagattttgatgatatgaacaaagcctgggctcaatggataccagaagggtctgcacctgccagagcaacgggtgagggccggctggcaggtgcggatattttggttgaaatgattgttactgctgcaatctaa

SEQ ID NO: 111070 - DNA, 258 bp, Enterobacter aerogenes
gtgagtaaaagtgacagtaattaccaggtcgtttatcgggatgaggtattgcaaaagtacgttcccggcggctgggttctgtttcagcggggaaagcaattcggcggcggcttctggttaggaaaaacttatgacggattgtttatgctggaatttgaataccctgtttcccttcacgatggtgttgtgtacatcctccagcatacgcaggcagcggctaattttatggattttgacgatgattttacgctgacgtga

SEQ ID NO: 111071 - DNA, 696 bp, Enterobacter aerogenes
atgaatttgattgaacagacacatcagattaatttttttacaaataataatgatatagttccaaatacattaacaattggatctttgcttgacaaaattgggaagtttggttttatacctacttttggtcaagaaattaatgctatcacaggtgagaaaaaacaaattcttatcatgatggattcaaatcaaaaattgagagtggaatttccaagtcatggtattatttttaatgggttaggtggcgagcctcatgaattttcagaaatggttttatcgatatccaaggagcttcagaacgtttttccaatgaagaaaggaaatagaatcgctgttctgaattcacgtatttatcagggtgatgaatcggtttattcttcgctttatgatggtttgtttacttataaaggtgtcaacccatttgagtgggataatcgtatagctataagaaaaaacattgaaggatatcacgaagaaataaatagtattagtacagttcgacgtactgagattgtagctccattcttaaataatggaatgcagagtgattgtgtattgtttgaaactgatactaacacccttcctcagaatggatatatgagatttgattgggatgaatatatccgcgtattagatttgttatgtcaggataacttggcaacgattgaaaaattacaacgctacacttcgctgtaa

SEQ ID NO: 111072 - DNA, 648 bp, Enterobacter aerogenes
atggtaaataatagttttataataagtgctgaaaaatcttttagcttacctaaggttaaaaacggggtaagctcaacaggttcatttgccgattattttgatggaaataatattgtttatgttgatgttaaaagccatgagttatttcatagcaagacaaatggtggttttcaatcagatatagagtcaataaatcaaggctcgtcaactaaacaggattttgaaattcaggtttcaaaatgtacttctagattaattgagttaacgtgttcagaagattacatcgaaggtgagattagtaagacacagatctacttagagtttttgtatgataaaagtcaggagctatttcaagaatcattccaaagagcatgggtgcaattgtaccgaatggatgattatcatgtgaaaaattttattaatttcgcatcgactattgaatatgaatggttagggaataaagctgatgctatgattatgggggtttgttctcttgaaaacgaacttatattcgaggcagcgatccgtgcggttgagtcttggggagaaaaatcattcgtttcagttcttgaaagaatgagaaagtttgatgccgattgggtcgaggagtataaagaagcagttatcggatacttgagaagtttataa

SEQ ID NO: 111073 - DNA, 498 bp, Enterobacter aerogenes
atggcatatttattgcgtaaaatatcccatagtaaatgggagtgtaataaaggacgaacatcagatgatatatctgcggatgcgataactggttgtacaaggacttctaataataccttgtcagtatggaattctgattccaccaactttcaagatgagttggtggaaaaaattgttgtcgctcttgctactacaatgtcagaaccagctacgatagatttggtttggcttgattctcaatggtttgatgaaagaggtatcgatattgcgcatactgcagggaataccttatataaatcagttaacaattttcatcgggatctatcagagctaaatcatagaaagcttgctgaggttggtgaacatatacttgaacaattgaattctaaggggctttataagagaattctcaagagtgaacttattgccttggttttcaaatggcagcagagagatggtgactttgatattgacgatttgggaggctttgttgaataa

SEQ ID NO: 111074 - DNA, 186 bp, Enterobacter aerogenes
atgaagacggtgtgcatgtttaataagttaaaaggatggtgcaggattgcaggggtaatccttattcctgtactgttgataataaacatggcaacgttattaacgatccatgatgggttcgtggtttttagatctttattgtttatttttgttctcacgattatagccagacgattactgccataa

SEQ ID NO: 111075 - DNA, 1824 bp, Enterobacter aerogenes
atgagcgtgaatgtaaaagccgccaccctaaccaaccttgttaaatataaaacagacagggcgtcattacgtagcgtacgtgatgatatgaaaaaattacaaaaggatttcagcaaaactgagggcaccattgctaaagcaaaaatgcaggctcagaaacaggtgtacactgcacaaatgcagcagcagaggcaggttcaacaacaacagaaacaggcagctaaacaagctgctgtagatgccaaagcgaaacagaatgaacagaaaaaattagcagcagcgcaagcacgcgctttgaaaattcaacagcagcaatctaagaagatagccactcaacaagaaaatgctgatttagcgagaaaacgtgccgccttccagcttggacgcctccagaatatgagcggagccgatcgctacgctgcgatcaaacaggctaatgccattgtggatgcttatgcacgaggaaatcaaagtctcaaatcgatgaatcaacaattatctcaacatctggtaactcagagagctatcgctcgaaataataataaacaggccaagcagtcaggtcaggggaaaaaatctggctcctctggttggctcagccgtcaggcaagcgcatttatccctggggaaattcttgggccagtagctggcgcttatgccgctcaacaggcatatcaaatcatctctggaacactggcgggagccattgagagaaaccagggcaggaaaatgattagttcgatggggttaaatcctctggaagctgacgccgccagaatggaaaccttaaaaagaactggtttctcaatgagttatgagaaatatagtgatatctccaaagatacccaggataagatcggccagttaagtcttggagaatggaaaacagataaaaaaacagggcaatcatcctattctggcggtggtgaaatgtcggactggctgcaaataatggttaatcgtggaggctatacccaacagggcgcactaaaaactcttcaggatataaagggaccagtggagttagccgtacttttaaaatctcttcagaagagcgcgaaactaactgaatcagaattcactgctttagcagaagtaataaacgacttttcttatttagctaaatcggtagatgccagcgggcaaaacgtcatcgatactatgaatatactggttagcagtggtcttgcactcaatagccaacagcagaaatccatcgataacctctcgcagatgtcgattgtattcgataacgccagaaatgcattaggtgatcaattcgcagcgtcctttagtaaagggcttgaagaccttggaattaatacacaaaatctttcctctgaaatgggttcattggtgcctctggtgaaggatttggggacggggacggctcagactgttaaagggtttaaagatttgctcgatgttctgtccattattaccgactggaaaaatagacttctcggaactgataaaccagaggaacagaatattttccagcaaggtgctacttttgttggtgaatcactgttgccaccgggcgtcctcgatatggcaagccggattaaaaatatagttagtcctggttctgattcttcatatgctaatcaagtgcaaaatggtggttggtataatcaaatgatgccagcaacgccagctatgcaatatcaacctgttatcccagatttaaaagcggattttaacctgacagtgaatccatctcctgaatttggaatgatggtcgaggctgtagcagataagcggatagagtgggcttttgatgatcagaatttccagattaaccagagtatattaggtcaataa

SEQ ID NO: 111076 - DNA, 972 bp, Enterobacter aerogenes
atggccagagccgacttagtgctaagtttagttgagactgggatgaagggtgaccttccgcgtttcaaaataactgcagaagcgatcgctgcagaagcaacagcacgccatcaatatcagcttgccgataagctgaaaaatattcttactagtacaggctctggtgaggcgcgccgttatacctacgattctgatctccagaatgccttttatgaaatccaaccgcgtaaaattctggatgatttgatcatccctgaaaccgtgactacgcagtttatggagttgatagaagagcatgcgcgtcgcgatctgttgcggtcgtataatctggaaccgcgtcataagcttttgttatctgggcctccaggaaacggcaaaacttcaattgccgaagcgctggccaaccatctctcgctgcctttctttacggttaagtacgaaggaataattaaccgctatcttggagaaacagcacagcaaatagacaagttatttgaatttgttaaaactcagcgctgcgtgctattttttgatgaatttgacgccataggtaaagagcgcgaagatgttaatgacaacggtgaaatgaagcgtgtagtgaattccctgcttaaacatattgacctattacctagccatgttgtgtttgtaggggcaacgaaccatgacgcaatgctcgataaggcaatctggcgcagatttcagttacagataactttgccgtctccaacacagagtatggcgacgaaatggtttgaagagtttgagaaacgcgtgggtcattctctcggccttgccccttcgacacttgccagaaagctgtctggtcttagcttcgccgagttagaagaatttgctctcgatgtgcaacgtaaatacgtgcttggtctccccgcaagcgaaaaaaaactgaaggaaatttccgctcactgccttaagcactggtcggagcgatatcggcaaaaagattaa

SEQ ID NO: 111077 - DNA, 2553 bp, Enterobacter aerogenes
atggcgcagaatcctctcttaatattcaccccgccaaaaccagttttaaagagggacgatctgacgcctaatcgttcatcgattcagtttccgaatatagatatccaggctgcacgagtttttccaaaagtcgaaaggcttgagcgtaatttcgcagaatatatcgaacttgctgaaaccgctgacggctttcttcctgaaaaagtacttgtgctggaagtcgtcggcgaaatagaaggcctcgctaccgcacttacccgagttaagggttttgaatatctttcatccgcattactcgaaaaatcttttgatagtgaagattattacacgttaagcaatggaacccgtagacctgcttccagaaacgcttatctgacaatgagcagccaggttgggctcagtcgtctcttggcactgtggcgcgaataccagaaaaataggaaagtagaatggggatttggtgcgctgaaggccgtctttgaccgacttacagatattcgtttctgggatacccgagacaggctagctgcaactttcgtcttagaagactggcagggacgtgttgaggatgcgactgctggatatgatgatcccgttcctttcgaaattgaactttggtatcggtcgtctcctgaggagcagtctaaagcggagtcacgcataagaggtttaatatctcgtgcaggtggcaccattatcggtggatgcaagtataaaggtatcagctatcacgctcttatcggtaatctccctgtcagtaaggttcaggagatactcctatatgggggcgaagctctggaactgatgcgctgcgatgatgtaatgttttttaggccactaggccaatgcgcttttcccattattgaagaaaatgttcagactggggacgagatatcgacgctggtcggtcagaatctccccgatccctatgcgagcccgattgtcgctttactcgatggtctaccacttgaaaaccactcggccctcagaggtaggctagaaattgacgatccggatgatttcgaatctctttacacctcgccgtcctatcagaatcacggtacatcgatggcatctctgattgtccatggtgatctttcgaatcagatcgaaccgcctctttctaggcgtattcatgtcagaccaatcatgattcccgggagtatcagtttcgatggtagtgtgagggagcaaattcctactcaatatcttcccgctgatctgatccatcgcgccgttgtcagaatgaaaaaaggagaaaacggtcagccgcccacatctccagacgtctccattattaacctatctattggagatccttgccgtatgtacgatgcccagatgagtccatgggcgagaatgttggactggttgtctgttgaatatcaggtattgttcgtcgttagtgcaggaaattcgagtatgcctttaattctggataatgttgctggggatgatttctctaatctcacccctacagaactggaagagcatgctcttaaagcaatcgcggttcaacgtccgttgcgtcgtttgctttcacctgctgaatcaataaatgcgttaaccgtcggtgcatcgcatcatgatggctttactggcaatattccaccaagacatgttgatgtattttcaactcatggaatgttttcaccgattaataccattgcgttaggaaggcgaaagtcgatcaaacctgaggtgcatatgcctggggggcgtcaaacttatgtgaataaaacgaacacatcgcgcgatccggtcaggcttgatgtttccaaaacatttcgttttggaccgggactgaaatcagctatgcctggagctgagggggcacttaatcagtgtggtttcacggcgggcacaagtaacgcagcagcgctagcgactaggagacttgcgatgctgcatgacacgctccaggaaatgaaggcgttcggatacaaggaagcactttcgaaagcttctgatgccctgattttaaaggcaatgatgatccatggtgctgaacataatactctctcgagcagagtaattagtcgccatttagatgtgaacggtagcagaacatttaaatctgatcttaatcagtatctaggatttggccaggtaaacgaaagccgaattcacttttgtgccgacaatcaagcaacacttatttattcaaacgttatcgaggctgagactgctcaagattattttttcccactcccaccaagtcttgccgccaaaactattaatcgtcgcttggtagtaacagtagtttggttctcgccagtgaatcatggacataaagattaccgcggggctcaactctgggcaagtccagcttatggtgatattaatcttgatgaatttgattattatccttcacatctgaaaaatggcacagtgtttcacgacgttcgcaagggaaatcgcgcttcagcctttaccgagggagatcggttggctatcagaattaattgttacggtcgagctggaattaaaaatctcaaggttccttatgtagttattgcgacattagatacaccaggtggctttgttgaataa

SEQ ID NO: 111078 - DNA, 141 bp, Enterobacter aerogenes; identical to SEQ ID NO: 36145

SEQ ID NO: 111079 - DNA, 891 bp, Enterobacter aerogenes
atgcggacaggtgaaatttctattcagagaataccggtgtcttactcacttgaacacaccatgtcacacagccttgaacgatatgtagaacaaaaacttactaccgatttactggaacatgttgcagctaatcgcattcctatcgtagttgaaaaccatgaaggcagtggcttttttccaaatcagattgatttttgttaccggcaaacatccagggtggttaacagtttcagacccacctggcatactcatgttgacgctgatcaacaggaatccgtcatacttcgtattccttcaggttatgactatattcgtcatttttcatcacttgtattgcattaccttaaagcccgaatatcgagtccgcaggagcttattactattaagtatgaacagcttaacgatcgccgttatccagccatgaccggccttaatactctcgacattgtaccgggtagccagattattattggctgttgtgacttgctgatttctgaaatggctgaccaaatcctttcatttgaggaaaacgatttttatacctgctggaaagccaaggataacgtggtatttctcggctgtaagttcagcttctggggtaggctttccggcagcatcgtccgttttatctgtgagcattttcagccagctgaaatcatctacttcggcaaactagggacactgactgcgccttccgacatctacgagaaaattttcacaccttcgcagttcctgatgtacaactgcctgacaaaactcgggccgaccatcacgttgaataacagtatggcacagttcaatgacaacggtctggttggtgttcatgcgtcagttcctacgatcatggaagaaacatttatgcagcgtctaagcgcaggaagcggtgactga

SEQ ID NO: 111080 - DNA, 132 bp, Enterobacter aerogenes
atgtgcgctcatctcaccaccataaatagcatcttcctggcgcatccgctctttaataaaggcatgtcctgttttggacataattggtatcccaccattctcggtaacaatatcgactgtattccatgttaa

SEQ ID NO: 111081 - DNA, 252 bp, Enterobacter aerogenes
atgactggccgtcacttcaatcccaccatcaatcccaagatggaaggtggcaaagtagatttcttcggtaccactcagaccaatatcaagtacatcagtgccggcatccatcaggccattagccaatgccagcttcaaagactcactagtaagtcggacatcaccacctacagcaatacgttttggtttcaaaaactcaccataagcacgcccgatacggtaggcaatatcttcattcagttcatcgcctaa

SEQ ID NO: 111082 - DNA, 558 bp, Enterobacter aerogenes
gtgaaaaaaatgaaccgtacgctccgcagatgttgtctgtacgggcttatcagcctgtctttgtttgcaccagttccggccgtgtatgccgccagcatcgagacggggtattcgccggaaggaacggctctgcagctggtcctgaagactattaattctgcacagcaggaaatccggctgatgggctattccttcacctcacccgaagtcgccggcgcgcttgtcagggcaaaacagcgtggtctcgatgtgaaagtggtacttgactggaaagccaacagcgcgaaagggagtgcaggtgtggcggcgatgaatctgctggccaatgccggtattcctgtacgaaccgtcagccagtttaaaatcatgcacgacaaggtgatcatcactgacggccgaaacgtggaaacggggtcgttcaactattcccgcgccgctgatcgggtcaattcagagaatgtgcttgtcgtatgggatgttccagtcgtagctcaacgctatctgcaacactggtcgacccgctggtcgcaggggacggactgggaacgggcttattaa

SEQ ID NO: 111083 - DNA, 141 bp, Enterobacter aerogenes; identical to SEQ ID NO: 36145

SEQ ID NO: 111084 - DNA, 141 bp, Enterobacter aerogenes; identical to SEQ ID NO: 36145

SEQ ID NO: 111085 - DNA, 234 bp, Enterobacter aerogenes
atggctaaattcaagtctcttattgttggcgctaagtttgaggtcgcttctaggaaaaccacctgtaaacatgacaaaaagcatgtgattacaaaaggtgagttcaggctaagcgtaaagaatccgacgcaaggtgaatcttactattgcctctcctgtgccaaaacgatggttactgaaagcttggccaaactagaaggcttcaaaagcgagctcgattcactctcactctaa

SEQ ID NO: 111086 - DNA, 327 bp, Enterobacter aerogenes
atggaaaagcgaacgaaagagatcaaaatccggctcaccgaaaccgagcatcagcgactgcttgatcgctgcgaccggactcaccttgcggagtggctgcgtcagcttggtctgggtgaacatacctcacgcaagcgccgtgtgcccgaagtggcacctgaactgctgcgacaggtcagcgggattggcaacaacctgaaccagatagcccgccgcctgaaccagactgattccctgactcctgctgaacgtgcctcgcttcttgtcgtactgaccagccttgaccgtcagcttggcgacctgctggcgcagaaccatgatcgttaa

SEQ ID NO: 111087 - DNA, 486 bp, Enterobacter aerogenes
atgagcgagattttaaatttggcgaagggcttcgaggagaaatcgaagcagcaggcgcaggataccgagcagagcgtgaagcgcgagttcgcgaggctggaaacgtctatcagcgaggacttgaaatcaagctcgcagagcatcagcaacgctatccacgagcagaacggcaggctgactggcatgatcagaacctctgtttcagcggcgatggcgtgggtattcctctgcttcgccctgctgatcggcatcctgggggggataatctggtttcagggcacgatcatcacttcacgcctgagcgaaatggacagctacagccagcaactggcgagcctgaaagcgaaaagcggcgcgggcgtgacgatttacagcgacgatacgcggcggaacacctatctggtagtgctgccgaagcaggcacacggcgtggaaacctacacgtcgacggccgggaacaccgtggtgaaatacacggcgaaataa

SEQ ID NO: 111088 - DNA, 234 bp, Enterobacter aerogenes
atgaccgagatggaaaaacagcttctgagcgccttagagagcttacagacaagctacgagcaacagcagcaggcgtggcaggacagctacagcagcttgcagcacatgttcgaggctacctcgcaggcgctgacgcacagcgacagggtgtgtcagcacttgagcagtcaggtggacagcttgcgtgcgcaggtcgagagcttgagcaggaacgtcagccgcttgatgcgctaa

SEQ ID NO: 111089 - DNA, 333 bp, Enterobacter aerogenes
gtgagtcacgcgattgagtttatcgagaccccgatgtttacccgtcagataaaacagatcgccacggatgaagagctcagggagctgcaaaagacgctgattgagtcgccggacaaaggcgatctcatccagaaaaccggcgggctgcgaaaagtcagaatggcgacgggcaaccagggaaaaagcggcagcgcgagggtaatttattttctggccaccgctgaggtgatttatctggtgatggcttacccgaaaagcaccaaagacagtctgacggatgcggagaaagccgcgctgaagacgctgacccaacaactgaaagacgaggtgtga

SEQ ID NO: 111090 - DNA, 285 bp, Enterobacter aerogenes
atgagtttttttgacgagctgaaagcatcgctggaagaagccgttgaaatcaaaaacggcgtcagagcgccttcccgcgtcacccgttacgagctggcagacgtgaaggccatcagggcacaactgaacgtttcacagagcgagatggcgaaagtgctgggaaccagcctcgataccatcaagagctgggaaaccggacgccgtaacccgaccggactggcggcaaaggtactggcaaccatccaggcgaacccgaaattcttccaggagctggctgcgcattaa

SEQ ID NO: 111091 - DNA, 924 bp, Enterobacter aerogenes
ttgcataacgccgcactcgcactttttaacgaacgcttaccgcacaagccgtacttttcggatgatctgcacttcggtgtacgcattgccggtaaggaacgcgccattctggcgaaatacatccagttcaatcagcctcacgccatgttctggctgggatttgacgtcgatcgcgtcggtgccgccatcgactggagcgaccgcaacgctccagcacctacactgaccatcaccaaccctgaaaacggacacgcgcacctgctgtacgcgctgaaaacctcgatacgcaccgcgccggatggaaaaatgaagccgctacgctacgccgccgccgtggagaacgcgctacgtaaaaaattagaggctgacgcgggttattcggggctaatctgcaaaaatccgaaccatggtcactggaaaatcgccgtctggcagccggaactttacacgctggactggctggctgactttctcgacctgaacgccgcgaacgacaaggaaatcatcgccgattatggcttaggccgtaactgcactctattcgataaaacccgtaagtgggcataccgcgccatccgtcagggctggcctgagtatgaacagtggctgaaagcctgctatgaacgtgccagcgcctataacctgcaatttgcagcgcctctggatgaaaatgaggttagtgggatagctaaaagtattgcgaagtggactgataaaaacttttcaaaagaaaccttttattcttatgttaagaaaactcactcatcttccattcaatcattgagggggagagttggagggtgcaagagtagaggcggtggaagatatatagatgatttcagtgaaagaactctggaaccatggttagacatggggatcagccgatctacctactatagaaggaagaaaaaaagtggcatttga

SEQ ID NO: 111092 - DNA, 615 bp, Enterobacter aerogenes
atgatcgacttcttaagtaaagtggtaagctcaacagaattttggagtggtctaggaggggctgttgttggtggcggatttaccctatggggaacaataattgaaggtagacggcaagaaagacagaatgctaccaatgctaaagaagaacgtttgaatgttttgataggtatcaaagctgaattagaatgcttgtttactatttacaatgcacgaatggccaaacatatgagtagttacgatgggaatagtccatttcttgttcaattcccagtgactcaaaattattttacattctatgaatccaattcattagctttatcaaaagtaagtgaatctactttgaatgaaattgtagcattatatgcatcttcgagaagccttgttgattctttcagaggaaacaacgtaatgatcgaaaagctgattcaggcacgcagaatttatgaaagtacgggcttagatcaacatagggaacagtttaatactgattataatattgctactgattatggcgttggtttaaaagagatacatttacagacgatgaaaaaataccaaacttgcttagcttcaatagctttggaagtagaaactctcaaatcaattaaataa

SEQ ID NO: 111093 - DNA, 357 bp, Enterobacter aerogenes
ttggcattagcaagaaatgtggtatttgaggaatcgatttcaatcggatttaacaatcaaacgaaaaaagttagagtttccaaaaaactaaaaccattagcgatcattaaactctacgaagaatcccctgcattatcagaagatgaaaaatcaataatcgattctatgccaggtgctaaatggaaacctcgccaacggtataccggattcaggttctctagagagccactccagtttgaggcgctggggttcatatctgaatatcactacaaccagtggttgtatttccaacaactgtctaacgaaaaatacgacgtagattttattgatgttgtgaataacggcatcaccgactaa

SEQ ID NO: 111094 - DNA, 276 bp, Enterobacter aerogenes
atgatcgattttgaacaacacaaaaacattgtagaagaatttgtagaacagcattacccgctcgcgcatagcctgatgattgatagttataaagatgcagaggtttattactcaaactaccaaatgctactagaagcgatgaataaattgcctgaacatcctgagtactttttagagtggctcttagaagccgacgcagccttgtatattaacctgatggaccttattgtcatcaccagaactattcataatgtgtttgcgcaagtttcgccttaa

SEQ ID NO: 111095 - DNA, 273 bp, Enterobacter aerogenes
ttgaaatatgatgaaaacagcattagagttttaacagatgaggaattagaacaccattccgcagatagcatcttaaacatcctgcttgatgaaaatcctgatatctcacctgaccatctggcaaaaatggctgagtgcctggttactttggggtatggtgtaactgaatacagagaatataaaactggcactttggataatattaaatgccagacaatgcaggagtggttctctaataaaaataaagaaagaaataaaatcaaaaaatattaa

SEQ ID NO: 111096 - DNA, 141 bp, Enterobacter aerogenes; identical to SEQ ID NO: 36145

SEQ ID NO: 111097 - DNA, 141 bp, Enterobacter aerogenes; identical to SEQ ID NO: 36145

SEQ ID NO: 111098 - DNA, 321 bp, Enterobacter aerogenes
atgcacatttcatctgtaccggccacggtaccggtttcgtcacgcctgtcgcccgtacaggtgtggaagcaactgttaaagtatctgctggaacaccattacggcttggcacttaacgacacgccattccatgacgacgcggccatccaagagcatattgaagctggtattacacttgctgatgcagtgaatttcctggtagaacgctatgaactggtacgcactgaccgtaagggattcacttggcaagatcaaacagcattcctgaccgccaccgatattctcagagccaggcgagctaccggattaataaatacttga

SEQ ID NO: 111099 - DNA, 300 bp, Enterobacter aerogenes
atggccaggtgcgcgctcattcttaaaatatcactggcaatgctggcatttgcggcaaactccattctgtgtcgtctggccctgcaaggaggccacattgatcccctttcattcagcagcctcaggctggccagtggtgcattcgtcctgtcccccttcctcttttatcacgccaggaccacattatcgctgtggcgtccgctgagcgggttttacctcatggcgtatgcggtgctgttctctgtcgcctatatccaggtacggaaacaggtcgtgaatatcctgagtgaagcctgctga

SEQ ID NO: 111100 - DNA, 141 bp, Enterobacter aerogenes; identical to SEQ ID NO: 36145

SEQ ID NO: 111101 - DNA, 141 bp, Enterobacter aerogenes; identical to SEQ ID NO: 36145

SEQ ID NO: 111102 - DNA, 141 bp, Enterobacter aerogenes; identical to SEQ ID NO: 36145

SEQ ID NO: 111103 - DNA, 990 bp, Enterobacter aerogenes
atggttgcaaaaatattgatagaccctagatggaaaaatgcaggaggaattggtactttctatgaagagatcaataaaataaatagatatgaggagtttccctttaaaggtaatccagcatctccatttgatactctcaacttaagtaaggagctctctgcattaagaaacagtgtcgttttttttcctggttacattccacccatagcaagtcgtgttccatatatttttacaattcatgatttaaaccacttagatcgtgaagagaattcaagtgtagccaagaaagtattctataacacagtaataaaaaaaggatgcaaaagttctgcatttatttttactgtatcagatttttcacgaagaagaattatagaatggtcaggggtaaatgaaaagaaagtgatcaatgtgggaaatggggtatctcaatcatttacacccgatggtgattttttagatcttgactatgaatatttcctttgtgtaagtaatcgaaaagctcataaaaatgaatttggagtgataaaatcgttctctctagctaatatagatagcagaataaagctagtattaactggtcgaccgactgatgaactcgaaacgctgatcaatagattaggaattcaggggagaattatatttaccggttttatcgacgcaaatgaattacctaaattatatcgatccgctaaggcattaatttttccatccttttatgaaggtttcggtttgcctgtaatagaagctcaggctagtggcataccagtgatcacatctaataacacgtcattgagtgaaatatctgggggagcttcaattcttgttgagccaacagaaatcaatgaaattgttgacgccatagagctggtatgtggagacattgagatcgtgaaacaaaaaataaaattaggtctcgaaaacgctaaaaattatagttggacaaaaacagcaagtattgtcgaacattatattaaaaaattactttag

SEQ ID NO: 111104 - DNA, 714 bp, Enterobacter aerogenes
atgtttagcccgcaaatatcattttgggcatgtgtatttttactgacaggtgttttttctagagtaacctttcttcgaaaaactatatttataattgcagtttttgctatcttatatacagctgtttcaagagaaataggagttagtaggtttgatgatttgattggcacatatatgccaattttgaattcacaaaaaaaatatggaacattcgaagcttcaggcctgggaatagaagtcggtttggtagtatatttaaacactttgatgacattttttagtattaatgatactcgaatgttattatttgtttgcgtatgcttcacgcttttcttttatacagtatgggttttctttttttatgaaaaagagttcgacagcaaggaaaaaggaatcgcgcttgctgtattgttggcctttatacagataggtctactagcgcaaactttaaggcaggaaatggcaacaccattactattgatggccattttttcgtgggacaagagtaggatagcaagcctcataatattaggcattgctgtctttatccatagtagttcattagttctttttcttttttatatactttttccatctcttagattgtgggggaagataagtattttcgtaggtatgtttattttttcgttttgcatatctgtgttccctggtttagttataaatttcttcaatgccatttatcttccattttaa

SEQ ID NO: 111105 - DNA, 546 bp, Enterobacter aerogenes
atgtcacgtgtttttgcctactgcagggtctcaactctggaacagaccacagaaaaccagcgtcgtgaaattgaagcggcaggttttgccatcagatcccaacgacttattgaggagcatatcagtggctcggttgctgccagcgaacgccccggatttatccggttgctagatcgcatggaaaatggggatgtactgattgtcaccaaacttgaccgtctgggtcgtaatgcgatggatatccgaaaaacagtagagcaactggcggctttagatattcgcgttcattgtctcgcactcggaggcgttgacttgaccagtccggccggaaaaatgactatgcaggtaatttctgctgtagcggagtttgagcgggatttgctgcttgagcgaacgcattcaggtattgcgagggcaaaagcggctggaaaacgcttcggtcgccctcccatcctgagcgaggaacaaaagcaaacagtgacagaacgcctaaaggcactgttgcaaatagtcggtggtgataaacttatcatccccttttgctga

SEQ ID NO: 111106 - DNA, 549 bp, Enterobacter aerogenes
atgattactaacaaacagatacttactgaggtcgagcaactgtcacgtctattcaaagatggggaagctgatattccttcaatgtggaattgcttctggccaggccttgctgcaatgttttggctactattatggcctatcgccatgtttagttataagttattttttgtagaattaccaaatgcagctcagatggggatagcagcttctgtattggtggcttttgttgctgggttgtttatgatgttgtatatagtaaatttcagagcattgtacctctccattcctgacacatatcgtaaacaatcagcattatgtcagtttatagtaggtaaggctaaattttactgtcgtgtatacttattgacgtatgtttttttaattatctcttgtacctatccggtttatggggctatatactcgacggtattatttatttgtttctcattttgtttgatgcaaattgttaatgttgatttgagccgttatcaacttacagccttaacatcgcttctcgagaccttcaagacaagtaagagtgaaaaataa

SEQ ID NO: 111107 - DNA, 1140 bp, Enterobacter aerogenes
atgacgactggagcagataatacagagtcgtcgcaagacacaatggctaaaagtaagatgtggaatgcggtggttgctaatgcaaaagcaaataatatatctaatgagcagtcctttcagaatctcatggatgaatccactagaggtacagttacaggtgaagcccatgtgggtgcaagatggagttcaggagatcagcttgctggtaaaattgggaaattggctacaggcgccagtgtagaaggtggcataaaaggatcaataagtgggagcggcagcacaggatcaactgatactgttggccagtctggtcgacattccagcgatagcagacatgatataagtagtcaggccgctaaagattttagagaggcaagtgattatcttgttagccataaaactaatacttcaggtaatataactgataacaatgcaagctctcgtgtcgatcagtttgctgcttcactttctagtgctaaaaatagttacgaccagtacacaaccagtagaacacgcagccatgaatatagtgaaatggcttcaagaactgagagtttgactggccagatgagcgagaatctcactcagcaatttgcgaactttgttcagcatcgtgctccacaggatgctgaggccattctgaccaatacaagctctcctgaaattgcagcgcagcgtgagatgctggcacgagagtttgtgaaagctcaagtagaaccacgaatcgacagttcctttgaacaaggaagaaatgatataggtaatggtatggcaagtgtttccgggacgccaggtgaccaaactgttgttagcgattttggcaagcacagtggtgatattgagtcaatgtcacgaaattctggtattaaagagaacgtaagaaatcaagtggattctatggtggaagataacaccaggataaataatgctggtaaaatcaatatcaaagagcaaggtgaagggattaaacaacagaatgcagattttgagatgttacataaaaaagaaggaaatgactttaatgagcgatataataaggaattgaatggtcaagtgaacaatccactaagcaacacgactgaggagttcaggaagaaggctgaagaatctgcaaggaaaatggatggtaaattaccataa

SEQ ID NO: 111108 - DNA, 939 bp, Enterobacter aerogenes
gtgcacatcccgctcaatcaggctgtagaccgctggtcgcagctcaggcatctggcgcacaatctctttcatgatggcaacgtcggcggcgctgcgctgctgcatcagcctgaacggctggcccggcgcgatgggctgcagctggtcgttatccccactggacaccgcccgtccaccgccggcgacgatgagggagtgggcttttgccatatcggccagccccaccatcgagctctcgtcgagcaggaacagggtgttgctgaaatcgggtgtctggccattgcgctgcagcagctgcgtgtcgtggaggaacgacgccgtcgtgcgcgcctccacgccggcactctgcatttccccgaccgcgcgatgcgtcggcgccagaccgatgacgcgcggacgggtctcttccggcagcagactgatggcactcatgactgcccggaactgggtggttttccccaccccggcatacccctgaaccaccgtgaaccgatccgtgctttccagaatcatccgggtcgccgcccgctgtccggcggtcaggtccgtcatcagactggccggcacgcggtccatcaggggggccaccgcgcctttaccttccagcacgtgggtcaggatgcttttttcggcgtcccaggtctgacgggaaatcagcaggtcgttaccgtggcccggggagacaccgacattcagcaactgtccggacttgatttgtttcttaatggtcatctcaatagaccacatcgggaccttatcacccccggtttccagtgccgtcgccagcaactggggccgggagaaggtcaggtcctggctctcaagcagcgggatggccaggtgaatggcctgttctgccggggtatgcagtccggccttctgctgcgcaatggccgcatccaggtccgtctcgccggatcgggccttcagctgctctga

SEQ ID NO: 111109 - DNA, 579 bp, Enterobacter aerogenes
gtgtggcatattgaagtaaaaggaaaaacatcacagccggggttggattttcgaacttgtcttggacaattagtgcagagaatgacaaaagataatattaattatgctattgctgttccaagaataaaacagtatgaaagattaatagaagaaacgagcattcttgctgttagtaaattgaatttacactggatatttgttgggcctgatggcagtgtgacaattaaggaacctgatagctctacgatgaaaaatggtaatggtaatggtaatggtaatggtaatggaagagaagtttctcttgtgaatggggggtttaaaagatttattacgggggattttatgccaacttgctcatatgggaaagctcctgttgtatttaaatcatctcggcgagaaatgtgggattggttggacgattttgttatttcaaatggggtgatcccaagtattgctgatattaaaaaagaggctgaatcgcggagtgggaaatggacgctttctaatgttaaaatagagtatcagttttggaaaatatatcacttgtataaggggcattttttctatcaatctgagtag

SEQ ID NO: 111110 - DNA, 171 bp, Enterobacter aerogenes
atggcgactgctactaattttgatgcgtggttagatgatgttgatggcgattatgaggaggttatggctctttatgattccgttcagaatgtaagtgatatggggttgtatcagtgtgttgagggtggtcggggtgatgcttgggtcgtgagctctaatcatcatccataa

SEQ ID NO: 111111 - DNA, 141 bp, Enterobacter aerogenes; identical to SEQ ID NO: 36145

SEQ ID NO: 111112 - DNA, 2202 bp, Enterobacter aerogenes
ttgagccagcaagaacaactcatagctgcttatatttctattgcagggcgctctgtagatatgagtgggttgagatactggactaataagttgactcaaccaggacaaacgtttgattctgtacttaaagcgattattgctgctccagagttccaaaataaaggtgcaaatttatcaggcgccgattttattaagcatgtatataatggtgtttttggtgttcaaccttctgacgctatagtcactcaatatttatcattaggtgccaataaaacagctgttattcaggctattattaatgatctacgtacttcaaacttaacaaatccaacagcagttaccagtcaacatgcctttgagtacgaaattggaacaggtttgctttataaaactggcgcgatacttacagctacagcaggcggcggaaatgcaacaggtacagttaatactaacaccagccaccagttaactaatgcggaaactgctgtcttaaccaatgtaatgctcagtgcaaatgctgctacgaccattaatttaaaatttgctgaccatttggcagatctcgaaattggtggcggtagcgcggctacagttaacctttccgacaatggtgtgaaccccggtgtcaacatcaccgttgacaacggtagtattactttaaatgccagttctggtgctgataaggtgcttttgactactgatgctgttgttgcctctgcgactggtcagtttaatcttggcacaggcaatgattccctgaaatggttaggaaatgcgacttcaggaactttcaatacggtaagtacttcaattcgggcagacggtggggctggtgttgatactatctcagcgaatttgatcaccaagaatgttgtgatgacatctagcggtcttggtgggacaacgaagacggcaactattaccactaacactgcccagtttactaactttgaaaaacttgatttggctggatataaaggtaaggcaaatgtcaattccggttcaacggcggcagacaatacttttgatttcggtattttaactgggaaagctgtatcggaatcaaatgtcacaggggttatcaataatgttgtacaaccagcaacatccaccatcggctcgcaagggtttgtactctccgggcttgccaatcaggtacacgtgataaatgctgccggtggcagctcagcgcagctggaagttaccggtgatgcgactgctgccagcagtgttgatatcactttcctcaaggatgcagtaaccagttttggtattaactttaccgcaaccagcaatactgatgtaaacgccggttcgcttgcgttgcatagcagcagtacaacagacattttaggtaatgttactgggccacagttgacgactttaaatatcgcttctggaggcattggtaattttagtaataccttgactctggctgataccaatacccaagtcacagggattaacgttagtggagatcatgttctgaatcttaacgttggttcaggttttagtaacatccataacgtcaatgctgcaagtaatacagctggtctgaatttagacttgggtgccagcggtactggcgatggcattattgtccaattgctgaaaattttgccattgagtgccgttactattggcttactggatacagtgctgggtctggtaggactagggctgaataaaggctatcacattgatgttacggggacttcttcgagtgatcattttgctgttcaggggaatacagttgttgctggcggtaacggtgccaaccagtatgtcctcaaatccagtacagtagataaaggtgtcactgtttctgattttaacagtgcaaaagacactatcattgacaatgtttctggcctgacgattaataatgatacctcacatactgccgttactgattatggttaccgtacttcagatcaggtagatgcattgttgggtactctggtcggcggtgtggtaggcggtgttgctggcctgttggctaatatccttggcctacaaaatggctctttaactcaaaaagttggtgtggcatcagttgtctggtccggacaatcaaacattgcagattcctacttgattattgataacaacaataaccataacctggactcttcagacacaatcgtcttcctttctgggcagaaccatcaacaactggttgatactttgcattacgcataa

SEQ ID NO: 111113 - DNA, 141 bp, Enterobacter aerogenes; identical to SEQ ID NO: 36145

SEQ ID NO: 111114 - DNA, 141 bp, Enterobacter aerogenes; identical to SEQ ID NO: 36145

SEQ ID NO: 111115 - DNA, 1086 bp, Enterobacter aerogenes
atgatgctgagccagctgaacctgcgttttcacaaaaaactgatcgacgcgctgaaagtgcgtgccggtcgcgaaaatacctcggtcaatgcgctggccgaacgttttcttgatgacggtctgaaaacgactgctgccggtgacggttattttcagctggtcgccgatccggatgccacggtccggcagttgtaccgcaagatagtcgcaggcgtgtcctgggaacccgtctcccgggacgaactgaggtttatgctggttagcgcccggcagggttacctgcgcggacgtcaccgcctggttacccggccgacactcagcactctgctgcaaatcgttcgggagcttcttacctggcaggtggaacaggacagggtgcgggacgaacattatttgcgaggaacctaccggctgagcgacggggatctgctggcaggatatgaccagtttctggccggattgtgtccggtcatcgaccatgccaccgccgaacaactgctacgcccgctggaaagtggctgtctggaactggctgattttccgaattccgtgctgacagggagtttcacgcaggccagactgagggaaatttttccgctggttctgtacgggctggagcggaccgagagccaggtcgaagcctttgtgcaggagatgcgcccgctcatcccggccgtgacgcagactattgaagcggatacgctgcgcctcgatattcagatcgacgggctcccggcagggcagcgtccgggcgcgctgtacaggacaccgaaactgcatatgatcctgaccgggaaggagtttgtttacccctgtggctgggcgccgttctccgagttactgggcctgctcaccctgtacgcccggcgccctgaagccctccagcacggtcatcagggggggcgggtgatgttctctccgccgggcagtgtgatgccggagggatttttcgggattgacggcctgcggatttttttgcctgcggaagcttttgagacgctggtccgggaacttactacgcattgtgatgaaggcatgctggcagaagccctgaccgggctgcgcagtctgtacggggatacgtaa

SEQ ID NO: 111116 - DNA, 345 bp, Enterobacter aerogenes
atgagcgaaatgaaaattgataatccggctcagaggctgcttgatttgctcgagcaaggaaaacaatatcagaaggctgataattgtcgcaaagtctggcaacaaatattgcaggttgagggtatggaagaacatcacctcctcacccgactggcgtatgcgatggcactgcccggacggatcatccaagtcagggaagacaatttctccacccttcgtggcaaatcaaatcactggaaaagccgcatcgatacagcctttgtatcacaaatcttaaatagcgactggaatacattctggaatagcatcgacgaggctttgttgaataaatcagatttcgggtaa

SEQ ID NO: 111117 - DNA, 1227 bp, Enterobacter aerogenes
atggatattcgcaatatagtaattattagcctggtattgttgattaccggccctgcagtagcggctgatgctcagttagggcggcttgtaaaagaccagcaaagcaatgataacgctgcgttcaaagaccgaaaaatagaacaaaaggatgtgttctccgatgccgtcgcaaaaaaagaaaccgatagcacattcccgctggaaactccgtgttttcaaattgatgaattagtgcttagcaatgattttttagacgaccgcggattaaataaaattaaaaaacaggttgctggaaaatgcttagggatgaatgggttgaaaaaagcggctgtgctttttcaagattactatataaatgcggggtatataacaacgagggtggaaattccatctcaagatctcttgactaaaaaattaagtttggcagtgataccaggaaggatttctgagattgtcattgttgataacgatataagtaaatgggttttgccattttcagaaggtgatattctcaatatcagggatgttgagcagggcctggaaaatatacagagaacacctgaggttgatgttaaaattaacatagtgccaggtactaaaaatggcacgagcaagctggtaattaatacgcaacgaaaaaaaatatggagtgccagagcttcgtacaataactatggtgatgatagcactggaaaccaacttattggtggagtggggtatttatataatgtcactagtttgagcgatgttttttacctggcggggacgggtagccagaccggtgggtataaaaatgctagtgcctattatagtgtgccttttggatataccgatctaagtcttttttatagtaaaagtaaatctactcagggtattgatgttggtacatatacttttgattatgtaggtgagactgagtatttcagcctcaaaggtaatcgtatgctataccgcaatgtgaactctaaattgtctgcgagtgctgaatttatcagacggaaatatgactacacattgggtgggacagaactagttttgcaaaaacgagatatgggtaacatacggttaggattaaattataaaagaaactttactggggctgcattggattctactttaacctggcaacggtttaccagggcttttggtggcactgacacaccagacatgcgtactggcactgtgagtaagaaaagggctttgttgaataaatcgaacttttgctga

SEQ ID NO: 111118 - DNA, 1626 bp, Enterobacter aerogenes
atgtcgacgcgcggtacggtaacctttctcgatgaactgacccactttttcatttttgaaatcaagaagcttccagccctcatcgatgacgttcagttttttcagactgcggggagactggtacatccggttctcaatatagatgatgagcgagaacatcaccgcgaccagcagagatggcctcgactccaggccaccgagctcaaggaccaccatccgggcatcgtcgtgcagggacggctcatcggagttgaagtattccccgtacagcccgttcacggtgtactggtcgagcaggatgatcatgtcatcaagacggctgcgcactcccggggagtcggcgtattcctcactgtctttctcgctctggaggaaggtcaccacatcatcaatacgcgccttgttgcgcttactcagccaggccgcccggaccgcctgcagaagcagaccttcatggacttcatccaggttgccgttcggactggccatcaccgacatctggtcgcggatacgctcggcggacaggtcaaagttagcgtcgtcgagaatattggcaaacggattaaacttcagcgagtcgccgtcgagatatacgccccccatgttttcacacagggacttgtagccgtcgcccatgtcgaacacccaggcaaacccgccggagtcgagcacactgcgaatgaggggctgaatcagaccggttttgcccgccccggaggtgccgcagaccgccatgttgaaattggtattgttcattccctcgtagaacaggtcgatgaacgccagctggttacggtaggtgggtgccaggagtcccgccggcgccagcgggctgtcagcgacgatcggcaggaggttagccacctggaacgtctccgcccgcttcaccacgcctgctgcctgcagctctttgaacaggccttcgccgcatttgaacggcatcatggccagaaaattacgcaggtgatggtagcgggccgggataagctggaagccacccttacggtaactgttgagcacctgctgctcggtagcgagagaggcctctgcgttatcggcggtatacgtggtgatgttaaagaagtaggacaccagagaggtctggttggtcgccagtcgctggcggatatcgccccactcctgcatttcctttatcacgttcggaaagtacttcgcgtaggaggttttgcttttcttctccacgtccatgaacttcaggttggcttcgttctgggtcttcacctggtcctccaccatcagcgtcagcgtgatgacaaaggggcaggagatggaaagctccgggttcagcaggttggcgtagttgtccgcagcggtccagagaaaggcgatttccggatcacactccaggtggtagttcgtcacccgggtcacgcactctttcccgtcgcgccccaggcggccaatcttcagatgaccggcggtgacctgcatatcaaagctgtcatccacgcactgatagttcaggtcctgatacgggtccagcttgtacggcacccggtacatctcatgcggatccgggttaatcatctcccgcatcagttcgaccagcccggccgcatcgaggatacgcgtcgggatgtaagccccgccgagcgatgcccgtaa

SEQ ID NO: 111119 - DNA, 399 bp, Enterobacter aerogenes
atgccaagagtgcaggtttatataagtgatcaggttgttgagaaaatcaatgcaatcattgagcagcgtcgtgctggcggtgctaaggacaaggatgtgaatttttcaagtatcagttcgatgctcattgagcttgggcttcgtgtgtatgaagctcaaatggaacgtaaggagtctggtttcaatcagatggcattcaataaggctttattcgaatatgtagttaaaacacagttttctatgaataaagttttgggtattgaatgcctcagtccccatgtaaaggatgaccctcgatggcaatggaaagggatcattcagaatattcaggaagacgtgcaggaagttatgcgtatgtatttccctgaagaggatgaggtaaataatactaatgattaa

SEQ ID NO: 111120 - DNA, 687 bp, Enterobacter aerogenes
atgtatccgatggatcgtaatgaaaaagacacctgccgtcaatccctcgcttcttctcttgaggcgctcatcatgcactattctttcccggtttgtattcataatcagtcaggagaatttccggcattcaattcagcatttttgtatgagttcgggggcgctttgcagtccgaacgaagttgggaggaactgattggtactgacacctttcttggacttcgagagttagaactactgattcaaattgaacaatctaacttccatattgaaagatgtatttatatcaatggaaagcaatttgattttatgatcgaggaatttgtcagtgatggtgctgtccactttttatggaagtttggaagggcatcaaactccattaaaagaataacaagatctcttcccctgcatgcggatgtcgttaattttatgagggctgtcaaaaggcttgataaaagtgagtatgatttttttgggttttatgcaggcggtgcaagtcacaagattatggggcagtttcttggactggaaaacggatcttccagaaataaaagcagtcaaatactaaccaagcttaatattagtagtcgtgatgatgccttcatcgttcttcatctaagtgagctgttggaaccggtaatgaaaaatgtcagggatattatcactcggcatgttaacagattgttataa

SEQ ID NO: 111121 - DNA, 360 bp, Enterobacter aerogenes
ttgcgccggctgcagccggaactgatcttcatcgccaccggttcagaagtggaactggcggttgccgcgtgggacaaactgaccgctgaaggcgtgaaggcgcgcgtggtctccatgccgtccaccgacgcgttcgacaagcaggatgcggcctatcgtgaatccgtactgccgaaagccgtttctgcccgcgtggcggtagaagccggtatcgcggactactggttcaaatacgttggcctgaacggcgccatcgttggcatgaccaccttcggtgagtctgcgccggcagagcagctgtttgaagagttcggcttcaccgttgacaacgttgtcgccaaagcgaaagcactgctgtaa

SEQ ID NO: 111122 - DNA, 402 bp, Enterobacter aerogenes
atgaatagttacagcaaaccctgcccgaaggattatgccgccgcgaaagcactcctgcactcccggaaacgccgcgaacaggaaaaactcgatttctgcttttattggttttttatttgtgccgtatccggtgtgtttctgtggtggggaacccaccactggtttgatctgatgatggataccatggggccagaagaactggccggacaggctaagaatgtggtgaatcagtggaatgttctgatgtatttcgtgcccttcatctttttcgcactctctgcaggttgcttcgtggtggggcttactagcgctgtcatgatcgaagggctctaccggggcgaactgatgcttttgcgccgtcagttaaaaaaaccgtgctccactgccgggaaaggagagtga

SEQ ID NO: 111123 - DNA, 204 bp, Enterobacter aerogenes
atgtcaaaatcgccaatgaaatatatggttcgcgcatggaacaaagagctgaaaaatccggcatgggaaatgggtaaccgcaggcatcgaaaagcatgcgcccgtgactgggcggacgccagcattgaagtcgacgttgatattcaggatcaggcagaggctgatgatcgtcttgaggaagaattaagggactggagggactag

SEQ ID NO: 111124 - DNA, 426 bp, Enterobacter aerogenes
atgacttccattaccagaaagcagcgtgcagagctgcgcatgaagtttggcggtcgctgtgcttactgtggtaatccgttgccggaaaaaggatggcatgcagatcacgtcgaggcagttcttcgtaaatcagagcagtgcatgaaggcggcagcaaaacgcatgttcaggcttaaagcgacaggtgaagtattcaggcctgaagcagactgcctggagaacctctttccagcatgtgcgccgtgcaatctcctcaaaacaacctactcactcgaaatgttcaggaagcaggtttcactgcaggttgagcgggcccgtaagagcagcatgaatttccgcacggcagagcgtttcgggctggttgaagtcgtcgaacggccagttgttttctggtttgaacagtatcaggaaggagcgtcagcatga

SEQ ID NO: 111125 - DNA, 264 bp, Enterobacter aerogenes
atgagcaaattaaccagtgcggcaatcgaatcatcaatgctgtcttctgtagagggattttctttcctggttgttgactctcttgagtttgagttgggcagagagcttatcgaggaggaatcaatgcgtgtatatcgctgcgttgaaaaagcaatcaacgaggcaacgcgggaagccgaagagaagcgaattgctgagctgggtgcggtaattgccggggtgcaagaacgtgctgataaaggagagaacaatgcgcgtccgtaa

SEQ ID NO: 111126 - DNA, 147 bp, Enterobacter aerogenes
atggctcttcaagctaatactggcacttcgtcaatgttgttaacttttagtgacgccaaaaaaatggcctcagaatgcaaggataaagaagaggttaaagcagtacgtgaaaaacaacttaacgcactgaacgctatgagcaaataa

SEQ ID NO: 111127 - DNA, 393 bp, Enterobacter aerogenes
atgatgctgttttttagaaagtatggatttttgtttatccctccagtctactggctcatctatctgggagccaggctgacttacaatggactggcaggagagtattctcctgatttctttcagggtattcgacatgaaggcatctatattatctgtagtttgtgtatcttttattttttctgcttagaggtggaagttagtgatggggagttctcagcgaacattctgttcctgattgttttctttcatgtggttttattatttatcactctgcttatttgtttgtggcaaggggcgatgttgttggatgcgatttttatgggtcagattattgcctccatgtgtttattgtttttcattcctgtgctttccattataagaaggagtttctag

SEQ ID NO: 111128 - DNA, 732 bp, Enterobacter aerogenes
atgccggaaaccgcacggaccatctatcgcggtaccgcagtagcgctcgttgaggggccgcatctctataaactgaacggttattactatctctttgccgctcaaggggggacggtatttactcatcaggaggtggtggcccgttccaccactttaaatgccgacagctttgaaaccgagcctggagaagtattcttaactaacgttgatacccctgacagctatatccagaagcaaggacacggcgctttggtttcgacgcccgaaggcgaatggtattatgcttcgctgtgcgctcgtccgtggaatcgtcccggagaatcaatctatgatcctcgcggctggtccacgcttggccgggaaacggctatccaaaaagtgtactgggatgacgacggttggccgcgcattgtgggcggtcacggcggtaaaacgtttgttgagggtccaaaagacgccatttataccgaaagcgcgaaagataatagccagcacgatgaatttactacgccaacgcttaatctcaactggaatacactgcgggtaccgtttaccgaaaagatgggtaccacaggcgacggaaagcttaccttaatcggccagggatcattagcgaatacgcatgatttgtcgcttattgctcgccgctggcaagccttttactttaatgctgaagttaaagtcgcttttaatcctttcagggctttgttgaataaatcagatttcgggtaa

SEQ ID NO: 111129 - DNA, 141 bp, Enterobacter aerogenes; identical to SEQ ID NO: 36145

SEQ ID NO: 111130 - DNA, 477 bp, Enterobacter aerogenes
atgggtgtcagcgttggaggagataaacagccagccattgggtcggtcctcacggacgccgcgcatccagtcccggatagtgaatggttcgccgttcttctcaatgccctgcaggtaacgaatagccttaacgtagttggtcagcacagctcgaatggagatggcggttttctcaattttctcttcaaccaggttcgctgccggcgtgttctgcagataggcgcgcagcttgtcgatcttaatggacagcatggtatcgaccagcttctcgtagctccgatcgtcgtctttgcgcatcagatacgcgccttcggcaaagatagtgcgaccggagccctgccagaacggatcttctttggtacccatcgggataagggtgttggagatgttgtcgaagtccggcagcgtcaggcactctttccacaaatcccaggctgcacagcgcgagtccagcgggttgaggattttatccagtga

SEQ ID NO: 111131 - DNA, 822 bp, Enterobacter aerogenes
atgcgtttagcatcccgatttggacttactcattccattcgtcaggaacgcccactgactaacgatgaattggtcaaggttgtaccttctgtgttttcagaagaaaagcataattcacgtagtgatcgctatacctatattccaaccattacactgctggataaattacgtgaagaaggtttccagccattttttgcctgtcagtcacgagtaagggatgaggataaacgggggcatactaagcatatggtaagacttcgccgtgaaggggccaataaaggaacagaagtacccgaaattattcttcttaactcgcatgatggatcgtccagctatcaaatgataccgggtatgttccgttttgtatgcacaaatggccttgtatgcggtacgtcgtttggcgagattcgtgtacctcataaaggtgatattgttgggagggtcatagaaggtgcttacgaagttctgggcattttcgataaaattactgaaggcgttgatgtcatgaagtctattacattaaccaaagaagaacagcgtctgtttggacaagctgcattaacctaccgatacgatgatgaaaataaagcaccagtcagcattgaacagataattcatccgcgccgttatgaagataaaaaagatgacatctggactacatatcaaagggtccaggaaaatctgattaaaggcggtttgcctggccgaactgaaaaagggaaaagaacaacaacccggccagtaaaagcaatcgatggtgatgtcaaactcaataaggcattgtggttaattgcggagaaattccgcactcttaaaggctaa

SEQ ID NO: 111132 - DNA, 438 bp, Enterobacter aerogenes
atgcgggttgcctatattgcaacgaacccattgctggctgaaaaattagtacagctaaaacagcagactggcggcgtcacctgtgaatttaccgagcagacattacatcaattcttccgtgacggtagctataatcgccatcagcgccggcttattggtaatttgagtgacgtctcctcgcgggtaaaaagctggcttcaggaagcaggttgtcgtttcccggtcgtccattcttacgggttgtttttatgggctgaattgcctgaacatatcgatagtgaaacgctggctgaaagagcattagtgcagggtctggctctggcgccaggtacgctgttttgtcaaaaagcagaagggctacgctatatgcgctttaatatcgcccatagccacaatgataaagttgccgcgctggttacccggttactaaaaccctaa

SEQ ID NO: 111133 - DNA, 141 bp, Enterobacter aerogenes; identical to SEQ ID NO: 36145

SEQ ID NO: 111134 - DNA, 372 bp, Enterobacter aerogenes
atggttatccccaccctggtcgtagtcaacgcgctggtagcccgcttccagccaggtcgagtgcacatcgttccagaagtacattggccggacgatcgcgccgtagtttttacggttatcggtattatccttgccgttgtcatagtcgtggaaggccagcagatactcgatctgcgcctgctgagtgaacttatggctgccctcgaagctggcgtagaccgtggtcaggtcgtcggttttgttatagacgctgttatccgagttatcggaatagcgcaggataaccttgttcaccccgctgtcgttgctatggctcagcaccagcccgccctgccaggcatcgaggcgcgcgtcgctgtccaccgcttttga

SEQ ID NO: 111135 - DNA, 648 bp, Enterobacter aerogenes
gtgctgctgtgcttcatccgccttcggggtcagcgtgcgggtagttttgccatcagaaagcgtgacactgtcacccgaaacagactgcacctcccagacgctgttggccacatagccgcgttccgggtcactcttgctgaaacgcattctgtccccctgagacacggtgatctcttcctggcgataaagcgtcacaccttcagcagaggcttcacggggagagatatatcgctcctttccttcactgtcagtcagggtgatcagctgattatccttatccacattgtcgatacggtggtatacgttatcaaccagcgccaccgcccccttgtgagctgtccaagtcgacagtttgcgcagttcaccgtcacggatgttgctcgtgaccagcaccggcagggtgacttcctccctgccagtttccccgttctcccgcctcgcttcatgaatcagaccgttcagtgcccgccggtcattattcagatgggttataatcagcgtctgcgactgtgcctccggggtccgtccggtatagtccttcaccagtgcctcgtagagcgtcgcgggctggcctgccggcaggctttcccccttgctcagcgccttacgtatctcctcttcctgcgtcggcgtgaattccaccactga

SEQ ID NO: 111136 - DNA, 582 bp, Enterobacter aerogenes
atggctataattcgtaaatctgagatacttcgtcgttacaactccgcacaaacaatattattagaggaggccagtgaacggcgctgggcatcaaataacctgcaaaaggcatttgaatcattctctttttctgagcattacgacatttttctttctcatgcttattcagattcgcgaatagttatgcaaattagaaacatgttaatcgaaaaaggttattccgtatatgttgactggattgaggatgagcatttagacagaggaaaggtaagcgaacatactgcaactgtactacgaaatagaatgaataattgctcatctttaatctatttaacttcagactcagcagaaaaatcggtttggatgccatgggagttagggtatatggacgcgcgaactggaagggtttcagttgcgcctattatcgaaagtgatgatgaagagtttgatggaagagaatatctgggcctgtatccttatttagatctaactctggccaggaacgccgccgtatctggcgtaagctgcatctcgccgttgacagtaaaacacatgaaatcatctgcgctgacctgtcgctga

SEQ ID NO: 111137 - DNA, 510 bp, Enterobacter aerogenes
atgacgtccccgataacctctttcacccggtccgccggctcgccggctttacgcgcctccccggccacttcccgggcagtctgttccgcctgtttttccatttcgcggcgctgctgttcttctgccgcccgctgcgccagaacctctggcgggaggataatgtcagccccggcctgcggtaccggagccaccggcgccggatcagcccatacccgcccgccggtcatggccccggggttccaggggcggtcatcaccggccagccgcaccaccaccccggtatcgggattgtcgcgggccattctgacgccctcccccatattcccggccagcaggctttctccgttgcggctgttctgcagcgccacgaaccgggcgtcttcattgcccataattcgtccctctccgccgatagcctccagccgtccgtcccgatcggtcagcgggctgagccagataccggcggctttcccgtttttatcaaatgccggcagcgccacatgcggctga

SEQ ID NO: 111138 - DNA, 273 bp, Enterobacter aerogenes
atgaacttcacgataaaatcccgtaaaaccggcgaaattttcagtttttacgcacccgacagtggcggttatgttcacctggagtcgccgggacactctggtaacacaggtgctcagatttgctgtggtggagggttcatggggagtacgctttcctgtggcgcttctgaggacgatctggccagtgttgcccgtaaatggtaccgacagttcgtgagggagaggcgcaaattcttaatgatgtcgggccagtattctgaggataacccatga

SEQ ID NO: 111139 - DNA, 141 bp, Enterobacter aerogenes; identical to SEQ ID NO: 36145

SEQ ID NO: 111140 - DNA, 141 bp, Enterobacter aerogenes; identical to SEQ ID NO: 36145

SEQ ID NO: 111141 - DNA, 141 bp, Enterobacter aerogenes; identical to SEQ ID NO: 36145

SEQ ID NO: 111142 - DNA, 141 bp, Enterobacter aerogenes; identical to SEQ ID NO: 36145

SEQ ID NO: 111143 - DNA, 405 bp, Enterobacter aerogenes
gtgaaagcgtactatatacttggacataacgttgcatggcttaacggtatatgcctgattctttttgttattggtgtggtcggtgcgatggcaatggttgccatccctgaaaaattcaatcttcgagttaacagaggcgatacattcatatactgtgcgcttatagcggtggttgggttttccgggatgttcgttatctccattcactcattttcgatggatgaacttgaagcaggtagacactggaaagatgactgccggacacttgaggtaaacatgccgacaggcgcttttaccagccctgttaataaactggactgtgatggcatcatcattaatgtgcctggggggcagtattattcctatatccatcagtgggaattatataaagctaactcaaaatga

SEQ ID NO: 111144 - DNA, 174 bp, Enterobacter aerogenes
atgtgtaatcacgatgacgacagtaatctcaatctatatttaaaagctatacaagcattaaaagaggatgatttttcaaaaaatgtacttaaaccactttttgagtcgatgtcgttttcacgagtggattttgtaggcggcccatatgagtatgggaacatgatattcctttga

SEQ ID NO: 111145 - DNA, 162 bp, Enterobacter aerogenes
atgagcaagcccgtcgtgccggaacttgttgagcgggaacagcctgagcacctgcgcgagtatttccgtgaacggctccgcgtacatcggctgaacagtcagcagttgccgcgcgcaaatgcccctgaatataataaaccgggcgaggatcagcagaattga

SEQ ID NO: 111146 - DNA, 237 bp, Enterobacter aerogenes
atgctgggtgtcttcgctgagtttgaaaccaacctgcgccgtgaacgccagttggaaggtatcgctgccgcaaaagcccgcggggtttatcaggggcgcaaaccgcgcatcgatcctgttgaggtccgtcggttgtacgttgaagagaaaatgggcgcaacggcgatttctcgccaactggggatcggtcgagcctcggtctatcgtgtgctggaccgcgatgagcagccggcgtaa

SEQ ID NO: 111147 - DNA, 273 bp, Enterobacter aerogenes
gtgtgggtcaattcgcgtaagggccgcatcatcacccgcgcgcaggtcagcgatcggccgaataaaggcgcggtgtacatgacctaccagtggtggatcggcgcctgtaacgagctggtgtcggagaacctgagcccgataaccaaaacgccggagtacaagtactgcgcggttaacgttgaacggattgccgatcagcgcgcggcggaacagtacgtaatcgaggagtacaacaagctgaaagcccgcctgcgcgaaagcgcgatgggttaa

SEQ ID NO: 111148 - DNA, 213 bp, Enterobacter aerogenes
gtgaaagaggttatcggggacgtcatccgcggactggagcgtgaccggccgggcccggagaaaacgacgctaccggatgatcctaagttccggcgccaggaggcggcgattcagcaggtggcttcagaaagtctgcaacgtgagcgtctgcaggctgtggagcgggacatggtgcgcgacctgaaccgcgagaaaaccctcgggggcgactga

SEQ ID NO: 111149 - DNA, 213 bp, Enterobacter aerogenes
gtgaaagaggttatcggggacgtcattcgcggactggagcgtgaccggccgggtacggagaaaacgacgctaccggatgatcctcagttccggcgccaggaggcggcgattcagcaggtggcctcagaaggtctgcagcgtgagcgtctgcaggctgtggagcgggacatggttcgtgaccttaaccgcgagaaaacactcgggggcgactga

SEQ ID NO: 111150 - DNA, 795 bp, Enterobacter aerogenes
atgctaaagagtgtctggattaagagttcttttcttttcattgcgttaacttttattttatttggtgtgtatacaacttttagcttagattccactcgcgggacaattataataataacgggctttggattgataattctcacgcagtttgattggggggaaattaaagtccttggtttagaagcaaagttaagaaatacaattaatgatgcagagacagttcttgaaagcctgagaaatatatcaataccaatatctgaagtttctatttctttagccgccagaactggacgctggggcacagctacacccaataaagaactttacacactagttagtaccatatctaaagaactgaaaaaaattggtgtcactgcacatgatattaataagataaaaaaagattggtttcattatactatgtttgatatgtgtaatattctcgttagtgaaatctcacagaaactttatgcacatcgtactgaatcccaaagaaaatatgatgaatgggttggagggaaacctatttcagacttgataaaacataacgagatgttagaggatttaagaaaagtagatcttgagatagaaatcttacattctattttaaaggaaagcaatcaccaaaaaatatatcattctattcaaaatttagttgatagaagtgtttcattaacacaggaagaaaaaaccttgttctggaaaagtaatcaagaactttgggaggacataggatatttccttgagaataaagaattacgtaggcctgagttctggcttaatcgttcagaatga

SEQ ID NO: 111151 - DNA, 273 bp, Enterobacter aerogenes
atgtctgataagaaaattactaaaataaaatacatccataatggaatatggaaggaagagggttatgaatctgatggatatgaccagattaatggagttttagaggggttagcatcgcgttatgtccctgcatcctcagtacctcgcggagtatttcctaagcctgatttgcctaagcgagaccttactaaacaggggattacaaaggtatatgttatgttcgaagatagtgattggttagaaatagatcctaaagatctgtttgaagtttga

SEQ ID NO: 111152 - DNA, 627 bp, Enterobacter aerogenes
atggcggagtattatccggcagaatttgaatcagaggcgtttaactgtcctcattgtggtgtttattcacagcagttatggcgggatatgggagggagcagctcccagcattactacaaagagaccgacttccatatgtcaacttgctctcattgtgatgacgatgctttttggtacaaaggcaatatgctcattccggcgtctggcaatgttgagttacctaactctgacatgccagaggactgtaagtccgactacatggaagccagagccatagtcaacttgtctcctaaaggtgccgccgcactcctccgcttgtgcttacagaaactcatgcgccatctcggtgaaccggggaacaacattaacgcagacattaagtctctcgttgagaaagggctacctcctcgtatccaacaagccgctgatatttgccgtatcgttggcaatcaggctgtacatcccggagagattatccttgatgatgaccctcagttaacacatagcctctttaagttattgaacataattgtcgatgacagaatcacccgacctaaagaggttgaggctatgtttaacagtatgccggaacgggcaagaaagggtatagaaaatagagataaataa

SEQ ID NO: 111153 - DNA, 444 bp, Enterobacter aerogenes
atggatacacaaaaccctgagttcactgagcaggaagcaattactgcctcagtggtcccggacgagttacgtatcggcttctggccgcagcactttggctccatcccgcaatggataacccttgaacctcgcattttcgcctggatggatcgcttctgtgacgagtactgcggtggaatctggtccttttacacgctcagcaacggcggtgcgtttatggcccctgatgctgacggtggtgataaatggcatctgttcaacagcatgaacggtaatggtgcggaaatgagtgtggaagccgcaggtatcgcggtctgcctgattgaatacagccatcacgcctgtcgcaccgaatgcgatgccatgacggagctctattaccggctgagggattacgccctgcagcaccctgaatccagcgccattttgcgcattattgattaa

SEQ ID NO: 111154 - DNA, 822 bp, Enterobacter aerogenes
atgcgattagccagccgctttggtcgtataaaccagatacgccgtgaccggcctctgacccatgaagagctgatgagtcatgtacccagcgtgttcgggagtgacaagcatgaatctcgttcagaccgttatacctacatcccgaccatcaccatcctcgaaagcctgcagcgtgaaggctttgagccgttctttgcctgccagacaaaggtccgtgaccagagcaagcgggaacacaccaaacacatgcttcgcctgcgtcgtgccggtcaactgaccgggcatcaggtaccggaaatcattcttctcaatagccatgacggttcatcaagctaccagatgctgccggggctgtttcgaggcgtctgtaccaacggcctggtctgcggtcagtcattcggagaagtacgggtaccgcataaaggcaatgtcgtcgagaaggtgattgaaggggcttacgaagtgctcggggtctttgaccgggtggaggagaaacgcgatgcaatgcagtcgctggcgttaccagccccggcctgtcacgcgctggcaaatgccgcactgaagtatcgatttggtgaggagcaccagccggtcacggtatcgcagttgctgactccgcgtcgtcgggaggactacagcgatgacctgtggaccgtttaccagcgcgtgcaggagaacctgatgaaaggtggtctgtcagggcgaaccgctcaggggaaaagaagccgcacccgtgccgttaccggtattgatggcgatgtgaagctcaaccgcgccctgtgggttatggcagaaaacatgctcgagtttttcgggcgttaa

SEQ ID NO: 111155 - DNA, 357 bp, Enterobacter aerogenes
atgcacaagccctttctcgacccacttgggctgacctttccgcagtatctggtcatgcttgagctgtttgccggcacgccccggtcggtgggagagctgggcagtagacttggaatggatactggcacaatcactcctctgctgaagcggcttgaagcctcgggaaaggtattccgtcagcgtgatccgggcgacgaacgcagggttctggtgacgcttaccgaaagcggagaagcgctgcgcgaagaactctgggctgtgacagacaaaatccgctcggcctgccgactcagtaaggatgagcttgctcagctacgcgacacgcttaacgattttgcccacccggcgacagaataa

SEQ ID NO: 111156 - DNA, 744 bp, Enterobacter aerogenes
atgaacattagcattatcggtgcaggaaatattggtgccaccctggccacaaagctttcagcagcaggttacacggtaaaactggctaactccaaaggcccagaaaccattgctgatatcgcacgtaaggccggcgcgaccgctgttacgagtgaagatgccctcagggacgctgaacttgttattcttgccatcccgttcaccgcacacaacagccttgccggactactgagctcgctgcctgataccgtgccggttatcgatacatccaactattatccgttccgcgatgggtctattgcagaggttgaaaacgggatgcctgaaagtgtctgggccagcgcgcgcctcggccatcccgtcatcaaggcgtggaatgccctgctggctaagacactctctgataagggtcttccggaaaatgccccggaccggatagcggtccctgttgcaggcgatgacgaaagagccaaacgggttgccatggtactggtcagcgaaacagggtttgatgctgttgatgctggttccctgagtgaatcatggcgtcagcagcctggttcgcctgcctactgcactgaactcagcgttgcggaactgaagcttgccctgacggctgcagataaaaaacaggctcaattaaatcgcgacgccctcatgcaggagtttatgtctgccagtgcccccctgagccatgaacatattgtggcccgtaaccgggcggtcacgtcaaagcagggctga

SEQ ID NO: 111157 - DNA, 765 bp, Enterobacter aerogenes
atgacttatccttccccactcaaaataggcattctcggcacgggcaatataggaaaaacgctgagccgcaggctctctgcagccggacatcaggtaaaagtagctaattcacgtggcccggagacaatcgatcccgaaacgctggcaacaggcgcaacacctgtaaaggcagtagacgcggtcagcgatgttgatgtgattattctttccatgccgctcagtcgcctgcctcagattgccccggtaatccggcaccttcctgacagcgttattgtggcagacacctcaaactactatccccaccgggacgggaaaattgatgaaatcgaagctggccagccagaaagcctctgggtgtctgatctgctgggccggggtgtgataaaggcctggaatgcgattggttccggatcgtttgcctccaaagacaggcagcccggggcccccgaccggatcgccataccggtagccggggataatgaggcagatcgtaaattgataatgcaactggtctctgataccggctttgatggatatgacgccggcacgctggccctgtcctggcgacagcagccgggcgcgcccgtttactgcacagacctgcaccatgacgagatgtcggctgcgctggaatcagcacaggcctcacgtttaccagtgagaagggacctttccgttgcagtgatccaggagcgcgtcggtgacagcaagaccaatcctgatgctgattttggcgtccggttatcgcgcataatctttatgtga

SEQ ID NO: 111158 - DNA, 609 bp, Enterobacter aerogenes
atgaaagttacatggaccgtcacgcctgtggagtatcagcgcatcgcgaaacgatgcccttcttgcaagattaaacgggacttcacgccgtcaggtgcatttcgtgttaattcgcaaaagaaggtgctggacgtgtggagtatctataaatgcacacactgcgattacacctggaatatctccctgtttacgcgtttgcacgtcagcaaaattgaccgcgaactgcatcaccgattgatgatgaacgatgcagccacggttctacattttgcctatgacacaactacgctgaagcgaaataatgccgagatctcgggtcggcctgactttcgcattcaggagcagtggttggccagtttttctcccggcaaacgggtcaaggttagcgtcaggatttcccgttcttttcaggtcagcttgctgtcgattttgcacaagcagctcatgctgagcaccggcgaaatcaagagacacgttgagtcagggaaaataaggggtatcacgatgaaaatacttaaatcgcgaaagctgaaggctgcggaatatgaattccagctgcctgcggaaacgctgttcgcccggcgcaagatagttctgacacatcgttaa

SEQ ID NO: 111159 - DNA, 993 bp, Enterobacter aerogenes
atggatctagaatctaaagaggattatgaagagaacactcatcataatgtggtgtcctcagttgtcactgcaactcatgataacttagatgggagagagttttttgaactatgtagtaatccagctctagttttttcgtttgagactcacaaaaaatttaatgagttacctgttgatagtaatgaatccccgttagatctttttatcgctaatacgaagcaacttcacttgttaagatctggtgatatttcaaacactttaagtcatctgttgttattaggttatgtgtctgcagccgaaagttatttgcgagctcttatcaggaatctaattaatcatgatgaatatattcagtctatagtttctgataaggccgttagttatgcagcggcgcaacaccataaaaaggagttattaccagaagctttacttgaggatttttcattggcaagcccttataatgtttttgaaacattaaaggacatcattggaatgaaaggacaaagaccaatcgaaatgattaaatgctcaagcgaattcatgaaagtttgcgagttaaggcattgttgtgttcatcgatttggtaagttgggctcgaaaaatgcaatccgactaggattggctgaacatatgaagcacttagaaaaaccgataatactcaataatgatgatctcgagcaaatcgcatttattgttgagaattttattagaactttgaataataccgttttcaaatttataattaatcgtacagttgagaataaaaataaggaaaaaggaggagaaagactatatgattctgaatggacatgggtgtttgaaaaagacataagtcgattcgaaaagtattatgcaatatttagtgctaaaaacgatacccttcccggattatcattacaggattcatatcaactttttgttaatgcgtataagcctaaacctcctgcaagaaaaaataaaaaaaatgaaaaaattaacgccgctactatctaa

SEQ ID NO: 111160 - DNA, 1707 bp, Enterobacter aerogenes
atgactgatgtggaattagatagtaaatttcttgtcgaggaacgggctgattatattgatgaggatacgataaagaataatactatcagatctggagagtttttcgatatcatacataatgctcttatatccccaggaatcaaactcatagttggtcctaggggatgtggtaaaacacatttgatgcgttatgcttgggttgaatgtaaaaatgatgataacgcaccattaccactctatgtttcctttaataaatattttaagttagagccgcttttaaaaactaaacctaatgcaattgatctctttcataaatgggtattagcaaaggtattactctctgcttatgaaattgcttgcgatattgaagattctgaagatcttgatttgtcaacgatactcatagcggataaagagtttttaattaatttaatcgtaagacttgagcagggcctttcgccatcattagagcaagaaaacattgttcaattgatcagtgtttcctctgtcatatcctcgttgagttcactatgcgattggcttgaacgtaaaagagtcattattttattagatgatgctgcaataagcttaactcctgaatatctttacgagttttttgatattgtgcgtagtctaaaaacctcaaaaatagctttaaaggcatcggtttatcctgggacaaccgaatatggcccaaggtttcatgttgctcatgatgctgaaacaattgatgcttggatttcagtacagcatcctaattattcctcagtgatggatgctatagcgcaggcaagatttcctgggtatgatggtatcccggatgacttgaaagagttattaaaattctcagcatttggtattccacgttcttttttgatgatgttaagggattatcaaacaactttaagtcagacaactcagcaaaaattcaataaaataattgaaaaatatgttgagcttagactcagcgaatacagttcactaaaagataagctacctcgactgtttgacattgtttcattaggtgaatcacttttattaaaggtggtcgaattactcaaggaaagtaactctcaatataaagaagagaaacaagtcataatcggtatagagaaaaatgataatgtttatttttctcgactcaccaaactattaattgaaacagggcttttttataatcttcctgatatttctcatggcgatgggcgtacttatgaaagatatatacctcattatgctttattgataaaggaaagagtgtttaacgaaggaagtagaggtttttctccctctcagattattcaaaaaatactaagaaagaatgctaagcatcctgttagaagaaacatttcatcattattcaatgctgagcaacttgcgagacttaaactaactttacctccatgtaataactgcaagactccgcgattgactgacaatcaaaaattttgccaccattgtgggaatcaattgattgatgagtctgcctataatcagtgcatgtctattccactttcaaaagtaccacatctaacatcctggcaaatgcaaaaactatctgggctggaaaaagtaaaaactataggagatgtattatctttacaagatcctgggagtgagttaagaaaaattcacagaatcggacccaaaattgccaataaaatcatggacaaagtgttattacatgttgaagagtttttgtcttaa

SEQ ID NO: 111161 - DNA, 1194 bp, Enterobacter aerogenes
atgaacagtaactatataccattcacacaacgagatagtctcggaagatactatacaaaagaatccataagtgcattattggtttctcaaatgaaagctgaaaaagtcaataatattattgatttagcttcgggtgaggggagcttaacctatgccgctttagaccgatggaagaatgcagaagcatattctttagatatagaatctcggatgtcaaaaaaggtatgtgataatctgactcatattgtaacagatgctcttgttcattcatttcctgaaatgcttgcccgacatcaaggaaattttgatgtcgcagtatgtaatcccccattcactctccctaaatggagggatgattattctaaaattattaatgagattggggcagataaatatatatctatctcaaaatatgtccccgcagagataatatttatatctcaagtcatcaggtttcttaaaaaaggtggtgaggctgggataattctacctgatggtatatttacagcaagaaagttcatagggctaagacgatatttattgaatgaacattcaattacaaaagtcattgaattgcctaggaatattttcaaaaggacagaggctaaaacacatattctgatttttaataaaaaaattgtgccgcatcagaaaatacaattacattgtataactaaagatggggaattgtcgcctcctgttttaattaaaaaagaagatgcgattgagagaatggactactcttatcattataataaaaacgaagagtctagtacaattgggatgctgaaaaatattttaattttcaggggtaaatttaattcaaaggaaattacggaacatattttccatacgacaaagtttagtggtaatgaaaagtgtattaaattccattgcaactctgaagaagaattgcagccatcaaaattagatgtcattgctaagcctggtgatatattaatagcaagggttgggcgagagttttataaaaaaatagtgtttgttgagagcggatattcctatatcagtgactgtatatttctgatacgagcctctggtgaagataagaaaaagttatttgattttctttgttctcaagaagggcaagaggaattatctcgagcgagtagtggtgtagctgcacaacatattacaatggatgcattaaaaaaaatacatcttgtaaggatttaa

SEQ ID NO: 111162 - DNA, 276 bp, Enterobacter aerogenes
atgagttttgaaattattgctgggctggtggtcctcatcctgggtgctatcgctggtgcattcggtattggccatgctcgcggcaccagtaaggcagaagccaaatcagcacaagtgcgcactgaagagaaagcctctgctagcgtagctgcagctgaacggaaagaggaagccaccagagaggccagcaatgtacagcagactgttagccatatgcctgattacgatgttgatcgggagctgcgcgaaaagtttacccgccccggtggtggttga

SEQ ID NO: 111163 - DNA, 990 bp, Enterobacter aerogenes
gtgcaattattaagtttattttgcggggctggcggtcttgatctaggtttccgacaatcaggatatgatctaaaactggccatagactggtctgaggctgctatcaaaacgcataaacacaattttcccgagtctacagctttgaagctagatctgcttgaacttggtgttccagggatgcttgagctatgcagtcaatactttaatgaaaatgaagcaatgggaatcattggtgggcctccttgtcaggggttttcccgtggaaatcctaattcgtttgcagatgatccaaggaataaattagcgattctgtacgttgactttataaaagaagttcagaaacacttcaatgttaattttgtggtttttgaaaatgtccttggtattaaagataagaaacatattcatacatacaataaaataacatcccaactagatgttattggctacgatgtttacgaacatgaattaaatgccattaattttggcgttgctcaagaaagaaaaagaattattataatcgcaataaaaaaagggatatctaaaaaagaattatcactgactcccccttttccctccacttcccctaaaacagttaaggatgtgatctttggttttcctgagcccgtttattatcacagaaaaattgtagatacagatattaacttccatcctaatcattggacgatgctccctaaatccgataaatttaaaaaccctgagctattgctaaataaaacgagaagttttagaacgatcaaatgggataaacctagtcccacgatagcatatggaaacagagaaatatatgtacacccaaataaaaagcgtagattgtctatttttgaatctatgttgcttcagggcttcccaaaagattttgtattgaaagggactctttctcaacaggttactcaagtttcaaatgctgttccgccgccaatggcgaaacaaatagccttgtcgattaaaaattccattagaggataa

SEQ ID NO: 111164 - DNA, 1977 bp, Enterobacter aerogenes
atggatataattaaaaataaagaacaacagattgcagaaaatattcgcaataatagagaggttgtagaaacagcatttcttactactgatgagaaagttattgcacgcgttacggacggcatatatagacaaccaggctctgctttacgcgaactaatatctaatgcatatgatgctgatgcaacagaggttcgcattagaactgatgaacctcgctttaattccatgactattgaggataatggaaatggtatgagtcctgaaactttaacgcgagtaatgaaccatattgggggaagttcaaaacgaaataatattggtgctgaatatgggattacagaccctcaagattttaatcttagccctgggggacgacacttaattgggaaaataggcataggattattctctgtatctcagctaactcaatcttttcagataataacaaaaagaaaaggtgatgatttccgtagtattgcaaatgttacgttaaaacaattctcagaccaaatattaaaagacacagacaatgatgaattatatgaatctggcacatacaaaatatggacagaaaatgcatctgatattgatacacacggtacaacggtaatcttgcataaaattcgtaaccaaactaaagaaacactctcaagttcgaatatgtgggcaagtgttgctgctagtaaagaaaaaatggaggagacaaatggtgatgatgataatgaattaattcatccacccaaatatcatataggctcaataaaggatgaagagcatttaaaacttttagataatgatgaaaaagtaagatcagttccttgggaggataaagatgaacctcatgaggcatttaaaaagctagttgaatgtgtatgggatgaatctaaaccaactaatccaactccaaaattagcagagttatttgacttttatttaaaaatgatatgggatctagctttaagtgttcctgttgactatgttgacaagagtatttttgacataccatttaataatcagttttatgcgtataaaatatctaatctaatgaaaggcggacaagcatcgccaattaatctttctgtgggcagtaagttaagtgaccattttacattctcacatgaagagcgtagctcaaattttaacgtctatattgataatctgaaattatctcgtccgattctttttgaaaacctccccaacacatcacatgccatctcaaaaccaatggtatttataggggaatattttgaggagttcaaaggcatcccaatatcggcgaccggaggcccattaaaatttaaagcttatcttttatggaattctaaaatatgcccgacagaacatcaaggcgtattaattcgtatacatgatgcaagtggcacaatgtttgatgatacatttatgaaataccaagttcaggaaaacacccgaaaaagacaagttacttttgaaattttcgttgaacagggtttagatagtgcattaaacatagatcgtgaatcctataatttttcgcatccccatgttgtgattttaacaagatgggtgcacagtgcgtttagacaattttccaatgcgaataaacagttagccaaaaagttaagagatgagagtcgttcttcaaaacaaaataaagttttatctaaaattgataagattgtagaaaaagcatggagcagtgcagggaatgatatttatcaattacctccgacagtagcaattatagattcagaaaaaaaagatacacatttaaataaagaaagtgactatatagtagacttctctgatctcaccatcaaaaaaaatgatgtagagaattataaagccacacaattaaatccgcttacagaagaaaagatcaaagcaatcactgcgattctagcaagctacggtgttcttgaaaatttaccgactttacaccgcaactcaatgattaaagctatttatgatgtaattattgctgaaggagatgcttaa

SEQ ID NO: 111165 - DNA, 1149 bp, Enterobacter aerogenes
atgagcgatcaaagcttcttcgacgatctttttgaagaaataaaggaatctcctgaaggacgttcgactaaaaacgcctttgcgccatggcatcatccaagaaagcatttggtgcgattagaacaatgggtatatttcataaatgttctcattgataaaaaaataaagaaacttgataagttaaagtattttagcttacccggggatgatttattagacgtaagaacgattcatgatgaaatatgcatcagccgtcaaattcagttacatttcatgggatttaacgaccatgaaagcgacagcacacgcgagcaaaatgctaatatttctttaactgaagttagagccctacctaacatagatccaaaatcagaatatcataacaacaatattttaaatattgtaacaaaggattcattagcatatcagagatttaaaagcttcggcgatttcgatgtgattaacttagacttttgcgacagcataactcaaaaaaaacctgcagatagaaaccctaatcactataatttattaacaaaaatagtccaactgcagaatcaccgtgacaaaccatggctccttttcttgacaacaagaattggcattgaccatattcatgaagacgctcttggtcattttaaaacacagtatgaagaaaatttgcgggatgataatttcagaaaaaaatccgaagaagcatttaatgtgtatgatagtgaaagcttagcccatgcatttactaattgtgatagcttcagaaagattatttcaacttcattttgcaaatggctactatctttttcgcttaacttaaccccaaaaacaacaatcaagctacttgatgctatggagtacaaagttctccctgagtctgaatatcctgatatgttgtctctcgctttattattaacgcctcatcctgatcaaataactgacccgtcaggtctagccttacctaatgtgaaggttgaggtttttcacgagccaaccattgcttccaattatatagataaaattggacggtgtacaaactgcgacgagtatcttgcaaccagcccagctaaaaaagagcaaatgattagtaaaagcattgctcttcttaattccgcaagatttgacacaagagagtacagaagaaagtttggttaa

SEQ ID NO: 111166 - DNA, 471 bp, Enterobacter aerogenes
gtgataggtattactgatgttaacgaaccaggcgaccgggccggatgttttcccggaggcggtgctgcgcaccttttccgggctacggggtctgtagccccggtaagcgcagcgccaccggggaagatggcggcacgtctgaccgcaaaacacaaaaacaaaaggcccggtcttccggctgagcctttcgtttacgttgctataacagcggctttccccggaggcggtgctgcgcaccttttccgggctacggggtctgtagccccggtaagcgcagcgccaccggggaagatggcggcacgtctgaccgcaaaacacaaaaacaaaaggcccggtcttccggctgagcctttcgtttacgttgctataacagcggctttccccggaggcggtgctgcgcaccttttccgggctacggggtctgtagccccggtaagcgcagcgccaccggggagatggcggcgcgtctga

SEQ ID NO: 111167 - DNA, 387 bp, Enterobacter aerogenes; identical to SEQ ID NO: 87830

SEQ ID NO: 111168 - DNA, 723 bp, Enterobacter aerogenes
atgtccaggtcgcttttaaccaacgaaaccagcgagcttgacctgctggatcaacgtcctttcgaccagaccgacttcgatatcctaaaatcctatgaagcggtggtggacgggttagcgatgctcattggttcccattgtgaaatcgtgctgcactcactgcaggatttaaaatgctccgctattcgtatcgctaacggtgaacacaccggccgccaaattggctcgccgattaccgatctggcgttacgtatgctgcacgatatgacgggagcggatagcagcgtatcgaagtgctattttacccgcgcgaaaagcggtgtgctgatgaaatcggtgactatcgccattcgcaaccgggaacatcgggtgattggtctgctttgtatcaatatgaaccttgatgttccgttctcgcagattatgagcactttcattccgccggagacgccggaagtcaattcgcaggtcaacttcgcctcgtctgtggatgatctggtggcgcaaacgctggagttcaccattgaagaggtgaatgccgatcgcaacgtatcgaataacgcgaaaaaccgccaaatcgtgctgaatctatacgagaaaggcatcttcgatatcaaagatgcgattaaccaggtagccgatcgcctgaatatctctaaacacacggtgtacctctacatccgccagtttaaaagcggtgatttccaggggctggataagtaa

SEQ ID NO: 111169 - DNA, 819 bp, Enterobacter aerogenes
atgaaatcactgtttaaagtaacgctgctggcgaccacgatggccgttgccctgaatgcaccgctgacctttgctgccgataccgcagcgaaagccgcaccggcggcggacagcaaatcggcatttaaaaatgacgatcaaaaatccgcttatgcgctgggtgcatccctcggccgttacatggaaaactccctgaaagaacaagagaagctgggtatcaaactggataaagaccagctgattgccggtgtgcaggatgcgtttgccgataagagcaaactgtccgacaaagaaattgaaaccactctgcagtcctttgagacccgtgtgaaaaccgccgctcagcagaagatggaaaaagatgcgaccgagaacgatgccaaaggcaaagcgttccgtgacgccttcgctaaagagaagggcgtgaaaacctctaaatccggcctgatgtataaagtcgagaaagccggtactggcgatgcgccgaaagacagcgataccgtcgtggtgaactacaaaggtacgctgatcgacggtaaagagttcgataactcttacacccgcggcgagccgctctctttccgtcttgatggcgttattcctggctggaccgaaggcctgaaaaacatcaaaaaaggcggcaaaatcaagctggttatcccaccagatctggcctacggcaaaactggcgttccgggtatcccggctaactctacgctggtattcgatgtagaactgctggatatcaaaccggctccgaaggctgatgctaagccagaagccgctgccgaagcaccggctgcagacgctaagaagtaa

SEQ ID NO: 111170 - DNA, 219 bp, Enterobacter aerogenes
atgaacgatagcacaatggagacgcgtctggcggaactggaaagccgactggcgtttcaggagatcaccatcgaggacctcaacaaaaccgtcacggcgcatgaaatagaaatggccaaaatgcgcgaacatatgcgcttgatgatcgaaaaattgaaagcgacacagccgtcgcacatcgcgtcacagtctgaagagacgccgcctccgcattattga

SEQ ID NO: 111171 - DNA, 591 bp, Enterobacter aerogenes
atgaaagtagcaaaagacctggtggtcagcctggcctatcaggtacgtacagaagacggtgtgttggttgatgagtctccggtgagtgcgccgctggactacctgcatggtcacggttccctgatttccggcctggaaaacgcattaaacggccacgaagtgggcgacaaatttgatgtcgaagtcggcgcgaatgacgcgtacggccagtatgacgaaaacctggttcagcgcgttcctaaagacgttttcatgggcgttgacgaactgcaggttggcatgcgcttcctggctgaaaccgaccagggtccggtaccggtagaaatcaccgaagtcggcgacgatttcgtggtggttgacggcaaccacatgctggctggccagaatctgaagttcaacgtagaagttgtcgccctgcgcgaagccactgcagaagagctggagcacggtcacgtacacggcgctcatggccacgatcacgatcatgaccacggtcatgacggttgctgcggcggccacggccacgatcatggtcacgaccatgaacacggcaaaggtggttgcggtaacggtggttgcggttgccactaa

SEQ ID NO: 111172 - DNA, 201 bp, Enterobacter aerogenes; identical to SEQ ID NO: 87825

SEQ ID NO: 111173 - DNA, 1806 bp, Enterobacter aerogenes
atggcgggagctgatttgctattagcgggggtactgtttttgtttgccgccgtggtggcggtaccgctggcggcccggctgggcattggcgccgtgctcggctacctgctggccgggattgcaattggcccgtgggggcttggctttattagcgatgtggatgaaattctccatttttccgagctgggcgttgtattcctgatgttcatcatcggccttgagcttaatccggccaaattgtggcaactgcgcaactcgatattcggcgtcggcgcggcgcaggtgctgtttagcgcggcgatcctcggcggattgctggtggtcaccgggttttcgtggcaggcggccgtggtgggcggtattgggttagcaatgtcctctaccgcaatggcgctgcagctgatgcgcgagaagggaatgagccgtaacgaatccggccagctgggcttttcagttctgttatttcaggatttagcggtgatcccggcgctggcgctggtcccgctgctcgccggacacggcgacgataacttcaactggatgtcggtggggatgaaggtgctggctttcgccggcatgctgattggcggccgttttctgctgcgtccggttttccgttttatcgccggttccggcgtgcgtgaggtatttaccgccgccacgctgctgctggtgctgggttccgcgctgtttatggacgccctggggctgtcaatggcgctggggacgtttatcgccggcgtgctgctggcggaaagcgaatatcgccacgagctggaaatcgctattgagccgtttaaaggcttgctgctggggctgttttttatctccgtcggcatggcgctgaatcttggcgtgctatatacccatctgttgtgggtcgcgctgagcgttgccgcgctggtggcggttaaagcgttggtgctttatgtattggcccggctatatggtttgcgcagctccgagcgcacgcagttcgccggcgtattgagccagggcggcgagttcgcctttgttctcttttccatgccggcttcgcagaagctgttccataacgatcaaatggcgctgctgctggttaccgtaaccttatcgatgatgaccacgccgctcctgatgaaggtcattgataaagtgctgtcgcgacggcttaacccggcggaggataccgatgaggcgccatgggtcgaggatgataagccacaggtgattatcgttggcttcgggcgttttggtcaggtgattgggcgcctgctgatggccaataaaatgcgtattaccgtgcttgaacgcgatatcagcgcggtcaacctgatgcgcaaatatggctacaaagtctatttcggcgatgcgacgcagcttgagctgctgcgttcggcgggggcggaagaggcgcagtctattgtgattacctgcaacgagccggaagataccatgaagctggtggagatgtgccaacagcattttccccacctccatattctggcgcgtgcgcgggggcgcgtagaggcgcatgagctattacaggccggcgtgacgcaattctcgcgagaaaccttctccagcgccctggaattggggcgcaaggcgctggtgaccctgggaatgcatccgcatcaggcgcagcgcgcgcagttacactttcgacgcctcgatatgcgaatgctgcgcgagttaatgccagtgcatactgataccgtacagatatcccgcgtgcgggaggcccggcgcgagctggaagagatttttgagcgtgaaatgcagaaagaaagccggcagctggacggctgggacgagtttgaatag

SEQ ID NO: 111174 - DNA, 561 bp, Enterobacter aerogenes
atgtctcagacagcgaaagtgttgctgctgtatgcccacccagaatctcaggattccgtggccaaccgggttttgcttgaaccggccttacagttgccgaatgtcaccgtgcacgatctttatgcgcactatccagatttttttattgatatcgcccatgagcaggatctcctgcgtcagcatcaggtgattgttttccaacatccgctgtatacgtggagctgcccggcattgttgaaagagtggctggaccgggtgctgagccgcggcttcgccagcggcgcgggaggaaatcaactggcgggaaagtactggcgtagcgtgatcaccaccggcgagccggagagcgcttaccgccgcgatgctaatcgctatccgatgaatgatattctgcgcccttttgagttaacggctggcatgtgccgcatgcactggctgagtccgattattgtctactgggcgcgccgacagcggccggaagatttgcaaagccacgcccgcgcatatcgtgattggctcgcgaatcctgttgctacaggaggcgtcaatggcgggagctga

SEQ ID NO: 111175 - DNA, 1905 bp, Enterobacter aerogenes
atgattgttttctcctcgttacaaattcgtcgcggcgtacgcgtcctgctggacaacgccaccgccaccatcaatcctggccagaaggtcggtctggtgggtaaaaacggctgcggtaaatctacgttgctttcgcttttgaaaaacgagataagcgccgacggcggctccatggccttcccgagcaactggcagctggcgtgggttaatcaggaaacgccggccctgccgcaaccggctattgattatgttattgatggcgatcgcgagttccgcaagctggaagccgatttacagcaggccaatgagcgtgacgacggccacgccatcgctaccgtccacggtaagctggatgccattgacgcctggacgattcgttcccgcgccgccagcctgctacacggccttggtttcagtaacgagcagcttgagcgcccggtcagtgatttctccggcggctggcgtatgcgcttaaacctcgcgcaggcgctgatctgccgttccgacctgctgctgctcgacgaaccgaccaaccacctcgatcttgatgcggtgatctggctggaaaaatggctgaaaggctataccggtacgctgatcctgatttcccacgatcgtgatttcctcgatccgatcgtcgataaaattattcatatcgaacagcaaacgatgttcgaatacaccggtaactacagctcgtttgaaatccagcgcgcgacccgtctgtcgcaacagcaggccatgtatgaaagccagcagcagcgcgtagcccacttgcagagctatatcgaccgcttccgcgccaaggccaccaaagcgaagcaggcgcagagccgtatcaaaatgcttgagcgcatggagcttatcgctccggcgcacgtcgataacccgttccacttcagcttccgcgcgccggaaagcctgccgaacccgttactcaagatggaaaaagtcagcgccggctacggcgaacggattattctcgactccatcaagctgaacctggtgcccggttcgcgtatcggtctgctggggcgcaacggcgccggtaaatcaacgctgattaagctactggccggtgaattacagccgctgtccggtgaaattggcctggcgaaagggattaagctcggttacttcgcccagcatcagctcgaattcctgcgcgccgatgagtcgccgatacagcatctggcccgcctggcgccgcaggagctggaacaaaaactgcgcgactacctcggcggctttggattccagggggataaagtcagcgaagagacccgccgtttctccggcggtgaaaaagcgcgcctggtgctggcgttaatcgtctggcagcgccctaacctactgctgctcgatgaaccgaccaaccaccttgatcttgatatgcgtcaggccttaaccgaagcgctgatcgacttcgaaggggcgctggtcgtggtctcgcacgatcgtcacctgatccgctccactactgacgatctgtacctcgtacacgacggtaaagttgagccgtttgatggcgatctggaagattatcagcagtggctgagtgattcgcagaagcaggaaaaccaggcctctgaagcgccgaaggataacggcaacagcgcgcaggcgcgtaaggatcaaaaacgccgcgaagccgaactgcgcacgcaaacgcaaccgctgcgtaaagagatcgcccggctggaaaaagagatggataaactcaacgcgcagctggcgcaggcggaagagaaactgggcgacagcgagttatatgacgcctcgcgcaaagcggaattaaccgcgtgcctgcagcagcaggcgagcgccaaatcagggctcgaagagtgtgaaatggcgtggctggacgcgcaggaacagctggagcggatgctgcaggaaggttaa

SEQ ID NO: 111176 - DNA, 156 bp, Enterobacter aerogenes; identical to SEQ ID NO: 87821

SEQ ID NO: 111177 - DNA, 1023 bp, Enterobacter aerogenes
atggttgaaataaccccgacagcagtgacgccccccgataacgattcgcgcgaattccatccgatgcgcggcgtgggcaatcgtcatctgcaaaccatgctgccgcggatcatccgccgcaagctccgatttacgccgcactggcagcgtcttgagctgccggatggcgatttcgtcgatctggcctggagcgaagaccctgccggcgcgcgccacaaaccgcggctggtggtttttcacggtctggaaggcagcctgcacagcccttacgcccacggtttaattcacgccgccatgcagcgcggctggctcggggtggtgatgcattttcgcggctgcagcggcgagccgaatcgcaacagtcgtatttatcactctggcgaaacggaagacggcacctggttcctgcactggttgcggcgtgaattcggcgccgcgccgacggcggcggtaggctattcgcttggcggcaacatgctgggctgtctgctggcgaaagaaggcgacaatattccgctcgatgcggccgtcattgtctcggcgccctttatgctggaagcctgcagctaccatatggataaaggattttcgcgcgtctatcagcgttacctgctcaacctgctgaaagccaacgcctcgcgcaagctgaaagcctatccaggctcgctgccggtggatcttcgccagctcaaaagcatgcgccgcatccgcgaattcgacgacatgatcaccgccaaaatccacggtttcgccgatgcgctagactattaccgacagtgcagcgcgatgccgcgcttaagcgatatcaccaagccgacgctgatcattcacgcaaaagacgatccatttatggaccatcattcaataccgccgcaggaacagctgccggctaatgtcgaatatcagctcacggaacaaggcggccacgttggctttgtcggcggtacgctgcgaaaaccgcaaatgtggctggagcaacgtattccggattggttaacccgctggctgggagggcaagcatga

SEQ ID NO: 111178 - DNA, 219 bp, Enterobacter aerogenes
atgattattccctggcaggatctcgatcccgaaacgctggataatctgattgaaagctttgtgttgcgcgaaggcaccgattatggtgaacatgaacgttcgcttgccgataaagtcgccgatgtaaaacagcagcttaaaaccggggaggccgtgctggtgtggtcagaactgcacgagacggtcaacatcatgccccgcaagatgtttaacggctaa

SEQ ID NO: 111179 - DNA, 870 bp, Enterobacter aerogenes
atgtctgccaaacatccagtgatcgcagtcacgggctccagcggcgcgggcaccaccaccaccagcctcgcgtttcgcaaaattttctcgcaactgaacctgcatgccgcggaggtcgaaggggatagcttccatcgctatactcgcccggaaatggacatggcgatccgcaaagcgcgcgatcagggcaaacacatcagctacttcggcccggaagccaacgacttcagcctacttgaacgcacctttttagagtacggcgaattcggcaagggccagtcgcgaaaatatctccatacctatgatgaagcggttccctggaatcaggttcccggcacctttaccccgtggcagccgctgcctgaaccgaccgacgtgctgttttatgaggggctgcacggcggcgtggtgacgccgcagcatgacgtggcgaaacatgtcgacctgctggtcggcgtggtgccgatcgtcaacctcgaatggattcagaagctcattcgcgataccagcgaacgaggccattcgcgcgaagcggtgatggactcagtggtgcgttcgatggaggactacatcaatttcatcaccccccagttctcacgtacccatatcaacttccagcgcgtgccgacggtggatacctcgaatccgtttgccgccaaaggtattccatcgctcgatgaaagcttcgtggtgattcacttccgcaatttgcaggggattgattatccctggctgttggcgatgttacaggggtcgtttatctcgcacatgaacaccctggtggtgccgggcggtaagatggggctggcgatggagctcattatggcgccgctggtcgagcgtttgatggaaggcaaaaccattagttaa

SEQ ID NO: 111180 - DNA, 405 bp, Enterobacter aerogenes; identical to SEQ ID NO: 87817

SEQ ID NO: 111181 - DNA, 633 bp, Enterobacter aerogenes; identical to SEQ ID NO: 108451

SEQ ID NO: 111182 - DNA, 2079 bp, Enterobacter aerogenes
atgtggcgcaggctgatttaccacccggaagtcaactatgcactgcggcaaacgctggtgctgtgtctacctgtggccatcgggcttctgctcggccatctgcagcaagggctgctgttctctttagttcccgcctgttgcaatattgccggtctcgacaccccgcataaacgttttttcaaacgcctgatcgttggcggctgcctgtttgccggcagcagcctgattgtgcaattgcttctggcgcgcgacatcccgttgccgcttatcctcagcgcgctggcgctgattctcggcgtgacggcggaaatcagctcgctacacgctcgcctgttgccggcatcgcttatcgccgccatttttaccttaagcctggccggcaatatgcccatctgggagccgctgcttatctatgcgctgggaaccttgtggtacggactctttaactggttctggttttggctctggcgagagcagccgctgcgcgagtcgttaagcctgctttaccgcgaactggctaactattgcgaggccaaatatagcctcctgacgcagcacactgacccgacgacctccctgccgccgctgcttacccgccagcagaaggtggtcgatttaattacccagtgctatcagcagatgcatatgttagccgccaaccagcgtagcgatcataagcgactgctgcgcgcgttccaggttgggctggatctgcaggaacatatttcagtgagcctgcaccagccggaagaggtgcaaaaactggtggagcgcagccatgcggaagcggtcatccgctggaacgcgcagaccgttgccgctcgtctgcgggtgctggcggatgatattctctaccaccgctacccgcgccgctttcagatggataagcaaatcggcgcgctggaaaaaatcgcctatcagcatcccgataacccagttggccagttctgcgcctggcacttcagtcgtatcgcccgcgtgctacgtactcagcgaccgctgtacgcacgtaacctgatggcggacaaagaacgacgcctgccgctgctaccggccctgaagaattacctgtcattgaaatccccggcgctgcgcaacgccgcgcgcatcagcgtaatgttgagcatcgccagcctgatgggcagcgccctgcacctgccgaagccttactggatcctgatgaccgtgctgttcgtgacgcaaaacggttacggcgccacccgcgtgcggattgtccaccgggcggcaggcaccctggcgggcctggtgatcgcctggctgaccttacacttccacgtaccggagagctatacgttaagcggtatgttgttcatcacgctgctgagctatctcatcattcgtaaacactacggctgggcgatggtgggctttaccgtcaccgcggtatataccctgcagttgctaacgcttaacggcgagcagttcatcgtcgcccgctttatcgataccatcattggctgtctgatcgcctttggcgggatggtctggctatggccgcaatggcagagcggcctgctgcgtaaaaacgcccacgatgccctggaggccgatcaggaggctattcggctgatacttagcgccgatccgcaggccccggcgttggcctaccagcgtatgcgcgtcaaccaggcgcacaacgccctgtataactcgcttaaccaggcgatgcaggaaccgggttttaactcgcactatctggaagatatgaagctgtgggtaacccatagccagtttatcgttgagcatatcaacgccatgaccacgctggcgcgcgagcatacgatgctaacgcctgacctggcgcagcggtatctggaatcttgtgaaattgcgctgcagcgctgtcagcagcgtctggattcagacgggccgggcagcgcgggcgatgtaaatattatggaatcccaggacggggaagtgttgcgtgggccgctcagcacccttgagcagcatctgcagcggatcctcggccatctgaacaccatgcacaccatttcgtcggtggcatggcgtcagcgtccgcatcacggcatctggctacgcacgactaggcgctaa

SEQ ID NO: 111183 - DNA, 1221 bp, Enterobacter aerogenes
atggcaacagagcaaccggcaatcacccgcgccacattcgatgaagtcattctgccgatttatgcaccggcggagtttattccggtgaaggggaaaggcagccgcgtttgggatcagcagggcaaagagtacgttgattttgccggcgggattgcggtgaccgcgctgggccactgccacccggcgctggtggcggcgctgcacgagcagggcgaaaccctgtggcacaccagcaacgtttttaccaacgagccggcgctgcgcctgggtcgccaactggtggacgctacttttgccgaacgcgtggtgtttatgaactccggtacggaagccaatgaaacggcgttcaagctggcgcgtcattacgcaatcactcgccatagcccgtacaaaaccaaaatcatcgctttccataatgccttccacggacggtcgctgttcaccgtctcggttggtggtcagccgaaatactctgacggtttcgggccgaaaccggcagatatcgtgcatgtcccatttaacgatctcgaggcggtgaaagcggtgatcgatgaccatacctgcgcggtggtggttgagccgattcagggcgagggcggggtgatggcggcgacgccggcgttcctgcaggggctgcgcgaactgtgcgaccagtatcaggcactgctggtatttgatgaagtgcagtgcggtatgggccgtaccggttcgctgttcgcctatatgcattacggcgtgaccccggatatcctgaccagcgcgaaagcgctcggcggcggtttcccgattagcgcgatgttgaccaccaatgaaattgccagcgccttccatgccggttcccatggctccacctacggcggcaatccgctggcctgcgcggtggcgaccgcggctttcaacctgattaacacgccgcaggtgctggagggcgtgaatgccaaacgggcgctgtttgtcgaacacctgcagcagatcgatgcgcagtttgatctgttcagcgacatccgcggcatggggctgttaatcggcgccgcgcttaagccgcagcatcatggacgcgcgcgcgatttcctctatgccgcggcggaggccggggtgatggtgttaaacgccgggccggacgtaatgcgctttgtgccgtcgctggtgattgatgatagcgatatcgccgaagggatggcgcgctttgcgcaggcggttaaaaacgtgcttagcgcctag

SEQ ID NO: 111184 - DNA, 564 bp, Enterobacter aerogenes
atgatcctgctaatcgataactatgactctttcacctggaatctgtaccagtacttttgcgaactgggggcggaggtgctggttaagcgtaacgatgagttaacgctggcagagatagcgtcgctggcgccggagaaaatcgttatttcgccgggcccctgcacgcccgatgagtcaggtatttcgctggacgttatccgccgttatgccggaaaaaccccgctgctcggcgtgtgtctgggtcatcaggctatcgcccaggtcttcggcgccgccatcgtacgcgccgctcaggtcatgcatggtaaaacgtcgcttattgagcacaacggcgagggcgtttttaaggggttaaacaacccgctcaccgttacgcgttaccattcattagttatcgacccgccaacccttcccgcggattttatcgttaccgcccgcagcgccagcggtgaaatcatgggtatccgccatcgccagtgggatctcgaaggcgtgcagttccacccggagagtattcttagcgaacagggacaccaactgctggaaaacttccttaaacgctga

SEQ ID NO: 111185 - DNA, 603 bp, Enterobacter aerogenes
atgagcgctaaatatggcgacgatcgcgacccctatctctatccgacgctggatgtgttgcgtaatcggctgggtattcgtcaggcacagcggctggaacaaacggcctgggaattcacttccctgcgcgcggcgacgatcccgttgggcccgcgcggccgcggcttaccgcatctgtgcgccattcaccggcaactttatcaggatctctttgactgggcgggcaaactgcgggaaatcgatatctaccagggcgatacgccgttttgccacttcgcgtggatagagaaagagggtaacgcgctgatgcgcaagctggaagaagaggactatctgtgtgaacaaccccgggagacgttcgtcgagcgcctgagctggtactacggcgaaatcaatgtcctgcacccgttccgtcttggcaacggcctgacgcaaaggatcttcttcgaacagttggccattcacgccggctacctgctcgactggcggggtattgagccggatgcgtggagccaggctaaccagctgggagcgatgggcgacccggaaccgctggagcggatctttcgtaaagtggtaagcgaagcgcgggaatctgagtag

SEQ ID NO: 111186 - DNA, 168 bp, Enterobacter aerogenes; identical to SEQ ID NO: 87811

SEQ ID NO: 111187 - DNA, 570 bp, Enterobacter aerogenes
atgctcaaatccactctggcggcgatggctgccgtattcgccatttcagcattctcccccgccatggcggccaagggcgacccgcacgtactgctgaccacttctgctggcaacatcgagttggagctgaatagccagaaggcgccgatttctgtcgataacttcctgaagtacgtgaacagcggtttctataacaacacgaccttccaccgggtgatcccaggctttatggtgcagggcggcggctttaacgagcagatgcagcaaaagcagccgaacccgccgattaaaaacgaagccgacaacggcctgcgtaatacccgcgggacaatcgccatggcgcgtaccgccgatcaggacagcgcgaccagccagttcttcatcaacgtggctgataacgctttcctcgaccacgggcagcgtgattttggctacgcggtatttggtaaagtggtgaagggaatggacgtcgccgacaaaatttctcaggttccgacccacaacgtcggcccataccaaaatgttccgtccaaaccggtcgttattctctcggcgaaagtgctgccgtaa

SEQ ID NO: 111188 - DNA, 1179 bp, Enterobacter aerogenes
atgactaacagcaatcgtatcaagctcacatggatcagctttttctcctacgccctgaccggcgcgttggtgatcgtcaccgggatggtgatggggaacatcgcggattatttccatctgccggtgtccagtatgagtaacacctttaccttcctcaatgccggtattctgatttctatcttcctgaatgcctggctgatggagatcgtgccgctgaaaacccagctgcgcttcggctttatcctgatgctgttagctatcgccgggctgatgttcggccacagcctgacgctgttctccgcgtcgatgttcgtgctcggtctggtcagcgggatcaccatgtcgatcggtactttcctgattacccacatgtatgaaggccgccagcgcggcgcgcgtctgctgttcaccgactccttcttcagcatggcagggatgatcttcccgatggtcgccgccgttctgctggcgcgcagcatcgagtggtactgggtttacgcctgtatcggcctggtctacgttgctattttcgtgctgactttcggctgtgagttcccggtgcttggcaacaaagcgctggcggaaaacagccagccggtagtgaaagagaaatggggcatcggcgtgctgttcctttccatcgccgcgctgtgctacatactcggtcagttgggctttatctcctgggtaccggaatatgccaaaggcctcggcatgagcctcggcgacgccggtaagttggtcagcgatttctggatgtcctatatgattggcatgtggtcgttcagcttcatcctgcgattcttcgacctgcagcgcatcctgaccgtgctggcgggcctggcgacagtcctgatgtatctgttcattaacggttcgccggagcatatgccgtggttcatcctgacccttggcttcttctccagcgccatctatacctcgatcattactctgggctcgcagcagactaaagtcgcttcaccgaagctggtgaacttcattctgacctgcggcactatcggcaccatgctgaccttcgtagtgaccgggccgatcgtcgcggccagcggcccgctggccgcgctgcacaccgcgaacggcctctatgccgtggtattcgtgatgtgtctgctccttggcttcgtttcccgccaccgtcagaacgcgtcggcgcactaa

SEQ ID NO: 111189 - DNA, 1323 bp, Enterobacter aerogenes
atgtcgacaacgccgttgtggttaattcagaacgtccatctgccacagaaggaagggctgtggcagattgcgattgataaagggcgattcggcgacattacgccgatgggagaggcgcgcagcgagagctacgaagtgcttaacgcccgcggcggattggccatcccgccgtttatcgaaccgcacattcatctcgataccacgcagacggcgggagaaccaaactggaaccagtccgggacgctgttcgaagggattgagcgttgggccgagcgtaaagcgctactaagccatgaggatgtgaaagcccgcgcgtggaaaaccctgcgctggcaaatcgctaacggcatccagtttgtccgcacccatgtcgatgtttccgacccaacgttgaccgcgctgaaagcgatgctggaagtcaaacaagaggtagcgccgtgggtcgatttgcagatagtcgccttcccccaggaagggattttatcctaccccaatggtgagagtttgctggaggaggcgttacggctgggcgccgatgtggtcggggcgatcccgcatttcgaatttactcgtgaatatggtgtggaatcactgcatatcgccttccgtctggcgcagaaataccagcgtccgctggatatccactgcgatgaaattgacgatgaacagtcgcgctttgtcgaaacggtcgccgcgctggcgttaaaagagggaattggcccccgggtgaccgcgagccacaccaccgcgatgcactcctataatggcgcttatacctcgcggctgttccgcctgttaaaactctcgggcattaacttcgtcgccaatccgctggtcaatattcatctgcaggggcgctttgatgactacccgaagcggcgcggcgtgacgcgagttaaggagctgatggcggccggcattaatgtctgttttggccacgatgatgtgttcgacccgtggtatccgttgggaaccggcaacatgctacaggtgctgcatatggggctacacgtttgccagttgatgggctatcagcagattaacgacagtctgcagctgattacccacaacagcgccagaacctttgggctcaatgattacggcatcgctaccggcaacccggccaatctgctgatcttgccggcggaaaacggttttgaagccgtacgctgccaggtgccggtacgttggtcaattcgtcagggaagggtcattgcgactacgcagctggcgcagacgtggatacagaccgataaaggcggcgaggagttgttttttaccaaaaatagcccctttgccgaagcaaaggggcctaaggcttag

SEQ ID NO: 111190 - DNA, 2544 bp, Enterobacter aerogenes
atgagcaaagtcagaatcgctattatcggtaacggcatggtcggccatcgctttatcgaagagcttcttgataaggcgcctgccggacaattcgacattaccgtgttctgtgaagagccgcgtatcgcctatgaccgtgtccacctgtcgtcttacttctcccatcacactgcggaagagctgtcgctggtacgcgaaggtttctatgagaaacacggcgtcaaggtactggtcggcgaacgcgcgattaccatcaaccgtcaggaaaaggtgatccactccagcgctggccgtaccgttttctacgacaagctgattatggcgactggctcatacccgtggatcccgcccattaaaggcgcggaaacccaggattgcttcgtctatcgtactattgaagatcttaacgccatcgaatcctgcgcccgtcgcagcaaacgcggcgcggtggtcggcgggggtctgctcggtctggaagcggctggcgcgctgaaaaatctcggcgtggaaacccacgtgatcgagttcgcgccgatgctgatggccgagcagctcgaccagatgggcggcgagcagctgaagcgtaagattgaaagcatgggcgtgaaggttcacaccagcaaaaacaccaaagagatcgttcagcagggcaccgaggcacgcaaaacgatgcgcttcgccgacggtagcgaactgcaggtcgatttcatcgtcttctctaccggtatccgtccgcgcgacaagctggctacccagtgcggtctcgccgttgcccaacgcggcggcatcatggtcaacgatagctgccagacctccgatccggatatctacgctatcggcgaatgcgccagctggaataaccgcgtatacggtcttgtcgccccgggctacaaaatggcgcaggttaccgttgaccatatcctcggcaacgacaatctgttcaccggcgccgacctcagcgccaagctgaagctgctcggcgtggacgttggcggtatcggcgacgcccacgggcgcacgccgggcgcgcgtagctacgtctatctcgacgaaagcaaagaggtctacaaacggctcattgtcagcgcagacaataaaaccctgctcggcgcggtactggtcggcgataccagcgattacggcaacctgctgcagttggtgctgaatgccatcgagctgccggaaaacccggattcgctgatcctcccggcccacgccggcagcggcaagccatccatcggcgtggataaactgccggacagcgcgcagatttgttcctgcttcgacgtcagcaaaggcgacctgatcgccgctatcaataaaggctgccacaccgtggcggcgctgaaagcggaaaccaaagccggaaccggctgcggcggctgtattccgctggtgacgcaggtactcaacgccgagctggcgaaacagggtatcgaagtgaacaacaatctgtgtgagcacttcgcctactctcgccaggagctgttccacctgatccgcgtggaaggcatcaaaaccttcgacgaactgctggaaaaacacggtcagggctacggctgtgaagtctgtaagccgaccgtcggttccctgctggcctcctgctggaatgagtacatcctcaaaccacagcacacgccgctgcaggacaccaacgataacttcctcgccaacatccagaaagatggcacctactcggttatcccgcgctccgcaggcggcgaaataacgccagaaggcctggttgccgtcggtcgcatcgcgcgcgaatttaatctgtataccaaaatcaccggttcacagcgtatcggcctgttcggcgcgcaaaaagacgacctgccggaaatctggcgtcaactgattgaagccggcttcgaaaccggccatgcgtacgccaaagcgttacgtatggcgaaaacctgcgtcggcagtacctggtgccgctacggcgtcggcgatagcgtcggcttcggcgtagaactggaaaaccgctataaaggtatccgtaccccgcacaaaatgaagttcggcgtctcaggttgtacccgtgaatgcgcggaagcgcagggtaaagacgttgggatcatcgccaccgagaaaggctggaacctgtacgtgtgcggtaacggcgggatgaaaccacgccacgccgatctgctggccgcggacctcgatcgcgatacgctcatcaaatatctcgaccgctttatgatgttctacatccgcaccgccgataagcttacccgtaccgcgccatggctggacaacatggaaggcggcatcgactatctgcgcagcgtcatcatcgacgataagctgggcctgaacgatcaccttgaagaagagctggctcgcctgcgcgccgcttttgcctgcgaatggaccgagaccgtcaataacccggcggcgcagacgcgcttcaaacactttatcaacagcgatcagcgcgacccgaacgttcaggtggtgccggaacgtgaccagcatcgcccggccacgccctatgagcgcatcccggtcacgctggtggaggaaaacgtatga

SEQ ID NO: 111191 - DNA, 327 bp, Enterobacter aerogenes
atgagccagtgggtaaacatctgcaaaattgacgacatcctgccggcgaccggcgtctgtgcgctgctggggcaacagcaggtagctatcttccgtccgtaccatgacgacagagtgttcgccatcagcaatatcgatccgttcttcaatgccagcgtgctgtcccgcgggattatcgctgagcatgacggcgcgctgtgggttgccagcccgctgaaaaagcagcgcttccgcctcagcgacgggctgtgcatggaagatgagagccactccatcgcccactatgaagcccgtgttaaagatggcaaagttcagctgaaagcctga

SEQ ID NO: 111192 - DNA, 1374 bp, Enterobacter aerogenes
gtggaccacttacctattttttgccaactacgcgatcgcgactgcttgctggtcggcggcggcgatgtcgctgaacgcaaggcgcgtctgttgctcgacgccggcgcccggttaacggtgaactcacgccagtttactccgcagtttcaggtgtgggccgaggcgcaaatgctgacgctggcgcagggtgatttcaatcctgcgctgctcgataactgctggctggcgatcgccgccaccgacgatgatgtcgttaatcagcaggtcagcgaggccgctgaatcacggcgtattttctgcaacgtggtggatgcgccccgtcaggccagctttatcatgccgtcaattatcgaccgctcgccgctgatggtcgccgtgtcttccggcggtacctccccggtgctggcgcgcctgctgcgtgaaaagctcgaatcgctgctgccgctgcacctcgggcaaatcgcccgctatgccgggcagttgcgctcaagggtgaaaaaacagttcgctaccgtcggcgcgcgccgccgcttctgggaaaaactgtttgttaacgatcgtctcgcccaatcgctggcgaacgatgatcgtcaggccgttgccgacaccacggaacagttattgaatgagccgctggaacatcgcggcgaagtggtgctggtgggcgccggtccgggcgatgccgggctgctcaccctcaagggactgcagcagatccagcaggccgatgtggtggtttatgaccgactggtctccgacgacattatgaacctggtgcgccgtgacgccgatcgggtgtttgtcggcaaacgtgcaggctatcactgcgtgccgcaggaggagattaaccaaatcctgctgcgcgaagcgcaaagcggcaaacgtgttgtacgcctgaaaggcggcgatccgtttatttttggccgcggcggcgaagagctggagaccctctgcgcggcaggtattccgttctcggtggtgccggggatcaccgccgcctccggctgctcggcctactccggcattccgctcacccaccgcgatttcgcccagggcgtacgcctgatcaccggccatctgaaaaccggtagcgatctcgactggcaaaatctggcggcggaaaaacagacgctggtgttctatatggggctaaaccaggcggcggcgatccgcgaaaaactgatcgcccacggcatggcggcggatatgccggccgctatcgtcgaaaacggcaccgcggtcaaccagaaggtcgtcaccggcactctggatcggctggatatcctggcgcagcagatggccagcccggcgttaattatcgtgggccgcgtggtggcgctacgcgacaagctgaactggttttctcaccattaa

SEQ ID NO: 111193 - DNA, 1005 bp, Enterobacter aerogenes
atgactaagcccatcgtttttagtggcgcacagccctcaggtgaattgaccattggcaactatatgggtgcgctgcgtcaatgggtaaacatgcaggatgactatcactgtatttactgcatcgttgaccagcacgcgatcaccgtgcgtcaggatccgcagaacctgcgtaaagcaacgctggatacgctggcgctgtatctggcctgcggtatcgatccgcaaaagagcaccattttcgtccagtctcacgtgccagaacacgcacagctgggctgggcgctcaactgctacacctatttcggcgaactgagccgtatgacccagtttaaggacaagtccgcgcgctacgccgagaacatcaacgccggtctgtttgactacccggtactgatggccgctgacatcctgctgtaccagaccaaccaggtaccggtaggcgaagatcagaaacagcatcttgagctgagccgcgacgttgcgcagcgctttaacgctatctatggcgatatctttaaagtgcctgagccgtttattcctaagtccggcgcgcgcgtcatgtcgctgctggagccgaccaagaagatgtccaagtccgatgacaaccgcaacaacgtcattggcctgctggaagacccgaaatcggtagttaagaagatcaaacgcgcggtgaccgattccgacgagccgccggttgtccgttacgatgtgcaaaacaaagcgggcgtttccaacctgctggatatcctctccgccgtcaccggccagagcattccggagctggaacagcactttgaaggtaaaatgtacggccatctgaaaggtgaagtcgccgaagccgtttccggtatgctgaccgagctgcaggagcgctatcaccgtttccgcaacgacgaagcgttccttaatcaggtgatgaaagagggcgccgagaaggccagcgcgcacgcttctaagactctgaaagcggtatatgaagcgattggctttgtcgctaagccgtaa

SEQ ID NO: 111194 - DNA, 762 bp, Enterobacter aerogenes
atggataaattacaggccatccgcggcgtggcattcgacctggacggtacgctggtcgatagcgcgccgggtttaaccgccgccgttgatagcgcgctttacgcgctggaactgccggtggcaggtgaagaacgcgtcgtgacctggattggcaacggcgcagacgtcctgatggagcgggcgctgaactgggctcgccaggagcgcgccacgttacgcgcggcgatggggaaaccttccgtcgacgatcatgatataccgcaagacgaacagctacgcgttttgcgtaaactgttcgaccgctattacgccgaagcggcggaagaaggcagcttcttgttcccggcggtggccgatacgctcggcgcgctgcatgccaaaggcctgccgctggctctggtcaccaacaaaccaacgccgttcgtggcgcccttgctcgaggcgctggatatcgcgaaatactttagcgtggtgatcggcggcgacgatgtgaagaacaaaaagccgcatccggatccgctgctgctggtggcgcaaaagctctctctgacgcctgccgaactcttgttcgtcggggattcgcgcaatgatattcaggcggcgaaagcggcaggttgccgctctatcggtctgacttacggctataactacggcgagccgatagcgctgagcgagccggattttatctttgaccaatttaatgaactcttgcccgctcttgggctaccgtacagtgaaactcaggaattaaaaaatgactaa

SEQ ID NO: 111195 - DNA, 678 bp, Enterobacter aerogenes
atgaagcagtatttgattgccccttcgattctgtcggctgattttgcccgtttgggcgaggataccgctaaggcactggcggcgggtgcggatgtcgtacacttcgacgtcatggacaaccactatgtgccgaatctgacgattggcccgatggtactgaagtcgctgcgcaactacggcattaccgcgccgatcgatgtgcacctgatggtaaagccggtcgaccgcatcattcctgattttgccgaagccggcgccagcattatcactttccacccggaagcctctgaacacgtcgaccgcagcctgcagcttatcaaagagcatggctgtaaagcggggctggtattcaacccggcaacgccgctgagttacctcgattacgttatggataagctggatgtgatcctgctgatgtcggttaacccaggctttggcggccagtcctttattccgcacacccttgaaaaactgcgtcaggtgcgtcagcttatcgatcaatccggctacgacattcgccttgaagtcgatggcggcgtgaaagccagcaatattggtgaaattgccgccgccggtgcggatatgtttgtcgcgggttcggcgatcttcggccagccggactacaaaaaagttattgatcaaatgcgtagtgaattagcgaaggttagtcatggataa

SEQ ID NO: 111196 - DNA, 828 bp, Enterobacter aerogenes
atgaaaaagaatcgcgcttttctgaagtgggcaggggggaaataccccctgcttgacgatattaaaaagcatttgccggaaggtgaatgcttgattgagcccttcgtgggcgccgggtcggtattcctgaataccgacttttctcgttatattctcgcggatatcaatagcgacctgatcggtctgtataacatcgtcaaattgcgcaccgacgaatacgtcagcgcggcacgtgagatgtttacgccggaaaataacgccgcggagcgctactaccagtaccgtgatgaattcaaccagagtcaggatcccctgcgtcgcgcggtgctgttcctgtatctgaatcgccatggctacaacggcctgtgccgctacaacctgcgcggcgagttcaacgtgccgtttggccgctacaaaaagccctatttccccgaggctgagctctatcacttcgccgccaaggcgcagaacgccgagttttactgcgaatcttatgaagagtgtatgaagcgcgccgatagccgggcggtggtctattgcgatccgccgtacgcgccgctgacggcgacggcgaattttaccgcctaccacaccaacagcttcaaccttgatcagcaggtactgctggcgaaaaaggcggaatcgttgatgaaaaagcggatcccggtgcttatctcaaaccaccgcacgccgctgacgcaggagtggtataaaaacgcggcggaaacgcatattgtgaaggttcggcgcagcatcagcagcaatggtggtacgcgtaaaaaggtggacgagctcttagcgctgtaccgtccaccgaagaccaaataa

SEQ ID NO: 111197 - DNA, 1293 bp, Enterobacter aerogenes
atggatgatttcaaaccagaagacgatatgaaagccgatcgcaacgatcgtcgtactggtcgttcccgtcagtcttccgagcgtgacgccgatccgcagatcaatttcgacgatctcgatcttgaggccgatgaaggccgtccgacgcgcgcgaacaaagcccgtcgtgaacgcgatgaagaagagtacgaagaggacctcgagtccgaagaagaagcagaagaagagcagcaggttgaacgccgcccgcgtaaacgcaaaaaggcccctgctaaaccggcttcccgccagtatgtcatgatgggcgtcggggtgctggtactcctgctgctgattgtcggagtgggttcggcgctgaaatcgccatcttcttccaatgaatccgcttctggtgagaagagcgttaatctgtcaggcgatcaaagcatgaccgctgaccagaacaacaatgctgcgcagccggtcgatcaaactgcgggcaacaccaaccagcaacagccgcaggacgtttctctgccgccgatcgcctctaatccgactcagggtcaacccgcctccgagccgcagggccagcagcgtgtggaagttcagggcgacctgaacaatgcgctgactcaacagcagggtcaactggatagcgccgttgctaactccaccttaccgaccgaacctgcgaccgttgcgccggtgcgtaatggcgccgcgccgcgtcaaacgaccgaacgccagacggccgccacgccgcgtcctgccgagcgtaaacaggtggtgattgaaccgaaaccgcaaagcaagccgcaggcgaccgccaaagcgccggttgaaaccaaacctaagcgcgtagagagcgcgccggcggctaccgccagcaagcctgtcgccactgcgcagactaaaccggctgcgacaaccgcgccaacggctaccgcgactgcgcctgccgcaacgacctccaccccggcggccaccgcgcctgcggcgaccgcagcggctggcagcaaaacggctggcgatgttggttcgatgaagtctgcgccgtctggcaactatacgttgcagctcagcagctcctctaactacaacaacctgaataactgggcgaagaaagagaagctggaaaaatatgttgtctatgagacgactcgcaacggtcaaccgtggtatgtgctggttagcggcatctacgcttcgaaagatgaagcgaaacgtgctgtcgccacgctccctgcggatgttcaggcgaaaaatccatgggcaaaaccgctgcaccaggtacaagctgacctgaagtaa

SEQ ID NO: 111198 - DNA, 1095 bp, Enterobacter aerogenes
atggagaagctgactgtaactctcggggaacgtagttacccgattaccatcgcggctggtttgtttaacgatccagcttcttttctgccactgaaatcaggcgaccaggtcatgctggtcaccaatgaaacgctggcgccgctttatcttgataccgttcgctccgtactggagcaagcgggtgtcaacgttgacagcgtgatcctgccggatggcgagcagtataaaagcctggcggtgatggatacggtatttaccgcgctgttgcaaaaaccacatggccgcgacaccacactcgtggcgctcggcggcggcgtggttggcgatttaaccggttttgccgctgcgagctatcagcgcggcgtacgttttattcaagttcccaccacgctgctttcgcaggtggactcttcggttggcggcaaaacggccgtaaaccatcccctcggtaaaaatatgattggcgccttctggcagccggtttccgtggtcgtcgaccttaattgtctcaaaaccttgccgaagcgtgagctctcctccggcctggctgaggttattaagtacggcattatcctcgacggcgagttcttctgctggcttgaagacaacatcgatgcgctgatggcgctggatgaatcagcgatggcgtactgtattcgccgttgttgtgagttaaaagccgaagttgtcgctgccgacgagcgcgaaaccgggttacgtgctttactgaatctgggacatacatttggtcatgctatcgaagctgaaatgggctacggtaactggctacatggcgaagctgtggcggcaggaatggtcatggcggcgcatacgtccgagcgtttagggcagtttagcgcgcaggatacgcagcgtatgattgcgctgttgcaacgtgcagggttgccggtacgcgggccgcaggaaatgtctgcagaagcgtacttgcctcacatgatgcgtgataaaaaggtactggcaggcgaaatgcgcctggtattgccgctcgctataggaaagagcgaggtccgcggcggagtgtcgcacgatgtagttcttggcgcgattgctgatactcagcaggcgcaacaataa

SEQ ID NO: 111199 - DNA, 522 bp, Enterobacter aerogenes; identical to SEQ ID NO: 87798

SEQ ID NO: 111200 - DNA, 1239 bp, Enterobacter aerogenes; identical to SEQ ID NO: 92127

SEQ ID NO: 111201 - DNA, 438 bp, Enterobacter aerogenes
atgcgggtagcgattgaacgcctgctggcgctgcgtgggtggtcgttgacgttactctgcggcgcagtgttggctgcggcaatatgtctggcgttttcgcttgctgctgtcagcgtttcacagccctcgaatgtgccgctacaggcgcaatggcggcgaatattgccgctgcgcgccacgctgcagcaacgggtagtccatagttggacggcccggcatttttcgccgctggagccgcctgtcgccggcgtcgccttacaggcctggcaaccgagggggcgcggtggcgaaatgcttgctgtggttgactggcaggcggtgccaccgctgtttgcctggcttgccgattgcggggtacacccaggcgctttttcattgaatgccgaaaaaggagcgttgcagttgtcgctgcagctggagagggacgatgaaacataa

SEQ ID NO: 111202 - DNA, 540 bp, Enterobacter aerogenes
atggcgcagcagattaatcttctgccgtggcgcgagacgcgacggcggcaacgcttgcgcctgggcgggctgctggcggcggcgatggcgctaagcatcgccactctgacgatagcgacgcgcacgttacgtcagatggatgtggcgcagcaggtaatgcgcacccaggccgacaatctgctttattccgcgctgttgcaacgcgagcgggagatgcgtgaggaaatacagcgcggtgagcggcaggcacggcgagcgcagcggcgggcggcgacgcatgcctggcagccgcgactgttatcgctggctgcactattgccggagccgctgtggctgaccaggctggactaccagccgcagggaatcaccctcaacggcctggcgctgaacctcaaggcggtggcggcgctggaaaaagcgctcagcaagctggaggattttcaaccggttacgccaggggcgacgcggcgtgatgcacaggggcgctggtcattcagctttttccttgcaggagaaaccaccgatgcgggtagcgattga

SEQ ID NO: 111203 - DNA, 786 bp, Enterobacter aerogenes
atgactttcagaaattggcgtataggaattcacattcaacaggatagcgtcgccatcgtggcgctgttgtacgaacgcgggcgctgggctttgcgtcgctggtggcgaattccgctaccgcccggcctggtggcgcagggcagcatcgttgaccttaatgagatggtgaagcggttacgtgaatggcgccgcgagctgccgttacagcatcaggtgtgcattgcgcttcctgccagccgtacgctgcaaaagcagttgcccgcgccacaggtgtcgctgcgggaaagcgaaagagcgacatggatagcgggcacgatggcgcgtcagctggaaatgcctgcctcttcgctgtgtatcgattacgccgcccgcgcggcaaacgatggctggcaggcgacggcagctcagcgtttggatatcgacgccctgcgtcagctggcgcggcggcttaagctgcgcctggcggctatcgtaccggatgcggctgctctcacttctttttttccctggcttactgacgagactcagggcctggtctggcagggggacgcgcagtggttatgggcgacccaggagcgctggggctattgtccttgcgctgaagccccctctttctcgcacttaacctcgcgcctcaatgatgaacagttccagctctgtagcagcctgccgttggcggaaaatagcttcgattgctggagcgcgatccaccgcctgcagccgccgcttcccgcctgcggcgatcgctttgctatcgcgcttggtttggcgctgggaggtaaataa

SEQ ID NO: 111204 - DNA, 2559 bp, Enterobacter aerogenes
gtgaagttcgtaaagtatctttttatccttgcagtttgttgcgttctgctgggagcaggctcgatttatggcctctacaaatttatagagccgcaactccccgatgtcgcgaccttaaaggatgtgcgcttgcagatcccgatgcaggtgtatagcgcggacggcgagcttattgcgcaatatggcgaaaagcgccgcatccccgtcactctgcagcagatgccgccggagctgataaaagcgtttatcgcgactgaagatagccgcttctatgagcatcatggcgtcgatccggtggggattttccgcgccgccagcgtggcgatgttctcaggccatgcctcgcagggcgccagtaccatcactcagcagctcgcacgtaactttttcctcagtccggaaaaaacgataacgcgtaagatcaaagaagttttcctcgcaatccgcatcgaacagctgctgaataaagacgaaattctcgatctttacctcaacaaaatttacctcggctaccgtgcctatggcgtcggcgccgccgcgcaggtttacttcggtaaatcagtcgatcagctgacgctgagcgaaatggcggttatcgccggtctgccgaaagcgccttccacctttaacccgctctattcgctggaccgcgcgaccgcgcgtcgcaacgtggtgctgtcgcgaatgttaagcgaaggctatatcactcaggcacagtacgatcaggcgcgcagcgaagcgattgacgccagctaccatacgccggaaatcgccttctccgccccgtatctgagcgaaatggtgcgtcaggagatggtcaaccgctacggcgagcaggcctacgaagacggctatcgcgtctacaccaccatcacgcgtaaaaaccagcaggccgcccagcagtcggtgcgtaaaaacgtgctcgattacgacatgcgccacggctatcgtggcccggccaatgtgctgtggaaagttggcgagaccccgtgggataacaaaaaaatcctcgatacgctgaaaaaactgccgggcgtcggcccgctagccccggcggtagtcacctccgcgaacccgcaggaagcggtcgcgttgctgggcaacggcacgtcggtggcattaacgatggatggcgtccgttgggcgcgtcgctacgtttccgatacgcaacaaggctcgacgccgcgcaaagtgaccgacgtcattcagaccgggcagcaaatttgggtgcgcaaagagggcgacaaatggtggctgtcgcaggtgccggaagtaaactccgcgctggtatctatcaacccgcaaaatggcgcgattatcgctctggtcggcggctttgacttcaatcagagtaagttcaaccgcgctacccaggcgctgcgtcaggttggctccaatatcaagccgttcctttataccgcggcgatggacaaaggcttaaccctcgccagtatgcttaacgatgtgccgatctcccgctgggatgccggcgcgggctccgactggcggccgaaaaactcgccgccgcagtacgccggccctattcgtctgcgtcagggattaggccagtcgaagaacgtggtgatggtgcgcgcgatgcgcgcaatgggcgtcgattatgcggcagagtatctgcagcgtttcggcttcccggcgcagaacatcgtccataccgaatcactggcgctgggttccgcttcctttaccccgctacaggtcgcccgcggctattcggtaatggccaacggcggcttcctgattaatccgtactttattagcaagattgagaacgatcagggcggcgtgctgtttgaagagcggcctaagatcgcctgtccgcagtgtaattcgccggtgatctacggcgatacgccgaaatccaatgtgctggaaaaccaggatgttgaagaggtcgccacctctcaggagccgcaaaacggcgacgttccgccgcagccgcagcttgagcaggctaatcagtcgctggtcgcgcaaagcggcgcgccggagtatgccccgcatgtcatcaacacgccgttggccttcctgattaagagcgcgctgaataccaatattttcggcgaaccgggctggatgggcaccggctggcgtgcgggccgcgacctgcagcgtcatgatatcggcggcaaaaccggtaccaccaacagctcaaaagacgcgtggttctccggctacggtcctggcgtcgtgacgtcggtgtggattggcttcgatgaccaccgccgcgatttgggccgtactaccgcttccggcgcgattaaagatcagatttcgggttatgaaggcggcgctaaaagcgcccaaccggcctgggatgattttatgaaacgggtactggaaggcgtgccggaagagccgttaacgccgccgccgggtattgtgacggtgaatatcgaccgcagcacaggtcaactggctaacggcggcaacagccgcgccgagtacttcatcgagggcacgcagcctacccatcaggcggtgcgcgaagttggcaccaccattaccgatagcggtggcgaaacccacgagttgttctaa

SEQ ID NO: 111205 - DNA, 561 bp, Enterobacter aerogenes; identical to SEQ ID NO: 107417

SEQ ID NO: 111206 - DNA, 2130 bp, Enterobacter aerogenes
atgggcacctttctgacctttttcacagctctgctactctgtgtcttgcttatcgggtggtggtatcgatctcatgccagacgtcgtcgcctccccttactgcaagcctttagcgacgcgacgacccgcaagctttctgatgatgaacgccaggcggtcgaaaagtatctcgatggcctcagccagtcgcaacaggtaccggcgaccggcgccagcgtcgcgcctgtcgccctgaaactgaatgagcagagcgacaccgtttataccgtcacccgcgccgtcacccgctatggcatttcgtctgatgagcccaacaaatggcgatacttcctcgactcggtggaggttcacctgccgccgttctgggaacagcatatcaacgacgagaacagcgtctcgctgatcccaaccgacagcctgccgctggtgattgttctcaatgaccacaccttgcgcgactatccgcaggaagcccgcagctacgcgcttgaacgcgcatcggctacccaggcgtcgattcgcggtgaggagagcgagcaggtcgagctgctgaacatccgccatgaaactcaggaagagcatgctctcagccgtcctgacagcctgcgcgaagggattatgatcgtcgcagccttcctgctgttctattgctgcctgatctcccctgacgtctttgcgccgtggctgctcggcggcggcgtactgttgttggcagcgggcttatggggcatctatgcgccgccgctggccggttcgctacgcgagatccactgcctgcgcggaatgccgaaacgctggggactgtttggcgagaacgatcaggaacacgtcaataatatttcgctggggattatcgaccttatctatccgcgccactggcaaccgtggatcgcccaggacctggggcagcaaaccgatattgatatttatcttaaccgccatgtggttcgccaggggcgcttcctgtcgctgcacgatgaagtgaaaaacttcccgctgcagtactggctacgcagcgcgattatcgccgccggcgcgctgctggtcgtcatcatgctgtggattagcgtcccgctgaatatgccctttaaattcacgctctcctggcttaagggggcgcagaccatcgaagccaccaccgtcggccagcttgagaaggcgaaagtccgcatcggcgacacgctgcagttaaaaggtaccggaatgtgcaacatccgtacgccgggcgcctggagcgcgaaagaagcctcaccgtttacgccgttcgattgttcgcagatcatctggaacgacgcgcctcccctgccgctgccggagtccgatatcgtcggtaaagccacggcgctggtccaggcggtacagcgccagttgcatcctgacccggacgacgattcacacgttagcccggcattacgttcggcaattcaaaaatcaggaatggtactgctggatgacttcggcgatatcgtgctgaaaaccaacgatctctgctcggcgaaagatgactgcgtgcgtctgaagaacgcgctggtcaaccttggcaatacccgcaactgggaagcgctaaccaaacgcgccaccgccggtaagctcgatggggtaaacgtgttgctgcggccggtgagcgccgaatcgctggagaatctggtgaccacctcaaccgcgccgtttgtgatgcgtgaaacctcccgcgcggcgcaggcgctaaatagcccggcgcctggcggattcctgatcgccagcgatgaaggcagcgaactggtcaatcagccgtggccggctatcagcctgtacgattatcccgcccacgagcagtggggagagctacagcgtctggcgggtatgctgatgcatacaccattccatgcggaggggattgtcaccaatctttataccgacgccaatggcacccagcatatcaacctgcaccgcattcccgatcgcagcgggctgtggcgctatcttggcaccactctgctgctgctggcgatgcttggctgtatgtcgtggcacggcgtgcaggcgatccgccgttatcagcgccagcgtcagcgcatggaagaaattcaaaaatattatgaaagctgcctgaatccggttctcatcccttccccggatcatcaagattaa

SEQ ID NO: 111207 - DNA, 684 bp, Enterobacter aerogenes
atgcaaatcaatatcgcgtggcaggaggttgataccgttctgctggatatggatggcacgctgctcgacctcgccttcgacaactacttctggcaaaaactggtcccggaaacctggggcgccgcgcgcggactcaacctgcaggaagccaaagcggcaatgcatcaggagtatcacgccgtgcagcatacgctaaactggtactgtcttgattactggagcgagcgactgggtttggatatttgtgcgatgaccagcgagcaggggccgcgggcaaaactgcgggaagataccgtgccattccttgatgcgctgcgggccagcggcaagcgccgcatcctgttgaccaatgcgcacccgcataatctggcggtgaagctcaagcacaccggtctggacgcgcaccttgatttattactttccacccacacatttggttatccgaaagaggatcagcgcctgtggcgcgcggtggcggaagaaaccggccttgatgcgcgcaaaacgctgtttgtcgatgacagcgaggctatcctggacgcggcggcgcagttcggtattcgttattgcctgggcgtcaccaatccggattccggcctggcggaaaaacagtatacccgccatcccggcgtgaacgattaccggcggctgatcccttccctgactccggaggagaggccatga

SEQ ID NO: 111208 - DNA, 402 bp, Enterobacter aerogenes
atgaaagataagcccgcagaaagcgtcaggctggacaaatggctttgggcagcccgcttttataaaacccgcgccatcgcgcgcgagatggttgaaggcggcaaagtgcactacaacggacaacgtagtaagccgagcaaaatcgtcgagctgaatgccaccctgaccctgcgtcagggcaacgacgagcgtaccgttatcgtcaaaagcgttaccgaacaacgcaggccagccagcgaagccgttatgctgtacgaagagacggcggagagtattgagaaacgcgaaaaagtggcgctggcgcgtaagctgaatgcgctaacgatgccgcacccagacagacgtccggacaaaaaagagcgccgcgacctgatgagatttaaacacggcgacagcgaatag

SEQ ID NO: 111209 - DNA, 879 bp, Enterobacter aerogenes
atgactcaacacgatcaattacatcgttatctgtttgaaaactatgccgtgcgcggtgaactggtcaccgtatcggacacgttggaacagatcctggccaaccatagctacccgcaaccggtgaaaaccgtgctgtcggagctgctggtcgccaccagcctgctgaccgccacgctgaagttcgccggcgatattaccgttcagctgcagggcgacggcccgctctcgctggcggtgatcaacggtaataaccagcagcagctgcgcggcgtcgctcgcgttcagggcgaaatcccggaaggcgcggacctgaaaacgctggtcggcaacggctacctggtcattaccatctctccacaggaaggcgagcgctatcagggcgttgttggcctggaaggcgataccctggcggcatgcctggaagattacttccagcgttccgaacagctgccgacccgactgttcattcgtaccggcgagcacgacggtaaagcggtggctggcggcatgctgttgcaggtgatgccggctcaggacgcgcagcttaacgacttcgagcatctggcgaccctgaccgagaccatcaaggcggaagagctgttcaccctgccggcgaccgatgtattatggcgcctgtaccatgaggaagaggtgacggtatacgacccgcaagacgtcgagttcaaatgcacctgttctcgccagcgctgcgccgatgcgctgaagacgctgccggatgaagaagtcgacagcatcctcgccgacgaaggcgaaattgatatgcattgcgactactgcggcaatcattatctgttcaacgcgatggatatcgccgagatccgcaataacgcctcgccggcggatccgcaggtacactaa

SEQ ID NO: 111210 - DNA, 1620 bp, Enterobacter aerogenes
atgcgcgttaatagtttaaccccgcaggatctcaaggcttacggtatcaatgacgtccaggaaattgtccacaacccgagcttcgatacgctgtatcaggaagagctcgacccgaaactggaaggttatgagcgtggcgtattaaccaatcttggtgccatcgccgtcgataccggcattttcaccggccgttcgccgaaagataaatatatcgtccgtgacgataccactcgcgataccgtgtggtggtctgataaaggcaatggcaagaacgacaacaagccgctctcccaggaaacctggcagcacctgaaaggcctggtgactcaccagctgtcgggcaaacgcctgtttatcgtcgacgccttctgcggcgccaacgccgacacccgcctcagcgtgcgcttcattactgaagtcgcctggcaggcacactttgttaagaacatgttcattcgcccgagcgaagaagaactggcagccttcgagccggactttatcgtcatgaacggcgcgaagtgcaccaacccgcagtggaaagagcagggtctgaactccgaaaacttcgtggctttcaacctgaccgagcgcatccagctcatcggcggcacctggtacggcggcgaaatgaagaaagggatgttctcgatcatgaactacctgctgccgctacagggcatcgcttcgatgcactgctccgctaacgtcggcgaaaaaggcgatgtcgccgtgttcttcggcctctccggcaccggtaaaaccaccctctccaccgacccgaaacgccgcctgattggcgatgacgagcacggatgggatgatgacggcgtatttaacttcgaaggcggctgctacgcgaagaccattaagctgtcggaagccaacgagccggatatctatcacgcgatccgccgcgatgcgctgctggaaaacgtcgtggtacgggctgacggcaccatcgattttgatgacggttcgaagaccgagaacacccgcgtctcctacccgatcgaccatatcgaaaatatcgttaagccagtgtcgaaagccggtcacgccaccaaggttatcttcctgaccgccgacgcctttggcgtattgccgccggtttcacgcctgaccgctgaccagactcagtaccacttcctgtctggctttaccgccaagctggccggtaccgagcgcggcgtcaccgagccgaccccaaccttctccgcctgcttcggcgccgcgttcctgtcgctgcacccgacgcagtacgctgaagtgctggtgaaacgcatgcaggcttccggcgcccaggcttacctggtcaacaccggctggaacggtaccggcaaacgtatctcaattaaagatacccgcgcgattatcgacgctatcctcgacggttcgctggataacgccgaaaccttcactctgccgatgttcaacctgcagatcccaaccgagctgccgggcgtcgatacccatatcctcgacccgcgtaatacctacggttctccggagcagtggcaggagaaagccgatcagctggcgaaactgtttattgagaacttcgagaaatataccgataccccggccggcgctgcgctggttgcggccggtccgaagcgttaa

SEQ ID NO: 111211 - DNA, 1362 bp, Enterobacter aerogenes
atgaagcgcgtgcgtttttcgccgcgaagctcatttgcccgcaccctgttactgatcgtcaccctgctgttcgtcagcctggtgacgacctatctggtggtgctgaatttcgcgatcctgccgagcctgcagcagtttaacaaggtgctggcatacgaagtccgtatgctgatgaccgataaactgcagctggaagacggcacccaactggtggttccgccggcgtttcgccgcgaaatttatcgcgagctggggatttcgctctattccaatgaggcggcggaagacgcaggcctgcgctgggcgcagcattatgaattcttaagccagcagatggcgcaccagcttggcgggccgaccgaagtgcgggttgaggtcaacaaaagctcgccggtggtgtggctgaagacctggctgtcgccgaatatctgggtgcgggtgccgctgactgaaatccatcagggcgatttctcgccgctattccgttatacgctggcgataatgctgctggccattggcggcgcgtggctatttatccgtatccagaaccggccgctggtcgatctggagcacgccgcgctgcaggtcggacgtgggattattccgccgcccctacgcgaatacggcgcgtcggaagtgcgttcggtgacccgcgccttcaaccatatggccgccggggtcaaacagctggcggatgaccgtacgctgctgatggccggggtcagccacgatttgcgcacgccgttgacgcggatccggctggcgacggagatgatgggcgaacaggacggctatcttgccgagtcgatcaataaagatatcgaagagtgcaacgccatcatcgagcagtttattgattacctgcgcaccggccaggagatgccgatggagcttgcggatctcaatgccgttttaggcgaagtgatcgccgctgaaagcggctacgagcgggaaatcgccaccgatctgcaggccggagaaattccgctgcgcctgcatccgctatcgattaaacgcgcgctagccaatatggtggtgaacgccgctcgttacggtaagggctggattaaagtcagcagcggcagcgaagccagccgtgcctggttccaggtggaagatgacggcccgggaattaaaccggaacagcgcgaacatctgttccagccgtttgtgcgtggcgatagcgcccgtagcaccagcggcaccgggctggggctggcgatagtgcagcgtattatcgacaatcataacggtcgcctggagattggcaccagcgaacgcggcggcctgctgatccgcgcctggctaccaattccggtgcatcgcgcgctgtcgccggcgaagcctgcgaaagagagttga

SEQ ID NO: 111212 - DNA, 720 bp, Enterobacter aerogenes
atgcaagagaattataagattctggttgtggatgacgatatgcgcctgcgcgcgctgctggaacgttatctgaccgagcagggcttccaggttcgtagcgtggcgaacgctgaacaaatggatcgcctgctgacccgtgaatccttccacctgatggtgctggatctgatgctgccgggcgaagatggtttatctatctgccgccgtctgcgtagtcagagcaacccgatgccgatcattatggtgacggcgaaaggggaagaagtggatcgtatcgtggggctggaaatcggcgccgatgactacattcctaaaccgtttaacccgcgtgaactgctggcccgtatccgcgccgtgctgcgccgccaggcgaacgagctgccgggcgcgccatcgcaagaagaagcggtgatcgcttttggcaaatttaaactgaaccttggcacccgcgagatgttccgtgaagatgagccgatgccgctcaccagcggtgagttcgcggtattaaaagcgctggttagccacccgcgtgaaccgctgtcccgcgataagctgatgaaccttgcccgcggccgcgagtactcggcgatggagcgttccatcgacgtacaaatttcccgcctgcgccgcatggtggaagaagatccggcgcatccgcgctacatccagaccgtttggggactgggctacgtcttcgtgccggacggttctaaggcatga

SEQ ID NO: 111213 - DNA, 1224 bp, Enterobacter aerogenes
atgctagtgaataaaacggcggagccgctggcggcccgcgccggggcgacccctaatctgcgctgggcatttatgctggtcaccagcctgttctttatgtgggggctctcttacggcctgctcgatgttctcaataaacattttcaggagaccctgcacgtcaccaaagcgcagtccggtttactgcaggcggcctattttggcgcctacttcctggtggcgctgcccgccggctactttatggataaacgcggttataaagcggggatcctggtcggcttgtgcctgtatgcgcttggcgcgctgctgtttgtgccggcggcgagcgtgaatagctttgcgctgttcctgttcgcgctgtttgtgattgcctgtggattaggttgtcttgagaccgcggcgaacccttatgcgacggtacttggcgatagtaaaggcgccgagcggcggttgaatctggcgcagtcgtttaacggactggggcaatttattggcccgctgatcggcggcacgctgttcttttcagctactcagggcgataccggcgatcagagctcggtaaaaatcacctatgtcgctatcgccgtgctggtgctggccatcgcgttgctgttccgccgcacgccgatgccggatattcgcgaagaggagggcagtcagcaagaagcggcgcaggggctgtggcagcatcgccactttaccggcggggttatcgcccagttcttttatgttgccgcgcaggtcggcgtgggtgcgttctttatcaactatgcgaccgagcactggcatggcgtgacaaaccagcacgcttcctatctgctgtcgattgcgatgattagctttatggtcggtcgtttcttcagtacctggctgatggggcgggtgcaggcggcgacgctgctgatggtgtattcgttggtcaatatcgtgctctgcggtctggtgatgatgagcattgatggcgtgtcggtggtggcgctgattgcggtcttcttttttatgtcgattatgttcccgaccattttcgcgctgggcgtaaaaaatatgggcagccataccaaacgcgccagctcgtttatgattatggccatcgtcggcggggcgattatgccttacttcatgggggcgctggccgaccgctacagcaccgcgctggcctatgggttgccgctgttatgcttcctggtggtgctgtggtacggcatgagccaacgacgcgcgtaa

SEQ ID NO: 111214 - DNA, 357 bp, Enterobacter aerogenes
atgagcgttaccgccgcgcggcggcgactgtgtcaggcgttggatttggtcgattcggcggagaaaattgccgaataccagcgtctgcatgaacgtatctggccggaagtcgccgggcatctgcgcgcccatggcgtgctggatatggagatttaccggcttggcacgcggctgtttatggtgatggaggtcgccggggatttcgatggcgaacgctttgctcagcacagcctgaaccacccggtcattcagcgctgggaagcgctgatgtggcaataccaggttcccaccccctggacgccggcaggcgaaaaatgggtgtcgatggagcgcatattctctttgcaggatcaataa

SEQ ID NO: 111215 - DNA, 777 bp, Enterobacter aerogenes
gtggatctatttcttaaagacaaagtggttatcgtcaccggcggcggctcggggatcggcgcggcggtaacgcaactgctggcggaagagggggcggtgccggtcatcgtcactaacgcccagccagagcaggggtttatggataggctgaagcaaatcgcgccgcaaagtgagctgattatcgccgacctgtgccaggaggctgaatgcgccagggcggtgagccaggtgctggcgcgctttggtcgtattgatgcgctggtgaataacgccggagtgaacgatggcgtagggctcgaggccgggcgtgaggcgtttctcggatcgcttgaaaaaaacctgatccactactatcagatggcccacctatgccgcgaagcgttagaggcggcgcggggggctatcgtcaatatcgcctcgaaaaacgcgctcagcggccagggcggcaccagcggctataccgcggcgaaaggggcggtgctggcattaacccgtgaatgggcggtatcgctgcgcgagagcggcgtgcgggtcaacgcggtggtgccggcagaagtgctgacgccgcagtaccagcgctggataaataccttccctgacccgcagcggcagatggcggcgattaaccaacgcatcccgttgggcaaacgcatgaccacgccggaagagatcgccaataccgtggtgtttcttatctcctcgcgtgcgtcgcacactaccgggcagtggttatcggtggatggcgggtatttgcatctcgacagggcgctgtcatga

SEQ ID NO: 111216 - DNA, 852 bp, Enterobacter aerogenes; identical to SEQ ID NO: 87779

SEQ ID NO: 111217 - DNA, 1296 bp, Enterobacter aerogenes; identical to SEQ ID NO: 87778

SEQ ID NO: 111218 - DNA, 852 bp, Enterobacter aerogenes
atgaaattacttcgttttggcaatcccggcagcgagcgtccgggcgtactcgataacgacggccgcctgcgcgacctgtcgcaatatattaacgatctgcgcggcgacgcgctgctgccggaaagtctggcgcgtctgcgccagctggaactctacagcctgccgttggttgaaggcaatccgcgtattggcgcctgcgtcggcggtatcggtaagtttatctgcatcggcctgaactatgccgatcacgccgcggagaccggcgccgatattccacaggagccggtggtattcagcaagtggaccagcgcggtggtcgggcctaacgacaacgtgattatcccgcgcggttcgcaaaagaccgactgggaagtcgaattaggggtagtgattggcaaaggcgggcgctatatcgacgagcgcgacgccatgcagcacgttgctggctactgcgtgattaatgacgtctccgaacgtgaatatcaaattgagcgcggcggcacctgggataagggcaaaggctgcgacacgttcgggccgaccggcccctggctggtgaccgccgatgaaatccccgatcccaacgcgcttaacctgtggctggaggtcgacggcaagcgctatcaggacggcaacacccgcaccatgattttcaaagtgccctatatcatcagctacctgagccgctttatgagcctgcagccgggcgatgtcatctccaccggtacgccgccgggggtgggtatgggccagaaaccgcagccggtttatttacgcgccggccagactattcgtttgggcattgaagggttgggcgaacagcagcagctgaccgtggaggacaaacaatga

SEQ ID NO: 111219 - DNA, 741 bp, Enterobacter aerogenes
atggaactaaccggaaaacgcgttctgattaccgccgcagggcaggggattggcaacagctgcgcgcggctgtttgccgccgccggcgcggaagtgattgccagcgatatcaacattgccggattgagcgatatccccggcgtacggccgctgcagctggatgtcacccgcgcggatgcgattgccgccgccgcggaaacgctgggcccgctggatgtgttgttcaactgcgccggggtggtgcatagcggcaacattcttgaatgtagcgagcgggagtggcagttcgccctcgatctgaacgtcaccgccatgttccacacgattcgcgcctttttgccggcgatgatcgcccgcggcggcggctcgattatcaacatgtcatcggtggcttccagcgtgaaaggagtaccaaaccgcttcgcctacagcgccagtaaagcggcggtcattggcctgacccgctcggtagcggcggatttcgtcacccagggcattcgttgtaatgcgatttgtccgggtaccgtcgattcaccttccctacgcggacgtattgccgagcaggcgcgcgagcaggggctgagcgaagaggcggtttatgaggcgtttgtcgcccgccagcccattggccgcatcggcaagccggaagagatcgcccaactggcgctgtacctggcttccgacgccagcgcctacaccaccggcacggtgcagattattgacggcggttggagcaactaa

SEQ ID NO: 111220 - DNA, 759 bp, Enterobacter aerogenes
atgccgattaccagactggaaaacccaaggatttacagacagatagcagaccaactcaagcgattaattgagaacaacgaatttccgcccggcagtcgtcttccgtctgagcgagatttagcccagcaattgaacgtcagccgcgcatcggtacgcgaagcgctgattgcgttggaggtgattggcctggtggacgtgcgcgtcggcaacggggtaatcgtcaaatcgcaaacgccgctcgtcgccaccaaagagccggtgatggcgcaggccggtcgcgaccagtggacggagatcgacgacgaactcaacatagacctcgattttaacgccgaactaccgcccttttctctgctgcaggcgcgcctgttaatcgaaccggaaaccgccgcgctggcggcacgccacgccagccccgaagagctggccgctatccgcgaggcctttgagcaaaactgtcgcgataaccgtgccggttcaaccacccatcccggcgaccgcctgttccatatccgtatcgctcaggccagcggcaacccggcgtacgcgtttatcatcggccacctgctcggccaccgctacggcagtatgttccgcatgctgcagcgccattacaccccggacgatatgccgcatcgctcggaacaggagcatcgcgcgatccttgaagccattgaggcccacgacgtacgtgcggcaaagaaagcaatgaaaaatcatattgatcaggtgattaccatttttacccgcagccagtag

SEQ ID NO: 111221 - DNA, 474 bp, Enterobacter aerogenes
atgaaaacgccgctgatcacccgtgaagggtatgaaaaactgaagcaagagatggattacttgtggcgtacagagcgcccggaagtcaccaagaaagtgacctgggcggcgagtcttggcgaccgcagtgaaaacgccgattatcagtacaataaaaagcgcctgcgcgaaattgaccgccgggtgcgttatctcaccaagtgtctggaaaatctcaaaatcgtcgattattccccgcagcaggaaggcaaagtgttcttcggcgcgtgggtggagatcgagaacgacgatggcgataccaagcgctttcgcattgtcggctacgatgaaatcttcggccgcaaagactatatctccatcgattcgccaatggcgcgcgctttactgaagaaagaggtgggcgacctggctatcgttaacactccggcgggcgaagccagctggtacgtcaatgaaattgaatacgtgaaatag

SEQ ID NO: 111222 - DNA, 2331 bp, Enterobacter aerogenes
atgatgaatgattcgctctgccgcattattgcgggtgaacttcaggccagagccgaacaggtagaagctgccgttcgcctgcttgatgaagggaacaccgtgccgtttattgcacgttatcgtaaggaagtcaccggcggtctggatgacacgcagctgcgtaatctggaaactcgcctcgggtatctgcgcgaactggaagaccgccgccaggcgatcctcaaatcgatcggcgaacagggcaagctcagcgaagcgctggaaaaagccatcaacgccaccctcagcaaaaccgagctcgaagatctctacctgccgtacaaacccaaacgccgcacccgcgggcaaatcgccattgaagccggtctcgaaccgctggccgatctgctgtggaatgagccttcccacgatccggaaaccgaagcggcaaactatatcgatgccgataaaggcgtggcggatagcaaagccgctctcgacggcgcgcgctatatcctgatggaacgcttctcggaagacgccgccctgctggcgaaagtacgtgattatctgtggaaaaacgcccatctggtggccagcgtcgtcagcggcaaggaagaagaaggcgctaaattccgcgattactttgaccaccatgaaccgatcgcttccgtgccgtcgcaccgcgcgctggcgatgttccgcgggcgcaatgagggcgtgctgcagctgtctctcaacgccgacccgcagtttgatgagccgccgaaagagagccactgcgagcagatcattatcgatcatctcggcctgcgcctgaataacgccccggcggacagctggcgcaaaggcgtcgtcagctggacctggcgcatcaaggtgctgatgcacctcgaaaccgaattaatgggcaccgtgcgcgaacgcgcggaagacgaagcgattaacgtattcgcccgtaatctccatgacctgctgatggccgcacctgccggcctgcgcgccaccatgggtcttgacccgggcctgcgtaccggcgtcaaagtggcggtagtcgacggcaccggcaaactggtggccaccgataccatctacccgcataccggccaggcggctaaagccgccgtcgtggtggcggcgctgtgcgaaaaacataacgttgagctggtggctatcggcaacggtaccgcttcccgcgagaccgagcgtttcttcctcgacgtgcaaaaacagttcccgaaagtgaccgcccagaaggtgatcgtcagcgaagccggcgcgtcggtctactcggcttccgaactggcggcgcaggagttcccggacctcgatgtttccctacgcggcgcggtctctatcgcccgccgtctgcaggatccgctggccgagctggtgaaaatcgatccgaaatcaatcggcgtcggccagtatcagcatgacgttagccagacgcagctggcgcgtaagctggatgcggtagtagaagactgcgtaaacgccgttggcgtcgaccttaacaccgcctcggtggcgctgttgacccgcgtcgcgggcctgacccgtatgatggcgcagaatatcgtcgcctggcgcgacgagaacggccagttccacaaccgccagcagttgctgaaggtaagccgtctggggccaaaagcctttgaacagtgcgccggcttcctgcgcattaaccacggcgacaacccgctggacgcctcgaccgttcacccggaagcctacccggtggtcgagcgtattctggccgctacccagcaggcgctgaaagatctgatgggcaacagcagcgagctgcgcaacctgaaagcctctgattttaccgatgataagttcggggtgccgacggtatccgatatcatcaaagagctggaaaaaccgggccgcgatccgcgccctgagtttaaaaccgcccagttcgccgacggcgttgagacgatgaacgacctgctgccggggatgattctggaaggtgcggtcaccaacgtcaccaactttggcgccttcgtcgatatcggcgtgcaccaggatggcctggtccacatctcttcgctgtcgaataagttcgttgaagacccgcataccgtggtcaaagcgggcgatatcgtcaaagtgaaggtgatggaagtggacctgccgcgtaaacgcatcgcgttaacgatgcgcctcgatgaacaaccgggcgacagcaacacgcgccgcggcggcggcaacgatcgcccgcagggtaaccgcccggcggcaaaagcggcgaagccgcgcggtcgcgatgctcagccagccggcaacagcgcgatgatggatgcgctggccgccgcgatgggcaaaaaacgctaa

SEQ ID NO: 111223 - DNA, 228 bp, Enterobacter aerogenes
atgcaattcactcctgatagtgcgtggaaaatcaccggtttttctcgcgatattagcccggcttatcggcagaaactgctctccctgggaatgttgcccggctcttcgtttcatgtcgtgcgcgtggcgccgttgggcgatcctattcatattgagacccggcgcgtgagcctggtattacgtaaaaaagacctcgcgttaattgaactggaagcggttgcgcaataa

SEQ ID NO: 111224 - DNA, 2319 bp, Enterobacter aerogenes
atgaaaaaattaaccgttggtttaattggtaatcctaattccggcaaaacaacgttatttaatcagctaaccggcgcgcgccagcgggtgggtaactgggcgggggtcaccgttgagcgtaaagaaggcgccttcaccaccaccgaccaccaggttaccctggttgacctgccgggcacctattcgctgaccaccatctcctcgcaaacatcgctcgatgaacaaattgcctgtcactatattctcagcggcgatgccgacctgctgattaacgtcatcgacgcctcgaacctggaacgtaacctctatctgactctgcaactgctggagttgggtattccctgcgtcgtcgcgctaaacatgctcgatattgccgaaaaacagcaaatccgcatcgacgtcgacgcgctggcggcccgcctcggctgcccggtgattccgctggtctccacccgcggccgcggtattgaagcgctgaaaatggcgcttgaccgccatgagcaaaatcagccgctggaactggtgcactatccgcaatccctgcagcgcgaagccgatatgctggcgcaggcgatgcctgctgatatgccgctgcgtcagcgccgctggcttgggctgcagatgctggaaggcgatatttacagccgcgcctttgccggcaacgccgccgataaactggatctggcgctggccaacctgagcggcgagatggacgatccggcgctctatatcgccgatgcccgctatcaaagtatcgccgcggtatgcgatgccgtcagtaacaccctgaccgctgagccgagccggttcaccacggcgatggataaaattatccttaaccgcttcctcggcttaccgatcttcctgttcgtgatgtacctgatgttcctgctggctatcaacatcggcggcgccctgcagccgattttcgacgccggttcggtggctattttcattcacggcatccagtggctgggctacactctgcacttcccggactggctgaccgtattcctcgcgcaagggctgggcggcggtatcaacaccgtgctgccgctggtgccgcaaatcggcatgatgtacctgttcctctccttccttgaggactccgggtatatggcgcgcgcggccttcgtaatggaccgcctgatgcaggcgttaggcctgccggggaaatccttcgtgccgctgatcgttggttttggctgtaacgtgccttccgttatgggcgcccgtacgctggatgcgccgcgtgaacggctgatgactatcatgatggcgccgtttatgtcctgcggcgcccgattggcgattttcgcggtctttgccgccgccttcttcggccagaacggcgcgctggcggtcttctcactgtacgtactgggcatcgtgatggcgatcctcaccggcctgatgctcaaatacaccattatgcgcggtgaagcctcgccgttcgtgatggagctgccggtgtatcacgtaccgcacatcaagagcctggttatccagacctggcagcgcctgaaaggcttcgtcctgcgcgccggtaaggtcattgtgattgtcagtattttcctcagcgcgctgaacagcttctcgcttagcggcaaagtggtcgataacatcaacgactcggcgctggcttcggttagccgagtgatcaccccagtgtttaagccgattggcgtgcatgaagataactggcaggcaaccgtcggcctgtttaccggcgcgatggcgaaagaagtggtggtcggtacgttgaacaccctctacaccgcggaagatatccagaatgaagagtttaacccacaggagtttagccttggcgacgagctgttagccgccgtcgatgaaacctggcaggggctgaaagacacctttagcctgagcgtgctggcgaacccgattgaagcaagcaaaggcgatggcgaaatggaaaccggcgccatgggggtgatgggcagtaaattcggcagcgccgccgccgcgtacagctacctgatcttcgtcctgctctatattccatgcatttccgtgatgggagcgattgcccgtgagtccagccgcggttggatgatgttctcggtgttgtggggattgaatatcgcctactcgctgtcgacgctgtactaccagaccgtgagctttagccaacacccgcgctacagcctggtatgcattatggcggtaattctgtttaacgtcgtggtctttggcctgttgcgtcgggcgcgtagccgggtggatgtttccctgctgacgacgcgtaaaaccccgacgtcctgctgccagagtccggccggcgactgccactaa

SEQ ID NO: 111225 - DNA, 237 bp, Enterobacter aerogenes
atggcatcgttaattgacgttcgcgatatgctggccctgcaggggcgcatggaagccgctcagctgagcgcccgcctgcatacgccacggccgctgatcgacgccatgttaagccgcctggaagcgatgggaaaagcggtcaagatgaccgaagatgccgatggctgcctttccggcagttgtaaaagctgcccggaagggaaagcctgtctgcgggagtggtggtctttgcgctga

SEQ ID NO: 111226 - DNA, 270 bp, Enterobacter aerogenes
atgaaacttgttacaggtattgttgcatctctggtgataggctccctctcttttggcgcgttcgcggcgaaagagattcaaaaagatgaagtcgcgaagatgaatctgaccaaggtcggtagcatcacgacttcccgtaccacgtcgccgatggacgcgaagctcgatctgtcgaagaaagcggatgagttgggtggtaagtacttcgtagtgattgccggcgagaagaacgagaagacggttcacgcgaacgccgacgtgtataagtaa

SEQ ID NO: 111227 - DNA, 783 bp, Enterobacter aerogenes
atgaatgacatctggtggcaaaccacgggcgaaggaaattgtcatcttgtgctgctgcacggctgggggctgaatgccaacgtatgggattgcatcacgccggaactggctacgcattttacccttcacctggtggatttaccgggctatggccgcagcggtggttttggcgccttaacgcttgaagagatggcgcagcaggtcgttgaaaaagcgccggagcaggctatctggcttggctggagcctgggcgggctggtagcgagcctggtggcgctgcagcacccgcaacgcgtgcaggcgctggtgaccgtcgcttcttcgccgtgttttggcgcgcgcgaccagtggccggggattaaaccggaagtgctgagcggcttccagcaacagctgagtgaagatttccagcgtaccgtcgagcgttttctcgccctgcaaaccatgggcaccgaaagcgcgcgccaggacgcccgggcgctgaaaagcaccgttctgtcgctgccgatgccgcctgctgaggttctcaacggcgggctggaaatcctcaaaaccgccgatttgcgtcaaccgctcgccgcgctgaccatgccgtttttgcgcctctatggccgactggatgggctggtgccgcgtaaaatcgttcctctgttggatgagctgtggccgcaaagtgagtctgttgtcttcgaaaaggcggcccacgcaccgtttatttcgcatccccagccattctgtgagcctctcatcgcgctgaaaaaccggctgaataattatttttag

SEQ ID NO: 111228 - DNA, 675 bp, Enterobacter aerogenes; identical to SEQ ID NO: 87767

SEQ ID NO: 111229 - DNA, 576 bp, Enterobacter aerogenes
atgatccgtatttccgatgctgcacaagcgcactttgccaaactgctggcaaatcaggaagaagggacgcaaattcgcgtatttgtgattaatcccggcaccccaaacgctgagtgcggcgtatcctattgcccaccggatgcggtggaagacaccgacacggcgctgaaatttgaacagctgaccgcgtatgttgatgaactcagcgcaccttatctggaagatgctgaaatcgacttcgtcactgaccagctcggttcccagctgacgctgaaagcgcctaacgccaaaatgcgtaaggtttccgacgatgccccgctgatggagcgcgtggagtacctgctgcagtcgcagatcaacccacagctggccggtcacggcggtcgcgtttcgctgatggaaatcaccgaagacggtctggctatcctgcagttcggtggcggttgcaacggctgctcaatggtcgatgtgaccctgaaagaagggatcgaaaagcagctgctgaacgaattcccggagctgaaaggcgtgcgcgatctgaccgaacaccagcgcggcgagcactcctactactaa

SEQ ID NO: 111230 - DNA, 1317 bp, Enterobacter aerogenes
atgccattagtcatcgtagctatcggggttgccctgttattgttgctgatgatccgtttcaaaatgaacggcttcatcgctctggttctggtggcgctcgccgtcggattaatgcagggtatgcctctggataaagtcatcgtatccatcaaaaacggcgtcgggggcacgctcggcagcctcgcactgatcatgggcttcggcgctatgctcggtaaaatgctggcggactgcggcggcgcgcagcgtatcgccactaccctgattgataaatttggtaaaaaacatattcaatgggccgttgtactgaccggtttcaccgtcggtttcgccctgttctatgaagtcggtttcgtgctgatgctgccgctggtctttaccatcgccgcttccgcgcgtatcccgctgctgtacgttggcgtaccgatggccgcggcgctctccgtcacccacggtttcctgccgccgcacccgggcccgaccgctatcgcgacaattttccacgccgatatgggcaaaacgctgctctacggtacgattctggctatcccgacggttattctcgccggcccggttttcgcccgttttctgaaaggtatcgataagccgatcccggaaggcctgcacaacccgaaaaccttcactgaagaagagatgccgggctttggcgtcagcgtctggacctctctggtgccggtgatcctgatggcgatgcgcgccgtcgccgagatggttctgccgaagggccacgccttcctgccggtggccgagttcttcggcgatccggtgatggcgaccctgattgcggtgctgatcgcgctgttcactttcggcctcaatcgcggccgttccatggagcagatcaacgatacgctgacctcctctatcaaaatcattgccatgatgctgttaatcatcggcggcggcggcgcctttaagcaggtgctggtggatagcggcatggataagtacatcgcttctatcatgcacgaatccaatatgtcaccgctgtttatggcgtggtctatcgctgcggtgctgcgtattgcgctgggttcggctaccgttgccgctatcaccgcaggtggtatcgccgcgccgctgattgccaccaccggcgttagcccggagctaatggttatcgccgtgggttccggtagcgttatcttctcccacgtgaacgatccaggtttctggctgttcaaagagtatttcaacctgaccattggcgagaccatcaagtcctggtcggtactggaaaccatcatttccgtgtgcggcctggttggttgtctgctgctggggatggtggtgtaa

SEQ ID NO: 111231 - DNA, 2076 bp, Enterobacter aerogenes
atggagaataaacgccttgataatgccgcgctggcggcggggatcagccccagctatatcaacgcgcacggccagccgcagtcgatcgcggcggccaccaaacaacgtttgctggatgctatgcatcgtacttctactgccgcgaaagcggcagtagaaccgctgcccagcgtcaaggtttttactcacggtaaaaaaatgcagttgccggtagcgggaagcggcgcgtttcactggctgctgacgaccgaagaaggtaagcagtatcagggtgagacgcgcggcggcgaaacgctcgctttgcctgggcgattgccgacgggctatcacaccctgaccctcacgcgggacggcgaacgctggcactgccgggcgatcgtcgccccggcgcgttgctacgaaccgcaggcgctaaaagagggcaaaaagctatggggcgcctgcgtccagctctacaccctacgttctgagaataactggggcatcggcgacttcggcgatctacgcgccatgctgccggaaatcgcccgtcgcggcggcgcgtttatcggcctcaacccgattcacgcgctctatccggcgaacccggagagcgccagtccgtacagtccgtcctcgcgccgctggcttaacgtcatctatatcgacgttaacgcggtggaggatttccagcgtagccctgccgcgcaggcatggtggcagcttgcggaaacccagcaggccttgaaggccgcgcggcagaccgctgatgtcgactataccgctgtcaccgcgctgaagctgaccgcgctgcgtctggcgtgggccgagttttctacgcgtgaagatgagcaaatggcggagttccgtcagttcgtgctgcgcgagggcgaaagtctctactggcaggcggcgtttgatgcgctgcatgcctggcaaagccgtcaggatccgatgcgctggggctggccggcatggccggaagcgtatcagagcacgagcagcccgcaggtgaaaaccttctgtgcggagcatgccgatgaggtgagcttttatctatggctgcagtggctggcatatacgcagttcgccgcctgttggcacaccagccagcaggacgggatgccgattggcctgtatcgcgatctggcggtcggcgtcgccgaaggcggatcggagacgtggtgcgatcgcgagctgtattgcctcaaggcttccgtcggcgcgccgccggatatcctcggcccgctgggacagaactggggcctgccgccgatggatccgcatgtaatggttgcccgcgcctacgagccgtttatcgaactgctacgggcgaatatgcaaaactgcggcgcattgcgtattgaccacgtgatgtcggtgctgcgtttgtggtggataccgtatggcgaaaccgccgaccatggcgcctatgtgcagtatcccgtggatgacctgctggcgatcctggcgctggagagccagcggcaccgctgcatggtcattggcgaagacctcggtaccgtaccggttgaaatcgtcggcaagctgcgcaaaagcggtgtttactcgtataaagtgctctatttcgaaaatggccctgataaaacgttccgcgcgccgaaggcttatccacagcagtcgatggcggtcgcaacgacccacgatctcccgacgctgcgcggctattgggagagcggtgatttgacgctcgggaagacgctgggtctgtatccggatgaagtggtgctgcgcggcttatatgccgatcgcgaacaagcaaagcaggggttgctggatgcgctgcatcggcacggctgtttgccgaagcgcgccggacataaagcctcgctgatggcgatgacctcaacgctcaatcgcgggatgcagcgctacatcgccgacagcaacagcgccctgcttgggctgcagccggaagattggctggagatggcttcgccagtcaacatcccgggcaccagtaccgagtatcccaactggcggcgtaagcttagtgtgacgctcgagcagatgtttgccgatgcgcaggtgaataagctgattaaagatctggataagcgccgcaaagcccgctaa

SEQ ID NO: 111232 - DNA, 2391 bp, Enterobacter aerogenes
atgtcacagacttcttttaaccaggctcagtttcaggctgcactgacgcgtcagtggcagcgtttcggtttatcgtcagccgcagagatgacccaacgccagtggtggcgcgcggtcagcggcgcgctggcggagcttttggcggcgcaaccggcggcggaagccgttaaaggacagcgccacgttaactacatttcgatggagttcctgatcggtcgcctgaccggtaataacctgctcaatctgggctggtatgaaggagtgagcgagacgctgaaggcgtacgacatccagttgaccgacctgctggaagaagagaccgatccggcgctgggcaacggcggcctgggccgtttggcggcctgcttcctggattctatggccaccgtcggccagtcggcgaccggttacggcctgaactaccagtacggtctgttccgtcaatccttcgctgacggtcagcagatggaagcgccggatgactggggacgcggcagctatccgtggttccgccacaacgaagcgctggatgtgcaggtgggcatcggcggtaaagtcagcaaaagcggcgaatggcaaccggctttcgtgattaccggcgaagcctgggatttaccggtgcttggctatcgcaataacgtcgcgcagccgctgcgcctgtggcaggcgaaacatgcccatccgttcaacctgaccaaattcaacgacggcgatttcctgcgcgcggagcagcaaggtatcgacgcggaaaaattgaccaaggtgctgtatccgaatgacaaccatctggcggggaaaaaactgcgcctgatgcagcagtacttccagtgcgcctgctcggtggccgatattctgcgtcgtcaccatctggctggccgcaagctgcatgagctggcggattatgaagtgatccagttgaacgacacccacccgaccatcgccatcccggagctgctgcgcgtgctgcttgatgagcaccagatgagctgggacgatgcgtgggccatcaccagcaaaaccttcgcttacaccaaccatactctgatgccggaagcgctggagtgctgggatgagaagctggtcaaggcgctgctgccgcgccacatgcagataatcaaagagattaacgacagatttaaactgctggtggagaaaacctggccgggcgataagcaggtgtgggcgaagctggcggtggtccatgataaacaggttcgcatggccaacatgtgcgtggtgagcggctttgcggtgaacggcgtcgcggcgctgcactccgatttggtggtgaaggatctgttcccggaatatcaccagctgtggccgaacaaattccataacgtgaccaacggcattacgccgcgtcgctggattaaacagtgtaatccggcgctggctgccctgcttgataagacgctgaagaaagagtgggccaacgatctcgaccagctgatcaaactggagaagtacgccgacgatgccaaattccgtcaggtttatcgtgacattaagcaggcgaataaagtgcgtctcgctgagttcgtgaagcggcgtaccggtatcgacatcaacccgcaggcgatttttgatatccagattaagcgcctgcacgaatacaaacgccagcacctcaacctgctgaatattctggcgcagtataaagagatccgcgaaaacccgcaggccgaccgcgtaccgcgcgtcttcctttttggcgctaaagccgcgccgggctactacctggcgaagaatattattctggcgatcaacaaggtggccgaggcgatcaataacgatccgctggtgggagataagctgaaagtggtcttcctgccggattactgcgtatcggcggcggaaatgctgatcccggcggcggacgtctccgagcagatttccacggcgggtaaagaggcctctggtaccggcaacatgaagctggcgctgaacggcgcactgaccgtcggcactcttgacggcgccaacgttgaaatcgccgagcaggttggcgaggacaatatctttatcttcggccataccgtggaagaagttaaggcgttgaaggcgaaaggctacgatccgctgaaatggcgcaagaaagataagctgctggacgcggtgctgaaagagctggaaagcggtaaatatagcggcggcgacaaacacgcctttgatcagatgctgcatagcctgctgcaaggcggcgatccgtacctggtgctggctgactttagcgcttacgtcgcggcgcagaagcaggtagacgaactgtatcgcgaccaggaagcctggacccgtgcggcgatcctcaacaccgcgcgctgcggcatgttcagctccgaccgctctattcgtgattatcagcaacgtatctggcaggcaaaacgctaa

SEQ ID NO: 111233 - DNA, 2706 bp, Enterobacter aerogenes
atgttgattccgtcaaaattaagtcgtccatcccgtcttgaacacactgtggttcgcgaacggttgctggcgaaactttccggcgcgaacaattatcgtctcgcgttggtgaccagcccggcaggttacggcaaaaccacgctcgtttcgcagtgggcttcgggtaagcatgaccttggctggttttcgctcgatgaaggcgataatcaacaagagcgcttcgccagctatctgattgcggcgattcaacaggcgacaggcggccactgcgccgccagcgaagccatggtgcaaaagcgccagtacgccagcctgccgtcgctgtttgcgcagctgtttattgagcttgccgactggcagcgtccgctgtacctggtcattgatgattatcacctgattaccaatccggtgatccacgacgccatgcgcttcttcttgcgccatcagccagagaccatgacgctggtagtgctgtcgcgcaacctgccgcagttggggatcgccaatctgcgggtgcgcgagcagttactggaaatcggcagccaacagctggcttttactcatcaggaggcgaaacagttctttgactgccgcctcgcctcccccattgaagccgatgacagcagtcgcctgtgcgatgacgtcgccggctgggccaccgccctgcagctcatcgccctctccgcccggcagaaaaacacctcagcccagcactccgcccgtcgtctcgccgggattaacgccagccacctttccgactatctggtcgatgaagtgctggataacgtcgatgcccgtacccgcagcttcttgttaaaaagctcgctgctgcgctcgatgaatgacgcgcttatcgtccgcgtcaccggcgaagagaacggccagatgcaactggaagagatcgaacgtcaggggctgttcctgcaccggatggatgactccggcgagtggttccgctatcacccgctattcggcaacttcctgcgccagcgctgtcagtgggaaatggccaccgagctaccggaaattcaccgcgccgccgccgaagcgtggatggcgcagggattccccaccgaagccatccatcatgcgcttgccgctggcgatgccgccatgctgcgcgatattttgctcaaccacgcctggggcatgttcaaccacagcgagctgggtctgctggaacaatcgctggcggcgctgccgtggtcgaacctgctggaaaatccacggctgatcctgctgcaggcctggctgatgcagagccagcatcgctatagcgaagtgaataccctgctggcccgcgccgaacaggagatggatgtcgaaatggataccgcgatgcacggcgatttcaacgccctgcgcgcgcaggtcgctatcaacgccggcgatcaggacgaagccgagcgtctggcaatggtggcgctggatgaactaccgctggcgagctattacagccgcatcgtcgccacttccgttcacggcgaagtgctgcactgcaaaggccacctgagcaaatcgctggcggtgatgcagcaaacagaacagatggctcgccgtcatgacgtctggcactacgccctgtggagcatgatccagcagagcgagattctgtttgcccagggcttcctgcaggcggcatgggagattcaggataaagctttccagcttatccgcgatcagcatcttgaacagctgccgatgcatgagttcctgttgcgcatccgcgcgcagctgctgtgggcgtgggcgcgtcttgatgaagcagaagaaagcgcccgcagcggcatcgctgtgttggcaaactaccagccgcagcagcagttgcagtgcctggcgttgatggtgcagtgctcgctggcgcgcggcgatctcgacaacgcccgcagcttattaaaccgcctggaaaatctgctgggcaacggccactatcacagcgattgggtctctaacgccgacaaagtgcgggtgatctactggcagatgaccggtgataaaaccgcagcggccaactggctgcgccagacgccgaaacctgaattcgccaataaccacttcctgcaaagccagtggcgcaacattgcccgcgcacagatccttctcggtgattttgattccgccgaaatggtgctggaagagttaaatgaaaatgcccgctcgctgcggctgatgagcgatatcaaccgtaacctgctactgttgaaccagctgtactggcaggcggagcgcaagggcgaggcgcaaaaagtgttaatggaagctttaaccctcgctaaccgcaccggctttatcaaccacttcgtgattgaaggcgaagccatggcccagcagctgcgccaactgattcaactgaatacgctgccggagctggagcagcaccgcgcccagcgtatcctgcgcgatattaaccagcatcatcgacataaattcgcccatttcgacgagagcttcgtcgaacggctgctgaaccacccggaagtgccggagcttatccgcaccagtccgctgacccagcgcgagtggcaggtgttagggcttatctattccggttacagcaacgagcagatcgccggcgaactggatgtcgcggccaccacgattaaaacgcatattcgcaatctatatcagaaactgggcgtcgcgcaccgccaggatgccgttcagcatgcccagcggttgctcaaaatgatgggatacggcgtataa

SEQ ID NO: 111234 - DNA, 759 bp, Enterobacter aerogenes
atgaaacaaacacaacgtcatgacgcgattatcgagctggtaaaaaaacagggatacgtcagtaccgaagagctggtggagcagtttgccgtcagcccgcagactattcgtcgcgatctgaatgatttagcggaacaaaaaatgatcctccgccaccacggcggcgcggcgatgccttcaagctcggtcaacacctcgtggcacgacaggaaagcgacccagacggcggaaaaagagcgcatcgcgcggaaagtggcgagcgaaatacccgacggcgcaaccctgtttatcgacattggcacgacgccggaagcagtggcccatgcgttgctcgatcataatgacctgcggattgtgaccaacaatctcaacgtcgcgaatacgctgatggtgaaagacgattttcgcattatcctcgccggtggcgagctgcgtagccgcgacggcgggatcatcggcgaagcgacgctcgattttatctcccagttccgcctcgacttcggcattcttggtattagcggtattgatagcgacggctcgctgctggagtttgattaccatgaagtgcgcaccaagcgggcgattatcgaaaactcgcgccacgtgatgctggtggtggatcactcgaagtttggccgtaatgcgatggtgaacatgggcagcattagtatggtcgatgcggtttataccgatatcatgccgcccgcaggcgtgctgaaggtgattaaagacaacaacctgcagctggagctgtgctaa

SEQ ID NO: 111235 - DNA, 831 bp, Enterobacter aerogenes
atgttaatgattacctcttttgccaacccgcgcgtggcccaggcgtttgtcgactatatggcgacgcaaggggtcatcctgactatccaacagcacacgcagagcgatgtctggctggctgatgaaacccaggccgcgcgggtgcaggccgagctggcccgttttctcgaaaacccggccgacccgcgctatctcgccgccagctggcaatcggggcataccaatagcggattgcattatcaacgcttcccgtttttagctaccctgcgtaacaacgccgggccgtttacgtgggcgattttgctggcctgtatcctggtcttcatactgcaaaacgttctgggcgatcagacgatgatgatctggcttgcctggccctacgatccttcgctgaaattcgaagcctggcgctatcttacccatgctttcatgcacttctcgctgatgcatattctgtttaacctgctatggtggtggtacctcggcggtgcggtggagaagcgcatcggtagcggcaaactggtggtgattaccattatcagcgctctgctgagcggattcgtccagcatcaggttagcggcccgtggttcggcggtttgtcgggagtggtctatgcattaatgggctatgtctggctgcgcggcgagcgcgacccgcagagcggtatttatctgcaacgcggtctgatcctcttctctttagtgtggttagtggctggatggtttgatgttttcggcatgtcgatcgccaatggcgcgcacgtggcgggcctggcagtcgggctggcgatggcgcttgtcgatacgctaaatgtgcgaaaacgaacgtag

SEQ ID NO: 111236 - DNA, 330 bp, Enterobacter aerogenes
atggaacaatttgaatgtatcaatgtagaagaagcgcatcagaaactgcatcagcagaaggcggtgctggtcgatatccgcgacccgcaaagctatgccatggggcacacgccgggcgcgtttcatctgaccaacgataccctgggcgcttttatgcgcgataacgactttgagacgccggtgatggtgatgtgctaccacggcaacagcagtaaaggcgccgcgcagtatttactgcagcagggcttcgagaacgtctacagcgtcgacggcggttttgacgcctggcatcgtcatttcccggcggaagttgcacacggctcgctataa

SEQ ID NO: 111237 - DNA, 1509 bp, Enterobacter aerogenes
gtggaaatcaaagatctgattgtgataggcggaggcatcaacggtgccggtatcgcggcagacgccgccgggcgcggtttatccgtgctgatgctggaagcgagagaccttgcctgcgccacctcgagcgccagctcaaaactgattcacggcggcctgcgctacctggaacactacgaattccgcctggtcagcgaagcgctggcggagcgcgaggtgttattaaaaatggcgccgcatttggccttcccgatgcgctttcgcttaccacatcgcccgcatctgcgcccggcgtggatgattcgtatcggtctgtttttatacgatcacctcggcaaacgcaccagcctgccgggctcgaccggtttgcgctttggcgcggaatcggtacttaagccggaaatcgtgcgcggtttcgaatattccgactgctgggtcgacgatgcgcgtctggttcttgccaacgcccagatggtggtacgtaaaggcggcgaggttcgcacccgcacccgcgctatctcggcaaaacgcgaaaacggcctgtgggtggtggaagcggaagatatcgatagcggcgaaaaattcacctggcacgcgcgcggcctggttaacgccaccggcccgtgggtgaaacatttcttcgacgaaggcatgcatctgcgctcgccgtatggcatccgcctgatcaaaggcagccatatcgtggtgccgcgcgtgcacacccagaagcaggcctatattctgcaaaacgaagataaacgtatcgtgtttgtcatcccgtggatggatgagttctcgattatcggcaccaccgacgtcgagtacaacggcgatccgaaagaggtggcgatcgatgataaagagatcaactacctgctgaacgtctacaacgcgcactttaaaaagacgctgtcgcgcgacgatatcgtctggacctactccggcgtgcgtccgctgtgcgacgatgaatccgactcgccgcaggcgattacccgcgactataccctcgatattcacgatgagaacggtcaggcgccgctgctgtcggtattcggcggcaagctcaccacctaccgtaaactggcggaacatgcgctggaaaaactgacgccgtattatcaggggattggcccggcgtggaccaaaaccgccgttctgcccggcggcgatatcggcggcgaccgcgacgactacgcggcgaaactgcgccgtcgcttcgcgtttatcagcgaatcaatggcccgccactacgcccgaacctacggtagcaacagcgagtggatccttggcgaagcgacttcgcttgccgatctgggagaagattttggccacgagttttatgaagccgagctgaagtacctggtcgaacacgagtgggttcgcagcctggatgacgctatctggcgccgtaccaaacaggggatgtggctgaatgccgagcagcaggcgcgtatcagcgagtggctggcgcaacatacgggaaagtctgaactgtcgttagcgtcctga

SEQ ID NO: 111238 - DNA, 2448 bp, Enterobacter aerogenes
atgaatgcaccctttagttatgcatcacccacgctgagcgttgaggcgttaaagcattctatcgcgtataagctgatgtttatcatcggcaaagatccggcgatcgccaacaaacacgaatggctgaacgccaccctgttcgccgttcgcgaccgcatggtcgagcgctggctgcgttcaaaccgcgcccagctgtcgcaggaagtgcggcaggtttactatctgtcgatggagtttttgattggccgcaccctctctaacgcgctgctgtcgttagggatttatgaagatgtgaataatgcgctggccgatatggggctcgatctggaagagcttattgatgaagaaaacgaccccggtttaggcaacggcggtttagggcgcctggccgcctgcttcctcgattctctggcgacactgggcctgccgggccgcggctacggtatccgctacgactatgggatgtttaagcagaacattgtcgacgggcggcagaaagagtcgccggattactggctggagtacggcaacccgtgggagttcgaacggcacaatacgcgctataaagtgcgtttcggcggccgcgtgcagcaggaagggaaaaatacccgctggatagagaccgaagagattatcgccgaagcctacgatcagattatccccggtttcgataccgatgccactaacaccctgcgtctgtggagcgcgcaggccagtagcgaaatcaacctcggtaaattcaaccagggcgactactttgcggcggtggaagataagaaccactccgagaacgtttcgcgggtgctgtacccggatgactccacctattccgggcgcgagctgcgcctgcgtcaggagtatttcctggtctcggcgacggtgcaggatatcctcagccgccactaccagctgcaccgcacctacgacaatctggcggcgaaaatcgccattcacctcaatgacacccacccggtgctgtcgattcctgagttgatgcgtctgctgatcgatgagcacaaatttagctgggatgaagccttcgaggtgacctgccaggtcttctcctataccaaccatacgttgatgagcgaagcgctggagacctggccggtcgatatgctggggaaaatcctgccgcgccatctgcagattatcttcgagattaacgattacttcctcaagacgctgcaggagcagtatcccaacgataccgcgctgctcagccgtacctcgatcattgatgaatccaatggtcgccgggtgcgtatggcgtggctggcggttgtcgtcagccataaagtcaacggcgtgtcagagctgcattctcgcttaatggtcgagtcgctgtttgccgagtttgcgaagattttcccgatgcgctttaccaacgtcaccaacggcgtcacgccgcggcgctggctggcgttggcgaacccgccgctgtcgcaggtgctggatgagaatatcggccacacctggcgcaccgacttaagccaactaagcgatctgcagcagcatattgattatccgacggtgaaccaggcggtgcgccgcgccaagcttgagaataagcagcggctggcgaactatatcgcccagcagttgaacgtggtggtcaatcctaaggcgctgtttgatgtgcagatcaaacgcatccacgaatataaacgccagctgatgaatatcctgcacgtcatcacccgctacaatcggatcaaagccgatccgcaggcggagtgggtgccgcgggtgaatatcttcgccggcaaggccgcgtcggcttactacatggcgaagcatattattcatctgatcaacgatgtagcggcggtggtaaacaacgatccgcagattggcgataagctaaaagtggtgtttatccccaactacagcgtgagcctggcgcagctgattatcccggcggcggatctctccgagcagatttcgttggcgggaacggaagcgtccggtaccagcaatatgaagtttgcgctcaacggggcgctaaccattggtacgctggatggcgctaacgttgagatgctggagcacgtcggcgaggacaatatctttatcttcggtaataccgcggaacaggtagaagccctgcgcagtaacggctataaacctcgcgattactatgagcaggatgaagaactgcatcaggcgttgacgcagattggcaccggcctgttcagtccttcggagcctggccgctaccgcgacctgctggattcactgatcaactttggcgaccactatcaggtactggcggactaccgcagctacgttgattgccaggataaggtggacgaactgtaccgccatccggaggagtgggccaataaagcgatgatgaacatcgccaatatgggctatttctcatccgaccgcacgatccaggagtacgccaaacatatctggcatatcgacccggttcgtttgtaa

SEQ ID NO: 111239 - DNA, 1434 bp, Enterobacter aerogenes
atgcaggttttacacgtatgttcagagatgttcccgttgttaaaaaccggcggtctggctgacgttatcggcgcgctgccggcggcgcagatcgcagacggcgtggatacccgcgtgctgctgccggggtatccggatatccgccgcgggattaccgacgcgcaggtcgtcacccgccgggatacctttgccgggcgcatcaccctgctgttcggccattttaacggcgtcggtatctatctgatcgacgcgccgcatctctacgatcgtccggggagcccgtatcacgacgccaacatgaacgcctataccgacaacgtgctgcgctttgcgctgctcggctgggtggggagcgaaatggcctgcgggctggatccattctggcgcccggaggtggtgcacgcccatgactggcacgcgggcctgacaccggcctatctggcggcgcgcggccgtccggcgaaatcggtgtttacggtgcacaatctcgcctaccagggaatgttttactcctggcatatgaatgagatagaactgccgtggtcgttctataacatgcacggcctcgaatttaacggtcagatctcgttcctcaaagccgggctgtactatgccgaccatatcacggcggtgagtccaacctacgcgcgggaaatcaccgaaccgcaatatgcctacggcatggaagggttgctgcgccagcgccaacacgagggccgcttgtccggcatccttaacggtgtcgatgatgctatctggaatccgcaaagcgatctgctgctggcggcgcgctatgaccgcgatagcctggaagagaaagccgagaataaacggcagctgcaaatcgccatggggctgaaggtggatgacaaagcgccgctgttcgccgtggtgagccgcctgaccagccaaaaagggctggatctggtgctggaggcgctgccgggcctgctggagcagggcgggcaactggcgctgctgggagccggcgatccggtcctgcaggagggcttcctcgccgccgccgccgaacatccgggccaggtcggcgtgcagattggctatcacgaggcgttttcgcaccgcatcatgggcggcgccgatgtgattctggttcccagccgctttgaaccgtgcggcctgactcagctgtatggcctgaaatacggcaccctgccgctggtgcgccgcaccggcggtctcgccgataccgtggccgactgttcgctggaaaacctcgccgacggcgtcgccagcggctttgtctttgaggacagtaacgcggtgtcgttgctgagggccatccggcgcacctttgtgttgtggtcgcggccatcgctgtggcgctacgttcagcgtcaggcgatgaatatggactttagctggcaggtggcggcgaaatcctatcgtgaactctatcaacgcttgatgtaa

SEQ ID NO: 111240 - DNA, 1296 bp, Enterobacter aerogenes
atggttgggctagaaaagaacgatccgttgatgctggcgcgtcaacttcctctcaaatcggtggcgctgatccttgctggcgggcgtggtacccggcttaaggatttaaccattaagcgcgcgaagcctgccgtccactttggcggtaagttccgtattatcgacttcgcgttatctaactgtcttaactcaggtattcgccgcatcggcgtgattacccagtatcaatcacacactttggtgcagcatatccagcgcggctggtctttcttcagcgaagagatgaatgagttcgtcgatctgctgccggcgcagcagcgggtacatggtgaaaactggtatcgcggtacggccgatgcggtgacgcagaacctcgacattattcgtcgctataaagccgaatatgtggtgatcctcgccggcgaccacatctacaaacaagattactcgcgcatgctgatcgaccatgtcgaaaaaggcgcgcgctgcactgtcgcctgtatgccggtgcccatcgaagaagcatccgcctttggcgtgatggcggtcgacgaaagcgagaagatcatcgagttcgtcgagaaaccggccaacccgccggcgatgccgaacgacgctacccgctcgcttgccagtatgggcatctatgtctttgatgcggattacctttatgaactgctggccgccgacgatctcgacgaaaactccagccacgacttcggcaaagatatcatcccgaaaattaccgaagctggcatggcttatgcacatcctttcccgctctcctgcgtgcaatccgacccgcaagccgagccgtactggcgcgatgtcgggacgctggaagcctactggaaggccaacctcgatctggcctcggtgacgccggagctggatatgtacgaccagcactggcctatccgtacccatatggaatcgctgccgccggcgaagttcgtccaggaccgctccggcagccacggcatgacgctgaactcgctggtttccggcggctgcattatctcgggctcggtggtggtgcagtcggtgctgttcccgcgagtgcgggtgaattcgttttgtaacattgattcggcagtcttattgccggatgtctgggtcgggcgctcgtgccgcctgcgccgctgcgtgatagatcgcgcctgcgtcatcccggaagggatggtcattggggagaatgcggaagaagatgccagccgcttctatcgttcagaagaagggatcgtgctggttacgcgcgacatgctgcggaaactggggcacaaacaggagcgataa

SEQ ID NO: 111241 - DNA, 1977 bp, Enterobacter aerogenes
atgacgacgcttgccgcgggaaaaccgacgcctttgggcgccagctatgacggcaaaggggtgaacttcaccctgttttccgcccacgccgagcgggtggagctctgcgtgttcgaccagcagggcaacgagcggcgctacgacctcccggcgcgcagcggcgacatctggcacggctggctggccgatgcgcgtccagggttacgctacggttatcgggtgcacgggccgtgggatccggcgcaggggcatcgcttcaatccggccaagctgctgctcgacccttgcgcgcatcaggtggcgggtgaactgctggacgacgagcgtctgcatggcggtatgcatgaaccggatgcccgcgacagcgcagccattgcgccaaaatcccaggtggtcgatctgcattacgactggctcggtgataaaccgccgcgcacgccttggggcgaaacggtcatttatgaagcccacgtcaaagggttgacctggctgcatccggagctgccggaggcgatccgcggcacctatcaggcgctgggccacccgctgatgatcgattattttcgccgtctgggtattaccgcgctggagctgatgccggtggcgcagttcgccagcgaacctcgcctgcagcggatggggctgagcaactactggggctacaacccgctggcgctgtttgcgctggagccgcgctacgccagccagccgcagcgggcgctcgatgagttccgcgatgcggtgaaggcgctgcacgcggcgggcatcgaggtgatcctcgatatcgtgctgaaccatagtgcggaaatcgatcttgaagggccgacagtctccctgcgcggtatcgataaccgcagctattattggatcagggacgacggcgattatcacaactggaccggctgcggtaacacgctcaacctcagtcatcccggcgtggtggagtatgccctgcagtgcctgcgcttttgggttgatgaatgccacgtcgacggttttcgcttcgacctggcgtcggtgatggggcgtacgccggaatttcgtcaggacgcgccgctgtttgaggccattcgccgcgacccggtattgtcggcgctcaagctgattgccgaaccctgggatattggccagggcggttatcaggtggggaacttcccgccgctgtttgccgaatggaacgaccattttcgcgataccgcgcgccgtttctggttgcaacaaaacgtgtcgttgggtgacttcgcccagcgcttcgccgcctccagcgatctctttgcccgcgatggcaaacggcctgcggcgacgatcaatctgatcacggcgcatgatggattcaccctacgtgattgcgtctgtttcaatcagaaacacaatcaggcgaacggcgaagagaatcgcgatgggactaacaataactacagcaataatcatggtatagagggattagaagccaatcttgccgtgattgagcggcggcgcgatagcgtacatgcgctcctgaccacgctgctgctgtcgcaaggaacgccgatgctgctggcgggcgatgagcatggccatagccagcacggcaacaataatgcgtactgtcaggacaatgccttgacctggctggactggcggcgggcaaatcacgggttaaccgcttttgtcgccgcgcttatccacctgcgtcggcgcattccggcattaacccgtaatcagtggtggcaggagcaggacggcaacgtgagctggctcaatcagcgcggagaaccgttaaacgccgacgagtggcaacatggcgccgcgcggctgcaaatcctgttatccgatcgctggttgatcgcgctgaatgccaccgcggaggtggcggatatggttttacccgcgggggagtggcgcgccgttcctccattcgccggagaggataatccggtcatcatggctgtctggcatgggcccgcgcacggagtttgcgtatttcaaaggtcgtag

SEQ ID NO: 111242 - DNA, 2184 bp, Enterobacter aerogenes
atgtcgaatcgaatcgatagagacgtgattaatgcgctgattgcaggtcatttcgcggatcccttttccgtgcttggcatgcaccgcaccgaggcggggctggaagttcgcgcattattaccagatgccaccgaagtgtgggttattgaaccgaaaaccgggcgtaaagtcggcaaactcgaatgcctcgactcgcgcggattctttagcggcctgctgccgcggcgtaaaaacgcttttcgctaccagctggccgtcacctggcatggacagcaaaacctgattgacgacccttaccgtttcggcccgctgctgcaggacgttgatgcctggctgttgtccgagggaacgcacctgcgcccttacgaaaccctgggcgcgcacgccgacactatggatggcgtcaccggtacacgcttttcggtctgggcgccaaacgcccgccgggtctcggtggtggggcaatttaactactgggatggccgacgccatcccatgcgcctgcgtaaagagtccggtatctgggaactcttcattcccggcgcgcttaatggccaactgtataaattcgagctgatcgacgctcatggcaatctacgcgtcaaagccgatccttacgcctttgagtcgcagatgcgcccggaaagcgcgtcgcttatctgcgatttgccgccgaaagtcgaacagccggcggcgcgcaaagccgcgaaccagtttgatgcgccgatctctatttatgaagtgcacctcggttcctggcgccgccataccgacaataacttctggcttagctaccgcgaactggcagaccaactggtgccatatgcaaaatggatgggcttcacccacctcgaactgctgccggtgaacgaacacccgttcgacggtagctggggttaccagccgaccggcctctacgcgccgacacgccgcttcggcacccgtgaagatttccgctatttcatcgatgccgcccacgccgcaggccttaacgtgatactcgattgggttccgggtcattttccggcggatgattttgcgctggcctcatttgacggcacctcgctgtatgaacacagcgatccgcgcgaaggttatcaccaggactggaatacccttatctataactacggccgccgcgaagtcagcaattacctggtgggtaacgcgctgtactggatcgagcgcttcggcattgatgcgctgcgcgtcgacgcggtggcgtcgatgatctaccgcgactatagccgtaaagcgggcgagtggatccccaacgaatacggcgggcgggaaaatctcgaagcgatcgagtttctgcgtaacaccaaccgtattctcggcgagcagacgccaggcgcggtaacgatggcggaagagtccaccgattttgccggcgtgacgcgtccgcccgccgatggcggcctcggcttctggttcaaatggaatctcggctggatgcacgacacgctggattatatgaaactcgatccagtccatcgtcgctaccatcacgacaaaatgaccttcggcatgctctacaactacaccgagaacttcgtgctgccgctctcccacgatgaagtggtgcacggcaaaaaatcgattctcgaccgcatgccgggcgacgcatggcagcgctttgccaacctgcgcgcctattacggctggctgttcgccttcccgggcaaaaagctgctgtttatgggcaatgaattcgcccagggccgcgagtggaaccacgacgccagtctcgactggcatctgctggagggtggcgacaactggcaccacggcgtccagcggctggtgcgcgacctgaaccatacctaccgccaccataaagcgttgcatgaacttgatttcgatccctacggcttcgaatggctggtggtcgacgatcatgagcgttcggtatttatcttcgtgcgccgcgataaagccggtaatgaaatcatcgtcgccagcaacttcacgccggtgccgcggcacaactaccgtttcggcatcaaccagccgggacgctggcgcgaggagctgaataccgactcgatgcattatcacggtagtaacgccggaaatggcggcgtggttgagagcgagtccgtcgccagtcacggtcgtcagcattcgttgtcgattaccctgccgccgctggcgaccatctggctggtacgggaggcctga

SEQ ID NO: 111243 - DNA, 1107 bp, Enterobacter aerogenes
atgaaaaatgttggttttatcggttggcgtggaatggtcggctctgttctcatgcaacgcatggtggaagagcgtgatttcgacgccattcgccctgttttcttctccacctctcagctgggtcagcccgcgccgtcattcggcggcagtaccggggggacgcttcaggatgcattcgatctggaagcgctgaaggcgctggacattattgttacctgccagggcggcgattacaccaacgagatttacccgaagctgcgcgaaagcggctggcaggggtactggattgacgcggcgtcttcgctgcgcatgaaagacgatgcgatcattattctcgacccggttaaccaggatgtcattaccgctggcctgaataacggcatcaaaaccttcgtcggcggcaactgtacggtgagcctgatgctgatgtccctcggcggcctgtttgcccatgacctggtggagtgggtcagcgtggcgacttaccaggcggcttccggcggcggcgcgcgtcatatgcgcgaactgctgagccagatgggccaactgcatggccacgtggcaagcgagctggcgaacccggcttccgcgattctcgatatcgagcgcaaagtgacgtcgctgacccgcagcggcgatctgccggtcgataactttggcgtgccgctggcgggcagcctgatcccatggatcgacaaacagcttgataacggccagagccgcgaagaatggaaaggccaggcggagacgaacaaaattctcgccaccgcgtcgccgatcccggtcgatggtctgtgtgtgcgcgtcggcgcgctgcgctgccacagccaggcgtttaccatcaagctgaagaaagatgtttctatcccgaccgttgaggaactgctggccgcgcataacccgtgggccaaagtggtgccaaacgatcgcgacatcaccatgcgcgagctgaccccagccgcggtgaccggcaccctgaccaccccggtagggcgcctgcgtaaactgaacatgggtcctgagtacctgtcggcctttaccgtcggcgaccagctgctgtggggcgccgccgaaccgttgcgccgcatgctacgacagctggcgtaa

SEQ ID NO: 111244 - DNA, 1341 bp, Enterobacter aerogenes
gtgagtactttaacgcttgttttaacagcagtcggctcggtattgctgctgctgtttttagtcatgaaggcgcgtatgcacgccttcgtggctttgatggtggtttctattggcgcaggtctcttttccggtatgccgctggataaaatcgcggcgacgatggaaaaagggatgggcggcacgctgggcttcctggcgatagtcgtcgcgctgggcgcgatgttcggtaaaattttgcatgaaaccggcgcggtcgaccaaattgcggtgaaaatgctgaagtccttcggccacaaccgcgcgcactatgctattggcctggccggccttatctgcgcgctgccgctgttcttcgaagtggcgatcgtgctgctgattagcgtcgcgttctccatggcgcgccataccggcactaacctcgtgaagctggtgatcccgctgttcgccggcgtagccgccgccgcggcattcctgctgccggggcccgcgccgatgctgctggcttcgcagatgcacgccgatttcggctggatgatcctgattggtctctgcgccgctattccggggatgattatcgccggcccgctgtggggtaacttcatcagccgctacgttgagctgcacattcctgacgatatcagcgaaccgcatctcggcgaaggtaaaatgccgtccttcggctttagcctctcgctgattctgctgccgctggtgctggtcggcctgaaaaccatcgccgcgcgctttgtgccggtgggatccaccgcctatgaatggttcgagtttatcggccacccattcaccgcgattctggttgcctgcctggtagcgatttacggcctggcggtacgtcaggggatggcgaaagatcgcgtgatggagatctgcggcgcggcgctgcagccggcgggtattattctgctggtgattggcgcaggcggcgtcttcaagcaggtactggttgactccggcgtcggcccggcgctcggcgaagcgctgactggcctgggtctgccgattgcgattacctgcttcgtgctggcggctgccgtacgtattattcagggctccgcgaccgtggcgtgtctgacggcggtcggcctggtaatgccggtcattgagcaactgaactacagcggcgcgcaaatggcggctctctccatctgtatcgcgggtggttcgatcgtagtgagccacgtgaacgatgccggcttctggctgttcggtaagtttaccggcgccagcgaagcgcagacgctgaaaacctggacgatgatggaaaccatccttggcaccaccggcgccatcgtcgggatgattgccttccagctgctgagctaa

SEQ ID NO: 111245 - DNA, 531 bp, Enterobacter aerogenes
ttgagcacgactaaccatgatcaccacgtctatgtcctgatgggcgtttccggcagtggtaaatccgccgtcgccagcgaagtggcgcatcaactgaaagccgcgtttctcgatggcgattttctgcatccgcgcagcaacatcaccaagatggcttccggcgagccgctgaacgacgatgatcgcaccccgtggctgcaggcgttgaatgacgcggcatttgccatgcagcgcaccaacaaagtttcgctgatcgtctgctcagcgctgaaaaaaagctaccgcgacattctgcgcaagggcaacccgaacctctcctttatctacctgaaaggcgacttcgacgtgattgaaagccgtctgaaggcgcgtaaagggcacttcttcaaaacccaaatgttggtgacgcagtttgaaacactgcaggaaccaggcgctgacgaaagcgatgtgcttatcgtcgatatcgaccagtcactggaaggcgtggtcgccagcaccattgaggtgattaacaaaggcagtaactag

SEQ ID NO: 111246 - DNA, 996 bp, Enterobacter aerogenes
atgaaaaagaaaagacccgtacttcaggatgtagccgatcttgtcggcgtgaccaaaatgacggtcagtcgctatttacgtaacccggaacaggtttctgaggccctgcgtggcaagattgccgttgcactcgatgagctgggttatattcccaatcgcgctcctgatattctctccaacgccaccagccgcgccatcggcgtactgctgccctcgttaaccaaccaggtcttctcggaagtgctacgcggcattgaaagcgtcaccgacgccttcggttatcaaaccatgctggcgcactacggctataagccggagatggaagagaagcgtctcgaatcgatgctctcctggaatattgacggcctgatcctcactgaacgtacccacacgccgcgcacgttgaaaatgattgaagtggccgggatccctgtggttgagctgatggacagccagtctccgtgcctcgacattgccgtcggtttcgataacttcgaagcggcgcggcagatgacggcggcgattatcgcccgcggtcaccgccacgttgcttatctcggcgcgcgtctggatgaacgtactatcatcaaacagaaggggtacgagcaggcgatgctcgatgccggcatgacgccctacagcgtgatggtggagcaatcctcttcctactcgtcagggattgagctgatgcgtcaagcgcgtcgcgaatatccgcagctcgacggcatcttctgcaccaacgatgacctcgcggtcggcgcggcgttcgagtgtcagcgtctggggctgaaaatcccggacgacatggcgatagccggtttccacggtcacgatatcggtcaggtgatggagccgcgtctcgccagcgtactgaccccgcgtgagcgcatggggcgcatcggcgccgagcgtctgctggcgcgcatccgcggtgagacgattacccctaagatgttagatttaggtttcacattgtcaccgggtggatctatttaa

SEQ ID NO: 111247 - DNA, 696 bp, Enterobacter aerogenes
atgatctacttacgcaaagctaacgaacgtggccacgctaaccatggctggctggattcctggcatactttctctttcgccaactactacgacccgaactttatgggtttctccgcgctgcgcgtgattaacgatgacgtaatcgacgccggccaggggtttggcacccacccgcacaaagacatggaaatcctgacttatgtgctggaaggcgcggttgagcaccaggacagcatgggtaacaaagagcaggttccggctggcgagttccagatcatgagcgcgggtaccggcgtgcgtcactctgagtacaacccgagcaacaccgaccgcctgcgtttgtatcagatctggattattccagaagaaaccggcattacgccgcgctacgagcagcgccgctttgatgccgcgcagggcaaacagctggtgctgtcgccagatgcgcgcgaagggtcgctgaaagtgcatcaggatatggagctgtatcgctgggcgctgctgaaagatgagcagtcggttcaccagattgccgcagaacgtcgcgtgtggatccaggtagtgaaaggcgaagtgacgattaacggcaccaaagccaccaccagcgatggtctggcgatttgggacgagcaggcgatttcggttcacgccgacagcgatagcgaaatcttacttttcgatctgccgccggtttga

SEQ ID NO: 111248 - DNA, 1038 bp, Enterobacter aerogenes
atgattctgcactgcgcatttattggcttcggtaaaagcacgacccgctatcaccttccttacgtcctgcatcgcaaagaccgctggcacgtcgcgcacatttatcgccgccgcgccaggccagaagaacaggcgccggcgtattcccatatccacttcaccagcgacctcgatgaagtactgaatgacccgcaggtcaagctggtggtggtctgcacccatgccgatagccacttcgaatacgcgaagcgggcgctggaagcggggaaaaacgtactggtcgaaaaaccctttactccgacgctggcagaggcgaaagccctgtttacgctggcgaaaagcaaagggttgacggtgacgccttatcagaaccgccgcttcgactcctgtttcctgaccaccaaaaaggtgattgaaagcggtaagctcggcgaactggtggagattgaaagtcattttgataactaccgaccggtggcggaaaccatccaggggggaccgcaaagcggcgatttctatggcctcggggtgcataccatggaccagatcatttcgctgtttggtcgcccggatcatgtttcctacgatctgcgctcactacgtaataaagccaatcccgatgacacgtttgaagctcaactgttttatggcgacctgaaagcgatcgtcaaaaccagccatctggtgcagattgactacccgaaatttatcgttcatggccataaaggctcgtttgtgaaatacggcattgaccagcaggagaccagcctgaaggccaacattatgccgggcgacgcggggttcggcgctgatgacagcgtggggcaactggtctacatcaacgaggcgggcgtggaggtacgtgaagaggtgccgctggaaagcggcgactacggacgagtgtatgacgcgctgtatgacaccctcgttaacggccagccgaattacgtcaaggaatctgaagttctcaccaatatggagattctgcagcgcggctttgaacaaccttctccggctactattaccctcgcaaaataa

SEQ ID NO: 111249 - DNA, 648 bp, Enterobacter aerogenes
atggaaaaaaagtatctcgccataaactgcgccatttttttctggcttctcgcactgatcgcctggtttagcgatgaggccgcgctggcgcgcctggcggcggcctgtacccttttcgctttccttactcatacccaacgggaaaaaattaacgctatgtttatgaagaaaaataaaaccgaagcgcaggctgctgaagtcgctgcgccagccgtggcggcaacagagccagaaacggcaagcgtcaaaaaacaggaaaccacggtgatcgccagcggcgtgcattttgtcggcaacatcgtcgccagcggccatgtctatatccacggccaggtcaccggcaacattgaggccaaagaacatctcattaaggtgatgcgcgaaggtgaggtcgagggcaatatccactgccgcgagctgatcgtcgacggcaaggttcatggccagtgccgtggcgatagcattgctattgaggaacatggcaacctcgacggcaccctcgcctatcgcgcgctggcgattaaaaagggcggcctgtttaccggcagcgcggaggtgttagccgcggcggagagcaaaaataaaagtaatatcgtcggcctggtcgcagaagaagcggtgaaatccgccaaatcgcaacatgcctga

SEQ ID NO: 111250 - DNA, 489 bp, Enterobacter aerogenes
atgagtgacatcgtgatacgccatgctgaaccgaaagatgttgacgcgattcgtcaaattcacgcccagccggaggtgtatcacaacacgctacaggtccctcatccatccgagcatatgtggcaggagcggctaaccgatacgcccggcgtgaagcagctggtggcctgtatcgatgggcaagtcgtggggcatttatgcattgctgtcgcccaacgtcctcgccgtagccacgtcgccgattttggtatcagcgtggattcgcgctggcataaccgcggcgtcgccagcgccctgatgcgtaccatgattgatatgtgcgacaactggctgcgcgtcgagcgcattgagctgacggtgttcgccgataacgccccggcggtcgcggtgtataagaagtacggctttgagatcgaaggcaccgccaagggttacgcattgcgcaacggcgagtatgtggatgcgtattatatggcgagaataaagtag

SEQ ID NO: 111251 - DNA, 1746 bp, Enterobacter aerogenes
atgataaaaacaacaatatggcgtcaggtggtcatcgcagcgttactggcggggggcagctttaccgtcgccgccaatccgccgcccccgccgccggtctcgtatggcgttgaggaagatgtgtttcacccggtgcgcgcccagcaggggatggtggcctcggtggatgcgctggcgacccgcgtcggcgtggatattttgcgtcagggcggcaacgccgtcgatgcagcggtggctgtcggctacgcgctggcggtcacgcatccgcaggccggtaatatcggcggcggcgggtttatgatgctgcgtactaaagacggtaaaaccacggcgatcgatttccgcgagatggccccggaacaggccacccgcgatatgttcctcgatgaacatggcaatccggacagtaaaaaatcgctgacttcacatctcgcttccggtacgccaggcagcgtcgcgggcttctctctcgcgctggaaaaatacggtaccatgccgctgaacaaggtgatccgcccggcgattaagctggcggaagagggctttatcgttaacgatgcgctggctgacgatttaaaaacctatggcagcgaagtgatcccgcagcatgaaaacagcaaagcgattttctggaagaacggcgagccgctgaaaaaaggcgaccggctggtgcaaaagaatctggggaaaagcctggagctgattgccgagcacggcccggacgccttctataaaggggctatcgccgaccagattgccggtgagatgaaaaaacacggcgggcttatcaccaaagccgacctcgccaactacaaggccgtggagcgtacgccgattagcggtgaatatcgcggctatgaggtttactccatgccgccgccgtcctctggcgggatccacatcgtgcagatcctcaatatcctcgaaaacttcgatatgcagaaatatggctttggcagcgccgacgccatgcaggtgatggcggaagcggagaaacatgcctatgccgaccgttcggaatatctcggcgatcctgacttcgtcaaagtgccgtggcaggcgttgaccagcaaagcttacgctaaagcgatagccgccgagattgatgtgaataaggcgaagccttccagccagatccgtccgggcaagctggcgccgtatgaaagcaaccaaaccacccacttctcggtggtcgataaagacggcaatgcggtggcggtcacctatacgttgaataccacctttggcaccggcatcgtggccggcgactccggcattatactcaacaaccagatggatgatttctcggcgaaacccggtgtgcctaacgtttatggtttagtcggcggcgacgccaacgcggtagggccgaaaaagcgtccgctgtcgtcgatgtcgccaactatcgtggtaaaagacgggaagacctggctggtgaccggtagcccgggcggtagccgaattatcaccaccgtgctgcaaatggtggtcaacaccattgattttgggatgaacgtcgcggaagccactaacgcgccgcgcttccaccaccagtggctgccggatgaactgcgggtggagaaaggttttagcccggataccgtgaaattgctggaagcaaaagggcagaaagtcgcgctgaaagaggcgatgggcagtacccagagcattatggtggggccggacggcacgctgtatggcgcttccgatccgcgttcgcccggtgatttgaccgcggggtattaa

SEQ ID NO: 111252 - DNA, 321 bp, Enterobacter aerogenes
atgaaagcgattttattcctggcggcgctgatgccgctcggcgttttagcacagccgattaacatcgataacaaccctaaccagccgggttatgtggtgcccagccagcagcgaatgcaaaatgagatgaaggtgcagcaacagcagcagcaaagcatgctgaagcagaatctgaataatcagacccgctcgcagcaacagcatttgcagagccagttgcaaaccaatcagcaacgcgcggcgcagggcggcaatctcaattcgcagccgcaggtactgccgaacaacaacggcgggatgctgcggcagactaacccgtaa

SEQ ID NO: 111253 - DNA, 741 bp, Enterobacter aerogenes
atgagtaactggccttatccccacatcgtcgcccatcgcggcggcggtaaactggcgccggagaacaccctggcggctatcgacgtcggcgcccgctacgggcacacgatgattgaatttgacgccaagctgtcgaaggacgggcagatctttctgctgcacgacgataatctcgaacgcaccagcaacggctggggcgtggcgggcgagctggcgtgggacgacctgctgaaggtcgatgccggcagctggtacagccgtgaatttaagggcgaaccgctgccgctgctctcccaggtggcggaacgctgccgccgtcacggcatgatggccaatatcgaaattaagccgaccaccgggcaggggccgcagaccggcaaagtggtggcgctggccgcgcgcgatctgtgggccgatatgaccgcgccgctactctcatcctttgaaatcgacgcgctggaagcggcgcaggaagccgcgcccgagctgccgcgcgggctgctgctggatgagtggcgcgatgactggcgcgaattgaccgcccggctgggctgcgtatctattcatctcaaccacaagctgctggatgcggctcgggtagcgagcctgaaacaggccggcctgcatattctggtgtatacggtcaataaaccccagcgcgccgccgagctactgcgctggggcgtagattgcatctgcaccgatgctattgacgtcatcgggccgaatttccagccttaa

SEQ ID NO: 111254 - DNA, 1071 bp, Enterobacter aerogenes
atggctggtttaaaactacaggcagtaagcaaaagctgggatggcaaaacccaggtaattcaaccgctgacgctggacgtggcggatggggagtttatcgtcatggtcggcccgtcgggctgcgggaaatcaacgctgctgcggatggttgccggacttgaacgagtgaccagcggcgatatctggattgatcgtaaacgggtgaccgagatggagccgaaggatcgcggtatcgcgatggtgttccagaactatgcgctttatccgcatatgagcgtggaagagaacatggcgtgggggctgaagattcgcggcatgggtaagggattgatcgccgagcgcgtgcaggaggcggcgcgtattcttgagctggatggcctgctcaagcgccgaccgcgggaactgtcaggcggtcagcgccagcgcgtggcgatgggccgcgctatcgtgcgtgacccggcggtattcctgttcgacgaaccgttgtcaaacctcgatgccaagctgcgcgtgcagatgcgtctggaactgcagcagctgcatcggcgcttgaaaacgacttcgctgtatgtcacccacgatcaggtcgaagcgatgaccctcgcccagcgggtgatggtaatgaataaggggattgccgagcagatcggcacgccggtcgaagtgtacgaaaagcccgccagccgctttgtggcgagctttatcggcagcccggccatgaacctgctggagggtcgggtgagcgatgatggcggccgctttgagctggaaggcggcatacagctaccgatgaatcacgagcatcggcgttacgccgggcgtaaaatgactctcggtatccgcccggagcactttattttaagctcgcaggcgcaaggcggcattccgctgctgatggatacgctggaaattttaggtgccgataacctcgcccacgggcgctggggcgagcagaagctggtggtcagattgccgcatcagcagcgcccggcgggtggcagcacgctatggctgcatctgcctttggaacatctgcacctctttgatggtgaaacaggacaacgcgcatga

SEQ ID NO: 111255 - DNA, 846 bp, Enterobacter aerogenes
atgattgagaaccgtcgcgggctgacgattttcagccacaccatgctcattttgggtattgccgtcattttattcccgctgtatgtcgccttcgtggcggcgacgctggataacaaatcggtgtttgaaacaccgatgacgctgatccccggcggacatctgctggagaacatgaagaccatctgggtgaacggcgtcggcgtcaacagcgcgccgttctggctgatgatgctcaacagcttcatcatggcgttcgccattacggtaggcaaaatcgtggtgtcgatgctttcggctttcgccatcgtctggttccgctttccgctgcgtaacctgttcttctggatgatcttcatcactctgatgctgccggtcgaggtgcgtattttcccgacggtggaagtgatcgccaacctcaaaatgctcgacagttatgccgggttaacgctgccgttgatggcttcggctaccgccaccttcctgttccgccagttctttatgactctgccggacgagctgattgaagcggcgcgtatcgatggcgcttcgccgatgcgcttctttcgcgacatcgtgctgccgctgtcgaaaaccaacctcgccgcgctgttcgtcatcacctttatctacggctggaaccagtatctatggccgttgctgattattcaggatgtgaatcttggcaccgccgtcgccggtattaaaggcatgatcgccaccggtgaaggtactactcagtggaatcaggtgatggcggcgatgctgctgaccctgatcccgccggtcgtcatcgttttagccatgcagcgcgcgtttgtgcgcggcctggtcgatagtgagaaataa

SEQ ID NO: 111256 - DNA, 888 bp, Enterobacter aerogenes
atgtcatcatcccgtccggtattccgctcgcgctggctgccctatgtgctggtcgcgccgcagctgattatcacgctgattttctttatctggcccgcgggcgaagcgctgtggtactcgctgcagagcgtcgatccgtttggcctttccagccagtttgtcggcctggataacttcgtcacgctgttccacgacccgtactatctggactcgttctggacgaccataaaattcagcactctggtaaccgtcagcggcctgcttatttcgctgttttttgccgcgctggtcgactatgtggtgcgcggcagccgcttttatcaaacgctgatgctgttgccgtatgccgtggctcccgccgtcgcggcggtgctgtggatcttcctcttcaatcccggacgcgggctgatcacccatttcctcggcgaattgggttacgactggagccacgcgcagaacagcggccaggcgatgtttctggtggtcttcgcctcggtctggaagcagataagctacaacttcctgttcttcttcgccgcgctgcagtcgatcccgcgttcgctggttgaggccgccgccatcgacggcgccggaccgattcgtcgcttcttcaagctggcgctgccgctgattgcgccggtgagtttcttcctgctggtggtcaacctggtttacgccttcttcgacaccttcccggtgatcgatgccgccaccgccggcggcccggtgcaggcgaccaccaccctaatctacaaaatttatcgcgaaggtttcgccgggctcgatctttccgcttccgccgcgcagtcggtggtgctgatgttcctcgtcattatcctgacggtggtgcagttccgttacgttgaaagtaaggtgcgttaccaatga

SEQ ID NO: 111257 - DNA, 1317 bp, Enterobacter aerogenes
atgatatcgttacgacatacagctttaggactggcgctgagcctggcatttgctggccaggcactggcagtaaccaccatccctttctggcactcgatggaaggggaactgggtaaagaagttgattctctggcgcaacgtttcaacgcggccaatcctgattacaaaattgttccgatgtacaaaggcaactacgagcagagcctgagcgccggtatcgccgccttccgtaccggtaacgcgccggcgattctgcaggtgtatgaagtcggcaccgccaccatgatggcgtcaaaagctattaagccggtgtaccaggtctttagcgatgcgggtattaagttcgatgaatcgcagttcgtaccgacggtgtccggttattacaccgattcaaaaaccggccatctgctctcccagccgtttaacagctccacgccggtgctgtactacaacaaagacgccttcaagaaagcgggtctggaccctgagcagccgccgaaaacctggcaggatcttgcggcttacaccgccaaactgaaagcggccggaatgaagtgcggctacgccagcggttggcagggctggatccagattgagaacttcagcgcctggaacggcctgccggtcgccacgaaaaataacggctttgacggtaccgacgcggtgctggagttcaacaagccggagcaggtgaagcatatcgcgctgctcgaagagatgaacaagaaaggcgatttcagctatttcgggcgtaaggatgaatccaccgagaagttctataacggtgactgcgcgatgactaccgcctcatccggttcgctggcggatattcgtcagtacgcgaaattcaactacggcgtcggcatgatgccttacgacgctgaggtgaaaggcgcgccgcagaacgccatcatcggcggggccagcctgtgggtgatgcagggcaaggacaaagagacctacaccggcgtggcgaagtttctcgacttcctgaccaaaccggaaaacgccgccgagtggcaccagaaaaccggctacctgccgattaccaccgcggcctacgatctgacgcgccagcagggcttctatgataagaacccaggcgctgatatcgccactcgccagatgctgaacaagccgccgttgccgttcaccaaaggcctgcgcctgggcaacatgccgcaaattcgcaccatcgttgatgaagagctggagagcgtgtggaccggcaagaaaaccccgcaacaggcgctggactccgccgttcagcgcgggaatcaactgctgcgccgtttcgagcaagccaccaaatcgtaa

SEQ ID NO: 111258 - DNA, 732 bp, Enterobacter aerogenes; identical to SEQ ID NO: 107470

SEQ ID NO: 111259 - DNA, 768 bp, Enterobacter aerogenes
atgagtcagccaatattatccgtgaacggcctgatgatgcgttttggcggcctgctggcggtcaataacgtctcccttgagctgcgcccgcaagagatcgtttccttaattggcccaaacggcgcgggaaaaaccaccgtttttaactgcctgaccggtttctataaacctaccggcggcaccattatgctgcgcgaccagcatctggaagggctgccggggcagcagattgcacggatgggggtggtacgaaccttccagcacgtgcgtctgttccgcgaaatgacggtgattgaaaatctgctggtggcgcagcatcaacagctgaaaaccggcgtcttctccggtctgctgaaaacgccggccttccgtcgcgcgcagagcgaagcgctggatcgggccgccacctggcttgagcgtatcggcctgctggagcatgccaaccgtcaggccagcaacctggcctacggcgaccagcgccggctggagattgcccgctgtatggtgacgcagccggagatcctgatgcttgatgaaccggcggcggggcttaacccgaaagagaccaaagagctggatgagcttatcgccgagctgcgtagccatcacaacaccaccatcctgcttatcgaacatgatatgaagctggtgatgggcatttccgatcgcatctacgtcgtgaaccaggggacgccgctggccaacgggacgccggaagagattcgtaataacccggacgtgatccgcgcctatttaggtgaagcataa

SEQ ID NO: 111260 - DNA, 1278 bp, Enterobacter aerogenes
atgaaaccgatgcaaattgcgatggcgcttctttccgccgcgatgttctttgttctggcgggcgtctttatgggcgtgcagctggagctgaatggcaccaaactggtggtcgataccgccgccgatattcgttggcagtggattttcatcggcaccgcggtggtctttttcttccaactgctgcgcccgctgttccagaaagcggttaagaacgtttccgggccgaaatttattatgccggcgattgacgggtcgacggtcaagcagaagctctttctgatagccctgctggtgattgccgtggcctggccgtttatggtgtcgcgcggtacggtggatatcgccaccttgacgatgatttatatcatccttggtctcggactgaacgtggtggttgggctttccggcctgctggtattgggctacggcgggttttacgccatcggcgcctatacctttgcgctgcttaaccactattacggtctcggtttctggacctgcctgccgctggccggcctggtttccgcggcggccggcttcctgctgggcttcccggtgctgcgtctgcgcggcgactatctggcgattgtgaccttaggcttcggcgagatcgtgcgcattttgctgcttaacaataccgagatcaccggcgggccgaacggtatcagccagatcccgaaaccgactttctttggtcttgaatttagccgtaccgcccgtgaaggcggctgggataccttcagcaacttcttcggtctgaagtacgatcccagcgatagggtgattttcctctatctggtagcgttgctgctggtggtgctcagcctgttcgttattaaccgtctgctgcggatgccgctcgggcgggcgtgggaagcgctgcgtgaagatgaaatcgcctgtcgttcgctgggcctgagcccgacgcgcatcaagctgaccgcctttactatcagcgccgcgtttgccggatttgccggcacgctgttcgccgcgcgccagggcttcgtgagcccggagtcctttaccttcgccgagtcggcctttgtgctggcgatcgtggtgctggggggtatgggctcgcagtttgcagtgatcctggcggctattctgctggtggtatcgcgcgagctgatgcgtgatttcaacgaatacagcatgttaatgctcggtgggttgatggtgctgatgatgatctggcgtccgcaggggctgctgccgatgacgcgcccgcagctgaagctgaaaaacggtcaggcgaaaggagagcaggcatga

SEQ ID NO: 111261 - DNA, 927 bp, Enterobacter aerogenes; identical to SEQ ID NO: 87732

SEQ ID NO: 111262 - DNA, 1110 bp, Enterobacter aerogenes
atgaaaaggaacgcgaaaacgatcatcgcgggagtcgttgcattagcgatttcccacgcggcgttggcaaaggatattaaagtcgccgtcgtcggcgcgatgtctggcccggttgcccagtggggcgatatggaattcaacggcgcgcgccaggcgattaaagacattaacgccagcggcggcattaaaggcgacaaactggttggcgtcgaatatgacgacgcctgcgatccgaaacaagcggtcgcggtcgccaacaaaatcgtcaatgatggcattcagtacgttattggccacctctgttcctcctccacccagccggcgtctgacatctatgaagatgaaggcatcctgatgatctcccccggggcgaccaacccggaactgacccagcgtggctaccagtacattatgcgtaccgcaggtcttgactcttcccaggggccgaccgccgcgaaatatatcctcgaacacgtgaagccgcagcgtattgcgattattcatgacaaacagcagtacggtgaagggctggcgcgttccgtacaggacaacctgaagaaagccggcgccaatatcgtcttctttgatggcatcaccgccggtgagaaagacttctccgcgctgctggcgcgcctgaagaaagagaatatcgacttcgtctactacggcggctactacccggaaatggggcagatgctgcgccaggcgcgctccgtcggcctgaaaacgcagtttatggggccggaaggcgtcggtaacgcctcgctgtccaacatcgccggcgcggcggcggaaggtatgctggtgacgatgccaaaacgctatgaccaggatccgtccaacagcgctattgttgatgcgctgaaagcggataaaaaagatccgagtggtccgtacgtctggatcacctatgccgccgttcagtcgctggcgcaagcaatggacagaaccggcagccagcagccgctggatttaattaaagatttgaaagctcacggcgcgaagaccgtgattgggccgctgaattgggatgaaaaaggcgatctgaagggatttgaatttggtgtcttccagtggcacgcggatggttcatccaccgtcgctaagtaa

SEQ ID NO: 111263 - DNA, 384 bp, Enterobacter aerogenes
atgaagctcaccattatccgtttacagcacttcagcgatcaggatcgcattgatttaggcaaaatctggccgtcgcaggatcctgcggcgctgatgctggatgaaaaccatcgtatttacgccgcccgctttaacgaacgtctgctcggcgccgtacgcgttaccctgcgcggcgtcgaaggcgagctcagcgatctgtgcgtgcgtgaagtcacccgccgccgcggcgtggggcaatatttagtggaagagacgttaagcgataacccgaatatcaatagctggcgcgttgccgatagcggggtggaagaccgcggcgtgatggcggcatttatgcaggcgctgggtttcagcgcccagcagaatggttgggagaagcattaa

SEQ ID NO: 111264 - DNA, 1098 bp, Enterobacter aerogenes
atgaagggtaaagcgttactggcaggatgtattgctttaattatgagcggttcagcgctggcggaagacattaaaattgccgtcgtgggagcgatgtccggcccggttgcccagtatggcgaccaggaatttaccggcgctgagcaggcggtggccgatatcaacgccaagggcggtatcaagggcaacaaactgcagatcgtgaaatatgacgatgcctgtgacccgaaacaagcggtggcggtcgcgaacaaagtggtgaatgacggcattaaatacgttatcggtcacctgtgttcctcatccacccagccggcgtctgacatctatgaagacgaaggcatcctgatgattaccccggcggcaaccgcgccggagctgacggcgcgcggctataagctgattctgcgcaccaccggtctcgactccgatcagggcccgacggcggcgaaatatattctcggcacggtgaagccgcagcgcatcgctgtggttcatgacaaacagcaatatggcgaagggctggcgcgctcagttcaggaaaacctgaagaaaggcggcgccaacgtggtgttctttgacgggatcaccgccggtgagaaagatttctctaccctcgtggcgcgcctgaagaaagaaaatatcgacttcgtctactacggcggttatcacccggaaatggggcagatcctgcgccaggcgcgcgcagccggtctgaaaacccagtttatgggcccggaaggcgtggctaacgtttccctgtctaacatcgccggagagtcggcagaaggcctgctggtcaccaaaccgaagaactacgatcaggttccggcgaacaaaccgattgtggatgctatcaaagcgaagaaacaggatccgagcggcgccttcgtgtggaccacctatgcggcactgcagtcgctgcaggcggggttaaatcagtctgaagatccggcggaaatcgcgaaatacctgaaaggggcgaaggtggataccgtcatggggccgctgtcgtgggatgagaaaggcgacctgaaagggttcgagttcggcgtgtttacctggcatgctaacggtacggcaaccgacgccaaataa

SEQ ID NO: 111265 - DNA, 855 bp, Enterobacter aerogenes
atgaccaaagaaatgcaaactttagctttagcccccgttggtaacctggaatcgtacatccgggctgctaacacttggccgatgttatcggctgatgaagagcgggagcttgctgaaaagctgcattaccagggcgatctggaagcagcgaaaaagctgattctgtctcacctgcgctttgttgttcatattgctcgtaactactcgggctatggcctgccgcaggcggacctgattcaggaaggtaacatcggtctgatgaaagccgtacgtcgtttcaacccggaagtgggtgtgcgactggtttccttcgccgtgcactggattaaagcggaaatccacgaatacgtgctgcgtaactggcgtatcgttaaagtcgcaaccaccaaagcgcagcgtaagctgttcttcaacctgcgtaaaaccaagcagcgtctgggctggtttaaccaggacgaagtagagatggttgcccgcgagctgggtgtgtcgagcaaagacgtacgtgagatggaatcacgtatggcagcgcaggacatgacctttgatatgtcgtccgatgacgaatccgatagccagccgatggcgccagtgctctatctgcaggacaaaacgtctaactttgccgacggcatcgaagacgataactgggaagagcaggctgctaataaactgactgatgcgatgcagggcctggacgagcgtagccaggacatcatccgcgctcgctggctggacgaggacaacaagtccacgctgcaggagctggcggatcgttatggcgtctcggctgaacgtgttcgtcagctggaaaagaacgcgatgaaaaaactacgcgccgctatcgaagcttaa

SEQ ID NO: 111266 - DNA, 1056 bp, Enterobacter aerogenes
gtgaataagcgcgacgcagtgaaccagattcgccagttcggcagcaagttcgatcgtctccgtaacgccacaggcggcggcagcggcgggcgcaatgcgccaaaacggccaaaagcggcgccgaacccggcatcgcggaagagtaacgtctttaacgagcaggtgcgctacgcctggcacggcgcgttacaggatttaaaaagcacgccgctggcgacctttctcaccattatggtgatcgctatttcgctgacgctgccgagcgtctgctatatggtctacaaaaacgtcaacagcgcggcgtcgcagtattatccgtcgccgcagatcaccgtctatctggaaaaaacgctggatgacgatgcggcggcgcgggtggttggccaactgcaggcggagcagggcgttgagaaggtaaattatctgtcgcgcgatgaggcgctgggcgagttccgcaactggtccgggtttggcggcgcgctggatatgctggaagagaacccgttgccggcggtagcgattgtggtgccgaagctcgatttccagaataccgattcgcttaacaccctgcgcgatcgcgtctcccgtattcagggggtcgacgaagtgcgcatggatgatagctggtttgcgcgcctggcgtcgctgaccggactggtcggccgggtgtcggcgatgatcggcgtgctgatgattgccgcggtattcctggtgattggtaacagcgtgcgcctgagcatcttcgcccgtcgcgataccattaacgtccagaagctgatcggcgctaccgacggtttcatcctgcgtccgttcctctatggcggcgcgctgttgggcttcgccggggcgtttttgtcgctgattctgtcggagattctggtgatgcgcctctcttcggcggtgaccgaagtggcgaaagtgtttggtactaaatttgaactcagcggcttaggcttcgatgaatgcctgctgatgctaatcgtctgctcgatgattggctgggtcgcggcctggctggcgacggtgcaacatttacgtcactttacccccgactaa

SEQ ID NO: 111267 - DNA, 669 bp, Enterobacter aerogenes
atgattcgctttgaacaagtcagcaaagcctatctcggtgggagacaagcgctgcagggggtgacgttccacctgcagcagggcgagatggcgttcctgaccggccattccggcgcggggaaaagtaccctgctgaagcttatctgtggtatcgaacggccgagcgccgggaaaattctgttcagcggccatgatatcagccgcctgaagagccgcgaggtgccgttccttcgccgccaaatcggcatgattttccaggaccaccacctgctgatggatcgcaccgtgttcgataatgtggcgatcccgctgattatcgccggcgccagcggcgatgatattcgccgccgcgtatccgcagcgttggataaagttgggctgctggacaaagcgaaaaatttccccatccaactctccggcggtgagcaacagcgtgtgggcattgcccgtgcagtggtcaacaagccggcggtgctgctggcggatgaaccgaccggtaacctcgatgaggcgctctcggaagggattttacgtctgtttgaagagtttaaccgcgtaggggtgacggtactgatggcgacgcacgacctggggcttatttccagccgtccgtaccgtgtcctgacgctaagcgacggtcatatgcatggaggccatcggggtgaataa

SEQ ID NO: 111268 - DNA, 1494 bp, Enterobacter aerogenes
atggcaaaagagaaaaaacgtggcttcttttcctggctgggctttgggcaaaaagagcaggctcaggaaagcgaaacagaacaaaaagtagaagaaaaacaagaggttgcggaacaggctccggcggcggaaacgcctgcggaagccgtacccgcggcggaaacggtaaaagaagaccccgaggcctttgccgccgaggtcgtagaagttaccgaacaggttgttgagagtgaactgccgcatccggtggtggaagagaccgcggcgtcggaaatcgtagttgaagaagcgccggttgttcctgcggtagaagaaaaagtcgctgaaccgctggttgaagaggtgattgccgagccggttatcgccgaagcggtcgctgaacagacgccggaagaggttatcgtcgcggagcctgaagtcatcgaagatgaggtcctcccggaagagtctgaagccgaattaagcgatgaagagcttgaagcgcaggcgctggcggcgcaagacgtagaagagacgccagaagaagaagcggaaactcaggaagcggcgccgcaggagcaggaaaaaccgaccaaagaaggtttcttcgcccgcttaaaacgcagcctggtgaaaaccaaacagaatctgggttccggatttatcagcctgttccgcggtaaaaaaatcgacgacgatctgtttgaagagctggaagaacagctgctgattgccgacgttggggtggaaaccacgcgtaagattattaccaatcttaccgagggggccagccgtaagcagctgcgtgatgccgaggcgttatacggtctgctgaaagaagagatgagcgagatcctgacgaaagttgaggaaccgctgaatgttgaagggaaaacgccatttgttattctgatggtcggcgttaacggcgtgggtaaaaccaccaccatcggtaagctggcgcgtcagtttgagcagcagggtaaatccgtgatgctggcggcgggggataccttccgcgcggcggcggtggaacagttacaggtctggggccagcgtaacgagatcccggtgattgcccagcataccggcgctgattcagcctcggttatttttgacgccattcaggcggcgaaagcgcgcaatattgatgtgctgattgccgataccgcgggtcgtctgcagaataaatcgcatctgatggaagaactgaagaagattgtccgcgtaatgaagaaactggatgtcgacgcgccgcatgaagtcatgctaaccatcgacgccagcaccgggcagaacgcgattagccaggccaaactgttccacgaagcggtggggctgaccggcattacattgactaagcttgacggaaccgcgaagggcggggttatcttctcagtggctgaccagttcagtattccgattcgctatattggcgtcggcgaacgtattgaagatctgcgtccgtttaatgcgggcgactttattgaggcactttttgcccgagaggattaa

SEQ ID NO: 111269 - DNA, 597 bp, Enterobacter aerogenes
atgaagaaaccaaatcacgcaggcagcggccagatccgcattatcggcggacagtggcggggccgtaaattaccggtgccggagagcccgggtctgcgcccgaccaccgaccgggttcgggaaacgctatttaactggctggcgccgtcgatggtcgacgcccactgccttgactgcttcgccggcagcggcgcgctggggctggaagcgctgtcacgctatgccgccagcaccacgctactggagatggagcgcagcgtcgcgcagcagctacaaaaaaatctcgcgacgctgaaagccaacaacggcaaggtggtcaacaccaacacgctggcgtttctcagccagccgggtacgccgcaccatattgtcttcgtcgatcctcccttccgcaaagggctactggaagaaacgctcagcctgctggaaaaaaaccactggctcgctgatgaagcgctgatttatgtcgaaagcgaagtagaaaacggactaccgccggttccggcaaactggcagctgtatcgcgaaaaagtcgccggacaggtcgcctaccgcctgtatcaacgcgaggcacaaggagaaaaccatgctgattaa

SEQ ID NO: 111270 - DNA, 279 bp, Enterobacter aerogenes
atgctgattaatttaggccgcctgctgatgctatgcgtttgggcgtttttgctgttgaacctgtttcaacctttcccaaaaccgctgaatatcttcgttaacgtggcgctgatttttatgattctgatgcatggcctgcagctgacgctgttgaaagcgacgcaaacgaaagatgcgccgccgctgagccgttttgagcagattcgtattttcatcttcggcgtatttgaactggtggcctggcagaaaaagctgaaggccacgctgaagaagaagtaa

SEQ ID NO: 111271 - DNA, 372 bp, Enterobacter aerogenes
atgggtacgcaaatgagtaaagttccgctattttttgtgctggtggtcgcggtgattgtggtggcggcctcgtttcgctacgtgcagcagcgccgggagaaaatggataacgacgccgcgccgctgctgcagaagcgggtggtggtcagcaataagcgggaaaaggtgattaacgatcgccgctcgcgccagcagacggtgacgccagccggcagcgagatgcgttatgaagcgagcttccgcccggaaaatggcggtctggaagtggtgttccgccttgatgcgccgcaataccacgcgctgagcgttggcgaccggggaatgctgagctataagggctctaaattcgtcgactttgttgccgataactga

SEQ ID NO: 111272 - DNA, 627 bp, Enterobacter aerogenes
atgctttggtcgtttattgctgtctgtttctccgcatggctttacgtcgatgcgtcctatcgtgggccggcctggcagcgctgggtctttaaaccggtcaccctgcttctgttgctgctgttagcctggcaggcgccaatgttcaacgccattagctacctggtgctggcgggcctgtgcgcttcgctgctcggcgatgccttaaccctgctgccgcgccagcgggtgatgtacgcggttggcgcattcttcctctctcatctgctgtatacgatctggttcgccagccagatgacgctttcgttcttctggccgctgccgctggtactgctggtgctcggcgcgctgctgctggcgattatctggacccgactggaagagatgcgcatgccggtgctgacctttatcggtatgactctggtgatggtgtggctggcgggcgaactgtggttcgtgcggccgaccgataccgcgctctccggcttccttggcgccgcttcgctgctgttgggtaacgccgtctggctgattagccactatcgccgtcgcttccgcgccgataacgccatttccgcggccttctactttgccgggcacttcctgatcgttcgcgcactgtatctgtaa

SEQ ID NO: 111273 - DNA, 2208 bp, Enterobacter aerogenes
atgtcgacaccagaatctcaggacaaaaaagtcccccagttctcgtcattcaaatttaccccggcgacagagcccgctgaaagctgctgtaccgatcataactgcgccggagaaaccgccgccgctgagcagccgctcaatggcgcccgctatagctggcaggtggaaggcatggactgcgcggcctgcgcccgtaaggtggagaccgccgtgcgccaaatcgacggggtcagccaggtacaggtgctattcgccaccgagaaactgctggtcaatgccgacagcgatatccgttcacaggttgaaaacgcggtacgcgccgcgggttataccctgcgcgatgctgacgcgccgcaggaagagaaaccgcaaggttcatggctacaggaaaacctggcgttattgagtctggtagtgatgatggcgctcagttgggggctggagcagtttaaccacccgttcggcaaactggcgtttgtcgccactaccctcgtcggcctgtggccggttgcccgtcaggcgctgcggttaattaaaagcggcagctggtttgccatcgaaacgctgatgagcgtcgccgccattggcgcgctgtttatcggcgccaccgccgaagcggcgatggtgctgctgctgttcctgatcggcgaacgacttgaaggctgggccgccagccgcgcgcgtcagggcgtgagcgccctgatggcgctcaaacctgataccgctgttcgcctgcgcaacggcgagcgtgagaccgtctcccagcgcgacctgcgtcctggcgacgtgattgaagtcgccgccggcgggcgcctgccggccgatggcgagctgctatcgccgtttgccagctttgacgaaagcgcgctgaccggcgaatcggtaccggtggagcgtaaagccggcgagcgcgtagccgccggcgccaccagcgtcgatcggctggtgcaattgagcgttatctccgaaccgggagacagcgccattgaccggatcctcaaactaattgaagaagccgaggagcgccgggcgccgattgagcgcttcatcgatcgcttcagccgaatctacactccggccattatggtagttgccctgctggttgccatcgtaccgccgctattcttcgccagcacctggctgccgtggatctataaaggcttaacgctgctgctgatcggctgcccgtgcgcgctggtcatctctaccccggcggcgattacctccggtctggctgtcgccgcacggcgcggagcgctgattaaaggcggcgcggcgctggaacaattgggccaggtgcgccaggtggcgttcgataaaaccggtactctgaccatcggccaaccgcaggtcacccacgttatcaccaccgccgacgttgatgaaaacggcctgctggcgctggcggcagcggttgaacaaggctccagccacccgctggcgcaggctatcatccgcgaagcgcagcagcgtaagctgactcttcccgttgcgcgcaaccagcgggcgctggccggttccgggatagaagccgaggtcaacggcagccgcatcttaatctgcgcggccagtaaggccgcccccgctgaacatgaggcgcagatccagcaactggagagcgccggacagacggtggtgctggtgatgcgcgatgataccttgctcggcattctggcgctgcgcgataccctgcgcgacgacgcgcgtcaggcggtggaagagctgcatcaattgggcgtacaaggggtgatcctcaccggggataacccgcgcgctgcggcggctatcgccaatgaactgggtctgcagttccgcgccggattgctgccggcggacaaagtgaacgcggtgatggcgcttaacgccaacgcgccgctggcaatggtcggcgacggtatcaacgatgccccggcgatgaaagcggcgaccatcggtattgcgatgggcagcggcaccgatgtagcgctggagaccgccgacgcggcgctgacccataaccgcctcaccggcctggcgcagatgatttcgctggcgcgcgccacccatgccaatattcgccagaatatcaccatcgctttagggttgaaggggattttcctcgtcacgacccttctcggcctgaccgggttgtggctggcggtgctggcggataccggcgcgacggtgctggtaacggctaacgccctgcggttattgcgtaaaaagtaa

SEQ ID NO: 111274 - DNA, 246 bp, Enterobacter aerogenes; identical to SEQ ID NO: 108585

SEQ ID NO: 111275 - DNA, 666 bp, Enterobacter aerogenes
atgaatccctttactaccgtacagcgtaagaaagcgctcgtctggctttcgctatttcatctgctggtgatcacctccagcaactatctggtccagctgccgatctccattttcggtttccataccacctggggcgcgttcagttttccctttattttcctcgccaccgatctgacggtgcgcattttcggcgccccgctggcgcgacgcatcatcttcgcagtgatgatcccggcgctgattatttcctatggcatttcggcgctgttttatatgggcgagtggcagggctttgccgcgctgggcacctttaatctgttcgtcgcccgtatcgccgccgccagctttatggcttatgcgctggggcaaattctcgacgtccacgttttcaaccgcctgcgtcagaatcgtcgctggtggctggcgccgacggcgtcgaccctgttcggtaacgtcagcgataccctggccttcttcttcatcgccttctggcgcagcccggatccgtttatggccgcccactggggagaaatcgccacggtcgactactgctttaaagtgcttatcagcatcgtcttcttcttgccgatgtacggcgtgctgttgaatatgctgttgaaaaaactggcggataaatctgatttgtcggcattgcagccaggttaa

SEQ ID NO: 111276 - DNA, 558 bp, Enterobacter aerogenes
atgcgcaatttggttaaatatgtcggtattggcctgctggttatggggcttgcggcctgtgataacagcgattcaaaagcgccgaccgtcggggcggcagcagagagcaataccagcggccaggcgattagcctgctggatggtaaactgagcttcactctgcccgcgggcatggccgaccagagcggtaagctcggtacccaggccaacaatatgcatgtctattctgacgccaccggccagaaagcggtgattgtgattgtcggcgacaacactaatgaagatctggcggtgctttccaaacgtctggaagatcagcagcgcagccgcgacccgcagctgcaggttgtgtctaacaaatcgattgagattaaaggccacaccttacagcaactggacagcatcatctccgccaaaggtcagaccgcgtggtcttccgtactgctcggtaagatcgatgacaaattgctgaccctgcaggtcactctgccagcggacaaccagcagcaggcgcagaccgaagcggaaagcatcgtcaacacgctggtcattaactaa

SEQ ID NO: 111277 - DNA, 1221 bp, Enterobacter aerogenes
atgcccgaacccgtcgccgaaccggcgctcaatggactgcgccttaatctgcggattgtctccgtcgttattttcaactttgccagctacctcactatcggcctgccgttggcggttctgccgggctacgttcacgatgtgatgggttttagcgccttctgggccgggctggtgattagtctccagtatttcgccacgctgctgagccgaccgcacgccgggcgctacgccgatctgctcgggccgaaaaagattgtcgttttcggcctgtgcggctgtttcctgagtggtttgagctacctgcttgcagcctggagcagcagctggccactgctgagtctgctgctgttatgccttggacgagcgatcctcggcattggccagagctttgccggcacggggtcgacgctatggggcgtaggcgttgtcggctcgctgcatatcgggcgggtgatttcgtggaacggcattgtgacctacggcgcgatggcgatgggcgcgccgctgggcgtgctgtgctattcatacattggcctcagcggcctggcgatggtcattatggcggttgctctggtggctatcatttgcgcgctaccgcgaacggcggtgaaggcaacgaaagggaaagcgatgtcatttcgcgcggtgctgggccgggtttggccttacggcatggcgctggcgttggcttctgccggctttggggttatcgcgacctttattaccctgttttatgacgcgaaaggctgggacggcgcggcctttgcgttaacgctgttcagctgcgcgtttgtcggcacgcggctgctttttcccaacggtattaaccgcctcggcggcctgaacgtggcgatgctctgttttagcgtggaggttattggcctgctgctggtgggctttgcacagacgccgctgatggcgaaagtcgggactttcctcaccggcgcgggtttctcgctggtcttcccggcgctgggcgtggtggcggtaaaagccgtgccgcagcacaatcagggctcggcgctggcgacctataccgtatttatggatttgtcgttggggataaccgggccgctggccgggcttttgatggcgtggaccgggataccgacgatttatctggcggctgcagggttggtgatggccgcgctactgctgggctggcggttaaaaaaacggcccccggtggttgaaccggaggccgctgcatcagggcaataa

SEQ ID NO: 111278 - DNA, 723 bp, Enterobacter aerogenes
atgaattttaccctgaacataatcgactggcaggcgagagcgcctgggctttgcgaagccgaacagtggcagcaatggtcacggtattcgcacaccatcgatccggcggccccggcggccaaactcaacgaactgccaatgatgaccgctcgccgacttagctccggcagcaagctggcggttgagtgcgggctggcgatgctgcgccgccatgagatcgacgccgttctctataccagccgtcacggcgaactagagcgcaactatcggatcctccacgccctggcgatggagcaagcggtttcgcctaccgatttcgccttatcggtacacaattccgccgttggtaatctgacgattgcggcgaaaaaacccattgtatcatcatcgctttctgccgggcgcgacactttccagcagggattatatgaagtcatggggcttctgcaggcaggttatcaacgcgtgttgatggttgattttgatggttttctgccagagttttaccattcgcagctgccgacggctatgccgacctggccctatgcgacggcctgggttattgagtccggcggcgaatggcagtgccaggctgagcgctatgatgccgttcctgaaagccccctaccgcaaagcctgctgtttttacggcactatctgcagaattcccatacgttcaccctgcccggcgagcgcgtgcagtggcgctggagccgcgcatga

SEQ ID NO: 111279 - DNA, 816 bp, Enterobacter aerogenes
atgacgccgcttttccaacggttaaatcgcctgtggcgcgcagcgatgaccggtttttgtttcgcgctgtttggccttggcgggctgctgctgtcactgatctggttcaatctgctgctggtcgtggtgcgcgataacacccgccgtcgtcgtctcgcgcggcgcagcatttccgccagcttccgcgtttttcttaacgtcgtgaaagccgtcggcgtactggactaccagattaaagggcgcgagattttacgtcaggagcgcggttgcctggtggtcgctaatcatcccagcctcatcgactacgtgatgctggcctcggtgatgccggaaaccgactgcctggtgaaaagcgcgttgctgaaaaacccatttgtcagcggcgtgatccgcgcggcggattatttgattaacgatcgcgccgataccctgcttccggccagtcggcagcgtttacagcagggcgatactattttgattttcccggaaggaacccgaacggtgccgggagaaaaaatgcagctgcagcgcggcgcggccaatatcgccgtgcgctgcggcagcgatttacgcgtcgtcgttatccgctgtaccgagcatatgctgggcaaacggagcaaatggtacgacccgccgcgaacgaagccgttatttaccgttgaagtcggagaacggctacgaatagaccaattttacgatgccaacacacaagaaccggcgctggccgcacggcagttaaaccggcatattttgcttaaattagaatcaggcgttgcgcctgaaacaggaattaatgatggaagcgctctatcttga

SEQ ID NO: 111280 - DNA, 258 bp, Enterobacter aerogenes; identical to SEQ ID NO: 87713

SEQ ID NO: 111281 - DNA, 252 bp, Enterobacter aerogenes; identical to SEQ ID NO: 87712

SEQ ID NO: 111282 - DNA, 582 bp, Enterobacter aerogenes
gtgtcgggcatccgctcgctgccggtcgtttcaattatgacggggttattactgctggcctggccatttttgatctggtttggcctcgcgcataacagcctgccatggctgttgccgctaatggcgctactgctgtttttacgctttcgccagacccggcgacagtcagggccgttgagcgtggtcactcagatcgttgcggtagccggcatgacgctgtgcattgccagcttcctgctaaagacccatcagctactgctattttacccggtggtggtgagcggcgtgatgctggcggtgtttggcggttcgctgtggtcaagtatgcctgtagtcgagcgcctggcgcggttgcgggacccggttctttctgagcaagccgtgcgctacacccgccgggtcacccaaatctggtgcgcctttttcatcggcaacggcggtatagcgctggttaccgcgttatatggcgatatgtcgctatggacggcgtggaacggcatgatttcctatctgctgatgggcatgttgatggccggagagtggctggtgcgccagcgggtgattaaacgagataaaccatga

SEQ ID NO: 111283 - DNA, 1350 bp, Enterobacter aerogenes; identical to SEQ ID NO: 108584

SEQ ID NO: 111284 - DNA, 354 bp, Enterobacter aerogenes; identical to SEQ ID NO: 108583

SEQ ID NO: 111285 - DNA, 1692 bp, Enterobacter aerogenes
atgccgctagctttctctccctgcgtgctgatcccctgctataaccacggcgccatgatgccgcgggtgctggcgcgcctgcagccctttggcctgccttgcatcgtagtggacgacggcagcgatagcagtacgcggcagcagttggagcggctggcggcggaaaccgccaatctgaccttaatccgcttaccacacaacgcgggcaaaggcgcagcggtgatccgtggactacaggccgcagcgcaagccgggttcagccacgcggtgcaggtcgatgccgatggtcagcacgccatcgaagatattccgcaactgttggcgctggcgcaggcccatcccgaagcgctgatttccggccaaccgatttacgacgactccatcccgcgttcccgcctctacgggcgctggataacccacgtctgggtatggattgaaacgctgtcgctgcagttgaaagacagcatgtgcggttttcgcgtctacccggtgacaccaacgctacagctggcgcagcgcgtgtcactcggccagcgaatggattttgataccgaagtgatggtgcgcctctactggcagggaaataccagctattttgtgccaacccgcgtgacctacccgccggacggtttgtcgcattttgatgccatcaaagataactgccgcatctcgctgatgcacacgcgtctgttcctcggcatgctgccgcggatgccgtcgctgctgtttcgccgcgcctcgccgcactgggcgcgtcagcaggaggtaaaaggattatggggaatgcgcctgatgctactggtgtggcggctgctggggcgcaaggcgttctcgctgctgctttatccggtggtcggcgtgtactggctgacggccgcgacggcccgccgtgcttcgcaacaatggataacccgcgtgcgcgaacagctcgccgcgcgccagatgccgataccgccaacgctaaccagctatcggcacttccagcgcttcggcgaggcgatgctggataaaatcgccagctggcgcggcgaattgcagttcggccgcgacgtggtttttaccgcaggcgccgaggagacgctaaatatcagcgatccgcgggggaagctgctgttggtttcgcatctcggcgatgtcgaagcctgccgcgcgctggcgcaactacagggcggcaaaaccatcaacgctctggtattcagcgaaaatgcgcaacgttttaaacagattatgacggaaatggcccctcaggccgggctcaacctgatgccggtgaacgatatcggcccggataccgccatcctgttgcaagaaaagctggatcgcggcgagtggatcgcgattgtcggcgaccgtattgcggttaacccgcagcgtggcggcgaatggcgtgtctgctggagccgttttatggggcaagccgcccccttcccgcaggggccatttatcctcgccgccattttgcgctgcccggttaatttgcttttcgctctccgccagcagggcaaactgcgcatttactgcgagccgttcgccgacccgctgctattaccgcgcgccgatcgccaacaggcattgcaacacatcatcgaccgctacgccgaacggctggaacactacgcgctgcagtcgccgctcgactggtttaactttttcgatttctggcgtttgccggatcccaaagacaaggagtaa

SEQ ID NO: 111286 - DNA, 423 bp, Enterobacter aerogenes; identical to SEQ ID NO: 105869

SEQ ID NO: 111287 - DNA, 606 bp, Enterobacter aerogenes
atgagattactgctgctgttagggctgtttatcagcccgctggtcagcgccctcacgcttgatgacctgcaaaaacaatttagcgaacagccggtggtgcgcgcccatttcgatcaagttcgcacgattaaggatctgccgcagccgctgcgatcccaggggcagatgttgatcgcccgcgataaggggttgctgtgggatcaaacctcgccattcccgatgcagctgttgctggatgacaaacggatggtgcaggcgatcaacggccagccgccgcaaaccattactgccgaaaacaatccgcagatgttccagttcaaccatttgctgcgcgcgctgttccaggcggatcgaaaagtcctggaagataacttccgcgtggaatttgccgataaaggcgaaggccattggacgctgcgcctgacgcccaccactacgccgctggataagatttttgcccgcatcgatttggccgggaaagactatctggaacatattcagctcaacgacaagcaaggcgatcgcaccgagatcacgctttcccaacaccaactgacgcctgcgcaactgaccgatgacgaacgccaacgctttgccgcccagtaa

SEQ ID NO: 111288 - DNA, 2319 bp, Enterobacter aerogenes
atgacgaacgccaacgctttgccgcccagtaaacgccccgcgctgttatgggccgtcgtctgccttctcctggcgggcgcgctgctggcgctgctgccgcaggcccggctcaacagcagcgtactggcgatgctgccgaagcagacgcttggcgcaatcccgcccagcctgaacgacggttttatgcagcgccttgaccgccagctggtctggctggtcagccccggtaaacaggccgacccgcaggtggccggcgactggctgcgtctgctgcaaacctcgaaggcgctggcagacgtcaaaggcccaatgaatgccgataatcagcaggcctgggggacctttttctggcagcatcgtaacggtttaattgaccccgctacccgcgcgcgcctgcaaaacggcggcgaagcgcaggcgcaatggatcctctcacagctctattcggcattttccggcgtcagcggcaaagaactgcaaaacgatccgctgatgctgatgcgcggctcgcagctggcgatggcgaaaggcggccagcggatgcaactgcaggatggctggctggtgaccaaagatgcccagggcaacctctggtatctgttgcatggcgaactggcgggttcctcattcgatatgcagcagacgcaccggctggtcactacgctcggcgagctggagaagcagtggaaaacgcagcatccgcaggcgcagctgctgtcgcgcggcaccgtgttctatagcgattacgccagtcagcaggcgaagcacgatatttctacactcggcgcggcgacgctgttcggcgtgatcctgctgatcgtcgtgacgtttcgttcgctgcgcccgctgctgctgtgcctgatttccatcgccatcggcgcgctggccggcaccgtcgtcacgctgctgctatttggcgaactgcatctgatgaccctggtgatgagcatgagcatcatcggcatctccgccgactatacgctctattatctgaccgaacggatggtgcatggcgcggaatcaaccccgtggcaaagcctcgccaaagtgcgtcatgcgttgctgctggcgctacttactaccgtggcggcttatctgattatgatgctggccccctttccggcgattcgccagatggcgctcttcgcggcggtcggcctgagcgcctcgtgtctgacggtaattttctggcatccatggttgtgccgtggacttcccgtgcgcccggttccggcgatggcattgttgttacgctggcttgccgcctggcgacgccataaaaagctgtccatcggcctccccgtcgcgctggccctgttctcgctggcgggtctcgcgacgctgcgggtggatgatgatatttcgcagctccaggcgttgccgcaggatatcctggcccaggaaaaagccatcaccgcgctcaccgggcaaagcgtcgatcaaaagtggtttgtgatttacggcaaaacggcccagcagacgctgcagcgcctggaggcatttatgcccgcgctgacgcaggcgcaaagcgacggcctgctcggcggatatcgcgctatccccctgaattcacttgctcgccaacagcaggatcttgccctgctgcaacgcgccgcgcccaccgtcagtaacgtgctgaaccacgccggactggcaacgatcaatcccgatctcaacccgatgccagtgaccgtcgacgtctggcttgccagcccggccagcgaaggttggcgactgctgtggctgacgctgccggatggcgaaagcggcgtactggtcccggtgagcggcgtaaaagacagcgcggcgctaaaaacgcttagtacaaaacaggctggcgttgcgtgggtcgatcgcaaacgcgatttcgaccagttgttcgcgctctaccgccacattctaaccggcctgctgggcgttgcgctggcggtgattgcctgcggcgctatgctccgccttggctggcgcaaagggctggttagcctggtgccgtcggtattgtcgctgggatgcgggctggcggtgctggcatttagcggccacgcggttaacctgttctccttgctggcgctggtgctggtactgggcatcggcattaactacacgctgtttttcagcaacccgcgtggtacgccgctgacatcgctgctggcggtcaccctggcgatgatgaccaccttattgacgctcggcatgttggtgtttagcgccacgcaggccattagcagttttggtattgttttggtaagcggcattttcgcagccttcctgctttcgccgttagcgatgccgaccaaaaaagagaaaaaaagacgatga

SEQ ID NO: 111289 - DNA, 585 bp, Enterobacter aerogenes
atgagaagaccatcattctggcgcgccttcgcgctactcgccgccttattgctggccggctgcagccgttcgcagccggagccgcaaggccgcccgcaggcgtggctggaaccgggtacgcgcgtcacgttgccgccgcctggtatctcgccggacatcagctcgcagcagttgctcaccggcagcttcaacggccaaacccagtcgctgctggtcatgctcaatgccgatgataaaaagctcacgctggcgggtctgtcatccgtcggtatccgcctgttcctggtgacctatgatgaaagagggctgcgcgctgaacagtcgatggtggttccgcaactgccgccagccagccaggtgctggccgatgtgatgctcagccactggccggttagcgcatggctgccgcagttgccaaaagggtggacgttgaccgagcgcggcgacaaacgcgaactacgtaacgcgcgcgggaagctggtcaccgaaatcacctatatcaaccgccaaggccagcgcgtgccgatcagcatcgaacagcacgtctttaaataccacatcaccattcaatacctgggtaactga

SEQ ID NO: 111290 - DNA, 1170 bp, Enterobacter aerogenes
atgatctacatttccgccgtcggcatgattaacgcgctgggccgcgataacgatgaaatcgccgccaatttggctcgcggtatcgcgcccggcatgcgtccgcgcgaggggtggctacaggggcatccgcaggcggttttcgcgggtgtggacggcgaattgcccgccattcccgatacctttagcgcccatcgttcgcgcaataatcagctgctgctggcggcgctggcgcaaattcagccgcaggtggatcgcgccatcgcccaatacggacgagagcgcgtggccgtagtgctcggcaccagcacctcggggctggatgagggtgacgcgcatgtcaccctgacgcttggcggcaaggaaagcgcggcctggcaatatccgcaacaggagctgggcgacccatcgcgttttctcagccactggctggcgctggatggcccggcatttacgctgtcaaccgcctgctcctccagcgccagagcgattatcagcggacgccgactaattgaagccgggctggcggatgtggcgatcgtcggcggcgcggacaccctcagccgaatgccgatcaacggctttcacagtctggaatcgctctccacgacgcagtgccagccatttgcccgcgaccgtaacggtatcactatcggcgaaggggcggcgctgatgctgttgacccgcgaaccgcagccagtcgcgctactgggtatcggcgagtccagcgacgcctggcatatttccgccccgcatcctgaaggagagggggcggtccgcgccatccagcaggcgctgggggatgcggacatcgcccctgaacaagtgggttatatcaacctgcacggcaccgccacgccgcttaacgatagaatagagtctcacgtcatcaacgcgctatttggcgttcgggtaccctgtagttcaacgaaacacctgaccggacacacgctgggcgccgcggggatcaccgaagccgccatcggcatgctgattctgcagcgaaacctgccgctgccagcgcaggatttcagccagtcgccgcgcgatgaaacactaccgccatgcgggatcatcgaacatccccagccgctgccgcgaccgattatcctgtcgaactcttttgcttttggcggtaacaacgccagcatcctgctcgggagcattcaatga

SEQ ID NO: 111291 - DNA, 477 bp, Enterobacter aerogenes; identical to SEQ ID NO: 107503

SEQ ID NO: 111292 - DNA, 732 bp, Enterobacter aerogenes; identical to SEQ ID NO: 107504

SEQ ID NO: 111293 - DNA, 1230 bp, Enterobacter aerogenes
atgacacgccgtgtggtcattaccgggatgggcggcgtcaccgcatttggcgaaaaatggcaggatgtctcggcggggctgaagagatataaaaacgccgtacgcgccatgccggagtggcgtatttacgacgggctgcatacgctgctgggcgcgccgatcgatgatttcaccctgcccgaccactatacccgcaagcgcattcgcgcgatggggcgcgtatcgttgctctccacccgcgccactgaactggcgctggagcaggccgggctaatcgacgatgccatactgagtaacggcgaaaccggcatcgcctacggttcatcaaccggcagtaccgccccgatgagcgaattcgccaccatgttgacggaaaagcacaccaataatattactgctaccacctacgtgcagatgatgccgcataccaccgccgtcaatacgggcctgttttttggcctgcgcggccgcgtgatcccgacgtccagcgcctgtacctccggaagccaggcgattggttacgcctgggaagcgattcgccacggctatcaaacggtgatggtcgccggcggcgcggaagagctttgcccgtcggaggccgcggtattcgatactctgtttgccaccagccagcgcaatgagcagcccgacattaccccctccccctttgatgtgctgcgcgatgggctggtgattggcgaaggggccggtactctcattctggaagaactggagcacgccaaagcacgcggggcgaccatttacggcgaaatcatcggcttcgccaccaactgcgatgctgcgcatatcactcaaccgcagcgtgaaaccatgcagatctgcatggaacaatcattaaaaatagcaggcctgagcgcccgggatatcggctacatttcggcccacggcaccgcgaccgaccgcggcgatatcgccgaaagccaggcgacggcggcgatttacggcgatagcgtgccgatctcctcgctgaaaagctatttcggccatacccttggcgcctgcggggcgctggaagcgtggatgagtctgcagatgatgcgcgagggctggttcgcgccaacgctgaatttgcataatccggacgccaattgcggagaactggattacatcatgggcgaagcgcgccagattgattgtgaattcctgcagagtaacaacttcgccttcggcggtattaacacctcaatgattattcagcgctggtcctga

SEQ ID NO: 111294 - DNA, 588 bp, Enterobacter aerogenes
atgtatcagcttatccttggccaaatctcaacgcttagcgccctgccgttaccgactgggttagcggcccaggcccctgatggcccgcggcgggcaagctggcttgccgggcgcgcgctgctggcgcatgcggcggccccgctggcggatattgcgtatggcgagcagggcaaaccggctttcccgcccggctgcgggcggtggtttaaccttagccacagcggcgaccagattgccctgctgctgagcgatgaaggcgaggttggctgcgatatcgaagtgattcgtccgcgcaacggctggcagcggttggccaacgccctgtttagcgagggcgagcatcaggaactggagcgcgaaccgccggagcggcagctagccgccttttggcgaatctggacgcgcaaagaagcgctggtaaagcaacgcggcggcagcgcctggcagatggcctctgttgacagcgcctttcgcagcacgctgtcattaagccagattcagtatcaagggttaagtattgcggtctgtacgccaacgccgttctcgctgacggcggcgcacattcaatgtttcaacggcgcggcttga

SEQ ID NO: 111295 - DNA, 384 bp, Enterobacter aerogenes
atggggttaatctgggcgttattgagcgtcgggctggtcagcggcgcgcagctgttactgcgcagcgcgatggtcgagctgccgccattgaccgatatcctgacctttctcaattatctactgcatttgcgcaccggtaccttcagcctgggtttcggcctggttggctatctgctgtcgatggtctgctggtatttcgcgctacaccgcttaccgttggccaaagcttacgcgctgctcagcctgagctacattctggtgtgggccgccgccatctggctgcccggctggcacgagccgttttactggcaatcgctgctgggcgtgctgattattatcgccggcgtgctgactatcttctggccggtcaagccgcgccgttga

SEQ ID NO: 111296 - DNA, 339 bp, Enterobacter aerogenes; identical to SEQ ID NO: 107508

SEQ ID NO: 111297 - DNA, 1656 bp, Enterobacter aerogenes
atgaaaagcattcgttatggcatctctctggttgtactctttgcgctgtattacttattgccgttaaatttccgtttgctgtggcagcctgatgaaacccgctatgccgagatcagtcgtgaaatgctggcctccggcgactgggtggtgccgcatctgctgggcctgcgttactttgaaaagccgattgccggttactggattaacagtattggccagtggctatttggtcataataactttggcgtgcgtttcggttcggtcttcgccattaccgtcagcgcgttgctggtggcgtggctggcgtggcgtattttccgtgataaacgcgtggcgatcctgtcgccggttatcttcctgaccgcgatgctggtatacggtatcggaacctatgcggtgctggatccgatgatcaccatgtggctggcgctggcgatgtgcagcttctggggagcctcccaggcgcagagccgcagcgggaagatgttgggttatgtcctgctgggagtcgcctgcggtatgggggtgatgaccaagggcttcctggcgctggcggtaccggtggttggcgtgctgccgtgggtgatggcgcgtaaacgctggcgcgaagtgctgacctacggctggctggcggtggcggtctgtacgttggtggtgctgccgtggggattggctattgccaatcgcgaacccgatttctggcgctatttcttctgggtcgagcatattcagcgtttcgctgagaaagacgcgcagcataaagcgccgttctggtactacattccgttcctgattgccggcagcctgccgtggttggcgctgttaccgggcgcgctgaagcgcggctggagcgagcgcgatgatgcccgcggcgcgctgtatctgctaggctggatagcgatgccgttcctgttcttcagcatcgccaagggaaaactgccgacctacattctgccgtgctttatgccgctgtcgattttgatggcccgctacgcgctggatgccgcgaaggcgggggcgaaagcgctgcgcatcaacggcatgatcaacctcggttttggtctgatcggcctggtcgctgtgctggtggtctcgccgtggggcgtcatgcataagccggtgtggacgaagatcgagctgtataaatgtctgctggcggcgattgcctttgccgtatgggcgctgatgggctggctggcgataaaagacaacggtcgtcgctggacgctggccgccatctgtccgctgggagtggcgctgctggtgggcttcgctatcccggatcgggttatcgacagcaaacagccgcagtttctggtggatattgttagcgaatcgctggcgccaagccgctatgtactgaccaacagcgtcggtatcggcgcggggctggcgtgggagctcaagcgtgacgacatcatcctgtatgaaaggcagggggagctaaaatatggcctcggctggccggatgcgcagagcaaattcgtggcgactcaagcttttgctgattggctggcggcgcaccgccagcagggaccgatctcactggtgctgcggatggataaaggtgaaacgatgaacgaactggcgttaccgaaacctgataactcctacgagctggggcgcgtggtgtttattcagtatctgccgcaatga

SEQ ID NO: 111298 - DNA, 903 bp, Enterobacter aerogenes
atgaaacaagtcggcttacgcatagatgtcgatacctttcgcgggacgcgtgatggcgtaccgcggctgctggccctgctgggcaagcacgggattcaggcaagcttctttttcagcgtcgggccggacaatatggggcgccatttatggcgcctggtaaaaccgaagtttctgtggaaaatgctgcgctccaacgcggcctcgctgtatggctgggatattctgctggccggcaccgcgtggccggggcgcaggattggcacgggtaacgaagaggttattcgcgccgccgcgcacatccatgaagtgggcctgcacgcctgggaccactacagctggcaagcgtggagcggcgtctggccacaggaacgtctgacgctggaaattgaacgcggtctgctcgaactggaacgcattatcggccgcccggtgacctgctccgccgtcgccggctggcgtgccgaccagcgggtggtaaaagcgaaagaatccttcgatttcctctacaacagcgattgtcgcggcacgcggccattcctgccgcagattggcggcggggcctccggcaccgtacaaattccggtgacgcttcccacctgggatgaagtcgtcggtagcgttgtggataccgccggcttcaaccgctatctgctggactgcattcatcgtgacaagggaacgccggtctataccatccacgccgaagtggaaggcattgcctacgccgatcagttcgatgcgctgctgaccatggcggaggaagaagaaatacaattttgcccactgagccagctgctgcccgctgactttagcgagctgccgtcaggcaaagtggtccgtggtgagctggctggccgggaaggttggcttggacgtgaacaattactgggctcgggtgtatga

SEQ ID NO: 111299 - DNA, 1986 bp, Enterobacter aerogenes
atgaaagcagtagtcttcgcttatcacgatatgggttgcgcaggtattcagtcactgctggatgccgggtatgacatcgccgctattttcacccatccggataaccctggcgaaaaccaattctttggttccgttgcccgcattgccgccgagcaaggtatcccggtatgggcgccggaagatgttaaccatccgctgtggattgaacgtattcgcgagatgaagccggatgtgctgttctcgttctactaccgcaacctgctgtgcgatgagatcctgaatatcgcgccgaagggggctttcaacctgcatggttctctgctgccgaaataccgcggtcgcgcgccgctgaattgggtactggtcaacggcgaaagcgaaaccggcgtgaccctgcaccggatggttaaccgcgccgacgcgggcgatatcgtcgcccaacaagctgtggctatcggcccggatgacgcggcgctggcgctgcaccgtaagctgtgcgccgccgcctccgatctgctgggccaggcgctgccggctattcgtgagggtaagactgaggagcgggcgcaggaccacagccaggcgacctacgttggccgtcgtaccccggaagacgggcgtctcgattgggacaaaccggcgcagactctgcacaacctggtgcgcgcggtatccgatccgtggccgggcgccttcgcctatgccggcgcgaacaaatttatcgtctggaaatcccgcgtgcgcgccgatctgccgacggcgaagcccggcaccgttatctccgtcgcgccgctagtggttgcctgtcagcagggggcgctggaaatcgtcaccggccagaccgaacgcggcgtttacatgcagggcgcccagctggcgcaggcgctggggctggtgaccagcgcggtgctgagcagcaaaccggtggtggcggtgaagcgccgtacccgcgtgctgatcctcggcgttaacggctttatcggtaaccacctgaccgagcgcctgttgcaggacgacaactatgagatttacggcctggatatcggctccgacgccatcagccgtttccttgactgcccgcgtttccacttcgtagaaggcgatatcagcattcactccgagtggatcgaataccatattaagaaatgcgacgtggtactgccgctggtcgcgatcgcgacgcctatcgaatacacccgtaacccgctgcgcgtgttcgaactggatttcgaagagaacctgaagatcatccgtgactgcgtgaaatacaataagcgcattatcttcccgtcgacctcggaagtgtacggcatgtgcaccgacaaaaacttcgacgaagataattccaatctggtggtcgggccgatcaacaaacagcgttggatctactcggtttctaaacagctgctggaccgcgtgatctgggcctatggcgataagaacggcctcaagttcaccctgttccgtccgttcaactggatggggccgcgtctggataaccttaatgccgcacgtatcggtagctcccgcgccatcactcagctgatcctcaacctggtggaaggttcgccgattaagcttatcgaaggcggcaaacagaagcgctgcttcaccgatatcagcgacggtatcgaagcgttgttccgcatcattgagaacaaagacggtcgctgcgatggtcagatcatcaacatcggtaacccggaaaacgaagcgagcatcaaagagctggcggaaatgctgctcgcctgcttcgagcgccatccgctgcgcgatcgcttcccgccgttcgccggcttccgcgaagtggaaagcagcgattactacggtaaaggctaccaggacgttgagcatcgtaaaccgagcattcgcaacgcgaaacgctgcctgaactgggaaccgaccgtcgagatggaagagaccgttgagcacactctggacttcttcctgcgcaccgttgagctcacggacgataaaaactcatga

SEQ ID NO: 111300 - DNA, 984 bp, Enterobacter aerogenes
atgcttacttatcctcccgtaaaaaaagtctcggtggttatcccggtttataacgaacaggatagtctgccggaactgctgcgtcgtaccgacgccgcctgtgcgacgctagggcgccaatatgaaattctgctgatcgacgacggcagcagcgacgattccgcgcgcatgctgaccgaggccgccgaagccgaaggcagccacgtggtggcggtgctgttgaaccgcaactacggccagcactcggcgattatggccggtttcagccatgtcaccggcgatctgatcatcaccctcgatgccgacttgcaaaacccgccggaagagatcccgcggctggtggcaaaagccgatgaaggctatgacgtggtcggtaccgtgcgccagaaccgtcaggacagcatcttccgtaaatctgcctcgaagatgattaaccgcctgattcagcgaaccaccggtaaagccatgggcgattacggctgcatgttgcgtgcctatcgccgccatatcatcgacgccatgctcaactgccatgagcgcagcacctttatcccgattctggcgaataccttcgcccgccgggcggtcgagatcccggtgatgcacgccgagcgcgaattcggcgactccaaatatagcttcatgcgtctgattaacctgatgtatgacctggtgacctgtctgaccaccaccccgctgcgtttactgagtattttcggcagcgtgatagccctgttgggctttgccttcggtctgctgctggtggtgctgcgtctggccttcggtccgcaatgggcggcggaaggggtgttcatgctcttcgccgtgctgtttatgttcatcggcgcccagtttgtcggtatgggcctgctcggggagtatatcggccgcatctataacgatgttcgcgcccgtccccgttactttattcaacgtgttgttcgccagccggaaacggcgtctcaagaggaagatcgttcatga

SEQ ID NO: 111301 - DNA, 1140 bp, Enterobacter aerogenes
atgagcgaatttctgccgttttcgcgcccgtcgatgggcgacgcagagctggctgcgctgcgtgaagttttgcaatcaggatggatcactactggtcctaaaaaccaggcgctggaagaggcgttttgccaactgaccggcaaccgccacgccatcgccgtcagctccgctaccggcggtatgcacgtcacgctaatggcgatgggcattggccctggcgacgaagtgatcaccccttcgcaaacctgggtgtcgacgctgaatatgatctgtctgctgggcgctacgccggtgatgatcgatgtcgatcacgataatctgatgattacccctgaggcggtggaagcggcgatcacctcgcggacgaaagcgattattcccgtccactacgcgggcgcgcctgcggatatcgatgcgatccgcgccgttggcgagcgccacggtataccggtaatcgaagatgccgcgcatgccgcgggaacgcactataaaggccgccacgtcggctggcgcggcaccgcgattttctcgttccacgcgatcaaaaatatgacctgcgccgaaggggggcttatcgtcaccgatgatgacgagctggcttcccgcatccgcagcctcaaattccacggcctgggcgtagacgcctacgaccgtcagacccacggccgcgcgccgcaggcggaagtgattactcccggcttcaaatataatctggccgatatcaacgccgcgctggcgctggtgcagctggataagctggcgcaggcgaatcaacgtcgcgctgaaatcgcccaacgctacctgcgcgagctggcggataccccctttaagccgctgaccattccggcatgggatcatcagcacgcctggcacctgtttattatccgcgttgatgaagtggcctgcggcatcagccgcgatgccctgatggaaaaactcaaagccatgggtataggcaccggtctgcacttccgcgcggcccatacgcaaaagtattaccgcgagcgttttcctgaagtttcgttaccgaataccgaatggaacagcgcgcgcatttgttccatcccgcttttcccggatatgaccgacgacgatgtcacccgcgtcattaccgcgctgcatcagttgtcaggacgttga

SEQ ID NO: 111302 - DNA, 504 bp, Enterobacter aerogenes
atgagcacttttgacaaacatgacctcagcggttttatcggtaaacatctggtttatacctacgacaacggctggaactacgaaatttacgttaaaaatggcaccactctggactatcgtattcacagcggtatcgttgctaatcgttgggtgaaagaccagcatgcgtacatcgtgcgggtaggcgaaagcatttataaaatttcctggactgaaccaaccggtaccgacgtcagcctgatcgtcaacctgggcgacaaactgttccacggcaccattttcttcccccgctggatcatgaataacccggaaaaaaccgtctgcttccagaacgatcatattccgttaatgaacgcctatcgtgacgccggcccggcctacccgaccgaagtgattgatgaattcgcgactatcacttttgttcgtgattgtggcgcggataataacgatgtaattaattgcccggctaatgaattacccgcagattttcctgcaaacttgtaa

SEQ ID NO: 111303 - DNA, 861 bp, Enterobacter aerogenes
atgcacaagaccacgctggaacaatgggcgctattggaaaaggtgattgagctgggcagttttgccaaagccgcggaagagaccaaccgcagccagtcttcggtgagctataacctggcgctgctgcaggaacgtttaggggtggcgctgctggcgccgtccgggcgacgggcggtgctgacgcccgctggcgaactgctgcttaatcaggtgaaaccgctactgaaggccttttcgtgggttgagacccacgccgcgacgctgcgcaacggcgcgcgcacccgcctggatctggtcgtcgacagcatttttccccgccagcggctcttcgccattctgcgtcagtttcagcaacgctacccgcaaactcaggttcggctgaccgaagtgctggaaaacgtcgatgaggcaagcgccgcccgcagcgaggccgatgtgatggtcttaacgcgtcgccaggatattaccggacgcggcgaatggctgatgaatatcgattttattgcggtcgcccatcgcgaccatccgctgtcgcaattggaagaaccgctggacgacaacgcgctggccccctggccgctgatccgcattgccgaccgtagcggcgacgcctcatccacccgcgatgcctggaccttttctaccattgatgccgccattgatgcggtactgtatcaggtgggattcggctggttgccggaagagcggatacgcgcacacctggaacagggcgtgctgaaagcgctgccgctgagccatggcgctcgccgcgccacgccgctgcatttgatagtgaagcgggatctggcgccgctcgatgaacaggtcaccaccctgctggatttgttcagacaatcgtaa

SEQ ID NO: 111304 - DNA, 1569 bp, Enterobacter aerogenes
ttgtctattttccgcaccaccttgctggcgctctgcgcctgcattcctctgctcgcgcccgccgccatgcatgaaatcgccatcgcctggccggttaacgtcggtcctctcaatccacatctgtatacgccgaaccaaatgttcgcccaaagtatggtgtatgagccgttagtcaaatatcaggccgatggccgggttacaccctggctggctacccgctggcttcactcagccgatggtaaaatctggcgtttcaccctgcgcgatgatgtctacttctccaacggcgaaccgtttaacgcccaagccgcagtggccaatttccaggcagtgctggccaaccgccagcggcacgcctggctggagttgaccaatcagataaccgacgttcaagcgctcagcgataacgaactacaaatcaccctgaaaagcgcctactacccgttcctgcaggaactcgcccttccccgcccgtttcgttttatcgccccctcgcagtttgttgacggtagtacgcagcgaggcatcaaggcgcccatcggcaccggtccgtggatgctgtccagttcgcagcttaatcagcaggatgtgctggtacgcaacccgcgctactggggcaaaaaaccggcgcttgagaaagtcaccgtgaaagtgatccccgacgccaccagccgggcggtcgcctttgaaaccggtgaagttgatctgctgtacggtgatgaagggctactgccgctggatacgttcgcccgttttcgccagcaggacgagtatcgcacgcgtctttccgccccgacgcaaaccgtgatgctggcgctcaatacgctgcaagcgcccacgaatgatttagcggtacgcgaggcgcttaactatgccgtcaataaacaggcgctcattgacggcgtgctgtacggcacccaacaggttgccgacacgcttttcgcgccctcggtaccttacgcgctggatgacctgccgccgcgccgcttcaatccggataaggcccgtacgctgctggaaaacgccggctggacgctaacgcccggcaaggatattcgtgaaaaagacgggcacccgttgcatcttgaactggcgtttatcggcaccgatgcgctggccaaatcgatggcggaaatcatccaggccgatctgcgccaggtaggtatcgatgtcgggctggtcggcgaagaggagagcagtatctatgcccgccagcacgatggccgcttcacgatgatcttcaaccatacctggggcgcgccgttcgacccgcatgcgtttatgagctcaatgcgcgtcgcttcgcacgccgactatcaggcgcagcgcggactgccggataaagcagagattgataaagagatcggcgaggtcctgactaccaccgacgagggccgccgtcgcgaactgtatcgcgatatcctcacccgcctgcacaacgaagcggtctatctgccgataagctacgtctcgctgatgtccgtcgcccgcaaaacgctgggcgaagtgcccttcgcgccggtgaccaccgatctgccgttagaactcattacgccggtgacaccatga

SEQ ID NO: 111305 - DNA, 948 bp, Enterobacter aerogenes
atgatgttgaaatatcttcttcgccgcctgctcccgctgccgttgatgctgcttgccgcctcggcgatcatcttcctgttattacgtcttggcgccggcgacccggcgctggactatctgcgtctctccaacgtgccgcccaccagcgaaatgattgccgctacccgcgagcagctcgggctcaatcagccgctggcgctgcagtatctacactggctgtggcgcgcgctgcatctcgattttggcgtctcctacgccagccagcgcccggttctggaagacctgctgcattttctgcccgcgacgctgcagctcaccggcgcggcgctggtgattattctgctgacctcgctaccgctggggatctgggcggcgcggcatcgcgaccgcttgcctgatttcgccgtacgattgattgccttcctcggcgtctcaatgcccaacttctggctggcatttttgctggtaatgctcttttccgtccatctgcgctggctaccggcgatgggctacggcggctggcgacatctgctgctaccggcgttttccatcgccctgatgtcgctggcgatcaatgcccgtctgctgcgcgccagcatgctggaagtgtccagccagcgccacgtggtctgggcgcgtctgcgcgggctgagcgagggtcaggtggagcggcgacacgtgctgcgtaacgcgacgttgccggtagtgacggcgctgggtatgcacatcggcgagctaatcggcgggacgatgatcatcgaaaatatcttcgcctggcccggcgtcggtcgctatgcggtttccgcgatattcaatcgcgactacccggtgatccagtgctttaccctgatgatggtggcggtgttcgtgctggccaatctggcggtcgacctgcttaacgccgcgctcgatccgcgcctgcgccgccatgaggaggccgccgtatga

SEQ ID NO: 111306 - DNA, 834 bp, Enterobacter aerogenes
atgacgctgttcgcgaccttccgctggccggtaaaactggcgctactcactattgcgctgctggcggcaatcgccatgagcagcggctggtggctgccctatgacccggcggccatcgatctccatcaacgtctgctctctccgggcgacgcccactggctcggcaccgatcatctcgggcgggatattttctcgcgccttctcgccgccacccgcgtctcgctgggcgcagtgatggcctgcctgctgctggtgctgctgatcggccttacggtgggcggcgccgccgggatggtgggcggacgtgtcgatcgcggcctgatgcgcctggccgagctgtttatgaccttcccgacttcaatactgtcattctttatggtcggtgtactcggtaccggtcttagcaacgtgattatcgccattgcgctgtcgcactgggcctggtacgcaaggatggtgcgcaatctggtggtctctctgcgccagcgcgagtttattctcgccgcgcgcctgagcggcgcgggacattggccattgtttcgtgaccatctggccggcgcggtgatcccttcgctgctggtgctcgcctcgctggatatcggtcatatgatgctccacgtagccgggatgtcattcctcggcctcggcgtcagcgcgccgacggcggaatggggggtgatgatcaacgacgcccgccagtacatctggacgcagccgctgcaaatggtctggcccggactggcgctgtttatcagcgtgatggcttttaatctggtgggcgacgcgctgcgcgatcgtctcgatcctcagctgatcgcggagcataaccactga

SEQ ID NO: 111307 - DNA, 765 bp, Enterobacter aerogenes
atgccgcaaaagatccaactggaacaactttcgctcgtcgccgaccgtccgctggtcagcgacgtttccctaaccctgcgtcgcggtcaggtactggcgctgctcggcagtagcggcagcggtaaatcgctgacctgcgccgccacgctcggcattttaccgcccggcgtcagacaaaccgcgggcagggtgctgctcgacggtatcccggtatacggtgaacagctgcgcggcgcgaccatcgccaccattatgcaaaacccgcgcagcgcctttaatccgctgcacaccatggcggcgcacgcgcgggaaacctgccgggcagcgggccacaaggctaataacgtcgcgctgctggcggcgatggaagaggtggggctggaaaatccgctctcgctgctcaagcgctatcccttcgagatgagcgggggcatgctgcagcggatgatggtggccctggccctgctcagtcgcgcgccgtttatcatcgccgacgaaccgaccaccgaccttgatgccgtcgcccaggcgcgcattctcgacctgctggcggatatcgtcgccaaccgcgggcaggggctgctgctggtgacccatgatatgggcgttgtcgcccggctggcgcatgacgtggcggtgatggaaaacggccgtcttgttgaacgctgcgacgttaacacgctatttagcgccccacagcacccgctcagccagcgcctgctggccgcccatctggcgctatatggcctggagaaaacaccatga

SEQ ID NO: 111308 - DNA, 792 bp, Enterobacter aerogenes
atgaatttactcagcgtgaacgcagtgagccacgattatccccaccacggtgcggtattgcgcgatatccagttcgacatcgccctcggtgaaacggtggcgctgctcgggcgcagcggctgcggcaaaagtaccctggcgcggatgctggtcggtctcgaaacgccgcggtatggcgatgtcgcctggcgcggcgcatcgctgacctccctgaagggggaggcgatcggcgcctttcgccgcgatattcagctggtgtttcaggatgccattagcgcggcgaatccgcgcaaaacggtgcgcgagattatcagcgagccgctgcggcacctgtttagtttatcgcgtgaagagcgtacgcagcgggtggaggagatgctgctggcggttgacctcgccccggcgcagctcgacaaacgtccggcgcagctcagcggcggacagctgcagcgcgtgtgcctggcgcgggcgctggtggtccggccgcagctattaattctcgacgaagcggtatcgaatctcgatctgatgcttcaggcggatattatcgccctgctcaaacgcctgcaggcgcagttcgccaccgcctgcctgtttatcacccatgacctgcgactggtggagcgtttttgccaacgggtactggtgatggatagcggacgcatcgtcgaaacggccgcagtaagtttgccgctgcgccttacatccgctgccggacaggcgctacaacgcgcggtactcccgccctttccccgcactctgcttaacgaggccatgctatgcagcgcgtaa

SEQ ID NO: 111309 - DNA, 414 bp, Enterobacter aerogenes
atgcagcgcgtaaccctgactctggatgatgatctgctggccgcgctcgacgcgcacagcgcccaccgcgggtaccacaaccgctcggaagcggtgcgcgatattctgcgtgaggcgcttcaccacaatccgctacagcagccgacgcaacgcggctatgcggtcctgtcgtacgtgtatgagcatgaaaaacgcgaactggcgagccggctggtcgcctcttcgcatcagcatcacgatctctcggtcgctacgttacatgtccacatcaatcatgatgactgtctggagatcgcggtgctaaaaggcaacatggacgaagtacagcattttgccgacgaggtgattgcccagcgcggcgtgcggcatgggcatttgcggtgtttagggggtgataaaaaccttgaaaattaa

SEQ ID NO: 111310 - DNA, 1014 bp, Enterobacter aerogenes
atgtcttccattcaactctgcgccgcgcatcaggcgacctctggcttcgacggcgatgcgatcgcccagtacatgcgtaccgactttattacgctgcaggaacatttcagcgtccatgaggcgcgtgaacactttatctcgcagctcgccagcgacgatattcccggccaggtatttgtcgtcgccggtaacaagctgcgcggcagcttatcagtcaaaaaactattgcaggaggcagaggtaggccagtctattcgctacctgatggacagctgtctgtttcgcgttaaacccgacgatgagcgccctcaggttattgccgaactcaccgagcgcggcctcgatctggtgccggttgtcgataaaggcgagctggtcggctgcctgatggaaaaagaaattgcccatctgctggaggatgacgtcaccgaagacgcccagctgcagggggcgacgctaccgctggaaaaaccgtatctggaaatcagtccgtggacgctgtggaagaaacgctcggtctggctgctactgttatttgttgccgaagcctacaccagcagcgtgctgcagcattttgaagaggcgctggaatcggccatcgcactggccttcttcatcccgttactgatcggcaccggcggcaacagcggaactcagatcacctcaacgctggtgcgttcgatggcgctgggtgaagtccgtttacgtgacatgggacgggttatccgcaaagaggtgtcgacctcgtttctgattgccctgaccctgggtctggcgggctgcctgcgcgcctggatgatggggattggtatggaaatcacgctgatcgtcagcctgacgctggtctgtattaccctgtggagcgcggtggtgtcttcggttattccgatgttgcttaagcggatcggtatcgacccggcggtggtttccgcgccgtttatcgccacgctgatagatggcaccgggctgattatctatttcaaaatcgcccagtattttcttgggttgaactga

SEQ ID NO: 111311 - DNA, 1194 bp, Enterobacter aerogenes
gtggaaaggtttgatgccattgtgatcggcgccggtgcggcgggaatgttttgtgcggcgcaggcggggcagttgggctgccgggtgctgctgctcgataatggcaaaaagccggggcgcaaaatcctgatgtccggcggcggccgctgcaactttactaacatgtatgtcgaacccgcggcatatctcagccaaaacccgcatttttgcaaatctgcgctggcgcgctatacccagtgggactttatcgaactggttggcaaatatggtattgcctggcatgagaagaccttaggtcagctgttttgcgatgattccgcggagcaaatcgtcaatctgctgctgtcggaatgtgaaaaaggcggcgtacagatccgtctgcgcagcgaaattctcagcgtcgaacgcgatgaacaaggctaccggctacaggtgaacggcgaaacgctgacggcgaagaagctggtaatcgcttccggcggcctgtcgatgccggggctgggagcatcgccgtttggttacaaggtggccgaacagttcggtctgaaggtgctgccgacccgcgcgggtctggtgccgtttaccctgcataaaccactgcttgagcagttgcaggtgctttccggcgtttcggtgcctgctaccattaccgccgagaacggtacgctgtttcgcgaaaacctgctatttacccatcgtggcctttccggcccggcggtgctgcagatttccagctactggcagcccggcgagtttgtcaccgtcaacctgttgccggactgcgaccttgaggcgttcctcaacgagcagcggggcgctcatcccaaccaaagcctgaaaaataccctggcgatgcagctgccgaagcggctggtcgaatgtttacagcagcttgggcaaattccggacgtgacgctcaagcagttgaacgttcgcgatcagcagacgctggtggagacgttaaccgcgtggcgcgtgcagccgaacggcactgaaggttatcgtaccgcggaagtgaccctcggcggtgtggacaccaacgagctttcgtcacgtaccatggaggcgcgcaaagcgccggggctttactttatcggtgaagtgatggacgtcaccggctggcttggcggctataacttccagtgggcgtggtcaagcgcctgggcctgcgcgcaggcgctggcggaagcttaa

SEQ ID NO: 111312 - DNA, 1497 bp, Enterobacter aerogenes; identical to SEQ ID NO: 108756

SEQ ID NO: 111313 - DNA, 336 bp, Enterobacter aerogenes; identical to SEQ ID NO: 87678

SEQ ID NO: 111314 - DNA, 438 bp, Enterobacter aerogenes; identical to SEQ ID NO: 108758

SEQ ID NO: 111315 - DNA, 1473 bp, Enterobacter aerogenes
atgaaaacaactgcacctacgggtttgctacagcaaccccgtccgttcttcatgattttttttgtagagttatgggagcgttttggctattacggcgtccagggtatcctggcggtgttctttgttaaacagcttggtttctctcaggaacaggcatttatcacctttggcgcctttgcggcgctggtctacggcctcatttccatcggcggctatgtcggtgaccatctgctgggaaccaaacgtacgctggtgctcggcgccgtcgtgctggctatcggctactttatgaccggcctgtcgctgctcaaacccgatcttatctttatcgcgcttggcacgatcgccgtcggcaacgggctatttaaagccaatccagcgagcctgctatcaaaatgctatccgcctaaagacgcccgtctcgacggcgccttcaccctgttttatatgtcgattaacatcggttcgctgctgtcgctgtcgctggcgccggttattgccgataagttcggctacgcggtaacctacaacctgtgcggcgccgggcttatcgtcgcgctgctggtctacttcgcctgtcgcggaatggtgaaagatatcggttcaaccccggatcatcagccgctgagtttccgtaatctgctgtatgtgctggtcggcaccgtagtgatgattttcctctgcgcctggctgatgcataacgttaaaatcgccaacctggtgctgattgtgctgtccatcgtggtgacgattttcttcttccgcgaagctttccgcctcgataaaaccggccgcaacaagatgttcgtcgccttcatcctgatgctcgaagcggtggtgttttatatcctgtacgcccagatgccaacctcgctcaacttcttcgccatcaataacgtgcatcacaacattctcggcatcgcgattaacccggtgagtttccaggcgttgaacccgttctgggtggtggtcgccagcccggtactggcggctatctacacccgtcttggcaacaaaggtaaagacctgaccatgccgatgaaattcactctcggcatgttcctctgcgcgctgggcttcctgaccgccgcggcggccgggatgtggtttgctgacccgcaggggctcacttcgccatggtttatcgtgctggtttatctgttccagagtctcggcgaactgctgattagcgccctgggcctggcgatggttgccgcgctggttccgcagcggctgatgggctttattctggggatgtggttcctgactcaggccgccgcgttcctgatgggcggctatgtcgcgaccttcaccgcggtaccagaaaatataaccgacccgctgcagacgctgccgatctacaccaacgtgtttagtaaaattggcctcgtgaccctggcggtgacggtggtgatggcctttatggtgccgtggctgaaccggatgattaataccccggccagcgccgaataa

SEQ ID NO: 111316 - DNA, 753 bp, Enterobacter aerogenes
gtgaagatctgcttaattgatgaaacaggcgccggtgacggcgccttatctgttttggccgcccgttgggggctggagcatgatgcagagaatccgatggcgctggtgctgacggacgagcatctggagctgcgtaagcgcgatgagccaaagcttggcggcatctttgtcgatttcgtcggcggcgcgatggctcatcgccgcaagtttggcggcggccgcggtgaagcggtagccaaagcggtgggtattaaaggcgattatctgccggatgtggttgacgccaccgccggcctggggcgcgatgccttcgtgctggcgtcggtcggctgccgcgtgcggatgcttgagcgtaacccggtggtcgctgcgctgctcgacgatggtttgaaacgtggctatgccgatgcggagatcggcggctggctgcaggagcgcttacagttgattcatgcctccagcctcaatgcgttgaccgatatcaccccgcgcccacaggtggtgtatctggatccgatgtttccccataagcagaaaagcgcgctggtcaaaaaagagatgcgggtatttcagtcgctggtggggccggatttagacgccgatggtctgttggcgccagcgcgtcagctggcgaccaaacgagtggtggtgaagcgtccggactatgcgccgccgctggcggatgtcgccacgccgaacgcggtggtgaccaaaggacatcggtttgatatttacgccggtacgccggcgtaa

SEQ ID NO: 111317 - DNA, 2043 bp, Enterobacter aerogenes
atgaccaatccattactgacgcctttttcattgccgccattttctgcaattaaaccggagcacgtggtccctgcggtcactaaagcgctggatgattgccgggccgcggtggaaagcgcggtggcgcacggcgcgccgtatagctgggaaaatctttgccagccgctggcggaagtggacgatgtgctgggacgcatcttctcgccaatcagccatttaaattcggtaaaaaacagcccggagctgcgtgaagcctacgaacagacgctgccgctgctctccgagtacagcacctgggtcggccagcatgaaggcctgtataaagcctaccgcgacctgcgcgacggcgataactacgccacgttgaacaccgcgcagaaaaaggcggtcgataacgcgctgcgcgattttgaattatccgggattggcctgccggcagaagcgcagaaacgctacggtgaaatcgccgcgcgcctctctgagcttggcaatctgtacagcaacaacgtgcttgatgccaccatgggctggaacaagctggtgaccgacgtcgccgatctcgcaggcatgccggaaagcgctctggccgccgctcaggcccaggcgcaggcgaaagagcaggaaggatatctgctgacgctggatattccgagctatctgccggtgatgacctactgcgacaatcaggcgctgcgcgaagagatgtatcgcgcctattccacccgcgcctccgatcagggcccgaacgccgggaaatgggataacagcccggtgatggcggagatcctcgcgctgcgtcacgagctggcgcaactgctgggctttgacagctacgcctttaaatctctggccaccaaaatggctgaaaatccgcagcaggtcctcgatttcctgaccgacctggcaaaacgcgcgcgtccgcagggcgaaaaagagctggctcagctgcgtgctttcgccaaagccgagtttggcgtcgatgagctgcagccgtgggatatcgcttactacagcgaaaaacagaaacagcatctctacagcattagcgatgagcaactgcgcccgtatttcccggaaaacaaagccgttaacggcctgtttgaagtggttaagcgtatttatggcattaccgccaaagagcgtaccgatgtcgatgtgtggcatccggaagtgcgtttcttcgagctgtatgacgaaaataatgagctgcgcggcagcttctatcttgacctgtatgcccgcgaacataaacgcggcggggcgtggatggacgactgcgtcggccagatgcgtaagctggatggttccctgcaaaaaccggtcgcttatctgacctgtaacttcaaccgcccggtaaacggcaaaccggcgctgttcacgcacgatgaagtgattaccctgttccacgagtttggccatggtctgcaccacatgctgacccgcattgatactgctggcgtttccggcatcagcggggtgccgtgggatgcggtcgaactgccgagccagtttatggaaaactggtgctgggagccggaagcgctggcgtttatctccgggcattacgaaaccggtgaaccgctgccgcaggaactgctggagaaaatgctggcggcgaaaaactaccaggcagcgatgtttattctccgccagctggagttcggtctgttcgatttccgtctacacgcggaatactcgccggagcagggggcgaaaatcctcgagaccctggccgagattaaaaagcaggtcgccgtggtgccgggcccaacctggggccgcttcccgcatgcgttcagccacatctttgcgggtggttacgcagcgggctactacagctacctgtgggccgatgtattggcggcggatgccttctcgcgcttcgaagaagagggaattttcaaccgtgaaaccggtcaatcattcctcgacaatatcctgagccgcggcggttccgaagagccgatggagctgttcaaacgcttccgcgggcgcgagccgcagctggacgcgatgcttgagcattacgggattaaaggctga

SEQ ID NO: 111318 - DNA, 843 bp, Enterobacter aerogenes
atgctcagttatcgccacagctttcacgcaggcaaccacgccgacgtccttaaacacaccgttcagagtttgatcattgaatcgctgaaagagaaagaaaaaccgtttctctacctggacacccacgccggcgcgggccgctatcagctgagcggcgagcacgccgaacgtaccggcgagtatcttgaaggcatcgcccgtatctggcagcaggacgatctgccgactgagcttgagccgtatatttcggtcgtcgagcacttcaaccgcagcggtcagctgcgctactaccctggctcgccgcttatcgcgcgccagctgctgcgcgagcaggacagcctgcagatgaccgaactgcacccgagcgatttcccgctgctgcgcgccgagttccagaaagacagccgcgcgcgcgtcgataaagccgatggctatcagcagttgaaggccaagctgccgccggtttcccgtcgcggtctgattcttatcgacccgccgtacgaaattaaaaccgattatcaggcggtggtcaccgggatcaacgaaggttataaacgcttcgccaccggcacctacgcgctgtggtatccggtggtgctgcgcgcgcaaatcaaacgcatgatcaaagatttagaagccacaggtatccgcaaaattctgcaaatcgagctggcggtgcgtccggacagcgaccagcgcggcatgaccgcctccgggatgatcgtcatcaacccgccgtggaagctggaacagcagatgaataacgtgctgccgtggctgcacagcaaactggttccagccggtaccggtcacgcgaccgtgagttggatcgtaccggagtaa

SEQ ID NO: 111319 - DNA, 1353 bp, Enterobacter aerogenes
atgagcaaacattatgattacctcgccatcggcggcggcagcggcggtatcgcctcgattaaccgtgcggcgatgtacggccagaagtgcgcgctgattgaagccaaagagctgggcggcacctgcgttaacgtcggctgcgtgccgaaaaaagtgatgtggcatgcggcgcagatccgcgaagcaatccacctgtatggcccggattacggtttcgataccaccatcaaccatttcgactgggataagctggttgccagccgcagcgcctatatcgaccgtattcatacctcttacgacaacgtgctgggtaagaataaagttgatgttatcaaaggtttcgcgcgctttgtcgatgcccataccgtggaagtcaacggcgagaccattaccgccgatcatatcctaatcgccaccggcggccgcccgagccacccgaacattccaggtgtggaatacggtattgattccgacggtttcttcgaactgtcggcgctgccgcagcgcgtagcggtagtcggcgcgggctatattgccgttgaactggccggcgtgattaacggcctcggcgcggaaacccacctgttcgtgcgtaaacacgcgccgctgcgcagcttcgatccgctgatcgttgagactatggtggaagtgatgaacgccgaaggcccacagctgcacacgaacgcaattccgaaggcggtagtcaagaatgccgacggcagcctgactctggagctggaagatggccgcagccagaccgtagattgcctgatttgggcgattggccgcgaaccggcgaccgataacttcaacttggcggcaacgggcgttaaaaccaacgataaaggctacatcatcgttgataagttccagaacaccaacgtgccgggcatctacgcggtgggcgataataccggcgccgtcgagctgacgccggtcgccgtggccgcaggccgtcgtctgtccgaacgcctgtttaacaacaagccggaagagcacctcgactacagcaatatcccgaccgtggtcttcagccacccgccaatcggcaccgtcggcttaaccgagccgcaggcgcgcgagcagtacggcgatgacgccgtgaaagtgtacaaatcgtccttcaccgcaatgtataccgccgtgacctctcaccgccagccgtgccgcatgaagctggtctgcgtcggcccggaagagaagattgtcggtattcacggtatcggcttcggaatggatgaaatgctgcagggctttgcggtagcgctgaaaatgggcgccaccaaaaaagacttcgacaataccgtcgccattcacccgaccgcagcggaagagttcgtcaccatgcgttaa

SEQ ID NO: 111320 - DNA, 1149 bp, Enterobacter aerogenes
gtgctattggcattactgttggtttcaggctgcgccggcacgctgtcgcaaatgagccctcccagcaatgaaaccagcctggtggggcataacgggcagcggctttccgtcgatactttcgtcagccaatacatgcgcgagaagcaggtcagcggcgtggtggtggcgattattcatcacaacggcccggcggagtttcactgcttcggcgtgacggatgataagcagcgctacccgataactccgcaaacgctttttgccctcggttcgttaagtaaaggtgttaccgctgaagtggtgacgatgctggtcaacgaggggcgtttacactggaacgatacgctgcaaaccctgctgccgccggggaccgtgctcagtgaagatgcccgcaagataaccttactgcagctggtcactcatacctccgggctgccgcgtcagccgatgaacatgctgtcgcttgagcatctgttggcctatctcaacaacggtgaaaacttttatcacgaactcgatgccgacggggtgctgagctatctgagcaacttcaatgcgccgctggagcgcgagccgagttactccaacctgggttttgcgatacttgggtatcttctcaaataccaaaccggtgaatcgattgagacgctggcgtcacggatgatcttccggccattggcgatggggaataccagcttcctgccgcaaacgttgcgtgaatatccgtggcgggcgctgggacacgcaggcgatcagccgaagtttaaaccgcgcggcgcgctgacgccggactggcagttcacgaataatatggttggcgcggcgagtctgtacagcgacgccggcgatctgattaactatgcccgcgctcacttcgcccccacggggcaggcggcactggatcgggcgtttaaagacgttagcgttgattattatccgcggcgggtcgaagcggcgaacattgcctgggtgaccgacacatttggtcggcagcgattaacttatcaggtgggatacatcggcggctattcaagctatatcggcttcgataaagcgaatcagaatgcggtggtggtgctgcaaaacagctttaactggagtaactacatcggccatcagatcctacgtaatctggtgacggagtcaaaatga

SEQ ID NO: 111321 - DNA, 1410 bp, Enterobacter aerogenes
atgctgacggataaccctatggacgtattgattgccttactggcgttaggattgctgatgctcgccgcctatcgcggctatagcgtgatcctttttgcccctttggttgcgctcggcgccgtattactcacccagccagccgccgttgccccggtattcagcgatatcttcatggataagctggtcgggttcgtaaaactctatttcccggtatttttactgggcgcggtcttcgggaaattaattgagttttccggattctcccgttcaatcgtgagtgctgttacccggctgatggggcaaaacaaggcgatgccggtgattattctggtctgcgcgttgttaacctatggcggggtttcgctattcgtggtggtatttgcggtctatcccttcgccgctgagatgttccgccagagccaaattccgaaacggctaatgcctgcgactatcgcgctgggcgccttcacttttacgatggatgcgctaccgggttcgccacagattcagaatattattccgactactttttacggtacgacctcctgggcagcgccctggcttggggtgctgggttccgcatttgtggctattggcggctggttatatctggaggcgatgcggcgtaaagcgcagcgcaggggagaaggttatggaagcgagttggtaaatgaacctgaaacaccggcagaccttaacttgccgcacccggtgatcgcgctgctgccgttgattatcgtcggcgtcgccaacctgctgtttacctggcttatccctcaggcgtacggtagccatttcctgattgacctgccgggactgaaagcgccgatggaaagcgatgtgaagaagatggtggcgatttgggcggtgatggcggcgttattgtgcggaattatcactatcttcttgtttgccgggcgtagcctgaagggtaagctggccgacggtagcaaagtcgccgttggcggcgcgatgctggcggcgttgaatactgcatcagagtatggttttggcggggtgattgccgcgctgccgggctttgttcaggtggccgatgcgctaaaagcgatcccaaaccctttactcaatcaggcgattacgatcaatattttgtccgggatcaccggttcatcctccggtggaatgagtattgccctggcggcgatggcggatcgctttgtggagtcggcccatgctgcggggatcccgctggaagtgatgcaccgtgtggcgtcgatggcggcgggcggcatggatacattgccgcacaatggggcgatcatcactttgctggcggtgaccggactgacgcatcgccaggcctataaaccgattctcggcatcacgttgtttaaaatcctcggtgcctttttcattatcggcgtttactacgccaccggactggtataa

SEQ ID NO: 111322 - DNA, 1308 bp, Enterobacter aerogenes
atggctatctggctcaagcgcggtgcggaatctgaagcagtgaaatctcacgaccgtacggttcgtgaagcggtagagaaaatcctggcggatattgaagcgcgcggtgacgcagccgtgcgcgagctgtcgattaagttcgataagctcgatcgcgcaaacttccgcctgtcgcagcaggaaatcgatgattgctatgcgcagctgtcggagcgcgatattgccgatatccgctttgcgcaggagcaggtgcgtaacttcgctcagcaccagcgcgacagcctgaaagatatcgaggttgaaacgctgccgggcgtcattctgggacacaaaaatattccggtcagcgcggcgggctgctacgtgccgggcgggaaatacccgctgctggcgtcggcgcatatgtcgattatcaccgctaaagtcgcaggtgtgccgcgcattgtcacctgtgcgccgccgtttaacggtaaaccggcgccggcgattgtggtggcgcagcatatggcgggggccgacgaaatctactgcctggggggtattcaggctgtggcggcgatggccgtcggtaccgagagcatcgcaccggtggatatgctggtggggccgggcaacgcctttgtcgctgaagccaaacgtcagctgtttggccgcgtcggtatcgatctgttcgccgggccgacggagaccctggtcattgccgatgaaagcgtggatggtgaaatctgcgccaccgacctgttaggtcaggctgagcatggtcctgattctccggcgattttgttgacgacctcggaaacgctggcgcgcgaaacgctggcggaaatcgatcgtctgctggcggtgctgcccaccgcggaaatcgcgcgccagtcgtgggcgaagtttggcgaaatcattgtggctgaagaccgggaagaaatgctgaaaatcgccaatgagctggcgttcgaacatgtgcaggtaatgacccgcgacccggactggttcctcgaaaatatgcagaactttggcgcattgttcctgggacctcgtactaacgtggcctacggcgataaagtcatcggcaccaaccataccctgccgacgcgtaaagcggcgcgttataccggggggctgtgggttgggaagttcatcaaaacctgcacctatcaaaaggttcttaccgatagcgcctccgcgcagatcggcgagtactgttcgcgtctgtgcgccctcgaaggtttctccggccatggtgaacaggccaacgtccgcgtgcgtcgctacggcaataaagacgttccttacgctgggattcctgaataa

SEQ ID NO: 111323 - DNA, 1017 bp, Enterobacter aerogenes
atggcaggtcaaaacaaacgagcagtcaccagttacgatgtcgcgaaagcggctggcgtctcgcaatctgcggtatcccgcgcctttaccgaaggagcgaaaatttcgccagccaccaaagaaaaggtgcgtaagatcgccgccgagctgggctatcgtccgagctttatcgcccagtcgctgatcacccgccgctcaacgcttattggtgtcgtcgttccggggttggtgaatcccttctacgccgcggttctggatgaactgtcacaggcgttgaacctgatgggataccgggtactgttgttttcgatgtaccgcgatgatgacactacccccatcatggaagagattctgcgtcatcgtgttgaagcgctagtgctggtgtccagcagcctttcttcacactttgctcatgaatgccagcagctcggcctgccggtgctgctgctcaaccgcaaaaacgacagccggtcggtttccagcgtcaccagcgataacctggctggcggcgccgcgattgccgatttcctgctggatctcggccatcagcagctggcatttgttgccggtagagatacctcctctaccagccgcgaccgtgagacaggctttcgacagcgtctggaggcccgcggcgcccgcccgatgctgcgcgatagcggaatgtggtcgatagaagaagcgatgaacgccacccgcaggctgatggcgctaccaacgccgccggacgcgctattttgcgccaacgatatgatggccatcgctgccctcaatgtggttgtcggcgaaatgggcatgaaggcgggcgaagatatctccatcatcgggttcgatgatatcgccatggccagctggccgctgataaatttaactacctgggtccagccgctatcggaaatggtggataccgccatcgccgtactgaaaacgcagctaggcgcggctgaaaccagtgccgttcagcacgttctgcaggggaagcttatcgtcaggggcagtacccgcccgcgacgctaa

SEQ ID NO: 111324 - DNA, 624 bp, Enterobacter aerogenes
atgataagaatcttgggtaaacgctcgtctattaacgtgcgtaaagtcctctggacctgcgaagaggcgggtatcgagtatcagcaggaagattatggcagcggctatagcccgcttgatacaccggaatttttggcgctgaatccaaatgcgttagtgccggtgctggtggatgacgattttgtcctttgggagtcgaacagcatctgccgctatctggcgcgtaaggtcggacgtgacgatttgctgccctctgcgttgcgggccgcggcgcaggtagaacactggatggactggcaggcgacggagtttaacagcgcgtggcgctacgcgttcacggggctggtgcgtaaagatccgcgttttcaggatccggcggcaattaaagagagtattgccgcgtggacgcgctgcgtacagattgtcgacaatcagctacagagcaccggcgcgtggctgaccggcgagacgtttacgctggcggatattgtgctggggctttcggttcatcgctggaaaatgacgccgttcgcccatccggagatggcaaacgtcgaacgctggtatatggcccttaaccagcgcccggcatttatgcgccacggcaataacggcgtagcgtag

SEQ ID NO: 111325 - DNA, 1149 bp, Enterobacter aerogenes
atggtcactcccttcaacattttaacgcccggcaatatccgctttggccgcgggcaagcccgcagcgccgcgccgtggctggcgcaatatgatgctccggtgctgctggttcacggcgcgaccaaaaatcgcgcccaatttttactgaacgaactgaccgcattacatcttcaggtcagcacttttgctatcgccaatgaacccacgctggacgatattgaacgcggcgtacggctggcgcgcgagcgcggcgtcggcgcggtggtcagcctcggcggcggcgcggtcattgatgccggtaaagccattgccgcgctggtcccggcaagcgggcctgccatcgactatctggaagtcgtcggaacggggagaatactggaagccagcccgctaccgtttgtcgctattcccacaacgtccggcaccggcgcggaggtcactaaaaacgcggtcatcaacgtcccgcagcagcagcgcaaagtcagcctgcgcgacgatcgcatgctgccgcagctggcgattgtcgatccagcgttaacggataacgccccccgcgccgtcaccctcggctccggccttgatgccttaactcaggttatcgaaccctggctgtgcacccgggcgacgcccttcaccgatgccctgtgcagggaggcgatcccccgcggcatcgccgcgttaaaaacgctgatggaaaaagagtgtgccgacagccgcgacgaactggcatgggtcagcctgtgcggcgggctggcgctcgccaatgccgggctgggtgtggttcacggtcttgcggggccgcttggcgggctaagcgatgcctcccacggcgcgctctgcggctgcctgctgccttttgggctggaactcaatgagtcgcaggtaaccaatccggcgctgcgtcagcgtttcctcgacgtgcgccagtggatcgctgccggactcggcgtctcgccggatgacgcctggcaaagcctgcgcgaatggagccagcgctcagggctcggcaatttacgcgacctcggcgtaccgcgtgaagcgctggaacctgccgcgctggcggctagtagttcatcgtcgatgaaagccaatccggtcacgcttgagtcagagcaactgctagagatgctggtagccgcctgggagtaa

SEQ ID NO: 111326 - DNA, 1659 bp, Enterobacter aerogenes
atgttcagccagaaactacgcaacgttgatgacgacgagttgaggatcgaaaacgatccgtgctacgaagccgatccgtatgagttaaaactggatgaaatgttcgacgccgaaccggagccggagatcatcgaagggctaccggcgtccgacgccctgacccctgccgaccgctatctcgagttgtttactaacgtacaaaagtcgcgcatttttcttgatagcaaaacttttcccgactgcgcgccaaaacacgatccgctggatatcctgatgcactaccggcgggttaagcgtacgccggagttcgatttacgtcagtttgtggaagacaacttctggctaccggatagccatgccgatgattacacctctgacccgaaactgacgctaaaagagcatattgataagctgtggccggtgctcacccgtgaaccgcaggatcatattccgtggtcatcgctgctggcgctaccgcagtcgtacatcgtccccggcgggcgttttagcgagacctactactgggattcctacttcaccatgctggggctggcggaaagcggccgtgaagatttgctcaaatgtatggccgacaacttcgcctggatgattgaaacctacggccacattcccaacggcaaccgcacctactatctcagccgctcccagccgccggtattcgccctgatggtggagctgtttgaggaagatggcgttcgcggcgcgcgccgctatctcgaccatctcaaattagagcacgccttctggatggacggcgcggaatcgctgatccctaaccaggcctaccgtcacgtggtgcgtatgcctgatggctcactgcttaaccgctactgggacgaccgtgatacgccgcgcgatgaatcctggcgagaagatgtcgaaacggcgaagcattccggccggccgccaaacgaggtctatcgtgacctgcgcgccggcgcggcttccggctgggactactccagccgctggctgcgcgatatcaccaggctggcgagtatccgcaccacccagtttattcccatcgacctcaacgctttcctgtttaagctggaaaatactatcgccaatctttcgggcctgaagggcgatcgcgacgctgaagccgaatttcgccgtaaagctaacgcgcgccgggaggcggttacccgctacctgtgggatgaagagtgcggctgttttcgcgattacgattggcgccgtgagcagttggccttgttctccgccgccagcatcgtcacgctgtatgtcgggatggcgacccacgcccaggccgaacggctggcggatgccgtacgcgcgcgtctgctcacccctggcggcatcatggcgacggaatatgaaagcggcgaacagtgggataaacccaacggctgggcgccgctgcagtggatggcggtacagggattcaaaatgtacggccacgacccgcttggcgatgaaatcgcccagagctggctgcagacggtgaatcaattttatctcaaacaccacaagctgattgagaaatatcatatcgccagcggcgtaccacatgagggcggcggcggggaatatccgctgcaggatggcttcggctggaccaacggcgtggtgcggcggcttatcagcctgtacggcgagccgaggtcttcttaa

SEQ ID NO: 111327 - DNA, 528 bp, Enterobacter aerogenes
atgcccgaactgcttacgccgcggctgcgctgctcgccgctgcagcttgacgactggtctttttttctcagcctgcaacaggatccgcaggtgatgctctatgttgcggataaccggcccatcgccgatatccgcgccgcgtttgatgcacgcctgccgctctggtcgcctaagtcctcgcactggctatgcctggtggttcgcgatcggcaaagccatacgcccctcggcctgaccggctattgccatcacgatgatgatatcgccgaagtgggctttctcttcgccccacaggcgcaggggctaggctatggatatgaatcactgtgtgcgctatgtgattacgcattttctacaggcggcattcgtcgtcttaccgccagcgtcaccgccggaaaccaggcctcaaaacagctgctgctaaaaacaggatttatacaggaaggagagctacgcgagagctactggctacatggccgttggcacaatgactggctgtttggcctgatgcgccacgattaccaataa

SEQ ID NO: 111328 - DNA, 423 bp, Enterobacter aerogenes
atgactatcaccacgttaagcctggcgggactgcgatttattcagcaaacgcaagggctggcgctactgccatatcaggaccagtttggccaatggcgggtcggctatggccacgctattgatgaagatgagaaagagacgcccatcaccgctgaactggcgatgatgctattgacggtagacctgctgcagtgccaacagattctacagcgcaggttggtcgtggaactgactcagccgcagtacgatgccctgctggcgctggtattcagtttagatggcagcgcccagccgcagctggacgctattttgcattatcttaacggccacaacatgacgcaggcgctgacgatatggcggaaaattgaccgcgataacgccttccgcctgcaggagtgcgagtggttttgtcaggccagttag

SEQ ID NO: 111329 - DNA, 609 bp, Enterobacter aerogenes
atgcaagtaatcatgtttgacaggcagtcaatatttattcatggaatgaaggtcggcttacaacaacgtattcctgaaattaatattcatagcacctgtcaggcagaacagctgtggcaactgctcacggctcatccgcaggcgctcctcatgcttgatggcgacctgaatagtgaattttgttgctggttgctccaggagaagcagcagcgttttccgcatgccaaagtattattagtggtttcggatgataataaaagctggctgcaacgggcgctggcgtggaacgtgcgcgccattgcccaacgtgaggatagcgccgatatgtttgcccagatcattaatagcatcatgttgggcatgatgtgtctgcctggcacctggttaatgacttcggcggatcgcgggaaaaacgctgtacatttaagtcgtcgccagcaggaaattttaaaactgctggcggaaggcagctctaataaggaaattagccgtacgttaaatatcagcgccgggaccgtgaaagcgcatcttgagtcgttatatcggcggctggatgtgaaaaacaggacccaggcggcgatggcgtttaacaacgtcggtgaaaactaa

SEQ ID NO: 111330 - DNA, 759 bp, Enterobacter aerogenes
atgacacaacgtatcgctttagtaaccggcggcagccgcggtctgggaaaaaacgcggcgctgaagctggcggcgaagggaaccgatattattctgacttaccacagtaaccagcaggcggcgcgggaagtggtgcgcgaaattgagcaaacaggagcgaaagcggcagcattgccgctgaacgtcggcgatgccgccagttttgcaggctttgtacaacagctgacgcaatgtctgaaggagaagtggcagcgcgacagcttcgattatttattgaacaatgccggcatcgggttgaccgcgccgtttagcgagaccagcgaagcgcagtttgacgagctgatgaacatccaccttaaggggccgttcttccttacccagcagctgctgcctttgcttaaagacggcgggcgcattctgaacgtctccagcgggctggcacgctttgcactccctggctattccgcttatgcggcgatgaaaggtgccatggaggtgttaacccgttatcaggcgaaggagctaggcgctcgcggaatatcggttaatatcattgcccccggcgcgattgagaccgactttggcggcggcgcggtgcgcgataatgccccgcttaaccagcatattgccgcccagacggcgctggggcgcgtcggcctgccggatgatatcggcgatgctatcgccgcgttgctgagtgacgagctcggctggatgaacgcccagcgcgttgaggtttccggcggcatgtttttataa

SEQ ID NO: 111331 - DNA, 900 bp, Enterobacter aerogenes
atggataaaattcacgcaatgcaactctttattcgtgtcgcggaactggagagtttctctcgcgccgccgatacccttgggttgcccaaaggtagcgtatcgcgacagatccaggcgctggagagccatctcggcgctcgcctgctgcaccgcaccacccgccgggtgcagttgacacaggacggcatggtctattacgaacgcgccaaagacctgctaagtaatctcgaagaactggatggtatgtttcagggcgatccatcaagcattagcggccgcctgcgtgtcgatatgccgatcagcgtcgccaaaaaactggtcatcccgaaacttcccgcgtttttacaacagtatcccggcattgaaatcgaactgagcagtagcgaccggctggtcgatgtggtgcgcgaaggcttcgactgcgtgatccgggtgggtacgctcaaagactcgggactcatcgcccgcccgctcggcaaactcacgcaaattaactgcgccagtccgcattatctggcgcgcttcggctacccggaaagcctcgacgatctggcggatcatgcactgatccactacgccagcaacttcggcgcgcggcagtcaggctttgaagtcgtcagcgatggcgccgtgcgctgggtgaaaaccggcggcgtgttgaccgtcaatagcaccgaaacctatcaggcggcctgccaggccgggctcggcattattcaggtcccgcgcattgccgtacgtgaaccgctgcgtaccggcgagctggttgagatcctgccgcagtaccgcgccgaaccgatgccggtgtcgattatctatccacatcggcgcaatctctcccgccgcgtgcatctctttatggagtggctgggcggattgatgaaaggttatgtcgattaa

SEQ ID NO: 111332 - DNA, 1032 bp, Enterobacter aerogenes
atgacgccggaaaacgacgatcgccaaccgccacaggaaacgggccagcagccggagaaaaacaaaagtacgctcgccgccatcaacgattccgccgttgggcagaaagctaaccaggcgctgaaaacggtcaccggaacggcggccaaagttcagcgcaatccggtaattgcccacctgctgcgcgccgccgagcggttcaatgacaggcttggcaatcagtttggcgcagccatcacctacttctcatttttgtcgatgatccccattctgatggtctcatttgccgccgcgggtttcgtactggcctggcatccgacgctgctgcaggacatcttcgataaaattctgcaaaacgttagcgacccgacgctggcggcaacgcttaaaaacaccatcaacaccgccgtacagcagcgtaccgccgtcggactggtcggcctgttggtcgcgctctactccggtattaactggatgggcaacctgcgtgaagcgattcgcgcccagtcgcgcgacgtgtgggaacgtacgccgcaggatcaggaaaaaatctgggtaaaatacttccgcgatctgatctcgctgattggcctgctggtcgcgctggttatcacgctgtcgattacctccgttgccggatccgcacagcagatgatcatctccgcgctgtatctcgattatatagaatggctgaaacccgcatggcgcctgattggcctggcgatttccatcttcgcgaactatctactgtttttctggatcttctggcgactgccgcgccaccgtccacgccgcaaagcgctgttccgcggtacgctaattgcggcgattggcttcgagattattaaaatcgtgatgacctggacgctgccggcgctggtgaaatccccatccggcgctgcctttggttccgtactggggctgatggccttcttctacttcttcgcccgtctgaccctcttctgcgccgcatggattgcgaccgcggagtacaaagacgataagcggatgccgggcaaagcccacgattaa

SEQ ID NO: 111333 - DNA, 1323 bp, Enterobacter aerogenes
atgcaagccacagccactactatcgacaacgcgcaagacgccacgccggttaactcgcgtaataaagtcgtcgtcgcctcactcatcggcaccgccattgagttcttcgacttctatatttacgccaccgccgcagttatcgtcttcccccatatctttttcccacagggtgatgccgccgccgcgacgctccagtcgctggcgacgttcgccatcgcctttgtcgcgcgcccgattggctcagcgctattcggccactttggcgaccgcgtaggccgcaaagtcacactcgtcgcctcgctgctgactatgggcatctccaccgtggtcatcggcctgctgccgggctatgaaagcattggcatcctggcgccgatgctgctggcgctggcgcgctttggtcagggtctcggccttggtggcgaatggggcggggcggccctgctggcgacggaaaacgctccgccgcgcaaacgcgcgctatatggctccttcccgcaactgggggcgccaatcggcttcttcttcgccaacggcaccttcctgttgctgtcgtggctgttgagcgaccagcagttcatggaatggggctggcgcgtgccgttcatcttctctgcggtactggtcattatcggtctgtatgttcgcgtgtcgctgcatgaaaccccggtgttcgctaaggtggcggcggcgaaaaaacaggtcaaaatcccgcttggcacgctgctgactaagcacgtgcgcgtgaccgtgctcggcaccttcatcatgctggcgacctataccctgttctatatcatgaccgtttactccatgaccttcagtaccgctgccgcgccgattggcttaggtttgccgcgtaacgaagtgctgtggatgctgatgatggcggtcattggttttggtgtgatggtgccggtggcgggcctgctggcggatgcctttggccgtcgtaaaagcatgattatcatcaccacgatgattattctgttcgcgctgttcgcctttaaaccgctgctcggttccggcaacccgattctggtcttcgccttcctgctgctgggccttagcctgatggggctgaccttcggcccgatgggcgcgctgttgccggagctgttcccgacggaagttcgttataccggcgcctctttctcctataacgtgtcgtcgatcctcggcgcgtcggtcgcaccatatattgccgcctggctgcagggcaattacggcctgccggctgtcggtatctacctggcggcgatggcggcgctgacgctgatcgccctgctgttgacccacgaaacccgccatcaatcgctgtaa

SEQ ID NO: 111334 - DNA, 2052 bp, Enterobacter aerogenes
atgaccagaacccgtaaaacgattgctattatctcgggaacgattgtgctgttaatcgttctttttttcatcgtgttggcgacctttgactggaaccggctcaagccgacgatcaatcagaaagtttccgccgagctcaatcggccattcgccattcgcggcgacctgggcgtagtgtgggagcgacagcctgaggagcgcggctggcgcagctggatcccgtggccgcatgtgcatgccgaagatatcgtgttgggcaacccgcccgacattccgcaagtgacgatggtacatctgccgcgcgtggaagcgacgctggctccgctggcgctgctgagcaaaacggtctacttgccgtggatcaagctcgaacagcccgacgtccggctgataaggctgacggaaaacagcaataactggacctttaaattagcttctgacccggcatccgaaaaagccaacccgccatcggcctggtctttccgccttgataatattctcttcgatcgcggcaacatcggcattgacgataaggtaacccgcagcgatatcgcgatcgtggtcgatccgcttggcaaagcgctgccgtttagcgaagtcaccggtgcgggcaacaaagcgcaggcgacaaaagccggcgattatatctttggcctgtcggtgaaggggcgctacaaaggccagccgctgagcggcagcggcaaaattggcggcatgctggcgctgcgtagcgatagtaccccgttcccgctacaaggcgattttcactctggtaatacccggatagcgtttagcggcacggtcagcgatccgcttaatgtcggcgggctcgatctgcggctgaaattcgccggcgactcgttgcgcgacctctacgacctgaccggcgttctgctgccggaaacgccgtccttttccaccgatggccgcctacgtgccgactttaaacataaaaacggtatgcgttttgactatcgcgattttaacggccggattggcgacagcgatatccacggttcgttgacctataccaccggcaaaccgcgaccgaagcttaccggcgatctggagtctaaacagctgcgtctggcggacctcggcccgctgattggcgttgattccggcggcggggcgaagaaatcctcatcacgcaaagcaggcgatgccctacagccggcggggaaagtcctgccggccgatcgctttgagacggataaatggcaggtgatggacgccgatgtgcgcttcaaggggcgacgaatcgaacacggcggtactctgcccatcagcgacctggcgacccatattattcttgaacgcggtgacctgcgcctgcaaccggtgcgctttggcctggccaacggttcgattgccggcagcgtgcatctgcagggcgataaaaaaccgctacagggcgaagccaatttgcaggcgcggcggctcaagcttaaggcgctgatgccgaacgttgaaatgatgcagaaaacgctcggtgagatgagcggcgatgtacaactgcgcggcagcggtaattcggtggcggcgctgctcggcaacagcaacggcaaccttaagctgctgatgaatgatggtctgattagccgcaacctgatggaaatcctcggcttaaacgtcggtaactttatcatcgggcagatttttggcgatgaggaggttcgggtgaactgcgcggcggccaatattgatgtggtcaacggcgtggcgcgaccgcaaattttcgccttcgataccgagaacgcgctgattaacattaccggcaccgccagctttgcctctgaacagctggatctgaccgttgacccggaaagtaagggcctgcgggtgattactctgcgttctccgctgtacgtgcgcggtacctttaaatcaccggatgccggggtgaaagccgggccgctgattgcccgcggcgcggtggcggcagcgttagcgacgctggtcacgccggcggccgctttactggcgctgatctcgccggcggaaggcgaggcgaatcagtgccggacgattttgtcgcagatgaaaaagtaa

SEQ ID NO: 111335 - DNA, 930 bp, Enterobacter aerogenes
atgtctaagaaaattgccgtgattggcgaatgcatgattgaactgtcagagaaaaacgcggcggtgaatcgcggtttcggcggcgataccttaaacacatccgtctacatcgcgcgccagaccagcgcggatgccctaagcgtacactacgtgaccgcgctgggcaccgacaccttcagccagcagatgctggagtcctggcagggcgaacaggtaaaaaccgatctgattcagcgcatggctgaccggctgcctggcctttactacattgaaacagacgagaccggcgagcgaaccttctactattggcgcaacgaagcggcggccaaattctggctcgaaagcgagcgcgcaggcgccatctgcgaagagctggctacctttgattacctctatctgagcggcatcagcctcgccatcctcagcccggccagccgggaaaagttgctcaccctgctacgcgaatgccgcgccaacggcgggaaagtgattttcgataacaactaccgtccgcgcctgtgggccagccagcaagagactcgccaggtgtaccagcaaatgctggaatgtaccgatatcgcttttctgacgcaggatgatgaagatgcgctgtggggagcggtaccggttgccgaagttatcgcccgcacccacgccgctggcgttgaagaggtggtggtgaagcgcggcgccgactcctgcctggtggcgatcgccggccagccgctgctggaggtgcccgcggtgaagctgccgaaagagaaagtagtggataccacggcggcgggcgattcgttcagcgccggctatctggcggtgcgcctgaccggcggcgacgcggaatccgcggcgaaacgcggacatctcaccgccagcacggttatccaatatcgcggggcgattatcccgcgcgaagcgatgccggactaa

SEQ ID NO: 111336 - DNA, 1500 bp, Enterobacter aerogenes
atgcagggcacaaaaattcgactcttaaccggtggtttgctgatgatagcgacggtcggttctgtgcaggcagaagcgctccagccggacccggcctggcaacaggggacgttggcgaacggtttttcgtggcaggtactttccacgccgcagcgccctagcgatcgcgtcgaagtccgcctggctgtgaatattggctcgctgagcgaaagcactcagcagagcggcttcagtcatttcattccgcgcctggcgctgacccaaagcggcagcctcccgacgatgcaggcgcgttcgctgtggcagcagagtattgacccgaagcgtcctctgccgccggcgatcgtttcgtacgatttcaccttgtttaatctgagtttgccgaacaaccgcaacgacctgctaaaagaagcgttgaactggctggcggacgctaacggtaaattgagtattacccaacaagccgtcaatcatgcgctgcagggcagcgatatggtggcgacctggccgctggatacccaggaaggctggtggcgctatcgcctgaagggctcaacgatgctcggtcacgatccggcggcgccgttgaagcaaccgattgatattaaacagctgaaagaattttatcagaaatggtacaccccggatgcgatgacgctgattgttgtcggtaacgtcgatagccgcagcgtcgctgagcagatcaacaaaatcttcggcgaactgaaaggtaaacgcgagaccccggcggcggtaccaacgctatcacctctgccggctgtaccggtgagtatcatgaccgatgccgtgcgtcaggataagctgtcgatcatgtgggattctccatggcagccaatccgcgattccgccgcgctgcagcgctactggcgcgatgacctggctcgggaagcgctgttctggcacgtgcagcagaacctgagcaaaagcaacgtaaaagatatcggcctcggttttgattgccgcgtgctgtatcagcgcgctcagtgcgcgatcaatatcgactcgccgggcgaacgtctgaacgccaacctgagcgcggtatcgcgcgagctggcgaaggtgcgcgacaacggtctgccgcaggaagagttcgatgcgctgattgcgcaaaagaatctcgaactgcaaaaactgttcgccacctatgcccgcacggataccgatatcctgattagccaacgtatgcgttcgctgcaaaatcaggtggtggatatcgcgccggagcagtatcaaaagctgcgccaggagttcctgaactcactgacggtcgacatgttgaaccagtatctgcgccagcagctgtcgcaggatatggcgctggtattgcagcagccgaaaggcgagccggagtacaacatgaaagatctgaaagcgacatgggaaaagctgatggcgccagcacccgctgcggcggtgagcgcgacgccggatacggttgatgcgcataacgaggcgacggatattcccccagcgcagtag

SEQ ID NO: 111337 - DNA, 1287 bp, Enterobacter aerogenes
atgaaactctctctcttcaaaagcctctatgtccaggttttatcggccatagctatcggtattttgctgggccatttctacccggaacttggcgcgcagatgaaaccgttcggcgacgccttcgtaaaactgattaaaatggtcattgctccggttatcttctgtaccgttgtaacagggattgccgggatggaaagcatgaaggccgtcggtcgtaccggtgcggtggcgctactctactttgaagtggtgagtaccattgcgttgattatcggtcttatcatcgtcaacgtagtgcaacccggcgcgggcatgaacgtcgatcccgcgacgttggacgcgcacgcggtggcagtctacgccgagcaggctaaagatcagggtgttgtcgccttcttactcgatattattccgggcagcgtgattggcgctttcgccagcggtaatattctgcaggtgctgatgtttgccgtcctgtttggttttgcgctgcatcgtttaggcagcaaaggccagctgattttcaacgtcattgaaagcttctcgcaggtcattttcggcatcattaacatgattatgcgactggcgccgatcggcgctttcggggccatggccttcaccatcggtaaatacggcgtcggtaccctggtacagctgggccaactgatcatctgcttctacatcacctgtatcctgttcgtggtgctggtattgggttctatcgcgcgggccactggatttagtatcttcaaattcattcgctatatccgcgaagagctgctgattgtactggggacctcttcgtccgaatccgcgctgccgcgaatgctggataagatggagaagttgggttgccgtaaatcagtggtggggctggtgataccgaccggctactcctttaacctcgatggcacctccatctacctgacgatggcggcagtgttcatcgcccaggccaccaatagccatatggatatcttccatcagatcaccctgctggtggtgctgctgctctcttcgaaaggggctgcgggcgtcaccgggagcggatttatcgtactggcggcgaccatctctgcggtagggcatctgccggtggcgggcctggcgctgattctcggtatcgaccgctttatgtccgaagcgcgcgcgttgaccaacctggtgggtaacggcgtggcgaccgtggttgtcgcgaaatgggtgaaagaactcgatgccaaacagctcgatgatgtgttgaataaccgcgttcccgcggacaaatcgcaagaattatcctcgtaa

SEQ ID NO: 111338 - DNA, 2007 bp, Enterobacter aerogenes
ttgcgcgtcagccgctcacttacaattaaacagatggcgatggtcgcgagcgtgtccatggcgtttgtcctggtcttttgttccattttgctgtttcactttgtgcaacagagtcgctataccacggccacgcaattagaaagtatcgcccgttccgttcgcgagcccctgtcggcggcaattttgaaagccgatattcccgaagcggaagccattctgggccgcattcagcctgctgggatcgtcagccgggcggatgtggtgctaccaaatcaatttcaggcgctgcggatgcgctttattcccgagcgcccggtgccggtgatgatcacccgcctgtttgaactaccggtgcagatatccctgccgatttactcgcttgagcgcccggctaatccgcagccgctggcctatctggtgctgcaggcggattcctatcgcatgtataaattcgtcatgagcgcgcttgcgacgttagtgactacttacttacttttggtgcttattttgacggtggcgcttacctggtgcattaaccggctgattgttcgcccgctgcgcgccatcgcccgcgagcttaacgatattccgccgcaggatcggctcggacatcagctgagcctgccgcgactgcaccaggatgatgaaatcggcatgctggtgcgttgctacaatcgcaaccagcagtctttgctgcgtcagcatgatgagctatcgctgcaatcgacccgtttcccggtgtctgagctccccaacaaagcctttttgatggcgatgctggagcagaccacaacccgtccacaaccctcggcgctgctggtggtagcctgtgagaccttgcaagatgccgctggcgtcctgaaagagagccagcgcgagatgctgctcctgacgctggttgagaagctgaaagcggttatcccacccaatatggtgctgacgcaggtgagcggttacgatttcgctattttcgcccccggactcagcaagccgtgggaagcggtgtcgttaagtaagcaagtgctcacttctattagcgagcgattgccgctgcacggtgtccagctgcggccctgcgccagtgtcggtatcgcgatgtttaatagcgaactgagcgctgaacagttttatcgtcgggcggtttccgccgcggtgacggcgcggcgcaagggcaaaaatcagatcgagttctttgaccccgagcagatggaaaaagcccagcgtcggttaatggaagagcacgatatcctcaccgcgctcgagaatcagcagttcgccatctggtttcaaccgcaggtggatattgccagcggtgatatttgcggtgcggaagttctgctgcgccagcgacaggccgatggcggttggtcgctgccgtgcgatctgattgagcgtattgaaaactgcgggctgatggtgccggtaggctattgggtgatggaagaagcctgccgccagctggcagcctggcagcagcaggggatcatgctgccgttgtcggtgaatgtctcgttactgcagttgctgcatcctgaccgcggcgttgagctgctggcactcattgaacgctatcgtatcgccccgggcaccctggtgctggaggtgacggaaagctgccgtctcgacgatccgcaggcggtgattgacctgctgcgcccgctgcgcgacgccggcacgcgtattgcgctggatgatttcggcatgggttatgccgggttgcgccagttgcaacatatgaaatcgctgccggttgatattctgaaaatcgacaaggcgtttattgatatgttgccggatgataccagtatggtcccggcgataattcaactcgcacgcgggctcaagctgcggatcgttgctgagggcgttgaaaaagaagaacagctgaaatggttgcaagcggctggcgtggatgtcgctcagggttacctgtttggttgcgccttgccgctggaaagctttatgcagcgcttcctgcaggccgataaggacgatgcaagtttgtaa

SEQ ID NO: 111339 - DNA, 3480 bp, Enterobacter aerogenes
atgcgcaagttctcactaagcttcatcacgctgtctgtcggccttggcctgttgccgctggcgcaggcggagaatacccctgcgcagcagcatctgctggaacaagtgcgtcttggcgaggccagcagtcgtgaggacctggtgcgtcagtcactttataggctggaactgatcgacccgaataaccccgattatcttgccgcgcggacgcgctatctgctgcgccagggcgacaccgccggcgcgcaaaagcagctcgatctgctggcaaagctggctccggaatcgtcggcgctacaagcgacgcgtaacgagatgaagatcagtaccggtagcggtcgccaggcgttgcagcaggcgcgattgctcggcgttgccgggaaggtcgatgaagccgtcgccgcctatgaaaagctcttcggcggcgtcccaacggataccgaagccgctatcgaatactggacgctggtggcgcgattgcccgctcgccatagcgaaggcgtcagccagctgaaaaaacttaatgccagtactccggataacgtcacgctattgacctcgctggcgaagcagatgttttcagataacaagccgcaggagggcttcgcctatctggaacagatggcgcgttcggcctcaggccgcggaattgcggctgatatgtggctcggcgaaattaaaagtatgccggtcagcagaggcagcgttcaggcactacagcgattcctgctccagttccccgctggttccgctgccgctaacgcccgggtgttgctggcgcagcagcaaactcaactgcaagacccagccttcctcgccaaaagcgaagggctggcggcggtgaaatccgggaatgcggcgcaggcggtggccgatctgcagcaggcggtacgcgcggatgcccgcgatagcgatgccgtcggcgcgctgggcgccgcctactcacagcgcggcgatagggcgcgggcggtggcgcagcttaataaagcgatcgcgatggatccgaaaagcccgaatcgcgataagtgggacagtttgctgaagaccaaccgctattggttgttgattaaacagggcgataacgcgctgaaagcaggccaactggcgcaggcgcaaaatgcgtacgcccaggcgcagcgggtggataacaccgacagttacgcggttctggggttaggcgatgtcgccgcggcgcgcaaagatgacgccgccgccgaacgctactatcgccaggcgttacgcatggatcgcgacaataatctcgccgtacgcggtctggcgaatgtttatcgtcgtgaatcgccggaaaaagccagcgcctatattgccagcctccccgccagccagcggcgcagtattgatgatatcgaacgcagtcttaccaacgatcggctggaaaaacaggccgaagcgctggaaagccagggcagctgggcgcaggccgcggaggtgcagcggcggcgtctggctctggatcctgaaagcgtgtggataacctatcggttggcgaaagatctggtcagcgccggccagcggccggaagcggacgcgctgatgcgtaacatggccaaccgcaagccgggcgatgccgaacgggtttatgcctacggcctctatttgtccggtaataatcaggatgatagggcgctggcgcaaattaacgcgctgccgcgcggacagtggaccgataatattcgtgaactggaagggcgtctgcaaagcgacaaagtgatgcgcgaggccaaccaacttcgcgatagcgggcaggaagcgcaggccattaccttgattaaacagcagccggaatcgatccgctacgatctggcgttggcggattgggcgcagcagcgcggcgatagcgaggcggcgatagcccagtaccatcgggtgctgagccagcaggctgataatggcgatgcgcgccttggcctggcggaagtctatctcgccgagggcgataaaaattccgcccgcgcgcaggtcgcgcagttgaaggatacggaatcgatcaacatgcagcgccgggtagcgctggcccgcgccggatttgacgataccgcgggcgcgcaacaaatatttgaccgcatcgtgccgcaggcgaaaagccagccgccgtcgatggaaagcgcgctggtgctgcgtgatgccgcgcgtttccagacgcaaagcgagcaaccacagcaggccctggaaagctataaagacgcgatggtggccgctggcgtgacccgagttcgcccgcaggataatgacacctttacccgcctgacccgcaacgatagccaggatgactggctgaagcgcgggatccgcagcgacgccgccgatctttatcgccagcaggatcttaacgttacccttgagcacgactattggggatcgagcggcaccggcggttattcagacctcaaagcgcacactaccatgttgcaggtggacgcgccgttgtatgacgggcggatgttcttccgtaccgatgtggtgaatatgaacgccgggtcgttttccactaatagcgatggcggttactcgccgagttgggggacctgtggtgaaattagctgctatggcggcagtaaaaatcagagcgatggcggcgccagcgtagcggttggctggaagaacgacacctggagcggcgatatcggcaccacaccgatgggctttaacgtggtggatgtcgtggggggactgagttatagcggcgatgccggcccggtcggctataccgtcaacgtccaccggcgacccatttccagctcgctgctctccttcggcgggcaaaaagataatcctaacgacggccataccggcactacctggggcggcgtccgcgccgccggcggcggcatcagcctcagctacgataaaggcgaggctaacggcatctggtcatcgctgggggctgaccaactcaccggcaaaaacgtcgaggacaactggcgcgtacgctggatgaccggttactactataaagcgatcaatgaaaataatcgccgggtgaccgtcggcctgaccaatatgatctggcactacgacaaagacctcagcggttacacgctgggccagggcggttactacagcccgcaggagtatctctccttctcggtgccggtcatctggcgtcagcgtaccgaaaactggtcgtgggaactcggcgggtcggtgtcgtggtcccattcgcgtacgcaaactcatgcgcgctatccgttgctgaatttgattccgtcgcagtatcgctacgaagccagtcagcaaaaagaagagggcggcagcagccagggcttcggttataccgcacgggcgctggtggaacggcgggtcaccggcaactggtttgtcggcgcggctgtggatattcagcaggcgaaagattacaccccgagccacgcgctgctgtacgtgcgctattccgcttccggctggcagggcgatatggatatgccgccgcagccgttggtgccttatgcggattggtag

SEQ ID NO: 111340 - DNA, 1107 bp, Enterobacter aerogenes
atgaacgcatttcgtggggtacttctctcggtattgatgctggcggcggggcaggttagcgccgcctgccagtggcccgcctgggagcagtttaaaaaagcgtatgtcagtgccgaagggcgggtcatcgaccccagcgatgcgcgcaaaatcaccacctccgaagggcaaagctacgcgctgttcttcgctctcgcggccaacgatcgccagggcttcgataagctgttccagtggacgcagaacaacctggcgcagggcgatctgcgcgcccatctgccgggatggctatgggggaaaaagagcgaggatgaatggacggtgctggacagcaattcggctgcggattctgatttgtggattgcctgggcgctgctggaagccggacgcctgtggaaggttgataactatactgaggtaggaaaagcgctgctggcgcggattgccgatgaagaagtcgctgatgttccggggctcgggccgtcggtactgccggggaaagttggtttcgcggacgacaagggctggcgctttaatccaagttatctgccgccgcagctcgccacctactttacccgctttggcgcgccgtggccgaagatccgcgacagcaatctgcgactgctgctggaaacggcgccaaaaggcttctcgccggactgggtgcgctatgagaaaggcagcggctggcagttgaaaaccgataaaccgattattggcagctatgacgctatccgcgtctatctgtgggtcggaatgctcaataacgccgataaacaaaaagcgccgctattggcgcgtttcaaaccgatggcggttcagacgatcaaacagggattaccgccggaaaaaaccaatatcgccagcgggaaaacgactggcgaggggccggttggcttctccgccgccatgctgccgtttttacaagatgacgacgcccgcgcgttacaacgccaacgggtcgccgatcattatcccgacgcggacgcctactacagcgcggtgctgacgctgttcggccaggggtgggatcaacatcgttttcgtttcgccgcgggtggcgaattacaacctgactggaaccaggcatgcgcaagttctcactaa

SEQ ID NO: 111341 - DNA, 2316 bp, Enterobacter aerogenes
atgagcagttggtaccccttcgcaacattttcggctccggcgacgttgccggaggccgtggttgccggagctccagcgacagcgggagctgttcagccagcgccggtcgttaacgatggccagccaacggcgacggttgtcgattctgccgccgcgccggtggtggtggcggacaacattccctctcgcgatgtgaagctgacttttgcgcaaatcgcgccgccgccggggagcatggtgctgcgcggttcgcatcctgagggcgccgtagagttcggtatgcgcagcgatgaggtggtcgccaaagcgctgctcaatcttgactacacgccgtcgccatcgctgctgccggtgcagtctcaactgaaggtttatcttaacgacgagctgatgggcgtactgccggtcaccaaagagcaactgggtaaaaaagtgagcgcccagatccccgtcgatccgctgtatatcaccgattttaaccgcgtgcggctggagttcgtcggccactatcgcgacgtttgcgaaaacccggcgagcagtacgttgtggcttgatatcggtcgtgagagctcgctggatttaacctatcagtcgctgcaggtccgtaacgatctctcccacttcccggtgccgttctacgactcgcgcgacaaccgtccgctgacgttgccgatggtttttgctgccgcgcctgacgtcatacaacagcaggcggcggcgattgtcgcctcctggtttggcagcaaggctggctggcgcggccagcagttcccggtccacttcaatgagataccggaacgtaacgctatcatcttcgcgaccaacgataagcgtccggacttcctgcgcgaccatccgccggtgaaagcgccgactatcgaaatggtcaaccatccgagcaacccgtacgtcaagctgctggtgatcttcggtcgcaacgatcaagacctgctgttggcggccaagggcattgcccaggggaatattttgttccgcggcgatagtgtcgtcgtggatggcgtgaaagagttgaaggcccgccagccctatgacgcgccgaactgggttcgtaccgacaggccggtgactttcggcgagctgaaaacctatgaacagcaactgcaatcaagcggcctggtgccagattcgattaacgtggcgctgaatctgccgccggatctgtatctgctgcgcgctaacggcatcgatatggacctgaagtatcgctataccatgccgccgatcaaagatagctcgcggatggatatcagcctaaacgatcagttcctgcagtcgttcagcctcaatagctcgcaggatgtgaataagctgattttacgcctaccggtgctgcaggggttactggacggccagaaccaggtgaccatacccgcgctgcgcctgggggcgatgaaccagttgcgcttcgatttccagtacatgaacccgatgcccggcggcaacatcgataactgcattaccttccagccggtgcagaatcacgtggtcatcggcgatgactccaccatcgatttttcgaagtattaccacttcctggcgatgccggatctgcgcgtcttcgccaacgccggtttcccgtatacccgcatggccgatctctctcagacgctgatcgtggtgccgaaaacgcctgatgcgggccaggtggagacgctactgcaggcggtaggtggcatcggcgcgcagagcgggctggcggctatcaacttgcagatgaccgatgacggtaaccagattaagggcaaagatgccgacctgatgctgattggcgctattccgccatcgctgaaagacgacagcaaaatcaatctgctggttgaggcgaccaaaagctgggtgaaaacgccgatgcgtcactatgacctggccagcatctacccggacgatgacgcccgcacgccgcatacgcgaaccgacatcacctcttccgggccaatggcggcgattatcggcttccagtcgccatacaacgaccagcgcagcgtgatcgccctgatggccgatagcccacgcggcaacgagctgcttacaaacgccttaaatgacagcggcaaacgggcggcgatgttcggttcggtggcggtgattcgcgaatccggcgtcaatagcctgcgggttggcgatatctattatgtcggccatctgccgtggttcgagcgcatctggtttgcgctctccagccatccgatactgttggcgattctggcggccgtcagcattgtgctgctggcgtgggtgctgtggcgcatgctgcgtattctcagccgtcgccgtcttgatcctgatgatgagtaa

SEQ ID NO: 111342 - DNA, 2619 bp, Enterobacter aerogenes
atgatccgcctgagtacgttgctgctggcgccgccggtgggcgagcgcttgagtgaacgttatgatgactatcgtcagcatggcgcgtcggtgctttcggcttttctcggttgcctgtgggcgtcgctggcgtgggcattcatgccgcttgagacgccgcgctggcaagctattcgcgaacaccatggcgactattttccgcatattaatccgcatcgcccacgcccgttagatccgctgcgctatttgctgcagtcgctctggctgctggcgacccgggtgccggaagcggataaaaaaataaactggcgctcgctggcggcgctggaaggggttcacgggcgctacgcgcagtggctggaaaaattaccagagaaggtcaacacccgtaccggccacctcgataagcagaaagagcttgaacatctgcatccgcagctgcggcggctggtgcttggcaccattaccttcttctcgctgattctggcgctgttgtgtatcacccagccgtttaacccgctgtcgcagtttatcttcctgctgttactgtggggcgtcgcgctgctggtgcggcgtattccggggcgtttctctgccctgatgttgatcgtgttgtcattgaccgtttcttgtcgctatatctggtggcgctatacctccacgctgaactggaacgatccggtcagcctggtgtgcgggctgattttgctgtttgccgaaacctacgcctggattgtgctggtactgggctatttccaggtggtgtggccgctgaatcgccagccggtgccgctaccggaagatatgaacgaatggccgacggtggatatcttcgtcccgacctacaacgaagatctcagcgtagtaaaaaataccatctacgcttcgcagggtatcgactggcctaaggataagctcaatatctggatccttgatgacggcggtcgcgaagagtttcgccagttcgcaaaagatgtcggcgtacattacatcgcgcgtaccagccacgaacatgccaaggccggtaatatcaacaatgcgctgaagtatgcgaaaggcgagttcgtctctatttttgactgtgaccacgtgcccacccgctcgttcctgcagatgaccatgggctggttcctgaaggataaaaagctggcgatgatgcagacgccgcaccactttttctcgccggatccgttcgaacgcaacctgggccgttttcgtaaaacgccaaatgaagggacgctgttttacggcctggtgcaggacggcaacgacatgtgggatgcgacctttttctgcggctcctgcgcggtaattcgccgcggcccgctggatgaaatcggcggtatcgccgttgagacggtcaccgaggatgctcacacttcactgcgcctgcatcgtcgtggccacacctccgcctatatgcgcatcccgcaggcggcggggctggcgacggaaagtttgtcggcgcatatcggccagcgtattcgctgggcgcgcgggatggtgcagattttccgtcttgataaccccttattcggtaaagggttgaagctggcgcagcgtatctgctacgtcaacgcgatgctgcactttttgtccggtataccgcggcttatcttcctcaccgcgccgctggccttcctgctgctacacgcctatatcatctatgcgccggcgctgatgatcgccttgttcgtgctgccgcatatgattcatgccagcctgaccaactcgaagatccagggcaagtaccgccactccttctggagtgaaatctacgaaacggtgttggcctggtatatcgcgccgccgaccttcgtcgcgctgattaacccgcacaaaggcaagttcaacgtcaccgccaaaggcggactggtgaaagacgagtatgtcgattgggttatctcccgcccctatatttatctggtgttgctcaatctggtgggtgtggcggtcggcatctggcgctttatgtacgggcccgaaaacgaaattttgaccgtctgggtcagtatcatctgggtgttttataacttaatcatcctcggcggcgccgtggcggtgtcggtggagagcaaacaggtgcggcgttcgcaccgcgtagagatgtcgatgccggcggcgattgcccgcccggatggccacctgttctcctgtaccgttcatgactactcggacggcggcctggggataaaaattcacggtgaagcgcgggtactggaagggcaacacgtgaatctgctgctcaaacgcggacagcaagaatatgacttcccggtacgcgtcgcgcgggtgaacggcggcgaagtcggtctgcaattgctgccgctgacaaaccagcaacatattgattttgtgcagtgtacgtttgcccgcgctgatacgtgggcgctttggcaggatagcttcccggaagataagccgatggaaagcctgctggatatcctcaagctggggttccgtggatatcgtcacctggcggagttctcgccgccgtcggtgaaggttattttccgctcgctcacctcgctggtggcctggatcgtatcgtttttaccgcgccgtcccgaacgcgccgcggcggtgctttcggcagaaccggcaatggctcaacaatga

SEQ ID NO: 111343 - DNA, 738 bp, Enterobacter aerogenes
atggcgattctgggattacaaggcatacgcggcggcgtaggcaccacctccattaccgccgcactggcctgggcgctacagctgctcggcgaaacggtgctggtggtcgatgccagcccggacaatatgctgcgcttttttttcaacgttgatttcgaccatcacaacggctgggcgcgctcgttgattgacggtcgcgactggcgcgacgccggactgcgctacaccgcgcatatcgatcttctgccgtttggccgcctgacccctggcgaacgcgagcacgttgataaactgagtccgaccctggaacccatcgcagcgcaaatcaaattgctcgatcagcaggggagccaccgctggctgctgcttgatattccggaaggctactctccgcttacccgcgaactgctgagcgtctgcgatcgtgcgctacaggttgtgcaccccgacggtaacagtcatatacgtctgcatcagcaggcgctgcctgccaacgcggatattttgattaacgacctgcgcgtcggcagtcagctgcaggaagatctctatcaactgtggctggaaagccagcggcgtattttgccggtcacgattcaccgcgatgaagcgatggcggagtgtctggcggcgaaacagcctcttggcgaatatcgccaggattcgctggcggcggaagaggtgctgacgctggccaactggtgcctgctgcactatgccagggagggggcggcatga

SEQ ID NO: 111344 - DNA, 189 bp, Enterobacter aerogenes; identical to SEQ ID NO: 87647

SEQ ID NO: 111345 - DNA, 1557 bp, Enterobacter aerogenes
gtggatattgtatatacgttgggtatttcatcgttatgggacgaagtatgccatatgcccgttggcggggtgtggtggcttaatgtcgaccgctatgccgacgccgtcagcctgatgaatcaaacgctggaaagccaggcgcaggacagcaaagtcgccgccatagtgatgggaaaaaaccctaaagaagtcatgtcattaaaaaaagatcgcggccctaataaaatcgcattattcaccatgcccgatcgcccggaaggcctgaaggagttgcaccgcgacctactttgttcgatggaacctggcaattatttatttattctgctatgtacagaaaattcctggcaaaatataaaaacagaagaattactccattgggtagaaaaatcgaatcgatgggccaaatatcataactgctctcttatgatacttaattctgctaacgataccgacaaacaactttccccgttattacgccagtatcgagccctttccgggctggcgagcattcgttatcagggcgatagccatctatttgatatcgcatggtggggcagtgagaaaggtattagcgcgcagcaacagttggttattttacacgatgatgagggctggcgactggcgcaaaacgaagaagcggtggtacagccgcgcagcgacgaaaaaatcgtcctcagtaatttgcgcgtgctggaaggggcccccgcgctttccgaatactggacgctgttcgaaaccaatgatgccgtctttgaagccggtcgtaccgcacaagcggccaccttgctattttccatcacccagaacgaacaaatagagcagctcggccgctatatccataccctgcgtcgccagcgcggcagcgccctaaaaatcgtggtacgtgaacaaacgccgagcctgcgcgccactgatgaacgcttgctgctaagcagcggcgccaacatggtgatcccctgcagcgccgggctttcacgctgcctgacgctcattgaaagcgtgcaaaagcagaaatttactcgtcacgttccggaagacttcaacacgttgttgacctggagccggccgcttaaacttcgcggctatcaaaagtgggacgccttctgtgaagcagtcggtaatatcatggccaacacgctgctgccgccggatagcaaaggggtgatggtggcgttacgccctgcgccggggctacgcgttgaacaggcattaaccctgtgtaaacctaaccgcatgggcgatatcgtgacgatcggcaataatcgattagtgctgttcttatcgttttgccgggtaaatgacctcgacaccgcattaaaccatatcttcccattaccgaccggagacattttctctaaccgtatgatttggtttgaagacaagcaaatttcagcggaaatcctgttgatgcggggcctctccccggacaactggaacacgccgctgccaattaccataggcaaaaacgaagcccttaacgttaagcacgatgggcgccagtggcggcgaatcccggaaccctggcggctctccaccgacggagaaccgcggtcatga

SEQ ID NO: 111346 - DNA, 198 bp, Enterobacter aerogenes
atgatgtctatcgccgatatcattcagctgatcgtattgtgcgccctgctgtttttcccgctgggatatctaacgcgccattatcagcgccgtattcgcacgactttgcgtttgatgttctttaaaccccgttatgtgaaaccagccggcgtactgcgccgggataatgcgaccaggcagggcaaactgaaaaaatga

SEQ ID NO: 111347 - DNA, 1680 bp, Enterobacter aerogenes
atgaccaaagcaaaaactaccgctacgccgcttccgctatggcagtactggcgcggcctgtctggctggaacttctattttctcgtgaagtttgccctgctgtgggcggggtacctgaacttccatccgatgcttaacctggtgttcctcgcctttctgctggtgccgatcccccgagaaaaactgcaccgggtacgccactggatagcgatcccgctcggctttgccctgttctggcatgatacctggctaccgggtccggaaagcatcatgagccagggttcgcaaattgccggtttcagcgccgattacatctgggatctgatcacccgcttcattaactggaatatggtcggcgccttctttgtgctgctggtgctgtggctattcatcagccagtggctacgcgttaccgtatttgtttcggctatcatggtctggctggttatcagcccgctgctgccctcctttaccttatggcctgccggtcagccgaccacggcagcggccacgccggcggcaacaaccggtggaaccacaacagccgcggcatccaccagcgctgccgccagcggcgatatcccgccgcagaccgaaccgccaacctcggctaacctcagcaactggctgaaaactttctatgcttctgaacagaaaagaaaaacgtcattccccgctcagcttcctggggatgcgcagccgtttgatctgctggtgatcaacatctgttccctgtcatggtcggacatcgaggctgccgggctgatggatcacccgctgtggaaacatttcgatattgtcttcaaaaacttcaactccgcgacctcctacagcggcccggcagcggttcgcctgctgcgcgccagctgcggccagctatctcatagcaacctgtatcagccatcgggcagcgagtgctatctgttcgaaaatctggcgaaactgggctttacccaacagctgatgctggggcataacggcgtattcggcgacttcctcaaagaggttcgctcactcggcggcatgcaaagtccattgatggatcagagcggtttgccggttatcctgcaaggcttcgacggatcgccggtttacgacgaccaggcgacgctcgatcgctggctacagtccaccgagaagcttaacacgccccgtaccgcgaccttctacaacacgctgccgctgcacgatggcaaccattatcccggccaaagcaaaacggcagactataaagctcgcgcgcagaaattctttgatgagctggacgccttcttcaccgaactggaaaaatcggggcgtaaagtgatggtggtggtggtgccggaacacggcgccgcgctgaagggggataagatgcaggtttccgggctgcgcgatatcccaagcccatcgattaccaacgtccctgcggcggtgaaattcttcggcatgaaggcgccgcaccagggcgccgcggtggaaatcacacagccttccagctacctcgcggtttctgaattggtggtgcgcgccctggacggcaagatgtttaccgaggataacgtcaactggcagcagtacaccgctaacctgccgcagaccgcggcggtatcggaaaactccaacgctattgttattcagtatcagggcaaaccctacgtgcaactcaacggcggcagttgggtgccatatccgcagtaa

SEQ ID NO: 111348 - DNA, 1014 bp, Enterobacter aerogenes; identical to SEQ ID NO: 107564

SEQ ID NO: 111349 - DNA, 984 bp, Enterobacter aerogenes; identical to SEQ ID NO: 107565

SEQ ID NO: 111350 - DNA, 903 bp, Enterobacter aerogenes; identical to SEQ ID NO: 107566

SEQ ID NO: 111351 - DNA, 1020 bp, Enterobacter aerogenes; identical to SEQ ID NO: 107567

SEQ ID NO: 111352 - DNA, 1608 bp, Enterobacter aerogenes
atgagtatttccttgaaacagtcagggatgctgaagcttggtctgagcctggtcgccatgaccgttgccgcaagcgtacaagctaaaaccttggtttattgttctgaaggttcgccggaaggctttaacccacagctcttcacctcgggtaccacctatgacgctagttcggtgcctatttacaaccgtctggttgaattcaaaaccggtacgactgaagttattcctggtcttgctgagaagtgggatgtcagcgaggacggtaaaacctataccttccacctgcgtaaaggcgtgaagtggcaggataataaagactttaaaccaacgcgcgagctgaatgccgacgacgtggtgttctccttcgaccgccagaaaaatgacaaaaacccgtaccataaagtctctggcggcagctatgagtacttcgaagggatgggtctgcaggacctgattagcgaagtgaagaaagtggacgataataccgtccagttcgtgctgactcgcccggaagcgccgttcctcgctgacctggcgatggactttgcttctattctgtcgaaagaatatgccgacaacatgctgaaagccggcacgccggaaaaagtagaccttaacccaatcggcaccggcccattccagctgctgcagtatcagaaagactcgcgcattctgtataaagccttcccgggctactggggcaccaagccgcagatcgatcgtctggtcttctccatcactccggacgcttccgtacgctacgccaagctgcagaaaaacgagtgccaggtgatgccgtatccgaacccggctgacatcgcgcgcatgaaggaagataaaaacatcaacctgctggaacagccgggtctgaacgtgggttatctatctttcaacaccgagaaaaaaccgctggataacgtcaaagttcgccaggcgctgacctacgcggtgaacaaagaagcgatcatcaaagccgtttatcagggcgcaggccagtcggcgaagaacctgatcccgccgaccatgtggggctataacgatgatgttaaagactacacctacgatcctgagaaggcgaagcagctgctgaaagaagcgggcatggaaaaaggcttcaccatcgacctgtgggcaatgccggtacagcgtccgtataacccgaacgcgcgccgtatggctgaaatgatccaggccgactgggcgaaagtcggcgtacaggccaagatagttacctacgagtggggcgagtacctgaaacgtgcgaaagcgggcgagcatcagaccgtgatgatgggctggaccggcgacaacggggatccggataacttctttgcgaccctgttcagctgcgctgcggcgaaagacggctctaactactctcgctggtgctacaagccgtttgaagacctcattcaaccggcacgcgccaccgacgaccacaacaagcgtattgaactgtacaaacaggctcaggtagtgatgcatgaccaggctccggcgctgatcatcgcccactccaccgtttacgagccagtgcgtaaagaagtcaaaggctatgtggttgatccgcttggcaaacaccacttcgataacgtctctgtcgaataa

SEQ ID NO: 111353 - DNA, 1692 bp, Enterobacter aerogenes
atgaaatacattaaaacgatgtcgcagcagaagctaagtttttggcttgcgctgtacatcggctggtttatgaacgccgcggtgtttttccgccgcttcgatggctacgctcaagagtttaccgtctggaaagggttgtccgggttggtggaactggtagcgacggttctggttactttcttccttctgcgcctgctgtcgttattcggccgccgggtatggcgcatattagcgacgctggtggtgctgttttccgcggcggcaagctattacatgaccttcctcaacgtggtcattggctacggtattatcgcttcggtgatgaccaccgatattgacctgtcgaaagaggtcattggctggcatctgatcctgtggctggccgcggttagcgctttaccgctactgcttatctggagcaaccgctgccgtaagacgctgctacagcaggtgaaaacgccaggtcagcgggcgaaaaatatcctgatagtcgtgctggccgggctgatggtctgggggccgattcgcctgctggaagtgcgccagaagaacgtcgagcgcaattcagaagtcgatatgccgagctacggcggcgtgattgccaactcttacctaccttctaactggctgtcggcgctcgggctgtacgcctgggcgcaggtggatgagtcgtccgataataaatcgctgattaaccccgcgaaaaaattcacctacgtagcgccgcaggatcttgatgatacttatgtggtgtttattatcggcgagaccacccgctgggatcatatgggtattctcggctataaccgtaataccacgccgaagctggcgcaggagaagaatcttgtcgccttccgcggtacctcttgcgataccgccaccaagctgtcgttgcgttgtatgttcgtgcgcgagggcggggcggatgataatccgcagcggacgctgaaagagcagaatgtgtttgctgttctgcaccagttaggctttgccggcgacctgtacgcgatgcagagcgagatgtggttctacagcaatacgatggccaacaatatcgcctatcgcgagcagatcggcgccgagccgcacaaccgcggcaagaacgtggatgatatgctgctggtcgatgaaatgaagcgcggcatggagcaaaacccgagcggcaagcgtctgattattctccataccaaggggtcgcattttaactatacccagcgatatccacgcagctttgcgcagtggaaaccagaatgtgtaggggtggacagcaaatgttcgaaggccgagttgattaactcctacgataacagcgtcacttatgtggatcactttatcgtcagcgtgctggaccaactgcgggataaaaaggctatcgtgttctacgccgccgatcacggcgagtcgattaatgaacacgaacatctgcacggcacgccgcgtatgatggcgccgccggagcagttccgcgtgccgatgatggtctggatgtcggataagtatctggcgaatccggatcacgccgcctcctttgcgcgcctcaagcagcaggcggcaatgaaggttccgcaccgtcacgttgagctgtatgacaccattatgggttgtcttggttatacctcgccggatggtgggattaatgagaacaacaactggtgtcgcgtgccggcagcggcgaaagcggcgaaggaatag

SEQ ID NO: 111354 - DNA, 1206 bp, Enterobacter aerogenes; identical to SEQ ID NO: 107570

SEQ ID NO: 111355 - DNA, 648 bp, Enterobacter aerogenes; identical to SEQ ID NO: 105940

SEQ ID NO: 111356 - DNA, 564 bp, Enterobacter aerogenes
atgcaacgttgcggatgggtaagccaggatcctctttatatccagtatcacgataacgaatggggagtcgccgagagaacgccgcaaaagctgtttgaaatgatctgcctggaaggccagcaggcggggctctcgtggatcacggttctgaaaaaacgtgaaaactatcgtcaggcctttcaccagtttgacccggttcgcgtagcggccatggatgaagcagacgtcgagcgcctgctacaggatgcgggcattatccgccatcggggaaagatccaggccatcatcggcaatgcgcgggcgtttctcgccatggaagccaacggtgaagcattcagcgatttcgtctggtcgtttgtcgataatcagccgcaaattacccatgcggcgacactcgccgaaatccccaccaccacaccagcctccgatgcgctatctaaggcgctaaaaaagcgcggctttaaatttgtcggctccactatctgttattcatttatgcaggcctgcgggttagtcaacgatcatgtgaccggctgctgttgctaccccgggagaccagcatga

SEQ ID NO: 111357 - DNA, 441 bp, Enterobacter aerogenes
atgatccaaaaatgggatgccacggagaccggcccgctactcgagttatggctggaaagcacgatttacgcgcatccgttcattgctgaaagctactggcgggaaagcctggaagttgtgcgcgaggtctatcttcccgccgccgccacctgggtgtggcaggagaatgacgcactgaaagggtttatcagcgtgatggattcgcgcttcgtcggggcgcttttcgtcgccccgcaagcgatccgccacggtatcggccgcgcgctgcttgatgaggtcaagcagcactacgactggttaagcctggaggtctatcagaaaaacgtgcgggcggtaaatttctaccacgcgcagggcttccgaatagaagactgcgcatggcaggacgacacccagcacccaacctggattatgcattggccggcggatcaaatgcgctga

SEQ ID NO: 111358 - DNA, 2331 bp, Enterobacter aerogenes
ttgccaacttcatctgcaactaaaaccatcttaaccgcggcccactgggggccaatgctggtggagacggatggtgaaaatgtgatttcgtcccgcggcgcgctggacacccccttcgccaactcgctgcaaacggcggtgcgcgaacaggtgcatagtaaaactcgcgttcgctatccgatggtgcgaaaaggctatctcgcctcgccgcaacagccgcagggcgtacgcggccaggatgaattcgtgcgggtaagctgggagcaggcacttgatctgattgatgcccagcatcgacggatccgcgaaagctacggcccgcagtcgattttcgccggttcctatggctggcgttctaacggcgtgttgcataaggcggcaaccctgctgcagcgctatatgagtcttgccgggggctataccggacacctcggcgattattcaaccggcgcggcgcaggcgatcatgccttatgtggttggcggtaatgaagtttatcaacagcaaaccagctggccgcttatcctggagcacagcgaggtggtggtgctgtggagcgctaatccgctgaatacgctgaaaatcgcctggaacgcctcggatgaacaggggatcccctggtttgatcgcctgcgccagagcggcaagcggctgatctgcatcgatcccatgcgatcggaaagcgttgatttctttggcgaatcgatggaatggatcgcgccacatatgggcactgacgtcgcgttgatgctggggatcgcccataccctggtagagcatggctggcaggacgatgaattcctcgcccgctgtaccagcggttatgacattttcgcccgctatttgagtggtgaaagcgatggcgtcgccaaaaccgccgaatgggcggcggcaatttgcggcgtagcggcgtataaaatccgcgaactggcgaaacttttccacgaaaacaccaccatgctgatgtccggctggggcatgcagcgccagcagtttggcgagcaaaaacactggatgctggtgacgctggcggcgatgctggggcagattggcacgcccggcggcggttttggtctttcttaccactttgccaacggcggcaaccccacgcgccgcgccgcagtgctggcctccatgcagggcagcgtagcgggcggcgtagacgcggtggaaaaaatcccggttgcccgcatcgttgaggccctggaaaaccccggcgcaagctatcagcacaacgggatgacgcggcgctttcccgacatccgctttatctggtgggcgggcggcgccaactttacccatcatcaggataccaaccgcctgattcaggcctggcagaagccggagctgattgtgatttccgaatgcttctggaccgccgccgcgcgccatgctgatatcgtcttaccggcgaccacttcgtttgagcgtaacgatctgaccatgaccggcgactacagcaatcagcatctggtgccgatgaagcgggtggtcgcgccgcgcgatgaagcgcgcgacgatttcgatgtttttgccgatctgagcgaacgctgggaggcgggcggccgcgaacgcttcaccgaaggaaaaaacgatttgcaatggctggagaccttctatcagattgccgcccagcgtggggcgcagcagcaagtggcgctgccgccgtttgccgaattctggcaggctaatcagctaattgaaatgccggaaaatccggataacgcccgtttctcccgcttcgcggcatttcgcgcagacccgcaggctaatccgttaaaaaccgcgagcggaaaaattgaaattcactcgccgaccattgccgggtttggctatgccgattgtccgccgcacccgatgtggctcgaacctgacgagtggcacggcaacgccgaggtgggtcagctgcaggtgctttccgcccatccggcgcaccgcctgcatagccagttgaaccagacttcgctgcgtgaacgctatgccgtcgccgggcgcgaaccgctgactatccatccgctggacgcgcaggcgcgcaatatcgccgacggcgatctggtgcgggtgtggaattcacgtggtcaggtactggccggcgcggtggtcacggaaggtattcgtccgggggtgatttgcctgcatgaaggcgcgtggccggatatcgaccccgatgccggaatatgcaaaaacggcgcggtgaacgtgctgacgaaagatattccgacctcgcgtctgggcaatggttgcgccgggaatacggcgctggcatggctggaaaaatatgatgggcccgcgctggcgctcagcgcatttgatccgccggccaatgcataa

SEQ ID NO: 111359 - DNA, 663 bp, Enterobacter aerogenes; identical to SEQ ID NO: 108232

SEQ ID NO: 111360 - DNA, 1017 bp, Enterobacter aerogenes; identical to SEQ ID NO: 105945

SEQ ID NO: 111361 - DNA, 750 bp, Enterobacter aerogenes
atggccagaaaaatcattgtcgtcaccgccgcttatggcaacgaccacgttaaagcgcttggcgggcagtccgccgtattaccctttatcgccggttccggcgccgatggcgtggaaattcgccgcgagttgttcagcgcggcggaactgaagcagttgccgacgctggcggccgacattgaaaaacaggggctgctggcctgctactccgcgccacaagcgctgttcatcgacaacggcgagctcaatccccatctcccgtcgttacttgaagaagcgcaaaccctcaacgccctgtggctgaagctctccctcggtcatttcatccataaccaacagctggagacgctgcgcgacattctgagcgccagcggcatggcgctggtggtggaaaatgaccagaccgattgcggccaactggcgccaatgcagcgcttcaaagccgcctgccgggtccatcagatgccggtgacgctgactttcgacatgggaaactggctgtgggtcggcgattcgccggaagaagccgcgcgccatctcgcccccgctgtcagctatattcatgtgaaggcggcggagcctcatcatgagaagtatcgcgccgtcccaccggaccaggcggacgctcgctggctggcgctgctcgataacctgcccgccgacgcgccgcgcggtattgaattcccgctggtcggcgacgacctgaccgccgtcacccgccattacgttgatctgttacgcgaggattaa

SEQ ID NO: 111362 - DNA, 936 bp, Enterobacter aerogenes
atggaaaacttagatgtcattaccattggcgaagccatggcgatgtttgtcgccaccgaaaccggcgaactggcggaggttgaacgctttatcaaacgcgtcgccggcgctgaactgaacgtggcgtccggcctggcgcgcctggggctgaaggtgggctgggtgagccgcgtcggcaacgatagctttggccgcttcgtgctgaattcgctggccaaagaaggcatcgacgcgcgcggcgtggccgttgacgagcgctacgctaccggcttccagatgaaatctaaagtcgaaaatggaaccgatcccatcgtggaatatttccgtaaaggatcggctgccagccatctgtcgacggaagatttccgcgctgattacttcaccagcgcccgccatttgcacttaagcggcgtcgccgccgcgctgtccgacagctcgtatgcattgctggaacatgcggccagggtgatgaaagccgaagggaaaaccctctcatttgatccaaacctgcgcccggtactgtggaaaagcgaagccgagatggtggagaaactgaaccgcctcgccttccaggctgactgggttttgccaggcttaaaagagggcgtgattcttaccggccagcagacgccggaaggtatcgctgatttctatctgtcgcgcggcgttaaggcggtggtgattaaaaccggctgcgacggcgcatggttcaagaccgccaacggcgaacagggcgccatcgcagccattaaagtcgacaacgtggtggacaccgtcggcgcgggtgatggctttgccgttggcgtaatcagcgcgctgctggaaggcaaaacgctgacgcaagccgtgaaccgcggtaacaaaattggctcgctggccattcaggtacagggcgatagcgaagggctgcccacccgcgaagcgctgggcgaataa

SEQ ID NO: 111363 - DNA, 972 bp, Enterobacter aerogenes
atgaagccgtctgtcattctctataaaacgctccccgacgatctgttacaccgtctggaggaacacttttccgtcacccaggtgaaaaacctgcgtccggaaaccgtttcgcagcacgcggaggctttcgcccaggcggaaggtttactgggttcgagtgaaaaggttgacgccgcgttactggagaaaatgccgaagctgcgtgcgacctctaccgtgtctgtcggctacgacaattttgatgtcgatgcattgaacgcgcgcaagattttgctgatgcatacgccgaccgtgctgaccgaaaccgtcgccgatacggtgatggctctggtgctgagcaccgcgcgtcgggtggttgaggtcgctgaacgcgtgaaagcgggcgaatggaccaagagcatcgggccggactggttcggctgcgatgtacaccataaaaccctgggcatcgtcggcatgggccgcattggcatggcgctggcgcagcgcgcccacttcggtttcggcatgccgattctgtataacgcgcgccggcagcatccacaggcggaagagcgcttcaatgcgcgctactgcgatctcgataccctgttacaggaagcggatttcgtctgcctcattctgccgctgagcgaagagacccaccacctgttcggcgaagcgcagtttgccaaaatgaaatcttccgccatcttcattaacgccgggcgcggtccggtcgttgacgagcaggcgctgattgcggcgctgcaggccggtgagatccacgctgccggtcttgacgtctttgaacatgaaccactggcaaaagattcgccgctgctgacgctgccgaacgtggtcgcgctaccgcacattggttccgccacccacgagacccgctataacatggcggcctgcgcggtagataacctgattgacgcattgaacggcaaggttgagaagaactgcgtgaacccgcaggtgaagtaa

SEQ ID NO: 111364 - DNA, 711 bp, Enterobacter aerogenes
atggcgacaggaaagtcctgctctcgctggtttgcggccgttgcggccatattaatggtggttagcctgagtgggtgttttgataaagaaggcgatcagcgcaaagcgttcatcgacttcctgcagaatacggcaatgcgtagcggcgaacgtctgcctacgctgaccgccgatcagaaaaaacagttcggccccttcgtgtccgattatgcggtgatttacgcttattcacagcaggtcagccaggcgatggatgcgggtctgcgcccggtggttgatagcgttaacgccattcgcgtggcgcaggattataccactcagcgtgagccgctgcggcaggctaacggcgcgctgggcgtgctgagccagcagctggaaaacgctaaaatgcaggcggatgccgcgcatggcgcgctgaagcaggctgatgaccttaagccggtttatgaccaggtgtttaataaagtcgtgacggcgccggcgaatgcgctgcagccgctgattccggccgcgcaggtctttactcagcaactggtccaggtgggtgattttgtcgctcagcaggggacgcaggtgagcttcgtggctaacggtattcagttcccgacgtctcagcaggcaagccagtacaatgcgctgattgctccgctggccgctcagcatcaggcctttaatcaggcctggacggcggcggttaacgccacgcgttaa

SEQ ID NO: 111365 - DNA, 1359 bp, Enterobacter aerogenes
atgaagaaaacaaccatcgatattcaggcttttatcaacgaacatccattcacgaagtaccaatggatgattctcgccttatgttttattaccgtcgcgatggacggatttgataccgcgattattggttttatcgcctcagacctggtacaggaatggggtgttgagaaatccgcgctgggcccggtaatgagcgccgctctggtcgggctcgccgtcggcgcgctgacggccgggccgctcgccgatcgtattggccgcaagaaagtgctgattatgtcgatcctggttttcggcggctttagtttgttaaccgcatttgccagcagccttaaccaactgacattattgcgcttcctcaccggattgggcttaggcgcggcaatgccgaatgccgcgacgctaatgagcgaatatgctccggaacgccgccgcgcgctgatggtaaacctgatgttcgtcggcttcccaatggggtcgtcgctgggaggctttctgtcggcctggatgatcccgcattatggctggcaaagcgtgctggtgcttggcggcgtgatgccgctgctgctggccgtggcgttaatgttcctgctaccggaatccgcacgctatatggtcgtgaaacggcagccggcgcagcggatcgccgccatcctgaagcgtatcgcgccgttgccggatgcggttgaatttgagctacgtgaagcaggccaggtgaaggaaaagtcagccattggcgtgattttctccccgcgctacgccgtgggcaccgtgatgctgtgcctgacctattttatgggattgctgattttctatctgctgaccagttggctgccgctgcttatccgcgagaccggcgcctcgatgagccaggcttctatcatcaccgctctgttcccgctcggcggcgggattggcgtgctgatcctcggcgcgctaatggataagatcaaccctaacaaagtggttgccgtcggctggctgctcaccggcgtctttgtttgcctggtgggtttctcaaccagcaatctgctgttgatgggggtaatggtgtttatcgctggcagcattatgaacggcgcgcaatcatcaatgccggcgctggctgccgggttctatccaacccagggccgcgccaccggcgttgcctggatgctcggtatcggccgcttcggcgggatcctcggcgccttcagcggcgctttcctgatgcaggcacaattgtcgtttgaaaccatcttcaccatgctggcgatcccggcgtttttatccgccatcgccctggtagtgaaatacaaactgagccagcgccaacctgccgttaagccaaatgacggtaaaaacctacagaaagcctaa

SEQ ID NO: 111366 - DNA, 291 bp, Enterobacter aerogenes
atggaatataaagatcccgtatttgatttgttgagtaacctggaacagattgtttttaaagaccagccgcaaacggctacgcacgcccgtaccccaagcgtttttaatgaattcgaacggctgcgtaagggcacaggccttaagacagatgatttcgccaatgcaatgggcgtcagcgtcgcgatggttgaagagtgggaatcgcgacgggtaaaaccttcatccacggagctcaaattgatgcgcctgatgatggccaatccacagctctcaaggcagctaatcgattga

SEQ ID NO: 111367 - DNA, 213 bp, Enterobacter aerogenes
atgtccggtaaaatgactggtatcgtaaaatggttcaacgctgacaaaggcttcggcttcatcactcctgacgatggctctaaagacgtgttcgtacacttctctgctatccagaacgatggctacaaatccctggacgaaggtcagaaagtttccttcaccatcgaaagcggcgctaaaggcccggcagctggcaacgtaacctctctgtaa

SEQ ID NO: 111368 - DNA, 1620 bp, Enterobacter aerogenes
atggctcattgtgcccacaccccctcttttgttttacatcaggtcacctgtcagttcgcgacgggacagacgctttttggcccgctgaatttatcgctggaaccgttgcgttgcggccttgtcgggcgaaatggcgttggcaagacacgcctgttgcgtctgctggcgggcctcgattctccctcctgcgggcatatcgaacgatcggccaccgttgcttgggtggcgcagcagccgaccctcacggccgggacaaccgttgcctccctgctgggttatgcgccagtatttgacgccttgtcccgccttgaacaggggaaagggctggcagatgacttcgaactgttagatggccgttgggatctgcccgatcgcctgagttcagcctttcgcgatgccgatctcccggcattctccgccgatcgtcccgctttttcgctcagcggcggcgaacgaatgaaggcgctgctgtgcggcgcattcgtttccggcgcggactttctgctgctggacgaacccacgaatcatctcgatcgtcagggccgggagtggctgtatcagcagctggaaatctggcggggcggggcattaatcgccagccacgaccgtgaattactggctctgatgtcgaggattattgagctaacgccggcggcgctgcgcagctacggcggtaattatgccgaatatcagcggcagcgcgaagcggagcaacaggccgcccgctcggcgctggagcatgccgcaatcgaacggcggcgcaccagggcgcggatgcaaaaggagcatgacgcggcccaacggcgctcggctcagacgctgcgtaccgtcgatacgctgaatatcgcctctttcgagcgtgtgaagtacaaaggggcggcaaaagagcgtccgggaacgctgcgccgccagcatcgtgagcagaacagtagtctgaatgccgccgtgcaccaggcgcgggagcgggtagaagaagataatccggtgatgttcacactgcctggcagtgaagtggctgccggcaagcaggtactggtgctggaatcgctgcagttggctcactcatcccccgcgccgctcgactggcgggtggatggcccgatgcgcatcgcgctaaaggggccaaacggctgtggcaaaacaacattattgaaaaccctgatggggctggagcaggcaaccgctggcgacgtccggctgtcggtgagtgcggcgtatctcgatcagcatctgacgcagctggatttatcattgtcggtgatggcgcaccttaacctgggcgataccccactggatgagggagtactgcgtagccgtctggcgcagctccagttgggagctgacaaggtcagccttccgctggcggcgttaagcggcggcgaacgcctgaaagcggcgcttgcctgcgtgctctggcggcgggactcaactcaattgctgctgctggatgagccaaccaatcacctcgatctggcgtctacccaggcaattgaaagcgcgctggcgacgtttcccggcgcgatgctggtggtatcgcatgacgaggcatttttacagggtctgaagctgactcattgtctggagtggagggaaacgggctggcattttgccgccctctga

SEQ ID NO: 111369 - DNA, 2070 bp, Enterobacter aerogenes
atgtctgagaaaactttcctggtggagatcggcaccgaagagctgccaccaaaagcactgcgcagcctggctgaatccttcgctgccaactttactgcggaactggacaacgctggcctcgcgcacggcgccgtcgaatggtttgccgcgccgcgccgtctggcgctgaaagtggcgaatctggccgcctcgcagccggatcgtgaagtcgaaaaacgcggcccggccattgcccaggcgtttgacgctgaaggtaaaccaagcaaagcggccgaaggctgggcgcgcggctgtggtattaccgtcgatcaggctgaacgtttgaccaccgataaaggcgaatggctgttgtatcgcgcccacgttaagggggaaagcgcgcaaacgctgctgccgaacatggttgcgacctcgctggctaagctgccgatcccgaaactgatgcgctggggcgcttctgacgttcactttgtgcgtccggttcacaccgtgaccctgctgttgggcgatcaggtgatcccggcgaccattctgggtatcgcttccgaccgtatcatccgcgggcaccgttttatgggcgagccggaattcaccatcgacaatgccgaccagtatccgcagattctgctggagcgcggtaaagtgatggccgactacgccgagcgtaaagccaaaatcaaagcggatgctgaagcggcggcgcgtaagattggcggtaacgctgacctgagcgaaagcctgctggaagaagtgacctcgctggttgaatggccggtagtgctgacggcgaagtttgaagagaaattcctcgcggtgccatctgaagcgctggtttacaccatgaagggcgaccagaagtacttcccggtctatgcaaacgacggcaaactgctgccgaacttcatcttcgtggcgaatatcgagtccaaagatccacagcagatcatctccggtaacgagaaggtcgttcgtccgcgtctggccgatgccgagttcttcttcaataccgaccgtaaaaaacgtctggaagataacctgccgcgtctggaaaccgtgctgttccaacagcagctgggtaccctgcgcgataagaccgatcgtattcaggcgctggcgggctggattgccgaacaaattggcgctgacgttaaccatgcgacccgcgcgggcctgctgtccaagtgcgacctgatgaccaatatggtcttcgagttcaccgacacgcagggcgtgatggggatgcactacgcgcgccatgacggcgaagcggaagatgttgcggtcgcgctgaacgagcagtatcagccgcgttttgccggcgatgcgctgccgtctaacccggttgcctgcgcggtggctattgccgacaagatggacactctggcgggtatcttcggtatcggtcagcatccgaaaggcgataaagacccgtttgcgctgcgccgcgccgcgctgggcgtactgcgtatcatcgttgagaagaacctgaatctcgatttgcaaacgctgaccgaagaagcggtgcgtctgtatggtgagaagctgactaacgccaacgtcgttgatgacgtcatcgacttcatgctgggccgcttccgcgcctggtatcaggacgaaggctatggtgttgatactattcaggcggtactggcgcgtcgtccgacccgcccggcggatttcgatgcgcgcatgaaggctgtgtcgcacttccgtacgctggaagagtcctccgccctggcggcggcaaacaagcgcgtatccaacatcctggcgaaatccgacgagaccctgaacgatatcgttcatgcctcggtgctgaaagaagcggcggaaattaagctggccggtaatctggtggtgctgcgtgataaactgcagccttatttcgccgaaggccgttatcaggatgcgctaattgagctggctgcgctgcgcgagccggttgatgagttcttcgaaaatgtgatggttaacgctgaagacaaagatgtccgcatcaaccgtctgacgctgctgtccaaactgcgcgagctgttcctgcaggttgcggatatttcactgctgcagtaa

SEQ ID NO: 111370 - DNA, 912 bp, Enterobacter aerogenes
atgcaaaagtttgataccaggaccttccagggcctgatcctgaccttacaggattactgggctcgtcagggctgcaccattgttcaaccactggacatggaagtcggcgccggcacatcccacccaatgacctgcttacgcgcgttggggccagagccgatggcgaccgcctacgtacagccttctcgtcgcccgaccgatggccgctatggcgaaaacccgaaccgcttacagcactattaccagttccaggtggtgattaagccgtccccggacaacattcaggaactgtatctcggatctctgaaagagctgggtatggatccgactatccacgacatccgcttcgttgaagataactgggaaaacccgactctgggcgcctggggattgggttgggaagtgtggcttaacggtatggaagtgacgcagtttacttacttccagcaggttggcgggctggagtgtaaaccggttaccggcgaaattacctacggcctggagcgtctggcgatgtacatccagggcgtggacagcgtatatgatctggtctggagcgatggcccgctgggtaaaaccacttacggcgacgttttccaccagaacgaagtggaacaatccacctataactttgaatatgcggacgtagacttcctgttcacctgcttcgagcagtatgagaaagaagcgcagcaactgctggcgctggaaactccgctgccgctgccagcctacgagcgtattctgaaagccgcccatagctttaacctgctggatgcgcgtaaagccatctccgtcaccgagcgtcagcgctatattctgcgtatccgcaccctgactaaagcagtggcagaagcatactatgcttcccgtgaggcccttggcttcccgatgtgcaacaaagacaaataa

SEQ ID NO: 111371 - DNA, 300 bp, Enterobacter aerogenes
atgaaatatttcgtatctgccctggcggcgctgctgctggtcggctgcagccagacacctgctcaacccgttcaaaaagcgcaaaaagcacgtattacgccgcaaactacgctgaatatggagaaattatgcaaagatcaggcggcgttacgttacagcaccgacacccatcgcgtcgacgtcaatcatttcgagcagttccaggcaagctatgagctttccggtctgacttcgcggaatgaacgctttgtctgttcttttgatccagacggccagtttttacatctttctatgcgctaa

SEQ ID NO: 111372 - DNA, 996 bp, Enterobacter aerogenes
atgcaggaaaaaataagctggattaccaacttgcgcggcatagcatgcctgatggtagtaatgattcacagtaccacctggtacattacccatcctcatagcatcagcttgttcgaatgggatatcgcgaatctgcttaactcggcatcacgggtcagcgtcccgctttttttcatgatttcaggatatctgttttttggcgaacgcagcgtccagccccgccattatctgcgcatcgcgctgtgtattctgttctatagcgtgctggcgctgctctatatcaccctgtttacccacatcaacgttgagctgtcattaaaaaatttactgcagaagccggtgttttatcacctgtggtttttctttgccattgtggtgatttatctgctctcgccgctgattcaggtgaagcaggtcagcggcaaaatgctgctggcgctgatgctggtgattggcctcatcgccaaccccaatatggtaagcatcaaggcgggcggcattgaatggctaccgataaacctctatatcaacggcgataccttttactacgtactgttcgggatactgggccgggcgatcggcgccatgaacaccgacagaagaggactgaccctgctgtgcgcgctgctgtttaccgccgcggtgtgggtcatttcacgcggcacgctgcatgaactgcaatggcgaggcgattttggcgatacctggtatctgtattgcgggccggctgtgtttatctgtgcaatctcgttattcaccctgggcaaaaacatcctcaatagccgtgagctcccgggtatcgcgttaatctccagacattcattaggcatttatggctttcacgcattgtttattcacgctctgcgcgccagcggccttgagctaagccgctggcccttgctggatattgtgtggattttcgccgccgcgctgttgggtagcctggcgctgtctacgctggttcagcgaattgatcgccgtcggttggtgagctga

SEQ ID NO: 111373 - DNA, 378 bp, Enterobacter aerogenes
atgaaattaaaacgtacgacggcaagattagtcatgctgctgggctcgctggtttacctcatcggcatctggcgaacgtgcccgctattcagcggtaaaggctattttcttggcgtgctggtgatggggatgtttgctgtcctcacccatcaacgaacggagcaggaagcgcagcgagatgatgattttatctccctgtgccggttggttctgttgctatcggcaggattgctgctggtcggcgcctggtttgttccggcgccgtggcgcgaaaaaagtatttacgtgatagcatggtttgtctgtatgtacggtgcgtcagcaacgtcttatcccgctaaagtcgcggataaagcgcgcaataactcagtggaataa

SEQ ID NO: 111374 - DNA, 1455 bp, Enterobacter aerogenes
atgtatatcgggattgatttagggacctcgggcgtaaaagccattctgctcaatgaacagggcgacgtactggcgacgcataccgaaaaactgaccgtctcgcgcccgcatccgctctggtccgaacaagatcccgaacagtggtggcaggcgacgaataccgcgatgcaagcgctgggcgcgcaacactccctgcgcgaggtaaaagctttaggcatcgccgggcagatgcatggcgccacgctgcttgataaacagcagcgggtcctgcgtccggcgattttgtggaatgacggccgctgcggcgaagagtgcatgctgctggaagaaaaagtcggcacttcgcggcaaatcaccggcaacctgatgatgccgggttttacggcgccgaagctgctgtgggtacagcgtcacgaagccgaaatctttaaacaggtcgataaggtcctgttgccgaaggattacctgcggctgcgcatgagcggtgagtacgctagcgatatgtccgacgccgccggcacgatgtggatgaacgtcgcgcgtcgtgactggagcgatgaaatgctcgccgcctgcgggctcagccgcgacaatatgccggccctctttgaaggctgcgaggtgaccggccatctgcgcgcagaggtcgctcaggtgtggaatatgccgcgggcgctggtggtagcgggcggcggcgataacgcggcaggcgctgtcggcgttggcatggccgatgcggggcaggcgatgttatcgctggggacctccggcgtttatttcgccgtcagcgatggttttctgagtaaaccggaaagcgcggtgcatagtttctgccacgccctgccgggccgctggcatctgatgtcggtgatgctcagcgccgcgtcttgtctggattgggcggcgaagttaaccggcctcggcagcgtaccggcgctgatcgccgcggcgcaatcggcggatgacaatgccgacccggtgtggttcttgccttatctttccggcgagcgtacgccgcacaacaatccgcaggctaaaggcgtgttcttcggccttacccatcaacatggtcccgctgaactggcgcgggcggtgcttgagggggtgggttacgcgctggccgacggcatggatgttgtgcactcctgtggtgtgaagccagacagcgtcacccttatcggcggcggcgcgcgcagcgcatactggcggcaaatgctcgccgatatcagcggacaacagctggatttccgcaccggcggcgatgtcggcccggcgttaggcgcggcaagattggcgcaactggccgttcatcatgatgcggctttctctgacctcctgccgcagctaccgctggagcaggcgcatctgcctgatgctcaacggtttgcccgttatgcgccgcgtcgtgaaacgttccgccagatttatcagcagcttaagccgctgatgtcataa

SEQ ID NO: 111375 - DNA, 1323 bp, Enterobacter aerogenes
atgcagacctatttcgatcaactcgatcgcgttcgttatgaaggcccgaaatcgactaacccactggctttccgtcactacaatccggatgaattagtactgggtaaacgcatggaagaccacctgcgtttcgctgcctgctactggcacactttctgctggaatggcgcggatatgtttggcgtggggtccttcgatcgtccatggcagcagccgggcgaagcgctggaaatggcgaaacgtaaagccgaagtggcatttgagtttttccataagttgaatgtgccgtattactgcttccatgatgtcgacgtttctccggaaggcgcttcgctgaaagagtacagcaacaacttcgcgcagatggtggacgtactggcggaaaaacagcagcagagcggcgttaaactgctgtgggggacggcaaactgctttaccaacccgcgttatggcgcaggggcggcgacgaaccccgatccggaagtctttagttgggcggcgactcaggtggtcaccgcaatgaatgcgacccacaagttgggcggtgaaaactacgttctgtggggcggtcgcgaaggctacgaaaccctgcttaataccgatctgcgccaggagcgcgagcagattggccgctttatgcaactggtggttgaacacaaacacaaaattggtttccagggcaccctgctgatcgagccgaagccgcaggagccgaccaagcaccaatatgattatgatgcctccacggtttacgggttcctgaaacagtttggtctggaaaaagagattaaactgaacattgaagccaaccacgccacccttgccggccactctttccaccacgagatcgccacggctattgcgctgggcctgttcggttcggtggacgcgaaccgcggcgatgcgcagctgggctgggataccgaccagttcccgaacagcgtagaagagaacgccctggtgatgtatgagatcctcaaggcgggtggcttcaccaccggcggcctgaactttgatgctaaagttcgtcgccagagcaccgacaaatacgatctgttctacggccatatcggcgcgatggacactatggcgctgtcgctgaaagtcgcggcgcgcatgattgaagacggcgagctggataaacgcgtggcgaaacgctacgccggctggaacggtgaattgggccagcagatcctcacaggccagatgaccctgaccgacatcgcgcactatgcgactcagcataacctggcgccgcagcatcacagcgggcatcaggaactgctggaaaacctggtaaaccattatctgttcgataagtaa

SEQ ID NO: 111376 - DNA, 996 bp, Enterobacter aerogenes
atgaagataaagaacctttgccttacgctctgcgcctcatcgctccttctcgccagcatggcgggcatggctaaagaagttaagattgggatggccatcgacgaccttcgtctggaacgctggcaaaaagatcgcgatattttcgtcaataaagcggaatcattaggtgccaaagtatttgtgcaatccgccaatggcaacgaagaaacgcaaatgtcgcaaattgaaaatatgatcaatcgcggcgtcgatgttttagtaattattccttacaacggccaagtgctcagtaacgttattaaagaagcgaagcaggagggaattaaagtcctcgcctacgatcgcatgattaataatgctgacatcgatttttatatttctttcgacaatgaaaaagtcggtgaaatgcaggcccaaagcctggttgacaaagtgccgcagggtaattatttcctgatgggcggctcgccggtggataataacgccaaactgttccgcgccggccagatgaaggtgctcaaaccttatgtcgatgagggcaaaattaagatcgtcggcgatcagtgggtcgacggctggctgccggaaaatgcgttaaaaatcatggaaaacgcgctgacggcgaataacaacaaaattgacgcggtagtggcttccaatgatgcgaccgccggtggcgctatccaggcgctaagcgcccaggggctggcgggtaaagtcgccatttccgggcaggatgccgatctggctggcgtgaaacgtattatttccggcacccagacaatgaccgtttataaaccgattaccacgcttgccactagcgctgccgaaatcgccgttgaattaggcaatgaccagcaacccaaggctgacgccacgttgaataacggcttaaaagatgtcccctcgcgcctgttaacgccaattgaagtcaataaagagaatattgacgccacggtgattaaagacggtttccacaaaaagagtgaactgtaa

SEQ ID NO: 111377 - DNA, 1542 bp, Enterobacter aerogenes
atgtcctggttactcgaaatgaagaacatcaccaaagccttcggcgcggttaaggccgtggataacgtcagcctgcggctgaatgccggggaagtggtgtcgttatgcggtgaaaatggttcggggaaatcaacgctgatgaaagtgctgtgcgggatctatccgcacggcagctacgaaggtgaaattattttcgctggtgagacgttacaggcgaatcatattcgcgataccgagcgtaaaggtatcgccattattcaccaggagctggcgttggtgaaacatctcacggtgctggaaaatatctttctcggcgccgagatctcacgccatggcctgctggattacgaaaccatgaccctgcgctgccagaagctattggcgcaggtgaatttatcgatctcgcccgatacccgcgttggcgatttaggcctgggccagcagcagctggtcgagattgccaaggcgctaaataaacaggtacgtttgctgatcctcgatgaacccacggcatcattaaccgaacaagaaaccgcgacgctgctggcgattattcgcgatctgcaaaaccacggcatcgcctgtatttatatttcgcacaagctcaatgaagttaaagccatctccgacactatctgcgtaatacgtgacggtcagcatattggcacccgcgacgccagcgggatgaatgaagatgacatcatcactatgatggtcgggcgcgagctcacggcgctgtacccaaatgaaccacatagtcatggcgatgagatcttgcgggtcgagcatctcaccgcctggcacccggttaaccgtcatatcaagcgcgtcaacgacgtgtcgttttccctccgccgcggcgaaatccttggcatcgccgggttagtcggcgccgggcgcaccgaggcggtgcaatgtctgtttggcgtctggccggggcgctggcagggaagcatctttatcgacggacagccggtgacgattaacaactgccaacaggcaattgcccatggcatcgccatggtgccggaagaccgcaaaaaagacggcatcgtgccggtgatggctgtcggcaagaacatcactctcgcggcattaaaccagttcaccggtccggcaagcagcctcgacgacgccgcggagcagcactgcattcagcagtcgattcagcggctgaaaatcaaaacgtcatcgccggatctggcgattggccgcctgagcggcggcaatcaacaaaaggcgattctggcccgctgcctgctgctcaatccgcgcattttaatcctcgatgaaccaacccgcggcatcgatatcggtgcgaaatacgaaatctacaagcttatcaatcaactggtgcagcaaggcatcgccgtcatcgtgatctcatccgaactgcctgaagtgctcgggctgagcgatagggtactggtgatgcacgaaggcaagcttaaggccgatttgcataaccaaggtctgacccaggaacaggtgatggaagccgcactgaggagcgaacgccatgtcgaaaaacacgtcgtctga

SEQ ID NO: 111378 - DNA, 1182 bp, Enterobacter aerogenes
atgtcgaaaaacacgtcgtctgaaatcaaacttacgccatccgcccctgccgtttttccggcgctgaaagggctcaatctccaggttttcgtgatgatcgccgcgattatcgccattatgctgttctttacctgggttaccgacggcgcctatctgagcgcgcgtaatatctccaacctcctgcggcaaaccgccatcaccggcatcctcgccgtcggcatggtgttcgtgatcatttcggcggaaatcgatctgtccgtcggctcgatgatggggctgctcggcggcgcggcggcgattttcgacgtctggctcggctggccgctgccgctcaccatcctcgttacgttggtcatggggctgctgctcggcgcgtggaacggatggtgggtcgcctatcgcaaggtgccctctttcattgttacccttgccggcatgctggcgtttcgcggaattttaatcggtattaccaacggtaccaccgtctcgcccaccacgccggcgatgtcgcaaatcggccaaagttatttaccggacggcatcggctttggtatcggcgttattggcatggcggtctttattatctggcaatggcgcgggcggatgcgccggcaggcgttagggctggcgaccaccagttctggcggcgccattggccgtcagaccatcaccgcagttatcgtgctgggcgctatctggttgctcaatgattatcgcggcgtgccgacgccggtgctcatactcgccgccctgctgctggcgggcatgtttatggcgacccgcaccgcttttggccgtcgtatctatgccattggcggcaatctggaagcggcccgcctctccgggattaacgtcgagcgcaccaagctggcagtcttcgcaattaacggcctgatggtcgccatcgccgggttgatcctcagttcgcgactgggagcgggttcgccttccgccggcaatatcgccgaactggacgccatcgccgcctgcgtgattggcggcaccagcctggcgggcggtatcggcagcgtggcaggggccgtaatgggggcgtttattatgtcggcgctggataatggcatgagcatgatggacgtcgccaccttctggcaatacatcgtcaaaggcgccattttactgttggcggtctggatggattcggctaccaagcggagaacataa

SEQ ID NO: 111379 - DNA, 1179 bp, Enterobacter aerogenes
atgtttgaaaagcgtcaccgcattacgctgttattcaacgccaacaaagcctatgaccgtcaggtggttgaaggcgttggcgaatatctgcaggcatcacagctggaatgggatatctttatcgaagaggattttcgcgcgcgtatcgaaaacatcaaagagtggttgggcgatggcgttatcgccgattacgacgacccggagatagaaaagctgctggcggatgtcaaagtgccaattatcggcgtcggcggctcctaccataagccagaatgctatccgcctgttcactatatcgccaccgataatgccgcgctggtcgaaagcgcattcctgcatctgaaagaaaaaggcgtgaaccgtttcgctttttacgggctaccgacctccagcggcaagcggtgggcgatggagcgcgaacacgccttcagccagctagtcgccaaagagaaataccgcggcgtggtctatcaggggctggagaccgcgccggagaactggcagcatgcgcaaaatcggcttgccgactggctgcaaacgctgccgccacaaaccggtattatcgccgtgaccgatgcccgcgcccgtcacattctgcaggcctgtgagctgctgcatattccggtgccggaaaaactgtgtgtcattggcatcgataacgaagaactgacccgctacctctcccgcgtcgcgctctcttccgtggcgcagggtacccggcagatgggctaccaggcggcgaaacttctgcatcgattactggaaaacgaagcgctaccgctacagcggctgctggtgccgccgatgcgcgtcattgagcgacgctccaccgattatcgctcgctcactgaccctgcggtgattcaggcgatgcattatatccgcaatcacgcctgcaaaggcatcaaggttgagcaggtgctcgacgccgtcggcatctctcgctctaatctggagaaacgctttaaagaagaggtcggcgagaccatccacacggtgatccacagcgaaaagctggaaaaagcgcgcagcctgctggtctccaccacgctatcgataaacgaaatttcgcagatgtgcggttatccatcgctgcagtatttctattcagtgtttaagaaagagtacgacgtgacgccgaaagaataccgcgatcggcacagtgaagtgatgatgtag

SEQ ID NO: 111380 - DNA, 564 bp, Enterobacter aerogenes
atgccttacattacaaagcaaaatcaagcgatcacggcagatcgtaactggcttgtctctaagcaatacgacggccgttggtcgccgagcgagcaggcgcgtctgaaagatatcgcctcacgttataaagtgaagtggtctggtaatactcgccgtataccatggaactcgttgcttgagcgcgtcgacattattccaaacagcatggtggcgaccatggcggcggcggaaagcggttggggcacctcgaagctggcgcgcgtgaacaacaacctgtttggtatgaagtgcggcggcggcaattgtcgcggtgcgatgaaaggctactcccagtttgaatcggtcgagcagtcggttcaggcttacgtgagaaaccttaacacgcatccggcttattcatccttccgtaagtctcgcgcacagctgcgtaagacggaccaggaagtgactgccagcgcgatgatccacaagttgaaggggtactcgacgaaagggtcgagctataacaactatctcttcgctatgtatcaggacaatcagcgcttaattgccgctcatatgtaa

SEQ ID NO: 111381 - DNA, 2031 bp, Enterobacter aerogenes
atgaaactcgctgcgcttgcctcgctactgctgcccgggatggcctttgccgcctggacaaccgctgacttccccgccttcactgaacaggatgcaggccgtttcacgacgcaaaatgaggtgacgaagggtacccgccctttgcggataagttttgaccaacagtgctggcagcctgcgggggcgataaaactcaatcagatgctgtcgctggaaccctgccgggatacgccgccgcagtggcgcgtgttccgtgacgggcgctatacgctggaagtcgatacccgctccggtacgccaacgctgatgctgtcgctggcggaacagcacactaccagtacgcagccgctgctgcgccagtgtcccaaatgggatggtaaaccgctgacgctcgacgtcggccaaacgttcgctgaaggaagccaggtccgcgatttttatagcggtaatatcgccacggtgaaagcgggcaaaatcacgctgcggcccgccgctggtagtaatgggctcctgctgcttgaacaagcgaatagcgccgccagcgcgccgtttaactggcacaacgccacgatctattttgtcctgaccgatcgcttcgtcaacggcaatccggccaacgacaacagctacgggcgccataaagacggtatgcaggagataggcaccttccacggcggcgatttacaagggctgaccagcaagctggattatcttcaacagcttggcgtcaacgcgctatggataagttcaccgctggagcaaattcacggctgggtcggcggcggcaccaaaggcgactttccccactacgcctatcacggttactacacccaggactggacccgtcttgacgccaacatgggcgacgaagcagaccttcgacaactggttgatgaggcccatcggcgcggtatacgcgtgctgtttgatatcgtcatgaatcacgccggttacgccacgctcgccgatatgcaggaatttcacttcggctcgctgtatctgaaaggcgatgaactgaaaaaaacgcttggcgagcgctggaccgattggaaaccggcgtcggggcaaagctggcacagcttcaatgattacatcaacttcagcgataaagcaggctgggaacaatggtgggggaaaaaatggatccgcaccgatatcggcgactacgacaatccgggtttcgacgatttcaccatgtcgctggcgttcctgccggacctgaaaaccgaatcgacgatcccttctggcctgccaaatttctatcgtcacaagccagataccgccgccaaagagatagccggctacacgccgcgggactatctgacccactggcttagccaatgggtacgcgactacgggattgacggtttccgcgtcgataccgcgaaacacgtcgaaccggacgcctggcagcagctcaaaacgcaggccacggccgcgctggcagactggaaaaaagcgaatccgcagaaagcgctggatgatgcgccattctggatgaccggcgaggcctggggtcacggcgtaatgcaaagcgactactatcgccacggcttcgacgcgatgattaatttcgattatcaggatcaagcggcgaaagcggtggactgtctggcagacatggacgccacttggcagcagatggcggacaagctgcagggtttcaacgtgctgagctatctctcctcgcacgatacccgcctgttccgcgaaggcggcagccgggcggcggaactgttattactcgcgccaggcgccgtgcaactcttctatggcgatgaatcttcgcgcccgttcggccccacgggctccgacccgctgcagggtacccgctccgatatgaactggcaggatgttgccggcagcgcatccgataatgtcgcgcactggcaaaaaatcgcccaattccgcgcccgccatccggccattggtatgggtaaacaacagacgctgacgctagagcagggctatggtttcgtgcgtgaaagcagcgctgataaagtgatggttgtctgggccggacagcaatag

SEQ ID NO: 111382 - DNA, 1257 bp, Enterobacter aerogenes
atgacattttcacttttcggcgacaaattcacccgtcattcaggcatcacccgcctgatggaagacctcaatgacggcctgcgcacaccgggcgcgatcatgctgggcggcggcaaccccgcgcaaatcccggagatgaatgaatacttcaatagcctgctggccgatatgctggataacggcaaagcccttgatgcgctttgcaattatgatggtccgcaagggaaaagcgagcttctgaccctgcttgcgcaaatgctgcgcgaagaattaggttgggagatcgaaccacagaatattgctctaacaaatggcagccagagcgcgtttttctacttatttaacctgtttgccggccgccgtgccgacggcaccacccgcaaggtgctgttcccgctgacgccagaatatatcggctacgccgattccgggctggaagaggatctgtttgtcgccacccgtcccaacattgagctgctgccggaaggccagtttaagtatcacgtggacttcgaacatctgcagatcaccgaagagacggggatgatctgcgtctcccggccaaccaacccgaccggcaacgtcattaccgacgaagagcttattaagctggatgccctcgccaatcagcacggcgtgccgctggttattgataacgcctatggcgtgcctttcccgggtattatttttagcgaagcgcgcccgctgtggaatccgaacatcgtgctgtgcatgagcttatccaagctcggcctgccgggcacgcgctgcggcattatcatcgccaacgagaaaatcattaccgccatcagcaatatgaacggcattatcagcctcgctccgggcggcattggtccggcaatgatgtgcgaaatgatcaagcgtaaggacctgctgcggctatcggagagggtgattaaaccgttctattatcagcgtgttcaggaaactatcgctaccattcgccgctatttgccggaagaacgctgcctgattcataaaccggaaggggcgattttcctctggctgtggtttaaggatctgccgatctctaccgagctgctgtatcagcgcctgaaacaacgcggcgtgctgatggtgccgggcgattacttcttcccggggctggacaagccgtggccgcatacgcatcagtgcatgcgcatgaactatgtgccggatccggagaaaatcgaggcgggagtgaaaattcttgccgaagagattgagcgcgcctggcaggagcaggacgcctga

SEQ ID NO: 111383 - DNA, 489 bp, Enterobacter aerogenes
atgaaccggtttattatcgccgatgcgcaaaagtgtatcggctgccgaacctgcgaggtggcctgcgtggtgtcgcatcagcaggatcaagattgttctaccgtttctgcaagacgctttgcgccgcggattcgggtggttaagagcgatgaactatcaacggcgacgctgtgccgtcagtgcgaggatgcgccctgcgcgaacgtctgcccggaaggggcaatacgccatgaaggcgacgtctggcgagtcgagcaacggctgtgcattggttgtaaaagctgtatggtggcgtgcccttatggggcgatgacggtgatgttgactgacgaaggcgtgcaggcgctgaagtgcgacctgtgcgcgcaccggcaaacggggccggcgtgcgtagcggcctgcccgactcaggcgctgcgctgtattgagcccgccgagctggaaagattaagcgccgagcgccgccgttgggcggcgcaggcaatgtaa

SEQ ID NO: 111384 - DNA, 1152 bp, Enterobacter aerogenes
atggctgcatcgactttttatattccgccagtaaacgttattggcgctggttctgttactgaagcgatgaatactatccagcaatacggatatcgtcgggcattaattgtcaccgacgcgatgctgaataaattaggtatggcgggtgaagtacaaaaggcgttacaggagcgggatattttcagcgtggtgtatgacggcgtgcacccgaacccgacgactctgaacgtcgaaagcggtctggcgctgctgaaagagaataactgcgactgcgtgatttccctgggcggcggttccccgcacgattgcgcgaaaggtatcgcgctggtcgcggcaaatggcggcaacatccgtgactatgaaggggtggaccgttcggcaaaaccgcaattgccgatgatcgctatcaataccaccgccggtacggcttccgaaatgacccgcttctgcatcattaccgatgtcgatcgccacatcaaaatggcgattgtcgataagcacgtgacgccggttctgtcggttaacgactcctcgctgatgatggggatgccgaaatcgctgaccgccgccaccggtatggacgcgttgactcacgctatcgaagcctatgtttctatcgcggcgacgccgatcaccgatgcctgcgcgttgaaagcgatgaccatgatttcgcagaatttaactcacgcagtggaagatggcggcaatgaacaggcgcgtgaagcgatggcctatgcgcagttccttgccggtatggccttcaacaacgcgtcgctgggctacgtccacgcgatggcgcaccagctgggcggcttctacgatctgccgcacggcgtctgcaacgccgtactgctgccgtttgtgcaggagtacaactgcagcgtcgccgccgcgcgtctgcgtgactgcgcgcaggcgatgggcgtgaacgttgccgggctgaacgataagcagggcgcggaagcctgcatcgcggccatccgcgagctggcgcgtaaagttggcatcccggccggtctgcgcgatctgaacgttaaagaagaggatatcccgctgctggccagcaacgcgctgaaagatgcctgcggtttaaccaatccgattcaggcgactcacgaagaaatcatggcgattttccgcgccgcgatgtaa

SEQ ID NO: 111385 - DNA, 1860 bp, Enterobacter aerogenes
atgattattgccaccgccggacatgtggaccacggcaaaaccacgctgctgcaggcgattaccggcgtcaacgccgatcgtctgccggaagagaaatcacgcggtatgactatcgatctcggctacgcctattggccgcagcctgatggccgtgtgttgggttttatcgatgtgccggggcatgaaaagtttttgtccaacatgttggccggcgtgggcgggatcgatcacgcgctgctggtggtggcctgcgatgacggcgtgatggcgcaaacccgcgagcacctggcaattctgcagttaacgggaaaaccgacgttaaccgttgcgttgaccaaaacggaccgcgtggacgcggcgcgggttgcagaagtccgggcacaggtggaatccacgctgagcgagctggggttcgacgacgtggctttcttcgccaccgcggcgacggaaaacctcggcattgccgaactgcgcagccatttgctccagctgaccgagcgcgcgcatccgcaacagcagcgttttcgtctggcgctggatcgcgcctttaccgttaagggcgcggggctggtggtgaccgggacggcgctatccggcgaggtaaaaatcggcgataccctctggctgaccggggccaataaacccatgcgcgtccgcgggctacatgcgcagaatcagccggttgaacaggcgcgggccgggcagcgtatcgcgttgaacatcgtcggcgacgcgcaaaaagaggatctcagccgcggcgactggctgctctcggtgcagcccgcagaaccttgcgagcgggcgatcgtcgagctcgcctgtcacgcgccgctcagccagtggcagtcgctgcatatccaccatgccgccagtcatatcaccggccgcgtttcgttactggaaggcaatctggccgagctggtgctggatacgccgctgtggctggcggataacgatcgtctggtgttgcgcgatatctccgctcgcttgacgctggccggcgcgcgggtggtgacgctaaatccgccgcgccgcggtaaacgcaagccggagtatctgcagtggctttacgcgctggcggcggcgcggggcgacgatgcgcaggcgttggatattcatttgcagcgcgatgcggtgcgtcttgacgattttgcctgggcgcggcaactgagcgccgacggcctgacggcattaattaaccgtccggactacctgcaggccgggaatagcctgcttagcgcgccgctggccgcccgctggcagaaaaaactgctcgacgcgctggcccgttatcacgaccagcatcgcgatgagccggggccggggcgtgaacgtctgcggcggattgcgctgccgatggaagatgaagcgctggtgctgttattgattgaacagatgcgcagcagcggcgtcattcaaagccatcacggctggctgcacctgccggaacataaagccgggtttaccgatgagcagcaggccatctggcagcgtgcggaatcgctcttcgccgatgagccatggtgggtgcgcgatctggcgcgcgatctgaacgtcgaagagtcgttgatgcgcgcggtgctgcgccaggcggcgcagcaggggatgattacggcgatcgtgaaagatcgttattatcgcaacgatcggattgttgaatttgcgcaattgatccgccgcctggatctgcagcgtggttccacctgcgcggcggattttcgcgatacgctgaatattggccgtaaactggcgattcaaattctcgaatatttcgaccgcattggctttacccgccgtcggggcaacgatcatctacttcgcgatgcgctgttattccctgaaaataaaaacggcgaataa

SEQ ID NO: 111386 - DNA, 1389 bp, Enterobacter aerogenes
atgtctaccgatactcgcgcgctttatacccggcttccggccattgaccgcttacttcgcgatcccgcttttgctttactgctcgatcgccatggccattcgcaaatcgtggcgcttctgcgtcagatgttggatgaggcgcgggagcatatccgccaggcgcaagcattgccagagtggtgcgatgactggccgcaggagaccgccagccggctgaaccatagtcagcagagcgcgctacgtccggtattcaacctgacgggcaccgtgctgcataccaatctggggcgcgctatccaggcggaagtcgcggtgcaggcggtggcgcaggcgatgcgcgcgccggtcacgctggaatacgatctcgacgatgccgggcgcggtcatcgcgaccgggcgctggccgatctgctgtgccggatcaccggcgcggaagatgcctgtatcgtcaataacaacgcggcggcggtgctgctgatgctggcggcgacggccagcgggaaagaagtggtggtctcgcgcggcgaactggtcgagatcggcggcgcatttcgcatccccgacgtcatgcgccaggccggttgtttgctgcatgaagtgggtaccactaaccgcacccacgccaaagattattgtcaggctatcaatgagcagactgcgctgctgatgaaagtgcataccagcaactacagcattgaaggctttaccaaagcggtcgatgaggcggcgctggcggaaattggccgcgaacatggcgtgccggtggtggccgatctcggcagcggctcgctggtggatttgagccagtacggtttgccgaaagaaccgatgccgcaggaattgattgcggcgggcgtgaacctggtgagcttttccggcgataagctgctcggcggaccgcaggcggggattatcgtcggcgatcgggcgctgatcgcgaagttacagagtcatccgcttaagcgcgcgctgcgggcggataaaatgacgctggcggcgctggaggcgactctgcggctgtatctgcatccggaagcgctggccgacgatctgccgacgctgcgactgctaacccgctgcgccgaggatatccgccagcagggcgagcgtattcagcctgcgttagcggcgcactatagcgattttgacgtgggcgtcgaagcgtgtttatcgcagatcggcagcgggtcgttgccggtcgaccgactgcccagcgccgcgttaacctttacgccgcgcgatggtcgcggcagccagctggaagcgctggccgcgcgctggcgcgccttgccgataccgacgatcggcagaatttatgatggccgcttatggctggatctgcgctgtcttgaagatgaaccccggtttatggagatgttattgagatga

SEQ ID NO: 111387 - DNA, 609 bp, Enterobacter aerogenes
atgaaactgatcggcagctataccagtccttttgtacgcaaaatttccgttatcttgctggaaaaggcgatccccttcgagtttgtgaacgaattcccctataacgacgtcaacggcgtggcgcagtacaacccgctgggaaaagtcccggcgttgctgaccgatgacggcgcgtgctggtttgattcgcccattattgcgcaatatctggaactgctaaacgtcgcgccggcgatgctgcccgcggaacctctggcggcgctgaagatgcgccaactggaagccttgtctgacggcatcatggaggcggcgagcgcgctggtgcgggaaaaagcgcgcccggcggcccagcagtcagaaaccgaactgctccgccagcgggaaaaaatcgctcgcggtcttgatatgttggaagggtacgccgccgacggtaccttgcgtcacggtgagctgaatctggcgaccattaccgccgcctgcgccattgcttatctgaattttcgtcgcgtggcgcccggctggtgcgcgacgcggccaaaactggtcaaactggtcgagacgttgtttcagcgatccagttttgcccgtaccgaaccgccagggagttga

SEQ ID NO: 111388 - DNA, 1137 bp, Enterobacter aerogenes
atggacctgttgatcattttgacgtacgtggccattgcgtggtcggtatttaaaatattccgtattccggtaaataaatggacggtcccgaccgcggccctgggcggcgtatttattgttagcgcgcttattttattaatgaactataaccacccttatacttttactgcgcagaaagcggttatttctattcctattacgccgcaggttaccggcattgttagcagcgtgaccgataaagccaaccagcgggtgaaaaagggcgaggtactatttactatcgacccggcgcgctaccaggcgcgtgtcgacaggctgcaggccgatctggtcaccgctctgcacagtatcaataccctgaaagcccaactgcaggaagcgcaggcgaacaccgtgcgcgtctccgccgagcgcgaccggctgtataaagattatcagcgctatttgaaaggcagccaggcgcgggtcaacccattttcggaaagcgatatcgataatgcgcggcaaaactatcttgcccaggatgcgttggtgaaagcctcggttgccgagcaggcgcagattcagagccagctggatagcacgctgaatggcgaacagtcgcaggtggtgagcctgcgcgcgcagttggcggaagcgaaatataacctcgatcagaccaccgtccgggcgccgagcgatggttacattacccaggtgctgattcgcccgggaacctacgccgcgtcgctgccgctgcgcccggtgatggtctttattccgcaacagaaacggctaattgtcgcccagttccgccagaactcgttgctcaggctggaggccggcgatgatgccgaagcggtgtttaacgccctgccaggtcaggtattccacggtaaactggtcaacgtattgccggtggtgccgggcgggacttatcaggcgcagggttcgctgcagtcgctgagcgtcacgccgggtagcgatggcgtgctggcgacaattgaactggatcccgatgcgcaggtcgatgcgctgcccgacggcatctacgcccaggtggcggtctattccgaccatttcacccacgtgtcggtgatgagaaaagtgctgctgcgcatgaccagctggatgcactacctctatctcgatcattaa

SEQ ID NO: 111389 - DNA, 366 bp, Enterobacter aerogenes
atgtttctcaattattttgcgctgggcgttctaatcttcgttttcctggttattttttacgggattattattttgcacgatattccgtacctgattgcgaagaaacgtaatcatccgcactctgacgcaattcacgtcgcggggtgggtcagcctgtttacgctgcacgtaatatggccatttttatggatctgggccaccctctatcagccggagcgcggctggggaatgcagcataagccgaatgacgcagggactgatggcgctgacagcgagctggcgcagctcaatcagcgtatcgctgaactcgaacataaaatcgcgcatctgcagccgacagcgccgccatcctcgacggagaaataa

SEQ ID NO: 111390 - DNA, 1911 bp, Enterobacter aerogenes
atgtcatccgatatcaagatcaaggtgcaaagctttggtcgtttcctcagcaatatggtgatgccgaatatcggcgcgtttatcgcgtgggggattatcaccgcgttatttatcccaacagggtggttgccgaacgagacgctggcgaagctggtcggcccgatgatcacctacctgctgccgctactgatcggttataccggcggtaagttggttggcggtgaacgcggcggcgtcgtcggcgctatcaccaccatgggcgttatcgtcggcgcggatatgccgatgttcctcggctcaatgatcgccggcccgctcggtggctactgcattaagaaatttgacgcctgggtagacggtaaaatcaaatccggtttcgaaatgctggtgaataacttctccgccggcatcatcgggatgatccttgccattctggcgttcctcggcatcggcccggcggttgaagtgctgtcaaaactgctggcggctggcgttaacttcatggtggcgcacgacatgctgccgctggcgtctatctttgttgaaccggcgaaaatcctgttcctcaataacgcgattaaccacggtatcttctcgccgctgggtattcagcagtcccatgagcttggcaaatccatcttcttcctgattgaagctaacccgggtccggggatgggcgttctgctggcgtacatgttctttggacgcggcagcgcgaagcagtctgcgggcggtgcggcaatcatccacttcctgggcggtatccacgaaatttacttcccgtacgtgctgatgaacccgcgtctgattctggccgttatcctcggcggtatgaccggtgtcttcaccctgactatcctcaacggcggcctggtttccccggcttccccgggttccattctggcggtactggcgatgacgccaaaaggcgcctacttcgctaacatcgcggccattattgcggcgatggcggtctcctttattgtctccgccattctgctgaaaaccagcaaagtgaaagaagaagacgatatcgaagccgcaacccgtcgcatgcacgacatgaaagccgagtccaaaggcgcggcgacgccgctggcggcgggcgacgtggctaacgaccttagccacgtgcgtaaaatcatcgttgcctgcgacgccggtatgggttccagcgccatgggcgccggggtactgcgtaagaaagtccaggatgccggactgagcaatatctctgtcactaacagcgcgattaacaacctgccgccggatgtcgacctggtgatcacccaccgcgacctgaccgagcgcgccatgcgccaggtaccgcaggcacagcatatttcgctgaccaacttcctcgacagcggcctgtataccagcctgaccgagcgtctggtagcggcgcagcgccacatcgacaacgaagtaaaagtcaccgatagcctgaaagacagctttgataatactgacaaaaacctgttccagctgggtgcggataacatcttcctcgggcgcaaagcggcgaccaaagaagaggccattcgcttcgccggtgaacaattggtgaaaggcggatacgttgagccggaatacgtgcaggcgatgctcgaccgcgagaagctgacctcaacctatcttggcgaatctatcgcggtaccgcacggtaccattgaagcgaaagaccgggtactgaaaaccggcgtcgtcttctgccagtatccggaaggcgtgcgcttcggcgaagaagaagatgaagtcgcgcgtctggtcatcggtatcgccgcccgcaacaacgaacacattcacgttatcaccagcctgaccaacgcactggatgatgaaaccgtgattgagcggctggcgaaaaccaccagcgtcgaagaagtcctatcgttgctgaataaataa

SEQ ID NO: 111391 - DNA, 1149 bp, Enterobacter aerogenes
atgaaagcattacattttggcgcaggtaatatcggacgtggcttcattggcaaactgctggctgacgccggtatctcccttacgttcgccgatgttaatcaggtggtccttgatgccctgaatgcccgtcatagctatcaggtccacgtggtgggtgaaaacgaacaggttgataccgtctccggtgtgaatgccgtcagcagcattggcgatgaggtggtggatctgatcgccgatgtcgacctggtgaccaccgcggtcggccccgtcgttctggagcgtatcgcccctgccatcgccaaaggcctggtgaaacgtaaagcgcagggtattgaacgcccgctgaatatcatcgcctgcgaaaacatggtacgcggcaccagccagctgaaaggccatgtatttaacgcgctggcggaagaggacaaagcgtgggttgaagcacatatcggcttcgtcgactccgccgtagaccgcatcgttccgccgtcggcttccgccacccacgatccgctggaagtcaccgttgaaaccttcagcgaatggattgtggataaaacccagtttaagggcgagctgccgaacatcccaggaatggaattaaccgataacctgatggcatttgtcgagcgtaagctattcaccttaaacaccgggcatgctataaccgcctacctcgggaaactggcgggccatcaaacgattcgcgacgcgattctcgatgagcacattcgcgccgtcgtgaaaggcgcaatggaagagagcggcgcggtgctgattaaacgctacagctttgatgcgcagaaacacgcggcttatatccagaagatcctcggtcgctttgagaacccgtatctgaaagatgatgtggagcgcgtcggccgccagccgctgcgtaaattgagcgcgggcgatcgtttgatcaagccgctgcttggcacgctggaatacggcctgccgcaccggaacctggtaaaagggatcgccgcggccatgcatttccgcagcgaagacgatccgcaggctcaggaactggcggcgctgattgccgaaaaagggccacaggccgcgctggcgcagatttccggtctggatgcggcaagcgctgtagtggcggaagccgttaacgactacaacgcggtaaaatga

SEQ ID NO: 111392 - DNA, 600 bp, Enterobacter aerogenes
atgatgtacaacctggcgcggccgatgccgcgcccaataccactcctgtcagatatgcaggcaataatggaagaaacacaggcatttgaaaaccgcgtacttgagcgtttaaatgctggtaagaccgtaagaagtttcctgatagccgccgtcgaactcctgacggaggcggtcaatattctggtgcttcaggtattccgcaaagacgattacgcggtgaaatacgcagtggagccattgctggagggcagtgggccgctgggcgatctttccgtacgcctgaagcttatctacggccttggggtgataagccgcgccgaatacgaagatgccgagctattgatggccttgcgtgaagagctcaatcatgacggcaatgagtacgctttcaccgacgatgaaattctcgggccgttaggcgagctgcactgcgtcgccgcgcttccgccaacgccgctgtttgatgagagcgataaggaactgctggcaatgcagaaactgcgctaccagcagatggtacgttctacgatggtgttgtctctgactgagctgatttcccgaatcagcttaaaaaaagccttccagaaatcaacgctctga

SEQ ID NO: 111393 - DNA, 225 bp, Enterobacter aerogenes; identical to SEQ ID NO: 87597

SEQ ID NO: 111394 - DNA, 363 bp, Enterobacter aerogenes
atgaaagaagtcgaaaagaatgaaatcaagcgtttgagcgaccgtctcgacgccatccgccaccagcaggccggcctgtcgctggtcgaagccgccgataaatacgcggagctggaaaaagaaaaagcgaccctggaaacggaaatcgaacgcctgcgttccgttcagtcgcagaagctgagcaaagaagcgcagaaactgatgagcatgccgcaccgccgcgccatcaccaaaaaagagcaggccgatatgggcaagctgaagaaaagagtgcgcggactggttgtcgtccatccgatgaccgcgctgggccgcgaaatgggcctcaaagagatgaccggcttcgcgaagagcgagttttaa

SEQ ID NO: 111395 - DNA, 1656 bp, Enterobacter aerogenes
atgaacctctggcaacaaaattacgatccggctggtaatatctggctatcgagccttatcgcctcactgccgattctgtttttctttttcgccctgattaagctcaagcttaaaggctatatcgccgccacctggaccgtagccatcgcgctgcttgtcgccctgctgttctataaaatgccggtcgaccgcgccttatcgtcggtggtatacggcttcttctacggcctgtggcctatcgcgtggattatcatcgccgcggtcttcgtctataaaatctcggtgaagaccgggcagttcgacattatccgctcgtcgattctttcgattacaccggaccagcgcctgcagatgctgattgtcggcttctccttcggcgccttcctcgaaggggccgccggtttcggcgcgccggtggcgatcaccgccgcgctgctggtcgggctcggcttcaatccgctatacgccgccgggctgtgcctgattgttaacaccgcgccggtggccttcggcgccatggggatcccgattctggtcgccggccaggtgaccggcatcgatagcttcgctatcggccagatggttggccgccagctaccgttcctgaccattatcgtgctgttctggatcatggcgattatggacggctggcgcggggtgaaagagacgtggcctgcggtgatggtcgcaggcggctcgttcgctatcgcgcagtacctcagctctaacttcctcggcccggaactgccggacatcatctcttcgctggtgtcgctggtatgcctgacgctgttcctcaagcgctggcagccggtacgtatcttccgctttggcgatatgggcgccgcgcaggttgatcaaaccctggcgcgcacgcattacaccgccggtcaggtcattcgcgcctggtcgccgttcctgttcctcaccgctaccgtcaccctgtggagcgtgccgccgtttaaagcgctgtttgcgccgggcggggcgatgtatgacttcgtggttaacatcccggtaccgttcctcgacaaaatggtcgcccgtatgccgccggtggtgagcgccgcgacgccgtacgccgcggtatataaattcgactggctgtcggcaaccggcaccgccattctgttcgccgctatactgtctatcgtctggctgcgtatgaagccgaaggatgcgctgaccactttcgccgggacgttgaaagagctggcgctgccgatttactccatcggcatggtgctggcgttcgcctttatctcgaactactccgggctgtcatcgacgctggcgttggcgctggcgcataccggccacgcgtttaccttcttctcgccgttcctcggctggctgggggtcttcctgaccggttcggatacttcgtctaacgcgctattcgccgcgctgcaggcgacggcagcccagcaaatcggcgtctccgatattctgctggtcgccgcgaataccaccggtggggtgacaggcaagatgatttcgccccagtcgatcgccattgcctgcgccgcggtaggcctggtgggtaaagagtcggacctgttccgctttaccgtcaagcacagtctgatcttcacctgcatggtgggcctgattaccaccctgcaggcttatgtcttaacctggatgattccgtga

SEQ ID NO: 111396 - DNA, 774 bp, Enterobacter aerogenes
gtgaaagtgatgccaaaacgcctggctgacgacgtcgcaaatcgcgtccgggcgctgatagaagaacaacagctggaggcgggcatgcgtttgcccgccgagcgccagcttgccgtccagctcggtgtttcacgcaattcgctgcgtgaagcgctggcgatgctggtcaacgaaggggtgctgcttagccgtcgcggcggcggcaccttcgtgcgctggcagcacgagccctggtcggagcaaaacatcgtccagccgctgaaaacgctgctcgccgacgaccccgactacagttttgatattctcgaagcccgccacgctattgaagccagcaccgcctggcatgcggcgatgcgggccaccgacgccgaaaaagaaaaaatccgcctctgttttgaagccaccctcagcgatgacccggatctcgcctcacaggcggatgttcgcttccacctggcgatcgctgaagcctcacataatgtggtgctgctgcaaaccatgcgcggtttcttcgagcttctgcaatcctcggtgaagcagagccgccagcgcatgtatctggtgccgccggtgttcgcgcgtctgaccgaacaacatcaggcggtaatggaagcgatcttcgccggcgacgcggaaggcgcccgccaggcgatgatggcccacctcggttttgtccacgccaccattaaacgttttgatgaagaccaggcccgccaggcgcgtattacccgcctgcccggtgaccacaatgaaaattccagggagaactcgtga

SEQ ID NO: 111397 - DNA, 1185 bp, Enterobacter aerogenes
atgattatttccgccgccagcgactatcgcgccgccgcacagcgtatcctgccaccatttctgttccactatatcgacggcggcgcctacgccgaacataccctgcgccgcaacgttgaagacctctccgacgtggcgctacgccagcgcattctgcgcaatatgtcggatctgagcctggagaccacgttattcaacgaaaagctggcgatgccaacggcgctggcgccggtcgggctgtgcggcatgtacgcgcgccgcggcgaagtgcaggcagcgggcgcggcggacgacaaaggcatcccgtttaccctctctaccgtttccgtttgcccgattgaagaggtcgccccgaccatcaaacgcccgatgtggttccagctgtatgtcctgcgcgatcgcggatttatgcgcaatgcgctggagcgcgccaaagccgcaggctgctccacgctggtctttaccgtggatatgccgacccccggcgcgcgctatcgcgacgcccattctggcatgagcggcccaaacgccgccatgcgccgctactggcaggccgtcactcatccgcagtgggcatgggatgtcggtctcaacggccgcccgcacgacctgggcaatatctccgcctacctcggcaaaccgaccgggcttgaggattacatcggctggctggcgaataatttcgatccgtcgatttcatggaaagacctggagtggatccgcgacttctgggacggcccgatggtgatcaaagggatcctcgacccggaggatgcccgcgatgcggtgcgcttcggcgctgacggtattgtcgtctccaaccacggcggccgccagcttgacggcgtgctctcttccgcccgcgccctgcccgccattgccgatgcggttaaaggcgacatcactattctcgccgacagcggtatccgcaacggtctcgacgtggtgcggatgatcgcccttggcgccgacagcgtgctgctgggccgcgcatatctgtacgcgctggcgactcacggcaagcagggggtggcgaatctgctcaaccttatcgagaaagagatgaaagtggcgatgacgctgaccggggcgaaatccatcagcgaaatcagccgcgattcgctggtgcagaatgccgaagcgctgcagaccttcgatgcgctcaagcagggcaatgccgcgtaa

SEQ ID NO: 111398 - DNA, 474 bp, Enterobacter aerogenes
atgctgaacatcgtgttattcgaaccagaaatcccgccgaacaccggcaatatcatccgcctgtgcgccaacaccggcttcaatttacatatcattgagccgatgggctttacctgggacgataaacgcctgagacgcgccgggttggattatcacgagttcaccgccgtacagcgccacgcggattacgcggcgtttgtcgccagcgcgaagccgcaacggttgttcgccctcacgactaaaggcacgcccgcccacagcgcggtaagctatcaggatggtgatttcttgatgtttggtccggaaacgcgcggcctgccggccagcatcctcgatgccctgccggcggaacaaaaaatccgtattccgatgatgccggacagccgcagcatgaacctgtcaaacgcggtgtcggtggtggtgtatgaagcctggcgtcagttgggataccccggcgccgtgttgcgccgctaa

SEQ ID NO: 111399 - DNA, 822 bp, Enterobacter aerogenes
atgccgtgtgaagaactggatatcgtctggaacaatattaaagccgaagcccgggctttggccgactgtgagccgatgctcgccagtttttaccacgcaacgctactcaagcacgaaaatctgggcagcgccctgagctatatgctggcgaataagctggcctcgccgattatgcctgctatcgctattcgcgaagtggtggaagaggcctatgccgctgacccggagatgatcgcttccgccgcctgtgatatccaggcggtacgtacccgtgaccctgcggtcgataaatactcaacgccgctgttgtacctgaaaggcttccatgcgctgcaggcctatcgtatcggccactggctgtggaatcagggtcgccgcgcgctggctattttcctgcagaaccaggtttccgtctcgttccaggtcgatattcatccggcggcgaagattggccgcgggatcatgctcgaccatgccaccggtatcgtggtcggtgaaacggcggtgattgaagacgacgtatccatcctgcagtctgtgaccctcggcggtaccggtaaaaccagcggcgaccgtcacccgaaaattcgcgaaggcgtgatgattggcgccggggcgaagatcctcggcaatatcgaagtcgggcgcggggcgaagattggcgccggttccgtggtgctacaacctgtgccgccgcataccaccgccgcaggcgtaccggcgcgcatcgtcggcaagccggagagcgacaagccggcgatggatatggatcagcattttaatgggattcaccataccttcgagtacggcgacggaatttga

SEQ ID NO: 111400 - DNA, 1020 bp, Enterobacter aerogenes
atgaacgcgcttaatgctgcaatgactgtgatcggtgccggctcttacggcaccgctcttgcaatcaccctggcaagaaatggccacgaggttgtcctttggggtcatgacccgaaacatatcgcgacgctgcaacacgatcgctgcaacgccgcgttccttcccgatgtgcccttcccggacacgctgcgccttgagagcgatttagcgacggcgctggccgccagccgcgatatcctcgtggtggtgccgagccacgtcttcggccaggttctgcgccagattaaaccgctgatgcgttccgatgcgcgtctggtgtgggcgacgaaaggtctggaggccgaaaccggccgtctgctgcaggacgtggcgcgtgaagcgctgggcgatgacatcccattagcggtcatctccggtccgacttttgccaaagagctggccgccggcctaccgacggcgatttcgctggcggcgacggatccgcagtttgcagaagaccttcagcgcttgctgcactgcggtaaaagcttccgtgtctacatcaacccggattttatcggcgtgcagttgggcggcgcggtgaaaaacgttatcgccatcggcgccgggatgtctgacggcatcggttttggcgcgaatgcacgtacggcgttgatcacgcgtgggctggtggaaatgtcccgtctcggcgcggcgctaggcgccgatccggaaaccttcatgggcatggccgggttgggcgacctggtactgacttgtaccgataaccaatcgcgaaaccgccgttttggcatgatgctcggacagggcatggacgtgcaaagcgcgcaggataagattggccaggtggttgaaggctatcgcaataccaaagaggttcgcgttctggcgcagcgtttaggcgtcgaaatgccaataaccgaggaaatttatcaggtattgtattgcggaaaaattgcgcgcgaggcagcattgaccttattgggtcgcgcacgcaaggacgaacgcagcgccaactag

SEQ ID NO: 111401 - DNA, 468 bp, Enterobacter aerogenes; identical to SEQ ID NO: 87589

SEQ ID NO: 111402 - DNA, 252 bp, Enterobacter aerogenes; identical to SEQ ID NO: 87588

SEQ ID NO: 111403 - DNA, 432 bp, Enterobacter aerogenes; identical to SEQ ID NO: 87587

SEQ ID NO: 111404 - DNA, 1545 bp, Enterobacter aerogenes
atgtcggttactaaaaaacctatggtactggtgattctggatggctacggctaccgtgaagaccagcaggataacgccatttatagcgcgaaaacgccggtaatggacgcactgtgggcaaaacgcccgcacaccctgattgatgcatccggtctggaagtcggcctgcctgaccgccagatgggtaactccgaagtgggccacgttaacctcggcgcgggccgtatcgtgtatcaggatctgacccgtctggacgttgaaatcaaagaacgcaccttctttgccaacccggtgctgaccggcgcggtcgacaaagccgtcgccgccggtaaagcggtacacatcatgggcctgatgtcgcctggcggcgttcacagccacgaagaccacatcatggcgatggtagaactggccgccgaacgcggcgcagagaaaatctatctgcacgctttcctcgatggccgcgacacgccgccgcgcagcgctgaagcgacgctggctaaattcgaagctaaattcaccgcgctgggcaaaggccgtatcgcctctatcattggccgctactacgctatggaccgcgacaaccgctgggatcgcgtagaacaagcctatgatctgatgacgctggccaaaggcgaattccaggccgacaccgcggtggcgggcctgcaggcagcctacgcgcgtgatgaaaacgacgagttcgtcaaagcgaccgttatccgcgccgccggccaggccgatgccgcgatggaagacggcgacgcgctgatcttcatgaacttccgcgctgaccgcgcgcgcgaaatcacccgcgccttcgttaacgccgacttcgacggcttcgcgcgtaagaaagtggttaacctcgatttcgtgatgctgaccgaatacgccgccgacatcaaagtcgcttgcgcgtatccaccagcttcactggtgaacactttcggcgagtggatggcgaagcacgacaaaacccagctgcgcatctccgaaaccgagaaatatgcgcacgtgaccttcttctttaacggcggggtagaaaatccgttcaaaggcgaagaccgtattctgattaactcgccgaaggtcgccacttacgacctgcagccggaaatgagctccgccgagctgaccgagaaactggttgcggccatcaaaggcggtcagtatgacaccatcatctgcaactacccgaacggcgatatggtaggccataccggggtgatggaagccgccgtgaaagcggttgaagcgctggatcactgcattgagcaagtggccgcggccgttgaatccgtcggcggccagctgctgatcaccgccgaccacggcaacgccgaacagatgcgcgatccggcgaccggacaggcgcacaccgcgcatactaacctgccggttccgctgatctacgttggcgacaaaacggtgaaagtggccgaaggcggcaagctttccgacatcgcgccaaccatgctgtcgctgatgggaatggaaatcccgcaagagatgactggcaagccgctgttcatcgtggaataa

SEQ ID NO: 111405 - DNA, 1272 bp, Enterobacter aerogenes
atgaggggaaaggcgacttattcaaatacatggatcgcaacggctgttcgatccgttctttacgccagcgtgcttagcgctggcgtattgctgtgcgccgcatccgctcacgccgatgaccgcgaccagttgaaatccattcaggccgatatcgccgccaaacagcgcgcgattaaacaacagcagcagcaacgcgcctccctgctcgcccagttaaaagcgcaggaagaggccatttccgccgccgcgcgcaaactgcgtgaaactcaggatactctcaatcagctcaataagcagattgacgacatgaacgcgtctatcgctaagctggagcgccagcgcgcctcccaggaacggaatctcgccgcgcagcttgacgccgcgttccgccaggggccgcacaccggtatgcagatgatcctcagtggtgaagaggggcagcgtaaccagcgcctgcaggcctattttggttactttaaccaggcccgtcaggaaaccatcgcccagctcaagcagacgcgcgaagaagtcgcggtgcagaaatcgatgttggaagaaaaacaaagccagcagcaaacgctggtttacgagcaaaaagcgcagcaggccaagcttgagcaggcgcgcaacgagcgtaaaaagacgctctccagcctcgaatcctccattcagaaaggccaacagcagctcagcgaactgcgcgctaacgaatcgcgcctgcgcggccgcatcgcccaggcggaagcggcagccaaagcccgcgccgaccgcgaggctcgtgatgcccaggcggtacgtgaccgccagcaggaggcctcgcgcaaaggcaccacctataaaccaaccgaaagcgaacgttcgctgatgtcgcgaaccggcggcctcggcgcgccgcgcgggcaggctttctggccggtacgcggaacaattcttcatcgttatggcgaacagctgcaaggtgaactacgttggaaagggatggttatcgctgcgtctgaaggcaccgaagtcaaagccattgccgatggccgggtgatcctcgccgactggctacagggctacggcctggtggtggtcgttgaacacggcaaaggcgacatgagtctttacggctataaccaaagcgcgctggtcagcgtcggtacccaggtccgcgcgggccaggctatcgcgctggtaggcagtagcggcggtcagggtcgtccgtcgctctatttcgaaattcgccgccagggtcaggcggtcaatccacagccgtggttgggaagataa

SEQ ID NO: 111406 - DNA, 900 bp, Enterobacter aerogenes
atggctgcgccggtttttgccggtaaactctctatcgttatcgatgatttcggctatcgcccgcagacggaaaataaggtgctggcgctgccgcccaccatctccgtcgccgtactgccgaatgccccccacgcccgggaaatggccactaaagcgcataatctgggccatgaagtgctgatccatctgccgatggcgccgctcagcaagcaaccgctggaaaaagacacgctgcgcccggatatgagcagcgatgagatcgaacgtattatccgtgaggcttacgggaaagtgccttacgccgtcgggctgaacaaccacatgggtagcgccatgacctcaaacctgttcggcatgcagaaggtgatgcaggcgctggaacgctacaatctctattttctcgatagcgtgaccatcggcaacacccaggccatgcgcgccgcccagggtacaggcgtgaaggtgattaaacgcaaagtgtttctcgacgacacccagaacgaggcggacatccgcactcagttcaatcgcgccatcgcgctggcgcggcgtaatggttcggcaatcgccattggtcacccacacccttcaacggtacgggtactacagcaaatggtttataacctgccgccggatatcacactggtgcgcccgagcagcctgctgaacgaaccgcaggtcgacaactcgacgccgaacacgcccgtccaaccaaacgcgccgcaacaacagaagccgcgtaacccgttccacggtgtgaagtactgcaaaccgaagcgtccgctggagccggtgaacgccagccgcttctttagcatcctcagcgaaagcatcagccagagcgcgctggtccagtattaccagttgaaatggcagggctgggacagccccaccaactaa

SEQ ID NO: 111407 - DNA, 792 bp, Enterobacter aerogenes
atgtttaaactctcagtatgcttgctgacctgtaattcggcccgcttattacgggaagtattgccgccgttgttacgggtggcagatgagtttattgtcgttgattccggcagtacggatgaaacgctacagatatgtcagcagtttggcttaacggttcaccatcacccctatgccgcccacggcatgcagatgaactatgcgacctcgctggcgactcatgactgggtgctgtgcatggatagcgacgaaatcctcgatgatgaagtggttgcggcgattctggcgcttaaggcgggagaggagccggatccgagctgcgcgtggcgcctgccgcgctactggttcgtgcttggcgaacaggtgcggaccatctatcccatctcatcgccagattacccggtacgcctgttcaaccgtcagcgggccagttttaaccagcgtccggtagacgatcaggtggtcggccatctgacgtcgaccaggctgccgggctttgtccgccacgataccttctattcactgcatgaagtgtttaacaagctcaacagctataccacccggctggtgaagatgcagaagatcaggccgtcgctcagccgcgggattatcagcgccatcggtgcgttttttaagtggtatttattcagcggcgcctggcgtagcggcaaggtgggggccgtaaccggtttgtacgccaccttttacagcttcataaagtattttaaagcttggtatgcctacaatggtaagcagcagggaaccgtgacggagaagcgcacggatccctga

SEQ ID NO: 111408 - DNA, 732 bp, Enterobacter aerogenes
atggccctctctatttttattagccgtctttggcgattgaagaatattatcttaccggtgctactgctttttatgagctttggcattttagctgaacaaaggcttgagcatggcgtgctgcaagcctactggaaagcgcaatggagtgataatgctaccattaatgttcctgccctcggatttcgctattattggcttgatgaccagggtaacttaaaaaaagttatccatatttatatgaaaggcacgatgaaagaacaactggcgtttattcgccagaattttagtgagatcccggagaattttatcaggtttcgcgagtggtatgttaaccagtcgggcagtctgttggttaataatgtcgcgcagtatgccgaatgcaacagtgagaactatagcgccttattgctttcttttattccctcgcaagataaaccattatccaatatggacgatatgaatgcgcagatctcctgcggcggggacggacgctatccctggttaacgacttaccatttacatcatgaatggaataaagattcttttaaagagtggccagatgataatacgaataatacatattccgttatgcgtgatgacgtggtgattaaaatacgtactatcaacaagttctgggtctatgccgccctttacgatgacagcaaaacggatggtatgagtgaaaaacgaggatacatcagggtaagtcatctgaaaccagataatcgatag

SEQ ID NO: 111409 - DNA, 1026 bp, Enterobacter aerogenes
atgaaagcgttatccaaactgaaagcggaagaaggcatctggatgaccgacgtaccggaaccggaagtcggccataacgatctgctgattaaaatccgtaagaccgcgatttgcggtaccgacgtgcacatctataactgggacgaatggtcgcagaaaaccattccggttccgatggtggtggggcatgagtacgttggtgaagtcgtgggtatcggtcaggaagttcgcggctttaagcttggcgatcgcgtttccggcgaagggcatatcacctgcggacattgccgcaactgccgtggcggtcgtacccatctgtgccgtaataccatcggcgtgggggtaaaccgcccgggctgtttcgctgaatatctggtgatcccggccttcaacgctttcaaaatcccggataatatctccgacgacctggcatccatcttcgacccgttcggcaacgctgtgcataccgcgctttccttcgacctggtcggtgaagatgttctggtttccggcgctggcccgatcggcgtgatggccgcggcggtggcgaaacatgtcggcgcgcgtaacgtggtgattaccgatgttaacgaatatcgtctggagctggcgcgtaaaatgggcgtcacccgcgcggttaacgtcgctaaagagaatcttaacgacgtgatggccgagctggggatgaccgaaggcttcgacgtgggtctggagatgtccggcgcgccgccggcgtttcgtaccatgctcgataccatgaaccacggtggacgtattgcgatgctgggtattcctccgtcggatatgtctatcgactggaccaaggtcatcttcaaggggctgtttatcaaagggatttacggccgcgaaatgtttgaaacctggtataagatggcggcgctgatccagtctggcctcgatctttcgccgattatcacccaccgtttcggtattgatgacttccagaaaggctttgacgcgatgcgctccggccagtctggcaaagtggtactgagctgggattaa

SEQ ID NO: 111410 - DNA, 1194 bp, Enterobacter aerogenes
atgcgtggtgatttctacaaacagttaaccaatgacctggataccgcgcgcgcggaagggttgtttaaagaagaacgtatcattacttcggctcagcaggcggacatcaccgtcggcgacagccacgtcattaacttctgcgccaacaactatctgggcctggcgaaccacccggaactgatcgccgcggcgaaatccggcatggacagccacggcttcgggatggcctcggtgcgcttcatctgcggtacccaggacacgcataagcagcttgagaaaaaactggcggatttcctcggtatggaagacgcgattctctactcctcttgctttgatgccaacggcggcctgtttgaaacgctgctggggccggaagacgctattatctctgatgcgctgaaccatgcgtcgatcatcgacggcgtgcgcctgtgtaaagcgaagcgtttccgctatgccaacaacgatatgcaggagctggaagcgcgtctgaaagaagcgcgcgaagctggcgctcgccacgtgctgatcgccaccgatggcgttttctcgatggacggggtgatcgccaacctgaaaggcgtctgcgacctggcggataaatacgatgcgctggtgatggtcgatgattctcacgccgtgggctttgtcggcgaaaatggccgcggttcccatgaatattgcgacgtgatgggccgcgtcgacatcatcaccggcacgttgggtaaagcgctgggcggcgcgtcaggcggttacaccgccgcgcgcaaagaagtcgttgagtggctgcgccagcgttcccgtccttatctgttctccaactccctagcgccggccatcgtcgccgcttctatcaaggtgctggagatggtggaagcgggcagcgaactgcgcgatcgcctgtgggctaacgcgcgcctgttccgcgaaaaaatgaccgccgcaggctttaccctcgcaggtgccgaccacgcgatcatcccggtgatgctcggtgaagccaccatcgcgcaggaattcgcgcgcgaactgcagaaagaaggtatttacgtcaccggtttcttctatccggtggttccaaaaggccaggcgcgtattcgcacccagatgtcggcggcgcatacccctgaacaaattgaacgtgcggtggaagcctttacccgcatcggcaaacaactgggcgtcatcgcctaa

SEQ ID NO: 111411 - DNA, 933 bp, Enterobacter aerogenes
atgatcatcgtaaccggcggcgcaggctttatcggcagcaacatcgttaaagccctgaatgacaaaggcatcaccgatattctggttgtagacaatctgaaagacggcaccaaattcgtaaacctggtggatctggacatcgctgactacatggataaagaagattttctgatccagattatggctggcgaagagttcggcgaggtcgaagcggtattccacgaaggcgcctgctcttccaccaccgagtgggacggcaagtatgtgatggataacaactatcagtactccaaagaggtgctgcactactgcctggagcgtgaaatcccgttcctgtacgcctcttccgccgccacctacggcgggcgcaccagcgactttatcgaatcccgcgaattcgaaaaaccgctgaacgtctacggctactcaaaattcctgttcgacgaatacgtccgtcagatcctgccggaagcagattcgcagattgtcggcttccgttatttcaacgtctacgggccgcgcgaaggccacaaaggcagcatggcgagcgtggccttccacctcaatacccagttgaataatggcgaaaatccgaaactgttcgaaggcagcgatggattcaaacgcgacttcgtctatgtcggcgacgtcgccgcggtgaacctgtggttctgggaaaatggcgtttccggtatcttcaaccttggtactggccgcgcggaatccttccaggcggtcgccgatgcgaccctggctttccataaaaaaggcagcattgagtacatcccgttcccggacaaactgaaaggccgctaccaggcattcacccaggccgatctgactaacctgcgtaaagcgggctatgacaaaccgttcaaaaccgttgccgaaggcgtaacggaatatatggcctggctcaaccgcgacgcgtaa

SEQ ID NO: 111412 - DNA, 1020 bp, Enterobacter aerogenes
atgatgatgtcgcaaagtctttatcgtacgctcagggcgcgctatccccaggcgattatcgacgtgatggcgccggcatggtgccgtccgttgttatcgcgcatgccggaagtcaatgaagcgatcgccatgccgctgggccacggcgcgctggctatcggcgaacgccgtaaactcggccacagcctgcgcgatcgtcgttacgatcgcgcttatgtgctgccgaactcgtttaaatcggccttggtgcctttctttgccaacatcccgctgcgcaccggctggcgcggcgaaatgcgctacggcctgctcaacgacgcccgcgtgctggataaagacgcctggccgctgatggtggagcgctacgtggcgctggcctacgataacggcgtcatgcgctgcgctaaagaccttccacagccgctgctgtggccgcacctgcaggtcaacgacggcgaaaaatcacaggcctgcaacgcttttaatctctcaaacgatcggccaattatcggcttctgccccggcgcggaattcggcccagcaaaacgctggccgcattatcactacgccgcgctggcgaaaaagctcattgacgatggttatcagatagcgctcttcggctcagcaaaagataacgatgccggcaaagagatcatcgccgcgctcagcagcgagcagcaggcctggtgccgtaatctggctggcgaaacccagctggaacaggccgtgatcctgattgccgcctgtcaggccgtggtcagcaacgattctgggctgatgcacgttgccgccgccctggaccgcccgctggtggcgctgtacggcccgagcagcccggactttaccccgccgctgtcgcacaaagcacgggttattcgcctgattagcggctaccacaaagtgcgcaaaggggatgccgctgaaggttatcatcagagcctgatcgacatcactccagaacgcgtcttgcaggagctgaacgaactgttagcggaaaaaaccgagcacgaggaagcgtaa

SEQ ID NO: 111413 - DNA, 987 bp, Enterobacter aerogenes
atgcgggtattgatcgtaaaaacctcatccatgggcgacgtactacacacgctgcccgcgctaaccgatgctgtgcaggccattcccggcatccgctttgattgggtggttgaagagggcttcgcacagatcccttcatggcatgagaccgtcgagcgggtgattccggtggcgattcgccgctggcgcaaagcctggttttccgcgcctatcaaagcggaaagaaaagcctttcgcgaggccgtaaaggccgtcaactacgatgctattatcgatgcccaggggctggtgaaaagcgccgcgctggtgacgcgtctggcgcacggcattaaacatggcatggactggcagtccgcccgcgagccgctggcgagcctgttttataaccgtcgccaccatatcgccgttcaacagcacgcggtagagcgtacgcgcgaactgttcgccaaaagcctcggctatgcccggccgcagacgcagggtgattacgccatcgcgcgccactttattcgccccgactcaccggtagcagagccgtatctggtctttctgcacgccaccacccgcgatgataaacactggccggaagcacgctggcaagagcttctcgatctgctggcagatagcgccgtacggatcaaactgccgtggggcgcgccgcatgaagaggcgcgggcaaaacggctggcggaagggcgcaagaacgtcgacgtattgccgcgcatgagtcttgagcaggtcgcccagattctggctggcgcacgcggcgtggtttccgtcgatactggcctgagccatttgaccgcggcgctcgacaaacctaatttcacgctctacggcccaaccgatccgggactgattggcggatatggtaaaaatcagcatattatccgcccggttaactcatcgcagcttgccgctttagacgctgctgcggtttttgcacaaatagagccattgctggtagcagagaaagcctatgtctga

SEQ ID NO: 111414 - DNA, 1101 bp, Enterobacter aerogenes
atgtctgattttttttcagagcaacgtccgcctaaacgcgtgctgatcatcaagcttcgccaccatggcgatgtacttttaacatcgccagtctttacggtaatgaaaaaaaactggccagacgccgaagtggatgccctggtgtatgacgatactcaggcgatgttgaccagtcatccgtatattaatcaggtgcatacgattggccgccagtggcgaaaaaaaggctggctcgcgcagtttcgcttatatcgcgaactgctcaatacgctaaaagcgcgtcagtatgacgtgttgattaacctgaccgaacactggcacggcgcgcgcctggcgcgtcgcctgaagccccgcgtgtcggtcggtttcaaacccgataagcgcagcggcctggcgcggcgtcgttgggtaaaatcatttaccacgctgtatccggcgattcaggataactctcgtcatatggttgaggtgaatctcgatgcgctgcgccgtatcggtatccacccgcaaaacgcggcggacaaaaatacgctctttgtaccaggagaggcggctgagaaatcgatcgctgaaaaactcgacgccttcggccttagcagtaaatcctatattctggtgcacccgacctcgcgctggatgtttaaggcctggcaaatcgacaaactggcaaggaccattgacaccctggccgctcgcggattgcctgttattctttctgccgcgccgtcgaaagaagaaacggcttacatgaacgagttgcgcgccgccctcacccaaccggttttcgatttgagcggacagttaaatctgaaagagcttggcgccttgatgaagcacgcccgtctctacttcggcgttgattcaatgccgatgcatttagccagcgcggtcggaacgccgacggtggccattttcggcccaaccggcgctatcaagtggtcgccgtggggcgtgccatatcgtgtgattaccgccgggtttacctgccagccgtgcggcaaagccggctgcggcgacagtcaggtttcggactgcatcactgctattactccgcagcaagtcctgagcgcgattgacaccctgttactggaatctccatga

SEQ ID NO: 111415 - DNA, 1113 bp, Enterobacter aerogenes
atgatgaaactggctatcgttcgccaaacctggaaccctaacggcggcgcagagcgttttgtctcgcgcgcgcttaacgtgttagcgcaggattccgcgctggacgtcacgctgatcgcccgctcatgggaggagtcggcaaactggaaaacgttgacggtaaatccccctttccgtaaccgcacggtacgtgaacgcggcttcgctcaggccgctgccgctcatttcgcagactttgatatcgtacagtgccatgagcgcatccccggtgcgacgatcttccgcgctggcgatggcgtgcacgcggcctggcttgagcaatataaccgtatcctttcgccgctctctcgtctggcgcagtcctttagccattaccatcgctatattctcagcgctgagcgggagatgttcacacaccccgcgttacgcaaagttatctgtaattcaaaaatggttcgcgatgatatcgcgcgccgcttccaactcgccgacgatcggctaaccgttatctacaacggtgtcgataccgcgcattttcatccggacgttaaagcgttgtccctgcgtagctcactggggatccccgagtcagcgccggtgctggcctatgtcggctcaggattttcgcggaaaggcgtcgcgacagcgctacgcgccgtcgccgctcatgctgacgtttggttgctgatcgccgggcgcgataaacatgcgcatcgttttagcgcgctggcgaagcggttgaagattgccgatcgcgtcaaatttctcggtccggtttccgatgtacgccaggtatatggttcggccgacgctctgatcttacctacgttgtacgatccattccctaacgtctgcgtcgaggctatggcctgcggactaccgctgctaaccagtttcggctgtggcgcagcggagtggattgaacaaggcatcaacggctgggtatgcgatgcgctcgacgtcattggctatcaggatgccatcggcgaatggttgaagggccgcgagcgcaacgttgattttgcggccaacgcacgcgccaccgccgccccctatacgcttgaacgcatggcggaagaactgcaggcgctttatcgcgatcttttacgctga

SEQ ID NO: 111416 - DNA, 1104 bp, Enterobacter aerogenes
atgcacatcgttcacactgaagccgatggcggcaagggcggccagcctctgcgcatcattaatgaatcgttaggtatggtggcccggggtcacaccgtgaccatactgtgcccggaatctgcgccgttgcatcagatggcgcaggcggcaggattaaccgtcgtcacgatgccattaaagcgtaaaaatctgagtaatctgatgcggctgcggcgctggctgttggaacagggtaataatattgatgttattaacagccataactcagccgatacctggctggtggcgttggctaacttgactctggcaaatcctattccgttagtgcgtacgcgccatgcctccggcgttccgcgtaataactggacaacgcgttggctatttcgcaccgcctgtgcgcacatcgttacgactggcgaagcgcttcgtcatcaaatgacggcgctgggcgtaccgcttgaacaaaccacttcagtaccgagcggtgtggatacgcagcgtttctatcctgatgacaaaaatgatgctcgagcgtattgcgagctctcgcagaacgatttttggctaggtgtcgtatcgcatctgcgccctaacaaaggccacagcgtgttgctgaaagcgttagcgcaaataaacgatcccacggtgaagctggcgattgtcggtgaggggccgcaccgcgaggccctggaggagcagattattcagctcaatttgctatctcgtgtggtgatggcaggacatcgccctgacccgcagcgctggttcccggcttttgatgtggcaattagtccttctcatgatatggaaggcgtgccgcagggggtcttacagtctctggcttcgcggatagcgacgattgctactgatgctggtggtactggtgatgcggttatcgaccgccggacggggttacttattgcgcagaatgatgttgatgcgctacgggaagcgatcgttactctctatcaggacgcatcactgcgccgccagttagcggagcagggctatgagtatctcacaacccattttactcgcgaatgtatgttagaggcgatggaaagcgttttccgctcggcggctcagcgtaaaagatcgcgataa

SEQ ID NO: 111417 - DNA, 1332 bp, Enterobacter aerogenes
ttgtacgtcctggcattatgttttgtctggccgattcctaacgaccaactccttttcaaccgcaatggttttatctacaccattattttatgcagtttcggcctattctttaccagccgtaccgctcgccagaagcttgatacacaccaaataaagtttgtattgattaccctctggctactaacgctttatatcttgctcaacggcctgttcgtcgccccggatctaaaagaaatggtcggtacctgggatggacaatggctgcgcccggtcctgctgttttgttccggtctgattctgatgccggtactgcagacccagttcccttccctaaccagcgcacggctgttcacgctgatcgtgctgtgtttctggggcgtgatttgtattcatctcctggattccgcctggctgtactggcgcgatggctatatccactggggcgaaacgcggattgtttataaccgcacccgtatgagcttccaggtcaatatgataaccggcttcctgctggcggaattactggcccgagcgttaatcaaaaaacgcttcctgtgtctgaataccccgatcgttacgctgttgttgatctctaacctcatctgtaccgcactggttgatacgcgctggggcacaatagggctggtcggcagcctgttctcgacctttatcctgcttagcctgaacgcccagcgccgcagccgcgtcgtacttactttaggcctgttagtcgctctgttctgctccgcgattttcctcggttacgcctcctggaaaaccgatccgcgctggcagagtctggaaagcgatgcggtcgctggctggaacgcgccatttaccagcttctgctataaccgcgttgacggcactatcccgctcaacgcccagggtaaagagatcgatcactctaacggctgccgagccagcttcttccatcaaggctggaagcttgttggcgagcacccggcaggaattggccctcgcaaagaggcgtttcgctatattctgcgtcgcgatactcaggatatgcatattacgattccgcacagccattatgggctaatcgaatttggcctgcagaacggcgtggtcgggattgccggctggcttatcttactggcgggctgctggtatatcggctggcgtgaattccgccatggtaaaactatggttgggttattcctgctgctgtttaccatcggcttcttctcgcgaaccatggtcgaccacaatctcaaagaccattatctcgagcaatatatgatgttgactggtttgctcatcggcatcgccgcgctgcgaccgcgtgagaattattcgccaaacgactaa

SEQ ID NO: 111418 - DNA, 984 bp, Enterobacter aerogenes
atgtcagacattcctgtcctgagccttatcgtcgcggtttataacggtgagaaattcctgagcgcattttttgacagcataaaagctcagcaaattagcggccttgaaatcatcgtcgttaatgacggttcaacggacaactctgcttctgttatcaaccactacgccggtgagtttgcccagttccacgtcatcgatcaggctaacggcggcgtgtccgcggcacgtaatagcggtcttgcggtagcgcggggagagtatgtcgccttccccgatatcgatgacgtaatctacccggggatgtattcccgtttactggagatcgcccaccagaacaaccttgacgtcgctacctgtaacggtaattacatttatgatgatgggcgtcccagcaaaaaaatattcccttcagaccgtcttgcgtccactggcgtccttgaggggccggattggctaaatatggcgctggagtcgcgcaagtttttgcacgtcacctggctaaatatttatcgccatgcgctgattaaagaaaataatttttctttcgaaccggggctacgccatcaggatattccctggacgaccgaaatactgctggtagccaaacgcgtgcagtacatcgatgaagttttttatgattacctgatccactcagcttcggtatcccatacccctggtaccgacgatacgcggatgcgctcttcacgtcactatatgaaaatactgacaatgctggatgccattaatcagcgctacccggaacaggtgaaacgcgttcccggctgtcattggcaaatcgctaaagagggattaggcattctgcatagcatcaataatatcgaagacctcgccaaaaaaagggaaattacgcaagaactctttgaccgcggcatctggtcgatgatctggaaaaatgcgcgtggattacgcctccgctggcgtctgggacgtcgttattttcgtttaaaaaaactggtcaaataa

SEQ ID NO: 111419 - DNA, 972 bp, Enterobacter aerogenes
atgaataagcttaaattgcacgccgtttctcgcagcgattttatcgctaaaaattatgctgacttccagacgctgctcgataaccgggtcgatcccaacaccattccagagcgtttttattgcggcggacgcggtggctggacattccagacgacgctggccctcaattattattatggcgacgcgatagaatgctctttcggctctgaatgccgccccgatgctatcaatctgatgcataacgatgatttcggttctcgcgtcaagccctggcgaggtgtcaccgtcgtcgcgcgcgctgaccgaccaccggttatcggcgcggattatgtcgttgaccaaaatccggaagttgacggtcacagtaatcgtatcttcgtcccttattggccgcagccgggtgttcagccgcgcgagcgcacggataacactattcaaaccgtggcctatttcgggcgcgtcgatagcttcccggcggaatatcaaagcgatgaatttaaacaacgcctggctgaacaaggtattgccttgcgtatctcgttcaacaactggacagactaccgcgatgtcgatatttgtgtgagtttccgtaaatcacacgaccataagctagcgcgcaaaccggccagcaagcttatcaataactggttgggcaaaacggtaatgatttgcgacgatgaacaatcgttccgggcaattcgcgaaagcgaactcgactatctgatagctaagaatccggacgaagccttcgcagcgatcatgaagttaaagaacgaccccgagctctatcaaaagatgcgcgaacaaggggagaaacggcttcaggtctattcaagggaagccgttgccgcccgttggatggcgctttttgaagatatctggcgcaagggtttgaatgcacgttcaatgccggtccgcgccctccgctttggttttggcaaagcgattcgtcctttgaccaaaaagtactga

SEQ ID NO: 111420 - DNA, 1611 bp, Enterobacter aerogenes
atgatgactttacaccgcaatcttatacgtacattactgctgacggtcgcttttgccgtgctgttcgcgctgccagaaatcattatcctgttaaaggaccacgtctatagcccgaaggctggagacctctcgctttatctgattatttcgctgctggcggcggtaagtatacgcttctttatcacccgcttgctgttggcgattaccttcatcgtgcaaattagcgaagcgatttactatcagttttatggccagttctatggcccaagcgaggtatggctggcgttcgtcgaaaccaaagatatcgccagcggcattaccgacagcctcggcacgttgggaatttacttcgttatcatgtttatcgctgttgtttttgccctgttctttacgcgccgttttgcgccgcagtggcctaagctgctggccgtgccatgtctggtagcgattctggtgatgtttgtcggccagttttacaaagcgatcaacggccagatgtataagttcaacccggatctgcgtcactcgcttctgcgtaacggcctttcggccatgagctacagcgctattcgcctgataccagaggcgatttccggtgataaccagaaactaacaacctacgagccgtataaagtcacgccgatcccgcaaagccaggtcggccgctactctattattctcgctatcggtgaaagcctgaacccgcaccacattagcgcgttgggttatgaacgagataccacccctgaattgaaagcgcttatggagcaatatcagggaaccggacggctaatcgtctccaatgccgtctctactcgcgtggctattccgatgttggtcaataacctgcgcgagcctgacaactacgccgcctacaagaataaatcagcgaacatttttgttaatgcgcagaagcgtggttatcaaacggcatttatctctgcccaagggctggaaggcttaagtaactggattggcatccacgcgctcaacctgtgggaagatacacaggtgcgaccggcgccagaaatcggcgctgatgtggttcttaccccctcagtagaaaaagccgatattaactgggcgaagccgttcctgatggttcttaacagccgggcgccacatatcccttacgaccgcaacattccgcagggatttgcccgcttctcaacaccggaagccggcgatgaagtcacccagaagaaaaacgagtatgatgacgcggttcgcctttacgatcgtgaactggcctcggcgattcgcacggtaatggccaagtcgaaattacccgtcctggtcttcgtcacctccgatcacggtgaacgcgtcggcgatggcggcttatttggccactctatcgtttcaatgccaatcgcgcaggttccgttcctctactttagtaacgacccggcctattcaatgcacaatattgcgcctcagatgccgttgaaccactatcaactggcaacgctgatcaacaaaatgttagggtacaccattgaaaaccctaatctgaaagatgacagttactttattactggcggcgatattcgcggtctttctgagcgtgtaacctatcatttgaatgcactccctcctgcggaacaataa

SEQ ID NO: 111421 - DNA, 1275 bp, Enterobacter aerogenes
ttggaattgctttataccaccctactctacctcattcagccgctggtgtggctgcgactgctgctgcgcagccgtaaggcgccggcctaccgaaaacgctgggctgaacgttatggcttctgtcaaaacaaggtagtgccggatggcattctgctgcactccgtctccgtcggtgaaacgctggcggcgatcccgttagtacgcgcgctacgccatcgctatccctcactgcccatcaccgtcactaccatgacgccaaccggctcagagcgagcgatgtctgccttcggtaaagatgttcatcacgtgtatctgccgtatgacctaccctgcgccatgaaccgcttcctcaacagcgtacagccgaaactggtcatcgtgatggaaaccgagctgtggccgaacatggtcgccgcgctgcacaaacgtaaaatcccgctggttatcgccaacgcgcgcctgtcagagcgttccgcgaaaggctatgccaaactcggcggcttcatgcgccgcctgttaagccgtattacgcttatcgccgcgcaaaatgaagaggacggcaaccgcttcctcgcgcttggcctcaaacgtaaccaactggcggtgaccggcagcctgaaattcgatatttccgtaaccccggaactggcggcccgcgccgttaccctgcgtcgccagtgggcgccgcaccgtaaagtgtggatcgccaccagcactcacgacggcgaagaacaaatcatcctgcaggcacataaaaaactgctggaaaccttccccgacctgctgctgatcctcgtgccgcgccatccggaacgcttcggcgacgctcgcgatatggtgcaaaaggccgggatgagcttcaccatgcgcagcaccggtgaaattccgtcgaacagcacccaagtggtgattggcgataccatgggcgaattgatgctgctctacggcattgccgacctggcgttcgtcggcggcagcctggttgaacgtggcgggcataacccgctcgaacccgccgcccatgctattccggtgctgatgggcccgcataccttcaactttaaagatatctgcgccaagctgcagcaggatgatggcctgatcaccgtcacggacgccgactcgctggtcagagaggtttctaccctgctgacggacgaagattatcgactgtggtacggccgccacgcggtggaagtgctgcaccaaaaccagggcgcgctgtcgcgtctgctacagttactgcaaccctacctgccgcagcggagccactaa

SEQ ID NO: 111422 - DNA, 771 bp, Enterobacter aerogenes
atgtcgacccgactctccgtcgtgatgatcgccaaaaacgccgccgacctgctcgccgattgcctggcgtcggtaagctgggcggatgaagtggtggtgctggactccggcagtaccgacaataccgtcgaactggcccgtagcctcggcgcgcgggtctatagcaataccgactggcgaggctatggcattcagcgccagcgcgcacaggattacgccactcacgactgggtgctgatgattgataccgacgagcgcgttacgcctgaactgaaagcggctattctcaagatactggacgcgccgcagcgcggcgttatctacagtatcgcccggcgtaactacttcctcgggcgttttatgcgccacagcggttggtatcccgatcgggtgatgcgcctgtacgaacgcgcgcgttaccgctataacgataatctggtgcatgaatctctggatagcctcggcgccgaagtcgtgccgctcagcggcgatctgctgcacctgacctgccgcgacttctccggcttccagcagaaacagctggcgtatgccgcagcctgggcgtttgagcgccatcagaagggcaagaaaacctcgatggcggggattttcagccatactctgggcgccttcgtgaaaacgctgctgctgcgcggcggcgtgctggatggaaaacagggttggctgctggcggtagtcaatgcgcaatacacgtttaataaatacaccgagctgtgggcactcagccgcggctactcggagaaagtgtaa

SEQ ID NO: 111423 - DNA, 480 bp, Enterobacter aerogenes; identical to SEQ ID NO: 87566

SEQ ID NO: 111424 - DNA, 810 bp, Enterobacter aerogenes
atgcctgaattacccgaagtcgaaaccagccgtcgcggcattgagccgcatctggtgggcgctaacatcctgcatgccgtagtgcgcaacgggcgcctgcgttggccagtatccgaagagatttaccgcctcagcgacgaaccggtgctgagcgtgcgccgacgcgccaaatacctgctgctggagctgcgtcacggctggatcattattcatcttggcatgtccggcagcctgcgcatcctcagtgaagagcagccggctgaaaaacacgaccacgtcgacctggtgctgagtaacggtaaagtgctgcgctataccgatcctcgccgctttggcgcctggttatggactaaagagctggatggtcatccggtgctggcgcatctcggcccggagccgctaagcgatgaattcaacgccgactatctccagcagcgttgcgcgaagaagaaaaccgccattaaaccctggctgatggataacaagctggtggtgggcgtggggaatatctacgccagcgaatcgctgttttccgccgggatccatcccgatcggctggcctcgtcgctctcgcatcaggaatgcgagtggttagtgaagatgattaagctggtgctgctgcgctcgattgagcagggtggaacgacgctgaaggatttcctgcaaagcgacggtaaaccgggatatttcgcccaggagctgcaggtatatggccgcaaaggcgagccgtgccggatctgcggcacgccgattatcgccagcaaacacgctcagcgcgcgaccttttattgccgccagtgtcagaagtag

SEQ ID NO: 111425 - DNA, 168 bp, Enterobacter aerogenes; identical to SEQ ID NO: 87564

SEQ ID NO: 111426 - DNA, 237 bp, Enterobacter aerogenes; identical to SEQ ID NO: 87563

SEQ ID NO: 111427 - DNA, 666 bp, Enterobacter aerogenes
atggatatacaggaatcattgatgccgcgggaaaaaatgctgcgcgacggtattgaaacgttgagcgacgttgagttgctggcgttgtttttgcgtaccggcacgcgtacccaggatgtactgacattttcacacagcttgctacagcgcttcggttcgctgtacgggctgttatcggctgagatagaacaatttgcagatatcgacggtatcggcattgcgaaatatgcgcaacttaaaggtattgccgagctggcgcggcgttattttagcctgcggatgagagaggaaccgtcgctggtcacgccgctcatgacgcgagaatttttacaaagccagctcgccgatgaagagcgggagatctttatggcgatctttttagataatcagaaccgggtattgaaacatagccgccttttttctggtactcttagccacgtagaggtgcatccgcgagaaattgtacgcgaagcaatcaaagtgaacgccgccgcggtgatccttgcccataatcatccttccggtagtcctgaaccgagtaagtcggataagttgatgaccgacagggtggttaagtgttgtagattcatggagatacgcgtgcttgatcatctgattattggccgcggcgcgtacgtctcttttgccgaacgtggctggatttag

SEQ ID NO: 111428 - DNA, 1215 bp, Enterobacter aerogenes
atgatgagtctggctggtaaaaaaatcgttcttggcgtgagcggcggcatcgccgcctataaaacgccggaactggtgcgccgactgcgagaacgcggcgccgatgtacgcgtcgccatgacggaagccgccaaggcctttattaccccgttgagcctgcaggcggtttccggttatccggtctccgatagcctgctggatccggctgccgaagcggcaatgggccatattgaactgggcaagtgggccgatctggttatccttgccccggcaaccgccgatttaatcgcccgcgtcgccgccggtatggcgaacgatctggtctccacgatttgcctggctacgccctcgccggtggtcgtcgttccagcgatgaaccaacagatgtatcgcgccgccgccacccagcacaaccttgccactattgcctcacgcggcctattggtatggggcccggatagcggcagccaggcctgcggtgacgttgggccgggccgcatgctcgatccgctcactatcgtggagatggcggcgcagcatttctcgcctgtcaaagatttgcaacatctcaacatcatgattaccgcgggcccaacccgcgagccgctggacccagtgcgctacatcaccaaccatagctccggcaaaatgggcttcgcgattgccgccgccgccgcacaacgcggtgcgaacgtcacgctggttagcggcccggtatcgctgccgacgccgccgtttgtgcaacgcatcgatgttggcaccgcgctggaaatggaagctgcggtgcaaaacggtgcgcagcagcagcatattttcatcggctgcgccgccgttgccgactaccgcgcagcaatcgtcgccgacgagaaaataaaaaagcaaggcgatgaattaacaataaaaatggtcaaaaacccggacatcgtcgccggggttgctgcactaaaaaacaaccgcccgtacgttgttggatttgccgccgaaacaaataatgtggaagaatacgcccggcaaaaacgtgcccgtaaaaatctcgacctgatttgcgccaatgatgtttctcagccaaatcaaggttttaatagcgataacaacgcattacaccttttctggcaggatggggataagcgcttaccacttgagcgcaaggaattcctgggccaattattactcgacgagatcgttacccgttatgatgaaaaaaatcgacgttaa

SEQ ID NO: 111429 - DNA, 459 bp, Enterobacter aerogenes; identical to SEQ ID NO: 87560

SEQ ID NO: 111430 - DNA, 597 bp, Enterobacter aerogenes
atggcagaaaaacaaactgcgaaaaggaatcgtcgcgaagaaatacttcaatctctggcgctgatgcttgaatccagcgatggtagtcaacgtattaccacagcgaagctggcggcctccgtcggtgtttccgaagcggcgttataccgtcattttcccagtaaaacccgcatgtttgacagcctgatcgagttcattgaagacagtctgattacgcgcatcaatttgattttgaaagatgaaaaggacaccacggctcgtctgcgcctgattgttctgctgattcttgggtttggcgagcgtaatcctgggctgacgcgtatcctcaccggccacgccttaatgttcgaacaggaccgtctgcagggtcgtatcaaccagctatttgaacgtatcgaagttcaattgcgtcaggtgatgcgtgaaaagaaaatgcgtgagggagaaggctacaccctcgacgagacgctactggcaagccagctgctggcattttgcgaaggcatgctgtcgcgttttgtacgtagcgagttcaagtaccgccctacggatgatttcgatgcccgctggccgctggtcgccgcgcaactgcaataa

SEQ ID NO: 111431 - DNA, 642 bp, Enterobacter aerogenes
atgaagccgtatcagcgccagtttattgagtttgcgcttagcaagcaggttcttaagtttggcgaatttacgctgaaatccgggcgtaagagcccctatttcttcaacgccggcctgtttaataccgggcgcgatctggctctgctgggccgtttctacgccgaggcgctggtggattccgggatcgagttcgacctgctgttcggcccggcctataaaggcatcccaatcgccaccactaccgccgtcgcactggctgaacatcatgaccgtgacatgccgtactgcttcaaccgtaaagaagcgaagacccacggtgaaggcggcaacctggtcggtagcccgctacaaggccgcgtgatgctggtggacgacgtgattaccgccggtacagctatccgtgaatcgatggaaattattcaggctaatggcgctgagttggccggcgtgctgatctcgcttgaccgccaggaacgcggccgcggtgagatctccgcgattcaggaggtggaacgtgattatggctgcaaagtgatttctatcgtcactctgaaagatcttatcgcctatctggaagaaaagcctgagatggctgagcatttggcatcggtacgcgcttaccgcgaagcctacggcgtctga

SEQ ID NO: 111432 - DNA, 717 bp, Enterobacter aerogenes
atgcgtccagcaggccgtagcgctaatcaggtgcgtccagtaaccctgacccgtaactatacaaaacatgctgaaggctccgtgctggtcgaatttggcgacaccaaagtgctgtgcactgcctccatcgacgaaggcgtaccgcgcttcctgaaaggtcagggccagggctggatcaccgccgaatatggcatgctgccgcgctccacccatacccgtaacgctcgcgaagccgcaaaaggcaagcagggcggccgcacgatggaaattcagcgtttgattgcccgcgcgctgcgcgctgcggtggatctgaaagcgctgggcgagttcaccattacgctcgattgcgatgtgctgcaggccgatggcggtacccgtaccgcgtccattaccggcgcctgcgttgcgctggccgatgcgctgaacaagctggttgctgccggtaaactcaaaaccaacccaatgaagggaatggtggccgccgtttccgttggtatcgttaatggcgaagccatttgcgatctggagtacgtggaagattccgccgcggaaaccgatatgaatgtggtaatgaccgaagacggtcgcatcattgaggtgcagggcacggcggaaggcgagccgttcacccatgaagagcttctcactctcctggcgttagcgcgagggggaatcgaatctattattgcgacgcagaaagcggcgttagaaaattaa

SEQ ID NO: 111433 - DNA, 864 bp, Enterobacter aerogenes
atgatccgcagtatgaccgcctatgcccggcgtgaaatcaagggtgactggggcagcgccgcgtgggaactgcgctcggtaaaccaacgctatctggaaacctacttccgcctgccggaacagttccggagcctggaacccgtggttcgcgagcgcatccgctctcgtctgactcgcggcaaaatcgaatgtaccctgcgttttgagcaggatcccagcgcccagggtgaactgatcctcaatgagaacctggcgaagcagctggtgaacgccgcgaactgggtaaaaatgcagagcgatgaaggcgagatcaacccggttgatatcctgcgctggcctggagtgatggcggcgcaagaacaggaccttgatgcgattgccgctgaaatcctcaacgccctgaacggcgcgctggacgactttatcgtcgcccgtgaaaccgaaggtcaggcactgaaaacgctgatcgaacaacgcctggaaggcgtcagcgccgaagtcagcaaagtccgcgcccatatgccggaaatcctgcagtggcagcgcgagcgcctggtcgccaagcttgaagacgccgaagtgcagctggaaaacaaccgtctcgagcaagagctggtgttgatggctcagcgtatcgacgtcgccgaagagctcgatcgcctggaagcgcacgttaaagagacctacaacattctgaagaagaaagaagccgtgggtcgccgcctcgacttcatgatgcaggagttcaaccgcgagtcgaatactctggcgtcaaaatccatcaatgccgacgtaaccaattcagcgatcgagctgaaggtgctgatcgagcagatgcgcgagcagattcagaatatcgagtaa

SEQ ID NO: 111434 - DNA, 618 bp, Enterobacter aerogenes
atgctgcttcatgttctttatctgattggtattacggcggaagcgatgactggcgctttagcagccgggcgtcgccgtatggacacctttggggtgattattatcgccaccgctaccgcgctcggcgggggttctgtacgcgatatccttctcggccattatccgctcggttgggtgaagcatccggaatacgtcattattgtggcggtagccgccgtcctcacgactatcgccgcgccggtaatgccacacctgcgccgcctgtttctggtgctggatgccctgggtctgattgtgttctcaattattggcgcgcaaatcgcgctggatatgggcgaagggccgataatcgcgtctattgccgccgtgatcaccggcgtctttggcggcgtgctgcgcgatatgttctgtaaacgtatcccgctggtgtttcagaaagagctgtacgctggcatctcttttgccgcagctattctgtacatcgccttacagcattacataagcgaccatgacgtggtggttatcacaacgcttctgtttggctttaccacccggctgctggctatacgtttaaaattaggtctaccggttttttattaccgacatgggtcacactaa

SEQ ID NO: 111435 - DNA, 1653 bp, Enterobacter aerogenes
atgtcatttgctaaaagccttgctctgaccatcaacagaaaattttctgggcactttatcgccttattggcgatatctatcctcatccagctctggcctgtttttttcacgcagcccatccgatttgcattgcgcatcgccatctgcaacgcgcttttgttactaagcgtgtcgtggatttatcgctatacatccgggaaagtcattctctttttgttaaccagcgccctgacgcttaatttcgccatcgctttcagtacctgggatatctacaaaagcgagttcaataccgttttcgccatgagtattttggcaactaattattctgaagcgaaaagcatagccggtttgtacctctatattctgccaatagcggctttctacttcgtgattacctggtgggcggtgaagttgctcagcgagaagctatcaacgcgaaccaaaggtatcagcgttattctactcgcgctctttatgggctatttctccatctccagcatcatcaaaaagaaccaggatttagaggtttattacccgcttagttcgcgaattctggttaacactccgttgtatactgcttctgaattcgtcatcgccgatcgcgataattcactagccgaacacattacgcagtcaacgcctcactatcctgcgctacaggcacatgatacgggtatcgacacttatgttgtcattgttggtgaatccgcacgcagaagtaacatgcagctctacgatttctcccagcaaacgacaccggttgccagcgcatttacccacaacgcgcttatttttaaacacgctatcgcacctgcctccgccacggtacttgctgtacctatggttctcagcaaggccgatccggataactttaccgccgactcgatggccgataatatcgtgaatatttcccggcaatccggcttttataccgagtggatcagtgcgcagggcaactcaggaaaaagtaataactatattgtggcgatcgcctcaaccagcgaaaagcatcaatggatacatacccaatacgatagtgacctgcttcccgcgctggatgaagcattaaaagtgccgggcaaaaaagtcatttttttacatattaacggtagccatgaaatggcctgcgaccgatatccacagtccgccgcaattctcaataccggtgataaatacgaggattgctacaataacgccatccgattcaccgactcttttatcggcgaagtcgttaagcgcatacaaaatagcgcctcttctctaatttatttttccgatcatggtctggaaaaaaatcccgatctggcttcactgtatatgcacggttcccgtaatcccagtaaagaggcttatgacgtgccacagttcatttggtatagccaaagcgccctggccaaccagaaacgacgtattggctgggtaaacgaacgctggccaaccaccaacaactacgccctgatgttaagttggttaggtatcagcaccggtatcgaaaattgtgattctctcctcgagaagtgctatcaacccgaatcgcaaatttcggtcatggacggcggacggcatatattcaattatgaccagttacgcaatacattcagcgcaccggaccaaaagaccccatggcgtaaagtaaaaagaaattcgctatag

SEQ ID NO: 111436 - DNA, 1680 bp, Enterobacter aerogenes
atgcgcagatggctgatagcggcagcgttatggatggcggcggcaagcccaatggcggcctgcccggcgtggtctttgcaacgcgcggagcaggagataggccacctcagtcggcaaattgccgactggaaagaggcctactggcagcagggcagcagcggggtcagcgacgaggtctacgacatgctctcggcccggttggcgcagtggcggcgctgcttcggtgagaaggcgccgcctgaagacgagctgccgccgccacgcggcgaagtcaagcatcctatcgcgcataccggcgtgcgcaaactgcctgatgccacgagcgttggccgctggatgcgcgataaaaccgacctgtgggtacaaccgaaagtcgacggtgtcgcggtgacgctggtttatcgcggcggtaggtttatacgggcgattagccgcggcgacggtctggcgggggaagactggacgacgaaagtgcgccagatccccggcgtaccgctgaccacctccggggcgctggcgaatagcgttctgcagggcgagatttttcagcggcgagaggggcatatacaaaaggggatgggcggtatgaattcacgggcgagagtggccgggatactgatgcgcaaagcgccgtcggcggcgttgagcacgctgggggtgtttatctgggcctggcctgatggcccggcccagatgtctacccgtctggcgctacttgctgacggtgggtttcctgtagcgcagcgctattcccatccggttaaagattggcagcaggctgccgcctggcgggagcgctggtttacctcgccgctgccctttgtcaccgacggtatcgtaattcgtactcagagagaacccgccggtgacggttggcttcccggacagggggtctgggtggcggcctggaaatatcagccagtttcacaagtggcggaagtgagcacaatccagtttgccatcgggcgtagcggtaaaatagccgttgtggcgcatctacaaccgataaagctggacgacaagctcgtgcggcgggtcaatgtcggttcggtggcccgctggcggcagttagatctcgccccaggcgatcagatcctggtgagccttgcggggcaagggatcccgcggctggatgatgtagtatggcgtggcctgaacagaacgaagccgttggtgcctgatactcgctatcactctcttacctgttttgaaaacaccgatgaatgccgggagcagttcatcgcgcgattggtttggataagctccgagcaaggattaggcattgatagcctgggagaagcaggatggagacagcttgctcagtcgcgccatttccaacatatcttctcctggcttgagttgacggtgtcgcagttggaaaacattcctggcttaacggcaacccgcgcagagcaactttggcatcgctttgcactaacacggcgcgcaccctttcatcgatggataagcgcgcttggtgtgccgcttccgcgcgctgccatgcgggtcttaaaagataattcatggcggctaattgagaagcgtgatgtcacgagctggcaaacgttacccggcgttgggccaaagaatgctcaacggcttgttgagtttattcgccatccggtcatcaagtcgatagtgctaaaacttggtcaactggaggtggacggtttttcgtaa

SEQ ID NO: 111437 - DNA, 735 bp, Enterobacter aerogenes
atgaaagaaacagcggcaaaaagtgtgacaatgactgcgtcacgcagcggcggcgtgtataataggctcgtatgtaggatctctttcgacaatcacatacaaaagacactcatggctcaaggcacgctttatattgtttccgcccctagcggcgcgggtaaatccagcctgattcaggctttattgaaaacccaaccgttgtacgactcccaggtttctgtgtcgcataccacgcgcaatccgcgcccgggtgaagttcacggtgaacactatttctttgtcgatcatgataaattcaggtcgatgattagcgaagacgctttccttgagcacgctgaggtttttggcaactattacggtacctctcgtgaagctattgagcaggttctggcgaccggcgtcgatgttttcctcgatatcgactggcagggcgcccagcaaattcgtaataaaatgcccggcgcgcgcagtatctttattctgccgccgtcaaaagacgagcttgaccgccgcctgcgcggccgcggtcaggacagcgaggaagtcatcgcaaaacgtatggcgcaggcagttgcagaaatgagccattacgcggaatatgattaccttattgtgaatgatgattttgataccgctttaggcgatctgaaaaacattatccgcgctgaacgtctgcgcatgagccgccaaaagcagcgacatggcgctttaatcaccaaactattggcagactga

SEQ ID NO: 111438 - DNA, 276 bp, Enterobacter aerogenes; identical to SEQ ID NO: 87552

SEQ ID NO: 111439 - DNA, 2121 bp, Enterobacter aerogenes
ttgtatctgtttgaaagcctgaatcagctgattcaaaactacctgccggaagagcaaatcaagcgccttcggcaggcgtatctcgttgcacgtgacgctcacgagggtcagacacgttcaagcggtgaaccctatatcacgcacccggtagcggtggcctgcattctggccgagatgaaactcgactacgaaacgctgatggccgcgctgctgcatgatgtgattgaagatacccctgccacctaccaggacatggaacagctttttggtaaaagcgtcgccgaactggtagagggggtgtcgaaacttgataagctcaagttccgcgataagaaagaggcgcaggccgaaaactttcgcaaaatgatcatggcgatggtgcaggatatccgcgtcatcctcatcaaacttgccgaccgcacccacaatatgcgcaccctgggctcgctacgcccggataaacgccgccgcatcgcccgcgaaacgctggaaatttatagcccgctggcgcaccgtctaggtattcatcacatcaaaaccgagctcgaagagttgggctttgaagcgctgtaccctaaccgctaccgcgtcatcaaagaagtggttaaagcagcgcgcggtaatcgtaaagagatgattcaaaagatcctctctgaaatcgaagggcgtttacaggaagcggggatcccctgccgcgtcagcggtcgcgaaaagcatctgtactccatttactgcaaaatggtgcttaaagagcagcgttttcactcgatcatggatatttacgccttccgcgttattgttcacgatcccgatatctgctatcgcgtgctgggccaaatgcacagcctctacaagccgcgtcccggtcgtttcaaagattacatcgccattccaaaagcgaacggctatcaatctttgcacacctcgatgattggcccccacggcgtcccggtcgaggtacaaatccgtaccgaagatatggaccagatggcggaaatgggggttgcggcgcactgggcttataaagagcacggcggcgaaagcagcacgaccgcgcaaatccgcgctcagcgctggatgcaaagcctgctggaactgcagcagagcgccggtagctcctttgaatttatcgagagcgttaaatccgatctgttcccggatgagatttacgttttcaccccggaagggcgcattgtcgaactgcctgccggcgccacgccggtggacttcgcctacgcggtgcataccgatatcggccatgcctgcgtcggcgcgcgcgtcgaccgtcagccctatccgctgtcgcaaccactctccagcggccagactgtcgaaatcattaccgcgccgggcgcacgcccgaatgccgcatggctgaactttgtcgtcagctcaaaagcgcgcgccaagatccgccaactgctgaagaaccttaagcgcgacgattcggtcagccttggccgccggctgcttaaccacgcgttaggcggcagccgcaagctggcagagatcccgccagagaacatccagcgcgaacttgaccgcatgaagctggccacgcttgacgatctgctggcggaaatcggtctcggtaacgcgatgagcgtggtggtggcgaaaaacctgcagcagggcgaagcctctgccgcaccggtgccggccaacgcgtcgaatcacggccatctgccgatcaagggcgccgatggcgtgctgattactttcgccaagtgctgtcgtccgattccgggggatccgatcatcgcccacgtcagcccaggcaaagggttggttatccaccatgaatcctgtcgtaacatccgcggctaccagaaagagcctgagaagtttatggcggtcgaatgggataaagaaactgcgcaggaatttatcgccgaaattaaggtggatatgttcaaccaccagggcgcgctggctaacctgacggccgcaatcaacaccgcgtcttccaatattcagagcctgaatacggaagaaaaagatggccgcgtttacagcgcctttatccgcctgaccgcgcgcgatcgcgtgcatctggcgaatatcatgcgcaaaattcgcgtcatgccggacgtgattaaagtcactcgtaaccgaaattag

SEQ ID NO: 111440 - DNA, 690 bp, Enterobacter aerogenes
atgaattcacagcgttatgcgcgtatctgcgagatgctcgccaggcgtcagcctgatctgacggtctgcatggagcaggtccataaaccccataacgtctctgcggtcatccgcaccgcagacgccatcggcgtacacgaagtacacgccatctggcctggcagccgtatgcgcaccatggcctctgccgcagccggcagcaatagttgggtgcaggtgaaaacacaccgcactatcggcgatgccgtcagccacttaaaaggccggggcatgcaaatcctcgcgacgcacctttccgacaaagccatcgattttcgcgaaatcgactatacgcgcccgacctgcatcctgatgggccaggagaaaaccggcatcacccaggaagcgctggcgctggcagaccaggacatcattatcccaatggtcggtatggtgcagtcgctgaacgtctccgtcgcctccgcgctgatcctttacgaagcgcagcgtcagcggcagaacgctggaatgtaccaacgcgccaatagcatgctgccgcctgaagagcagcagcggctgctatttgaaggcggttacccggtgctggcgcgcgtcgccaaacaaaaagggctgccttatccccacgtcaacgagcagggtgaagtcgaagccgatgcctcgtggtgggcaacgatgcaggcggcgaggtaa

SEQ ID NO: 111441 - DNA, 2082 bp, Enterobacter aerogenes
atgtcaggccgcctgttagatgccgtcccgctcaactcgctgaccggcgttggcgccgcacagagcagcaaactagcgaaaatcggtctgcatacggttcaggacctgctacttcacctgccgctacgctatgaagaccgaacccacctgtatcaaatcggcgaactgctgccgggcgtctacgcaaccgtagagggtgaagtgctcaacagcaatatcaccttcggcggccgccggatgatgacctgtcagatcagcgacggctccggcatcctgaccatgcgttttttcaacttcaacgcggcgatgaaaaacagcctggcgaccggtcgtcgcgtgctggcctacggcgaagctaaacgcggcaagtttggcgccgagatgatccacccggaatatcgcgtacagggtgatatgagtaccccggagctgcaggaaaccctcactccggtctacccaaccactgaaggcattaagcaggcgacgctgcgcaaactcaccgatcaggcgcttgagctgctggaaacctgcgcgattagcgaactgctgccgccggagttggcgcaggggatgatgagcctgccggaggcgctgcgtacgctgcaccgcccgccgccgtcgctacagctcagcgagctggagagcggtaaacatccggcacagcagcgtcttatcctggaagagttgctggcgcataatctcagcatgctggcgcttcgcgccggcgcccagcgctaccatgcgctgccgctcagcgccaacgacacgctgaaaacccagctcctggcttccctgccctttaaaccaacgggcgcgcaggcgcgcgtcaccgcggagatcgagcgcgatatggcgctggacgtgccgatgatgcgcctggtgcagggcgacgtcggatccggtaaaacgctggttgccgcgctggccgccttgcgcgctatcgcccatggtaagcaggtggcgctgatggcgccgaccgaactgctggccgagcagcacgccaataatttccgcagctggttcgcgccgctgggcattgaagtcggctggctggctggcaaacagaaaggcaaagcgcgccaggcgcagcaggaagccatcgccaacggtgaagtgcagatgattgtcggcacccacgccatttttcaggagcaggtgcagtttaacggcctggcgctggtgattatcgacgaacagcaccgctttggcgttcatcaacgcctggcgctgtgggaaaagggccagcagcagggcttccacccgcatcagctgatcatgaccgctacgccgattccgcgcaccctggcgatgaccgcttatgccgatctcgatacctcggttatcgatgagctgccgccgggccgtaccccggtaacgaccgtcgctatcccggacacgcgccgcagcgacattatcgaccgcgtgcgtaacgcttgcacccaggaaggtcgccaggcctattgggtctgtacgttgattgaagagtccgatctgctggaagcccaggcggcggaagccacctgggaagagctcaagctggcgctgccggaactgaatatcggcctcgtccacgggcggatgaaaccagcggagaaacaggccgtgatgcaggccttcaagcagggcgagatgcacctgctggtcgccaccacggtgattgaagtcggcgttgacgtccctaactcaagcctgatgattattgaaaacccggagcgtcttggtctggcgcagctgcaccagctacgcgggcgcgttgggcgcggcgccgtcgcctcccactgcgtgctactctataaatcgccgctctccaaaacggcgcagaagcgcctgcaggtgctgcgcgacagcaacgacggtttcgtcatcgcccagaaagacctggaaatccgcggccccggcgagcttctcggcacccgccagaccggcaacgccgaatttaaagtagcggacttgctgcgcgatcaggccatgatccccgaggttcagcgcattgctcgccatattcacgaacgctatccgctgcaggcacaggcactgattgagcgctggatgccggaaaccgaacgctattccaacgcgtag

SEQ ID NO: 111442 - DNA, 1011 bp, Enterobacter aerogenes
atgaaacgagaactggccatcgaattttcgcgtgtcaccgaagccgccgcgctggcgggttataaatggctgggccgcggcgataaaaataccgccgacggcgcagcggttaacgccatgcgcattatgctcaacctcgtcaatatcgacggcaccatcgtcatcggcgagggcgaaatcgatgaagcgccgatgctctatatcggcgaaaaagtgggtaccggcaaaggcgacgcggtagatatcgccgtcgatccgattgaaggcacccgcatgacggccatgggccaggccaacgcgctggcggtgatggcggttggcgataaaggctgcttcctcaacgcgccggatatgtatatggaaaagctgattgtcggccccggcgctaaaggcgctatcgatctcaatctgccgctggaagagaacttgcgcaacatcgcccgcgcgttgaataaaccgctcgctgaactgaccgtcaccgtgctggcgaaaccccgccacgacgcggtcattgcgcaactgcagcagttgggcgtgcgcgtgttcgcgatccccgatggcgacgtggcagcttctattctgacctgtatgccggatagcgaagtcgacgtgctgtacggcatcggcggcgcgccggaaggcgtggtttcggcggcggtgatccgcgcgctggacggcgatatgcagggccgcctgctggctcgccaccacgtgaagggcgacagcgaagagaaccgccgtatcggtgaaagcgaactggcgcgctgcaaaactatgggtatcgaagcgggtaaagtgctgcgtcttgatgaaatggcgcgcagcgataacgtcatcttctccgccaccgggattaccaaaggcgatctgctggatggcatcacccgccagggcaatatggcgaccaccgaaacgctgctaatccgcggtaaatcgcggactatccgccgtattcagtcgattcattacctcgaccgaaaagacccggacgtccagcaacacatcctgtaa

SEQ ID NO: 111443 - DNA, 747 bp, Enterobacter aerogenes
atggcaaactgggttacaggtaaagttgtaaaagtgcaaaactggaccgatgcactgtttagcctcaccattcacgcgcccgttgagccgttcaccgcagggcagtttgctaaactgggcctggatgttgacggcgagcgcgtgcagcgcgcctactcctacgtcaacgcccccagcaatcccgatcttgagttctacctggtcaccgttccggagggtaaactcagcccgcgactggccgcgctgaaacccggggacgacgttcagatagtcagcgaagccgccggtttcttcgtgctggaagaggtgccggactgcgacacgctgtggatgctcgccaccggtacggcgatcggcccctatttgtcgattctggaggaagggaaagacctggatcgcttcaaaaacctggtgctggtgcatgcggcgcgctacgcagccgacctcagctatttaccgcaaatgcgagagctggagcagcgctacgccggcaaattgcgtatccagaccgtggtcagccgtgagacagcggaaggttctctgactggccgggtgccgtttctgattgaaaccggtgcgctggaagaggcggtcggcctgccgatgaccgccgataccagccacgtgatgctgtgtggtaacccgcagatggtgcgtgatacccagcagttgctgaaagagacccggcagatgaccaaacatctgcgtcgccgaccgggccatatgacggcagagcactactggtaa

SEQ ID NO: 111444 - DNA, 429 bp, Enterobacter aerogenes
atgaccctacagcagtggttattctcaattaaaggccgtattggccgccgggatttctggatttggatcgttatctgggtgttgaccatgagcgcgctgtttaccctcgcgggcagcaatttgctgagtttacagaccgcggcgtttattctcgtctgcctgctctggccgacggcggcggtggtggtgaagcgtctgcacgatcgcgggagatccggcctctgggcgctgctgatgattctggcgtggatgctgctggcgggtaactgggcgatgttgccgcaggtctggcagtggggcgtcgggcgctttgtaccgacgctgattatcgtcatgatgttgatcgacctgggcgcgttcgtcggcacccagggcgaaaataagtttggcaaagagacgcaggatgtccgctggaaagcggacgcctga

SEQ ID NO: 111445 - DNA, 600 bp, Enterobacter aerogenes
atgaagaagtgggcaatcttaagtttgattgggctgacagcgttatctgtcggcccgatggcgttgtccgcagaaacagaatccgccgccaccgccccctatcttttacccagcgcgccgatttttgatgtcagcatcagcgagttccgcgaaaaatttaatgccgataatccgaaactgccgcttaacgagtttcgttctatcgcctccagccgcgataaagctaacctgacccgcgctgccaccaagattaacgagaatctgtatgcctctaccgcgctggagcgcggcacgctaaagattaaatcgatgcagataacctggctgccgattcaggggccggaacaaaaagcggcgaaagcgaaagcgcaggaatatatgagcgctattctccgcgcttttgtaccgacgctaagtccactgcagagccagcaaaagttgcaaaaactgctgaccgccggcaaaggcaaacgctactacaccgaaaccgaaggcgcggtgcgctatgtagtggcagatcacggggaaaaggggctaactttcgccattgaaccgattaagctggcgctatctgaaacgctggaagacaacaataaatga

SEQ ID NO: 111446 - DNA, 768 bp, Enterobacter aerogenes
atgcgacatcctttagtgatgggtaactggaaactgaacggcagccgccacatggtaaacgaactggttgctaacctgcgtactgaactggccggcgtaagcggctgtgcagtggcaatcgcgccgccggaaatgtatctcgacctggctaagcgtgcggcagaaggcagccacatccacctgggcgcgcagaacgttgacgtgaatctgtccggcgcattcactggtgaaacctccgccgaaatgctgaaagatatcggcgcgcagtacatcatcatcggccactccgaacgccgtacctaccacaaagaatccgacgaactgatcgcgaagaaattcgctgtactgaaagagcagggtctgacgccggttctgtgcatcggtgaaaccgaagctgaaaacgaagcgggcaaaacggaagaagtgtgcgcgcgtcagatcgacgcggtgctgaaaactcagggcgcagccgcttttgaaggcgtggttatcgcttatgaaccagtatgggctatcggtaccggtaaatccgctaccccagcgcaggctcaggcggtacacaaattcatccgtgaccacattgctaaagctgacgctaaaatcgctgagcaggtcatcatccagtacggcggttccgttaacgccggcaacgccgcagagctgttcacccagccggacatcgacggcgcgctggttggcggcgcatccctgaaagcagacgctttcgcggtgatcgttaaagctgcagaagcggcgaaaaaagcgtaa

SEQ ID NO: 111447 - DNA, 1305 bp, Enterobacter aerogenes
atgtcgctctggctaacccacccgctgttcctcccttcgctgatcgtcggcatcaccattgtgctctgggcgacttcgctgttaccggaatttatcaccgcgctgctgttcttcgcggcggcgatgatgaccaaaatcgctccgccggaggtgatcttcggcggttttgcttcctccgcgttctggctggtgttcagcggctttgtgttggggatcgccatccgtaaaaccggactggcggatagagcggcgcaggcgctatcggcgcggctcaccgactcctggccgcggatggtcggcagcgtggtattactgagttatgcgttggcgttcgtgatgccatcaaacatggggcgcatcgcgctgttgatgccgattgtggcggcgatggcccggcgcgcggggatagccgacggcacgcgcggctggtacggcctggcgctggcggtgggctttggcaccttccagctatctgcgaccattttgcctgctaacgtgccaaatctggtgatgagcggggcggcggaaggctcttacgggatccatttgaattacgttccctatttactgctgcatacgccagtgcttggctggttgaaaggggcggtgctggtggcgctgatctgctggctgtttcccggcaagccgcatccgccgcgcgagctggcgccgcaggcgccaatgagccgcgatgaaaagcgtctggcgtggctactggcggtggtgttgacgttatgggtgaccgaaagctggcacggcgtcggcccggcgtggaccggcctggcggcagcggtggtcacgctgctgccgcgagtaggatttatcagcggtgaggagttcgccagcggggtgaatatgcgcacctgcatttatgttgccggcattttgggactggcgtttaccgtgacccaaaccgggattggcggcgcggtgggtaacgcgctgctgcaggtgatgccgctggataaagataatccgttcaccagcttcctggcgctcaccggaattaccagcgcgctgaattttattatgaccgccaacggcgtcccggcgctgtatacgacttttgcgcagagctttgccgacgcgaccggctttccgctgctgagcgtgattatgattcaggtgctgggttattccacgccgctgctgccataccaggcgtcaccgatcgtggtggcgatgggattaggtaaagtcccggcgagagcggggatgttgctatgcctggcgctggcggcggtgagctatttgattttgctgccgctggattacgcgtggtatcagctattggggaaattgtag

SEQ ID NO: 111448 - DNA, 765 bp, Enterobacter aerogenes
atgagaagagtaagatactttttgtgggcgctgctggtggttattctggcggctttggccggcggctactattggctgcattccggcaacccgaacgcgttacgtcaaattgtcctgcagcagtgcgtacccaatcagcagcaacatcagaacccgtcgccgtgcgcggaagtgaacctgaaaggcggctacgtgttgtttaaagatcgcaatggcccgctgcaatatctgctaatgccgacctaccgtattaacggtaccgaaagtccgctgctgttggatccgttaacgccgaatttcttctggcaggcctggcaggggcgcgaaattatgagccagcgccgcggcgcgccaattgatgataatgcggtatcgctggcgattaactcgcgcagcgggcgcacgcaaaaccatttccatattcatatctcctgcctgcgtcccgatgtccgcgcgcagttagataatgatgcggcgacaattagcagccgctggctacccttgccgggcggtctgcagggccatgagtatctggcgcgtcgggtaacggaagccgagctggctcagcgcagcccgttcctgatgctggcggaagaggtaccggaagcgcgcgaacatatggggcgttatgcgttagcgatggcgcggcaaagcgacggctcgctggtgctgttggcgacagagcgtaacctgctgactctcaaccgtgcttcagcggaagaaattcaggatcatagctgcgcaattcttaacgcaaaccactag

SEQ ID NO: 111449 - DNA, 990 bp, Enterobacter aerogenes
atgaataagtggggcgtagggttaactctgttgctggcatccgccagcgtgctggcaaaagattatcagctgttgaacgtctcgtacgatccgacgcgcgagctgtacgaacagtacaataaagcgtttagcgcgcactggaagcaggaaaccggcgataacgtggtgatccgtcagtcgcacggcggctccggcaaacaggcgacgtcggttatcaacgggattgaagcggatgtcgtcaccctggcgctggcctacgacgtagacgccattgccgaacgtggtcgtatcgataaaaactggctgaaacgcctgccggataactccgcgccgtatacctcaaccatcgtgttcctcgtccgtaagggcaacccaaaacagatccatgactggaacgacctgattaaaccaggtgtatcggtcatcaccccgaacccgaaaagctccggcggcgcccgctggaactatctggcggcctggggctatgccctgcatcagaatcacggcgatcaggctaaagcgcaggagttcgtgaaggcgctgtataaaaacgtggaagtgctggattccggcgcgcgcggttccaccaacaccttcgtagaacgcgggatcggcgacgtgctgattgcctgggagaacgaagcgctgctggcgacgaaagagctgggcaaggacaagtttgaaatcgtgacgccgagcgagtccattctggccgagccgacggtttccgtcgtcgataaagtggtggataagaaaggcactcgccaggtggcggaagcgtacctgaagtatctctactcgccggaaggccaggagattgcggcgaagaacttctatcgtccgcgcgatcctgatgtggcgaagaaatatgccaacgagttcccgaaactgaagctgtttaccatcgatcaggagttcggcggctggacgaaagcgcagaaggagcacttctccaacggcggtaccttcgaccagattagccagcgttaa

SEQ ID NO: 111450 - DNA, 240 bp, Enterobacter aerogenes
atgtcattagaagtgtttgagaaattagaatctaaagttcagcaggcgattgataccatcactctgttgcagatggaaatcgaagagctgaaagaaaagaacaccacgctggcgcaggaagtgcagagcgcgcagcacggccgtgaagagctggagcgtgaaaatagccagctgagagaacaacagcagggctggcaggatcgtctgcaggcgttgctgggccgcatggaagaagtctaa

SEQ ID NO: 111451 - DNA, 849 bp, Enterobacter aerogenes
atgagccagacatcaacattaaaaggccagtgcatcgcagagtttctcggtaccgggttgttgatctttttcggcgttgggtgcgtagctgcgctcaaagtcgcaggagccagcttcggtcagtgggaaatcagcatcatctggggtctgggggtggctatggctatctacctgaccgcgggcgtatccggcgcgcaccttaatccggcggtcaccatcgccttatggttattcgcctgctttgatgggcgcaaagttgttccttttattatttcgcaattcgccggcgccttttgcgctgcggcattagtttacgggctttattacaatcttttcttcgatttcgaacacacccacaacatggtacgcggcagcgtggaaagccttgagctcgccggtatcttctcgacctacccgaacccgcatatcaattttgtgcaggccttcgcggtagaaatggtgattaccgctattctgatgggcgtgattttagcgctgaccgacgacggcaacggcgtgccgcgcggcccgctggcgccgctgctgattggtctgctgattgccgttatcggtgcttctatgggtccgctgaccggcttcgcgatgaacccggcgcgtgatatcggaccgaaagccttcgcctggctggcaggctggggtaacgtcgccttcaccggcggcaaagatattccttatttcctggtgccgctgtgcgcaccggtggtcggcgcggcgctgggcgcattcagctaccgcaaattcattggccgccatctgccttgcgacacctgcgtcgaggaagaaaaagaatccgcttcttccgcgtcgcaacaaaaagcttcgctgtaa

SEQ ID NO: 111452 - DNA, 1512 bp, Enterobacter aerogenes
atgaccgagaaaaaatatatcgttgcgctcgaccagggcactaccagctcccgcgccgtcgtgatggatcacgacgccaatatcgtcagcgtgtcacagcgtgaattcgaacaaatttatccgaagccaggctgggttgagcacgacccgatggagatttgggcctcgcagagctcgactctggtcgaagtgttggcaaaagccgatatcaactccgacgaaattgccgccatcggcatcaccaaccagcgtgaaaccgccatcgtttgggagcgtgagaccggtaagcctatttacaacgctatcgtctggcagtgccgccgcaccgcggatatctgcgagcagctaaagcgcgacggcatggaagagtacatccgtaaagccaccggcctggtggtggacccgtacttctccggcaccaaagtgaagtggatccttgaccatgtcgaaggcgcccgcgagcgcgccaagcgcggcgagctgctgttcggtaccgttgatacctggcttatctggaaaatgactcaggggcgcgtgcacgtcaccgactacaccaacgcctcgcgtaccatgttgttcaacatccatgaactggactgggacgacaaaatgctcgacgcgctggatatcccgcgcgccatgctaccggaagtacgtaagtcttctgaagtgtacggccagaccaacatcggcggtaaaggcggcacccgtattcctatctccggcatcgccggcgaccagcaggcggcgctgtttggccagctgtgtgtgaaagaagggatggcgaaaaatacctacggtaccggctgcttcatgttaatgaacaccggtgaaaaggcggtgacctcaacccacggcctgctgaccactatcgcctgcggccctaccggcgaagtgaactacgcgctggaaggcgcggtgtttatggccggagcgtcgattcagtggctgcgtgatgaaatgaaactcatcaacgatgctttcgattctgaatacttcgccactaaggtgaaggacaccaacggcgtgtatgtggtgccggcctttaccggtcttggcgcgccatactgggatccgtatgcgcgcggcgcgattttcggcctgacccgcggagtgaacgccaaccatattatccgcgccacgctggaatctatcgcctatcagacgcgtgacgttctggaagcgatgcaggccgactccggtattcgtctgcacgccctgcgcgtggacggcggcgcggtcgccaacaacttcctgatgcagttccagtccgatattctcggcacccgcgtggaacgcccggaagtgcgtgaagtcacggcgctgggcgccgcctatctggcaggtctggcggtcggcttctggcaaaatctcgacgagctgcaggagaaagcggtgattgaacgtgagttccgcccgggtattgaaaccaccgagcgtaatttccgctacagcggctggaagaaagcggtgaaacgcgcgttagcgtgggaagagcacgacgaagcgtaa

SEQ ID NO: 111453 - DNA, 1203 bp, Enterobacter aerogenes
atgttgcatctcgataccttatcgacgctcgttgccgcaaccatggtgttgcttttagggcgaaagctcgttcagaacgtcccattcctcaaaaaatataccattcctgaacccgtcgccggcggcctgctggtggcgctggcgctgctggttttgaaaaaaagcatggatatcgaaatcgatttcgatatgagcctgaaggacccgctgatgctggcgttcttcgccactatcggccttaacgctaaccttgccagtctgcgggcgggcggcaaagtgcttggcactttcctgattgtggtggtgggcctgctgctgctgcagaacgctctcggtatcggcatggcgaagctgctggggctggatccgctgatgggtctgctggccggttctatcacgctttccggcggtcacggcaccggggcggcgtggagtaaattgttcgttgagcgttacggttttgccaacgctaccgaggtcgcgatggcttgcgcaaccttcggcctggtgctcggcggcctgatcggcgggccggtggcgcgttatctggtgaagcactcttcctcgccggacggtacgccggacgaccagctggcgccgacggcgtttgagaagccggatatgggccgcatgatcacctcgctggtgctgattgaaagtattgcgttaatcgctatctgcctgaccgtagggaaggtggttgcgcaactgctggcgggtaccgtgtttgaattaccgaccttcgtctgcgtgctgtttatcggcgtgatcctcagcaacggcctggcgctggctgggctgtatcgcgtgtttgaccgcgcggtatcggtactgggcaacgtcagcctgtcgctgttcctcgcgatggcgctgatgagcctcaagctgtgggaactggcgtcgctggcgctgccgatgattattattctggcggtgcaggcggtggcgatggcgctgtatgcggtgtttgtgacttaccggatgatgggcaagaactatgatgccgccgtgctggcagccggtcattgcgggttcgggcttggcgcgacgccgacggcgattgccaatatgcaggcgattaccgaccgttttggcccgtcgcatatggctttcctggtggtgccgatggtgggggcgttctttatagatatcgtcaacgcgctggtgattaagctgtacctgctgttgccgatatttggctga

SEQ ID NO: 111454 - DNA, 1392 bp, Enterobacter aerogenes
atgtccgttacgaccgcagagtcagaaaatgcgcaaccggttgcgcataaaccagccagcgaattaatctatcgcctcgaagaccgtccgccgcttccgcaaacgctgtttgccgcattccagcacctgctggcgatgtttgttgcggtcatcaccccggcgctgcttatctgtcaggcgctcggcctcccggccgaagatacgcaacacatcatcagcatgtcgctgttcgcctccggcgtggcatccattatccagattaaagcctggggaccagttggctccggcctgctctccatccagggcaccagcttcaacttcgtcgccccgttgattatgggcggcaccgcgctgaaaaccggcggcgccgacgtgccgacgatgatggccgcgctgttcggcaccctgatgctggcgagctgcaccgaaatggtcctctcgcgggttctgcatctggcgcgccgcattattacgccgctggtctccggcgtggtggtgatgattatcggcctgtcgctcattcaggttggcctgacttctatcggcggcggctatgcggcgatggccgaccacaccttcggcgcgccgaaaaacctgctgctggcgggcatcgtgctggcgctgattattatcctcaaccgccagcgcaacccgtacctgcgcatcgcctcgctggtaatcgcgatggctgccggttacctggcagcgtggttcctcgatatgctgccggctaacaccgcgcctaccaacagcagcctgatcactatccctacgccgctctattacggcctgggcatcgactggagcttgctgctgccgctgatgctggtctttatgatcacctcccttgaaacgatcggcgatatcaccgcaacctccgacgtttctgaacaaccggtctccggcccgctgtatatgaaacgcctgaaaggcggcgtactggcgaacggcctgaactcatttgtttccgccgttttcaataccttcccgaactcctgcttcggccagaacaacggcgtgatccaactgaccggcgtcgccagccgctatgtgggctttgtggtggcactgatgctgattgtgctcggcctgttcccggcggtaagcggctttgtgcagcatattcctgaaccggtacttggcggcgcgacgctggtgatgttcggtaccattgccgcatccggcgtgcgcatcgtctcccgcgagccgctgaatcgccgcgctatcctgattatcgccctctctctggcggtgggtctcggcgtatcgcagcagcctctgatcctgcagttcgcaccggactggctgaaaaacctgctctcttccggtattgccgctggcggtatcacggcgattgttctgaatttaatcttcccgcctgagaagaactaa

SEQ ID NO: 111455 - DNA, 1710 bp, Enterobacter aerogenes; identical to SEQ ID NO: 87535

SEQ ID NO: 111456 - DNA, 1560 bp, Enterobacter aerogenes
atgtctgtaatacgtcaacgtattctggagaatatgcaaaaattctccagggccatgatcggcgcagtattgttcttgccggtcattggattaattctggctctcagttccgtcttaactaacccgactcttattgctgaaaccagtttccttcatcaattagggcaactgcttggcgataccttctggccattattcggtaacctcggattattgttttgcgtgggaataagttacggcctggcaaaagataaaaaaacagaggtcgcacttgtctcggtgatgtgttttatcatgtttctcggcgccaaccattcatggctggaacatactcatgcggtggcggaaaaaattaacggcgaatattacggtaccgggcaaacgcagctattaggctttgtggtcgtcgatatgggagtattcctcggaatcattcttggctgcaccattgcctgggtacataataaagtctccaatattgagctgcccggcgcgctatcgatgtacggcggggcgaagctgacgctggtcgccatgacgccagtcattatctgctatgccattgcttttacctggatttggccttttatgacccacggcattagcgccctgaccgggtttatgaagaatgccggcgttgcgggagtgtttgtctacggcttctttgaaaaattccttattcccaccggcttgcaccatttcgtgtggtcgcctttccagctcacgcaaatcggcggcacgctaaatgtcgatggccaggtcgtctccggcacccaggcgattttcctcgcctatatgcgccatcccgatctgacatcggtgatgaacgatgcattacgtttctcgcaacaggggatgaccaccatctttggcctggcgggcgcatcgctggcgttttatcacaccgcgaagccggagaagaaagcgatggcaaaggcgattctgctgccggcgattatcacctcgatgctgaccggcatcaccgaacccattgaattcacattcttatttgtctcgccgctgctgtgggtgatccatgcgacgttaaccgccgcttcgcaggcaattggcgacatcttcaccgtgcggccgtggggcgcctccggcctgattgaatttctgatctacaacctgccgctgccggtgtcgttaacccgctggccggggtacgtgctgatcggtattggccaatttatcgtttattacgcgatattccgcacgctggtcgtgaagttaaatctgaaaacgccgggccgcgaggatgacgataacgtcaagctatacagtaaggcggactaccgtaaaaaagtcagcggcccgcagtcgatgacggatgaaattattaatggcttaggcggtaaagccaatattatctccgttgataactgtttcacgcgcctgcgggtggttgtccataatatggcattagttgatgatgaaatattaaaaagtactggcgcaaatggcgtagtacgcaatcgtaatgaagttcaggttatttatggcgtcaaagtcgggcaagtccgttcccgggttgatagctggctagcagaaaattaa

SEQ ID NO: 111457 - DNA, 1380 bp, Enterobacter aerogenes
atgaaattaaccgtattaggcgggggcggcgtgcgctctgcatttctggcaaagtcgctggcttataacgcgcaccgcattggtttaacggaagtggtatttcaggatagctcagcggagaatttatcgctatttggtgaaatcgcccgctatgtatttaataccattcgcccggatattcattttacgaccaccagcgatccggttgccgcgctgcagggtacccattacgtgattaccacgctgcgcgttggcggcgatgagagccgcatccgcgacgagcgaatcgcgctggagcataacacgctgggtcaggagaccaccggcgcgggcggttttgccatggcaatgcgctcgatcccggcgatcctgcgctactgtcggctgatcgaagaacatgccgacaaagacgcgatcctgtttaactttaccaatccgtccgggctggtcaccgaggcgattatcaaatccggtttcaaacgccgggtatacgggatttgcgatgcgccgtcggaactcatccgcgagctgccggagatcctcggctgcgacccgcacgacctgagcgtggaatgctacggtttaaaccatttttcctggtttacgcacttcaccgtgcgcggggaagaggttaccgcgcagctggtcgccaacccggatttgtaccgcaaaacggcgatgcagtacttctcgccggagctggtcaaactgtgcgataaccagttgcttaacgaatatctctattactactactatcgcgaagtggcgctacgggcgattcaacaggcgccggagacccgcggcgagcagattgcccgtatcaaccacgatatgcgtcaggagctcagcggcgtggatgttaaagcggatccgcaggcggcctttaccatctggatgaagcactacctacgccgcgaaaacagctatatgcaaaacgagtcgcagcaggaaaaattccatacccgcgagccgttaacgctgcggcagtttattgaagagccggataccggcggctacgccggggtggcgctggatattctggaggcggtcaacagcaccaccaccaaacgcatcgtggtgtcgctacaaaataacggcacgctcgattttttacgccccgacgatgtgattgaaatcagctgcgatctgagcaaagagggtcttaagccggtgacgccggttaacgtgccgacggcgcagaaaaatatgattgccagcgtgaaggagtatgaacgattggcggtggcggcaattctgcagcaggacaaatcgctggcgatgcaggcgttgatggctcatccgctggtcggttcatattcgctggcgaagaagctggttgaggcctatctcgacgatgaacagttcgccgggtggcggtaa

SEQ ID NO: 111458 - DNA, 723 bp, Enterobacter aerogenes
atggacttagaaaatatctttcgtgacgtgaagttgagtaaaaccgaaatgaccgtgctgcgttttattcaaaatgacccgcagctatgtatccgcgaagggatccgcaccgtcgcggagcgctgctacagtaatccttcttcgctggtgcggctggcgaagaagcttaagttcagcggctggctggagctggtctatttcatcaagttcaatatcaccatgccaaagctcgatgtcaccaacgatattgattatatgagcattcaaccggcagaagcgctgacgccgctgctggcaggccttgagcagcagcgtattttgatccacggcagcggtttttcgcagctaatcgcccagtatatttataataagtttctcgttaccggcgtgaacgccagcctggcattgtggccggattatgaaatccttgagcaaaaaaacgctgcccgctttgattctatctggatcatctctaaatccggacgcagcagttcggcgttaaattgggttaaggcgctggaaggcaaggagataaacctggtttgctttaccggcgattatcaaagcccgctggcgcaggccgcgaatacggcgtttattattcacgacccgcagaagttcgacgatgatatttactggagcaacccgttttttggctactgcatattgggctttgagcggttgttaaaaatgtggtttaccagcgtacgtagcaataggtag

SEQ ID NO: 111459 - DNA, 675 bp, Enterobacter aerogenes
atgaaacgttcccagattaactatgcgatagataaagcgctggcgatggccgaaacttttcgtatcagcctgccggaatttgcccactttacggcgtcaagctggccacaaaaacggcatgaaggttggcatgaagtccaggatctacagcttggatgggatgtgacggatttcgccagcggttgctttcgcgaaacgggccttacgctgttgacgttacgcaacggttctttatccgacccgcgttataccaaaccctacgcggaaaaaatgttgcagattcagcaagatcagcaaaccccctggcatttccattaccacaaaatggaggacatcattaaccgcggcggcggcgacctctgcatgcaactggcctgggcgacacaggacgaacagttagaccaacagcgccatgttagcgtgatgatcgatggctgccagcgtacgctgaaacccgctgagacgctggtgctgcatccggggcagagcgtctgtctaccggtggggctctatcatcgcttctgggccgaaaaagggatagtgatgggttgggaaatttcaatggttaatgacgaccatacggataatcgttttctcgaggcgggcgggcgctttccctccattgaggaagatgaacctgcaagatggctgctgtgcagtgaataccggcagtga

SEQ ID NO: 111460 - DNA, 918 bp, Enterobacter aerogenes
atgaattacctcggactggatgtcggtgggacgaaaatcgccgccgtcgtgatggatgagcagggacgggagcggggtcgttaccgctgcgcaacacggaaagaaaaccgtcaggcatttatgtcgtgcatcgtggatttcgttgccgatattcgcgcgcggacgggaacgccgatggctattggcatcgcgttgccgggtagcgtttcgccacagcattgcgtcattcgtaacgccaacattcaggtgattaacggctatcgtttacaggatgcgcttgaacaggcgctcggtcagccggtggtgttagccaacgatggcaattgtttcgccttatcagaagcatgcgatggcgccggagaagggttttcatcggttttcggcatgacgttagggaccggctgcggaggtggtattgccctggagcggcagcctttcgtcggcgcctcaggtattgccgcagagtgcgggcatatcgccttgcccggctattctcctgaggaggatgggccgccgacacgttgttattgcggcagatttaactgtgtggagtcttttatttccgcaacggggctacgtgaacgctatcgactgctcagcggagagtgtgtgtcgagcgagcagattctcgcccgcgcgcaggcgggagaatccgccgcttgccatcaggtccaccgctttcgtcaacagctggcgcggacgctggcgactattgtcaatatcatcgaccccggcgtgattgtgttgggcggcggtttatccaacgcgccgcagctggtagcggatttaccatcggcggtcgcaccgctcgtcttcaccgaccatttttctacccctatcatttctgcgcggcatggcgacagtagcggtatgcgcggcgccgcctggcttgccgtgcgaagcggagttaaaccatga

SEQ ID NO: 111461 - DNA, 861 bp, Enterobacter aerogenes
atgttagtttccatgcaagaaatacttaaaccgactcgtgaacacggctttgccatcggtgcatttaacgttgcggacagctgctttattcgcgccgtcgtggaagaggcggaagcgacaaatactcccgccatcatttcaattcaccccagcgagcacgactttgtcggcgattccttttttagctacgtgcgggatatcacccagcgtagccgggtgccgtttacattacatctcgatcatggcgcctcggtggagcatgtgctgcgtgcgatccagtgcggttttacctcggtgatgatcgatgggtcgctgctgccctatgaagaaaacgtcgctctaacgcgggaagtggtcaggctggcgcatgcggttggcgtctctgtcgaaggtgaactggggaccatcggccagacgggaacgtcggtagagggcggagtgtcgaaagtgacttataccgacccggcgcaggcgcaggattttgtcactcgtaccggcgtcgataccctggcggtggcgattggtaccgcgcacggcatctatccaaaagggatgcaacctgaactgcagatgcacatcctgcgcgatattgccggacgagtgtcgatcccgctggtactgcacggcggctccgccaatccggatgcggaaattgccgagtctgtcacgctcggagtcgggaaaatcaatatctccagcgatatgaaacacgcttacttcctgaaagtacgtgaaattttgagtaaagagagctggtgggatccgaatgtgatttatccggaaccgattaatgccgcacgtgaagttattcgccacaaaatgaagttgtttggttccaccggcaaagcaagcttgtattga

SEQ ID NO: 111462 - DNA, 852 bp, Enterobacter aerogenes
atgtttgccgatatgaagcagatggttgagaaagcctggcgtgaacagtatgccctgctggcgattaactgtatgaatctggagagcgcccgcgccgcggtacgcgtggcggaaaaataccgcgcgccgattattctcaatctctatcagggccatctggcgcattttccgccagcgacggcgatggcggtggccaggacccttgccgaagaggccagcgttcccgtgaccttgagtctcgatcatgggaaagaaccggtgaagatccgccaggcttttcgcgctggattcagcgggttgatgattgatgcttctgcatttccacttgcggaaaatatccgccagacccgagaggtcaccactctggctgccagcatcgggctgtgtgttgaaggggaattggggcatctggctgatgctccgcgctatgactctgcgacgaacgccgacctgatgacgcaacctgaggacgtcgccccgtttatcgagcaaaccggtatcgacttactggcggtctccgtcggcacggcccacggcatgtatgcgcctggggtcacgcccgcgctggactttgaccgtctggcgcaggtgcagcgagcctcttcggtgcccctggccctgcacggcggcagcggcacgccatttgatcagcttgcctgctgcccggcatttggcgtggcgaagattaatgtcggcgcggcggtgtttgaggcaggtaaagccgcactactccataccctttgccatgacagctctattgaactggccgatgccatggcggtgatggaacacgccagcgctgaagctatcgtcccttacttacaagcatccggcgcgataaaccgcgcctga

SEQ ID NO: 111463 - DNA, 1092 bp, Enterobacter aerogenes
atgagtgagaataaaccacctgtctcgcaggaaattaaaaagcatttgttaacgggtatttcatggatgataccgctgattgttgccgccgggatctgcattgccctcggtcaggttctgggcggtaccaatgtcgccgagaaagtcggcactattccatggatgttgaatcaaatcggcggctgggggatggggctcatcgtcccgctcatctgtgcggcgattgcctattccattgccgacagacctggttttgcccctggactgattgttgggtttgtctgcgggcaaatccacaccggtttcatcggcggaatgctgggcggtttcctggtgggctatacggtgctgctgttaaagcattacgtgcggttgccaaaatcgatgcaagggctgatgcccattatggtgctgccggtattaagcaccattatcagcggtctgttgatgatgaccctgataggcaagccgattgcctggctgcaggaggccttgattcatctgttggagtcgatgcagggtggttcacgattcctgttgggggccattcttggcgcgatggccacctttgattttggcgggccggtgaataaaaccatgtcgttattcgccgatggcttgctggtgagcggggtctatggtccggaggcggtcaagtttgtcggctccatgatcccgccgttcggtattacgttgtccttcctgctgacccgccataaatatacccgtgctgaaagtgaagcgttaaaggccgccttcccgatgggtatttgcatgatcaccgaaggggtgatccctatcgcggcccgcgatctgctgcgggtggtgggatcctgcgtcgtggcttcagcggtggcaggcggcttgattatgacatggggtgtggaaagcccggtgccacatggcggtatgtttgcggtgccgctattcacccatccactgctgttttgtctggcgctggcgattgggacggttatctgcggcgtgatgttgtcgctatggaaaaaaccggtcacggagcgtgatgaagagtttgatgaactgagcgaccaaaaagtcgccgatgatgaaatcacctttacccttgagtaa

SEQ ID NO: 111464 - DNA, 315 bp, Enterobacter aerogenes; identical to SEQ ID NO: 87526

SEQ ID NO: 111465 - DNA, 471 bp, Enterobacter aerogenes; identical to SEQ ID NO: 87525

SEQ ID NO: 111466 - DNA, 1572 bp, Enterobacter aerogenes; identical to SEQ ID NO: 87524

SEQ ID NO: 111467 - DNA, 2319 bp, Enterobacter aerogenes
atgaaaatcagtgatggaaactggctcattcaaccagggctcaacctgatccaacccgtacaggtttacgaggtggagcagcaggggaatgaaatggtggtctatgccgcaccgcgcgatgtccacgaacgcgcctggcagctggatacgccattgttcaccctgcgctttttctcgcctcaggaagggataatcggcgtgcgcatggagcacttccatggcgcgctggataacggcccgcactatccgctgaacgtgcagaaagacgtccatgtcgaaatagaaaatacggccgagttcgccgagctgaaaagcggcagcctcagcgtgcgggtgactaaaggtgaattctgggcgctggattttctgcgcgacggcgtgcgtatcaccggtagccaactgaaaaacaacggctacgtgcaggatagtaagacccagcgcaactacatgtttgagcgcctcgacctcggcgtcggcgaaaccgtctacggcctcggcgagcgctttaccgcgctggtgcgcaacggccagacggtagaaacctggaacgaagacggcggcaccagcactgagcaatcctacaaaaacattccgttctacctgaccaaccgcggctacggcgtgctggtgaatcacccgcagcgcgtctccttcgaggtgggctcggagaaagtctctaaagtccagttcagcgttgaaggcgaatatctcgagtacttcgtgatcgacggcccgacgccgaaagcggtgcttaaccgctatacgcagttcaccggccgcccggcgctgccgccggcatggtcgttcggtctgtggctgacgacctcgttcactaccaactatgacgaagcgacggtaaatagctttatcgacggcatggccgagcgccatctgccgctgcacgtcttccacttcgactgcttctggatgaaggccttccagtggtgcgattttgaatgggatccgctaactttcccggacccggaagggatgatcaagcgcctgaaggcgaaagggctgaaggtctgcgtgtggatcaacccgtacatcggccagcgctcgccggtgttcaaggagctgaaagagaagggctatctgcttaagcgcccggacggttcgctgtggcagtgggataagtggcagccggggctggcgatttatgacttcaccaacccggaagcctgccagtggtacgccagcaagttaaaaggtctggtagcgatgggggtcgattgcttcaagaccgacttcggcgagcgtatcccgaccgacgtgcagtggtttgacggttccgatccgcagaaaatgcacaaccactacgcattcatctataacgagctggtgtggaaggtgctgaaagagaccgtcggcgagcaggaggcggtgctgttcgcccgttccgcctcggtgggcgcgcagcagttcccggtgcactggggcggcgactgctacgccaactacgaatcgatggcggaaagcctgcgcggcgggctgtcgatcggcatgtccggcttcggtttctggagccacgatatcggcggtttcgaaaacaccgcgccggcccacgtttataagcgctggtgtgcctttggcctgctctccagccacagccgcctgcacggcagcaaatcctatcgtgtgccgtgggcctacgacgaagagtcctgtgacgtggtgcgccacttcacgcagctgaaatgccgcatgatgccgtatctctatcgccaggcggcgctggccaacgagttcggcactccgatgttgcgtgcgatgatgctcgaattcccggacgatccggcctgcgactatctcgaccgtcagtatatgctcggcgattcggtcctggtggcgccggtgttctccgaagcgggcgaggtgcagttttatctgccggaggggcgctggacgcacctgtggcataacgatgaattgccgggtagccgctggcataagcagcgtcacgatgcactgagcctgccggtctacgttcgtgacaacaccctgctggcgctgggcaacaacgaccagaaacccgattatgcctggcatgaaggcaccgccttccagctgttccagctgggcgatggcaatgaaacggtctgtcaggttccggcggccgatggttccgcgatcttcactctgaaggcgaagcgccagggtaacaccatcaccgtgagcggcgaaggcgaagcccgcggctggacgctgtgtctgcgcaatatcccgcagatagcgggcgtggagggcgggacgcaggcgggcagcgaactgggcgtggtggtgagcgcccagggcaatgtgctgacgattacgctgtaa

SEQ ID NO: 111468 - DNA, 1395 bp, Enterobacter aerogenes; identical to SEQ ID NO: 107677

SEQ ID NO: 111469 - DNA, 1038 bp, Enterobacter aerogenes
atggcaaaggaaactataacgtcgtccccagcaggtgaattcattatgtttgccagcgatgacggggaagtacgcgttgaatgccgctttgagcaagaaacactatggctccctcaagcaactatcgccagcctttatcaagtcaccccacaagccgttacacagcatattaaagctatatatgaggaaggtgagcttgaacaaaacgcaacctgtaagtcttacttacaagttcaacaggagggcagccgtcaggtaagccgcaaccggcttcactacagcctgcctgtcatactcgctgttggctatcgcgttcgctcctctcgcggcacgcagttccgccagtgggcgacccagacgctccaggaatacctgatcaaaggttttgtgatggacgatgagcggctgaagaatccgcctgtgggttcatcggctgtacccgactatttcgatgagatgctggagcgtattcgcgatattcgcgccagcgaacgccgcgtttatttgcgggtgcgagaaatttttgccttagcggctgactatcaaccgtcgttaaaagaaaccacgcagttttttcaaactatccagaacaagttacattttgcctgtaccggacataccgccgctgagctcattcatcaacgtgctgacgccagtctgccgcatatggggctgaccagctatagaggcgaagaggtgcataagggcgacgtgacggtagcaaaaaattatctcactcaggatgaagtcagcgagcttaaccgcgtagttaacatgtggctggattttgccgaggatcaggcccgtcgtcgtcagcaggtctttttacgcgactggcaggataagctggatcagttcctgcaatttaacgaccgtgaggttttgcaaggcgcaggtaaagtcagtaagaaaatggccgatgaaaaagcgcaggcggaatatagtcagtttgctgagcaacagcggcgcttaaaggaagccgaaggtgaaaaggatatcgccggtttgctacagtggaaaacagagcctaaaaagtag

SEQ ID NO: 111470 - DNA, 1197 bp, Enterobacter aerogenes
atgcgtaaaatactcctttcgctgctgctggctgccgtgaccagcgggctggcgctggcggacgacggcaagccgttcccgcatatcggctggcgcagcgcggataatctcgccgggctggatttcggcggcgcgctgcgggcaaattatcgctatgaagactggaaaggcagtaattaccgcaacccgccgcatctgcgttttgataccttccgtatcgacagcagcggcttctatgataattatttctttgatgccgggttctggtttcaggatcaccgtaaatacgccatcgaccgcgcttacgtaggctatcgcttcgacaacaataataatattcagctggggatccccggcaaaccatttggccttgaaccttatccgcaatttggctggtcctatggtattccgttttatttaggctttggcgtgagcgccggtagcggcgtgaactatcaatatcatgataataactggtcgctggatgtggcctatttcccgtggatggaaccggagaatttgcgctatgcgccggacgttggcgattacgatcggctgaaaaacactatctatccgactcagcatcagcagcataatgaaaagcgggaccaggtgaacgtgcgaattgcgcgtgattttcacggcggcggctggaataacgagctgggcggctcactggcgctggcgcggttgcacaaccgcgagaccgacgacgacggcaccttctgggcggcaggcgtgcacggcatgttacataacgggccgtggcagctgacctcgcagctgattcgctaccaatacgatccgaagaacccggcgggcgtcagcgacgatacgatactgatgggcggcaacggcctgacgccggcctacctgatcccggcgaaagcgacgaccgcgtcgctgaacgtcgcccgcgatgtcgacgtgaagtggggcggcgtatcgaagctgcgtttttacaacgactacagcgtgctgtggaaagataaaagcggctggagcgattcgcagatgaatacccttggcgtacaggtctttgcgctgccggtgatgttctgggtcgatctcagctgggcgaagaacgttaatccgtggggcggcgcgctgaacgccaccggctggaccagcacccagtccgagggcagcggcaaatggtacttccgcaccaacgttaatattggttattacttctga

SEQ ID NO: 111471 - DNA, 1008 bp, Enterobacter aerogenes
atgaaagccattgctattacccaggccgccgccgacggcaacaacatcccctttttacgcgatatcgatctgccggatccgcaggcgcaggggcacgatctgctggtcgaggtcaaagccatttcggtgaatccggtcgacaccaaagtgcgcgccgggtttaatgccgataccccgcgagtgctgggctgggatgcggttggcgtggtgaaagccgttggcgatgctgtgacgctgttcacgccgggcgatgaagtgtggtacgccggcgcgctgggccgtcccggcagtaacagcgaactgcagctggttgatgaacgcatcgtggcgctgaagccgcgctcgctggagaatgccgccgccgccgcgctgcctctgaccgctatcaccgcctgggaattgctgttccaccgccttggcgtgcaggaaggcggtaacgccggcgatacgctgctgattgtcggcgcggcgggcggcgttggctctatcctcacccagttggccagcaaactcaccaacatgacggtaattggtaccgcatcgcgcccggaaagccagaagtgggtacgcgaggccggggcgcatcacgtcattgaccacagcaagccgctcgctgaagaactggcgaaaatcggcattcatgccgtgacccacgtcgccagcctgaccaataccgatcagcattttaacgaactgatcgccgcgctcgccccgcagggtaagctggcgctgattgatgacccggagagcctggacgtggtgccgctgaaagcgaaaagcatttcgctgcactgggaatttatgttcacccgctcaatgtttgagacggatgatatgatcgcccaacatcagctactgacccgcgtcgccgcgttgattgacgataacacgctgcgcactacccttggcgaacactacggcactatcaacgccgccaatctgcaaaaagcccacgttaagctggaaaccgggcgctcggtcggcaaaatcgtgctggagggtttctaa

SEQ ID NO: 111472 - DNA, 303 bp, Enterobacter aerogenes; identical to SEQ ID NO: 107684

SEQ ID NO: 111473 - DNA, 1050 bp, Enterobacter aerogenes
atgcagatcaacgctataggtacgtactccgccagccagccgctcgaatcgatgtctatcacccgccgcgaacccggcccacaagatgtgcagatcgctattgcatactgcggcgtctgccattccgatctccatcaggcgcgagcggaatgggccgggacgctgtatccctgcgtgccgggccatgaaatcgttggccgggtgacggcggtcggcgatgccgtctcaggttacgccgttggcgatctggtgggcgtcggctgtatggtggatagctgtaaacagtgcgaggagtgcgctgaagggctggagaactactgtgaccatatggtgctgacctataacgggccgacccaggacgcgccggggcatacgctgggcggttattcacagcagatcgtggtcaatgaacgctacgtactgcggataaaccatcccgaagcgcagctcgccgccgtcgcgccgctgttgtgcgccgggatcacgacttattcgcctctgcgccactggcacgccgggccgggcaaaaaagtcggcgtcgtcggcatcggcggcctgggacatatggggatcaagttggcccacgccatgggggcccacgtagtggcctttaccacctccgaatccaagcgcgacgcggccagagcgttgggcgcggatgaggtcgtggtgtcgcgcaacgaagacgaaatggcggcccacgtcaaaagtttcgatttcatcctcaacaccgtggcggcgccgcacaatctcgatgccttcaccacgttgctgaaacgcgatggcactatgacgttggttggcgccccggccacgccgcatccatcgccggaagtgttcaatctgatcttccgccgccgctcgattgccggctcgatgatcggcggtatcccggaaacccaggagatgctcgacttctgcgccgaacacggcatcgtcgccgatatcgagctgattcgcgccgatcagatcaacgaagcctgggaaagaatggtcaagggcgacgtgaaatatcgcttcgtgatcgacagttcgactctcgccggctaa

SEQ ID NO: 111474 - DNA, 957 bp, Enterobacter aerogenes
atgatgacattaaccgacgtggcgattgtcgccgtagagggctttagcccgtttcattattccgtcccctgtatgctgtttggcgatacggtctcggaaaccaaacgttttaatctgcagatttgcgccgaacagccgggattactcagcgcccgcgacggcttcgcgctatacgccagcggtgattttaccgcgatggaacaggcggatatcgtggtggtgccctactggggcgaggtcaaccagcgcccgccgcaggcgctgatcgagagtctgattcgggcgcgcgataacggcgcggaaatcgtcggcctgtgcctcggcgcgtttgtccttggctacgccgggctgctcgacggtaagcgggcggcgacccactgggagttcgagcaggatttccagcgcctgtttccgcaggttcagcttgatatcaacgccctgtacgtcgatgaccagaaggtgattacctcggcggggaccgccgcggcgctagattgctgcctgtatatcattcgccagcgttttggcagcctcgccgccaaccagatcgcccggcggatgatcgtgccgccgcaccgcgagggcggccaggcgcagtttatcgcccagccggtgccgcgcaacacccgcgatgcgcggattaattgtctgctggattatctgcaacagcatattgccgagccgcataatcttgattcgctggccgaggtggtggcgatgagccgccgtaccctgacccgccacttcgccagggcgaccgggatgagcattgccgactggttgaccgctgaacgtctgcgccgcagccagagcctgctcgaagcggggaatttgccggtcgagcaggtggcggaagcggtgggctatctctccgccgtgacctggcgccagcagtttaaagcgcgttttggcgttagcccgacggagtggcggcggactttccgccgcggcgtttag

SEQ ID NO: 111475 - DNA, 543 bp, Enterobacter aerogenes
atgaaaaagaaactaaccgccgccgatatgcataatccgcagatcatcgccgaaacgccgtggttcagcatgcgcaaggtaggtattgatgtcgcccccggcgagcggcgtgacttttattccattcactacccacgcccggcggtcgggattgtggcgctccaggacgacaaagtgctgctgattcgccactaccgctatctgatcgataaggtggtgtgggccattccctctggcggcgtcgatgaaggggaagagcccgccgtcgccgcgctgcgcgaactacgcgaagagaccggctggcaagcgcaacacgctgaggaaatcatccgctacaacccgtcatacggcagcagcgaccagctgtttatcacctggctcgccaccgatttaagctgggttggcatggacgcagatcaggatgaagtgatggaaaccggctggtttaccttcgaggagataaaccagctgatcgcccgcggcgaaatgccggacgggctgtctctggtgccgctgctgcacctgatggcgcagcgtagatga

SEQ ID NO: 111476 - DNA, 813 bp, Enterobacter aerogenes
atgatgaaattgcgtttacgcacggcggcggcagtgatgctggctggcctgctgttagcgggctgtgaccagaagaatgacaatgccaaacacataaaagtcggcgtgattaacggcgcggaacaggatgtggcggaagtggcgaagaaggtggcgaaagaaaagtatggcctcgacgtcgagctggtgggctttagcggctcgctgttgccgaacgatgctaccaacgccggggagctggatgccaacgtcttccagcatcgtccttatctggaacaagacaacaaagcgcacggctaccacctggtggccatcggcaatactttcgtctttcccatggccggctattcgcgcaagattaaatccgttgccgatattaaagatggcgcgaccatcgccattcccaatgacccgaccaacctcggccgcgcgctattgttattgcaaaaagagcagttgattaccctcaaagcgggtaccggcctgctgccgacggcggtggatattaccagcaacccgcgcaacctgaaaattatggagctggagggcgcgcagctgccgcgggtgctggacgatccgaaggtcgatgtcgccattatcagtaccacctacctgcagcaaaccgggttatcgccggtgcgcgatggcatctttattgaagacaaaaactcgccgtacgtgaacatcattgtggcgcgtgaagacaataaagacgccgaaagcgtgaaagagtttatgcagtcgtaccagtcgccggaagtggcgaaggcggcagaaaccatcttcaacggcggcgcggtaccgggctggtaa

SEQ ID NO: 111477 - DNA, 201 bp, Enterobacter aerogenes
atgctactccagatatcggctattattgttgtttgttccctttttgtttttatttttcctttaccgttttttggcaaaaaatgtgcatattgtggcaaactccgtcccgcactattttggttattttcactggataaacattattgcgatgattgccttgacaaattcaatgccgacatcagaaataaaaaaaacatgtaa

SEQ ID NO: 111478 - DNA, 567 bp, Enterobacter aerogenes
gtgagcaattcgatagcagacggagcgaaattaactccggagacattcgcagatttcattgagcgcttgaggtatcaccatcgcggcgatggtgttaatcgtcacgccaccgccgatccgattttcatggttcagaagcaggcaaccatttatggcctggcagaagagtacggcgaatcgaagatagtccatttcgaagaatgcgaatgggagagcccgcaagagtattgggacgatctggatgaacagcagcaggaagagttaaacgccttctgcattgaccaatgcgacactgcctttaccgatctcgatgaagacgctcagtgggaagtactggctgaccttgacgaccacactgtctgcggtacacgcaaagagtggaagaacatcaacgcacattttacccgtgaagcagcggaggctttcattcgccgaaaacagcatgattatcctcctctgcgggtctacgtcgagagcatgtacttcggctgggagtatcaggaaatcatacgtgctctatgcgacggaagattggtgctaaccgaaaaaaatggcggtgcagcatga

SEQ ID NO: 111479 - DNA, 321 bp, Enterobacter aerogenes
atgacaactgatataaccgaactggcgcagctgcgtgcagaactttcaaatccggcgatggacactaacgtccatctgcgaaaagttgcgttatcgctggtagaggcgctggagaaggcgcagcagcggatttctcagttggagtcccgctccgtcaccgtgaatctggcatcccgccgattaccatctgattacgttgatggtgaattcggcaatgatgatttggcagcaatacataatgcgtgtcggctggaatgcaaggtcagtgttgaaaagtatttgtcagcacatgggattgtagtcaagtgggaggctgagtga

SEQ ID NO: 111480 - DNA, 285 bp, Enterobacter aerogenes
atggaatatttcaagaaaggccaaatgataccaaagaggctcggtctggttgatgtccaccgaaaagccagacatgcagttacgttcggctccgatgtattttgcgatatcaatgggaacatcattgttcttgctggaaccggacaatcactcgtcaacgtaaaggggtggcgattaggtattcgcagaaacaacggcacattccagaagaaagacggtgctaattcaataaagttttatgcaaagtcagtgtatctgaggggtgaagatgaaacatatcattaa

SEQ ID NO: 111481 - DNA, 195 bp, Enterobacter aerogenes
atgaaacatatcattaagtttccattagaaaataacaagaaagatagctggtgtggtgctgtcatttcacctactgaatgggcacttgaagatgcacagcacgcgcttttgagcattgagcagggttcgcttgttcagccgtgcaaggagtgtcttaaggctattgtaaaagttgcgcagcaggaggtgaagtga

SEQ ID NO: 111482 - DNA, 402 bp, Enterobacter aerogenes
atggccggatttagccgtattaaattaaaccctctcgatgttgttcgcgaccagtttggtgttgagcttaatcatattacttacgacccgagcctgagaaaggcagattgccattaccaggttattcggcagacatcacatgatggcacattgctgtttacgcatgagctactagcaagcgctctggtcgaaattgcgaatatgcattcttactccaaaaaactccctcccaaggactgggataaagtcatagcgataaaatatacgctcggtcctctttggataacaacggtgtatggcagagttaatctgccagcaggcaactatcctggtgagaagcagagggtgaggatgtctgtggtatgtgaatacatttacgcagacggtgacagcgatgcataa

SEQ ID NO: 111483 - DNA, 207 bp, Enterobacter aerogenes
atggtgagcaaactcaaacagcggcgtcttcgccgccttaaagcggatgtagcctggtggcgcgaagaggctgaggattgccgctcccgtcttctggaactggccggtgaaatagacaggctcaaaaaactggtcatccgcgtgccgatgccggtggtggtcccggattccgtggccgatgaacttaagctgagagaggtggggtaa

SEQ ID NO: 111484 - DNA, 198 bp, Enterobacter aerogenes
atggatgatttaaacaaaataatcaccaatgctcgcgttctctcatggaagagagaatttggtccatttgttaaatgccctgagtgctttgggttgctgacaaaatgcgaactatgcaaagggaaaggaaaacttatccaggaggatattgacgcgtggaacaatccgatcgccaaactgaaaatggataagcgatga

SEQ ID NO: 111485 - DNA, 426 bp, Enterobacter aerogenes
atgccgagcaaagattactatcttaatcgaagggctaggcttgataaggccatggaaaagttgggtggttgttgcgcgagttgcggatctaaggattcgcttcagtttgaccacatagacccttccaccaaatcagcaaatgtaagcgagatgcactatcactcagattcggtgttttatgctgaggttgaaaagtgccagttactatgttctgaatgccacattcggaaaactaaatttgaccttagttacttagtagcaggtgagctgaatggtatgagtaagctaacaatggacaccgttcagttcatgagggaaaactatattcctcgacataaggtttatggcgccagagggttagggagaatgtttggtgtaacacatcaaacagtgctttcagtcttgaatggcgaaacctggaaataa

SEQ ID NO: 111486 - DNA, 189 bp, Enterobacter aerogenes
atggatatcgacctaatcaccatgtctatctcagcgctagctgtggctatttctgtgtacgccgctgtgccggttcctgagaagaagtccaaacagattaagcgcacgcctcccgatcagcttccacccgaggttagaaagctcattgagaacgttgatgagcttgagcggatagcaaaaagtctctga

SEQ ID NO: 111487 - DNA, 357 bp, Enterobacter aerogenes
ttggcattagcgagaaatacaatatttgaagaatcaattgaaatcggatttaacaatcaaacgaaaaaagtaaaaaatcccaagaaattaaaacctctacaaataatcaaactctacgaagaatccccagcattatcagaagatgaaaaatcaataatcgattctatgcctggtgttaaatggaaacctcgccaacggtataccggattcaggttcaatagagagccgctccagtgggaggcactagggtttatatctgaatatcactatagccactggctttatttccagcaactctccaacgagcaatatgacgtagattttattgatgttgtgaataacggcatcaccgactaa

SEQ ID NO: 111488 - DNA, 144 bp, Enterobacter aerogenes
atgtgcaaagtgttcgtggtagtatcttcggttcaaatgtccatcaacatcactcagccgttcatcttcatctatagtaaacgagtaactattatctttgctcaaaaactctttgccatattcatcttgatcaatataacttaa

SEQ ID NO: 111489 - DNA, 330 bp, Enterobacter aerogenes
atgagcacagcatatgaacaactcctagttgaaaaagttatcgattttggggacagcttttccgatgtaaaacaacctaacaacgtcatcacgagtttaaatttatttggtgatgagaatctcagcatcaataaggttttaaatgaccgtctcgtagaggatgcagatcgcgtcaatagtgaaaatgctccttatgtgcacagtgattttaacaccactgaattacctacgtttgacagtcaattcgtcgaacttcgaacatttaaacgggtagacaaaattagctctcgctcgttcgaacaggctcgtggttttggcaaaaaaagataa

SEQ ID NO: 111490 - DNA, 222 bp, Enterobacter aerogenes
atgacatcgcgtatcaaaacacgctggacactatcctcgctgaggctgttctttcaggtaaacaatctggagtttatacggctcaaggtgatttatctttttttgctgaatttaatcaaactaaatccacagcaaccttcgattttagtactactgcaaatgttctcgcacaactggatgctgtacagcgccaaattcgacaggcagcacgcagtaaactga

SEQ ID NO: 111491 - DNA, 366 bp, Enterobacter aerogenes
gtgggcgctatgtttaaaaaggagctcttcagaaaactggatattgccgcgcaggcgagccccaaagcaaaaatgatcgaaaaaatacccgttgcttcgctggtggcgaaaggggactacgcgatagggtttcagcaggttagcgaactgttgccggtcagcggcgtgacgtttgttggtcgtctgccggatgaagtgcaatacgttactcgcttcgcgggcgccgtagttgccgattcatccgcgcagtcgcaggcgaagcagttgctgtgctatctggcttcagtcccggcgcaggcggaaatccgtcgtacaggcatggatcctttaccctctaatgcctgtgaattaccggaagagggctaa

SEQ ID NO: 111492 - DNA, 360 bp, Enterobacter aerogenes
ttggcactagcgagaaacacagtttttgaagaagcaattgaattaggatttaataacagaaataaaaaagttagaatttctaaaaaactaaaaccactaaagattattaaacgctacgaacaaagctcgccacttacaccagacgaacgagaaacaattaactctatggatggtgtgacgtggaaacctcgccaaaagtacatcggttttaaatttagcagagagccgctcaaatttgaatgtctctttgataatataaatgaatacgagggttggttggagtttaaccgattagaaaatgaaaacttcacaggaaatgatcttgggcttgattttgatgcaccaggcatctctgattaa

SEQ ID NO: 111493 - DNA, 1815 bp, Enterobacter aerogenes
atgagtaaagtgaccgccgcgactttggtcaacagggttgtctataagacagatttaaatagtcttaaaaaggttagaaacgatatgaagaaacttcaaaaagagttttctaaatcaaacaaccaggtagctaaagcgaaacaggcagcagataaacaaattcatcaacaacaaattaagcagcagaggcaagttcaacaacaacagaaacaggcagctaaacaggctgctgtagatgctaaagcaaaagctaacgaacataagaaattagcggcagcgcaagcccgcgctttaaaaattcaacagcagcaacagactaaaaccgccaaaatcagcgagaatgcacgattggcagagcggaaagcgctgtttgatattggcagattgcaggggctgcatggtgctgaacgattccaggctatcaaacatgcccaagcgcttgtcagccagtaccagcaaggggctatttccctgcgagatatgaatcaacaactctcacagcacctgaccacacaacgcgctatagccagaaataattcaaaacaagcgaagcagtcaggtaaaaggaaaaaatctggctcatctggctggctgagtcgtcaggcaagcgcatttatccccggtgagatactcgggccagtagctggcgcttatgccgcccaacaggcctatcaaatcatctctggaacattggcgggagcgattgaacggaaccaaggaaggaagatgatcagttcgatgggcttaaatcctctggaggctgatgcagctattcaggaaactctaaaacgaactggctttaatatgagctatgaaaagatttctgacatagcaaaagatacccaggacaagatcggccaattgagtcttggcgagtggaaaacagataagaaaacaggacaatcaacatattcaggcggtggagaaatgggagattggctccagatgatggttagtcgtggaggctatacccagcagggagcgctaaaaactctccaaaatgtgaaaggtccggttgagttagctgtgttacttgaaggtttacgtaaaagtgcaaaacttacagattctgaattcactgctttagccgaagtaataaacgacttctcctatctggctaaatcggtagatgccagcgggcaaaacgtcatcgatactatgaacacgatggttaacagtggtctggcacttaatagccaacagcagaaatctatcgataacctctcgcagatgtcaattgtattcgataacgccagaaatgcattaggtgatcaatttgcggcatcttttagcaaaggtcttgatgatttaggaattaatacacgaaatctatcttctgaaatgggttcattggtgcctttggtgaaggatttaggaacgggaacggctcagactgtgaaaggttttaaggatttgctcgatgtcctttctattatcacagaatggaaaaatagacttttaggtgagaaaccagaagatcgaaatatccttcagcaaggggctacgtttgttggtgagtctctattgccaccgggtgtcctagatatggctggcaaagtgaaggcctggttaacgccagagggaaactctgttgctgcacaggctcagagtggagcgctaatgaatcaaatgatggtgcagaccccagctatgcagtaccaacccgtcattccggatttaaaggctgactttaaccttactgtgaatccatctcctgaatttggaatgatggtggaggcggtagccgataaacgcattgaatgggcttttgatgatcagaatttccagattaaccagagcatccttggtcagtga

SEQ ID NO: 111494 - DNA, 609 bp, Enterobacter aerogenes
atggatttacaagcatgggataatactgtttcgatagtatctaacaccattacagcattgagtgttacaggtggtgttatttttggaggttctaaattaaaagatttcatcaacactaaaaataaagaaatagcgttttactcagcgctagcattatatgatgaaataatcgcctatagggggaaacttagtctaatcaggattagattaaattatgcacttgaaattattaatgaatcccttagaacgaacacacctctaacctcagcccaatatcttgaactgcaagagatgggagttggattatttgaaacatcattaatcattggtaacttatttattaaaacccataattttaatggtgtatttagtgatgattctttaaaagcggtaacgaatattgttactatatctcacgatataacaagccacctaaatagtttctttaatgaagtattagctgcaactaaaggaaaagtcataactaataatgaacgaaatcaactttatattcacagtaataagtttgaccactttacaaatctgtaccttaatgcctgcactgaaatacaaacaacaaaatttaatgatttttgcaatataaaatag

SEQ ID NO: 111495 - DNA, 1176 bp, Enterobacter aerogenes
atgcctttaaacgatatgcagattcgccgcgctaagcctgaagataaaccctatacgcttggggatgggcaaggcttgtcattgcttatagaacctaatggaagcaagagctggcggttccgctatcgctttgctggtaaacccaagatgatctcgcttggcgtttacccaacgatcacccttgctgatgcacgttcacgtcgtgatgaagctcgaaaacttgtggcagaaggaaagaaccctagcgaggttcgaaaagagcaaaaactggctctgcaaacagagtcagagaacgccttcgaaaagatagccagagagtggcatcaacttaaatctactaaatggtcggcaggatatgcatcagacatcatggaagcgtttaagaacgatatttttccttatgttggaacaaggcctgtgggagagattaaaccgctagaactgctgaacgtactgcgtaaaattgagaaacgtggtgcgttggagaaaatgcggaaagtgcgtcagcgttgctccgaagtgtttcgctacgcaatcgcaacaggcagggcggagtacaatcctgcggcggatctctccagcgctctcgaagtacaccaatccaatcatttcccgttcctaaaagctgatgagatacctgattttctgcgtgccttagagggttataccgggagtaagcttgtccagatagcgactaaattactgatgattacaggcgtgagaaccatagaattacgcgcggcattgtggcaagaatttgatctggataacgctatctgggaaattcctgctgaaaggatgaaaatgcgcaggccgcatcttgttccattatcgactcaagcgttagagttactccatgaacttaagactatgtcaggcaactatcgttatgtttttccaggacggaatgatcctaacaaacctatgagcgaagcgagcataaaccaggtcatcaagcgtatcggttatgctggacaggtgactggacatggatttaggcattcaatgtcaaccattttgcatgagcaaggctatgatacagtttggatagaaatgcaattggctcatgttgataaaaacagtatacgtgggacatataaccatgctcaatacatcgataaaagaagcataatgttacaatggtatgctgaatatatccttgggataaggaattag

SEQ ID NO: 111496 - DNA, 1995 bp, Enterobacter aerogenes
gtggctaaagaaagagtagttgttaacgataagggaattcgtaataggctgaaagcaattaagccatttaactcgatcgcagaatacatatggaatagctttgatgcgggtgcatcaaatgtaaatgtatcatatgaagtggattctatggaggcagtcatttctttatcgatcggcgatgatggtttaggtattaattatagtaagctgaacagtaagtttaagccattcctttcatctgaaaaaaggtcagatgacgaaagttcaataatgagtcttgttcatggtaaaaatggattgggacgattgacattttataaattttcacgtgttgcaatatggagaacaacatataatgagggaaatgaattatataattatgatataacagtttcagatgattcgttggatagtttcagcaacacggaacctgccacggcagatgtaaaaaaatgtggaacaacagtactttttagtcatatttacgaactgtcagaacattatattcaaggcgttttaattccttatttggaaaaagagttctcttggtttttatatttattcaaaaaacagaattattgtattaatattaatgatacgctattgaatgtatcgaatctcatcaaagatagtgagatttttagtctgaaggttgaaggttttaactttgaagtcgagtatgtccgttggtgtgcaaggctcaatcatcaggcatctaggatgtatttcacctcttcagatggatgttttaaatattcagtaacaacgcttcttaataataaatcagactcatttcatcacagtgtgtatatacagagtgcattctttgataattttgttgctaacaatagcaatcaagatgatatgttttgcaacagtattggttctgacatatataaaaaacttgttagtgagataaattcatttcttagactcaaaagaaaacccttgctactggagtttgctcaagaacttgtcgtagcctatgaagaaaaagggatttttccgtcatataatcaaagaaataagtgggatgcaatgaaggctgaagatctgagggaagcggtccagcagttatatcaaattgaacctaagttttttagcgggcttaacaagcctcagcaaaaaatattagttagaatgcttgctttgatcatcgatggtggtgatgttgatagcttctttgatatagtcgatggtgtaataagtctttcttccgatgaaaaagataaatttgcagagcaattaaaagtaacacaattgtcatctattttaagaacgattgaattaattacagatagatataaatccgttcaagagtttaaaaagttagtctttgacccagaaatgtatgctggtgaagttccacatttgcaaaaaatgatggaaaagaactattggctattgggtgaacagtaccaggttgttactgcggaagagccagattttaatgaagctctcaaacgtcactcatatatactacggggtgagacaagtgatgagagagttgctcatgagtctgcaaaccgagagatggacctgttcatggtaaggcagcgatatgaaaacaaccatattgagcatgttgttgttgaattaaaacatcctgtcaacgttcgattaggtaaaaagcaaatagaccaaatatacgattattatcaggttataaaaagtatagatcggtttaatgcttctaatatgaaatggaagttttatctaattggaaataagttcgatagcaccaattatattgaagatcttattaaaaatttccagggtaaaggggattacggacttgcccataaaggggaatatgagatctatgttagaacgtggtccgaaatattctctgattttgaattaaagcataattatttagatgaaaaattaaatattgaaaaagaaagtttgcaagtagatatgtataaaaacgcagatgatatcgtcagtgaagttagaatctctgatggagagcctcaattttcaactccatga

SEQ ID NO: 111497 - DNA, 1413 bp, Enterobacter aerogenes
atgtcttttagtgatattaaaaaattaagcagagagagatttaactcttttgttgactggactcgaatgcctaacattgagttactttcaaaagaattagaatggtattgtggccctcaggaacacttgctcggagttgttttattagatttagaggataaagattatggtggtgttgttttagcaagggatttaagcaatagatttagatgtattgatgtatttgcgagtgaggaaaaattaaacactgctcgcgcaaaattaaaaaaattgatgcgaaaacacattaaaaatcgagttaagattttcccccaaggggacgaaacttatgaaccaatggacttattcacacctatagtcaaggaggaaaaacttcataagcatttctcattattcggtaagtatcttaattggtcaccagcaacaggcataattaaagaaatgatgaatcattttgatgatgttgatggtaattttgtcgaacaatttcaaaccacggcttttgatgcaagattatgggagttatacttatttgcctatctcaaagaagagcacttctggatggataggaaatatcatgcccctgactatatggtgacaaaatatggcaaaaccatatgcattgaagcagtaacagtcaatccctcaactaataatatagataaagaattagaacgtaatttcgaacctaaaaacccccaagagctgatggaaaagcttgaaaattacatgccaataaaatttgggagttcattatattcaaaattaacaaaaaaaaatcgatattgggatttagagcatgtaaaggggaatccgctcgtatttgccattgctgatttccatgaggcaaattcaatggtatggtctcatagcgcactttggcaatatttgtatgggatgcgatatgaacatatacaaactgaagatgggagttaccatattgctcctacgaaaattttgacacataaactcgacgcaaaagaaatcccatcgggttttttctatctggatgacgctgaaaatatatcagcaatacttagttccaatagtggcactatctcaaaattcaatagaatgggaaaattagcagggtttggcgatcctaatttaatgctttttagaagaggtttttgccatgaccatgatcccgaggcaatgcatcctgaattctttgcttttgctgtagagacaggaaaaacaactgaaagttgggctgaggggttaaatatgtaccataaccccaatgctaaacatcctgtagactatcgattattcccttctattgcacaccattttatggaggatggtgtaatcaaaagtatcataccagaattccatccgtattcgtctatcacctacaacatacttactcgcaaagataagaaaaaagaaaaattccatattgatgaataa

SEQ ID NO: 111498 - DNA, 552 bp, Enterobacter aerogenes
atgacggcccgggccactcctgcgcaggcgcttaccagttttcgaaacgcccgtattctgtgggccggacatagtgagagccgaaaagccgctgaacaacagatagaatctctcctcactgccacggaaaaaccagcagattatgcccgacagctcgggttactgcgggaacgactggatgtgctgaaatggcagattaactgcgctgcgcgtgagtgtatgtactcgcagcatctgctgatggaggcctgcacagaagacgctctcagcagttttatgcaggcgaatggagcagccctgacatctgcactggctccgtttcttaaggggcgtggaggggttgacgttgcgtcccgtatgttacgcagtgccctggttcgacagctggcaataacaccgcctgaaatcgccggggattatcgtgagattctggatgaatccggtgtaatgcctgaccccaagatggttcgtgactgccagggtacttacactccggcacaacatctgcgctttcagcaacgcctgaatgacattaacgatatgcaggagtga

SEQ ID NO: 111499 - DNA, 261 bp, Enterobacter aerogenes
atgcacaatatttctgtttctgcgccagctccggctgcgccattatttcctgtaccgaaccagcatgaacgatttttacgcctgcctgaggtaatgcacttgtgcgggttgtctcgctcgaccatttacgacctgatcagccgcgatgcgtttccgaagcagatcccgcttggcggtaaaaatgtcgcctgggcacagtctgaggtcagcgcatggatggcggaccgtatcagcgcccgtgggcggggatgtgatgcatga

SEQ ID NO: 111500 - DNA, 558 bp, Enterobacter aerogenes
atgatgatacctgaatacattaaatcccttttttctggcttgcttactgccgtcatttccaggtatagtttttccgctgtcgcaaaatcggcagccggaattggcgttccgtgtaacttattggcgacaactgacgcgccttgcgtctttttttacgtcgtagctcaggcacacccattttccgggctgtggtgtttgtgtatacaccgtggttcattcaagataatggcagtccgggcggggcagccttcgggctggccggtttccaataaggccggttacgccaaccccgttcgggctgccaccagtgaaattggcgtttccggtggtagcaataaccgctacttattggaggctgccatcatggctacaatcctcaccccgtcatacccgcaatatgtctttgtgtttgccgtaatccgccgtactgacactcaaccccgcatttgtatgcttcgtactgtagcctgcgatgagcgttccgcgcgtctttcgctggtccgtgattatgtgctctccctctctgcacgcctgcctgccggggaggtgacgctatga

SEQ ID NO: 111501 - DNA, 222 bp, Enterobacter aerogenes
atgaaccagtttgagatctcctacgacgatgttgtaaagctgaaacatttacgcaatgtgggtgagtatgtaactggcatggcagccctgcaggactgttatgaaaagccagcaggtgcccagtgcgaacaactggtttccctcatctatctgatgacagagcaactggatggagtggtgcaacgctgccatgacgacctgatgaatgcggaggtggcctga

SEQ ID NO: 111502 - DNA, 324 bp, Enterobacter aerogenes
atgaaatgcagtgaatctcatctggcacttcgtgccgctctgtatcgccgtgccgttgcctgtgcctggctggctctcagcaatcatcaggaacgttattccggcctgacgctcgctgaacttgaagatgccatagcccgcgagctggaagggttctatctgcgccagcatgggcagcaaagagggctggaaattgcctgcgcgttgctttcggatctgatggagtcggggccgcttaaagcctgtccggttctctcactgctcggaatgacggtcatggatgaactttgttcccgtcacctcaacaaaccagcgctgcactaa

SEQ ID NO: 111503 - DNA, 963 bp, Enterobacter aerogenes
atgaaggtacccgttcatctcaatgcgctacgtgcttttgaagccagcgcgcggcatcagagcttttcgcttgcggcagaagagttaaatgtcaccccggcggctgtgggtcagctggtacgctcccttgaagaagttgttggatttccactgtttcatcgcagcaataaccggcgagcggcccttctgctgacagaacccgcgcaacgggcgttaccggatattcgcgccgggtttcagaacctcaatctgggtatgacgctgcttcgcgaaggggccaccaacggtattcttaacgtcactatcagtcctgcttttgccgccaagtggttgctgccccgtatagaagatttccagcaacgctggccggatatcgatgtgcgtctggaaaccagcctgaagttgctggattttaccgcgcagggtatggacgtcggtattcgctacggtctgggacactgggaaggattgcaggcagagctattgatgtcggaagaggttttcccggtttgtgccccctctttgatggcagtaaacccggcgattaactgcctgactggcgtcacggagcaaacgcttattcacgatctgtcgatggagcagcataaagacttcattacctgggataggtggttacgccgtttcaacgttcaggctatcgcccgtaaaccaggcctgcggatcaacagctccgctgcggtgctacaggccgccgttgagggccatggtatagcactggcgcgcagcattatggtcgatgaggatctcaaaagcggacgtctggtccggttgtgcccggaggtttcactcgccagcccgctagcctattaccttgtgcatcggcctggttgcgacagcctgccgaagatcgcctatttccgtgaatggatgattgagcaagctcaggcatttaataatgcggtaaatcacggcaatctctccaggaaaatcgaaccactgtaa

SEQ ID NO: 111504 - DNA, 1263 bp, Enterobacter aerogenes
atggcccgaatacttggcggtattgccgtctcacatacgccgacgattggcttcgcggttgatcaccacaaacaacaggatccagcatggtcccctattttccaaagctttgagccgcttcagcgctggcttgatgagaaaaagcccgacgcactggtttatatctttaacgatcatgtcaccgcatttttctttgatcactattccgcgtttactctgggaatcgataaagagtatggcgtagcagacgaaggcggcggcccgcgcgatctgccgccggtaaaaggcgatgcggcactctcacggcacattggtgcgagcctgatggccgacgagtttgatatgtcgttctttatgaataaaaaactggaccacggattgttttcccccctgtcggcacttctgccctggcagcaagaagagggatggccaacccgcgtgatcccgctgcagatcggcgtactgcaattccctgtgccgagcgctaagcgatgctataagctgggccaggcattacgtcgcgccatcgaaagctatccggaagatattgacgtggcgattgttgccaccggcgggctgtcgcatcaggtacacggggaacgttgtggattcaataataccgactgggatgcacaatttgtcgacatgcttgttaacgacccggaaaaactgaccgaaatgaccatcagtgaatatgcgacgctgggggggatggaaggttcagaggttattatgtggctggtgatgcgtggcgccctttcggccaatgtcactgaaacctggcgtgattactacctgccctctatgaccggcattgcgacgcttattctggaaaataacgcccgcactccccctgtggacaccctgaaccgccaccgccagcatatcgcgcagcaactgacgggtgttgataacctgccgggaacgtatccctttacgcatgagcgaagcctgaatggcctgcggctaaacggcttcctgcataaactcacgcaacctgcatggcgcgagcgcttcctgagcacgccgcaggcgctgtatgaggaggccgagctgagccaggaggaacaacgcttgctgaccgaacgtgactggcgcggtttgatccagtacggcgcgagttttttcctgctggagaaaatgggcgcggtggttggcgtatcgaatctgcacatttacgccgccatgcgcggtcaaacgctggaggagtttcaaaaaacgcgaaaccagcaggtcacctattctgtcgcgggtacccgttag

SEQ ID NO: 111505 - DNA, 1191 bp, Enterobacter aerogenes
atgcagctacgctttttctgtcaggtggctttacgggggagtgtttcgcgtgctgccgatgatttatttcgtacgcagtccgccattacgcgtgcaatacgcgatctggaagcctcgctgaacgtcattcttttcgagcggcactatagcggtatggtgcttacagagtacggcaagtgtatattaccgcgcgccaggcgggcggtagaggatttgcaggccgtgcccgccctgatgcaaaagttgagggtgcgcaccagcgcgtctaccgcactgccggatgcaggctggctatttcatacccgtcggctggaaatttttattcaactgtaccatgtcaatcatacccagaccgtcgctactcagctcggggtgacgcaaccggcaatcagcgcagcacttaaaattctggagaaaggcgcagacgcggcgctgtttcgccgaactccggaaggggttcgcccgacaactgcggctgacatgctttatccccacatcagtcggtcacttaacgaactggataatatctggagcgatctcgccgcccggcgtggcgtgctggagggaagcgtgcgtataggtgcgctgccgctcagccgaacgcaactgctacccggcgcgatcgccagtttcctggcgcgccatccgaacatcacaataatgacgaacgagagcccatatgagtccctggtgtcggacatgcgcgcgggcaatattgattttattattggcgccctgcgtcagaatgaggatctccccgacctgacatgcgaagcgctctttgaagaagatatgctgatcctggcgcgtaatgaccatccattgctgcacgatcctgatccctggagcaagctggcgcaggcacagtgggtgctacctcgctctaatgccccagcgcggcatttgcttgacaatgcatttcttttatcagggctgcctttgccgcaaccttgtgtagaaaccggtgatgcggcgatggttcgtggcctgctgcttcactccgacatgctggcggcggtatcaacaagccaaatgcgctatgaaattgagaacgggctgctcaccattttacctgttcgcctgcccgatacgacacgccgtatcgggctgaccttcagggaggggagcctaccgtcacccgctacgcaagccttgctcacttttattcatagccacgtggcgaaaggctaa

SEQ ID NO: 111506 - DNA, 741 bp, Enterobacter aerogenes
atgtcccaaccgattcgtgaaaaaagtgcccttgtcgtcagtgcccactccgctgatttcgtctggcgtgcaggtggtgctatagccctgcatgttgagcagggctatcaggtgcatatcgtatgcctgtcgttcggcgagcgaggagagtccgctaaactgtggcgcaaaggcaatatgactgaggaaacggtaaaacatcatcgccgggaagaagcccaggctgccgccgacattctcggagccagcgtggagttttttgatattggcgactatccgctgcgtgccgacaaagagacactgttccgcctggcggatgtttatcgtcgcgtgcagccgcattttgtcctgacccattccatgcaggatccctataactacgatcatccgatggcgtcgaacctggcgcaggaagctcgcatcatcgcccaggcagaaggataccgtcctggtgaacctgttgtgcaggcaccgccagtctactgctttgaaccacatcaacctgagcagtgcagctggaagccggacgtcctgctggacattacacgcgtctgggagaaaaagtatcaggcaatccagtgcatgcagggtcaggagcatttgtgggaatattatacccgcgtggcgcttcagcggggggtgcaggctaaacgcaatattggcatcaccgctgcgcgagacatcgtgcatgccgaaggttttcagagcatcttccctcgcgtgacggagaaccttgcatga

SEQ ID NO: 111507 - DNA, 714 bp, Enterobacter aerogenes
atgaatctccttaatcgtaaaggcattgtcgtccgctcccttccccgccacgacaatatcgcccttcgtcagcttactgcggcgggggtagccacacttcatgaagctttcgaccgacaggggcttatggcgccgcacatcaggcccattcaacagggcatatgccgcgccggaaacgcggtcacagtgctggtcacgcccggcgataactggatgttccacgttgccgtcgagcagtgccgtccgggcgacatactcgtggtggcgcccacctccccctgcggggatggcttttttggcgatctgctggccacgtcgttacagtcgcgcggcgtcgtggggctagtgggtgatatcggtatccgtgattcacataccctccgcgatatgggctttgccgtctggtcccggcaggtttacgcccagggcacggtgaaagagacgttgggctcggttaacgtcccgattatctgtgctggccagttggtcacgccaggagatgtggttgtggctgatgacgacggcgttgtggttatcccacactccgttgtccccgaggtgctggcaaaagccgaaacccgaatggcgaacgaagaggcgaaacgagagcgtatgggaagcggcgaactggggctggatatctacgcgatgcgcccgcgtctcgctgagaaagggctgcgttattacgatagcgcggaagatgtggagagttaa

SEQ ID NO: 111508 - DNA, 1083 bp, Enterobacter aerogenes
atggcacaacgcagaataccctgcctgttgatgcgcggcggcacctctaaggcggcctgcttcctcgcggacgatttacccgcggatcccgcaagtcgtgacgcggtgctgctggcgacgatgggctcaccggatacgcgtcaaatcgacggcattggcggagccgatccgctcacaagcaaggtggcaatcattcgccgctccgctcggccggatgcagatgtcgattacctttttgcccaggtgaacgtcgatcgtgccgtggtcgattacggtcagaactgcgggaacattcttgcggccgtcgggccttttgccattgaacgcggactggttgactgtgttgccccccttacccgggtgcgcatctatatgcagaataccggccagcttgcggttgcagaggtgccctgtggcaacgacggcgtggagtatgcggggaacacccgcattgacggcgtgcccggtacggccagcaaaattgtgctcaatttccttgatgtggcgggctcaagctgtggcgcgctgcttcccaccgggcagtcacgcgatcgcatcgacggcgttgatgtgacctgtatcgataacggtatgcctgtggtccttatccgcgccagcgatctggggcgcacgggctatgaaacccgcgaacagctcgatgccgatgatgaattaaaacagcggctggagtcgattagactacaggccgggctacgcatgaacctgggcgacgtggcggagcgcacggttcctaaaatgacgctggttgccagtccccgcgccgggggggccatcagcagtcgaacctttattccgcaccgatgccatgcctcaattggcgtgtttggcgcggtgagcgtcgccagcgcctgtcttattcccggctcggtggcgcaagcgctggcaagtcttgagcgtgcgccagagttaagcgttgaacacccaaccggtgaattcagcgtcgcgctccggcttgatgataatgggcagttggctggctgcggtctgctgcgtacggcgcgactactgttcgcgggcgacgtttgcattccggccggcgtgtggccgcgtaaggagctgtga

SEQ ID NO: 111509 - DNA, 876 bp, Enterobacter aerogenes
atgacgacaattacgtttataggctacggtgaagcaggttgcattcttgcggatgcactggcaaaagtgaacccagtcaccgtctgggattgcaagctgaaaggtcctgagcgagatgcgatgataacgaaggcgcatcggggaggcgtgcgggcggccatctccctggctgacgcgttgacaggtgccgaactcatattttccaccgtcaccgccggatccgccctggatgtcgccgcacaagctgcaccgctgatgaccgacacgcagtattttcttgaccttaactccgtcgccccgcagaccaagcgtcaggctgccgaatgctttaagcccggcgcttatgtcgatgtcgcggtgatggcgccggtccccccaggggcactccgaacgccgctgttgacggggggaccacaggcagaagcaattgctgagttactcaccacgcttggatgtaacgcccgctatggcggtaaccacgttggcagcgtgtcggctatcaagatgtgccgcagcgtgatgatcaaagggctggaagcgcttactgccgaatgcctgttcgccgccggccattacggtgttgaggaacaggtgctggcatcgctccacgccagcttcccctcattgggctggaacgacgccctgcccgactacctgataagccgcgtagctgagcatggcatccggcgcagcgaagagatggaagaagtggtcaaaacccttcgcgatgcagcggaaaatagtgtgatgagtcaggcgacggcgatagcccaacgccacctgcccgatcgtatggccgcgcgaggaattacctatgcgcagcttgagccgtttaactggaaagcgctgacagcgttgcttaacgaccacatttaa

SEQ ID NO: 111510 - DNA, 402 bp, Enterobacter aerogenes
atgaaaactttactccatgcaataaagataaagacagatccagaacgcgtatggcatgcattgaccgatatcgccgaaatggctgcctggcatgaaggtactgtgcaaggtgcaatcgcagttggcaaatcgctcattctcaatccaaaggacgatctacgttttgtttgggaaacggagcaacttgtatctccttcactaattgcacagatttgtaccgaaggccccgggcgttcggtaggaaaacgacttcgatttattcttagcccgcttagcgatggcaggacgttagtcgagctcgctgatggccaatgggaagacagcgatccgcatttgccgctctgcaacacttactggggcgcggtgttataccgcctgaaggtctatatcgagcagcattaa

SEQ ID NO: 111511 - DNA, 1545 bp, Enterobacter aerogenes
atgccgcagaaaaaacctacaacctggcaggaagtgaaaccaggcgcaacgcaccctcaaggatgggatgttcctcccataaatgatttacgttccgccattgagttacttaaaaaacaccctgaacagtatatcgaaaccgacagggaaacggatcctatcgccgaactggcgggtgtgtatcgttatgttggtgctggcggtaccgtaactcgccccacgcgtaaggggccagcaatgatgtttaataacataaagggatttccggggatgcgggtgctcgttggcttgctcgctagccgggatcgcgtcagcatgatgctcggggcaccagtacgtgaattggggatacagatggcggaggcaagacgcaatgtaactccgccagttattgttaagggacaacaggcaccctgtcaggaagttatttatcgtgcggaggatgaaaattttgatcttcggacactattgcccgcaccgaccaatacccgcgaagatgcaggtccttatttttgtctcggattagtattgggtagcgatccagatgaccgtgataatgttgacgtgactatccaccgtttgtgcgttcagggaaaagatgaactgtctatcttctttgcgccgggacgacatattgatgctttcaggcagaaagcagaagctgcaggtaagccccttccggtgtcgattaacatggggttggacccagcaattcccattggagcagaatttgaagctccgactacaccgtttggctttgatgaactctgtgttgcaggtggtctacgtggtagaccgatagagcttgttgaatgcgttagcgtgcgccagcgcgccattgcaagagcagagattgttattgagggagaaatacttccaggtgtcagagttgcggaagatcaacacacccatacggggaaagcaatgccggagttcccgggttatacaggtgatgccaacccatcattaccagtgattaaagtcaaagctatcaccacacggcgcaaccctatacttcagactttagtggggccgggtgaagagcacgttagtctggcaggtatcccgacagaagcaagcatttatatggaatgcgaggatgccctaccgggcctgatcaaaaatgtctatgctcacagcgcgggtggcggtaaatttctggcaattttacaagtggctaaacgtaatagtggtgacgacgggatgaccaggcaggctgcacttatcgctttggccgtatatcgcgaattgaagaatgtctttttagtcgatgaggatgtcgatctttttgacagcgatgatgtgctatgggctatgcagacacgtttttctggcgatcttgatacaatcttcatcccaggtatcgcgggacacgtactggatccttcccagacgccattatacgatcccaggataaccgccaaaggaacaacgactaaaaccgtctatgactgtacagttccattccatcttagggagcattttgttcgcgcgcagtttaaggagcttgacccgacgttatgggtacctgatttgtataaatga

SEQ ID NO: 111512 - DNA, 930 bp, Enterobacter aerogenes
atgaaaaattacctgttaaccttgagcatcgctctctgtatgtctaatgtccaatcagtatacgctaattttccgaacgcaatcccccaaggtggtcctactgttaaagagaaaaatttacgccccaactattcggatgtctcgtacggcaacagctcggcaacgcaaactttcgacctgtatttaccagaaggaaatagaggatctttcccgatagtaatctatgcacatcctggggggtttaaatttggagacaaaacaatggcaccatatagtattgtgcatgctcttttggctaaaggatatgccttcgcgagtgtaaattacagattgtcggttgaaagcaaattccctactgcagtacaagacttttttaaagcatctgagtttattacggatcatgcaaatcaatataaaatagatatcaataagatatatttttttggtgagtctgctgggggtaatattgttgcattagcaggtttagctgcgaacagtcctctcttcaataaggggaagattaaaccaggaaaatatattttccctaagggtgttataacgttatatcctcctgttgatttttctaaaattgatgagttcaagcacgctcagggctgtaatagtagtgaggcacagccagaactgacgctggaagaacaatatattggtggcaggttagctgataatcttgataagattcgatcctcgaatcctgtaacttatattacaaattcagcccctgcatttttcatcgaaaatggagaccaagattgtaatgttggatctgaacagtcaaagctactatttgatgcattgaataaaataaatgcaaaagtttactactatgaacttgaaggcgccgggcatggcggtaagcaatttgaaaccacagaaaatattagtaaaatcattgactttattgagaaataa

SEQ ID NO: 111513 - DNA, 255 bp, Enterobacter aerogenes
atgagtactctaattgaggtggttgtcgatggtctctggcgtgaaggcgaaaataatctggcagtcaggctgctgacgactgacggcgacccattacccgcatggcagcccggcgcccatattgatctgcatctggcgaacggcgtgacccgtcagtactcactcactcaccgggagccaccgcaggctggaacgttatctgatttgcgtggcgcgatcggcagagtcgcgcggcggttcgcgctacatccatga

SEQ ID NO: 111514 - DNA, 567 bp, Enterobacter aerogenes
gtgactccgactcggacagcgattctgattctgacagcgactccgattctgacagcgactccgactcggacagcgactcggattccgacagtgattcggactctgacagcgactccgactcggacagcgattcggattccgacagtgactccgactcggacagcgattcggattccgacagtgactccgattccgacagcgattccgattccgacagtgattccgactccgacagtgactccgactctgacagcgactcggattccgacagcgactccgactcggacagcgactcggattctgacagtgactcggattcggacagcgattctgactccgacagcgactcggactctgacagtgactccgactccgacagcgattccgattcggacagtgactcggattcggacagcgactcggattcggacagtgattcggactctgacagtgactcggattcggacagcgactccgattcggacagcgattcggattctgacagcgactcagattccgaaccgcaggcaaatgatgatacgcatacggcagctatcgataccgtag

SEQ ID NO: 111515 - DNA, 291 bp, Enterobacter aerogenes
atgcgcagtaaccttcactgggccctgctgcacggagggctggcggcggcgacgttgtttatcgctatcgcttcgctatgcctggggcagtaccacctcagcctgaatgaggtctttcatgagcttacgcatggcgcgcccgatagcggcatcgccgggcagatagtctggtcagtcaggcttcccagggtagcgatggcgctgctggccggcggctcgctggggctatgcggcgcgactttacaaggcgtattccataacccgctggtcgaccccatatcatcggggtaa

SEQ ID NO: 111516 - DNA, 513 bp, Enterobacter aerogenes
gtggctaagaaaagaaatataagaaaagcaaaagaaactctgctgtttgtaggggaagggttttgcgaacgagcttttttgtttcacgtcaatgggttgtattctaagggggcaataaaaaccaagatcataactgccaagggcaaggggccagagcatgtgattaatcatgcgatttcatgtaaaaaaatggataattatgatcgggtggcagttttaattgatttggatttgatttgttcacctgcagtacttaaagcagccaaagctaaaggaataagagttattggctcaatgccatgtttggaaggatttttattggatgttttaggagtagcaaaagactctacaaacgaagggtgcaaaaaaatttttaaaccactattagctaacgatccaactgatagggatagttatacagggcttttcaaaaaatcagttttagacaaggcaagaaaaacacacacaaacttagatgagattattaggatttttgaggggaatttaaagtga

SEQ ID NO: 111517 - DNA, 1086 bp, Enterobacter aerogenes
atgggttcaaatggttctggtaaatccaacatgctcaagccgttggctttcttacgctggttttgctctgattcttttaccaaaatggaaagtagtagtctattgcctttctatccccatcattcaagtgcaactgaactgtctgagattgaaatttgtttcattgactcagatgataaagaccaacattgggaatacaagtattacgttcgtttaagccgggaacgggtttacaatgaagaattgaaattgaaaacaagtcggcaatacacaacgctgtttaaacgtgaatttgatattgataaagatgcgtacatatgcaaatcacataagttaatgtcagacgaaaatgcgtttccagtatcggaaatgaaatctatacctatgaattcgtctacaattgcatatatgcatcgaaaggatagtattatagcaagtctcattttggataatttaacgtcaatagataataatctaaatgtttttgggaaaatcaattttaattattctaatgtaatgagggcaacagagttttactctactgaaaaggatatatttgacatggctgttaagtatctgaaaagaatggatcttggtcttgataatattgtgttaaaagaacaagaggtagtagagaaagaaacaggagaacgaaaaaaggaatttatgccatacggagttcacaagtgtgatggcaaaagatttagagtgccattttatatggagtcaagtggtacacaggcatgctattatttcattctaacattgattattgcaatacgtaatggtggcgttgctgttatagacgagctggatagcgacttacatcctaatatggttgtcgagcttctaagcatgtttgaaaatgaagcgataaatacaagaaatgctcaattgattttcagttgtcattcacccgaagttctcaaaaatcttaaaaaacaccatgtttacttggtggagaaagaggatagtaaaagtgaatgttggcgattggatgaggtgaagggacttcgtagtcaagataatctctatagtaaatatataacaggcgccttgggtggtgtcccagatatttgtctgtga

SEQ ID NO: 111518 - DNA, 639 bp, Enterobacter aerogenes
atggctgagtatttcccggcagtttttgaaggcgaggcttttaattgtccacattgcggggtttatgctcggcaattttggcgtacattattcggtggtagtcagcgtctggggacaaaggatacacccttcacgatgtcatcatgttcacattgtggtgatagtgcctattggtgccaagaaaaaatgctagtccctgcggctggtaatgttgaattacccaatccagacatgccggatgattgtaagtctgactacatggaagccagaagcataatcaatctgtctcctaaaggtgccgctgcgctactccgcttgtgcttacagaaactcatgcgccatctcggtgaaccggggaacaacattaacgcagacattaagtctctcgttgagaaaggtcttcctccccgtatccaacaagctgctgacatttgtcgtatcgttggtaatcaggccgtgcaccccggagagattagccttgatgatgaccctcagttaacacatggtctctttaagttattgaatatcattgttgatgaccgcatcaccagacctaaagaaatcgaagcgatgttccaaagtatgcctgaaggtccacgtcaaggcatcgaaaagcgggacggcaaggctagcggatag

SEQ ID NO: 111519 - DNA, 876 bp, Enterobacter aerogenes
atggctcgcccttccatgaaagccttagtcgatttactaagtgagtcgcccacctcaccaccacccgaaaaatggcaggatctggaatcgcatgttcaagacgtatatcagcaactactcgatattcaaggtaacaagaccatggtagctcgtaatgtgcagatttcaggtagggaaggaagtagctatcagatagacgtttactacgaatttgagatggcaggtatacgtcatcgcgttgctgtggagtgcaagaaccgctcccgcccattggagcgagatagcgtattagcctttcattcaaagatacatcaatgctgcctgagtcatggaattatcgtttccgcaggtggtttccagacaggagcgcgtgagttcgctgaaaaaaataacgttacactcatggattactcagagctgccttccattggcaatcttctttctcgaagactggcaaatgtagtcattcccgatgaggatacgattggtcagcctttctggactatttttgatactgaggaatactcacctttcgggcatgtcgacgcaaagaacgaaataacgacggcctttttgttcctttccaaagttcatgcccagcggtttctaaaggaccagaacttaggctccaaatggcaggttaggggaatggctcaaagacatctctcctgctacatcctaacctgtgatgcgtttaacgcaagatatgtcattgctcggcctgggtatgctgctggcgtgcccaaaaatcagttcttgttcgatgaaatcctgagaaaagacttgatcaacgattttcacgagggcattgatttgccaaaggagccaaatatcgcgcccggataccgttcaatattcagaaaaaaaacagtctga

SEQ ID NO: 111520 - DNA, 1266 bp, Enterobacter aerogenes
atgggacaatcacccttaagttcagatgttaatgaacaaggagagggtattgtctttttccaagggaaggctgagtttggaaaattgtatccaacccccagaaaatattgcacaaaaccaacaaaaattgcgtcagctggagatattttgctatcaataagggcgccggttggaccaacgaacattgccactgaaacaacggcgattggtcgagggctggcagccatcagtgctcacagtggtttaacagaccctaaatatcttctttactattttagatgtatagagccgtggttaagtacacaaggcacggggtctactttcaaagctatttcaggtcagtttattaaggaattaaaagccccattaccgtcttttgccgaacaaaaaatcattgccgaaaaactcgatacgctgctggcgcaggtagacagcaccaaagcacgtcttgagcaaatcccacaaatcctgaaacgttttcgtcaggcggttttggcagcagctgtaagtggagaattaactaagcacttaacacaaaccaagaaaaatgaagttactttagataagatagcaacaataatcgaccctcatcccagccataggacacccaaaattgatgatgccggcataccatatattggtataggagacattcaacctgatggtaaaattaactttacaagcgcgcgcaaagtttcagtggatgtattcatagagcatagggcgagatatactttaaacgaaggtgattttatctttggaaaaattgggactttaggtaaagcatgtgttttaccgattggaatcaaatatacattatcagcaaatgttatcctcattcagccaattaaagacaaagtatcatcagattatttgagatattttctgtcttcgccactaactatgcaggaaataacacagcaagctaactcaacatcccaagcagcgtttggtattaagaaaatgagagctttcaagtgtaaccttccctctctagtcgaacaacacgaaatcgtccgccgcgtcgaacaactcttcgcctacgccgacaccatcgaaaagcaggttaacaacgcactgacccgcgtcaacagcctcacccagtcgatcctggcaaaagctttccgcggcgagcttaccgcgcagtggcgtgcggaaaacccaagtcttatcagcggtgaaaacagcgccgccgcgctgctggaaaaaattaaggccgaacgcgctgccagcagcggtaaaaaagccgcgcgtaaaaaagcgtga

SEQ ID NO: 111521 - DNA, 6321 bp, Enterobacter aerogenes
atgactacacgctatttttcgtcacttattgaacaatcgttgtctcgttcaactgaagcaacactgagtatcatgggggtcacaaacccgcagttgcgtgagcacctcgcgcaacaaatgggcgccgattgtgggaaatcaggctcattccttgcttctcccgttttccaacaaatgtttggctggaaagcgtcaaacaaaacgatgcgtagcctgacggaaggcaaggcattgctcagtaaagctgtggttgattcgctggatgatcagaacaatggacgctatcgttttggtgctgactggaaaccctttactcaccagctagccagttggaaggctctgctggaaaaaaaacattctgtggtagtgaccagcggtacgggttcaggcaaaaccgaatgttttatggtgccggtgctggaagacctctaccgggaattacatgaaaatggcaacaacccacttatcggcgtcagggcccttttcctctatccacttaacgccttaattaattcgcaacgtgagcgcctggacgcctggacacgtggttttggttccggaatccgatactgcctctacaacggaaataccgaaaatctacacgccgcagtgaaaagcgaacaggtaaaaagaccgaatgaagtactctcgcgcgaaaaaatgcgtgaagaacccgctccaattctagtgaccaacggcacaatgctggaatatatgatggtccgccagatcgacgctccaattatccagcaatctaaatcacaaaaatcattacgctggatcgtattggatgaagcgcatacctatgtcggctcgcaggccgctgaactggcgctgcagttacgccgcgtgatgacggcctttggtgtgactccagatgatgttcgctttgtagcaacctctgcaaccattgccggaagcgatgccgaaaagcaattaaaaaaattcctctctgaattatccggtataccgcaagagcgcattgacgtactggacggaagccgggttattccggaactggaaccatgcaaacacgtttttattccgttagaagaaattgagcaaatccctgatacagacatgaagggcgtaagcccagagcgctttgatgcacttacgcattcacctgaagcgcattacttgcgtgaaatgttagttactcaatcgaatccaatgaagttggatgatatgacgcagcggttgaactcgctaacaaaacagcattatagccaacaggatgtgttgcgctggattgacgtctgctctggcacacaacccaatactaaggatcccgcatttcttaaggtcagggcgcacatattccaacgcaatacccagggggtgtgggcctgtgttgataaagaatgcagattaaagcacggtaccccgctggaaaagggttggccttttggttatgtgtatgtgaacaaacgccaaaattgcgattgtggaagcccggtttacgagctggcattctgtaatgaatgtaatgagccacatcttctggcgcgggacaaaaagggaaaacttgtccaatgggaaaataaaggcggtgatgagttctctttgcaagatgatgtgcatattgaaaatgatgccgcagaagaaaaagttgataaagagagtcgttttcagcccccactcattatcgccgcagagaagaccagcgcggcgggttatacccaacagcgtctggaccgtcagacgcgtcgtattggtgttattaacaatgacagcatcccgctagttattaacgacattgaacaagtatgtagtgccagtagctgtggctacagaggcacaagcggaaaacaaccgttccgccgtgccttattaggtgggccattttacgtcaccaatattgtgccaaccgttctggaatattgtcaggattttattagtgaagaaggaaaagagggcgtcggacctgattcgttaccaggtcgaggccgtcgacttattacctttaccgacagccggcaaggaacggcccgcatggctgtgcgcatgcagcaagaagctgagcgcagccgcttacgcggtagtgtggtggaaatcctgagctggcatcaacgaacacagacttctgcaacaccgaatgccaatgccgatctggaaaagttagcgacgagggcaaaacaggcccgcaatgaggcggcagagtatagaagctggggaatgccggaacaagcaaaactggctgaagcgcaagccgaacagcttgaacaggctattcaggccgcgactggtggcaaagctgcgaccattctgttttcgcggacctggattgaaatggttaatgaacttaaagaaaaagccgatattcgcggccctattctgcaatataaccactatctgaagcctgaaattttcaatgaaaatggcgggccgctgaagctttctgaaatgttgttattccgggagtttatgcgccgacccaaacgaactaacagcctggaaacgcagggattagttcaggttggttatcaggggctggagaaggtccataagatgccggtgcattggcaagagaaagggctgactctggatgactggaaggattttcttaaggttacactggatctgtacgtacgtgaaagcaacttcacacaactggacgatgagttgaaaaactggattggtagccgtttttcatcgaaattcgtccgtaacccggacacaaaagatcccgaagataatcagaacagacgctggccacaaattcgtaatggcaatatatcccatcgtttagtgaagttattaatgcttggcgcaggattcaaaaccgttaatacggcgacgatggatattatcaatacgtggctgaaagaagcgtggacccaacttaccgggccacttgcagtgctgaaacctgatggtaaccgtttctatctgccaaaagagcacatgactttttctttaatcatagatgcctggatttgtccggtaaccaataagattctggatacagcctttaaaggcttaaccccttatctgcccacccacatttcgtttgaacaccttaccaagacacaatatgacgcttttgtcgcgcaaaaggtcaccatgccggaaatctggaagctggatcgttcgcaagaagactacgctccgggtctggcgaaggtacgtgactgggttagtaaagagccactaatcgcacaattacgttcggaaaacgtctggacggatattaacgatcgtgtcgtggaaggcggattttactaccgcacagccgagcactctgctcagcaatcgtcagaacgtttgcaaagctacgaaaagatgttcaaaaacggacagcttaatgttctcaactgttccaccaccatggaaatgggggttgatatcggtggcattaccgccgtggtgatgaacaacgtaccgccacatccggcaaactatttacagcgtgccgggcgagccgggcgtagtcaggaatcacgtgcgatttcttatactctgtgcaaaggaaacccgcacgaccagcaggtttttgccaacccactctggccgtttgagaccatgatccccgcgccaatggtagcaatgaattccgcccggttggtgcaacgccacgtcaatgcgttattactgtccgactttttatgtcacgtcattggcgaaacggataaagaaaaaaccagtcttgatagcctctggtttttcggtgaggacgacggggagtcaaaatgtgaacgctttaaagtctggctggaacgcccggctcttgatatcgacgcggcactggaacggctggtaataggcacagcattacatggcgccagaccagacttgttgcgggataaaacgattaatgcgattactttcctgcaacaacggtggctttccgtctatcgcgaccttgtggcccaggagcgcgagtcgcagccacaaacaccttatcgcaagcgcatagaactggagaaaaaacggcactgtggcgagtatttgctgcgtgacctggcggccaggactttcctgccgggatacggcttcccgacagatgtggtgacgtttgataacttcactatggaagactatatccgtgaaaaatcacagaaaagccgggataaaaaagatcgcgaagataatgtgtcacgttataaaggacttccctcgcgtaacctgggcgttgccatccgtgaatatgcaccaggtgcagagatcatactggatggccgggtcttccgttctgctggcgtctcactgcactggcacaatattaatgccgataccaatgaagcccagcgtctggattgcgcctggcgctgtcacaaatgcgggaccataggttatgaagaggggttgagcagttccgggacgctattttgcaccaacagcgcctgtggcgaaaaaatcatccaggataatcgtcgccaggtgctgcagccagccgggtttgtaactgatgcgcatgcgccggtgacgaacaatattgaaaccatgaaatttatcccggttgtccctgcctgggtatttgttaaagcagaacccgtaccgctgcctaacccgataatggggtatatggcatctggcgctgatgggcatgttttccagcaaagccttggagaaagtgggcatggttacgcactttgcctgagctgcggtcgtgcagagtcgatgttgaacgcaaacgatgcgccgaaaagtatggaagcccactacccgccgcgtccgggaaaagcggatcgcgacagtcagaatcaacgtctaatttgccccggttcgacggcgctcatgaagaacgtcacactgggggcattggcgcgaacggatgtctttgaaatggttctacgcaagccgcaaagcggtgagtatctgccggataacacggaagaaggtcggattgttgccatgactctggcggttgccctacgtcaggcgctggccggggttttgggtatctccgcggcagaactgggctacgccgtgcgaccggtcagactggaagacggacaatcggtattagccgttcaactttacgatgtgattagcggtggtgcgggttttgcatccagtgcaccgatgcacattgaggccattctgcggggaatggtgaagcagttgggttgccaccactgcgatacggcatgcagtgaatgcctcctcgactcccagactcgccacgatcatgatttgctggatcgtaaagcggcacaggcatggctcggtgatgacttcagttactacattggcttaccggatgaagagacattctcgctaccggatgctcgctactgcccgggagccattggcgatacccttcgtcgggcgattaacgagggagctgaaaaactcacactgtggatgaatgggccactcaatgaatgggatctttatgcccgtcaattccgggcggctattcagaactaccggattaaagacaatgttgcggtcgaccttgtcattcctgctggcgtcgatgatccggagctgttgcatgaactttcgcagtttactgctttgggcgtgcgtttgtgtcatagcgaacaggctctggaattgccgattgttgcgcaaatcacctttgccgattgcctaatgacgctggcttcacgcagccagcaggcaactatcccggggccgggctggcacctgaatgacgaactggtcgttcgcagcctcggctataaaacgataaaactgaacgagtttgttctgacgggtaaagcaacgaacactgttgagcgtgtcaaagacatagagattcataaacagttaaatggtccactttcgcagttcggacaacgcttctgggacgcgctgtttaacagccatgaagaagcacagtcgctgatgaaaaaccaacgaatcaccagcgttcactataccgatcgctatctgcaaaacccggttgcgctggcgctgctgggggcgatactgaaaccgctaaaaacaaagctgaccgatgacgcggagcttgagcttgatactctgtttaagctcaaagatcgttcaggaaatcgcccctctcatgactggatgagcgaagcggattttcaggatttcgccgaccagtggtttactgcggcaatgggcagagcggtagaactgacggtgttcgattcgccacgtgatattccacatcatcgtaagctgacggtgacctttgaagatggtcagacgttaaaaatccgcttcgatcagggaatgggatactggcgtatcgacttcccgtatgcatggcgtaactttgactttactgacgatgtgacttatcagctagtaaaactggcgcaagcctgccaggagggcaaagtccttaatagcgaggaaagctgggcaacggatgtgctggtagaggtgatgacatcttaa

SEQ ID NO: 111522 - DNA, 2952 bp, Enterobacter aerogenes
atggaaggttactggaaccgcccaatccgattttacgaatcggaacgacgtaattttctcggaacattgttcagtgaggggggattaccattccgcttactgaaagaatcggatagccattttcagaatgtattctcccggattctcaatcaatatgggcaggcacaactggcaggattttccatactttctctagtaagaactgtcatagaaaaatcagccctgccaactgtttttagcgaagacacttctgtagaactcatcagccatatagcggaaaaactcagctcgctggttctaatgtacaacctgagcaatcataccgaacccgtgaagcagcttgataaagtgcatccaaaatggcgtgatgagttccctatgcctttggatgatgaaacaggtactcgctttcttaatgggttgctatgtactgcctccgtagaggctaaatcccacttacaaaaaaataagggttccggttgtcaattctattggtcggaaaaccatcccaatcaaatccaggcgataatttcgctgcctgatgaactcaccttcccaatcatcagcactccctcaacgacgcgatttgaacttgccatttatgaagatggtgaagaagtcacctgtctcggccccgcctatgcatccctggagaacgcccatgccaaagttcgcctgcgtaaaagtgagtcgagatttgtcagacgccagccagctgcgagcttaacgattgttgcacgaactggaggaatgattgttggcaccataaaacttgaagatagtgaaatcgccgttggcgaggtaccacttacttttgttgatgatgaggaacgctggttattgcaagggcaagcttcttgtactgtacgtaatagcaatgttcttattgccttacctcaagaaaaaaccactatttcagggtgtgaaggctctccaggtacagcgtcgttattaggactcagaacactgtccgtaaaaggacgccaagatataaccatttccggagatgaaacatacaggatccgcaccgggagggaacaatctaatcagagcggatttgatttttatggaaaacatgttacctggaattgccatcctgatgaaacattccttggtgtacctaaagttacggcgaaaaacctgaatgctgaagatatacaattcaaacgttacctgagtggcatatcgttagatgaatgtcaggtacaagagatgatgggtacgcaatatgtttctgtcagaaatactcacaatgaaactctactgcgtcgaaaaattgggatcttgccggcagattttaacattgaaataaagggtggtgagctagccaatgaaggttccattgttatctcaacgcaacatccctgcatgtctgtcttaaaagataaaacactagaggttgctcgcaaacgctcagcaggacaaacagaaatattacttaaagcagaaggaatacctcctgcgtttgtctctttgcagatttacccaaatttgggtgcagccccagtagagatgactctacctttccctgcaaaaggttgcctggcccttgatgcaaatggatgcactctggataaaaatattactctgcatgatttgctgggttcgagagcctttttatttggtaaaaatggcgatccgacacgtttttcactggaattacatttacgttccaaaagtgggttacaggcatggcatgaatggtgttataccgcgggggaacaccccgtcgaactcaatttatacagcctgagagagcatattgaaaacttactgtctcttgagacaggaattgaccaggttgttgagatgcaaatcaaaggcgcaggtgctgtaatgagctggcagattcgccgctataaatacagtttacgctatgattatgaaagagaacttctcgtcagccagtcaacccattatcgtaccgagcaaatgtcttcacctgtcatcatgttattgagtgagccggagagaaaaatcaccccattatcatcaagaatgagcgaaggtgtaccgacaggtgaatatgaactgagttcggttattaacaaaaatgggccgtggttagtcgtccccaaacagggtgaggaaatggcgtttcgcccctgcttcattcgtggggaaccgtcgttacctgtggatgaaagtagtattcgttcattgcagaaagcgacccagctttttaatccccagtctgaagttaataccattacactggtacttgaacagatggctaacgatcccgctcattccggctggcaatttatgcgttgcctgtacgaccaatttggttatctgccgctggcaacctttgaagtttggcgtgcgctagtacagcatccacgagcactggcgatgtcgctatttaaatttgagatgtcagctgagtatctgagccgcattgaaaatgagttccctattttatgggagttcttccccatcctcgaaatcaaaaccgcagccgatcgatttaaattgttcctgagccaaaagggtgcaccggaagaaacccagaatttactggtgaagagcttgtatcagcgattggggctcgttttcccgacatatgccgacgaaattgagagatggttaagttatggacaattccctccgcccattccagagttcttcattcgcgagtggtatcaggagcttttacgtgagcatagtgaagctcgctggccagagtacggcagcaagcggctgcatagctggatgacatcacaaaaaaatccagtgatcagcattaatcctgacgcagaataccgctattccgttgcctggttacccgtcttcgccgcagctgtagcaagcggcaatacctcttttgaagccgtatttgaccgtaaaccgggtgccgtatttttcctgagacaggtcagggacttcgattcccgctggtttaaggccatcttccagtgcagcctgttgcgttattttgctcaaaaataa

SEQ ID NO: 111523 - DNA, 300 bp, Enterobacter aerogenes
atgcctggcagtcatcaaaatcttatcggcgatccgctaaatagcgttgtgatcccagtggtttgtaggtctgatattctcaatatagtgatgaatctgagtagatccagggtcttctatctatctctctttgtcccgttacgtacagagcacatactcgtgaacgattaccatggcgaggttgaacgattgccaggctattggcgcgtctatctctggtaccaagcaaacaacctgatggatctgaaggtcagcaatgagcgagaagcggacgttcattcctggctaatagccatatag

SEQ ID NO: 111524 - DNA, 642 bp, Enterobacter aerogenes
atgactatttttttcgtcactaatagcgatagccaaaccgcagccaatcttgcggttgcaaagaagattgctgcaaacaccgatataaaattgtttggttgcgatgcattacgagataggcttcataatgagttatcgggagaaaagcgcgctattttctcgatgagccatggttcacgattggcaattattgatagtgatggcgttgatgcagttgtggagcatgacaggtatgtgttgagtggctacaaagtttatgcttgggcgtgtatgaccgctcaattcctgggcggtgcattggcgcaggaagatatttactggtggggttatgatgctgccataacggctcccgatgatcgagataaatatctcgatattttttctgaggtgatatcaactgctaagaacaacttcgagaatggtgttgatcattccagcattcaaaggattctagacttaataaaggacgcatgccacacagcagaaataaagttggaaagtgtaggtgcaactgatgatgaagatgcaatgtctctctattcctgctgtcatcaaatatgggctcgcctatgcatatggctgcctggggcacaacaacctatcaagcaccgagatgctcctccggcatacattgatatgtag

SEQ ID NO: 111525 - DNA, 807 bp, Enterobacter aerogenes
atgcaaaagtcattaatacttcctggaaacaggatgcctacagaaccttcacagctgactatatacgtagaaggcactacggatgcagcggttgttgaaaatatcttgtatgctctcaactctcaccttaccccaactattgtagtttgcaatggcaaacagcgtatagcaaaaaccattaaggacctgactaatgatggaaatgctaaatacatagcattgatagacgctgatgaacctagtgtatttgattctagggaagaggcgaagcgtcaacttggcaatccttctatccctgtgttttgtgcagtacctactatagaagcctggcttttcgcggatgataaaatcgctacttacctcgcaaggaacgaatcggcgatacgtaccatcgagcgtatgccattgccagagtcgattccctacccgaaacatcttgcaagtaaaattcttaaaatcaatggcctatcaaatgagtataaggtactgcgggacatggatattcatagggcggcagctagatctccttctttaaggaattttcttgctggtatatatgacgttttagagctgaaatcggacttacctgatcactccatgtcaaccacagtcagtcgtgacgttttctctacattgctacgtgaacttcctggggacgctgtagcttggcgaacgcttgctggcgagacttatagtgcagccgaattggccaagagcattggtgaggggacagaagcaggaaagcagtatataactgagttacttagagttgcgcgtgatcttacactacggaaggcaaagaaatga

SEQ ID NO: 111526 - DNA, 606 bp, Enterobacter aerogenes
atggagaaaattaagctaggacaacattgggactatgcctattataccttcatgaccggaacaaggccttttataggtattgagatgatcctctcgaccatgatcgagaactttacaaaggtcacaagccatccatgtggtgcttttagcactactaatgacaggattgcaagaaatgcaattagtgatactgcaattgtcatgtcctactctttgctcgaaggtttttttcatgaagagtacgagtactatgtgcaagatggaaagtcaaaaaaacccggagagttaagtgctttgattaacacattattgcatgtacacaagatctctctcagagattggagggagagaagaaaggtattggatttagtgaaggatttgcgtaatgccgtggtccacagtaatggacaaatagctggtaatatttataaagagaaatgcatagcacttttgcaagaagatttgtttgaacatagtatccatcacccaacactaactttttccagggcgctctggctactacgagagtttaaaagcatcgctgatgaatattcagaatcagtttttaataatctatcgaatcattcagatgcacaagcaacttaa

SEQ ID NO: 111527 - DNA, 1239 bp, Enterobacter aerogenes
atgatccgtatgcgcgttaaaaatttcgggccggtaggaccgggcctgatagagaatgacggctggatcgaatttaaacctgttacggtgtttatcggcaaccaaggcgcgggcaagagtactctcgccaaactgttctcaactttttgctggattgaaaaagcactggttcgcggcgattacccgaagaaatggtttgagcgcaaagggcgttttaaaaacatgtttctcagttatcaccgcctagaaaattatcaggacttggataagcgcggtaagacagtgattgagtatgagggtgaggcttgggcgatccgttacatctcgaaccagttaagcattactgcgctgcctagccagcagtatgcactgccacaggtgatgtatgtccctgccgaacgtaattttatctcttatgtgcgtaaccccagtgaacttaaactctcctctgagtcgctgaaggagtttttgtcggctttcgaactagcaaaacagaacctgcccaaaaccgtaaaactgccgattaataacactgagattgaatatgacaaactcaatgatatcgttaatttgaaaggtccgggccatcggctacgcctgacggatgcctccagcggattccagtctttcgtaccgttgtacatggtcagcttgcatctggctaatgcagtgcaagaccagagtcaagccacgtcaatgagtgccgatgagatggcgcgtttcgcgcaggagattaagagtatttttgataatagtagcctgactcaggagcagaaacgggtggctgtctcagtgctgtcgggacggtttaacaaaagtgcatttattaatattgtggaagaaccggaacagaatctgttcccttcctcacaatgggaaatgctgaaaagcctgctggcgtttaaccgtcagggtatagccaatcgcttggttctgaccactcacagcccctacattgtcagctacctctcgctggcggtacaggggaaacatctgcagcagcgtatcagtgagagcgggcggaacgagttattaccccgcctcagtgccctgatcccagaaacggcattactagccccggacgaagtagcgatctaccagtgtaacgatcaagatggcagtgttaccctgctggcaaattatgaaggcatcccttcggataaaaatctgctgaatgactggttgcggatgggtaataccatgttcgatcagatgctggagctggaagaggagctttaa

SEQ ID NO: 111528 - DNA, 492 bp, Enterobacter aerogenes
atggatttttttaaggaagcttgccagagcggcccttatacgcagcagacctttggcgtctgtgacaaccagaacagcacacccgcatatgtggataccggcaatcgacaaaactgggtggcgaccgtggagaacccggcacagcttgcagttatctttaccgcgattgataaatgcgtgctgctggatagcgatgaacgcgggcgcggacgctgtgatggcatgctgaccactgataatctgctgtatctggttgagttgaaagatcagcgggccaactggcggagtgatgcaacagaacagctacaatccaccattctttttctgcgggaccatcacgacctcagtgcatacaaacataaaaaagcctttggttgcaataaacggcatcaggcatttagcccgattgaccaagaaacccggcggcgcttctttgatgtatatggctttcgcctagatttacagggaataattaaactaccgggagggtga

SEQ ID NO: 111529 - DNA, 582 bp, Enterobacter aerogenes
atggcacagaatatgcctaaagaacaaagaattacactcattacgctagctactttaactgcagttgtggcagtcctttggtttttgtctatgatgattgagcatgaaataaaaagctttggccccttagtagtttcgctctcgagtgcaataccagtgttttctttgtggtggccatttaaacctaagtacatatccaaacgaatgcgaaatacattacctgttgatttaaatatcacggatcatgttctatttggtgatggggattacaaattcgacccttatttttccactgcatcaaacagaagccttcatattataacaagatattcaacatatcttttgggtggggctcctgcctcaggaatatataacttccatgagattggcgacgctggatcatttccaataaataatcttgatatgaataatactcctgttgagcgagtagttgttttgaaaaatatccataataaatatgccttaatgaaaataaattcaattaatcagcagcatcctcatattttcgagattgagtatattctcaacagtgcaggttctgagaattttacagattgctga

SEQ ID NO: 111530 - DNA, 141 bp, Enterobacter aerogenes
atgacccagtctgatgagatgagtgttatatgcccttctttgttcattttatcgtgtttgttcgtgcattgtatgttttgttgtattgaatttgattcattgtacacgatcacctctttacttattggtctagaaatttga

SEQ ID NO: 111531 - DNA, 246 bp, Enterobacter aerogenes
atgccggacatcgcgccgctgtcgcagctcgcccgcgcgatcgaatacataacgcaccccgcgctgctgcccctcacggaaccagcccccggcgctctcattcaccgcccgggtctgcgtctgcaggtggctgcccgccgcatcctgcacaaactgccgcagcgtaccgtccggcgcggtatgggccgtcaagcgccccaccggatcgtaagcgtaacgatcgctgccccacaggctgttatttaa

SEQ ID NO: 111532 - DNA, 3411 bp, Enterobacter aerogenes
atggcagagaatgcaggtggcatttattacgatattgagatggatgtgcgcgggctacttactgctcagcagcgcgtaaaccagcgacttgatctgatggagcgcggttttgataaaaccactcgatccattgataccactgaaaagtcaatgtctagcctttctcgtgtgactgtggctcttacggcggcgctttctgtacaacaggtggctgaatatgctgacgcctgggctacggtaaataacaagctcgccaactcattgcgcccaagcgagcagttggctgatgtaactcagcgagtgttcgacatcacccagcagaccagaagcagccttgatgcaacggcctctctttatgccaggctggaaagagccaccagacaatacggcaccagcgctagggatctggaaaaattaaccacgattatcaatcaggggtttgtggtttcaggagcaacggcgcaagaggctgaaaatgccattattcagctatctcagggcttggcctctggcgcgttacgcggtgaggaattcaactctgtaaacgagcagggtaaccgccttatcgtagcccttgctgactctatgggggtaagcatcggccagatgcgcaacatggcggcacagggcaagctaacgacagatgttgtggttaacggtctactttcccaggggagtgtaatcggtgctgaatttgccaacaccactacgactatcagccaagctcttcaggttgctggcaataacatcactaagttcttcggtgaaaattctacggttaaaacaggcgcggcaattttcagtgatgcagtcgtcaccatcagtgaaaatattggcggactgagcgcgttgctgactggtgtcgcggctattcttgggagtcggtatgtcggcgccttaactatggccactgcggctaaaatcaaagcagctgccgcatcacgcacgctttcagcagaagaatcattagcagctcaggctgcagcgaataaagcagcggcagacctcagggcggcaacagtcgcaaaagaacgggccttagatgagataaggctcgcagaaatgatgcgacttactgctatcagcgaaaacaacgctgcggcagctgaacagcgcttgtccgttgccagggttgcagctgctggtgcggttgataattataatcgagcactggcggcaaacaggactgctcaaatggctctctcatctggtgccggcctggctagcagggctctcgggttaattggtgggcctgccggagcagcaatgcttgctgctagtgcaatcctttacttttcacagcgtgcaaaagaggccagaaatgacgccaacacccttgcagatagcgttaacgagctgagttcaaaattccagacgatgtcgcatacagagctggcggcaacgattgggaagttaagccaaaacctaccagaattaagtgatgcggtatctgacgcacaaaaggaattcaatgatgcgacatctgcagtccagcgacagcagagagagattgcaaactggggcaccaatacaacgagagggcggcaggctgccgaagcgcttagcggcgcacaggataacctatctatagcaactcttgaactggagaaggcccagaacaggctaagccagacacaaaactctattaacattggccgcgctacgctaaacggaacgatgaagcagggtatagatttgcttcgcagggatgggcaggaagccggaattgctgccggtatgatgagcaagttgggggatatgattaattttgccgccaaggcaaaagacaaattcaactccagcagcctcatggttgaacgcccgaaagatgttcaggagtatcttgataagctacaggatcaggtaacacttcagagcgagcttaatgacaggaagcgagcgcaattaagggctgagcaggatattaggaaactcggtggaacagaggcggatgttaacttagctcgtgacagggccgccgctgaatttgatgctcaacaggcgcagcaaaacaataaaaaggccactaaggaagcaacatctgaagcgaataaatttgccacccaacaggaatcagtaaatcagaaactggcaaacctgaaacagcaggcagaacttgccgccgggtctaccaatgaactgagcagagagcaggccatgctcaatgctgaacagtcacttgggaaaggggctacgcaagcgcaaattgcggaggctaggcagtatgccgcggctaaatgggatactgccaacgccattaaagcgcaggccgcagcagagaagctgttgccggaagcgcgtgaaaacgccagctacaggcaggatgttgaagcgctgaatactgccctttcagccaagaaaattagccaggagcagtacaacgagacatctgaaaggctcgaagccgctcaccaatccaatcttgcgaaaattcgcgcgcaacaggctgttaccccacaacagcaggctgctggcgatgtggatccggtgcagaacctggctaatcagcatacccaacagttggcactcatccagcagtacgaacagcagggagttatcgcccataatcaggccttagcactaaaaaaagccgctgatactcagtatgagcaggaacgaacggatgctatgtgggcattgttcacgcaacagagtgtggggtatcaggctcttggcgcagcggtggacgctttcggcaatcaggcttccaatgcattaaccggtatcatcactggcagcatgtcagcctcagaagcattgcagtctatcggcaacaccattctaaacgacgtgattaacacgtttgttcagatgggcatgcagcaggccaaatcggcaataatgggggcgacagcgcagaatgctgcgatcgcaactacgacggccgcgcaggttagctcactagcaaccaccacggccgccagtacatcgtctgcggcggccacaacggcagcatggacgccggcggcgcttgtggcgtcgattggttccttcggcggcgcggttgctattggtctcggcgccctgttggctgcgctggctgtaggctcatcgttggccggcaaacgtaagaacggtggtccggtatcggcgggctcaatgtaccaggtaggtgagggcggcatgcctgaaatctaccgtgccagtaacggcagtcagtacatgatccccggtgataacggctctgtcatcagcaataaggatttgcagggcagtggcggcggcgcgctgcaggtcgtgaacaacgtttacaactatgcaaatggcgtcaatgtcgatacccgcagcagccagagcggcgggcaactggttatcgagacctttatcacggatatacagaacggcggcccgatgtcgtctcagatgcaggacacgttcggcctacgccggcaggccaatggcgattactaa

SEQ ID NO: 111533 - DNA, 222 bp, Enterobacter aerogenes
atgatttatcccttcgatgcgtcctatgctcaggaagtgctgagaaaacattatcagtatgcggatgtcctcgccaatccccgtgaaagtcttgctgcaaagacggctgggctcattgctcacgacggacacctctcgaaatgggatggagataaaagcacgtctgaaatacgcaggaagttgtcgagaaacaccgaagatattgaaacaagggcggcttaa

SEQ ID NO: 111534 - DNA, 225 bp, Enterobacter aerogenes
gtgagtcatgagcttacagatagccagatcattgctgacctcattggcaccctgcagcgttatggctacaacgtcgatagaaagtctctttcgccagtcttgctaatagtgcttcaggatttaaaggctcgccaacatgttgcagagacgatgattcgctatctggaatcgccgcatttgctggctattgacaccgtgccgacgcggggaactggcgatgcctaa

SEQ ID NO: 111535 - DNA, 606 bp, Enterobacter aerogenes
atgggcacacgacatctaacatgcgttgttaaagacggtaactacaaggtcgctcagtacggccaatgggatggttatccatcagggcaagggatcgatattctcacttttttgcgtgaagaacttaaacgagatgtgtttcttcccaaactttcgcagacatttcagcctaccgaagaacagattaaggcgtggtggcttgaggttgggcatgacatggaaaacggtggtggatttgtgggccacacgattgctaagcaattcagcaaaaaccacccttcactatctcgcgatactggcggtgaaattctttcactgattcagggtgccagcgatcctctgccggttcgggtatatacggagtttgcagctgactcactattttgcgagtgggcatacgtagtggatttcgacaaaaacacttttgagatattcgaaggctttaaccatgcccctttatctgaaaatgagcgcttctacggcttgaagtgttatgacgcgaacaaggactaccaccctgtccgtcatcggaaaacttattcactcgattctctgccaacgaatgaagagtttttggctgagttagagacgcaggaagaagaataa

SEQ ID NO: 111536 - DNA, 306 bp, Enterobacter aerogenes
atgaaagaactgaaattttacggtgccagtgatgaccttttcgaatgcgaaggcgccatccgggaagagatctgtatgtacagcaatcccggcgtttatcacctcaagtctgctgaaggagaaatgctggttattgcctgctatacggacgaaggctgctgggctattggcgtcggtcaggttaatgaagaaacaccgctcccggtatggccagcgtcattcagccagcatgagcgcggctatagcgtggtcttaacgctgctggtacctgacgacacggatctggttctggaggatgaagcatga

SEQ ID NO: 111537 - DNA, 1182 bp, Enterobacter aerogenes
atgtcgaaaaacacgtcgtctgaaatcaaacttaccccatccacccctgccgctttcccggcgctgaaagggctcaatctccaggttttcgtgatgatcgccgcgattatcgccattatgctgttctttacctgggtcaccgacggcgcctacctgagcgcgcgtaatatttccaacctcctgcggcaaaccgccatcaccggtatcctcgccgtcggcatggtattcgtgatcatttcggcggaaatcgacctgtccgtcggctcgatgatgggtttgctcggcggcgcggcggcgattttcgacgtttggctcggctggccgctgccgctcaccatcctcgttacgttggtcatggggctgctgctcggcgcgtggaacggatggtgggtcgcctatcgcaaggtaccctctttcattgttacccttgccggtatgctggcgtttcgcgggattttaatcggtattaccaacggtaccaccgtctcgcctaccacgctggcgatgtcgcaaatcggccaaagttatttaccggacggcatcggcttcggtatcggcgttattggcatggcggcttttatcatctggcaatggcgcggacggatgcgccgacaggcgttagggctggcgaccaccagttctggcggcgccgttggccgtcagaccatcaccgcagttatcgtgctgggcgctatctggttgctcaatgattatcgcggcgtgccgacgccggtactcatactcgccgccctgctgctggctggcatgtttatggcgacccgcaccgcttttggccgtcgtatctatgccattggcggcaatctggaagcggcccgcctctccgggattaacgtcgagcgcaccaagcttgcagtcttcgcgattaacggcctgatggtggccattgccggattgattctcagttcgcgactgggagcgggttcgccttccgccggcaatatcgccgaactggatgccatcgccgcctgcgtgattggcggcaccagtctggcgggcggggtaggcagcgtcgctggcgcggtgatgggggcgtttattatgtcagcgctggataatggcatgagcatgatggacgtcgccactttctggcaatacatcgtcaaaggcgccattttactgttggcggtctggatggattcggctaccaagcggagaacataa

SEQ ID NO: 111538 - DNA, 141 bp, Enterobacter aerogenes
atgcaaaaaggcgaacatttgttcgcctttttaaatgatcctatctgtcaccagtcaccagtcacgatcacgatcatgatgatgatgatgatggtggtggtgtcggtgatggtagccatcatctacgatacatcccgataa

SEQ ID NO: 111539 - DNA, 372 bp, Enterobacter aerogenes
atgagcgcacgttccagttatacaacccgaacggagggctataacgtgggatttccgtcgccagcagcagactatgtagaagtacgactgaccgtcgataaactctgcggtaccggtccaaatactaggctcgttcagacagaaactggttacaccgtagtcgatgtctccggtaaaccaaagcaaggagataccgttttaattcaatacggcggaggcacagattttgcaaaaattatgggccgggcatttattacaagagacgaggaggctctggaaggcgaggctttggatgatgttacagttgtcggggtggtgacattcgtcatcaatcgagcttggcctaatgatgacgaatgtcctgtcatataa

SEQ ID NO: 111540 - DNA, 240 bp, Enterobacter aerogenes
atgccgagaaactcagatatcgaaatagcctggcgtcaggcaattgtcattgagcctaatggccgtcgcaccgtgacaacgtccggttttatccgggaactcgaaaaagttaactggcactggtcgccaagccaggctaaccattggatagagcactatgtgacgacattccgggatgtctcaacgcaggaaggcgatgagcgcacgttccagttatacaacccgaacggagggctataa

SEQ ID NO: 111541 - DNA, 801 bp, Enterobacter aerogenes
atgtttgggaaaaaatgtattttctgcaaaaaagacagtggcgcaaacaaaataaccaaggaacatgtattccctaagtggttaaaaaaagaactaaaagaaaccagaggcctagtatatacttcgcaatatattgaaaatagaaagcctattgacaattccaaattcaaaaaaggactgcatccgtatgatcaagttgtaaaggatgtatgtatggtatgcaacaatggttggatgagtgctttggaaagtagaataaaggacttattgacaaagctaattcatgggcatgatatagttttaaatgaagaacaatgcaataattttgccttatggtcaataaaaaccgcattaatattatcacatttagaaaaggggcgttccacagtaccaccccagcattacacaacaataatgaatggtaacatacctgataatgtgtctgtctttataggatattacagacacgacaccgacttcacatcaagattccttagaggccatattaattttgattcaacatccccggatgactctcagatattttatttatcaactttcacaatcggacatctttatgtccatatatcttatttttccgaaatagaaatcttcaaaaaccttcattcctttgacctaggcaaacatttcaaaggcagcattctccgtattacacctgagttccatggcggccgcttagagtatccaacaaaaaacccgataaattacacaaaagaagatatgagcgctctttctatctatatgctaaccggagaagtatctcaaccttatggcacttag

SEQ ID NO: 111542 - DNA, 3126 bp, Enterobacter aerogenes
atggcctttaatccgccgctggggagtaattctcccgtagtgttgctcgataacgccacgcgcctggataagctggtcaacggacccgctgccgatgttcccgaccgtgccggagatccgctttattcgtggcggggtatccatcagaaccttattccgctgagcaagcaatatatgacgctggctgatgcccaggcggatattgccaatattcctgaaggatcgaccacgtattaccgcagcccggataacagcgcgctcgcaatcgaggtgatgaacgttggcgggacgctgcagcctaccgggcgccgtatggtttcacagaaaaccgtagaagggattatccccagtcttgttggccccggcatgaacctgttcaacaagggagcggtgatctccgggttctatctgtttgagggaacggggatacccagggaaaatcctgagtactgctattcagaaaagatctctgccgtggccgggggagcttatacttccaggcttctcactcgtgtagtgacattttttgatggtaacgacaattatctgtctgacctctcatctgttactgcatttacagcgcctgccggtactgcctattttattgtttcggtaccgctggtaaacattgacacctatcaggtaacgtttggtgctggcgaaatgccctatcgggcatatcaggcagtactgcgggataagatcaaaggggcgccgacaaactcctatcgaacgctgggctttactgcaggtaaaaacttattcaatcctgccgacgctatgcccggcgtgcatctttccagtatcggcacaattcttacagactctgataccagcatgaccgtatcgggatacattcctgttgacccgactcagctttattgtgtcgatcatccgtggaaagcagctacatactatgatgcgaaaggcgtgtttatcagccgccagtatgattcgtcctattcaacaaaacctgtcaatccgctgacgttaccatcaaatgccgcgtatatgcggatagaaattcctgctgtcgtggcgtctgttaccatggtggaaaggaataataaggccaccgaatttgagccgtttaaatcaaaggccccatcggcatattcaggtgtgccagtagtcttttctgaaccggtaaaagccctgacggaaacagacctctacggccccggtacgaacctgttcaataagaacaaggtggttgatggttatatcaatgagttcggtgcatggttcccggttccggcagccagtgggtccgtatacatcacctcggaatacattaaagtgtcggcgggtgatgttctgaattcaagccggtcgatgcgcttcattaacttctacgactcggacaaaaaacatctttcgtcggtttcagcagttaatgttgtcactgcgcctgcatcggcagcgtatgtgagaataaccactcttctttcaaacaaagatgcgatgtttgtcgccagagcgtcagtactgccgcccgttgaagactatgtgcatgtcatgcgcaaagtactgcctgacggttttcagatccgaattcctggagatattgttgacgcagaccagctcgatattgattttgtaaagcatggactgatagtactggggaaaaacctgtttaacagggcgaccgtgcaatcagggtatattaatgaatcgggcactgttatatcccctgactcacgttacgtgtactcagattatattcccgttgaattcagcacgtcttacgcacttcgtgttggcgccaggttcattacgttttataacgccagtaaaacgtttatccgtacggatgcatcctccactcaggcactgacttcgttcgttactgattcggaaattgcctatgtgagaattacatttggctcggatcggtatgtagaagcccaggttgagaaaggagacagcgccactgcattcgaggaatacgcgttctattacctttcagaaatgcctgacggcacgcctgtcaaagtgaaaggcgctgaagttgtatcagaagcggtaccggatgtttttggtattgagcgtcttcgggaaacgcatatgcggatgactaaaatgtcttttggggatgctgttcgtcttatcgttacgatgatgggagacagctacaccagaatgtcaccacgttatgtgctgaaagtggcacaaatcctttggcgctatttcaatagtgcaggcacggccgcaactatcccccccattgggtacggctggcgttcgtttggttttgatcctaacggcgataatactgatgttatgggtacatcagttgtacagtccggatttttctgcgcttacaacacagggcatggcccagatatttcgtctgtgacggcgagtgcaagcggagcaacgatttcatacagccagaattttgcgctgggttttgattcgttcctgtttgccgaggggggatctggtgttattcagtgccaggcaaccgggatggctgaccccatcacgattgacctgtcggctcatcccgccgggatgcagattatcccgctggcgttaccaacaaccggtagcggcacagtaacgtttacggttatcactcctccggtgacgttgtacggagcgaatatcctcaatcaaaccatgtcgggtgtcctggttcataaaatgggaggtagtggttctcataccaatcactgggtcaacgcaatggatcagcgctggcttgatgcttttgataacctcggggccgacctcgtgacaatcatgctgggaacgaacgaccagggcgcgcagctctctgccgcaacattccgggctaatattctcacgatgatagatcgggttcgttctgtgcggccaacggctgatattttgctgatttgcccggcggaaaataaccgcgacggcggaaacagtattcccatgtccacttacgcggaggtgatgtataagattgcgcgcgatgatcgtgatgtggcctttctgaacctgcaggcgtccttcggtcagaaacacgaggactacgcagctggatcagacagaccatggatgataggggacgggttacaccctgacccatcaacgggagggtatgtcattgctggagctatagctcgcgccttaggcatatctgtaaattaa

SEQ ID NO: 111543 - DNA, 2559 bp, Enterobacter aerogenes
atggctggcaagtcactagggactcttactatcgacttaattgcaaaagttggtggatttgtttcagggatggataaagctgaacgtgcgtcagccaagtggagcaagcaggtacaggatgatgtggcaaagtctagtgctgcactcgcaggtataggggctgcagccgttacagctggtctggctgttggcgcatctggatttcaattactgaaatcaacatccaagcaaatagcagaaaccgatcgctgggcaaaatcattacaattatctacccaggagcttctggcttggcagtttgccgcggaaaaggctggtgtatctggtgaccaaatggctgatatcttcaaggatattggtgataagattggcgacgcggtattaaataaatctggtgaagctgttgatgcgcttaacgctcttggtttatcagccgagaaattatcaaaagtaagtccagataaacaattgcttgccataggtgaatctctaggaaaaattggtactaattctgagaaaacaacaattcttgaaagtttggggaacgacctttcaaaattgcttcctttgtttgatcaaaacaaccaaaagcttaaacagtttattgaccttgctaaagattatggtgttgctcctgatccatcctctattgatgatttagtaaaggtaaatcaactttttgaagatatggaggcccaagttgcagggctcaaaattgaaattgctgcaggattagcaaaagttgatctaactcctttacaaaactcactcgataagcttcatgacgtactgactgatcctgtagttcttcagggtatttctgatctagtgtcagaagtagctcaacttgccggatggcttgtaaaagcagcagctggggctggtcaattagcagccagcacagggaaccgttttgcggcgcttagtggcaagatagacctttcgaatatagatcaggttaatgaacgcattgcatatctgcaaaaaaaccttgaaggtaaaaaagggttttattctcaaagtgagtcaatgtttgggtggattactggggtagatgacagcgctaaatcactaaatgatgagttgttatctcttatagaaacaagggataaattttctaaagccagtaaagttgtgctacctcttcagactgccactgtggggactggtaacccgtttgctttgcctcctggaggtacgaacggaaaacctgctaaaacgccagcaagtaaaacagataatgcgtttaacagtagactgctagacctacaaaaacaagctgccctcattgaaacaactggcaaaaaaaccgcagaagtaaccgaactggaaaaggttaattttgatataaccagcggcaacctgaaaaagttatcagaagggcagaaggagcaacttcgaactgcggctaaagtccttgactccaaaaaagaagagttacggcttaatcaggagaattacaaattatctgaatttgtttctggtctagatagacagaacaaaataataaaacaaggatatgataatgatcttgctggccgctcattgggggtaaaagatcgtagtcgaatgcgtgaaataaacagcattcaacaggactttgagtcaaggcaagaggatttattaaaacagtatcagtctggtgatattactaaatcactttatgattctgaaactaatgcattaaaagtttcccttgaagaacgcctgcagattcaagaggattattatcaggagtctgatgatttacgtaatgattgggaatcgggcatatcaagtgctttagctgatttcgccgatagttcaagtgattattatcagcaagcagctgatgcgatgacatcaatattaggttctgcaacggattcaatttcagaacatttatatgatgttatcagcggtactgaatcgatgggggaagcaataaaaggaattttttcagaccttggtaagtcagtcataaaagctttggttgatatggctgcacaatggatagtgtatcaaggtgttcagatgctggtgaacaaaacagcccaagcctctgcgattcccgcaatgattgctaatgctcaggctactgctttacaggcacaacttgccgctttcgcttcaactgctgcaataccaatcgtgggccctgctcttgctcctgaggcaatggctgcagcagcggctataacagaacctatggtagctgctatttctgcctcttccctttctggtatggcccacgatgggattgatgcagttcctgaaacaggtacctggttgcttcaaaaaggggaacgggtcaccaccgcgaagaccagcactaaactggatgcaactctggatagggtagcgaaccagtcaacgggcggaggagctatttacgcgcccaatattaatattccgataaatgggaatccatctgatgccacgatcgctctggttcagaaagctgcagatgaaggggcagaacgagggtatcgcaaagctgttacttcgatcgtaaaggggcagggtgatttgcaccgtgccttgatgggtaaaacaaattccgggaggaagattcgctga

SEQ ID NO: 111544 - DNA, 468 bp, Enterobacter aerogenes
atgaaaagttcagggcagttgctatcgttggctggcgtaattctcgcggtgtattcattgttctttatggatgtgagtgttgatgttggtgatggtacaagagttaataatatcgggctaatggcgcaacaacaaaattatttattaattgcagttgttctttttcttgcaggtgtgtttatttcattttcagggagaaaaaaggcattgccagaagttgatttcactaaattagaatcattttcagcagatgactttgtttctttgaaggatggagaaccatgtctaaatatattggctatagacaatcttgcgctgagttttttaaaaaaacatggttcaagtagtgtgagtgatatcatttttatgaacatgcctttaatcgacaggttagagcaaggtcttcctgaatcagtaaggaaagattttaaatctacccttaaacggaggttaaaggagaattgttaa

SEQ ID NO: 111545 - DNA, 264 bp, Enterobacter aerogenes
atgaatggtatcggcgggcgcacgatcgcagaggctcaggagcggatgagccgtagagaatttctggtttggctcaaataccgtgataagtacggaccgctcaacaatatgatgcgcactgagtggggggcgtcgctggtggcctctgttctggcgaacatcaacaaaacaaaggatatggcaccttacaaaatcagtgactttgcaccacacatcaacgagacaccgttatctcttgaagaagcaatgaaaagttggcattga

SEQ ID NO: 111546 - DNA, 321 bp, Enterobacter aerogenes
atgaagccctctgtagaagagcttcgttaccagtgccgtatcgacagcgatgacgatacagaggatgtgatgttaacgctctacctcaatgcctctctgaagcatgcggaaaaaatcactaattgccgtctttatgataacgctgttccagacgacgatcctgatgcactggtgatagaagacgatatcaaacttgctctaatgttgcttgtatcgcactggtatgaaaacagggagcctgtgagtaacgacagcgttaacagtattccattcggtgttgatgcaattctgaaacagcaccgcaaaacacctgggacgtga

SEQ ID NO: 111547 - DNA, 204 bp, Enterobacter aerogenes
atgctgctgaaaaaagacctgaaatggtcgcctgatggcattcaggtcagaaacattcctgctggtgaatatgagactggctcacttcctgaacgtgctcttgaggtcgcggctcagatggggattctcgacggcactgaacaaccggaaattgaaacaccagttaagcctaaaaccagcaataagcggggtgaaggaaaatga

SEQ ID NO: 111548 - DNA, 1209 bp, Enterobacter aerogenes
atggctgtcgaaattaaagacgttgagcaggtcgcgcaggatttgcagcagaaattcgatgattttaaagcgaaaaatgataagcgcattgacgctatcgaatccgaaaaaggcaagctggccggagaagtggaaacactaaacggtaagctgaccgagctggatcagctgaaaaccgcgctggaagatgagcttaaacagcttaagcgtcccgctggtggcactcaaagcaaagccgcaaccgagcataaaaccgctttcatcgactttatgcgcaagggtaaggatgacggactgcgcgatcttgagcgtaaagccctacaggtaggcgtggatgaagatggcggttatgccgtccccgaagagctggatcgcaccattctcaatcttctgaaagatgaggtagtgatgcgccaagaggcgacaaccatcaccgttggtggtgccaactataaaaagttggttaaccttggcggcaccgcttccggctgggtaggtgaaaccgatccccgtccggctactgatgcgtctaaactcggtcagattgaaccgttcatgggtgaaatctacggaaaccctcaggcaacccagacgatgctggatgatgccttctttaacgtagaggactggatcaacagcgagctggcggttgagttctccgaacaggaagaaatcgccttcaccagcggcaatggtacgaagaaaccgaaaggattcctggcctatgcctcttctctggatgacgataaaacccgtgcttttggcaccctgcagcacattctttccggtgcggcggctggtgtgactgccgatgcgattatcaaactggtctacaccctgcgcaaggtgcaccgcaacggtgctaagttcatgatgaacaacaacagcctgtttgccgttcgcattctgaaggactccgagggtaactatctctggcgtccgggccttgagctgggccagccttcctctctggcgggttatggcgttgccgagaatgagcaaatgccggatatcgctgctgatgcgaaagctattgcattcggtaactttaagcgcggctacaccatcgttgatcgcattggtacccgcattcttcgtgatccgtacaccaacaaaccgtttgttggtttctacaccactaaacgtactggcggaatgctggccgattcgcaggccatcaaactgttgcagattggtgctggcgcataa

SEQ ID NO: 111549 - DNA, 657 bp, Enterobacter aerogenes
atgatgccgatgactaaacagcggctggatattccgctgaagctaaagtctgtcagcgacagcggggagtttgaaggctatggctctgtattcggcgttaaggacagttacgacgatgtagttgttcccggcgctttcagtaaatcacttcagtcatggcgggagaaaaacgcgcttccagccatgctctggcagcatcagatggatgaacctatcggggtttataccgaaatgaaagaggatgagatcggcttatatgtcaaaggccggttactcattgatgatgatccactttcaaagcgagcacacgcccacatgaaggccggttctttaaccggcctttctattggttacatgctcaaagactgggaatacgaccgcgagaaaggcgtgtttcttctcaaggagatcgacctttgggaggtcagccccgtaacgtttccatcgaatgatgaggcgcgggtaagcgatgttaaaagcgcgtttgcccgtggcgaaacaccatcccagaaaagtattgaacgggtcctgcgcgatgttgggctctcccgcacccaggccaaagcattcatggccgggggctatggcaacctctctcagcgtgacgctgatgaagtggatgccgcactggatgcactgaaaaacatcaaattttaa

SEQ ID NO: 111550 - DNA, 1230 bp, Enterobacter aerogenes
atgttctttcctgggttattcagaaaaaacgatactccggttaccacgccagctgaactggcagaagctgtagggatgacttacgacacttacaccgggaagcgcgtcagcagccagaaagccatgcggcttactgcagtgtttggttgcatcagagttctggcagagtcaatgggcatgctgccctgcaacttgtacaagatcactggtaacagtaagcaaaaagcaacatctgaaaggctgcacaaattactgacgatgaaaccaaatgactatatgaccccccaggagttctgggagctggtcatagtctgtctttgcctgcgtggtaatttttatgcctataaggtcaaggcgctcggtgaggttgttgaactcttgcctattgatccgggttgtgtagaaccaaagcttaatagtcagtggcaaccggtatatcaggtcactttccctgatggctcgacggatgtgctgggacaggatgatatctggcacgtcaggacgctgacctttgatgggctggtgggcctgaacccaatcgcatacgcaagggaagctatttctttgggtatggcgacagaagaacacggtgcccgattgttctcaaatggcgcggttacttctggtgttctccgtactgagcaaacgttgaccgacgctgcctatggcaggttgaagaaagattttgaggatcgtcacctcgggctcagcaatgcgcatcgccctatgattcttgaaatgggtcttgactggaagtcgatggcgctcaatgccgaagacagccagtttcttgagaccagaaaatttcaactggaggaaatttgccgactatacagggtgccgatgcatatggtgcagaacactgatcgcgccaccttcagcaatatcgaaaaccttggcattggctttattaattattcccttgtcccttacatgacccgcatcgaacagcgaattaacgtaggtctggtgaaggaatcgaaacagggcacctactatgccaaattcaatgccggtgctttgctgcgcggggatatgaaatcaaggttcgaatcatattcaaccggtattaactggggtatctactcaccaaacgactgccgtgaactggaagatatgaatccacgctctggcggtgacatttatctgacgccgatgaatatgacgaccaagccgtctgacaacaataagagcaaaacaaccgaggaacaacatgatgccgatgactaa

SEQ ID NO: 111551 - DNA, 186 bp, Enterobacter aerogenes
atgatcctgatgattcttgccccgctgatcggggtgatcggtgctgctttgttttcttacggagcatggctggttttcccacctgcagggtttatttctgctggagtgctgtgcttgttctggtcatgggcagtatcgaaatatttgtccgcgccacgtaatgttcataacgaaggcggtgactga

SEQ ID NO: 111552 - DNA, 1758 bp, Enterobacter aerogenes
atggctaaagttgcagatggcatacgctacgctgagagggtcgtggcgggaaatatcattgcctgcgaatttgttcgtctcgcttgccagcgctttcttgatgatctgaaattcggcgaggaacgtgacgtttatttcagcgaaccgcgtgcgcagcatattcttaatttttacaagtttgtgcctcacgttaaaggcgctcttgcaggtcagccaattgaattaatggactggcatattttcattctgataaacatctttggttttgttattccgctggtgaatgaagaaaccggcgaaatagtgctgcgtaatgacggcagcggaaggccggtaatggttcgccgcttccggacagcctataacgaagtggcacgtaaaaatgccaagtctactttgtcttctggcgttgggctgtatatgaccggggctgacagcgagggtggtgcagaggtctattctgctgcgacgacgagagaccaggcacggatcgtgtttgaagatgcaaaaaacatggtcaaaaaggctaagccaacacttggtaagctgtttgagttcaataaactcgctatttaccaggagcaaacagcctccaaatttgagccgctgtcttccgatgcaaataaccttgacggcctgaatatccattgcgccattattgacgaactgcatgcgcataaaacgcgagatgtgtgggacgttctggagaccgcaacgggggcccgtctgcaatctctgctctttggcatcactacagcaggttttaacaaagagggtatttgttacgaacagcgagattacgccattaaagtgttacgtggctacaacagcgatgtagaaggcgcggtaaaggacgacacctattttgccattatcttcacccttgataaggatgatgatccgtttgatgaaacggtatggcagaaggcgaatcccggactgggtatctgcaagcgttgggacgaccttcgccgcttggctaagaaagcgaaagagcaggtttccgccagggtgaactttttcactaagcacatgaatatctgggtaacagctgagtccgcctggatggacatgatgaaatgggagaagtgcgaatatatagctccccagcacgagcttaaaacctatcccatgtgggctggcgttgacctggcacataaaattgatatttgcgcagctgtaaagctctggcgtgctgataacggacatgcccatgcagattttaaattctggctacctgaggggcggctggaaagatgttctgcacagatggcgcagatgtatcgaaaatgggccgagctaggaaaacttgagcttaccgatggtgatgttatcgatcatgcccagattaaagctgatttcctggattggattaacggtgaaaacctgaaagaaaccggattcgatccatggagcgcaacgcagttcagcctggctctggcggaagaaggcgtgccgctggtggaggttccgcaaaccgtcagaaacttttctgaatccatgaaagaggtcgagtcgctggtctatggagggcgtttccaccacagcaatcacccggtaatgaactggatgatgtcaaacgtcaccgttaagccggataaaaacgacaacattttccctaacaaatccacgcctgaagccaaaattgacggtcccgcagcactgtttaccgcaatgagtcggatgctggttaatggcggggaacctgaggcaagcctttctgaccacctagaaagttacggtgttcgttcactttaa

SEQ ID NO: 111553 - DNA, 498 bp, Enterobacter aerogenes
atgtctggaccaccgaaaacccctacacatctacgtttggtgaggggtaacccatctaagcgagcgatcaacaaaaacgaaccagagccacccaaaggggtacccccaacgccgaagcattttgataagcaggggaagtactggtttaagcggatggctgaggaactggacgctatcggcgttatgtcccagcttgacgcgcgggctctggaattgctcgtggaagcctacacagaataccgccatcactgtgaaaccctggatcgtgagggatatacctacgccgtatacagcgatgatgatcctgatgagggtaaagagcgggaaatcagaatgattaagccacatccggcggcaatgatgaaagcggatgcatggaagcgcatgcgtgcaatgctggccgagttcggcatgactccttcaagccggtcgaaagtcaacagagaaacgacacctgatgatgacctgatcagtaaattccttaattcgagggactaa

SEQ ID NO: 111554 - DNA, 996 bp, Enterobacter aerogenes
atggctaatgatattagagagttatgcaatcgctggtctcagtgtatattaaaaagcacagaggagacagtatttaatgacgacgtagaaaatcttaggctttataggcaaaatattttccctcacgatttgtcatatgatgagttaatagactcaattattggcctgtcaggcgttgcttacttcaagaaaaatgtgcaaggtataagttatgaccattttttttgttgggcttggtgcgcggatattgtaacaagatatggtactaatttttatcctattgaagaaattgagatagaaaacttgttcaaagctacatatcatgcctctatagcaaattgcgaagtaaaagatggtagtcttgatgagtttcagcgcggggtagatgctttaaatgcaataagtgtaaataaacgtaattacatgcagaccagcatgctttccttgtgttacttggtgttcccattgcttgagtcaactttaaaaaaactatgcagtgaatacgtagggttggatggagttctaaagaaaaatgtaacatacacagatgcaagtggaactgtgataaataaagtgttaaaggcaagtgggaaaccagtgataataagtagtttaaaagatcttatttatatttacaaggaagttgtgattgacgctgaaggaaagagaaatatcgaggatattttaggtgtgatagctgaaaggcatgctgatgacccttgtagtgttatatacaaatggaggaattcatcattgcatggcacagagaatttcatgcaggtaggggggctccttttatgtcttacatctcttttgataatatatgacttgaaagataggtatgattctttaaaagaaaatgttctcagtcggcttaaaatgacggggttgttaacggacagtgggaatgatacatttcgtgaattttacccaccttgtgatatcaataaattaccaaaaaatggagtcgcattattcagtgtgtatagtggataa

SEQ ID NO: 111555 - DNA, 270 bp, Enterobacter aerogenes
atggggattgaaatgattatgggtctggtcgccgccttgctggcccttatcgctggtgcatttgggttaggacattcacgcggaaccagtaaagcagaagctaaagctgagctgcagcgcacagaagagaacgcagctgccagcgtcgcagcggcagaacgcaaagcggaagtcacgaaagaggccagcaatgtacagcagactgttagccatatgcctgatgacgatgttgatcgggagctgcgcaaaaactttacccgtaaaacctga

SEQ ID NO: 111556 - DNA, 531 bp, Enterobacter aerogenes
gtgggtaatgaacctaaatggaaaaatgaacgccaaccggcttggctggtagctgcaatcagacgaaccatcgccgaacttcctggtggttatgaggaggctgcagaaattttagggatttacaaagctgatgatgttaccccggcaatcgatccactacataaccggcttcgcacaaatggcgatcaaatcttccctcttggctgggcaatggtcttacaagctgctggtggctcaaaccacatagcaaatgctgtagcccgtcactccaacggtctctttgtaccgctgactgatgtcgaagacgttgataacgcagatattaaccaacgcctgatggagtccattgagtggattggtaggcactctcagtacattcgcaaagccacagctgacggtgttatagacgctgctgaacgcgctcagattgaagagaacagctatcaggttatgaccaaatggcaagaacatctgacgctgttattccgggttttctgttctcccgatgaggattcccgacctccagactaa

SEQ ID NO: 111557 - DNA, 243 bp, Enterobacter aerogenes
atggaaactttaagagaatacctaaacaccttatcgcctgataaacaaagagaattttcaaataaatgcgatacatctcttgaatatctgcgtaaggcaattagcaaaaagcaaaaattaggagccgcgctatctgtttctattgaaaagaattcaggtggcttcgttagcaggaaagaccttcacccggatgactgggagaagatttggcctgagttagatcataaaaaatctgcggcttga

SEQ ID NO: 111558 - DNA, 378 bp, Enterobacter aerogenes
atgatttccgactatgttgaagtactttacgctattgagttcactactgaacatgcgcgcgtgcttttcgggaaccgtgagccaacggatgttaaggttatgaccgttaacggcgatagcatggcacctacccttgtttcgggtgatcggttgttcgtcgatatttcagttcggcatttccagactgatggcgtctactcatttgtgtacgggaagaccttccatgttaagcgcctgcaaatgcaaggtgacaagctggcagttctgtctgataacccagcttatgagaagtggtatatcaacgaagatagccaagataatctttacgttatgggtaaagcattgattcatgagtcaataaaatataaccgactataa

SEQ ID NO: 111559 - DNA, 435 bp, Enterobacter aerogenes
atgaagcatgagaaagtcctattcgtttactctactctcatccgagaaggtatggttgccagtggctactaccacccagatgctgttctctttgaagttaatcacaataaaacatactccttagccgtaactgttggtttcgtatacagggcagacgttatttactggaatgaaattgacgtcatctttgaaaacaaatcagttatagttcagaagcatgacggtgagagtacatttaacgtgcttgcttccagcagaccaaacacaagtgacatagttaacgtcgcctctttttacctaaaaggagtcaatttccctagtccaggaatgtacaccgctgtagtttcgctttatgacagtgatgaacaaggggaaaagcggaattttatcgataaaaaggagtgttgttttatcgtggcggagagggattactaa

SEQ ID NO: 111560 - DNA, 327 bp, Enterobacter aerogenes
atgacagaacgcttagaacggcttgagagaaaagtagattcctttgaattgactttgtcacgtttaaacgaaaccatgctgaaactggattcaaggtttgaccgtgtaaatgataggtttgatagcattgaaaaaagcctggctgatgttgatcgacgtttcgatgcatcatctaaaaatgtcactgataagattgacagcgctgcaaaactgaccgaagccaacacccgaacggctatagctgaggctaagttggcaatcattctggccatacctgctatcatcggtgctgtttataccgcttacaaattgttaagcaaatcataa

SEQ ID NO: 111561 - DNA, 360 bp, Enterobacter aerogenes
atgtcagaacccaaaaatgccacctcgtttagccagcagctggcctatatcaacaaaggcaccctggatgccgaacttaccgaggcgctggcagaagtcatcaaagcggttcgtgaaaccggtaagaaaggtgctgttacgctgacgctgaattgcgccatgctgaacacgcgtgacgaaaataccatgaaggttacgccgaaagttagccggaccattcccgagctggatcgcgccgacaccatcatgttctccaccgccgacggcgatctgctgcgtgacgacccgtcacaaactcagctggatttgaaagttatcgagccggtcattcaggccgcgccaatcaagctgacccagtaa

SEQ ID NO: 111562 - DNA, 480 bp, Enterobacter aerogenes
atgaacgtatacgaaatggaagggtttctgcacggtaaatgcttaccgggtgatctcagggttaatgaatcaaacgctgaatacctggtgagaaaactctgcgaagtaagcgagctacaaggtgaagtaacggcgttagtagctactctggaaaaaagccgcgaggtgtcatcgtgtccagaaggggttgatctgcaggattgggttaagcagttggctaaggagagcctagcgctaagagatgccattactacgcatagtcaatcaatccacttctgtgagctttgtggaaaagatgacccgtgcagtactgacgatgtttgttatgcgctgaatgaaaccaccgccaccgatcgcatcgttgccgggattaaggctgatggggtggagcaggctgcaaacgaatgttatggcgctggttatatctgcgaaacattgctggcgtatgcccagcagctgcgcgagggggccgacaaatga

SEQ ID NO: 111563 - DNA, 1215 bp, Enterobacter aerogenes
atgcccttaaatgcgcgtcaagtcgagactgcaaaacccagagacaaagcctacaaactcactgatggcggagggctctatcttatggtcaacactaacggttcaaagtactggcgcatgaagtatcgatttggcgggaaagagaaaaagctctctttcggaacctacccgaccatctcacttgcggaagcccgaactaaacgagatgaagcaagaaaggtattagcaaatgacaaggatccaggggaggtaaaaaaagccgcacagctcgccaaaaagctatcagttaccaacacatttgaagcaatagctctcgaatggtacaacgcaaaagtatctggctggtcaaagagttatgcagattacgtcaaccgaggttttaaaaataatatctttccctttctaggctctcagccagtgaatgaaattaaacccctagagctattatctgtattgcaacgaatggaaaagcgaggagcgccagagctcgcaagcaaagtacgccagcgttgtaatgaggtttttcgctacgcgattgtaacaggtcgtgccgaatacaaccctgctgctgatcttggtagcgctttgcaaggccatgagaaacagcactatcccttccttacagccgctgagctgcctgattttttgcaaaagttatcaaactactctggtagtcttattactcttctggcaacccgtttgctcattctgacaggcttgagaacagtagagttacgtctagctgaatggagtgaaattgacttcgataatcgtatctgggaaatccccaaaactagaatgaaaatgaaacgtcctcatgttgtcccgttatcggctcaatctttgagcgcactccgtcaattgaaagtactaacaggaaactacaaactcatttttgcgggtcgcaatgatgtgaacaaagcgatgagtgaagctagcatcaatatggttataaagaggattggctacgataagagagcaactgggcatggttttcgtcatactatgagtactattttgcatgagcagggattcaactcggcatggatcgaaacacaactagcccacgtagataaaaactcaatccgtggaacctataatcatgcccagtatatagaaggtagaagggagatgatgcaatggtatgcagactttatggatgcgtttcagggaggtgatgtagtattaaaaaaagaacattttcgaaatgtataa

SEQ ID NO: 111564 - DNA, 789 bp, Enterobacter aerogenes
gtgaatagtaaagtgtatttaataaacaatagtgtaacatttgatgttgggaccatgattctcacgaatcgagccagtaatgatacagttgctctaacaaggaatctttctgaatgtttatttatcctcctcagcaatcatggtgagataatcagtcaagatttctttatagatgaagtttgggtaaaaaaaaggatgtttatttcagaaaatacattagtacaaaatataagaaagttacgtgctattattaattccattggcttgagtaaggattttatagtaaccaaaaaagggaaggggtattatttttcatcggatgtagaagttcagttgtttgatactgaaaaaaaatgtgagcatgaaattaaaagcctggataacaataacaattgtgtttatcctataaaaataaaaagatatgtaagaaagactatttgtgtatgtatgattgttatgttttttatcctttcttttttttgggttttgtatttttatggtgatcattatattaattccgttccgaaagtggaatactattttaatacaaagatgaaagggtgttttttttactttgataataagttgggatttgataaattaaatgtgataaatattatcatgaaacaaaatgaagttggttgcaccactccttcttatatatatataacctattatccattatcagctcattactcgtatataaagtgtgatcaagaaatcagtagtggctttgaaagtaaaacatgtacatctgtggtaaggtatgattatgaaaaaaatatttaa

SEQ ID NO: 111565 - DNA, 270 bp, Enterobacter aerogenes
gtgatggataccattctggtggtacgcccgcggcaggttcagtttaaatgggcgttcgataaagcggcggggagcgtcagtaataccggcaatacctggtttaagctgctgataaaaccgggatgcgacaccacggaagaggaaggtgacgcctggtatctgcgccccggcgatgtcgttcgccagtcgtcgctgcgtaagcccggtaaccactacatcatctataacgaaaaatttattaaactcaacaaagattgtcagggtaaataa

SEQ ID NO: 111566 - DNA, 990 bp, Enterobacter aerogenes
atgctcaagtatgcccaagtatttgactcgaaaactgcgactcaatatatgggccgcactgaatcaagctacgaaccgagcagcatgcgttttatatctttgctcattcagatatcaggaatggtttctgagcaattaagccgggagaaggaaaagcttgtccgtgctcttccatttttcccaagtgaccttgcagataccgctgaaaatgcttggttctcctctcttaaagcatcaacctcggctgagaacattgagtcgttttgccaatatggaaatgatttggaagatgagcgtatcaaaggtgaagctctgttagcagagaaagacatcaaagggcgcttgattgcaattgctaaggaagagatagcctcagaaaacgttaagcaagccatgagtctattgagggaaggccttgcggatggcaaagccgaggagttgtttaaggcaaaagacttggctgttgcagcgagaaaggctgccaatatagttgcgcagcaggcattcgcaactgctcctctgcaaggcgttggcgaaacggcttggaaactaatgtgggatcaagcgcgaaactactctattgctcatgcttaccatagtcgcgaatttcccgttactactggaggcgcgtattgcgtgctttgccaacaggaactcacagaggaaggttcagctcgactcaaaagttttgagtctttcgttacagctggcttagagaccacggcaaaaactgcggaaaccactagcgcagagctcattgcgaaggtggttcagttaccttctatagaggattggattgcccggctggctcaattgaaatttgatgaaacctttgctcgtgcctcttatgaaacgttgaaagcaaggcgctcacagtttgaggcgtgtaccgccgttggttcgatcaccgcattcgattgggggcttattgatcaagcagtggaaaaacgcgctgtcgacttaaatgctgagaagattagtttgacataa

SEQ ID NO: 111567 - DNA, 2151 bp, Enterobacter aerogenes
atggatgtattgaactggacaggtagaaagcatttgccaattatcagacagaccgaatcggcagaatgcgggttggcttgtctagcaatggtcgccagttggcatggacttaaaactgatttagctgcattacgtgagcgcttcactatcagttcgcaaggaatgacattacagcggttgattgagtatgctgcgattattcgcctttctcctcgcgcggtccgcctggaacctgaggacctgaaatcccttaatctcccctgtattttacactggaacatgaatcactttgtcgttctccatcaagttagaggaagcaagctagtcatacacgatccagatcgggggaaggtcaatttaccgataagggaggtgggaaaacattttactggaattgcccttgaattaaaccctacagcagattttgtaacccgtgatgaacgtaagaaaatacgcttacgtcaactaacagggaaaacaccaggattattttctgcgatggtgaggatcataatttttgctctcgcactggaaattcttgccctcggtagccctttgcttaaccagatggttatcgatgaggtactggtcgcagcggaccatagtttgcttaccgtcatcatcattgcctcgttgttgttgtcttttacgcagttgcttttatcactggctcgtcagtgggcaagtatcacgatgtcagttaatttcaatatgcaatggaccgcgagaattttccatcatctgatcagacttccgcttacatggtatgatgctcgcagtaaaggcagcattaacgcccggtttggcgcaatagacaccatccagacagcgctgacaacgcaggtccttgaaggaatcctggatgtgctattagttgtcacatctttgggtatgatgttgctctacagccctgaaatgacgctaatagcgatagctgcggcagttatttacggtgtattgagagcgctttggtatcctgctatccgacaggctgctgaagatgcttgggatgcagaagcccgagaggctgggcactttttggaaacactgaatggtattctgagtctaagaatcaatggtgttctggtgcatcgtgaagctgcttggttgaatctcaatgttactcgccgaaatactcaactgcatcagagcaggctggatatgtgctatgacgtggttcatacccttgttgggagtttggtttcggctctggttttatggaaaggggcaagcgaagttctgaatggaacatttacggtcgggatgttagttgcctatctttcttatcagggccgttttaccacgagcgttagcagtctaacagacaagtttttttcttggcggatgctggatgtatacaacgaacgactggctgatattgttactgcccctactgaaggtcaagaacaccgccagaaagatggactgacaatagaacttatgtcgaatggtgagcctattttgcctggcttcactcaacacaaatcttgtgctccattatccattgagaatatcgttttcagccataagggaaatattgctcgggttatcaaagatgtttccttgacgttgaatcctggtgaaatcgttgctatcacaggaaaatcagggtgcggcaaatcaactttggttaaacttatccttgggattcatacacctgaacaagggactgtgagtagctttggtatccctcatacccatcctgattatattcaggttcgtcaacgaattggaaccgttctccaggacgatcatttgtttaggggatcgatagcggacaacattattttcttcaatgggattcgtgatcaggaacgaatgaagcaatgtgcctgtttggcgctcattgatacagatataatggcaatgccgatgggatatcaaactctggttggagaaacgggaggggggttatctggagggcagaagcagcggatccttttggcacgtgctttatacaaaaaacctggatttttgttgctcgatgaagcaaccagtcacttggatgttgagagtgaaatcatcattagccagactttgcgtcaaataggtatccccatacttcttatagcccatcgacctgaaacgcttgcgtcagctgatcgtgtattaattctggaaaacggggagttacaagagcaggttgcctga

SEQ ID NO: 111568 - DNA, 1254 bp, Enterobacter aerogenes
atgaaaatttttagagacgaagctatcaatcaacagaatgaaactacgtatggcgagattataatccctgcatcctttgccatgacatttatcgcggtagctacacttatcttgcttatacttatattttcatttctctattacgggcaatatacccgtaaagcccacctttcgggtcttgtcatgccgtcatccgggttgataaaagtcacacctcagcacaatggatttgtaacacgtttggatgtaacggagggggaacatgtaaatgccggaaagccgttatattatatcagtggtgaacgatacaatgctcaaggaattggcacgctggctacgatgcgcgtctccctgaaaacacagtattccatgctttcttcgcagcaggcgttggagttgcgtgacaattttcaacaacaacaagccattaggcaaaggatattatccttacagccacagattaaaagtgcggagcaacggctagctctggctgaacatcaggcgcaattgtcagcttcggtaatgagtcgttacaggaagctggtatctttacattacgtatcagatattgagtaccagcaaaagcaaattgaagttacctctgcaaaagaaaacgttgaggatcaaagacagattctcttacaacttcactctgctctggatgcagcagacgatgatcttaggcatcttgtcaccctcggggagagtaggaagtcagagcttgacagacagttacagattttagagcagcaattggtagaacttgccgggcaagaaagttttactttgacttctcctgtatccggcacagttgctgctgttcttgtgagacaaggtcagtcagttaaagcttcggagcctgtaatgactctcgttcctgataatgctcgattacaagtggagctctacgctaccagtcagaatgcaggatttatacagccaggtcagcgtgttgcattgcgatttgctgcatttccctatcaaaaatttggcattcaatacggcactattcgcgaaataagtcgaacgacgttgacgccttcagatttattttctgtttcatctgtgatctggaaagaaaatgaagggcattatcgggtgattgtagagcctgagtatacctttatcctcgcttatggaaaaaaggaagaactacgtccaggaatgacacttgaaggagatgtcagcttggatacccgccatttatgggaatggctgacagaaccattatggagccttaaaggaaaattataa

SEQ ID NO: 111569 - DNA, 642 bp, Enterobacter aerogenes
gtgaaaactgattattatcctgaagattttcgcttaaccaagagaatggcgtttgtattttttatggttgttgttagtacaataggaataacagcattgccattgtatacgattcgctatataagtattgaaagctctctggcattgatggttgggcttgagtttttgatatcgttaatagtttatttctcatatcttcgtcatctgcaaaactttaaaaataaaccatctataaaaacgacaacattagcattggtgactttatccttaatgcaaattttgtctttctttgttacagcatacgggaaaggtgtacaacctacgcaaccgcagttattggaaatatttctattattgttagttgtacccttctatgaagaagttatttatcgtgggtgcctgtttgggttggttaattgtattacaaaaaatattcttatatcatcattggttacgtcactcgtattttcattaatgcatactcaatacaattccattgctgtacacgttatgttgttctttatgtcaataatccttgttaatgttcgtgttaaaacaaatggattatatagcccaatgcttgtccattccggtatgaatgcgctggttataatgataaacgctcaatctattcttcgatag

SEQ ID NO: 111570 - DNA, 1920 bp, Enterobacter aerogenes
atggtggggccattcactgctaatattatacaggccgcagtagtaaaatccgttgaattaatgcttcagaagattttcaactctcagtggccaagagattgcgaagatgcaaaagagatagttcacgaactacagaacggatggcccaaaaataaattcatcgaaaagcacgtccaacatacgcttaaaatgcgtactcttataaatccgaatgacgatgtaacacttacagatatttatcacccgctgacagtcgttactgcatctaacggtgactcaatatcaataaaagatgactttatccttcaatttagtgggatcgctaatattattggtatagccggtcaggggaaaagcactatactgcgtaaactttttctagaagaaattaaaaaggcggagagggttcctttttttattgagcttaggaatgttccagacgggaatatactagcatacttcaaaaatttacttaaaagcctccatattacggttacagattcgaatgttgaatacttactccaatcgaaaaagatagttttattgcttgatggatttgatgaaattcggcaggaaaccacagttcaagctattcagtcaatattcgaactaaacaaaacttacgcctgcccacttataacaacaagcagaccaaacacgcaaatttgtcagatgcccggaattaataacctgatagttaaagaaatagatttagaagataaactacgcatacttaatcttattgaccaacaggatccaaaatctaacaagacaacatttcgaagcctttgtaacttacttgttgagaatacttattttgaggagaccatcagtaaccctattatggttgcgcttttatatcattgttttccatacatggatgaagtaccgaaggatgttactgatttttatcgtcagctatttggtgttttatatgcgcgacatgataaaacaaaaggttataataacagagagagagagtcacgtattgaggtggaacccgcccgtacgcttttctcaaacctttgccttaaatcattattaaaagaacagtattatcttgactcacacacgcttcatcaacatataaaaaatgctcttaaaagccatgggtacgatgaaaaattagctgacgcattcactaatgatatcgtgaaaataacctgcctgttgcaggccgatggtaatgaccgttttgtttatcttcataaatcggtacaggagttttttgctgcattttttattagtacattgcaggaaaaaaccattaaaagtcaaatttatgcgtatctgagaaaatccctcctgtcatcacctaaatttgataatctactacaatttctctactatttagataatttaacttttttgaatgagatcacgcttgaaacattcaaaagtactgagtttgaaaaatatgccaacctgacctatgaagaaatttctgtaccatttgacaagttattatcagacggaggggtttatggggaaagtacactgaatgatacatttgtgaccttaaccggttatacttctataggatcaattttaaaactagacttcctgaacgtaataaaaggtgataaaagagataattttgatatagacttggaatttagaaaaataaccccagatgctatcgacaaagagaatctttcatcttactcttataataaaacgtcttcggaccaaaataaaaaccgttttatcgaagagagaacagatgataacccgagagaaaattataaatttaacctcaagaaattcctaataatcaatggattgtatgaatattataaaaaggtattctttgagaccatagttgatttcaataatgaagtttataaggtaaagcaaaatgaagtccgcgaaatgaaggatgcaatggtcgatagttttgggtttatatctgaaatttga

SEQ ID NO: 111571 - DNA, 207 bp, Enterobacter aerogenes
atgcaaaagctaattttgttgggtctactgattctcagtggtcaggcgaatgccacacagattacgatgaccaatccacagcaggaacagacggagaacggtaagacgctttgcatctatgagaatgccaattacacattcacctacctaactaaggggaaatgcccgtatgctcgaacctttaatacagaggattcaggaaagtaa

SEQ ID NO: 111572 - DNA, 444 bp, Enterobacter aerogenes
atggatccgaaaaaatttacacgccatgatttttctgaaactgcctttactctgatgcaaattattggagataacagccaaggtgaggctaaggttagagaagattattaccaatcagctacgttctctctgagtcaacttaattctttaatcgcaattgataaagcaaggaccatagcgaataagagaatagtattcactcttgcagatagtttatcttttaaccttgaacttaaaaatcattttaacaaaacagttataatgttaagttacattgatcatgatgaatatggcaaagagtttttaagcaaagataagagttatacatttactatagatgaagatgaacggctgagtgatgttgagggacatttgaaccgtaaacattaccacgaacactttacacacatttttaccttgcttgtagagaaaatcatcaagtaa

SEQ ID NO: 111573 - DNA, 423 bp, Enterobacter aerogenes
atgaccgaaaaagaaccaccatttctggcaattgattaccgtatcctggcgttagatattaaaacagacgtcaacgaaaaaaccatcgatagcagcaccattcttaaactcaaactagtctattcctatctcctggggttctccaaaacttgcagcgaggtttatccagaacaggcaaaaataggtaaaaaattgggtatcggttctcggcaggttgttgggagattaatttcgttacttgagtctctgggatggatttcaaaaacatcgagaactggaacatccaatctatacaaggtgaaaaccgtcgagaaaattttagaaggtattccgcgcgagactaaagaagaacacgaagcacctaagatatatacgcgcgctgtgatggatgatgatggtgacatcccatcgttttcaaaataa

SEQ ID NO: 111574 - DNA, 360 bp, Enterobacter aerogenes
ttggcattagcaagaaacactgtgtttgaagaaacgattgaaatcggatttaacaatcaaacgaaaaaagtaaaaaatcccaaaaaattaaaaccgttagcaataatcaaactttacgaagaatccccatcactgacaccagaagaacaagaaacaattaactctatgaatggtgtaacttggaaacctcgccaaaagtacatcggttttaaattcaatcgtgaaccgctcaaatttgagtacctatttgataatatcaatgagtatgatggatggttagaatttaataggctcgaaaatgaaaacttcacgggaaatgatcttggccttgattttgatgccccaggcatcaccgactaa

SEQ ID NO: 111575 - DNA, 273 bp, Enterobacter aerogenes
atggaggatagattgaaatatgatgaaaacagcattagagttttaaaagatgaggaacttgaatcgcactccgcagatagcatcttaagcatcctgcttgacgaaaatcctgatatctcacctgaccatctggcaaaaatggctgagtgcctggttactttggggtatagtgtcaatgaatacagagaatataaaactggaactttggataatattaaacttcagacaatgcaggaatggtttagagaaagaaataacattaagaaatattaa

SEQ ID NO: 111576 - DNA, 162 bp, Enterobacter aerogenes
atgcacactcacgcaaaatgtgtattgggaattgcctcacggttatcgtggatgggtgaattatgcccggagtttaccgtgaggattcccgaaggtaagcgtaatgccaataacgcctactttttctgtagtaaacaatatactaagtatagcatccgttga

SEQ ID NO: 111577 - DNA, 1821 bp, Enterobacter aerogenes
atggagtatgtcaatatggcaactaaggtagaagccgcaacactggttaacaggattgtttataaatctgatttaaatagtctgaaaaaagttagaaacgacatgaagaaacttcaacaggaattttctaaatcaaacaatcaggtagcaaaggtcaaacagcaggcagataaacaaattcatcaagcacagattaagcagcagcgtgatattgataaacagcagaaacaagctgcaaaacaggcagcagtagatgctaaggctaaacagaatgaacagaaaaaactggcagcagcccagagcagagcggctaaaatccagatgcagcagcaagctaaaacagccaaaatcagcgagaatgcgcgattggcagagcggaaagcgctgtttgatattggcagattgcagggtctgaatggtgcggaacgtttccaggccatcaaacatgctcaggggttaattgattcctataaaaatcaaactcttactttgagagacctcaatcaacaactctctcagtacctgaccacccaacgcgcgatatcccgtaataacgcaaaacgagcgaagcagtcaggtaagggaaaaaaatctggttcatctggctggctgagtcgtcaggcaagcgctttcattcctggggagattctcgggccaacagccgccgcttatgctgcccaacaggcatatcagattatggcggggacactggctggagcgattgaacggaaccagggcaggaaaatgatccagagttttggtggaaatgatcttgaatatatggcgttgagacaggaatctctgaaaaggacgggttttgacatctccagggacaagtacgcggatattagtaaagacctaaaggaccgccagggtgatttatcttttggtagcaccgataaaaacggtaattttactggcggtggtgagttctcggatttggtcaacatcctgcgccagagggcaggctacaccaacggcggcgctgtcaaacagttacaggcactaaaaacaccagttgagtttgctgtatttatgcgtagtctcaaggatgcaggcaaggtgactcaacaagaatttgtcaatatgggggagagaattaatgatgcctcatatgttctgaatagcgtcgattctggtggtcagaacctcatacaaactatggatacactggttgattctcatttggcactaacaacggctcaacagaaatctattaataatctaacagagatgtcagcggtatttaaccaagctaaagaatcgttaggcgatcaatttgccgcatcttttagcaaaggtttagaggatttaggaattaatactcaaaatctatcttctgaaatgggttcactggtgcctctggtgaaggatttaggaacgggaaccgctcagactgttaagggatttaaagaccttcttgatgtgttgtctattatcacagaatggaaaaataaactattaggtgagaaaccagaagagcgaaatatctttcagcaaggggctacgtttgttggtgagtctctattgccaccgggcgtcctcgatatggcaagtaaagttaaaaatcttgtaagcccaggctctgattcctcatacgctaatcaagtgcaaaatggtggttggtataatcagatgttaccttccaccctagctatgagttatcaacctgttatcccagatttaaaagctgattttaaccttaccgtaaatccatctcctgaatttgggatgatggtagaggcggtagccgataagcgtattgagtgggcttttgatgatcagaatttccaaatcagtcaaagcattttaggtcaataa

SEQ ID NO: 111578 - DNA, 1257 bp, Enterobacter aerogenes
atggatcacaagagggtaaaaccgaaggacaaacgcgatcgttatctgattctcgatccgtgtggtgtgtacatggtacgcatagctattccggcatacatggctgcacacttcggtaataaaacatacttcatgaggtcaacagcaactcgcgacattcgtcaggcacgtctattccgggatgccatagcgttagaatggtacaaattgcgcaatcagcttaaaccagttcgttcaggttcacgggttgagcagatccttgatgaacttcgaggtatcagtaaacaggcgaaggacacaccacccacacaacagaacttccccgttcaagtgcaggcttgcccttctcttctggtaatgcgtgatcagtacattctgcaattcagtgagaagcgcaaactcaccactctatcgaagacaaacaaagctgtagaggtgctcttagaacatctgaaaaaacgcgatgttcagcttcgtgacattaaccgaacaaccgttactggttggttggataaactgaaaagcgagaaagccccccagactattcaaaactatatcagcgctctggctcaaatctgggatttagcccgtaaccgatatcacgacgccccacaggataacccctggcgtggtcatgggttggaggcgaaaggcagcaaagtaagctatgaggtttttactcatgcagaattggcgaaagtcttttccgcgctagatggtgacgaagaaatgcggaatgtaacgctgatcgggatgtatagcggtatgcgtattaatgaaatctgttcactacgtgcagccaacatcaaggagatcgagggggtgctctgcttcgaagtgacggagggtaagagtaaagcagccgcccgtataattcctgtgcatagccttatcacttcgttggtgttatcgctgcgtgagaagccccataacggttttttattctatcgtgcgtcaatcactgaccgtgcagacggaaagcgctctacgtggcattcacagcgttttactcgtgctaaacgcaaggcattgggagaacagggaactgaaaggaaagttttccacagcctacgccaccaggccgcgcaaattttggatagaaatcaagttgttgaggacaggatagcccttctgctcggtcacgagcgcggctctacagaaagtttcaaaacatacagcaagaatgcagcctctccggtggagcttagacaatatatcgaattgatacgctatccagaaatagaaaaaggggcttga

SEQ ID NO: 111579 - DNA, 384 bp, Enterobacter aerogenes
atgattgtattattcaaccaagacattccatatacgttacataacaacacccatccttctatggttaactggttatgtgcaaattacgacataagtcatatgccgtatagcctaatattcagcacgaaggaaacccgtgtagaattatggatttcgcgaacatcgacagatatcaacaccatggcaccgaataggctggaacaaagccgggtatctgttgaagaggtatcaagaaaaccacggcttcaacagcttgccgccgtacaggccgctcacgttgagaagcgcaacaccgtaatggacggcagagcaatgattgccgctatgagccatgaaacctgcgtccgaattggcaggtacgtaaaaatattcgcgcaggattga

SEQ ID NO: 111580 - DNA, 1155 bp, Enterobacter aerogenes
atgtcaaaagagctaaacgttggaattgtagcagactggctagttacttatgcaggtgctgaaagagttattaaggagtttgtagacctttatccttcatctgaaatttattctgtggttgatttcttaactgatgaatcaagagcctaccttcataataaaaaggctaaaacctcatttattcaaaagcttcccttatcaaacagaaaatatcaaaaatatttaccattgatgccactggctattgaacaactagatgtttcttctcataatgtaattatttcgagcagtcatgctgtagccaaaggcatattaacaggccctgatcagttacatataagttatgttcattcccctatccgttatgcatgggatttgcagcatcaatacctgagggaatcagggttgaataaaggactaaaaggtcttttagcaaaaataatcttgcataaaatccgtttgtgggacaccagaactgcaaatggtgtagatcattttattgcgaactcgaaatttatagcacgaagaattaaaaaagtatatggacgtaatgccgatgtcatttatccgccagtagatgtagagcgttttagtttttgtgaagaaaaagataattattattttacagcatcaagacttgtaccatataaacgaatagatctaattgttgaagcattcagtcagatgcctgataagaaattagttgtcattggtgatggttcagagatgaataagatcaaatcaaaggcaagtaataatatagaaattctcggatatcaacctaatcatgttatggaagattacatgaaaaaggcaaaagcatttgtttttgccgcggaagaggattttggaattactccagtagaagcccaagcttgtggcactccagttattgcttttggtaaggggggggcactagaaaccattcgcccgatagatgttgcagaaccaactggtgtatttttcaatgaacaaaaagttgaggctatattggctgctgtaaataagtttgagcaggaattacacattataaaacctgaatactgtaggaaaaatgctttgcggttttcaaatgaacgtttccaaagagaaataaagcaatatgtagaacaaaaatggtgcttatttaaagagtctaaaaaaattgaatattaa

SEQ ID NO: 111581 - DNA, 1152 bp, Enterobacter aerogenes
atgggtcgtagtgttgtattttatggtgcgtttgatagatataattatggcgataatttgatgccattattattggccgaatatttaaaggggtgcaacccaacgattacagaggatgattttattttttcatcaattagtgattcggatctaagtagatatttatgcaagccgactgttgctatgaaagatttactcggtgttaatgaaggatcttctattatcatcgttggcggtgaagtacttggtgctgatattggagtattatatacgcatgttcaaactagtcattttaaagttcaatgtattagatttatgaggaggattgttcctggcattataaataaaatagcgcgaaaggcatacggttctgtatgggatttcccttatataccagagaaggaatccttcaaaaacaaagtaaatattatatttaatactgttggtggtatacctgtaaaatctcaagagataaatatcaaaaattcagattatatctcagttagagataatcgaacatatgagtctatatcaagctttgctcaggccaaattagtcccagattctgtattgatggcttctggtgttattgatcttgaattcattgaaactaaggttagatctgaattaatcactagatacgcgagtaaaaagtacattactattcaagcttgtccatacaaagttgatttcacccctgatgagttagctacagagttatctaaattagatactgaatatgaagttgtcttgttaccaataggatatgccagtggccatgatgatgtaatgttcttaaataaggttaataatgcctctggcagtaaattctttttagaagatgatttgaatgtctgggaaattatgtatttaattgttaagtcacaggcattttacggaacaagtttgcatggtgttattacggctatgtcttttagagttccacattactgtattaataaaaatatcaccaagttaacgtcatttttagaaacgtggagtgtatacccttataacaaaccaattcatatatcagaaataccgaaagctttacaaaattcaaagacatctctagatgaattagataatgctgttgtaaaagcacagtctcttatttttgaaagtatttctgatttctccaaaatgttatga

SEQ ID NO: 111582 - DNA, 141 bp, Enterobacter aerogenes
atgtatgttcttcgtgaatccatactgcataagcttaacaacgttcgctcctggcacacagcggacgaccaactgagtttaagttccagcatgagcgaacagcagacattgataagcacggagtttacggccgttggctaa

SEQ ID NO: 111583 - DNA, 1257 bp, Enterobacter aerogenes
atgaataagagtaatgatgatcttataatcctccagacaagattatactatgtttataacatttcatttttaatgttaatgtttttcggggtgttatttagtccacatattgcattttggtcatgtgtatttttattaatgggggcattttcaaaatctaaaattataagagagggcataacagccatagctatagcaatgctgctatttgctgcagtctctagagagataggctttagcttgtctgacgatttgattggcacttatatgccaatattgaacaagtggaaagagtatgggacgtttgaatccactgggctcggcattgagctaggtatagttatctatcttgattttatactaaatttcatcaaaataacagatgcaagaacgttattgtttttttgcgttttatttactttgactttttacctaatatggataaatttcttcttttctaagagtgttgataaaaaagaacaaggtatggcaatcgccatatctttagcgtttatgcaggttggtctattgactcaaacgctcagacaggaaatggcaaccccttttttattgatggcgatctatatctgggataaaaagaagtttccaagtattctttttataataactgcaacatttatacatagtagttcgctaattatattcatcttttacctgttgtttccttccgttaggctttggggtaaaatatttatctttgctgttctttttgctttttcattatgtatttcattatttccaggtatagtaataaatgttttcaatgcattatatttgccttttttagcaaaaaaaatacagtactatttaactgccagggcttcaggtgcgtcagaaatcattgcagcgggtaagttctatcttcttattatattaatcatgctcgcaaataaaatatttttgaagaaagaaatatcgaggataaatggaataagtaaaaagatatatgagttttgtctttggggtagtatttgtaatatgagttttgttacattaccaaatgcaagcaggttctttcttattatacctggtttcttcatttattatgtgtttttaccgattagtaaaaaatacccaaatttctttaaattcttaatgttggtatttgttcttttatctttgttcgaaccccagcggttagttggtggagggattccaggttttgaaatgtgggatacttataattggtttgaattaactccattttattatgttagtgatctttttagtaagtaa

SEQ ID NO: 111584 - DNA, 1026 bp, Enterobacter aerogenes
atgcgtacattaaagtttataatcttgttcctattatcatttaaatgctattcagaggatatgttagtgggggtaggaatacatcccaccaattttaatgggacaacggaacagctaatatcattattaaaacattataatataacaacgacaagaactgattatccgtggagttcagtggagaaagagaaagggaaatacacacttggtaatgagaagttagagtcatttataagtgctagcgcgaacaatgatattaaaccacttcttatattggattatggcaatcctgtttatgaagaagcaacattagaaaatcctaaaagaaaaccgacgacagatgcttctatatctgcgtttgtaaattattctctttggactgttaagcacttcagcagtaaggtttcaatgtatgaaatttggaatgaatgggtacaaggttctggcaaaagaaatttacaagcaggttcgagcatagaatcagcaaatatgtatgcgaaattagtatctgaaacttgtgctgcgattaaaaatacccatccagataaaaaagtaattattggatctacttctccatcggatcgtaatgaattaaagtggctctctgcagttttgaaagaaaaaaatgtattatcgtgtattgatggtatttcattacacatttatgcatcttctccaaacaaaaaactaattcctgaaaaaacagtaacagcagttatgctatttcaaaattatattcgtaatgagttagaccttgggtacaatctcccattatatattacagagataggagtgcctagcttaaaaaataataattataacgaacaggacataaaaaattatttcgaatacattataagaaatttcagcgaactcggatatgtgaaaggtgtttggtggtacgatttcattaatgatggcgcggacaaaacaaaaaaagagcataattttggtatgctaaatgaaaatttaactggaaaacctatcgcggaaagcatacgtaataataataacctagagaagtaa

SEQ ID NO: 111585 - DNA, 567 bp, Enterobacter aerogenes
gtgtcagaagcataccgacctgacggagattttataaattttgggtttgagtatttgctttgtgtaagtaatcgaaaaacacataagaatgaaactggtgttttacatgcatttaaaattgctgatattgataaaaaaataaaactagtatttacagggaaacccaatgcaagtattgaagcactaatagatcggcttgagctcagagaacgagttgtatttactggatatttagatgcatctgaactaccgaaattatatagatctgcttgtgccttagtgtttccatccttttatgagggttttggacttccggtgatagaggcgcaagccagtggcattcctgttattacttctgcaaccacctccttaggtgaagtttctggaggagctgctatactggttgatccgtgccaggttagcgaaattgtgtcagggattgaaaaagtaattaatgacaagaatggttgttataaaatgatcgaaaatggattgttaaatagtaaaaattatacgtggggtaaaaccgctaaactagttgatacttacctaacaagtataaaatga

SEQ ID NO: 111586 - DNA, 513 bp, Enterobacter aerogenes
atgagtggggaaaaagttagggtttatgaaaataagatatgttcagaggcgcatagaataatagcaacctcagtagttgttagagatgaactaatcgaaagctatggtgaacaattaaaagataaaacatacgtcatagaaaatggttatgatcaaaaattattttataacaaaaatattacagcgaatagaaatgattgtgtctatattggtgcattagactatagattcgattttatagcgctcgagcacttggctaatgaaaataaaaaaataatgtttgatatttatggaccgctaccaagagattttacttcagctataaagccgatttttgttaaatgtgacaatgtaagatttaaaggggagttagattatgcaaaagtgcctgatattcttaatcgttataaagtaggactccttcctcttattgataatgaatcaaataaaggcagaagtccgatgactgtctcttatacacatctgacgctgccgacgatatgcagtgtgtag

SEQ ID NO: 111587 - DNA, 1536 bp, Enterobacter aerogenes
atgctcgacaccaacatgaaaacccagctcaaggcctatcttgagaagctgaccaaacctgttgagctgattgccacgctggatgacagcgctaaatcggcagagatcaaggaactgttggctgaaatcgctgaactgtcagacaaagttacctttaaagaagacaacacgctggcggtacgtaagccatcgttcctgattactaacccaggttccaaccaggggccgcgttttgctggttctcccctgggacatgagttcacctcattagtgctggcgctactgtggaccggcggtcatccgtcgaaagaagcgcagtcgctgctggagcagatccgcaaccttgacggtgattttgaattcgagacttactactcgctctcttgccacaactgcccggacgtggtgcaggcgctgaacctgatggcggtgctgaatccgcgcatcaaacacacggcgattgatggtggaaccttccagaatgaaatcaccgatcgcaacgtgatgggcgtaccggcggtgtttgtgaatggtcaggagtttggtcaaggtcgtatgacgctgactgaaatcgtcgccaaagtggataccggcgcggaaaaacgcgcggcggaagagctgaacaaacgcgatgcttatgatgttctaatcgtcggttccggcccgtctggcgcagcggcggcggtatactccgcgcgtaaaggcattcgtaccggcctgatgggcgaacgtttcggcggccaggtgctggatactgtagatatcgaaaactatatttccgtaccgaaaaccgaaggccaaaaactggccggcgccctgaaagcgcacgtcagtgaatatgatgttgatgtgattgattcacaaagcgcggcaaaactgatcccggcagccgtcgaaggtggcctgcatcagatcgaaaccgcctccggcgcggtgctgaaagcgcgcagcgttatcatcgcaaccggcgccaaatggcgtaacatgaacgtgcctggtgaagaccaataccgcactaagggcgtaacctactgcccgcactgcgacggcccgttgtttaaagggaaacgtgtggcggtgattggcggcggtaactctggcgttgaagcggcaattgatttggcgggcgtcgttgaacacgtgacgttgctggagttcgcgccagaaatgaaagccgaccaggtgctgcaggataaagtacgcagcctgaaaaatgtcgatattattctcaacgcccagaccaccgaagtggttggcgacggtagtaaggtgacggggctgcagtaccgcgaccgcgtcagcggcgatgagcatcatgtcgcgttagccggtatttttgtccagatcggcctgttgccgaataccaactggctggaaggtacggttgagcgtaaccgcatgggtgaaatcatcattgatgccaaatgtgaaaccaacgtgaagggcgtatttgccgccggcgactgcactaccgtgccgtacaaacaaattattatcgccactggcgaaggtgcgaaggtgcgaaggcttctctga

SEQ ID NO: 111588 - DNA, 276 bp, Enterobacter aerogenes
atgattgattttgaacagcacaaaaatatcgtagaagagtttgttgaacagcattacccgctggcgcatagtttgatgattgatagctataaagatgcagagatttactattcaaacttccaaattctcatgcgggaaatgaatacacttccagaacatccagagtactttttagagtggctactggaagatgaccccgcgttgtatataaacctgatggaacttgttgttatcgtcagaactattcaaaacgtgtttgaacaggtttcgccttaa

SEQ ID NO: 111589 - DNA, 759 bp, Enterobacter aerogenes
ttgaagaaaaagaaaacttttgaagtaagcattaacaacttacccgccgcactaaaacgtttagacctaccagccgaacaagtaaaagttatcgaagattataaaaaacagtttccattcttgattgaagatgaagaaaatgttttggttagcctcgatcagctttgggaagcactggatacaccgtattatacaccacccggaaagccgtccgaaaatccggacgggttagagaaggcacgtacagccccaaaagaaaaagagtacaagcgcactaaatttcgaaattgggttaaagatgtagttttaaaagagattgataacgagccatttagtcgaatggtgcccgttcgcggtggtaaacgaaaagagacctttgtaacaatcgaagatgcaaaaacaattgcgatgttaacacccggtgagcagggtagaaaaattagacgctattttgtgactgtagaaaaggtctgcaaaatcctctggcaatacaatttccagcgtcaccagatagaaaataaatctaacgaagtttacaaactcaagttagcccaaactggttataaagattttgatgttgcagcaaaggataaaattcgctttaactctctggttaaacagattgcaggtgcgaggaatgttaaagaaacagacctggaaaactatcatcacatccagcacgaggtatttaatgcagtgcagcgagggtgtacagacagccagatcctcgccttttatcttggtgatgaggcagcataa

SEQ ID NO: 111590 - DNA, 180 bp, Enterobacter aerogenes
atgatgaatattcgatttgaccaggatacctaccgggaactcatctatgaggctaacctgcgagataaaccagcggcagcgctggtagtgcagataatccgcgagtatctccaaaaacaaacaggctcacagctaggagcaaaccaaccagaggatttaaatgggaaaaacagaagataa

SEQ ID NO: 111591 - DNA, 957 bp, Enterobacter aerogenes
atggggtgtggttacgttcactgtcatgagacaccgcccgtgtacgccttaatcgatgtcaattcgatgtactgcagctgcgaagaagcgttccgccctgatttacgaggtcgccctgtggtcgttctcagcaacaacgacggggcgcttgttgcggtcaatcgcgcggcgaaagcgctgggcgtgcgccgcggggagccctatttccgctgccgccgcctgctggaacagcataacgttgccgtattcagttccaactacaccctttacgcctcattctccgccagatttgcaaccgtggtggagagtctggcgccgcggacatttgtttactcaattgatgagctctttgcggatgcctctcatatggagggagtgatgacgccgcaggcgtttggccagcttttgcgggctgaagtgctgcgccagacaacgctcacctgtggagtcggcgtcgcgccaactaagacgcaggccaagctgtgcaaccacgccgcaaagacgtggcctgccaccggcggggttgtagcgctcagtgatcctgcgcgactgaaaaagctgatgagcctggtggcggccggcgatgtgtggggcgttggccatcgtaccgaaaaagggctggcggcaatggggatcaaaacggcgctggcgctcgcagagatggatatccgtcttgcacgccggctgtacggtgtgacgctggaacggaccattcgtgagctgcgtggcgaggcctgctttgccctggaggaaggaaccggcgcgaaacagcagcttgttgtatcccgttcgtttggagcgcgggtcacgcaactggcgcagatgcagcaggcggtgactaaatatgccacacgagcaggggaaaagttgcgccaggaaaaccgcctggcgaaggtggtaacggtctttatccgcagcagtgcttatgacgccggcggtgtgccctacagtaactag

SEQ ID NO: 111592 - DNA, 246 bp, Enterobacter aerogenes
gtgcgacaaaagcaccagcgttatgatccgctgaagccatatcagcgcatgtgggctgagcgccgggccagaacccgccagcctgccattgtcagaggctcactggtggcgataggcgtgctgggtgtagcctggctgctgcccttcatcgtcagcctgccgtgtaagccaggtacgatcctgctcgcctcgatgctgctcgcgccctgtgccggggtatatgcgatgcgcagaccgcggtattag

SEQ ID NO: 111593 - DNA, 513 bp, Enterobacter aerogenes
atgaaatatccaaccgtatcagttaacggcgtttccgttcgtgttgacgatgaaggtcgctacagccttaatgatctccacgcagcagcagtggccaatggagaagcgacagaaaaccaaaggccaagtcagtttatgcgaagccggcaagtccgtaactttgttgataccttaagcagagtgcaaaaatgcacggcggttcgcacagttaatggtgggcttaatcatggcgtatgggcactagaattggttgcgattcgctatgcagcgtggctcagcgctgaatttgaaattcgcgtctaccagacttttcaaaccctggtcagaaaaggtttcgacgctatgtcccgtctgaataaaatcgaccacatcatcaacactgaaaccaaagcaatcagccagtgcgcgagccagatggcgaagtggggtgtaggtggtcgcaagcaattgctccatgcggcgcgcgatcgtgctgctgatgaggtccagttatatttacccggtatcgcatag

SEQ ID NO: 111594 - DNA, 273 bp, Enterobacter aerogenes
gtgaccaaatcactacgcattgaattaggcgacaaatatgtcgtcaccggctcggcgcatgacctgattttgaatgagaagaagattgctaaggaaggtaaatcagccgggcaggaagtgctttcgcggctgggttatttcagcaagttcgagcatctggtgcgggaattaatgcacaaggaaattctggaatctgaagcgcagacgctgacagaactgcgtgaccacattcagcaattcagcgagaggctgggtaaggcggtaggattatga

SEQ ID NO: 111595 - DNA, 240 bp, Enterobacter aerogenes
atgttccagctaattcagcggggtcagatttacgctgaccagcacggttggcccgtcatcatccacagctgcacatcacagatagtccgctactggcgacagggccggataaacaccgcttcaatagaccgttttaataatgatttcgagccgctctctcacgaagaggcccagcagataaaggcagatcttgagcagagcgaacacattaagaaactgcgctcacagcgggcggcgtaa

SEQ ID NO: 111596 - DNA, 258 bp, Enterobacter aerogenes
atgttcagatgtccagtctgcggcgcgtcagcccgcatccgtaccagtcgcccggagaacgataccaacaccgtgcgatgcaaatattaccagtgcaataatcttgagtgcggcgtcggcttcaccacgatggaagcattccacaaattcacctcccggcagcgtaaagatgatccgccgctgccgggaggtttcattccacgtgatgccttcccggcatcacactacggaaaagaccagcttaacttagcgctgtaa

SEQ ID NO: 111597 - DNA, 1140 bp, Enterobacter aerogenes
atgtcgctttcagacctgaaaacatcactggatcgggcgctcgataattacgacaacgcgctcactgacgccgttaaaagccctggttacagcgtcacaatggggggcaaggtgctgacgcagcttgatgagcggttaatgtcgctctccatgacggataacagaggtttcaacgccgatcagatagtcattaacatcgacgatagtgacggtctggtcgcgcttcctccgcgtggtgcagagattgctgtctcgatgggctggatgggggaagagctgatctacaaaggcctgtatatcgttgatgaggtatcgcatgaaggcccgccggacgggatcgagataaccgcccgcagcgccgattttcgcgaagagttcaacgtcaaacgcgaagtgtcctggcacgatgtaaagctggaacgcgtgatctctgccattgcgcaccgttatggtctgaaagcccagatcagcgagatgctgatggatatcgtgattgaccatgctgaccagacggaagaaagcgacatgtctttcctgacccgtatggcggatatgttgggcgccattgcgacagtgaagaacggcactcttctgttcatcatgccgggcggaggcgttacgaccagtggaaaagcgataccttcagcgacaatcacgcgcgacagtggcgacagacaccggttccgcattgcagatcgtgacgcctatactggcgtaaaggcctactggctggatctcaacttcggcaaaaaaaagaaagtcaccgtgaagcatcgccgcaaaccggcgaagcccaaaaaagagaagagcagcagcagggaaggcgactacatggaaggggcggagggtaatatttacgtgctgcgtaaaaccttcgccaatgaggaggccgccaagcgcgccgcagctgcaaaatggcagaagttacagcggggcgcggcggagttttcgatcactctggcgcgaggccgtgcagaactgtacccggagatgcatgtcactgtgaccggttttaaagatgagatagaccaacaggactggattattgcgaaggtggagcatgtgatcgacgacagcgcctttacaaccaggctggaactggaggccaaaatcccggagtggatagcagaaacggattaa

SEQ ID NO: 111598 - DNA, 411 bp, Enterobacter aerogenes
atgggggattatcactgcgaactcaataacgtaatggtggaaactatggctgaacaacgcttccatggtgcccgcgtcagagaaaataccgacctggtaacagccatcaatgacattgaatccagtgttattggtattgtggccgtggcagatgatgctgatgcggaaacctttcccctgaatactcccgtgcttatcacgcgggttaacagtgtcctgggtaaagccggtacttccggttccctttacaaagcgctcaaggctatctcggatcagaccagcccaaaagtggtcgtggtgcgcgtggcggaagccacaacggaagaaggcgctaaaacacaggcgcaactcattatcggcggtacagaggcggacggcagctatacccgccagcagagatctcgcgcctga

SEQ ID NO: 111599 - DNA, 1650 bp, Enterobacter aerogenes
atggggataaaccagaacacaatttacgcctggaaaaaacgcgatgaatgggacgaaacccccgccatccagcgcgtcagccagtctattgacgcgcgcctgatccagctaaccgacaaagacgccaaaacggggggcgacttcaaagaaattgaccttctgacccggcagcttaaaaagctctccgacggtcagccctcctcttctgtccccggcaaaaagccgcgcaagcgcaagctcaaaaatcactttaccgaagagcagatcaccgcgttgcgcgagaagatcatggggtcactggcctggcatcagcgcggctggtatgaacaacgccaccaccgcaaccgcatgatcctgaagtcccgccagattggtgcgacctggtattttgcccgcgaagcgttgctcgatgcgctgcgtgatgatgtgaaatatccgtaccagcgcaatcaaatcttcctgtctgcctcccggcgacaggctcaccagttcagaggatttattcaacgcgtggcggaagaggtcgacgtcgaactaaaaggcggtgacaagattgtcctgtccaacggcgcggagctgcacttcctcggcacctccgccgcgacagcacagtcttatactggcaatctgaaatttgatgaattcttctgggtgagcaactttaccaatctgcgtaaggttgccggcgcaatggcaacgctgaaggggttaacgcgcacctatttttccacaccatcaggcgaaactcatgaggcatatcctttctggacgggcgatcgctggaatgaaaaacgccccagagcacagcgtaaggcgttcgacgttacctggaagacgctgaacagtggcctgctctgcccggataaaacctggcgccagattgtcacgctgaaagacgttatcgatcacggatgggaatacactgacctggaagagattcaggaagaaaacagcgaagacgaattccgcaatctgtatatgtgcgagtttgtgcgcgacggtgaatcagcgttcaaccttaatgctctgatcggctgcggtgcagatggttatgatgaatggccggactggaaaccctttgcttcacgcccgatgggaaaccgccccgtctggctcggttacgacgctaacggcagtagcggtaacggtgacagcggcgcggtctcgatagtggtgccgccagcggttcccggcggtaagttccgcacgattgaaacacttcaggtgcagggactggaattcgaagaacaggcgaaggttatcgaaaacttcaccttcaagtacaacgtgcagcatatcggcatagacgtaacgggcggtaatggcgaggctgtctaccagattgttaaaaagttcttcccgcttgcgatgccctacagctttaacctgaactccaagcgcgccctggtgctgaaaatgcttcagctgatccgcgccggtcgctgggagtatgaccgcagtgagcgccagctgattaacgcgttcaatgcagtgcgcaaggtgaagacgcccggcggcctgatcacatatgacactgaccgatcccgcggggtcagtcacggcgacttagcctgggcgaatatgctcgcgataattaacgaaccgctgggccaggaaagtggcagcggcagttttgctatggagttctga

SEQ ID NO: 111600 - DNA, 1059 bp, Enterobacter aerogenes
atgagcaaccacgaccaacacaatgaccgcaccgccgtaaatgacggtggcggccagaatgatattgctgaagcgctgaaagcgagcccggcgctgagcgcctttacctttgacggcccgtacatggtgacggacggttatgatctgctggacaacatgtgttgcattgataatggccggtactatgaaacgccggtcgactggtacgggctggcgcgatcgtttggtcaggcgtcctggcaccagtcagcgctgtattttaagcgtaatgcgctgaccgggtgctttatccctcacccgctattaagtcgccaggcgttctccgcatttgtgctggactggtttgtcttcggtaacgcttaccttgagcggcgccgtaaccgtctcggtgaaccactggcactgaaacacatcccggcgaaatacacgcggcgaggggtggatctcgataaatactggtttatccggcagtggaaggatgagtatgaattcagggctggcgaggtctgccaggtgatgaacccggatattaaccaggaaatctacggcatgccggaatacatgggcgccctgctttccgccagcctgtcacactccgccgacaagttccgcaaactctactacgacaacggctcccacgccgggtgcattctttacgtcggtgccgcccaggtggatgcggagagtatcaaggtggtgcaaaaaacattgtcggaagccagggggaaaggtgctttcaagaacgttctgatcaatgcccccggcggcggcaaggacggcgtgcaattgctgccgttcagtcagatcaccgccaaggacgagtttctcaatatcaaatccgtgacacgcgacgatatccttgccgctcatcgcgtgccgccacagctgatgggtgccatgccggaaggtaacggatcatttggtgacgtggagaaagccgcccgcgtctttgccatcaacgaactgatgccggtgatggaagcgctgaagcatgttaacgaatggctgggtatcgaggttattcgtttcaatccttatgccctgctcgacaccaagtaa

SEQ ID NO: 111601 - DNA, 450 bp, Enterobacter aerogenes
atgcacaaaaaacgaagcgaatgttgcgcgcaggtgacgggggaacagcccacgcaagagggggctgacagggggatggcatcaaattgccgtagtatggctattctcgctttgctggtgcgtctgatagtgatgatggtgatgccgtggctgtattggtattgcgcccgcgagaagggcgctcaggccgttacaggcgaggtgttagcggtgaggattcaggcagcgaaatgcgccaggttatgcgggatattgttgaatctttctgaaggaatgccgccgcataagccgcggcgggcaggggttttacttggtgtcgagcagggcataaggattgaaacgaataacctcgatacccagccattcgttaacatgcttcagcgcttccatcaccggcatcagttcgttgatggcaaagacgcgggcggctttctccacgtcaccaaatga

SEQ ID NO: 111602 - DNA, 267 bp, Enterobacter aerogenes
atgacgacagtgatcaaatggaagaccagagccgttaaagatctgcgcgctctgccttcacaagaccaaaaaccagtgcgcgaaaaagtaaacgcattacaggcttaccctgatattcaggggctggatatcaaaaaactcacggataaaaacggtcagtaccgactgagggtaaaaaactaccgcgtgttgtttgagatggaaggcggagagattgtagtgatagatatccttcgcatcctgcggcgcacgtcgacaacgtactaa

SEQ ID NO: 111603 - DNA, 375 bp, Enterobacter aerogenes
atgtccgcaatccaattcatcaccgacagcaatggacacagagtgtccgctgtagtgccgattgaattgttcgagaagttaacccgtgacagtgacctggacgagttatacgaaccagttcaattcgacgacgacgcatcaccagataccagatacccgaatgaggttattaacattttgtctgaaaagaattgcaccatgcaggccgcatggcgcatctacagaggaatgacacaaaaacaagttgctgatgcgctgggtataaaacaggctaccgtttctgaattcgaaaagtcagaaagaccacgcagagacaatatagaaagactggcaaaattatatagatgcaccccagaacaattgatacttgaatga

SEQ ID NO: 111604 - DNA, 693 bp, Enterobacter aerogenes
atgagttatctgggaagtaaggcggccagcggtgtttatcaaaaaatcatcgccgaaatgccgccgcacgatacttacattgaaacccatctggggagcggcgctgtgatgtttcataaaccgcttgcagccaggactattggaattgatgttgatgaaaatgcttttaaattaacgcggaatcgctggttacatatggggtacattccgcccgcactgcacttgtatcatggtgatgctgtaggttttctggaaagagaagactttacccagcatgggcgtgtacttatttattcagatccaccctacctgccagaaacgcgcaccagtcgtgcccgctaccgtcatgaatataccattgccgatcatgagcgtctgctggcctgcctcatgagcctgccggagaacgtcagcgtgatcctttctggctatccgtcgcagctttatgacgaaacgttagtaggctggcgtagcaaagagtttcaggccatgactcgcggcggcgtgagaacagagaaaatatggatgaatttcccggagggggcagcgtactcgcatacgttcgccggtaaggactacaacgatcgctaccggattaagcgaaaagcgcagcgctggaaggaaaagtttgcggcgttaccgccagcagaacgcctggcaattatggttgcgttggcggaagtggatgtataa

SEQ ID NO: 111605 - DNA, 558 bp, Enterobacter aerogenes
atgaagcatttcaacaccaaagcaatcagatcagttatcgccgaaatgaaccggcaggacgaaaaatggggatctgaccgcgatcagcatccgttcgtctggcaaaccatccttagcgaagaggtcggggagtttagccaggcgattttgcatgatgaatttggcggccataaatcaggaacggcgcgcgaagagatggtgcagatcgccgccgtcgctctccagattatcgaatattacgatcgccgttgtgcgcctgcggctgaatccgaacaagttcatccagagcttgcgctgccggccatcccggcggggcgtgaaaaaatcggcggttgtgattggctggactggaatgagctatcagcgctcggtcttattgtccgcattaacgctgaaatccttcatccacttggattggcaattttccgtgatccggcttccggcatctcagcgggcgccatgattgcgccagatggaaaatgggagtatgcgcccgatgttattgaagggctgcgggtaagactttccgattactccggcaaacacggtcacttttga

SEQ ID NO: 111606 - DNA, 2484 bp, Enterobacter aerogenes
atgaccgccgcatcagctgcgtctcacatcacgctgccgggtcgcactgacgccacccggtatgattacgagtggcagaagccgagacctgccatttttgtcgataagactcctgctgttgatctggttgaacttggtcaagagaaggagtttttggcgtgggtgaaagttacctttgcgccactacctcgctttattcgcctgcgtctgacttcccgcatcgacagcattcacaccatgaagggcaggcacattgcccgccttgcgctgcgcgatatcatccgcagggatctgccgcctatcaatatggtgaatgagcaatacgctattgcgatgaccgatgaggctaaatctcaggctgaaacagctttcaaagggttaaatccgctttaccatacgtttaacaccctgcatggcttagttgagcgctttaatcatctgccagacttcacgccggaagatattgagttactggcgcaggatatcgctatctatatgcgctctgtgctgagtgaggctcatgaaacagtggagacgcagagtgatcgcaaatatgccggatacctatacaccgaagcggctatcctcgcgcggcttttcttcctgacacctccgagctgggcaaaatattgccggggtgcgctgtttattgatgaagcgaccaccggcatcagcaagatgctggatgatcgttactggtaccgcaacctgaaaaagtacgccgcgcgctggcgggaacatctgcacattgcctttggtgatgtgaaacgaggcgccgcaccctattgcagcaagcaccacgttgatgagtgggatgccagacgcaagcgcagccgtgcgatcatggcccgtcttgaactggaagatcaggacaccaaagaacgtatctcacttattgagcagatcgataagagcatttccaacccggcattacgccgcgttgaactcatgacccgcatcggcggctttgagaaagttgccaccgaaagcggctacgtgggccagttttttactctgacagcgccatccaaataccacgcctataccgtattcggtcaccgtaatgccaaatggaacggggccagcccgagagccacgcagcgctaccttaatcgggtatggcaaaagatccgtgccgagctggcccgccgtgaaattcaggtctttggcctgagggtggcggagtctcaccacgatggtacaccgcactggcatggtctgttgttttccatgccggagcactctgccgagctactggaagtgatggaagactacgccacccgcgaggatgcggaagagttgcaggggaaacacggcaaccagccgcgctttgacatgaagcttatcgatcatgagatcggcagcgccaccgggtacgtggttaagtacatcagtaagaatattgatggctatgcgcttgacggtgaaaccgacgacgagagcggccggccgctgaaagaaacggctaaacacgctaccgcctgggcttcatgctggggcatccgtcagtttcagtttttgggcggtgctccagtgtctgtctggcgcgagttgcgccggttccgcaaccaggaacaggccgacaagataaacccgttgtttgccgaactgcaccgcgctgccgatgctggcgactggcaacaatacacccaattgcagggcggagcgctggtagcccgccgcgatctgccgttgcgtatctggtaccagcagaaagaccaaccaaacgaccacggcgaataccagaaccttatcaaagggctggttatgcctcacaccttcctgccaccgattgaaacccgtctgcattcttactgcatcgtgcgtaagaaaccggaggttttagacgactccggtcaggccgttgactttgattttgaccttccgggcgcgtctgcgccctctaggactcgtgtcaataactgtaccgaggtcaaaaaacgaacaaatcagccccccggatcaccgccattaatgacagtgccagctgagcgggaagagcctgaacagttcgagatcggtcagttaacacgcgaacagcggaaacaggtgattgaaagcatccataactacaaaccgcggcggcataaatcccccgccgatgagttcgaggagctggcgctcagcattactgttggcgactgctccgagtatgacacccgcagggcagagagttatctcaaggccgcccatgaaatcaggcgtagagagcaggttctgtcaccggaaatagccggactggcgggcttagttcagtcatgggcgaaagtgaagaaggtgctgatcagtaaaccgcaggccatacagctggcgcgcggcaatgaagtgacggtgctggatacggtataccgggcgcatccggttacaggtgagctgatcattgcaggcgttgataagccgtggcgcaaaactcttgcagatcataaggccggtgagctagcggctcgctggaaaaaggcagctaaacggaaaaatgagaggtaa

SEQ ID NO: 111607 - DNA, 1023 bp, Enterobacter aerogenes
atgactagccatcccgtcgcctactacaacgaaatagacccattcgcagcccaatggctgcgcaatcttatcgacgccggccatattgcgcctggtgtcgtcgacacccgttcaattgaggacgtaacccctaatgatcttatcggattcaatcagtgccatttcttcgccgggatcggcggatggtcgcttgccctgcgtcgcgcaggctggcctgacagtcgcccagcatggacagcatcatgcccctgccaacctttcagcgcggcaggcaaaggacttgggtttgctgacgagcggcacctatggccctccgcacattggcttattggccaacgccgtcctgtcgtggtctttggcgagcagtctggcagcgctgacgcggacaactggatcgaccttgtacaagctgacgtggaagccctgggttatgccttcggggcggttgcgtttccgtctgcgggcgtcggcgcgccgcaccagcgagaccgcgcttattgggtggccgacgccgattgcctcaaatgggagaggtgcggggaatttcaaccgacaggggggggtaaaccttcagacagcggcgttattagccggatggccgacaccatcagcgacggacggcaagggaggctatcagggcggaagggtacggaacggaaaattatctacagatcgattggatgtgacagcccagcttgcaggatggcccacaccgaccacgagcaacgatcgctcaccttgtccacaggaagctatgaggacgtatcgcgacaatggaacaaagattcagaagcggttgcaggatgtagcggcgttgtgcggcccggcccggttaacagtatctggaaatctgctgactggctccactgccaggatggaaagtggcggccagttagacccggatcattcccgctggttgatggggttcccggcagagtgggaagactgcgcgcctacggaaacgccatcaacattgaagcggcgacagcgttcataaaagcgtacatggcggcggaacaatga

SEQ ID NO: 111608 - DNA, 1011 bp, Enterobacter aerogenes
atgaatgccattgatccacgctgttaccacatagacgccattaacattatttctgtctctggcggaaaagactcactagcccaatgcttgtacgcggtggagaacggcgtggagcataagcgcgttttcgctgatacaggtcacgaacatccacaaaccatggaatatctggattaccttgagcggagcttagggaagatccatcgcgttaaagcagactttacccggcagattgaaggtaaacgcaagtttattgctgaaaagtggccggcttcacttgttgaagagtgtggcatgtcgccagacgaggccgcagaacgtattgcaagagctcttgaaattctcaagccaacaggtatcccgtttctggatctatgcatgtggaaggggcgattcccctccaccaaagccagattctgcacatttgaactgaagcatgaacctgtgcgcactcaggtggttgtaccggcgcttgatgaatatgacgaggttataagctggcaaggtgtcagagcccaggaatctcccgcaagagccgagctgccgatgtgggaagaggacgcagacaatacgccaggtttacacgtctatcgcccgatcctgaactggttgcatgaagatgtgttcgcccttgcaaaacgtcacggaatcaagccaaacccgctttacctgcaaggctgtagtcgcgttggttgcatgccgtgcattcatgcccgcaaatccgaattggctgagattttccagcgttggccggaagagatccgccgtgtcgctgagtgggagcgccttgttgcagcatgttcccgccgaggtaactcaacattctttccgtccacacacgaccctcgccgcgcagaacgtcggattgatgtgatcaccgtcgatgcctacggcattgagtcatatcgggactgggctttaaccaccagggggggggctcagtttgatttgctggctgctgcaaatgacaaatcggtttgttccagtgtttatgccggggtgtgtgaatga

SEQ ID NO: 111609 - DNA, 549 bp, Enterobacter aerogenes
atgaacaatgtcatgttagatgttcgcgtgctggggaaatctcccgactcaccaatttttgccattgagtgtgtattcttcgaaccgtcgaccgggaagattggccctgaatattaccgcgctgttgatatcagaacggtcggtggtatttatccggaagcagtattgcagctcatgaaaggggattcggcgcaaagggctgaggttattaacgcaacttgcagcgcgatcgatgccgttgcaggtgcctgccgttttatcacgtcgacagtttcaaagcatgagaagctctattgctgggctgcgggtgattcgcttagtgttgcagcactggcgcacgctgtttcccggtatgatttagaaccgttcttaccgcccttcgaagtccgtaacctttcaacgctaattcatatcgcaggcgttaccgggtacgtcccgcacccgcgccgctcttctgctacctacctgctgaccgatgccgtttatcgcgctgagcaggcctgcattatctggcagcgtctgacctccccacacctcgaatctctgtga

SEQ ID NO: 111610 - DNA, 225 bp, Enterobacter aerogenes
atgtcagtcaagtcaatcaagctgggtaatggaataagtgatccggagtttatggaaataaacaccgaggcgcgcttaagcgagcgcgctcagttgctgggactactgcgcatctatatgggcttgctgaaaaaggaaagcctcaccccggaagagatttattcatcagtcgagcggtggatcgtcaaccgcgaattaaccaataacgagggtaacaaacaatga

SEQ ID NO: 111611 - DNA, 273 bp, Enterobacter aerogenes
atgtttaccgaggaaaacacatcatttgagcgtgaaatgctcattcgtgaggcagtcgaaagtgctgagcaaggctttactgtccatttgaaaaatggtgcacgtattactgttacacctgatagcccctcaattgatttaattgtctacgggctggaaaagaccattcgtggcgggcatgagcgcgctcgaatgacttttattgattttctttattactggcatgaacggttattcaaacaggtaaaaagaaaacctcgccctaaccattaa

SEQ ID NO: 111612 - DNA, 399 bp, Enterobacter aerogenes
atgaaacaagaatacgcggataaaattaactcacttcttcagtgcttccatttcaataaagagtttctggaatggaaccatgattattcacttcagttgcttcgccatggtgtttcccatctctaccattttgcaatgctgcaaggggagaacgacgaagacaccctcgccgaactgcgcaatatcatcaccgccgtcaccgagggagaagtgccaaagccttatgatctgacgcttatctcagataagtcaccagacgtcaaaggcaagaccgtgatgtttgttaacccagtggcggtatccgtggagttaacgcctgagatgttgcagcacctcaaaagctctgttgctgccgcaagcggtggagttcaacgcctgaaacagccgagtttgtattaa

SEQ ID NO: 111613 - DNA, 264 bp, Enterobacter aerogenes
atgaaaaaacgttattcgcaattcggctctgaagcggggagtatccacggcgcgattcaggtcagtaaaaatacttttgcgtatcgcggtttcaccattcgcaaaacaccgcgcaatatctttaatgaacgccagacctatttaattaataaacgggacgagcagggcggtattgataattactacggtcgtgatttcgcactggtggaagcctgcaacaccgttgacaggatgttaaatgatgatcggtttaccgctgcgtga

SEQ ID NO: 111614 - DNA, 267 bp, Enterobacter aerogenes
atggctagaaacgcaagaagggctacaactccacctgagatcagggatttaccgggagattacccgtttggtgatcgcgtttcggaatctctggctgattatgcaaaacgtactggtttgaccttaaaggccgtacagcatcgcgcagatgatggacgactgccgatcatccaatcgcgtccgcgcgcaaagcgcgaggtgaatctactcgctatttacatgaacgcccgatacaaagcggagcgttttgttgagtccatgaactaa

SEQ ID NO: 111615 - DNA, 300 bp, Enterobacter aerogenes
atgtcaatagagatttcagaaaagctaaaaatgatcagagatgccgaaggcctcagtcaggcgaaatttgcccaactaacaggcatttcgctcgggatgataaagcagtatgaaaccggcattagaggggctggggtagaaacgctacttaagataacgacttgcgcagtactgaagaaatacaccctgtggttaatgagcgatgaaactaatgagtcagcggggcaaattgctccgcctctctctcctaatgggccagaaaacacatcgagccaccgaaacgcgaagaaggttggctaa

SEQ ID NO: 111616 - DNA, 318 bp, Enterobacter aerogenes
atggtaaatgcagtatctgctaaagattatcaatcgcagggtgcgaaagctttaggagaaaaaatccgaaccatcagacaagccgaatgcctctcacggggtgctttcggcgcgatgcttggcattcctgttggtacgcttcggcgttacgaaactggaaaaataatcagtgttggtggtgatgccttgctaaagatcgtaaatcacccgctgttttataaatacgcgctctggcttatgactgacacaaccagcgaagccgccgggcaagttgcacccagcttaaattttgatgagggcgacaccaatgagcattaa

SEQ ID NO: 111617 - DNA, 969 bp, Enterobacter aerogenes
atgagcattaagtccctcaaagatggttatatggttgacgtgcgtccgaacggtcgcgagggtcgccgtatacgcaaaaagtttgcgactaaatccgaagcgcagcaatacgagcggtggatcttgtcctcccagcacaataaaagctggctggataaagccccggacaagcggcctttctctgagcttatcgacctgtggtggcggattaaggggcagacgatgaagtcaggggaaagcacgcgccgcaaacttgagcgcgttgatgaggcgatgggctttcctactgctgaccgggtgaataaaaacacctgggccgattatcgcgctggccggtatgcggctggcatcaaagcgaaaacactcaaccgcgagcaggaaaccttatcttccctgttcagctccctgatcgagacaggaaattatcatcacgataatccctttaaaggcgttcccccgctaaaggttcacgcccacgaaatgggttatttactgaagccgcagatcacgaagctattagccgccctacccgaaccagaaaatttagcggcacgtttaagcctggctaccggcgcccgctggggagaggttattaaattacggcgcacccatctggcccattccaaagcaatgttcatcaatacgaagaacagcaaaaaccggacggtgcccgttagtcagtcgctttttgatgagttgtgcaagcggggcaatggttacatcttcgcggacgtcgactacgagctgctgcgcagaactatcaaacaggtggcccctgatctgccagacggtcagggggtgcatgtgctgcggcataccttcgccagtcacttcatgatgaatggcggcaatattctgaccctgcaaaaaatacttggtcactcaaatattcaacaaacgatggtttacgcacatttggcacccgactacctacaagacgccgtgcggtttaaccctctggagaactaa

SEQ ID NO: 111618 - DNA, 399 bp, Enterobacter aerogenes
atgaaacccctaaattttgatgacttcccctaccttggtcgtgacctcaaccccacggagcgcaagcatctacagtgcatgcagcagatcacacctaaaatatttattcagttcctcaccgaaaaaggggctaaagcattctgtctttcgtgcggacacccgaagctgtttgttccgcacacaactgtccacaacactgatcctgagcttcctgattatgatggctcaaatgactgggaatatcttacccccagccacaaggatgatgagcctatttctatctataacacccggtatgaggtgatgtgttctcactgcggtttcacatccacatactctgcttatccggtcattcaatgggctaaggaaaatgggctcatagtttgggaggaggtctaa

SEQ ID NO: 111619 - DNA, 477 bp, Enterobacter aerogenes
atgtcgtatgccaaaagggagcaaggagtaaccccgatccgtaagggtatcgacagcaattcaagtgatgcgttatcctcttacggaggcggagatggtagcggaggcgggatgttagaaaaacttgaaaggcgtgttgagcggctagaggccgacttaacagctgcaagaattgacttaacacttattagagagcgctctgaaaaccatgctacaaaatcggagttatctatcctgactgaacgctcaaatacctttgcaaaacagtcggaacttacgaagcttgttgagcgctccgaaagctttgcgtcaaagactgagctagcaagacttgtcgaacgctcagagaactttgctacaaaggccgacctcgaaaaaatggcaaactcaataaattcgagaatcacatggtcagtcatgatcccgctagcagttgctgtcattggttttgtcattaaatctttcgttttcaagtaa

SEQ ID NO: 111620 - DNA, 657 bp, Enterobacter aerogenes
atgaagcaggatttccgctgtggttgctggctgatggagaaaccagaaacagcgatgaaagccattacccgtaatctcgatcgtggtatatggcgcgacttaatgaaaaagtcaggaatgctatcgctcatggatgctcaggcgcgtgaccagtggtacaacaacctggaaaaggacgatattccggctgtcagcgaagagaatatactgagtacctttgagcaattgcaccagagcaaaagcgaggtgtttgagcgtggggtcatcaacgtgttcaaaggcttatcgtgggattacaagagcaacagcccgtgtaagtttgggaaaaagatcatcgtaaatggactggtgaaacatgaccgatggggatttgggcttaactggggatggcaacgtgatcgtctggcggatcttgaacgcatgctgatgctgcttgatggcaaaccgattcccgacaaccgcgctgatgccacccgtcgtctcagtgatcatattcatcagaacaggcaaagcaattgttacgaggacgaaatgtttactattaagtactttcagaagggaacagctcatatcagcttcaaaaggccagaactgcttgataaaatgaacgacattgtagcgaagcattttccttcgatgttacccgctcgctcctga

SEQ ID NO: 111621 - DNA, 276 bp, Enterobacter aerogenes
atgaaaaaagaaaataaacatgcaagtcaaacttcagcggatctagctgcattaatggaatattctcgttttacgaagagaactcttaccaagtcttccagcgaagtttttgatttatttactgacatatattatatggaaacagtttatgatgatattattaaaaagacaaagaagagtattgataaaagtcaacacaagtacattgattttgaaaaggttagaatggatataatgtgtatgcacacacaggctattatgatttcctacatgtaa

SEQ ID NO: 111622 - DNA, 165 bp, Enterobacter aerogenes
atgagtcgcgaagaagcaattaacaaactaaaaattctgcaggagatgagagataaggaaatcgcccattgtaatgctgatgacgtaatctgcgaccttctgaagtcgcttggatatgaagacgtggtaaaggaatacgactacatcgataagtggtatgcatag

SEQ ID NO: 111623 - DNA, 357 bp, Enterobacter aerogenes
atggattacagcaagctatcagattttgaaattaataagctcgtattcgaaagaaaaacatctcttgcggcacttagttatccgcacagcgcagataagaggtcatgtggccataaggatataaatgatatttatcactggtttgacttctgcaacaacccagtagatgcatggccgattattactggtaatggaattagcctttaccacgataatggtaattggcaagcggaaatgacctactacgctccagttggcgcatttggtactgacgaaacatgcagtaaatttgtcgatgataaaaaccctcttcgcgctgcaatgattttatttcttatgatgcaggagcccaaatga

SEQ ID NO: 111624 - DNA, 585 bp, Enterobacter aerogenes
atgagcaatgtaatttttacctataacgaagaatcagcactgtcagccggaatgggtggcttcattaatgaaaatggcgcgtacattttcaccattacagaggccgagctaaagcagggcattgacggaagtaaggctcaatggattgagttttccggtgaagctgatgatgggcgcaaggtgcagtacctgagtgtttactccgtcaaaaaagacggtcagcccagcacattcggcgtaaacatgattaacgcgatgatgggctgcgctggcattaattcactcactcagcacatggcatctgctggaaaatatgttgcgcctgagtttgctggtaagcgaattggcctggttcttcaaaaggttctccgcagcaagcgggacggcagcgatacatacggaatggaaattcgcatcccgtttattgctgaaacacgacagacgcttcaggagcgaaaggacggcgtaagacctgaggcggtggataagattgcatcatcattaaaagaccgcgacaaccgcaacaagggcggaacgcaacataccgataacggtcattacgactacggcaatcaggacttctaa

SEQ ID NO: 111625 - DNA, 681 bp, Enterobacter aerogenes
atgggaactgcaactttaatcctcggtgaatccggcactggtaaatcagccagcctccgcaatatggcgccagacgacgcaatcctgattaaagcggtagggaagccgctaccgttccgttctagtaactggaagccatgggactcaacaagcaaaacaggaagcatcgtcgtatctgacgactggaatcatattctgacaataatcaagaaagcgccggcatacggaaagaaaatcatcatcgttgatgattttcagtatgtgatgagcaacgaatttatgcgccgatctgaggagaagtctttcgacaagttcacggagataggccgccatgcctgggaggttattagggctgctcaggatgctcccgatgacctacgcgtttattttctagcccacaccgaagaaacggcgatgggacgcacgaaaatgaagacgataggcaaaatgctggatgagaaaatcaccgttgaaggcatgtttactatcgtacttcgcaccatgacccgcgacgacaaattcttcttctctaccaaaaacaacggatctgacaccgttaaatcaccaatgggcatgtttgaaagcagcgaaattgataatgatcttgcctatgtagacgcaactgtttgcgaatactacggcttcaccaatgttcacaaaattaaggattcagccgcatga

SEQ ID NO: 111626 - DNA, 171 bp, Enterobacter aerogenes
atgagtgcaatggaaagatgggatgacgacgcttttattatggcggtaagcgacgttattccagagcaggaaatgacgcatgaacttgcagcacaggaagcgatagcggattaccacagcgagaagcagcaaatgagaatggagggtgtgttatgggaactgcaactttaa

SEQ ID NO: 111627 - DNA, 327 bp, Enterobacter aerogenes
atgcagaaatttaagggaacgcccggtccgtgggagtcaaaaaccattcacggtgacctcaaagttattcagaaaggtagctacgagaaattagcgcctgggatggtttcttattgctgtgtaactgagcttgagaataagcatgacgccaagctgattgccgccgctcctgagttactggaagctctgcaattggcgcttaacgccatgaacgagatgggtgacatcttaaattttcacgatttagctgaacaaagtaaggttgatgagttaacgccagcttttgataaggctcgctcggccatcaacaaagcactcggcaaataa

SEQ ID NO: 111628 - DNA, 507 bp, Enterobacter aerogenes
atggcaaacccaaatttcacaccatcatggccgctctacaaagacgctgacggtgtatatgtgtctgcacttccgatcaaagctatcaaatacgctaatgacgggagtgcaaacgcagaattcgacggcgcatacgctgagcaatacatgtctgcgcaattcgtgagtgtgttcaagccacagattggcggatacctgttccgtagccagtacggcgagctgctgtacctgagtaaggcggatttcgaagctgagtattcagcaggtggcggagaaactgttagttggggtgatatcgaaggcaaaccggcaacgttccctccgaccattggcaccaccgcaactaccgcgatggctggtaatgcaaagcctgctactgcaggtgcggcagatactgctgcaaaactcgcaacacctcgcaccatcacgctgaccggcgctgtgacaggttctgcctcgtttgacggctccggtaatatcacaattaccacaactgcaggcgcatag

SEQ ID NO: 111629 - DNA, 504 bp, Enterobacter aerogenes
atggcgactgaagaagtgaagtgcggtcgaccatcggattacacggaagagttagcagaaataatctgcctcagattggcggagggtgagtctctgcgctctgtgtgtcgtgatgaggatatgccatcaaaacaagctgtgttgcgctggctggctcgtaatgagtcgtttcgtgcccaatacgtgcgagcgaaagaagaaggcgcagaagccatcgctgaagagctatttgatattgctgatgacggcacgaatgattggatggagaagctggatagggatggagaagccattggctatcagcttaatggtgagcacgtccagcgctccaagctgcgaattgatactcgcaagtggtatctgtccaagataatgccgaagaagtacggcgatagaattcagcatgagcagaagataactatcaccgacctaaccgatgaagagttagaccgcaaattactggagcttaccgatgcgcaatctcagccgggagcagaagattga

SEQ ID NO: 111630 - DNA, 1449 bp, Enterobacter aerogenes
atgcgcaatctcagccgggagcagaagattgagctggtaaggctcttggaagaaaagaagcgtagagaatttgtttatcgctaccgctcctactatgacacccgatacgaatggcagcgtaaattcattgctgctacagcagagtatcgacagtgcgctctgattgctgcaaaccgagtcggaaaaaccgatacggcgacatacatcgacgccgttcatctccttggtgaataccctgatgggtggacgggacatcgattcgaccacgcgccacttatgtggtgcctgggttactccggcgagaaatgccgagacctgttacaggccgcaatcattggtaaaaaagtaaatggcgagttcactggcggactgataccgccggatagaatcgtctcaaccgagccaatgaccggcacacccaatgctgttcgttctgcatatatccgccacagcagcggagacttgagcaaaatacagttctggtcatacacgcaggggcagcacgccctaatgggtgatgatatcgactggtttcacatcgatgaagagccagaagacccaaccatctacccgcaggtgctaactcgtacagctaccggtgaccgtggtaatggcggccgtggcatcctgacatttaccccagaaaacggacgtacagagttggtaatccagctgctagatacgcctgcagattctcagttctgcatgaatgttggttgggatgatgcacctcacctgacggaagaaacaaagaaaagcctgctggagtcgttcccaccccaccaaagagacatgcgaaccaagggcattccgatgttagggcatggacgcatattcgatttcagcgaagaaatgatcacatgtgagccattcccaatacccaagcattacatggttatcgatggcatggacttcggatgggatcacccgcaaagccgcatccaactggcaatcgacatggatagcgaaaccttctatgtaactaaggcttggaaggcaagtaaaacatctcctgcagaggcttggggtgcaactaaagcatgggcaaacaaagttcctactgcatggcctcaggatggattgcagacagagaaaggcagtggtttacagcagagggagtattacaaggatgctggattcttgatgctcccagagcctgcgcaatggccagatggatcccgctcggtagagccaggtctgttcgagttgcatgacctgatgagtactggtcggttcaaagtgttctccggactccgtgattggtttgaggaattcaatttctaccatcgcgacgaacgaggacgcattgttaagaccagagatgacctgttagatgctacacgttacgcctacatgatgcgccgcttcgccaaacgatatggcgacatcgggacaatcaaagaaaagaaaatccccgcaccgattagaccagtacgcagaggacgataa

SEQ ID NO: 111631 - DNA, 2178 bp, Enterobacter aerogenes
atggccgacaatgaaaacaggctggagagcatcctgtcgcgctttgatgcggactggacagccagcgacgaagccagaagggaagccaagaatgatctattcttctcccgcgtctctcaatgggatgactggttaacacaatatacaacgctgcaatatcgcgggcagttcgatgtggttcgcccagtggtgcgtaagctcgtatctgagatgcgtcagaaccctattgatgttctgtatcgtccaaaggacggggcgagccctgattctgcagatgtgttgatggggatgtatcgcacagacatgcggcataacacagcaaaaatagctgtgaacatcgccgtacgtgagcagattgaggctggcgtaggtgcgtggcgtcttgttactgactacgaagaccaaagcccgactagcaacaatcaggttatccgtcgagaacctatccatagcgcttgctcccatgttatctgggacagcaacagcaaactgatggataaatctgacgctcggcactgcactgtaatccactcaatgagtcagaatggctggaaggatttcgcagaaaagtacgatctcgatgctgatgaaattccatcattccagaaccccaatgattgggtattcccctggcttactcaggacacaatccatattgctgagttctatgaagtggtcgagaaaaaagagactgcttttatctatcaggatccggtaacgggagagcctgtaagctatttcaagcgagacattagagatgttatagatgagcttgctgatagcggatttatcagaatcgcagagcgccaagttaagcgtcgccgggtatacaaatcaatcatcacctgcaccgctgttttgaaagacaagcagcttatcgctggggagcatatccctattgtcccggtgttcggcgagtggggctttgtcgaggataaagaggtatatgaaggcgtcgtccgcctgacaaaagacggccagcggctacgcaacatgattatgtccttcaatgctgacatcgtcgcgcgtacgccaaagaaaaagccattcttctggcctgagcagattctcggctttgagcatatgtatgacggtaacgacgattacccgtattacctgctcaatcgcactgatgagaataacggagagctgccaacccaacctcttgggtattacgaaaatccggaagttccacaggccaacgcctacatgctggaagcggccaccgctgcagtgaaagaggtggcgacgcttggcgttgatgcggaagcagtaaacggtggtcaggtggcatttgataccgttaaccaactgaatatgcgatctgaccttgagacgtatgttttccaggacaacctcgcaactgccatgcgtcgtgacggcgagatttaccagtcgatggtgaatgatatctatgacgtacctcgcaacgtaacagtcactcttgaggacggtagcgaaaaagacgttcaactgatgagcgaagtcgttgaccttgctacaggtgagcgtcaggtgctgaatgatatccggggtcgctatgagtgctacaccgatgttggcccatcattccagtccatgaaacagcagaaccgagctgagatactggaattgcttggtaaaacgccacagggaactccggaatatcaactcctgctgctccagtacttcactcttctggatggtaaaggcgttgagatgatgcgtgattatgccaacaagcaactcattcagatgggcgttaaaaagccagaaacacctgaagagcaacagtggcttatcgaggcgcaacaggcaaaacaaggccagcaagatccggcaatggttcaggctcagggggttctcctgcagggtcaggctgaactggctaaagccaataaccagacgctatctctgcagatagacgcggccaaggtcgaagcgcagaatcagcttaacgccgccaaaatcgcagaaatattcaacaacatggacctcaataagcaatccgagtttagagagttccttaaaaccgttgcttcatttcagcaggatcgcagcgaagatgctcgcgcaaatgctgagttactcctcaaaggcgatgaacaaacgcacaagcagcgaatggacattgccaacatcctgcaatcgcagagacaaaatcaaccttccggcagtgtagccgagacacctcaataa

SEQ ID NO: 111632 - DNA, 909 bp, Enterobacter aerogenes
atggaccaaaccaccgaaattcaggcacctgaaggccaatccctgtccgtcgataacgcggcggcatccgcagtcgatccagcatcaaatgccaatgatgctacagggcaggaagatggttttgagattgtcctgaaggacgatgagccagcaccaaaacaagacccggcaaagaacgcagaattcgcccgccgccgcatcgagcgcaaacgtcagcgtgagcttgagcagcagatggaagcggttaaacgtggagaattgccggagagtttgcgggtaaatcctgaccttccaccccagccagatattaacgcctacctgtcagaggaaggcctggccaaatatgactacgacaatagccgcgcacttgctgctttcaatgccgccaacaccgaatggctaatgaaggcgcaagatgctcgcagcaatgccgtggcagagcaagggcgcaagactcaggagtttacccagcaatcagcgcaatacgtcgaagctgcccgtaaacactatgatgcagcggaaaaactcaacatccctgattaccaggagaaagaagacgcgttcatgcaactggttccgcctgctgtcggagccgacattatgcgtctattcccggagaagtccgccgcgctcatgtatcacctgggagcaaacccggagaaagcccgacagttattggcaatggatgggcagtcagcgctgattgaactcactcgactatccgaacgcttaactctcaagcctcgcggtaaacaaatttcctctgctccacctgctgaccagccaattactggtgatgtgtcagcggctaacaaagacgcaatccgcaaacaaatggatgctgctgctagtaagggtgacgtggaaacctaccgcaaactaaaggcaaaacttaaaggaatccgataa

SEQ ID NO: 111633 - DNA, 1293 bp, Enterobacter aerogenes
atggctttgaacgaaggtcaagttgttacactggcggtagatgagatcatcgaaaccatctccgcaatcaccccaatggcgcagaaagccaagaaatacaccccgccggccgcatccatgcagcgctccagcaacactatctggatgcccgtggagcaggaatccccgactcaggaggggtgggatttaactggcgacgcaaccggaattctggagcttaacgtcgcagtaaacatgggggagccggataacgacttcttccagttgcgagctgatgatttacgcgatgagactgcgtatcgccaccgcatccagtcagcagcccgcaaactggccaataacgtcgagttgaaagtcgcaaacatggccgccgaaatgggctcgctggttattacatctccggacgctatcggcacaaacaccgcagacgcatggaactttgttgctgatgctgaagaactgatgttctcccgtgagcttaaccgcgacatggggacttcgtatttcttcaaccctcaggactacaaaaaagccggttacgacctgacaaagcgcgacatctttgggcgaatccctgaagaagcataccgtgacggtactattcagcgtcaggttgctggcttcgatgatgtacttcgctctccaaagctgccggtactgactgcgtctaccgcaactggcattactgtatccggcgctcaatcattcaagccggtcgcatggcaactggataacgatggcaataaagttaacgttgataaccgtttcgccactgtaaccctgtctgcaactaccgggctgaaacgcggcgacaagatttcgtttgctggcgtgaaattcctcggccagatggctaagaacgttctggcgcaggatgcgactttctccgtggttcgcgttgttgatggtactcacgttgaaatcactccgaagccggtggctcttgatgatgtttccctttctcctgaacagcgcgcatacgccaacgttaacacctcgctggcagatgcaatggcggtgaatatcctgaacgttaaagatgcacgcactaacgtgttctgggctgacgacgctatccgaatcgtttcccagcctattccggccaaccacgaactgtttgcaggcatgaaaaccacctcattcagcatcccggatgttggcctgaatggcatcttcgctacgcagggcgatatctcaaccctgtccggcctgtgccgtattgcgctgtggtatggcgtgaacgccacgcgaccggaggcaatcggtgtaggcctgcccggccagaccgcgtaa

SEQ ID NO: 111634 - DNA, 501 bp, Enterobacter aerogenes
atgcagataaagactaaaggtgatctggtcagagctgcgcttcgtaagcttggagtggcatcagatgcaacccttaccgatgtagagcctcagtctattcaggatgccgttgatgatctggaagcgatgatggctgagtggcatcaagacggaaaaggcatcgtcactggatatttattctccgatgatgaaaatccgcccgcagaaggtgacgaccacgggcttcgttcaagcgcaatcagcgcggtattccataatctggcctgcagaattgccccggattatgcgcttgaggctaccgctaaaattgtcgccaccgctaaatatgggaaagagcttctctataagcaaaccgccatcgccagagctaaaagggcaccttacccatcacgcatgccaactggcagcggaaacagtttcgccaatctgaacgaatggcattatttccccggagagcagaatgccgattcaacaactccctctgatgaaggggctgggtaa

SEQ ID NO: 111635 - DNA, 465 bp, Enterobacter aerogenes
ttgatgaaaagattcttgcttttgttaccaatattactttctggctgcgccaaagttagcgattaccaagcaagttgcgaacagcgataccaaaggcttagcgatatggcaaattgtcttgatgcaagcgtgaaaaatgactccaggatggcgtcagcatcaacaccaaagctatatgttttggctgcaaaaatgcttggacagggagttgatgagggaaagataagcgatgcacaggctagactagaattgcaaaacctatacgttaacattcagcgacaagaagcgtcagaccagcaggctcaggggcaggctattcagcaagccttgcttgggtaccaggccatgagcacaatgcaggccattgagcagaatgcaaggcaaccagtaatacctcagacgcctcaacgaataaccacagattgtcattcatatggtatgaatactacctgtacatcttattag

SEQ ID NO: 111636 - DNA, 156 bp, Enterobacter aerogenes
atgctgcagctgatgccaggaagtcggcacaggatgcatctgcatcagcatctgctgcaaaatcatcagaactgctcgctaagggatatgctgataacgcatctgcatcagcgacaaaggccgcagagtcagcagagtcagcagaggccattgtag

SEQ ID NO: 111637 - DNA, 597 bp, Enterobacter aerogenes
gtgaaattctggaatcaccgtcacgcgataccgggttcaatgagcgagtggacggtaacgcgccgaatattgctttcaacccctacggggataccacccagcagttgctaccgctatttggaactgatggcgtatggaagccgatcgatcagcttccggttgcggtacagtcaattgctcagtttggtgcgaaaggagcagtcccggcaatgcgcgttacagccactccgccagggcaattccatgatgcactggtcaacgttggcctcgatagcgttaaggctggtgagtatgtcgccgttgagttttgcgtttacgtcgctgctgatgctggggctaatgttgaagcgctgctggcgaatgctgcacgtgctttcttctggtacagttcaactggatttgtgcaggtatttgcttcaatcagagaaaaactggctgccaacacctataaaatgtttgcggtttaccagtacacccagaatgcgacaaaggtctatttcggtgcccgaaaccaggcaacgaatgccgatttctatgctttcaacttcttcgccgcatcgtcttcaacaaccatcctcaacattaccaaggggttag

SEQ ID NO: 111638 - DNA, 342 bp, Enterobacter aerogenes
atgaaggcgatagccgtagcattattatttattccttttgcttgtttttcgcaatctattgatgagtttttcaaagacaacccggatttaaaatctaacccattcaccagaagtgcaattatttctcaggctggtgtcgcgacactaaatgatgtaatgcttcaaaagcaacctggtgaaatgtcaggacaagtaatgaagaggttacttaaagaggacggatataattatgcgctggttgctatcagacagttggcagaacagtgcaaacaaggcgtcgctgaatcagcatcaaacctcaaagaaagcgattgcaagatgatagaagaacataatcgctga

SEQ ID NO: 111639 - DNA, 408 bp, Enterobacter aerogenes
atgcataagaaagtatttacgggtttaattctattagcattaacagcaggtaacgctcttgctgattttgaaccaatgtccataaattgtgatggtgagaactataaaattttgtggggagcgacaggatatgccgtaaccaaaaacggtgagttattaacaaaccctaaatttatgcgaaaaacctatgggaacgatcctgatgccgctcttcttacagttgagcactggggcagaaatggtggaatgcactacttgaagacgtttatctttaatagcgcgcctaaaaaaattacactgttaagccaataccttgatgcagacaactcaccacgggctgaacctgtaactaaaaaatgcactggtgatgttaatgtggaagttttcttcccagaagggggattatga

SEQ ID NO: 111640 - DNA, 339 bp, Enterobacter aerogenes
atgaaaaaatggctgtgcgtactaatggctcttatttcagtgaatgctattgctgacactcaatgtgggccatacaaaatattctggaactcaaaagatggttttgccagagttaacggtgagaggccggagagccagaaagttacatttctgaaaaagaaagatgattacggtaacgttaaaattcaatggatgttaacggataggaactctggcaggtgggttgggatggactttattgcaagaggtggtaagccaatccttaacgtcgagggcatccgtatgaatatggacgagccgcgaatttttggcacttacgattgcataaaatcaaaataa

SEQ ID NO: 111641 - DNA, 696 bp, Enterobacter aerogenes
atgaaatattactttactgccaggctgggggagactcgatacctacaggccgatggctcgctattgtgcaaagacgtgccgatagccagaaccggcacgcaaatctatctgccggaagaagtggaccttgagcctgatccgctaaccggcacagtgacggtatggcgaacagaggatgaagttttctctccagagacgatggcgagctttgaaggcgttgccgtcaccctggagcatccagaaggcgataacggagaaatcgtctttgttaacccatccaactactccgaactggcgcacggtcacatacagaacgtcaggcgcggtactggcgacaaatcagacctactgatagctgatgtgctggttaagcggcaggaggctatcgacgccattcaggctggttataccgacgtcagttgcggctatgacgccaaatataaacaactctccccaggtaaggggaagcaataccaaatcaccggaaaccatcttgctgtcggcatcgaccgggggcgggctggcggccgctgtgctatcggggattctgtcccatcaacgttacgaaaggaaaagccaataatgtcatggtttaaaaacttggctaaggccattaagacgaaagatgatgacgctttagcgaagctcatcgacgaagcgccggacatgccgtctgatggcatgggctctatttga

SEQ ID NO: 111642 - DNA, 228 bp, Enterobacter aerogenes
atgaaaatagttgttttttcggatgatggaaatcatgtcgttgatgcggaagatggaaccttgcattggaatgtgatgaattctgatgggagctgttcccaaaggcccgttgaaatgtacgtgtatagggaactatcagttcataaatttgcgtacattgctaaattcagagatgcatcatcagccgaaatcaatgaagccgtagttaagcacggatacgacgtatag

SEQ ID NO: 111643 - DNA, 435 bp, Enterobacter aerogenes
gtgaatagcgatatctggatgccagaaggttcagtcgaggaagcccaccagcgggctttaacgtgggtttgcgatgcataccttttttacctggttagcctgcaccgccgcccggtgtaccgccatcagtacggcgatatttcgcttaatcaaccagctttgcaggggttcattgactcctacctgcaagataaggggtggaatgccgaacggcgttgggcgcattacatcaacattctggatctcatcaaatatatgcatcgcagcaattcgaaatttatcgactggggaacagtgccagcgctgactcctcgtgggatccgctggatgaacgcatgcctttcacgcctgggcgaaatggtaaatagccatggcgggtgggatggctacatcgctgcagttaaggaggcgcaaaacgatgaaaaaggtatttga

SEQ ID NO: 111644 - DNA, 126 bp, Enterobacter aerogenes
atgaaaaaggtatttgaagtggtggtgtttacactgtttttctccagcctctcggggctggggtttaccgcgggtgtctgctgtttcttcggatttgcgcgattactggcgaggtctctggcatga

SEQ ID NO: 111645 - DNA, 213 bp, Enterobacter aerogenes
atgagcaacggtcagcactatgcatacccgaacccgagcaatgcgacaccaggtggaatgacctatcgccaacaccttactgcacagatcgcaccggtcatgctcacgaatttttttagtaacgatgcatggacggattacgacgatttagccagaaccttggtgatggctgtagatgccatcatcgaagccgaacaggagacagcaaaatga

SEQ ID NO: 111646 - DNA, 468 bp, Enterobacter aerogenes
atgacgatcagcgaaaagcgccttaaaaaaatcgccagtggtgaacctttcttcccgggtgaggtggtggcgatggcccttgagcttctagcttaccctaaagaagcattgcagtcggaatatcctgaaacgctcccctgcccagtcattcttgagcctggcttccggtttggtaaaggcgttggtacccacctggtgttgcgagcgctcaaaaacagaagcgaacgttacgcagagctggatgctatggggcccgaagcacgcgcaaaacatgatgcagctatcgctgagcttagggaaaagctgggttttggtatcccagcaaaaacaactatgcaggttaagttgccgggactaccgcaactcgggtctgacgcggaatggtaccagggatttgctgctggtgcaggaagcatgcgcgaagcttgtgtggccgcgctggtttctgctggattgagagtgcagtga

SEQ ID NO: 111647 - DNA, 237 bp, Enterobacter aerogenes
atgaacaatgtgatccagttggccccaaatgagtgggtttgtgaaaacgttcttattgcggtaaccgggctaaagcccggcaccatcctccgggcaaggaaagagtgctggctggtcgggcgagaatatattcatgtatcacctgatggaaatccgaagccatccagcgaatgcatgtacaaccgtaaggctgtggacgcatgggtttcttcactaaaaaataaacaaccagggtga

SEQ ID NO: 111648 - DNA, 1314 bp, Enterobacter aerogenes
atggataaagtcacatatccaacaggcgtcgaaaaccacggtggaagtctacgcatctggtttaattttaaaggtaagcgtgtcagggaaagcctcggtgtccctgacaccgctaagaacaggaagatcgccggggaattgcggacatctgtatgttttgctatccgcacaggcaccttcgactatgcagcccagtttcctgactcacctaaccttagaacgtttggggttggtaaaaaagaaattacagtgaaagaacttgaagacaagtggctggacctgaaaaaaatggaaatttgtgcgaacgcactcaatcgctatgagtcgatcgtaagaaatgtcattccaatgatcgggggaaacaggttggtaacttcggtgaccaaagaggaactactctacatcagaaaggagttgctgaccgggtatcagaattttgcaaacggcaagaagccagcaaaaggcagaagtgttgttactgtgaactattacatgacgacaatcgctgggatgtttcagtttgctgcagatcacggttacctggaaacaaacccgtttgatggcattaagcctctgaaaaaagccagggcagaaccggatccgctaactcgggacgaatttattcgtctgatagatgcgtgccggcatcagcagacgaaaaacctgtggtcattagcagtgtacacaggtatgcgtcacggggaactggtctccctggcctgggaagatatcgacctgaaagcaggaacaatcacagtcaggcgtaattatacgaaacttggtgagttcactctaccaaaaacggcagcaagcacggatcgggtggtgcatcttatccagccggcaatcaacatcctgaagaatcaggctgaaatgacaatgatgggcaagcagcaccacatcgaagtgcagctacgtgaatataaccgttcggtgaatcacgaatgcacattcgtgtttaaccctcagttgactaggcgttgtgagcaggttggttttatctacaaggttgattcagttggtgactcatgggatgccgccatgaggcgcgcaggtatccgccgcagaaaggcctatcagtcacgacatacttatgcatgttggtcactgtctgccggagccaacccgagcttcattgccaatcaaatgggccatgctagcgcccagatggtttttaatgtgtacggtgcctggatggcggacagcagtgcagagcagatcacaatgcttaatcagaagctggcaaactttgccccattgatgccccatagccagcaaggcagcatgagaggattattaaaatcagtaagttaa

SEQ ID NO: 111649 - DNA, 258 bp, Enterobacter aerogenes
atgcttgacgacctgtgggcctggcttacagagcaggagacagcatgccctcccggcggcgctttacataaagctatcgtcatgcactgtcgcatcagcgtggagctgagcgtgttcctggatgatggcgcggtgtcgctggacaacaatgtctgcgtacgcgcgatcaaaaccgtggtcatgggcagaaaatcatggctgttcgcgggatcccggatggcgggagcgcgtgcggcacaaataatgagcctgctgtaa

SEQ ID NO: 111650 - DNA, 1206 bp, Enterobacter aerogenes
atgaaacgcgattacggtagtgtgggtaccatagctcttagagcaagcgctttacttcaggctatgagtagggatattgaggaacaaaggaaagaatttaatctgacagattatcatcagacatatactcgtaacgctgtcgcaaaactaccaaagctgagccggcgtatcgtagaactggccatgaaagaaatggaagaagacggctatatatttaataaaaagcagattggtaacgtcgaacaatatgctctgacgataaagaatgttatcgatatctacgcccaccgacagatacctaaatatcgcgatatccataaagaaccctacgttattttcgttgtaaaccttaaaggtggtgtatcaaaaacagtcagtacagttactcttgcacatgcgttgcgtgtacatcaggacctgctgcggcatgatcttcgcatccttgtaatagacctcgacccacaggcctccagtactatgttcctggatcacacccatagcattggtacagtccttgaaacagctgctcaggcaatgctgaatgatctcgatgttgaaacattgcgagaagcagttattcgccccaccattattcctggtgttgatgtcatccctgcttctattgatgacggctttgtggcgagccagtgggagtctttagtagcagaacatttaccaggacttaaaccttctgaagtcctcaggaaaacaatcattgaccgtatcgctggtgactatgattttgtcttcatagatactggcccccatcttgatccgttccttctgaatggtctggcagcgagtgatttgcttctgacccctactccaccggcacaggttgatttccattcaacccttaaatatctgacacgtttgcctgaaatgctggagcgtcttgaagacgaaggtgtggaaccacgcctgagcgcgagtatcggtttcatgtcaaaaatgactaataagcgtgatcacgaaacttcgcatagcctggcccgcgaagtgtatgcaagtaatattctggactcgtcactgccacgtttggatggattcgaacgatgtggtgaatcttttgacactattattagtgctaaccctgtttcataccctggtagtgctgaagcgttgaaaaaggcacgtactgaagcagaacggtttacgaaagcagtttttgaccgcattgaatacatccggggagagtctaaatga

SEQ ID NO: 111651 - DNA, 972 bp, Enterobacter aerogenes
atgaaaaaggttttagctcgtgggcgagttctcggtaatagcaattcagagtttgcccgtatgcttgaaggtgacggagatgtcaaaacgtttactcttaaatccggcaagcaggccaaatttgtcaaaacggttgtattaagcggagagattgaatcaaagacgttcgttgatgcatcggtcaatggacgagatcaggctatgcttacgcgtgagtccgttagtgatatttcccggacgataaagctgcagcaattcttcccggctattggacgggaggttaatggacgaattgagatattagatgggacccgacgccgtgccgcctgcatatttaataacgttaaattcgaaatcctagtaactaaagatgatatatcactcgccgatgcacggcagttagcgcaagatatccagacagctagagaacatagccttcgagagttggggaaacgacttgaagtcacctatggaactagcatgacgaaagaagagattgcgttgaaagagaatctctctccggcgaaagtgactcgcgcgtttcaggccgcagcagtgccagatgaaatggttgcagtattcccggtgataaatgatatttctttgtcggattatcagtttttgctaaaactggctgaagaagcaaacaacaagcaaacatccgtaacagaactgatggaaaaagttcaacatcggttgaagaccatgccagattatccggcaattgataaaagcaaaattctggcggctatcagggttgagagcaaatcgttgacaacccgccctaccagaacggttcaaactgagaagctgagagaattttcagatcgcaatcagtttgccagaaagaaaactgattcaaagaagcgactggttgtttatgagttttcccgcatttccgctgaggcacagtcggagattgatgatgcaataaaacgtattctgaaaagactacctgagtcaagtgagtaa

SEQ ID NO: 111652 - DNA, 381 bp, Enterobacter aerogenes
atgaaaacgttatggacagatatcagagagggatggcgggcgatgcaatatcactacactggccccggagctgcattgcacttaatagcgctggctgtccgctgcctgctgtggtgggtgatgggctgcattctcctttttacggtctacggcgggttactgttgttttatctcgaacagatgccgggacaggtggcatcaacgatcccgggcctgctgacgatggttcatgaggtggtggttctctggcagtggcagtgcatcacggtactgagctcggtcctgccgctgttatgtttgtgggtgacgcttgttcattttatttgggtacgtcccgctaacgctgaccgtacccgtattccgttcgacccgcgtcgttaa

SEQ ID NO: 111653 - DNA, 387 bp, Enterobacter aerogenes
atgctgatgataacgctgttgtgtttcgttgtgggtgtcctgctgtcggtggtggtgtgtcagcgacgggagtatcgccgtctgcgtcgtgatgccgacagtatcgtgctgcgctatgtgaaggtggccgaacgctatgagaggctggtttgtgagctgacggagccgtacggtggcgtgctgagcgggctggaggaggtgaatgacctgtcagcctgtctgagtggtttgccggatacagaacgcacgcaggctcaggcggcgcttgcccgcctcgatgactggctgtgcctgctgcttcaccaggtggccgatcgttaccggctcaccgaagccgatcggcggcgctggctgggtgatggcaacggtggggaggggcgtgaatga

SEQ ID NO: 111654 - DNA, 399 bp, Enterobacter aerogenes
atgctcaagtacatgctggacaccaacatctgtatcttcaccataaaaaataaacctgaagccgtcaggcagaagttcaaccttcaccggcagcagctttgcatcagcacaataacgttgatggagcttatttatggcgcagagaaaagcagcgcgccggaacgtaacctcaccgtcgtggagggattcgcggcacgccttaccgtactggattacgatatgcacgccgccacacatacgggtcagatccgggcggaacaggcaaaaatcggtcagcccattggcccatacgaccagatgattgccggtcatgcccgcagccggggactcattatggtgaccaacaatatgcgggagttctcccgcgtatccggccttcggacagaagactgggtctga

SEQ ID NO: 111655 - DNA, 228 bp, Enterobacter aerogenes
atggaaaccactgtattcttaagtaaccgcagtcaggctgttcgcctgccgaaagcggttgcactgcctgatgatgtgaaacatgttgagattgtggctgttggccggactcgtatcatttcaccggcaggtgaatcctgggatgcctggtttgatggcgaagccgtcaccacagactttatgtcggcccgggaacagcccgaagcacagatgcgggaagacttctga

SEQ ID NO: 111656 - DNA, 291 bp, Enterobacter aerogenes
gtgaataagaacagtgagaaagtgggtgaaaaagagaagcaggaaaacctgctgatgttctgtgggatggcatttatggcagccggcccggcattctggtttctgatgaacagcaccattaacgcccggctggtcacgttaccacccgatatagccgggttgatggaggtggttaacgtggccgtcgcactgctgttcgccgtgtcgggggcagccctggcgctggcggggtgggggctgtctgcatggcatgcctggcggaaaagttggggggcggatgtggcggagtga

SEQ ID NO: 111657 - DNA, 222 bp, Enterobacter aerogenes
atggaagcaaaactgaagaattgtgtggattgtggtaaaccattaagcgtgacggcccagtcctgcaatgaatgcaactcaaccgatccctttggctcgaagcgatttaatgacaaactccaggccacctttatggccgtatgcattatcgctgctcttgttattggggggctctggtataccggaataattaaccccgctgactggctcacctcccgctga

SEQ ID NO: 111658 - DNA, 570 bp, Enterobacter aerogenes
ttgaaccactatttacggttgtatttcaaacaaaaaaccagagcgacagcactgaacatttttcttgggatggttcttgttattccgtgtacgcgagcttcaactcttgatgatattaaggcgctggaagccgcaaaacagacccgggggcacactgaagtaaaacctgttcccgggctcgccacagaaccggctaagtcggtacatctgtatcagttgccggatgggcggcagttaaatacagaagattaccgcctggtgttgtttatgcagtcttcctgccatttttgccagcagtttgatccgcagctggcgcagttatcggcacaaacggggtttaaggtgtttccctacacgctggacggacaaggggatgtgagtttcccgcaggcgatcccggccccgcgtgctgttctcgaccagttctttggccccggtaataacggtgtgacgcccaccacctggctggtcaacgtcaataccctgcagagctggccactggcgcaggggctgacggatatgaacagtctgctgcaacgaattaacctggcactggaaacaagaggatag

SEQ ID NO: 111659 - DNA, 435 bp, Enterobacter aerogenes
atgcaaaaacgaataatcgcattatggatcatcgtgagtgctttatatatcgcggggtgtttctggctgtatttcggtacgctgaacttcgatgggctggatttatacatgcgacaggaggatacggcctatgcatttgattgcgaactgactgctctgcaggggattcttattgcgctgacgccggtgttttgcctgtggctggagttctgggttaccgggcgctttggtcgaatatcaatatggtgccgccgctatggtggatgccttgtggtggcggcggtctctgcggtatggatctggtttcaaagccataccgctattatgtatccttatcacagtaatgaggcgggtagcatactcatttctctctggtgcggattaattttaaatcactgtataatgcgggcgcgccgcgcaaggctaacattatga

SEQ ID NO: 111660 - DNA, 1191 bp, Enterobacter aerogenes
atgaaaatagtactcagggttgctctgttgtttacatgtgttccagtgctttatctcagcgcagtatttatcatcctgacgctgtcaaaagacgagtactacaacgatataaataaacacatcgaaacagcgttctcatcgaccaccggttcatcagagccagatctgagcttaatgtctcaccgaatgattgcttctgatatacaggatggtcttatctcgccacagaatgcgaaaagggcattcagtaataccgcaggttactttaatgaagtaaagcgtgaatgtctgaaagaaaacactcaccaaacgaaagatattctttcctgtgctaataaaatacttggtaaccatttttattattacccggcaagagaaaccgcttacgcatgggccggacattactctgattgcgacttaaacgtctatctcctactggatgccctccacctgtttaataaaaccgccagcattgtgtatgcaccaggccatgcgtttctgtcctggaaagatgagcagaccgggttgcctgcatggtgggaaaccacatcagaggcaaaccatggacgccccgctgatttagcactaaatttttatcagaaaacgctggaaccgttttattaccgcccgcagtcagcggcgtttgctgaacgcttctatacttcagtcgtcacactgaacagtttaaatatgggactgaaagataacaggctgaaggacataattaaactgtaccctgataacccttttgttgaggatcttgaatacgagaataaaacatcgcttacacctgcagatgtcgcatggcttcaggcccggtttaaaacggatatgtcatctgttacaaaaaaacaactgctggcaaattattatcagaaaaaaggtaacgcagaattggccaaacactatgccaacaggatcgacattgacagttgtgatactgactgtcgccctctcatgataatggtgtcacctgtgaatcgattctggtttatggcatcagatagactaagcaaacacgtcattcataatagccatggtgaatttgccatggataaaagaaaatatcccattacagctatcaagaaacgcttttatgatgtggcaataattttaatcataatgttagccttgcgcggcgcgcccgcattatacagtgatttaaaattaatccgcaccagagagaaatga

SEQ ID NO: 111661 - DNA, 576 bp, Enterobacter aerogenes
atggtgaaacgaagtgatattgaaaatgatgtgaaaatgttgatgcagtcatttaaaaacgattaccgcattcctacctctggagagattatattcccaataattaaactgatgtcagttgtttatatgatgcatgttgtggttataacggtagggttgatcgtttgtgataaaaaaatctggtttccggggattgccatgtggttagttttgtcttgtggaattttaactgttatggccatcatgatggtctatgggaatctttctctgctgatgtgtatcccaaaggaagtgcgtgaaaaatcattgcttgttaatttagctaaaaagaaactaagattatatggtctagttatgatagtgtttaatatttttgtgggtgttatattaatcagcgagcgctcatctcttattataggttatgggttttcttggtttgcttctttcctaatcggcggaattgttttcagcatgtccatgagtcggtacatgacccctgcggtggtcgcaacactcgataaaattcgtcaggtggtttcctctcctcaaacgtcatcaaatagcgaagaagtttaa

SEQ ID NO: 111662 - DNA, 435 bp, Enterobacter aerogenes
atgctggggtttaaacggaataaaaaggaaaagaaagaaaagcaggcgagtccagttgatgttagacttggagtcaaaaaacatttatttgcattaattgtcaacagaaccaataaagaatggtatgaaaagaatggggcgattggtttcattaattttattggttcttatgatggcgcggagttattgcccgctaatatagaatacccttttgtatacacatggatggacctcgctcatgaaggtggaatgcgtatgagctttaatacgcgagatatgaagttttattgccaggctgtcattgaatctttgggtattgacgaggttaatgagaattcagatagtattgttaatgaagtgattgacgattttgtgaaaatacacacagcggctttctttaaattggttgaggaaatcaataaaggtaatgtttaa

SEQ ID NO: 111663 - DNA, 231 bp, Enterobacter aerogenes
atgaattgttctgataatgtcagttctgatgccgtgttgcctgaagaaaatattttgtcttctcgtcagacaggaatgggatacgcccatataaaccagcttatgcccagaatgaaatggaataatgatgacctcattatcatttatgatccgactgctgcatttcgggatgtgttttctgatgcgctgattgtctcgccttcatgtgaatatgcggggagggataaatga

SEQ ID NO: 111664 - DNA, 759 bp, Enterobacter aerogenes
atggatttacttaatacccgtttcttctttcgttccccggatgaaggggtggcgaactatgtgatgcgtcagctgggccagcgccgggcgaaggtgtttaacgagcagtacagctatggtgctgatacggtgcgtgacggggtgtcgttcagcaagcaggaagatgaccagtacctggtcaactactctgatatccagtctctgccggacctgaactgctacgtgacgttgccgggggattatccggtggtccgcatgaacatgacgtatgaaaaactggattttattgctgccgaattcctgccccgtgagttgaatgacagtctggacccggaaatcgaggaggaaatcacccgtcgcgagctggatgaagacagcatcgacaggttgcttgcagtacagagcagtgagcctgctgtaccggcaacaacagcatcagctgctgccgtatctccggccattgctgcaaccgaaactatcaattcatcccctctgccgccggccgctgtatcgtcctccgcatctgacatccaggcaacgaccagtccggtccagaacggtggtcgggtgaaggaatatgacgggctgcaggtggatacgcagaccggtgaaattctcactgagcccaatcattacgaagactatgcggcgtacgagcaggaggccctgctggcgatgaaggaagaagagaaaaatatcctcgtccaccgtgagcatgctgagccggacgatgggcgtgaaccgggggaccgctggtaa

SEQ ID NO: 111665 - DNA, 687 bp, Enterobacter aerogenes
atgaatgatgtcaaaacccgtccgctcctgagcctgaagcgtaaggccccgtcagcagacacgtccgtacctgccagtgaggtggatgcgggtatcatagtctcccgacggaaaacggtggtggtgaacaccgggccaaaacgcaataaaaagccgctggcggatgacagaccgcccgcctcccgggggattcagccgggcaacgggcaaaccaaaaagacaaagaataaaaagcagcctgtgccaccacccaaaaaggcagttgaggggatacccccacccccggcaaaaaagcagcgacctggtcgttcgccgcggctgatgcgcccgatggaggccgtgaagacgctgggttcgtactggccgggcctgttcgctggcggccagttgcgtccgctggccatcggggtcagggaacagctctttgctgatgccgcgcagcgggaattaccgctgtcgcgtaaggtgatacgccgttgtctgaaaacgctgacgcggacggaaacgtatctgagcagcctgatgaccggagcgccgtgttacaacgcggatggctctgttgaatcgctcattctgcccgagcgtgaagcggccgcgaagatgaagctggggtatgttctggcgtatcgggaaaaaatgaaactgaagaaacaggcggaaaaagcagccgtcatggatgaaaaatga

SEQ ID NO: 111666 - DNA, 453 bp, Enterobacter aerogenes
atgcgtactcgtccagcctctcgattgatagtcctttcacctgaaaatcacgttctgctctttagattctgccataaagatgatgctctggaaggaaaaacatactgggcaacaccagggggaggactcgagcacaacgagtcttttgagcaggcggcgttacgtgaattatttgaagaaacgggcctgacaagaagaactacgggaccacaaatagcctccagaaccttccctatggtgctaccaagtggtgagaacgttcttgctgaagaacgtttctttattataactacggataaatcagaaattgaccgctcaggttggagtaacaacgaaaaggaagtcattagcgatcactactggtggagcttagaagagctcagacagaccaatgaaatcatcttcccactcgatttgataattaacatacttgaagactttccgtgcacttaa

SEQ ID NO: 111667 - DNA, 246 bp, Enterobacter aerogenes
atgggagcagaacctgtatcagggagtctgactgagctcgatgcaacctctctcgccgcgcacatgaaaggcagcgatgtcgtggtattcacagccggtgccggcggaaaaggtggatcggaaatgacaaatgccatagatggcgaaggcctcaaaaccgctattgcagccgccattcaggctggcgtgtcgcgctttctgctggtctctgcattcccggaggcgttagcggtacagttcggttaa

SEQ ID NO: 111668 - DNA, 384 bp, Enterobacter aerogenes
atgacagataccacttacgtacaggattacaacgctattatcgctgtacttaatcaatacaacgaaggcggtaaacaggcgaagagtgaggtgatgaaacccgccttcagtgatcaggccaccattttcggtgtggatggcgacggcaacctcaccggagggccgattcaggggctttttgacaccatcgataccgctttccgtccttctcccgaagctaaagctgccattgtccgcgtcgatatcgtgggctcggctgccagcgcccgtatcgatacggacgacatttcaggcttccgctttaccgacttctttaatctgttgaaagtgaacggtcagtggactgtgattagcaaaatttatcatacccacgtcgcaccctga

SEQ ID NO: 111669 - DNA, 615 bp, Enterobacter aerogenes
atggctgagcttctctcaaccctgagtttgtatgtgcagtctgcgggttgggcaggcgcaggagtgtttgtcgtggtttttattactgcgacgatgctgttttttccagcgtcgcttctgacagctcttgctggctggttatttggaataacgggggggacgctgattgcattactgggcggcgtggcgtcttcattgctggctttcgcgctggggaagagcagccttttcccttttgccacccggatggcgaccaggagtcgttatatgaaaagcggactttcgctgacgcggcaaaacagcattgtgctggttctgctgctgcgtctgagttcggtggtgccgtttgcgccacttaactacggtcttggcgcgagcggtatgccattcagaaagtatcttgctgccacggtccttggcctgatcccgggcacgtttatttatgccggtgcgggtgccgctgtgtcagatgtgaatacgctgattcagggaggcttctcgcccatggaatttatgcacaacactagtgtgttaacgggaggcgcaggagccattacgggcctgttgctcctgtatttgcttcaacgaagcatacgaaaaaaaacggggatctga

SEQ ID NO: 111670 - DNA, 624 bp, Enterobacter aerogenes
atgaaagaccatgaacgtcctgccgcccgggaaaaacctaaaggcagaccccgaagctttgaccgtgatcaggccctgctgaaagcgctggacctcttctggcgcaaaggctatgaaccgtcttcggttgctgaactgtgcgccgtaatggaaatcactccaccgagcctctatgcggctttcggcaataaggcaaaattgttcattgaagccgtgaactactatgaacggacttactggaaagccacgtgggagcgacttgagcagacacaggatatccatgaagctattgataactttttcagcgaagctgcagatatcctgctttctccgtcagcaccatgtggctgcatggtggtcctggcggccattaatgtctccgcggactcaactgatgtcgtcagggcggtaagcgttctgaggcaggaaggtaaagacctgtttgaaaaacggctggccagagctgtactggaaaagcaacttccgcaggaaacaaatactgctggcctggcgaccgttctgaacacgttactggaggggatgtcgattgaagcgaaggatggtgccgaaccgggctgcatgcatatgattgggcaacatgcagtcaggttgttgccccggtga

SEQ ID NO: 111671 - DNA, 561 bp, Enterobacter aerogenes
atgcgtcagcacatcatcgatgtggcgagagcattgattacccataaaggctacagtgccgtagggattgcagagattgttaacgctgccggtatccccaagggatcgttttattattattttaagtccaaagaagagttcgcagaagccctgctggaacactacttcagccactaccttcagcaggttgatgcccagctcagcggaagtggctctgcccgtgagcgtctggagcgttacttcagtttctggacagaaacgcagggagcagatcttccggaaagcaaatgtcttgttgttaagctgggtgcagaagtctgcgatcagtacgacagcatgcggcatattctggcgaagggcacggacaagatagttcagaaaattgcacaatgtgttagtgaagggcaacaggacggctctctgccagccgggcctgatgcggatgaacttgctgaagagctctatcagctctggctgggagcctcgctgatggcaaaaatccatgcccctgaaaaagcttttgataaagcgatgaatgcaacaatgcggctgcttgcgtag

SEQ ID NO: 111672 - DNA, 744 bp, Enterobacter aerogenes
atgaatcacctgcaaaataaaatagctgtcattaccggtgcatcatccgggataggggctgcaaccgctcatgaacttgctcgtcatggcgttaagatagttgtagccgcccttgatcaaatcggcattgatgagatagtcggaagcattaaagcggcgggtggccaggcagcaggtctggtgaccgatgttacccgccaggaggactgccacgctctggtgaaatatgcctcagacactttcggcccggtcgatatactgattaacaatgccggtctgatgttgttttccagctggagcgatgtggtatgggaagactggaacaaaatggtagacgtcaatatcaaaggctacctcaacaccatagcggcagtacttccggaaatgcttgcgaaaaacgacggccagatcctgaacatggcttcagtcgcaggccatcaggttgatgccggcgcgggcgtttacagtgctacaaaattctttgtgcatgccatgacggaatcgatgcgcaaagatttgggcgtgaataatggaatacgtgtgaatactatcagtcctggagtcattaatacaggttgggcagataaagttggcgatccggaaggccggaaagtggctcaggagttgaataaaattgccatcagtcctcaggatgttgccagggcagtagtttatgccctcaaccagccgaagaacgtgacggtgaacgacctgatcgtttccccaacccggcaaaactggtaa

SEQ ID NO: 111673 - DNA, 168 bp, Enterobacter aerogenes; identical to SEQ ID NO: 110838

SEQ ID NO: 111674 - DNA, 882 bp, Enterobacter aerogenes
atgatttctaaatgttttgataattatttttatgaattcgatgtgcacgaacttatttattcaagacccttgcccgtaaatgttcgtagtagcatgaagtttaaacagatagctgttacggtgagtgaaatcggcctgattgaacctgtcattgtttttatcgataatgatggaacaaaacgtattcttgatggtcatctaagggttgaggtattgaaagatctgggagttaaaaaagtgcattgcctcatctcctctgttgaggattcttatacgtataataagcgagttaaccgtataacaattgttcaggaacaaaaaatgctactcagagctgttgaggctggagtgtctgtggaaaaactttgtactgcattgggtgtatcaatacagacagtgcaaagtaagttaagattgtcagatggtattgctcctgaggtactggcgttactggctgaaaggagtgtgcctcaggccttatttagccttttgaaaaaattaaaaccttataaacaaattgaagtggttgataccctgttgagtattaataatttcacaaaaaaatttgtagagtccatgttacatgcaattccaccggaacattttgttgatgcttgtcatgctcaagaagagccgagtgatattcgacgacaacttgaacgattagagaaagagcttgtttcagtgcagattgaaacatcaaagttggatgatgagtactcagaaaatacacttaagttggtgattgtcaaaggtcatcttgaaaggattttgaatagaagtgatatccttcattggttatatgataatcatcctgattacctttcggtatttaaacagattaccggaattgaaaatcttaatcagattattgaaaaatga

SEQ ID NO: 111675 - DNA, 906 bp, Enterobacter aerogenes
atgagtagatccgatagcgaagttgtagaaatggttaatgtttgcgatgtttttattgcaaatgaaaggaaaaggaatcgttttgtttatgagggaattaaagaaaacattataaatcaggggctaaagagacctataaccattaggccttacaacattaatggatataagtatgcacttatatgtggacaaggtcgactggaagcttttattggtcatggtgagaaaacaatacctgcattaataaagcatgttgatgaggaaacagctcacctgatgagccttgctgagaatatagccagaagaaatcccagaaatgctgagttcttcgccgaaattcaaagaatgaaaaacactggtttgtcagaaaaagatatagggtcaaagttgggatatacagcttcatggatcagtagtgtgttggctttactttctcagggagagaaaagtttacttattgctgctgagtctgggcatatcccattgtaccttgctgtagacatatcaagagcggcagataaagatgaacaagctcttttgaccagagcattagaagaagggcatataaaaggaagtcagattaataaaattaaaaaaatacttgaaagccgaaggcatggaaataaaggtagcatgagttcggcttatgttcctggcaagcgagccaagaaattgacaccacaagagttagctgacttatatgaaaaacatgttttcgagcatcgtgctgttgtaatgaaatcacaggctgcaaaagataaaataacagctgtgggacatatatatagtaagcttttagcaaatcctgatttcgtttcccttttgaaaaagaataatattactgatattccgacaatactcggagagttaatggaaaaacataaggataaaactcatgatttctaa

SEQ ID NO: 111676 - DNA, 1536 bp, Enterobacter aerogenes
atgattgaactccaatcagaagatgttattgcagcacaatacctgagaatgtcgacagagcatcaacagtattcaattgacaatcagcgtgaatacataagtaaatatgcagagaagcagggaatatccattcgttacacttatgatgatgcaggaaagagtggtttaaaaatcgctgacaggcctgggctatgttctttgctgaatgatatttatgatgcgagaatcacagtgtctgtaatcctcgtctatgatgttagccgttttggacgatgccaggatatcgaagagccagcctaccattcatatatgttgagacagaaaggtgtgcgtattatttattgtgccgagccattttctgagtctcagccagaattatttatgctagggctttcatattcccgctatggagctgctcattatagtaagaacctgtctgacaaagttttcatcggtcaggcgaaccttatccgtcatggttatcatcagggaggaaaagctgggtacggaatgcgaagactgcttgtggacgagagaggaaaagcaaaagatattttacgggcaggacaacgtaaaagccttcagactgagcgagtcattctcattcctggacctatagaggaagttaatgttgtcaacagaattttcgatatgcttatagatgagaacaaacctgaaattgtcattgcatcagagcttaaccgactcaatgttgcagctgaagacggatccaggtggactcgtgggaaaatacatcacattttgactagcgagagatatataggaaatagtgtttataacagaacctcatttcgtctgaagggtaaacatgttaagaacccagaaagtgagtgggtacgttgcgatgatgcctggaaatcggttgtctcacgtgaaaaattttatgctgcgcagagaataatcaacaagcgctcgataaaattatctgatgaagaacttctcgaacaattaaagagattgcttgtcagaaaaggtcgtttatccggaatgattattgatgaagaagagcttttcccatccagcagtatctttcgctcccgctttggtggactgatcagggcgtataaactcattggctataatcctagagtagactactcgtggtttgaaactaaaaaaaatatttccggaataaacactgcatttagtgaacagattatccagactatctacagacttggtggatgggtaactgatagcgggatggttaatcgcttttgtgttaatgaagaattcgtactttccattaatgctgtccgatgtcagcgattgtccagcggaaagcttcgatggcgtatttcatttaaagatgtcagtttttgcgacatgatgttatatccaagacttgatagtacaaataagaccattgttgattattacctcatacctgcaatggatatattatccgattcaatcactttaaatgaggaaaatggatttatccctgaactttaccgttttgataatcttgaatgcctggagatgatgttaaagagaactccactggaggtttaa

SEQ ID NO: 111677 - DNA, 1827 bp, Enterobacter aerogenes
atggcgaaattaatgacgtccctgacgctatgttcagggagaatgacgaacggtgagcgccgtgtagcccagcgccttgaatcacatctcgcagaggactgccttgtctggtatgacatcccggtggggcggcaatacaggcatcctgactttgttattattgatcccgcaaacggccttatttttcttgaagtcaaagactggaagctgagcacccttcatcatattgacccgcagactgtgactctcatgactgcgcagggagaaaagcaggaacaaaatccgctggtacaggtcagggaatatgcctgtgcgaccgtcgaatcgttatcctgtgagccgaaactgcagcaaaataccggcctgtacaaaggtaagctcaatattgcctgggcttatggtgttgtttttaccaatatcacccgccagcaactgacctccctctctgccgatggggcagtggaatccatttttccccgggcactgacgatttgtcaggatgaaatgactgagtctgtctctttatctgcttttcgttctaaaatttcgggattgtttaccacccgtttcagaccgaaagtcactccggctgtcagggatattttacgccagcacctgttcccggagattgcgattcggtcaaagaaaaaaaataatcaggtctgcagggtaatggacctgcagcaggaggttctggcccgtaatctcggggaagggcaccgcgtcatacatggcgtggcgggttccggcaagacactcattttactctaccgttgtctgtatctttcagaaacgacaacgcgtcctgtattagtgctgtgttttaatattatcctggcaaactatatccgtgaatgtgttgctgaaagagggctgtcgggtaaagtgcacgtgtatcatttccacgactggtgcgcgagtgctgcccgaaaattcaaactcaatgtgagcggtgaagggctctactttgataactgttttaccgcgctggaagatgcggttaacagcggtgccgtgaccgacagtggttatgatgccgtgctgattgacgagggtcatgatttcgaccagcgctggctttcattaatcgcccggttgtttgataacacaacctgttcactgctgctgatgtacgatgatgcgcagtccctgtaccgacgtgagagagcacttaacttttcgctggcgagtgtgggtatccaggcccaggggcgaacgtcagtccttcgggttaactaccgtaacccctgccgcattctcaatttcgcgtacgccttttcacgcgactattttgacagtcaccataatcaggagctccctctggtgctgccggaagcctgcggagaggagggtgatattcctgatattgaattatgccggtctaaagcggaggaggcccgtcgtgttgttgcatggctgaaagaacaacacgcggttgcaggccgctggggagatatggctgtgctgtgcccgacacgttattcagcagacaggctcatcgtattgctggagcagcataagatacccaccgccatcagctttacctccggggataaaaaagcctattcgcatcgcgacgatgttgtacacctcatgaccttccagagcagtaagggtcttgaatttccttacgttgccgtcatcaatgcgtcttttgttcgtaaaggtgctgaggatgagtcggaagccatcccggcgctttatgtagcgtttacccgcgcgacgcgttcgctgctggtgacctgctacaaagaaaacagcatcagtcgtcagctgacaaaatttgccggcgtggatttgcaggagcaacaggatgactatgcataa

SEQ ID NO: 111678 - DNA, 471 bp, Enterobacter aerogenes
atgtcagtaaaatcacagtttctcgataaattgcaggcccgacaacctgctccggcttcatctgtcagcaagactcaggctgatattgctgagtttcgcctccgaatggcacagcttcatgagcagatggacgcgtggctggtgggtaccggactgaatgtggagacgcacaatacacctgttacggacctgctggtggaggggggagcttttgatattaccgccctcgttctgcgtatcgacgaccggtccgtaaaatttgtgccggcattcctttatggtcagggggtaaccgggtgcgtggaggcgaccttccataatggaggactcgtgacgcctctggggcgattatttatgcggtcaggaacggtgtgcaactggacctttagtccgccaggtactttatcctgccctgggcagcgttttgatgaaagcactttctttaacctgattttagcgcttctgccatag

SEQ ID NO: 111679 - DNA, 546 bp, Enterobacter aerogenes
gtgttacgtacaagtttaattaagactacgccctggctgatgccgctgatagcactcactctgactggctgtggggtaacgcagagcgtcaccgacgctaccaaatcggcgttcaattctgtgttctataaaaaaattaaaatcctgcatctggattttaccgcacgtgaagcgctgaacaccgactcccgtgaaagtaactcgctgtctcagccggtggtgataagggtttaccagctcaaagaccgcaaaacctttgataagacggtgtatcagcagttgcttcaggatgatagcaccattctgaaagacgacatgctggccagtcgtgatgtcgtggtgaaaccgggtggcgatgcaaaccttgatatgccaatggaagaaaaggcgcagtttgtcgcggtggtagggctgttccgtcacccggatatggtcaacaacacctggaagctggtgatagggcgcgaagaccttgacccggataagccgcgcattctggaagccggtaacaatcatcttacgctgcaacctctaaaggacgactga

SEQ ID NO: 111680 - DNA, 1086 bp, Enterobacter aerogenes
atgggaagagaagcacaaccgccgcattcccggctgaccccgcggctggagtctgaccttcaccgcattaacttttaccgtttatgccagctgctggagaaacgtaatccgggcaggccactgatgggctcgaccagccatccggcagatgacccggtgcggtttgcgccgcatccggggatgggtttccctgccagtgaactgaaagctgtcgaatatgacgaggatgatgaccgcaggccaccgctcatccgtacgacctttatggggatgtacggtgtcgattcccccttaccaacggcctacctggatgacatcacccagcgtcgcgaagggcacgaggcgcttcagggctttctggatatcttcagccaccgcatcctgacacagttttaccgcatctggcgtaaatactcttacccggccacgtttgagcccggcggcacagacagcatttcgcagtcgttgctgggtctggtggggctgggcattccgggcaccgcagagcacatcgctaccccggtatcgcgctttctgtcgctgctgggcgtactgcagcagccaggtaaaacccaggaagggatgcaggcgctggtgagcctgctggcacctgacacgacggtgcaggtgagcccgtactgcctgaggccggtggaggtcagtcagccgctgggcttttacggcgatgacgattttcttctggatggcaacacgccgctgggtgaagaagcgatggatgctaacagtcagctgctgattgccctgtccaccgataacgaacaggaatcacagggctggaaaccggatggtctgctgtatcaggactttctcgtgatgctgcgtgtctatctgggctggcgctttaaggcaaaaatcaccctgactaccgccacccgtctgctggccgcgccgccccttggcgaaggcccattctggctggggatgaatggcgtgctgggcgcggaagacgaaggtctcctggacgatatcccgcagacctatacgacggaactgggctattacaccggcctgcagcccgcgacactacaacaaggaaacagacgtgttacgtacaagtttaattaa

SEQ ID NO: 111681 - DNA, 1755 bp, Enterobacter aerogenes
atggatgatttaaccctgcgttattatgacgctgaaatgcgatatctgctggaagccggtgaagagtttgcgcgtgctcaccccgagcaggcggcaatgctcaatctcgataaagcaggggcgcgcgacccttacgtggagcggctgttcgagggctttgccttcctgatgggccggctgcgcgaaaagctcgatgacgacctgcctgaactgaccgaagggctggtcagcctgctgtggccgcattacctgcgtaccattccgtccatgtcggtggtggaattcacccctgactggcgtgagatgaaagagcagatgcgcatcgtcaaaggctttgaggtgaactcgcggccgatcggtgagaaaggcacgcgttgccggtacaccaccaccaaagagattacccttcagccattgtcgcttgagagtgcccgactggcgaccgatccagatggccgttcggtcatcacgctgcgctttaactgcagtcatctcgccgactggagccgtgtcgatctcagccagctcccgttctacttcaacgctgatgcaccgttggcctgcgccatgcatgaggcctttaccatgaacacggcccgcctatggttgcggatgcccggagacatggacagaagaccgctcgacgggtatttcaccgcgctgggtttcggcgacgacgatgacctgtggccgaagggaagcagcagctttagcggctatcagctgctgctggagtacttcaccttccgtgaaaaattcatgttcacagggctgcgtgggctggagaccgtggtctttccggctgagctcccatggtttgaaattgacgtggtgctggcggagcgctgggagcatgatttcagctttaccgaaaagcatctgcgcctgaactgtgtgccggtgattaacctgttcccgctggaatccgacccgctgacgctcaactccctgcagacagaatacatgctgcgcccgatgcgcgtgcaggatggccataccgagatttacgcggtggattcggtgatgtcatcgagccagcatacctacgtgccgttttcgagcttccgccacaaaggcggaatgatgcgtcatgaagcgccggaatattactaccacacccgcgtgcgccgtggcccatcgggcctgcataatacctggcttatccttggcggtgaggcctttgataaccacaccgtaccggaagacgaaagcctgtcgctgacgcttaccggcaccaacggccagctgccacgacgagcactgcagagcacggtgctggatacggtgatgaaaaccacctcggccagtatcggcgtgcgtaacctgtgtgcgccgacactgccctgttatccgccggcgcaggatcgttttcactggcgcgtgctgagtcacctcggcagcggattcctgtcgatgatggataatgccgatgtgctgcgcggtaccctggcgctatacgaatggaccgacagcgagatgaaccgccgccgactggaagccatcatcgacgtgaagcacagcgaaaccgagcggtttgagcagggctacctggtacgcggtgtgcaaattgaggtgacgctggacagccacggctttgccgggcgcggtgatatctgtctgttcggcgagatgctgagccgcttcttcgcgctgtacaccgacatctacctgtttaaccgcctgattattattctgcaaccgaccggagagcgcctggaatgggaagagaagcacaaccgccgcattcccggctga

SEQ ID NO: 111682 - DNA, 1281 bp, Enterobacter aerogenes
atggcagcagaaggcttttacctggtgcagggcgacaagacgacctgcggcgggaaaatcaccacgggcgcagaggatcacactctgtttgataaacctgttgcccgggagcaggacagtgtgacctgcgggaaacatgccggactattcaagatagccggcggcatcgacaacgataccattcatgaccggcgaatggccggaaccctcgacagctacagcacctgtccctgtaaggcgaagtttattccatcaatgatggatgatacatacgagaaaagttcagcaggagcagcagcttctgctgaggagcctggaaagacatcgatagcgaatgccgtttctcaggcttttctggcaggcgcgcaggctgatacgatgttagctccgggatatcctacgttgattaacacccacaccgttccggatgacaatgtacgagggatgctaagacgtaacagacatgatttcctcttgctgacgctggaggaatgccagaggattattgacggctgggatttcgttaaaaagaaatggaaagatgccacaacaaatcccgtcggaaatactgtcaaaacatatgcaacgaatatcgatgatgcagccaatgcttcagcgatgatttacaaactgggaagcatcggtattaccgcgacagtgtttgttaaccataaaggaacacgtctgataaaaatcagtggttatgcagcaatcagaaaaacgctgaaggctccagtttttggtgaaatgaatccaaatatcatcgaggcaggggtagggaagtttggtttgcagaaagccatcatcgacggtgcgattctcggttttgtctatgtatcggtaatagatacaattgatttcatattgaatgatgaaacctcacttgcaatgttccttgggacacttgctactgacattgtcaaagtaggtatttcttcggcagcactttatgccgttgggttatatacaatgtctgcgtatgttgtgctgaatattgctgttgttcttgtttttggcgcaggtatagcctgggtgcttaacacacttgataaaaaatatcatattacagatagtttggtggagttaatggcaccttacattgaatcagcgcagcaagagtttgtagaaaaatccagagagatatcaaatgatgtgctcgacttgggtggtatgtatattgatggaatgctcaggaaagggcggcatgtcatcgagactgagataaagcagtatcttaagaagtatattggcgacctaacatcgcaggtgattgatttatga

SEQ ID NO: 111683 - DNA, 1602 bp, Enterobacter aerogenes
atgagcacactgcagaatctggttgtggcctgtcaggctgacgacacgcagctgcggcaacaggcgcagacacgcacggaaaactggcagacctggcttgctccggtaagtgacaccagtcctgccggagaagaccctggctatgacgacgattttcagcgtatccgggaggaggtcaataagctttccggcatcgataccgggctgatttgcacgcttgccgaaaaactgctgaccagcactgccaaagatatcaggatcgccacctactactgctgggcgcgtttgcatcaggacggggaaaccggatttgccgaagggcttgaactgctggcggggttgctacagcgctatggaacgcatcttcatcctcagcgtgagcggagccgtaaaccggcgctcgagtggctcgcaggctcccgtgttctggacagcctgtcactctggccggaagtggtacgcgacgatgcactacggactgccggtgcgctactgctcattcgcgacagtctggagtcagagccggatgcgtcgcggccagagctgaatgccctgtacagcgcgctggaatctcgcctgatgaaagccggtggtgtggatgctgtggtgccacagaacgccggtaacaaggcacagtcacagacctccacgcacacgacggagcctgacgcgccggttctgagtcgcattacctccggtcaggatttgctggctcaggcccgtacactgaccggatatctgcgtgagcaacctgatggctggcttgccgcacaccggctgatgaaaagcctgcgtcatgacacgctgagtgctattccggccccggatgctgaaggaaaaacgcgcatcgaaccgccgcgcgctgaccagcgagccatgctcaaacgcctgtacctgcagcagagctggctggagatactggagcaggcggacagtaccttctcgcgtggcgccaatcacctctggctggatttgcagtggtatatccaccaggccctgatgaaatcgggacaggatgtgctggcagatatcatcgccgccgacctgaaagggctgctgcgtcgccttaccgggcttgaaaccctggcctttaatgacggtacgccgtttgccgatgaggtcacgctgaactggataaaccagagcgtgctggacgatatgtccggctggcgggatgagccagtcagtgccgacagtggggataataacaatattctggctcttgagccggaagcgctggagaaagcggatactgatggtctggatgccacacttcactggctgcagactcgcccgggcgccgactccgcaaaagacaaatggctgctgcgtctgctgatggcccgtgtagccgagcagaagggcaaaaatgaactggcgctgcatttgctgggtgagctcgacagtgccgcacagtcaatcaccctcacgcagtggacaccggcactgctgtttgaagtgaaatcgcgtcgcctcagactgctgcgaatgaaagccacacgcagtgaaactgataaatcacggcttcagcctgagatggatatgcttctgtccggtctgattgcgctcgatccggccagcagtgcggtgctttgcggataa

SEQ ID NO: 111684 - DNA, 3483 bp, Enterobacter aerogenes
gtgaagctactcttagcaccgaagactacggaaggccgctatcttgctgtcgcagttattttctttttgctgttggccgttatgacgttcatggtctggaagcacccggatatagccgggattgaagacggaagtcagcagcaaattcactggctcatcgccggcggatgtatttcaggatcagcccttatcgtatcgatgtttctcctggcggcggtacgaagtgccggtaaacaggagtttagtgcgcttgtcgacaataccaacggtgatgatgagaaaaagaaacgagaaagtgataaagcgcctgttcaccctgcagtggccatgtgtaacaaaattcggagacatctccgctcccgtattggcctctactggcgtcgtaaaacccgtctgctgttaatcactggcgatgaggcggcaatcgagcagctggtacctggcctgcaggaaaaccagtggcttgaaggtaaccgtaccgttctgatttacggcggcagtctgactgctgggcccgataaggaaaaatacgccgcactgcgtaaactgcgccgcggtcgtccactggacggtattgtacgcgtcatgccgcggtcgcttaatctcacccctcagattagtgataacgatttacgcgaactggaaaaaatcagtgaactgctccgttattccacgccggtctggctgtggcagttgtgtgaaagcaagtggtcgcaggcaaaacgtactgaacagtcggtaggagccagtttcccactgcgtgccaggcctgacgatattacccgccagcttgagctgatgctgccgacactgcgaacgcaggggatgagtcaggtcgctgagaataacagccacgacttcctgctgcgcctgggccagcaccttaaagacggcggcattgcccgctgggctcagcaactggtgccatggctggctgcctctcagcagcgcgttccgctgcgaggcctgatgttcagcctgccggagaataaacccgccgctaccgcaggagaaacagccggtactgcacctgccgacgctgagaaatatatcccggaatcacaacgccatgcgctgaccctgccggtaacctggcagggcattgtggatgactgtacccgcgtgcgtggccgccgtgtcggtatggcgtgggaacagacgctggcctggacgctgatggctattatcggtgtctggggggtggggacgctgctgtcgtttgcggtcaatcgcctgcagattgtctctgtggcgcagcaggcacatgctctggtggagcatccctccgtatcggattatcagctgacggctctgcataccctgcgtaatgacgcaggccgcctgcagcaccgtattcaggaaggcgcgccatggtatcagcgcttcggtctggaccataaccagcaactgctcgacgcgatgctgccctggtacggtgtggcgaacaaccgcctgatccgcgacccggcaaatgccgccctgacgcagaagctcagcgtgctggcaggctccgctcccggcagcgaccagcgggcacagttggcgaagccgggctatgaccagctgaaagcctggctgatgatggcccgtccggataaagccgatggtgcgtattacgcgcagaccatgaaagccgtgcagccgacgcggatgggcatttcaaccggcctgtggcaaagcctgtcaccggatttgtgggccttctacatttccgaactgccaaaacagccacagtggaaaatcacgccggatgcgcagctggtgagccaaagccgtcaggtgttgttgcagcaaattggacggcgtaatgctgaaagcactctgtatgagaacatgctcaaatccgtgcgtcgtaactttgccgatgtgtctctggaagacatgaccggcggtaccgatgcgcggcgactgttcaccaccgaggaagtggtgcccggcatgtttacccgccaggcgtgggaagggggcattcagcaggctatcgaaaaggccgcaaattcccgccgggatgaaattgactgggtgttgagcgacagccggaaagcggtttcctcagacctgtcgccggaagccctgaaagcacgtctgacgcaacgttacttcaccgactttgccggcagttggctgagcttcctcaacagcctgcactggaatccggcaaacaacattgctgatgtgactgaccagctgacgctgatgagtgatgtccgtcagtcgccactgattgccctgatgaataccctcgcctggcaggggcagaccggccagcaaagcgaaggcctttcggactccatcatcaaatcggctaaagatctcgtaggcgggaaagacaaacctgcgattgaccagtctgcgtcagggccgcaggggccgctcgatgaaacctttggcccactgctgacgctgatggggaaaaacaaaggcagcaacgtcatgtcggctgacaattcactgagccttcagacgtatctgacccgcatcacccgcgtgcgtctgcgtctgcaacaggtggccagcgcctctgatccgcaggaaatgatgcagaccctggcgcagaccgtgttccagggcaaaagcgtggatctgaccgacacccagcagtacggcagtctaatttcggcaagccttggcgaagagtggagcggttttggcagcacgatgtttgtgcagccactgacccaggcctgggagaccgtgcttcagccgtcggcagcgagtctgaatgacaaatggagccgttcggtagtggcgaactggcacaccgcctttgacgggcgtttcccgtttgcggcgagtaaaagtgatgcctccctgccaatgctggctgagtttttgcgcaaggacagcggacgtattgagcgcttcctgaccacagagctcagcggtgtactgcacaaagagggcagccagtgggtaccggataaggtcaacagccaggggctgagttttaacccggctttcctgcgggcgattaatcaactgagccagctgtccgacattctgttcaccgacggaagccagggcatcagctttgagctgcaggcgcgccctgtgccgcaagtggtcgaaacacagctgaccattgatggccagccgttgcactacttcaatcagatggctgactggcagagcttccgctggccgggagagacttacaagccggggacgatgctgacctggactacggtcaacgccggcgcacgcctgttcggagattacagcgggacctggggctttattcgctggctggaccagggtaagcgccagcagcttgaccgcagccagtggatgatgagcttcaccgctccggacggtcgaaccctgcagtgggtattgcgctcacaacttggaaaaggtccgctggcgctgctggatctacgcggattcacgctgccggatcagatattcagtgtcgacagcgcagccatggctcaggcgctgatggccagcgccggaaacagtgacatggatggagtcgaataa

SEQ ID NO: 111685 - DNA, 1209 bp, Enterobacter aerogenes
atgtcgtacacacttaaaaatttgccagggtgctatccaaggcctacgtctctgaaattttctcgttggattattgctctggttgccatgctttcggtcagtgttatattaatgcgtatatttgggcgttatgttgaaaacctgtatttttggaaagttgctttaggtgtgcctattgttttgtggagtgttccgtttgtttcttgtctgcttctgtgggcattgcaggatagcaaagcaaatgctttcgacaaacaacgagaacaatggattcttcgagaaacccgtaaggcacgtcgtgcactacaggtgctgaatgcaacattcattaccggccactcatcagttgctcagaaagatacagcgcttgcgatgcaaaataacgatagcatcattgtttcgcaggtcgaccgggatggtaatgaaagctccaggatgagccaaatttcttctagcccgcaggactcgctaaaattcgtgataacgaatattttttcgaagttgattgctggcattcctttcgcacatatccctgacaaagtaccactggtagtattttttgatgtatcaacatcgctgcctctggagagcattcgccattactgggatgagacctggcaaaaaaacaatattactcttcctgttgaatatggtgagggaagtgggctcagtgtaatcgaccgctggttgaatgaacgtattaaagatcaagcgatgttattgattgtgggtctccagttaaagcctgccgaatctgacaacacagctgaagccggtgtagcactgcttcttggcaaccgcctgacccaggaggcactcgaacctctcgcgttgctgcaccggccagatgctgctccaaccggtgagcttagggaggggatgaacatggccgcctataacgtcccgctcaaagaaaatatcgtcaaaaatttatggcttgccgggctgacaggtgagcagcgtgcagaagttattgcgtgccagaatgcgcaccctgcgcagtctgtagaggacgaagccgtcatttcgctcgatacatctatgggacatgccggtgccgcggccccctggctggctatcgctgcctccaccgaaatcacccgacaaactcagtcaccacagatgattatctgcggtgataccacacagaatgtgctgtggagcacgctcattaccccgattgcttcccgacaggagatagatccgtga

SEQ ID NO: 111686 - DNA, 534 bp, Enterobacter aerogenes
atgaattggaaactggctattgcttttacgtttgtattatcccaatcagcttttgcaagttctgaagccttccaaaaggaatggaatgatagttccggtaaacatgttttaattatagataaaaagcttgatagcaaagacggtggaatgaccttacttgtcaaacaagtcacagggaatagtaacgattggaccctcaaggattttgtacgaaactgcgacgaagatataaaactagatattgttcctgattctgtcgaggtgaataaaacattttctgatggtgtgggaaccgttttatttgcctacaaaatagggtgtgttggtgggattgaccctgtaactgtaaaatattttgcttttaaagatggtgtaaaatattcgttaaggggagaagagcatattattgttggtagtgagggcttcggtggggagaaggctccagtgcctgatttcaatctcaagaatgacaaatctcttctgaagtacatgatagacaaatgggattctatttccacaacaaaagtaaattaa

SEQ ID NO: 111687 - DNA, 1821 bp, Enterobacter aerogenes
atgcgctttataaatgctatttatcatgcttcgacaaaaacggtagaatatgagtcatcgaatggcacaagattgttaaaaactgggggctcactgaattggcgattcaataacccagggaatcttatttctgtaaaaaatcaacaaggaaaaatcggtgttggagttgtctacaatccagacaaacattcattcgcaatattttctagcatagaagctggtgataatgccaaacgatctctgctcaaaagaaaatataaggattatactattccagaaatgatgaaaaaatatgctccggggaatgatggtaataaccctgaagcttatgccaattttatcatgtcagaaagtggggtcgctcagggggagaaagtaggagaacttgacgattcaaaattcagtaaggtaatcaaggcaattagcaaaaaggaaggtggcttgaagccgggcaccgaaaaatgggtgtatgtgacaaatgtgactgtttctgatggctctcgaccagttgctgatgtgccatttaaagtgacactaggaagcactagctacgagtggaaaacagatgcttacggcaagctcaagacaatcatccatacgaaacaaggaatggctattgtcgtcaaatatactaattctgctggaaaagaggatgttgtttattccgctgttgctggagatgaaacgaaaaatatactgcttacaagaaacttttcgcaattctctgcaaaaacacttgccgagactccaaaaactccacgtgcgaagagcactcaaaaaccgattgagtatacagtcatgtcaggtgacactctctcgaaaattgccgaacgttataaaacaagcgctgatgaaatagccaaaaacaataatataaaagatgtgagtaagatctttccaggtcaacatttgacgatatatggtgtcaacgctaatagcccttcgatctataccgttgctccaggggacactttagcgaagatcgcagaaaaaaatggcgtgaatgttgaagatattgcacggcagaataatatatcagatccgaataaaatatacccgggacaatcaatttctatagacaaaattggcaatgctacgtctggtaagactgaaaggccagttgaaaatccgatagcctcaaaaccagttaataaaaaacctgaaagaaataatgtaatcaatacgaataaaaaagctctggattcagttggaggaaaaaattctggcaatccgattgcattactccctcatgatcagagagaggccccatggatgatggttgcaattaaagaagctcaaaaatggaaaggggcagatgaatctataataactaaaacatctaattatcatcagttgataggttatggaaaaatgttgccaaacctcgttggcagcaatcacgcgtggtgcgcatcatttgtaaattattgtttgcaagaagtggggtatgctaaatctcattttccattcagagcaagatctttcatcggtgatagtaattttttcgaaatatctaagcctgtttacggggctattgcgacgtctggtcatcatgctacccttgtttatggaactgcaaacggtgccatcattggcttgggaggtaaccaaggggggttgtcaattataaatggatctgtatctgcagggacgattaaattttctacttataaagggatgcgatattttttacctgtaacttataaggcatattataacgaggcacaaaaacatagccttcagcaatttgatgtcaatgaattgaactcaaagatgttaagtatgaccgtaaagtcaaaaggaaaagagagtacacgatga

SEQ ID NO: 111688 - DNA, 417 bp, Enterobacter aerogenes
atgttaaaggaaatttggaagtctattttttgctttatgatcgtgctttctagctttagtgcatctgctacttgcttaaaggaaggggataaagtaagtctgacaggagttgttagcgaaaaattatactacggccctcctggctggggggaggataaagcgaatgatgagaagctacatgagtggatattgcatttaaaccagccactcacgtgtgtgacagacgcagatactgacaaccaaaactggaatcaggacgttcagttgataatgcgtgatagtaatgactataaagcaaataaaagtcttctaggaaaaagtgtcagtattgatggcgtaatatttcttgcagagaccggatatcacatgacgcctgttttattagatgatgccaagtttgaagttgcaggcaaatag

SEQ ID NO: 111689 - DNA, 1689 bp, Enterobacter aerogenes
gtggctgatgtgttcgctcagggcgtggtcgtcacggcgatacacagccatgcgcgccgtgatgaagactttggcgtcaacttcgacggcatcccggacagcactgattttagcttccgccctgagcctggctcacgcccggtgatggccggtacattgccggcccgtgtcaccagcaccaccgagaacgacacctacggccacatcgataaagacggccgctatcgcgtcaacatgctgtttgaccgtgataactgggaaaccgggttcgagagcctgtgggtgcgccagtcacgcccgtatgcgggagacacctacgggctgcacctgccgctgctggcgggcaccgaagtggcgattggtttcgaggacggtaacccggacagaccgtacatttctggcgtacttcacgactcggcccacggtgaccatgtcactatccgaaactacaaacgtaacgtcctgcgcacgcctgcgaacaacaaaatccgcctcgatgacagccgtgaccaggagcatatcaaggtctccaccgagtacggcggcaagagtcagctgaatctcggacatttagtggatgcggagaagcagaagcgcggtgagggttttgagctcagaaccgacagttggggagccatccgggcacagaaagggatgttcatcagtgccgatggccagacgaaagcacagggtcaggtgctggagatgcagccagcaatcagcaatctgggtgatgcccgggagcagatgacgtccatctccgatgatgcgcagaaggcgaccgcgaacccggccgatctccaggcgcaaataaaactactggaacagcagctgacagacctcaaaaaatcagtgctgctgctcagtgcaccggatggaatggcgctgaccagcggacaacatctgcaggtatctgccgggcagaacctgatagctacggccggtaaaaatgccgacgtcagcgtggtgaaaaatctgttcgtcggggtaggtaatgccctgagtgtgtttgttcgtaagctggggatcaagctcatcgcgaaccaggggccggtgcaggtacaggcgcagaacgacctgatggagttactggcacgtaaagaaatcagcatcgtcagcacggaagatgaaatcaagattattgcgaagaagaagctgactctgaatggtggtgggagctatatcaggattgatgcaagtgcgattgaatctgcaactgcaggtgaatatcgtacgaaagcaggacattatgggcgcaaggcaagtgcatcagaaaaggtcacgctgccagtctttcctgtaatggaacctggcgaacaaagcttacgttttgctttccctggcgccgatagtgtcagccaaagtctggactggatgacaaatcagccatacaacattactgacagcaatgggaaaatcctgtcgaccggcacggtagacagttcaggtcgcttcccgaaaatagtgctgcctgaaagcgatacattaaacttaatcatagggcgagagacctggctcaaagaagagcttccaacatcagtcgaagaggctgaggtagatagtgcggaagatatagaatcactggagtctgataccgattcggatgatatcgagacagcagaagatcatacttctgcgctaacagaatcaatgatcgcaaaactattaaatttaactacgacagggtga

SEQ ID NO: 111690 - DNA, 705 bp, Enterobacter aerogenes
atgaaaacagtacaaaaaaacttactggccagcctgctggccctgaccgccggccagtcgctggtcagcgctccgaccatggctgcagacagcatcgatgtgaaggtcatcggcaccatcgtaccggctgcctgtaagccgaccctgacaggcggcgctgttattgactacggcaccattccggctgccagcattgcggctgacgactttactgtactgccggtaaagagcctggagtttagcatcgcctgtgaggctccggccaaagtgtccctgaggtcggtggatgcgcgagcagcgacagtggttagacctgtgggtaaagagttgctgggcgctaccataaattcaacgacgtccttgatgggtctgggtcaggccgatggcaaaaatatcggggcctatgccatgcagatagcaccaggaaccgtgaagctggatggtggacaagcatctcctgatcatattttcagcaacgaccggggcgcaacctggttcaagagttctactttgggctcatggctgggaggcaatacgtcacgtcttttcagctgggccaatactggtgagttgacccctgtagccttcaaagccctgaccggcaccctggaagttcaggcctccatcaacaagagctctgagctgaacctgaccaaagccatcccgcttgacggtcaaagcaccatcgaactggtctacctgtaa

SEQ ID NO: 111691 - DNA, 216 bp, Enterobacter aerogenes
atgtttgcgctcgctgatgtgaattcgttctatgcaaactgtgaaaaggtgtttcgtccggacctgcgtaacaggcccgttgtggtgctcagtaacaacgatggttgtattatcgtgcgcagcgccgaagccaaacggctgtgcattaaaataggcgtcccctggttccagttgaagacggcagtacaattcccggagccggttatcacgttctag

SEQ ID NO: 111692 - DNA, 609 bp, Enterobacter aerogenes
atgtctaacagggtgatgtctcaccttgaggagctagcaccgcgcgtggagcagtacagcattgacgagatgtttctcgatatccgcggtatagaaaactgtatcaattttgagtacttcggccggcagctgcgcgagcatgtacgctccggaacggacctgaccatcggcgtcggaatggggccgaccaaaacactggctaaaagcgcacaatgggcctcgaaagagtggccacagttaggaggagtgcttgccctgacgccacataatccgaagcgaacagagaaacagctctcactgcagccggtggaggaaatctggggagtaggtcgcaggatatccaggaaactgagcacactgggtattaccactgcactacagctggcgcgcgcgaatcctgtatttatcaggaaaaactttaatgttgtgctggagagaaccgtcctggaactcaatggtgaaagctgtatttcgctggaagaagcgcctccgccgaaacagctgattgtctgcagccggtcctttgggcagcgtgttacgacgtatgactcgatgcgacaggcagtctgtcattacgctgaacgtgcagctcgagcgacaattctgtag

SEQ ID NO: 111693 - DNA, 1026 bp, Enterobacter aerogenes
atggccaaaaaaccgtttatgaaacgattacaggcacagcaggaaatgaaaaaaattgcggctgtttctgacattgaacacatcattgcaaataaacagccggatgagctgatccatgatagagctgcacaccagataatggcggatatcgctcgcccggatctcgaacctgatggacagattatccgtgttgatataaacctcgtctatgctgaagagcaagtacggcctgaagaagacttcgaggaagaagttatcgatggtatgtctgataccttcgaaactataggaatgcttacaccgccacgttgttatccccgtgacaagcgtggataccagatatggcttggcgaaacgcgtgttcgtacagctcgtaaacgtggtgatacccatattgatatttatgttggtaaaccaccacgagaaagaaaagaacgcattattggccagcttattgaaaaccttcagcagtccggccttaaaccattagcgacggcaaaatcgttctatgaactcaagcatcagttcaatatgacaggtgagcagatcgcaaaaacgatgggtaaacctacttcttttgtcagtaaacaccttcgtctcattgaagcaccggaaaatattaccgccctactccgggataaagttacttctgatatcgatctggcttacactctgattcagttgaatgaaaagtctcccgaagaggctgagaagcttattgcggttgcaagggagttcggaatttctcgcgcgcaggttaaagctgtgcatgatagagttaagaataaaaacaaaggtgagatttcgcatgcgaaatctaaagctcagagaaaggcagctaagactttggataacaattcagatgaaaaaaactggcaagttatcgtcgagatagacgaccagcaaggggcgatcatgactgatcgtgccccagaagatgatggttatgtatgggtaaaactggatattggtgagatttcagttgaggcttcggagctacgtgtcaaaggtctgcggcctctgtga

SEQ ID NO: 111694 - DNA, 138 bp, Enterobacter aerogenes
atgaacaataaaaattcacttttgattctcttgtttgtgtttacgcacatgagcaatgttgaaatacctgctacgaatatgctgtccagtaacaacatttcagttaatgtcacggtgacttccctcccttctaagtaa

SEQ ID NO: 111695 - DNA, 1218 bp, Enterobacter aerogenes
atggacagttctcagtatgaagagaatgctttatatgatattactaatttcattgcccaagaaatctacgttttagcagtaagatcttcatttacatcagaatacgagctaatgattcagttagcaaatcacataaaagaaacgttgcaaccagtaaaagatgaattttactatgattcagaatatgaagaaatccttgaactaatagtagatgcgataggtacaggtgaatcattagaagaactacataacgctataaataattatatcgacagtaggtatactgtccattatgaagaagatgtagaacataccgaaaaagtaaaaaatctgaagttaaagacgactttatgtgcaacatcagtatacgagaaatacgaaaaaaaatcttttccatttaatcatcaatatccaccatatgtattttgccataataataattacttagacgcattattatatttctataataaagaatatcttccaaagaagaaagaacataacggggttagaaaaatagtaagtaccatctgcccatataaaatatcaagacgatacaattactcaagatataagaaacgtcatattcaatatgaagttgatgtacctaaaaatacccttaagaactctatagaaaaaggagagtttaccataaacgtgactaatgagaacgatgcgttagtacaagagtgtctttttctgcttggttttagggatgaagagcaggttacttatactaatgaactgcgtataagcattgatacatcttccccgttagatgatattgaagttgacaaaataatggcaattatacgattagatctttcacatatacagcgaaacaataaatactctgaatatcgtagagctcaagacataagagacctaaagagagcaatgaaaatacccaatatttcaagtgatagctatatagcgataaagaaactgcatacaccacagatagaaaaactgaagactgatctaaacgcgaagaactatctctgtgggttaattatccttcaccgctatttatttgagcgttctacctctaatacttcattagaaaaattatgtgctgacctctcggatgagttgatgggttctataaaaatagacgcttccaaattttcatctgacaccatacttcgaggatataaacaagtcagaaagatatttcaagaacaaataaaaattctcgatacaaaaatctttgtataa

SEQ ID NO: 111696 - DNA, 621 bp, Enterobacter aerogenes
atgtatatggttaaacgaaacataagggatttgggcataatggcggttcttgtcttcacgacttacgggacctgcgcagcaacccgggaagaaatgcagcagcttgatgcagcctacccgcctggcagcgtggtgatctgtcatacggatcttccgggggacggaaaactcagcctcccgatgacaatgatctccaggggaaaggtcgggtccagagaaaatggtcaaactctctatgacgtctctgttacctggcatagtaaaggttcgaaggaaggcgttgccagtgatatgacactatcgttccggatgacacagcgcagtgatgagaaggggcagtactcgcttatcgatcctaaaagtatggctgtctcaatgcccacagccggacctgccgctgaaaaaaacatccttgaaggtttccgtcgccgttttgccggtaccgaaaacttcacaccctacagccagatcgagtttactgaatttccggcgtatatcacccatgacagggggaagcaccgtcctactgcaggagggaagttcatgagcgcgcctgacagacacacgatctttctttcggacaacgatggtcagatgcctggctcaggagaaagcctgtga

SEQ ID NO: 111697 - DNA, 126 bp, Enterobacter aerogenes
atgaacgtatttttagagggcatcctggaatttatgaaggcaccattgcgggataaggtagtaactttgctgtttatcctgtctgtgggggctgtgctgttgatgctgaaaagatccagtcactaa

SEQ ID NO: 111698 - DNA, 864 bp, Enterobacter aerogenes
atgattttgacacctctagatttgaaaaatttgaaaacattatttgagaacccattaaagccaggatatgttctaaactttagtgataaaacaatgagagagttctttgaatcagaattgaatattgatatagaaaattcaatttacaaagatgatggtacatcaaagttaaaaagacttctgagtttttttaaaaaaaacaaacaagaaagtgttctcattgtagtgagtaaactttggaattacagaaaaacattgagcgactttcctataacacctcaagatgaagtaatttttaaaaacttcacattaaaatttgaagataaaaaatctattacagataaaacaacggaaaatctaaatagaattaatactcaacatttgctagacgaacttgacgctcttaagagcaaaggacctcaagaaagaggatatggttttgaagtgtggctcaatgaactcttcaagactttcaatttgtcccccagagaaccttttaaaattaatggagagcaaattgatggtagtttccagcttaatcacaatacgtaccttattgaagccaaatggcacggcgtaaaaacgggaaacagagatcttcatgtttttcaaggtaaaatagatcaaaaaacaagatggacaagagggatgtttgtcagttgggctggatttacaagggatgggttgaatgcatggggaaaagggaagagtgtgatatgtgtcagtgggcgagacctatatcttatgctgaaaaatgatattaacttttgccagctgattgaggataaagggagaatagcctccgaagagggtgactattacgtggaaattgataagatatatccaaatttatctaatacttaa

SEQ ID NO: 111699 - DNA, 837 bp, Enterobacter aerogenes
atgtttagtaatagaaacatcaatatctggaaggaatatcttcctagaatgctcagtaaacgcattgaaggtcctatcattagaacgggagaagatgctaaaaaagttgacacttttgtcatctatttattagacggaggtgagtacaaatatcttatagatcgtattgaaaaccagcatgttaaagcactcaaatggaatatggataaacgccgattctatgaagaatgtaatctatcctataaagaaatagcttctcttacgcctgaaattattcattattatggtgttgatgaaataaagtataattcaattaatgagttaagattgagtgagataacaaagtacgggcgtcttagaataaaactcaacaatttttttagaagcagagagcgtaataaattttacaagaaagaattagtagtgaatgatagaataaaagttttgaaaactattacaaacatttatgtaaatagtgaccatagttataatggatcaagtgatagtgatatattgaatcaactttattccattatgtgggtaagacatcccaaagcagatatatacaaaaaagaactaattcttactctagactcattagtggatgacggatgccttattaagcaagataataaatatatagttacaggcagggctgtgagtgctctctcaaagtatgagattgaagaacttcgctatgatcaacaacttgcgacacaacagcgcatgtctaacatgacactagccattgttatattaacacttattacagctgtagggggcttagttcaagctggtgtattaaaaattcccactttatttagtctacacttttag

SEQ ID NO: 111700 - DNA, 708 bp, Enterobacter aerogenes
atgaaaaactcattaacactagcctcagctgtgttgctggctgtgactgctggtcatgccatggctgcggatgacaatgtggatgtaaaagttacaggacagatagtgcctccggcctgcgtacctgcggtaagcggtggagcggtttttgattatggtggtattaaggcggcaagtctgacacaggatgattacacagttctttcaagaaaagaactcggtttttctgtaacctgtgattcccctatgaaaatagcgttctctgctgtagatgctcgtgctgactctgttgtcgtgcctgtgggaaagatactgattctatatttaggcagtactattacagcggacgatatttcgcttttcggattggggaccacatcggagggaaagaaaattggtgcatataaagcagctataatgtctccctttataatcgatggagaaaaagaaggcttcaattccataaggtctgatgacggtggtcagacttggactaattacggtgcttctgataccgtatggataaatcctcaaggagcaaatattctgtcctctttggcccaaaaggggagcacagaacctgttgcctttaccaccttgtcagcaactattagaattcatgctgccattaataagggctctgagcttgatcttaccaagattattaatttggacggacaggcgactattcaaatgacttatctctag

SEQ ID NO: 111701 - DNA, 210 bp, Enterobacter aerogenes
atgaaagatgaaaaacaaggagcatggctaggcgtgagcaatgatagagttttcagctgggctaaaacgggtgaactgactccggtggcctttaccaccctgaccggtaccctgagagttcaggcctccatcaacaaagtttcagaacttgatttgaccaaaacggtcactcttgatggcatggcgactatccagatgttctatctctga

SEQ ID NO: 111702 - DNA, 498 bp, Enterobacter aerogenes
atgcgaatcagactattatctggaataaagaaaatcgcaccttatactgcaatttttatgttaattcttttgctttatttgactttccaaagctggtctcgttggcgcgaagagcatttgacgacaatgacatgtgacgcaataatcaatgtttataaaggaaaacaacgactttctttacgtctgcaatatgcctttctaggcgaggaaggtgttgctaatttatccggagttatggaaatagaagaaggaagatacgcacagattagccgacaagtcttttttagctacaaacgagtaaacgatgggttatatatggaaaatcagaaaacaactatatctcttctggataatatcgggcctgagggactaaattccctattgccagcattttatactcagcaaggggctcgagcaaattttctggtatatgcgcaaaaacccggaggatacatctttgtaaaggattttatccccgcattttattgtgcaaaatag

SEQ ID NO: 111703 - DNA, 846 bp, Enterobacter aerogenes
atgccggtagatgataatgatgattattcaagtaatgtttgctatataattgaaaaggaaattcttttctttcctgcgcagcattgcattcataataatatcaaaaatgttacagtctctctgcttagtacggcgtctgagtgtctacttgttctcttaattgaacatgggagaattgtttcaagaaaggaaatgaaagaaagggtatggtctaaaagaggtgtggttgtgagtagcaacacattttatcaaaccatgctcaatttacgtagagggcttgagaaggcgggggctgggaggaacgtcatctccacttattatggaaaaggtgtatctattgaggaaaaggtcagggttgaaataaaaacttctaacgcggttcaggatttttgctttgttactgactcctgtgaattattttcacctcaaactaaacattcatctctgatagatgaacaagaacacatgaaaatagatgaggacaatgataaaaacggctttaaaaaaattaaaattaaaccatcaatggtttatgtattcaatttgataatttttttgttgtgtgtgttaatgttttttttatctaaaaatctggaaagagaaaattatttcaagcgatatgcaaaatcagaactgaagattaaagattgtcctatttatactggccctacgcaggtgagtgataatgagataaaaaacttaatctcaaaagaaatgtttagttgcgaaccaggtgaaagcctttatctgtcatccatataccccatacaacgcgtgtcagtgattcgttgtacgggaagttttttaccgggggatgaatgcgaatcagactattatctggaataa

SEQ ID NO: 111704 - DNA, 648 bp, Enterobacter aerogenes
atgaaactaagagttataagtgataacttatattattgcatggccttttcagaaacaaataattgtcagacattcacgcctgaccatgccttacacctaattgatagtggcaggaaagatgttttttatggttctgtagtagtgattaatgcatcttctaatggtgtaacacttcgagtactggattcgataatgaagcaagatacattatctatttttattgaaccaactcaatggcctactcgggatcgggtttattgcatatgcaacgtatatatattaccttgtaggatgccattaaccaagattctaaatagaattgagaaatgcaacatgtcatcaggaagtgtatttgaaatctacacgcacaagattaaagcttcggagtggagtataatgctatatctgatgaatggtatatccaatcgcaatctagcgagatatcttaattcatcagaaaaaacaataagcggcaggatgatatttcttgctggcaagatgggtgttttagggatcaataaagcaatgcaacttaatgttatgtattttttctatctaattttcttaataagtaaaggaaacaacatcaagacttatactaaacatcaacaatcactagtatgtgagatcgtgaaaaaatgcaaatga

SEQ ID NO: 111705 - DNA, 216 bp, Enterobacter aerogenes
gtgccggataacctgtttaacggacgacatttccaggcgctgattgtagtcgataattttagtcgggagtgtctggcgatccatgccggaaagccgcagaaaggtgaggatgtggtcggtgtgatggaagagttgcgggggctgggcaagcgcctgccggtacgtattcagacagataacggcagcgagtttatttcgaaaagtctggataaatga

SEQ ID NO: 111706 - DNA, 303 bp, Enterobacter aerogenes
atgccgggggagcagcaccttgctgaacgtgagcggaaaacgaaaccgctgctgaaatccctggagagttggctgcgtgaaaagatgaaaacgctatcgcgacactcggagctggcgaaggccttcacgtacgccctgaaccagtggccagcgctggcgtactatgcggaggacggctgggccgaagcagataacaacatcgctgaaaatgccctacggatggtcagccagggtcgtaaaaactggttgttcttcggctctgaacggagtggatccagaaggctacctccgccatgtgcttga

SEQ ID NO: 111707 - DNA, 207 bp, Enterobacter aerogenes
atggaacgcttcttcagaagtctgaaaaacgagtgggtgccagtgacaggctatataaactttagcgaagcatctcatgcgatcacaaactatatcgtcgggtattacagctcgctaaggccgcatgactataacggtggattacctccaaacgaatcggaaaaccgatactggaaaaactctaaaaccgtggccagttttagttga

SEQ ID NO: 111708 - DNA, 375 bp, Enterobacter aerogenes
atggtgtatcaggccccgacggaagaagccgcgctgatggcgctggatacgttcgcgggagtctgggacgataaatatccgcaaatcagcaaaagctggtgtgcgcactgggaaaatctcaatacgttcttcggctatccgcctgatatccgcaaggccatctacaccacaaatgccatcgaatcgctgaacagtgtgatccgcgcagccatcaaaaagcgaaaggtgttcccgacagacgactcggtgcgtaaggttatctatctggcaatcagggatgcttcaaaaaaatggagtatgccaatccagaactggcggctggcaatgagccgttttattatcgagttcggtgaccgcctgagcgttcacctttaa

SEQ ID NO: 111709 - DNA, 450 bp, Enterobacter aerogenes
atgaccacccgcgaaatcgtcgccacgttcaaagagatgtacgatgccgatgtgtcacccacgctgatatctaaggtcaccgacgccgtcaaagagcaggtcgcagaatggcaaaaccggcagctggatgcgctgtatcccattgtttatatggactgcattgtcgtcaaagtccgtcagaatggcagcgtaataaacaaagccgtcttcctcgcgctgggtattaataccgaaggccagaaagagctattgggcatgtggctggcagaaaacgaaggggcgaagttctggctcagtgtgctgacagagcttaaaaaccgggggcttcaggatatcctgattgcctgcgtggacggactgaagggcttcccggatgcgataaacagcgtttatccccagacccatatccagctgtgcatcatccatatggtgcgcaacagcctgaaatag

SEQ ID NO: 111710 - DNA, 207 bp, Enterobacter aerogenes
atgcccgagatggtcggtcagctcagcattaagcgccgtttcgacggtcagcttcgtcagcatgcgggaaaacgcattgagatcagcttcggttttaaggcctttagccagttcagccgcaagggctttaagtttcttttcgtccataatttgcctgtctccgttactggagtgaacatatcaaaaacaggcaattacacaatttaa

SEQ ID NO: 111711 - DNA, 492 bp, Enterobacter aerogenes
atggcaattcctgtttatctttggctgaaagacgacggcggcgcggacatcaaaggttctgtggacgttcaggatcgtgaaggcagcatcgaagtggtggcacagcagcataacctgtacatcccgaccgataacaacaccggcaagctgaccggtacccgtattcacaccccgttcctgttcaccaaggaaatcgactcctccagcccttacctgtacaaggcggtgaccaccggtcagaccctcaagtctgcggaattcaagtggtacaaaatcaacgatgcgggtcaggaagttgaatacttcaacaccaaactggaaaacgtgaaagtggtgaaagtgaaccctgtgatgcacgacatcaaggatccttctttcgagaagcacaaccacctcgagcagatcgaactgcgttacgaaaaaatcacctggacctacaaagacggcaacatcattcattccgattcctggaacgaacgcgctactgcgtaa

SEQ ID NO: 111712 - DNA, 1452 bp, Enterobacter aerogenes
atgcagcaatcaccggtgcttacggtcacgcagggatgctggatccgcgtggaggatcatcaggatctggagcaggcagcccggcaggtactgggtttgcgccctgactggggtcgtcagctgtcagtgatggtcagcgtctgtcctcagaaacacgctgacagcgagcgtcttaccagtcgtctgctggctttgcgctgggaaattagtcgattgcgtaaagaaacaggtcattcggtaccgctgattttgaatggtcagattggcagtgcgatgacgaatgatctgctctggcaggcggcgatcccgggggaaggggtgagggtctggcgtgagtcttcagcaccggcctcaatcgctgcatgggtcactaccggtgggttgcctgcgatgcagcaacaggtgttgatgaacagcctgatgggctggttccatcagcacgtcaaagctgtctttatggatgaaaatcctgatgttccagtcattaaacctgtagcggtgctgtggggtatgggaccgatccttgccggaagtctggctacatcggcctggacggcgtggctttctcgtcgcactgcaatgcagcaggtggctggctggcaaccggtgggaacggacagtacggtgatttcccccttcccggattttatcctgccgctgctgccggaaggacgaggcatgacgccgcgtggacgaacgttccgttgtgcgctcgggattttcacgctggcggcgattgcagcgctgctcagtagcggctggaacaatcaccagttgctgcagcgtgtgagtttcgatattgcccgatatgaccatatcccaatgcatgatttcggccctaaagccgatgctgttgccgtcctgcgtgacgatgcagcagagctggatggctgggcgcgcaatggcgtaccgatgcggatgggcctcggtctgtatcagggagagcgcctgcgaatgcctgtgctggatgctattcgctcttatgaaccaccgcctccaccgcctgagccgcagccgaaatctgtgccgaaaattgttcgcctcgacagcatgtcgctgttcgattcgggcaaattcgacctcaaatccggctccaccaaactgctggtcaactcgctggtgggcatcaaggccaaaccgggctggctgattgtcgtgtccgggcataccgataacaccggtaatccacaactgaaccagacgttgtccctgaagcgtgccgaagcggtacgcgactggatgcgtgacaccggtgacgtgccggtgagctgttttgcggtgcagggctatggcgagagccgcccggtcgcaaccaatgacaccccggagggcagagcgctcaaccgccgtgtcgaaatcagtctggtaccgcaggccaatgcctgtcagatacccggcaaaaccccagcgtcatcgcaggatgatgacgtatcacaatcaaatggagagtaa

SEQ ID NO: 111713 - DNA, 909 bp, Enterobacter aerogenes
atgcagccagagctgacgctgcgtttcgcccatcagaacaacagcgattatctgacctgtccggttgcccgtctgcagcaggattcacaggggaactgggcacttgatgaaacctttcttccgccactgctggctctgcagggcagccgctggctggtgacccagctggaacagctgatgacgcagttgcgtgcccgtctgagccgcctgatggccatgcgtcgcgaaagtaacgagcgcatggccgattttgccgtggcggatgtgtctctgttctggttgctcaatgccctgaacagcgcagagcccgtgctcggacagtttcagcgtcacccgcaaagttcaccggagcgtctgtacccggaactggcacgccttgcgggcagcctgctgaccttctcgctggaacaccaggtgagtgctattccggtctggcagcatgagcagctgaataacgtcttcccgccgctctttgacctgctgggcgacctgctggaagccagcctgccgtcgcgggtggtggcgattgagcttgagcatgatgcccggcttcacttctggcaggcgcgtctgcatgacccacgtcttcgggaaggggcggattactacctctccgtacgatcaccgatgccggtggcacagctgcaggaacagttcccgcgccagtgcaaggtcggcagtccggatcatgtcaggagtatcgtcaattcatcccgcgtgggtgtgcctttaatcccactccgtcatgtgccggcagccattccactgcgcctggaaaaccagtatttcagccttgatgtctctcatcctctggccactgaaatgcttcagggcggcacctgcatgttttacgttccggggatgcttggcgagcctgagcttgaactctttgcggtattgagaacatga

SEQ ID NO: 111714 - DNA, 150 bp, Enterobacter aerogenes
atggacgaaaataaattcaagctttggatacagatgaagcttaccggcgaaacagtgctcgaggtagaaacgactacccacgggcacaagccctccaaaaaaaggctcaaatccccattatggctactcgccaaaaacgttgctgcgtga

SEQ ID NO: 111715 - DNA, 2973 bp, Enterobacter aerogenes
atgactccccgtagaaagcagcaacgtatgaccgtgtcatttctcagcacggcaatttttctggcccttggtgcctgcagtaccagtgtccgggcgacccccggtgtcagcgtcggtagcggtgaaaacaagaccgtaaccggcgatatcgctgcgacgactatcggcgatgccgctctgaacgcccttgatggtggcaccatcaagggccaggatgtttcactgtccagtaaatttaacgcgcttatccgtgcgtcaggtcagagtcttatcgaacttgacggtgtggcactgggggcgtcttttggtgcgcaggcttatattgaagatggtgcggtggtatcgctgtcggacgccactttcagcgccggggacgtatggtatgtagatggtgcagatagtcagttgctgctgaaggactctgtctcttcgttgacagacgccacgtttgatatccgccatcatggtagtttgcagttcgacaacgtcagccttgaaggtagtccttccggcagtggtgcagccatgatacgtgctgccagcaatgcagatgtcacaattaccggcagcctgctgacttcgcatgataatgctgtactgaagttaagcgacggggcgacagcgatactgcaggacagtaaacttgccgcttatcctgagcatccagagaatatggggtattacccggtggtgcagctgaatgaggggacggctgttgatgcagataatgtggatttaagttttgccgcggaaggcagcgcactttcgctggatgattatacctttgcggatatccgtaacagccgtatcaccggtatgctgattaaggatgaaggggcagccgtggatgcttttggtgccgggagcaggacggtgatgacgaacacagatattctcatcagtggtgatatgtctgccgctccggggcgatttatgggagtgtatggtgggactgatgcgaccgtttcaatgcagggtggcagtattaccacacaagggacgggcctgacaggacttcaggctgattatgcccgggttgagctcaatggcgcgacggtatcaacgcagcaggataaatcggtgggggtgttgctgtatggggcatccggtacggtttctggtggtgcagtcctgacgaaggggggggactctccggctgtcgctatgcatgaccagggaaacctgaccattaacgggaccgatatcagggcgcacgcttctgcggcgctggagatgtctgcggggccggcagcgccgctgcaactggttctgaataatgcgcaggtgaccggggggaacggtgcatcgcttgtgatgcgggattcggacacgacccagccaggcggcgctgtcgtcagcgctgaattacgtaatggtaccatcatgaccggcaatgtcatcatcgcgggtcaggatacccgttccttattcagcctggatatggataatgccaccctgacaggggcggtaaacgctgagggcgggcagacttctctgtccacaacaacaggcggtatatggaatataaccggtaactcggtgctggattcgctgaataatggcggaacggttgctttcgctggcgatggtccgggtaccgctctgcatatccgtgggaattataccgggagcgacggtctcatcgtgttcaatacggtgctggagggggaccactcagaaacagatcatatgacggttgatggggcgacccggggggtgacatatgtggctgtcaccagagccggaggaagtggtgcgcagaccctgaatggtattgagcttattcatgtgggaggggagtctgacggcgaatttctgcagcaggggcgtattgtcgcgggggcgtacgattacacgcttgtccgtggaaaaggcgacaatgccggtaactggtatctgacaagcgaagggattacgtaccccggtgacaatggtaatggcggtgacaatggtaatggcggtgacaatggtaatggcggtgctgaatctcatcattcccctgacgtacgtccagaaggaggagcttacgctacgaaccttgcagcggccaatacaatgtttcagaacaggttgcatgaccggctgggcgaaactcactatgtggatgcgctgacgggagaagaaagggtaacgagcctgtggatgcgacactcaggggggcatagtcgtagcaaggatagtcatggcaaactgagcacacaggccgatcgctatgtactgcaactggggggagatatagcccggtggaatacttctggtgacagccgcattcatcttggtgtgatgggaggatatgcgaaccagaagagcggcacacgaaaccaccgtatgggctaccatgcagatggtaatatccacggttacagtgccggactatacggaacctggttgcaggaaaatactggaaaaacaggcgtatatgttgatgcctggatgctgtataactggtttgataacagtgtcagcggccagtcacttgtctctgaaaattacaaatcaaaaggcattacagcctctgttgaaacgggttacacgtggaaggctggtgagaaaagtgcgcgtgaaagctggtttatacaaccggtggctcagatgacttggatgggagtgaaggccgatgaccattatgaagtaaacggcacgcgtgtgcagggtgagggggacggaaatttgcagtcacggctgggcatgcggtcctttatcaaaggtcataacctgcaagatgaggattcgggcagaacgtttgagccttttgttgaggttaactggttgcataatacaaaaaaatttggagccactctggatggcatacatataaatcaggatggctcccgcaatattgcagagctgaagatgggggtggaaggggaggttaatcgccatatcagtttatgggttaacgtgggacagcagcttggggataaaggctacagtgataccagtggtatactgggtattaaagggagcttctga

SEQ ID NO: 111716 - DNA, 660 bp, Enterobacter aerogenes
atgaaacataacagccagcaggcggtcaggaaaaccgtctccgttataaaaaagcgccgggaagccggtgggttcgtatcagtcagcaggatgtggggtgttgccagcttgatagtgttggggctggggaatcagtggtccgccatggcgactatcaggccggcgactgcgcagcctgatataccggtatgtacggtgacagccggccctgcaatggtagattttggaagccgaagccgggggcaattgcaggatacttccggagggctgactccgggaatgcggcgtctgacagttagcgcaggatgtacgctttcccgggtgatgaaactccgtttcgatggtcccgtccggggaacagacttcagttgggggggagcagacagcatcctgcgtcttcgggtgtctcagacacagctcgatggtatcccggtacagcttcagcggctcgatagcgcagggagcccggtttctcagggggatgatgacttgccattcactcccggagataccctgatggcggtcaaaaatggtctgcccgtgcatggcaggcaactgaatatcaccctggagattgagcccgtactgggtgagcacgacagcagaccggtgcagcggatatacccggaaggttcactgcggataagcctggagccatga

SEQ ID NO: 111717 - DNA, 2475 bp, Enterobacter aerogenes
gtgtctgatgtatcctcagatccggttttttaccctttactagaaaatatgcctatttatcacggttgtgtcaggactttatttttacacactaccgttgtaacacttttcggaatctttggtttaggggatgtttttgccgatgatattgtctttgaccctggagcgttacaaacccaagggctggatacctccctcgcaacgcagtttcagcgcggagatgcgttcccgccgggcgttaaccgagtttctctgaaggtgaacggcgttgaccgggggcgtcatccggtctggtttgatgaggccggccgcctctgcccggatgcatcgctcttgcgtcagggcggtctgaaggtaccggcaggtgtgtcagacaggcatacagaggacgagaggagaagtgagctctgtccggatctgacaaccgtatggccacagttcaccgttgaggccaacccgggcgagggggcactggcacttatcgtcccgcaggaggcgctcgatccggatgcagataccgcacactggcagcacaacggcgcagccggaatgctgaactacagcacgcagtatatgggaagccagaccacaggctctcgcatgaattactggcagatgcagactgaggcgggttttaatgccggtgactgggtggtacgcagcaatcagagcctttaccattttggggactcaacgcatacggattatcagaatgcttatgcacaacgcacctttacaggcctgaaaagcaccctccaggtgggacaggtcccgctttcaggtggcctatttggggtcgggcaggtcatgggttttcagatgacaccggagcaggggctgtataccggaaacggagtggcggtagtgaccggcattgcagatggcccttctgtggtggagattcgtcagcttggtgtccccgtatttcatacgaccgtgcccgcgggcccctttaatctgagtggtttttcactgctgaacacgcggactgatttgaccgtcctcctgaaaggaaccgacggaagcgagcgaagctttatcgttccggcatcggcctatgcgcgtgaaggtgcgaccattacgccgggggtatcctggggggtggggaggtatgaccagcaaggggctgataagcacccgcttgttgctgtggcatcaaagggttttctgctgtctgagcgtacggcgctccagggcggcgttttgtggggggaggactatcaggcggtaagtaccgcgtttaactcgacttttctgtggcgtactgggatgacgcttcagaatacgtttgcccgcaccacctctttttccaaaaaaggtgcgctgacctctttgtctgtcagccagcctcttggcgatgcttttaccctgaatctgaatggttcgcatcaggatgcgggctaccgggaattcagcgaggcgcagatacgggagccagagaatagctcacgcaataaagatcaaataggcggaggattcacctggtctcaggagtggctggggagtttcagtctgtcggccgggcgcagcacgcagacccgcggcgatgccacaacctggactcagttaagctggggccgccagtttgggcgggcgacggtaaatgtgaatacctcccgtaacgagagtgggggtgactacggtcgggaagatcgcatttatatttcattccagtttccgctgggtgaaagtacgacgatgaataccacgatgaaccatagccgtgatggctggcgctatggaagccgtgtggatcaacgcctcagccaggatcgtaactggagtatctccgttgaacgggacgaacaccgcaggcaaaactcagcgacaggcaccttcagctccgtgacccgctggagcaatcttacggggagtgtttcagcagattcagaacattcgcgcagcctgagtatacaagcttcgggaagtgtggtggcacatgggcatggggtcacaatggctccctaccaggttcgtgatacgtttgcgattgcaagagtgggaaaaaagtccggtgtcaggctggagacgccggcgggaccggtctggacggataataacgggattgcggttatcccctccctgaacagctgggtgcgtaccggcgtggaagttgacactcgcagtctgggtaagcgcgccgatgtacttaacggtatgcaggaggtatcaccggcacgtggctctgtgagttatcttcgttttgatatggtttccacacggcgtgtattggtcagcgtacgggggagcggcgatgtacggcttccgtctggtgcggcggtttatgacaagaaaggggaatttatcactgtagttgatgaagatggcaacgtgttcctgccggatgcaaagccgggcatgacgttcagcgttgatacgaagaaaaatgaatgccaggtcacgctggacagtctgccggaagagccagcggaagaagcgggcctctatgagacggtcagcggtgtatgccggtaa

SEQ ID NO: 111718 - DNA, 1368 bp, Enterobacter aerogenes
gtggcagaggtctttgctcagggcgtagtcgtcacggcaatgcacagctatgcccgtcgtgatgaggactttggcgtcaggtttgacggcatcccggacagcactgattttagtttccgtcctgagcctggctcacgcccggtgatggccggtacattgccggcccgcgtcaccagtaccacggaaaacgacacctacgggcacatcgacaaagacggccgctaccgcgtcaacatgctgtttgaccgggacagctgggagaccgggtttgagagcctgtgggtccgtcagtcccgcccgtatgcaggggatacgtacggtctgcacctgccgctgctggcgggcaccgaagtggcgattggctttgaggacggtaatccggaccggccgtacattgccggtgtgctgcacgactcggcccacggcgaccacgtcactatccggaactacaaacgcaacgtgctgcgcaccccggcgaacaacaaaatccgcctcgacgacgagcgcggaaaagagcatatcaaggtgtcgacggagtacggcggcaagagccagctcaatctcgggcaccttgtcgacagcgaaaagcagaagcgtggtgagggttttgagctcagaaccgacagctggggcgccatccgggcgcagaaagggatatttatcagtaccgatggccaggcaaaggcgcaggggcccatgctggacatgcagccagccatcagtctgctaaaaggggcgctgaatcaggtaactggatggggaactattacgcagactcaccacaatattacgcctgattctgagccattaagagcattggtttccggtgccagtgagcttaaagagcctgcgctgttgctgtcttcaccgacaggtattgcctccgttacgccggaaacagccctgatgcacagcgggaaagggttgtatctgcagagccagggggaagtcaatatcaccgcagcacaacactattcggtgaacgcgagccaggcggtctcactgctggcccaacaggaaggaatgcggctggtatccgccaaaggttcactggagattgagtcacatagtgatgcgctgtcgctgacttccctgaaagatgtcactgtccagtcaacacagggacacctgcagttgacggctaaaaatggcattactctgggctgtggcggggcttatattcgtcttacgccacagggagaggtgcatattcacgggccgggattaatcagtcttaaaggcgtgcacgatttgcaggggcccgccagcgaggattttcctctgccagaactgccggcatcagtatgcaaagagtgccttaaaagagctcagcaactggcgcagggttttgtacccagggaggcataa

SEQ ID NO: 111719 - DNA, 753 bp, Enterobacter aerogenes
atgactgcgcaatggattgaagaagtcgctgttacctgccggacttccggaactgattatcttgatcttatcattgatcaggcagggctggatttcagcgttattccggcactgaatgcactgtcggtggagtggcagtctctttatcacgggcttccggaagcgtttatcgtcgatgatgctccgctggttgcacgcattagacttgatgattttcagcagttgcagtggctgaaggacatgagtcagcaggttgccgttcaggctccgttactgctgttgtgctcacactggcctttttctgccctggctggctggttcacacagtgtatggatgttctgcaggaaggacggagcgggattttacgattttacgatacgcggattttccctgtgctttttacggacgttctcagtgaggaacagcaaaagcctttattgcgccccgtactgttctgggcatggcaggatatggatggtaatgccagaggtataaaaggtagcggtacgccccagacccgcgacgaaaaacctgacaaaatcgatctaagcgatcgccagcttgagcacctgatgtgcgtatgtgatgtcatgactctcctgtcgcaccgtgcaccgccagcgggcaggtatgcatcacaacaggcacttttttctgattgttaccagggcatggtggaggcaacaaaccagggcattattctggatgaagcacgcgaggcctgggtcatgaaaaagtggcttcccacataa

SEQ ID NO: 111720 - DNA, 531 bp, Enterobacter aerogenes
atgaaacattcactgttaagcccgctgctggcgggcctgctgctgttaaccgggtgctcgcagcctgctgctcaggccggaggcggtggtggtggcaccattgacgccatcaaccacaccaaatgggcgattaaccacttcagtgtggataaccagtcgggtatcgacattattggcccgttccaggggggcggtggcggctgctgctacagtgtgcccgcccgctggacgccgggtatgacggtgcgtattgactgggaaagtggggaggcatccactgagggctttcctggatttgccgattcaaaaaaatatagggagtggagggacaaaatgaaagagaacgataggcagcacagcaaaaccgtcccggttcctgactataacggccaggatgtctgcggcatcacagtgcactttttaccctgcgatgacgtgaaggtgacgaccagttgctacacctacggcagtccctcctacccgataaaagagcccatcaggatgaaggagcccaaagtatgtccgagataa

SEQ ID NO: 111721 - DNA, 1197 bp, Enterobacter aerogenes
atgtccgagataaaggaaaccgatttagcctgggtgccgccgccgttccctgcccagggacgactgccgactcaggcgctgcaggtcgggcagagctgccatcagcagaacagcgccgagcggctctaccgccaggaactgtgtctggcggccggacgacgcgtggagccgccgtgctgcaagacgctgcatatcagtctgtttttcgacggtacggggaataacctgaacaatgacctgttgctgtctgacccgaagcatccgaccaatatcgcgcggctgtttcgtgccaccatcggagatggcaccgctggtggcgtatcggatgcgagcaaggtaccgctggatgcggcaagcgacagcggtggaaagtacttcaaattttatattcccggcgtgggcaccccgtttccggaagtgaacgacccggactattccaccatgggactggtgggcgcatccaagggcgaagagcgtattaactgggccttgctgcgcattattgatgtgttgatgcgaataagtaaggacccggaaaacaacagtataaaactgtccgagggtgccagccgtaaatccataggtaaaatgggtaccagttggaaccggctgtggtttggcggcagccacaaccgttacgaagagttcagtcgtttactgaatgcgttagccccgcaactgaaaccgttgctcacacagccggaaccgggtaagcctaaggtattaggcatcaaactgtacgtttacggattttcccgcggagctgccgctgcgcgtacgtttgtacgctggctgagcgagctgcttcctccaccaaaggctgagggcgaaaaacccccgcagtgcctgcagattggcgagatgctgttgcctatcagcgtggagtttctcgggctgctggataccgtggcctccgttgggatagcgcacgtggtgccggttgccgaggggcatatgtcctgggcggatggcatgatggagctgccggacgataaaacctatggcggtctgataaaaaaatgcgtgcatctggtgtccggacatgagcagcgcctctgcttcccgctggactcggtgcgccggagtgacggcaaatacccaccctatgccactgaggtggtttacccggggatgcactcggatctggggggcggttatccgccgggggatcaggggaaccagcgtcgcagccagtag

SEQ ID NO: 111722 - DNA, 501 bp, Enterobacter aerogenes
atgaaagcgtggcggtatttctttatagcggtgtttctgtttatgtccatgatacttcccgcagtaatatctcttttaccgtcatggcataaatacagtgataacggtaaaagagacatccggttagctgctcgtgtcgattttctcctgcgtgatgcccgtttactgggcggggatatcctgcgtcagcctcatccgaacctctcatgttcgccggacaccgcgcgcgcactcgaacaggcagcactcaggtatccgcatattcatggtgtgtttctttaccacaacggggaaatttactgctcctcgttaaggcagctctttacgcctgatgccacatttcaggacgtcacccgctctgctactgacgggaaaaccttgttgctgagcgggatgaaagcattccccggaaaagtctttctggcgtacatccggggaaatcagaaacgtggcattgtggtgactatcgatgcctactggctgcgacgctggttcccctga

SEQ ID NO: 111723 - DNA, 1149 bp, Enterobacter aerogenes
atgataatgagaaagatgttgcgctgttccctttccgtagttgtgctgtgctggtcgatgttattatttattcggcctgccatggcaaactgtactattaatgttccaacggcaactacctctatgcctctgcagctggggaatattactgtcggagctgatttggcagttgggaaggttttatataaacaaacatataacttgaattatcaaccaggtgggcaacagtacgttaccgtaacctgttcgtcaaaaaacccaatcatggcgaattatacttatacacagacgccattgccgctttcagcatggggaagtggtcaatatgctggtaaagtgtatgaaactggggttgcaggcattggtatttacgttcatgaaggtgtcaatggctctgtaattattcctgcaagtaagccggccgcaagccttccagaggttggtccaaccgaagattgccaaacatcagggaagtgcacagttataggtaattttaagcgctgggatgtgttttttataaagaccgggaatatatctccaggaactataacaggtggaaacttaccttgtgtaggtgttaattatacaaatgatgttaatagcccggaaaaccaggtagccaatatttgtatgtccggcagtattaatgttgtggccagcacctgtaaaacccctgatgttaccgtgcctatggggtcttatgatgtttcagctttcaacggaaaggggagcgcgactaaatggaacgatgcttctatcaaactgactgactgcccagtatattatggttacggctcctcaggctcctggtatgctgatggttctggtacgaataatagcggaagtccaactaagaatgctttaacagtacaactgacacctgtaactacagtagtaaataatagtgaaggtatattcagtctcttaactgagggcaacgctgcgggaggcgtgggaatacaactcgcttatgggaataatgttgctcaggaatttgtaaatttcgctgagacgaaaacctaccagatggaattaggaagcaccgggatatccaccatcccgttggtcgcacgctatatccagacagatacgcgagttacgcctggacaggcaaatagcgctgtaacttttacgattaactattactaa

SEQ ID NO: 111724 - DNA, 252 bp, Enterobacter aerogenes
atggcgaaacaggccagtggcgaggccgtgccgtttggtgctgaggtgtacgacggtgccggtacggtggtgggcagcgtggggcagtcggggcagatatatgcccgcgtggagaaaacacggggccgcctgaccgtgaaatggggttcgcaggtagatcagcgctgccacattaactatattctgccaccacagccggtgtcagctcataacaacaatattgtacggtttgattccgtgtgtgggggttaa

SEQ ID NO: 111725 - DNA, 501 bp, Enterobacter aerogenes
atggcgctcttcatcgagcacgcgcatggcggtggtgtagtcatagtaaccggacgtggagaagcggtaggctgccaccgtcaggttactgtcagtgtcgggaatgaatttgctgtagctgacctggtagctctggccactgctggccaccgtatcgtcctgcagatgagtccgtgcctgagtgacactggcggaaaacgcccccacagcggtactcactgccaggccgccctgcagggcgtagtagtccgcgccactgccctgtatcccgccaaacccggtcaggatattggtcagcccgcgctggtaagttgcctgatacagggtcggattgaaggaaatggacgggtcattcagtttgccggccacaatatcgtagcggtgcatacccgggcgcagcagttgcgtgaccgaggcatacggtaccgagaacgtctggacactgccatccgcttccgtcacggtcacatcgagattgccgccgtagcccgtcgggtataa

SEQ ID NO: 111726 - DNA, 138 bp, Enterobacter aerogenes
atgaatgtgggggtatctcagtgcctcgtgctcgagctggcgcgccctgtcaggggaacattgcaggtctccctggtgcctgaaatatacgctcaattcgcgggcatcacgcaggagaaaatcgacacgagcagctaa

SEQ ID NO: 111727 - DNA, 1140 bp, Enterobacter aerogenes
atgaaagcatttcccgggaaagtttttctggtttatgtccggggaaataaagaccatggaatggtggtcacgattgatgcttactggctgcgtcattggttttcagcagacggtctgaacgccgtcattgttgacggaaaactgttaaacaggaacctgaccgttaccagtgcagagggcatccgcacgaaggttacgcattcggtcaaatctccgctctccggattcagcgtggtgtctttccggcatgataaccggtttcagctgttctggccggtggtggccatgctggcagtggcactagggatgcttattgccctgctggtatgcctgtatcgtgaaagggccttcccgactccccggcggctggaaatcgccatactttcaggagaaattgtaccctggtatcagcccataatggatgtatctcgtggtgaaatccgtggggtggaagttctggcgcgatggcatcaccccggaaagggtacgctgggacctggctcatttatcccactggctgaacgcagtggtctgcttattccgatgacactgacgcttcttgaccaggtccggcgggatatggcggttctgaaattccggttaccggcaaactttcatatatccatcaacattaatgccactccggagatggttgatgccctgaccgatgcgctggtcagttttcatcggtcatttccggaccgactctctctggttgttgagttgacggaaggcacggaggtccggtctgattcactggtgatagcgttgctcagggacctgcgactagaaggtatcggtatcgcgctggatgattttggtacggcgttttccaatattgccgcgattgaccagttgccggtaacctgtctgaagattgaccaggggtttatccggaaactggcggacagcatggattcgcaacgcctggtggagagcatcattgaactgggcaggaacagccatctgtcggtggtggctgaaggggtggagacagcattccagtctgattttctgttgtcgaagggggtgattttccagcagggatactactggtcaaaaccgctacccatgatggattttgcccggtatctcatctggcacagaataaacccggaacgtttaactgaggctgattaa

SEQ ID NO: 111728 - DNA, 174 bp, Enterobacter aerogenes
atgacagacggaaagcactggtccgaaattatcgcacgttttaaaaagcccgattctgtggagttttttgtccagaaaacgctaggcacccttgaagacccggaggaggcgcattttttaagaacgctggcgctgaagaaaattgaagagcttgaacgcgagtatggcctctga

SEQ ID NO: 111729 - DNA, 309 bp, Enterobacter aerogenes
atgacaaaagaagaattgatgcccgtaaccgataaggtcgcggaagagctggagaaggccgggttatatcgccgggcggctacccgctggctgcaggtgttttttgaatgcccggatgatgcagaaagagcctggatatcacgccgccgcagggattgtctcagccggacgcaggttgtggcgataaagtcggatgagagctatctggatgtctgtcgggctgtcagggcggtgcaccgcgagatggggttgagcccatccagtgcttcagcctaccatagctatcgtatcgggcggcggcggggttaa

SEQ ID NO: 111730 - DNA, 273 bp, Enterobacter aerogenes
atgtctaagcacgtttatccaggatcgaacgtcgtcgacataataagcaatcgttaccgcattggcatcctctacggccattgcgctagcgaacattccccgtttgtcgatacgaagcgtcgcaaagcctttggcagccaggccttcagcgagaagtcggtaaggcgaagcattcacaccaagcgggttgtttccatcccgatcggtcggcccggagccaggaacgataagaacaacggcggttggaatgcattaagcgaagtcgtgatgtag

SEQ ID NO: 111731 - DNA, 312 bp, Enterobacter aerogenes
atgagtgaaaatacggtaaataacgcactgcgtctgatgggctacgatacaaaagtcgatgtctgtggtcacggcttccgggcaatggcctgcagttcgttgatcgaatcaggattatggtccagggacgcagtggaacgccagatgagccaccaggagcgaaatggcgtacgtgcggcttacatccataaagcggagtttctggatgaacgcaggctgatgctgcaatggtgggctgattttctggatgctcacaaacaggaaaccatttcaccgttcgattttgcaaagctcaacaacccaatgaagtaa

SEQ ID NO: 111732 - DNA, 126 bp, Enterobacter aerogenes
atgtgggtgagcaaagcctcaaattggaaatttacagaagagtatttaatccagaagctatgtttctcttcaggtttaattctaggatatgccatccgtatattttggctgtgtggtcagtattaa

SEQ ID NO: 111733 - DNA, 549 bp, Enterobacter aerogenes
atgaatgtcacgaatacggataattaccctatgctgctgacgaccaccatccaggacattgctcaggataatgaaaaattgattctggtttcaccgccgaccattcgcgtggatgctggaaaaacacagaaggttcgttttatgctgatgaataaacaacctctgaaaacagaacgtttacggagggttatttttaatggtatccctccccagaataaaggtaaaaacgaggtgcgaatgagcgtcagccagaatttaccggtcatcatacgtccggcagggctggcgcgcgataaagcaccatggaagtgtcttgtctggaaagtttccggagacaaattaacggtaagcaatgagtcaccttatgtggttcgtcttgcacagggcgtgaaagctctgccgggtaatgttccgctcagtctgccgcaaagttacattctccctggtgcgcatatttctgttaatgcaccggcaggaaaaaggctgtcaggcacgcaacaggtacgtatttctccagccacaacatgggatgcgccgctcacaaaataa

SEQ ID NO: 111734 - DNA, 363 bp, Enterobacter aerogenes
atgaaaacagtacaaaaaactttgttggtcaacctgctggctctgaccgcaggacagtcacttgtcagcgctccggcgatggccgcaaacagtattaatgtcaaggttattgggactatcgtacctgcagcctgtaagccagccctgaccggcggggcggtgattgactacgggaccatcaaggccagcgacatcaagactgatgatttcaccatacttcctgtaaaaagcctgaactcctgcatcgcctgtgaggcgccagccaaggtatctctgaggtccgttgatgcccgcaaggaaactgtagtgaagccggtgggcaagcaattgctgggacaaatgtttatgagggtatggcattaa

SEQ ID NO: 111735 - DNA, 156 bp, Enterobacter aerogenes
atgggcctgggccagtctgatggcaacaaaatcggggcctatgccatggaaattgcttcgaggaccgtgaaactcaacggcggcaccacctctcttgataacattttcagcaagaactgcattctcaacgggggggggattacggatcatgactag

SEQ ID NO: 111736 - DNA, 927 bp, Enterobacter aerogenes
atgcacaggtatattgaagtgaactcagtcagggaagggggctatcttctctggcgccttggtcatgcagaagatgccagacgctttgctttcagtgcgcaaaagaacaggcaacaaattcaggataaaattaacagtatcattgatgatgaaatacaaaataatgacggtgacgcacgtattctcagagcagtgctccggtatgcctcaaattaccgtgaacgtagtattgatgaatctcagttgtcatggctcaggcgggatgcttatggttgtctgtatttctggttagggttagtaaaagaatacgtaacattcgggatgacggagagtaatgaagtgaacccccgatattattaccgacgggaggggcatttctggcttactggtgagcacatgtcgtcatcagtccctgactcaccggaacaatgttatctggcaatattatctatcctggatatgctacctcaccagattaaacgcaaagatgccattatagcggaacttagagatgagtatttttacaataaggaacgatttagaaaagatttttcctggataactgacgcagagcctgaaaacattgaatggataatggctcaattcggtctgcatcgaaagattcttcgggattttaaaaatattaaccttgttcatgagatgcaaaaccttgctgttcctgcactatattatctctgggaggaagagccagacacaaaacaactgtttcttaatacgttgcgcaaacgttatgcaaatatgaaacatcgtaagaaagtagcggttaaatctccggttaatattcgtatttctgaaagtgcaaaaaagacgctggtaaaacttgagaagcgctttaaccgaaacagggctgatgtcattgaatatctgatagaaaaaacctggcaagaactgaaccagaaaaactaa

SEQ ID NO: 111737 - DNA, 675 bp, Enterobacter aerogenes
atgaaaaagccattaaagcttgcttccgccgcgttgctggctgtgattgcgggtcacgccatggccgctgatgacaatgtggatgtaaaagttacaggacagatagtgcctccggcctgcgtacctgcggtaagcggtggagcggtttttgattatggtagtattaaggctgggtctttaaagctggatgattttaatgttctgagtaaaaaaactctgaactttagcctgacctgtaattctccaatgaaaatagcttttatctcaacagatggtcgtgcggggacgatagtttccgggggcggttccatgggtatacaagatagtgatacatccaaattttttgggttaggacaggctgatggcaaaaatattggcaattatgctatgggtataagtaatactaatttacaggtagatggcgaaacggggtacgtggggattcagtcgaaggataatggcacgacctggacagccggtgactttaaaggcatctggatggaccagaaatacatttcaagcgtcgcgaaagccggaacgactgagccggtagcctttacgacaatgaatggccagattattactcagcctgttattaataaagcggctgaactagacctgacaaaggttgttaatttggatgggcaggtttctgttcaggttatttatctctga

SEQ ID NO: 111738 - DNA, 228 bp, Enterobacter aerogenes
atgatcgctgccgaggttggaggtcatcaggataacggtgttacggaagtcgatttcacgcccttcaccgtcgcgcataaagccgcggtcgaacacctgatagaacaggttcatcacatcgcggtgcgctttctctacttcatccaacagcaccacgctgtatgggcgtttgcgtaccgcttcggtgagaatgccgccctgaccgtagccgacgtaacccggcggtga

SEQ ID NO: 111739 - DNA, 516 bp, Enterobacter aerogenes
atggcggttgctgccggcggcgatatcttccagcagtgcctgttcttccagttccagcgcggtcagttgtgctttcaggcgcacaatttgttccggcacggtatcaaggctcatgcggacacgtgcagcagcggtatccagcaggtcaacggccttgtccggcaactggcgtccggtcaggtagcgacgggacagggtgacagccgcacggacggcgtcatcagtgatatggacgttgtggtgttcggcgtagcgggatttcagtccacgcagcatcagacacgcggtgtcgtcgtccggctcgtcgaccttcaccatctggaagcgacgttccagcgcggcatcgcgctcgaagtactgtttgtactcgctccaggtggtagcggcgatggtgcgcagttcgccgcgcgccagtgccggcttcagcaggttggccgcatccgcgccacctgcctggttgccggcaccgataatggtgtgggcttcgtcgatgaacagaagaatgggtaccggtga

SEQ ID NO: 111740 - DNA, 378 bp, Enterobacter aerogenes
atgagaatattacctgtatcccgaaaacgggaggcgcagtcctgcccgtcgcctgtaatcgtctggcagaccctgctcacatacctgctggacagacactacggcctgacgctcaacgacacgccgtttggcaacgatggcgtgatccaggagcatattaacgccgggctctcactgtgtgatgcagtaaattttatcgtggagaaatacgacctggtgcgcaccgatcgtcgcggtttcagtgcggaaacacagtcaccgcttatcagcagcatcgatattcttcgtgcccgtaaggctaccggactgatgagccgcagcggttacatagtggtgaccgatatcaccggtggcaaatacagcggggaggtccagtga

SEQ ID NO: 111741 - DNA, 369 bp, Enterobacter aerogenes
ttgtcgaataacactccaccagtaaaccatgatattgccgaaccgtggtggggtcttcagtgcaatatcacgccctgttttggcgctcgtctggtgcaggagggcaaccgactgcactatctcgctgaccgcgccaacatcaccggtcagttcagcgaggcggatttacgccatcttgaccaggcatttccggtactgatgaaacaacttgagctaatgctctccaccggagaactcaatccccgccactcgcacagcgttatgcttttcgcaaaagggttgacctgtgaagccgactccctcggctcgcacgggtacatctatatagcgatttacccgactccacctgaagcacaacccggagactaa

SEQ ID NO: 111742 - DNA, 204 bp, Enterobacter aerogenes
atggaacaacagttaccgttatttgcttgtgaattagcccccactgaccagcagaccatccggacggcactgaccctgctggaatgccagctacgtgagccaggtgcagcatttacatccagcagctcagtacgcgactggctacgcctgcgcttgaccgcgaagccttcaccgttctgtggctcgacaatcagcaccgtctga

SEQ ID NO: 111743 - DNA, 234 bp, Enterobacter aerogenes
atggccccggaaacaaatcgagataccgatgagaagtggtcgctatttaacactatgaacggtaacagcggagagctgagcgccgaagccgccggaatagccgtttgcctgatgacatacagtcaccacgccatgcgcaccgaatgcgatgctatgacggagcactactatcgcctgcgggactacgcgcttaaccacgcggaatgcagcaccatcatgcatatcatcgactga

SEQ ID NO: 111744 - DNA, 369 bp, Enterobacter aerogenes
atgcagaacacaacacctgtagtaaaccatgatatttctgagccctggtggggacttaaacctaccgtcaggccgtgctttggcgcacggctggtacaggaaggcaaccggctgcattatctggctgaccgggccagtttcaccggaacattcagcaatgaggatttacgccatctcgatcaggcgtttccggtacttctcaaacagctcgagttaatgctggtttccggtgaactcaatccacgccatcagcaccgcgtcacgctgtttgcaaaaggtctgaccctcgacgcagatacccttggcagttgcggttatgtctatattgcgattttcccgaccccacctgaagcacagcccggagactaa

SEQ ID NO: 111745 - DNA, 222 bp, Enterobacter aerogenes
atgaaaatcatcagcaaacgccaggcaatgacgatttaccgtcagcatcctcaatcccgcctgtttcgcttctgtaccggaagatataagtggtccggcagcatctgccactataccggacgggaggtacaggatatcgccggcgtgctggccgtattcgctgagcgtcgccaggaccgcaatggcccgtatgtcgtattgcgcagcgttaccctgaagtaa

SEQ ID NO: 111746 - DNA, 480 bp, Enterobacter aerogenes
atggaacaacagttaccgttatttgcttgtgaattagcccccactgaccaaaagaccatccgggcggcactgaccctgctggagcgacagttacgcgaacccggtgcggcatttacctccagcagctcagtacgtgactggctgcgtctgcaactgacgctggaagaaagggaagaatttaccgttctcttcctcgataaccagcatcgcctgattgctcatgaaacgctcttccggggcaatatcaacagtatgaccgtatacccccgtgaggtggttaaggccggactgaaaaataatgccgctgcagcgattctggctcataaccatccgtcgggagaggcagaacccagccaggccgacaggttaatgacagaacgcctgaaacaggcgctggagctggttgatattcgcctgctggaccatctggtggtcggcgggatggatattgtctcttttgccgaacgcggctggctgtaa

SEQ ID NO: 111747 - DNA, 678 bp, Enterobacter aerogenes
atgcatggctgcttctgccagtgggcggtaaattacggtctggaagcgggccagcagcgccggctggaagtggtcacgcaatatcggacgcagcagttcgtgcagatctgcctcggtggcttccggctgctcatcaagcaactgcatcaggtggtcgctgccgaggttcgaggtcatcaggataacggtgttacggaagtcgatttcacgcccttcgccgtcgcgcataaagccgcggtcaaagacctgatagaacaggttcatcacgtcgcggtgagctttctccacttcatccagcagcaccacgctgtacgggcgcttgcgcactgcttcggtgagaataccgccctgaccgtagccgacgtagcccggcggggaacctttgagctgggaaacagtgtgtggctcctggtactcggacaggttgatggtaatcagcgatttttcaccgccatacagcacgtccgccagcgccagtgcggtttcggtcttaccgacgccgctcgggccgaccagcaggaacacaccctgcgggccgttctcggacgtcagcccggttttggccgcgcgcaggcgctgggcgatagcctcaagagaaacatcctgaccgacgacacgctggccgatttcattttccagggtcagcagttcggtctgttcgtctttcatcagggatga

SEQ ID NO: 111748 - DNA, 693 bp, Enterobacter aerogenes
ttgtgcctgttcgagctgctgctgcaggtcggaaatctccgcctgctggctgatgtcctggcggctggtcatcagctgctgcgccagcgccttttcagtgctggaacgcgattcctgctccgcaatacgcgcttccagttcagtccgctgctgctcaatggcacccagacggtcaccatggcggttgctgccggcggcgatatcttccagcagagcctgttcttccagttccagcgcggtcaattgtgctttcaggcgcacaatctgttccggcacggtatcaaggctcatgcgcacacgtgccgcggcggtatccagcaggtcaacggccttgtccggcagctggcgtccggtcagatagcggcgggacagcgtgacggcagcacgtaccgcatcatcggtgatatgtacgttgtggtgttcggcatagcgggatttgaggccacgcagcatcagacacgcggtgtcgtcgtccggctcgtcgaccttcacgatctggaagcgacgttccagcgcggcatcgcgctcgaaatattgtttgtattcagaccaggtggtggcggcgatggtgcgcagttcaccgcgcgccagcgcaggtttcagcaggttggcggcatccgcgccgccggcctggttaccggcaccgatgatagtgtgggcttcgtcaataaacagcaaaatcggtactggtga

SEQ ID NO: 111749 - DNA, 375 bp, Enterobacter aerogenes
atggatacagacagaaaaagaggtcgtatagaattaaatcacgaagaacgcagagatatatctatacagttcagagtaaacaaagcagagtttgaatatttaaaatcattagtggaagcatcagggcttgaaagaggttattacattagaaaagagattttaaactctgaacccgttgttaaaagaaagatgccaaaagttaatcaaaaaacatatatgcagctttcagcgataggtaataatataaatcaggctgttaaaaagttaaatggcaatgagtattttgataaaaatgaagttgataagcttaactttaatataaaacaagtcagcagaagaataatagaagtgaataaggatttggattatatatga

SEQ ID NO: 111750 - DNA, 501 bp, Enterobacter aerogenes
atgacaaaaatagagatgatgaactcgttagaagtttctcagcaagaaaagatgatgaaccaaatagtattgaacgatcacttattgaaccaaatatcaatgacagtagagccactgaccgaatcgatgatgatattatcagaatcagtcagcacagcattgaatcagacacagcagacactaacaaggctgaacaactcgttagaaacaacaacaacagctttaaactcagcgaaaaatatattagaccaacaagccctaaagttagaagaacaacacaaaaagctgcacaaatacttaacagagttaaaaaacaatacaataaagaatcaatcaaaacttatactaaaagtagcctcaatagttggagtcctaaatttagcggcggttctatcagtaggatacttgatcatgcagaaacagccaacgcagccacaaataaatttagacgcaagagcggtagccgtttcaatagcagagcaactaagatcgaagagataa

SEQ ID NO: 111751 - DNA, 288 bp, Enterobacter aerogenes
atgcgtaaacttatgatggtggcaggtttggtgacgctattgtctggttgtggtgatgatggcatctatggcagctacgttaatcagcaatacggtgtcaggcttgatgttcagaaagatgtgatcaagttcagaaatggcgtttttactgttaaaagctgggatgaaagcaagaaacccatctatatagccaaaacgcaaaacaaagatcttggctcttggacttttaaaatcgaaaaggtcaaagatggcgtcgtttaccaaggtgcggtttttaagaaggattaa

SEQ ID NO: 111752 - DNA, 276 bp, Enterobacter aerogenes
atggaacaaaatattattcagtgtcctttttgttataaagaaagtcaaaaaggtgttcatgtatgcaccggatgtcaggcatccgtgctatatggaacatatcccggttggtatgcggcggtgatcatcctgttagcttttggtctgtcagcgctcattggaatgtctgcaggtatggcaggagctactataagcttaccaataatagctattgtcggttttgtcgtgggtaaagctattttctcagataacattatattcagaagaagaatgtaa

SEQ ID NO: 111753 - DNA, 177 bp, Enterobacter aerogenes
atgatgtttatgtctgtagtaatggtaatactttgtattatgttaggcggttttatgattagaagctgtacaggaaaaactaactcttcaagcgaagcaaaacaagcaatatcagatgttaaaaaaataatagataaaaaagcactaatcaaatataagaggagtaataagatatga

SEQ ID NO: 111754 - DNA, 168 bp, Enterobacter aerogenes
atgatccataaatactccctaggaaaatctgacgatattgaactggctaaactacaggggctcttatccttttcgaaacatatagagcctttatttatcgaaagaatgatgaaaaaatactcagttaacttggtagataaaataatctctggtcaatggaggaaataa

SEQ ID NO: 111755 - DNA, 228 bp, Enterobacter aerogenes
atgaaagatggagaaaagcactggtcagcgattattaagcggttcagaaaaatcagttcggtggagttttttgtccggaaaaccctggtgatgcttgatgatccggaagagaaattatttttaagcgcccttgcgcagaagaaaattgaagagctggaaagagagtcggtccctgagggggtaacggacggtgatgatggaaaaagaaacgctgacgccggtagctga

SEQ ID NO: 111756 - DNA, 234 bp, Enterobacter aerogenes
atgcaggacattgacaatacgccgttatcacccggtccgttcacccgtgagcaggcgactgccgtcgccacgctgtatatcaacgttgctatcgaagatgaccaaggtacgcactttcgactggtgatccgcgacagcgagggccagttgatctggcgggcgtggaattttgaagccagtgccggggaatggcttaaccgctatatcgccagccacgggataccaaaaaactga

SEQ ID NO: 111757 - DNA, 447 bp, Enterobacter aerogenes
atgaagatagccttcaaatctgtcgacggacgtaaaggttccgctgttattccggtcggaaagagtatacagcagcaaactattactgaaaattccaggttgatgggcgtggggatggacggtgacagtaaggttggcgcttattctctgaatgttgccaatatgaaaattgacagcggtgatggtgttattcgggattatacgaaatatgattcaattagttcttccgataacggtaaaaactggcgaaaagttgctcgtatgtatttaaatgataataatgaaatcacttctattgctgataaaggaacactggctccattagcagtaaaaacactgaatggagagatattttcacaacttgtgattaacaaaggttccgaactcgacctgactaaagtcattaatattaatggcgtgtctactattcaggttatttatctctga

SEQ ID NO: 111758 - DNA, 486 bp, Enterobacter aerogenes
atgatcccggaaacccgtgagtttgagtttgcgaacctgggctttatcccactaagttattataaaaacagagattattcctgctttttcagcgctaactccacgcagaagccggccctgtacgacactgcagatgccacagccaacagccgtatcaacgcgcgtctgccgtatatattcctgctgtcccgtatcgctcactacctgaagctgattcagcgtgaaaatatcggcacaaccaaagaccgtcgtctgctggagcttgagctcaatacctgggtgcgcagtctggtgaccgaaatgaccgacccgggcgacgagctgcaggcctctcacccgctgcgtgacgccaaagtggtggtggaagacattgaggacaacccgggcttcttccgtgtgaagctgtacgccatcccgcacttccaggtggaaggcatggacgtcaacctgtcgctggtttcccagatgccgaaggcgaaatcataa

SEQ ID NO: 111759 - DNA, 132 bp, Enterobacter aerogenes
atgggcggctggctggcaccgtggcccgtgcgtatcggcctgagcgtggtggtagtggccgcactctggtggggtctgaaccactggctggatcagatgctagcgaccctactgccgggagccgtgaaatga

SEQ ID NO: 111760 - DNA, 207 bp, Enterobacter aerogenes
gtgcgcagtctggtgaccgaaatgaccgacccgggcgacgagctgcaggcctctcacccgctgcgtgacgccaaagtggttgtcgaagacatcgaagacaacccgggcttcttccgtgtgaagctgtacgccatcccgcacttccaggtggaaggcatggacgtcaacctgtcgctggtttcccagatgccgaaggcgaaatcataa

SEQ ID NO: 111761 - DNA, 243 bp, Enterobacter aerogenes
atgccaccgctgcctgataacgcccaccaggctaccccttatccgaccgctctggaaaacaatcccagcagccgctccatctctgacgacgacctctgcgcccggtgctctcaccttctttatcgtcccggtgaacgctgcctgtgcagcttaagcaccactgaggggcactggccctcccactgtgatacggacggctatgcgcagtccttcccgtcactccggcttaaccagcatccctaa

SEQ ID NO: 111762 - DNA, 231 bp, Enterobacter aerogenes
atggctgagaagcattctaaagcagaacccgtcatttccaaaacccgccgccgctataaagtcggctacgtcagcatccgctacataaacagcaaaacctacatgaccacgtattactcacagcccccagcctgcacctcaagggcgagtggctggctgaggcaggatttgagaccgggcgcgcgtaacggtgaagatttcggacggatgcattgtgctgatggcggataa

SEQ ID NO: 111763 - DNA, 366 bp, Enterobacter aerogenes
atggcagtgttaacaacgagacagctacagcaggccatgaacaacaaagacgaacagttttttaagctgcttggcgcaaggatcgcgcaggcccgtaaggaggagcagctcacgcagacgcaactcgcggaacagttagggattgcgcagcagacaatggcgcattacgaaggcgggaagctcaaggtttcagcggcgctgtttccgccactgccgcagatcctgaacctgtcgctggatgaactgcttggattgcctgcccccgcagcagcggtaagcgtggcccggcttcgcgactggagcagcagatcgagatcatcagccagttaccgcgaaccaagcagaagctggtttcagagattttag

SEQ ID NO: 111764 - DNA, 264 bp, Enterobacter aerogenes
atggcccgcctccccgaagcagaactacagcacatcaaagccgccgttcccttagttgccgtggtgaagcagcaggggcggcagatgtacaaaagaggaacaaaacgccgtaccggcgcttgcgggctctctgccgcccgcacccgtcacgggttgccgtgggaggtacaacgcggccctggagcagaaccggtaatgacagtgaacggcggcgatggtatggtggacgagcattcagaatgcgcgtcgggaaagttgggttaa

SEQ ID NO: 111765 - DNA, 243 bp, Enterobacter aerogenes
atgtgtattatagatttgatggattttgacgaaaattcacaagatctctttaaaataattggatttgttccccattggaggggaaataaaaaacagaaaattgcgttgtatggagttgctgtaaaaaaagggcgtgttttgaccgatctgggtatatctagtgaagaagctttaagtatgttagaaaaacatcctgagatagagaaacgttttcgtgaaacatttccatttattaactactag

SEQ ID NO: 111766 - DNA, 300 bp, Enterobacter aerogenes
atgaatgtagaatttgagttactagatgaattaagaaagaagacgacagatttcatttaccccctttctttggagggggttatcgttgaacctgcttttaatgaacttctctcttttactgacaacatgacgagggttatgaaatatgaaaaatttctaccaaaaaatattttaaaagagttgtcgttaactataaatgccatgaagtcaagtagtaataaattaaatgacaaaaaactttgtgaaatgatttttaaaatggaaaaaatttcaatcttattattgtgggagaggcaatag

SEQ ID NO: 111767 - DNA, 135 bp, Enterobacter aerogenes
atgagagtgagacgcgcggtacccgatgaagcccctgcgttgtggaatatccgtaatcaggcgattcgccatggctgtcgtcaaagctatggcgctgaagtgattcacgcctggacgccggaagagatgccctag

SEQ ID NO: 111768 - DNA, 219 bp, Enterobacter aerogenes
atgctgactgatactaagcttaagcatctgaaagccagagagaaaaactacaaaattgcagatcgtgatggtctgtatgttttggttacgcctgcgggttcggtgacattccggtacgattaccgaatcaataaccgccgtgaaacgctgactatcgggcggtatggccctgaaggaattaaccttgttgaagctttaccgtacagttccagatattga

SEQ ID NO: 111769 - DNA, 1809 bp, Enterobacter aerogenes
atgagtggaggcaaaataaccgccgcgactttggtcaacgttgtcaaattccgtacagaccaagcaagtttaaaagctgtcagaaacgatatgaagaagcttcaaaaggagttctctaaatcaaacaaccaggtagcaaaggccaaacaggcagcagataaacaagtatatcaagcacagattaaacaacagcgtgatattgataaacaacagaaacaggcagctaaacaagcggcagcagacgctaaagcaaaggctaacgaacagaagaaactggcagcagcacaatcaagagcggctaaaatccagatgcagcaacagcagaaacaagcctcagtagcagaaaatgcccgattaaaggaaaggaaatcgctatttgatatatcacgtttggaggggttaaacggtgctcagaggtttaccgctgcccgccacgcgcagaatctggtgagccagtaccagcaaggggctatctccctccgggatatgaaccaacaaatggcgatccatatggctcagcaaaaggccctggcaaggcaacagcggaagcaagctaaacagtcaggacaaccctctaagagaggctcatctggttggttgagtcgccaggcaagcgcatttatccccggtgagatactcggaccaaccgcagccgcatacgccgcccaacaggcctatcagattatggcggggacactacagggagcgattgagagaaaccagggcaggaaaatgatccagagttttggtggaaacgaccttgaatatctggcgttgagacaggaatctctgaaaaggacgggttttgacatctccagggacaagtacgccgatatctcaaaagacctaaaagaccgccaaggtgatttgtcgtttggtagcactgataaaaacggtaattttactggtggtggtgagttctcggatttggtcaacgtcatgcgccagaggatgggttactccaacggcggcgctgtcaaacagttgcagtctctaaaaacgccagtcgagtttgcagtgatgctgcgcgggatgctggaatcaggcaaaatcaccacgcaggaatttgtcaatatgggggaaaggatcaatgacgcctcatatgttctgaatagcgttgattctggtggtcagaacctgataaaaactatggatacgctggttgattctcatttagcactaacgactgctcaacagaaatctattaataatctgactgagatgtcagcagtatttaaccaagctaaagaatctttaggcgatcaatttgcggcatcttttagtaaaggtttagaggatttaggaattaatactcagaatctatcttctgaaatggggtcactggttccgttggttaaagatttaggagcggggacggctcaaacagttaagggatttaaagatcttcttgatgttctgtccattatcacagaatggaaaaataaacttctcggaactgataaaccagaggagcagaatattttccagcaaggggctacatttgttggtgaatcactgttgccaccgggtgtccttgatatggcaagccggattaaaaatatagttagtcctggttctgattcttctgttgcatcacaggtgcaaagtggttggtataatcaaattatgcctgcaacgccatctatgcagtatcaaccagtcatcccggatttaaaagctgattttaaccttactgtgaatcctagtcctgaatttgggatgatggtcgaggcagtcgctgataaaagaattgaatgggcatttgatgaccagaacttccagattagtcaaagcattttaggtcaataa

SEQ ID NO: 111770 - DNA, 264 bp, Enterobacter aerogenes
ttgatatttccagtaataactatgggaaggtaccacacacaggacggaaatatttatatccaaagtgatgatggtatctggcgtcagaatgtaaattatcttgcaggtgttcccactcagtataattgcaccacctataaggaacagtttgagaagattataaggcacatcgaaaacggtaaattaaggggtgcatacgcctctaaactgcattataaaatgctagatggtagattgtttagctttaatgagaaaacgccttag

SEQ ID NO: 111771 - DNA, 177 bp, Enterobacter aerogenes
atgaatgttacttttgaccaggagacctataaagatctcatctatgaggcaaacctccagggattagcagcccctgcgctggtagcacggatcatccgggaatacatcaaaaatcaaacaggcccatacgaaggggcaaaccaaccagaggatttaaatgggaaaaacaaaagataa

SEQ ID NO: 111772 - DNA, 429 bp, Enterobacter aerogenes
atggtagacccaacctctttagctgcaatctctggtacgcttgaccttgtcaacaaatcagttgaattagttaaaaaccttcgcaaaaaaggcgatgaggaactaacagccgctgagatgcgtaacacgttgattgatttactagatgatctagtagaagttaaaagcgaatttgtgactttgaaagctgttttactgaataaagaagaagagatccaaaaccttaagactcaattagaagataaaacaaaactaacttttgatggtaagatttactggcttgaaggagataaaacaccatattgtagtaaatgctacgagaaggattctttagcatttcacctaagttttgctaaagcttaccctgcttggggcgatcgtgaacattggtattgccagaattgcaatgcaacattttatgatttgtaa

SEQ ID NO: 111773 - DNA, 816 bp, Enterobacter aerogenes
gtggaagatgatatcttcgagcttgaacatttcaattcactagtaggtgaaaacctagtagatatgattttgacgaaggcccccacgaaagtaagatggagagtgattaaagctgctgaccatgtgcgtaaagcacatagaataaaagatatagatatggagatgttttccatccggataatcgcagccgaggaagaattggttgtagcaattttcgaatggctgaaattgaatactgataagatgccagaacacagggacttggtgggtaaattcaaaaatcatcaagtaaaattaatgtttacccctgttttgttattgatgaagaatgtccttatagaatgcatcggaccgaatttaaatattcatggggttaacgttgaaatgaaacctcgctttgaaaatgggaaggtcgaattatgtttatcaataccctcgactggatacatggcacctcttaacccattatctatggcaatcaaccatgaagatgaggagcaagatattattgaaagtttatacgaaacattagaaaaagaagtacaggataatcttggaatgcctcttaaagaatttgtcatgaagagagctgattttagaaatttacttctttattcagatgacggtggttttctaaattacgagatagattatgatgatataatgcgtggttttaattcaactgttgaagcccttctatggtcaattgctgctttattgagtaataatcctttatctcctaacttggggttggttacccaattcatttccgtatacaggcttgtcttgattaagacaaaagttatcaagggatga

SEQ ID NO: 111774 - DNA, 1656 bp, Enterobacter aerogenes
atgggtaacagagtggacaacaaagccccgaaattcactaccaaacgcggcaacacctactacatcaattttcgtctccctgatgggactttctttcgccgtagtttaggcactgattcactaagagcggttgaagtgactatgagccgcctaagcccatacatccctcttgttcaaaatggctcgctgtctgtcgagcaattcaaaatgcatatagatggtttccgtgaggccactcagcgcgattttgatacttatctgttggactggttgaggctaggcgttgatgaggttaagcggatgccggaactcggacgactgaacaagtcaattttccctgatgctcctatttcagcatcaaagagtgtggaagaggctaaggggcaatctgaggcccttcttaaccgtgtctatagcggggatgactctaccgctcggatgttacttgccactctgcaccagaagaaagtttctttcggtcaaaatgacatagaacaagcttatgaggtggcggggcagattgatatgcaccagaccatgctacaccaggcatatgaggcgttctattctggcgacattgtccgttatcgtgctcttgttgaatccatgcaatctcaactagctgaaactgagagacgaaaaaaaccagcagctaaacaggctgtagctactgttgatgctccagacgatgacaatacgccgttactatcggaagcctggaaactgtttgtagcggagaaggggaaaaactgggctatcaccatagctcgggagaataatcgcttctacgaggtgctgatgcacgttttaggggatattcccgtaggcagcattaccaaacagcacatacgccaagcactggcagtaattgagaacttaccgcgccgtaatctcaaaccgtattcagaaatgagcctctcggagtgcatagattgtgatgtgccagaggacgatctgatcagtagtgctaacgtcaaaaaacaccttaaaatttattcgtcattctttaaagtttttcttaaagatgaaaaggatatattagagaagtctcctacggaggggatcaaatatgaggtgacagagaacaagggcgggcattacacaaaaccagaaatgaaacgcctgatagaacggctatcaacttttaccgattggcgtaaagactatttcctgactttgatctacacaggtgctcgccggggtgaaatggcggcgatccgtaaagaacatatacgcaatgatgaagaaacagggcgctattatatcttcattgagggcggtaaaactgagcatgcacagcggcaaattcccgtaagtaagaagatagaatcgcttctgttgtcacgtattaagtctctaaaatctgctgatcttgtgtttggagacttgccaacgtatgaacatattgctttccagtggcgtagtctcatggaggagtgcaacatccctaaatacaacgaatttggacagaagcgcgttatccatgcctgccgtcatacgttcatttcagaagctattaccaaaactggcaatgcaacattagtacagtttgtggtaggccatagccgtactcagtcactagggattactgcacgctatacgcatagaccagcgctgagccaactactaaccgtagttgattgcgtaagttggtaa

SEQ ID NO: 111775 - DNA, 1017 bp, Enterobacter aerogenes
atggcgaaagcggcgcgagcaaccatcagcgacgtggcgaaagccgcgaaaaccggtaaaaccagcatttcacgctatctcaacggcgaaaagcatctgctttccgacgatctgctggcgcggattgagaaagcgattgccgagctcaactaccgtcccagcctgatggcccgtggcctaaaacatggtcgtacccgcctgattggcctgatcatcgccgatatcaccaacccctactccgtgaacgtgttaagcgggattgaagccgcctgccgcgaaaaaggcttcaccttgctggtgtgtaataccaacaacgaaatcgatcaggagcttcactatctcgacctcctacgcagctatcaggttgaagggattgtggttaatgcggtcggcatgcgcgaagaaggcctcaaccgcctgcagcaatcctcgctgccgatggtgcttatcgaccgtaaaatccccgatttcgcctgtgatgtcgtggggctggataacactcaggccgccaccaccgccaccgagcatctggtggaaaagggttttgaagcgctgttgtttttaagcgaaccgataggctccgtaaacacccgccgcgagcgcctggacgcctttcgcgcgaccctgcagcgccataccggaatagtggcggaaaacgccgaggtcccgctcaacgacggcgccatgatggataacgtcctgcgtcagttccacgcccgccaccgcggaatgcgcaaagcagtgatttccgccaatggcgccctgacgttacaggtcgcccgttcactgaagcgcattgatctcatctggggcagcgatatcggcctgctgggcttcgatgagctggaatgggcggagctggcgggcgtcggtatcaccaccctcaaacagccaacctggcagattggctatgccgcggtcgaacaggtcgtcagacgtatcgaaggcggcagcgaccccatctgcgagcgggtcttctccggcgaacttatcgtccggggatcaacgtctcgttaa

SEQ ID NO: 111776 - DNA, 717 bp, Enterobacter aerogenes
atgaactcgatttttactgaagaaaatctgctggcattcaccaccgcggcgcgttttggcagcttcagcaaggcggccgatgagctggggttaaccacctcagccatcagctataccatcaaacgaatggaagcggggctggacgtggtgctgtttacccgcaacacccgcagcattgaactgacggaatctggttactatctgtttcgcaaggctaccgatctgcttaatgatttccatgcgataaagcgcagcatagatactatctcgcaaggcatcgaagcgcgggtgcgcatctgcattaatcaactgctatacacgccgcgccataccgcccgcctgctgcaggtgctgaaaaaacagtttcccacctgccagataaccgttaccaccgaggtatacaacggcgtctgggattcgattatcaataaccaggcgaatattgctatcggcgcgccggatacgctacttgacggcggcggtattgattacaccgagatcggcgcgatccgctggcgtttatgcccgaacctatttcggaaagccagttacgcctctatcccaatatcatggttgaggacaccgccagcacgatcaataaaaaggtcggttggctgctgcatggtcaggaggcgatcctggtccctgacttcaatactaaatgccagtgtcagatcctcggtgaggggatcggttttttacctgactatatggtga

SEQ ID NO: 111777 - DNA, 504 bp, Enterobacter aerogenes
atgagctcgatcacgccaactgaggttggctcttatgttatttccctgataggtcccattatcattgggatagctgcggcgggttttactgcctactttgcattacatcgattctacagggaaaaatggtgggaaaaaaaataccaagcttacgatgacctaattggcagcttatacgaacttcagatattgcatagaaatgccataattgaatacagatttaagcagtatctggatgaagagcctccgattaaggtagatcttgaaaggtggcaagaacttgaggcatctgttaaaaaaatgctcgctttctcaccaatgaagcttacttcatcaacccaaggttatataaaagaatacctagaccaagtttcttcgcgggatagcaagctgagaaatcagcatattaagagagatatcatcctgcgtgaagttgagtcagtgattataagtatcataccaaaaattgttgaagaggctcgtgtagagctaaaaaacaaataa

SEQ ID NO: 111778 - DNA, 195 bp, Enterobacter aerogenes
atgtactaccaatttggcaacatcactatccacttttcggtttttcagagtcgtttttatgtcgctcattgggatggaggaaatgttgtaactgacaaatggtcacagtttattgagctcgtaacccaacagacaggcattgatagggtagagtttcaaaatgcagctaaagagttttttggggaacaacagtaa

SEQ ID NO: 111779 - DNA, 690 bp, Enterobacter aerogenes
atgacagcgcaatatttagaatttgttcgccagcagctgatagtggccaccgccgatctgagcggtgcgacgaaagggcaactggtagcctttgctgagaatgctcaattcgcggcgacggcgcgtagccgggggaggaagaaagtagccgatccggtcaccggccgcatgataaacccatcaaacccgccaatccccggacagcagtcccgcgcgaaaggttccgcaatagccctcgttctgcccgttgagtattcgacggcgagctggcgccgcgctgtcctgtcacttgaagatcatcagaaagcctggctgctctggaactacagcgacaatatccgctgggagcaccaggagacggtcacccggtgggcatgggagcaattcagcgagaagctggccggtgcgcgtgtcgcaaagaaaacggttgatcgcctgcgtcagcttatctggctggctgcgcaggacgtcaaagccgagctgacaggccgggagacttatgaataccaaaagcttgcttccctggtcggcgtgaccccgaagaactggtcagaaacgtttacggagcggtgggaggagatgaaaaccaccttgcggcgccttgatagcgatgccctgttgcaggttacgcgatcacgttcacaacaaaaggcgacaaatttagatgtaagtcttgcaaaactggattaa

SEQ ID NO: 111780 - DNA, 537 bp, Enterobacter aerogenes
atgaacgaagcttgggcagcaattaccgcaggggtgattgcggcagcggcaggtggtatcggtttggtaatgaccaaagaaaacaagacttctgaattccgccaggcatggatacaagagttgaggctcgcccttaccacatttagttcgattcttttaacagtgcggaatttatctgcagaaggtgatcttgtcccagaaagtgataagcaaagggtcagtcaattgttatctgaaataaaccttaggataaattatggaaagcagtctcctgaagaagaacggttatcagaaattataacgaaaatgcttgaagacgcctatgctggcaacgctcaatttaccactacacaggccgattttactcaagcatcatttaacgttctaaaaaaagagtggaaaagagttaaaagaggcgagttgatttatcaactttgtatgtatccttgcctaataatcacggcgctcgccataatttgttccggcatctatgctttgaacaatatccagagtttatggcagttccttacacattga

SEQ ID NO: 111781 - DNA, 378 bp, Enterobacter aerogenes
atggataatcgctacgaaatagcagagcaaaacggaatgagccgagagtttgctgactggttctttgataacaaaaaagctggctgtggaaacgtctggttcatgatgatggcggcaatgtgggagggatggcaaggacgcgccgccatgcttcagggtgccgatggcaacgctccggtgattccggatggttgggtggctgtgccagttgagccaacagaggacatgatcgtcaatgggttcgagtcagagccagatgagagctttagcgatgagaaagagtgggaagcatacgacgccatgagtgggtgccagcaggcggcgcatcgggctaagttgtgctgggcagcgatgttatcggcagcaccgaagatttga

SEQ ID NO: 111782 - DNA, 582 bp, Enterobacter aerogenes
atgaccagcaaattaacaatagaacaagccaggcgcctacgtaacgatttcgaatgctggcagcaggattacgacccgaaagacgataaagagcagtacgacatgtttggtcgtgggatggctgcaatggacatgctgattgcgtggatgtatcaggagccggtggcgtataccgacgagcgcaacctgggctatatcgaccgagggagggagacggcatatctgtggggcaagcagaactcagaggcggcagatgtaccgctctatctccacgcgcagcagccggtagttgacgccgacgataatttctattcgtggtttggcagggagtggcaggagaattatcagcataaccaatacaccacagcagctaagcaaatgctgggtgtgatggctgaatctgcgtggatagcagcaactgaaaggcgacggcaaaagcaaagcgtttctgtccctgatgtgaaaatctacgaagacgtgccttatgaagttggacgcttcaaaactcatcgagattgctattgcgatggctggaactcctgccgcgccgccatgctgaaccaggagaaaggcaatggataa

SEQ ID NO: 111783 - DNA, 231 bp, Enterobacter aerogenes
atgaccatatcaagcggatacgcgatagacgcatattgcgagtgtgatatgtgcaggacaaacgtcgaccttgtggggcgttacgtcaggcaagaaatggccagcgcggccggggaaacttatgcggagtgcgcaagagagttgcgccacctgggatggtacttatcacgtgaccgtcgccacgctctcgcgccgggacataagaagccggaaaaatgggagactgattaa

SEQ ID NO: 111784 - DNA, 195 bp, Enterobacter aerogenes
atggctgaaaaatcatccttggagcgtctgcgggaaatcaatgcagagaataaacgcgaagctagagtcagtatcggagttcttaaagccgccagaagtgaaattaacgctcatgtttcagtgaatggaaagggcgtcatgacggacatggttcttaactctctgaacgcgattatcgaaggagccaaccaatga

SEQ ID NO: 111785 - DNA, 471 bp, Enterobacter aerogenes
atgactgatatcacagaactggcgcagagagagaaattcgaagcgtggtgggagcgcgagtataaacatctcgaatcctcgaaatataccgatgctgtgccgcatatcaaatacggcttctggatggcatatcaggccggtggcgctgagcaggtagaggcgctggagaaggcgcagcgctataccgaagaattgcgggaatggaatgctggtctggcgcaggagtcatgcgagcgcgagcagcgaatttttgagctggagaaccaactaaagtcagcagaaaacaatgagattgatgctcgttgccatatcgctgaactggagtcccgcaccgtcaccgtgaagctgccagagcctccaggaccaatgtctataggagcgcgtactgtttactttggaattgtagctgatgtcgttcgctcttttcaggatggactgtccgccgctggcatcaaggtggaggctaagtga

SEQ ID NO: 111786 - DNA, 483 bp, Enterobacter aerogenes
atgaacatctcaacagtaaacgagctcattcagtcgcttgatagtgcgggcgagctgtcgatcaaagagacaaaggttatggcgctggcgaaagcttaccagcagctggctgcggagaatgtggcgctgaaagcggcaattgatgcaaccataggatggcagcaatctaccgatgtggaaaacgttgaaagcgtgagaatgttgctcgatatcaatacccccgccaccgacgcctacctggccgggattaaggctgatggtcgcgttgaaggtatcaactttgcagctggccgccttgccgccgctttcaatcacggattcgttgataagtcgatggctgaagtttatgacgtggtgcgcatgattctgactgcaaaagaggatttagccaacaacccagcagaagatggcctgtcaggtgaatacgctgaaaaatcactggctgaatggggagctgtgctgcgcgagggggccgacaaatga

SEQ ID NO: 111787 - DNA, 207 bp, Enterobacter aerogenes
atgacgtattacggcacgcgaaactctgggcagagaagcagcagcttccttcagacaaatttgagaagaaacgcgttaagcgtgggcagcaacaaccaagtctgctctgaaatggcgaaagccgcggtgctggaacaccaacggctttcaggtggaattaactggatcaattcacaggagcaattatggcaaacaccgccgaagtaa

SEQ ID NO: 111788 - DNA, 315 bp, Enterobacter aerogenes
atgaaagtgactgatgaggctttgttacgttcagggtttacgcagcctgaattgcagaagataaaaagcaatattgaaaaatatggaggaacgcttggagaggccataaatgacctcgccaggcgatttgttaccttggcgggagtggtggctgtgtgtgccttaatcctactgctacttatcgtcttcagctcacctgatagagcatttgcatgggggctggcgatgatctttggggctgccattatgttctttgcacagccgccggtaatttcctataaatcctggcgttaccgaaaaactatcaaggattaa

SEQ ID NO: 111789 - DNA, 591 bp, Enterobacter aerogenes
atggcacaaataaaatttgtaataaaagataagtttgatagcaatgacccagtatttaaaaggttgacggatactatctctaactataacaacgtaaataaactcaagttaataatcaatataacttataatgaaggtggtgaagttgctattatgctcgcttttgtagcaacaattgagaaagcggtgttgaataattcaaatcttactatcgaactgagatttggtggttttgctatgagcgccgccgcttttgtgttttgctattttgtattttatgctgatattccaagagtgagagtgctatccaatacacgactatctgtgatttatcataaaccccggatgaaacaaataaatgcatcaaactttatttttgctaatgatccaattaaactaagtaagttagctaagcaacaacagacagatctaataagttatacaaatcagtttgatgatgtctggggcgctgtagtagcaatctatgaaatgggtggggaagcatttgatccttccttgcttagttcgtataatggtaacggtgactttgcattcacactctcaaatcgagtgtttaaaggagggtattaa

SEQ ID NO: 111790 - DNA, 177 bp, Enterobacter aerogenes
atgaacttagatgctaaaacgcttaaacagcttcaactgaaacgagctaggctgattgcttctggtgatcttagtaagccccgcctactcagtgatagcatcgatatggatgaagttgctaagcgaatgaaaaatacagataaaaagaaagccaaacctaaatatttagtagtttaa

SEQ ID NO: 111791 - DNA, 741 bp, Enterobacter aerogenes
gtggaacataaaaaaaacaatgacgaggccgtgttggcggtgatggacgacatcatcaatacgtttgatgagtatgttgtctgtttttcgttcgcgactaagggcatcgcgcaacagggggaagaactagcaaaacactcctttgaaaaggggcaccgtatctggatcggatcggatgtagcaacaaatccaaagatgcacgcaagaatagacacggtggagtgtattgagaaatgcaaaaaagatggctatttctccaacgagttagcaaaatccttgctaagtatcatgtactccctgtgggatgaggtttatcgccaccggctcgctaaagttactggcttagatgctcagtatattcaatgccctttaatgggagacttacgcaaaatccggcactgcataatccataacaagtccattgtgccggacaacgggattcgatttgaagcgctagaatggttgctgccaccgggagaggaattggtggtgacctacaagatgttcctggaacttaatgatggcatacgaggggacaaaatgagaatccagggctggagaattccaccactgttacaggaagtcatgccacaaatgtctgaaaaagaaagaaaatattttcatgcgttcttcaagaaaccggaaaaccgaaagaataatgtcgaatggcccggtttggaaaaatttttaggccgaattaaatactatcagagcaaaaacgatagtagccccaaagtctga

SEQ ID NO: 111792 - DNA, 216 bp, Enterobacter aerogenes
atgcgtgtattcgttacaatagctactgacatagaaaagcgtggcaggaattgcttccctcccccaaaattgaaggcctatcacatagcaggaggctttgacgaagaacacttcgcgctgctgagcaagaataagagactgattaaccccctggcacatcagatcctgcaagcccattttcctaagagtattcagggaaaggttgtagttagttga

SEQ ID NO: 111793 - DNA, 1353 bp, Enterobacter aerogenes
atggctaagtataaagcgtatccggagtataaggattctggggttgagtggctgggggaggttccgaatcactggaaaaccgtatccatatccagattgttttccaggattaagcggaccggatatacagagaaagaattgctttccgtatatcgggattatggtgttataccaaaatcaagcagagatgataacaataataagccttcagaggatttgtcaccctatcaattggttgagccgaatgatttggttatgaataagatgaaagcctggcaaggttcaatcgcaatttcagagtatgaagggatagttagtccggcatattttgtctacaaacccaacaatatcctttttgagttggcacatccaaggtatgtgcattatttacttcgcaacccgatttacgttactcaatacctgagccgctccaagggtatacgagtcaatcaatgggatctggatcctgatgagtttagaaatattgagctgctgcttccagacaagactgagcaggaaaaaatatacagtttcctcgatcacgaaaccgcaaaaatcgacaacctgattgagaagcaacagcaactgattgaactgctaaaagaaaaacgtcaggcagtgattagccatgccgtcaccaaagggctaaaccctgatgtgccgatgaaagattctggtgttgagtggttgggggaggtaccggagcattggagtttaaaaagtttccgatatgcttgcttaatttatagaggtaaatttggccaccgccctcgaaatgacccttctttatatgatggtgattacccttttattcaaacaggggatgttgctcgagcaagtaaattcattgagacatattcacaaacactcaatgaaaagggaaaggctgtaagtcaattattcccatctggaacgttgatgatggcaattgctgcaaatattggggatacggctattcttggatttgaggcatacgctccagacagcgttgttggattcaagccctatcaaaaccttcatctggaattcttgcgctacagttttatggctgcgttacccgcgttagaacaaacatcgacacaaagcacccaagcaaatttgaatattgatagaattggtgcggttaaagcagtttttcctcccttggaggaacagctagatatcatcgattatttagataatatgttgtgttcgtatgattcaattgaagaaaatgccaaccaggccatccaactccttcaggagcgccgcgccgccctaatctccgccgccgtcaccggaaaaatcgacgtccgcgattggattgcccctgaagcgcaggacgttgaggagccacaggaggccaccgcatga

SEQ ID NO: 111794 - DNA, 981 bp, Enterobacter aerogenes
atggacaaacaaaaagtagaaaaagtcctaaaaaagaacaggtatataaatgcagcatttgctaggcattgcatatctgcatttaatatttggaatacgttgctagctccaataataataggtattggtgtttcttatctattccaatacaaagataaccttgataagattaataatttattttttgtattgtgtggtgtatttattatcatacattttattttggcattggcatttaactatctggataaacgaagtgatacaactatagaattagctgaggtttcagaagggtataatggattaatatctgatatggaaattgtaaaggaaaggatgcgcgtagccaatgaattaaatgccacgcaaaaaatagttatttacttagccaccttaaaggttaatagtcacattaaagatgttttgattaagaaaaaagagaactcgtttacaacaaaagagttagactcatttgttaatgaattcattgagaccattataaattatttatctaaacatagagaaactttgtttggttttgaaagtaaatcaagatataacattgctctttacgtttatgatccagagcaagaacaattagttgtcgcagcgagaaaatgtgatgacagaattgatagaaaagatcgcccgtggaaatcaggttttggtcatgttggattaacttacttgcataaagagttaaaaatatgcccgaatattcatagtagtagcgagctaaaaataacaaattcgcttgataaaattaattactgttcatttatttcagttcctattcttacatataatgaaaatgatgctgaaaatgactgtttaggagtattagttttaactagtgcattgcctgaacaattttccttgcaaagagacaaagagtttcttcaaaatatttcttcattgatagcaatatatatagatgtcatagctagcatatataaagaagttaacagccaacaaaaataa

SEQ ID NO: 111795 - DNA, 243 bp, Enterobacter aerogenes
atgaaaaaagcacaaagcgtcaaaaaaatgggttatgccaagttactgacccctaaaggaaataatatagatggctttgctgtttcaaacgactttgaaaaagtttttttcaaatactcttcgcaaggtttgaacaatcaagtcgaagagatgatgaatgattggatatcaaacaaagtaaaacaagaggaagaggaaatttttaaagatattaaattccactcccaaattaagacagcgtaa

SEQ ID NO: 111796 - DNA, 1119 bp, Enterobacter aerogenes
atgtcaacccaaaactttaactctattgaaagggaagcaatatggtcagcccacaacaaaaaatgcgcgtacacggggcagtctatagtgataaatggtttccatattgaccatataatccctgagcatttatcagaaaaacatgatgaattatcagaaattaagtccaatttgggtttgccggataattttgatatttttggatacgagaatttattaccgtgctgtgtggcaactaacttgcaaaaaggtaagggtaattttgaggaggctcatgcacgttattttttagacttagccagcaaaaagaaaccaagaataattaaaaacatcgagaacattaaaagaaggaatgacaaggcgaaggctttattaattactcaacagcacctcgagagtgggaacataagcattaatgatcttcaaagtattttaaatcagagtaactctgatgacatgtacaatttaatggtgtcattgaaaatttcagatgaggagagtattaatgtaatacgaaaatctgatatggaagacttgtggaaccaaaaggtaattttaggaggtaataatgatgtggaaggtgttgttttgtgcaactctgaaaatgaaacaatgcttgttaaaactagcagagagtttcttgatgcatcagaaaaggggtttcatgctgatactacttataccatgaaaatggccagttattttgagtggcagtgtggattgctcaaagcaatatcgaggtcaattttaccgacagagagctatatagaaacccccaaggcaagtatatttgatattgatttgttaccataccatattttcccaaatctatcacaaggtgtggatgacattattgataggaccagtacatatcaagacatgcttaataataatctaataaaaatcacacaaattaagaataatttattaagagttgaaaatgatgttatggggcaacagttggttgaagtggtcagggctgattttaccggcgatggctatgaatctatattatgctttgaatacgtttgggctactgaaggaacatttggtaggggagggatactaattctcacaagaaaagctcaagatgcactttttgaggttgttgaactttaa

SEQ ID NO: 111797 - DNA, 228 bp, Enterobacter aerogenes
atgaaacagcccgccatcaccgtgaaagacctcgaatgcctggagcacctgcgtaacgtcggccagttcgtcggcgagctgatgcaggtgcaggactgtacttccctgcgtcgtgacccgactcagcagttgcagctcacctccgtgatttacctcatgaccgcccagctcgacggcgtggtcgagcgctgcaaccaccgctggttcaccggggagggcaacgtatga

SEQ ID NO: 111798 - DNA, 864 bp, Enterobacter aerogenes
atgcctatcactgttcctgactctgcatggtatagagctaaaagtgcttgcgccaatgcccctttaaagtgcccatatgccaacgtaaaaaaaagttatagatattatgagagcatatatatgcttggtgaagctcaactaatcacatctatcagtgatgataaaaaagttgaactagaaactttttggtcagaaacaaatttacgtccagtaatcgctgaagaaagcaccgaaatcagtggttcagttggtagatggacttcattctcaaatttctgccctgaagttagctttacctacttcggtctttatgccagttttttagcaaaatacgtggatgacattgataaggatattggccaaagagctgctgaaagagatggtattaacaatgattggcggtatcaatggggatttttgtctgaatgccattttctagattgcagtgcttataaccaagttgatatttttaactcacagaaaactggtaaccttgaaaagttagtacattcaaatatcataactctgattaatcgaatggagcaatgtctagaaaatcaagatccttcaggagctctgcatgctgctgctaatattttggaaacaatggccaaagatattcttggtagtgacaatttattaaatgagactctgggatcattcattgaaaaatatagaaaagaatctctcatgccggaagaaataaagaacgtcgtaggttctatttataagcttcgcaatcaaatgcctttatcaggtcatgggcacactaaagccccaaacataaatatgcatgatgcgattgttatagctgccacgacaaagtttatcgtcgaaattgaatacagactcagaaaaccttaa

SEQ ID NO: 111799 - DNA, 150 bp, Enterobacter aerogenes
atggtgatgaacaagccggagtttatgggcggcgtgattcagaacaaagtcgatccgcaggcaggggaagtggtcgatcagagcacgctggaccatctgcgcggccaattgaccgcctttggcgattatattcagcgggttaaagcataa

SEQ ID NO: 111800 - DNA, 396 bp, Enterobacter aerogenes
atgtctgatacgttgaaagttgttacgttactcggaagtctgcgcaaaggttcttttaatgccatggttgcgcgcacgctgccaggcattgcgcctgcgggcatggaaatctccgcgctgccgtcgatcggcgatattccgctgtacgatgccgatatccaacaggaagaggggttcccgcagagcgtgcaggagatcgcgaaacaaatccgcgaagcggacggcgtggtgatcgttaccccggaatataactactcggtacccggcggcctgaagaacgccatcgactggctctcacgtctgccggaacagccgctggccggtaagccggtgctgatccagaccagctcaatgggcgctatcggcggggcgcgttgtcagtatcatctgcgctag

SEQ ID NO: 111801 - DNA, 1260 bp, Enterobacter aerogenes
atgaaaaataacgataactcgctctttgcaactaaagagaaagggcaatcctatcgcctgcgttttaataaaagttttatgcaatcggggaccagtttttccgtcgcgggttatcgctattccacttccggatattattcttttgccgactttattgatgagactaccgctgatagtgaccgcacttcattaaccggtcgcaaaaaaggtcgttttgatgcgtcaatttcgcaaacgctatctggctacggctcactgtcgctttcactggtcaatgaaacgtattgggataactcaagaatggcctcattaggcattggttatagcggtactatcggcaaagtgtcttactttgttaattactcatacaaccgtaatgtccaaagtacagacgatagcggggagagcaatccagacagcgacactatcgtgtcactcacgctgagtgtgccgctcggcgaaacgatgtcagccaattacagtatgagcgcaggtcgtaaaagcgataccacgcacagtgtcggtcttaacgggatgatgcttgccgatcgttcgctgaactggaacgttcagcaaggctatgacgccagtgataaaagtatctccggaaatattggcgtgggttatcagggatcaaggggcgaagtgaccgccggatatggttacgatcgctatagtaaccgctacaactatacgctgcgtggcggcatggttgctcattcaggtggccttacgttttctcgttttctgggggaaagctcggcgctggttgaaacgccaggcgtcagcgatgtgacggtgcgcggtcaaacgaacgtcagcaccgattcggcgggttacgctattgtgccttatatccgcccttatcatagcaacaacttgtcattagatgagcagcaggtcactggcgccgaagtggataatgtggtgagaaccgtggtgccgacgcgcaacgccatcgtgaaagtaaaatacgatacctatattggctataaggcaatgattaccttaaaaacgaagtctggaatagttccatttggcgccatcgtgtctctggataataataatggacgagccaatgatatccgcagcaatattgttggtgacggcgggcaggtatatgtaacgggcctccagaaaaaaggtgcgctgcttgtaaaatggggcagcggtagcaatgagcagtgtcgggcagtttatgactttagcggccaggtttcggaccaggatattattttctatcaggctatttgttattaa

SEQ ID NO: 111802 - DNA, 174 bp, Enterobacter aerogenes
atggccgtacaacagaataaaccaacccgttccaaacgtggcatgcgtcgttcccatgacgctctgaccgcactcaccagcctgtctgtagacaaaacttctggtgagaaacacctgcgtcaccacatcactgccgacggtttctaccgcggtcgcaaggtaatcgctaagtaa

SEQ ID NO: 111803 - DNA, 183 bp, Enterobacter aerogenes
atggatgatgaaccgcccctgtggcgtaaaatcctccacggcgtccaggatgacttgctaaattcgctgggacagttccctttattaggggtcaatgacacccggcgtcgcacagagaatgtcttcaatcatgtcttcgacctgatgcttactgagccatgctttatccagtgccgtcgttga

SEQ ID NO: 111804 - DNA, 153 bp, Enterobacter aerogenes
atgcagtcatttcttgagtgcgtcagttctgtagttcataaaattgatggacaaaacgcctgcataatagcaggcgcaattttcggcttttttattcagttaattattattgttttatgggaggcaaactcgaaccgagtcaaaagaaagtga

SEQ ID NO: 111805 - DNA, 264 bp, Enterobacter aerogenes
gtggattataacggcgccgcggtagaaaagagtgctgacaccatcatgatcgacaccgctaacggcgtactgggcggcaacctcagcgcgctgtctaacggctacaacaccgcaggccgcaccaccgcgcaggacggctttaacttctccatcatcagcggtaccaccgacggcaccaccgcggtaaccgattacagcacgctgccggaagggatctggagcggtgacgtgagcgtgcagttcgacgcaacctggaccagctga

SEQ ID NO: 111806 - DNA, 477 bp, Enterobacter aerogenes
atggttattaatgcgcgcgttcgccagcagcgtgccgtcttcggcgcggatgcgcccggagacggtgaccatctgcttcacttccggctcgatcaccgccacgttaccgggataaagcgtcaggtgactcttacgaccgctgacaatgtcgtagctgtcgatcgagtttttactgttctgcagttcgacttcatagcggctgtacggcgacagcggcagataattgcgtttaccgctgagctgcacgatgcgcccgttaaccttagcgctgagcttgccgtcgtcttccagcccggtattgaagatcaccccggcattgccatcggttcgcccgctggcggcgatatttttcccctgccagccgacgctgccgctggcggtcaggttggtgttcacgtagccgtcggcgccgctgttgacgttcagcgtgccgttggtgtagcgcgtttcgaactgcgtataagcgccgccgcttaa

SEQ ID NO: 111807 - DNA, 606 bp, Enterobacter aerogenes
ttgcgattatttgctcaacttagctggtactttcgccgggagtggcgccgctatctcggcgccgtcgctctgcttgccgttattgccgtactccagctaatcccgccgaaagtagtggggattgtggtcgatggcgtgactaaagaacattacaccgtagagcaggtgtggatgtggatcggcgcgctggtggttatcgcggtgatgatttatctgctgcgctatgtctggcgcgtgctgctcttcggcgcctcttatcaactggccgttgaactgcgtgaagacttctaccgtcagctcagccgccagcatccggccttctatctgcgtcaccgtaccggcgatcttattgcccgcgcgaccaacgatgttgaccgcgtcgtcttcgccgccggcgagggtgtcctgacgctggtggattcattggtgatgggttgtgcggtactgattgtgatgtcgacgcaaatcagctggcagttaacgctgctggcgctggtgccgatgccgtttatggcgctggcgatcaagcgtaatggcgatgccctgcatgagcgtttccgcgtggcgcaggcggctttttccagcctcaacgatcgcacacagtaa

SEQ ID NO: 111808 - DNA, 603 bp, Enterobacter aerogenes; identical to SEQ ID NO: 95880

SEQ ID NO: 111809 - DNA, 912 bp, Enterobacter aerogenes
atgcggttcaataccccacttcgctatcccggcggtaaaggcaaattatcaaacttcatgctaaatgttattgaggagaataatctttcgcctatacattatgctgagccttatgctggaggcgcgggtcttgcattgaaactgctagatctaaatattgctgaaagaattatccttaacgatataaacgtttccgtttatgcattctggcattctgttcttaacaatgctgatactttatgctctatgatctacgatacaccggtcactatggatgagtggtataaacaaaaggaaataataaataacacaaatagttatgacctgctaacaattggtttctctacatttttccttaatagaaccaatcgctccggaatattaaagggcggggttattggtggaaaaaatcaagatggcgaatggaaattagatgctagatataataaaaacgacctaatttctcgcataagaatcattcatgccgaaaaggatcgaattgagctttttaatctagatgctatcgagtttatcaataatataattacagaattaccagaaaattcaataacttatttagaccctccgtactatgtcaaaggaaaagggttatatatcaatcattacaaccacgaagatcatgtgaatgtagcaaaggttgttcaatctgacataaaaacgccgtggattgtatcgtacgacaatacacctgaaattagagatatgtataaaaaaacacagtctttaatgtacggtataaattatagtgctcaagatcggtacaaaggttctgaggctatgttcttcagcgatctgcttaaaattccagtaacggataatccaacgaagattaaagcgccaaagaagattaggactttagccggccatgccggtacttcaaaggatacgtaa

SEQ ID NO: 111810 - DNA, 1734 bp, Enterobacter aerogenes
atggcaaatcagataactaagttgaataaacttcaggttataaaatttagaggtctaaaagacgtaaatattgatttcggcagtaagttaactgttatttgtgggaaaaatggcacatcaaagtcgacgatacttggtatcgtcgcacaaatttttagcttttcaagagaccaatcaacagatccagtaacgaacttaaagaactataagacattaacaaacagaagctttaagtcagcattcaatgagcattttagattatctgaagaatatgatactgctggctctatggatgttaagattcatttatatgatgctaatgtcaataaacatttagacaagcttactttaggtctgtatggctataccgatagagcaaaagctcgacctgtcgtccgtggtaatgatggaattccaggtgcaaaccagagccgtaatgtaactcatcctgttatttttctaagcttggcaagattactccctattactttacgtaccgattatgcgacaagggatgttcaatatattaatgataactctgaagaaataagagttatgaacaatcaattattattaaaaaccacagggagtacggtaacagccacaaaaggggttattgattccatggttgtacatagtgacaattatgatcatgagtcagtatctgtaggggaagataatgttggacaaataattcaagctattttttcatttaaacgattaaaggaaacctacccagattatcatggtggcattcttttaattgatgaagctgatgctggtttattccctgcggctcaattcgaactaataaaaatactaaccaaagcagcaaagcaatataatttgcaaatcattatgacttcgcactcaccgctaatcatagaagatatctataatagatcaaaacaagacgagaaatcattcaaaacaatttacttaacagatacctatggtgatatcaaaacaagaaataatttatcttggccagatattaacgctgaccttcacgttcaaactgttaaaattgacgaagacttaaacttacctaaggccaatgtctattttgaagatcgagaaggatttgattttttcaaacaattaattattgacagaaaaataaacaaaatcatcaacccactaggtaatataaatataagctgcagtgcaattcttgatttgatggccagaaaaatccccgaattcaccgtcaaaagtctgattgtcttagatggtgatgttgcaaatgataatggagataatgcaaaaaaagcaaaaaaagaaaaaaacctatgccttcttccccatttactccctcctgaccaaatgatatttgagtttttatataacctgccacccgatgatgattattgggaaaatagaaatcgtttcacaaaaccagtcttcaacagaattgccactgatatagtaaccactctaaaattagggaaggcaccaataaacatatcaaatgaaatcgatgaatttaaaaaagggaagcaaggtattttaggtgtaatacgtaaactctttaaagattttgcgcatacacccgagttcagaagtatggtagatggaccagtcaagaacaatccatataggtactgggtcaccaagaatagcgctatatccgaccaatataaatatgatttcaccaaaagcctcaagatagtaatgaccacaggtcacggcgttgactcagccgtaatccactcttacctctctgataactaa

SEQ ID NO: 111811 - DNA, 567 bp, Enterobacter aerogenes
gtgaaccatttaatggtcgacctcgaaactatgggtaataagcctgctgctccaatcgtcacaatcggtgctgtgttctttgaaccacaaactggagagctgggcgcagagttctatgtggctgtcaacctcgccagcgctatggatcagggagcgactccggacggtgacactatcctgtggtggctcaaacaatcatcagaggcccgtgcagctatttgtactgacgataccaagcacatcgcggaagcgctctccggactcagttcattcatcagccgcaactctgacaacccgcgttacttgaaagtctggggcaatggtgccaacttcgacaacgtgattttacgctcagcctacgaccgcgccggccaaacctgcccgtggcaattctggaacgacagcgacgtgcgtaccatggtgctgctcggtaaacaacttggtttcgatcccaaacgtaatatgccatttgatggtgtagcccacaacgcattagccgatgcccgccatcaagcaaaatatgtatcggcaatctggcagaaactattgccttcaagcgacgaataa

SEQ ID NO: 111812 - DNA, 198 bp, Enterobacter aerogenes
atggcacacgtgaaagtgaaagaattggttgctgcagcgtatgctgctgcaccgggtctaccaccagcagcagcccaattgatgcaagacatagcgtcaaggctggatgtgacctttgtcgcccttacagaggcaatggaccagaacacagcgctgtcggctatgttagctgcagcgcagaaacaggagaaaaattaa

SEQ ID NO: 111813 - DNA, 801 bp, Enterobacter aerogenes
atgtcacaattaaacggcgacgctatcgagaaaattcaggagctaactcttgctgcggtccacacacaggagctgaaaactaccatatgccccacggttatgttgccgtccgggtacggtatcgaaagcctggagcgctttaacctcaaccggttccgcttccgtggtgccctggaaacaaccagcattgccgatttcgttcgttattcagttggctatgccgttattgataccccagcccgctgtttcatcgacgcagagagtatgtcagcccgtgcagtgtttaacatcggttccctgggcgaacccggacatgcagacaacgtagcgtctatccgcctcaaaaaaacagcacctttccgggcgttgctcgcaatcaatggcgatcgcctgagccagaaacaaattgccgaatggctcgaagactggagcgatttcttgctcgctttcgatgctgaagggcaaaccatggatatctccaaagctgcacaggctgttcgtcgggtgactatccagcagactaatcaggccgaccacgaagatagtgatttcgctggtagaaaatcgctgatgcaaagtgtagaagcgagcagcaaagatgtaatgccggtcgctttcgaatttaaatgcatcccttatgaaggcctaggcgaacgccgctttagtcttcgtaacagcctgcttaaaagtggcgaaccagtgtttgtgctgcggatcgttcaactcgaagcgcaggaagaagaaatggctaatgaattccgcgatttgttgattgctcagtttgacgacaagccggtgtaa

SEQ ID NO: 111814 - DNA, 447 bp, Enterobacter aerogenes
atgagtgttattagcgaagaatttttccagaaaattcttaataatctttccgaactacacggtatagcagtgtttggttcagttactgaacccggctattcccaggtcaaaaatcgtgcttcactcgtatttgcacttgaagtcctacttgagcgacatcgtgaaaaacacggaaccttatggagcccgttacccggaaaactcgctttgttgcacttgatccttcaaaagtacaaatggccattatctgaaataaaggctttgacccttcaggagtccgtattcctccttcaggaagaattaaaatttgaaaaccttccggatctggctcaacgtgttctcaaaaattatttagctgaccgagctgaacactacttcgctgaaatacgagaggaagagtgggatccagatctgtatctcacaattccaaagccgcagcgatggtga

SEQ ID NO: 111815 - DNA, 195 bp, Enterobacter aerogenes
atgaaggcaactgaaccaaaaatcattgctcctagcagcaccgaggaagaggtcatctcctggatggaacggaaaattagtgcatcacatcggcttaaaaccgcaatcgccgaaagagaagctcttaagcagtcaatcgaagtggtcgatcaactcattgacgaactcaccatcgctgcggctttggaattgtga

SEQ ID NO: 111816 - DNA, 552 bp, Enterobacter aerogenes
gtgggtatagaacctgaatggaaagtagaaaagcaaccggcgtggctggtggccgcgattaaaaagactatcaccgaactggatgggggttatgcagaagctgctgaatggttaggcgttacagaaaacgcgctctttaaccgccttcgcgcagaaggggatcagatattcccgctcggttgggcaatggtactccaacgtgcagcgagcacaaatcatatagctaatgctatcgcacgccactccaacggcgtctttgttccgctcgctgaagtcgaagacgtggacaatggcgacattaatcaacgccttatggagtcgattgagtggattggaaaacactccagcttcattcgtaaagcaactgctgatggtgttattgatgccgatgaaaaggctcagattgagcagaacagctatcaggtgatggcaaagttccaggagcatgtagcgcttctgtttcgcgttttttgtactccagaaaagagtgacgcccgcgagtgtgcagctccgggcgtcgtggcgaataaatctttgtgtatggagaaataa

SEQ ID NO: 111817 - DNA, 180 bp, Enterobacter aerogenes
atgcgagaagttaaccggaagttcaaagaccactatggcaatccagtcagagttatccgctgggagcctgagacacgtcgcgtcatctacctgcgggaaggctattcccacgagtgctttagcccactcgatcagtttcaacgcaagttcagggaagtagagggcagccatgagcagtaa

SEQ ID NO: 111818 - DNA, 912 bp, Enterobacter aerogenes
atgagcagtaaattacacggcctcgtatgggaagcatgcgctttcaaagggctgataatctcagaaatagcggtcatggctcgcctggctgatttcagtaatgacgaaggtgtgtcatggccagcggtaaccactattcagcgacagatcggtgccaagagcgagaatactgtccgcagcgctatcaaaaagcttcaggctaaaggctggctgaagaagcaggaacggcgcgtgggcggaaagaataattcgaacgtttataaactcaatgttgagatgctggaacgtgcagcagctgaagcaaaaatcttctacgcaacgccacgtgaacaatcaaaatttgatgcctcagaatttgagggttcaaaatttgagggggcaaattctgatgcctcaaataatgggtctgtaccccctcaaatattgcgggaggacccctcaatggttgaaggcgatccgtcattagatccgtcattagatccgtcatctaaaaaaccttcttgtcgggctcctgcggaacccgacgataagccggatcctgaagttgttattaccgataacgcgatcgaagttctggcacacctgaatctggtcagcggttcccgttaccagaaatctaagacctcactggagaacattcgcgcgcgcctccgcgaaggtcataccgttagcgacttgaaactggtaatcgacgtcaaacatgagcactggcatggcaacgacgagcaataccagtacatgcgacccgagacacttttcggccctaaaaaattcgagggatatctgcaaagcgctatccgttgggatgccaaaggccgcccgccaagggagttgtgggacaaaaccagaccgcgggatgttaattcaattagtccagtacaaaccacgattccacgggggttccggggatga

SEQ ID NO: 111819 - DNA, 459 bp, Enterobacter aerogenes
atgaacatagccaagtcgatctttgaatttattgagaagaatccaggcaaaatgctgcgcgatatcactgcggcatttcctgaaaccaaaccggtaacagtgaagagcactgttcatcgcctgtactacgacggggaacttgccagcgttgaagttactggtgggtttatctacttcgtagcgggatccatcgatattgaagagtacctgcctggtgggctttcgggggagattcttgcccttgaagcgacagccaaaaagctggaagagaaacgctattaccgccgtgcggcgacggtatggcagcaactttgtgacagcaactgtacggctaaagcaagagagcggtacctgcgtcttaagaatgcttctgttcgaaacgccagaaacatgaatgattccgccgggtcatgctatctggccggaaattactgcggaggtgacttgtgctccgattga

SEQ ID NO: 111820 - DNA, 954 bp, Enterobacter aerogenes
atgagtcaggaagtacaagaagctatgaccgcagaagagcaaactttaacaaaaaccatcaacccttattgcctggcacttgaggaacagcgccagcgcagtgcgcattatttgaaagaggttggcgatcaatggcggacaccagatctgctgttctggggcgttaacgctatgtttggcccgctggttcttgacctgtttgcagacgagagcaatgcaaaatgccccgcatggtataccgctgaagataacgcattaacacaggactggtccgctcaccttgaagaacttggtggcgcaggatttggtaatccaccgtatagccgttctcagtaccacgaaaaacaggcagtcaccggcatgactcacatcatgagttatgcatctgagcagcgagaaaagggcgggcgctatgttttcctgctgaagtcagcgacaagcgagacatggtggccagaagatgccgatcatgtgtgttttatccgtggtcgtattggtttcgatctcccgacctggtttgtgccggcggatgataaacagaaacccaccagcgccttctttgctggcgctatcgtgatatttgataagacatggtgtggggagcgctttagctatatcgatcgtatagagcttgaggcgaaagggcgcgcaagtatggctttggctgagtttgctgcgggaaaattcctgtcaccagcttcgccagttcagtctcctgaagtgatcatccccgatgctgttgcatcactagctgaggctgaatcccggatctggccactggaagttggtctcgtctttgaacagttacaaggcgcagaggatctggaattctcacagcagaacaagctgaaggcccacattaaccagttgtggctggagcgggtgcccaccagcgaaatcattaccgttgctggtggtcttgtcggcagcatgagggggaccgctcatgcgtga

SEQ ID NO: 111821 - DNA, 477 bp, Enterobacter aerogenes
atgatgaggttaactctcaggcagcaggaggttctgaacctcctgatcgagtaccaacgtaagcatggtttccctcctaccacttacgaactgaccggcatgttggggtgccggtcccccaatgccgcagcaacgcacctcaaggcgctggagagaaaaggggccatcaagattacccgcggagtttctcgcggtatcagtatcaccccttcgctgttggccagagaaatatcggtcaatctcaacagcatcgtaaaagtgaaacttactgccgaagctctaagttacatgagaagccagcacgaagagaatcgaatccagcacccggcgatcttcggagacttttcgcccccggtaacagacgaaaatggctatacgtcaatgaccctgtggagcctcatgtctgaccttggcccgctctgctattgcggaggagatgttccgtttgagttgaaaatagtgctggaggcagaatga

SEQ ID NO: 111822 - DNA, 399 bp, Enterobacter aerogenes
atgaaatttattcttccattcccacccagcgtgaacacctactggcggtccccaaataaggggcccgcagaaggtaaacaccttgtcagcgcagccggccgtaaattcaaacatgcagtacgttcagcgatcattgagcaactgcgtgcaataccaaaaccatctaccgcgccagcagctgtagaaattattctctatccgccagactatcgccggcgtgacctggacaattacaacaaggcagttcttgatgctttgacttatgccggtatctgggaggacgacaaccaggtaaagcgcatggctatagagtggggtgagaatgttaaaggcgggcgggtagaaatcaccatatcggcgtataaaaaaacgctggatgtttgttcagtggtaggttga

SEQ ID NO: 111823 - DNA, 855 bp, Enterobacter aerogenes
atggctaaccatgttatgggcgtagctacgcctgtcgataatcaattgcatcaggtaattccggtaatgcagggcacaatcggcgatcagagagcttcgttggtcagcgccaggcgactgcataattttcttggggtcggtcgtgacttcagcaactggataaagtctcgtattagccagtacggttttgctgaaaacatcgattatacagttatcgccagttctggcgaaaacccactcggcgggcgcccggcagtggattacatggtcaccatcgatatgggtaaagagttagcgatggtagaacgcaatgaaaaaggtcgtcaggtaaggcgttatttcattagttgcgagcagcaggcaaaatcagcgataagccatacgcatcctgatttttccaacccggcgctagctgccagggcgtgggctgatgagtatgaagccaggcagaggattgaggctttaagtcaccggcaggctcaatatatcgatcatcttgaaaacctgtttaccgacggcttatccccagtgcagttctgcaaacgtctgaatggtgtcaacgttagtaaagtcagcgccttcctacagagcgctaactggctttacgatgacaatcctaacggcaatcacgctcaatggcgtgtcagatctcaggtcagggataagtatctcaccgagaagagcacaaaagtttcaccgagcgccgccgccagtttcacaacataccagcccgtcctcctgcgcgatggggctgtttggctttatcgcaagtatctgaagggacaactgccgatgaagcaatcctggaatagggaatatacccacgataaagagctttctgggggcattcagtga

SEQ ID NO: 111824 - DNA, 1056 bp, Enterobacter aerogenes
gtgagagcattactgacccctgaagtcgtgtctcgtctcggtgttgttcttttcaaacccggtcgtgaattgatgcctctctttaccggcggccgtgtcctgatagagcgtcagccagagaagatgaaaacactgcccactgggcggatcgccgatgcacgtcagccgcttgcagaaatggacattctgcgttttttcatgagggatgagagggttattaacgcagctggtggaattaacgctcttgaggcctggcttctacgacatgtcagagagtgccagtacccgcattcccactatcaccaccatgaattagtgactatgcggcatccgcctggcgccatggttgtctgctggcattgtgataatgaattacgtgagcagaccaccgaaatgttgtcagagctggcttatcagaatctggctcagtgggtgattgaaagggtgctgatcagccttggatacaataaggagcgcgaattatcgatggcggagctctgctggtgggctgtgaaatccggcattgctgacgcaataaccgagacgatggcgcaacaggccttaagactacctgaggaacctttcctgtccgtttataaggatagcgatattgtcccgtcatttgctgcaggtgaaatccttcaggatcttgtcgagggcatagacctgacggacgccagtgtactcattgagcaacctcagagtgaaaataaacccattctgaggcttagtgtcgatccgaacagcccagaatcatttatgcgccgcccaaagcgccggcgctggacctgcgaagtttacacacgttgggttaaaactcagccatgtgaatgctgtaggcaaccatcagacgatccacaccatataatagggaatggtctggggggaactggcaccaaggcccatgatctcttcgtgataccactgtgcagagtgcatcacgatgaattacacgccaatacatcagagttcgaaaagaaatatggcactcagttagagctgtgggctcgttttctggatcgggtaatgggtatcggagtcattgtaaaagcttga

SEQ ID NO: 111825 - DNA, 192 bp, Enterobacter aerogenes
atgctaaatcagcaagatatgacggaaacagccaaggctgtttttgatgaattaagtgacaaaccggctacggctggggagattgctcagaatactcacctaagccgcgaacgctgccagctcatacttacgcagctggtaatggcggggttatctgattatcagttcggatgttataagcgcctccagtaa

SEQ ID NO: 111826 - DNA, 627 bp, Enterobacter aerogenes
atgaaccaatcacaatttcaaagggcggctggtatcagcgccgggttagctgcgcgctggtttccgcacattgatactgcaatgaacgaattcagcatcattagtcctctcgatcgggcgatgttcatagcgcaatgtggacacgaaagcacgtcatttacccagttggtcgaaagttttaactatagcgttgctggcctgtctggttttgtgaaggcaaagcgcatcacgcaggaccaggcgaacaccctggggcgtaaaacttacgaaaaggttttgccgatcgaacgtcaacgagccatcgcaaatctggtctacagcaatcgctttggcaataaggctgcgggcgatggctggaaataccgtggacgtggaattatcgggatcaccttcctcgaaaattacatgaagtgcggtaatgcgctgaaactggatttagtcagcaaccctgaactgctggagaaagatattaacgcagcccgcagcgccgcatggttctatacctcaaacggctgcttgaaataccccggcgatttaattcgcgtaactcagattatcaacggtggtcagaacggcattgatgaccgacgcgcccgattcctgaaagctaaatctgttctggtgtga

SEQ ID NO: 111827 - DNA, 276 bp, Enterobacter aerogenes
atgggcattgaaatgattattggtctggcaactgcgttgctggccattgtcgctggcgcatttgggttaggccatgcgcgaggtactaataaagcggaagctaaagccgaacagcagcgcaccgaagataatgccgctgccagcgtcgcagcggcggaacggaaagaggaagccaccagagaggccagcaatgtacagcagactgttagccatatgcctgatgacgatgttgatcgggagctgcgcgaaagatttacccgccccggtggtggttga

SEQ ID NO: 111828 - DNA, 549 bp, Enterobacter aerogenes
atgctgagtcaggaatttttagaaagatgtgtttaccctgcagtaaagcatgaagccgcgcactggttggctgcgtacctgtatgggtgggggccaagagttattgggataaggatcccagagtcagaaaatactcaccatagctatgttcaggtgagtcatgcagtaaaaatgtcttcaatcgaagatgtcattgattacacgagaaaaagattagtcattctttatgctggaatgtacgctcagcattcggatggccgttcattcgacaatcaagccatttcagattgtgttaaacctgacgggggatcttattccgatttctggaaggcggaggaaatttacttcttttattacaactgtttgcaaaatcctcagggatgggagattgagttcagaccaatagtttctgaagtcaaaaatatggtcataactaactattggtttcttgaaaaagttgcaagggaaattggctgtagagcaacgcatattggccaagaaattttagttcaacctgaagaactaatttctatgtatgaaaataaataa

SEQ ID NO: 111829 - DNA, 492 bp, Enterobacter aerogenes
atgaacgctgattacatttcctatgaatcattagttgccgcaagagaagctgctgattgggccttttggtcgatgattggcacttggctatcggcgttagctactttgtttgcggctataattgcagtactggcaatcagaagctggagaaaacatgaggaagcacttgagctaaaagaatttagagtttctgcatataactacaatgttgcattaatcagagcaccgttatacaacagcgacgatctttcagagcatgattttgtggcggttcaaaagacatattttgcattgaatgagttttttgtgtccacggttcggatgcatgaaaaaatagctcgaggaaaagcttctcttgtctatcaaaaaatggccgatattcaaacccgatatatagctggcgatataacaaatcaacaagcagataaagaagtattaaaaattagaacccatgatcctttactgggtatcggcttgaaagaagaacagtaa

SEQ ID NO: 111830 - DNA, 246 bp, Enterobacter aerogenes
atggcagaaatcaccgacgcccagcagattcgcctgaacctgctatcagccctgaactacgacacagcagcagctaaagtcgctgtagagtttgttctggatagtccacttaagtatcagcttttcatccagcaatacagccgcgtcacgacagaaaccgaagtggtagcaaagacgatgaaagcagtgcaggaagctactgaagcgctgccgctctttgatacaactgctgaacagtccagctag

SEQ ID NO: 111831 - DNA, 222 bp, Enterobacter aerogenes
atgtcaaaacaggtcatttcgttacttccaggtgatcaggtagatcttatttccgtcgcagatgatgacaactacgtgacttattacggggaccaaggtgcacaacttggtatgccgatagaaacatttacgcttgatgaaaaggaatatttgattgcgaagtgttcagctgatatagcggatgaaagaattatcgcagcaatcaggaagtatttcggttaa

SEQ ID NO: 111832 - DNA, 129 bp, Enterobacter aerogenes
atgcgcctgacagttctcgacgacgatccgggcgaaagcatcgaacccggtcgcgaacgtatcgaagtttatctcaatggcgttgaggtaaagcacgcttttctgctgacgatgaaagaggtgaggtga

SEQ ID NO: 111833 - DNA, 342 bp, Enterobacter aerogenes
atgaacattgagccacgcatctacggcagcaaatgggaccgcgagcgtcttatattccttcgagcgcacccattatgcgtcatgtgccaggatcaaggcagggtgacagcggcaacggtggttgatcacatcatcccgcacaaattaaaagagtctttgcgctctggtgacagccaggcaatagcgaaggcgcaaaagcttttctggagccggaagaactggcaagggctgtgtaagcagcaccatgactcaacgaagcagagaatggagaagcgcggctccgctatcggctgcgatgaaaatggtattccgcttgatccaaactctcactggttcagatga

SEQ ID NO: 111834 - DNA, 465 bp, Enterobacter aerogenes
atggcaggacgacgcccgaaaccgacccacctcaaagtggtctccggcaacccgggcaaacgtaaactcaacgataaagaaccgactccggcgcgagaaattccaagcccgccggcgcacctgaccgactggggaaaggttgcctggggaaggttgactgttctccttgacgggatgggggtgttgacagttgccgataccttagcccttgaacggctatgcgatatttacgctgatatccttcagttgcgcgacaccatcgcagtagagggaagaacctataccgtccagaccgagggtggttttcttatcaaagctaacccggccgtttcgatgttggccgatgccgaccgccgttttaaaagttacctggttgaattcggtcttacgccagcggcaaggacgaaggtgaaagtgaatggcgaagaccccgaagaggacacgctcgacaagttcttcggttga

SEQ ID NO: 111835 - DNA, 1737 bp, Enterobacter aerogenes
atggcgaagaccccgaagaggacacgctcgacaagttcttcggttgatcctgcaacccaatatgcgatggatgtaacctcgggcaaagaactggctggtcctgacatacgtaactcatgccagcgccaccttaacgatctgcagtcatgtcatgcccgtggtctgcactgggatgttgaggcggcgcaacgctcgattgactattttgcgaaagttctgaagctcaatggtggtgatttcgaaggcgagcctttcgtgttgctgccatggcagtgcttcatcgtcggttcgatttttggctggaaaaacgccagaggttttcgccggttccgaatggtctatgtggagtccgggaagggatccggtaaatcccctctgtctgcgggtatagggctttactgtctcactgcggataaagaagcacgcgctgaagtttatgccgctgccacgaagaaagaccaggcaatggtccttttccgtgatgcggtggcgatggtcgatcagtctccagctctttccgcacgtattcagaaatcaggtggtgccgggaaggaatggaacctggcttttcttcagtctggttccttctttcgtccaatcagttcagatgacgggcagtccggcccgcgaccgcattgtgctcttattgatgaagttcacgagcataaaagcaatcaggttgttgaaatgatgcgtgccggtaccaaaggtcgtcggcaggcgctgattttcatgatcaccaacagtgggcacgataaaacgagtgtctgctatgactatcacgaatacggccgaaaggtttctgccggttcgatagaagatgacagcttttttgccttcatttgttctctggatgaaggagacgatcctttcaaggatgagtcctgctggaagaaagctaacccttcgctgggtcacacctttgaagaaagctatcttcgtgagcaggtgactcaggcccgcgggatgccatcgaaagagagcatcgtcagacgtcttaacttctgtcagtgggttgacgcggctaatccgtggatgagcagtgatgtctggatgggttgtgaggagagctttaatccagatgaactggaaggtgaggaatgctatggcggtttagacctgtccggatcgcgtgatttgacggcactggcgttgttttttccaaaacaacgtaagttgctggtggagttctggaccccgaaagatacgttactggaacgggccaaaacggaccgggtaccttatgacgcctgggagcgagatggccacatccacaccacacctggcaaagcagtgaaatacggctttgttgcccagcgcattgcagatctgactcagaagtttgatatcaaggccatcgccttcgaccagtatcgcattaaatatcttgagccggagcttgaggaagcatctgtttctgttcccttaatccctcatgggcaagggtattacaaagcgaaagattccgggctgtggatgcctcactccatcgaattgtttgaagagttgcttgatgacagcgtcattatcatcaggacgaacccttgtcttcgctggaatgcggcttcagcagtgacggaggctgatcagaaagaaaaccgaatttttgccaagaaaaaaagtaccgggcgtatcgacggcattgtagcgggcgctatggcaatcggtgcctccgaaggctatgaggatgattctggcgatatcgacgactttttcagtaatcccatcattgtgtga

SEQ ID NO: 111836 - DNA, 1320 bp, Enterobacter aerogenes
atgaataaagataagaagccaggccggataaaaagcgccgttcgccggtggctcggcgtacccatctcacttacagacggtgaattctgggctgcttatgctggtgggcagtccgcagcaggcaaatccgttacggttgataaagccctgcagttatcggcagtgtggtcatgtgtaaggctgttatccgaaaccatcgcgactttgcctgtaggtttttacgaaaaaacggctgatggtcgccagagtgcaaatgatcacccgctttatgagctcctccataatcagccgaatgctgacatgaccgctgtggagttctgggaaatgatcatggccagccttcttttatgggggaatgcttacgcggaaatcgaccgtaccggaaagcgtattacctcgcttgtaccgctcaggccagaaaggatgaaggttgatttaagtagcagcggagatcctatttatacctaccgtgactggccttcaggtacatcccgaaacattaatgaacgggacatcatgcacatccgtgcgttcagcaccaatggtgtcatgggcctgtcacctgtcagttatgcccgacagacacttggtctggcaatggcaacagatgaagccagcgcaaaagtttttaaaaatggtatgcggcccagtggcgttctctcaatggatcaaatcctgaaaaaagagcagcgcaatgaagtacgtgaaagcatggttgaacaattttctggatccatgaataccgggaaaatgatggttcttgaagcgggaatgaagtttcagccagttgacctcaacccggaagacgcccagatgctgcagtccagggcattcaatatcgaagagatttgtcggtggttcagagtatggccggggttgattggacacagtgcccaggggcagacaatgtggggaagtggcgtcgaacagatgctgattggctttttaacgttttcacttcgtccatggcttacccgtattgagcaggcgattcgtaaaagcctcctggctccgggagaaagaaataagtacttcgcagagttttccatcgaaggtctcttacgtgccgacagcgccgcccgtgccgctttttactcaacgatgacccagaacggtctgatgactcgcaatgaagcacggcaaaaagaaaaccttcagccaaaacctggcgctgaccaactaaccgttcaatctaacctgctgccgatagatcagcttggcaagtccggcgacagtgaatcggccaaaaacgcactgcgggaatggcttggcattaaatcagaggagacgccggaatgtaccggaaaaacgcagccatga

SEQ ID NO: 111837 - DNA, 708 bp, Enterobacter aerogenes
atgtaccggaaaaacgcagccatgaaagtaaaggcattcaacttcgatattaaggccgtcaacgatgacggccttttttctggatacggttctgtcttcgatgttgtcgatagctacaacgaagtcgtggcgccgggtgcgttcctcgaaagcatcgaggaaacacgggcgaaggggagaacgttcccggttctctggcagcatcgcaccggcgaacccatcgggaactgggacatctcgaccctgaaagaagataaacatgggctttttggtgaaggggccctgtggcttgaagacgcggcctacgcgaaaaccgcctggcggggcatgaaaacccgtgccattacaggcctttccattggctattacgtccgtgagtcaaattacgatgagaaaacccggatccgcaccttaacgaagctcgacctggttgaaatctccattgttaccgtgccggccaatgatgatgcgcgtattgacgtcattaagtcgaagctgtcacacggtgatcttccttccttacctgaatttgagaagttcctgcgagaggcaggtttctcgaaaagtcagtccgccgcggtcgcctcccgcggactgtcctatctgcttgaccggagtgagtccgggggcgaagacggcgaaaccaaagcggctattgcggcgatgcgccagcaactgagccagttttctctcccaaaaattctctaa

SEQ ID NO: 111838 - DNA, 1221 bp, Enterobacter aerogenes
atgtaccagaaaaaatcggctgacgatcagccacaaagtattggcgaaatctcctcccagctcaccatggtgattgatcaggtcaaaaacttcggcgaagacgtgaagagaaaaatggaggcaggagaaaccgtttcgctggaactgaaacaaagaacggacgaaagcattaatcagatgaacgagctgaaagaacgtctcactgagctggagcaaaaaggtgcacgccgcccgaacgatgcacctgcacagcgaaaatcgctcggtgagctggtggtcgaaagtgaagagttcaaaggcatggacagttcggcccgtaagagcatccgcgtcaagctggaacagaaagatattatgaacgtgccggcgactacgggcactggcgtgagcacaaccaacagtctggtggtctccgatcgtgttcagggcattatcgccccgccggaacgcactctgaccatccgtaatctgcttatccccggtaataccgcatctaacggtattgaattcgttcaggaaacggggtttaccaataatgctgcagctgtggcggaaggtgctctgaagcaaaaatcagacattaagtttgagctgaaaagtgcgccggttcgtaccattgcgcattattttaaagcgtcccgtcagatcctggacgatgcgcccggtctggccagttatatcgatggccgtgctcagtatggtcttcgctttaaagaggagcagcagttgctgagcggcgatggcaccggcgcgaatatcctcggtattctgccgcaggcaacagaatttgctccagcgcttaccctgtccaacgccacgccgatcgaccgtcttcgcctggctgttctgcaggccgttcttgcagaatatccggcgtctggttttgtactgaaccctattgactgggcaggcatcgagttaaccaaagataacgaaggccgctacatcattgcgcagccggtcaatggtggtgttccacggatctggggtcttcctgttgtggaaactcaggctatggcgcagaacaacttcctgactggagccttcaacatggctgcgcaaatcttcgatcgcatggatatcgaagtgctgctctccactgagaacgaagatgactttattaaaaacatggtcaccattcgtgcggaagagcgtctggcgttagcagtttatcgtccggaagcatttgtcaccggtaatgtaaccgcttctggcggctga

SEQ ID NO: 111839 - DNA, 255 bp, Enterobacter aerogenes
atggccagaaaaaatgtggatgaaccgtctgtatccgacggtaaaaatgcggcgccagaacccactgaggccgggactattcaggttcagcctgtccggcgttttatggatggcgatattttcaggacgcccgccgatgatccttttcatgtctctcgcttacgtgctgccgagctcaaaggtaacgggctggtgacgatagttggtgaagtccctgataacaaaatgaaccgcgcccccgaaaccaaagggtaa

SEQ ID NO: 111840 - DNA, 483 bp, Enterobacter aerogenes
atgccgcattggtccaattttcatcatcccctccggctaaacacccatttgaattcgccagggattcagcaaccagcgtgcgggtcctgggatatcaggactcagagcatccccgcggttttcatacaaccagcccactataagaagaaccgcgctctgaatggagggcgtgatgataagcggacgatcgccggcactttcattctcaacagcactatccagagcagcctggtcagcaaaaaagcgacggttaagaaactgcatagcagcatcctccgcagcggcaagatacccctccaccatcgttttatcgatttcatcatccagcctgagatgttccatggctgtttcagtgttgattaccgtcataaccattaccctttggtttcgggggcgcggttcattttgttatcagggacttcaccaactatcgtcaccagcccgttacctttgagctcggcagcacgtaagcgagagacatga

SEQ ID NO: 111841 - DNA, 450 bp, Enterobacter aerogenes
atgattgatgtgaatctggatttttccggcttagaggatatcgcccgagacctgcaaatcctcagcaaagccgaaaacaacaaagtcctccgggactctactcgggccggggctgaagtcctccggcaggaagtgattgatcgggctcctgagcaaagcggaaaactgaagaaaaacgttgttgtcgtcacccagaaaagccgtcgccgtggggaaatcgcatcgggggtgcatattcgtggcgttaacccgcgaacggggaacagcgacaacaccatgaaggccagcaacaagcggaatgctttctactggcgcttcgtggagctgggaacatctacggccccggcacatccttttgttcgccccgcttttgatacccgacaggaagaggccgcaaaggtagcgatggagagaatgaacaaggcgatcgatgaggtgctggcgaaatga

SEQ ID NO: 111842 - DNA, 348 bp, Enterobacter aerogenes
atgacagaggatgatatctataccctgctgtcgccgctggcagacgggcgggtttatccgtatgtggtgccgcttggcagcgacgatttacccgcagtggccgctccttacatcattttctcgataccgactgatgttgccggggatgtgttctgtgggcaggccgaatcgacgctgcacattcaggtagacgtgtgggcagaaactaacgatgaggccagggcgttgcggcttgaggccctttcccggctggaagtgctttcacctaccgaagtaaccaaaatccccggctacgacactacaacccacttgcatcgggcaacgcttgaaataacggtcattgcctga

SEQ ID NO: 111843 - DNA, 711 bp, Enterobacter aerogenes
atgtcagcattgtacgaacgcgcccaaaaaacggtagtaatgattacatcagtgccggtcactgcggaagagctggcatcggcgacctggctcaacctgagttgtaccattaaacaggccagctttaccgctggtcagaaaaacgatattgacgtgacaacgctatgctccgaagaaacggagaatatcaacggactcccggcaccgtctgagatgtctctctccggtaacttctaccgcaacccggcgcaggatacgctgcgtactgcttacgataatgacggcgtatacggctttaaggttgtgttcccttccgggaatggcttcctgttccgcgccgaagttcgtcagcatacctgggattcacagaccaacggtgttgttgctgcaacgttctctctgcgtctgaaaggtaagcccagcaatattgattcgacaggtattctgtcattcatcaacgatctttcaccttcgctatcagtagcggcaggaagcgccctgacaatgggtgtggtcatccagggtggcactgcaccttatacctacgtctggaaaaaaggttcgtcaaccgtcagcgggcagaccagcgcaacgtttaataaggccagtgcagtttctggtgatgccggtgtttactcctgtgtagtcactgactctgccactccggcgaacgttatcacctcatctgactgcaccgtcaccatcagttaa

SEQ ID NO: 111844 - DNA, 414 bp, Enterobacter aerogenes
atgtcaaaacagaatcttaaagcgctggcgctggccccgatggcgggttttcgtaaaaaagaagtcaccgttccggaatgggaaaacgccaaagttatcattcgtgaaccatcggctgaggcctggattcgctggcaggggattgccagcccggaacaaccaaaactaccggaagggcaggaagcgccagaggtgccagaactgaccccttcagaacgtgctttccgcacgatgcgggcgatgcgggcagatgtcacactcttcattgatattctgctggataccaacctacagtacgttttcaccgtcgatgataccgaacaggttgaagcaatttatggccctgtccattcccggttgctgaaacaggcgcttgatctcattcgtgatgcggatgatgccaaagcaaagtaa

SEQ ID NO: 111845 - DNA, 306 bp, Enterobacter aerogenes
atgcctggcatgcagttcctgatggcgctggcgctccggatgggccgcacgctgggcgaactgcgacaaaccatgacggttggcgaattcagaatgtgggctgaattcgaccgtatcagcccgatcggtgatatccgtggcgatattctcaatgcccagctggtttcagcgatgtacggggcgcagggcggtaaagtcaccatcgaagatgctcaactcaagtggagcacagaagaggatgaggtaatcgatagtggcgatccatttgccggattagaggccgctttgctcgcagcatcggaataa

SEQ ID NO: 111846 - DNA, 516 bp, Enterobacter aerogenes
atgaaatatccaaccgtatcagtaaacggcgtttccgttcgtgttgacggtgaaggtcgctacaatctcaacgatcttcatgcagcggctgtggcggaaggcaaagccaccgaatcacagcggcctggtgaattcctcaaaacaaagcaagtaagacggtttgtacaggccctgagcgatgcgaagaaaatcgcatcggtattaaccatcaaaggtggtccgcttcaggggtcatggggactcgaactaattgccatccgttatgctgcgtggcttaacccattattcgagattaaggtatacgagacattccagatgctgatccgtaatggctttgatgctatggctcgcttaaataaaattgaccatgtgataaacaccgaaaccaaggaagtgagtcagtgcgcaagccgtatgggaaaatggggatctggtggtcgcaaacgcctgcttttggcagctcgcgcccgtgtggtcgatgaggttcaaatgtacctgcctggttttgaggcgtga

SEQ ID NO: 111847 - DNA, 3408 bp, Enterobacter aerogenes
atggcaacccttcgcgaattaattataaaagtttcagctaattctcagtcctttcagaccgagatcgctcgcgcctctcgcatgggggccgattattataagacaatgcaaaggggggggcggcaggcggctgtttctgcacgcgagacaagacaggcactagccgaagtatctgcacaattgtcagaaactaaaaacgcagctatgggtatggctggtgcgtttgccggagtttttgcgactgggcacctaatcgcccttgctgatgagtggagttctgtgaatgcacgtttaaaacaggcgtcaacatcaaccgatgatttctccaattcccaacgattacttatggatatcagccagaaaacagggacagcgttcagtgataacgcaggtttatttgctcgatcggcagcatcaatgcgtgagtttggttattcctctggcgatgtactgaaagtaaccgaggctatcagcacgggccttaaattatctggggccagcacgtcagaggctagttctgttatcacgcagttcagccaggcgttagctcagggagtgttgcgtggagaggagttcaactctgttaacgaaaacggtgatcgaatcatccgtgctttagcggcaggtatgggcgttgcccgcaaagacctcaaggcgatggctgataacggactgttgacaatagataaagtggttccggccattaccgctcagttgcgagtgatgcaggctgaatttgaatcaatgccaaaaacggtttcaggctcaactcaaaaggttgaaaatgcttttcttgcttgggttggcggtacaaacgatgcttatggtgcctctgcagcgcttgctggtgggcttgactccctggcagagaacattgatacagtagcaatggcagcaggggcattaacggcgattggagttacccgttttcttggtaactggacgttgcaattaaagtcgcacaccgaagagcttatacgggccagaggtgcagaaatttcgagtacagcggccaaaattgagggggcaaatgcttcacttacacagatcgaatcagaaaaatcacttctcctttcaaatcaacgatcgctcgtggctcaattagaattggcgcagactgaaaaacaacgtgcgactatcagaacacttctggccaaaaactcaatggatatggtaaaggctaacaaagccgagaccgcgaccgttaatgagctatcaatggcaaaccagaggctgaatgcgctaacctctgttacaagaacggcatgggctggcgtatcatccttatttggtggcattccagggattttgatgctgggggcaggcgcctggtatacatggtatcagaatcaggaacaggcgcgtcagtctgcgatacagtatgcctccacccttgatgaggtggtggaaaaagcgaaagccatgagcgaaattcaaatcagaggttctattgccgattctggtgaatccattgacgcgctcaaagataagctggaggacttgagggatgctcaagccgaggcagctgctgaagttcagaaatatacgtctctcgctcgacaaatgggcgttctgaatgatcaaaataatggttacgtacagaacgctgctaaatatcagcgggaatataacaaaatatcccgagatattgctgatactacatctcaattaaacaatgctgtagatgcacaaaataatttacaaacagaattagcctcaaaagttcaggcgtcggcagttgcttttgacaaaataaaaaactcgataattggtgcgctgaatgttaatgaagcaatggcaacttcgctatcagttaccattcaattcatggacgaattaaaaaaacgctctgggagcggccagcccccagcagctcaaaccaacacggcttacgataattttataaagcaacagaaggagagcatagccctctctcaaaaagaaggtgttgagcgggccaagcttaaagcgcttcaggatgccatcaaacagggagcggttagaactgataataaaggtaatattttaccggggcaggatgagcagatcgcagctattcaaggtaatgctgctacagactttaaacttaacgaatcgcaaaaaaaacctcgcggaaagtcagaggtagaaaaaaatgaagatgcatatacccgcattgttaaacaacaagaagaacagattgcactcgccggacaaagcaatgaactggcaaaaataaaatatcagatagttcagggggagctagcctcactcgatcaagctaaaaaagaaactcttctgcataatgctgcgcttatcgatcagaaaaacattgctgaacagttaaaaacgttccgtgaggggctcgctgacagcaacgctgctgcgcgtgatcggggggatattgattttcttggtgccgggatgggggataaggcccgcgaccgcatgaaggaaatggcggatattcgtactgattttctcaagcagcagcgggacctgcagcgggatttcagcaaaggtcagatttctgaggacctgtacaaacagcaaacggaagcgctacaggcggcgcttactgaacggctccagattcaggaggactactacaagaaaaccgatgaacagcagtcagactggcgggcggggatcagcgattcactgatgaactacgccgatcaggctgctgacctcagttcaatggctgccaccgcaaccagcgaaattctggatgccaccactaactctatctccaacaacatgaccagcgtcctgactggggcgacttcgttcaaagaggggatgtcgaatatcttcagctctctgggggaaacggtgattaagacgctgatccagatggcaacacaggcattaatcaccaaagcgattatggcgtcgttcggcggtggggctggtggaatgttcgggagtcttcttggcggaggtgggggaggtggcagcaccgggacggccattcagagcgctggcgctaatttttcgtttaatgctctgggtggtgtctacgattcgccttcactttccgcatacagcggcggtgtatacagcactccgcagtattttgcgtttgcaaaaggggctggtgtattcggtgaagctgggccagaagccatcatgccgctaacccgtagtgctgatggttcgctgggggttcgtgctgtaggtcgtgagtcccctgcggtacagagcgcagcaagccagattcaggcacagccacggattgctgtcagcgtggacgcacgaagcacgttcaccggcaaacccgatgacataacgatgcaggctgtagagcgaagaaatgatgctcttgaacagcggatagttaacaccttaaccgccgaggtaaataacccacagaagaaattcggccgggctatttactccaatctacagccaaaaaaaccacgataa

SEQ ID NO: 111848 - DNA, 474 bp, Enterobacter aerogenes
atggcggatattatctatccggatgagtacctgcctatgccgctgatggacgggtacggttttaagcccatatcaccgatactgcgaacggaaatgacgtccggtcgcgctcagcagcgaaggcgatacacctcaacaccgacccaggcatcagttaaatggatttttaaaactgatgcgctggcgcaggtatttgaggcttttttcagggatgcgcttaaagatggccagtcatggttctatctgaaactccagacccccatcggggtaaagccctataaagccaggttcgtggatatttacgaagggccgacgctggttgcgccaaaatactggcagtacagcgcaacgctggaattatgggagcgtccgttaccgccttcaggctggggaaattatccggaatggctggcgggccagtcgttactggatattgcgctaaacagagagtggccgaagcatgacaattcttga

SEQ ID NO: 111849 - DNA, 477 bp, Enterobacter aerogenes
atgacaattcttgagcgattatatgccagcagcggatcggaggttattcacgacacgctgcagatttcggcaggcgatgataactactggctaaccagtggctgggatgacgtttccgtgatgctggaaaatggtcagccggcgacgtttgaagccagcgcgatagatatcgccttaccagccaggaacgccgacgggacacaggatttaaagtttgctatcagcaatattgacggaagggtttctgaggcgatcgataaaatcctggatgaaatgaaatcagccacgctgacattccggcggtacatttcatccgatatgtctgccccggcatcatcaccgtatacgctcgatattaaatccggctcctggaccccgacagcagtacaggtcacggcaggctatatgaatattctcaaaacagcctggccccgtaaacgttacaacctcgcagagcatcctggcttacgttactaa

SEQ ID NO: 111850 - DNA, 381 bp, Enterobacter aerogenes
atgtttgacgctgataaataccgttcagtcatctggctgaaaggcggacgcgtatacccgaaactcgactgttttggcattgtgaatgaaatccggcgtgatctggagttacccctctggcctgacttcgctggtgtaaccaaagacgacggcggtctcaatcgggaggcgagaaagttgatgctttccttgcaacgctgcgagccctgcgaaggtgctggcgtggcctgctattccggctcaacggttacgcatgtcgggatcgttgtcatgctcgataaccagctgcaggttgcggaatgtaatccaggctcgggggttacgtttctgccactggcgcgattcatacgaaggtttaaccgcgtggagttctggcaatga

SEQ ID NO: 111851 - DNA, 3078 bp, Enterobacter aerogenes
atgacgataaagttttttccgtcccggttgccgggtgaacccctggagacgcacgaacatggcgcgatgaccctgcatgagtggatggccaggaatgtcccgagctactcgcaggacagaaagcatcctgttgcggtcgaactggacggccgggctgttccacctgcggaatggccactatgtttgctgcggccagacagcgatgtgcggatttacccgatcccgtatggaaccggcctggaaatcgccgtgtgggtatcggttgccgtatctattgcctctacggcctatgcgctttttttcgccccgaaaccagagctgggcgggttttcatcaggaaattcagcatcactggacctgaacccggcaaaagcgaatacagccaagcttggcgatcctgtccgagaggtattcggaagaaacagaatttatccagattacctggtgcagccggtcactcgctttgaccccaatgatcccacccggatgacggtcgaaatgtttgtctgcctcgggtatggacgtttctcttacaccggcggtgattttcgggtaggtgaaactcctgctctgccattaggcgatggcttttcatataccagctatggccctggcgataacgtggcgggggaccgtcgcagcgaggtctggttcaacagtacagaagttggcgggacatcaagcgggtcaggtctggatatggctcagactgcccctgaagccagtgatatcgttgctgatgccatgactgttagcggtgcatctgtttcgttttcaggtctcgatgtcgatgatgacaacgatgatgatgaagatgagaacaaactgcctcctggctggattgagggggcaattgtcactctgaaagcgccggtgaattatcaggtatcgattgaggatggttttaacgttctgacaggtgacgccgtggcagaagtggcgccatataatggtatgcctgtaacgctgacatttagcggtaccgattacgatctgcagattgccacgtataccccccaccaggacgccgttccgggaacgggtggatcgactgcagcattgcgcgccagtgcgtcgccatccacgtatgattttacgacaaccagccagacgtttgctctgacctggcagggcgtcacctataccctgtccctggttgctgactacggcacaatgtccggtttgctggcggcgattaacggcgggctgaccggatcaggattgattgctcaggatgacggcggcgtgattcgtatcgtggaaatctccagcccgtggcgtggcggttccattacgtcatcattcctgcccgcgtcagtttttggcgacagccctgtgtttactgccggtacagcatccagtggcggaagcccggcggtctcagccagtgtcaggctggcatacgattccggtaccgcattttctggcctgccggacggcacgcagcggatttccctggctcaccgtggcaacgaataccagatagcatcgactgacggagcgtctgcgaccgtacagagagtggttaacggtgccgttgacaacacctggtcaggttttctgacccgtaccgtcgtggattttgccgcgtctggtatcaacgataatgaaacatggctcggcccctttctggcctccccgcaaaatgaagttgtggacgccttcgaggtcaactttgctttcccaaacggaatttgcggattccagaacaacgggaataagcgggttcgccatgttgagtatgaaattcagtaccgcgtatatggttccggatcagggtggacgagtaagcagggggtgtacgcgcttaaaaacgttaatggcctcggttttacagagcgttttaatctgtcttctcccgggctggtggaggttcgatgccgccgccgtaacgagcaggggagtaacaacgcgagggacagcatgttctggcaggcgctcagaggtcgtttgctttcccgtccgacctcctacgcagggatatcaacaatagggatcacggttgaaaccggcggccagctggcggcgcagtcagacaagcgtgtgagtgttgtcgcgacgcgaaactatgatggcggtggtgacaggacaatcagcggggcattcctgcatctggcccgcagtctgggttatcgcgacgaccagatcgacatttccacaattaacatgcttgaggctaactactggacgccacgaggcgaatattttgaccatcaggcaagcagtgacagcacgtccgcaaaggatattttcgacaagatagctgaagcaggcatggggtattttctgctgtctgacggcttactttccgtcgggcgtgaaggggtcaaaagctggaccggaatcatcaccccccaggatactgtcgaggaaatgcagacatcattcagggtgccttcggaggacgattttgatggcgtggatgtgaaatacatcaatcccgttacctgggcggaggagaccgtacagtgccggacgcctgaaaatccgttcccccggaaaacggaggcttacaccatcgatgtcgtcatgactgcggatcgtgcctggcgtatcgggatgcgccggttaatgaaatatctccatcaacgccggacgtatacggctacaacagcaatgctgggatggtgccatgattttggtgaccacatcattttgtcagatgatattcgaaccgggaaaacccaaagttgcctgattgacgcaatgacatacgactttcaggaaataacgctacatgtcaccgagcctctggactggagctatacaaatccccggtgctggatacagtttcagaacagtcgtccatcgtcacggatgctgacgccgcagcggatagatgatttcactcttaccataccttacaacgacgatctgcacccggaagactggattatggacgaccctgatattgatctaccgcgtttgctgttctgcgacagtgaaaaaggtgcccggcatgggatagtccaggaggtagccccctccggtgacaacaactgtcagattaccgcgccggaatataaagaaattttctacgcctacgacgacgccacataccccggcgacgtctcgtaa

SEQ ID NO: 111852 - DNA, 1206 bp, Enterobacter aerogenes
atgtctcttcgtttcagacaaacctttactctatttcctggtgtgaggctcaacattggaaagcgtggaataagcgcaagcatcggggtacctggtgcgactgtcaatgttgggaaaaaaggactcagggcgactgtgggactcccgggtacaggcttatcttatactacatctaccctgccctatgatgattgccactcagttacgaatccattaattccgtcctcgacagaacctcattttgggtcgacggaatcatttccaagcaacactccatcgaacgctaaaatatacatgcccatggctggcatgaatgaaatttccagcgcttcggtagaagtcctgacaagctcctcccttttacctttacgggatttgattgctaaagcacgagaacaaagtgcagagataaaagcagatctacaagaagctcttgctgaagaatcaaaacaaaagaacgagttggttcggcgcaaatcaagtctacttcgttggttttacaaacgtcgcatcgcagaacttgagactgaactccccgtaacgcaagctgagatatctcgcctgttatcatgggaagacagcacaaaaatagccattaccttcgagagcagtgacacttcacagcgcgcatatgcagcaatggtccgtgcattcgatatgttaaaatctagcaacaaaaaatgggatatcactgctgacaaagcgacagaccagtttgccgaaagaacgttagcaactcgatctgtggatcgtcatcctgttacctttgactacagctcaacagatctcattcaatttacaggtcgtgcgatgcggtttgaaaatgtcaatggcgacgatatattgctttatcctggagttgcagtcataccacgtgttgatggggcattcgctctgattgatatacgcgaattacaaatcagtgcggaacatcggagatttcaagaggaagacggtgttcccaaggatacacgtatagatggccatacttgggcgaaaacgaataagaatggatcgccagaccgtcgatttaaagataactaccaaatcccaatttgcatttatggaaatattactttccattcccaaactgggttaactgaggaatatatggtatcaaatgcagatgccgcgcaagcctttgctgaaacagtacagcgctatcagacctcactcacagaatccgaagcgttggtacaggcctaa

SEQ ID NO: 111853 - DNA, 2133 bp, Enterobacter aerogenes
atggcctttaatccgccgttagggagcacgtctcccgaggtgttggtcggtaatgccaaacgtctcgatgaactggtgaacggccccgccgccgacattcccgatcgtggtggggatcctctggactcctggcgtttgataatggaacaaaaccagacacgcgtagagcaactggacgacatcattacctctcttgatactgcgagcttcactttcccggacgaacccgcaggcatcgctggcacgactgatggtcagtatttccgcgttcctcagggggaaggtaacgttgtcggatttaattattataaaaacagcgcaggtatggcagtcattgttgcatcagttgcatctgcagaaattactaaattgctgggcatgaccgatgattctggtctcgtacggacagtttcatctgatggaaagattacggaagtaaaaacagagaccggtgataattatctggcggggatggacgaaagcattcaggagatggcgtcgcgaagtggaaaagacagttcagttaatctccactcagctacggataaagacgggctacagctagttattaccgatgcggaaggtaagatccgcatccctcttactgattttacgctgcaggatctgctggcgcaggttcatcctgtcccggggccgtttctcaacacgctgagctccgctgataaggcggcatatggctatattgatgagctgggcggtcttaatctcccgggtcttccgacatccgttaacaatatgctgaacagcctgtcccgccgcgtgcagcagcaggcagatggccggtttctcacaagtatcaaggactatggctgggaccctaacagccaggaagatgcacgacaggtgattcagcgcgcaatccgggacatggcccgcaatccgtatggtggtgtgatttacttgccgccaggagtataccggctgagttctttcctcacgcccgcgccgaacgtatcgattattggcgccggtaccggcaaaacaatcctgatgccgtatggctcatattcggcgctccagttcaccacatcaccgacgaaccccatcccggaactgacggattttgtgtattccgattttgaggtggattgtcaggaccaggtgttgccggatgagggttatctccccaggactaaggggctgtattttaacttctaccgccgcggtcacctgcaccgcctgcgcgtgcgaaactctggcgctacggggattggcatcgactttgcgcgcgattccgcgattactgaatgcgtggtggagaactttggtcggctagcgccgtcgggtaacgataaccctgcgggggcatctggtctcggattaggggctggcggtacgcagagcgagccgctgtatgtcgcaggaaacttctgccgcaacgggaagaacttcggcatcttccttgagaaacagcacggaacaaatgcgccttacagctctgaacacacgatagtcaccggcaacacatgtacagggaataacgctggcctgggtgattgtggtgttgatggcatgatcgctaccaataacaacttctcagaaaataattatggcgtgattatcagtccgggaactgtgctggcatatcccggttcgcgcgggcgtctgcagtgcaatattatcgccaaaaatgctaaacatggcgtctattacaacagcacgactgagcagcgagacggcgaataccagattgacagcaataccatccgtgataatggcgaagatggaattaacctcaaagcgccaggccaggaagtccgcagcatgtttatccaggggaatgacgtttatcgaaacggacggcatggtctgaacctggaagacgggacggcgatcaatatggatgtggtaaacaaccgcttctggaataacggcctgaccgcttccgggaacggaattaatctggcctcagaagttaagatcagctcgttcagcgcaaataaaattcgcgacatccagtctacgcctactcagcaatatcctgtttatgccagcggtacgcttaccgatgtcgatatttcatttaaccactgcgtgggtaacgcgcagaacacactaaatctgaccggtacgcaaacccgcgtcaccactctgaacaatccaggaatctga

SEQ ID NO: 111854 - DNA, 1401 bp, Enterobacter aerogenes
atggcaactcaaatcaagagcaataaaacttatcagggcgatgctgccgcacttccttccccacaggccccgatgccgaaactggccagtctttacctggactttgagaaagagctttatattgccctcggcagaacaacgggtaatgcaattcgctcccgccgtctggctgacgtggtaacctttactcgcgcatcagaaaccacgcgggtaaacaaaagcggccttatagagtatctggcgtccggtgaagctgcgatcgaatatgatccgattactggtgagtgcctggggcttcgcgttgctgcaggggtaactaaccttgcggccaacagtgaaaacttttctggcacgacctggacaaaatcgggcgtgtccaccacggccgccaaaacaatcgcacctgatggtaacgtctctgcatcacccttcaatgaaagcactgacagcgctgatactgtgcactttatgcaggaaaattccactccggccgccaccgtgggaagtcctgtcacattcagtatttttgcgaaagcgaataccgcgagtgttatccagctggtcgctcagggtgcagtaacaacgacgcagtttgctaacttcgatctggtcaacggcttaagaacccgtagctcgtccggcatcctgcagacaagtatgcggaaatataaaaatggctggtaccgtctgagtatcaccattacccctgcgggcaaagcctccccgcagttcacgctggcgcttgtgaatgatgtgacatcagccgctgcgttgccagcctatacaggttcagggaagggtgtttacatctggggggcgcagattgaaaactgggatggagtgacgccatacattccgacagctggcgcaactgtgacccgacctgatgaggtctgcaccgttcgtaccgatcttgattttctggctgctgaccgcggggcaatttttgctgattacaatatgcccgccagcctgcaggcgatgagtggtgtctataacgccgggcaggcaattgtctgtcttgataatgacagtgtcgctgaatatgtcagttttctgaaccgcagaatcagtaacagtatcaccaaccagaatctggcggccgccgcgaaaattgtcggcagttctgaagttacggttgaggtaaaacgtctcggccaggtacgaaacggccatcagtcctttatcagttcatttatcaacggcgatatgcgtgtatttgacggcattaacagatacagcggaacgccactggtatcaacacaactgaaccgactgatgatcgggcgagcaagaacgacaccgtcagcggtttccaatacatatctcaaacgcctggtgtattacccggtcacgttagtggaagctgaattagtatctcagtttaattcactctcctag

SEQ ID NO: 111855 - DNA, 1419 bp, Enterobacter aerogenes
atggcgactatcgtacaaagtaatatgaagcttaaaggtaatgtgaaattaccgtcagtaaacgctcctctcccggatggggctaacttattcgcggatttctccaccggtcgctatgtcattaaacatgccagcggtaacgttattcgttcggcatcactgacagatattctgtcattcactcgtgccggcattgccacaagagtaggcaaaaccgggctgattgaatatcttgctacagatgagccagcgattgattatcaccctgtgacgcatgaatgcctcgggttacgcgtagagctgtcatccattaaccgtattgcctggtctcaggatttcacaaaaatggcaagctggacgccaaccgggattacgctgacagccaatgatgctgtctcccctgatggtaacaccacagcaaccaaaattatcgaaacggctggctcctccgtatcacccagaacgctcctggcactgacgaccagcgacgccacagttgccccgtatacgttcagcatctttgccaaagccaatacggcagatgttattcaacttgcggcgcaaggtgcggtttcgcctgtggccttcgccaacttcaacctgcgtaatggaaagattggtaagatttcagcggggtcatcaacccttggaatgttgcagacaacaatggaggaatacagtaacggatggtatcgctgcgccattacgataaccccatcatctgcaacctctcctcagtttacggttgcgctggtgaacaatgacagtagcgcacaggcagttccgtcttacactgccgtcataccaagatcggtctggatttggggggctcagccagagcgtaaagatggtgcgacgtcgtatattcccacggcaggtgcagaagttacccgcaacagcgacatgtgcacaacgccatccacaacgcagtttatttctgcagccgcaggaacagttctggccagcgttgttcatccgcacagcctgcagcttatcagtggctcgtatggttcattatcgtgtgttgtcgtactcgataatgtggctgaaggacccaacatccggttttcgtatcgcccgccgtctaaaggtgccgctgagggggctgctcttggcgtagcgcctgactcaacagggatcgcacagaaccttgaaattcccagcatggcatcggtaagggacagtgagcagtcatgcatatttgcctttgacggcgccgcgctgacaaccaaactgtttgatggctataactggtattccaggtccgttaccgcattccctccggcgctttctcgcctgtgcattggccgctcttatatgggggcaacgaattactttaacgggcatataaggaaaatcatctactggcctgctgcgctgggtgatgaagaaatggaggagattatttcttatcagtaa

SEQ ID NO: 111856 - DNA, 1986 bp, Enterobacter aerogenes
atggcctttaacccggagctggggagcacgtctcccgcagtgctgctcgataacgccgagcgcctggataagctggtgaatggtgatgcgccgaccgaaccggaccgcgctggcgttgatctggatacctggcgcggaatgatggcgaaaaatgatgaagttcggcaaaacatcattccgctgagtaagcagtacatgacgctggctgcagcacaggctgatatcgcgaacatcccggagggcagcactacttatgtgcgcagtcctgatgatagcgccctggctattgaggtcatgaacgttgccgggactctacaggaaaccggaaggaggatgatctcaaaggagtatgttgatgcgctgaaaaagcttatcaatgtctcatcggataacaatctgaccttttttaacgatgtcgatgatgccactgtcacagtgcaggatgatttcggagatatgcacctggcggggatgccaggttctgtccgggaccggctaaaaacacttcaggcaaataaggccccggcaatccttcgcctgactgatgctgagaatgctgcctacgcctctgttgatgagtatggcgatatttatgctccggaaatgccctccgggattcagcgattattactgggaatgaaaaaggacgtcgatcggcttcgaaagcgcgggatggttcttgacgccagagactgcgggctgaatacgaaaaccggggaagactctcagagagcaattcagcgcggatataactggttatccgggaatggtggcgggcacctgtatgtaccggctggctatttcaagatggcaattcctgtggtgccgcgttcaggcgttgcattgcacggggccggtattggtgcgacaaactttctaccctatggctacctttcggcgtttgagtacacaggagaagaaatttatatcgaaaaccttcagtttaccgacttcaccatcgatggcgaaaatcagcaactccacccgacaagaggttatattcccaatattaaggggatcctccttcagtattacaggaatactgtttttgaccgtatcaaaattcagaatacgggggcgacagggttaggtaccgatatgccggataatgtgtctattatgcgggtggccactgaaaactgtggacgtctcggcgttgttggtgatctaggggcctccggtatcgggctggggaccgggttccttaacagtgagcccatctttgtttatctgacggtgaataaacacaataaaaactacggcatattttatgagccccagcgcggcgtgggtgtggcccgcgacacgattgcggtcgggaatgtgtgtgagtacaaccatgcgggaatggctgactgcggcatagatggtctcatcgcgatcggcaataacctgcgtttcaatgaatatgggtttaaaggctctccgggaacaaacggcgcggggaaccctggtaaccgtggcattctgaaggacaaccacatcaacggcaatactaaacacggcatttatctttatacggacaaagggattgctatagagggggaatacaattactccggtaaccgtatcgctgataacgagcttgacggcattcatgttgaatatgctcatacgtccgcgaagttactgaacagtaagtttgcggataatgatatttatcgcaatggtcgtcatgggcttaattttgtcagtggcaatctggttaatgttgacattatggataaccggctctggaacaatggccgcacagaagcgggtgatgccatcgctggcgcagcggatatggtgaaatgcgggattaccggcaataaaatccgcgacacgcaggacactgcaacccagcgatacccggttaatctctccggagcactgacagataccgatatctcattcaaccattgtgttggaaatgcccagaacaccttaaatcttaccggcacacaaacccgcgttaccacgatcaacaacccagggattgcataa

SEQ ID NO: 111857 - DNA, 1914 bp, Enterobacter aerogenes
gtgtcaattgaaattaggggtcaagcgaaacataaggatttccttttagagaaacccgtggtatttaatgaaaacattatcttattaacgggaaggaatggatcaggaaaaacacgttttctagaaagcattaaaaatcaatgttccaccacacatatacaagaaaaccaagttaacccaacagacataattcttattatggatgctagtgttatattaaaatcaaaggaacaatacaatgatgaaaatcacagaaaatatattgacacctgtcttcacctatttgatcaatacaagactcatatagacagtccggcaggtgcgcaagagcctgaaccattgagaagatctacttctgatatagattattattcattatgtcagatacttgatcttatttcaaaaaagacaggaaagaaaattgcagatcttactcatggtgatataatactaaatttcgaactcccaattaaaaatgcgttaggcatgccaaatatatcagagattgtcaacgcatatattaaaagacgtcatacaaacaattataatatgtggctaaacacaacccaaaaacaagccaccccattttggagtgatgctgaattcattgaaaaatacggagataaaccttggattataatcaacaaaatactttatgatgtttttgatgggaagtttgaatttcctattccagatgaagactcacacagttataattaccaggcaaatcttattcaaagaagtaatggaacttcagttccagttgaaaacttatcatctggagaaaaaatattactttggcttgcgttaactcttttcaacacacaatataatcacaccagaattgttaatactcctaaaatagtgttaatcgatgaacctgatgcatttctacatcctaagatggtcttaaaaatgcataacatcctaaactcttttgtaaaacattttaattcaacggtaataattaccactcactccccaacttctgtagccctagcgccagatgagagcatttatctagtcgacaataatttagtacaaaaactagaaaaagatcgcgctattactgagttattagatggcgtaactcaaatatcactgaaccctaataaccggcgtcaagttttcgttgaaagtcaatacgatgcaaatgtttatcaagagttattttcaaaactgatgcatcgttcagaaaagattgaccctaaaatatcattaacatttattagttcaggagcaaaaaccccaaagcaacttttaatcgataaagcaattcaagttttaaaaatccaagataaaagtttaatagaagagtttgccgaatctgtaaatggtgttggtgattgctctaaagtcattgggcaagtagaggcgttagttgagaatgataatgacaccgtcagaggtattatagattgggatttgaaaaatcatgcaacagaacatataaaaatttttgctgaaaattatgcctattcgattgaaaatgtaactctagaccctatttgcattcttcttttgttacatattgacaagccagaatctatgaccatggaaaaaatatgtggggaagacatacactggtctaaatggatttgcgacgaaaaattattgcaatcagccattgatctttttatgatgcatgtcctagaaagaccgaataaaaaagatagagtcttagattacgtatctggaattaaattaaatacagactctgagtatttagaaaaaaatgggcatgaattagagttattagtcaagacaaaatataagggcctggagagtttttgtaggaagaaaaaagaaggtgaactaaaatctgccatagtaaatagatcaatgataatgttaactgattgtaagtttataccaagtatatatattgaggttttttcccaagtgcagaagtag

SEQ ID NO: 111858 - DNA, 753 bp, Enterobacter aerogenes
atgctgcaaaattcggctgaactaattacaaatcagctatttgatagattgtttccatccattgagaaaggcgaaaatctcattggtgaatttgaagtttttggaataattcgggatgcaaagaaaatacctgagaaagacgaatctttgtctgttcaaggattggcgtggatcgttcttggtgatattgataagggttccgaactatgcgagcaagctattgaaattaaccctacagaaagtgctatatggataaattatgctgtggcattaggccagcgaggtttttacgctaaacagcgatcagtattgaaccgtagcactatgacactcagtccatcactactacttttcgactttataatttcttctttctgggctgattataaagaaatgagtcgtattaaggatatgttcgtaagtcttgatggcattgaattaaacgataagcagaaggaagattatatgatggctgaggctatatataatactcttgattctctttctgaaaaagaaaggtgttctctatcagagatggcaaacatagcaatggatgtcttatctaaacacaatataaaaacaaagaactcagggcaatacgtggccccggatggaatgctatcgtttaattatgatgtttttgatgttcctgtagacactatcatcaaattaaatgatgaactagcaaataggatcgttgagcagggactgtacaatgcccaatccatagtattatttacgccgggtgtttaa

SEQ ID NO: 111859 - DNA, 570 bp, Enterobacter aerogenes
gtggaaaatctacctccggattacttttttaatgctgacgataaactcgtggactttcttgagaagcagggagaggaagtagttcgtgagattcaggcatccaataaaataaacgtcgaaaatggttacaaactactgagtattcagattgtcggaattggttcttcttttctactacttacacaacaaacgagctttgatttcctcgcagcgggcgtagcgacttttacggttctatggacatggtgtgctatttacttagttcactcaggattgtcagtaaaaatgagaggcctgatatatgcgccgcctcaagacctttataaccagggcttcaaagatattgaggaagcaagttatcagatattctttgatgctggatacaagggggaagcaacccccctacctctgattaggcgataccggcttgctaatcttaacgatacagccaatgagttgcttttacagaatgaaaaaatccgcaattgtttagataaggcgaggatgtttactatcctcgccccagtggtggcaatgcttatttctgctgtttttttaagtattctttaa

SEQ ID NO: 111860 - DNA, 213 bp, Enterobacter aerogenes
atggaacaaaacaccgcagcggtaacgcataacaaaatacaggtagttctgactatcgaaaatggtcaggtcattgatacccgaaacgtccgcgataacgaattaatcgcaagcatggatacgtttttatggatggcgaagaaagccgggtatcaggtgatcgcccctaatcaggaggaagcaagtggcactaacagcaatacgcattcctga

SEQ ID NO: 111861 - DNA, 642 bp, Enterobacter aerogenes
atgaacaaattcgaaattgaccattttttagaatccaaaacctcgcgaataaagaagaagaggcttatttgcggcattgggcgttttgatgttgatttcccgtgtgggatctggatagaaggtaaatgtcatcatcacagcgcgtacgaagtctggcgtcacatgcttcaacgttgctacaaaccgaacacagaccaggacgcgcgcatctacgcagaatgtactgtgtgcgatgagtggttttatttcagtaattttctggccttctggaaagcttattaccgtgaaggctgcgcattggacaaagatttattacatcctggtaataaaatttattcaccagagcattgtgtattcattccgcaagcactgaacagctttggcgctgaccacaccagagtgcgcggtgaattgccgcagggtgtgagttggcacaagcggcgcagtaagtttcgggcgaaaatccgcataaaagggaaaaccaaacatctcgggttgttcgacagcgcacaggaagcgcatacagcatggcatgcagccagaatgcaacaggctcgtgactggaaactagtctgcgatgaaatccatccagacctgcacgccggattgatgcaaaaagtagccggagaaattaaacgatga

SEQ ID NO: 111862 - DNA, 414 bp, Enterobacter aerogenes
atgatcgacaaccgcacagccagcgccatcgacctggcactacagaaacacgataccccggccggtcctttgtttgtagctcaacgccacggacgtatcaagaaatgctttagccgggataccgccattcgctatctggctttcttcatgaccacctgggcattcgaggcatcaggctttaagtgccgccaccctcgagtacgtatcgatcgtgacgatatggaagtctggcgcgatggtgaaatacgagctgagtatcaggctgcccatcagcgttgccttcgcaggctgcgtcgcatcctcgcccgcaagcgtgagatccagaactggcatgcgaaatgggatcgcatgcatgaccgttacatcaaagaacacgacgaactccaggcaactaaaccggaggggatccagtag

SEQ ID NO: 111863 - DNA, 1800 bp, Enterobacter aerogenes
atgggaagtgtgatcgtcaccatgatttatcattttcttgtatcgcttcaaagaaagttatcggcggtcagtgtatgttacgcgctttcaaaggttgtgtggtttgcgggtatgtacgagttcgatctggtattgctgctgctccagcagatgtgcgtgtttctggtcatcgcctggctgatgagtaaaacgcgcctgttcatccccctgatgcaggtcaccgtacgtctgccgcataagttgctgtgctatgtcaccttctcgattttttgcattatggggacctatttcggtctgcatatcgaagattctattgcaaatacccgcgctattggcgcagtgatgggcggcctgctcggcggcccggtggtcggcggcctggtggggctgaccgggggcctgcatcgctattcgctgggcggaatgacggcgttaagctgtatggtgtcgaccattgtcgaagggctgctcggtggtctggtgcacagcatactaatcaggcgcggccgcccggataaagtgttcagcccgcttaccgccggggcgattacctttttcgccgaactggtgcagatgctgataatcctgctcattgcgcgaccctttcaggatgcgctgcacctggtacagagtattgccgcgccgatgatggttaccaataccgtcggcgccgcgctatttatgcgtatcctgctggataagcgggcgatgtttgaaaaatacacgtcggctttttccgccaccgcgctgaaagtggcggcctctaccgaggggatcctgcgccagggattcaacgaagaaaacagtatgaaagtggcgcaggtgttgattcaggaacttgatatcggcgcagtggccatcaccgaccgcgagcggctgctggcgtttaccggcatcggcgatgaccaccatctaccaggtaagccgatctcatcatcctatacgcaaagggcgattgataccggcgaagtggtttatgccgacggcaacgaggtgccgtaccgctgttcaattcaccctggatgcaaactgggctcgacgctggtgatcccgttacgcggcgagaaccagcgggtgattggcaccattaagctatatgaagcgaaaaaccgcttgttcagctcgattaaccgtacgctgggggaggggatcgcccagctactgtcggcgcagatccttgccggtcagtatgaacggcagaaggcgttgctgacccagtcggaaattaagctgctacatgctcaggtcaacccgcactttttgttcaacgccctgaacacgctgaaggcggtgattcgccgcgatagcgatcaggccggacaactggtgcagtatctatcaaccttctttcgcaaaaatctgaagcgaccaacggagatcgtcaccctggcggacgaaattgaacatgtgaatgcctatctgcaaattgagaaggcgcgattccaggataatttacagatacgtatgcaggttcctgcatcgcttgaacatctgcaactaccggcgtttacgttacagccgatagtcgaaaacgcgatcaagcacggcacttctcagcatcttggcgtgggcgaaattaccattcgcgccagtcagcatgagcgttggttacagctggatgtggaagataacgccggtctgtatcgggataaccctaatgccagcgggctcggaatgagcctggtggacagaagactgcgtacgcgcttcggcgccgactgcggaattagcgtcgcttgcgaagcggaacattttacccgcattacgctgcgactgcctctggaggagaatgcatgctaa

SEQ ID NO: 111864 - DNA, 1632 bp, Enterobacter aerogenes
atgtcagtcagctataacatatatagaatgccatataagagtcttccagaattgacaaaaaaaatcattaaagaagggcttgtcgaacaaaaaactattctacatcaatcttatcaactcaaattttatttttctgataaattaaaaggaaatgaagtatggtggtgggatgtttttagtgatttcttcaatgaagaaattgaaaagcctcataatatattctattttggcctgctaataggatttaaagaaaaggaccctgagaattgctatcttatcagtcttggtaaatcacatttttatctcagcaagtttattgaagcagactttgggctgaatgtggcaatgcgtatagctaatgatgaaaatattttactcaagaaaagcagattcttttgtgggggaaagagtcaggaggcatcctcatactcacagtttgttcaaggagcatattttcctggcgaatccatcgagcatctcaaaacaaaagccaaagaaactgacaagtggggatgtaataatataactttttctgattcaattcagctaagtttggatggtgctcctactgcattagtcgatgttttcaatgatattgattcttcgttggcaaccaaagagaaaatcgaatttcctaaatcggaaaaaatcactgacgagtcaaagatagatgagcttgataattatctacttcaatcgatcattacagatgatgcaaaagttattattgatgagattcaatcttttggtgcctctattgtaattaataattctttgacattttttaaattgcacacaaaagttgaggggagtggaaagtatcttcaatcatcagataaaattaatgacataaaaatagcagatgtaaagaaattcataaaaaataacaaaataaaagatgtcaataaagtttttgttaagataactaatgaaaataacagtggtcatacagcctcgttaaaagaaatattgagcattacttatagcgagggcagcgagcacttcttccttaagaggggaggatggagtcgatttaactctgcttttatgaagtatttgtctacttctttagccagtataaaatttgaggttaaagatgctcttaaggaagacgacttcaaagtatggcaagctgaaaaaataaaacaaatcgcagaaggaacttctaaagataaattagaatatagagaatattattttaatgaaaagatgtctgatgagaaaggttatatacttctagatcgccagctaaaaaaaataccatccttacgtgataatggcaaggactacaatgttgaagttgcagatctttataaaaatggagagattattgctgtaaagatatcagataaaccgcatgatctaatttataatattgaacagtcaaaaaccacaattcaaactatagtaagaggagtagtaaaatttgaagagacaattactgatgtggttttatggatctcaactactacaaaagctaaaaaattaattgacatcaattctattcaatttttattagcggttcaaacttggaaggaagttgttgaaggatttaatctgaaaccaaagatatattattcacatcacgacaaaccccaaaagaaaaagggaaagaaaaaaaacgcatcttaa

SEQ ID NO: 111865 - DNA, 705 bp, Enterobacter aerogenes
atgctactttccgcattccatgtttcaacccctactctggtttataaacactggttgaatggagctttgtactatttgtttaatgcccattccactgaaaaccagatagatgcaaggaagtacctcggttatctggagcatctcgcctccgcgtttgtctttcaaaacttcctggcagagcaagaaccaaaatcatattttgagattatctacggtgaagaggcacctctccaacctgtggtactgtcggacaagactcagaagaagatgcgctttggtatgatagcaaacaacctggtattcaattacctcgactacttactttggtgtcgtgacagaaataaagctgaggtagtgaaacgttttgaatttaccttccgaagttcagtagagcatttctaccctcagcaccccatggacggctttaggacattaccagatacatcgttgcattccttcggcaaccttagcctgattagccacagcaagaattcgcgacttagtaatttccagccaaaacaaaagcatgagtacttcgaagcgagccttgagcgtaatgaaattgatagtctgaaactgctcgctatgatggagctgatgaagaagaacaatcagtggggggaagaagaaatcgccactcacgaagaggaaatgctggcagtgttaaccagtggtagtgatagcgtatttagggaggtgttatga

SEQ ID NO: 111866 - DNA, 1482 bp, Enterobacter aerogenes
atgagtgagatgaaggcgcttcatgaatcacttttacttgcttgtgatttgtttagagggaaagttggctcatcttcttataaagattatatattttcaatgttattgctgaaatatatttctgatgttaaggctgactatgaatatgatttaattaatgaagaatattctgagttgttagagattgcttctcgagtaccagaggatgcgagtttttataaaatatatcatgaggctaagaatcatggtgattatattggagagaggattgacgactcgctgaaattaattgatcaggctattgattcggtctgtcaaagtagaggtggttatttattcgagtctatacaatttgcgacggttaattttggtgcaagatcagcgagagatcgaatgcttgttaatttacttgctatttttgcacgtcctgaaatgaattttggttatatgcaaggtggtaatgaaaagataaaagtagcatgtagatatctttttgaaaagattgcatctgactcggcgatgaggggtggggatttttatactccagaaggtatttcattactatttgcagagttattgcagcctaaggatggagatagtatttgtgatcctacttgtggatctggttctcttttaattaccctaggggaaaaaataaaaaaatcctttaaaagcaataactataccttgtttggtcaagaggctaatagatccagttgggccttggctaaaatgaatatgattatccataacgaaattaatagtcggatagaatggggggatgtaatatctaatcctcagcttctggatacagataatagattgatgcagtttgatgtagttgcttctaaccctccattcaatattatcggttggaatcatgatgatttagtacataatgattatggtcgttttaatttaggttttccacctcagtctaagggggattatgcctttattttgcacatgatttcaacacttaaaagtgcaactggtagaatggccatactggtatctcacggggtattgttccgtggaggtcaagaggagagtatcaggaaaaatttagttagtgaagggttgttagatgcggtaataggtctaccagataggttgcttcttgggacagggataccatgcgccattttgatcttcaggagagataaaaaacattctaatgttgtgttcatcgacgcatctgatttggctaaacccgtaaaggggcgcaatttaataacaaatgaaatcattgagaaggtatcagaatgctactttgaaagaagtagtatcagtaatttttcacatgttgcttcttttgatgaaatacaagaaaatgattttaatttaaatatatctcggtatgttaagaagcatgaagagcaggcttttgttgatcttgagagcttacgtcaacagcgtgaggaactactatcaacattgcatgaattagaaagagaaatgaaagattttattgataattga

SEQ ID NO: 111867 - DNA, 603 bp, Enterobacter aerogenes
atgcataaaactgttacattagagagtgttgctgagatccgcttagggatgccctttaaatcggcgatacaagatgctggtgagcaaggctcctgttatcttatccagacgaaagatattggacttgacggcattttagatctaggtgctttaacctctgttatcccagaaggtaatcctgagaagcattatcttttccctaatgatattttattacgtctgcgggggcctgtgttttctgctgggattatcgaaggaaatttaggcaaaccaatcattacgtccaatcagttagcagtaattagatgtaatgataatctaatactgccacattatttacattggtatataaactctacttctggaagtaaacatattcgcagtttgagtgaaggtacgagtataagtaaacttaattcaaaaacagtttctaaaatgactgttaaactcccaaatttgggggttcaagaaaagattggttctattaatagaaactggaataaacaaaaaacagtttataattcactaatacaaaatggcaatatgctctttgatggtatatgtgaaagtatcattaatagcgaggagttagaaaatgagtga

SEQ ID NO: 111868 - DNA, 249 bp, Enterobacter aerogenes
ttgccgctgctatttacccgaaacattctgaccaaaaccgctctgagaggctctaacaaaatgaacgagaaaaaatatcaatccctgcgtaaaaagtcaataagtaagggggggaatatggcttgtattgttatgctggtacacgcgctctccttttcctcattgcagatggatttagatgtacgtgtgggggatgtgaattggaaacactcgattgtgcttaaaactactggaggaaagggagagtaa

SEQ ID NO: 111869 - DNA, 222 bp, Enterobacter aerogenes
atgactgtatatcttggtatcgatattgccagtaagaaatttgatgagcagaactctgtgacgggaattaccgatgcaaagcttttgaaaacacatccgctggatttttggctctccataaatggcttggtcagagcacaatgccagacattcacgcatgcctggaagcgactggtaactatggcatttcactcgccacatttttgtatgaaaataagataa

SEQ ID NO: 111870 - DNA, 609 bp, Enterobacter aerogenes
atgaaagttacatggaccgtcacgcctgtggggtatcagcgcatcgcgaaacgatgcccttcatgcaacattaaacgggacttcacgccgtcaggtgcatttcgggttaattcgcaaaagaaggtgctggacgtgtggagtatctataaatgcacacactgtgattacacctggaatatctccctgttttcgcgtctgcacgtcagcaaaattgaccgccagctttatcatcggctaatgacaaacgatgccgccacggttcaacattttgcctgtgatatcgcgacgctgaagcggaacaacgccgagctatcgggtcggcctgattttaccgttcaggagcagtggttagccagcctttctcccggcaaacgggtcaaggttagaatcaggatttcccgttcttttcaggtcaacctgctgtcgattttgcacaagcagctcatgctgagcaccggcgaaatcaagagatacgttgagttagggaaaataaggggtatcacgatgaaaatgcttaaatcgcgaaagctgaaggctgcggaatataagtttcagctgcctgcggaaacgctgttcgcccggcgcaagatagttctgacacatcgttaa

SEQ ID NO: 111871 - DNA, 219 bp, Enterobacter aerogenes
atgaaatttcaaatcacaagagcaattggcctcagtaagttctctccacgttgggttaaggttatctgcttacggttaattaaaaatgatattgaacgctctctcaacgttcttctggtcaaaatcgatgaatctgaactctctacggagcaactcaaagcgtttaaggaatgcgttgaaagaattaacctggcacggggtaagggaatgcaggcgtga

SEQ ID NO: 111872 - DNA, 201 bp, Enterobacter aerogenes
atgaaactgtccgctatgagcgaggaatggaagttgaacactctgctcaacgtcgccaaatggagccttaacctcccagtttttcgcgagtgggactttcaaagtagatgctacttatatggcaacaacgcggttgacctaacaaaaaacgaatggtttcccagatcgagcgccccttcattaaacgttccccatttttga

SEQ ID NO: 111873 - DNA, 921 bp, Enterobacter aerogenes
atgggtgaattttcaaaatacgttggtgaagtaggcgaagatattgtcaatgattttctaactctatttggttggcgaaacatgtgcaataataaaaaagtagattgctgtgtttcaacacatgaaaaaataacacatggtgtcgatgctttatacgtatatgattctctacttcaaaaacagacattagttagtgttgttgtttctgctaaatattctgcatcatcttacaccagtgtcaaatcaacctttagagatcattttaaagatattgccaacacaattgaatgctacaataaatcacaactaaagaggaacattacaaaaaactttaaaggcagctctcgaaaagaagatattggtgtattattttatttaaacaatgatgagaatgaagaaaaagataacattaaaggtaccatagcaaataccagaatagataacacattaaaatttaatacaattcatgtcattgataatgcaagagctaaattcttatttgaatcattaaacttcattagaaaaaaatataaagattgtgattttttttgcaacaatacaacattaaatatagcgtcttcaaaaacacacacaaaaatcatgccagtagaatatatcacatcaccaataatccctatatctgttgcatctgaaaatggtcgaagatttattttactttgcgatttcgattttagcaaagagtccctaattcttgttttcaatttagccaggaaactatgctctgacttttcaagtcactatgaaatatactttaaacaatataacgcgctcaccgatgatcctgtaatagatgaagttaaaatgtcacaaataaatgaagatgatgacatcttagagagcatagatgtacaaatctcatcttataattccaacttcaggaatatcaaaaatgagaaataa

SEQ ID NO: 111874 - DNA, 1131 bp, Enterobacter aerogenes
atgagaaataaaattgactttattccatctggcgacgaattaaagaatctagttggacaaatgaattgcacagccacaataattaataacatattgcgggagagaggggttttctgctcttcttcagaaaagaccataacggttcccaatctaataacttcttttttgagtcctgaagaatcctatgaattactccaaagcattaaaacaaaagaaaaattagataaagttaattttcgtaattttgagattgataatgacgctgaacttttagaagaacttagtggatgtatcgatgttgatgatttaataagtaatgaatatactaacattgaaatttctgattttaacgattttacatcattagatggtaaatcaaataattctataataatggagttcgagttatgtcgtaaagatatattagatgattggtatatcaccgagaaatttttcagaggttctgtagaaattaagaaagattatgatggcgaacgtgcccaactattaatgaatgttaaattgaatcatacatcgccagaaacaaaagaaatatctgaacgaattgtgtcgttagttgaaagtaaactccttaaagatcaaatcatcaaagactcccctcatggcgggaaagtactctttaacgattttgaaaatgaatatcgtgtatcatttttaagcgaacttgctaaacagcatattgggtatgaattttactataaaaaaattgatgatgttcatttcaatccagataaagatgcagattactctacacaacctcaattagtaaccaatttccttgaaaaagatattgagcaatatcgagttaaaggggatcttgataaaatcatatcaataaaatggaaacatattcacccatacgttaaagtaactaaagtattagctagttatacaattgcacatgggaaatatgagggcgattgtaaagtctcatatgaatttagcgattacgggcgtaaaaactctctcaatccagaattatgcattactgttgtaaacataaaaatgaaaggggcctcacaagagagattgaatgaaatacaagacttaataatgcgacaaatcgagacaagaaaagctgaattactccgtaagtacaaaaaatcataa

SEQ ID NO: 111875 - DNA, 480 bp, Enterobacter aerogenes
atgagtgatgatttcaagcagcatccaattcagctgaaagcgctacaagttcttaagttgaacatcgaagttcacgacccagtgagagctttgagtgacaattactctttagttgaatattcattagaaactgggcgttcggattttgatgagagtgacaacacaattcaagtgatgatgagaattcgtgccggtaagcttgcagttgacagcaaagcaccagcagaaaagaatgaactcttcgcttctgaaccagtttcatttcttgtcgaagttgggggggtttttgaggtagatcttgaaacgtttccaaggagacaaattcatcgattcgcagaacgcaatgcgcctctgattatctatccatatgtccgtgaacaagtttatggtttaagtactagggtcggtattaaacacatgttgttaccactgtttgaagtccctgcttttaccatagcacaagcacctaaatcagattaa

SEQ ID NO: 111876 - DNA, 294 bp, Enterobacter aerogenes
atgaaccgagaaatgaaagcagcaatggaagctgcattacaagatattctggctatgtccccagaggattttttagctgccgcgaacaaaactatgtccggtgatgttttcgaatttttgatgtccacagggaagtttgagtctttcgatttaaagcaactcgaaccacatcaaatccaattcgctgaggctatgcctgaaaaaatcgttgatatgttaaccaaaatgagagtttacgaggcccgcgtcaacgtcgatgcctttgactcagatgatttcgcattggcggcttga

SEQ ID NO: 111877 - DNA, 606 bp, Enterobacter aerogenes
atgaataatatcagtttagttcccatagaagcggctaatgacccgatccaactgtacgaagcgtgtggttctcatggaacctgtcgttctagagctgaatcaatcctttccgaagggttcaagacaggcacgaaaggcagacgtggtgatggtgcttatctttggtatgctgaatcagtaggttgcgaatatgcaacacagttagcgcatcattggtttttatcatctgtaaagcgccgagagtttgaaggtgatggggatcaaagtgaagcgattctatggggtaaggttagtgcgccacccgatgaagttcttaatcttgagcgtcctgagttccgtgacactttaagaaaagctttagcacggcattggactacaattaactccaaagatccgaaagagaaggaggcgttagtatgctctatacatcaaatgcttatccaaggaatcgagactactaagccagtaggcgttgtacttgctacggtaacgccgcctaagatgcccgatgaactagctggctatgtaggacaaccatatgccttgatagttagaaatttgagctatctgaccatatttagtgacattgagagggttccatcatga

SEQ ID NO: 111878 - DNA, 942 bp, Enterobacter aerogenes
atgaacaggcatgttgaagtaagctctatcagagagggcgtctatattttgtggtacctcggctatactgatctagccagcttgtatgcatcagggagtgagagagaacttctccgtttcaatggagccattaacagacttattgagcaaatattaacagaaaatgataaatcagagatcattcggaattttctagaaaaccagggaatgtacagaaagtactgtgttgatgaaacaattgcctcctggttctctcatgatgaaaaatccagtgtctttttctggctttatcttttaaaaaaattcagagaacaacagcttggtgatgagatcttatctcttgctggcaacagttatcatgacaaaaaaatagtatgtgataaaaataactcaaaaattaccgttaatgaacttccaatccgaacgccagataatccaaagaagtgttttatggctggattatatattcttgacctgctcagcttttcacctgacaagttgcaacgtacactcgacgaaataaaaatcgattactcgcatataagagacctccgccgaaaagattttgcctggtttacagatgctgggccggaagatgtcaaatgggtctggaaacagttcaatggtcacccgaacttattaaataacataaacaagtgggatcttaatgagtctcttctgtctcaggctataccattactttactacttatgggatggtcgagaagacacgaaagctctttaccttaatacattgcgtaagcgttacgcaaatatgaaacatcgtaagaaagttgccgataaggcaccggttaatattcgtatatctaaaagtgcaaaagagacactggtcaaactggagaagcgttttaaccgtaacagggctgatgtcattgaatatttgatagaaaaaaactgggctgagctgaatcagaaaaactaa

SEQ ID NO: 111879 - DNA, 546 bp, Enterobacter aerogenes
atgcgccattttttcacaacgtaccgggactcgatcctcgcatctgcgggcatcatcattgccattatctcgcttgcattcgctatctggcagggcagagaagaaatcaggcacaaccatatttctgtagagccaaggataaatgcctatttctctaacgatggtcgcaaaaatcagtggggaatttacgtcatcaataacggtatgggaacggcctttgttaacgggctaaccgttacggtcaatgacaaacccgtggatgccattgataacaatatcttcgtgggggccattcaggcactgggccttcacgctgaatgttttgtgattggtggcccgcgtccgaatgattccttcaaggttggagaagaaatatttctggttgaggcaagagggttagataaaaactgtgctgaagaccgactacgactgaagtgggcttcacaagatccacaccagctggactttgtgctggatacggaatccatctacggtgataaatttcgttatacctattctcagaaccgtcaggtaaaactggattaa

SEQ ID NO: 111880 - DNA, 1338 bp, Enterobacter aerogenes
atgacactgaacgagaaaacaatgtcgatgaaacaggaggcagttccacttggttttaaacaaacagaagtggggataatacctaaggattggatggtaattaatatagccaaaaccatgaaattaattaatggttatggtttcaagccatcacaatgggaaaaagaaggcttaccaataattagaattcaaaatcttaatgactcacatgcaccatataactattttaccggggttattgatacaaaatttcatataaaaaaaggcgatttactattcgcttggtctggttcaaaaggagtttcttttggagctagagtatggcaaggaaaaaaagcaatactaaatcagcatatattcaaagtcatccctgatgaaaactttgttacagcaagttattcctattacgtacttcgaaaggtccaagagcaaattgaaaaaatggctcatggatttaaatcatctttcgttcatgtaaaaaaaggtgatcttgaaaacaccccgcttccaatcccgccaaagaaagaacaaacagccatcgcaaatgtgctctccgataccgatacactgattactaaacttgagcatttaatcaccaaaaaacattccatcaaaaccgccaccatgcagcaactgctgactggtcacacgcgcttaccgctgtttgctaaacgccccgatgggacactcaagagctataaattcagtgaacttggaaggattccggaagattgggaggtacgcccacttggttatttactcaatgattcaccgcgttacggaattaatgccccagcagtaaaattggggaggaatattcccgtttatattcgtataactgatattagtgataacggatattttagacccactgagaaagtcggtgtaaatagcccactttctgattcctatatactacaggaaggggacattgtcttagcaagaacaggggctagtgttggtaaatcttatctttacaaaccagaggatggcaccctcgtgtatgcaggatttcttatcaaaattacgccagatcaaagatccctaaattcaaaattccttttccagtttctacagacgcagcagtattggaattggatagctacaaattcaatgcgaagcgggcaaccaggagttaatgggaatgaattcgcaagtttacccataccagtaccacccaaaaaagaacaaactgccatcgccagcatcctctccgatatggacgctgaactcgaggctctggagcaaaaactctccaagatccgagatataaaacaaggaatgatgcaacaactgctgaccggacgcatccgtttactattggatcaccaaccatga

SEQ ID NO: 111881 - DNA, 588 bp, Enterobacter aerogenes
atgcaggtgcgtctgctgcgggcgattcaggaacgcgaagtgcagcgcgtgggcagtaatcagacgctttctgtcgatgtgcggctaatcgccgccacccatcgtaatctggcggaggaggtgagcgccgggcgttttcgccaggatctctattaccgcctgaatgtcgtaactattgatatgccgccgctgcgtcagcggcgtgaagatattccgcaactggcgcagcattttcttaagcgctacgccgaacgcaatcgcaaaacggtgcagggatttacgccgcaggcgatggacctgttgattcactacgactggccggggaatatccgcgaactggaaaatgcggtggagcgggcggtggtactgctgaccggagactacatttccgagcgtgaactgccgttggcgatagcgggcgcgccgctgccggtcactggcaacgatgaggcgctgattcagccgttagtggaagttgaaaaagaagtcattctctcggcgctggaaaaaacgggcggcaacaaaactgaagccgcccgtcagttaggcattacgcgtaaaacgctgctggcaaaactcagccgttag

SEQ ID NO: 111882 - DNA, 231 bp, Enterobacter aerogenes
ttgacgatttccccggcgctgctcgatgagctggcggctaacgacgcgccgctcagtcgtcagctcaagccaggttacgtcagcgaaacccgaccgtcgccgatgagccaggctgagtttctctggcagcatcatcaggatccgatggcggtggagaaactgtcggaaggcattcggctgtttgccgccgatcaactgaagcttgaaaaccaaattcgtcagatgctgtaa

SEQ ID NO: 111883 - DNA, 276 bp, Enterobacter aerogenes
gtggcttctgtttctatcagctgtccctcctgttcagctactgacggggtggtgcgtaacggcaaaagcactgccggacatcagcgctatctctgctctcactgccgtaaaacatggcaactgcagttcacttacaccgcttctcaacccggtacgcaccagaaaatcattgatatggccatgaatggcgtcggatgtcgcgccagtgcacgcattatgggcgttggcctcaacacggttttacgtcacttaaaaaactcaggccgcagtcggtaa

SEQ ID NO: 111884 - DNA, 168 bp, Enterobacter aerogenes
atgactgccgaagttcattcggcgaagcttatccagctgcgcctgcagatggtctatttcgcgctcccggtcggcctgcttttccagcagggcgcggttcagcgcttcctgttcggacaggcgctgtttcagcagaaggatgtcgtcagggggaggtgttgttcataa

SEQ ID NO: 111885 - DNA, 360 bp, Enterobacter aerogenes
gtgaatctgacagaaaaatcagcacatttggcgtggtgcgccttggtggcgctggcgttagccaggcaaaacggtgacgttgtgtcaccggtacaggaaaatctctttctcacccgctggctggcgacagcactgaagcaacgtcgtttttcgcgtgacgtggcccctgacatcgagtggcttctgaaacagggccgacagctgggcgtcaatgctaaactggcccgtaagctgaactacctctggcgttccagctccggggagttgtctgcgcagaatgacctgttccggttgacccatgctctggaaacggcgaaagatatgtgctggaactaccgactatgcagttaccctgaatga

SEQ ID NO: 111886 - DNA, 924 bp, Enterobacter aerogenes
gtggcaaagcaaaagttcaaaatcaccaactggcccacctacaacaaagccctcatcaaccgtggctccctcactttctggctggacgatgaagcgattcatgcctggtatgagtcggcaacgccttcatcacggggaagacctcagcgctattctgaccttgccatcaccaccgtcctgatgattaaacgcctgttccggctgaccctgcgggctgcgcagggttttattgattccatttttgccctgatgaacgttccgttgcgctgcccggattacagcagtgtcagcaagcgggcaaagtcggttaatgtctgtttcaaaacacccacccggggtgaaatcgcacacctggtgattgattccaccgggctgaaggtttttggtgaaggcaaatggaaagtcaaaaatcacggcaaagagcgccgtcgtacctggcggaagctgcatctggccgttgacagcagaacacatgaagtcatctgcgcggacctgtctctgaacaacgtcacggactcagaagctttcccgggtcttatccggcagacacacagaaaaatcagggcagccgcagcagacggcgcttacgacacccgactctgtcacgatgaactgcggcgcaagaaaatcagtgccctcatcccgccccgaaaaggagcgggttactggcccgtagagtacgcagaccgtaaccgtgcagtagcgaatcagcggctgaccgggagtaatgcccggtggaaatggacaacagattacaaccgtcgctcgatagcggagacggccatgtacagggtaaagcaactgttcggaggttcactgacgctgtgtgattacgatggtcaggtagtagaggctttgggcatggtgcgtgcgctgaataaaataacgaaggctggtatgccagaaagcgtgcgtattgcctga

SEQ ID NO: 111887 - DNA, 426 bp, Enterobacter aerogenes
atgcgcgcccgctggatgtggaatatccgccagcttctgctgagcgtctggttcgaaggcgtggccctgccgctgtccctgtcacatatcaccaccgaatcacaatggcgcagtctgatactgacggccggaggcgactactggcacgtctacatgtcaaaaaagacggacggtggcaaaaacaccgtgaaatacctggggcgttacctgaaaaagccgccgatagcgggctcccggctggcgcactacgccggaagtgccacgctgagctttcgctaccacgaccacaacacgggcgagctggccacagagacgctgacgcagagggacatcgtggcgcgcctgaaacagcacatcccggagaagttcttccgtaagcgtacagcgagtgacctgcccccaggattagatacaaccgtcagttag

SEQ ID NO: 111888 - DNA, 921 bp, Enterobacter aerogenes
atggcaatagcaaagccgacggtacttatcgtcgatgatgatatcaacacggtaagtatgttgaatgacacgcttgatgaagccggttttaccgttctggtcgctctggagggtaatcaagccctttcgataaccagccagataaccccggatatcattctgcttgatgccgtaatgccgcatctggatgggttttcaaccagtaagcgcctgcggcaaaatccggggctgcggcataccccgattattttcatgacaggcctgagtgatacgcagaatatcgttgatgcatttgatgccggggtggtcgattacgtaattaagccgatacgcacggaagagctggttgtcagaatgcgtacccacttgcggaactcaaaattaacggtcagtgcctatagcgcgatggattccgttggccagaccttatgtgtttttagcaaagaggggcaactacgctgggccacgcccaatgcatggcaactgatgaaaaacttcagcgataccgggtatgaacccaataaaaaaatagtaaaccggatcatcggttggctgaacaatacggaaggtttaaaaatacccttagatctttcatcgcaaggcatcgctctgaaattctatctttcacgccggaccgctgaaggagaaagtttgctacgtattgaagagatcaaaggacatgaagaagtcgaagcggtgaaacgcctgaaaaacaacctagggctgacgcaacgagaagccgaagtcctcctgtggattgccaggggaaaaacaaaccgcgaaattggcgatattttaaaccttagccccagaaccgtgaataaacaccttgaaattgtatttccaaagctgagtgtggacaatcgcaccgcagcggcagcgttggcaataaattcgctatatgccagggagaaaatgtag

SEQ ID NO: 111889 - DNA, 3381 bp, Enterobacter aerogenes
atgaccgttcagcaaaaggcgtttaaatcgcgcagacgctacaaccagtgggtgaccaatcagactctcgaggattttgcgctccgctatacgccggtctcggcacgacgctggagcgcaaagcgagttgttatgacagcgctcagcgcaattacctttttggcgcttgaagccattggcggcgcgctgacgttaacctatggatttaattatgtggtggtggcggttatcttagttagcattattatctttgcgctatcaatgccgattgccattaatgccgcaaaaaacggcctggatattgatttgctgacccgcggcgccggatttggctaccttggttccacggtgacctcgttaatctatgcttctttcacctttatatttttcgccctggaagccgctattatggcgatggcgcttaatatgctgtttggcctgccattgcactttggttatctgattggttccgttgttgttattcccctcgtcacctgggggttcacttttatttcccgttttcagcagttcacccagttttgctggctggcgctacagctattaccctttattttcattttaatacgtgaacatcatgtgctgcaaaactggatcgacttccctggttttattacagcccgcgatggttctttcgatttccttcagctcggcgccgtctgttccgtactgctctcactggtaagtcaagtgggagagcaggtcgatcaggttcgttttttaccaaagccacaacatccggcccgctggagatggtatggcgcagtaattgccgcaggtccggggtgggttgtcatcggcgccatcaagatcctgctcggctccttcctcgccgtgctggcgtttaattacggactcggcgcggaactggccagcgaacccacccatatgtatctggtggcatttagctatgtcacccattcatcatcaacgctactggcattaaccggtatttttgtggtgctctcccagctcaaaattaacgtcaccaatgcatatgccggctcgatcgcatggtctaattttttcctgcgcctgacccatcgtcatccagggcgcgtcgtgtggctgttttttaatgtcggtattgctctgttattgatggaacttggcgtttatcgcgtatttgaggatatcctgggcatttatgcggtggcggccacatcctggcttggcagcgtggttgccgatatcaccttaaataagtggcttaaattacgaccagcggaaatagagtttcgccgggcctatctctacgatatcaatcctgtcggcatcggttcgatgacgctcgccatgctctgcggtctctcagcctggatgggatggcttggtcatcctctacaggtttttgcctcaatgttatcgttgtgtctgacgtttatcaccgcccccttcatcgcctggctgactcgcggacgttactatttttcccggacgccggtgcaggtcacggcaacggaatgctgtgtctgcggtaattattttgaaaaaccagagatgagctattgtcctttttatcagggcagtatttgctcactatgttgttctctcgatgtccagtgcaacgatacttgcaaacctcatgcgcgctatacggaacaggcttcaaagcttatcgggatatttattaaagaaaaatcattacgcaaaattgatcccagagtgtggagttttatcagcattttgctgttattcagttccgtcatcggtctgcttttgatgctggttttcgctcagatgcgcgatgaattcggcagcgagcaggaccttctcgccgcggcgttatggaaagttttttttatcctgcttatcgtaaccggcgtcaccacctggctatttgtcctgacaaataaaagtcgccagattgcgcaagaggaattgcgcctgcaaagcgaccgtctgatgaaagaaattattgcccatgaagcgacggaccggcaattgcagcaggcaaaggaagatgccgacgatgctaatcaggccaaaagccgctatctcaccgggattactcatgaactcagaacgccgctcaatgcgatgctgggttatgcgcaattactcgaacgtgctgatgatatccctccagcccggcagcgcggtatcggtattatgcgcagaagcggcgagcatctggctaatctaattgagggattactggatatttcgaaaattgaagcgggaaaattagaaatatatcgtgaagaagtgcgcattggcgatttggtgcagcaactggtcgccatgtttgaacaacaggccagcgataaaggactgacatttcactacaacgccccacactggctgcccgaggcggtgatgacggatgagaaacgcctccggcaaattcttatcaatctgctttctaatgcggttaaattcacggacagaggcagtgtaaccctcgatttccagtatcgtagcgaggtggcgtttttctcggttcacgataccggcatcggcatcgcccctgagaacctggaacgcatctttaagcctttcgaacgcgtatccggcgatagtcgtcggatcgggacgggccttgggctgacgattacccggcttctgacttatatcatgggtggcgatctccaggtggaaagcatccgtggcgaaggcacaacgtttaaactcaccctgatgctgccaagctatagcggggatgcctaccaacccgccgagcctgcggtaatcaccggatatccaggcaagcgacacaccctgctggtagttgacgatgatgaatcccatcggcagctgatgatggatttactcacgcccataggcttcacgctgctaacagccgaaaatggtcatgtcgcgctacatttagcccggcaaaatcatatcgaccttcttcttctggatgttgcaatgcctgaaatgtcggggtgggaactgctacgtcagttacgtaataagggacaattagcgccggtaattatgatttctgcggaagcggatgagggtaaatgccgccacttcactggcgaaggggaagttcgctacctggttaaaccgctgcgtttccctttactactggagaacatcggtgaaatattgcatctccagtggcgcacggaatgtcagccgccaaagcagccggaaatacatgaaccacgctcgcagcttacccgtgtccagattgagtcgttaaaagagatggccagattgggttatgtgagagggtttcgtgaactgctggacaaacatatttccgctaaccagatcagcaaagccgagggcgaaaaatttgccgagttgctgaggcgctttcgattcaaagagatagtcgagagtcttgaacgcccggagggagagaaaaatggcaatagcaaagccgacggtacttatcgtcgatga

SEQ ID NO: 111890 - DNA, 1281 bp, Enterobacter aerogenes
atgaacattcgtgatttaccccagccacatagcaatatgaaaataccgagcccaggccggtttcaccaggcgtgcctcaaagcgaaacttttggcgattgccggcctgatgatggcagctaatacggccatcgccgccccggcgacgtcagtggttaataccacgggcctggcggtcaccgacaatagcgtcaaggtcgggatactgcattcatccacaggcacgatggccatcagtgaaaccggctcgattcaggctgaaaagctggctattgagcagattaacgctgccggaggggtactggggagaaaaattgaatatgtacaggaagacggggccagcgactggccgacctttgcagaaaaagcgcgtaagttactggtcagtgataaggtcgccgctatcttcggcggctggacttcggcttcccgcaaagccatgctgccggtacttgagcaatataacggcatgctctattacccaaccttttacgaagggcttgagcaatcgccaaacgttatttataccggacaggaagctactcaacagataatctccggcattgattgggtagttaaaaataaacatgcaaaaaccttctacctgcttggctctgattatatttggccgcgtactgcaaacaaaatcgcccgtcaccatattgaaaagctggggctgaaagtcgttggcgaagattattacccactcggtaatacgcagttcaattcggttattaacaaaataaaactcaaaaagcctgatgttatctatgccattgttgtcggcggttcgaatgtggccttctataagcaattgaaggcggcggggatcgatatgacgcaggagaaaccgctgctgctgaccatctccgtcacggaagatgagatccgcggtattggcggcgaaaatatcgtcggcgcctatgcctcgatgaagtatttccagagtatggataatccggaaaataaaagctttgtcgccgcatttaaaaagcgctggggtaatgacatggttatcggcgatgtcactcaggcggcctatcttggcccatggttatggaaagcggcggttgagaaagctggctcgttcgacgtggacaaaattcgtaaggcctcgcccggtattgagttcaaagatgcgccggaagggtatgtacgcatccatgataaccatcatctgtggtccaaaacggttatcggtcgcgctcgtgcggatgggcagtacgacgtgatttatcagacgccagaacttatcgaaccgaacccattcccgaaagactaa

SEQ ID NO: 111891 - DNA, 927 bp, Enterobacter aerogenes
atgttcagcgattataacttcgccgatttggcttccatttttgtcatgcaggggttttcggggctcagcctgttcgccgtgtttgttctgatgtcgcttggactcgctattatttttggccagatgggcgtgattaatatggctcatggcgagttcatgatcctgggtgcttatgtcacatggttgaccggtaagtttttcagcgcttatctgccttcaatcttcggcatctacttctttgttgccattgcccttgctttcctgtgtaccgccttgctgggtacgctcgttgagaaaatcctgatacggcatctgtataaacgccccctcgacacgctgctggcgacatggggtctgagcctgattctacagcagtgctatcgttcgctatttggtccccgcgaagtcggcgttgacttaccttcatggctaatggggtcgtatcagtttgccgacaatattgatattcctgttaatggggtatttgttctgctgctgaccgtagttattaccgcttttacggcctggctgatttatttctccgcctggggaataaaagtccgcgcggtggtacttaaccgccagatggccagcgcggtgggtattaatacggctcaggtcgatagtcgaaccttcgcacttgggtgcggcatcgccgggatcgccggaagcgcctttaccatgatcggctcaacaggtccaacggctggccagcagtatatcgttgacaccttcctggtggtggtgtttggcggcgcgcaaagtttgctcggcacgctcgcctccgcatttgccatttcacaatcgcaatccacgctggagtttttcctgagcggttcaatggcgaaggtgattacgctactgatcgtggtcggcattctgctattgcgtccgcaaggtcttttcgccaaccgggtccgccgctag

SEQ ID NO: 111892 - DNA, 1116 bp, Enterobacter aerogenes
atgaaacgcatgcaaaattatccgctactgggtattgccctggtgataggccttatttttatcgtcatgccgctaaccctggatcttttccgtttaaacctgatcggtaaatacctgacttatgcatttgttgccgtcgggctggtactttgttggggctacagcggtattctgagcctggggcagggcatcttttttggcctcggcggttattgtatggccatgtttctcaagctggaagcttcctcgccagcggaaacaaaaatgcaaaccaccccgggcatcccggattttatggactggaatcagctaaccgctttgccctcgttctggcagccattccattcttttagtctgacaattctggctattttaatcgtgcccactatttgcgcatggattctcggcagcgcaatgtttaaacgccgcgttggcggggtgtacttcgctattatcacccaggctatctccgcgatcctgacgattcttattatcggacaacagggttacaccgggggaattaacggcatcacggatttacgcacgcttttaggttgggatatccgtactgattctgcacgctatatcctctactttattaatgctgttttactgatgctggttgtgagcgcgggctattttattgtgaatagcaagctcggccgactgatggttgccattcgcgataaggaagaccgcgttcgtttctctggttatgatgtcgcgaatatcaaaacggtggttttctgcattagcgctctgttttcggcgatcggtggcgcgatgttcactctgcaagtagggttcatgtcgccagggtttattggcactgttgcttcaattgaaatggtcgttttctgtgccgtgggcgggcgaggttctttgctgggggcagtatatggcgcccttatcgtcaatgccgccaagagcagtatttccgagtcttttcctgaactctggacgattgccatgggcctgctctttattgccgtcgtgctgattttcccgaaaggactggcagggctttatcagcaatatattcacccgatcgtgatgtcgctgctgcgcaaaaagagtatgaccaaacccagagtaaacaccggagtgctgaaatga

SEQ ID NO: 111893 - DNA, 750 bp, Enterobacter aerogenes
atgaaaaatccgataaaagaaataattttagcggtagagggattaaccgtttcatttaatggcttcaaagccgtcgatgatttttcaatgtacatcgatgaggggcagatttacgttattattggcccaaatggcgcgggtaagacaacagtgcttgatctcatttgcgggaaaacaaagctaaccagcggcagcatcaaatttcgcaataaggaactgagtaaacttcgggaaaataaaattgttcatgaaggggttgggcgtaaattccagaatccatcaatctatgagaacttaacggtatttgaaaatctcgagttatcttatcccaaagccagaaccgcgttgggcgccatgttctttcgtcgcacgccagaaataatcgctgcggtcgaacaggttgctggcgaaattttccttgccgattacctacatacgcaggctgaccttctcagccatgggcaaaagcagtggttagaaatagggatgctactaatacaagatcctaagctcatgatgctggacgaacccgtggcaggcatgtctgtcgccgaacgccaaaaaaccgcgcagctcctgcgcaaaattgccgggggacgttctgtactggtgattgaacacgacatgcagttcgtcgaagacattgccgatcatgtcaccgtcatgcaccagggaaaagtattgtcggaaggtagcatcaataaagtcaaaaacgaccctcgggttattgacgtttatcttggtcattaa

SEQ ID NO: 111894 - DNA, 690 bp, Enterobacter aerogenes
atgctgaaaatttctgattatgctgtcgcatatggtcagagccaggtcatcagtggactgaatctgacgttagcagagggtgaaatcgtcgctctggtagggcgcaatggtatgggtaaaaccacgctgatgaaatcactgattggtatgataccgtcctgtgccggtgagttagagtttgccggtacaaatattaccggcttgcttagttaccagcgtgttcagcatggcattggctttgtcccgcaggggcgaatggtattttcaaccatgacggttgaagaaaatataaaaacggggattcgccaatcccgttcgttacaggttcctgaatacctgtatgactatttccctgtgctgaaagaaatgcgcaaacggatggcgggaaatctttccggtggtcagcagcagcagctcgttatggccagagctctcgccggtaaacccaaattacttttgctggatgaaccaacggagggaattcaaccgtcaattattaaagaaatggcaaaaatattacgtaagattcgtgatgcagaagggttgaccatattagtttccgagcaggttttaagctttgtactcgatgtgtcagataaaattgttgttattgagaaaggcaatattgttcatcaacaggcgcgttctggtgctgatgaagaacaaattgcgtcatatctgtcggtttaa

SEQ ID NO: 111895 - DNA, 1008 bp, Enterobacter aerogenes
atgggtagcaccggaagtgtaagctcctgggatgaagcgttattaattgccgccatccaataccccgttcccgttattaaaggaccggaggatatccagatacaggtcgataagatttgtaaggccgttgactccaccaaagccggatatccgggacttgatgttatcgtcttcccggaatattcaacccagggactgaatactaaaatctggacctatgacgagatgttactcactctcgatagcccggagattggtcagttcaaagaggcctgtatccgcaacggcatctggggggtattttccttaatggagcgcaatgaagacccgtctcttccaccgtacaacaccgctattatcattaacgatcggggcgatatcgctctgcattaccgcaagctgcaaccatgggttccgattgagccctggatgccgggaaatatgggaatgccggtatgcgatgggcctaaaggttctaaactcgccgtctgcatatgccatgacggcatgttcccggaactggcgcgtgaggctgcttataaaggctgcaatgtctatatccgtatttcgggctattccacgcaggtgaacgatcagtggatctggaccaaccggacgaatgcctggcaaaacctgatgtataccgtttcggtgaatctggccggttatgacgatgtcttttattacttcggcgagggtacggtctgcaattatgacggtaacgtcattcagcaggggcaccgcaacccatgggaaattgttaccgcagagctgttcccgcgcctggtggataaagcgcgtgaaaactgggcgttggaaaacaatattttcaaccttggctgccggggctatgtcggcaaaccgggaggcgaacgcgagaattacctgacctgggtgcgcgatcttgccaatggcgaatacaaacttccgtgggatgaaaatgtcaaaattcgcgatggctggaagtattatcctgatggggtgcaattaggcccgctacctaaataa

SEQ ID NO: 111896 - DNA, 432 bp, Enterobacter aerogenes
atgaaaacgttactgactctggacgtcctcaaaaccatgtccatcgacgagctggaagattaccgcgctgcgggtgaagattttcgccgtgagctgacccatgcagtgatgcgtgttctgcatctgccgtcaggctggtccgtgaacggtgaatatcgcagtgagtttggcggttttttcccggttcagatccgcttttctccggcccattgccattttgatgtcgctgtctgcagccccggagagttgagtgagcgctggatgatcgtctttgtgacacgtggtggccagccgttctctgttgttcgcagcatggaagcatttaacccggagttgatctcccacacgctagcattgatagcgtgtctcgatactgacggatattcctgcgccagtatcatcagtacgctggaacaggagggcgcacaatga

SEQ ID NO: 111897 - DNA, 729 bp, Enterobacter aerogenes
atgatcccttcgtcccgttcccttgtcaccctgcagcctgcccggcaggctgcgctgcaggccatcatgaccgtggagaatgcccgccagcgcggtgctcgtctgtctgcagcgccacacgtgcgtactttcctgcgcctgctgaccgggaacagccgtatgaacacgaccgtggcgcagcgcattcccggcctgaactgggacccgaaacatcgtctgagcagtcttaaacaggtggaagaggcgctcgatgcactgattgccagtcacggggagtgctgcccgctgccgctgctggttgatgttcaggccgaactgttccccgaggtgcagcacagccggactgagcgccggaaacagcgcagcagcctcgcctttacccgtaagatgcgtcgggaagaacgcgcaatggtgcatcactggcgattacggcagaacctgctgggacaggccgtcacggagctgaatttccagtcaccggaaacggtcatcagctggtaccgccggtgggccggtgagtttgacgcgcgtgagcttgcccctgccttctggcactggcgatcgcgatatgcctcgctggcctctctggactggctgcgggatgccggggagccgctgtatggtgtcatgcatgaaatcagcttcattgtgagagagacgccggagtctgtgcgtcaggcagaacgctggcaggtcccgaacaagctgacacaccggagccacggatga

SEQ ID NO: 111898 - DNA, 327 bp, Enterobacter aerogenes
atgaagtggcgctattccctgcgctggaaactgccgcacaggccctgcccgggtccacaggagctggtttccgttgtcgtggaggcagggcaggcggcacctgaagaagtgatgtcttgctgggtagcgggcgcgggatatgcggtatgcgtggattttctggacgagaggcagattaagcgctggagcgacgagcggaaagccgccgcccgccaccggaatctggtgcgccgcatcaacaggattgcgcccttgtttgccgacgagctgatcgagcgggagcttgagagcagacccgggtattttcgcggcaaatcagaacgatga

SEQ ID NO: 111899 - DNA, 222 bp, Enterobacter aerogenes
atgtgcggacgtttttctcagtcattaacgcgggaagagtatctttctctcttcgccaataaagccgatcgaaatattgcctacgacccggaacccatcggtcgctataacgtcgccccgggtaccagggtgttacttctgagcgaacgcgacgaacagctgcagctcgatccggttcacttgtatacgagtaataaagttggatacctgatccgcctctaa

SEQ ID NO: 111900 - DNA, 240 bp, Enterobacter aerogenes
atgaagtgtttaatcgtcacatctaggcatggcttactgaattggtatcccacttttttactctatgctttctcgttatcggtgctggatttgcagtttggtatccaactttatttttataatgctgtttttcatgtcgtagaatgcggcttagaggcggatcaggtatccaactttattactcgtatacaagtgaaccggatcgagctgcagctgttcgtcgcgttcgctcagaagtaa

SEQ ID NO: 111901 - DNA, 276 bp, Enterobacter aerogenes; identical to SEQ ID NO: 111883

SEQ ID NO: 111902 - DNA, 570 bp, Enterobacter aerogenes; identical to SEQ ID NO: 91932

SEQ ID NO: 111903 - DNA, 276 bp, Enterobacter aerogenes; identical to SEQ ID NO: 91793

SEQ ID NO: 111904 - DNA, 579 bp, Enterobacter aerogenes
atgaatttaccttcatatagccagttttttcatactatctatgatgaaaagtcaccagtaggccgaattggtcgtggcacacattattccgtatttgaaaccgttcagtggctctcaccaagtctcgggagatataaatctccaaaggttcaaaagttcgcaattatctgggatgaagatcacgacacccggattgtcgatgttttagaaatagcattaatgcgaaacttattaggtccagttgtgtttgcaggtgagcgaaagggatcattaaacatcgttctttcaccagattttgacaggttgactccttcagaaaaaaaagagtatctggcaaattggcaagagctcgctgatggtggatatgcctctgacagctggggctttgactggagttatctttcctcgccagcaaccggttcgatcatccaggattccaagacaaaaacagaggcctatttattcaacatttgtaacctctgggagcttggacactcagtctataatgagcgcaacccttgggaggacgaggaaaggatgcagcagtctatagatagtctgaagtctttatctaaataa

SEQ ID NO: 111905 - DNA, 375 bp, Enterobacter aerogenes
atgagctacatccaagtgaataaaaatcacttgttacttatgtattcatttgagcacatactggaatctgctttaaaagagttaatgccagagtgctgggaagatctgataagaatcgccaaatgtgccgccgattcagattttaagtctcttgaagacaatatcgacagcaggtgttgttattttataaatctgcaacctaaaatcagaaaaaaccaattaagaaacattctctgttcgtttggttcgctatggggaaaatatgccctcgataaacaggacgtaaaaatgctgaatgaaatgaatagtacaacgggtattggccagaagatattacttgataaatcagaaaggggagtcagagctcccctgtga

SEQ ID NO: 111906 - DNA, 732 bp, Enterobacter aerogenes
ttgaccactacaccagaagaggtttttctggaagccttcattcgttaccggacggcatacacccacctgcatgatatctatgaggaacaggtcagtgatactacgccgggcggcactgagagactgacccggtgtgcagatgaagtcagtgccgcgctggaattttttaaacagcatgaaaaaatcattgccgccgcaccatcccagctggaagaactgccgggggccggtagcgaaacttatacgttcgcgcgcagtccggaactgtttatccctctgacaggatatttacgggagagcatccggcgttctggatcacaacctcacatggaacaggcgcttctacgggcagtggacaccctcaatgagctgcagaagatggttagcggtgaagtttccgccaccactacggctgtttttattatccaggatgcgcgcacagttatgctctgcgccgaagaggcaacccgtaaagatcaggagtatattgtggcaagagcctgggtatcaagaatgaaagaggcgtttcaacgtgccgaccttgcgtatctgaatctgaaagcagacgcaaagatcagcgcattcagcaggatcataatattactcagacggctggttgaggatgccgagcgttatgtaagccgcatgcctgaaaagggtgaaaaattcgcctctggcctccaagaagatctctcgcaccttctggacacactggaacagagtctcagttga

SEQ ID NO: 111907 - DNA, 402 bp, Enterobacter aerogenes; identical to SEQ ID NO: 16839

SEQ ID NO: 111908 - DNA, 531 bp, Enterobacter aerogenes
atgaaaaaccgctataaatctctggttgatcgctatgcggcagctatccgcagcggtgcgctggcggctggctgccagctgccgacccatcggcaattggtcgttgaacacggaatttctctggctaccgcgacgcgggtctaccgtgaactggcgttaatggggctggtcagcggcgaaacgggacgcgggacttttgtgcgtgaactgagcttgccgccggggctgggtgtcgatcagcacgccattgccccggacatgatcgatcttaatttcaactctccggcgttgccggaacaaaccgttctcctgcgcgaggcattaaaaaaactgtctggcgcgggcgatctggaagcgttgttacgctatcaaccgcacgccggacgcatgagcgaacgggaaatagtggcccagcatcttaacagacagggtatggcggccagcgccgggcaggtcgctatcgttaacggcgctcagcatgggctggcggtctgctgcgtcccggcgatgtggttgcggcagatgccttga

SEQ ID NO: 111909 - DNA, 1083 bp, Enterobacter aerogenes
atggcctttaatccgccgctggggagtacctctcccgctgtgttgctcgataacgccacgcgcctggataagctggtcaacggacagccgacgaccgttcccgaccgcgccggtgacccgctttattcatggcggggcatccatcagaaccttattccgctgagcaagcagtatatgacgctggctgatgctcaggcggatattgacaatatccccgaaggctcgaccacgtattaccgcagcccggatgatagcgcactggctatcgaggttatcaacagcggaggaacactagcacctaccgggcgtaggatgccctcacaggcattcgttgcaggtatcgaccaatttaccgcagagctttctgcacaaatcgctgctcttcagctaaaaacagcaatgctgtcacaatacagctcagatgagtggcaatggattttaaccgggttgcaggggccatcggcaacagcgcttgcactggataacgatttcgggctatggctggcaggtcttaaatcatcattgcaggattatgtagagcagctaatccccaaacaacaggcaaatctttatcagggattacaacatgtcattgtggctcaaaacggcgttgatggtcttctgactattaatgataatggtgatgtacgtattgtcggcactgatgatgttcttcaggacaggcttaacgcgctatgttccactaacttttcccgcaccattattggcttccagcatgtcgtttttgcagccgatttaaaaaccgccatttttgcaatagatgatgatggcggggtgcatattcccggtatcgatggcccgctacaggataaccttggcgaatcactggcgaccatcaaaaccgtgggcggtgtaccagcagcagcatggcgcggagaggtgctctggtcagaacgtcccgtactgactacgcaaaaactgacgccttccggtttcgttttcagttatctacctggcggagaggcagtatctggttccggggtgatgtatgtaccgtcaatacgtgaaatgccgcttgatgcacctgaaattcagggggcggttcaagtggacagtctctga

SEQ ID NO: 111910 - DNA, 1017 bp, Enterobacter aerogenes
atgttaagtcgttcggcgatggcgctggttaccgcattactcatgtttccgcaaatcgcggagacgatctatagcccggcgctgactgatatcagcgcacatttttccgttagcgccgccgatgcggcgcagacgctggcggtctattttatcggctttgccgttggcgtgctgttctggggctggttcagcgaccggcgcgggcggcggccggcgttattgctcggtctggcggtgtataccgcaggttgtatgctggcgctggcggcgccagattttagcgtactgctggcggctcgtatcgtggcggctttcggcgcggcaatcgggtcggtggttgggcaaacggtgctgcgggatgcgtttgatggccggaggttggcggctctcttttcttttgtcggcatggcgctggctatcagcccggcaattggcgtttatcttggcggcgtgctgacggcctggcgcggaatgaacggcgtcttcggcgcactggcgttgctggcggcggcgctggtggcggcattgaatatcggtttgttcagctattacagccagggacctttcctttttgcccgcctggggctggatgcgcggacctttggctatagcggcatggcgctggcggcaggggcgttggttggcgcgcagggcaatcgtatgttgctgcgacgtggagcagggcagcggcctatttttatctgtgccggtctgctgttattgctcgccagcgcaggcgtatgcctgttagcggattcatggttctttttgctgccgatgatcgcagtggcgacagcctatgccatggcgatccccgtagtgctgggaacggcgcttagcgactacgctgattgtcgtggtagcgccggagcgctgttcggcctgacctattatttggttatcggcttggggctggcattcgtggggtgggggcaatcgctcggcgtcgcgttggcaatctgtgcggtgatttgcgcgttaaccggttggtgttatctgcgatacattgatgattag

SEQ ID NO: 111911 - DNA, 480 bp, Enterobacter aerogenes
atgaataccttcatcgtcgatttgctaaaaaagatctggctgcctgtttttgtgctggtcgtgatctctcttctggcgtggcgggtaagttactaccgcgacaactccatcacctacaaagaccagcgtgataaagccactgataagcttaacctggcgaacgacaccatcaaagacatgaatacccgccagcgtgatgtcgctgcattggatgctaaatacaccggagaactggctgatgccaaagctactatcgatcagcttgagcgtgatgttgcttctggcaagcgtcggttgcagctcaacgcaaaatgtaccgcgaacggagcatccggaaccggcggcatgggcgatgcttccagcccccgacttgctgacgccgctgaacgggattatttcaccctcagagagcgaatcgtcacagtgacgaagcaggttgactatctgcaggactacgtcaaagagcagtgcttaaaataa

SEQ ID NO: 111912 - DNA, 342 bp, Enterobacter aerogenes
atgcataactggagcgaaatattttccattgttgatggaaatcttgtgtgggccataaagccagctaacagagtaaagattggtgacattgcaggatgtcttagcgatggctacagaaggtttgaatactctggctctcaataccttgcacatagaatagtatgggaaatgataaacgggccaattccggaaggaatggaggttgaccacataaatcacgtccgcgcagacaatcggattgaaaatcttaggctgataagccagtcggataatacccgcaacaaatcgctgccagcaccaatacgtcaggtgagattggtatccattggaataaaaagctaa

SEQ ID NO: 111913 - DNA, 309 bp, Enterobacter aerogenes
atggctgagttgcgcgcaggtgggctggcgttggtaatcaactctggaaataaaaatgagattggtaaatcagtaacgttgatccgaaagcttttaagcggcgagtttcatcaattcccaaacgggagtagctacgcaatgaagaccaatacaggtcagacaatatgggtcgtatctggtgatgtttcgatttacaaaagcaagccatctggcgggatgtcgattttcgcatccagtcacctgatgcctatcgatggcgacgacttcagcaatgaagacgaacaccagaaggaacgggagcatgcctaa

SEQ ID NO: 111914 - DNA, 798 bp, Enterobacter aerogenes
atgaccaaatcaaccataaccagagagccaattactcacgacctgaaaatttaccctgagttcttctctgctgtatgcactggcgttaaacgcgcggaactgcgcaaaaatgaccgtgattatcgtgttggcgacacccttcacctgatggagacaccacgcggtagttgtcatcaaactggagagtttatcaatgtgaaaatcacccatatcgatgacgttggggaatggatgccgggttatgttcttctgagcgttgagctacaggaacgccgcaaggctgaggcagcatggcggaaatttcagggcatgctcaactctggtgaccctgcagcatcccagcagccatcgccggtagtgccggatgaaattaccgatgaccacatggagcagcaattgatgggagatgaatgggcggatagtttccgtgctggctggaacgcctgccgcgccgccatgctccagtctgaacctgtaacgacggctaacaagttgggcaactctccgtcgcaaagcccaattgaccatggatatcggaaaggttgcgaatgttcaggctgtaaaaccacagtcagaatctgcgctgaactggcgggctggattccggtaagcgagcggcttccagaggaaggtggtcgttactggtgctatgtggaagaacaaaatagccttggtaaaagccactatcagtggaattgctcatggaatggcgaaaaatggggaggcgctatgatgtatgggcgcgtcactcactggatgccgctgccagccgccccgcaggaggtgaatcatggctga

SEQ ID NO: 111915 - DNA, 171 bp, Enterobacter aerogenes
atgacagtacatcattcgcttcgctgcatgaagtgctacaaaaaatgggaccgggcgtggctactatctgctggccgttccattgatggttcacgcgatagtcagtttattaagtggagaaatgtatccgtaattggcgaaaccaaaaccgaaacacctatctgtaaatga

SEQ ID NO: 111916 - DNA, 381 bp, Enterobacter aerogenes
atgagcagcatgacaactgatatcaccgaactggcgcagagagaggaattcgaagcgtggtttgtaaatgatgttgtaggggccgatgtaaccttcccaacatttgaagatggcgaatactccgaaggagaaatttacgacgagcaattgtacttcatgcttcaagctatgtggatggcatggaaagcggccagcgctgagatggtagaggcgctggagaaggcgcagaagctgccagagccttacgcctatttgcgagagaatgatggacaaatccaaatctccataggcgctgagcgcccaagcgaccgctcaggaggctatgccactccatggtttgccatctataccgccgctggcatcaagtgggaggctgagtga

SEQ ID NO: 111917 - DNA, 192 bp, Enterobacter aerogenes
atgaacagagcctctccagttgatttgaggaaaagcctcgacatcgccaaccacctagcgcacatcgggattcgctttgtgccgatcccggtggcgaccgaggaagaattccagacgctggccgtcgagctatcgcgacggcttgagcagatggcggtcgaggccgaaaaggatgagggcggtgcagcatga

SEQ ID NO: 111918 - DNA, 1698 bp, Enterobacter aerogenes
atgcggctcaataaacttattgttttaaagaacaatgctattgttagggaagtgacgtttaaagacggtttaaacctaattgtaaataaaagaacgtcaggtaaagatagtggtaatagtgtaggtaaatccacgttatcacgcgttttagattacttgtttatgtcttcaggtaatgatatctatcatgatgctgaatttggaaaggatatacctgaaatagtatcattaatcaatgataacatattaaaattcacattggattttaatacggtagaaaataaaaaagcaattgtttctcgaacaatatctactgatgagaaaaattcaaagtattatttaagcgatgttgaagttgataagaaacaatattatgacttcatagctcaagcagtatttgggttgactacagataagccatctctaagaaatgtgtcgcataaattcattagaaacacgaatgaaaaaatgcagaaaacccttaactttttacatgcgaatacaacttctgatgtctacgatttattatacttgtttttgtttggattcaatgggttgccattgataaagaaaaagggcgaatttaataaagatataaaaaaacaaaaagcatatcttgccgcatacagaaatccgaacagagagacagttttatcaaaaatgatcaagcctctaaaaaaggaaattgcagaggcagagaaaaatattaaaaattttgattttaaagatagccatgatgaaagcctaaaaaagctatcagaaatacaaagggttatcagtgactactctttgatttatgcttctttaaatatgcgcgttaggaatattgaagaatcgatcttgtctctaaaaaagaatatcacggaactcgtagaagacgatttaatcgaaatatataattcggccggtctttattttaaaggcgagcttaaaagatcttatgaagaaatggtattatttcataatgatgtaattaaaaataaaattaattttttagagtcggagttgttaaagaaaaaagaagagattgatgttgtaaatggaaaaattaatgattttcatgagcaagagtcatctttatttaaaacaatcaaagagcctgaaacgttaaagtctataaatcaactatttaataaattaactgagttacgtgaaaatctggctagcatagagactaatctcactcgtattaacgatactaatgccttaataaaatcgcttgaagatagtagggagaagttacttgaagagatcgagttggctgttcaaggtctagagaagaatatcgagatttttaacgagttttttggtgatcttacaaaggaaatttatggcgagagatatatctttgatctttctttcgatattgataaaggaaaatgtaattttgatatttcatgtgttacgccaaatagcaacgggggtaaaaagaagggcgagataactgcatttgatttagcatatattaaatttgttgataaggttaaattgaagagaccaacttttgtaattcatgatagcattgaagatgttgatgtgaatcaaattagagatatattttttgaagcaaacaatataaatggtcaatatattgtgtcaatcttaagtgataagttttcagaagatgttgatttaaaaatgatgaaggataactccatccttgaattatcttcgacaaacaaattctttaaggtataa

SEQ ID NO: 111919 - DNA, 984 bp, Enterobacter aerogenes
atggctaaaaactatatagaaaggagactggctgagccatgggaaagtaaaatgacaataataaggttttggatgcgtcgcttcttcaggatagctcccctttattattttttgctattgattgcattttattttggtgagcattttggatattatcgcgatgtcattgcttcagcgtggccggtaacgcaaacagaaactacccgctatacggactcatcctttagtaattttatcgctcatatttcctttgcatttggtttcttgccttattactcttttagaactgtactgccggattggagtattgggctagaaatgcaatattatttgcttttccctttcataatgctctttatatcaagggtaggttttgtccgcgcgtctgttattgttatgttgctctgtgctatagcggcctttgcgcttccgggatattttagttctttccctatgccatctatgattttatttaaattacctttgtttctttctggtatgctgatatataaagcggtatctgaaaataaggttaattatatattctgggctttgcttgctcccttcgtggcacatttaatgggatactttacttcaccaattcgtatgactttagaagcgctcatcatcattgcaatgtctttattattaatgccgcataaaaataactttccgcttaaaaacttctttaatttcgtaaagaaattactttcaatgcgtataagtcagcatcttggtgatgtatcatattcagtttatctattacatttaatgatagttatccctgttgtgggtattttaattgaatatacttcttttgaaagcctatctccgttcttaagattttgtattgtagtttttattacactaccacttacatattttattgcaaattatttgtttaagtatattgaaaagaatggtattttgctgggccgcacttttataaagaaaaaaaaggctactataaataacaatgcatga

SEQ ID NO: 111920 - DNA, 1305 bp, Enterobacter aerogenes
atgcctataattttatcagtcatcacgatattaatacccctcatagttttattttgggattggtttaacgccaatgctaatgttatagggacaataaccacatccttggctttttttgcggctatatggactgctttggaagggcgaaaaagtgctaaggccgcattccttgcggttagggcagcagagaactctttagatgattcacggaaaaacttcaaaaaagaagccttcaatcaaaggttttcactccttcttgaacagcataataattacttaaataaggtaaatgagtatttaagaagcgctgatgggtggcagtttttgagcaaagtatttaatcacaatatacatactgaatctttttacatgcttaaaggacacttcgcgttaagtccttatatgagaatactttatcatttacttaagtctatagaagatgattattatggtgataaagaagattttgtaggaatgaaaaagtattcttcactcgtgcgatcactgataagtaatgatgtcctttatcttatcgctgttaatgcaagcattacatatgagcaaggaaagcgaactcagtacgaaagatatcagaatttattacatcgatttgattttttcgaacatgcagacttctatcgtataaatgaccaaattgacgcatctaaaactatagaatgccgttcctctttctatgatttagaaagtgatataaagatgaggttttcgaaatattgcttggatggaatatataatattctagatgattatgaaccaacccttccagtgtcaaccattttatcgtatatgtattcttctccaaaaaatgaaatggttcataaatatttcgctgacattgatttgaatatcaataatctgtttgtcaatgaggttaataaaaaatcttatcaggaattatttaaatcttctttcagtttcaaattcattaatgcctattttatcaaagagtcattggatgagcatgaaatgcccgatgtaatcactgaggatatgttgttatcatgctcaatgattaagagtataattcgtggcataaaaagtaagcgtttaacaaaaatgggtaatccacaatttagatatgtaagactatctgtaaataatgataaagttatttttcattcccttttcgaacaacttttcgatgccgtcaatgagtatttgattgaagttaatagaaaaaattatatttcttttatgaaagagaatctccctgtaaacagagtaattctaaaaattaatgagatggaaaagcagctaaagtctcaaacaatcgagagtatttag

SEQ ID NO: 111921 - DNA, 1023 bp, Enterobacter aerogenes
ttgatcaccgctattttggataagtatcctaaaattagcgttactgctgttgatattgataacaaaaattcttgtattcttgaaagtaaatttcgtggaattgaagttatctgtggagattcaacttcgtcggaagtctgtgagtctatcacagatgaatcctatgacgtcgcgctttgcaatccgccattcaaaaatatccccacttctgattttattgatagtgtggtaaatgcaatggttggtagaaataaaaaaagtaaaaacattagagctgaaattgtatttttgctaataaacttaaaaaaacttaagccactaggtgagttggctataattttaccagatatgttctttacatcattgaattatctgtggctaagaaagtatctaataagtaattttagcctaatgaaaataattgagtgtgaacataactcatttaaaaagacagaagccaaaacacacatttaccacataataaaaaaaagaccagaaggtttttcattgattgatttttgctctggaaatgagtgttcaaagattagctatgatgagtttatttccaacgaaaataatagtgatatttctaaagaatttgacgataaattctttttgtttcgcgggaaattatcaggaaaggactgcaaattgtcagggttgccgtatttccatactacctcttttaactctattacatattttcatgatcctaaggttcgggattttgatagatgtgcaattgaaggagatatattaattgcaagggttggaacgagagttgttggaaaaactttcatttataacagcacccctgctttgatcagtgattgtatcttttgtctgagaattgagaatgtaaaactgagagaattttttttaatgcgttggaatgctgacaagggagactggcttttcaaaaatgcaaaaggaacttgtgcaaaaaatattagcttgacggctttcagagattatatcaggaatgtcttgatgttattttattctaagcaaaaaataggatga

SEQ ID NO: 111922 - DNA, 1314 bp, Enterobacter aerogenes
atgaaaacaagcactttaaaaaaagagaatgtagtttttgcaatgatgaaagggtatagcttcaggatttctgatattaaatggcaattagatataaatatttgtgtttacccatataaggttgccgataaaatgccagagtcgatgcgtgttggttacctcaataccttggcatatttttcgtctgaatatagttcaggttacataaagaatataaaccacatctttatccaatggctaagattgatggatcttgaaatgattaattccacagcggtttatcaatttaatgttagcttaggccctgagaaaaaccacaagctaagttcaataaagaattttcttagtaaatggaaaaaactcggttatgaaggagttgataactcagctctaagaatgctggaaaaaataagcattaaacctaatttaacgggggaggccgttaaacgaagagatcctaatagtggaccattaacggaagaagagatgaaaatcatacttgaaagtatcagcaacttgttgaaagaagataaaatccctctgtttatttattgctacattattctattagcaacaacgggaaggaggccattacagttaacttcgttaaaagcgaaagatctcatcagaacgggagaaaattgctttctaaaaataccgaaagtaaaacaaaggaagaactttagaagtgagttcagcttggtaagtatcgatgactccctttatgagaaactaacaaccttgattaatatgaatcaaaaacatattgaagatagcgttagtcagagtatggaccatataaaaaatgaattgcccatattcatgaacactaaaaaatctttattgattcattctgatgaaagtttagataccatcatgacaactgattttttacatatgaatacttattttatctcaaacaaactaagtaatttgactactaaattcaacattaggttatcaagtaataacgaccatatacgacttaatgcaagacgattcaggtataccctgggaactcgtttagcaaaggaaggagcatcagttgaagtaatcgctaaagcattagaccataaatctataaactcatcaggtatatacgtaaaaaattgtccagacaatgttcatgatatagacaagatgcttaatcctttttttgaaccgctatcaaagatatttcttggagaagaacagtcaaaaaacaagaagctctttactgaatatgttttaaattcgttcggattttttaatggtaaaaacgaccaaattgaatgtttcacttgtaaaaactttagagcctggagtacaaaatga

SEQ ID NO: 111923 - DNA, 138 bp, Enterobacter aerogenes
atgagaagtttgaaagaattattaagatcgaaaataaaagagatgagtttaattcacttgagctacattttactatctttattaactattatctttttattttcgatcgttaaattgatgatggagctaacggtctaa

SEQ ID NO: 111924 - DNA, 384 bp, Enterobacter aerogenes
atgaaagaaactttaggattaccattctgtaagaaaaataacaaagtcccagctaaatcattgcgtactcattgtgtcagcgcccgattcaaccatgaagaactacagcttctcaacacgaaacgcggtgataaaagcaagggagagtggcttcgcttagcgtccctggataagcttcctttgtccgttcctgccatcaacatagaagcctggaaatctctgagcgaaatttcacagaagctgaacaagcttgtcgctcatctggataacaaaagccaaggtagctctctgacgcaaacagaactattcgcagtgaagcgccagatctcagagcttcgcataaatcttgttggtgcagatttatggggagaaagaaatgaatga

SEQ ID NO: 111925 - DNA, 1272 bp, Enterobacter aerogenes
atgaaagggatgcaaaaaatcaaaagaggaaaaacctttaacgggctaatttcttatttattaaaacctgcttcgcaccacaaatcagatccgagtgtggttggtggcaatgtgatagaaagcttcgcagaagcactaagtgcagagttcaacactacgaagctcctgcgcaccgatgtcagtaaacctgtatggcacaattctctgcgtctgcctgctggtgagagtctatcgatacaacgatggaagctgttagccgatgactacatgaagcgtatgggcttctctgaaacgcatctacgtgcatacgtgcttcatgatgataaagatggtcaacatatccatatagtagcaagtcgcatagatgcaacatccgggaagctctacttaggtaaaaatgagaaccttatcagcacccgtatcatccaggatcttgaacaagactaccagctaacaagaaccaaaggaccgaaagcatctccagcagcgccctcacctaaaccgaagctcaaaaaatcccgtaatgagatgatgatagaaaagagaactggtgagctatgcccaaaaggaatcatccaaaacgcccttaacgagctgcttgataccaggcaatcgattaccgacttcgtgcaacaacttgtggcacaaaatatcaggccaatccctaacattgcctctactggacgcatgaacggcttctcatttgaatacaacgggattgctttcaaagcatctcaattgggaaaagggtattcctggtctgccttgcaaagcagaatcgactaccaacaggaacgtgataatgcattcctgtttaaactgaaatcatctgtcagagaaacatctgttagtgcaactcatgatatggccataactatagatgctcctgaaaccacgacagaatacgttaaccgccccatagaagcacttatcctcgataaacgagctgctggtcaggacgaatactctatcgcttctgtcgaagcgcttctcccagaagctgttgcaactaacaaagaagcgatagcaaccggagcgttaaaagtagcgcccaagcgaagctatgcattgtcagcgttcaggtggttggaatacatcccctacctcgatgtaatttatcgtatgttgaaaaacctcaaaatccccccccttgaacgccctcgaaaacacaaaaccatcactagcgttagaatgatagagataacatcatcaccccccaaaactgccattgaaacaccacataaatcgcacagagcttcgctttcaatgtag

SEQ ID NO: 111926 - DNA, 621 bp, Enterobacter aerogenes
atgagtatctcgaccacgaaacaccgtaatgaagaagttgaagctgatctgtttggtgaaacttttacatttgttgagactttctctggcacagtcatcgattccgatccaggaaatggtcagatctgggtaaaaaccgacgctggggatgagaagcagatttccgactatggtatctcgttcagaaattcacacactatctataaatacgagcttcgccagtatagtgaggatggttcgtatgatgtgtataaagatgcacttatcgttaataagaacacgggtgaacatgaagtaaacttaaacaggaaaacggttgtcatccccgcttttctgacaatgctgttccataatgcttccacagcatcatattacagagcaatgcctgtttcgaaactgttcttcattgttttcattttgctttgtgctgtagcacttatttcatttctcacattgccttggggctttaaagatggatatgtgtgggatgagcacaagtatatgtggctcacatatttcctatcaaggatcggaagcttcgcttgtatcaaatggattaaaagaagaagcgaaagatttgatcatgaactcagaagtcttatcgatttagcaaaaagataa

SEQ ID NO: 111927 - DNA, 843 bp, Enterobacter aerogenes
atggcaaacaaaaaatttacttataacatatcaggtccaaaagtaacgccaaacattaatactattgatttttttgatcagcattacgaagaaccaaatataacggctatagatatttataatcaaaagaaagatatacattttaggctgctgggtgaacctcaagactcttccgaatggaagcttttagttaacttggttatgttaggatttgtatcccttgttgaaagttattgcagatgcattatccgcagaattctacttgttgataaaaatgctatgtcatatagttttaaaaataatgtaagttatgctgcggctatttatcataaaaaagaaattttgcctgaggcattacttgaagacgcatcatttatttcggaaaaaaacattcttgacactatcaagacatttacaggattaagcattgataaacaaaaatcagtttcagtaattgccgcattgcaaaaatatgagcaaatatgccaattaagacactgtatagttcatagatcaggtttgtttggaaccaaaaatgcgttaaagttaggattagaacgacatcatcttttcctcgaaaaaccaattataatcagttatgaagctattcaatcaattgcatctgtctgtgataatgttgtgaaggaagtgaatgatgaactatttaacctattattagatggtattgctgaacaatatgactggacaggagatctaagaaaggacaagaaaatattttcgaagtatttcgatatattttattcctctgtggctaatcctaatagaaatgaagcactaaagcagtgttattattcattttgtcaacactttggatttaaataa

SEQ ID NO: 111928 - DNA, 177 bp, Enterobacter aerogenes; identical to SEQ ID NO: 100116

SEQ ID NO: 111929 - DNA, 306 bp, Enterobacter aerogenes
ttgacccagctggatacctccggttcaacgctgagcgtgggcgtggattataacggcgccgcggtagagaagaccgctgacaccatcatgatcgacaccgctaacggcgtactgggcggcaacctcagcgcgctgtctaacggctacaacaccgcaggccgaaccaccgcgcaggacggctttaacttctccatcatcagcggtaccaccgacggcaccaccgcggtaaccgattacagcacgctaccggaagggatctggagcggtgacgtgagcgtgcagttcgacgccacctggaccagctga

SEQ ID NO: 111930 - DNA, 195 bp, Enterobacter aerogenes
atgttgctgttgttcgaattgattaacagccttaacaatatcgccaacttcctgatgctcaaagaaaattccggtcggagtaccacaagcctgagcttcaaccggtgtaattccaaaatcttcctcagcagcaaaaacaaatgctttagccttttgcatatgctcttgcattatattgttatcctgatagcctaa

SEQ ID NO: 111931 - DNA, 1083 bp, Enterobacter aerogenes; identical to SEQ ID NO: 111909

SEQ ID NO: 111932 - DNA, 279 bp, Enterobacter aerogenes
atggcgcgcagtgagctgaatgtcgccctgcgccgcgctgatttttccgccatggttggtaagattgtcggcgtcaagcttgatattgccatttgcggcaatagtgccttcgccgttgtccagcgcgccttcgctggtaatagacatgccgccgctgccggtatgcagcagcgttccgttttgattgagcaactggctggtgctgagcgtcaaagcatggctgttgctggcaatctcaccgccgcggttatccaatcccgcgcgaaaatcaaggcgtag

SEQ ID NO: 111933 - DNA, 1404 bp, Enterobacter aerogenes
atgtttcatattcactcatttaacaagtcaaagtcaaaccaaaatactttgtcaatgttgaaaatcattgagtttgttttattgaaatcatacggagatgctaatattatcaagtgtaataatatcatatttgatgaatgtgcaaggttagcatcagccaaatattcaaaaaaacaagcagttggaattggtaaagaacttgagaagctatgttcattcttaactggaaacagaatgacgacctcatcatactttttctgggtgaatccgttaaggcataaaataactcagagctggaaaggttatgaaccttcactcgaaggacactcaaaactaccagacataaaatccgtaatagctattgctgagattttctcaaaagatgaaagccaattgtctacaagggacatcttcactacctctgttcttgcactactcatgtgcgctccaggaagaatttcagaaattttaagtcttccagcggattgtgagattactgaaaaagatgacaaaggcattgaacgatatggtttaagatttttttcagcaaagggttatgctggggatatcaaatggattcctacagtaatggtccctatagctcaaaaggcgatagctcgattaaaaaaactgtccaaccatgcaaggtttgcctcaagaacaatggaaggccaaggcactgagtcatccaagtatgcactcattaccacaaagcctcagaattttccttggtatgatgaagaaaaaagaattaaatattcaaatgctttatgtcttttatttgacaggcaactgtgtcagaagacaagaaaagattttacatcttttttcagacccacggctgagttttttagaatggatattaatgctgttgcaagtatcaaaggcacaacaaacctgttcaaaagacacggctatatcaatgaggatggtattccctattctattagaactcatcaattaaggcatctattgaatactttttctcaaattaatggcatggatgagtttagtatcgctcgatggtctggaagaaagttggtctcacaaaatgtttcctatgatcaccgatcacacttacaaatgactaagctcataagagaaaaaacgacaatcgaggcaagtaatagccataggaaaaaagaaatagctatcatggacataactgatttcgattcattgaatgatggagctgtgctcgttactaagtatggttactgcaagcactcatatgcttttgacgtatgcggttattatccaatacaagactctggaaaggatgatgatcgactattggtaattcataataaaattattgaaaaaacgtatcatgataaaaatgatgggaatctcaatgctgaaaaatggtatgagtttcaaactaaaattataaaaggagaataa

SEQ ID NO: 111934 - DNA, 489 bp, Enterobacter aerogenes
atgccgttagctatcgagcaactagatgtttctaatcaggacattatcctctcaagtagtcatgctgtagcgaaaggaattctgactgggcctgatcaattgcatatttcatatattcattcacctataagatatgcatgggatttgcaacatcaatacttaaaagaagcaaatttagataagggagctaaaggattaatcgctaaatggcttcttcataaaattaggttgtgggattatcgtactgcaaatggagtcaatcatttcattgctaattcacaatttattgccagaagaataaagaaagtgtacggtcgggatgctgatgtcatatatccacctgtcgacgttgaacgtttttctcttaatcaagagaaagaggattactattttacggcttcaagaatggttccttacaagaggatcgatcttattgtcgaagcttttagtcatatgctcttgcattatattgttatcctgatagcctaa

SEQ ID NO: 111935 - DNA, 654 bp, Enterobacter aerogenes
atgcatataattgcaacgttagagaaaccgctaactgatgggactagcaatggcagttttgcggctactaacttcactgaggactgcgttattagggatatttccgtaccgaatttagggagaacggcgttatctgaaggggtattgatcaataacagcaaaggttgtcatgtaagtaatatccgaatgggcaatgctaagtctgcagtgtccactttttacgttgatgacacaatgaacgaccaagcaaagccaaacataattgaaggaatcactggcattggatgtgatcaagccctggccatcacaggaaagtatgcaacatttagcaatgtaaatagcgttaactgtctgcaagaggttttattccgcaatggtaatgcgactggaaactaccttaagttcaggccaaaaagctttgcagttggtggttcatcaacgcaattcctcttcttttacttcctgaataacattgtggatggatggaataggaagtatgcatggttaagaccactggatgccttacggtctccatttacctcactaacatcatggaactcaaacactcaagtaaaaatggcaacggcaacaaccgtgacgtttatgcacaaaataacgccagatattaaggcggtatctggatttactatgtag

SEQ ID NO: 111936 - DNA, 195 bp, Enterobacter aerogenes
atggcagtatttgcagcaatgcgcataactagcgaacccaaaaaagcacaagatagctgggatgacatcggtcgcgctatcctaggccgcagcaaatctgtgtcaagatctagcgtatcttaccaggaaggaatgagccccgaggctatcattgccatggcgaatgcaaggtcttcgtcccgcaggaaggcataa

SEQ ID NO: 111937 - DNA, 1695 bp, Enterobacter aerogenes
atgagtattaaaaaaaatgaaataaggaattgtattagcaagcttgctaataatataagggcggaaaagatagattatagtagctatcttgagctttattcaggtggagaaaatattagaaacatcaacaatgttaataatagtgttatatatggcagaaggggatcgggtaaaacgcatctactgaaagcattgtcagaagaaataatgaataatttttctgctgataaaatatttccagtttatattgatttgagaagaattattcctcttatatctacgagttcagatagtcaggacgttaatgctgtactaatctttaagtacataatgcaagaagtttcatttaacctgtatcaaaatttacctcagattttagaggctaatgaattcgattctaaaaacgatttgttatttgactcaaagcttgagcatttaaaaaaactattctctgagttatatcttgagtttgatggtcgagaattaaagaaaacgagtgatttgaccgtctctgaagaggaggtcaaaagtatcaatggtggtgttgaagtatcgaaaagtcccaatctaaaagttagtgctggcagttcgacaaaagaaacaaaacaaacagaattaagaatgcatatttctattcttcatatgacaaatgtcattgaggaaataatttcttctttggatctaagattcatcatggttatgcttgatgaatggtctgaaatatctaaagatactcaacctgcgctagctgagataataaagaaaacattttcagctattaatgtggttacaaagatagcagcaataccaaatagaacaaaccttggatttaaaaacgataataagttctatggattagaggatggcggagatatttttggttatcatttggatttaagatatgtgttcgaggtaaacaaaaatcaaactcgtgatttctttaatgatctcttatacaagcatttatcatcaatcaataaggcagaagttgatgccttaattaaaaaagaaaagaaaacaaaagaaagttttataaatatcttgttcgccaatgtcgcgttaaatgaaatattaattgcttgcgctggtattcctagggattttatgaatctctttttgaatagctatgatagattcatgctatcatccacctctacagctttaagaattagtgttaaaaacttacgtgctgctaatgctgagtggtatgagaaagataagaaagagcaagttgataaaaatgaaattgaaaggaatcttttaactcagattgttcaggaagttattgagaaaaagaaatccatgcactttctcattcctgagaagtactcaaataataaacacattcagaatcttattgattttagagttatacatcttagaaagagtgggtactcacatcaagaccatgcgggggtttcttataatgtttactctgttgattatgggtgctataactcattaaatataactaagagtaaattggatacatctattctcaatgaactaggtgtaaaagagttaagagatatcagacgaatttctttagaggattcctttttccagcagtttatgatggaaattggcgaggctttcatatgccctcacgctgcctgtaaaaaacctgtagatacaaatcatcccgcttatacgaaacaagggttatgtaatcattgttttgacaaggtggtttaa

SEQ ID NO: 111938 - DNA, 321 bp, Enterobacter aerogenes; identical to SEQ ID NO: 109263

SEQ ID NO: 111939 - DNA, 591 bp, Enterobacter aerogenes
atggcgctacgcttatccgacctacggtccggtattcggctggtagccccggtaagcgtaagcgcgaccggggagagttcaacggcggggccgttagtttgtcggatggcgctacgcttatccgacctacggtccggtattcggctggtagccccggtaagcgtaagcgcgaccggggagagttcaacggcggcgccgttagtttgtcggatggcgctacgcttatccgacctacggtccggtatgcgggtagtagccccggtaagcgtaagcgcgaccggggagagttcaacggcggcgccgttagtttgtcggatggcgctacgcttatccgacctacggtccggtattcggctggtagccccggtaagcgtgagcgcgaccggggagagctcaatattgtcggatggcgttgcgcttatccgaccttgcaaacaccgcggtggtcactgccgttacagcgtgacgccgcttttaaagatagccagttcgcggaaatcattgcgttcgttgcaggtttgcttgccgttggcgatatcaacgatcagatcgacaaactcctccagcacctgcggcatcgctttcccgtga

SEQ ID NO: 111940 - DNA, 699 bp, Enterobacter aerogenes
gtgaagagtactcccacttccgcagcacaatcagaacaatggttagcagtcgacgcatggttttctacccttttttccccttcagatgatatgtcagacaagatactggcggcgaaccacgacgcgggcttgccggaacatgatatatccataatgcaagggaaaacgctcgccttctttatcacattaatgcaggctcaacgtattcttgagataggtacgctgggggcctttagtacgatctggatggcccgttcgctaccgccaggcggccgagtaaccactatagaggccgagaaacggcatgcggaggtcgcgttacacaatgtgagtgacgcgggcctgtgcgaccgtgtagatcttcgtattgggcaggctcttgacatattaccttcactaaaagggccattcgatctcatttttatcgacgctgataaaaaaaataatcccgcttatctggaatgggctttgcgtctctctcgttctgggacgcttatcattgccgataatattgttcgcggcggtgaaatactgcaaagcgaaagttcagacgacaatgtcaaaggggttcgcacatttctttctttgctggccaaacatccattgcttaccgccacggccatacaaacagtagggtctaaaggatgggatggctttgcccttgcagtagttacggggaacatagatgaaccagaatag

SEQ ID NO: 111941 - DNA, 588 bp, Enterobacter aerogenes
atgggtatgaaatcaaaatatcacgatattattaattcatccgctcttctttttaatgttgaaggttatatattacccagtattgacaagatttctgaagctgccgggatatctaaaatgaccttttatcgttattttaatgataaagagtcattaatccgagctattcttgaagataaacatcataagtttatttcagagcttgttgctataaccgaaaaggaaaatactacgaaagataaacttttcgcaatatttaatttttatcatgagtggtttgcgcgttcttattttcatggttgtattttttttcgtgctgtggtggagttgggaaatagcatgccagcactctgtaacatcgttttcgatttcaaaagtgatttacttaaggtcgtgagggatatattaaacgaatgtctgaagccagagccggctgagcgtgttgcggttattattgttatgctgattgatggtgccatctcgatgagccagacaatggacaaagaggcgcgagaatatcctgcggccatgactgcgtggtcagcagcaaaagctgtaatttattctgaaggtggagagttagagtga

SEQ ID NO: 111942 - DNA, 1065 bp, Enterobacter aerogenes
atgataaataaaagtgaatctttatcggtaattgacagagatacagccttaaaatttgaaaataaactggatgctttattttttcaactaattgatagtaatgatattaattcaatttttgaacggcggccacagacagcgcagcagctaatgagcttagcgtcggaagcgtgttttaatgcctttgagcatcagaatgaagaggcgctccgtcaggttcaccaggcgcttttctacgcatatcactctcatctcgccgaaccactttcttgttctagtcgaaatcaataccatccggtattgttgcaggtacgtacttttcttgagtcgcagtggctttttagcgaaaaacgccgtgtaagatctcaagcattgtttttatctccgggaaatattattgaggaacttcagcgactatggaagagccattcagtttcgtctcatgcgctgtttgattttttggagcatgaagctaatagccatcagctctattattttttcaaaagcgacagtgcattaaatttacttttctttgatctggtcgcgatgacgttggttggttctttccccgaaactcgtggtgaaattagtcagaatttatgggatgagattggacagggtagcaatgaatttacccatgtaaatttatataaggatttgctttatcgtcgtggtattaatttaccagacgatcactatacccatctgtatgactggcaggggctggccggatataatctatttatgatggggggcgtcactcgctgtcattattataaattgattggtatgatggcaatgaccgaattgctcgacccgtcacaatatgaaaagcttgttaacggtagtcgtcgccttggtctttcggcgcgagatgtgcattactatagtgagcatatctctgttgatgtcgaccatgctgatggctggcttaacaatgtcattattcccgtcgctgaacgttatcctgaggcgttggaggagatctactttggcgcccagttacgtttgcagacgtgtcaggattattacgataatttgctcagaacgctaaaggctttgtaa

SEQ ID NO: 111943 - DNA, 1305 bp, Enterobacter aerogenes
atgcattcttctccttcgatgatgaaactgggcgcgttctggtacccaaccggataccacattgctgcatggcgacacccggacgttcccgctaacgcgggggtcaatatcgaacactgcatggcattcgcgcgtcaggcagaacaagcttcattcgattttatttttctggcggatagtctggctgtaaaaggagatgactggcagacgctcagcaagagcgcgcatcgctacgtgggtcaatttgaaccactgacactactttctgccctcagtgccgtcaccacacgaatcggcctggttgcctccgccacgaccacctacaacagcccatacacgttggccaggcaatttgcttcgctggcacatctcagccaggggagagcgggttggaatctcattacctcacaaaatccctttgaggccggaaattacggtctggaaaatcatcccgaccatgccgatcgctacaaacgtgctgaagagttttgcgacgtcgttaaagggttatggcacagctgggatgattcggccttctgttatgacaagaagaacggacagttttttaatgtcgatgggctgcatatcctggaccaccgtggcgaaaatttccgggtgaaagggccgctgaatgttcccgcttgtccaggcggcgatccgattatcgttcaggcgggcgcttctgatgccgggcgcagacttgctgcgcgcaccagtgaagtcattttttcagcacaacatgatttttcctgtgcacaagaattttatcaggatattcatcatcgcgcggcgctagccagtcgcccagcgccaaaaattatgacagggctattcccgtttgtaggacaaagcattcaagaagcggaggaaaaacacgctcggctacagtcattgattgatgatagcgtggggctctctctccttcaggtgcagcttggtggcgtagatctctcgtcctactccatggatgctcctcttccgccgcttcccgaaggcaacgccagccgtagccgtcgtcaattgttgctggaattggccgagcgtcagggttatacgcttcgccaactctgtcaacatgttgcaggtgccagaggacactggcagctcgtgggaacggcagcacaaatagcagatgagatggaatactggtttcgtcaacgggcaacagacggttttaacatcatggccccctggttacctggcgggtttgaggattttacccgctgggtagtacctgaattaagacggcgaggattattccgcgacgaatacacaggcacaaccttgcgcgaacatctggcataa

SEQ ID NO: 111944 - DNA, 1227 bp, Enterobacter aerogenes
atgaatatcgcacaagcccccctcgaccatcttttatgccgtttattgtttgatccgcagcatgccggagaactgacgcaaacattgtcggcagaacagtggcaacactgcctcgaacgcgccgtcaaccataaaattctgccgcacgtcgcgatgctctaccagcagtatcaggccttaccgctgccggaaaactatcaaacaattttgcatacgcatacgctggagcgttccagttggctcgctgctctacgactagccgcccctttcagccaaagcgctaatgctatgttaatgaagggctttggccatgagctcctctaccctgaaaagatagatcggttcgcaaaagatatggatgttgttgtggctgatttcactgtcttctgtgatatagctaaccagttacttaataatggctttcatttgccatttatgacgcagtttatctggcgtaaagagttgaaaagctggcagggactggcccgcttcattcatcgggaaggaaatgaagatggcggggttgaactgcatatcggtcagtttgcggtcgatgaagcccacaaacttagttggcctacgttgcacgcgcaggccacagtacaacgctttggggagcttccgctctgcatgcctgatacgacgatgatgctcaccgtttttttcatggaacttgccacccgcccggaatgcatgctgagggatctctatgatggttactgcctgtgcatgaccctcacggaccaggataaattcgatatgctggtcacggcgctgaataaggcgcagcttggcgagcaggtcataaaactgatcgcggcctttaatcgctttaatcatcccactccgcaaaaactactccagcttgagaaaaaagttcgaacacgtgggccatcaggtaagtgcaactggcgtaaccgaattcgaaaacgtctcgatagcgcttgccagaacgccgacgttttgctgcggctatacagtatttttgatagaccttgggcaattcgcctggcaatgcatttcgccatacctatttacggcataccgctgagctctcatccacaaccgctgcggctgataaaaaggggacgttacaggctactaaccacccaagcgggcacatttttacttggcggtgtgggtatattcagcgatgaagagatcgagtatttacagtcggttatcgcatcatcacctttacctctcacgcctgagccggagccataa

SEQ ID NO: 111945 - DNA, 1074 bp, Enterobacter aerogenes
atgttaaagcgggctattgattcctaccaccatcttaagcttgacgatacgccagagctgctaaatctggcctggacgcaggatgaacggaattttattactcccgccctgaacgagcttattacgtgcagcctgcaggaggaaatcaatggacaactgcctgcaacctggcattatgccgtcgacgatccttggggagaacagcgtctcaccccagccgttgcccactatttcggcgttcaggaaaaagcattctcgctggcctgtggagccggcgtcattcaattattgagtattttacccgcgctaagtgccagacggcatgtcgccgtcgacggtgaagtttatccagactttccctggtggttaaaacattcggggcgacgcgcagaacgaatcgcatccgagcccttggcggaaaggataaagcaggttatcagtctggaaagcgatctctatttcatagaacgccccgcgcttcagagtggctcagtcatgtctctggatagtgtttatgaattgggagtagccatggcgcgagcggggataaaactattgattgatgaatccaacgccaattaccttcccccctcctgtagcgccgttcatttactggcctgtctgccaaacatcatcgtactacgaggtatgtcaaaagcctggggattaggtgggctacgtatggggttttgtctttcctctcctgcgcttaaaaacatgcttcgggaacatattccgcctttacttaatccgtctttaacactaaggatcgcccacaatctgctgatggcgggggatagcacagccagcctgcgcgcgcgaatccaacaacaaaagcaggccgcgctcggtctatttaccggatggccagtgatctcctccagcgaagccatgccctatatttttctccccagtgacaaggaatccgcgctgcaaaaacgaggagttgttggaaaacagcaccacttctggcaggaaactaacgcctccgccactctgttacgtctcagcgtaccgctggagaccagtagaatgcagcggctggaacaggccctgaaggtagaaacgccatga

SEQ ID NO: 111946 - DNA, 1038 bp, Enterobacter aerogenes
atgaaaaaagtggaaacagcgtcgcgtttaagccagcggcattttcgtgagcgtgtaagagctcgcttgtcgcgcaacacgcaccagatcgtgtttgccctggatggcattcccggcaaactggttgacactctgtggcaaacgccagtcatagaacgctggcatgcagtgtttcccgccacctcaaccactggttggctcagcagcctgaccgggctcggcgttgaagaacacggtattcccggcgtcgtgttccgatataacgaccaaccggattcgcttatcaatatttgccaatatcaaggggaagcgctggcaattcccacagacaacattttccatgacgcacgccgctgcggttatttaccgcaagctgtgataggggatctgctccccatcgagggaacctggacgcgcgccctacttgatggtgtggaaatcatcgaccgaagcgttttttttaccctttcgccaccacaaccggtttgggcacttctagaaacacttaaaaccgctattaaaagcgcgctcgagagaacagacgtcccaaccctggtctggatatttatcgatatcgatcattacgtccacacgcaaggttatgacgctcacgttacagcctttctgctgggtattgatgaactcgccagcactctgacgcaacagggctgcgatgtcatcgcccattccgatcatggcctggtacccgtgctccacgatgagcagatcgcccaccagattgacctgttgtgcgaacagttcggcgcgaccatgggaggagcaggtctgacgcgctggttctatgtcccggatgacagagtagccgaattccatcgtcgcctgaccgatcgcctgggggagtttgccgaggtcatttacgccacagaattggatgatatgcctgctcgcgtgggcaacctgctgcttattgcgcgtggcgaacgatttattgcctctccgggctaccggtatgaacatggctcacgccagcccgacgaactcgacgtcttttatgccatatgggagacaccatgttaa

SEQ ID NO: 111947 - DNA, 2127 bp, Enterobacter aerogenes
atggagaacatggtagtggcaatcgtcggcggtggtccgcgcgcagtgtacgccctggaacgtctactggtgctattgaccaaccatctgcccgtacgccaattatctattcatatctttgataatactggacgttttggcgcagggatggcgcacagcgatctacagagcaaaagctgctatttgaatcgcccggtcgatcaaattgcatttgccgcagatgagtccatcagcacgaccaataagctgcttcccgcgccgttgcgcctcaatttttatcactggtgccgacaacgtttttatgcaacaggcgatgcccgatttgatttacagccccatgacattcctcgtcgatatttacacggtctcgcgctgcgcgattatttcgatacctacgccaacgcccttcgggcactacccggcatagatgtcacgactcatgcagaagaggttattagcgtcacgcgcaataattccgattttttactgcataccccccgaatgccggcaggtttgcgcgccgactacgcgctctttgtgaccgggcatacgccttgccgcgcccattggcaaacggatgaagcccgttatcaacgcggcttacgttatacatcgtacgcctatcccctggaccaactaaacagcgtaggcgcaggaagcagcatcgccctctgcggtatgggcctcaccgccatcgacatctgtctacatttgacagaaggacggggaggccgtttcctccgtacagaagagggggacttgcgttatcaagccagcggcaatgaaccatcgcaaatcatcacgctcagccgaagcggccagctttacaccgcccgggcacgcaaccaaaaaaccgcagtcaatcttcaccgcccacactttttttgtgaagaggcaattgcatctctgcggcgccaccgtggccgatacaccgtgctaggtgatggcaccgtttgtcgacagatcgatttcaggcaggatgtttttcccttaatcgtcctggaaatggcgtggatctattaccggaccctgtttggcgaacggtttgcgcagagcgtcagcgcggcgctcgctccacattatcaggcgtttttgacacatacggcatcggagatacagtgcaacgttgagacgctaatggcttattggaacgaccattttcgtcaaatggcgactgcgctgaacgaggcctgtcagggaacagtatgccccgatcggggcgttcaggaggccgcggccgcgtttgtttgtacgctaacagatgaacacatcacgccggaacaggcgattagccgcctgcgctcgctccccaggcaggagataaaatggcgccatgcccggaatatttatcaccactacttcgactggcaggctattttctatcccaaaacgcgggggcgtcggccacgtaaagctgagcacctggacgcactggcacgcgatctggcttttgccgcacagggcaatatctctaatcccctgaaggccgcctgcgatggcgtctggcgcgatttacgcgccgtcttctcggcagccacagattttggaggcctgacgcccgcctctcagcaggattttatccgccactggctctcccactataatcggctttccaacggcgccggtacagaagcgatggagaagctaggctgcttgattgccagtggccgggtggcaatcgcgcctggcggcacccgcatccgttcttgcggcccctttagcggttatcggctcacgggtcgacaatatcggctacgggttgaccatctatgttgcgcgcgtttacaccccttcgatgcgcatcggcaacgtaattctctctacccttccctgctcgcaacaggtctggtccgcatgtgggaaaaccgtggcggcgacggaacgcgctttatgccgggcgccctggacctcacccgcgattttcaccctattaatcgccaaaaccacatcgagaggcgattaacgtttctcggggcgcccgccgaaggactctgttttttccagaatgccgccgcgcgccccgacaccaatagcgcaatccttagcgccataaataactgggcaacagacctgctgacgcaaatggctgaaaacgcgttggcgatatcagaaccggagcggctatga

SEQ ID NO: 111948 - DNA, 933 bp, Enterobacter aerogenes
atggaaatagaagtctctttgagcggcgaactccccgacgcgcgcatttatgaggaagtctctgccgtaggtctattgaggggcgagtatatttttcgccgcgccggaaaatacctgacggctcccgatggacgacagctcatggaagaatatatcgaaaatattctgcgaacttttccggacaaggatgtttggtaccgttttatcgacgcgccagcaaatgaaattaatatgctggaaggctatgacgagtatgtattagaagagtttccaactatcgggttgcgcggaatgcgccgtgcaatggagctgccacgaaccttcgatctggaatttgatgtggttactacgctcgccaggaagcataaaaacttgcacatcatgtttccctacatctgcgaaatgtcagaaatcgaatttggcatggattatgtgcgccgcttcagcttccccaacaaagtgtcatgcatgatggaaacccctgccgccctttggcatgccaaagatatccagcggctcggtctggaaaactttttggttggcatgaatgatttgagtagtctggttgtaggcgccagccgaggtagtggttttgatcgccataaccatcccgccattatcggcatgcttaagacgctgcgccaaacgctaagcgacagccgtctcagcattgcggggtacatgaagcccgaatttctggaaattgccaaacaaactggaatggatgccattaccgtgcattactcctccttcccggccttttttggcgaccgtttttctgagtaccaggatatggactttatgctgaactttaaaaaacaggataaccgcaagcgcctaagattatgggcccagtctctgctagatgttgctaatgataccagttcaatgacgattcaaggcctgcactggcataaaaaagccaaatcataa

SEQ ID NO: 111949 - DNA, 651 bp, Enterobacter aerogenes
atgttaattaacttattgggttgcgacggctgcggaaaatcaacccagttgcgtcaggttatcccgtggctggaagcccactattctcagccagtccggtcaatttcgaaaaaagatgcgttgaacatcaccgccatccctgaagctcgctattttggctgcgactaccataccctgatgttcgatatcctgcctgaaatgcgtggagcaagccgggctctgtttatctttaatctgcttgctataccgctttgccatcagccggtacaaaacgatgagattgtgattctggatggtggctggcaaaaacatgtcgccaccgagatggcattgggtcttgatgagcaatggttgactaatctggccgacattttccctaaacccgacctgacgatattcctcgacgtggatccggataccatcctcgaatggcgtaggcaaaaaaatggcactcatgctccctacgagtgcgggaaccaatcaaactgcagcgacgccctttttctggaacaaatgaacaaggtataccgaattttgctcaggcagagccgggaacaaaattggacacgaatcgacggtaaaaaaactacgacggaggtgtttcaggcgattacccaaaccatcactgcaaccttcgaacccgcacgttga

SEQ ID NO: 111950 - DNA, 1269 bp, Enterobacter aerogenes
atgtcagcaaagttatctttaaattcagagggacctgcaatctcggttgtcacggcacatggacgccagcaactcatcagtaataaagatgagcgcttaattgacgtcctcaaccgtaataatgttccgtggtctgcagtctctatctaccagcgtaatgaagatgacgaaacgctacacctctgctctggcctggaaaagagcatgtctgagtttaacgctgatgaactattgctttatttcaatcgtaacgtaaatccttttaaattctcgccagagaattttcgcatcgtgccggcatcagaggacgagcaacagtcgacggaatacatctatcaggatttacaaaacagcgactccagcgcccaaagttatctgaaaaaactgacgccggaagagtgtcagtcgattattgcccagcgggttgctgataccattaaagagaatttgccggaaggggctcatctggtggtgggggtcagcggtggcggtgacagtaatgccatgctgcacggtctgagcctcatccgcgactatgtgcatattcatcccgtcatcattatggggatccctgattgggataaaggcgtgccgcgcgccaaagcgctgtgtgaaaaatatcagctcgaccttaaagtttttgacgaaacagaagttaaatccctgctaggtattccttccgacggcgaaagccttattgatcgttttgagcgacattttgtcggtgacgactttgaattcctcggaacattgctgattcgtctctctctgactcgctatgcgcgagagttgaataccaccttcatcagcaccggtctgaatctggaagatgtgctgtgtgaaaatctctatcgcgtgacgaccggattaaagccagcttccagtcctgctcgtaaaattggcgatatgacactggtaatgcccctttggatgtgcccgaaacggatcattgacggctgtttccctaaatactccctcgacaattacgaagcgcgttacccctgcttctccctggggcgcaatctgtactacagcgtcatttatacgctgcaatcgagctacccgggatttccggagcaaatggccagaggactatctctgctggcagaacagaatccagtggagtaccacctggatgaacagctcggcttttatgtagaacgattggttccactggcgctacgccatcagtttaaaaaaatgctcaatgatgcccagggggtcagcctggacgagcaggcagaggacattctgcgtacgcagcgttaa

SEQ ID NO: 111951 - DNA, 210 bp, Enterobacter aerogenes
atgaaaactgctttaaaacaaaatccaagtaataatttcaacctgaaaaatgaagctgtaaatctgatcgtacatggcgcacatcatcagtatgccgacctgtccgtcaatgagctggaatcaatgcgtgctaatcgcgcatttattccggcttcacggcatgggattgaaactatttgcggtgccagctgcgaaaccggcgcacagtaa

SEQ ID NO: 111952 - DNA, 954 bp, Enterobacter aerogenes
atgatctatttaccctccgatgtgaaaataaagttttgtggtcatgtttttttattttatgtgtttgagcaggtgttcgaaataagttttgatgatgaagttcaatatatttctgcacagcaattggctgatgcattagtcaaaaaagggtgcgccgagcgggatcaaacccctttttgtgaatatctcatagaaaacaatcttgtttttgaacataccggtagttttgctcccgtcagcgaattggggagtaccggaaatgctttttataaccatctgtttaatatagttaataataaatggttgttagagcggggggaaactccgcttgcgctggcgctgctggaacctgaaaagcaccgagccctgctgttgggctggacgctggaatattttcacgtcacccgactggccatcacctcgctgattggtattcttgggcacaacttctctccagcacttgctgcgcttgcccgggattttgttaaagaagagctatttcatgagcgtattatggccaaagcttttcaggatacgccatggaatgacagccaagtgtttgcctcgcaaccgctcccctcaacgcaagcctatatggattttctcaaggatattgcttttcgtcgtcctcactcgttttttgccagcctgtttttctatgaaggtgatgatgaagatatgctgatgttctccgagcgaattcccgatatccctggttttcgtcggatacgtgacagtcatctggcgcatgcccgcattaatgttcagggcgatcacgccaatttttcacgccactatttctcggaaatctctctgcttactcacgagcagcaaaacgaaattctggatgatatgtcatatctcaatttccttttttatgacatgcaggatgaaatctatacgttttatcgtgacgaacaggcggtggaggagcggttatgtatcaatcaatga

SEQ ID NO: 111953 - DNA, 339 bp, Enterobacter aerogenes
atgtatcaatcaatgatgtttcagatgatcagccttggcattgcgatgaacgcggatccactggttgatttgcgtagtgtatggaaaaaaatgacgctgctggaaggcatcgaaacgccgctaaattttcagcaacgggcaattgttacgcgcggacggatcgccatgctcgacggagagggacgcttttttgcttttttacgcacggtctgccagtcactccctgaggcgccctggcggcaggaggtaagcgaattactcggtaaggttgatttacccgtgtttatggaagatcgcgcgtttgtagctcgctttttgaaggaccgttctttgtcatga

SEQ ID NO: 111954 - DNA, 1173 bp, Enterobacter aerogenes
atgaccttactgataattattacaatgctgaaagctgttgccgagaaaataagtaactttattttgccgttatgggcatttcagcagactcagtccaatgatttgatgagctatgtacgcatgtttgaatacctaccttttatggttttaggattcattattggtgcgctggtggatagagtcggcagccgtcgcggttttacgttagggactctggggcagacagcggtgttggcggtgctggcgtggtatggcgctccatcgccacatttgcttttccttctggtattcgtgctaatggggatgacgtatttcgcaaataactcgctcatcgtccagtcccgaactgctttacctgataacagactaatcacctataaccgctatacgaatatggtgactaatgtcatggaaagcgcaggacccgccataattggcgctttattgctggtattaagttatacccaggcgctgcatttttcttgggtgctgctgtctgtcgccctgttgcttggcataatgactttccgacgtccgccagcaagggggaaaaaaccgtttatacccgatgttatatacggctttcgagccctctatcgattgcgtaatctttgggttttatcgtggtggacggcctttgctaatgctgtgattgtcgtctcggaagtcgtggtgatgtactgtgcgaagtcgacatttaccttcaccgattttcaggtcgggttacttttcgcagttggtggtttgggcgctataagcggatcgtggctgtcggaacatattgagcaacgcgtgggggtcatacgggtgctggcctacagtattcctctaattgggcttgcctacctcttcaccagccttcacgttacgcctgtaaccttaggcgcaatgttgttttgcgaatcttttcttttctctctctatattgtctgcgttcgaacctacaggctggtggtggccccggctgacgatctcggcaaaattaatggtatcaccggcagcatcttcaaaatgttcatcccggtatcactaacgctttatgcgctctggggtaatcaggtttcgacaggtgtggtattgggagtgatgggagggctgtttgtgtcaggttcgatagtgttagtggcctccaacgtgctcaggatgcaggaaaaattgtcagataattattaa

SEQ ID NO: 111955 - DNA, 1638 bp, Enterobacter aerogenes
atgacgcagaaatggcttaaatgggcgctgagcaacggtaatgaaacggagatgttcgatattatccatgggcttggtgagttcgatcgttatcaggcttctcaaggcattatgtctgcggcgacatttatctctcgcgtagcaaaagagaaggggatgtgcgatgcgacagtccaccacttcactgctaatggctcccgaagctggtgggatttccaggcccctgtggcttggacgccactaaaagcgacgttgtctctgtttcccccatcctgtgtactagaccaccggagcaaaccttttactttggccacctattcagcggcggcgtgtggacagtatcccatggttttctttgatgaggtaaacgatctcaacgggaaagttgtccttatccccgcgtcggactatcaacctgctggtctgttggcgagtctgaagcaacggggcgcggcgggatttgtgaccgatgcctttgcccgttttgatcccgatagcggccgttactggcgtggccgccttgagctgccgccaggttgcgaattatttgcgtttagcgtgcttccggaagagctacgagacctggcttgcgccgaaactgaggcgtatgtcgagatcgtgattgatgatgatgcctccatgcccgtagtgagtgcctcaattcctggtaagacggaggtgcgggagatctgggtaactgcacacctatgccattcccgcgcgggggcgaacgataatgcatccggggtgagcgcctcgcttgaagtggcgagactggtgcagtgtttgataaaaacgtccggggcgttgcgttatcctattcgcttcatctgggggcctgaatttcttggcgtggcggcgatgcagtataaaaggcgtcacctgccgggaccgattgcggtaattaatctggatatggtgggtgaagaccctgagcgatgcggggcgccaatgtgtgttgagctccctccagacagcttaacctccccactgggagagatggcaaaaatgctgatgcagaacgtttttgccctgaccgccgggtatcctggttcctggcttagcatgcctttccacggtttttccgatcacgcactgtttatgaaccatagcgatgcgcagcgtaactgccctgcggttcagctttgccacatcaacgatcggttcaatcataccgcggcagatttgccggataaggtctccggtgtagagatgaagcgtgcggttgctgtagcgttggcgctaattatgcaactgcaggcgctacgtccagaacagattttgcctcatcgtcaagagccggctcctgaggatggcggcttggtggggcgctgggaggggccgcttaacctcaggggccttatccagcggttggacaaaccgctgcgacagtcgatagaaacattgatttcacgggataaacgttaccttgcgcttctgcatctttgtgctattggggctaatggatgccggagggagacgttagtgcatgaatcggctaacacgataggtttgccactctctgatgaggtggctgcattactattctcactttttgattcctctgattattttcaggtctgcagagcaaatcacattccggggggcgaaaattatggatccacaacagctttttga

SEQ ID NO: 111956 - DNA, 1581 bp, Enterobacter aerogenes
atgtgcctgaggcctggcgagcgggcacgttacagtgcgttattgaacttcgtcatgctgtggagcggattagttcttgccgctttgatcagactgagcctgctaacggctttttccctgaagatatcgtccaccattatgaggcaacccgtgaataaggctcttcatcttctttcgttggccgagttgtcgcggcagttgcagcagaagttactgacttcagtggcgttgacggagtacttcctggaacgtattgaacgctttaatccaactctacacgcatttatacaggttgatagggagcgcgcataccgctgcgcacgtcgcgccgatgatatcctgactaagggagggccgtgtagtcccttaacgggcataccttatgccctaaaagatatttttgacgttgagggtgagccgacaacctgtcattcgtatttgatgttgcaacatcgtgcgacgcgcagtagtaccgtggagtcccgactggctgcctccggcgcagtatatttaggcaaactggcgacgcatgagtttgctctgggcggcccgagtattgagcttccttttcctcctgcgcgcaatccctggaatacggcacattttaccggagcatcttcgtcgggggcgggcgctgcagtcgctgcggggttggttcccatcgctcttggttcggataccagcggttcaatacgcggccccgcctgtttatgcggtatcgttgggtttaaaccaacctatggagtcgtctcccgggcaggtgtattccccctatcatggacgctggatcattgtgggcccttaacgcgttttagcgatgatagccgtagggttttacaggcgattgccggatatgacccggccgacccgacgaccaacagccgtaaactggatttatctccccgagcggtgacatggcccagtcaccgcatagcctggccacgacatctgttaacggataacccacataccgacccggcactgatcgctgcgatggatcgggcggtcggatttctggttgacgcgggagcacaggtcgaagaggtgaaatttaaggatttttctctgtttaatgcctgtgggcgaattatcatggctgccgaatcttttgctatccatcagcacaatctgcgcacacgaggagctgaatacggtcgtttcacctatcagcggatcctccccggtgcaacaatttcggcaactgagctattggatgcgttgcgtttacgtacggaactgactggctggctgaatgctgaattattttcgcgctattcattgttgctgtttcccggcacgctgcgggccgcaccgcacttcaatgaattttcacaggattggccaccggctagccatgtcgtaccaacgcagacaattccctttaacgtgacggggaatcctgcactgagcctgccgctggggctgacggaggatggattgcccctggggatgcaactcgtcggcagattatttgatgacagctttgtgctggacgcgggcgaggagatggagaaatggctcgcaatgcccgcactgagtgataacgttatgatatgccagcagaaggaagccgcagcgtaa

SEQ ID NO: 111957 - DNA, 1074 bp, Enterobacter aerogenes
atgattacagcaaataacattgctttactgttcgatgatactgtccctactcagtatttattttctttagctaaggacatcccacttccgcagaggctatcatggttatatataatttcgaacatcagagaaagtagattattagatgaatatgaaaacacattgagtaaacataactcccaagcaaaaaataaaaaatttgataaaatctatgcgaacaccgaacaaacgttaaacctctgtggtggtaccgtagaccgatcattactggcaaaagatattgtcgacatcacccaccttatcgcgcaaaaaattcactgggacgatctgcagtttttgccagaacatccgcactatatgcgtgccgaatatcttgaggctacgctacagaaagtgaaatccgttgaggacgtgtgcctggctcttaatattaactgcatagactgtagacctgacagcgcaaccatcgagattaaccaagcgcgtgtcgatattataacggatagcgataactacgccgacctccgtctcgacgataaacagcgaagcgcgagtattgcgcttaatgcccctgactttaccagcctgacaccgagcgaagctcttgagctagcgcatgaaattggccactgtcgtaaccacctattcagcccctatcccagcggagattttgcgcttcctttctgggataccgaactgccggcctttgaagaagagtggcgcttatgtacagcgttggatccccacataagcctgcaagcatggtctctcgaagccattaagcaatccgttttcgctctttttccgcttctggctcctgaaaacggtatagagcgggcgtttcgatatgccctggagcacaatcccatttattgcaacagcgcgaaaacaccagaatggctactggaaaaaacatctcttttcgtctggactggagtcccttacgtgcaatatttcctcagcctcgcacatctcattttacgccatagtcccaaggatgagcagcttgcgaaattattatcgcgcagctattcacgttttacgctgcggcttccttctgctggcatatcataa

SEQ ID NO: 111958 - DNA, 594 bp, Enterobacter aerogenes
atgcaaaaagttgtactcgctaccggcaacgccggtaaagttcgcgagctggcctcgctgctggaagattttggcctcgacatcgtcgcccagactgagcttggggtcgattccgccgaagaaaccggcctgacctttatcgaaaacgcgatcctcaaagcgcgtcacgccgcgcaggtcaccggcctgccggccattgccgacgattcgggtctggcggtggatgcgctgggcggcgcgccgggaatttactccgctcgctactcgggtgaaaacgccagcgacctgcagaatctggaaaagctgctggatgctctacaggatgtgcccgatgagcaacgccaggcccatttccactgcgtgctggtgtatctgcgtcatgccgaagacccgacgccgctggtatgccatggcagctggccgggcgtgattactcgtcaggcggcgggtaacggcggctttggctatgacccgattttctttgttccgtccgagggtaaaaccgcagcggagctgagccgtgaagagaaaagcgccatttcccaccgcgggcaggcgctgaaactgttactggaagcattacgtaatggctaa

SEQ ID NO: 111959 - DNA, 762 bp, Enterobacter aerogenes
atgaaatctctcatgccaagaagtaggatccttttcaaatatcgtagatttgataaaagctgcttagagctactcctgaaccgagagctctggttcgcttctccatcaactttaaacgacccatttgaagcacaatcctcattcgatgaagttctacatgcggtatgggctcgttatcccttgccgcaaaaagagcgtgagctttacgaagactacctccaaaaaaaacttagctcagcgggtatttgttcgttcagcatggctcgaaaaaatcagttaatgtgggctcattatgctgatgaacataagggtgtatgcataggattcaaagaacaaaaaatcaggcctgaaggctcacatattttccctatagatgttacttaccaagataactatccatttgacgacattattgagcgcttcaagcactttgagcattatcctggtatgaacgacttaaatagcataactggcgatattctttactctgtcctcggaactaagtacacaagttggaaatatgaacgagagcggcgattggttttttttaagtcatgtgctaaaaaatttgaaacggaagcagttaactccattgcttttgggctcagaaccagtgaaagggataaacagacattgcgagctttgttagctggagcagaatgggagcatgtaaaatggtttcagtcagttaagtctactactaagtactcacttgaattcgagcgtataaagtcatcaccccttcactcaagacagctttga

SEQ ID NO: 111960 - DNA, 804 bp, Enterobacter aerogenes
atgatttattacgtatcattcaccattataatatttatttcagtggaggttctcatcagcaaaactcgccctgctgtaaatatgaaaacgataccctctccatttactgtaccagtttggttgttcgcctggttacgtaacggaactaacggcgttatacaactggctgtgtttcgcctgttaagaatgaattatttaactatcatacatacagagcataacgttaaactttgtgccaaccaacagcattataaatgtgaaatgagtcggatagaaaaaatactttttgaccattttactttgccgaaaattagcaatcaaaatttacccatgactctttaccgtgcaacagaaaacgattgggttgcagaagtgcgccatacaaactttatgttaagttccgtacaacagaggataaaccaacttctggtagttatacccgcatgtattttaattatactgctattatggaaagcattttatgcctttgaaaaaacagatgccggttcaataaattgtcttctaatgcttataatctctagccgttgctggtttgccatgtcgcgaaataccttagataaaacaaatctggacaggaaaggattctcagttaaagtaattaccgcttgcactgaacatttaaaacaatcgttaacatgccgtacacttctcctagatgaaaatttcgtcgattatagtatcgctgtcaatgcggtcggtactctccccatcaagtatcgcgaatactataatatagcgttgactatccaacttccacaatccatcgaatataccaatagttaa

SEQ ID NO: 111961 - DNA, 585 bp, Enterobacter aerogenes
atgacaaggatcgcggttgagctttccttactaacttttgtgcgttccagtgaattacgtttcgcgcgttgggatgagttcgacttcgataagtctctctggcgtgtacctgcaaagcgagaagaaattaaagtcgtgcgttactcaaaccggggtatgaagatgaaagaggagcatatcgttcctctcagtcgacaggcgatgattttgttagagcagcttaagcagattagtggtgataaagaactgctgttcccatgggatcacgacgccgccaaagttatgagtgaaaacacggtgaatagttcgttgcgtgccatgggttatgatacgaaaaccgaagtttgcggacatggttttaggacgatggcgcgtggtgcgctcggtgagtcagggttatggagcgatgatgaaattgaacgtcagttgagccacactgagcgtaataatgtccgtgcggcttatatacatacttctgagcatttggatgaacgtcgattgatgttgcaatggtgggctgactatcttgatactaccaagataaaccccatcactccttacgattttggaagctctaaaatctag

SEQ ID NO: 111962 - DNA, 1674 bp, Enterobacter aerogenes
atgggacaataccatgatgaagaatacattaatgatttaacagagcgagttttcctcattaaacaacaactcgaagctggtaagataaaaatatccagccatcttgttgacggttttatcgaaagttttggaaatgtgcgtttgcgagaagatgggaaagtagacccttctactgttgacggaagaataagagcaatgggagttgctgttaaccacattgttgagagggaaaatacaaagaaaaaatattctattcatgatttacaagtagcatattttaatcttttattcggtgagtttggagagttttttgaattaatgaaatcaactaattcctctccacataaaatatcaactttcttttctcaaaaagatgaatatgttcagaaaatagatggttttttccccgatgtctacgagaacattaaggggttttgggaggccgcatctgagattggtgtgatacatttacaggatggttcccagcttaagtcaaatttctcaggtgatttgtttccttcttttcatgagaatgcggtttctattgctggattgtatgttgatacaatttctttaccatgcccagtgttgcgtgttggtcggctccatagtgtatctgataaagctgaatttacgagacttcttcttaaacatgttctaacgtgtatgacatataaagatgtagctttagaggaaattgagcctgcaatcgtattgattctacccgataggcgagatttcgaaaaaaatagccaagagcactttatgaagatttgtgaaccatatgtcatggcacatgcacaatatctttatgcgcgaaaatttgaaaactacggtgatctccgtgagtttagtaattcaatggatgatattgataaggtactcaaaaatataaaacgaccagatcgactcatttttaattctgaatggggatataatccaagggtacagttggaaaaaattttatcagacaaggatagaatgacaaaaaatattataggtgaacatgcagggatggaggtgtttttttcatgtgtaggtcgaatgcctcaggcgtatgccgcaaaatgtaatgcgcaggaacttggaagtacgccttatataaatgcagatacatcgtggctctattatacgtggcttatagagtacgaatctcaaaattttaatgtagatgatgatgaattaaaaaacctacatatggtacatgctttatctcatggtatgcaggatgggttttcgtggttaggaaatgttccggtcaataagataattgaattaagacgaaataatttaatggacgaagtaagaagtgttttgtcaagtggagttgattcgttagtgcattcatccagtgatagttatgttcgaactactcagcaagtgattgacaatgttgatagagcttttattgagcatcaaagagtattggataaagcgagaagagaaaagttaagaatttttgggcttgacgttgctccttgcctagccaatggggtgatagccattgccggtgctatgactggtaatgtggctttagctactgtaagtgctgggctaggaattatagggctccctacaattagtgacattaagtcaaaatttaagcagagacaagataggcttgatgcatataagcgaactgctacaggtatactttttagccataaatcttaa

SEQ ID NO: 111963 - DNA, 594 bp, Enterobacter aerogenes
gtgagtgaagataatcaatccgcaaaaaaaaccaatattattgataaatggtcaccaaaggatttacttaatcctttttctgaactcttaataatattcacatctaaaagcgataaaaacgtggaaagcgccgctgaaaaatttcagatgcgaattcaaaaagtcatattcttggcattaactttattacttcttgcaaagggtttttttgaaatactacaaaccctaaccattctagagcaacctataattttacatgttcccttcctaaaagaacctttagtattttataaggaccatggtatcgcaggtggccttttaagaataaagtcattggtattcgtagccaatgcattagctctttcatgcggttttcagttagcatacatgcttgttacaaaggggccagatgaagccgtagagccaattatgctgggaattgcctctgctatacttttaatcctctccgatagttccccttccgattgggggcaaggaaaatctctagcgatattcattttaataataagcatcccaattttatattggtcatccagaaaaatgaaaaatgataaaaaccaagatgagaaataa

SEQ ID NO: 111964 - DNA, 417 bp, Enterobacter aerogenes
atgcatgccgatgtcggcggcgactgtaagcccaccgaactcggtaaggtgcagaccgatgccgccagcctgctgtcaaagattgtgctgcacgatatgtatgccgccgcctttgacgccggggcgccgctgagcgtacctgaggaggtgatgcctggcggggctaaagagaaaacctatcggataatgccgaatgacgtattaaaacaattcaaaatctccgcccaggccatcgccctgtttaatgcctggcagcaggccggggcgcagcaggcgggggcgaagaccgaaacgccggccgtcaacgaggcggaggtggtggccatcgccgtggcccagggccgggatccggttgccgcgctgaaggcggctcacgacaaggcggatagcgataaggcgaaagccgcgccgccgtga

SEQ ID NO: 111965 - DNA, 348 bp, Enterobacter aerogenes
atgcagccgcgttggctgccgcggccactgattgaccacgcaccccagatggtcgtcacagaatttgtcaagcgcgcttttacggttgaacttctgggtcagccgcgagaagggccagacggtggccatactgttccggtatctggtcagttcactgtcttctattctttcctttttcaccgcatagcaaatgctgctgtaggttttaagcagcgcctgattgatacgatcctcaccgccgttggcaaacagctcgccgtccagcgagtagtgctcttcgtcaatctccggaaagcgcgccccacagccgggaaagtagtaacaaaagaaaccatcgttatcagctga

SEQ ID NO: 111966 - DNA, 261 bp, Enterobacter aerogenes
atggccgcgagggataaagacaacattggcctgatgctgactcagactggcgcgaaaattgaaatagcaagggtcgtcaatcagcacggtatcgccaggtttgatcagaatacggaacagcatgtcgatggcattcatggtgctattcgccataataatctgctcaaccggtacgctaattcccgcctcattcattttcatctgcagtgtttttctcaatggcaggtatcctcgtggattaccgtactcagagaattttag

SEQ ID NO: 111967 - DNA, 216 bp, Enterobacter aerogenes
atggctaactctttactggaaacctgcaataactggcagattcagcgcgctgaaatattagcgcgcaatcccgacatggcgatgaccattcaaaagctagacatgatgattgagcatgcggtgaggtcggcaatagaaatttctcaccgtgttgactgggattttcgagaggcggagcgtctggcaaagcaggtatatgaggaacccaaccaatga

SEQ ID NO: 111968 - DNA, 678 bp, Enterobacter aerogenes
gtgctagtatccagcaacgtcaccatgcagtttggcagtaagccgctgtttgaaaacatctccgtcaaatttggcggcggcaaccgctacggcctgattggcgccaacggcagcggcaaatccacgtttatgaagatcctcggcggcgatcttgagccgacgctgggcaatgtgtctctcgacccgaacgagcgcatcggtaagctgcgccaggatcagttcgccttcgaagagttcaccgtgcacgctcaggatcatgccgaagatttcgagaacgacctgacggtctttgactggatgagccagtggaaacaggaaggcgatgacgagcaggcggtacgcagtatccttggtcgtctgttgtttagccaggacgatatcaaaaagccggcgaaagtcctctccggtggcgagaaaggtcgcatgctgttcggtaagctgatgatgcagaaaccgaacatcctggtgatggatgaaccgactaaccacctggatatggaatcgatcgaatcgctgaacatggcgctggagatgtatcagggcaccctgattttcgtttctcacgaccgtgagttcgtgagttctctggcgactcgcgtactggagatcaccccagaacgcgtaatcgatttcagcggcaactacgaagattacctgcgcagtaaaggtatcgagtaa

SEQ ID NO: 111969 - DNA, 516 bp, Enterobacter aerogenes
atgacaataatgtcggccgcgccagccgccacgccggtgacaatcagagatttgccactcacggccacggtcgccttcgtgctatccgaggttgccacacggaaagactgttccgacgcgctggcaggcaggaaggtgacgtttagcgttgtggttgcgccgacggccacgctgaccgttgccttgtcgagtttaatgccggtcactgcgattggcggattaccgctttcttccgccagctccggtttcccggtattggtgattttggcggtacgggtgatcacttccttcgcgggaatggctttacccaggctactgcaccagcctttgaacacatccacggtgccattcgggtacttaattttgtacgcccgtacatcgccatcgacaaaccaggccaccagcgacttttgcccttcttcacccggtttccaggccagcgttaatgatgtatcacctgccgattttgccccctgtgcagtcgcggtccagtctgcgtcgtcatcgtcaaggtag

SEQ ID NO: 111970 - DNA, 207 bp, Enterobacter aerogenes
atgcaggcggtcgccctcttttgcatcgatatcacggtcgagcgtgatgacgcgtccattcaccgcgctgatacgaccaccattcactcgcccggccagccgttcgtcgcccagcccaatgatgtaacccggctgtgggatcctgccgtcaagaccaacatcaatttcgaccacgcggtctttgttgttggtcagaatggcccatag

SEQ ID NO: 111971 - DNA, 756 bp, Enterobacter aerogenes
atgagtcttcacgctgattatcaaaaactggagccgggagatgaaatccggcttttcgaaattgacggaagtgcttttaatatgggggatattttatatttccacggatataacattccccatactgaagcggaaattttagccgctggtggcgatgaatcaaaattgcccgctaaaagtatctggtggcagggaatcgaatataaagcgtggccgtgtgaattagaggggatcgaatcctcgacttcaggaagcgacgcgcagccgacactgagggtgggcaacattgatggttcgatttccgcgttgtgtttgcattatgacgatttggcgatggctcgggtcattatccatgagacacaaaagcagtatctggatgcgcgaaatttccctgcgggtaatgccaccgcggatccaacgcaggaaaaacggcacctctattttatcgacaccaaaagtcttgaaaccgatgaaacggtggagttcgcgctcgatagcccgatggggttgcaggggaaattgatccctactcgtcagtatcattcggtttgtacctggtgtattcgcaataaataccgtagtggcgatggttgcgattatgccgggacaaagtatttcgacaagaataacaagccggttgatgatccatcgaaggacgtctgcaacggaacactcactgcctgcaaactgcgttttggtgagcataacgaactaccgtttggcgggttccccggcacgtcgctgataaggagctga

SEQ ID NO: 111972 - DNA, 423 bp, Enterobacter aerogenes
ttgaacagaggaaaatacattagtcgcggaatcctgatactccgcccagccctgtttggcaccggccagccagttaccacgcaatgcatcctcagcttcataggtcgcttgctgttccgccagcaccttccgctgtgcatcaggattgaaggcgtacgtttcactcagcttttcaagcgtgctccttctgttcgactccctgccagaaagcccctcggcctgagccttgatccccgcccggaccgcactctgctgctgcgcgaatttattggcctgatcagccagattattcagcttctgctgccggacgaccttatcaccgagatcggccagctggcgtttgtattccagcgtttcgtttttgtgggccagcagggatttttcctgcgtggacaactggcggcggccggcggcctcctgtaa

SEQ ID NO: 111973 - DNA, 309 bp, Enterobacter aerogenes
ttgctcgacaacctgcgccttcagctggcgaagaaatttctcgcgcgcctggttcgctttttcctcaacctgctgaagctctttctgccgcgccgtggtgcgggaaatcagggagagataatcaccctgggtgatgtttccctgtgcgcgggccttgcggaattgttcctggacactggccagcgaccgtgtttctccactgagggatcgaacgccatctatctgccgaaagaacgattccgccagcgcatcctgccgccgcgccagcgcctcagcctgcgcgtcgttctcacgataacgctggtttaa

SEQ ID NO: 111974 - DNA, 177 bp, Enterobacter aerogenes
atgcagcgactcattcagcgttgcaaccgcattaaccggatcctctttcagccgtttgaactggttaatagtttcatccaccgcctggccggtcgcctgctggagccttgcagccacgttggcaacacgctcgacgtcggcgccaccgaatgccccacttccgacaacctgcgctaa

SEQ ID NO: 111975 - DNA, 456 bp, Enterobacter aerogenes
atggggtggattagcggcggctccagtgcctcaaagtctggtcagtcttttgccgttcctgcttatcgtcccgcttcttatgatgtcggtggttttaccggacatggcggcaaatacgagcctgcaggcattgtccaccgcggtgagtttgtattcactaaggaggcaaccagccgcatcggcgtgagcaacctttaccggatgatgcgcggttatgctgctggcgggtatgtcggccacgctggcagtccggcgagtgtgtcccctggcggtgtgatggtcaacatgggcggcgtctatatcagtagcagcaacgaacagcagtctacgcagcggtcagcgattgacagtaacgggatcctcaagcaactgaaacccgccatcatcagtgtcgtcagtgaacaggcccaacggcccggaacgccactctggaaggcaataaaagaagggcgttaa

SEQ ID NO: 111976 - DNA, 429 bp, Enterobacter aerogenes
atgagcatgtttttgaagaaagacgaatttacccataacggcgctacggtgacgatcaccgaattgtcggcactgcagcgcattacttatctcgaatatctggccgcagaagaaaaagccttatccgccatttctgatgacgtggatgaccagacaatgtccgccgggctggtcagcatgagtattcgcgcaggcgcgcgtctgattgcgctctcgctctggcataacgatccgaaggggccttctgaagaggaactccaccagcaggtgatgagtacctggccggcggaagcgattggcaaagcggaaatgcagatcaagctgctctccggcatgctggcgcccgttgtcgaagaagatcaacccattgatgccactgcgctgggcgatgaaccgggtgatgaacctgttactgcggaaaagccctag

SEQ ID NO: 111977 - DNA, 1038 bp, Enterobacter aerogenes
atgcgcgtcctcttcccacccaggctagttccgggagatgttattggtgtaacagctccatcttctggcgtacctgagcacctgcaccccaggttggaactcgccatcaaaaacctgaagaaaaaaggtttccaagtccgcgaaggaaactgcttacgctcgcagcgcaaaaataaaagttcaagtaagcgttctcgcgctgaagaattaatgtcttatcttacagacccagacataaaagctgtcatgcccccctggggcggcgatctagcaatggaaatacttgatttaattgatttcaatctgctagccaggtctgagccaaaatggtttgtaggtttttcagatctaagtacattccattttccactaaccacgatttcgggctgggctactctgcatgggccaaacctaatggatcttggcgctcaaaagttagatgcaaccactcaggttgtatgggaaattctggaatcgaatcgtggaactgtaatagaacaatactcttcagcagcattccaggctgatgaaaatcaatgggggacagcatcagatgaaggttttaatctgacccaaaaaacacagtggaaacgtcttgatggtgttacatcttctctcacctttagtggcaaactgattggcgggtgccttgaaataatatcgaggttagcaggtacaccattcgggaatttaccattgttcaaggcgagcaatagcgctcaaggagtaattctctattttgaaaacgtggaaatggctccctgtgaattaacacgcgcattaattagcttacgattacagggttggtttgataacttaaatggtgttcttataggaagaagtgctgcacccggcataagcgacccaactaaacataattatttggatgcccttaaagccgcttttgagaatgttgccgtgcccgtactgtatgatgttgatattggtcatatacctcctcaaatctccctggtaaatggagccgatgcgacggtattttttgcagaaaatggtagttcggtaactcagcagttgtag

SEQ ID NO: 111978 - DNA, 894 bp, Enterobacter aerogenes
atgaaaattagtgcactcactgaacgaatttcacaaaaaatcatggtgttagtcgataatggtgagattactccaggttcacatttaagtgtaccgaaactggccggaatcttcgatgtctcccgctcccctgttcgcgaagcactcgtttaccttgaacaaaagggagtgttactacagaagcaaaaccgaggtttttttgttaaagatgactacactccgcaagctgatatcaaacaagaactgtcagaagaactcgatttacctgaatattatcaattggctgaggactggctgcaggatgaaattgaatctgaagtaaccgagctttttctgatgaaacgctacaacctcaccaagagccagttgtctacagtgctcgccagaggcattagtgaaggatgggttgaacgtaagcagggttacggctggcgctttctaccggtggcaaaaaccaagaccgcactggagcagattttcagcttccgtatggtcatagaacctatggccatcctggaacccacgttcaatgctcctcaggaaaaaatcaacgagatacgacgcgagctggaaatgctgatggagagcggaattgagcgtctcacccctacacagttacagctggcaggctatcgctttcacgaaacgattatcgctttttcgaataatccgttttttgagatctcgctgcgcaatgtcaaccgcatgcgccggctgatggactatcggatcatggatgaccgtaaccgttactacgctgaagtaaaagatcatatgcggatcctcgccctgattgaatccgggcagcgcattgaagcgtcctataccatgaagcaacatctgtctgtcgccctcgataataaaaaaatgcgccgaatcagcgcagaaagttaa

SEQ ID NO: 111979 - DNA, 1338 bp, Enterobacter aerogenes
atgctctcgttactgggttacggcatgattgtggtctttatgatcctcatcatgaccaaaaaattatcggctctgaccgccctgactattattccgatcctgtttgcgcttattgccggtttcggtggcgaaatgggcgatatgatgattgatggattaaagaaggtcgcgcccaccgcaattatggttattttcgcgatcctctatttttgtaccatgttcgacaccggtttattcgatccaataattcgtttcttcctgcgcattattgatggcgatccggtcaaggcggtgatgtgtaccgcgctgctggcggcgatggtctctctcgacggggacggttccaccacctacatgatttgtgttacggcgatgcttccgcttttcaaacgtattcgtctcgacccgcttgctctgacctgtgtggtcttcctttccgggagtgtaaccaacctgctgccgtggggcggcccgctggcgcgcgtctcggcgtcgttaaaggtggaatcgagcgaactgtttataccgctaatcccttcgatgatctgcgggctggtcggggttctcgcgctctcctggtatatcggcatccgcgaacgccgtcggctgggcaaactaagcattcagaccaatgcgcatggcgcggtaattgaagaagatgccgagagctatctgcctgccataaatgaggtcaatgacgagctgcgtcggccaaaaatgttttggctcaatgccgctctgacgcttgcgctgatggcttcgctggtgatggagcttctcccactgtcggtgctgtttatggtggcgtttgccattgcgctgctgattaactacccgcatctggatgcccagcgccagcgtatcgcggctcatgcgcccgcagcgctaaatcagacctcaatatttctcgcagccggcatcttcgcgggaattctgtcgggaacggggatggtcaccgccatgtccaacacgctactggacgtcctgccgcagtcctgggggccttatctggcaccgattactgcgctaatcagcctacctggtactttctttatgtccaatgacgccttctattacggcgtgctgccagtactggctgaggctgcaaaagcttatggaattgatccggttgagattggccgtgcgtcgctggtggggcaaccggtgcatctgttaagcccgctggtggcatcgacctatctgctggtggggttggcaggcgttgagttcagtgaccatcagaaatacaccttcaagtgggcgttcctgctgtgcatgatattcctgggctcgggattattgctggggctttatcccgtctattcggttgccagttaa

SEQ ID NO: 111980 - DNA, 744 bp, Enterobacter aerogenes
atgacccaacgtatcgcgtatgtcacatctggaatggggagtctcggtacggcaatttgtcgtcggttagcgcaggatggctttattgtcgttgccggttgcggtcctgattcaaaaagaaaggacgcctggctggaagataacaagaagttaggttttgattttattgcctctgagggaaacgttgcagactggaattcaacggtaaaagcctttgaaaaaattcgtgcggaggtcggcgaagtggatgtgctgattaataattccgggaccgcgcgtaatgtcctgttccgcgatatgcagccccaggagtggcaggccgttattgataccaacatgaactccttatttaacgtaacgcgtcaggtggtggatagcatgatgtcgcgcggctgggggcgcattattaatatctcctccctgaatgcgcagattggcaccgtcgggcaggttaactactccaccgcaaaatatgccgtgcgtggttttacccgcgccctggcgcgtgaggtatcggcgcgcggcgtcacggttaataccgtctctcccggctatctggccaccagcaaactgaaaacggtcactcccgttcaggtcatcgacaagattgttcaggaaattccagtccggcgtctgggatcgccaaaagaaattgcctctatttgtgcctggctggcttccgatgaagcgggttatgccaccggggcgaacttctccgtcaacggcggtatgcacatgagttaa

SEQ ID NO: 111981 - DNA, 1092 bp, Enterobacter aerogenes
atgacaacctatgcttacgttggctgccggacctcggcatggcgcggtgcgcgcggcaaggggattagcgtctaccggattgccgattccggaaattgggagctgttacaatgcattgcctccgtgcaggacaacccctcctggttgacactcgatcccgggcgtaaccggctctatgttctgcacggcgatggcgactgcgtggcggtatttaatcgcgatcccgacaccggcctgctgagcctttatcaccatcaaaccactggcccacatcacagtaacccggacctcgatcccgcccgcagaaacaatccggttggcgcctcgctgacgcctgacgggaacaccctgctgatcgccaatcatgagggaggcaacattgccgccctgcctgtcagcgaggagggtctggagccgccagtgcacttagccttcatcgaaggacataccgccgcgcatgccacgctgtcgcgcccgcatgaaatcgtttttgcgcccggcagcccgctgttcgccgtgccggttcagggccgaaaggccggcaacggcatcgatatgatccgtctgtatcactgggagcagactcgctcatgcctggccgatgaggtgcaactcccggaagggagctggccgcgtcacgtcgattttcatcccagcgggaaatggctgtatggcatcagcgagctgagcagcaccgtcacggtttatcgtctcgaccgggaaaaggggactttctcactcacacaaaccctcagcgcgttgccggcaggctatacgagccggagcgatgctagtgaaatcgaggtgcatccatccgggcgttttgcctatgccgccaaccggggccatgactccatcgccgtattcagcatcaatcaacaggaaggttcactgacgtccactggatgggtgccctgcggcgggaaaacgccccgcttcaccaccctttcgcccgatggctcacgcttcttcagcgcgaatgaagactctgacaccattcaggtgttcgatgtcgacagcgacaccggcatgctttccgcgacagaaatcgtcattgcaacggccagcccaacctgcatctgctttgcctaa

SEQ ID NO: 111982 - DNA, 924 bp, Enterobacter aerogenes
atgcgttttgatctggtctctttatctctctttgtggcggtcgcggagacgcaaaatcttacccatgcggcccgcagaaaacatactgcggtatctgcggtcagcaaacgtatcgccgagttggagcagcaggtgggtacgcagctgatgctgcgtatgccgaggggcataaccctgaccccggcgggtcattcactgctctatcatgcccgccaggtgttccgcaatctggagaagatggaggaggagctcagcgattacgccgcgggcatccggggacacatccgtatttacaccatctccgcggcgctgataaatcaactgccgcgggtggtgagcgactatctttcgcactacccgcagaccgatattgaaattgaagaacagaccggaatgagcgttgtgcaggggttaatggctggcgaggccgatgtcggcttcttctccagctggaccccgtcagcagggattgagtactggccctggcagcacgatctcctctcggtgcttgtgtggccctctcaccccctggcggcgagcagcgagttaacttttgccgatattgtgaatgaaaaactgatcggctcgcaccgcaacagcgccgtgagccatatccttgaacgccaggcgcgcgccctggggaaaacccttaacgtggggctgcgcgtgagtagctttatggctatggccgagctggtggcgcagcagctggggattgcggtactgccggtgaatgaggtggcatcttcaaccctgcacagcggcgtccgcgtcattccgttagcggagccctgggcgagacgggagctgcttgttggcgtgcgggattacgggcaggcttcgccgtcggtgaaagccctaatcggcagcctgcttccggcggagcaggctgtgcaacccgaagggcagacagagcgacgctga

SEQ ID NO: 111983 - DNA, 2649 bp, Enterobacter aerogenes
atgacatcaaccctggctctcgaacgctctgacctggtgattcatcatcagcgttatcattttgtggatctcacccagctgttacccctggcgcagttgcaggcgctccctttcagcctgcgcgcgctgctggaaaacgtcgcgctgcgctctccggagtctctgccacaatttttgcagatgctggccggggcggctgacaaaggcgaggtggagttctatcccgatcggctgatgtttcacgacaccacctgtctgcctgcgctggcggattttgcggcgatgcgtgatttaacaaccgagctgggcggcgatgccacggcgatcaatccgcgcattccggcagtactgactatcgatcattcggtgattgtcgaaagctatgcctccgcctctgcgctggaagataacctgcagtttgattttcgccgtaacgctgagcgttaccgctttatccgctgggccgaaaagagcctggataacttccgtgttatcccgccaggcaccggaattattcatctgatgaaccttgaagccattgccgaggtggtgatggtggataacaccgcaccggtgccgctcctgcatgcggattgcatgatcgccaccgatagccataccccgatgatcaacgccctgggcattctggggtggggcgtgggcgggctcgaagggcaggccgcgctggtgggggaacccgtcaccctgagcttccccgaggtgattggcatttcggtatcaggcgcgctgtcacccgatgtcagcgacagcgacttggccctgcatatcacccgcctgctgcgcgaaacgggcgttgtcggtaagtttgtcgagtttaccgggccggcgttagccagcatgtccgttgaatcgcgggccaccatcgccaacatggctccggaatacggcgcgacggtggtgttctttccctttgatgaacgcagcgctgaatacgtggcgttaaccgggcgtagcgaagagaagcaggtcctcatcaacacctatatgcaggcgcagcacctgtggcggacggcggatgcaccgcagccggaattcagccagcttattgcgctcgatctttcgaccattgagccgtgcatggccgggccggttaatccccatcaacagatcccgctggggcaggcggccagcagcttcaccgacacgctcagtccgcaagtgcgggatcgccgctggtcgcggtctgaataccctgaaccgatccgccagggcgcggtggctattgccgccattaccagctgtacgaccacggcgaatccctggcttgtcattcaggcagccctctttgcccgcaatgccgccagacacgggctgcggcccaagccgtgggttaaaacctcgttctcgccgggctcccgggccgtgactgactatctcagcgcgtcgggtttgctgagcgaactggagaaagtgggctttgacgtcacgggctacggttgcatgacctgtattggcagctcgggtgctctgcaaccggcaatggaggcgctggtcagcgaggggctacaggcggtatgcgttctgtccggcaaccgtaatttccctcgtcgcgtgaacccttctctcgggtacggctatctcacctctccggcgctggtgattgcctgggcgattgccggacatatctctcatgacatggttaacgacccgcttggcgttgacgaggcagggcggccacttaccatccgcgatttaatgccgtcccgggaggaggtggaaatgtggctcggacggatcatgaaaccggagcactacgtcaaacgccgggacattatctggcaggggaccccgcactggcagcagattgtggcccccggaagcgtgcattatccctgggaggctacttccacctatctgcgccgtccgggttatcttgaacgcctgccccgggatcccgccgcgccgctgaccctctctggcgcgcatcccttcctgtggttaggcgatgatgtcaccaccgaccacatctcgccggccggggcaatcccgctcgcaagccaggcggggcaatggttggttgagcatcatgaagatccgcaggatctgaacctctactcaacgcggcgcagtaaccacgaagtcatggttcgcggcgcgttcacaaataccgcgctggtcaaccgcttgcttccgcaggcgcagcgcagcggcggcggcaaggcctgggatgcgcagcatcagcagatcctgccggcgtatgaagcggcgcaaagctggctccagcgtgaaaccccgctggtgatctttgccggtgagcgttatggcgcaggctccagccgggactgggccgccaaagcccaggcgctgctgggggttaaggcggtagtggcgcacagttttgaacgtatccaccgcaccaaccttatcgggatggggattttgccgttacatatcacccctgacgaggcggcgcgtttaccggagatggacgcacgcgaggagattaacgttgacggactggatcatttgcagacgggctccacgtccctgaagatgaagatccgacgcggcacatcgctgctgggcgaattcatgctgaccctgaccctcgattcgcagcaggagcttcgctatctccggtacggcggcattctgccttacgtcattcagcaaacactgaagcattaa

SEQ ID NO: 111984 - DNA, 678 bp, Enterobacter aerogenes
atgtcagccattgaacccctgcgttttgccattaatctgggtaatgccgtgcttgcaaaggaactgccggacggcagtccgggcgggatcactgtggaactggcgcatagaatcgccgcggagtggggcataacggcgcaattcaaaacctatccgaccgccggaaaggtggtggatgacgcgcagaagggactctgggatatcgcatttctggcggtcgaccctcagcgcgaagaggtgctgcactttacccagccctatatccagatccagggaacggttctggttaacgaaagcagcccgtggcaaagcgtggcgcaaatggataaaaccggggtggtgatcaacgtcgggaaaggggcggcctacgatctctatcttacgcgtcagctaaagaacgccaccctgaaccggcttagctcctctcaggctgctatcgatgcgtttctgaacggcgaaggggatatggctgcggggatccgtcagccgctggagcggacagccgcacagaacacgggatatcgggtcctgcccgataacttcggtcagataaaccaggctatctgcgttcctcggggtaacgaacagcactaccaggatcttgtcgcacttctgaccctctggcaggcggaaggcagcatacagcagattatcgacagagaattagccgcagcgtga

SEQ ID NO: 111985 - DNA, 1380 bp, Enterobacter aerogenes
atgacaactcccgactctgcttcatcaaaaaagagacccacgcactatcgttatatgattttgctgatggtgttcttaagtatcgcgttaaaccatggcgatcgtgccaccttctccattgccggacctgatatggtcaaagccgctggcctggatattgtggcgctgggttatctgatctccacctttacctgggcgtacgtgcttgggcagtatccgggcggctggttactcgaccgttttggctccaaacgggtgctggtcaccggggtctttacctggtcactgtttgttttcctggtggggttcagcacctcatttgacaacgtctgggtcacccgcatcatgatcttcggctttatttttatgatggggttaatcgaagcgccgaccctgcctgccaactcgcgctttcttgctgcctggttcccggcgcgcgaacgcggtaaggcgtccgggtttaccacggcggcgcagtacttcgcgctggtggtctttttacccctgatgggctggttctcttatcgcttcggctgggagtcggtgttctggtttatgggcgggctggggatcctggttgcacttgttatgcaccgggtccttgccgacaccccgaaggtccatccgctggttaacagcgaagagctggattacatccagtcgggcggggggctgaccaacctgaaggccaccaaaaagggcgacaccacgggcaagggctatacccgcaaactgctgaccaaccggctggcgctcggcgtctacatggggcagttcttctttaccgtactttcgtacttcttcctgacctggttcccggtttatctggttcacgatcgcggaatgactattctgaaagccgggttcgtcgcctctttacccgcgctgtgcggctgcgccggggcgctgctggggggcgtattgtcggattacatgctctctcgtggctttagcctctcagcggcccgtaaaacgccgattgttgtcggtatgctgctggccgtcagcatggtgatctgtaactacgtggactctgcctggattgtcgtggcgatcatgtccctggccttcttcggaaaaggatttggggcgatggggtggtgtgtggtctccgacttttcgccgaaagaggcggtcggcctgagcggcgggctgtttaatatgatcggtaatatttcggggatcttcacgccgattatcattgcctacattattaaagacaccggatcatttaacggcgcgctgatcttcgttggcgtctgcgctttcctgaatttgtgctgttatttatttgtcgccggcaaaatccagcgcctgagttttgataccgaacataatgaccgtaacggtcttccggaggagccccatgtcagccattga

SEQ ID NO: 111986 - DNA, 888 bp, Enterobacter aerogenes
gtgaataatgagaaaacagaggcagagattaaatacagccatattacgtctctacccggtgttgtattacccgcgaatagctgtgactgccatcatcatatttttgacaggcgttacccttatgcgcccgatgataaacgcaaattacccgctgccaccgtcagcgattatcgcgcgtttaaacactggcttgggtttactcgccacgtccttgttcaaccttcttcttacggtgcagataaccgctgtttactcgatgcgctaaagtcctttggcccggttgcgcgcggcgaagctgtggtcacggataccgttagtgacgcggagctggactgccttgccgccgctggggtgaccggcatccgtttcaattttggcgcgggcagtatcaccaccccggagatgctgatgccgctggcctcccgggtagccgaacgcggctggcatgtgcaaatccatgccaccgccgaccagctctgggatctgcgcactttgctaacccagcttccggggcggctggttatcgaccatttcttccgcctgccgcagcccgagccgatgtcccatccggcatggaagctcgcctgggatctcattagtactggtcactgctgggtaaaactgtcggcgctttaccatcagtcacagcgggatgacgtgtcggacatggcggacgtgatcaaagtttttttacatgaagccactgagcgcgtggtctggggaagcgactggccgcacccgaatctcattagcgcaaataagaagatgccagatgacgcgttaattctttcaaatatttttcactgggcaagtaatgagcgggttcggcataagttatttgtcgataacccggctgaactttacggatttaactcttcgtcttcctga

SEQ ID NO: 111987 - DNA, 654 bp, Enterobacter aerogenes
atgagccatcgtattgtcctgatccatgccacccctctggccgtggcacctatcaatgacacctttaagcagctgtggcctgacgctgaaatcagcaacctgcttgacgatgccctgagcgtagatcgcgcgaaagtgtccacgctaaccccatgcctgaacaaccgtatcaatgcgttagtggaatatgccattagcattgatgcagcagcggtgctgtttacctgttcagcttttggcgccgccatcgaagccagcgcgcgtgaaaaatcgctacccgtactcaagcctaacgaggcgatgttcgaggatgcgctgaaaaaagggcggaatatcgtcatgctggccaccttcgggcctgcggtaaaaggaatggaagacgagttcagggaactggcggcagcatgccactcagatgccaccctgagcagctatgtggtaccaggtgcccgcgatgccctgaacgccggcaatgccagcctgcataaccagcttattgtcgaggcggcccagcaacatcaggaggccgacgcaattcttctggcgcatttttctatggaaattgcttacccgcaggtcagttccgctgtctcctgcgcggtattaagtagtccgcagtccgctgtaaaaaaattaaagcgtttaatgaattaa

SEQ ID NO: 111988 - DNA, 1071 bp, Enterobacter aerogenes
atgcgcattctggttctgccatgtgacggtatcggtcctgaaatcacctcagctgcagtaacagtgctgaattcactggataaagccttcggcctggattttgaatttgactacgaagatgtgggtttcaagagcctggaaaaatatggcaccacgcttcgtcaggagtcgttagacagagcgaaaacctacgatggcattattctcggtacccagtcccacgcggactatccagcccctgaaaagggtggccgtaacgtctcagcgggctttcgtatcggtctggacctgtatgcgaacgttcgcccggcccgcacgcgtccattcctgacgtcgaacatgaaagaaggcaaaaccatggatctcgtgatcatgcgtgaagccacagaaggtttttacccggatcgtaatatgacgcgcggctggggtgaggtaatgccgagcccggatatggcgttgtctacccgcaaaatcacccgtcactgctctgagcgtattgcgcgtaaagcttttgaactggcgatgcagcgtaagaaaaaagtgacggctatccacaaagccaacagcttccatatgacggatggtctgttcctggaagcggtgcgcaccgtgtcgaaagagttcccggaagtacagctggatgacctgttggtagatgcatccaccgcacatctggtgcgtaacccggaacgctttgacgtgctggttgctaccaacttctacggcgacatcatcagcgatctggcaagcgaactctccggaagcctgggcttagcgggctccattatggccagcgatacccattgctgtgcgcaggcacagcatggttctgcgccggatattcaaaatcaggataaagctaatccggtttcgatgatcctctccgcggcaatgatgctggcgtggtatgccgagaagcataaccagccgaaattcctgaaagcagcggatgagctcaaccgcgcggtggacgaagtgctggagaacccggcgacccgcactccggatctggggggcacatgcggtactaaagcctttgctgataaagtggcagcggctattcgttcctga

SEQ ID NO: 111989 - DNA, 1260 bp, Enterobacter aerogenes
atgactaagttaggcgtcatcgccgacgactttaccggggccacagacatagccagctttatggttaacgcaggctggaaggtggtgctgtttaatggcgtgccaacgagcgctttcgacgcgcaggatgcagatgccatcgtgattgccctgaagagccgctcgatcccggtcaacgaggcggtggaacggtcgttatcggcctcggcctggctaaaggcgcaggggtgccagcgacagctctttaaatattgctccacctttgactcgacttctcaaggtaatatcggcccggtgaccgatgcgctgatgaagttcttaaatacgcccgccactcttgtctgcccggcggtaccggataatggccgcacgatagtgcacggccatttgttcgttaagggtgaactgcttaatgaaagcggtatggaacatcatcccgtcacgccgatgaaacattcctccctgaaaaaactgatggaagcgcagtccgtggggctgtgcgggatgattaatctggagagggtgaaaaatcacccggatgacatagcgtttgagatggaaaaacatctggcaaataaagcccgttatttcatcttcgacgtccttgataatcaggatctgctgactgtcgcccgggctaccgcgaacttcccgctagtgaccggcgccgccggactggggtatgccatcgccaccctggatgggcagaacacattgtccggaaaacaggccatgcacattgatgccagcggagccagcgtggtgctttctggcagttgttcagccatgaccaatcaacaggtggatttctatcagcagcgcgcctccgctctggcgctggatgtggaaaaaattattcacgatcccgcctatctggagttcgtggcgcaatgggcaatcgcccatgccggtgagcctctggcaccgatggtctacgccacccaaccgccgcaaatcattgagctgatccagaagaactacggggctgagtacgtcagcgaccggattgaaacctttttctcttcgctggcccaggcgctgacccaagctggctttaacaagtttatcgtcgcgggaggcgaaacttcgggcgcggtaacgcagggattgaacattgaggggatgattattggtgaatcggtcgcgccgggcgtgccctggacccagaccctcaacaaacagcagtgggtgattctcaaatccgggaacttcggtagccaggatttcttccagaaagcacaggaacattatcatgagtga

SEQ ID NO: 111990 - DNA, 639 bp, Enterobacter aerogenes
atgagtgaaaaacagttaagagaggatatggttcgctatgcacgttccatgtttgagcgcggatacagcagcggtggcgcgggcaatatcagcctgaaacttccggatggtaatattcttgcgacgcccactaactccagctttggcgacctcgatgcagacgagctgagcaaagtcaccatgcagggagagctgctgtccggacagaaagcctctaaagaggtactgatgcatcttgcgatgtatcgccaacgcccgcactgtggaggcatcgttcatctgcactctccctggctcactgccctgtcgtgcctgccgggtatcgaccttgaaaatgcccttcctcccatcacgccttattacgtgatgcgcgtgggtaaactgcccgtggtgccttatattcgcccgggctcgccgctgatcgcagagcacgttgaaatgctggcggcggaacataacgccattctattagccaatcacggccctattatttctggcaagaatatccgcgaggcagtattcaatgccgaagagttagaggagacggcaaaactctatttcatgctcaaaccttttggcataaataccctgactcaggaaaatgtcgacgaactcaatgccacatttaatatgaaataa

SEQ ID NO: 111991 - DNA, 1302 bp, Enterobacter aerogenes
atgtctcttatgcttatcaccgggatagttatgtttattatattaacctggtgtcttctgaaaaacatatttccccccagtatcttatttattctcctgcccaccgccgccgcattagtgtgcggttttggttttaaggagttaggcgactatgtcgctcaggggttgaaatctgtcgtgggaacggcaacgctcgtcgccttcagcgccatgttttttaccctgatgaaagaagccggagttttcgacgtaatcgttcgctttatcctgcgcttcattaccccctccaccttttcggtgttactcgcgaccctggtgattgcctccatttgcagtctggacggtaacgcctatgccaccctgctggtcacagtaccagccctcctgcccatctatgagaagatgaacatcagtaaaaagacgctgttactgctgatcactgtgggtgtcggcgtaacagggatcactccctggggcggttcgctcaacagagccatcgcggtgacgcatctggatattctggaggtctattaccggctgatcccgctgcaggccattctgtttgtactgggggttattctttgctggtttatggcgagaatcgaaaacaggagcggctcgggtatttcgccggatgaatttcatcttatgcgggccgatatgctgacctgcaaaaccgatcataatccctggctgctgaaactcaattttgccttagttatcgccaccattgtgattctagtctcaggcctggttgccgggaattatctgtttatgatcgccttctcgctggcgattattattaattacccggacacgaagatcgcgcaacaaaaaataaaagattacgccctcacgatattcccggtgatcgttatatttttaactatcggcgtatttgtgggtattctgcaaaacaccggcattatcaaagtgttggtgaacgagattgccgacattttccctaccagcctgggtccgtatctgtatcttattctcgcgaccttcagcgtgccgattgttattctgataggttccgatgcgttctactttgctctattacctctcgcggtcggtcttggccagagcttcggcgtttcgcctctgcacgtgactatcgccatgctcatcaccgagcagattggcctgctgctaagcccggtgatacctgccacgcatctcggcctgagcctacttaatttacgagttgatgaacatatccgacattctatgacgaaaatctggattatgagcgtctgcgcactcgtcgcagcactggtaatcggaacgatacctgtatga

SEQ ID NO: 111992 - DNA, 585 bp, Enterobacter aerogenes
ttgagtatttcacccgccgctaccaggtggtgcgctcccggcgctgagcgctggcggccccagccatgcccgtttaccggtagcccggacgaggcgcctgcgccgactccgggtcatattcatcagccccggctccagcctttatgccggatggcggctgcgccttatccggcctacaacgactgctgcctgcgggatagccaggacgaggcgcctgcgccgactccgggtcatattcatcggccagggctccagcctttacgccggatggcggctacaccttatccggcctacaacgactggcgcccccagccatgcccgtttaccaatagcccggacgaggcgcctgcgccgactccgggtcatattcatctgccccggctccagccttatgccggatggcggctacgccttatccggcctacaacggcgaaactgcgctttcttcgccgtcgtcatcagcgttacttcccggcttccggatgggtatcgaacgccgccatcactgctgccagcgcggcttcgctgaagccgtgcttcgggtcatctacaccaagtccgaagcgggtttgcagcgtttcataa

SEQ ID NO: 111993 - DNA, 1410 bp, Enterobacter aerogenes
atggatgaacgagcacaagaaaagttatttaaaaaactcttctctccaaaatctttatttgatgtatataccgagagatttagtaagtccgcagcaaaaggcctcgatagaatcaatggcatgcaatattcaaatagagccagaaaggaattaaagaaagtctctgaaaaatgtcttaatggttcttttagatttactccttacttagagaagttgaaaagcaaagggagagggaaaaaacccagggttatttctataccaacaattagagatcgcgttgtattaaaacagctcaatgtttttctttgtgaggtttttcctaattgtgtaccgaagagcatagcttcaacttatattagaagtatatcagatgatttaaaaggcgtgacccctgaagatatttatgtttgtagttgtgatatcgaaggtttttatgacaacataaacaaacatcgacttgaaaaaatattatcaaaagaaataagaagtaaaagggcgctggatctcatagttcattctcttttaacaccaacaactagtgataatgttaataaaaaaatgaggaaggtattttttgataatgaaaaaggagtacctcaaggattgtcaatatctaacattttagctgcgatttatctgcaaggtgtagataatgaaatgctaaaatttgatgtgacttactatagatatgttgatgatgtactaatgtatggtaattatgatgacgtaagctcagcttatcattcattaaggcgcaggcttaaatatagagggttaaacactcatccgccatcatcaccaaaaacacatttaggctttcttaatgagtcctttagttttttaggatatgtttttaaaggaaatgttataacagtacgagattcgactgttgaatcatttatgaaatcaattgcatctaggttcagtgattatcttcacaataaaaacaaaagattaaagaagtatacacatttaacctctgatgatctaaaagacatttttctggaagagctaaatgataagttaacaggagctattagtgagaaaaaaagatacgggtgggtggcttattattcaaatattaacgacctttctcttcttcataaaatagattttataataagtgaaatgtttaagcgcttggatgattttgataattgtgcaccagaaggattgaaaaaggtagcgcgtgcttattatgaaatgaagtttagcccacatagaggttatatacgagattatgaccagattaaaactataaaacaaaaaactgaattcttgcaccgacgtggaaggattgctgaaggcgagaggttaactaaagaacaggttgaagagcgttatgaaagatataaagctaaaaatttagctagcatgcatgcagatgaaggtgaagtgtatcctaagtaa

SEQ ID NO: 111994 - DNA, 642 bp, Enterobacter aerogenes
atgaaagattttttggatagcctaagcaaatccgcctgggaaacatcatgcgcaagatacaatgcatcccgtaggttaaaggttagagagattttttcgactatcagtctcgctttaattggcctttccggtatcatactctcattaatccaatatttttggattacagatataaaccctaagctcaatatattaataactgcattttccattatcttaagcatgctattaataataattagccttattgaatggggagtcgcatcaggagctaaatctgaggctctctttagaaatgctgagttgcttaatgagcatgaaaggaagatttctttattcaaaaactgcttaaaagaagaaataacggatgacgattgcaaatatatagataatcttcgcgatgagtatgaaaaaataaaatcaacatgtactttcaaccatagccctgttgattacgagtatcataaaatagtaaaaaatagatattatattgcccatacttctgaaagctttagtttttggcgagtgttaaaaggtagaattaactattacattagtagtatttggggatacttaattatctggtcaattgttgccatattcttcttcaaggttttaatggtaatagcatccctatattga

SEQ ID NO: 111995 - DNA, 207 bp, Enterobacter aerogenes
atgcacatgaaactgttcaattctaaaggtctgccacttctggcaatgagcctagataaccgatccgataactggttgaacctgtcagccattgcgagatatttcgacgttccacgcagcacttttttgcagagggtgaatgatcacggttgggaatcagctattgctcattatgagcagcagagaaagatcaaactgaaacattga

SEQ ID NO: 111996 - DNA, 1041 bp, Enterobacter aerogenes
atggctattaaatcatttgattatgttgactacagcaaggtgtttcgcactcaggttccgcagagtaatttactgctgacccacctcaatgtatttgcagaccgtcagatcgcagattcccacaaagttagtgtggatcgtatccaggaatctgcaattggtgtggacgctccgttgatgcgtttcagttcggagtgggggactatcgagaagccgacagcaggatcatatctctacgagttgccttgggcgggtgtgactgaccgtgtgacttcggcagatctcaaaggttaccgtcgtcccggttccacaatggagcagtctcttgatgagattgaggccaacaagtttcttcagatgcgtgctaaattcgaacgctctcgcgaatatgcttactggcaggcgctgatcttcaataaagttaatgcttggggaactcagcaaaatgagattgattggtctgtagagttttccctgaaccagcgaaccgctgatttgcaccaggacgtaaatgatgacccgatgcgcgatattgacgatcaggtcagtgccacaaaagcactgatgggtggtctgactcaatacctgcgtggctgggttctgctgtgtggatctgatgcctaccgtgctgtgagatattctcctcaaattcgtgaattgctagtttattcaaacgggctggttggttctgatgtgctgttcccgtctgatgttctgccaggctttagttcgtttatgctgggttctgtgcgtctgatcgaagtcagtgattcagcattcagcggtatcaagtcaaacgaggctttccttgttccggtctttggcaatgctccggttgagcagagcttaccaatggggcgcttcgttggtccatgtgctcgccatctggaaatctccgcttctggtgatgttgaagactggtacgcatacagggctttcgacgagttacgaaatcgtaatttatatagtgaatacagcctgttagcctacaattttaggcccgacttggttacccgaatgaccttggttccggtcgagtaa

SEQ ID NO: 111997 - DNA, 561 bp, Enterobacter aerogenes
atgttgctaacccgtaaacgggtgaatttcatctctccgatgatctaccaaccggggcaggcgctttcctgcctccggctctttttctgcatggaacatgaagtgaacaaagtcgctgatagcggctttcttttcacccctcaatggcaaatttgccagagaaataataacgccatcattggcgatgacctgaatggagatttcaagactatgaaactggatgattatccaaaaacttataataacgtggtgaaaaattcggcaactgccaattttgatcgtaaatgtcaaacattcgcgacactggcgcaatctgttgagccgggttctgtggtgacctctgccggggtgctgtatacctccggtgatgatgcgatcctttgcctgtcctacgctgacgcaggttctaacgttccggttatcgtggctgaccgcctgatttacgtatacccagaatcaatccgcgccgtaatgggttcagcaacaaatgcagcactagcagcattaaccgctaacggaaacattcgcctgacctctgacgatgttgtcatcgtagaataa

SEQ ID NO: 111998 - DNA, 249 bp, Enterobacter aerogenes
atgccgaataaaatttgcccgattacaaatcggcctatcaagttgaatagttgcggtaaacacatgccacgttattgcgtggtagatggcaaccgttacgagagtttccaccagtttgctacccagattctaaaactatctgttagtgaaattattggattacgtaatcagcatttcatcgagagacataaatcagttgttaacggctatagtgtagagatgttctataaatgtgatgaaaaaaagtaa

SEQ ID NO: 111999 - DNA, 318 bp, Enterobacter aerogenes
atgaatattcgggattttataggacagtaccgtaaccatcctgtactttttattggggcaggtgttagtttgcgatatcttaacaactcccatacatgggatggtttattgaagcatattgcttttgagttaaagggaaataacgagttttatctagatatcaaagctgaatgtcaagttgatgggaaatataactacgccctaattgcaactaaattagaaaaagcgtttaataaagctttaggtgaagataggaatggtaaatttgaaagtattaatgatatcttttatgctgagatggaacgtgaaaatttctaa

SEQ ID NO: 112000 - DNA, 195 bp, Enterobacter aerogenes
atggggaaaatcatcgcagattaccaggcaacaaaagacggcgaggttatctattctggctcgctgtcggtggtgtctgaagagagcgacacatcagtaaaatcagcagtgatggcagaactgctctctatcaacagacagtttggcggcggagtgccagataccgtgactgttgattcatggacgccagtgtag

SEQ ID NO: 112001 - DNA, 753 bp, Enterobacter aerogenes
atgaccacccgtatttatgtagaccagggcgttgttgcgacgcgctatctcgatacctatccgtatcctaacgacatcacattgcttccctcgataattcctggcctcataattcaggctgactgggatgtgaacgatcccgcatctctcacgcgtaacagggttggctcagcaatgacggctgtaggtaacccgacactgggtgattacggcatcacagtgagtgaggggaactacatcgactcaggcattgatatttctgcctataacgccaacgacctgactgaaattagtattctggactggcccggcgctgttcgtgccgttattggccgtgtacaaattaatgctccgcagcgctcccgtggtattcagacttctaccgcatcatggatcgctaaatggctgacgcaatcgggcacagcacagcaggcaaccattactaacagctcagaggccggtaatagtgaaatggtggttggtcgatttatccgggataacggcagcggttctatgctgaccaaaattaagatccctcgcaccgaccaggaaaccacgacaactgcggcgtccattccgtactcaatgccgtcatcgaacattctgattggggcgtcggttgatgctgccaccaccggcagttcatttatcagagcctctctggttgccagccgtgcgctgaccgacgaagagatcgccaccatctactcgacttataaaaactattaccagttgaaaggtaaaacaatctaa

SEQ ID NO: 112002 - DNA, 2127 bp, Enterobacter aerogenes
atggcctttaatctgccgctgggatcgtccaacgctgatgtttttatgggcaacgttcaacgtcttgatgaactggttaacggtcctgctgccgacgttcccgaccgcgccggcgacccactttattcatggcggggcatccatcagaaccttatcccactgagccgccagtatatgacgctggccgacgcccaggcggatattgccaatattcccgaaggcagtgcaacgtattaccgcagccctgatgatagtgcgctggctattgaagtcatcaataatggcgggactctaacagagactggcagaaaaatgccttcacagggggctgttgatgcgctgagggaggttatttctgaagaaataacaaaagtgatggcctctggtgcagcacagacaacagatgcattcccggatattgctgagctgattcttgatagtgtaggaaacgctgtttatcgccgttacgccgatggaaccagtcaattccccgctttgatggttggctcgggaattgagtttgttcaaatggccgggggaggttttgtctgccagctaagggattctgaggaagagattttcaaggtctcggcttcaggcagcatcattcgcggcgctgtaacgagttgggttactgatgatgaaagcatcagtgattatgtcgaaatccatatggatggccagggacgtatctatcgccgcgtgctggctgatggaacggttgagcaggttggtgatgatgatccgtcaggtgatgcatcaacatacccaatgctcgcttcagtcgatggcaatataatttctgtgcagggtgatgtgctcacacagataacggacgattcaggcgtgtcgaatattgcccctgtggcgtacgagaaattttcacgctacctgtcaaatatcagcggcagctatctgacaaatcgctctacgtatgatgggaaataccgggtgcgtgaaagcaagaatatcctgcttcattacattggcaccgggcaatctcttaaagcagggggatcgacgattagccaggctcctgtcactctctcctcagaagcagactatggagttatcagcttttcaacaggcccgaaggtcgatttcaaatacgatactctggatgaatccctgctagggtcggccacccctgcgcgagaaaacgtggggacccgtcccggtcaggagtcaccatccagcggcatagcctataaaattcatgagctgacagggcataccgttttggcctccaccgctgccagttcgggtacagatattgcgggaatttcggctggaacggccacgtttaccgccgccaccaaaatgattcaggcggccgttgcgatggctgatgaactgggcatggagtatgtcccggtacttgtgctcatccacggaaatcaaaacgctgcaagcggaactactgtcgcctcttatcgtgccgcaatggagaacctgcgcgcgcagtatgagacggttataaacgccgcaactggcaaaacacagtcactccacatgtttgtcggtcaactctcgaacgtcgtgccctacggcggaacagtagggacaacgaaaaccaacaccatcggcattgcccagtatcaggaggcgcgcgacaacgagtttattcatctggcaagtgcgcagtatgcccgcccgtattccgacggtgagcacctcaccagtgcaggataccggactgagggggaggtaattggcactgttattggcaactggatcaacgataacaccaaatcatcactggtgccggtagaggctggcgttgttcagtccgggaataccctcactattccagtgaagggctgcgtgggtaatctggttattgatacgagccgcgtaaccgatcccggtaattacggattcctgctggaaggggcaacaatttcctctgttgccgtcagcggaagtggtgtcactgcaaagattaccattaccaaaacagattcatcgctggcgacgcgggtttcttatgctgaaacaggcatagccgggcagagccctggtgcgatcaccggctcacgcggctgcatccacgattcacagagtggcacatcgctggcgggacttcctctttacaacgacctcgctgttttcgcattccaactctaa

SEQ ID NO: 112003 - DNA, 621 bp, Enterobacter aerogenes
atggacttcaatagaggcggacaggaagtaatcaagcgattactaattgcttatggattcaagacaagacaggcgctttgcgaacagcttggcgcatcaactagcacaatgagcacaagatggatgagggatatttttcccgcagactgggttattcagtgcgcgatggaaacaggcgcttcgcttgaatggctctcctttgggaagggcgaagccttccataacgtagcggaaaactctccaaatgagtatataaagacggccaacgacaacgccatgggtgatgtggtcgcggttcctcgtaagaaaatcattgatgggaatctgtacgaatccaatttttatatgctcgataaggcaatgcttccctctcacctcagcaagcctgtaatcatccttgatgacgaaatcccgtacgtcgcagacatgaaaactgacgaactatcggatggaacatgggttgttgaaattgagggaaaaacaagcataaaagagctgacccgtattcctgttggcagggtgcttgtagccccaatatctggcggccaatcttttgaatgtgggatcaatgaccttaaaccattagctaaatgccactattacctaatgtcgaatgtttga

SEQ ID NO: 112004 - DNA, 1023 bp, Enterobacter aerogenes
atgcaccttaataaccgtgcgcgggatttactggacaattatacggcggggatggcacagcattttggcacgcaaaaccctggtcgttatttttcccttaatgacccgcaggaaaccgcgcttcgcctggctatgctggagtctgtcgagttcctgaactggatcaccacgctggacgttgaccagctgagtggtcaggtcgtcaacgtgggcgcgtcagtacttcataccgggcgcagcgaaacaggccgtttcgtccgccaggtgggtgttgacggcaatacctattcactggttgaaacggacagctgtgcggcgctgcgctgggatctgctttccgtctgggcgaacgctggaaaggaagaaaacgagttttacaacctggtgcagaccttcagcacccaggcgtttgcaatggacatgctgcgtatcggcttcaacggtacacaccgcgccaaaaccacagacccgaaagccaacccaaatggcgaagatgtcaacattggctggcatgaaatcatgaaaaccatgctggacggcaagcaaattatgaccgatccggtggtgcttgatcaggcgggtgattacaaatcgctggatgcgatggcctctgatctgattaacgccaaaattccggcacagttccgtaatgacccgcgcctggtggtgctggtaggtgctgatctggtggccgctgaacagtaccgcctgttccaggcagctgaccgcccaacggagaaaatcgcggcgcagctgctgggtaacaccattgctggccgtaaggcgattatcccgccgttcatgccgggcaaacgcatggtggttacaccgctttctaacctgcacatctacacccaacgcaacacgcgccagcgtaaagcacgctttgaagatgatcgcaaacagtttgaaaacagctatctgcgcaatgaaggctacgcgattgaagagccggagttgtatgcggccattgatgaaaatgccgtgaccatcggcaaaccgtctgagccagtggagggttaa

SEQ ID NO: 112005 - DNA, 1404 bp, Enterobacter aerogenes
ttgagtaccgtattgacagtaggcgaaacagctaaaattcttaatatatcccctcaaagagtcaggtcgctgtgccgttcgggtatcctatctaaagcacgtcaatcgggaagggtatggttgcttgatgaacaagaggttctagactacaaagccaatttgaatgcggaagataggataacaaatgtcactacttcgagacctattgctttaagttttttttctggggctatggggttagatctaggaattgagaaagcaggctttaaaactttactagcttgtgaaatagataaaagtgcccgtaaaacgattaaagcaaataggcctgatgtggcacttattggcgatatacgagactattctcctcaggaaattatggaacacgctggattaaaaataggtgatgaggtagatctcattatgggagggccaccatgtcaggctttctcgactgcaggtaagcgtaaaggttttgaagatgaaagggggaacgttttcttaaaatatttagagacggtttttgagattagacctaaatacttcataatagaaaatgttaggggcctgctttctgcacctcttcaacatagacctcacagccaaagagggcaagattttcctccactcaaaaatgaagaagaggctgggggtgtattgagttatatttatcgtatgatcagagcttcaggatatagttgttcctttgagttatataactctgcaaacttcggcgttccgcaaactagagaacgagttattttaatgtgtgctcgagatggtaaacgtattccatatcttgagcccactcactcagaaaacggtgagttcggattgcctttgtggaaaacatttaaagatgcagttaagcatcttgatagaaatgcgcatacacatttagattttcctgaaaaaagactaaaatactatagattattaaagccaggtgagtattggaagaatttgtcagtagaattgcaaatggaagctttgggtaaatcatatttctccggcggagggaaaactggttttttaagaaggttggcttgggataaaccatcccccactcttgtaacgcatccggctatgccggctacagacttagctcatcctgaggaattacgccctctttcaatagaagagtataaatgtgtacaacaatttccattagattggaaaattgaagggaagctgcttgaccaatacaagcaattgggtaatgccgttccaataggattaggctatgctgttggtaggcatattttaaatttcgaaaaaggaattatgcctaaaaattatcaggggtttaaatactcgaggtataaaaatacttctgattcttaccttgaagaaaagttggcgaccagtattataaatgatgaccaattaaatatggttatgtaa

SEQ ID NO: 112006 - DNA, 768 bp, Enterobacter aerogenes
atgaatccacattgcagacagctcgtcagtgacgaattcagagactgcgtacagcgaactttagttagattacaaagcgaacctactagtatgccatttcacgaggcgttactcagtagagaggctgtcttttggagtagattcgaaagatcctttagtacaagttttggccagcgtgtaattgagagaatttcagcttatatagctcaatattctggcgcgcaaaacgtaactacacaaaaacaaaccaatgtaactttagatgtatccagattctcagctatagaaaataacattcatgcggcccgttcaaatgcaattggatattctccagattggaatgctgaagttaattatataaacaaccttccacttacaggaacccaacaaattcacagagtaatatctgacttgtattttgtacgtgatggcagggcgaattatatatcgattaaaaccgtaaaaccaaatattgaccaaacggccgaagcaaaacgcgacttattaaagataaagctcgctgacagttctgcaaatgtttactttgggttatattacaatccttatggagatcgaagagacttatacagatggactcctcctatgagaatattcaatttccacaccgatccatgcgtattaattggacgcgattactgggatacgttaggaggtgagggaacatataatacacttttagagatcgctcgctctgttagccaagaattacaggaactggtaaggcagtatggagtcgataggctttaa

SEQ ID NO: 112007 - DNA, 720 bp, Enterobacter aerogenes
atggcattacttgaatatatcagtgatgaagatctttttagcgaagttgaaaccttattaactaaagctaaaaagaaaaaagactccgctgagaagacttttaacagcaatgtgattgacccttttggcgcgctttttgaagctccgggtttctcatcccatgaagagtggcgaaactccgaacttgcacggcaacgtcagaagaccattcagaatcatgttggtacatttcaccaaaaaatcctcggccatgttgatggatggcaggacatgggaattgggggcatcgttgatctcctcaacgaagagagaagaatcattgcagaggtgaagaataaatactcaacggttactggcggggacttagctgataagtataaaggcttagatgaactggtatcacctaaacatagccgttttaaggattactgcgcttactttgttaatataatccctcgcaaacctgtcaggtctgacatcccttttaccccctccaataaaggtagcggtactctatgcccttcgaatcctaacattcgaatcattgatggtgcgagcttctatgaactagtaacgggcagaccggatgctctgcaagaactttatagtgttcttcctcacgcaattgagtatgttttgaacgagcgtcttgggcagaaaggcttctccatccctgataaagattcttttattaagtattttggtctcgcttacggctga

SEQ ID NO: 112008 - DNA, 1254 bp, Enterobacter aerogenes
atgttggcatggttactaagtatgttaaaggaagagttttcactttcagaagtagcagacattttgggtgtgtcaaaagaaactttaaggcgttgggacactgctggaaaattagtttctcaacgaaatgacgagaacaactatcgtttttatagaaaagatcaacttaaacattttgagcaggctcagtttttatttaaaagccagtggtctgatgagtctaaagcctgcaataataattatactgtattagaattatttgctggcgcaggaggtatggctttaggtttggaaaaagcaggtttaaaatctgttttactaaatgaaattgattcccatgcttgtaagacgctacggataaatagacctgaatggaatgtggttgaaggtgatgtgagtcaagtagatttcaccccttatagggataccgttgacgtactggctggcggtttcccttgccaagcattctcttatgcaggcaaaaaacttggttttgaagatacacgaggtacccttttctttgagttcgctagagccgttaaagaaatcaatccgaaagttcttttagcagagaatgtacgtggattgctaaaccatgatgatgggcgaactttagagacaataaaaaatattatcacagacttgggctacactttatttgagccaagagtgcttaaggctattttctataaagtgccacaaaaacgcgagcgtttgattatagtggctgtaagaaatgatcttgctaatgacatagattatgagtggccttcatcttacaataaaatcttaactcttaaagatgccttaaaaaagggagagctgtacgataccgacgtgccagaatctgatgggcaaaaataccctaaaagaaaagccgagattctaagcatggttcctccgggtgggtactggagagaccttccagaagatatccaaaaagaatacatgctcaagagtttttacttaggcggtggtaaaactggtatggctcgtcgcttgtcttgggatgaaccaagcctcactttaacatgtgccccagcacagaaacaaacagagcgttgccacccggaagaaacacgaccattaacagtgcgtgagtacgcaagaatacagaccttccctgatgactgggtatttgaaggtccaatgtcagcgaaatataagcaaatagggaatgctgttcctgttaatctgtcatttgccattggtaaatccgttgtacatcttttagaaaaaataaataaaaaataa

SEQ ID NO: 112009 - DNA, 948 bp, Enterobacter aerogenes
atggatagtgtagaaaagctcaaatcgataaactggaaagatttgattacgaacaatcacaaatggattgaatcaaggttggttaatcacccttgtgatagtcaagctaagatagtttcaaggatttttaccatcccattcagcggagttatacaagaacatcatcacttagtggagtctatggctgatgctattgaacactacgtttttgataaagaagctcttgctaaaatgaaagcggatggcgttaccccttttagaaaagctgcacagttttttggggatactaatccagtcaaggatggtaagtacggggagttactcctttatatcctatctgaggctatacttaatacaccgatggtctcacataaaatcactaatttaactaacttaaacgatcaggttaagggtggtgacggtgttttcttcggtgtgtatagagaaaatctttcaattttaattggtgagtcgaaaatatataagagttttagtggcgcgctggaaagcgcatttgactctcttgacaggtttacaaaaagttatactagcggtgcacttggtcatgaactttttatggctagaactaatatatcaagtaattttgattttgaaactatggagttgatttataaagcatttactcctggtgatgatatttactctgagtgtgttaaaacacacccggttctgcttatatttgaagatgaagaaattaagagcatagaggaaaaagcaataaacaaggcggaggccgaaagactgtttgatgcatggcttactaaaaaaaaggaagcgataaagtcagacatcgatgcaaagttaatcaaataccctaatgttaaaccttgcttcttagactttttcctaatacctatgacagatgttggtgagttcaaaaagtcgttgtatagagctatccacggaatagattacaaagaaaattaa

SEQ ID NO: 112010 - DNA, 2658 bp, Enterobacter aerogenes
atggctaaaagtactgctacaacagcaataaatcatcaagactttacaagcgtttttaatttattgattgagcatttgtttttgaaaaatagaggtaaggaagaaaaatataaaatatctgatgaaatgattaggagagcaacttggcttgcatcacttggatcatcaggcaacgaaaccgataaaaatattgcaagtgcattcggtacattgctctatttatacgacacaagtaatgaactgtatctcaaagcttgttatattctgcaatctagggctggtaatatagtctctgctaagcatttagaaggtctttttagtcaagggaatattattaaacactttagttcatcattggattttgaactcacaagtcaaaagtttcttcttgaaaaaagagtttctgacaataattatatttattttactcattttcaaagaagtctgtgggacaaactagaacgcggtgaaaacgttgcagtatctgcaccaacatcggccggtaaatcatttgtaattaaaaggtatatctacgatagtgttatatctgcaaatgatggttacttcgtttacgttgtaccctcaaaggcgctgataaaccaagtcggcaatgaaatgtctagagagttaaaagacatagctacagtgatgacaacctataaggattcagaaaatgatgattcaaaaatagtatatgttctcacgcctgaaagatgtatgcgattgttaaatgagaatggtaacaaagcacctaaaatagttttttttgatgagatacaaaatttagaggaaaaaagtagggggaatgtttttgagaatgttatctatagaatgacaagcttatggcagtcaactcaatttattatggctggcccatacataatcaatttacatcattcactcaataaaattattgacctgaatctagttgagcaaacaacttctacaaccccggttttgcagttaaaagttgtacttacagtacataaaaataagaaagccgttaattataaattaataagcccggttggggatgcggtgttaggtgagtacgatataggtaaggcattgtatagcaaattatcttcatcaaagggtgcagcattaaagcatatcacttctattctagatgctgatgaacaaaatataatatacgcacctaagaagaatttggctgagggatgggcgctggcaattgctcaaactaacaatgaagattcggagctagatgaagataatactgatttagcgcatgattcaagaatagatagtttgtgttcatttttagaaaatgagatacatcctctgtattctcttgttagatgccttaagaaaggggttgcatttcatcatggtggcttattggatgtggcaaggctcgaggtagaggatcttttcgctgatggtgcgattaggaatttggtgtgcacctcaactttactacagggcgtaaatcttcctgctgatagaatgattgtaatatccccaaagattggtgactatgagttatcccattttgattttttaaatcttattggccgtgcaggtaggattagtacatctttatatggtgagattttttgcattcagcttgttgatgaagaatgggccgaagataagattgagtcgaatgaaacaaaggagatacaatcttcagttttaagaaagctcaatgaatatggtgagtcagttgtaagttacattgatgtctacactaaagatattgttgatactcaaggagagcttcatgctgtcaatcttgcctcctatctgcgaggccagtttttagtagatagagagcattatgagaaaataataagcaactccaatcttactcttaatcaaattagagtgatgacgaatagattggaggcgttggaagatattttaaatgtaccgaaggatataatttataaaaatcctttcatcgatcccctcttgattgatcagctttattttttggttgaaagcgaaggtgtcaataaatggatgattgataaatatcctagagtcaaatctggagtggcagatcccagtgctgaatttcagcatatgaattattataaccaatataaaagcataattttacggctgaatgatatttttgagatagagaaagagattaattataaagaagatggtgtgtcaagaaaatcaagtcatttcgtttctatctttaaattagtaaacgactcacataagtggatgcaaggtagaaattataggttttttatagatgacatggtaactaagaaattaataaataaaggcatttcagttgattataagaaggttgacgggattaccaattttgtaactacacacattaatactaatttgacattcattttggttaaatatctctcgctttgggctgacgtagtaagctcatttatgtctgaggaagaacgtacgttgaatgcatttttcctcaatctctcgtctatgttagaaatgggtaattatgatcctcaggttttagaggtgatggcttatggaataaatagaagcactgcaattgaattattgaaaaaacaaaaaataaaaaatgagcaaaccacttggcaatatttagtgcaatataatttggataagctttcaccattgcataggaaatatttgcaaagagcgggctttgggtcttcaaagcctgcataa

SEQ ID NO: 112011 - DNA, 468 bp, Enterobacter aerogenes
atgtgctcacgtttagccttcattcgctcggcaggaatcgtccagagttttgcatcaaagtcgatctcttcccaacgagcgccagaagcttcagatgggcgcactagcgtcaggagttgccattcaattagacagcgggtcgaaactgagagattcgacatcaccaaagagcgcgtgagttttggcaatttttctggtcgaagcgttggcatgttctgctttttcggtttctcgaatgccatcccaacacccgatgctggatttgcatcaatcagaccagtgttaaccgcatatatcattatttcgttaatacgctgtactaggcggcgaactgtctccagtgcccctcgtgctttgattggctcaagtgcttcaacaatcgttctggcctttatctcctgtacgggtatcgcaccgattgccgggagcgcgtctttatctaaagaacgccaaatatcctttgcataa

SEQ ID NO: 112012 - DNA, 1236 bp, Enterobacter aerogenes
atggttatcaataatcgagacgacataacattcaatattgaaataagaaagttatttgatactattttgaaaaaatcttcaattcgtcctccgattgaagttagtaagaataatgatctcatcagcgatttttcctctaagtgtgaaaaattcaagagctgtttaaaagattacattgatgctaatgatggactgttagctcgtagagttcaaagcagattaagagtcatagaatcaatgcaggaaggtataataaacgctttggaatgttacctttcaggagatatcaagtcagcttacgattctttcgaggaaatgcttgagccagatttcgtatctcggcacattaaaaatatctgcatccctttgacacagatatgcagtagtgagaaaccgctttttagggtaaggaaatccgaacgtccgctatccacaagaaaggatatctttcatatccccttcaaacagcgccatttagttaaagcacaacgctactcagttgcaggtctgccgtgcctttatctaggcacctcattatatatatgctggcgtgaaatggataaacccgattttgataagttatatatatcttcatttataaccgaatcccatgacgagaaatcacttctgttaaattttagtgccgacatcctatatcgaagaaaattttttgttgaagaaaaaagtaacggaacacctaaagatgaaatttcaagtaggactatgttatcctacctagcattatggcctctcataattgcatgcaactatttaaaaaaacacagtgatgcctcatttattcaagaatatataataccaaacttacttatgcagtggataagtagggataacaacaattacaacattgtagggattgcatatcgttctacaaaacttcctgccaatactgatagtgagagaggtgtcaatgtcgttctccctccaaaagcgcgttatgaagatatgaaagaaaacgacttctgtcccgtgctttccgatttatttcaatgtaccccaccagtttcgtggcaggttctgaaaactcttgagtatgtaccattgcgccagtccttttcggatagagaaaaactaagtgatagactcaggcgcaaaaagaactgggatgttatgggcaatcttgatgacgaaattttgagcatttataaattatcagacttttacaagctagaagtttgtatagatgaaattcaagtttatgatgatatttacacgtaa

SEQ ID NO: 112013 - DNA, 1083 bp, Enterobacter aerogenes
atgattaatgttacgaatgaaatgctcattgatgtagtcagtgatgcgcttgcagggaagagggaaagccttctcatgcgattgagagtaatggcaaaaaaactgaaaaaagaatctccagagttagcgaacaaactggaaagcttgctagtgcataccagtggtgctgtcgctgttgagcgcgcccaaccattgatacctaaagcagctcccgttgatgctgacagtaggcaaaagttgttagtcgaaacttatcctgtggttattgatgtagaacctgtctggcctagcaaaactgatgtgcaattaaatcggtttgtgatcgaatgggaaatgaaagaacgccttcataaagaggggcttcatccttccaggtctcttctcatgggaggacctccgggagttgggaagacgttagctgcaaaatggttggcttgtaagcttgatatgcctcttctcacacttgatcttgcgagtgtaatgagcagctatttaggtaaaacggggaataacataaaagcagttcttaattatgcttcgtcatttccatgtgtgctgctgcttgatgaatttgatgcaatcgcgaagaaaagagatgatgcaacagatgttggagaactcaagcgattagttactgtactcttacaagctattgacgaatggcctaatacttctgtactaattgctgctacaaaccattcagaattactcgatccagctgcctggaggcgatttgatagagtgattgattttgactatccaacaaaagacctaattcaaagatatttaatatctaaagatattggtgatgatttagctgggtatatttcggctagattggataaggtttcttacgctgtaattgaaagagcaattaaccaagctaagcgtaattctattatagaaaactctcctttaagttcatcgttgatagatgagttattagaaggcgagtctattgatgatgttattagagcaatgttatctgataatgtttcgcaaaggaaaatttcacgtgacctaggtatacctagaactcaggtcagtaaatttgtgaagacagagggcgaaggaaatgaatga

SEQ ID NO: 112014 - DNA, 2193 bp, Enterobacter aerogenes
atgaatgataaaaatatgttactggggtatggggagactcttactggttcaattaaattgaaccggggtggtggtaataaaaacaaaccttatacctactctgaaaataaacctgtcatatccggacagttgagtgaattgattgctgaaatcaataaaatcccgacatcagcaatgccagaaggcaaggctgtggcaaaatttgtattacacccaacatttctggctaaaagctattttcctgtagggttgcttgacaggttttccctcggtagcatcggtagtaaagctattaaaattaagcctagaaaagatatcaaaaagaaagggcgaaaagacgagtatactacagcctgtatttatgtttccggtaagcaggaggattttcagcaattccttgacgctgtcaataaagatgcactaacgaagggacagcaggatgactttataactctggaaagcatttcaatgcttgaagtgtctgataaagtaaaagcaatcaatggtcacgaaatgatgaacattgaggtggcactgcatacaccagaaaatacttcaagcgtaattgatacttttgaatcctttgctttgcaaaatggcgcagtcatcgatacagcaagaagcataaaggttaagggcttaacttttatgccaatcaaagcaagtaaagatgttgctttgaaacttgcagagttttcttttcttagaacgttaagagaactcccagaattaaggttaagtgaaccagttatcgcgcgctctgtggaacaagcatcccatcttagtttgccaactgaaggggctgtaaatcaaaatttgaaggtggctatatttgacggcggcctgggggtagatgatttcagcccatgggttactgaatacacctttaatggtaactctgctacgagtgctaaattaatttcccatgggcaggatgtaacttctacagttctatttggtgttctggggacggaaaccgaaaaattgacggtgcccttttgtaatattgatcattatcgtgttttggactccaatgttaataattcggatgttgatctttttgatgttctgattcgaattaaaagtgttttggaacagaaccattatgattatgtaaatttaagcttaggtccaagattgcccgtggatgatgatgatgtccatgtgtggacctctacgcttgaggaaatttttgcaactggtgaaacgctttgcactatcgcagtaggaaatgatggacatctccctgcgcaattgaacagaatccagcctccagcagacttagttaatggtttgtctgtcggtgcggcgacatctttatctgatgactgggagcgttgttcttacagttgcattggtcctgggcgaagccccggctttgtaaagcctgatggggtcgcttttggtgggaatgaggatgagccttttcaggtatacagtccaatgcttaatgggcttgccagtactgccggaacgagttttgcagcaccgttggtgttgcgacaggcgattgcgttaagttcatcgttgcaatataacatcacgcctctaactgctaaggcactcctcatacatcatgctgaaagcaaaaaacttaatcgccacgaggtaggctggggtcgtttccctcatgatctgagtgaagtgatattctgcggggatgatgaggtaaaagttatctatcaaggaaaactgaagccatcccaacacatgcgagcacttattcctgttcccgaagttctgatgaaaggtcgtgtgaatttgagggcaacattctgcttcgcaagtccagtagatgctgagcatcctttaaactacaccagaagtggattggaagtgactatgcgtaaaggcatctcggatagtgatggactcactttccctcttttcaatctgaaaaatgtttatgctgatgaaaatgagcagcgcattgatgcccataaatgggagacgacgctaagaagtgaacatacctttaaagaaggtgagttaactaatccttgctttgacatcgcttattatggtcgcgattgcgggatgcctgttgatgtagatgagttagatgaattaccttatgttcttattgtaactttatcagctgaggaaatgcctgatttatataacctgataaggcaaaaatatcagacattgcagcctatccaggttcagcagcaaattattttgcgtgcttaa

SEQ ID NO: 112015 - DNA, 384 bp, Enterobacter aerogenes
gtgaaaaaatctctaattgccttactaatggttaccagcggtttctcctatgcagacaagattccggtttcaattgagaatgtcattgctggcataaatgctcgtgagcatagtcttaaaaatggtgaactcactgtcagatatgaccgttcaaaagtgacgcaggatatggctaccgccatgtttgactggatatgtaatgactatttcatgaacaaatggaagccggagacaataaaaagggtcacgcttctgaacgtaacacgcgatcaaggttacaaaattgatgctggcgggaatgagtgtaagaaaagtggctctatgacttttgaacaagagaaagcctataaagccaatatcatcaaaaacgctactcagttctaa

SEQ ID NO: 112016 - DNA, 498 bp, Enterobacter aerogenes
atggctttaaatcttcaagacaaacaagcgattgttgctgaagtcagcgaagtagccaaaggcgcgctgtctgcagtagttgcggattcccgtggcgtaactgtagataaaatgactgaactgcgtaaagcaggtcgtgaagctggcgtttacatgcgtgttgttcgtaacaccctgctgcgccgcgtcgttgaaggtactccgttcgagtgcctgaaagacacgtttgttggtccgaccatgattgcatactctatggaacacccgggcgctgctgctcgtctgttcaaagagttcgcgaaagcgaatgcaaaatttgaggtcaaagccgctgcctttgaaggtgagctgatcccggcgtcgcaaatcgaccgcctggcaactctgccgacctacgaagaagcaattgcacgcctgatggcaaccatgaaagaagcttcggctggcaaactggttcgtactctggctgctgtacgcgatgcgaaagaagctgcttaa

SEQ ID NO: 112017 - DNA, 1134 bp, Enterobacter aerogenes
atgaagaaaaaaaatgtaaaactttctgtattggcattgactgtaggattactgtctggttgtacaatattaccaggccaagatctaaatagtttacgaaaaaatacagtagaattacctgatagcgattatgatcttgacaagttggtcgatgtatatccaatgaccccacaattagtggagcaattacgaccacaatcaattctggcacgccctaaccaagagttggatactttgttaaaaagttatgaataccggattggtgtcggcgatgtattaatggtcacagtgtgggatcatccagagttgaccaccccagcagggcagtatcgaagtgcaagtgatacggggaattgggttaatgctgatggctctattttttatccatatatcggaaaagttcaggtagcaggtaaaactttagctcaagtccgtcagctgattactagtagattgacgacatatattgaaagtccgcaagttgatgtcagtgttgccgcgtttcgttcgcaaaaagtttatgtaacaggagaagttgcaaaatctgggcagcaagcaatcacaaatataccgctaaccgtgatggatgccatcaatgcagctggtggtctggctgcggatgcagattggcggaacgtagtcctaacccataatggtaaagatactaaaatttctctttatgccctgatgcaaaaaggtgatttaacccaaaaccaccttctatatcctggtgatatactttttgtaccgcgtaatgatgacctaaaagtatttgttatgggagaagttggtaagcaaaccacgcttaaaatggatcgaagtggtatgactttggctgaagctcttgggaatgcaaatggcatttctcaggaattaagtgatgctacaggaatctttgtcgtgcgacaattgaagggtgataaagatggcaagattgctcgtgtttatcaactaaatgctcaagatgcatctgcgatggttatggggacggagttccaattacaaccatatgatattgtttttgtcacatccttgcctattgttcgttggaatagacttattaatcagttattaccgactataaacagtgtacgctatatggttagcacggcggatagcattaggaagtggtaa

SEQ ID NO: 112018 - DNA, 1461 bp, Enterobacter aerogenes
atgacttatgacaactcagatcctgaatttgcatcaaaggtattaaatagcatcacagaaaactatttactacaaaatataaataggaaaaccgaacaggctcaaaagagtttggattttctaaataatcaattgccaaaggtaagagctcaactggatgagtatgagcaaaagttgaatggctttagacgcgaaagctcatcagttgatctttcactcgaggctaaatcactcttagataatttagtgcaattggatgcgcaaatcaatcaattaacatttaaagagacagatattgctcaactatttacgaaagatcatccatcatataaggcattgcttgagaaaaaagcaatattagaaaaagaaaaattgcgattgagcaaagaagtatcgcaattacccatgacacaacaagaaattattagactttctcgtgatgttgacgttcagcagcaggtctacttgcaaatgctaaacaaacagcaggagttaggtgtgcttaaggcaagtgcaattggatacgtaaggataatcgaccaggcaatgacgcgattatctccagttgaaccgcgtaaagttatcattgttctattggggatatttcttggtgctttggttgccgcctcttttagtcttgttcgcaaagcgatgcatcgtggtgtagataacccggaaatgttagaagctgtaggcatagatgttctggctagtattccgttttcagagtggcaacagaaacagttacttcgctcaaatttaaatgcgaatggtaagctgaaactgctagcaaatagtaacccaagtgatttagcgattgagtccatccgaagcttacggaccagcattcatttcagtatgatggaagctaaaaataatatattaatgatctccggtgttagtccaaacatcggtaaatcctttgttagctcaaaccttgctgcagtgcttgctcaaagcggtaaacgtacacttttgattgatgctgacttacgtaaaggctatctgcatgatgtatttaatattcaaagtgataagaatgggttaacagaattcttagctgggcaaaaaaattatcaagatgttgttaagaaaattgtggatgttgagaatttatgggtcattccaagaggaagtatcccagaaaacccatccgaattgttgatgaaagatacgttgaaatcactgttagaatatgcatcacagaattatgatgttgttatagtggatacaccgcctattcttgcggtgactgatgctgcaataataggtatgcatagtgatactaatttgcttgtcacccggtttgaagaaaacagtgttaaagaagttgaggttagtatccgacgctttgcacaaaacggtattgttatcaaagggacaatattgaatgcagtattaaaaagagctgcgtcatattattcatatggctattacgagtatgaatataagcaggattaa

SEQ ID NO: 112019 - DNA, 204 bp, Enterobacter aerogenes
atgaaacgaatcaaagctaaagggatccctgttattatttatgaacctgtgatgaaagaagaggatttctttaattcgcgggtagtacgtgatctggatgctttcaaacaagaagccgatgtcatcatctctaaccgaatggccgatgagttgatggatgtacaagacaaagtgtatactcgtgatctctttggtaatgactga

SEQ ID NO: 112020 - DNA, 774 bp, Enterobacter aerogenes
atgaacgagtatattgccgtcgattggggctctacgcagctgcgggcatggcggatgcgtgatggcgaatgcatcgaccagctgaagctgccctgcggcgtcacgcgcctgaacgggcagcgcgccgaagcggtatttcagcagcagctggcgctggaggcgctcaacggtcagttacatgaggtggcggaaaacgtgtggatcgtgccggggctgaaagtggcgcaggccgcagagtacgatgtgatgcgcggtgaagaaacgcagctgctgggcgcctggcaactgatgccagcggagtgttacgtgatgcccggcacccactgcaaatgggtgcaggtgcaaaacggcgtggtgcgccagttcgccacggcgatgacaggcgaactgcatcacctgctgcttaaccattcgctgctcggccagcaactgctggtacaacaacccgatgacgccgctttcgctctcggtatggaaaaagggctaactcagccagcgctgctggacgggttattcagcgctcgggccgcgcgggtgttaggcgcgctggcggcgacttcggtgagcgattatctctccgggctgttgattggcgcggaggtggcgacctttagcgaacgctatcgcgccagccgcgtggtgctggttggtgagcactcgctcagcacccgttatcagcaggcgatggcggcgcgcgggttcgccgtttcctgttgttccggcgaggcggcgtttctttcgggtatagcgaggatgattgatggacaaggttaa

SEQ ID NO: 112021 - DNA, 240 bp, Enterobacter aerogenes
atgcaccgtcagtcagacatcgccgcggctttccgcgagtccattttgcgcagttccaaggggttccagtaccttcacacccgcgacttcgttaccgcgctgcgccggcgcggaatccacttttccgaggtggaggcgaactcctggatcgctcgcgagcagacgtattttgtcgataagacgccggaccatagcgaaaacaggctgtggatgatggccaacatggggagggttctgtaa

SEQ ID NO: 112022 - DNA, 318 bp, Enterobacter aerogenes
atgggatttccatcacccgcgacggactacgtcgagcaaaggttgtctgttaactcgatctgcaatgtcgggcctaatacgttgctcttcgagcggtctggcggttacgttgtgctggatatctccctgaaaccaaagcagggaagccagttgcttatccagcacggcggcgggacggaacttgccacgctgagaggaaagtcactgataaccgatgatggcgaagcgatcgagggagatgctctcgatgatgtcagcgtcatcggcgtcgtgacgtttactatctgcgatgtgcgccaggacaatgcggttgtttag

SEQ ID NO: 112023 - DNA, 1026 bp, Enterobacter aerogenes
atgacggcgcaagcgccttatccggcctacattcatgcgtatcccaggcctgataagcgtagcgctatcaagcgaaacatgccgtacgacgctgagtttacgcgcgacgagcgacaattaaatcaacacgagaacccatacgacgccatgagcgacgacaattcacacagtagtgacacagtaaacagcaaaaagggatttttctccctcttactcagccaacttttccacggtgaacccaaaaaccgtgatgaattattggcgctgatccgtgactccgggcagaacgagcttatcgatgaagatacgcgcgacatgctcgaaggggtaatggatatcgccgaccagcgcgtccgcgatattatgatcccgcgttcgcaaatgattaccctgaaacgcaaccagacgctggacgagtgcctcgatgtgatcatcgaatccgcccactcgcgtttcccggtcattagcgaagataaagatcacattgaagggattctgatggctaaggatctgctgccgtttatgcgcagcgacgccgaagctttcagcatggaaaaagtgttacgtccggcggttgtcgtgcctgaaagcaagcgggttgaccgcatgctgaaagagttccgctcgcaacgttatcatatggcgatcgtcatcgacgagttcggcggcgtctctggtctggtgactatcgaagatattctcgaacttatcgtcggcgaaatcgaagacgaatacgatgaagaggaagatatcgatttccgtcagctaagccgtcatacctggacggtacgcgcgctggcatcaattgaagatttcaataaagcctacggcacccacttcagcgatgaagaggtcgataccatcggcggactggtgatgcaggcctttggtcatctcccggcccgcggcgagtcgattgacattgatggttaccaattcaaggtcgcaatggctgacagcagacgtattattcaggtccatgtaaagcttcctgatgatgcgccgcagccgaagctggaagactaa

SEQ ID NO: 112024 - DNA, 297 bp, Enterobacter aerogenes
atgaccatgaccatgaccgagaccgaagcgctcgggataatccgcagtattaccggaatcagccagcaggctggcgaacaggaggccacgcagccggacagcgtgatagccgaaaattacgcgcgtgttgttgctgaggtgatgcgccgtgatggtattgagcttaacggcgtggatatgcgcaacatacgaaccagagtccttgagttgctggcataccgtcgccgttctcaacaacggagggagagcgcgaaaaatacttaccagtggaagaagccggaacgactgcggcggtaa

SEQ ID NO: 112025 - DNA, 543 bp, Enterobacter aerogenes
atgaaatcgcacctgatgaacaaaaaaaacatggcgcaaagctgccgtgtaagtgcgacagcgttcgacaagtggggagtgactcccgttgaacgtaaaggccgcgaggcgttttatgatgttgccagcgtaatagacaatcgggttagcaatgcaattaaccagattacagacgacaaaggcgagattgataatgatgagcttttgcgagtcaggatcagattgctgacagcgcaggcggaggcgcaggagcttaaaaacgagcgcgaacgcggcgatgtgattagtacggaattttgtatatatgcgctttcaaaactggcgagtcagatttcttcaatcatgggcagcctgccgcttactatgcaaaggagcttcccacagatgacccccgccatgctggatggcctgaaaaaagaagttgtcagagcctgtaacgcatgcacaaaacttgatgaaaacatcccgcgaatgctgtccgattatctgatggaaactaccggaaatgtgcctgataagtttcagccggataaagacaagtaa

SEQ ID NO: 112026 - DNA, 384 bp, Enterobacter aerogenes
atgcagaatcattacaatgaccttaagccaattgccgaaatgatgtatccggatccagcagtagaggaattaaaggctattgctgacaaaatgcgtttaagtgaacgccttgttgatatgaatcaggtgatggaacttactacccttagccgtcgcacattgctaaaccttgaggctcgcggagagttccccgaacgcgtacaggttacggaagggcgtaaggcttggtatttaagtgaagtgatcgactggataaacaatattcctcgagcttctgaatattgccgcgtacctgtcccaaaaaagccagatgcggcgctatgcctcaagattgagcgtgtacgtcgcaatgcacgggatggtcgctataagttgattggttga

SEQ ID NO: 112027 - DNA, 342 bp, Enterobacter aerogenes
atggctactcattacactgaactcatgtctggcactgaagcactggttactacgctggggatattttcagccaataaaggggtaatacctgcgtttacgccactgatgcaggaagatgcaactggtgcgctagtggtatgggatggaacgagcgcaggcaaagcggtttatgtttccgctgtacaaatcgacacagcgaaaaaaacacaggcacaggtttataagacaggtgttttaaatgttgatgctctgaactggcctgagtctgtaaaagaactgtcggcaaaggttgccgcgtttgttggctcaggtatttctgttcagccgctggctcgtgtgtaa

SEQ ID NO: 112028 - DNA, 1041 bp, Enterobacter aerogenes
atggttgacttatattcgcctacacagcttgtgcaggtggctaatgctgaagatgtgcaaaaaaaattaaatgcgttgtttaccagtttgtttttcactcgctcggtaatgtttgaatcgagagacattattcttgatacgatcgacgatccaaatatcccgatcgcggcgttttgctctcctatggtgggcagtaaagtttcacgagatgagggatacgaatcaaaaacaattcgccctggctatatgaaaccgaaaagcagcattgatccaaataagttagctgtgcgccctgctggtgtatcacctgagcaatacaatgcttttggagcgcgtaatattaaagttaaacaggcgattgtaaatcaggctaaagctattcgtgcacgtattgaatggcttgccgttcaggcaatcacaacggggaaaaatatcattgagggcgatggtattgaacgttatgagctggactggaatattaaaccacaaaatatcatcactcagtctggcggtgctgagtggtcaggtaaggataaagaagcttttgatccaaatgatgatattgagagctacgcagaatttagtgagggcgtcactaatattatcattatgggcggtaatgtatggaagaaataccgttcattcagggcgataaaagaggctctggatactcgtcgtggttctaattccgaactggaaacggcccttaaagaccttggtgattcggtgagttttaaagggtatatgggcgatgttgcgattgttgtttacagcgggcgttataccgacgaggacggaactgaaaaatatttccttgatcctgatttgatggtgcttggcaatacggctcttcaggggattgtcgcttatggcggtattcaggatccggagctaatccggatggggctgactaaagccgaacttgcaccgaaaaactatattgtgcctggtgatccggctattgaatatgtgcagacacattcagcaccacagccaataccggcccgcatcaatcgttttgttaccgttcgcattggctaa

SEQ ID NO: 112029 - DNA, 423 bp, Enterobacter aerogenes
atgacagcacagatagcggcttacggacggctggtggctgatccgcagttaaagaccaccagcaagggtacacaaatggcgatggctagtatggcggtcccccttccgtgcagccaggcagatgacggaacggcgatgatgtggttatccgtcctggcgtttggcagacaggccgacgcactggcaaaacaccacaaaggcgaactggtgagcgtggcgggtaacatgcaggtaagccagtggacaggccagaacggcgaaacgcggcagggctggcaggttatcgcagacagcgtgatcagtgcgcgaacagcgcgaccgggcggcaaaaaaggccagcaggggcaggccactgacgcactgaacagggcaaaacaacagtcggggaatgatgatccgtacggcgataatataccgttttaa

SEQ ID NO: 112030 - DNA, 246 bp, Enterobacter aerogenes
atgacagcgaagcacataaaaaaatcacaatcgcacgcccttgatttgacggaacactggttaagggtgtcgataaaaatcatcgaccgcaacgccggggaaggatatgcgaaagcacatcccgaactgattagcgcattcatgacaacggcagctgcaaactttgccacgctgacagaacgggagattgccgaagcggaacaggtgacaaccatcaacgttaaaaccggagagcagacagcatga

SEQ ID NO: 112031 - DNA, 1818 bp, Enterobacter aerogenes
atgaaaaaagcgccaaatttaaaacaccagccgcgtgacaaaatgacggaagtcatcatttttgcgggtagtgatgcgtgggcacatgcgaagcagtggcaggaacaggacgggcgactggctggcgataacgtgccacctgtctggcttggagagcaacaacttgccgaactggacaacctgcaaatcgtaccggacggacgctatcgcgtgcgtctctaccaggcggggttattgcgtccggggcttgttaataccatcgggcagaaactggcagcggcaggtgtcagggatgctgattattaccctgaaggaatgcacagccagaaacgggagaactggcgcgaatatctggaacgtgaacgggcagagcaggcggaaaagaaaaaggtagttgaactgcctgtaaagaaaaaagagcgggtaaaagacgataacgcttcatcactggcgcttaaccagatgggagcaagtcaacgcggcgaagttctcctggcacattatggcggtgaactggcgattcatgctgactctgacactgttcaccattacaacggcgttgtatgggagccagtacaggataaagaattacagcgagctatggcacagattttcattgatgcggagatcagctattcgcagaacgccattaaatcggcggtcgataccatgaagttaagtttgcctgttatggggaatacagcccgtaacctgattggattcagtaacggggtatttgataccagaacaggtaattttcgggagcataacaaaaacgactggttgttaattgccagtgaattacctttcagcccaccagcagagggggaaacgctggcaacacatgcgccgaatttctggaagtggttacgccgttcggtggctgagaatgaccgcaaggcggatcgcgtactggctgcattattcatggtgctggcgaaccggtacgactggcagttattcattgaggtaacaggtccagggggaagtggtaaaagcgtgatggcggagatttgcaccatgctggcgggtaaggctaatacagtatcagcgagcatgaaggcgctggaagatgcaagggaacgcgcgttagtggttggcttttcgctgattatcatgccggatatgacccgctacgctggtgatggggcgggaattaaggctattacaggcggtgacaaggtggcaatcgacccaaaacataaagccccatattcaacgcgtatcccggcagtagtgctggcggttaacaataacgctatgtcattcagtgaccgcagtggggggatctcgcgacgtcgggtgatattcaatttttcggaagttgtaccggagaacgaacgcgattcaatgctggcggaaaaaatagaaggtgagctggcggtagtgattcgtcatctgcttacacggtttgctgaccaggacgaagccagacgccttttatatgagcagcagaaatcagaagaagcactcgcgataaagcgtgaaggtgattcgctggtggacttctgcggctatctcatggcgtcggtaatgtgtgatggcctgttagtgggtaatgctgaaattgtgccattcagcccgcgcaggtatctctatcatgcctatctggcttatatgaaggcacatgggtttggtaaacctgtaacactgacgcgcttcggtaaagatatgccgggggcaatggcggaatatggcagggagtatatgaaacggaaaacgaagcacggtttgcgttcaaacgtgacactgacggaggaatcagaagactggatgccatcatgtgtatcggtcactaatgacgatagcaaaaattaa

SEQ ID NO: 112032 - DNA, 300 bp, Enterobacter aerogenes
atgagaacgtatttatctggcttgactgccagcggttatgcacacccccaaattatccccggcgctatttatctggataagaacggtaatagagtaacggtaaaagaactgatgtttgaccgtgtgtattttatccgtgatggctattcatttcttagttcgctgaacgtggagatctttatttgcagattccggcgggaaatcccgacttccagaaataaccatgtgtcacgtgtggatgtggataaaaaactacaggaactgaaaaacatgattgccgcgtggagagagcagaaatga

SEQ ID NO: 112033 - DNA, 321 bp, Enterobacter aerogenes
atgcctgatatgtcaaattaccagtacctgattaatccgcattttaactgtgagcatgatattgctaaaaaggtttattccgctgcggatggggctactgacaatatatcaatggctgttgcgtcaattggtagcctgatgtggcatgcgtcagaaaatgaggactatgacgaaaaggccatgcgcattgatatgggtaatatcggtttgttactggcaatgcttggacattttgatatttcgttacggtgcaccattaaaaatgccacagatgcattaaatgctataaagaaagcgaatactgattcaaatcggggataa

SEQ ID NO: 112034 - DNA, 204 bp, Enterobacter aerogenes
atgagaaatcataccatacacccgcaagggcgggactcgtacaacctgaataaatacatctggcgttttatcgccctgagcaccgcacaaccgcgcgtgattcacatcgtggccaccagcgaacaggaagcacgccagcaatccccggctggctgcgtgatggtattcgccgcccgtattcgtcagggggtgtgccatgcctga

SEQ ID NO: 112035 - DNA, 306 bp, Enterobacter aerogenes; identical to SEQ ID NO: 15095

SEQ ID NO: 112036 - DNA, 210 bp, Enterobacter aerogenes; identical to SEQ ID NO: 9210

SEQ ID NO: 112037 - DNA, 1239 bp, Enterobacter aerogenes
atgagcagcgcaattcatagacttagcgacactcttttacgaaaattaagcggatcaccaaccacaaaaaacgccttttttaatgacggtggcaatcttagcgtaagacattccaccagcggcctgttaacctggtatttcacttacagggccggaactggtaggcaggtatcaccggaacgtctgagactgggcaattatcccgatctgagtctgaaagcagccagggaaaaagcagcacagtgtcgcgcctggctggctgaggggaaaaatccgcgctatgagcttaatcgtgctgtacaggatgcgttagcccccgtgacagttaaggaagcgctcacttactggcttgaatcgtatgcaaaggaaaagcgcactgactacgaatcactgaaaagccggatcaataaacacataatcagccagattggcgctttgccgttggaaaaatgcgagctacggcactggttggcatgttttgaccagatggcaaagcgaagcccagtatctgccggatttttgctacaggtatgcaaacaggcgcttaagtactgccgaaaacgacgatacgcaatcagcaacgttcttgatgatatggttgtcggtgatgtgggaaaaaaagcagaagtgagcgagcgcgtactaacaaataaggagcttggggaattactccgcgccctggatgacaaaatattcccgccatactacagcgccctaattcgcctcctgattgtttttggatgccgtaccactgagctaaggcgctctgaggtgcaggagtgggattttaaagaaatgctctggacagtaccgaaggagcacagcaaaacgaaggtcgccatattcaggccaataccggaaagcattttgccgttcgtcacgcaactggtggagcagaacagacacacaggcttattgcttggtgaactgaaaggacaatcttcggtagcagagtacggaagaacagcgcacagacgaattaatcaagccccctggacgttacacgatatccggcacacatttacaaccatgctgaacgatttaggcgtggatccgcatattgtcgagcagcttacagcccaccagatgccagggatgcaacgagtctataaccactcccgctaccttgatgcaaaacgtgatgctcttaatctatgggtagaccgtctcgagcttctccagaacaatgatgaaaaaatcgttgttatgaccccgcgaatttacccccaaaattcttga

SEQ ID NO: 112038 - DNA, 939 bp, Enterobacter aerogenes
atgctggagctcgattttagccagacgttgggcaaccactgcctcgaagtgcatgaaacccttcccgccagcggcattaccgctattttcggcgtctcaggcgcgggaaaaacctcgctgattaatgctatcagcgggctgacgcagccgcagcaggggcgcattgtgctcaatggtcgggtactcaatgacgcgcgacagcgtatctgcctggcgccggagaagcggcgcatcggctacgtgtttcaggacgcgcggctgtttccgcactataaagtgcgcggcaacctgaaatatgggatggccaaaagcatggccgcgcaatttgataagctggtggcgttgttgggcattgagcacctgcttgaacgactgcccggtagtttgtccggcggggaaaaacagcgggtggcgattggccgcgccctgttgaccgcgccggaattgctgctgctggatgagccgctggcctcgctggatattccgcgcaagcgcgaattactcccctatttacagagactggcgcgcgagatccacatcccgatgctatatgtcagccactcgctggatgaaattcagcacctggccgataacgtgctggtgctggaggcgggaaaagtgaaggcgtttggcgatctcgaaacggtgtggagcagcagcgtgatgcatccgtggctgccgcaggagcagcagagcacgattcttaacgtctcggtgatcgcgcagcatccgcaatatgcaatgactgcgctggcgctgggcgatcagcaactatgggttaatcagctggcgcgggagccgggcgaagcggcgcgtattcgtattcaggcgtcggatgtgtcgctggtgctggagcatccgcgacaaaccagtatccggaatattctgcgcgcgcaggtcgttagctgtgtggaaaccaacggtcagattgaggtatag

SEQ ID NO: 112039 - DNA, 195 bp, Enterobacter aerogenes
atggcgatttgggtagatgcggacgcgtgtccgaatgtcattaaagaaattttgttccgcgccgccgaacgcacgcagacgccgagtcgctgcgggttccgccgtcgcgttacgtccgcgcgctacgggtggcgcagggttttgatgttgccgataacgagattgtccgtctctgtgaaccgggcgatttggtga

SEQ ID NO: 112040 - DNA, 249 bp, Enterobacter aerogenes
gtgatcaccgctgacatcccgctggcggcggaagtgctggcgaaaggaggcgcggcgctgaatccgcgcggcgagcgctacagtgaggcgaccattcgcgagcgcctgacgatgcgtgattttatggagacgatgcgggccagcggcgtacagaccggcggcccggatagtttatcgcagcgcgatcggcagttattcgccgccgagctggagaagtggctgcttgcggttaaacgccagcaggattaa

SEQ ID NO: 112041 - DNA, 864 bp, Enterobacter aerogenes
atgcggttgggaaaaatcaccagtactgacagtgacaaatttggtttctatgtggggcaatacttcggctatgggaatcagcaaggcggtctaattggcggtgaaggggttgatattacggctaagagcctgaataacgaatctggccgtattattgcgcaaaccggtgatgtaaatattaatctgactggcgatctcgcaagtaacaaagggcagattgttgctaattcagggggtatgacgattgctgcgaagaaaatcgctgctgattacgcaactatttatagctctggtaacatgcaaattgatgcatcttcattgtcatcaaaagcaagcggttccattgcaaagaatacggctaacggagtcatctcttcagatagcgacgtcttgattaatattaatggtgattataataacaccggatgggtgaatgctaaaggtaatctgacggttaatgcctccggttacttgacaaataatcacgcctttaatgctgatggtgacttgaacctgaccgggaaaaccatcactaacaacagcgatattgctgctggtaatactttgaacatttcgacggcgaatgatttgaccaataatcttggcgcaaacatttctgccaaaacaactaacgtcacagctaaaaatatctcaaactgggctaatttagttgctgatagccagttgaatgtcactgcaagtaataacatctacaactatggcaacctttatacagcgggtaaggcggtaatcgatgctaagaaaatcgtcaacactggtttctgggctgtattaggtggagctcaaggatttgagactacagctaatgttgtaaacgtatttggtaccgttgtaggtaaataa

SEQ ID NO: 112042 - DNA, 1155 bp, Enterobacter aerogenes
gtgcggatagctattcccagctacatgcgccacctgttccaagggaagcgctactttatgaaaagcacagggacacgtgacatacgtcaagcgcgtttgtttcgcgatgctattgctctggaatggactcgcttaaggaatctgcttaagccgcaaggcggctcatccgtcgatcaaatcattgatgagctacgccgtgtcagtgtgtatgctaaggaagcccccgcatcatttggtgcatcggttcaggcttgcccttccctacttaaaatgcgcgatctgtatcttctccaatacagcgagaagagaaagctgaccacgctatccaagaccaacaaagccgtagaggtgctgttaacccacctgaaaaagaaagatattcagttgcgggatattaatcgaaccatagttacaggctggttagataagctcaaaactgagcgagcgccgcaaaccatccagaactatataagcgcactggcacagatttgggatttggcacgcaatcgctatcacgatgcgccacaggacaatccttggcgtggtcatgcgctcgaagcaaaaagcagcaaggtcagctatgaagtcttcgcaccgggagagctggcaaagatctattccttgcttgatgacgagatgaaggcggtaacggctattggtgcatacagcggtatgcggcttaatgaaatatgtacgctacgtgaaagcagcattaaaaatatcgagggtgtattgtgctttgagatcaccgagggaaagaccaagagcgcggcgcgaatcgtccctgtacacagcaagataatccctctcgtgaagtcgttgctcaagaccacacatagcggttttctgttctatcacgcctcaatcacagaccgagccgatgggaagcgctcaacgtggcatacgcagcaattcacgcgagcaaagcgtaaagcgcttggcgaacctgccgcagagagaaaagtgtttcactcactccgccatgcttttgtgcaacagctcgaccgtgctcaagtgccagaggatagaatcgcgctactagtaggccatgagcgcggaagtacagaaagtttcaaaacctattcaagaaatagcgcctcaacgattgaactaaaaagatacgtcgaattgttgtcatataaagatatcaggtaa

SEQ ID NO: 112043 - DNA, 615 bp, Enterobacter aerogenes
atgcataaaacatttctaagttatcatcatgctaatgaacaggatttaaaagatagtataatagagacatatggcggggaatcttttatcgataaatccgtaagcgacggtgacattagtactgatgtaagtgaagaatacatcatgcgtaagatacgcgaggaatatctagctgatactacagttactgttgtgcttatcgggagagagacagcccaacgtccatttgtgaattcagaaattcaggcatctctatggggagaaaatccagcgggattgataggtgtcgtcagagatgaaatctggaatgaagtttttaccgatgctgtatgttctgattttcgctgtaactgtggagtgagtttaaggcagatttctactggttatacactatatcttccttatctggtgcaaggtaatcatcgttttcaaaaaacagttccgcattacactgatgaggaagtgtattgtgcagtggtaaggtattccgattttattgctgattgcgaaaaatatattgatgaagcatttaataaacgagcaattatgaatcctgctgttaaaagaaatgcagatacagttcctgctatccgagctaaacttagactatggtaa

SEQ ID NO: 112044 - DNA, 729 bp, Enterobacter aerogenes
atgtacaagagatgggttgcgtgggggtctgtttgcatagttgttattgcgcttttgggaacggttcagttaccaacgtctgaagatataaccttcggtaagcgtttacttcaaaatattggggtgcttagctctctactttctgtagttgtattaatcattgtgactatctttctattagatggcatgatgaatcgaaaatattcgtttaaagttgaacggcttagttttggcggtttaaatattctttttgataactctgatgccctttttataaagtctatacagaattttctcgacacgaaaaggacgctttttaaaataaacgtccagcaggatgcttttgatgaggtatttaattcttattacgaggtctatcaatttattcgtgttgagatgcgagttctgaatattaaaaggaaaaaagatcttgagttatatatgttggcgaatactatgctcaaaaaactaaatgcatttctgactgagcaccaaaataattataggcgctggcataagtatgtctcagataaagatgaagttaaaattgacgagaagcctgatggtgaagcaattgttcttaggtatcatctgacgccaatcggtaaaattcagacttactattatcattttaataaacttgttaatgattttactgatctgaataaattctttcaagatagtgttgccagcaagtttagtattgacatggataaatggagcaactaa

SEQ ID NO: 112045 - DNA, 447 bp, Enterobacter aerogenes
atggttacacggacagaccagctactaagaaaagcgatgcggggctatctggaacacctcggcaacatgccgttggctgaacggattagaaacgctgctgcattcgaagatgtgtatcgctttttgttgaatggttccgggcggctggagctgcgccgcgctgacgtggctgccgtccgtgtcttcctttggaactatcaataccgccgctgtgctgtgacaggtaagccgctgcgccttgcgtctgccgtgctggatcactgccaccgaaccgggcgcgtgcgtgctgtggtgcatcgatctgctaacgctgccgagggaggccattatgcaggaagtttatgtgggctgacccacgccagtatgagcgtaatgttggtaagttaccgacgccaatacaaggggataggagttatctatccccataaaactgagcaacttacttag

SEQ ID NO: 112046 - DNA, 300 bp, Enterobacter aerogenes
atggcattgacgattaaattaaggtggcggtacatcgaaccgccgccaatgactggcgcactcgctgacctgaaagtgtgggtaatggataccggagagcctgagcttgaagatgaatttcgtaagctgctggggctaatgcgccgcaatggtatcagtgacgaacgcgttaatgcgatggctgatgagctttatgctctggtttgccaacgccagtacgaagaatacgaagcctgcaagcgggctgcgtctgacaatggagactttgaatcatggttacacggacagaccagctactaa

SEQ ID NO: 112047 - DNA, 846 bp, Enterobacter aerogenes
atgaagccttacgaaaaccccgcgctgttgcgggagctgttcacatacgaggtcgagactggccgattgacgcacgccaaaggcaagcggcgcgaccacgccggggagctggccgatacattcattgcccccgatagaagccgcagggtgtctgtccgggttgacgggaggcgtaacgccgtgtctgcgcatcgggcagcatgggcgattgctcatggcgaaatccccagcggggcacaggttctgcacatcaacggtgacaaggctgataaccggttggttaacctcaagctggtgacagccgaagagcgcgacaccgcaaaagtgcggaagcccagccggaaggggaaccgccgcaccgcgcccgcctctgtcgtggacgctcctgccgatgagccggattctgttgaagctggcgacccggtgccggaactccctctgcctgttaagccgctggccgaagacgacccactccgccagtgttacgccgaactgctggccgaagctagctgtgtctcactgccacggctgcgcccgggcaacggggatgcgctcatgtcgcagattggagacgcgctcggtgtgtccgtgcctgagcacccaacggcgcacgctgcggtgtggtacaggattttaactgagcaaggacttagcgaactgttggaggggaataataaacaggtgctgacaatcttctttctgctctgctggagagacagcgccttgcggttggcgggcaagcaaaaggaacggctggctatcgctatcgaaggaaggacgcttaaacaagccaatgaagcgagagcaaacggcataaagaggaatgcttatggcattgacgattaa

SEQ ID NO: 112048 - DNA, 510 bp, Enterobacter aerogenes
atggttaatgatgcttacgcccctgagctgttgcgatccctcttcctgtatgacccgatgacaggtcgcctgcaccataaagctaaccgacgccgggttaaggctggctcctatgctgactccacccggcgagctgatggatatcgtcaagttgccctgcggctcgatggtaaacagtatcagcttaaagctcatcgcgtggcttggattctggagcatggcgatattcctgatggtctgcaagttgaccacatcaatggtatccgtgacgacaaccgcctatgcaatctgcgcttggttacgcagcgggaaaacgaccagaaccgacgcaaggcaagggggtatagctggaataagggctgtagcaaatgggaggcttacatacgtgttgatggtgtactccgtcaccttggcttattcactaccgaagcggcggcgcgtgctgcctatctaaaagctaaagccagataccatccctcaacgccagcctatttattgcaagctgcctaa

SEQ ID NO: 112049 - DNA, 261 bp, Enterobacter aerogenes
atgctgacaacgacattcatattgaagcctatgaccgggcatgaactgggcgctgattatgacgttaccgcagaggaagcgctgacgagggcgacgctgtttaaaccttcctcggtactgttgacggtcgaagcgcagagcgtcatcaatcgccagtgggatgatgaacgcgaaatgacgatggtgatgggctcatatcgcctgttcaatgttgggttgcgccgcccggactgcgttatcaatttccgacaagctgcataa

SEQ ID NO: 112050 - DNA, 348 bp, Enterobacter aerogenes
atgaccttactgacacctgaaaacgtggcagcggctagagctgcccgtagcgcaaggattgaacactggaaagcgaacgccagccagcttaagcaggactttgctgacgaagcgcactggcggcggcacgcctcacgcttcggcgtgcgtatgccctcggcgtatgttcccggctccgagctgcgattgctgcgccgggcggccaaacgcgcgggcatctctggtgctgatatgcgcgatgcttttggtgggggcgttgcgcacctgcacgagcttaatccccactggcctgctttcgcgcttatcggcctgattcttgaggtggcggctgaaaaagctgctgcctga

SEQ ID NO: 112051 - DNA, 696 bp, Enterobacter aerogenes
atgtctgaccagaatgttaatccgtacctttcgggcgctgatgctgcaccgcagcaatcgccgtacatggccgcgcctattggcgctgacaatggcgcatcccgctttagctctgcgcctgctgatgctgatttcctccgcactcagcccgtcaacggcaatgctggcgatcaatgggattctggcaatatcgcaaatcaacaagatcagaacgcggacagcgccggggcgcaggtgggtgacaccatccctctgatggatggaactgctgttgagtataccgccgagctgcaaggattgatggggcagtttcaccagtccattgaaagccaactagggaaggggacagttgacgctatgttgcagtatgctggcacgctcgacgccgggacgcaagctacccttgagcgtatggtgttgtctggcgatcctgctcagatgcagcgggcagttcagtacctgcaagagcgtatggcctcaggttctacgactggttatgtcccatcgcaggggaacccatacggtcagcccacagcgcaacctgtcggtatgtctcatgccgagtttatcgcagcgtatgaccagctttcgcagtgggcgcagcaatcagggtatggccccggccatcgccagtacgacgatcaataccgcgctctggttgcgcagcgctccgctggcaaacgcgctggccgttaa

SEQ ID NO: 112052 - DNA, 240 bp, Enterobacter aerogenes
atgagcaaaactatcgtattgctgccgccacgcaagaataccgactgggctgcgcaattaaagctgatttctgaatcgcttgaggtgagtcaggcagacctcgcccgcgcctatcaggttgatcgtcaggatatgggtaaagcgtatcatggtgtgcgcaaactgccggaacgttgcgtgcctgttcatatgctgttgctagcgcaggttcacgatttcagagcattatcaggagaataa

SEQ ID NO: 112053 - DNA, 234 bp, Enterobacter aerogenes
atggcagagaacgaaccactacatcccgcagttaatcccgaactctatgtgaaccttggcgaacaacgcgaaggctacgcgccgatagaatcccggggctgggatgtactgacgcggaacctgaccggggaagggcgaactgaccccggccaaatgcttaaccagaatccgaaacaacgcccgcgcggctccgttggtgagcgtcgttggcttcgtaaacgtggattactttaa

SEQ ID NO: 112054 - DNA, 567 bp, Enterobacter aerogenes
atgacagttctgagcctgaccgatatccagcgcatcaatacccttgttaagcgcgatcttctaaatgtagaggaagttgtcgcggcaaccggatttgacccggtggatgttgaggcggtgctgagcggcgtttacgtagccgaccttgccaaccagtggcgggatgaagccgctattacgctggaggaatacaacgccatccgtaagcgctggaaaccggggcgcggccactgggacactacgcatgccattgcacgcgattttctaattcggcctgaaactgtgctggctatcgtccattcccgctttagcaacgctcacactcacccagtgccgaaagccgtcaaagcaaagtcggagaaagcgaaagtaatgcgcaagttggtgcctactgatttagatgaaatccacaagttagagcgcttcgggtggcctgccgccgagattgccgaaaagctgggtgtccctgtcgaggtagtcgcgcatgtacaacgctgcctgcgtaaccgttggtcgtacccggatactctggagtctgttaactccaaattcagcgaggctgaatga

SEQ ID NO: 112055 - DNA, 177 bp, Enterobacter aerogenes
atgacccctgaacaattcagacaatggttcgttaagctgccggagaaataccagcgcgtagcccgtgccatgtacgacgacgcatgcaagtctgggacacataccgcttccagtctgctacttattcgcacgctgattgaagatcaaatcaatttcgatggagactttaccttatga

SEQ ID NO: 112056 - DNA, 210 bp, Enterobacter aerogenes
atgactaaatctgaatttgaagccggaacatgggaactaaaaaccctgctgctgggtgcgttgacgcgcaggcttaaggaggatgcggcgggagagtcacgcatggctgctgccgagttgtcatcttgcgtgaacttcctcaagcagaacgccgccgactcgccggacacatcattcaacaacgttttcccggaggatgacgaccaatga

SEQ ID NO: 112057 - DNA, 432 bp, Enterobacter aerogenes
atgcctgatgaaaccgtgctgcagcgcgcggggcgttctgacgccctgcttaatgcccaacttgcgtttgccctgaacgggtattcatttgacggactggcgtcacgccatgttcacgccctcaatcgcgaggccgttttgcgccgggtaggctccccactacagcggtattgcctactgaatgactgtgagccgtgggagtgcctagctgcgatattgaacagattccgccaccggggggatggctctcgcgtttggccgacgtggcgcatggcgcatgaggtttttaatggggctgctcaccctgcagttaagacgcccgcagaaatcctccaatctgtgcagcgccgtctgtatttaccaaaaccagtacatgctgaggtaattcaacatctgcgtgcaatgggcttaattggagataaccaccaatga

SEQ ID NO: 112058 - DNA, 1845 bp, Enterobacter aerogenes
atgccaacgaatctacgccgcctgctggcgctggccgctgacgccgaaccgctcaataccgctaacgcagatgtacagcagatgattgctgacgggattgttattcggcgttccaagatatgtcccgtaaagcgtaaacccgttaaagcggcctacaacacgaagaccgaagagttttattacaatgcagatggctccgcgatgaccttgcgggagtggcgaacgctgcacggtgttcaaccgaagaagcaaaaacagcgttccgacacggggttgcggcaagtcatccagcccggtgacgcaattcattgccgatgcgctgagctggagctgtggttaaacaagaagcctgctcgttatgctgacccgctgccgccagattttcccggtgttcgcgtagatgatgccgcattgaaaccgcgcgagcacgccgttccggcatcgacaaccgggcagaatgcttttctcaaagcctgccgcgagttcctgatttgtgatgagaagactatacaccacatcaacaggggcatgaataaactggaagcgatgcgcaattcagatttcaaacgctacggggactcagcggagtttcgtcaattgtggtgcggagagtcgaaacctaccgaggataaatttaacagtacaaatcgtcattgtgacccgaacggcttggctgcattgtcgtctgtgccgtcactgaatactacgccgtatgagttccgccccctggctcgctgtgaccgaaacgcgcgcgttagcctgctgccacccgatgggctggagtggaggccggggcagttgtctgttgctgatgcgatcttttcccgtggcagtgatgtgcttgccgttctgcctaccgggtatggcaaaagcgcagccttcacttatccattgatttatgagtcccgcgctggcattggcctgtctgtaatcgtggttcctactaatacccttaagcgtcagattctccgccagttgcgggaggctggcattcacgctgtggcctttggcgataagctaccgaggcaccgcaacgcacaacaactggcgggactagcagccggggcgttccgggttgctgttgtttcgcctgaacatctggttccgtcgagtcaggttctcgcagcgctgatggcttatggcgttgatcgttttattatcgatgaggcacacacggtcaaagactgggatttccgcccagcttacgacgcaatgcagcacacactacagaatgcctttccttcggctcaacgctgcgtgtttacggctacgctgctacgcgaaaatgagcgcagtttaatggagtcgcttggctgccgtggcgattacgtaacattccgcgctgatgttgctcgcgagaatatccagttgacgccagtcagacagtgccgcgaacgtttccgagcggctattgggctggtcgaggctctgccgaaagaagagaagacgcttattctcgtcaatgaccttaaaacgttgcgggcgtacctgaaactcttgggcgaccgggcgcggccgtatcactcgaagacgatgcacctgagcaacgaggaacgccacgcaaacgctgagtggtttgcctctacgccgggcgcgattcttattgctactaaagccttcgggctgggtgctgatgttcctgatatccgtaacgttgtcgtgacatacgtccccgatgatttgcctgatctcgttcagatgattggacgagccgggcgcgatggggaacctgcccgcgcttttctgctgtggtcatcgctggcgctggatgttgcgcctgatgagcttgcttacttctaccgccctgaaaactgcaactgggactacatctcccgtttcctctga

SEQ ID NO: 112059 - DNA, 576 bp, Enterobacter aerogenes
atgaggacttttatctactgccgcgtttcaacacgcgagcaggatacgcagaatcaggtgctggctattgagcgtgccgggtacacggtgcctgagagcagggtaatcagcgaggacatttcaggcagcgttcaggctatgcagcgccctaagtttcgggcgatggttgagcataagctggaagcgggagatcagcttgtcgtgctgaaactggacaggctggggcgtgacaacatcgatgtgcagcagaccatcgacatgctgttagaacacggtgtgaaggtggtgtctcttgacctgccagcgcgtgatctgacttcatctgagggcaagctaatccgccagatgtttggagcctttgctgagttcgagcgaaaccgtatacgtgagaggacgctggacgggctggagaaggcgaaagccaatggcgttaagctgggacgcaaggaagccaccgacaccactcaaaaggtgcaggagttgcgaagtgagggactgtctcaatcgaaggtagcgaagcgtctcggcgttagcgtgagcaccgttaaacgccactggaacaagggggaggagtga

SEQ ID NO: 112060 - DNA, 717 bp, Enterobacter aerogenes
atggtcagtaaaaacagcgaagccccattggcggcaacctttggggcttctatcgaaaataaccgcgaaggaaatatcgacatgagcagtgtacagaacaaagagctaagtttccacaatgtcacattggtaccagcgcctgttgcggatggtatttggctgacatctgcagatgtcgctaaggcactgggatatgcttcaagcaaaagcgtttcgaccatttactcacgtaattccgacgagttcacgagcagcatgtcaatggtcatcaaaatgatgaccaacggaataaacaataacttacgtgaaaagtcggtccgcgtgttctctcttcgtggttgtcatctaatcgcgatgtttgccactaccgataaggcgaaagagtttcgccgctgggttctggatattctggatcgggaagtggcgcattcgccgattgcgaagcagttcagtgatgatgagctttgctctttggcatggttatggcgtgccagcgacatcatgctcaaggcctgcgatagcgtcactccgttgttgaaagtggctgggcatcgccaagctgggcattttcattcaatcgggcaggaattgccacgatcgattaacaaggcaagagaagtgattaagcgcgagacggcgcatatcgaatttcacccatggaaggatgataactggagcagggtattaccacacctgcgtcaggagatgttgcagtga

SEQ ID NO: 112061 - DNA, 174 bp, Enterobacter aerogenes
atgcaagacgtactctataccggccgcaagaacgacagtttccagcttcgcctgccagagcgaatgaaggaggatatccggcgcttagctgaaatggatgggatttcgattaactctgcaattgtgcagcgtttggcaaaaagcctgcgtgaggagcgcatgaatggtcagtaa

SEQ ID NO: 112062 - DNA, 354 bp, Enterobacter aerogenes
atgatgattaaacattccttgctattttcaattctgctaataaccaccactctttcatatgcagagacgcttgatgattttttcaataaaaataaagatctaaacaatgatattgagattagattagctataaaagagaaagcctctcaacttgctttgtcagaagcatatgatgagggagcaaatgacctctctgccaggagtggcaggctgatgcgggaggatggtggtagttatgctagatatgcggtcaaaactcttgttgatgcttgcaataacattggcccgtatcaaagcatgcttgacgatccggcgtgcaaaaggctagaaggtaaggttgctggcataaaataa

SEQ ID NO: 112063 - DNA, 1926 bp, Enterobacter aerogenes
atggcagcaacggtaattgacgccctcctgattacgctgggccttgatacgtctgacttccgtaaggggcagaaagacgttagcgacgacctcaagaagcagcgtgaggatgcgaaaaaaactgccaaggaaatggcggagcagggcaagaaagccgcttcgttcttcagcagcataaagacggagctgctggcactgactggcgttaccgtcactgccggcggcctgatgagccttgttaaaaataccacgtctagcctgatggacctttccattcagtcaaaggctcttggcatgacagccagagaacttgatggcttcgggaaggctgcagaatcagccggaagctcttttgagaggatcacggccgccttgcagggttttcaggctgcaaagcaaggctctctatttggggataccagcagcccgatctttagcggcatgcgaatgcttacggcgttaactggtgatacttttgacgtctattcaaaggatgccaagtcactcgcaaggtcttatctggagtcactcaggaaagtcaaagacccaaacattcggcgccagattggtgctatgggtgggttcgatgatgcgaccattcagcgaaaccaggagggtagatttcttccggatgttgaccgcttaacaaaaagctctggaataactgatgcctctgttaaaggggcgaaagagtttacagaagcatgggtggtgctcaaccagaacctcgaaaccactaaaaaccagttttacacgttccttattccgtatgtgcgtgagtttaatggcgttcttcttcagttatcaaactggatgaaatctcatccagatgagatgagacaaaaagtcgagtccttttttggtgccattgagagcggagctaaggtggcagataacgctgcgagatctgttggtggttgggaaaacgcgatcaagctactcatcggcttaaaggttgcgacatgggtgatgggaatcacaaaggcttttactggattgttcgccctcacaccacctgcgtggtttgtcgctgccagtgctgtgggtgtacgggcttatcagaacatatccaatgccgcaaccaaagcagaccatactgattctctttgggagtcaataaaacagcgctggtctgcaggtggttggtataacaatcagcaaaatatacaagctgtatcaccggagcaaagaaagaaagatcaggatgagcgttcattctgggaatcaactaaaaatcttctttcacaggctgtgaatgcattaatttctccggctggggcagcatccatgcagccaaatattgttggcggctaccagccaaatgtcccgcttaacgcgcaggccgctcgccttggcgccaaagggaaggcatttcttcaggcaatggctggcgaattcggggcgctggaaggtaaatatggacttccggccggactgctgtcttcggtagctgctactgaatcaggtggtgacccgtttgcggagtcgaaagctggagccaaaggcttgttccagttcatgccaggcacggcaaaggatatggggctcaaaggtcgtgatgttttcgaccctcacaagtcagctgatgccgctgcaagatacctgcgctatctgctggaggctacgggcggagatctggataaaacccttgcttcctacaactgggggctcggaaacgtccagaagaaaggcatggacaacctgccgtcggaaactcgtaattacgtccccaaagtcatggccggaatgcatcccggcgccagtatggccgtagaccgcgcgatgccgggtcaggctggcggtgtttataacttttatggcaccaaaatcaccacccaggcccagaacgtggaacagcttaccagcgacatcaaaaagcacggcgacaaccgcgtcatgctaatggctggctactcaggacaataa

SEQ ID NO: 112064 - DNA, 717 bp, Enterobacter aerogenes
atgaaacttattaagtattggcgtgttcaacttttcaaagctgaaaatcgtggaatggctccgggtaatgccgaggtgcttatttttgagggttattccaaagataagcccaaaatcaagctcggcgccggggtcagcttcgagctgtttacagcgcctgactcactggaatcccgtatcttccgtgatcacctcattgacagcgcgcgcttcatccctgtgtatgaagatgatggcgacaatgtagatgacggaactcaggaggagcagactaagcctccctcacgcgaagccatgattgaatatatcaagcaggccattggggaaggctatcagcccaaaaactgcgatgagctcattagcaaccctgatctgatttggctcttgcatgatgaggcggtcgattatgaatatcgcgcttgttggcgctggtaccaaaacggtcatggttttcatgagacttttagcgtccctgagaaaatccacgatcacgcctgcgtaaactgttttgccgataaaggcccacgccttggcgagtgccacgtatccgacgttaataaggcccgcagttcctccttcgaagacgtcgtgaagccggtaatcaaatggcttaacgaaaacgccaaccctcatacatcagtgaacatcgacgcaaccagtgctcagctgcttactggtgaaatcggcatccacacggaagagttcattaaggactga

SEQ ID NO: 112065 - DNA, 645 bp, Enterobacter aerogenes
atgaaacgcgcagaccaaaataccgaatggtcagaattagctaaggttcctcgtcgctcataccttggcaaatatcgacgcctgaaaccgtcgcaagaacgatggattcgctcattgctgagcctgtggggggctgtttatggtggcagtggtacagaacacctttccggcggtggtgggatgtggtcaatgatcatcaccgggtggagcggtgaacaacaggaaaagattgctgacgttttaaccagactcaaaaaaataggttactcaggtgagaacctgttggttatggcaagggccattttgtggcctaaaaagtcgcttagtgatgttatctcagatgccattgatcgcgatgaggctgacttcatggaagctctgatactcaaatctttccccgtcgagaacatgatttataaggtcggcaaacgctattactcaagcagacaaccattggttgatatggcgagatggatgcaatatcgctatgcaccattcctgactgaaaaacagtgtatcgaccgcatcagatggtgtgtcgatttgttcaattctgctgtcttcttcacgcttattgcagaactcagcatcgaaaatgaagaaaattgcaaaaaagacttgaaaacaagttttgaagctgcataa

SEQ ID NO: 112066 - DNA, 261 bp, Enterobacter aerogenes
gtgagtgacgtaaaaagcaaaatcatgcaggtgatgactgatgctgctgcgctgcaggatgcgacactggggagcggataccctttccgcatggctacctggaatatccgatgcgcgatggagcgcaaattccctggggtggaatggaggagcgccgacctccgcaaagagcttattgaactggcgaaagaggggctggtatccaaatgtccccacgagagccgcattggccaggccgtctggcgcctggaggtgaagtga

SEQ ID NO: 112067 - DNA, 645 bp, Enterobacter aerogenes
atgaccagcaaatttagcatcgacaacagagagctgattcagagaatcagtagcggcgaggctattgtgggaattgattttggtaatctaatcgtcagggaactggctgcattcaggctggccgcaatggacagcagcgagtcggttgaactgcctctcgactacctacagggacacaaagacggtctggagtgggccgcccaactggcagaagccaatcaccctgaaaaaggagactggctttacgatgaccctatcgagctggcaaaagccattcgcaaaggtccagatatgccgccagcgcagccggtagcggacagtgagccggtgattgttgttggcgatgatggaggggatgcgctttcttatcgccgccttatccagtcctttgagcctggcactaagctctatctccacgcgcagccagcaccggtagtttcaggatggattccggtaagcgagcgcctgccagaagaaggtggccgttactggtgctatgtggaagagcaaaacagcttggggaaaagccactaccaatggaactgctcatggaatgaaggtgcatggtcagacaaggcgctaacaggtcgtgttacccactggatgccgctgccggccgccccgcaggaggtgaagagtgagtga

SEQ ID NO: 112068 - DNA, 228 bp, Enterobacter aerogenes
atgggcgtaacaaaaatgatatgtgtcagttccactacgccagcctggtttactccgggcgccgtatacgactcagaaccccgcggtaccgatatctgcatttgtggtgacaacctcgtttcagacctcaacaaagaggactggtacgaaatgagccagcgcgcagatgggctgtggttcttaatcggttttcagcaggcatttttatttcggggagccagccaatga

SEQ ID NO: 112069 - DNA, 795 bp, Enterobacter aerogenes
atgactaataaaaccgaattcaaatttggcgattacgccatcatcgaacataaacgtcacggcgcacctaacgagatgtttgttcataaggtcattgaccagcttcgctctaacacctgggttgatgttcctgttcagtctcctgcaactgaaaccatacatgacgagatggaggatgtttgtctttgcatctgctgtggagttgacgagaccgaagtacgccgttatcgcgtcaaagatatgcttcaccgctctcccgtctatgcggtgactgatgaaaagaaaggttcgactatcacactacaggcagtaaacgagctcatcgcttccctggagagcgcaggcgagctgtcgatcaaagagacaaaggttatggcgctggcgaaagcgtttaagcagctggctgaggagaatgcggcgttagctctggaaaatgtagcaatgaaacagatcgttgactccgtaaccaacctggataacgaacctcagtaccacgacgaaggcatggggtgcggactggaagaccgaggtattactgaccggtacgatgcctgccgctacggctgggatgaagctatggagcggatatacggcgaagtgatcccatgtgccgatgagctggatttttccgccaccgatcgcatcgtagccgggattaaggctgatggggtggaggagttcgcggtaaaacttcgtattcctggcgatgacccattccttgatgctctggcaaaaggggttgcagtcgccgctgacgactacgccaagcagctgcgcgagggggccgacaaatga

SEQ ID NO: 112070 - DNA, 300 bp, Enterobacter aerogenes
atgaaaaagaactctggcagacaggctgtaatcaacttcatcgggcagcaccctggttgctcatttcaggatatccgccacggtaccgggctagacccgtccgttgtcaattctgctttgtggcagatgaaccgcgatggacgcgttaagcgcgaaggagaatatcgtagctatcgctacacccttgcagagcagacagccgtaaccgaaagcgatccggagttttatcgccagcgtcctggcggagtaaacccaatgaccaacctttttaaccagtgcctggcgggagtaagaaaatga

SEQ ID NO: 112071 - DNA, 255 bp, Enterobacter aerogenes
atgaaccacatcgaattcattgagaagaacgtccgcgaagagctgatgcgccagggattcacccaggcagtagctcaggggggggcataccaggcggtcgatatgtacaagcgcatgtcgcaggcaagtcgcaaggggaggatttttgatgatgtgttacgccacgcaaagctgtgggcagagaagcagacattgccgtctgacaagttcgaaaagaaaagggctaagcccgttaagcaacaaggcctgttctga

SEQ ID NO: 112072 - DNA, 762 bp, Enterobacter aerogenes
atgacacagtttcaacttgcattaatcgccagagaagttgatggagaagtcatccatcttcgcaccaaagacggttacatcaatgccaccgcaatgtgcaagtctgctgggaagctacttgctgactatacacgactaaaaacaacgcaagatttttttgatgaattatcccgcgatatggggattcccatatcggaattaattcaatcatttaaaggcggaagagcagagaatcaagggacttgggttcatccagacatcgcaattaacttagctcagtggctatctccaaaatttgcagtgcaagtatcgagatgggtgcgtgagtggatgtcaggcgaaagagcgcctgccgaactccctatccaccttaagcggtatatgacaaaccgaggcagggttcctcatacgcacttttctatgcttaatgaactgacgtttaacttggttgcgccacttgagcaggcaggatatacgctgccagaaaaaatggtccctgatatttcagaaggtagggttttctcgcaatggcttcgtgaaaaccggggtgttgagccgaagacgttcccaacatataaccatgagtacccagatggccggacattcccggtacgtctatacccaaacgaatatcttgcagatttcaaacaacacttcaacgaagtgtggctgcctcagtacgcccctaaatattttgcagaacgagaccaaagggcattgacgttgattgagaaaatcatgctgcctgaccttgattcctaa

SEQ ID NO: 112073 - DNA, 1497 bp, Enterobacter aerogenes
  misc_feature (1464)..(1473): n is a, c, g, or t
ttgctagatgcgtattatcaatacgcctggaagtcccatttttggatggaagattttaatctcttcgaagaaaatcttcaattagcgtatgaaagtatagcatcatcaactaattcctcaaaatgggaaaaagttttaaatttagtaaccgttcataaaagttatattagacttaacaacgcaacatctacaatcgacattgagaatattgaacgtaacatgctcgccaaactagatgagatagctgacgatgattcacgtcccagtaatgcactaacagcgaaaactcacaaagccatttataaattgacaacgttttcagatgtagaagatgcttcggttgtatttgaagagttacatgaaatttttaaaaatagtgggaatttaataggctatccttttgagaaaaacttccaacttctgaacgaactagatgacattattttcgatgtagatgcatatgaaaatttattagactatatgactgagcaatctgctgttagaggtggtgaagttaaaggggcattattaaatctacgaagaggtataaagaggcttcaaaatggtcacccttatcaggcaatcaagtatttaggaaaatcttttattccactctataaagaggaatcacgagataaatttatattagcattaaaagctattgcttatgcttacgaatccattggattgctatggagttcacgttcatgcttgcttctatccgcttctttgattacagataacttctggaagtatgatgagatatcattaaagcaggctgagatttattatagtttatgcctaacagaaataaaactagggaaattagcacatgcccttttatggtatgaactgtttttaataattaacgagaatatcagtgatagctcgttcggcgataaagaaaatcagcaagtcgatttttacataagtcaactcattttgaacactgacctaaagggaataaatcgacagagtaatatccccgatgaactcgatagattaggcctttttgtatcatcgggatgtcttaaatatgctttaggttatattgaagattttgaacgtgagtacgaagttactgccgataaagatcataatgatttcttgcaaaaaatacgtgactttgatgcaggatttaatagtaagggcataaaagataaccatgacaaacgaggagtacatacatcttttatttttggatgcaccatagaaattaactttccgaatcggtcaccatttatagaattttcaactaatgtcttatcacttttagagggtgcttttgcaacctgtacgattgacaacatccatcttaaagaagcatttttaattattgaagtaatagcagatgacgatgatgacttatccttatcacatgaaataaatagcaatagtggaaaactaaatcttacaataaattgctctggttttgatgtaagtgattttagaatcgaggctcannnnnnnnnnatacagaatacattgaaaaaatga

SEQ ID NO: 112074 - DNA, 864 bp, Enterobacter aerogenes
atgatcttcgaagatgctgcattcgacagagcaattagttttggtgcctgtatcaaatctattgaaaatgttcttggaaatgatattgatcaacaaattaagaaaatttattccaccagtgctgaaaagaaaacttatcctcttttaagagataaatcctgggatagtgaatttccgaaagtattggagatcgaggatataaaagctccaacacctggtaaaggaagaatgcctgaagaggaacttaattccgaaaatataacacataaagattattccatacaaagtttaatcaaacctcgtctatgggatagaacacgctggcaaggagtaggcttcgctcaatttaaatcgtgttatccagggttatatctattatttaaacaccccgatataggtgaggatattttcaaagatcttatatcatcagtaggcttggtagatagtaaagccagattacgggtttgtattgttaagggtatttcagttaaaaacccaactcattatagagtactaatatctgaaaatatgatgacaactccgttaactaaaagaatgacaatgatcagtagaattaatacgatgactcctgatagcaatgtcaatttggaaaggtttcttgctgcatatcaggcttgtggaaaattctatcttggatgtgatgcgatgttaaaaaatattattcctgagtatccacaaagagatagtttagggatagaaatgagtacgttagatgttaggtgggcttgggaaattgggttaaatgatgttgattgcattggggttaatttaaaagaagatgacccctacattcctagtgatgtagctgagatcccattattgcaattgataaacagtaaataa

SEQ ID NO: 112075 - DNA, 996 bp, Enterobacter aerogenes
atggcgaccacagtaatagctgcctttaacgaatttatgaaagataccgtgaatctcaaaaaggcagatacagatgacgcgcgtgcaagtcgcgactggctaatcggtaagataaatgattttgagaagtacgataaatttccggtgagttatccagcgatccatattgcctttggatcctttgccagaagaaccaaaatccgtcctctggacgatatcgatctgatgttcggcttatccgcgcagagtgccacctataacgttctgagtgaccgggtcaccctgacctcttccggcgaggggtcgcgcctgcacgggtatcggcattcgggagctgacactatctgctccgtcagaattctgaatgcctttaaaaatcgcctgcaggacattgcccagtacgcccaagctgaaatcagacgtaaccaggaagccgtcacgttgaaactggtcagcaaggactggaattttgatatcgtaccctgctttatcaccagcgaagatgtctttggaaggacttactacctgatccccgacggcaacggtcactggaagtttaccgacccccgcaaagacagggacagagtcacaactatcaatgtccagaatgacggcaatgtgctcaatgtcattagagcagtaaagtactggcagcggcgaccgacaatgccttccatgagttcctacctgctggagacgctgattctggactattacgccggcaggacatcctgctcatcgtttgtcgatatggagctggaagcgcttttccgccatattggtctgtttgtgcagttctccgtcaacgatcccaaaggcatacagggagatatcaactttctttcagccgaggctcgtaaggcgatatcggacagatgttatctcgatgcgcagaaggcatctgaggcgagacgatttgaagataataaagagtatgaaaaatccatcaataaatggcgcgacgtgttcgggccgtcctttcctgtttacgggtga

SEQ ID NO: 112076 - DNA, 933 bp, Enterobacter aerogenes
atgaatgccatttatacgaaccagtcaaccagagaaaacctggatttactgtatgcacaggcccgtatctacgacagggtaaaaaactggaacaggctgaattttctcttcagcatcatcgtgccactcctgctttcgatctttaccgcatacaaccggagccggggatttgtcgattcagatctgctgtctacgctgttggggttgtatggactcctggtgcttacctttaacattgccatcagcgggcacatctcggcactgcgcaggaaggcagcctcaatccaggaaatgtacgactgccgggtacttggcattcggcgcaatgaactaaaggtggaggagatctcacgtgatgagatcatccgggcagctgcatatttcagagacagtccggaaaaagcacgaaagcgatttggcgaagaggggtggtacgtcagtaaggtgtatgacgcgccgcaggccgtaatggcgctcctgtgccacggaaaaaacctcggctgggacaaatcgctcagggaggtgctgcacgtgttttatctttcggctttcattatctctcctgtcgcgatgcttgtttacggcatcgccatgaaatctgggctgaatgagatcctgttctatgtggtgttcactttgccagttatccgctatttcttgcttcagtttctggataatagcagcagtatgaaaagaagcgagaagctgaaaaagtacgttgagaaggaattatccggcatcagggtgtccggaagggcagaagaagagcagctgggttataccctccggaatatccaggatgaaattttcgcctaccgagcctcatgcccacccgttcctaacggtattcagctgataatgaagccaaaaaatgagcgaatttatgttgattactttgaaacgaatctgaaggagatgcacctgcaagactga

SEQ ID NO: 112077 - DNA, 2610 bp, Enterobacter aerogenes
atgctcggcagtgagttgttgcgtttttttcaaaccttaaatacagcagatgtaccaagtgatgtaaggaaaatagcaaatcttgtgtgggaaaatcttgacgaaatcgtgccgttgggaaccgcacagggtcagcgggtcaaacgtattgtcgctctggctcaatccgcctgggatacactcagcccagaagtccaaacactccctgagcagaacgccgaaagtgtttccacctttagccgacttagaaagatgtctgttggaccatttagaggatttgccagacgagaggagtttgatttagattcccgcctagtgctgatctacggccccaatggtacggggaaatccagtttctgcgaggcacttgaatacgcattactgggccgcgtcgcggaggcagaaagtaagcgttttcgtaatcaacacgactattttagaaacgcatatgtcaatcagttttctgctcccgaaattataggtgttggagatcaagagcaggatgtgatgattgagaataatgaaacacaatatcgcttttgttttattgaaaagaatcgtatcgacagcttttcaagaatcgctgctctggccccagcaaagcaagccgaacttatatcaacattattcgggttggatacatttaatgattttgtgcgaaatttcacctcagatcttgatgcccgatatatcgacctgactggcgtaaaggctgctcaattagcaacaaagagccaatctctcttgggagcacagcagcaactgaaaacgagtaaggcccaccttgaagaactaacctcagcagaacaaactctagcctcaggctatcgtgaaggcatatctttccatcagatggttgtagagttgaagggggatgggcaaaatatcggcgtcattcggcagcttgaaaccgagttacaaaaacagcttccggccaagagtggtctaacctctgccattttgaaaaagctcagtgattcagtcgaaaaggggcttacagaccttaagggcaagcaaaatcaactggcagaggcaagtcagcaaatttcttttaaaaatttatttgaagccgtcgtccagttgcaaagcaccaagcctgaccattgtcctgcatgtcataccccacttcagcacgttgcaaaaaacccttacaaatatgccagtaatgaattgcttaaacttaagtttttatcgacactacaagacgaaataactcagttggaaaaatcaatcagccagctgatgttcgacgttcataaagttattagtacttgttgtcagttcattccgcatagcaatccacttgaagatttccgaaataaaactggaagcgatttgtggtgtgcactacagcaaccggcaggtgatgggatacccccttggactcttcttgaagaacaggtacatcatctggagaaagaggataaaaaaacagatgaaaatattaaacgacgagaactgcaacagcaatctcttgatagtctgcgtgaaaccgaacgacagataactatattacagacaaaaagagaggaaacagagaagtccatcgctgaagctcagttgctaattaccagatttaatgccgaaaataggcaacttattgatgaagttgagcatgagaaagctattgttaggaaaaaccaagaaatttctgaggcatattccaactttgttattcgattgaacgcctataaagatcggttacctcagcaactcgtagcaaatctcggagataacattgttaccctttacaatgcgtttaaccgtaatgattccagaggcgaaaagctcgctgatatcaaattacctctgatgcaaaatcaacggttggaagtggcgttccagaataatcccgtacaatattttgatgctcttcatgtgctaagtgaaggtcatgtgcgctgtataggactagcgatcttattggcaaaaaacattaatgagcagtgcccacttttaatttttgatgatccggtaaatgctattgatgacgatcatagagattccattcgaaaaacgttatttgaagatacgttctttgccgaaaagcaaatcattctagcttgtcatggagaggaattttttaaagatatccaaaatttactgcctacgcgggttgctgctcaatccaagactttcactttcttgccacgtctagatgaattgcatattcgtgtcgatttcaactgcgcccctaggaactacattatctcggcacgaaaacattacgaacgtaatgaaattagggaagctctcgctaaatgtagacaggcacttgaatcgctgatgaaggtgaaggtctggcgctatgtaaataaatatggtgacggtaatcttagccttaagttacggtcggcaaattcacctattgagttacgtaatttgtcagatcaattaaaaaagcagattaataaaactgattttactgatcaaaataaaagtgctgtttttggtccaattgacgttttgactgggattagtggagattcgcgagaatggcgctatcttaacaaaggcacacatgaggaagatggaagggctgaatttgaccgagcaacagtagaaaccatgatttgtgcacttgaagatctcgatcaagctgtaagctaa

SEQ ID NO: 112078 - DNA, 168 bp, Enterobacter aerogenes
atgaacagtaaacaatggcctggtaaagcggcgattggtcgtctgaaaggtgaggaactggcgcaatataatttgtggctggattatctggacgcactggaactggtcgatacttccagtgcgccagatattgaatggcctactcctccggcagttcaggccagatga

SEQ ID NO: 112079 - DNA, 585 bp, Enterobacter aerogenes
atggacgtgacaaacgatgattacatccgtctgttgtcagcactgttgccgcccggtccggcgtggtcagccagcgatccggcgattgccggtgcggcaccgtcattaacccgtgttcatcagcgtgcggatgccctgatgcaggagctggatccgcgcaccaccaccgaactgataaaccgctgggagcgtctgtgcggcctgccggatgaatgtattccggcagggacgcagacccttcgccagcgtcagcaacggctggatgcgaaggttaacctggcgggcggcatcaatgaggatttttaccttgcacagcttgctgccctgggcagaccagacgccaccatcacgcgatacgacaaaagcacgttcacctgctcatctgcctgtactgacgcggtgaatgcgccggaatggcggtattactggcaggtcaacatgccagccgccaccaacaccacctggatgacatgtggcgatccctgtgattccgcgctgcgcttctggggggacaccgttgtcgagtgtgttcttaacaaactctgcccgtcgcatacctatgtgatttttaaatatccggagtaa

SEQ ID NO: 112080 - DNA, 1059 bp, Enterobacter aerogenes
atggcggacagtgaatttcagcgcccgacgctggcagaaaatatcagtatgctccgtaacgatttattcgccaggctggacgtcagcgacacgctccggcgcatggatgaagacgtgcgggcaaaggtgtatgcggcggcgctgcatacggtctacggttacatcgattatctggcaatgaatatgctgcctgacctgtgcgatgagtcctggctggcgcgacatgctgcgatgaaacggtgtccgcgcaagggggccacggttgccagcgggtatatgcgctgggaaggtgtcagcgatggcctgaaggtgactgccgggagtgttattcagcgcgatgacctggtgcagtacacgacaactgacgatgcaatcagctccggtggtgtcctgcgcgtgccgatcgcctgctcaagtgcaggtgcggtcggtaacgctgacgacggtacggcattaatcctggtcacgccggtgaatggtctgccgtcttccggtgtggctgacaccctgacaggcggatttgatactgaagagctggaaacgtggcgcgcccgcgtcattgagcggtattactggacgccgcagggcggggctgacggggactatgtcgtctgggctaaagaagtgcctggcattacccgcgcatggacataccgacactggatgggaacggggactgtcggtgtgatgattgccagcagtgacctgattaatcccattccggaagaatcaacggaaacggcggcaagacaacatatcgggccactggccccggtggcaggctctgatttgtatgtgttcaggccggtggcacatacggtggattttcatatccgtgtgacgccggacacaccagaaatacgggctgccatcaccgcggagttgcgttcgttcctgctgcgtgatggttatccgcagggagaactgaaggtgtcacgtatcagtgaagcgatttccggtgcgaacggggaatacagccatcagttgcttgcaccggcggacaatatcaccattgcgaaaaatgaactggcggttctgggggcgatttcatggacgtga

SEQ ID NO: 112081 - DNA, 426 bp, Enterobacter aerogenes
atggaactgtggctgacggtgaacggtaaacgcacctgcgccagcgcaccgctggatccgctgacccgcgccgtggtgatttccctgttcacctggcggcgggcggagcctgatgacaatgccgacgtcccgatgggatggtggggggatacctggcctgcggtacagaatgaccgttacggctcccgactgtggttgcttcagcgcagcaaactgaccaatcagctggtgcagacggtaaggggatatatccgcgaatgcctgcaatggatgactgatgacggcgtggtgtcccgtattgatctggatatccgccgcaccgggattaatgagctgggtaacagtatcaccctctggcgtcgtgatggaccagtaatgatttcttttgatgatctgtggagtgcgataacgcatggcggacagtga

SEQ ID NO: 112082 - DNA, 549 bp, Enterobacter aerogenes
atgaggacgattgaagccatgcagcgacaacttctcggcctgattgggcgggcagtggtgaaaagcatcagtgccgccacgaaatgtcagaccgtggatgtgtccctgattgccggtgaacccaaagccggggttgaacatcttgaaccctacggttttaccgcaagggcaaacagcggtgcggaagcggtggtgttgtttccggatggcgaccgttctcatgcggtggttgttacggtgtcggaccggcgctaccgcctgaaagggctgcaaacgggtgaggtggctgtctatgacgatcaggggcagtctgtgacgctgacccgggaggggatcgtggtggacggtgcagggaaaacgatcacgtttcgcaatgcacctgaagcacgttttgaaatggatctggaagtgaccggacaggtgaaagacctgtgcgactccggcggcaccaccatgtcagcgatgcggcttgcctataacgggcatcgtcacagagagaacggtcagggcagtaacaccgacaaacctgataaagcgatggaggcatga

SEQ ID NO: 112083 - DNA, 1080 bp, Enterobacter aerogenes
atgaacgacaatgtcacgctacgggtaaatggccgggagtggaatggctggacatcggtgcgcatcggtgccggtattgaacggctggcgcgggatttcagtgtggagatcactcgccaatggccgggagatgagggtatcaccacgcttcagccgcgcattaaaaacggttcaaaagtggaagtgctgattggtgatgagctggtgatcaccggctgggtggaggcgactcccgttcgttacgatgcccgttcggtcagcaccggtattgccggacgtagtctgacggctgacctgattgactgtgcagccgaaccgacacagtttaacggacgctcgctggtgcagattgcgcaggcgcttgctgcgcctttcggcattgaggttgtgaacagcggtgcgccgtcgggtgttattcctgatgttcagcctgatcacggtgaaacggtgattgaggtaatcaacaaaatactcggtcagcagcaggcgctggcttacgacgacccgcacggcaggctggtgattggcggtattggctcaacgcgggcacataccgcgctggtacttggggaaaacatcctttcctgtgatacggagaagagtatccgggagcggttttctgtttaccaggtggcggggcagcgtgccggaaacgacgatgatttcggtgaggccaccaccaccgcgctgcgggcccgcacagaggacgcatttattgcccgttaccgtccgatgtatatcaggcagacagggcaggccacgggggcaggctgtattgcgcgtgctgactttgaagcccgaaaacgggcggcgcggacggatgaaaccacctatgtggtgcagggctggcgacagggtaacggtacgctgtggcagcccaaccagcgggtgattgtcttcgatccggtctgtggtttcgacaataccgaactgcttgtctcggaagtcacgtttactcaggaccagaacggcaccctgacggaaatccgtgtcggcccgcctgatgcttatctgcctgaacccgaagcccccggcgcgcggaaaaagaaaaaagccagagtacaggaggacccgttctga

SEQ ID NO: 112084 - DNA, 1329 bp, Enterobacter aerogenes
atgacgtggaaagacagacttcaggacgcgtcatttcgcggtgtgccgtttaaggttgaagaagaaagtgcgggaaccggtcgtcgtgtggaaacgcacgaatacccgaaccgcgacaaaccctataccgaagacctggggaaaatcactttccgcccgtccatcacagcttatgtggtgggagatgactgctttgaccagcgcgatcgcctgattgacgcgctgaataaacccggtcccggcacgcttgtccatccgacttacggtgagctgaaagtctgtgttgacggggaagttcgggtcagcacatcgaagagtgaagggcgtattgtccgctttgacctgaagtttgtcgaagcgggagaactctcttaccccacttcaggtgcggcgacggcgcagacgctgatgtcatcctgttctgcactggatgactgcatcagtgacagcttcagtggtttcagtatcgatggcgtggcagattttgtgcagaacgacgtcgtcggtaatgccagcacaatgcttgggtatgtttctgattcgatgaaagtggtggattctgccgtatcggatgccgccaggctgttgcagggggatatctcggtacttctgccgccaccatcgtcaggcaaaaatttcgttgagcaggtgcagaaaatgtggcgtaccgggaaacgcctttatggtaacgccagcgacctggtcaccatgatcaaaacgctttccggtgtcagcctcggcagcgatctgcaaccgcgcggcgtctggaaaacggacagtaaaactaccgccacggcgacgcagcagcgtaacgtggttgccagcacccttcgtacgaccgcaatcagcgaagcggcgtatgccgtcacacgattgcctgcgcccacaacttccgcggtgatgcagaatgccacagtagggcagtcaacaacacccgcgcagagcaccggctggccttctgtcacgcatccggcactgaacaatgcaccggcggtgaaaaacacggttgacctgccaacgtgggaagaactgaccgacattcgcgacacactgaatacggcaattgataaggagttgtcccgtacaaccagtgatgcgctgtttctggcgctgcgccgggtgaaagcagatctgaatgcggatatcaacacgcgccttgaacagtctgcacggatcattcagcgcacgccggatgaggttttacccgcgctggtgctggcggcgacctggtttgataacgcggcgcgtgacgcggacattatccggcgtaatgccattacgcatcccggctttgtgccggtgatccctctgaaggtgccagtgcaatga

SEQ ID NO: 112085 - DNA, 1836 bp, Enterobacter aerogenes
atggcggaatttgagcttaaggcgttgatcaccggtgtcgacaggctttctcccgcgctgtcgaaaatgcaaaagaaaatccggggatttaaacgccaggcggaagaagcgtcacagggtgggctggcgcttggtggcggactggcagcgggtctgacgctttccctgaaatcttatgccgatcaggaaaacgccgccaccgggctgaaagtcgccatgatggatgcgaacggcgaggtcggaaagagctttcaggacatcaataaactggctattggcctgggtaaccagctacccggtacaacggctgatttccagaacatgatgcagatgctggtgcgtcaggggatcccggcagaaaacattcttggcggtgtgggtaaagcgacagcttatcttgcggtacaactgaaaaaaacaccggaagcggctgctgagtttgctgcaaagatgcaggatgctaccggaacggcgtcagaagacatgatggggctgttcgacactatccagaaggcgttttatctgggtgttgacgataccaacatgttgtccttcttcactaaaaccagctctgttctgaagatggtgaacaaggacggtcttcaggctgcacagagccttgcccccatcagcgtcatgatggatcagatggggatgaacggggagtcggcaggtaacgccctgcgaaaagttatccagtccggattaagcgttaagaaaatcagggacgtcaataaaatcatggcccgccagaaactcggggtacagctcgattttactgacggcaaaggaagttttggcggtcttgataacatgttcaggcaactggcaaagctgcgaaaactgaccgatgttaagcgaacaggtgtacttaaggcaatatttggtgatgatgccgaaacccttcaggtggtcaatgcactaatcgataaaggaaaggatggctacgatcagatccagcagaagatgaataaacaggccagcctgaataaacgtgttcaggcccagcttggtacgctgtccaacctgtgggaggcaatgacggggaccgcaactaacggccttgcggctattggcggcgcattttctggtgacgccaaaaatatcacgcagtggctgggggagttaggggaaaaattcacgaagtttgcggatgaaaatccccgggttattcgcggcgtcgtcgggcttgctgccggtcttgcgattctgaaactgggattgatgggcgttggcggtgccatcagtattgtcagcaggatcatgtcgatgacgccgattggaatgattgcgacggcgatagccctggctgcgggattaattatcactaactgggatgttgtcggaccttatttcaagaagctctgggaaaccattggtccttattttgaggctggctgggaacttctgaagaaggtttttgcctggtcgccgctggggatggtaatcaataactggggaccggttgttaagtggtttcaggatatgtgggacaaactgaagccaattattgagtggtttaccgacagttccggtgacacggtcgatgccattaactctgcgcagtggggcgcgggtgcttatgatgcttatgggacgggaataccggcacggggatacacaccttatcaggcggtagatccggctcagtcaaacaacgcctccggtgccacaggcccgaatcccttcatgattaacaaagcttctgcgccaaaagttgatggtgagatcaaggtctcttttgtgaattcgcctccgggtatgcgggttatggaaacgcgatccagcggttttgatgtcagccatgatgttggctatacgcgctttggcaggtaa

SEQ ID NO: 112086 - DNA, 270 bp, Enterobacter aerogenes
atgaaagagcttgagttaaagaaaccgattactgctcatggcgagacactctccgtactggagtttgatgaacccaccgggaaggatgtacgcgagctggggtatccctaccagatgaatcaggatgagtcagtcagacttctggcgcatgtggtgtcgaaatacattgtgcggctggcgaaagtgccgcaaagctctgtcgaccagatgtctccggcagacctgaatgcagcggcgtggcttgtggctggttttttcctccaggcctga

SEQ ID NO: 112087 - DNA, 357 bp, Enterobacter aerogenes; identical to SEQ ID NO: 4088

SEQ ID NO: 112088 - DNA, 1497 bp, Enterobacter aerogenes
atgacgataagctttaacaccattccgtcgaatacgctggttccgttgttttatgcggaaatggataactcggcggcgaatactgcacaggacagcggagcatcgctgctgattggtcatgccaataacggtgcagagattgttgccaacagtctggtactgatgccgtcggcagactatgcacgccagatttgtggtgcgggaagtcagctggcgcgtatggtcgaggcttatcgccagaccgacccgtttggcgagctgtatgtgattgccgttccggaagccacaggcgcggcggcaacggttacgctgacggtgaccggggcggcaaccgaaaccggcacggtgaatgtttatgtgggacgtacccgcgtgcaggcaccggtgaccaacggcgataacgtcgcgacgattgccagcagtatcaaagatgccattaatgccgttccggccctgccgtttacggcctcatcttcggcaggcgtggtcacgctgaccgcgcgtcataaggggctttgcgggaatgaaattcctgtcagcctcaattactacggctttggtgggggcgaagtgctgccagcgggcgtacagattgccgtggcgacgggtaccgccggaacgggtgctccggttctcaccggcgcggtggctgcaatggcggatgagccgtttgattatatcggcctgccgttcaacgacacggcctccgttaacacgctggtgaccgagatgaacgataccagcggtcgctggagctatgcgcgtcagctgtatggtcatgtgtatacggcaaagatcggcacgctgtcagaactggtgaccgcaggtgaccagtttaaccagcagcacattaccctggcggggtacgaaaaagagacccagacgcctgccgacgagctggcggcaagccgtaccgcccgcgcagcggtgtttatccgcaacgatccggcacgtcccacgcagaccggtgagctggtgggtatgctgcctgcgccgaaggggaaacggttcacgatgaccgaacaacagaccctgctgtctcatggcgtggcaacggcgtatgtcgaaagcggggtactacgcattcagcgtgatgtcaccacgtacaggaaaaacgcttacggggttgcggataacagttacctcgacagtgagacgctgcataccagcgcgtatgtactgcgcaaactgaaatccgtcattaccagtaagtacgggcgtcacaagcttgccagtgacggtacccgctttggtcccggtcaggcgattgtcaccccggcggtgatcaaaggggaactgctggcaacctaccgtcagcttgagcgtgcggggatcgtggaaaactacgaactgtttaagcagtacctggttgtggagcgtgatgccagcgatccgaaccgcctgaacacgctgttcccgcctgactatgttaaccagctgcgtgtctttgccgtggttaatcagttccgtcttcagtattcagaggagtctgcataa

SEQ ID NO: 112089 - DNA, 171 bp, Enterobacter aerogenes
atgtttgtcaaacctgttaaagggcggtcagttcctgaccctgcccgcggcgaccttttgcccgccgaagggcgaaatgttgacgagaacaactactggctgcgccgtgaagcagcgggtgatatccggcgcgtgaataaaaaggtgaataccgatgacgataagctttaa

SEQ ID NO: 112090 - DNA, 561 bp, Enterobacter aerogenes
atgaaactgacgcctgttattgctgcgctgcgtgcccgctgtccgtattttgaaaaccgggtggcaggcgcggcccagttcaaaaatctgccggaggtcggaaagctgaagctcccggcggcatatgtggtaccgggtgatgactctccgggagaaaacaaaagccagaccgactactggcaggagctgaaagagggtttctccgtggttgtcatactgagtaacgggcgtgatgagcgcggtcagtttgcctcgtatgatgtggtggacgatgtccggcagatgctctttaaggctctgctgggctggaacccggaggcgtgcggtaacccgattacctatgacggcggcacgctgctggatctgaatcgtcatgagctgatttatcagttcgatttttcggtcatcagcgagctgactgaagacgatacccgccagcaggatgatctgaacagtctggatgaactgcaaacgctggcgattgatgttgattatctcgagcccggtaacgggcctgacggcgatatcgaacatcacaccgaaataacccttccttcctga

SEQ ID NO: 112091 - DNA, 507 bp, Enterobacter aerogenes
atgacgacttcctttttgcacgttgattttcagcagcccgcggagatgcgctttaaccgcgcccgtgtccggcgggcgtttgtcacgattggtcagcgtcatatgcgtgatgcccgtcggctggtgatgcgccgtgcgcggtcggcaccgggtgaaaaccccggttatcagaccggacgcctggctcgttcgattggttacatggtacccagagccagtaaacatcgccctggttttatggcacgtatagcccctaaccagcgtaatggagagggaaaccgacgtatcaccggtgatttttatccggcttttttgttctatggcgtgaggcgaggggcaaagcgtcgtcgcagccatcatcgtggtgcatccggtggcagcggctggcgactggctccacgtaataacttcatggtggaaacgcttgaaaagaaccgcagctggacacgctattttctggcgcgggaattgcgtaaatcactgaagccggagcgacgacgcagatga

SEQ ID NO: 112092 - DNA, 411 bp, Enterobacter aerogenes
atgaaaattcgtcaggcgcagaccagcgcaacctacattctgccggaccccggtgaactgaataaacgcgtcctgatccgccagcgggtggatatgcccgcggataactttggcgtggagtctcaatacccggttacgttccggacatgggcgaaggttatccagaccagtgccaccacctggcaggaaaccgcgcagaccggggacgccatcacccattacattaccattcgctaccgccgggggatcaccgctgattatgaggtggtctgcggtgacagtgtgtaccgggtgaaacgtcagcgcgatctgaacggggcgcggcgttttctgctgctggagtgtacggagctgggcgaatgtaggcagagtcacggaggcaacaatgacgacttcctttttgcacgttga

SEQ ID NO: 112093 - DNA, 324 bp, Enterobacter aerogenes
atgcttctgacaatggaagagattaaagcccaactccggctggatgaggatttcgatgctgatgaccgccatctgcaactgctggcctgtgcggcgcaaaagcggacggaaacgtatctgaaccggaagctctatgcaccggatgaaaccattccggacagcgatccggacgggctgcacctgccggatgatattcgtctggggatgctgatgcttatcagccatttttacgaaaaccgctcgtcggttacggaagtggagaaactcgacatgccgcagagttttggctggcttgtcggcccgtataggtactttccgcaatga

SEQ ID NO: 112094 - DNA, 1206 bp, Enterobacter aerogenes
atggcagttgatattaaagatgtcgaacaggtcgcgcaggagctgcagcagaagtttgacgacttcaaggcaaagaacgacaagcgcgtggatgcgattgagcaggaaaaaggcaaacttgccgggcaggtggaaaccctgaacgggaaactcagcgagctggaaaacctcaaaagcgatcttgaaaaagagctgcttgagctgaaacgtccggcaggtggtgcgcaaaataaactggccaccgagcataaagaagcgtttgtgggcttcctgcgtaaaggccgtgaagatggtctgcgcgatctggagcgcaaggcattacaggtgggcaccgatgaagacggtggctatgccgtgccggaagcgctggatcgcaacattctgaccttgctgaaagatgaagtggtgatgcgccaggaagccgcggtgatcaccgttggcggttccgactacaaaaaactggtgaatctgggcggcacggcttccggatgggttggcgagactgacgcgcgctcccagactgccacctccagactggggctgattgaacctttcatgggggaaatctacggtaacccgcaggccacccagaaaatgctggatgatgcctttttcaacgtggaggcctggatcaacagcgagctggcaaccgaatttgccgaacaggaagaaattgcctttaccaccggcgatggtaccaagaagccgaaagggttcctggcgtatgaatccactgatgaaaccgataaggtccgggcgttcggcaaacttcagcatattgtatccggcgacgcgactgcggtgaccgcagacgccattatcaaactgatttacacgctgcgaaaggcacaccgcaccggcgcgaagttcatgatgaacaacaacagcctgtttgccatccgtttgctgaaagacagcgagggtaactatctgtggcgtccggggctggaactggggcagccgtcctctctggcgggttacggtatcgctgaaaacgaacagatgccggatatcgccgctgatgcgaaagccattgcatttggtaacttcaaacggggttacaccatcgttgaccgtatcggcacccgcattctgcgtgacccgtacaccaataaaccgtttgtcggtttttatacaaccaagcgcaccggcgggatgctggtcgattcgcaggccatcaaactgctgaagattgctgcggcgtaa

SEQ ID NO: 112095 - DNA, 651 bp, Enterobacter aerogenes
atgcagacgaaacaacgtcttgatgtaccgctgagtctgaaatctgtcagtgactccggtgagtttgaagggtatggctccgtctttggtgtaaaggacagccacgatgatgtggtgatgtccggggcatttgctgcttccctgcgggcgtggagtgacagaaaagcgttacctgcgctgctctggcagcaccgcatggatgagcccatcggagtttacaccgaaatgaaggaagacgatgtcgggctttacgtcagggggcggttgctcattgatgatgatcccctggcaaaacgcgcacatgcacacatgaaggccggttcgttaaccggcctttctattgggtacgtcctgaaagactgggaatacgaccggacgaaagaagcctttctgctgaaagaaatcgacctctgggaagtcagtctggtgacgtttccgtctaacgacgaggcgcggatcagcgacgtcaagaacgcgctggcccgcggggaaatccctgaacagaaaaaaatcgaaagagtcctgcgtgatgtcggactctcccgtacccaggccaaagcattcatggccgggggctatggcgcactgtccctgcgcgacgctgaggatgtgggctctgcactgaatgcattgaaaaatctgaacttctaa

SEQ ID NO: 112096 - DNA, 1242 bp, Enterobacter aerogenes
gtgtttttttcgggattatttcaacgaaaaagtgacgcaccggtgaccacgccagcagagctggcggatgctatcgggttgtcctacgacacctataccggaaagcagatcagcagccagcgggccatgcgactgacggcggttttttcctgtgtcagggtgctggcggagtcggtcgggatgttgccctgcaacctgtatcacctgaacggcagcctgaagcagagagccactggcgaacgtctgcataagctgatctccacgcatcccaatggctatatgacgccgcaggagttctgggagctggtggtcacctgtctgtgcctgcggggaaacttttacgcctacaaagtgaaagcatttggcgaagtggctgaactgctgcccgtcgatcccggctgtgtggtaccgaagcttaacagtagctgggagccggtctatcaggtcacattcccggatggctccacggatgtactgagccaggaggatatctggcatgtgcgcacgctgacgctggacggactggtggggctgaatcccatcgcctatgcccgcgaggcaatatcgctggcggcagcgaccgaagagcacggggccagactgttcagcaatggcgcggtgacgtcgggtgtgttgcgtacagagcagacgctgtcagatcaggcttacgagcgcctgaagaaagattttgaggagcgtcacaccgggcttggtaatgctcaccgcccgatgatccttgagatggggctggactggaagtcgatggcgctgaacgccgaggacagccagttcctggaaacccgcaagtttcagcttgaagaaatctgtcgtctgttccgggtgccgttgcacatggtgcagaacaccgatcgcgccaccttcaacaatattgaagagctggggctgggatttatcaactattcactggtgccgtatctgacccgcatcgaacagcggatcaacaccggactggtacgaaaaagtaagcagggcgtttattacgccaaatttaacgccggggcgttactgcgcggggatatgaagtcccgttttgaagcctacgccaccgggattaactggggaatttactctcccaatgactgccgcgacctggaagatatgaatccgcgtcccggtggtgatgtctatctcacaccgatgaacatgaccacgaaaccctccgatggcagtaaagccggtaagcagaaggataacgccaatgcagacgaaacaacgtcttga

SEQ ID NO: 112097 - DNA, 183 bp, Enterobacter aerogenes
atgatcatgctgattctcgcgcctctggtgggcgtgctgggggtgcttttgctggcgtatggtgcctggctgatttatcccccggcggggtttgttgttgccggggcgttgtgcctgttctggtcgtggctggtggcgcgatatctcgaccgtacacagtcgtctgtcggcggaggtaaatag

SEQ ID NO: 112098 - DNA, 1734 bp, Enterobacter aerogenes
atgagccggaaatcttaccccaacgtaaatgctgccaatcagtatgcccgtgatgtcgtgcgcggaaagattgtggcctgccagtttgtgattcaggcctgccagcgccatcttgatgacctgatggcggaaaaaagtaagtcgtttcgttaccgcttcgacaaggacctggctgaacgggccgccaaatttattcagctgttgccacacaccaagggtgagtgggcattcaaacggatgcccatcacgctggagccgtggcagctctttgtgatctgctgtgcgtttggctgggtcaataaaggcacccggttgcgtcgcttccgtgaggtgtataccgaaatcccccgtaagaacggcaaatcggcaatctctgccggtgttgccctgtattgttttgcctgtgataacgagttcggtgcggaagtgtattccggtgccacgacggagaaacaggcatgggaagtctttcgcccggcacgactgatgtgtaaacgcacacccatgctgacggaagcgttcgggattgaggttaacgcctcaaacatgaaccgtccggaggatggcgcgcggtttgaaccgctgattggtaaccccggtgatggttcatcaccccactgtgcggtggtggatgaatatcacgagcacgccaccgatgcgctttacaccacgatgcttaccgggatgggggcgcgacgtcagccactgatgtgggccattactactgccgggtacaacattgaggggccgtgctacgacaagcgacgggaagttatcgagatgctcaacgggtcggtacccaacgatgaactgttcgggatcatctataccgttgacgaaggcgatgactggaccgacccgcaggtgctggaaaaagctaacccgaatattggcgtgtcggtttatcgcgaatttttgttaagtcagcagcagcgtgcgaaaaataacgcccgtctggcaaacgtctttaaaacaaaacacctcaatatctgggtgtcggcgcgttcggcgtatttcaacctggtgagctggcagagctgcgaggataaatcactgacccttgagcagttcgaggggcagccgtgcattctggcctttgacctggcccgtaagctggatatgaacagcatggcgcgactttatacccgcgagattgacggtaaaacgcattactacagtgtggccccgcgtttctgggtaccgtatgacacggtgtacagcgtcgagaaaaatgaagatcgccggacagccgaacgctttcagaaatgggtggaaatgggcgtcctgaccgttaccgatggtgcagaggtggattatcgctacatcctcgaagaggccaaagcggcgaacaaaatcagcccggtcagcgagtcacccatcgaccccttcggggcgaccgggctgtcacatgaccttgctgatgaagacctgaatcccatcaccatcattcagaactacaccaacatgtccgacccgatgaaagagctggaagcggcaattgaatcggggcgctttcatcatgatggcaatcccatcatgacctggtgtatcggcaacgtggtcggcaaaaccattccgggtaacgatgatgtggtgaagcccgtcaaagagcaggcggaaaacaaaatcgatggtgcagttgcgctgattatggcggttggcagagccatgctgtatgagaaagaagacactctgtccgaccacattgagtcctacgggatccgctcgctttaa

SEQ ID NO: 112099 - DNA, 495 bp, Enterobacter aerogenes
atggctggaacggcggggcgttccgggcgtcgccccaagccaacggcgcgcaaggcgctggccggaaaccccggcaagcgagccctgaataaagatgaacctgtttttacgcccatcaaaggtgttgagccaccggagtggttcgctgaagaagatctccctctcgctacgatcatgtggcaactgacaactaaagaactctgcggtcagggcctgctgtgcgtgactgacctcgcggtgcttgagcggtggtgcgtggcctacgagttctggcgacgtgccgtgaaaaatattgccagacagggcaacaccatcaccggtgcaatgggcggtatggtcaaaaatccggagctgaccgccaaaaaagaacaggagtccgagatgagcagtacgggggcaatgctcggactcgaccccagcagccgccagcgtctgattggcctggcggggaagaagaaagccactaacccgtttctgaaaatcatcgaatcatga

SEQ ID NO: 112100 - DNA, 351 bp, Enterobacter aerogenes
atgccaccacgaaccccaaaagcctgccgcgttcgcggctgccgcaataccactactgatccgtcaggctattgcgaaaaccacaaaagcgagggctggaagcaatacaagccaggacaatcccgtcatcagcgcggttatggttctaagtgggatgttattcgcgtgcgtgtgctgcaacgtgacaaaggcctgtgtcagttatgtctgcgtgctggtgtggtacgtgaggcgaaaaccgttgaccacatcattcctaaagcgcatggcggcacagatgccgacagcaatctgcagagtctgtgctggccgtgtcataaggcgaagacggcccgtgaacggttgaagtga

SEQ ID NO: 112101 - DNA, 486 bp, Enterobacter aerogenes
atggattggaatatgtggtctgctattggggcttgtggttcggctatcgcgtctttatgggcgttgtgttatgcacgcaaggcgttaaacacatggaatagacaagagcaatttaaagtaaagttagagtttaaacgagctttacttgagctggaggatgcctttgaggcaatgcccgataattggaattccacacaatacagaatagctagaacaagagttgaacagcagtataatgctgttgttcaccgagttgatgatgcagcacagctatatttcaagaaagaaaaccttaaatcagcataccagaatgcagtgagagcatgggttttatgtgaaggggggattaaagataaaagtatacatgctgaatggaaacaactcaggactgaatatagtcaatatattatgactggtggaaataaaaagtgctacttatcaaaaatagaaaaaatatattctagaattgtcgtgttcatagattga

SEQ ID NO: 112102 - DNA, 315 bp, Enterobacter aerogenes
atgcaaaacagcagatcgcactggagtcacagagaacccaggctgatatcaaagtggctgttgcggatgatgattgtgctttacgccttgtgcctgctgccgctgctgaccggttgcggaaatacgcggacagtttacgtaacagtacctccaattccgcttccagctactctgactttggaaacgccagtaccgcacatacccgatactctgacctatggtgacagtctggagttgaatgtgagtctgttgtcagcgttggaacagtgtaatcttgataaagcgacaataaaaaatatcgacgctaacaaataa

SEQ ID NO: 112103 - DNA, 477 bp, Enterobacter aerogenes
atgcaaaatcttaatcctcagcgtaaagctttcctcgatatggtggcatggtcagaaggaacggataacgggcgacaaccgacacgtaaccacggttatgatattattgttggtggtgaactattcactgattactccgatcaccctcgcaaacttgtcacgctaaaccccaaactcaaatcaacagctgcaggccgttatcaacttctttcacgctggtgggatgcttaccgcaagcagcttgggctgaaagacttctctccaaaaagccaggatgctgtggcattgcagcagattaaagagcgtggcgctttaccgatgattgatcgcggcgatattcgtcaggctatcgatcgttgcagcaatatctgggcttcactgccgggcgctggttacggtcaatatgaacataaaatcggtgacctgattgcccgattcaaagaggctggcggggtggtaaatgaagttgagctataa

SEQ ID NO: 112104 - DNA, 306 bp, Enterobacter aerogenes
atgcacgaaaaagagaatcttgctggagcgttctggctcgttttgctgatcatcgcaggttggggcggtctggtccgctacctgatagatgtgaagcagagtaaagcaacgtggagttggataaatgctctggctcagatagtggtatcaggattcaccggtgttattggtggcctgatcagcatcgaaagtggattcagtatttacatgattctcgcgacagcggggattagtggtgcgatgggttcggttgcactgacgtacttctgggaacgactgacaggggtgaaaaatgcaaaatcttaa

SEQ ID NO: 112105 - DNA, 336 bp, Enterobacter aerogenes
atgattaatgccgttgagtacagattaccgttaggaaatatctctccagagaatcttgacgcgttgtcagagcttatcgttaagcattccgataaatttaataactatgtacttagttctatttctgatgatgatattcgatattcttacgattactacaattttgaaatcacagagatagatgaatatgggtttcactttatagcaccatatagctattatgaaggatgcgttgacaataacttctcaggagaggttgaaggttatgcagaatacgaaattattgataatgaattagtcttctctcttgaggaactaccttgggatgtaaaataa

SEQ ID NO: 112106 - DNA, 942 bp, Enterobacter aerogenes
atgagcactaaattaaccggctatgtatgggatggttgcgctgcatcaggcatgaaattatccagcgtggcaattatggcccgcctggctgatttcagtaatgacgaaggtgtgtgctggccatcaattgaaactattgcccgtcagattggcgcggggatgagtaccgtcaggacggctatcgcacggctggaagcagaaggctggttaacgcgtaaggcgcgtcgccagggtaaccgcaatgcgtcgaatgtttatcagcttaacgttgcgaagcttcaggcagcggcattttctcaactgtcagattctgacccgtcaaaatctgacgcatcaaaatctgacccgtcaaaatttgatgcgtcgaaatctggcaaaaaagcgggttttcacccgtcagaatctggcggggatccgtcagtaaaatcaaaacatgatccgtcagataaaaaaccttctcgtccggacgcttcgcaaccggacacgcagacggatgaacaggattttttaactcgccatcctgatgcggttgtattcagccctaaaaagcgccactggggaacgcaggatgatttgacctgcgcacagtggctctggaaaaaaatcatcgccctgtacgagcaagccgccgaatgtgacggcgaggtggttcgtcccaaagaaccgaactggacagcctgggcaaacgaaattcgcctgatgtgtgtgcaggatggtcgtactcacaaacaaatctgcgagatgtacagccgcgtcagccgcgatccgttctggtgccgtaacgtgctcagcccgtcgaagttgcgggaaaaatgggatgagctttccctgcgcttatcaccgtccgtcagcacgtacaccgaaaaacgcgaagacccgtacttcaaatccagttacgacaacgtggactacagccagatcccggcaggattcagggggtga

SEQ ID NO: 112107 - DNA, 339 bp, Enterobacter aerogenes
atgaacagtttaacaacacactaccgtcgctcgcaactgattgcgcttcctgtaccgggtggaaaagcgaaggtggagtattgctatgcagttaatgtaccaggtgacagggaaattgtaacccacagctttgctgagtgggctgtgggtgatttcaaccggcagaaggagacagtcctttgcgacaagttaaccgctggttcaaagatcactacggagtgcccgtcagagtcattcgttgggagccggaaacacaacgagttatctacctccgcgaaggctatgagcatgagtgcttcagcccgctcgaacagtttcgtcgtaaattcagggaaatag

SEQ ID NO: 112108 - DNA, 201 bp, Enterobacter aerogenes
atgacaactgacgatatcgaaagctacttcggcagtattgagaaagttgctgcttttttcggcataacaactgaagccgtttatcagtggcgaaaccgtccgggccagttaattccaaaaggacgtgcagcagaagctgcatatagaacttgcggacggttgccatttaaacctgagctttatgaaaaatctaatggataa

SEQ ID NO: 112109 - DNA, 627 bp, Enterobacter aerogenes
atggaaacggttggtcagcgtataaaagctctgagaagagttaccggaacgtcccagaaagaattgggtaaattttgtggagtaagcgacgttgctgtggggtactgggagaaagacatcaatacccctggtggggaggcactttcgaaattagcgaagttcttcaatacgtcaatagattacattctttatggtgctgagtttgaaggcaaactcgtcacaaacatgcgcagagttcctgtaatatcgtgggttcaggctgggcagtttactgagtgcagggcagcagaagtgtttagtgaagtggacaagtgggtagatacatcattaaagattggtgataactcatttgcattagaggttaaaggtgactccatgactaaccctaatggcctcccaacaataccagaaggcgcaacagtgattgtagatccagatgcagaacctcgtcatggaaaaatagtcatcgctcgacttgatggaacaaacgaagctacagtaaaaaaattagtcatcgatggccctcaaaagtttttagtgccattaaatcctcggtatcccaacatccctatcaatggtaattgccttatcattggtgtagtcaaaggagttcaatacgaactctaa

SEQ ID NO: 112110 - DNA, 297 bp, Enterobacter aerogenes
atgttaaagcaggtgtatgaaatgaaagtccagattttaaacaataactgtgaagtcgtttggtcatacgacatagccgcccctgtagatcagagcggcgatagctggaccaatgggaaacatcagattatggctggagttgtgttctctttacgccgtgctttggaacaggctgaagtatttccatcagaccctgaatggaaatggcctttttctatttgtccaaattcggagagcacatttcagaaaattggtcagaaagtcgcactcgaagagcatcagccaactgtttcctga

SEQ ID NO: 112111 - DNA, 246 bp, Enterobacter aerogenes
atgacttttgatgaaaaagaacttgataatgcaattaataaaatcatcgtaacgtcgctcttttcctgtctcagcgacactcagcagaaacagttctacgaatcggttttcaacatgatcgagcgttgttgtttctgcgatgccgacgagttacctgaaaaaatcaggaaacagttggctgatgctcttcgagtgcgactttctgaccaattttctgaaatgtgctctccgaatttggacaaatag

SEQ ID NO: 112112 - DNA, 216 bp, Enterobacter aerogenes
atgagcgtgataaaaactcatacaggaattgttatcacccgagacggtgaaaagcggatgaaattacattccactgaaacgtcctgggttgccggacgttgtgaatcctacgacaaaaagactggttaccgttggggggcacctaacatgcgtcgccgtctgctactggacagcatcaggccaataaaacaggtagcaaccagggaacaaaattaa

SEQ ID NO: 112113 - DNA, 249 bp, Enterobacter aerogenes; identical to SEQ ID NO: 40380

SEQ ID NO: 112114 - DNA, 819 bp, Enterobacter aerogenes; identical to SEQ ID NO: 40381

SEQ ID NO: 112115 - DNA, 354 bp, Enterobacter aerogenes
atgaaatatcaggttaaagagtttattaacgataaatattctaaagctgttaatattttaaaggataaccttaaagaaaactaccatgttttttatggtttgagattgagtgagattcttttccctgccagtgaatacggctctgatgctttctttaatgagttcgaagcaataaacagtattacattgccattaataatttttgaaatcaatgaacgtacacctgtagctatcattggctttgaacaaattgcaggtgctgtttttgttgaacaattagacattaaagttttggttattgacgacctgtctgaattgctgactaatgaaacactggttttattatacaactga

SEQ ID NO: 112116 - DNA, 771 bp, Enterobacter aerogenes
atgaaagaatctgatgaagaacgtttcaataaacgtatatgtgttggtcatgtgcttgtcagtgctgacatttatgtaacacctgttatgactgaaagcgcggccgaggtggagttaactgtccctaacgacgattatcaaaaggcaatggaactgtatgatcgtatttgccagtttgcattgcttcatggtgaagatttacaaggactattccagactagcagatattactacatgtcatgtttcgtgcgtgatattgaagcatttaagaaagaattcgaaaaagaggaagagctaaagcctttatttaatcatgataagggcgatacggctgagtttattatcagcttccccgaaaaggctaactatgatgataaggaaccagttaaaaactcctttctggaaatcacacaaaaacatgtcgattcattagatgaacttacatggggtgattttgagcacagagcattcactggcgctacggtaggttttggcatcaaccccaatacaatggaacgcattaattttgatgatgagcgtgacaaaataacaaaactatctcgtaaggatttcgtggcgtctaatctcactgattctttcgaagatgatttttatgttaatcctttatttgaaggagcacaaaaaatcggtgagattgataatcacccggtatatttcaactcaagaggcttttacttctactggaacaaagaaactgaatacctgctggaaagttggttgactttcccgtcgtatccctatggctggtaa

SEQ ID NO: 112117 - DNA, 417 bp, Enterobacter aerogenes
atgttaagagaattaagtggtgtgagccgtactttatggcgagctgcattttttagcctggttaaggctccagcaatggcgttgtttattggttttgtctttctgtctttcaataactccattgcggacacgtacctgacctcagccagagaacttaccgggaatgctccaccggataaggttcagacctgtgtctttaaaaaaagcaaacaggaactatcaccttacgtacagaaagaaccatgcgtaaatacgctgactgatgcgaaggactggtctcagtcgttcgacagaagcattcgtcgtatttactggactatagccctgttgggtttttttacctggttttgttttgatggtatggctgctcagttgatgctgaaaattgatgacatgtgggagagaaggaaaaaatga

SEQ ID NO: 112118 - DNA, 324 bp, Enterobacter aerogenes
atgaaagtaattaatacacctgatgcaagaagtgtgagagttgccggaattgaaattatcgatagtgtcaaaaaggtcgcttctgtttttactgaaatcctgttgtttatggtctggtttccggcaattatctatgggctttatcgcgttgttatcgttttgtgggatgattccttaaaatcgcaatcactcatggagtttattaatttcatggttgagttatacagctatgtgcttccttcgctggcagttatcgctgtggttttaatcgttattttaagttcatttaaagtgttttcaaaggtctggagaaaatcatgttaa

SEQ ID NO: 112119 - DNA, 339 bp, Enterobacter aerogenes
atgaacacttatgttatcacttttcaggctttaaacgttaagaaagaaaaaatcatctgctccgcttttgtccattcagaaactctcttcctcgcagttcattctttcgaagataaaaatcgcggtcgtggttatgtgatcacgtctgttaatgagttattgaccgatgaattgacagctaaaaactccctcaagaaaaatattaacttttggtttaacgaatgtggattaagtaaagaggagattattaaagaaattaatcactggaaaaattttgcatactctattaaagaactggaggaagccaaagaagaagcgattagagaactgcggagttaa

SEQ ID NO: 112120 - DNA, 171 bp, Enterobacter aerogenes
atgggtatggtaagtaatttttttagtgagtacgggatcatattattagcactagtgaatagttttgtgctttggaagttccttaatggttcaaagatgattctaggattatcagtaataataaacatagcaattattatcatagttttaatggatgtattcaccaggtaa

SEQ ID NO: 112121 - DNA, 1245 bp, Enterobacter aerogenes
atgaaaagcagtaacacacttcgttggggaatagtcctgacggtaattttggcggcgggagccgcctattggttctggcacgatcgcgccgaagagacaaccgcaggcgctgctggcgcgagtcaacaaggagcaaaggcgcctgccggggcgcgtcacgggcgttttggggccacgctggccccggtacaggcggccactgccaccagcgaatccgtcccccgctaccttactggcctggggactatcgccgcggcgaacaccgtgaccgtgcgcagtcgggttgacggccagttactgagtatccatttccaggaaggtcagcaggtaaaagccggcgatctgctggcgcaaatcgatcccagccagttcaaagtcgcgctggcccaggcgcagggccagcttgccaaagataacgctaccctcgcaaacgcgcgccgcgatctcgctcgctatcaacaactggtaaaaaccaatcttatctcccgtcaggagctcgatacccagcagtcgctggtggtcgaatccgccggcacggttaaagccgatcaggccgccgtcgccagtgcgcaactgcaactggactggacccgcatcaccgcgccgattgacgggcgcgtgggcctgaagcaggtcgacatcggcaaccaaatctccagtggcgacaccaccggcattgtcgttctcacgcaaactcaccctatcgatttggtctttaccctgccggaaagcgatatcgccaccgtggtacaggcgcagaaagccggtaaaacgctgagcgtcgaggcctgggaccgaaccaataaacagaagatcagtacaggcagcctgctgagcctcgataaccaaatcgatgccaccaccggcaccattaagcttaaggcgcgctttaataacctcgatgacgctctgttcccgaatcagttcgtcaacgccagaatgctggtggataccgagcaggatgcggtagtgatccccaccgccgcgctacaaatgggcaacgaggggcacttcgtgtgggtgctgaacagtgagaataaagtcagtaaacatacggtcacgccgggtattcaggatagccaaaaagtggtgattaacgccgggctgtcagcgggcgaccgggtggtgaccgatggtatcgatcgcctgacggaaggcgctaaggtcgaagttgtcgaagctcacagcgccgtgcaggaacaacctaccacccgcccgagtggtaaaaacggagcgggcgcctga

SEQ ID NO: 112122 - DNA, 1230 bp, Enterobacter aerogenes
atggcaaaactcgcaaaaaaactcacagatactgaaatcaaaagcaccaaaccttcagacaaagaaaccaacctgtttgacggcgatggtctgatgctacgaatcgctcccctctcaagtggaggaaggaaaaattggtacttcaggtatgctgtgccagtgaccaaaaagcgaactaaagtgtgcttaggaacctatcctcacctcacccttgcaagagccagagctttacgggatgaatatctctccctgttagccaatggtattgaccctcagacccatatcaacgataaagcaaatgcattaaagagtgcgaccgaacacaccctacaagccgtagcaagaaaatggttagatgagaaggtcaagacgtcaggcatctcaaaaaaccatgcagaagacatctggagaagcctggagaggaatatttttccaggtcttggtaatgttcctatcaatgagatccgacctaaactcttaaaacaacatcttgatcctattgagcaacgagggattctagaaaccttgcggcgagtcatttctcgattaaatgaaattttccgttgggcagccactgaggaacttatcgagttcaatccggctgacaatctggggcaacggttcagtaagcctaaaaaacagaatatgccagcattacccccttccgaactcccccgcttcttagttaccctaaacaatgcttctgtccgtttagaaacacgattattgattgaatggcagcttctcacatgggttcgtccaggcgaagcagtgcgtgcaagatggtctgatatagatatggacaatcatatgtggaacattccagctgagttcatgaaaatgaaaaagcctcataaagttccattaagcaaaggtgctattcgagtactcaatacaatggagtctatcagtggacatcgcgaatgggtatttcccagtataaaagccccactcaatcatatgcatgaacagacagctaacgcagcaattatccgtatgggatttggtggtgagcttgtagcacatggaatgcgatctatagcaagaacggctgcagaagaatcaggaaaattcaggaccgaggtgctcgaatcagcacttgcccactcgaaaaaggacgaaatcattgcagcttataatcgtgcggaatatatttcggaaagagaaaaacttatgcaatggtggagtgattatattcagtcacaacaacttaaaactattgcagcctaa

SEQ ID NO: 112123 - DNA, 240 bp, Enterobacter aerogenes
atggggcatggttttcgtcacacaatgagtaccattctgcacgtagaaggatacaactctgcatggatcgaaacactgcttgcacatgtggataagaacgctattcgcggggcttacaatcatgcacaatatttggaagggggacaacagatgatgcagtggtatagtgattacatagatagcttgtctagaaataaacttccgcaattttttcttcaaaaaaggctgtatgaacaataa

SEQ ID NO: 112124 - DNA, 852 bp, Enterobacter aerogenes
atgaaaaactggtcgcgagagcacaatcaggagatcagaacctggtttgatatcgataactaccgggcactggaaaattgcactctgtatgccctttactacgagctttgggcgagggctctgctttacaagcctgggccgagtgatgaagagaagaaggggctgtggcagtacatggttaaaattttcgatggaaggcctctccttttcgatgaaacgtcactggattttgaggcggattatgactgcctctacaaccctcctcatgtgttcctgacggatatcaccagactggcacagctcggtgtctctgcattatcagcagagctctttacatgggatggcggcgatgtttacggcgttaacttaccgcaccatcaggcctatgtgtctgaggttatggcaccgttatgtgaaaataccgtcatgctagaaatcgatctcgcgagtggcacagatgatgagataaccgcttctataaaatcggtactccctcaatggcgaaagattaagaatgttacgacagatcaatccggtgtggttaggtttgggtatgggacaatcaaaaaaatcatcagctatcgcctggtggcaatgctggatatcttactgtgggcaaaaagacacgaagtgagaatttcagatgaccgtctttcccgtcttttgtataccgacgacgatgatgaatctgtcgttcgtcagcagaaccatataaaagactccgatcgacccctggcgatgaaagcagcaacaatcgactttatcaagcagttcaatctgttcattaaccgtaactctcatattaaaaatatgcgagtttcagatgtgatgaaactcgcggaatcaggctga

SEQ ID NO: 112125 - DNA, 210 bp, Enterobacter aerogenes
atgaaaagtaatcaaccaacccgccttatccgtcttcctgaagtcctgcagcgtacgggctatggaaaggcctggatttatcgtctgattagcgaaggacgttttcctgcaccagtaaagattggcgcccgcgcagtggcttttgtcgagagtgagatagatgagtggattgatggggtcattaacagttcaagatctcatgtagcgtaa

SEQ ID NO: 112126 - DNA, 309 bp, Enterobacter aerogenes
atgaacataagtgattttgagcagtacgaaggctattgggaaattattgatgataacctttttgacgaaattttttatattgatcgtattgaaaaactggagccaactgaaaaggtcattaaggccattgagttgcttagttatttatttactgacgacaaaatggacatgttggaagaagttcgtcgaatgaatatgcttgctcaggctgatatatttgatttgtggtttgatataataaaatcacgggattacgttgaagcagtggcgaaaatagtgatttattatagtattggtatgcctgtgtga

SEQ ID NO: 112127 - DNA, 318 bp, Enterobacter aerogenes
atggaacaaaaattcccttcataccttcttacagataaacacgcatcaacgaaaagaaagcagaacgaagaaacagctaaagcattgtaccttctcacacacattgccgcgaaccaaactggcaaccgcattatatatctgatttttcatcgtgcaaaaatagtggcgctgaaggaaggcatatatatcacacccgcccggttctatcgggctatcgatgaactgattgatacgaaaacaattgcacgtacagaatttaaatatcagtgcatccttaaccctgtatactttagatttctgaaaacagacccaacataa

SEQ ID NO: 112128 - DNA, 564 bp, Enterobacter aerogenes
atgtcaaacaccaatatcacgttaagcagacaacaaaaatccattatagcaaaggcccttgacgtcagtcctgaagaattagaagagatcagtatcaaaaccagcatacacaagaaaacgtcatttcgtgacgacttctcattggtattcaaaggcaatattgccacgctcgcaagaatgaaactgacgccaacttcatttaaaatcgttatatatcttttttcgattctggattacgggaacattcttattaatttttcacagtccaaaatagcaaaagaactcggactatgtaaatccaatgtttcacgcgcattcagagaattatttgaaaagaaaattctgcttcgtgacaccgaacatgaccatgtttacctgaattcgaacctctgtgtaaaaggcattccgcgccgcttcaatgaagaacagatggataagtttaaaaaatccaggatagatactgaggattttgacgatgccttcaatctttaccattcgggcaggaaagtaaagccaaacagaaagcccgtaaccctgtttcctgcggatgacataccattttaa

SEQ ID NO: 112129 - DNA, 423 bp, Enterobacter aerogenes
atgaaaactgaccatgcccaggatcaggaagaaaaatttctatgggtgattgataaatacattaccagacattgtcatagcccaatgggcaatgattattaccgtaaattctatgtgttgtttgtcggttaccatctgaagtatttttatgcgaaggagaagtacagcaattcctgttttcatgtcgataatattatgcagatgttctctggtgttgtgtcttatcttaacggcaatctgctcagtcagttcgccaacggcaacacactgcttcagtcgctcaactcgctgataaactacatttcacaggatgtcgccagggcggaacgcatctatgctgatttattggcacagtatgagaaaaagcgtatcgcgggttcaatgacatacactccgcgccctggtgtcaggaaaaggttatga

SEQ ID NO: 112130 - DNA, 321 bp, Enterobacter aerogenes
atgaaaaaatatgcatttaccacactcattgcgtccatttttttgttgagcggttgtaccggtgaaccgtctgagcaggatatttacactgcaatgaataaggtcgtggagcagacgaatgccatcgttaaatccataattggtaaagatgtcccgaaagacacactgcgggatttaaaatctgtcaaaaagcatgactgcgtgaaagtatcggataaaagctataaatgtaatgtgacggctgttgttaataacgacaaggccaccgccgctgtcacactggtcaaaacggatgatggctggcaggtcgttgacaagtag

SEQ ID NO: 112131 - DNA, 387 bp, Enterobacter aerogenes
atgaacagattcattgtttctgtattttttatttccgctatttttatttctggttgctcaacatcagggaaccagcatcttaaaaacgaaacatcgcaaagcttgcaatcgaaaatcatcaaaaataaaacaaagaaatcagaaataaccacccttcttggtgcaccggatacccgcacaacactggatagtggcaatgaagaatggacttattttatggataacaaccagtttgatgccaccacattcattccggtaattggactgttaacgggtggttcacagacacaggctaaaacgctcgaaatcgaatttaaaggtgaaacggtcagcaagtggacgttctctgaaaacaacagcaagatgaaaaccggccttattcaataa

SEQ ID NO: 112132 - DNA, 279 bp, Enterobacter aerogenes
atgagtaaccagactgttcaatgccccttttgttttaaagaaagcccccacggcgtaaaaatttgtatcgggtgccatgcaaaagtggtttacggtgaatgccctgttattgtcgccattctgttcgggatcgctgtgatgatcctggcttacttagcaggctcatggactgacaattttttcgtctctgtcatcgttttttttggcagtatatttattcttaagtacccgcttaaaaaagtttatgcagatcgaattctgtttattcaacgaaattga

SEQ ID NO: 112133 - DNA, 1200 bp, Enterobacter aerogenes
atgaaaggcatgcagaaaataaaaagaggtaaacagtttgcaggtgttgttctctacagcctgaaatcaggttctcaccacaaaattgagccttctatcattggaggtaacatgacgggcagcaacgccaccgaactaatcagtgagtttgatagcgttaaaaaaatgcgccccgatgtcgccaaatctgtctggcacaattcgcttcgccttccagaaggagaatcgctgacagtcaggcaatggagagcatttgcggatgagtatatggcccggatgggttttaccgacacacatttgcgttgctatatcctccacgacgatttttgtggccagcacatccacataatagctaatcgcattaacatggccggtggaaagctgtacctggggaaaaatgaaaatctcatcagcacccgcattatcagcgagctggagatagtgcatggactcacccaaaccacaccagcaaacggcgttcgtcgtcagagtaaaaggaagccttcccgcaatgaagtaaagatggcggaacggacagcaactccctgccctaagtctcagttgcagaccctgattgataatgtcttaacgcatcgtcccgatttactgacttttatcggcatgcttgaacggaaaggtgtggcctgcaaaccaaacattgcgtcgacagggaaaatgaacggtttttcatttcagtaccagggcattgcctttaaagcctctcaattgggtaaaaaatatggctggtcttctctgcaaacactaattgatttcgtaccggaacatctggctttattgaaacaagcacaaaagccaacagtacctgcatcagtgccagtgccatcatgcgagcctgaagagcagactgtaaaccgggaaacgattctggagaaaatccatcagcttgaagaaaaaattcgactggaaagacaacaggataaagtgggtatcattcagctcaggagcaaactgcacaatacaacccgtctgataccccgccagcgtcgtctctattcgtggcttgtattgcttggccattttgtggcacttctcagacgcaggggtatgtctctgttacatgcgactggacgtcccttccaccaaatcctgcacctgtatcttctgacaccctgccattctatggcagacaataccattaaagaacaatcacttaagaataaccactactctacaccataa

SEQ ID NO: 112134 - DNA, 225 bp, Enterobacter aerogenes
atggcgtccctgcataaactcccgccagtactgcctgaaataaatagcgaagcctggattgaactcggcaggcttgcgcaagatttaaatcacctgttaacgcatctcgaccacaaaagccctgacagtgaactgacccgtactgaattgtttgccgtcaggagacagatcaaagcccttcgtgaacatcttatcccttcaactttctggagtggtaataaatga

SEQ ID NO: 112135 - DNA, 948 bp, Enterobacter aerogenes
atgagtatccataaagaacacggtttcttatactgcgagactaaaaaagatgtccaggaatgcattaccgcaggcttcgatattaactctttcatatatgcgggtcgaaatgcactcttccataaccgttacattagtgcagttcaagccatgattgaagagggaatggatttagaccatacagatcattacggagacaatgcgctatttaccaatgactccccaaaaatactcagcctcttaatagattccggaatcaatatacaccatacaaatgacaagggggagaattgtcttttcagtcatatttttgacaggaaaaacgcagaactccttattaatgcgggtgttgacattcatcacacagataataatggacaaacgcttctttataagaccttcagtgaggtttactttgattactgggtgaataaaggttgtgatcttaatcatagggataagtatggcaacacggttctggatttgtctggctgcaaaggtcacatatatgattttatcgcaatggcccttactcgtcatcttgataaaattgataacccccctacactttttaaacacttatcgattgagtccttacccttgttggcgttactgcataaaaaaggcattcatttcacggtagatcaacactgtacattttcactttacgtgagagaaatgaaggcattttttgtcgaattaaaatcctatacagatattggtcatgttcaattttacaatatgaaaaataagcacattggcagctacacggggatcgagacagtaaaatggtttattcgcaacggtatcagaatagacgacgaaatactcatagaacgttctgatgcagataagatctttggttatatcgcggggagagataaaaaagaactatttaaggtgataaaatcagaaattattcgttcacctaagcgaaagaggatttaa

SEQ ID NO: 112136 - DNA, 288 bp, Enterobacter aerogenes
atgatcaccgagagaaatatcttaaccctcttttcaattcatacctttctctcttacaacgtaagcaagaaagaaacaatcaaatcattcacgcacttcctccggaatgccaacaatgacacctttaacaatgcattccagtttcgcgggtgcaatatcatttatcaaaacaagaagagagaaattaaagaaatttcatggttttccttttcacggatttatgacgacatagtaagaataaaagaatatagaacaaacaacaacacttacaacaaaattgcagcctaa

SEQ ID NO: 112137 - DNA, 582 bp, Enterobacter aerogenes
atgagcgaaaggaaaaaaatcgaagagcaggctcttctctatcatttaacatgtatggataatctccctaatattttagacacaggattaagatcccgtgcgtcagtaaaaggcgagtttgttgatgtggccgacggagaaataataacaggtcgcgaagctttaaatttgcaaacaatggttccctttcattttttcactaaaaatccatttgatggaagagttttgaaagaccataaagaaaaatcattttgcattatttcggttagacgaatatttgccagtgaaaatggttggaaaattattcctaaacatccattatccgccagttctactgtcagcctcttagactatgaacaagggatgactcaaattaactgggaacttatgaatacaagggattataaaaatgcagaatgcaaatctgtatgtatggctgagtgtttatcaagtgcaacagtcgagccggaaagtttttattgcatctatgtcaaaaatgacgacgaaaaaaaatatgttgaagacttgataaaaaaacaaggattaagtatatttgtaacagtcaacccttatatgttctaa

SEQ ID NO: 112138 - DNA, 516 bp, Enterobacter aerogenes
atggatttagaaacaccccgtttaaagcttgaaccctttgatgactctcattatgaaggtttgagggtaatggatagtgatgccggtgtgatgcgttatatcaccggaggtatcgttaaaacgcccgaagaaacctgggaaggtatcagaagagtccaggcacgttgggataagtacaaattctcatggtgggctatcaaagagaagttctctggcgtgatcgttggtgcagcatgtctccagcacttggcaaacgcggatggcgcaccattagagattggctggcgtctcgtccctgaacataatggcaagggctatgcaacagaggctgctcaagcaatcgttgattacgcggcagagcaggtaggagcaacttatctcgttgcagttgccgaccctgaaaatatcccctcgcagcgtgtaatgcaaaggttaggtatgacttacaaagcaatagagcagcactacaatgtgccatgtgtggtgtttgagcttaacatacgcaggcctgcttaa

SEQ ID NO: 112139 - DNA, 198 bp, Enterobacter aerogenes
gtggcacagatagccatcgcatgggctattgcgaaaggtacccttcccctcgttggtgcgactaaagtccatcacgttctggacgccgcctgcgcttcagacatccagttacgcgatgaggaaatcatcctgctggaacaactcgccgcagagaccagagtggatacacgaggcgcctgggaaaaaccgatggtgtaa

SEQ ID NO: 112140 - DNA, 291 bp, Enterobacter aerogenes
atgaagtatcttattggtatcatgagttttttagtaattttcattcttgcaatccttgccagtaacaaccggggggctatacgctatcggccattggtcgtgatgttattctgtcaattcacgtttgccggtttgttgttgaaaacaagcctgggtaaccaggtgatagccgttattgctggcgcgtttgcccatttaatggcctatgcgagtgaaggggttaactttgtcttggtggtttgcaaaaccacggcgagctctctttctttattagcgtcctcttgcctatag

SEQ ID NO: 112141 - DNA, 687 bp, Enterobacter aerogenes
atgcagccgcgtgggctgccgcggccactggttgaccacgccgcccagatggtcgtcgcagaatttgtcgagtgcgcttttacggttaaatttctgggtcagccgcgagaagggccagacggtggccatactttgccgatatctggtcagctcactgtcttctatcctttcctttttcaccgcataacaaatgctgctgtaagttttaagcagcgcctggttgatacggtcctcaccgccgttggcaaacagctcgccgtccagcgaatattcgttctcgccaatctccggaaagcgcgccccacagccgggaaagtagtaacaaaagtagccgtcgttttccgcagcttcatcttgaactttccagtttgccgcatggtagaggcggccgatattggtcagcggcgggtttcgcgagccatacacttcatcaccatcttcttcattacagcaggtaccgtcaaagaacaggctgatatgcaggctggccgggcagcccggttccgtttttttatccgattgatgatcggactctttgacatacccctccaggtattgcctggcatagttgccttcggtctgcattctgctcgccggcaggcggccgcgctcgttgtattcggctttctgctgcgcggatttatccgcgggctttttgtcatccggcccgggaaactttggcggtaa

SEQ ID NO: 112142 - DNA, 717 bp, Enterobacter aerogenes
atggttgcgctcggcctcattcttacatgtatcccaaagaagtcatccaatggtagtcaaatatttatattatttatcattgctatatgctcaatccttacatctatgttattgaaaagtcagattgctaataacgacttgggatggagagcaattcttcccgctgttcttgtttcgtcttcactaatagcaatatcaattgaaaaattgaaaagggaagctatcacatgcataagcctcattgttgtagccattagtttaccatccgcaatagatttttctaaaaatttattgcaaggtgatttccgcaatgacaatgttgagattatttcaagcttattggatataactaataatacagagcctactgatcgaatactgataaaccctagaaaatttgaaggacgtgaggtttttgatgggaacgttcttccatccataataatagataggaatagttgctttacgaatctgtcttatgcatatgctttttctaaccagtggggtgagtccattggttattactggaatacattaaaagaattttatgccggccatgcctcgaatgaagatctaacaaagatgaaaaagctgaaatgcactaagttagtcgttttgcctggagacggcatttgggataaattcccttataatcactcagaatgggtgctaaccattgacaaaaaagattataagatatatacgcaaagacaatga

SEQ ID NO: 112143 - DNA, 714 bp, Enterobacter aerogenes
atggcaagaattacaaaaaaggaatctacattacatattaaagtaatggatttaattcattcagacaaagcattaacacaagatgataaagagtttatatttaataactataaaggtgatggaataggtgctactggtgcttttttcacaccagaaatgctcgcatgggatttcataattgatgctggttgtactggtcagtgtatcgaactatgtgcgggtatcggtcgtctcagttactaccagtacctaagaaacaagccaacacacattacatgcgttgaactgaatcccgaatacgtgatgatcgggaaaagggtgttaccagaggcagaatggataactggtgatgctctccaattcactcctgaccgtttttatgatgttgcctatggtaatcctccatttggtaagatcaacacctcagaagtgcatacaggccgttacactggttcagagtttgaatacaagattatcgaccgtgctcgtgagtatgcatcatttggtgcatggattgttccacaaggctcttctggttttgtgtacagtggtgcacagtactatgacaatagtagaccatctgctaagtacctacgttttattaatgacactggtttagaattgcatcctggtgtgggtatcgatacgagcatttacaaagatgaatggaacggtacaaaggttatatgtgaaagtgtgactgtagaatattaa

SEQ ID NO: 112144 - DNA, 1278 bp, Enterobacter aerogenes
atgaaaataaaaggactccgatggtggataatcggtttggtcgcgctgggcactgccattaactatctggcaagaagttcacttagtgtcgctgcatcgacattatttactgagctacatattactgaacagcaatattcatgggtcataatgtcattccagatggcctataccttagcgcaatcggtctgcggatatattttagattcgattggcttacgtattggcttctttattttcgccctcgcctggtcgttcgccaatatggcgcatgcgctggcggttaactggcagtcattggcgttctgccgcggtctgcttggtctgagtgaatccgccgccatcccggcgggtatcaaagcaacttcggaatggtttccttcgaaagagcgtggcattgccggcggtttattcaatatcggcacatccctcggcgcgatgctggccccgccgattgtggtatgggcgattatctacttacactggcagttcgcttttattttcaccggttcattcggtcttatctttgcttttttatggttgtttttatatcgcccaccagaaaaacataaatggatatcggaagaagaaaagcaatatattgctgacggtcaggaaaaggaattacagtccgatggcgataaacgtccgccgctgagagtgctgcttaaacagcgtaatttctggggtatcgccatgacccgttttctgtcggatcccgtctgggggacgttaagcttctggctaccgttatatttaatccaggtccggcacctgccattaaaagaaatcgcgatgtttgcctggcttcccttcctggcggcggatatcggctgtgtagcgggaggtgtgctttctaatctgctgatcacgaaatttaacgtcacgacggtcaattcccgacgcatcggcttcacgattggcgcgctgctgatgacctcgctgtccgccgtcggttttgtagaaaacgtctactttgccatcgcattgattagccttggcggattcgcccaccagatgctgtcgaccatggcgatgaccctagcgtccgatctgtttaaaaagaaccaggttgctaccgtcagcggtatggcaggctccgccgcctggctggggcaactgctattcaccatggtgatggggctgctggtgcatcagattggctacacgcccttctttattgcgctcagcattcttgatctcatcgcggcagccattatctggcttacggttatcgatccacaacgcgccgtcagagagccgatactcaccacctga

SEQ ID NO: 112145 - DNA, 2076 bp, Enterobacter aerogenes
atgagccaggtggatgacgccatccttgatgcgctaacgcacgtcgctttcccgaaaggcttcgcccaggcagagccttcctcggtagtgaccattgataacgtgacctatcccgtctggcgggccgatgcgctggtcgtcggcagcggcgcggccgggctgcgcgcggcggtggagcttcagcgtcgccagcaaaacgtcctgctggcgacggcgggcctctatatgggcacctccgcctgctccggttcggataagcagacgctgtttaccgccgccaccgcgggcactggcgataacttcatcgcgctggcggaggcgttagccagcggcggggccatggatctcgataccgcctatgtggaagccgtcggctcgttacatacgctagggggattacaatatctcggtctggagctgccggaagatcgctacggcgccattctgcgttaccagacagaccatgacgaggccggtcgggccacctcctgcggcccacgcacctcgcggctgatggtgaaggtgctgctcgatgaggtgaaacggttggggatcccgctgttaaccagcgcaaccatcattaagctgctgcaccagcgcgatgaaacgggcatcgatcgcgtggccggcgcgattctggcgaccggttcacgggcctggaatccatccgggctggcaattgtcaccgcaccgaacgtcgtcctggctaccggcggcccaggcgagctttatcgcgacagcgtctatccacataaatgctttggctcgctggggctggcgctggaggaagggatcacactcgctaatctgacggaaagccagtttggcatcggtacgccgcgcagcgcttttccgtggaatttatctggtacctatgtacaagtgatcccgtatatctactccgtggatagcgaaggtaacgaacataactttctggctgactactaccgtaccacccaggagctggcgtcgaacatttttcgcaagggataccagtggccgttccatgccaccagagtgatggactttggctccagcctgctggatatggccgttgcgcacgagcagcaattgggccgtaaagtctatatggatttcctgcgcaacccgcagccggtgccgggcgacgtgccgttttcgctcaaccggctggatgaagatgtccgggcgtacctggcgaataacgacgcgctggccgcgctgcccatcgaacgcctgcagcggatgaaccccttatccatctccctgtacaacatgcatggccacgatctcacccaggcgccgctgcagtttgccatgaataatcagcatatgaatggcggaattgaggtcgatatctggggacagacttcgctacccggctgctttgcggttggtgaagtggccggaacgcacggcgtgacccgccccggcggggccgcgctgaacgccgggcaggtctttgctgtgcgcctggcgcgctatatcgccgaagcgggctggcgaggggaaagcgacgcggtggaagcgctcgccaccagccccctgaagcagatcaacgccgtgatccaccaggcgctacatcacgcttcaggacgatcgctggtcagtctgagagaggaaatacaggcgcggatgtctgattacgccggatttatctgccatgtggacaccatcagaccggccgcgcaggccgcccggcaactgctggcaagtctcgctcacgacgcccttgcgattcaacaccaggctgagatcccagggcttttcatgtggcgtcagctgacgctggcctcggcggctattctgaccatgctggaggagtacgttgccgcaggcggcggaagccggggcgcgcgaattattcttgacccgcaaggtgactgcctgccgttaactcgcctcggccccttagcgcaatggcgttttcgaccagaacaacaggccgacaaaaagacaaagctcactattcagtatcgggaaaataaatttattttccagcaacaatcattaagaaaattaccggatttaaaaagtaattattttgaaaagaactggcctgattttctctgcggagaaatataccgcaagcagtaa

SEQ ID NO: 112146 - DNA, 1542 bp, Enterobacter aerogenes
atgaataaaatgacaacggctgacgcgctggccgcccagattcatgatggcgcgacgatcgccatcagcggtaacggcggcggcatggtggaggccgattatctgctggcagcgatcgaaaaacgctttctggaaaccggccatccctgcgatctgacgctggtgcattccctgggtatcggcgatcgcgactgcaaaggctcgaaccgtttcgctcacgcgaaaatgttaaaacgggtgattgccggccattttacctggtcgcccaagatgcaggcactggtgaagaacgaagaaattgaagcctattgcttccccggcggggtaatccaggcgctgctgcgcgagatcggcgccggacgtccggggcttatcacccacgttggcctcggctcgttcgttgacccgcgtcacgacggcggcaaatccaatgccatcacccgcgaagacctggtggagcttatcgagatcgatggcgaaactaaactgcgctaccgcccgttcgccgtcgattacgccattgtgcgcgggacctatgccgacgcgcgcggcaacatcagcctggaagaagaagccatcaatatggacagctactcgatggcgctggcggcacataatagcggcggcaaggtctttgttcaggtgcgcgacgtgctggaagcgggcgcgattaccccgcgtaacgtcaccctgccaggcatcctggtggacgggattgtggaatatcgcgagcagccgcagacctatctcggcggctacgacctgaccataagcggccagcaccgccgcctctgctccagcgacgccattgagctggtcagccatccggtacgccgtctgatcgcccgccgtgcggcccgcgaactggttgccggcgcgtccaccaacttcggctttggtattcccggcggcatccccggcatcgcgctgcgcgaaggcgtgccgtaccagagtttatggctcagcgtggaacaaggcgtccataacggcatgatgctggacgatgcgttatttggttgcgcgcgcaacgccgacgccattctcccttcgctggatcagtttgaattctacagcggcggcgggatcgacatcaccttcctcggcatgggcgagatggatcagcgcggcaacgtcaacgtctcccatatcaacggcaacctgattggcccgggcggctttctggagatcgcccagaacgcccgcaaggtggtgttctgcggcacttttgacgccaaaggtagcaaaattgacgttactccagacggcctgcatatcgcgcagtccggacaaattcccaaactggtcgccaatgtggaaaagatcaccttcagcgccgattacgcccgccagagcggacaagaggtactgtatatcaccgaacgcgcggtattccagctgacggctgaaggcgtggagcttatcgaggtcgctccaagggtaaacattgagcgcgatattctgccgtatatggcgttccggccgattatcaggcaaccgcgcctgatggacagcaacctgtttacaccaatggaggaagcatga

SEQ ID NO: 112147 - DNA, 777 bp, Enterobacter aerogenes
atgaatgcacaccccgttctgttcagcagaacggcggcttcctgccgcctgacgctgaaccgcgaagataaatgtcacgcgattaatgaagagatgatcgaattactcgatcgttatttaagtgaaatagaaaatgacgctgcgctgcgactggtggaattaaccgccaccggcgacaaattcttctgcgcaggcggcgatattaaatcctggtccgcttactcgccgctggatatgggcagaaagtggattaaacgcggtaacgaagttttttcccgcctgcgcaatctgccacagctgaccgtcgccaatattaacggccataccatcggcggcggcatcgaactggcgctgtgctgcgatattcgcatcgcgagcccggcggccaagttctccacaccggaagtgacgctcggcatgatccccggttggatggggattgaacgcgtgcttaaccaggtgggccccacggtgggtcgccagatgctgatgctcggcaaacgccttaccgcccagcaggcgcaggcggcaggcttaattaacgaagtggtcgaaaaagcgcaggtggagagctggatggcaaatcagctcgctaccgtgaagaaatgcggcccggtggccctggcgcatattaaacagctaattctggccctcgagaacaaacatgcggattatccgcaccagctgctggccggattgatgtccgccaccgaggactgccagcaggcgacgcgcgcgttcgcggaaaaaggcaacgtgaccttccgcaaccagtaa

SEQ ID NO: 112148 - DNA, 846 bp, Enterobacter aerogenes
atgagaaatctgttacagcgccccgatctgttcagcatcaataccgcgacgcttggctataaaacgccgctcccctccattattgatgcctgcgcagaacgcggcattggcgccatcgccccctggagaagggagctggacggcgagaacgtatcggcgattgcccgccagctggcggcgaatcatatggccgtatcgggatattgtcgcagcacctattacaccgcccctacgctggcagaacgtaagcgggcaatagacgaaaaccgccgggcgctggacgatgccgcgacgctcaacgccgcctgctatatgcaggtggtcggcgggttgccgcagggcagcaaagacctgtatgacgcgcgtgagcaggtgaaacacggtatccgtcagctgctgccgcactcccgggagatcggggtacctattgccctggagccgttgcatcccatgaccgccgccgatcgctcctgtctgtgtacgctgcgacaggcgctggactggtgtgatgaacttgaccccgacggtgaatatggtctcggcgtcgcggtggatgtttaccacgtctggtgggaccccgacctcgccagccagatccagcgggcgggaaaacgaattctggcgtttcacgtttccgactggctggtgcccactaccgacctggtcaacgaccgcggcatgccgggcgatggagtgataaatattccctcgattcgccgtctggtggaaagcgctggtttcaacggagcggtggaattagaaatattctcgccgcataactggtggcaaaaagatattaatagcaccctggatattagcgtcgatcgcatcgcacattattgctaa

SEQ ID NO: 112149 - DNA, 792 bp, Enterobacter aerogenes
atgaaaacaaataatccagttgccgttatcaccggtgcggctcgcggtattggtaaaggttgcgcgcttgagctggcccgcggcgggttcaatctgctgatcaacgaccgccccgatgcggaaagtgtgcaaaagctcaaggcaacccagcaggaatgcattgccgaaggcgcagaggtgatctgtttccctgccgatatcggcgatctgtccctgcatgaagagatgctcgatgctgcgcaaaatcagtgggggcgtctggattgcctgctcaataacgccgggatctcggtgaaaaaacgcggcgatattcttgatctacagccggacagttttgatgaaaatattaccatcaacacccgcgcgcccttcttcctcgcgcagtcgttcagcaaacgcctgctggcgcagcctaaaccggaacacgaattaccgcatcgctcgattatttttgtcagctccatcaacgccatcatgctggcgatgaaccgcggagaatacaccattgccaaaaccgcggtgtccgcggccgcccgcctgttcgctgcccgtctatgcgaagagcagatcggcgtatatgaaatccgtccaggtcttatcaaaacggaaatgacgatcccggctaccgcctactatgacgaactgatcgccaaaggcctggtgccatgggggcgctggggctttccggctgatatcgcctctaccgtgcgcgccatggcggaaggcaagctgatctacacctgcggccaggccgttgccatagacggcggcctgagcatgccgcgcttctga

SEQ ID NO: 112150 - DNA, 639 bp, Enterobacter aerogenes
atgtatattgataccagcaacgcgcaaaatctgaaggaaaaactccttctcagcgcggtaaatgaattcgcagaatatggctatgaaggcgccagggtagataatatcgtcaaggcggcggattgcagtaaacagacggtctatcaccacttcggtaataaagagaatttatttattgaagtgctcgaatatacctggaacgatatccgccagaaagaaaaatcactggatgtttcaggtttatctccagcgcaggcgattgataagattattgactttacctgggattattatatcgataatccgtggtttttaaaaatcgtgcataatgaaaaccagagtaaaggcatccattaccagaaatcaaagcgtctgcctgaaattaaccattcgcaccttgaactgatggcctcattgctggatgaaggaaagaaattaaatattttcaaaccggatattgacccgttgcaggtgaatattaatattgctgcgcttggtgggtattatttaattaatcaacacacgctgggactggtttatcacatcagtatggtatcgccacaggcattagaagccagacgccaggtcatcaaagagacgatcctgagctggctactaattgataagacttcgatttaa

SEQ ID NO: 112151 - DNA, 1809 bp, Enterobacter aerogenes
atgagcgtgaatgtaaaagccgccaccctaaccaaccttgttaaatataaaacagacagggcgtcattgcttagagtacgtgatgatatgaaaaaattacaaaaggatttcagcaaaacagagggaactatagccaaggcaaaaatgcaggctgataaacaggcgtacactgcacaaatgcagcagcaggaacaggttcaacaacagcagaaacaagctgcaaaacaacaagcagtagatgcaaaggctaaggctaatgaacagaagaaactggcagcagcgcaagctcgtgccttaaaaattcaacaacagcagcaagccaaaacagccaaaatcagcgagaatgcacgattggcagagcgcaaggcgctgtttgatattggcagattgcagggtctgaatggtgcggaacgtttccaggccatcaaacatgctcaggggttaattgattcctataaaaatcaaactcttactttgagaggcctcaatcaacagttatctcaatacctgactacccaacgtgcaatatcccgtaatagcgcaaaacgagcgaagcagtcaggtaagggaaaaaaatctggctcatctggctggctgagtcgtcaggcaagcgcatttatccccggtgagatactcgggccagtagctggcgcttatgccgcccaacaggcctatcaaatcatctctggaacattggcgggagcgattgaacggaaccagggcaggaaaatgatccagagctttggtggaaatgaccttgagtatatgagtttgcgccgtgcctctctcgctactacaggttttgacatctcccgtgaaaaatatgctgatatcagcaaagattggttagataaacagggtgatttatcttttggtaacacggataaaaatggcaactttaccggaggtggggaactatcagacctcgttaacgtaatgcgtcaacgtctgggatataccaatcaaggggcagtcgccaaattaaactcatttaaaacgccagttgagtttgctgtatttatgcgcggtctcagagatgcaggtaaagtgactcaacaagaatttgttaaccttggtgagcgaattaatgatatgagttatgtattgaactctgtttcaagtggcggtgaaaatcttctcaagattcaaaatgaattggttgattctcatttagcactaacgactgctcaacagaaatccattaataatctgacagagatgtcagcagtgtttaatcaggctaaagaatcgttaggggatcagtttgcggcatcttttagtaaaggtttagaggatttaggaattaatacacaaaatctatcttctgaaatgggttcactggttccgttggttaaagatttaggaacggggacggctcaaacagttaagggatttaaagatttgctcgatgtattgtccattatcacagaatggaaaaatagacttctcggaactgataaaccagaggaacagaatattttccagcaaggcgcaacatttgttggagaagcactgttgccaccgggcattcttgatatggcaagtcggattaaaaatatagttagtcctggttccgattcttcagttgcatcacaggtgcaaggtggtggttggtataatcaaattatgccagcaacgccatctatgcagtaccaaccaatcatcccggatttaaaggctgattttaatctgacagtaaatccatctcctgaatttggaatgatggtcgaggcagtcgctgataagcggatagagtgggcattcgatgaccagaatttccaaattaaccaaagtatattaggtcaataa

SEQ ID NO: 112152 - DNA, 129 bp, Enterobacter aerogenes
atgaggattcccgaaagtaagcgaaatgccaataacgcctatgtctctgtaaacaatctcctaggtatagcatcctttgattattgcctacatatttatattaccattaaaacgttattttgtcaataa

SEQ ID NO: 112153 - DNA, 285 bp, Enterobacter aerogenes
atgtttaaacggaagaaaacctcggagtatccaacaatcacctctggaagatatcatacacaggacgggaatatttatatccaacgtgatgatggtatctggcgtcagaatgtaaattatcttgcagctattcctaatcagtacggatgcaccaccttcgaggaacaatttgagaagattataggtcacatcgaaaacggtgaattacgtggtacatacgcctctacgctgcattataaaatggtagatggtaaactctatagatttaatgagaaaacgtcttag

SEQ ID NO: 112154 - DNA, 135 bp, Enterobacter aerogenes
atgagccgaggaaaaccaactaaaacagaacgtattaacctggtagtatcaccctatgtattacaatggttaaaggacaatgggggaattagtaaggtaattgataaactaattcaggaggcgatgaaaagatga

SEQ ID NO: 112155 - DNA, 339 bp, Enterobacter aerogenes
atgaaaagaatacttattcttgctctactattcagtactgagtcatttgcacatatcgttacggatcgtgaagcatgggataactggtctggtggttctctacatacatcaactaccctatatgaatgtggtagttatgtgattgaggatgacaatagccagattatcaaagttaatggatatccacatgaactaactaaatcggtactcaaggccgatgggctgtacaatacatatgataatggccttacattagctattctttcaaagaagggaatagtacagctatacaaggatggaaaacttatagttaataattgtagttttacttctaaataa

SEQ ID NO: 112156 - DNA, 1950 bp, Enterobacter aerogenes
atgctccgtcctatatgttatgagcgagtatctagcattcagcaaatcgaaggaggaggcggtctggatgaccaacgttcagttctggaagcttatttagatagaaatgctgcattatttaataatgacagggtatttattcgggatctgggggttagtgcattcagaaattccaatatatcaccagagtcacaacttgggatatttttgcaggatgtgcaaaatcgcaagtatggagaaggtgatgcactcatagttatgtcactcgaccgtattagccgccgttccagttgggcagaggatactatcaggttcatcgtgaacagtggcgtcgaggttcatgatatttctgccagtactgtgttacgaaaagatgatccacactcgaaacttatcatggaactgatacagatgcgttcacacaatgaatcgttgatgaagtcagtacgtgcaaaggctgcgtgggatagaaagatcaaagaagccatcaaagaaggtaaggttatatcaaatagaatgcctgtatggctagtcaatgagggaggtaagtacgcgatcaatgaagagaaggtagagttgattcgttcatgttttaagatgtacgccgctggcatgagcactggtgagattgtgaagcattataaacagaagggtgttttgcttcagatggtgactgtttcaaactgggttcgtgatcgtcgcttgttgggtgagcacaaacgttataacgatgaggtatatcgtggcgtatatccagttgtgattgatgatgagctattccttacagctaatcgtatgatggatcgcgttggtcttgagaagaagaaaccacgtgaagacttactattagaccatgcagttgtgaagaagattttccgactatttgaagatggtgttggcactggttcaatagttaaacagttagaagcaggttggagtaccgtaaatgtcttaagagtcttgagggataagaaggttgttaagatgaaaattatcgacaacttaacatttgaacgagtaaaccagaagttatcattgaatggtgtagctaatcgcatcagaaaagatttatctattgctcaagatgattacataacaaacttgtttcctaagattctcaagtgcggttgctgcggtgggaatattgctattcactataatcatgtaagaacaaaatatgttatctgtcgtacacgtgaagagaagaaagcttgtgatgctaaatcaattcaatatatcaggattgaaaagaatattctggaaacagtgaagaatgtcaattttgaacaattgatgaaaaaagaagaaaccaatagttctccagtagatacattacgtgaggaactatcttcattacgcgaggaagaaaaagcatttattgcacgtattgaagagcgtaaaaagaagggactactgacaggtataatgcttagtgatggcttaacagaggttcaggatagaatagttcaggtagaggatgaactaatagaattacaggatatccgagagataccaaaactcgatttcaatattgatgaggtattagatcctatgaacgtagagttacgagctaggattcgtaaggaactacgattagtgcttaaggcgataagatatagagttattgctaatgctatctttgtgcacttggattattttaatgactaccttacacatgttttagtgattaataataaacgtggtggtggtgagatgctgactgaattcataattgagcatcgtaatgatgtaagaatttataagagtgactccttcagcttaacatacacagaaggagataaactaccagcgtttagcacgctagatagtaaacctattaattttattgaatatatattgttacgtgattatatacgtgaattagagggtgaggagtcagtgacagctatttggatggaccgtaatgagaaatttatattccagtcttag

SEQ ID NO: 112157 - DNA, 747 bp, Enterobacter aerogenes
atgattaagctggaaagaaattttacacctctattcttttctcctcagaatgttagtcgtttaactgaaaaatttaagagcaacggtactcatgtatggcatcacgatgatgtaaaaaattcgttgatggagttaagtgataaaaaatgtgcatactgtgaggttaagcttggtgaaaaaagcacatatcatgaggtggagcattttaaagataagaatgattaccctgatgatgtaatagagtggaataacctattaccttcatgtcgtcattgtaatggttctaaagggacacatgatgttgtccaagaaccaatagttaatccttttgaggaactcccggcagagtttttttatattaaaaatttcagaatgaaaggaagaaatgagaaaggtattctgactatagatgttttaaatcttaacgatagagagcatttggttaagccaagatgtgaaactggagctataattgcggaaaaaatagaagattctttaactttatttgagatatatctttcaaatccaacaggcaaaaataaaagaaagttaatcggtactgttagagggatacttaaagaatgtcaaagaagtgccatattttccgcagtatctgctactatattacatacgagtgaggattatctgactttacggggtaatatgatggcccataagttatgggatgaagatatggagaaccttcacataatgtcaaacaatatacaattaccaacaacagcttaa

SEQ ID NO: 112158 - DNA, 873 bp, Enterobacter aerogenes
gtgatttatttgaacatttctagaatgtttaaatatgtatctttatctaatatttctaaagatgaggaaagacaagatcatagcataaatacccttttgactgatggaatttcggttgcggatatgaaaaattggttcgcaaaacgttgtctgttcgttaatacaccagaagcattaagtgaaaataataaagttaatttggagttggcaaaaaaatgtttttcactgcttaatactgaatataaattttctcgcgtagatgcgaaaagatttgatgttttcgtatctactccaaatggagaaatttggtatgaatatttatcatcagggtttaaatcatgtctgagtattttattcggcataataaaagagattgaactaagaatgcctgatgaagattgtttagcacagcattttgatggcattgtattgattgatgaactggaaatgcatcttcaccctgaatggcagtccaaaattgtttctgttctgcgagacacatttcctgcaacacaatttatagttactactcatagtcctcacattatacaaaatgcggaacctaatcagataattgcattagggacagatagtaatggatatacatacgtcagagaacttccgagtaatgagtttggttatacaggatggacagtagatgaggtactcaaagatgtaatggggatggaggacacaagaagtaagaaattacaaaatatgcttgctgcatttgatcaagctattgatgaggagaataaaattgaagcagagcgcatttataaagaattagatagggcacttcatccagcaaatgtgcttagaaaaatgcttagtattgatctttcctcagtaatcgaggagggcaataaatga

SEQ ID NO: 112159 - DNA, 3276 bp, Enterobacter aerogenes
atgttagcgatcattcctacaccacttaatgttggtgattttggtgtgggtagtaatggcaatgatataccacaatatcaaccgagcacccccgatggtaactcattctataaagttccggcaggaaagaccgattctcccgataccagtactgattatattggtattgcaaccgtcgataatggaaacattaataagttggtaatgtccgaaactggcgaattgaaggtatttgtacaggcgggagaaggtaccgactggaaacagttattcaccgacgatcaggcaaataataaattcgtacccgtaacacgtaaaattagtggtcatgatctaactactgatatcaatcttaccaataaagatgttggattggataaggtaactaatgatgcacaattaaagatttcctcaaaccttgcagacctaaccgatccacaggccgcacgtaagaatttacaattaggttcgatggcagtgcaacaggccacaagtgtagccattactggtggtactgcaactctcgatactctaaccgtaagtggtaagtcatcattgaatggtggttatatcggtaccgaatatgccattgtattggataacacaactagcgatctgaatactctactattcaataaaaaaggtggtggagaacgacaactatatatctgcaataccgatggtgcaggtaccaatattaccaataaacctaccaatgttaagggatcatttaatctcgtagtagagcgtgtacgttatgcaagcgatacggacaatctaaccaagcaaactctatcaagtcagaatggcgaacgtgtatggtaccgttttggtggtaataagagtggtgcaaccatcccaacatggaatgactggaaactcattactgtaagtgatgatctcggtactatggcagaacagaatgccgatgcagtcaatattactggtggtacaatcgtagttgataagactactaccaatacacttggtgttagtaacgccgcaaccattgcaaatctaaccgcacgtggtaataccatgaatgtacagccagatacgggcggtacaacggttggagtacagatcggctcgacaacacaattagtacaatcatatattgatttcaataccagcggcctaaatgtgaattatgactctcgcattattgcaagtggtggtactgcgacggatggtaatggaattctatccctaatcggtcgtgaaattagattaaatggagatgtaatcctaagtaccccccttggtattaatagtggcgaccttggtgtatattcgacaagtcaaaccgataataaagttagagatattgccatcccgtcaacaactggtggcgataactactatctagtggcaacactgaaggattcgcaaagcggaagcggttttgtacaattccgtgtcaatggtgccaataactatggtgcaccagtaagtacatgggattatgtaagcctatcggcacgtggaattgcaaatggattgaatactaccaatggcgatagtttctttacgcacatgcaaatgatgcgagataagagcagtgcaccattagaacttggttatgcaattcaggccgataagagcgtaaacatttatctacgtagtcaatcgtattggcaaggaacgcgaattcaggttgatgcaattgccaatggcggtactttcattctgggagtattggcaacatatgatggtagttcacaggaatgggttaagacagtaccgacaggatatacaccaatcgttcccaagaatatgattaccgaacgtgatagtcctgcattcatgaataaagataataatttcagtactaaacaatctttcaatgccgatattgttattaatcccggaagtgatgccaattctattctaactcttggacaatctaccatacgcgataatggtacaaaggcattaattattagttccaatagtggtactactacgggtagtcagggaattttcttccgtccaaatggagatacagattcaagtattcaatataatgtaaactcacaaggacattactttgtcggggcaacaaactttaatggattggtaagccttggtagtttaaatagttccggtactgcaacattcaatatgtatagtggtaagagaattgccattgatctaacaaatactactcgcgatctcaacaccttaatattttccggtactgattcaggtaacgaaaatctattcgtatgtcgaaatagtggaggtagtgcaaatattacaaatatgccacctggtgtagatggtaactttacactacgtgtcgaatccatgcgacagaatattgcaaccgatgcaaccagtaagcaaacccttgcatgtagtacaaccaataaaacatatgttcgttatggtagaattactaccagtggtaatgtatggtctgtatgggcggaattattggattccgaaagtgattatactctaaatggggttataacatttggtggtgctaccaatttcgataatactgcaacattcaaacaaaatataactaccaatggtattatcaatgcagcgggtggtatcaattctaccaaatatgcaacatttagtggttcgacaaccgtattcaatagtaccgcacagtttggagggggtattaactgctattcatcgttcaactgtaccgaacctggaacatttgcaagaatattatatgtaaaaaatactataaccaatccacagcaatataataatggtggaacataccaactaaaaatggaaggtcgtggtggttgggcaggtggtgatgcaagcggtgcatactgtaatctatttttggaagaaaataccggtactgagcattatctcgcaattagacttaatggattcggtagtgatagacaatggagattccgtagtggtggtcaaactacatctccattgggagacttacaagtagcaggttcagatcgtcgattgaaggaagatattgtaccgattagtactgatgatgctgtaaatgcacttgaccgaatcaaccaagttaagattagtgaattcaaattcaagagtattgaccgtgtgcaacgtggttggattgcacaggatcttgatgcaattccgggtgccaaatatgcatatcttggtggcactaccaccgatgatataggtaccgaattccaagtaatgaacgtagatagtaatgcaataattgccgacttaatattggtagtacagaaactatctcaggaaataaatgaattaaagagtaaatataatgaaggggaataa

SEQ ID NO: 112160 - DNA, 240 bp, Enterobacter aerogenes
atgaaaaacagtaatcagataagtgctacgaaaaatgaatatattgcgaaacgatttattcgtgttcctgatgttttaaatcgagtgggattcagtcgcactaccctatatgaacgtattaaggaaggaaactttccagacagagtaaaaataggaccaaggtgtgtcgcttttgtggaaagtgagatagatgaatggattgaagctactattcggaactcacgccagaacgtagcataa

SEQ ID NO: 112161 - DNA, 492 bp, Enterobacter aerogenes
atgttagtttctgagataactttggcaaccagactgggtattaatattgaagaatctccagactggcaccaagtaattgggcaccttgaagaatataaatacagtggcatattctctgattattataaaagatggtggtgggcagatgtagagttgtggataaataaaaatcttaactgcccaataattaaaggattaacctcagaaaaaagagtagagatcatcaaagaaaagcttggtttagaacaattgatgccaattcatagcatacatccaagccaaagcaccaagttttgggttaattgtattatcagtaaagagcctcttgatacaatagatgctcttcgtgcatcatctatggaattaaaaccttgggaagatgataaatacctttcaattaaaacagtgttagagagacgggccgaaaaatataaagtacatccagaagacagaacaaaattggatcgaattcgggcgaggtttaaattataa

SEQ ID NO: 112162 - DNA, 744 bp, Enterobacter aerogenes
atgaacaataatacaactttgttagacgatatgtgtaggctcagggacttcttatatgatagccgcatatgcccagatattaatcctctcaaccgtttaattagtaaacttaatgcaaatctccactccgaaacaggggaggactttgaatactctttagacgatttagtattttatcttagcgaaaaatgtggaacaatttgtccgacacaaattacacccaaagaaaatcctattgaaatacatttggaacttatattaaaaagtgaaggaccttatgaattttcgaagattaaagaactttcagggcaattacgacttaaagctgagtggatcaatgacagaacagaagaaattgagataaaaacatcacatagtgcttggcattttgattatcatgttcctcaaatgggggatggcgtaaattcatttactcatcctcaatttcatttacaaaatggaggaaataggctgactgataatttaaatgactatggcgagttaatgattcttgatgctccaagattacctttacctcctatggatgtgatattagccattgactttattatttcaaatttctttggttctatttggcaacaagcattatgtgattctgaatacattgatgtagttaaaagagcacaaaaagcatggtggaaaccttattatgaaggtataagtcaacactggtctggcaatggttcaggaatatccaatatcctaatcccaaaccttctgtag

SEQ ID NO: 112163 - DNA, 414 bp, Enterobacter aerogenes
atgaatgctggaaatcatacttttaataacatcaaaccattcagaatctgtaactgtgaaaatttcgttcctgctaaattaccctcccaacagacacgttctcattgtattagtatcagattaaatgatgccgagttatcttacgtagacggtttacgagaggatctcaatcgtgctgtttggatacgtatgttagcattgaagcatctccctcccaaaattcctgaaataaatctaactgtctggaaagtccttgccaaagcatctcaggatctgaacaaccttgttcagcatctcaacactaaatcacatgatagtccttttaccatcaccgaaatttatacggtgcaaaaaagaataaaaatactgagagatgcccttgtgtcagcaactccctctgtcagagataaataa

SEQ ID NO: 112164 - DNA, 171 bp, Enterobacter aerogenes
atgaaagggatgcaaaaaatccgcaggggaaagagttttgctggtgttgtccactatgtgttaagacacggttctcatcacaaaaatgaacctaccgtgatcggtggaaatatagcgattgttggcaataccactcaaaatctgatagctgaatttaatactactaagtga

SEQ ID NO: 112165 - DNA, 639 bp, Enterobacter aerogenes
atggtcgtcgcagaatttgtcgagtgcgcttttacggttaaatttctgggtcagccgcgagaagggccagacggtggccatactttgccgatatctggtcagctcactgtcttctatcctttcctttttcaccgcataacaaatgctgctgtaagttttaagcagcgcctggttgatacggtcctcaccgccgttggcaaacagctcgccgtccagcgaatattcgttctcgccaatctccggaaagcgcgccccacagccgggaaagtagtaacaaaagtagccgtcgttttccgcagcttcatcttgaactttccagtttgccgcatggtagaggcggccgatattggtcagcggcgggtttcgcgagccatacacttcatcaccatcttcttcattacagcaggtaccgtcaaagaacaggctgatatgcaggctggccgggcagcccggttccgtttttttatccgattgatgatcggactctttgacatacccctccaggtattgcctggcatagttgccttcggtctgcattctgctcgccggcaggcggccgcgctcgttgtattcggctttctgctgcgcggatttatccgcgggctttttgtcatccggcccgggaaactttggcggtaa

SEQ ID NO: 112166 - DNA, 573 bp, Enterobacter aerogenes
atgataaagcatatccgtattttgcccggcgggctggcggtgctggccgccgcttttctctgcctgctgacggcctgccgcgaccacagtcgtgacggcatgagcggcgccgatttaaacctctacaatcacggtccggatgccatcgtttcggtgcaggtgaatggctatggcgggccgggcgctaactcctacggcggcggcggcggcttctgctgtgtgatggtgcctgatgtctggcgcccggggctgacggcaaaaattacctggacctccgatcccaattactggatgaaatccagtgagatgccggatgattatgaaactcactatcagcgccatgggccgattattgtacctattgaacgttgggaaaagggacaggcttgcggctttgacgtgcatattttcccctgcgataaggtgcggatagtgcgttcctgcatcccgccgggacagccgggatatccggtaccccagtcgccgccagactggaaggaaagagccaaaaatatactttataaacatatcaaggaggagatcgtatgtccgataacgcagactccacgctga

SEQ ID NO: 112167 - DNA, 156 bp, Enterobacter aerogenes
atgagctataaggaaagcaacagcatccgtgctgcttatacccacaaagccaagcatcttgagcagcgccgcctgatgctgcagtggtgggctgattatctggatgcgaacagcaacggtatggtcaggccgtttgagtttgctcagaaacaataa

SEQ ID NO: 112168 - DNA, 423 bp, Enterobacter aerogenes
atggtagacccatcctctttagctgcaatctctggtacgcttgaccttgtcaacaaatcagttgaattagttaaaaaccttcgcaaaaaaggcgatgaggaactaacagccgctgagatgcgtaacacgttgattgatttgctagatgatctggttgaagttaaaagcgaatttgtgacgttaaaggcagttttacttagtaaagaagaagagattcaggagcttaaggcaaagctacaaggtaaggaatcacttaaatttgatggacttctttactggaaagaaaacgaccctacagcattctgcccggtatgttatgagaaaaataattcttatattcatatgattcataagaagtcaggtccacaaagccgcgagtattggacttgccgtgtgtgtagcaatatgttttttattaattaa

SEQ ID NO: 112169 - DNA, 477 bp, Enterobacter aerogenes
atgaaaccaataattgaacgcaaaggaattcagtttgcaatacattatgaaggttatgaactttttacgaagccgattcatgtttcagagctatattctgtctttatcaatctctttacgaatgcatacaaagcaatacttcgttctggaacaaatccacgaaaaatgtctttaactgcaaaaaaagatagtgaagatataattatccgattcgaagatagcggtgatggaattgaacctgcaaatagagaaagagtttttgagcctttctatactacaagtacaccatcaggaccttatgaaagtgatgatttatcattaaaaggaatgggattggggttatcaatcgtacgtgatctcgttgaatccatgtctgcagaaatatctatagttgatccatccgatggttttacaacgtgctttgagttgagaattccaaaagctaatgataaggaaataccagatgacatctattaa

SEQ ID NO: 112170 - DNA, 480 bp, Enterobacter aerogenes
atgagaaaagtaaaaatagacaacagtgatttaatccattatttagagacagtcaaagaactaaaaaatcatattacgattgaagaatacagaaatgaatatcgtagactacgctctgatgatattccgtggaataaagttcagaaatttaagtctgaacatactgaacttcgcagactggataaaaagagaaaatcctttattgagtgttttattgatgaattaaatcctatcagtagttcaaaagctaacacatcagcaaaatcatcaggtaattttgatctatttaacgaacgagcattatatcgtaaagcactttcagaaaaaagtgatgatgaaatatttgccttagtcataaaacagcgtacaggagccgctctggagtttcagcgttccatagaacaaagtcttgagcaactctctcacatctcgtcagagttcgaaccatcaagccagaagcgcaagaaaatgtctctttaa

SEQ ID NO: 112171 - DNA, 351 bp, Enterobacter aerogenes
atgagctttgaagctaaaagggaacatgccattgccattatggaaaacaagaagatgtggcgtagtaactatgcgcctcctttgctacgcctcgcatggaaagctggcctcaagattccaccgttaccttttgcctcgttctggcaaattaccctgttgatgggaggatggtttggtccggtgtgggggatctgtatgtggttttttacttggaaggacacagggatgcaaccgggcacagcatttgtctcaagcatagtcgcaggtatttgctttggtattcttatggctgcgtatcattggtggcgaaaggaagctaacgatctacctgagtgggacagtcttggatga

SEQ ID NO: 112172 - DNA, 516 bp, Enterobacter aerogenes
atggcgattaacaaagtcaaatcaccaacggtttttatgctccatgggtttcttggtagtgggaaaacgacttttgccagacatctggaacacaaatataccgctttacgttttactcatgatgaatggatgcagcagctgtatggcatcgatcccccgcaggctaattttgctgattacgcacaacgggtgttcaacgttatggagcccctatggacgcgatgcgttgagcttaacaataatgtcattctagatttcggattctggtcgagagaggaaagagtccgggtgcgtgaaatcatcacagctcataatggtcaggcagtcctttgccgtctgtcctgcccggatgacattgcatgggaacgtattcaaaaaagaaataaaacgccgacaaatagtctctatatagcgagggagacatttgatttacttcacgaacgatttgagcctctgacgcctgatgaagactttaccgaggtcagtgataatggctcatgtcgatatatgcaataa

SEQ ID NO: 112173 - DNA, 186 bp, Enterobacter aerogenes
atgcatataaaagaccttttacttctggcactctgtctggccttgcttttttttatagtgaaaggcatcgatgcgtttgaacttcgccttccactctggttactgcgagtaatctatgctgcaggcatttttcttggcgcatcaacgatcctggcaagtatgtggttattgcatatatcgacatga

SEQ ID NO: 112174 - DNA, 582 bp, Enterobacter aerogenes
atggatgagtttatgactcaaaaagatgaagttatgagagctagtttactctcttataaaaactgtaagctatttcaaactaagagtgatgtgttcggaatatctgaattcataatttattccgatagtagattcacaaatgaagctaaaggggattttgtttattccttcctaaatatgctccctttagaagatgttggtgtaaaaccgaccttaacggtgagagtcttgtctgctttagacccggcaaggttgtcttttatggatgaaaagccacatacggatgactttcatggcggttggcttagtgatgaaattgcagctttggttagcttgaaattaggcgtaagagcacacgcaggctcaactgttagagaatatagtagttatacacctgaatatggccacccgagagcagagcaaaaccctccaccacctttaatgttaaaaggatcatttgtagttccttcagcaaaaaaacatattgaaatttcacagttgaaattattaaacgatatttacaagctctcagaaaataatggtttcagcattagaagtggctgctggaaactgggactctaa

SEQ ID NO: 112175 - DNA, 1857 bp, Enterobacter aerogenes; identical to SEQ ID NO: 82672

SEQ ID NO: 112176 - DNA, 2559 bp, Enterobacter aerogenes
atgaacaggttattggttataaaggaagaaaatcatacagttaaccctgatatggggcttgtgattcctgttgcttatcttgatgaaaatggaaattatgaaaaaattgatcctagcgattttcctaatggaggaatatttatttccaaaggatttttgaatataagccagcagtttggatatgatgaattatttattcttaatgaatattacgaaagcaatgatgatgactggaaaattaatacaagacatcaaaagcattttggacttggaagtaaagtagaaaggctcgataaaagctactttattccaattataaaatctgctctccccgatataaaaacaggtttccttggtcatgatattgacgcccctagcgctcaattctttattgagaatgagggctatgtatatggaccgtttaaagcctccaaacaagataacaattggcaattatctcctttatctacaccgtcacccttacagcttaaacaagaccatatagcaaggtttgatttaaaggaaattatagctaatgatttttcttatgagttaattattaaaggtgaagttagaaaatatattaaaaatttgaaagacctctccagtttattgtttgagcaaaaagattacatttcagatacaaggcttgtttcttacttcaccaaaaatggatttggaaatggattttcgaaaaataaatctcctttaggaaaaagtgaagcgcaaaagttgtcgcaagggattgatgagtatgttaagaagaataaagtattagagaatagcgagcgtcttaaaagacttaaggagctacttggagaatttttagattcaagtccattcggccaagagattgttcaagagtttttagcagaaagtagggatggcaggctttatttagatgattatttcagcaaaaataaagacctgctggttaagcaaaagtctaaagaactagaggaagttactcgagtacagaagagtaaattaaataaagagataagtgatttagaaaggctaataacaaataaaaaagcagaattagattctgaattaaaaaatgttgaatatgaaaaggtcagggctagagaagaacttgagagaataaaaaaacagtctgctgaagatgctcatgaccttctccttcaaaaacagcaggctttgacggaaaaaaatgctgagttagaagaaaacattaaaaatgcaagcattaagcttgaacaattctactcaatggagtctagggtaaatgattataattctctgaatgaagaaataaattatctgaaaaggcttaaagaggatattgaaaaagacaaagaatcagctgagaaagcacttaaacttaaaaaagcaactttgaactctccacagcttctggaaaaaactgtagagatacaaacaatacaaaacctcaaaactctcttgaatggtggcagggcaagagaaagcacgccgaaaatatataaaacaaagataaatccatcaactatcgaactgaataaagaaaacagaaaagaatacattaattacttagttgattcatttagcaacgataatggaaggaatttttcatttgatgaaatggcgaatttaattatatgcttgaatcaatcattcatgacaattttatcaggccctccgggaacaggaaaaacctccacggctattagattagctcaaaatatgggcttgactaatggtgagaatacatacaatactagtaactttattaatattccagtcggaagagcttgggtatcaagccgagacatcttaggattttataattccttaaaagacgtttaccagccagcccgtacaggtctttatgagtttttgaagagtgatcataatccagattatttgaaaataattctacttgatgaggccaacctgtctagcgtcgaacactattggtcagactttctaggtatgtgtgatcccgaaggaagaaatagaaaaattgattctggcattccatctgaagacgaaagatatattaccgtggctgatggtgtgcgttttatagcaactattaacaatgatgcgtcaactgaacgtttatcgccaaggttaatcgaccgggtacccgtaataggtttaaatcacaacgcagaatttaaatcgaacgttataagatctttagcatttgaaggcgctgtgaaaaacgaatggttggaaagttgttttgatgtgagcttatatgagtcttcttttacgacggaagaggagaacttacttgatgaaataatagaaatattaaaagctcctcttaccagaactacttctgttagagtcagtcaaagaaaatataatgcaatgaagaggtattgctatattgctaatgaaatcgaagggttacaagttcagcctctagattttgcaataaatcagcacgttttgccattgattgaggggtacggtgcaggtttcaaagaaagattgcacaatcttgagcaaaagcttgtggagtttgatcttcatatttctaaagcaacacttagaaatataataaataatggtgatatttatagcgaatcttactcttatttttag

SEQ ID NO: 112177 - DNA, 303 bp, Enterobacter aerogenes; identical to SEQ ID NO: 82781

SEQ ID NO: 112178 - DNA, 294 bp, Enterobacter aerogenes
gtggcgcacgtcttcggtgaacgcactctggccacactggagcgtcttctgagcctgctgtcggcctttgaggtcgtggtatggatgacggatggctggccgctgtatgaatcccgcctgaagggaaagctgcacgttatcagcaagcgttacactcagcgcattgagcgacataacctgaatctgagacaacatctggcaaggctgggacggaagtcactgtcgttctcaaaatcggtggagctgcatggcaaggtcatcgggcattatctgaacataaaacactatcagtaa

SEQ ID NO: 112179 - DNA, 327 bp, Enterobacter aerogenes; identical to SEQ ID NO: 22905

SEQ ID NO: 112180 - DNA, 315 bp, Enterobacter aerogenes
atgaagaagaccgtaactacggcagtgctgctttgtgcgttcgctgccggaactgcgcatgctgaggaaaaagccgacccgaacgatccatgtgcaatggtgttatgcctggccggaaaacttgacggcagcagtccggcggagtgtgacccgatgtataaaagttttatgtcaatcaggaaaaagaataaacatggttttttacccaatcacacggcagatgccagaaagaaaaaactaaatgaatgtcctgcggctgatgcaggtacagtaaataaaattatttcaagctttgggcggctgaaaaatttttaa

SEQ ID NO: 112181 - DNA, 393 bp, Enterobacter aerogenes
atgaaaaaaatgttaatggtcagtgtcctttttctctctgcctgttcctctccgccggaaccgccacaggttgactggaaacagaatcccgaaacggtaaatacacaattaatggactggcagccgacatattcagtcattaaatcagacaagattaattcatcatgggttaaagttattcatgatttcagacctgaaaaccgtctttatgatgatgctgttttttactccgttgcacattcggattcagtgattgttgaaaccagtaacggaacagacttttttacagctaaaaactggttgagggcgaacggtgcaaacggtgtcatacagtatcgctataaaatgaactgtctttcttgcaggactaccagtgtttatttatcccgataa

SEQ ID NO: 112182 - DNA, 207 bp, Enterobacter aerogenes; identical to SEQ ID NO: 111707

SEQ ID NO: 112183 - DNA, 549 bp, Enterobacter aerogenes
gtgaggagtcttaccgccattttaataattcctgctcttgtcacagcctgtagcatgcaggaaatagcagatacaaataagaaaatcagtgatggtgcttcaggtataatgaactctttgaggggaaactctaacccatcaactgatgttacaacaccaatgcatttacctcagtcattaaaaaaagaatccaagtctaaaaattatactgtagctgttgatgtagatactgctgctgccagaataaaaagacattacaagtttatgtcaagtcaggagctggatagtttacggagtagctctaatgacggggcatggaaagcggccgctgaagatgatgcacatccagtttgggaggcaatacctggtagctattataaaatgggatctgactggaatgataacgatcatttagatgtagaaattgaaaaaaacgggagtgggagtaaactctatataacatattcttcggcatctgcagaaaggctatcgggatctggcgtacagaagttgatgaaggaaattcattccgtggctataggtgagtga

SEQ ID NO: 112184 - DNA, 207 bp, Enterobacter aerogenes; identical to SEQ ID NO: 82771

SEQ ID NO: 112185 - DNA, 615 bp, Enterobacter aerogenes
gtgactttcattactcatccgtccattcagagtaatgcatttgcgacgtggttgactgagaagctatccgtaaacgtaactctgcataatatcaacaaaccgctaactcaacatctggcaaaagactctgtaatattgtttgatattgccgtctctaataagaaattgaatggcgtgtggcgagatattattcgcgtacaggcagataatccgcgtctgttgattatcaatagcgcgcaaaagtatgagctttacgaaatggcgcaatggcctgcgttatatggcgtattccgccatgacgatgaccaatcgcgcttaattgagggcgtcaaagccgtattaaatggcgagcagacggctgaattgagcgtgatgcacccggcgctgtattctgcggatcaggtcacggcgccgacggagaactcaccgttgaccgagcgtgaatgtgagatcctcaacgagctgcgctgcggcgcaacgaatatggatattgcccgcgcgctgttcatcagcgaaaacacggtacgtactcatctgtacaatgtgttccgcaaattgagcgtcaagaaccgtacccaggcggtaagctgggcgaatgaacatctgcgtcactga

SEQ ID NO: 112186 - DNA, 567 bp, Enterobacter aerogenes
atgcctgcatcacaacagaaattaatcaatgtggatattgaacgcgttagcgcggaggaggtccgtccgggagataatctggctattcacgcggcgatggccgtcgccaaacctggcgatgtgttagtgatagacggcaagggcgatctctcctgcgctttactgggtgagatcatggccacgcaggcgcaggccagcggcatcgcaggtatcatcattgacggcgcagttcgcgatgctgaaaccttaagtaaacaaagctttcctgttttcgcagccggtcttaatccgtgtggtcccaccaagttcattccaggccgggtcaatcatgctatttcggtcgcgggcgccgcggtgcaggcgggtgacctggtggtaggggatattgacggcgtggtggttatcccccgcgatgaagtaggcaccatcattgagctggcgaaaggtaaactggaaggggaagtcaaacgtctttcggctatccacgatggcgatcttcgcccacactggctggagaatgcgttgcgtcaggcgggtatgctgagcgaaggggaggcattgccatga

SEQ ID NO: 112187 - DNA, 474 bp, Enterobacter aerogenes
atggctaaaaaaactaaaaacctgttcacgctgatgcagccggtagttcgtaaagacagtgagatcggtcaggtggaaatcaccggcgatcagtcaggccggatcgttgcgcggcctgaatcttatccgcgttgccaatatggatgcagactcaattgccacgctgttgacgcgagtcaccgcgcctgcgctgacacaaaaagaaatcaacgagatgcacactctggactttatcgggctggcagagcttctggtccctttcttgaatccgccggagcctggagcgtcgagcgtggcggagacggggagcgagtaatcagcgtcgcgtttgaccagatagacgatctggttgctgatattgccgttatttttaactggccgccctctgaagttttcggcatggatcttggcgaggtgatagcctggcgcaagcgggcggcgcttcgaagtggtgccagtgatgaagagtcttga

SEQ ID NO: 112188 - DNA, 327 bp, Enterobacter aerogenes
gtggacggtcaggactatgggaaacaggtcaacttcgaggatggccgggactgtgggaaacaggtcaacttcgcggatggccgggactgtgggaaacaggtcaacttcgtggacggtcaggactatgggaaacaggtcaacttcgaggatggccgggactgtgggaaacaggtcaacttcgcggatggccgggactgtgggaaacaggtcaacttcgtggacggccgggactgtgggaaacaggtcaacttcgtggacggccagggctgcgtgaaacaccacatgtataggcacacacagatagcgtgttcagggcaacaaatgtga

SEQ ID NO: 112189 - DNA, 705 bp, Enterobacter aerogenes
atggctgactggtttattgcaactgaaggcgtgaaggtggtcaaggacagtgccagtctgtggccgcagatcatcacgggggttttgtccgccggtgctgcattcggtggtgtgtggtacgggcagtggcggataacacagcgagagaaggaagcagcagcagcgaagcttgccagcgaacgtctctttatcgctacggagctggtctttattcttgagcggtttgcacagcgctgcgttggctccgcccaggagtcagatggcccagaaaagtatgatcaagatggttatgtcaggattgaacaccctataccagaaattgattacacatctgttaccggggactggcgggctcttccttcggacctgatgtaccggctcagcgagttaccggttctaagacaggaagcggccagctccattgataccaccttctatgaaaatacgccttttgatggtactgccgggatttctgagctcaaccagcaggcctcccgcctggggctgaaggccattcgcttgtcccgttgtctgcgacatctctgtgaaatgccagaagatcgactctcggagcagccgaggtcagcgtggcgcgttctctggcgtgtacgggggcgttgtattcagaaactgatgcatagtcaccggaggagcaggaagttatatgcttcacttcagcaactgactgcagcgagagataactga

SEQ ID NO: 112190 - DNA, 309 bp, Enterobacter aerogenes
atggatgcagacaggattcagttcaagatcgaaacactgatacccgttctcaaatctttagggcatagcaggctttggtaccgagcgatcagctacggttccagatatgaagaactggagtttatcgtcaaccaggaaaatgaacgtcttgctcaatggagccctaagcgtcaagggtggattgtgaccgacaagattctttgcattcccttaaacggaagtctgacgcagactccgggtgtgccagtcgatgatgattgggtgttttacagaatgcacgatgaacctcttagcagaaagtcgctgtga

SEQ ID NO: 112191 - DNA, 621 bp, Enterobacter aerogenes
atgagacaggaaagagtattacgtataaaggcatttcgacgggcactggagcttggtggcggtgaacgggctgacgggtgtcgtcattttccccgctggaaaacggaactgaggaatttcccgcacggcagctgcgatttagccagcaatactctggcgtactacctcaaggaacgagagagatgccatccgtgcatcatttttatggaagggaacgctggctttcatgaagcggaaaactcaacagttcacgggcatgtcatcgtattgctggacggagagtacatcgatttgacgctggatcaattcgacgaatatccggactacattccttacgaacctgtcgaatctgacgggcagattggtaagctgttgcgtaatatcatgaagcatgaggacccggtaaaaacccgccagattgatctcgatggtggcgaagagctgtatgcctggttacgcgataccgccgacgaagtgctggcagcagatccggaatggcaggcccgggaacggtcgatagaagaagcaagggaagccgctattacggtgttcccgtttctgtctgacgtgcaaaaaactgagtgcgaacagggcccggacagtcaggaggctgccagatga

SEQ ID NO: 112192 - DNA, 789 bp, Enterobacter aerogenes
atgaagatttatcattacactgacctgaacggcctgaagggcatcatcgaatcaggctcactgtgggcgacgcacttttcctttctcaatgacagtaatgagctgactcacggcatgaactgccttgagaacgccctgcagtacctgagggacgactttaacccgaaaacccttaagttcatcgaacaggcactgacgcacttcagaatgcaccgggcagctcacgtctataacctttcgttctgtctcgaacccgacctgttaagccagtggcggggttatgggagctctcagggcgtgtgcctggaatttgatgatgaagagctacttgcctcgctggaattaactcattatcaggtgtttaaaaaccgtgtgctctataccaaagaggattccacggttgaagcccggaacgaaatcctcgccttctttcgtcagccacaggttcaggaggcaataaatgcagatgtaatgcatgagatgattcaggcaaccagactggcacacagcctgccgccttttttcaagaatgacggtttcaaagaggagcaggagttcaggatggtaatccttccggacagcccttttgagggtgtcaattttcgtgtcaatgacagcggtctggtaccatatctgatcattaaagcaaaagataagctgccactgacaaacgtcagaattggtccccgcagtaacagagcaatgatgatggacgggatttcattcctgttgcagagcagggggtataccagtacacggatttcgtttactgagacgccgttccggtaa

SEQ ID NO: 112193 - DNA, 741 bp, Enterobacter aerogenes
atgttgaataaagtttcacaaattaatttggccaaaatactggctgaaaaatttaacgaaggtgactggcaggagctgtttgctgttacagattgtgaagacgttccggaaggactaaatcaattctaccgacatgttcactgggacaaccctgagctgaaaggggtggccatctcagccatagaaagcactctggccagggacgctgataatctttctaagatctgggcgctggataatgttcaacgctttatcagcattgccaatactgagttattcaatgaaataaagaacattgtgaatcagaacgggcaaagaaatgtttcggcagcaccagtgaaaaatgtaaatgaaaacatttaccaggccttagaagatgcggaagtgttgcttaaaaataatgggccacaccgggcatatgatcgtgttcataccgctcttcatgcttcattaagacaaatgtgtgccaaccatggaattgcgaccaatagtacaaatgataatgttccaggcttgctttccctgataactgcacatctcaaagacctgcctgatgatggaagaaatgaagatgtttttaaaatgttgagatcatctgccgcaatacttcatgggatcaataacctgcgtaacaattacagcatggcccatcctactgaaactttgcttaatgaagccgatgcgcgttttgccataaatctggttcgttccattatgacttatattgatgaattgctttaa

SEQ ID NO: 112194 - DNA, 258 bp, Enterobacter aerogenes
atggaacctggacagaacacttcactcccctatgacatcctgacgggcgaatgtgaagccgcaatcagaaaacatctggccagaacggagatcctcgacagcacgggtctggaactcgaacaggcaaaggcctgtgccgtgctgtcactctggtgcggcctggccgttgcggcaaaggcccccccggagatcatcgatgcggacaggcagcgcctgatgctgatgattgaccaatatcagaccatgaggcagcaataa

SEQ ID NO: 112195 - DNA, 288 bp, Enterobacter aerogenes
gtggaatatacctctattactgatgtcagaaatcatatcgatcagatagacagtgagctggtcaaactcatagctcagcgtgctcaatgcgttaaagctgcagcggcgtttaaaactgatcaggcatccgtgcgtgcacctgacagagtacaacaggtcatcgaccgggttcgtgaaagggcgtcgaatgaaggccttccggaagtcatcattgaaaaagtgtatcgcagcatgattagtgcatttatcgagtacgagctggagcaacatagccgattagtgaaatga

SEQ ID NO: 112196 - DNA, 756 bp, Enterobacter aerogenes
atggacaaagggcagcgagatcggtggcggatgttctatctcagcgagcagaagctgttcagtcagctcaatgaacagtgtaagtgcctctattcatccggtgacgacgaattgaaatacagcgagtttatgaaccagaacggtacagtactcaacaaaccgccacgctttgttcactggatcggccacttaaagggcgaccatactgaaataaaggacctggcggggctggtacgcaatgattatgtccgggcagtggggcagaagaacttcacgaaattcccgtcgcgcttcccggtgttctaccataacgttgaacaaatcaacgtcacgcaacaccgcgcgttttcatctgtacggattgaaggggagtttgtggccgttaagacctatacggacgtgaaggacattcctacggatctggagaagcttcggacggcggggtttaccccggaagtcctcgatgatgtgctatttaaatccctggttattccggttactgaacttcatgaactggcaggagttgaccggatacaggcgcggcggcagaccggcatccagtaccgcgcgacggtacgccatgtcggggaatcgcgcggcagacggaccatgctcggcctgatggtgatcgaccaggacagcgatccggcagtggtctttccggcgccagaagcgccccggcctcactcacttgccgccgctggccgtgaaattgtgctgcctgtagagacgccattccatttctttataaaatag

SEQ ID NO: 112197 - DNA, 561 bp, Enterobacter aerogenes
atggaaaaagaaatattaacggcattaatttctgccggggcatcttttgttggagttggcattggttggattgtcgcttataaaacagtaaaagcacaagttaaccaatctgttaagaatcttgcagcttcacatcgagcggagataatcagaagacaacttgattctttagagacactatggggaatatttgatgccacatctcgtaccggtggtcaaggtagaataatccaacatagggaagggaatatctatttatctataccaaatacaaaaaaatttattaacctcattgaaaaaacctttaatggtaaaagtgggttatatttttcagaaatatgcaggagaaaattgttcgatttccggaactatttgctctcatttaccaatacagcttcttatggagtgcctcttattactttaagctcgcaccagctcgacgaattctataataagagaaaagatctacgacttcaaataagaacagaaatgggaagtttagatctacaaatggcaaaggatgaattagataaactatccaaagaaaatttaaacaagtaa

SEQ ID NO: 112198 - DNA, 1005 bp, Enterobacter aerogenes
atggccgatcccctgaacttacagaccgacgtcgtccggcagcacacggtgccacgttttttactgaagcacttcagtgcgccgggaaaaagtaagcgccggcggttgcacgcctttgacaaggcccgcgggtgcagttacgccaccacgcccgacgacgccagcgtgcgcaacaccttttacaatcttgacgatcaccccgatcgcttgagcctggagccactgctagggatttacgaacaccatgccgcgccggtgatcgccgcactgctgcagcacagggatatccgccggctgaccgaggaggagcggtacaaactggccgtgtttgtggccgtgcagcgtgcgcgtacctttggcgagcagcagcgtatagccggaatggtctctgtgcttgcggataaattggctggtatcggcgcgacagctgaccaggtgaccgatgtcctgggtatatcgccagatcgcgatatccggcacgtttttctgcgtttactggccgatcaggcgcctcatattgaccattacctgaataaagactggtatctctttgagaccacggccgatcatccgttctacgtgtctgataacccggtggtcctgcagaacagtaatgacttcgggccatacggcaacctcggactggcggttcgcggtatagaaatttatctgccgctgtcgtccacgctgatgctcgccctgtactgcccttccatacgggaaggaatgcttcagcaacggcaggacattgaatttttactggcatgcgcgccgcattgcataccggcacatatgcgcccgtttgagatgcttgagcatatccggcgttatactgactatctgtcttttccgctgagccaggagaatgtcactcgttacaattcgctgcaggttcagttttctgagcagtatgttttctgtgaaaggaatgactttactctggttgagaaaatgctggcagatgacgagcgataccggaccggcccacgttttaaggctggctga

SEQ ID NO: 112199 - DNA, 663 bp, Enterobacter aerogenes
atgaaaattgcacttctggccgccactgggcgcgctggtagcacggtacttgctgaactgatcagcagaggacatgacgttatcgctgttgcccgcaatccggacaaactgcctggtaatctgccttccagcgtcaccgcggtaaaggatgaccttagcgacgctacacgactcgctgagattattgcgggcgcagatgctgttgtcagcgcctttgggccatcaagcaatgacccgcgctatacatccgatcaggactataccgatcaacttgtgggtgtcacagagcgggcgattgccgccgtgaagaaggcgggagtacccaggttgctcgttgttggtggggcaggttctctctggttttcgccaggtgtcacggtacttgactccggttactggccagaaccctatgttgccattgcaaaatcacacgttaaagcttttgccgcgcttcgggcatcaggcattaactggtcttatttcagcccaccgatgatgatcgaacccggagaacgtaccggtaaattccgccttggtggtgatgacgtaatcttcgacagcaacaataaaaacagtatctctttcgaagattatgcaattgcactggttgatgaactggaaaaacctgagcaggaacgccagcgctttaccatcggatattaa

SEQ ID NO: 112200 - DNA, 540 bp, Enterobacter aerogenes
atggatatgctccatcagatgggctattccgcgacaggcattaaagacatcgttgacagcgccggggtacctaaagggtctttctataatcattttgaaagcaaagaagatttcgctgggcagatcattgatatctattttgaacaggccctgcctcagatagcggaacacttggaaaatccggatatttcgccgcttgaacggctgagaacctatttcgaacaaagggctgaaagtttcattaccagcgattatttccaggggtgtcttttgggcaatttttccctggaaatgggagatcacagcacagagatacgtcagcgaaccgctgaacattttaatacctggacccttcatattgaaaaatgcatagaggaaagccagcaaaaaggcgagataacgtcccctttgcaaccggcattactggcccgttttgttctcaacagctgggagggcgcgctggtcagaatgcgctcagatcggagtgacatgccattacgcgactttatggatgtaattttcacaaccgttctcatctga

SEQ ID NO: 112201 - DNA, 867 bp, Enterobacter aerogenes
atgactaacaaaaacgcaccaggatctgaattgcaaacccagttcccggcagccattgagaccactcaaattgatggtctttcaatccgctatgcccgttcgcctaaagatggagccgaaacgctcctgcttctcagtccctggcctgaaagcctgatggcttttttgccaacctggttccactttgccgaaaaatacgatgtgcttgctatcgatctgcccggtttcggtcattctgagggacgttctgacgtgattgcaccagaggcaatgggagagtttgttgttaaggttgtgacgcactttggtctgaaccgtccgcatgctgttggaccagatataggaacgtccactctgctctttgctgccgcgaatcatccggaaatattttcttccataactattggcagtgggggcgtagcttatccccttgacgtcaaaaacagtctgaaacaatggattgactatccaacgttagaaccgctgcagaacatcgatataccagcaaaaatcaacgccacactgggtacgcttgagcactacaaggttcctgattttgtgcgcgaggattacatctcttcctacagtggcaaaggacgatttgctgaatctgcccgtttcgttcgcctctatccgaaagagctggaagttctcagggatcgcctgacggatattaagacgcctgtcctcgttatcacgggtcagcacgatccattcgtgccggtatctaatgggcaatatgtcgtcgaacgggttccggtttcacatctggagattgtgaatagcggtcatctggtgtgggaggatgcagcggaagcttatgctgcattcgttctaaactgggtaaaaaaacacaaacgtcattaa

SEQ ID NO: 112202 - DNA, 948 bp, Enterobacter aerogenes
atgaagaaattaccaaaaattgcactgggaacctggtcatggggtacaggagcgaacggaggggatgccgtctttggtaactccctctctgatgaacaaatgaagtcggtgtttgataccgcagtccagtcaggcctgaatttatgggatacggcagcggtttatggtatgggggattctgaaaaggcccttggcaagcttatccggagatattcccgcgaagatctgatcctttccacgaaattcaccccaaatattgctgacaaacaggcagctcatcccgtcagtgcaatgctggaagaaagtcttagtcggctgggtgttaataatatcgatatttactggatacacagcccgaaggatgttgaaaaatggaccagcggtcttatccctttattacaggctggtaaggtgaaaagcgttggtgtttctaaccataatcttgaacaaattaaacgtgcgaatgagatcctgggggccgctggttattcagtcagtgcagtccagaatcactacagcctgctttatcgcgcttcggaagacgccggtattctggattactgcaaagaacataacatcacgttcttcgcttacatggtgctggaacagggtgcgttgagtggtcgatatagcccgcaaaacccgatgcctgagggcagtggacgtgctgcgacgtacaataaaattctgccacaactccaggcgttaaccgatgcaatgaaagaaattggtgcgacaaaaggtgccagcgtggcgcaggttgccatagcatgggctattagcaaaggaacgttaccgattattggcgcaacgaaagtccaccacgtcggtgatgccgccaaagcagcagaacttcatctcagtaaagatgaaatcgcccggattgaaaaattatccgttgaagcaggtgtgaatacccgtggatcatgggaaaacaacatgttgtaa

SEQ ID NO: 112203 - DNA, 198 bp, Enterobacter aerogenes
atggccagcacagagaagatatttaccctctcctatgacgaactgcttgagcacaccaaaaaagttgtcaccgatttcaggaatctcagcacgccgccggacatcctggatatctggagcaacaatggagtcatcgtgctctggcgctcacttgtcgaggcaatggggggcccgggaaggactatctcagtgacttaa

SEQ ID NO: 112204 - DNA, 996 bp, Enterobacter aerogenes
atgagctggtttaatgacgtatttggattcgaagaatcagactatgcagagactcaggctcgttttttccaggaaggcccttttcttcataccagaagccagccatctgtttcttatcgttctggtattctgaccatgccgagtctggccgaattaaggaaagcggtcagcaatcttgtgacagaaccgtatggaaggtgcagatttgacatacttgaggctgatgcatatgacctccaccgaaaatccgaagtgaagggcgcgctgatccaggttgccagtcagttcaacttactcgaaatgccatgtgaatatacaacgccagaaaaggggattaccgattaccagtttgatcatactcaaggacctgcctgcgctatggcctgtgctgctgccacagtatttcgtaattatcttgtcccgatggggtcacagactggacaatccactaccagccagcttaacacgctggctgatatggaaaaggctatcggcattgatggcatacgaatgaaaaacgggtatgccctgatgtcggctaatacggtgcaggctattagccgttatattgcatcgctggatgagcaaatgcgggacaggctcagacaggagttacgcatcggattgcactcagatactgaagtcactataccaggagtacctgaagatcagtttgtgtctcaggctctctgctctgccttacctgtcgcgtataactcatctccccgggaagactgggctccttttgcatcgctggtactggaagccagttacgaagcaacgttgctggcaggtgttctgaactaccggcttacaggcaatccgagagtatatgtgactatggtcggaggcggagcatttggtaatgaacctggctggataatttctgctctcaggcgtgccttatatctggtcagccatcataatctggaggtgatgtttgtaagctaccgacatactcctgcagctttatattcattaattgaggaattttga

SEQ ID NO: 112205 - DNA, 270 bp, Enterobacter aerogenes
atgtcacaggtagtaaacgcaattacttcctcatccaaacgttcctacagaaaaggaaatcctctttctgcagcagagcgccagcaaaaagcggttgcacgtaagaaagagacacacaaagaagtcagggtgtttgtcaaagatgccctgaaagataagctgcaggtaatgtgtgaaaatgcgggaatgacgcaggctgagatgattgagctgcttattcaacgggcttcagtgaaacaggatagtaacgtaacgacgtcacattcttga

SEQ ID NO: 112206 - DNA, 537 bp, Enterobacter aerogenes
atgaaatactcagtattgtctggttttctggcagtgactttgttcgcttccggtggggtgatggctcagccaactgtacaggcggggttttctcctgaagggtcggcgctgcagctggtactgaatacgatcgttactgcgcagcaaagtattcgcttgatgggctacagcttcacttcaccggaagtaacgcgagctctgatccaggcgaaacagcggggtatcgatgtcagagtggtacttgactggaaagccaacagctcgaaagggagtgcaggtgtggcggcgatgaatctgctggccaatgccggtattcctgtacgaaccgtcagccagtttaaaatcatgcacgacaaggtgatcattaccgacggccgaaacgtggaaacggggtcgttcaactattcccgcgctgcggcgaacagcaactccgaaaatgccctggtcatccgggattaccctgcgctggctgatacctatctgaagcactggcagtcccggtgggagatggggagggactggcttactacgtactaa

SEQ ID NO: 112207 - DNA, 789 bp, Enterobacter aerogenes
atgaatatcaaaactgctttaattgcggtggctgtctcctcttgtatgttaacccctaccctgggccaggccagtgaacattcttctgtattcaccccggaacaggaaaaaagaattggtgaaattgcagcagattatatgcgtgcgcatcctgatattcttattcagatgagcgaaaagctgcaggcagaacagcaggaaagggaaagtcgcgagttgaaatcagctgcgctggcacaacaagccagaattctgtctgataaaaacatcccatcatggggacccgctgaagggacggtcatggtcgtcgagttcttcgactatcagtgcatctggtgcagcagactggcaccagaactggaaaaagtcatgaaggctaacacgaacgtgcggtattacttcatggagtggcctgtgtttggcagccgctggccggaatcactgctcgctgcgaagactggtctgcaggtctggaaagagaagggagcagaagcatatttaacgtatcataataatatctatggtaccggattgaatgaaggcagactcacgcaggagattattgaaaaacaatccgggaaaataaattttaatcaacacactattgaagcaatcaataatacgttgaagaatataaatcagatcgccacaacaacaggcttaaccggcacgccgggtgtaattattatgccgctcaatggagcgacagaggataacaccaccgtcttttccgggatgacagaagcagagaatattcagcaggcaatcaatagagcacaggggaaataa

SEQ ID NO: 112208 - DNA, 585 bp, Enterobacter aerogenes
atgacggaagaaaaacgacccacgctcagtctgaaaaaaaagccagcagaacggtcgactggtactgagcctgaaagcccacgcattgtcaggcgcaagcaagtggttaatgtcaccacgccgccggcatggaaagtcaaaaaagaaaagctggccaggaaagcggagcagatcgcttcggctgaacctgttccgcctgaacccgctagcccagaaaaagccaacaggaaaattcgttacctccgcttgccggcgttgcaggtggccattgataccctgcaaccctggtggcccgcactttttgatggtgataagccacgtctgctggcgacggggatccgggaaaccatatttaacgatatagcttcccgcgggataccgctgtcccataagcaggtcattaaatgtctgaaacggattactcgctctgaacaatacctgtcatcgatgatcgccggtgctgaacgcgttgacttaaatggtactccggtgagtgtcgtgactccggatgaagagcagtatgcgatgctgagaatggaaaagcagcgccgacagcaggcaagaattcagagcgatatggtttaa

SEQ ID NO: 112209 - DNA, 723 bp, Enterobacter aerogenes
atgagagcacaacacacatttcttggcgcgacagacagctggcttcagcgcctgctgacctggacaccgggacaaacggatatgattaaaacggtcgcactggtacttatggtgattgaccacactggcttactgctggccggaaacaatgaagtgatgcgcctgctgggacgcggttgttttccactgttcggactggtgtggggaatgaacctggccaggcaccaggaaatccgccagtcgcagctgaatcatctctggtgctgggcgatgatcgctcagggggcgtttatcctggtgggctatccctggtacatgggcaatatccttttttcattcgctgtcacggggcaggcgatgcgctggttcagcttacggacccgtaacgatatgcttctgtctatcgctattgtgatcgcctgggtgccgttgtccgcggacagctatggcctggctggcgtctttatgctgatcaacagttaccggctgtgccgcgccacggaagcggtggaaagaacgggctatgctttactgtgggcggtaatggtcctgctgttgaatcttcatgatgccgggcagtctgtcgctggtctggcgatcgcccttcttgtcgtgagtgtgtgctctgatatcgggaaacaggttaaacggttctggccaccccatttttttgtattgttctatgctgttcatctggcagtgctggggattgtggctgcataa

SEQ ID NO: 112210 - DNA, 525 bp, Enterobacter aerogenes
atgttaacccatcaaataatacaaggtgaaattgacgagttaaaactagttctgactgagaaggatttaacgatcccctcattctggagttgtatctggcctggcttgacttttatgttttggtttttactttcatcatatttttcatatgggataagtgatttttctacgggtcttgatagaatttcatcaatggtttttgcggcagtcgtgggcattttttctatcattgcaaccgcgaatacccgctcactcttcctttctttacctgagtctttcaggaaaaagtcgttgttctttggttttttagcaaagaaatgcagagcttatggagcggttatttttactatattcccatgtctggcgtttttttctgcatataacggaattaatgcggttgtttttattgttgttaccggtttcagtcttttattaacacttatggttatgaatattgaccttagtcgttatcagttggcgaccctgacgtctgttattgaatcagttagaaatcatgaacggtga

SEQ ID NO: 112211 - DNA, 219 bp, Enterobacter aerogenes
atgcatgcctttatttttctggtgctgatgacgccgagtagtggtggtggaatttgggatattactcccatgcctaatacagatgtctgcataaaaatgctacgggtactcgaagcacgtggaggaagaggtttcggaagtaatacaggagagtgcattgaaattaaaaccagcgagccgttgaacagcgtgatagaaacattgagtgagggtgggtaa

SEQ ID NO: 112212 - DNA, 393 bp, Enterobacter aerogenes
atgcacgacggcgaagaaaggaaaaaactttcgctgtaccttcacccggaggactctgccgatcgtcttgcactggctgaaatcgaaactgtcccccggaaaaaccggggggagttatatcggcaggctttgataaccggcctgataatgcatcagcttgatgcgcgaattcccgccgtgttaaccgcactattcaccagagaactgaatgcggatgaggtcattagtcagattgctacgataacaggctggaaaccctcctcaggcgatttgaaagaggtactgaaggcgttaggagggcttcagagtacagcttcaccagaacactctcaggatgccggtgagcaggcccgtctgaaagcggccagggcgaagatgcaaaacctgatctga

SEQ ID NO: 112213 - DNA, 975 bp, Enterobacter aerogenes
atgaaaattttttgcgatgatggttctacaaacgtgaaacttgcctggtttgaagggaagacgctgaaaagtgcggtatcagtgaactcttttcgccataactggaaagtcgagggcttaggcagcagtcgtacctataactatctgctcgatggccgcaaatatacttacgacccggtcagcgaagctgcgattagcacgactcacattgagtaccagtactctgatacaaacgtgctggcagttcaccacgcattactgaacagtggaattgaaccccaggagatagatctcaccgttacgttacctatcagcgagttttacacggccgactgccagaaaaacacgcttaacattgagagaaaaattagcaacctgatgcgggaagtcaccctgaacaaaggggtaacttttaccattaaaagcgttgaagtgatgcctgaatcactcccagctgtctttacacgcctggttgctgacaatgtgggtcagtacgaaaaatcactggttatcgatctcggtggtacgaccctggatgtcggggttattgttggccagtttgaggacgtttcggcagtacatggtaatcctgatattggcgtatcaatggtcacgaaagccacgctcactgcactgaaaatggccagcagtgataccagtccaatgattgctgacgagctgatcaaaaacagggagaacctggattttgtggggcaggttgtaaatgaggctgctaaacaaaatctggtactggatactattgatacagcgatacataagctgggcgagctggttgttgatgatttgctgcagtatcgaaacgtaaaccgcgtatacattgttggtggcggtgccgcacttattgccgatgctgttcgtaaggcatggaaccaccttggcgaaaaggttgttcttatggacgaacctcagacagcgctggtccaggcgattgcacgcttcaaagcggaggagtaa

SEQ ID NO: 112214 - DNA, 375 bp, Enterobacter aerogenes
atggctgatgcatcaaaacttaaaactaaaagagctcgtggtgggctgggtgtaccccctggccccgacgaagtggctaccagcctgaacgcgcctgagatagctcctgcagtcgctgccactgatgtacagatacagcaggcggacttatcgccagtgcaccatgatcctgtgggtacgcaaacagtgaccgaggcatatacccgccgcgatggccgttctgccagaaaaacaaacaggacgctggcatttgcaacacgtgtcacacctgcattcgaccaggagatcagggatatcgcagagcgtgaggggttgaaactggtggaagttctggaaaaagcagttgaggcatataaggaaaaacagggatattaa

SEQ ID NO: 112215 - DNA, 633 bp, Enterobacter aerogenes
atggcctggatagttggttttatttcccagaaaggtggtgtgggtaaaagcactaaggcgagagcgttagcgcgtgaagcatccgcctgtggcatcaaaacaaaattagctgacctcgacctggaacaggcaacgagtgctgagtggcaccgccgacgtctgtcagctggtttaccaccggttgcttcagtcgaagtattttcaacagcaaagcaggccatagaatctgccggcgagtttgaccttctcattcttgatggaccagctcgtgcaagcaaagggacttcggaaatagctaaggtggccgaccttatcgtccagccaacgggggcttcccttgacgatcttgtcccggccattaaagttttcaacgcgctggtaaaagaaggcgtgccacgttcaaaactggtctttgctttaagccgtgtaggtaccgaagcggaagagctggatgctcgtgcatatatcagtgaggcgggttatgaaactttagctggatgtctttttgagaagccagcttacagaaaagcgatgaactcaggacttgcagtgacagaaacacgctataaaggtttaaacgagagagctgatgaacttatccaggcgctcatcgataagattggagaagagtaa

SEQ ID NO: 112216 - DNA, 234 bp, Enterobacter aerogenes
atgagcatttataacgccggaccgttaccagatgacaccttcaccagagcacaggctgaagcggtggtggcacagtttgaaaatgtcgccatcgaagacgatcagatttcgcattttcgcctggtcgttcgtcacaacggcgaaatggtgtggagcgcatggaattttgaagcggatgccgggaaatggctcaaccgttacatcgaacgctatggcatccgtaaaacgaagtaa

SEQ ID NO: 112217 - DNA, 906 bp, Enterobacter aerogenes; identical to SEQ ID NO: 97868

SEQ ID NO: 112218 - DNA, 954 bp, Enterobacter aerogenes
atgacaagtatagcaattcttgaagcagttaacacctcttacgtgccgttcaacggtcagcaagtgataactgcagttgctgctggggtgacttacgtggcaatgcgtcagattgtagagaacatcggaatggactggactggtcagtcggtaaagctgcgcaaaatgaaggacagattcaactgtagagatatctctatggttgccgccgacggcaagttgcgtaagcttttgtgcctcccactgaaaaaactcaatggatggctgttcagtatcaacccagaaaaagtgcgcgccgatatccgcgacaaactgatcaagtaccaggaggaatgctttaccgttctgcatgactactggactaaaggcgaggttaagaacccacgcaaaaagaccacggtcgatgaaaggacgccacttcgggatgccgttaacatgctggtaagcaaaaggcacatgatgtatccggaagcttacgcgatgatccatcaacgctttaatgttgacagcattgaggacctggaggcatcgcagattccaactgcaatcgagtatgttcaccgtgttgcgcttgaaggggaatttcttggcaagcaggaaacactgccagcgccgaagtttgacgtaaacattccgcttcaatggtggatcgataacaacccgttggttcgcagtggcaacctgtcatttgggaagtctctaacagccccgtcctttgacgtgacgatggagatgctttgtggtgacaactcgacatctgcagctattcgcctgattaacgttctggaagaggccggctttgatgtgtcggcgccgaaggctgaaattgtggcgatgcgcaaacatctgggtaatgtcgagtacggtatgaaggctatcgcggatgcttgccgccgggcggggaataaaaccatctcgttccgtggcggaaaggctgaatatgtgattggctaa

SEQ ID NO: 112219 - DNA, 450 bp, Enterobacter aerogenes
atggaaagtctggacgcacggaaagtgctattgcaattcttgacagaactgccagatacaataaggacggaagagttgctcttggttctcgcttattgcgggcagaaccccaacttaaatgactctgacagcttccctgaatccatcgaaaaataccttctccagggcggcctgtcaggaattggtgccgtactatgcaccagagcatccattgactacacacttggagatgtaaacctcaaaatgattcgagcggaagaggaccttaaggcattggtggcgaaacatcctgacttcccagaagctggccttctcggcattcctctgagaaaacggcattatgccgccgctctggagaagtggaatgcgctgcgggcaaatgagttatctgacgaaagtattcgatattttggacaaatgtttttatccccacgatggggtagaggctga

SEQ ID NO: 112220 - DNA, 582 bp, Enterobacter aerogenes
atggactattcattatcagagctatctgaggtttttacgtgcgaccctgaaaagggtgagctttattggctacctcgcagcagagaaagtttcaataacgatttcacatatcggatgtggaacttgcagttctccggcaaagtggccgggggaatcaatggatctggatacgtagtggttagctctggggaaatgaaaatcctagcgcaccgggcaatctggattttcgatgaaggccccattccagatggaatgtttattgaccatatcaatcacatccgacacgacaataggaaagtaaatctgcgcttagtgactcacgcccagaaccagaaaaaccaatccatgcactctacgaacattagcggtatcaatggagtaagaagggatgagaggagcgggaagtgggccgccttcataaaaacaaaaggccgaagcattaggcttggtttatttaatacattagaagacgccactcaggcgagaaagagcgctgatcgcaacttctgttttcatgagaatcacggtaaagacaagtatcttgataccccttacgttgacccttggttaagggttaactga

SEQ ID NO: 112221 - DNA, 360 bp, Enterobacter aerogenes
atgagcattactgttaacaccctggccactatcgtgaccggcgtatccgctatcgcatccggcgttgtcagcgtttatgaaaacggcgaaaaactgctggaaatcatgaaagcggccatcgtaaaagtggaagaagcctatgccagcctgaaggctgctggcgcgaccaaaaaagcgctggtgctggcaacactacaggcggctgccgaagccctgggcgaagcgtgggataaaatcatggattatttctccgcgctcatcgattccgttgtcgatctgtacaacaccgcgaaaggcgtgattgatgatgtgaagggcgacacgggcaccacggaaacggctgctgaagcaacggcatag

SEQ ID NO: 112222 - DNA, 345 bp, Enterobacter aerogenes
atgaaactacagaggccgctaagcagaattctgctgacgctgagcgcgtgcgcaatgctggcagcgtgtcagagcgaacagcagcaattaacgacgcaatccgacgcgctaacgacaaagccggtcgttaactgcgaggaaagcaagtcgtttcagaagctgcccgattacccggagtgtacagactgtgacaaaactactgacactgctgtactgcgtgcttacatcgctactcagcaggagtgggcagttaaaaccatcggcgtctatacctacaactcaatcctccgcgacaacaccgccgcctgcatcaggcagctgcgcgacagcggcattatcaactga

SEQ ID NO: 112223 - DNA, 231 bp, Enterobacter aerogenes
atgactctcgtcgataactggaagcaagcatggaaatggtattcaacccacgcgctgattctcgccacttccgctcctctggcgatgtccgaagctgagaagtatttcggccacgaattcccgctatgggtaaaagcgaccgtcgctggcgtgattttcgtgagcggggttattggccgcgtcattctccaggagaagcccgatgtggtcgatactcagcgcgataattag

SEQ ID NO: 112224 - DNA, 468 bp, Enterobacter aerogenes
atgccagataatatttcagcattccttgacgtgattgcgtgggccgaggggacgagcacaagccgctatacccaaaataacgggtacgacgtcatcgtgaacggaatcaactccccccacattttcactgattattcgacgcatccaaatattctggtgacagttaaccggaaaggcctcaaatcgacagccgccgggcgctatcagttgctgggtaaatactggacacactatcgggacaagttaaatctccccgattactcccctgattcacaggatgccgtggctgttcagctaatcaaagagcagggcgcatactctgatgtgctggcagggcgcattgaagtcgccattcagaagtgctcgaacatatgggcctctttccctggtgctggctacaaccagcgtgaacacagaatggctgacctggtggcgatgtttaaaaaattcggggggaaagtcgcatga

SEQ ID NO: 112225 - DNA, 222 bp, Enterobacter aerogenes
atgagaacaatgtcagacaaagttaccactgccgctgcgtacacaacgtcaggggcaacgtttattgccggaagcatgtcgcttaacgagtggctggccttgggcggtttcattctcgcaatattcacatttggcattaacgtctactaccagcgcaaaagggaccggcgcgaagagcgtgatagcaagatgcgatatggggggcgtgataatgccagataa

SEQ ID NO: 112226 - DNA, 528 bp, Enterobacter aerogenes
atggaattcaccaaagaacggtttctgaaaatccaatcatggagcgaaacatacggaccaggtagcaatgtcgtactgccagcagaagaagcggcagagctggcccgcatggcgctggccgcaatggacagcgagccggtggcggtagtgccggatgccgcgactgcgatacgtgcttgcctatctgagttcccggaaagcgcacgcgatatcgttgaggaatgcgcagatattgcagaaaacgcctgccgcgccgccatgctccaggctgaacctgtaacgactgctaacaagttgggcaactctccggtaattccggatacatggattccggtaagcgagcggatgcctgaagagcgcgagaccgttgtattggttgccgacgagagagggattgtctggtgcgctgaaattcaagacggagaaatctacccagatgaatttcctggcactcgagggtttggatgctccgaagcaacccactggatgccgctgccagccgccccgcaggaggtgaagggtgaatga

SEQ ID NO: 112227 - DNA, 177 bp, Enterobacter aerogenes
atgagaccgccgatcacaaaggaagaagtcgagttactgatgcaggatatggagatgctggcagagcagcagctagtaggattggaggcgttagaggctctgagactgctggagatgcgcagacagaccggtaagctggaggctataaagcgattgatatcgtatgggaaggagtag

SEQ ID NO: 112228 - DNA, 201 bp, Enterobacter aerogenes
atgagactcaggaaatacaataaaagtttgggatggatgtcattaatcgcaggtactgtattactcagtggttgtgattctgcgctccttgacccaaaaggacagattggactggagcaacgctctttgattctgacggcattcggcctgatgatgattgtcgttattcccgccgtcttaatggcagtaggatttgcctag

SEQ ID NO: 112229 - DNA, 675 bp, Enterobacter aerogenes
gtggtctggacggttcctattctgatcatcttgttcctggccgttctgacctggaaaaccactcacgctctggagccaagcaaaccgcttgtccacgacgagaaagcaatcaccatcgaagttgtatcgatggactggaaatggttctttatttacccggaacagggtatcgctaccgtcaacgaaatcgccttcccggcgaacgtaccggtacactttaaagtcacttccaactccgtgatgaactcgttctttattccgcgcttaggtagccagatttatgcgatggccgggatgcagactcagctgcacctcatcgctgatgaagcaggcacttatgacggtatctccgcaagctatagtggcccgggcttctctggtatgaagttcaaggctatcgccaccccggatcgtgcaaccttcgatcagtgggtagcaaaagcgaaacagtccccgaactccatggactccatggctgcattcgacaaagtggctgtgcctagcgaaaacaacaaagtggaatacttctctaacgtgaaaccggatttgttcaaagatgttgttaacaaattcatgtctcacgagagcatgaacatgtctaaacctgaaggcgagcacgctgcgcacgaagggatggaaggcatggacatgagccacgcggaaaccgctcactaa

SEQ ID NO: 112230 - DNA, 834 bp, Enterobacter aerogenes
atgtccgcgcgatcttccccgctgccggatggcggcacaacgctgaaatggcgactatcagacgcgcataaccagtatggcatcctgctggccacgctgccggttggccgccacctgagccacgaccaacagcaactggtcgacacgctggtggagcagttgaccagcaccctggcgctggatcgccatcaggaaaaacagcagcagctcatcgtgatggaagaacgcgccaccatcgcccgcgagcttcacgactctatcgcccagtcgctctcgtgcatgaagatgcaggtgagctgtctgcagatgcagggcgatagcctgccggatgaaagccggctgctgttggggcagatccgcaacgaactcaatacctcatgggcgcagctaagggagctgttaaccaccttccgcctgcagcttaccgaggcgggtctgcgcccggcgctggaggccagttgtcaggagtacagcgcgcactttggtttcacggtacaactggattatcagttgccgccgcgttttgtcccgtcgcatcaggcgattcacctgctgcagatcgcccgcgaggcgttaagcaatgcgttgaagcatgctaacgcgacagaagtcatcgtgaccgtgtcacaacgcgataatcaggtacgtttagtcgttgccgataacggccgcggcgtaccggaaaacgcggagcgaagtaaccattacggtttaattattatgcgggatcgcgcgcaaagcttgcgcggcgactgtcaggtgcgccgccgggagaccggcggtaccgaagtcgtggtgacatttatcccggaaaaatcgttttcaatccaataa

SEQ ID NO: 112231 - DNA, 654 bp, Enterobacter aerogenes; identical to SEQ ID NO: 95876

SEQ ID NO: 112232 - DNA, 381 bp, Enterobacter aerogenes
atgctgggcgtaccactccgtcggcagcagttggatttgcgccgccgttttttccccgccgagtaccggcgagagctgaatgcggttgtaggccggctgcggttcatcgccgataagcgtgatgatgaaacgcccctgcgcgcgcgccgccagcttctctgccagccgggttgccgccataccgttgccgataattaccagtcgccgcatcattccgccttaggccgctttcggctgcttttcgtagaggaaatggaggatctgctgacgcaggtggtggtagtggttatcttccgccagctggacccggttacgcggacgcggcagattaacgtcaaggatctcgccgatcgtcgcggccggtccattggtcatcattaa

SEQ ID NO: 112233 - DNA, 723 bp, Enterobacter aerogenes
atggcaaatattgattttcgcaacaagattcactggcgtcggcgctaccgttcgccgcagggtgtagagacggaacgcgagatcctgcgggtgtttgaaagcgatcgcgggcgcattatcaattcaccggccatccgccgcctgcagcaaaaaacccaggtctttccacttgagcgtaacgcggcggtccgcacccgactcacccattcgctcgaagtccagcaggtcgggcgctacatcgccaaagaggtgctaagccgcctgaaagagcaaaagctgctggaatgctacggtctggatgaactgagcggcccgtttgaaagcgtggtggagatggcctgtctgatgcacgatatcggcaatccgccatttggccattttggcgaggcggcaattaacgattggttcagaaaacggctggcgccgaaagatgccgccagccagccgttaagccaggatcgctgccaggttgacgcgctgcgtctgcacgacggcgaaggggtgctcaacgaactgcggcgtaaagtgcgtcaggatttgtgctgctttgaaggcaatgctcagggcatccgtctggtgcatacgctgatgcgtatgaacctgacctggacccaggtcggctgcattctgaaatatacgcggccggcgtggtggcggggagagacgcttgccagccatagctacttaatgaaaaagcctggttattatttagccgaagaatag

SEQ ID NO: 112234 - DNA, 726 bp, Enterobacter aerogenes
atggaagctgccgatgatatctcatattgcgttgctgacctcgaagatgcggtagaaaaacgaatattcagcgcggagcaattgtatcagcatctgtatgacgcgtggggcactcatgaaaaaggatcgttgttcgcccaggttgtagaaaacgcgtgggagaaatcgcgcgcaaattcactgagccgcagcactgaagatcagttctttatgtatttacgggttaatacgttgaataaactggtgccttatgcggcgcatcggtttatcgaaaacttaccggctatttttagcggcgattttaatcatgcgctgttagaggacgacagcgattgtagtcagctacttgaactttataaaaacgtcgccataaaacaggtgtttagtcatcctgatgttgaacagctggaattacagggctatcgggttatcagcggtctgctggatatctacgagccgctactgaaattatcgctggaggagttcagccaattggtggaacaagatcgggtacgcagtttgcctattgcttcgaggttgttccagaaactttcgacccgacatcggttggcttatgtggaggcggtaaataagctttcgcgtgatgccgaagaatatcccgtgctggagtattattaccgctgtcgattgattcaggactatatcagcggaatgacggatttgtatgcgtgggatgaatatcgccgtctgatggcggtggaataa

SEQ ID NO: 112235 - DNA, 462 bp, Enterobacter aerogenes; identical to SEQ ID NO: 5821

SEQ ID NO: 112236 - DNA, 1617 bp, Enterobacter aerogenes
atggcaatttttgatgaaaagcggcatttatatgaagccttattgagacataactacttccccaaccaaaaaggttcgataagtgaaatcccaccgtgcttttcttccaggacattcacaccggaaatagcagaattagtttcatctgacacatcagggcgtagaagcttacaaggttatgattgtgtagagtattacgctaccagatataacaatttcccgagaacgctctcaatcatccatccaaaagcgtacgcaaaattagccaagcatatacatgataactgggaggaaatacggtttataaaacaaaatgaaagcagcatgatcaaaccagacatgcatactgatggccgtgttataatcatgaattatgaggatgcagagactaaaaccgtaagagaactgaatgatggttttggacggcgatttaaagttaacgcagatatatcaggttgctttaccaacatctactcacactctattccgtgggcggtcgtaggtattaataatgcaaaaatagccttaaatactaaagtaaaaagccaagataaacactggagcgacaagcttgactattttcagcgtcaggctaagaggaatgagacacatggtgttcctattggcccagcaacctcaagtattgtttgcgagattattttaagcgctgtagataaaaaactgagggatgatggatttttatttagacgttatatagatgactatacatgttattgtaaaacacatgatgatgcgaagtcttttttacatttgcttggtatggagctttctaagtataaattatcactaaatttacacaagactaaaataactaatctcccagggactttgaatgataactgggtttctttgcttaatgtaaactcaccaacaaagaaacgttttacagatcaggatctgaatactctaagctcttctgaagtaattaattttctagattatgctgtgcagttgaacactcaagtaggtggtggaagcatactaaaatacgctatttcactggtaataaacaatctagatgagtatacaatcactcaggtgtatgactacctccttaacttatcatggcattatccaatgcttattccatatctaggcgttcttatcgaacatatttatttagatgatggtgatgagtataagaataaattcaatgagattttgagaatgtgtgcagagaataaatactctgacggtatggcttggactctttatttttgcatcaaaaataacattgatatagatgatgatgttataaaaatgattattagtttcggtgactgcttgagcttatgcttgctagatagcacagggatatatgaagaaaaaatcaatggttttgtggcagatattattaaattagattatgaatatgacatagacagatattggctccttttttatcaacgattccttaatgataaggccccaagtccttataatgacaaatgctttgacatcatgaaaaattatggcgttaattttatgccagatgaaaattataataccaaagctgagtcatattgtcatgtcatcaacaacccatttctcgaagacgaggatgagattgtaagctttaacgattatatggcgtag

SEQ ID NO: 112237 - DNA, 525 bp, Enterobacter aerogenes
atgatactcagaaacgctattgtgggcctcatacttggtattttagcttacattgcatctgtttacataggaggtaagatcgttggctcatattcagggctatctgatctttacagaagtagtatgagaggctatttcttttccgcatttttaggcatatcgtctttccttttatctttattaacctttgtcgttatcaacctcaaagaaaaaatgtttgactcagaagattataaaaaaatatatataaagcacaaacagttaaatgctggagatgagataaaaaaacatgacctatacaaaccactagttgtaattaccacaatgctagtattttcaatctcttgtagtatattaacttcaatactacaatttaccctagggttatctagtaactgctggatattgatcataccaacattgactccgttcattgccatttcatttatggtgctttctctttatcaaatgtcacaattaattttccaatggctgcgttctgaagatgttataaaaatatcttga

SEQ ID NO: 112238 - DNA, 876 bp, Enterobacter aerogenes
atgaaggtttactgcacaccagtgaaagttgcttgcaccagcggacgatttaccgcagcttcatttttgtctgaaagtgcaaaaaattcaacaatagacatggattattctgactctgacaagagtgtctactttcgtttttttgaagattctgatgcattttcctgtgtaatattgacaataaaaaaatcaaaatcttacgtctcagcaaacttagtaaataaggatttttcattaataacaacaggtaccggggcaaattcaattagcgaagctaacatagccatagtcaataaacataacttaaagggaatatatatacataacgaagggactatgttacttggtgcttttgatagtaaactcagggcgtattactatcgtgtgctaagggataagttaacatcaaaaaaaagagatgagaagcttgttattgagcgcctagttgatagttcaagccttatggataaaatcaataagtactcttttgtggatgaaattaatgctacttttgttaactccactaccgcagcaagatacttgaactcttcagtttataataaaacaaaaagcgttcgaataactatgcgaacaaataacctgtctataaaaacaaaagctgagaaagacgacttagctaactatctaactagtttaatccaaacacaggcacaaggtataagttttaaagggaagaattcaataaatgtcgccggggaaacggtgggtgtaattgataaggctaatagcattgaaacgttagagcatgatgattatatgactatgctgcatggtatgaagttaagtgcctttttgagtagtaaattatacactgacatgaaaaatttaatcatgtcacacaatcttctaaaatga

SEQ ID NO: 112239 - DNA, 714 bp, Enterobacter aerogenes
atgttatttgcatggataaccgatcctaacgcctggctggcgctcggcacgctgacgctgctggagatcgttctcgggatcgataatattatttttctctctctggttgtcgctaagttgcccaccgcccaacgcgcccatgcgcggcgtatcgggttaatgggagcaatgctgatgcgtctcggcctgctggcgtctatcgcctgggtcgttaagctcaccaatccactcttcaccgtattcggtcaggagatctcgtttcgcgacatgatcctgctgctcggcggtttgttcttgatctggaaagcgagtaaagagatccacgaatcgatcgaaggcgaggaagaaggtcttaaaaccaacgtccaatccttctttggcgccatcgtacagatcatgctgctggatatcatcttcagccttgattcagtcatcaccgccgtcggcctctccgatcatctgttcattatgatggccgcggtggtgattgcggttggggtgatgatgtttgccgcacgtccgatcggcgacttcgttgaccgtcacccgtcggtcaaaatgttggcgttgtcgtttctgatcctggtcggtttcaccctgatgctggagagcttcgatgtgcatgtgccgaaaggttacatctacttcgcgatgttcttctccattgcggtcgaaactctcaacctgatgcgcaataagaaaaacccgctataa

SEQ ID NO: 112240 - DNA, 2511 bp, Enterobacter aerogenes
atggttgattttggaaagctacgtactcaggcaaagaaagcagtgccaattgaacctggcgaaatatttcgccgactgcctaaacctgaaggtttcaatgatatttataccagccaggagcaggtcttagagaattggtttggtcgaagaaatgaagctgatgttgtgataaagctccatacaggtggagggaaaacgcttgttggtcttctgatggcgcaatctacgcttaatgaaactaaagaacctgtcctttatcttgcaccaacacgacagctggttaagcaaaccttagagaaagctaaggcgcatggaattgcagcagtaccttacgagaaaggtaaaccgcttgctgaagatttcatcaatggcaaagctgttatggtggcaacctacaaagcgcttttcaacgggcaaagtaaattcggggttcgtggaggcgctagacccccggtaaaagtcggcgctgttatccttgatgatgcgcatgttgccttttctgttgtgcgcgagtctttcaccttagcggtagatgcagataataattctgagtgttatgaagaactgaccagcttattcagaaaggcttttcgggatagtgatcggatcggaacattcgacgatatcgtccaaggctcaagtggcggcgttatagaagtgccatattgggcatggcatgagcagattgacacggtaagggagtatctgcgggcagatgcggataattacgctttcgtttggcctcttctcagagacaatctacatttgtgccatgctttgatcagccgtaatgctttcactattactcccgtgcttcctttggtcaacgagttccctacgttttctgactcacctcgtcgaatatacatgtcggctacaattgcggatgacagcgaaattgtccgaaccttcgatgcagatccacgtttcgtgggcaacgcactaacatcgcgctcacttgctggtattagtgagcgaatgatacttattccagatcttatgccattttcattcgagacgattgaagctgtgagcaccttactcgaatggacggctgagaaaaggaatttgggagccgtgatactcgttcagtctaataacgctgcaaagcgttgggagaaggttgcaacgttcgctacaaaatcagaagatgtcgaccatttggtcagacaacttcaggatcgagagactaatggacctgttgtgctagctaaccggtatgatggtatcgatctccctggcgactcttgtcggttactggttatcgaaggattaccggctgggactactgactatgagctcatgcgtgcagcgacactctatggtggagcatcaatcagccgcatgttggcacaacggattgaacagggaataggccgtggagcccgtggttctggcgatcactgtgtggttattttagctggcgcggatcttgccggatggattgcaaaagatgcaaacttccagttgttgactagcgctacacgagctcagttagatataggctctacagtcagcaaagaggtgaaggacaccaaggagctggcgaggacaattgctaccagctttgatcggaatccggactggatcgagtatcacgcagaaacactagcggagagtttggatcaggaacaagcagatccgaatcgtttcgaaattgctgctgcagagcggaaggcatttaacctgtgggttgatggatatcatgacaaggctattactaaactagacagcagcatcaattctgtgaaatcacttgattcacagactcgcggctggttgcttcaactggcagggcgtatagcgaaccattgggggcaaacagaacgtggtgatgaactgcaacaaaacgcttatggaaataaccgaaacctcttacgtccccgagttgttcctccataccgtccgttggccactccgagcgcccaggcgtccttaattgctcaacaatttcagggctaccgaatccgtcgaggtttaatcaaccgatttgagaatgtggtctcacagttacatcaaaattccacagcaaatcagtttgagcaggcgttggtggaacttgcacaaatgcttgggttgaccgccgaacgattcgatgatggaggaaaggggccagatgtactctggttgcttcctcagaaagtaggatttatcattgaggctaagagcaggaagctaaaaaagaactctctgacgaaagaaaaccacgggcaacttcttgttgctgagcaatggttcaatcaaaattatccagcttatgaggctgttcgtatttcggttcatcctacgaataaagcaaccaagtcagcttcggcaactgatacctacgcattaacgttcgaaaagctcgcagcattgataagtgataccagagcgttgctcataaagttgtgtgagtcacaactggacgatgttgagcttgctgcagagtgtgcccgcgagcttaaaatatcgcctgttcgggctgataagttggtacaaaactatctctcaaggttcgttgaagaataa

SEQ ID NO: 112241 - DNA, 2142 bp, Enterobacter aerogenes
atgaactacgaaataatcaagaatatcttggcgaaactcgctgaagagaatgccaagacagtcgatgtgctgctcgccatcaataccatcgtcaacagaagcaattcagagtgggagggccgcgatttggtaatccgagcactcgacaaatttgagttttttgactctgtcgaacagtcactcctgctaaacatggtacgagctgtcggattattcccttatatcactcctcacctcagcagcatggcgatttctgaccgcttagcttacgaagcacacagggtcgagggtgtagaacaaggcatggtatttcatcatctgcaggcccatgttttcagcttgatcatgcaaggccggaacgtagtgctcagtgcttctacaagcgtcggaaaaagtctagtcattgacgctgtactagcacagcgacggttcaaaaaggtggtagtgattgttccgaccattgcgcttatcgacgaaacccgccgtcgactagtcaaacgttttaaggacttcaacctgatcacgcatccgagccaagaatctgtggttgatacaaccaacgtctacctgctcacccaagagcgtgtcatccagcgtcctgaccttgctgatgtggagttctttgtcttagacgagttctacaaaatcgacttggggaactcacctgacgaaagcacgcgcgctgttgacttgagcttagcattccacaagcttgcaaagactggtgctcaattctacatgctcgggcctcacattcagaaaatctctggtttggatgactatgagtaccacttcatcccatccgactacagcactgtcgcagtcgacattcaaaatttcaatctggagatgcgttccgaagagcgaaaggaaaaattgcttgagttggtcacaactctagactctcctactttaatctactgtcaggccccccctagtgcgaacagggtcgccgagtatttaattcaagaagccgggttgaagccagtgccagaaacgcaggaaatagctgcatgggtctccaagcactaccaccctgaatggaacgttgccaaggcattatctctgggtatcgggattcaccatggaggagtgccacgtgcattgcaacagtacatcgttaagttgttcaatgatggcatcatcaagcgaattatctgtacatctacgatgatcgaaggcgtcaacacatcggcagagaacgtgatcatttacgaccgccgcctaaatacttcaaagttcgactacttcacttacaagaatatttccggtcgggcgggccgtatgaataagtacttcattggtaaagtcttcatgctcgaagcgcctccccttgagcagggtctcaccgttgaatatcccatcggccatcaggatgaaaactccccgataggactcatcatgcaactggagaacgaataccttactgatatttcacgtggtaggcttcaagatgcatacgccaacccgatactatcgccgtcaaccctgatagaaaatcgacacgttccgattgagcggcaagtcgaggtcgcagaaatgatcattcgtgacctaccggatggcagcaagcttcttgactggaaaggcatccctgagacgaatcagctcaattacctatgtgaactagtctacagtctggaaggcggtaatctgatggactatgggatatcatctagcttgcaattaatgtggcacatcaatgagctccgaactcagaaaaatctgcctgcttacctaagagacgcggtggagaatcgacgagaggaacacactcccagtgaagcgatcaatctacgcctgaaattcatcagaaatatggtgtgtttccgattgcctcgggacatcatggccgtaagtaacattcaggccgacgtgctggcgaaaatagggatcgagccgggtgattttagcttctttgctgagcagcttgaaaatatgttcctcgacccactactcaccgcgttggatgaatacggaattcccacacagatctcgactcagatcaagaacctcatcttgccatcggaacatctgaacgacctactggcgaaacttcgggctctggctcccagagtagagagcctccaactgacaggttttgagaaaagcttaatgagctgggctgtgtccgaaatgtag

SEQ ID NO: 112242 - DNA, 1629 bp, Enterobacter aerogenes
atgagtattactagcctatccgatgcaggtgggcctgcggcaaggcagggcttcaagtatcaagatcacgtagctgtcagtttcattttcaagatgctccaggacagtaactactcccaagtggaatgtgagacagcggatgacatcgtggcggtattccaatgctcgggccagatagtaaatgaatacattcaggtcaaaacaactgaaagtgatagcaaatggaacttgaatgagataacggcgttagacggcaccaaggccaattcttcgctactacataaatcgctgaaatgtgatgttcgtccaggtattgcacgctttcgaatcgtgaccaagcgcgacgttgcaaaaattcttgatggattcaagaaagagatagataagcgagtgctacctgacacaaccacagcacgaggtgtggcactgtgcaagaagtttaaaacatttgtatcacctcaaaaacgtgacttcttgtactgggctgaaaactttgtctggcaggtatacggtgatgtcgaggcccttgaggctgtcaatataaaggctttgtcccagcttgcggaggggcttggaaatcgccccaacttcacgcagctaaaggcaatttacgaagaatttttagagattgctgacaaagcggcaacatctagcgtgaagacagccgcagcatctaagatcatccttcgagctccgacgctggatcacctcaagaaattactagaagaggctgatgacatgtcaacggccacatccaaaccatataaaaagcatccggacccgttcttagtcgagtttcacaccaacgcaaaagagagcttgttgcactcattttctggatttgacgtgcgctattcgcttaggaaatggcggcatgaaaattacgcaaagcatctcgtcgaatggctaccggagttttccctaaaggccagtgaaatcgtaaacatccttgcgcataacgccgaaacgatattggccaggtcaattagtacattcagcgacagtgagcttccgcgcgacaggctcattgcagaactaattctccattccatcctgcgcagccggcaacacagcgagcccgttgcgtgtaaagtcttctacaagtctgctggtaagctttccgaatttggcaatgctcacatcgttcaaatgcctgatcaggatgaccagttgtggctaggccttgcccgcatgatcaaagcggatgacatggatacaactctagagcaaattcgagaaattcttgacgaaactatctcagaaaccgtgctatcagcagagcgcgaaatcattatttctctacgcgaaccattacaccaccagccaaaagcagattccttcaatcaagctctgcatcgaaattctcctatcgatgacatgctgaatattctttgcttccccatcttgctgacttacgacagtgcagctctctcatcaggatggttcgtaaattacgtagacaacctcaagaaagagatcgaaacccacttcagcgcgttcacctctgaactgtcggagaacatcaaacaagttaaggtgctcatcttcttggtgcctatggaaagtattgaacttctgaccaaagcttttaacgctcgctgcgaaaagctggaagaattacaggcataa

SEQ ID NO: 112243 - DNA, 765 bp, Enterobacter aerogenes
atggtggatagtcgtcagttcattaaatcggttaagcagaatccggaaaatttttttatcattcactactcgtgtcagaacctaaatgacgataatgatgctctttctccacgtataacttctatcgctataaatcacttctcttcagggcaatcggttagcttttcgactcattcaatctcagaggaaatgcacatcccgcgtgatgacgtgttagatcgatttgatgaagtcgagttagagttgttatcccagttttataagtttattagagatcgacgtgacaaattttgggttcattggaacatgcgaaatctaacatatggttttgagcatttagagcaccggtatcgcgtactcggtgggaaagatgcctgtgttattgccgttgagcgtagactgaatctaaacgaccttttagctgatcgatacggagccgactatgctaagcatccaaagatgctttcattgatggatcaaaatggcggcaggcatagagatttccttggtggtaaggaagaggtagaagcttttgaaaataaagagtttctacgcatgcatacatcaacactatctaaggtaggattttttagctctaccatgggtaagtttgtcagtggcaaactcaaaaccgcctcaaaaggatatggagtacgactcgataaactttttgaaagtcgcacagttaaatcgttaggtttgatctcaattatctttgggttacccgtagccatctggcaactttatctctggacagtcggttaa

SEQ ID NO: 112244 - DNA, 2967 bp, Enterobacter aerogenes
atgcctaattttttcagggattcgaatggtgctctgaatctagccgcacaaacgttagtgccaaaccaaggctttcgtgcaggtcaacttggtgccctgcatgctgcaatggcgcattactcggtctatgccgacccagcgataatctgccttcctactgggtacggtaagacatctgtaatgatggcactgccgtttctggttcagtcaaaacgagtgctcgttgttgagccatctaatgcgctacgcaagcaggtgtcatcgcactttgcggagctgtctaccctaaagcgtatcggtgctattccggtggatcttgctaacccatcggtgctccgacatgaagggagacctcaatcggaggaagattggcaggtcttagagagccacgatgttgtggtttcgaccccaagtagttcttcacctgcggttgcacctggcgcctcgccagacttgttcgatttaatcgtatttgatgaggcccatcacgctcctgcgagtacatgggctgcatacttagagcactacacgaaagcccggttcgtatttctgaccgcaacgccttttcgccgcgatggccaagtaattccagggaagctggtctaccgctacccagtaatgaaggccgtagatgaaggagcgtttcatcccgttgccttccgagctgcgcctattcaaaacacggttgatgatcatcatattgacttggtcattgcagagactgctgtaaaccaactgcatctggacttagctgcagggcatgatcatcgcctttttgtgagggctgcaacgatcaatgcagcgagagctttggttccaatctatcaagcgcttggagtcaacgttgaagcagttgatagtaagatcacgaagcgtacccaggatcgttgcgagcagcgtttggtcagtggggaactgcaggggatcgtctgtgtggatatgttcggggaggggtacgactttccgaaactgaaggtggccgcattgcacactccacatcgttcattggtaccgacaattcagttcattgggcgtttcgctagggtggataaggcaactggccaagcgacattgatcgcgccgctcccaagagttctggaggcacctagcgctcttctgaaagagggggtagatcttgcgagtatgatagatgctgcagcacaagcagagatggcaggtgatgctgctgagttagaaatggttgagcggctcaagctgcggcgaatggccgagtcaaactacgatgcagtgtcccctttagcaattgagctctatgcgcatgtctgcgtattccggtgctccactcctccaatcttcgctcagataaaagaaactttggggcgtgacctgcgagtagtgaagcaatgggcgtcagatgatggagccctgacactaatcctgacctctgacgaaaatccaccaaatttcgctacatccgatgtacttgtgaatattcggcatgatgcttttctgcttttatactttgcggactctcaactttgctatatcggctctactcgaagaactgaaaagatctacttgggattgatggacatgatttgcccccaaagttatcggtcattgagctacgaggaaaccagccgcgcgagagcaggtttggagggggtgcgattcttcaatgtcggattaaaaaatacgacattcaactcacaaagtgaaacataccgtacgttaacaggaccggcagcggaacgtgcggtaacggctggtgatagccgggcatactctcaagggcacttctttggaagcggctcgagcggcggagaaaaagagaccatcggagctagcagtagctcgcgtatttggagtaatcagcgtctctccatagcagaatttaaccagtgggtcgctcgattagatggtcgacttgctggcaatgctcccttctcagaaacacgcctcgatgttattcggtcggctacgacgttgcagaagctaccagacttagtgattgcagggacctggcccagagcaggattcaaggcaaatccgaggattaggattcgtcgttctgaggatcaacgcccgctctatagccgcctcactgaatgggacctagcagactttgactgcagacctttagaaggccaattactcttcagtattcactcagaggaagcctgtgccaatatgcttttttcgccccaggggcgaatggtgatattgcttgatcagaatgtggttttggagatcgaatcagctagcgaacaatggatgccgttagctgactggttgagtgaacacccgccgatgttctatgcctccgataaatcaacctttgaagggctgaatttaatgcttgcgccgcagttacaggcagtttcactaacaaaggacgatacgaaggtcattgattgggacgagtgcgaaatcaaggtcgagtttgtcatcgacaatgacactgaaaaagcacgggaacagcgtgcagagctacagggaaaaaggactgtacaggaacatctcgaacattacctccttggtctccctaacgtattcgtattgttttacgaccaccgttctggagaggcagccgactatattgccgtgaccgtgggggccaatggcgtcgtggacatcacgttgtaccactgtaaaggagcaggaggcgcccccagcggggggcgagtggatgatgtgtacgaagtcgctggtcagttggtgaagtccgttttctattgcgatgtatctgtacttcttgcgcatatggaggatcgaatgagtcaacgttttaagtcgccgtctaggtttgttgtgggtgatctgcagacactcaaggaaagactttacgctactcgggcaacccaacttggattcactgtagtgggcgtgcaaccaggaataagcaacgctgcaatcgatgcccacctcgcagatctaatgtcattcggaatctcttatgccatgcagggaggcgcaacaagagcctattggttagtgagtgaatag

SEQ ID NO: 112245 - DNA, 234 bp, Enterobacter aerogenes
atgccgtatgaactgtctcatcttaatgccctgtgggatgcgctggggaaaacaacggtcagggatgacgacggtaacgttgtgattgacgaacctttcctgcatttcccgacgggtacccctctcttccatatctggtcatggtttgaatccctgcacgacgggttcgtcgttgcggtgaagctgtacaacacatccgtcccggatacgtcaacagacaggaaaagcaaatga

SEQ ID NO: 112246 - DNA, 651 bp, Enterobacter aerogenes
atgcagccgcgttggctgccgcggccactgattgaccacgcaccccagatggtcgtcccagaatttgtcaagcgcgcttttacggttgaacttctgggtcagccgcgagaagggccagacggtggccatctgaggccgaaaggtatccagttcgctgtcctcaattgcctttttattcaccgcatagcaaatgctactgtaggttttaagcagcgcctggttgatacgatcctcaccgccgttggcaaacagctcgccgtccagcgagtagtgcttctcgcctatctccggaaagcttgcgccacagccgggaaagtagtaactgaagtagccgtcatcttccgctggcggcaactggccactccagttcgcggcatgataaagccggccgatattggtcagcggcggattacgcgagccatacacctcatcggctccctcttcattacaacaggtaccgtcaaagaacaggctgatatgcaggctggccgggcagcccggctccgtttttttgtccgatttatgatcggactccccgacatatccctccaggtactgcctggcgtaattgccttcggtctgcgttctgctcgcaggcaggcgcccgcgctcgttgtattcggttttctgctgcgtggagttatccgctga

SEQ ID NO: 112247 - DNA, 528 bp, Enterobacter aerogenes
atgctgccggacgtcaacggctgggatatcgtgcgcatgctgcgcgccgccaataaaggcatgccaatcctgctgctcaccgcacttggcactatcgagcatcgggtgaaggggctggagctgggcgccgacgactatctggtgaagccctttgcttttgcggaactgctggcgcgggtgcgcactctgctgcgtcgcggggcggcggtaatagtagaaagccagtttcaggcggccgatctcagcgttgatttggtcagccgcaaagtgacgcgtggcgcgactcgtatcaccctgaccagcaaagagtttaccctgctggagttcttcttgcgccatcagggcgaggtgctaccccgttcgctgatcgcgtcgcaggtgtgggatatgaatttcgacagcgacactaacgctatcgacgtggcggtgaagcggctgcgcgccaaaatcgataacgacttcgaaccgaagcttatccagaccgtgcgcggcgtcggctatatgcttgaggtgccggatggccgctaa

SEQ ID NO: 112248 - DNA, 453 bp, Enterobacter aerogenes
atgaaaatcaactttcccttactcgcgttggcgatcggtgcctttggtatcggtaccacggagttttccccaatgggattactgccggttatcgccaaaggcgtagatgtgtctatcccggccgcggggatgctgattagcgcctacgccattggcgtgatggtcggcgcgccgttaatgactttactgctatcgcatcgtgctcgccgcaatgcattgatcttcctgatggggatcttcaccctcggcaacgtgctctcttctattgcgccggattacacgacgctactgctgtcgcgcattatcactagcctcaatcatggcgcgttcttcggccttggctcggtcgtcgccgcaagcgtggtgccaaaacacaaacaggccagcgcggtcgcgaccatgtttatggggcttaccattgccaatatcggcggcgtaccggctgccacctag

SEQ ID NO: 112249 - DNA, 498 bp, Enterobacter aerogenes
atgaacccggaatcggtccgcatttatctggtcgctgccatgggtgccaatcgggttattggcaatggtcccgatatcccctggaaaatcccaggtgagcagaagatttttcgcaggctcaccgagagcaaagtggtcgttatgggccgcaagacatttgagtccataggcaagcccttaccaaaccgccacacagtggtgctctcgcgccaagctcgttatagcgctcctggttgtgcagttgtttcaacgctgtcacaggctatcgccatcgcagccgaacacggcaaagaactctacgtagccggcggagccgaggtatatgcgctggcgctaccgcatgccaacggcgtctttctatctgaggtacatcaaacctttgagggtgacgccttcttcccagtgcttaacgcagcagaattcgaggttgtctcatccgaaaccattcaaggcacaatcacgtacacgcactccgtctatgcgcgtcgtaacggctaa

SEQ ID NO: 112250 - DNA, 306 bp, Enterobacter aerogenes
atgagcaatttgacctcattcgactggtggctggcaacctaccttgtggcggccggcttcggatatgccttttacattggtcagttaatcgtaaagctactgctgatcagatttgccagccataaacgcatagacgacggtctgtggcgcctgggttctctgctggagactcactacggcgaactcaaggagaacgaaactatcactattcaagcgaagcgttttacggccatcatcacgagaacgccggaacagaaggtgagtttgatcaaaaagatagcaactgaacgagtcacagaaaaataa

SEQ ID NO: 112251 - DNA, 153 bp, Enterobacter aerogenes
atgattccatacatcctgttatcttttgctgggggcgtggccctcggcttcagtatctgtcgcgatctggtcaggcaggaactgaaaaccaaaacgcttcgcatcggtaagcgtctgtatcgggttgttcacgagacgggagtgcagaaatga

SEQ ID NO: 112252 - DNA, 213 bp, Enterobacter aerogenes
atgatcatgttaagtaaacgggagaaagaaactctgcgtgaaatcagccagtggaaacagttctacgccaactggaagccaaagacccgcgccaaactggaacgtatgaatcttgtcgctaacgtttcgccaaaaggatgtgtggagaactatcaactcactgaaaaaggacactcactgttacagcaattgactgaggcgggggcgttctga

SEQ ID NO: 112253 - DNA, 177 bp, Enterobacter aerogenes; identical to SEQ ID NO: 86002

SEQ ID NO: 112254 - DNA, 1323 bp, Enterobacter aerogenes
atggaaaaactgatcgccctaaagcacaagctggatgccataaaaacgatgggaaccaacgccaagaaagaggcgctggccaaccttgatgaatttgagcagagcatggtctcgctaatgctcaacccattcattcgattcggtgtgaagaagtacaaagtggccgagccactcgatacttccgtacccagcgatcagaaggtagtcgagctgctggagaagctggcggcgcgcgaactgaccgggaacgcggccattactgctgtcgaatcactcgttgcctcaatgtgcgctgacgggcaggacgtgtttcgtcgcttcctgctgaaagatccgaaagccggcgtcggcattagcctgtgcaacaaggtgttcgaaaacccaattccgaagtttgaggtacagctggcgtctccgtacaaggagaaaggcgacaaatacccatttaaacaaaacccaaaggccaagtggccaatgatcggcagcctcaaactcgatggtctccgggttatctgcgaagttatcgttgacgaggaagaggtgaacttcttgacgcgtaccggcaatccgattacgtcactcgatcaccttaaaccagccatgcttgagcgaggcagactctccggtttcaagcacatctttttcgatggtgagggtactgcaggtacgttcaaccagtccgtgtcggcgcttcgcaagaagaacgtgacagccattggtgccgtttaccatatcttcgatttcttcttaccggagtggcgtgctcaggcaaaaagcaaagagtacctgaagaccggcatgaagctgaaagagcgcctggctatgctggtggcgttattccgcaacacttgcggggaagattacgcgcaagatatccacctgcatccgttctacatcatccatagccatgaagactttatcgaacgcttcatgaagcgcctggatgagaatgaagagggggagatgggcaaagatccggattctgtttacgagttcaagcgtacccgcagctggtggaagctgaaagacgaggattccgaagacggtgaaatcatcgacttcgagccaggcgacccggactctggctttgcgcatacgctaggcaagatagtgattcgtctggagaacggcgtcatcgtgcgtgccagcggtatcaaacataagtacctggatgagatctggaacaatcaggagaaatatcgtggacgcatcgtcgaggttcactgccatgagaaaacgccagacggtagcttacgccacccacgtctgaagtggccgaaatgtctgcgagataccgaagaccgtattggagataaagactga

SEQ ID NO: 112255 - DNA, 477 bp, Enterobacter aerogenes
atgtccacaagaacagatttgtcgaaaatcccgtctatctccggaaacaacggttattcgctgcgctgtccggaagtgaagatcaacggccatgaggcccattgcagctatacagtctgccagcacaccatcctcgcttacaaagagaagcgcctcccggcgacatcgttccagtcctgcgctgcggccattgctgctggcaaatgccaggcgctgaagatgatggtcgaagagatccgcaaaggcgaacagctctacttcatcgatatggctgcgcttatcaaagaagtggaagagcaaaacgaccacgccagaacgctaacccggaagcgcaacaccatgacgattaacagtctggttaaacgcacgaagaaaacagaaccagccaaacccgaaaccacgtccaccgattcactggcgcccgtcactgacgtgtacgcggcactcattgaagaagcaaccaaagaaaacacatga

SEQ ID NO: 112256 - DNA, 795 bp, Enterobacter aerogenes
atgaaagcagatattcagaagtccgttaccgaaattatcgacaaatcaggcgtagaaattgatacagaagggcgccagaagattatcgatgaggcgatccaaactgcgctggagcacatcgccacgtctgtgagcacagcacctcttggggaaggctcgaaatacatgcgggtatgggttcgttttggagagtccccggagctgcctggtgttaaacagaaacgcgcggcactcgtggcgttcactcgcaaaatgaaggacgcaacggtcgaagtacgtgccggtgcatggtacgacggtcgcgttgtctacaccaatcaggcggtgtgtgatgaaggtgaacgatttgaggaaattgtcgacgcaactcttcgcgcgatcaaaggcagggctggtgtagaggatgatccgtctatcgcggcgttcctgagcattgtcgaactgcctgaagttaccgaacgcgttaccgatctgacaacaccacctggtttgctggaattggtggtcagtggcgataccaaaaaagccgttgagcgcattcgtgaggtggaatacggcatcatctgcgatatgtgccgcagcgacttagacctggtgcgcatcattgttgacgcgggtcaggcatgtgacggtgtgctcgccagttttgcagggcaggtggcacgcctggccaacgagctgccgatgattaaacaggaggcaaaatcatacgccgtccaccatgccaacgatttactggagccataccggttcgaagccgctcaggacaaaatgactggctgggcgacctggtaa

SEQ ID NO: 112257 - DNA, 1116 bp, Enterobacter aerogenes
gtgagcgacttgaaagaattactgaccgagctggattttgaacaatggctcgatatggaaggaatcatctaccgtcgtggtggcgtcagtactcgtggacgtgaggtgaatatcaaggagtgtccggtatgcggcagctcaaactggaaggtttatttcaacctgaccaatggcgtcggcaaatgctttgctggtgatcatcccgaagagattcagttcaacaagctggtcttcctcaagcactacagcggcaaatcccgtcgcgattttgaagagtacgtccagaacgcgctgatctcacaaggatgggcgccgaagacggaagaggtcgtgctggccagcaaggttgaactcgaagggccagtagctctcccgcgccattacgaactccccattgacggtcgtcttcctgattatctggtggagcgccatatctccccggagctggccaaatactttgatctgcgttactgcgtcgaaggcaagcacgcatacgtcgatccgtacacagaccaggtcaaagggcaggtgtttgatatgcgcatcctgataccggtttacgatctggatggcgtgatgaagaccttccaggggcgtgacattaccggtgcagcagaacgccgttatctcttccccatgcagctgccggcgtcgggtaagtttctctacaacggccacaatgcagtcggaaaacaaacggtcgttgtgtgtgaaggggcatttgacgtaatgggcgtgaagcgagccatcttcgacgaagagacgctgcgggattatgtagagccaattggcacgttcgggatgcacttgtccggaaatatgaatgaggacgctgaagatcagttaggcgcgttcctgacgctcaaggcgcgtggattacgcaacgtcatcatgatgtgggacagcgaaaagcaagcgatccgcaacaccatgtcagcggccaaacgtctcaccagcatcggactgaatgtcaaagtggcctgtctgggcgaagaaggtctcgaccccggcgacgcgacgccagagcagatactaaaagcctattatcgtgccaagccgtactccagacagttggagctacaaagcaaggtactcggcattaaagctcttgtataa

SEQ ID NO: 112258 - DNA, 1341 bp, Enterobacter aerogenes
atgaccgaactttgccacacaggacgagggttgtctgaagagttcgacgacgacttccagaatcgactcgcagcctacttctgtcgcgaccatgagtttctgactcgcgccggtgatctggttgcgccaaaccagttctccaatgcggccaacgccattctggtgaacatggtgtcgggctactacagaatgtataagagcgcaccatcatcgtcggccatactcgacatgctcaaacgcgccaaacgcgataagacgatccgcgaagagctgttccccgacgtcgttgaggcgtttaagcggattctcgctgagaagctgtcagacacggcgtacatggtcgaccaggtcgccacgttcgccaaaagcgtagcattcgacgacgcgctgattaaagcggctgagatgaaagagaagggcgatttccagggcgcgatggcaatcatggctaaagtccagcaaatcggctctaacgaagcgaccggcatttacgattacttctctgaatcagcagagcgttacaaggcgcgtgagtatgaagcgtccgacgattacgtgccaaacagcatcacaacgggtctaccgctgctcgacaagctgctttaccagaaaggctgggcaaagcgtgaaatggtgctgttcatgggcttcgcgaagtctggtaaatcgacggcgatgggtgagttctccatcaacgccacgcttgccggttacaacgtcctgtatctgtcgctggaagttcacacctccattctgtcagatcgctttgacgcccgtctgtctgagaccgaaatgtccaagctggtggagcgccgcgacgacgtccatcgcaaactggcagagctgggcgcgacgaaaggcgtggggagcttgtggattgttgaacgaccgtccggaagcatgtcgcctgcagatctggatcgtatgttgggcagcatgaaagccaatggcatgatccccgacatggtcgtggtcgactacgctgacctgatgcgtgccagctacgacctccgcgacgaccgcgccaacattcgcagcatctacactgacctgcgtgcgctgtacgacaaacacaacgttgccggcatcactgcatcgcagactaacagggaaggtggtgcttctgaggtggcaacaatgatgcacgcagcggacaacatcgagaaggtgcgtatcgctgacctcgttatcacgatcaacaaaacggaagaggaagaggcgaaaggcgaagcgcgtctgtacttcgctggttcacgtaaccagaaaggcggcgtaagcatccgcgttaagcagaacctcgaacaaatgcgattcatcgaacgcattatggacgtcctctaa

SEQ ID NO: 112259 - DNA, 726 bp, Enterobacter aerogenes
atgagccagatcttctttaacactattaacaacgaccagtacgacttcatgaccgagtgggacaccacagtcatggacaagtgggtggccgagaatattgggctgtcacgctgcaaggatgaggctgagttgttcgagacaaagtggtttgattaccgcgacatgcacccgcttatggccacatgccttttcactgaggcatacaagcgccagtactcatacatcatgctgtcgcatggccgcgaacactatgagacggccccattcacaaccggtttgaaacgtgtgccgtatcaggagctgtcgacggcgaacaaaacgtctctctggaaagcacgccagtttgccgaccagtactgctgctcttatgactacttcatttctaccgttctgtccgcagctgcacgccgtctgtgggacaaattgcctcgcccccagcatctctggcagcccgagctgatcgagatattcgaagagaagttagccaaacgcgctgtaacccgtctggatgactctctggtgagttttaagcatctgggagatatgcagcacgacccgattcaagaacgctattttgagtgggttctggagcgtctgcgtggcattacccgagacaagcgcgtccgcatcatcttctccgctgtctggttgatggaaatcgtgcctgagcgtgtgatttacgcgcacttcccggaagaactggaagaagcacggcgattctgttga

SEQ ID NO: 112260 - DNA, 759 bp, Enterobacter aerogenes
gtgctgtacaaatacgtagggcatgaagacccaaacgaattaatcaaaattcttaaattcttcatcgaagatggaaccatccgagccacccggccacacgacttcaatgaccctgccgagttcaaagccaaatttagttttgacgccacgatcccggagaagcgtgtccgatattatgagatgtggcctggcaaaagcgacgaggacggtgagaactggttaagagggcgaaccaaaaacgccgaagagtttgacgcctatatgctgcgcggaaatctgcttttgaataccggtgtgatatgcctcaccagaactgacaccaattacctgatgtggtcgcattacgccagctcccactctggattttgcatagggtttgatgacgctattgtggaagcgctggatgaccaacacacagcgttaaacggtgatgtggagtacgtgaaatcgccgcctgaagtgaacttctataccgctgatgtgtacgacattgtcagagccatctttctgcacaagggtgagagctggaagtacgaagaagagttccggattatctctgagctgccagggattaagaagttcgacacctcgctcatcaaagagatttctatcggatgcaaaccctatccagagctggaaagttttgcccgtgaactgctggacagcaatctggccgtgtacaaaatgctttgccctaccgactcgtaccaactgaagcgtgtggagctggacaagaaccttacttttcaaggttactag

SEQ ID NO: 112261 - DNA, 360 bp, Enterobacter aerogenes
atgtccatgagaatgggagaccttgcaaagcgcaaagagccggaagagcagccaaaaagcagcaccccaatgcgccagccagtcagaccgcaggggcgtccgactcgtgggaaagagaagattaagagccgcacaatgtcgctggaagacgagtatttcgatctgctggagatgatgaaattcatccctcgtttcgagaaattcacccgttctgacgtgattcgtgcagccattttccatctggcagagaagtcgccgcaggaaatcgaagacatcgtgaaactgaacgaggcgatcacagctgccgacgtcacgatgcgcaccgatgaaatcaaacgtgagttgatgaagaaaggttaa

SEQ ID NO: 112262 - DNA, 750 bp, Enterobacter aerogenes
atggcaccttctttaattgatgaacgctaccacaagcagttgaacaaaatgccgctctctatgggcggctatactattttagagacctttcatttcgcgacaccagaaggcgatgttgttcgtctggtggagatgcgtgccgataaaggcgagttcgacaactttctcgttgtgtatcttttgccctcctataactcagattatcaatttgacgaaatcacgcgggttatggatgacgaggggatgagtgcgtttgaggctgccgaacacatcatcaaaattgagatcgtggatgcgactcttagcccagaagagctgaaggttgtgggtcggtttgcctataacgatttttcgtttattggcgtcgatgggaatgaatacctcggtaagcaaatcaaaggcgcttatctcgaaccgccttttgactcagcccgcataggctctacagcatatcgcttcatactggacaaataccgccacctcgtttgcgacaatttgcaaaccattctgggtgcgtccatgtggtcaggtactatgcggagatatggcgaggttatgatctacgataccgtgaaaaaatgttgtcttgaccagctcggcgacaaggcaaagggttctaccaccggcttcctgccgtgggatattggcagtttgcctttaagtcgcgtaacagacgagtggggagaccgcgagctgcgacttgataaaggctcttgtacgcacatcgtcaacatcatctctctcccataa

SEQ ID NO: 112263 - DNA, 423 bp, Enterobacter aerogenes
atgctcaactatcatgacaaaacacgtactatgcaaacgatccgcacgaacactgcggtagtcgatagcttccctatgcgttttcataacagtgaagactcagtggaagtgcgccgcatgttatgtcgcgaaacagctgaccgccagcacttcattgtcacattcaaaagcgatgttactcgcgcagagaacatctccaacagcacctcaactgtaactcctttggcagaggtcgttgtgcgcaataacaaattgcgctttgttctcaagccgcaagaacagtaccccgaaattgttgatgttaaagaatccattgttccaaaaattgagaaagccgttgtacaattcatgaagaataagttcaacgacctcaaggaaagcgttttaccagaacgcaaaaaagaacaatggcaccttctttaa

SEQ ID NO: 112264 - DNA, 243 bp, Enterobacter aerogenes
atgagacatttaatgaagtgcggcggaaaggcgcttctgctgttcatcgtgagctgcatggtaagtgggtgcgtgattaagacacagacttccggcgtgctcttctgcgatgcagccaaccctatctatgtgagtaatgaggatttaatgaccgaagagacagagcgacagatcttgactcacaatatggtgggcgagcgtttgtgccaatggagcggcaaaaaagcagacggaagcgcgtaa

SEQ ID NO: 112265 - DNA, 693 bp, Enterobacter aerogenes
atgaaaactccaagaggtattcgtaacaacaacccaggcaatctcgataaggggtcgccgtggcaggggcttattagcaacccttccgaaccacgtttctgcacgttcaaagatcctgtatgggggattcgagcgctggcggtaacgctcatcacttaccacgacaagcgccgggcgaaggacggctcaagcatcgataccattcgcgaggtcatcgagcgctgggcgccgccaaacgaaaacaacaccagtgcctacgtgaacgaggtatctaaagccgttggtgtcaccccggacatgatcatcgatctacacgactacgacactctgcgtccgctggtagaggcgatcattcggcacgagaacggccgtggcccactgaaaacgccaaacacctggtatgcggcagaagttattgaggaaggtctgcgtcgcgctggcgtcgttaagccgatcaagacggttaaagcggttcctgtgaccaaagaaacggctggcgcaactgtcacggcaggtattgggctggcgcagctggccgacgtaatgccccaagtgtctgtggcgatggataaggcacaaggtcatatcaccagcggtgatacggttcgtatcatttttggcgtagccaccatcattgtggccggctttattgcctggtctcaggtacgcaaacaccagaaagggatggtttaa

SEQ ID NO: 112266 - DNA, 324 bp, Enterobacter aerogenes
atgtcgaacgagatggcaggcgtaacgcctgagcaggttgaacgcattgccgcaatcgttgcgcgtgaagtcgttggcaaattaggtaaggagttgcgtgaagaaattggccaggaggtcaatgaccagctcaaaacctactttggcgatatgacgcctgcacaacacagcattcagcactccaacctggacaaacttcttaaccggctcgacaccatctccagcgggttctttggcggcattatctcaaagattacgtcgttcctgattaccgcgctgctgctggggttagccgcctacggcgtcaagaatggactgcaataa

SEQ ID NO: 112267 - DNA, 234 bp, Enterobacter aerogenes
atgaaaaagatgatattaattttaggtatggctttaactttgactgcgtgccagaaactaccagagccggtttgctatgggcgagcaatggtaggcggcgttgacactggtgtgccaatctatgcgattaagaaagaagggcattacacattataccgtgcaggtagtgtctttaactggcgttgggtcggctctggtgctttcacctcactaagctcatgcccaaaaatttaa

SEQ ID NO: 112268 - DNA, 609 bp, Enterobacter aerogenes
atgtacggaagcaaaattgttcgttctgatgggaaggtctggatgtctccaagtcttaccccgatggtgttccaaagtaagcatgtggtgtcgttgcgaggcggaagtgagttcaatactggcctgtctccagatcggtcgcctattgttttcgttgcttattcaaaggctgtttcgctgctcgcaagccgattagttcgcaataaccaggttatttacagcttcggcggggtaggcagcgactccagtgtaacggtgtatgtgttcgcaactggcatttcaaaaaaagagaagtgggggatgagtttctttaattcatcgggagtggagatctataacacggcaaatattccattgtcatttacgtttcttgataataagagctggaacagcggagataaacacaactttgattatccagtagctattgtgcctacatatgctaacgcattcgccataccgatgccgggtggtgcgaagaccctagtatacggttacacatgttatgggaacaccgtgagttcgattctcgttaatgaaattaacggtggggctacattagctatcaataaccgagttccagttttgaacagaaacctctacggataa

SEQ ID NO: 112269 - DNA, 255 bp, Enterobacter aerogenes
atgagttatggagcaaaaatctggtcgcctagccgtcaggaaatggttgacgcattagcgccaatttattatctggattattttctaccgacaggtagtggcagcagaagttatgcaattgagccaggtatgtcaattgattactacataatggaaacaatcaatggatatattggaagtgtttcggtatcgggcaactcgattaactggtctgatgctcgcggtacaatttatatattggtgtttcagaaataa

SEQ ID NO: 112270 - DNA, 537 bp, Enterobacter aerogenes
atggctattggctccggatgggtcgggtcgtcagccgtcgcaacaactggtcagcggtggatgtccgccgctggctcggctgttaaggtcggcacaccgttctggatgagtggcttggttggtaaatctactgccgactttaccatcacaactggacgcagtacttatgatgcccgcgtgcaggtaacaaacatgcagtgggtcgttgtgtccactaactacaccggttttgcaaccgctacaggcagtatccagaatgtactcagtaacgttctaaccgtgcgccctactggttctctaagcggtagcttgtttggttgtgaaatccgacatttttatcaaccaagcggttatcaaaatctctatttgggattggttaatgggcctgcacaaaactttaatctatctcttaatggtactgtgctgtcgtttgtcaattatatgtacctgaatggggtgcggacttattacgcattaactgcacaaaactggtttttcaatcaggtaggagcgacgtttaccgtctccagagtctga

SEQ ID NO: 112271 - DNA, 3555 bp, Enterobacter aerogenes
atgtggtacagggaaggtactatcacatttacacaggggagtgacacactcaccggcaccggtacgttctggaacgtaaccgcgaatggtgtgctgccgggcatgattgtcattggccctgataacaaactgcacgaaattaagcgcgtactcaatgacaccagcctgctgctggtggagccgtattcaggcgaaacccagacggaagttccgtgccgcatcattacaacctatgagggcgatttaacgcagttcagcgcacgttttaccgcgctaatgacccgtatgtcagccgactcgaagacgatgcgcagctggttgacagctgttgatgaggtcacgcttgagcgtgaagacggtacggaagtgaccgtgaagtcgctgacgcagatcgtcaatgagcacaatgccaatcagcaatggtacaaagacaataccgacgctatcgatgccgctggtgaaaaggccaaagcagcggctgccagtgctgcggccgctgcggaaagcgccaatacagcgacgaccaaagccaccgaagcaagccagagtgctaccgccgcagctgcatcagaaagcgctgccggtgtaagtgcatccgctgccaaaacgtctgaaaccaatgctgaaagcctcaaggtcgatgctgctgcgtctgccgcgacagcgtctgccaaagcgactgaagctggtgaatcagccacgagtgccgcggcatccaaagatgcggctaaagcatctgaagctcaggctgcgaccagtgcatccgaagcctctgcttcagcgtctgctgcgtctgactctgctgctgctgcaaaaacctctgaaaccaatgcctctgcctcagagcaggccgccgctggtagtgcagctgatgcgctggcctcgaaaaatgcggctaaggagtcagaaactcatgctgcttcgagcgccggggagtcggtggccagtgctgctgcggccaaagtttcagaaaccaacgccgacgcatcgcagaaggctgctgctgagagtgaatctgccgcaggtctgagtgccgaggctgcggctaatagtgcttcggcatctggcgaatacgctgatgctgcgttagccagcaaagaagccgctgcattgagcgcaggtgaagctaagaagtcagagacgagtgcagctgcgtcggcaacaacagcggcagattctctggctgggatagaagtcaaagcgaatgaggcggctgagtccgctgtgctcgcatcgaagaaggcaaccgaggcgtcaacctccgcgggtgaagcaaaaatatcccaaacaaaagcgaaagagtctgaggataaggcgtatgagtatgctcagaatgcccaatcaagtgtagcgagcgtgaagtggaaagggacttccgcagagatggacctaactaccgattcgcctaaatgggtgaagatttcgcgcgcacgtatgccgcagtcgaccagcaccgtttatatcgagatcattggcggtgcgggatatgaagtcaacagcccttatcaggcggcaatggccgacatagtgcttcgaacagctagtggcgatccgcgtggcctgaatgtagttacctatcgcacaatggattctgccgtgcagaacgtagccactgtgaacaccgatgaggacaactacgatatctatctgaatgccggtgcgggtgctcagaagctgattgttaaccttcagttctctggcgcagcggtagagaccctggaagtttttgaggttctggatacgctaccggaaaacgccgttgtgggagttgtttatcatcgtgtgctttccgatgcagatggctctattaccggatcgctcatgggtaacgcaagttcagcgactgtactgcagaccgctcgcagcatcggtggcgtattgttcgatggcagcaaagatatcgtgcttccgggggtgaatgctcagggcaaccagagtacttccggtaacgctgcaacggcgagcaagctccagatcgctcgtagtatcggaggtgtgtctttcgatggctccgcagatatcaatctaccaggcgtaaatacatcgggtaatcagaatacttccggtaatgcagccacagctacgaagctgcaggcggcccgaaaaattggtggggtttcttttgatgggtcagccgatatcaacttacctggcgtaaacacagcaggcaatcagagcactacgggcaatgctggtacggcgacaaaactgcaaacagcgcgaaaaattggcggagtttcttttgatgggtcaactgatatcaatttgccgggcgtaaatactgcgggtaatcagagtacaacaggcaatgcagcaacagcgactaagctacagaccccaagaacgattaataacgtgtcttttgacgggtcagcaaatatctccattcccacacttgtgtcatgcgggagagtcgcagcgctggaagctaactcccagggggcaatgtccggcatacaaatgtatgaagcctacagcaacaattacccaacgacttatggcaacgtcattcatcttaaaggtgcggcgtcttcaggtgaaggtgaactattgattggctggagcggaacgagcggtactcatgcgccagtttacgttcgttctcgccgtgatgctagtgatgcaaattggtcggcgtgggcacagctctacaccacactcaacaagccgagcgccgcagatgtgggggctttgcctttgtccggtggcacgctttcaggtggtctgactgcagcaggggatatcatttccagatcggccaacgcctaccgcgcggcatatggcaactatggtttctttatcagaaatgatggggggaacacctatttccttttgaccgcatctggagatccgcttggaagttggaatgctttacgaccgattactattgcaaacgcaagcggtgcagtttcaatggggaatggcttgagcgttgggggaggggtggatgtcacgagcggaaatatccgaatcccgacgtcgagcacatcgtggatcgacatgaggactaacgcagcgctttcaaacagttctgctgtagcaacgtcctcagcatcagcaattgttcgtcaagagcacgccgatcgttactttatggtcggtgggttggggaactcgcagttcgggttctacatgattaacaagtcgcgtactgctaacggaacggatgcacaggcttttctgcagagcgatggcgtgtggtattgcgggggcaatggtagttttaacgacgtttatattcgctctgaccgacgcagcaaacgccagatccgcaagattgagcgggcgcttgataaagtggagcagattgaaggcgttctttatgaaattcaggtctatgaccgttacgaacagtctggtgggcttatcgcgcaggacgttcagaaggtccagcctgagctggtaactgtcgaccacaatgatcagtccggccaagcgcgtttacgtctgaactataacggtgtgatcggcatgttggtcgaggctgtgaaggagttacgtgaagaagtgcgcgaactccgtggagaaatgtctgttttaaagggaggtaattga

SEQ ID NO: 112272 - DNA, 4158 bp, Enterobacter aerogenes
atggaacagttcaagaagaaaaggttgcctctcctgatcgcaggtgcaggcggcaagaaaagcagcagctccagccgcacgccggttgaagccgatgataccgttaactcgcgtgctatggcgtctatcctcgacttgctcggggaaggcgttattggtggtctggttgacggtgcaaaatcgattttcatcgatgatctgccgatcctcaatgaagacggctcggccaactatagcggcattacatgggattttcgcgacggttcgcaagaccagacgcctatggctggctttgattttgttgaaacgcccaaatccatcaacattcagctgaaaaagacacatgaggtgacagtctccatcgataacgatgaagctgaccgcgttcgcgtcatcctcaaatttccctctctgcgtagcgtggataagaaatcgggtgacaccaacggcacaacagtcaaatacaagtttcagatcgccaatggcgatggaacatttgctgatgtagttgctgaaggcgagaaaagtgttgaagttgccctgacagcgaagaagacaggtgtttactaccgcagctacgaactcaaactgccgaaacctggccgcgcatataaggttcgtgtcatacgcctaaccgacgacagcaaaactcagtatctctataacgatacgtgggtggactccatcggtgagatcgtcgatacgccaatgaactatccgaactctgcgcttgttggactcaaggttaactcagagcagttcggcagctctatgccttctcgttcgtatctggtgcgtggtttgaaaatccgcgtgccgtcaaactacaacgagaacaccaatacctatgttggtgtttgggacggtacgtttaagctgctgtcatcttctaacccagcctggattctcttcgacgttctgaccaacgcccgatatggccttgggcagtttgtctctgagtccatgattgatcttggacagatgtatcagatcggtcgctattgcgacgaagaggtcgacgatggtttcggcggcaaggagaagcgtttcgccatcaacacccagataaccagccggcaggatgcttatcgactgattcaggatatcgctggcgccttccgcggtatggtcttctgggctggtggaatggtcaacgtcatgcaggacagtccgtcagacccggtcatgatgtttaccaacgcaaacgtcaaagatggcctgttcagctataaaggttcagctcgcaaagatcgtccttccgttgcgcttgtcacctacaacaataaagaagacggctacaagcagaacatcgagtacgtcgaagaccaggaggcgatgcgccgttatggcgagcgcaaaactgaagtggttgcgttcggttgtaccagccgtggacaggcgcatcgtgtcggtttgtggttgctgtataccgctcgcatggagtctgacgttatcacctttactgcaggtctcgatgcttcgttcttgatgcctggtgaaaccgtgctaatccagaacaagtaccgttcgggcaagcgcaactccggtcgcattatgtcctttaacaagagcagcattacattagacgcaccagtatcgttgaagaaaagcggcagctacattcgcatcttgaaccaggaaggcaagatcgtcgaacgcgacattctggagacgggggagaatatcactaaagtgacgttctcgaagtctctggcatccggcgaaatgccagtaatgaatggcatctggactatcaccgaaccagacctggagccaatgcgagtacgcgttatcaacgttgcacagggtgatgcgcaagggtctttcgatgtgacggtcgtccagaataacccttcgaagtacgaagcgatagacaatggggcgacgctgattccggagaacaacaccgttctcgatccaacatactcgaagccgacaaacctgcaggtgacggaaggaacgtatatttccagcccaggcaacctttccatcaagcttattgcgacctgggaaggtaagtctgctgagtattggatcagttggcgtcgctcggacgagaacaacgtttctaactggcagtccgcgcgtgtcactgaagagcagtacgaaatcatcaatattgccgagaacggccaatatgatatccagctttatgctgtgtcattcagcggcaaaaagactgagatcatcagtacagtctataaagttcagggaacgatgacaccgccaggcgcaccgactgcgttgacggccgtgggtgactatcgcaacgtgattctgaattgggttaaccctgattcaatcgatctcgaccacatcaacgtgtatgcgtcacagaccaacgacctggacaccgcaaaactgattgccgaggccgccagtactactttcacccatgcaggtctgggagatagcgaaacgtggttctattgggttcgcgcggcaaataagagaggcatgttgagtccgccgaactccaatttgggtaccgaggcgatgacaaaggatgttctctcattcctgacagggaaaatcacatcttctgagttgggacaggagttgcttgaggaaatcgactctaaggtttctcaggaggctgttgattctatctatcagcagatggaggaaagcctcaaagatctcgatgacaagttgacggcggcagatcagagactagaagaagcgcaaaacgggcttaaaacggaagtgtccggcactttggataaggtcaatgacgctctgcaacaggttgaagattccaatgcggctttagttgagttacaggaaactgtatccgagcagggcaaagccgtagctggcgcggtcgaagcagctcatgcagcactcgataatgcttctgcattgattgccgaagaacgtgaggcccgagtagaaggcgatatggcgaacgccaaacagattgaggcgatgaagtcttctgttgacgatagcgttgctgctgttgaagagatgaagaaaactgtggccgaagtcgagcgagccagcgcggaagtaaccaccaatattgaggcattggccaaaaccaatatcgatctcgctctgcgtcaggatgaagaccagcacaagcagatggtcaataacgcgaagatcgcaaccactcagaagacgtttgccgacgatatgtctgcaatggcctcgaaagtggaagagatccgcgcagaaattggtgaagatattcgcgcttctatcactgaagaaacgacggctcgtgttgaggctgataaggctattgcgacccaaataaccaagcttgaagctcagattaacgacgatatcgctgcggcaattgtgaccgaacaagaggctcgtgcaacggcggatgagtcgttgtcgaagcagatcacaacattgcaagcgaaggttgagggagatatcagcgcggcgctggccgaagagcagattgcaagagcgaccgccgacgaatcgttggcacaacaaatcacaacactaaaggcccaaacaggtgccgacattaaggcggctgttgcggaagaaacgaaagccagaaccgatgccgactctgcgctggcagggcaaatcaccaatttgcaggctcagacaggaaaagatatcagtgccgctattacttctgaagcaaccgcacgcgcggaagccgataaagcactaggtggtcgtattgatacgattaaggctgaagtagatggcaactcggccactatccagcagcaggcccaggcaattgccgataccaacaaaaaggtttcgacagcgtggacgcttaaaatggagacctccacgagcggtggccagaaatatgttgccggtatcgcgctgggcattgatagcacaggtctttctcagttccttgttcaagcagaccgctttggtcttgtgaactcggttaacgggaaaatcaccacaccgtttgtggtcgaaaacagcgttgcttacatgaacggcgcttttatcaaggatggaacaatcaccaacgccaaagttggcgacctacagtccaccaactttatctctggccgttcaggatggcgctttgggaaaaatggcgtgctggagatcaacggcaatagtggcggtaacggtcgtctggtcatcaacggccagcgtatcgatgtctatgacgacaacaacgttctccgggtgaggattgggcttctttga

SEQ ID NO: 112273 - DNA, 591 bp, Enterobacter aerogenes
gtgtctgagttagttcatgtgcaacttggcggccctatggccaaacacttcggtcgtcactggcatttgaaggttcgcaacaccaagcaggctctggatttgattgaggctaatcgccccggattcaaagcctggatgaagcgaaacctcaaaacctacgacaaataccacatccagatcaccaacaagcagggccacaaatggtcggtcgacgaaggtgagtaccagatgatggggcagtccgacaacatcgcgaagatccgaattacgccagttcctcgcggtagtggcggctctgcgtttggttggtttcagacggtggtgggtgctgttttgatggtcgcctccatctgggttccagccctggctccgctcggtttgtcattaatgatgggcggcgtcgcgcaactcatttcgccacaggcgacgaacgacagtgtgagacaggcggataactccgactcgttctatttcgatgggccgcagaacaccactaaccagggaaacccggtgcagctcatctatggagaggaaattttggttggctcgcaggttgtgagttcttctatcaccatcgaccagcttatgtaa

SEQ ID NO: 112274 - DNA, 798 bp, Enterobacter aerogenes
atgggtaataaagtgctccctgagcttggctcggacgttatgcaacaaatctatctgacagccatcaaacgctacccgaacgaagcgtgtggctttctggtgcgcaccactggcgagaaatatcgcttcattgaagcccggaacgtgtcggagtacccggaaaacacgtttgttatgcacgctgacgacattatcgctgcggaagatgcgggggacgtggttgccatctggcactcccacactgacgaatcagctgatgcgtcagacgccgaccgagccggatgtgaggcaacggaagttccgtggttgattctggctgttcggaagaatgtcgagggcgatgcgccatttcacttcagtgagatgaatgtgatcaccccagacggctttgagatgccttatctggggagaccctatgtgttcggtgtcttcgactgctggatgctttgccgcgactatctcaagcgcgagtttggtgttgagctgaatccgaatgcgcacctgcatatcccgtcatggtacacgggcgacaacgacattctcgaccagaactatcgaaatgaagggctggtgcgtcttgcgccagggacggaaccgcagcgcggcgatgtcttcttcatccagtacggaaaaatgcctgaccactgcgcggtgtatatcggagacggcatgatcctgcatcaccagatcgaccgcctgagttgtcgcgcttattacggtggcatgtaccagaaacacacgacgcaccacctgcgtcacagagacttactcaagggagatgagacgtgtctgagttag

SEQ ID NO: 112275 - DNA, 699 bp, Enterobacter aerogenes
atgggtattaaagctgatattcagagcttgtcgccctccgcgctcattgagttgttcgaacttgatatgtcgaacaccacctctgggggcaagctgtttttccacgccggcacaaacgaactgatggagccagtcgtttggcagggtgtgtcctacgaaccgtggccaatcaaagcgtcaggctttgataagactggtcagggtactttgccgcgtccaaaaatccaggtctccaactttgccggaactgtctccgctgaagttcaggcaaacgacgatctggtgggttgccgcatcatccgcaagatgacgctggcgcgttttctcgatgcggccaacttcaaagacgggaatccaaccgcagatccaaatcagcacttcccggatgagatgtggttcatcgaacagaagactctcgaaacccatgaggtcgtcgagtttgagctgtcgagtgtgttcgatctgatgggcgtgcagctgccgtaccgccagatcatcaaaaacacctgcccgtggaaataccgcggcccagagtgcggctacaccggcccatatttcgacaaaaacaaccagcaaaccaccatgtcaggcgcggattactgcacgaaacgctacgactcatgcaacgctcgccgtaactactttgccaatggcgtaatccactttggcgggttcatcggagcaacacgttatgggtaa

SEQ ID NO: 112276 - DNA, 336 bp, Enterobacter aerogenes
atggaaagactgacttttaactggtatcccgactacgagtcggaaaagaccgtgaagcctaacgtggcggttctgaatttcggtgacgattacgaacagcgccaggccaaaggtctcaatcgcatcaaagaagagtggagcctgacatttacgcgctcttacgacgtcatcaatgccgtcgatgactttctgacggcacgcgcggccgttgagtcgttctactggacgaaccctcgtggcaaaaagattgttgtggtgtgcgacagccatacggtcaaacgttaccagggctatcaggttctcactgcgaccttcagacaaatttatgaaggataa

SEQ ID NO: 112277 - DNA, 4572 bp, Enterobacter aerogenes
atgtcacaaaacgtagagtttatcctgtcgctggaagacaagcagtttacagcgtcaatcgaccgggcgggtaagctacttaccagattcggggagcaggccacaaagccagctcagaaaattaacaatctggaacgctcgttgggttcggtctcccgcatcatcggcgttctggagtccaagctcgatgccacggcagacaaactacaggatgtagctgccggcttcgagcttgtgtctgatgtttcgcgcaagacgcgaggcaacattaccagcctcaactcaggtctcaaaaccctgattgagcgcgtcgacacaaccacctcatccgttaataagctcaccacatcgctgcgcaaggttcagtctgaactcaacgagttttccgattgggcaacgttcgctggcaagagcgccagccgcttcggtacggaggtaaaagaagcctcttcctccgtgagtggcatgaatacgcgccttaacaccacgacgaagcgtctcagtaattggggtgtcacaacgagccaggctgccgaggggctgaagaaagtccgcgatcagatggatgccgtgattggccgccagcaactgatcagcaagccggtacgtgtacgcaccagcggctacggtgatggcggtggtggtcgacacagcggttcctatggccacggcgggcgtggtgctgaaagtggtgtgttctctggtctgcgcggcaacattttcttgcttggcgagattggtgatgcggcaagaacggtaactgacatcctgttcggctggcagaagccaatcatcgaagccgcctccgaaatggagcgtatgcgtgtcatgttgcgcgggctgaacaaggacaaggccaaccctggcaaagcagccgcagaggatatgcagtacatcgtggatatggcgcaaaacgccccgtttgcgatgcaggctctgaccgattccttcgttaaattccgctcggcaggtctcgatcctactgacgggtcgctgaaagcactggtggactccgttgcacgcttcggcggcgatagcgaactgcttaaacgtgctgccgtggctgtccagcagatgtccggtaagggcgtcgtgtcgatggaagaactgcgtcagcaattaggtgaagccgttcctaacgcgatgaaagcgatggcagacgctgccggtatcactatgggggaactgaccaaagcagtctccaccggtactgtggaagcgaaacaggcgctatcgctgatgttcgttggtctgcgtgcggagaacgaaaacgccgccaaagacatgatgcaaacctacactggtgcgctggcgcaattgcaaacctcctttacgctgtttgccgatcgtgtcggtcaggcgggctatctggattctctcacaaaggggatgaaagagcttgcttccatcatgaacagcgctgaaggcatttcgttcgctaactcgctgggttccggactctccacggcgatcgacggcttacgcgagctggcgcagtggctggctaaaaaccaggagctggttatcagcctgggcaaagttgttgctgcgatggtggcgttcaagctgatgcgtgccgggattgcaggtgtgatcggtactgccgggcaaatggttaacacatttaccaagatgtcgaccgttctccaggctccgttcaatctgggcgcgacagcggtcacccgctttaatcgtgcggctcgtatggggctggctccaatcccatcgctgatcttcgctatccgtggcgcgattacggggcttcagggcgcgtttgctgggctaactgcgttcattgcagcaaaccccattggtgcagcgttcaccgtagctaccgtggctgtagccggtcttatcacgtatatgaccatgctccgcagcgaaacgtccaaagttgtggacgagatccgcaaaatcccggaggcgatgactgcggccaagcgtgcgcagatggcagcgcgtgcagccgagcttgaaaaacagatccagcgagaccagcaggcgcttaaaaccggtgaaagcgtgaactactactccacagcggctggccctgtcgccgtgaaggagtccaaagaggttgttgaggctcgcctgaagaaaaatcaggaagagtacgaaagaaccacaggcacgatggcgctgggtgatggcgcggtggccaaacggctggcaaaagaggctgctgaatcccagattgagaaaatccgggcagataaccaggtcttctctgcaacgtttgtgaaagcccgtcaggaggctctggataagatccagaaaatcaacgacgacaaatcgctttcggacgacgagaagaacaagctgctcgcaccgcttcgcgagaaggtgaacaagtcctatctggaaccggcgcagaagctggtcgacgacctgtcttctcgcaaaaacgcaaccgagaagcaaattgcccacttcagcgacatgctggagaaagcgaagaaagaggggaacaccgagcaggttcagaagctacaaggcagcatccgtgggtatcaggagcatcttgaagctgttgctcaggagctgactcaggcggagttcgagcgtgatagcgcggcgaaaaccggtaagggcgtaatgtccaaccagggaaccgttctagggctgggaacgaccgataaagcggctcagaaagcactggcgcagtatatgcggaaccagatggactccgcgacctaccagcgcacactgccagacggtacggcgatgctggacttcgaaggcaagccgatcatcgggccgaaacagctcaaaacccagttgaacctgcagaaagcctccagcgccagctctctggagaaaatgagcgacgaggaacgtgctgccgcgatcgccgcactgaccaaagcgcgtgagcaggacgccgcagcagcggaaaaagccgggcagcgtactgccaatgcttctcagcgtgtcgctaggaaggaagaaaatgcgcagcgtaagctggcggccggctaccagaaagccctggataaagccgatcagcttatggggcagatgggtgaaagctcaaaagcgaccgtgtcgtttgatcagtctctccgcgataccaccaaatcgctgaccgaactggccaacgccgtaccgaatgagttcatcactcaggagatgatcgacaaagccaagtcacgcctggctgacctggctaacgcgagcgacgactatcgcgagatgttcaaccgccgcaacgtcgagcagatgatctccacctgggcgccggaatccgattccatcatcagcgcgggttacaagccgtctcgtgaagagaaggtggccgatttcaacgacacctacaaccgtaacctgaaagcgttgatggatctgcgtgaccaggcttctgatccgaaaatcgtggcgctttacaccaagcagattaaccagctggtggcggcaggcaacaccgctctcatcaaagagacgggtacggcgacacagaagctggcgcttgagtacgagaatctggccgatcagctggaaaatagctggagcaacctgttcagcaacatgacggatacgctgaccgacttcgtcatgaaggggaaaatggacttctccagcctggcagaatccatcctccgcgacatcaccaacatggttgtgaagacgcagatcaccctgcctctcatgaacatgctggggatgggaacgacggcagcgggcagctctcagagcggcaatctgctttctggtgtcgcatcagcggttgccaaccagggcgtccggatgaatgcggtcaacggcgataagagcgtgggtgaggcgacgaaagagacctccagctcggtctccggtctggggcagaccactcagcagacgaccagcgcgattggctctgcaaccaacgcgatcggcagctgggtgaatggactgttcaccagcactgaagccaaagacgcggaaaccaaagcggtgaagacatccatcttctccatgcagaaccttagctctgtcacgggggcgctttctgccgcgtttgccatgctgggagcaaacatgtccggctctggcaataagtggttgagcttcggcgccaccattgcctccgggcttgtgtctgcctgggctggtggtggcttcgacaacatcggatcgggttcctccggctctaactccgggttcaacaatctcaccggatcggcatctgatggtactggcggcatcccggcaattccgaagttcgccaaaggcggcattttcgggaaagacggcgtggttccgctgcgtgcgtaccagaaaggtggcatcgctgactctccacagctggcgctgtttggtgaaggggatatgaacgaagcctacgttccgcttccggatgggcgttccatcccggttacgctcaacgcagagggtgttaaaggcggcggtggcggcgttttctcacctgtcagcattgagatcaacgtcaacagcgacggcagtgtctcggagaacagcaattccgaaggcgcatggagtcaggcagcgcagcgcatgaaggcgatcgcgcttgaaaccatcgctcaggagaagcggccaggcggttcgctcaaccctaactctcaacgtaactaa

SEQ ID NO: 112278 - DNA, 270 bp, Enterobacter aerogenes
gtgtcgccattagagctgctgggcgtccctctaacgatgttctggatgctcagccgcaacatcgaccgtctgcgtgcggaagaggatgtccgcaacctgcaagtcgctcgcgctgctcaggcagatggcgagggcgtgaaggcgttcatggagggtttgcaactcaggattggaagaccagtcgtaaccgataaagtctacgatcctcgcaaggataaggcagaccctgacgccaaagagcaactgatgcaaatttttggcagaggatga

SEQ ID NO: 112279 - DNA, 318 bp, Enterobacter aerogenes
atgaccaaattactcgatctcgactccattctgccgccgaagaaaagcatcaagttcggcggccaggaatatcccatcgttgaaatgactgttggcctgttcgtctccatcaagcagatggaaggcaaagacctccagaacatgtcgcctgttgagcaggttactgcttacgccgacctggttcgcaaggtcatcccatccgtgccggacgctgtactggaaaaactgactgttccgcagctccagcagatcttcaccttcgctatggaagtgattgatgaagagaacgaaaaagcggctggtgaaggggcaaagtaa

SEQ ID NO: 112280 - DNA, 747 bp, Enterobacter aerogenes
atgtccaatacccatgtaaaaaacatcaaacttggcgcctgcaaagtgtcgtttggtggcgttgatctgggttacaccaaaggcggtgttcaggttgaagttgcgaccgaaactctgaaagtcaccgtagaccagttggggcagaccaccatctccgagctggtgcagggtcgtaacatcactatcactgcgccgctggccgagtctgtgttgcagaatatggtcgatctgatgccgggttctactctgagcgaagaagataacgctgtgaccatcacttccgcacagggcgtcaacctgatcgacgtagccaaagagctggttctgaccccgcaggataccaccgactacgttctgaccatcccgaaagctgcgaccgcaggtaacttcaccatgacctaccagtctgatgatgttcgcgtgttctccgttcagttcaccgcttacccggatgacgacggcgtgctggggaaaatgagcggcccaaagccggttaaaaccgtctctatctctccggaatctccggaagttaaagccggtgagaccgtgcagctgactgcccagatcacccctgcagatgccggcgataaaaccggtgtgtgggaatccgacaatcaggagaaagcaaccgttgaccagactggtctggttcgcggagtagctgaaggttcggcaaatatctcctttaccagcaatagcggcggcaagaaaacgaccaaagcagtaacggttaattctgccgaataa

SEQ ID NO: 112281 - DNA, 384 bp, Enterobacter aerogenes
gtgtttattgaggcatttgcgagcctgatgcagaaggcgaagatcggtacagtcggcactgacattttctgtcactacatgccagccaatgtgaagtccggtgttctgttggttactcccaatacggggatcaccattgaccatgagttaaaaggcttctatcacgactctttcaccgtcatcgtgcgtaatgcgacgatcacaaaggcggtggcgaaagccaataagatcatggacatgttcccggtcgaagaaaccgtgtcagagggcgtttacttccggttggttcggccaatgtcgatgccgattacttatcccaaaaacgaaggttcgctgattgaagcgggtatcccgattgaatttgcgggctatttgttgaattaa

SEQ ID NO: 112282 - DNA, 474 bp, Enterobacter aerogenes
atgggtctgaagtacgactcgcatcagtttaagcgtgctggcgacaggctcaataacagccagaaagcttttaagcgttatctcatccgtgacatggagaagctggcgcgtctggttgagcgtctggcgcgggcaatggccccgctggagactggctcactcgaaagcgcgatcttcgcgagagtggtcaaagaaggctataccgggctgcgtattgagttatcggtatctggagccaaaccacgagaagggcatccgggcgttgaggttggcgattatgcggagtacatggagttgggcaagtatcgtctcggctatctctcccgcatgaagagcgtcaccaacccgccagtcgctggtgtgaagccacgagttgggcctttgttccttgagagagccgtgcagatcagtgagaaacagttcactcagacgattgcagaagcggcaaggaaagcaggttttacgagaggttga

SEQ ID NO: 112283 - DNA, 345 bp, Enterobacter aerogenes
atgaacatttcatggcaagcagagattgcgatttaccgtcttggttcgaagaacgtctacggtgaagcgcaattgcagttcgtcaggaagacgaacgtcggcgtagttaagtttgagcaaagtaacgagaagtcatcggtacgtgcggacagctccggcagtcgcggtaaagcgaatctggaattgttcgatgctgttctggtgatcccacttgaggccgcagtgcagcttgatgacgttctcattctggaggggcaaaagctgaaggtatccagcgtgcatcgtcgctggggactgcgtgggcgccctgggcacctggaagtaggggcaaacatatgggtctga

SEQ ID NO: 112284 - DNA, 834 bp, Enterobacter aerogenes
atggcgcagatcgacacgtaccgtagcggggaagcagtttccctgtcgtttgcatttaacgttctggatattgagtcggccacgtataccgtcagagatggcgcaggtgcgatcatcgtcgataacgaacctctcgatattactgaggggcagatgtccattccggttgtcgtgtcggccgaacacaacctgctttcagataaagagcgcgatctgcgacacgtcattgtcaaagcggtggcatccgggctgacgcatgaagagcgcaagatgtacgttctgctgaatagcttcgagctgtcaattcctggccagtcattcgcaacggtcgcagacgcccagatgcaagctatcgatatgctgaacggcgacaccctgttagctgatggcgaagggctgatgcgcaaacgtctcattgaggccaccagacgcgtcaaaacgctgccgttctcaatccgcaaagtcctgcgtatcgacttcgaccgttacgaccgcccgcaaaacatgctgaacgtctatgacattccgtggggcgctgacggggcatatcgtcacgatcagatcgattgggaacagatgacgccggataaattcgaagagttcccggactacttcaaactggcattaatgctggccgtggttaatgaagcctgcgaaatcgctaacggtaatgacgtagcggcagcccgcgaggacggcattctgtctgagtccattggtgaaacgaccaatatgtaccgcaccggcaaagcggcaaatgtgcatgtggctcgcagtacctggcgactgctggtcagttacatcaataaccgcatgattgttcgccgtgcgtaa

SEQ ID NO: 112285 - DNA, 396 bp, Enterobacter aerogenes
ttggggtatacgggcattctctgcggtatccagtttgtcgacggcatctcggttgctgaactgccattcatcgatcagcagcgaatttgtgcctccatgcgtgccactaccgttgaaggcaaaaatgtatctccttctgccgcgtacagcagccgcaatgatttgactgcggacgacattgtcgagacggcggccccggatattgtgccaatgaaacgtggtacggctgaagtggaagccaaaccggtacaacgcttcactcgtgaagagctggagtcgattgcggactgtgaaggtattgcgggtctgcgtcagatcggcaaccagattggcgtgaaagccaaaggtatcgttgaaatgatcgaaggcatcctgaaagcacagggcggtgagtaa

SEQ ID NO: 112286 - DNA, 186 bp, Enterobacter aerogenes
atgccagaacaaaagatgaagatcacggaagaggcgtttgcggatttcacggggcatatgtgccgtgccggattcaccaattccatctccaacgagcctctgagcgagcgccagcagaaccatcttgcggcttgcttccgggcaattccgttcactcagtctgtcaccattacaccggctgcgtaa

SEQ ID NO: 112287 - DNA, 876 bp, Enterobacter aerogenes
atgccattactgcgtgatgaagctgaaaagctgtctaacaacgaacttgagcagggtgtgatcgagaccatcatcgatcgcgatgacctgttcgctgttctgcctttcatgaagattaattctaaggcatacctctacaaccgcgaagctaccctgagcgaagcaaccttcattgatgtgaacgacaccatcaccgaaggcgctgcaaccttcaccgaacacgttgcgaagctgcgtatcctggcaggcgacgtagacgtcgacaaattcctggcgaccactatgtccgacaccaacaaccagctggcaatccaggttcgtcagaaggtgaaaggtctggctcgcgcattccgccgcaacctgattctgggcgactccagcaccaacaccaaagcgttcgacggcattccgaagctgatgcacgacgatcagaagatcgatatcgaaggcgcttccatgaccttctccatgttcgacgagctggtcgacgcggtgaaagatctgggcgcagactgcatcatgatgcgttccgagcacctgcgtgcttatcgcgctctgctgcgtaccgttagcctcggcccgtccgaaatcatgatggaaaacttcggccgtccgatgctgtgccacaacggtgtaccgttcatcgtgaacgacttcatcccgactgacgcgggcaaagcaagcatctactgcctgcacctgtccgaagagaacggtgtgactggtctgtatggcggtgaaaacgcaggtatcgttgttgagaacatcggtactgttcagaacaaagacgcaacccgtacccgcgttaagtggtactgctctctggcgaacaagcacgacaaggctatcgccgcgctgaccaacgtaaaaatttga

SEQ ID NO: 112288 - DNA, 894 bp, Enterobacter aerogenes
atgaatctgtggcaaatgcttttggcccgtcgtggcctgatggatgcagccgaagcgcatgagcgcggcggcgctggtggcggcgctcctgctggagacaatgagcagggtacgcaagaccaaggcaaacagggcgagcaaaaagagcaaccgaagggtgacgacgagtatgccggtatgactcaggaagagttgctggcagaactacgaaagtccaagaagaccggtgcagacctgctgaaagagaacatgaagcgcaaggagaaagagcgcacattggccgatcagctggctcagtacggcgatattgacccggcgcgtgctcgccagcttctcgaagctgaacaagccgcagaaaccgcacgccgtgaggcagagcaggctgaactggaacgtcgcggcgaattcgacgctgtgaaaaagcagatgatcgaagcgcaccaggctgaactggcacagcgcgacgaacgctactccgctctggagagcgagaacgccgcactgaaggctcaactggtcgaaatgactgttggcgcttccttcagcggctctgccttcctgcgtgacaaagttctgatgactccggctaaggctcgcgttatctacggctctcatttcgaagtgggtgaagacggtagtgttgtgggctttgataagccagccggtcagaaagaacgtgcagttctggttgacggtgaaggcaaaccgttaccgttcgaatccgcgattgagcgcattctgcgtgcagatccggaagctgacgcactgttgcgcagcgaagccaagcagggtgctggttccaatagcaaaccgacccacaaagtaaaccagccgaagagcaagtcgactatggataagttgacctccggtctggggaaaatcggactcaagtaa

SEQ ID NO: 112289 - DNA, 1575 bp, Enterobacter aerogenes
atggaattgactgacaagcaaatcaaagaccttgtggcacgacgccaccctgaatatgagaagaaaaaagaacattgggacttcctcgccagcacctacgctggcgggcgtgcctggttcaacgacaatatcttccgttacttcaaagagggcgatcaggagttcaaagagcgcctggaacgcgcttatcgcttcaaccatacgcgcgaagtggtaaacctcatcaacaaatacctcttcaaagaggtcattcaccgcaacactgatgaagcaccggagcagatccgcaatttctggaagcgagccacgcgccagaaagcctccatcgatgcgtttatggcggctatcgatctgcaatcatccatttatggccgtatctgggttgtcgtggacagcaccatgaacgtcgatgttgagtctgttgcagacgagaagaaaaatgatgcgcgtgcctacgcttactggatttcgccgcagcagctgcttgatgttgcctgggatgaagacggcaatatgttgtgggcgctgattgttgaaatcgcgcgcgacgacgaagatccgttcacatcaaccgggcaggaataccagcgttaccgtctgtggacgcaaaacgagtggtatctgttccgtgaagaagtgaagaagggttccggaaatagcggtcgccgtcaggccaaagtcgttctggaggatagcggccagcataatctgggcgtggtgccggtgttcccggtggattgcattggtgaaagcgagtctccgtatttcagcccgtcgttgattgacgatattgcctatcttgatcgcgccgtggccaactacctgtcgaaccttgacgcgattattcaggatcagacattcagccagctggcgatcccggttcagtcattgctgccgggcgatgaaaaccacaccaaagtgcttgaaatggggacaaagcgcgtcttcaccttcgactctgagagcggtaatcagccattctacctgtctccggacccgaaacaggcccagatgattatcaccacgattaagacggtgattaacgagatctaccattccgttggcgtggcaggtgagcgaaccaagcaggataacgcacagggcatcgataactcttcgggcgcagcgaagatgtacgacttccagcgcgttaacagtctgctggtgacaaaagcagagcgcctcgaaagggcagagcgccagatgatgcagctggcagcgaagtggatgggtgtcgaactggatgaagaccactctctgatcgcgtacccggaaagtttcgacatccgcggtctgactgatgagtttgcagttgctgaaaagctctcgctgcttcaggcacctgattccgttcgtcgtcaccagatggaaatgctcatcgagaaagtgttcccgaacatttctgaggcgatgaaaaaggaatttgataaagatctcttgaaatttcctccaaaaaatgatctaaacacccttgaaaataagtcagtacttacttatgatcgaggtacagcccaagaaagcgggcaagatcaaccccgagggaatggggactcatctactcaagagaccgagtga

SEQ ID NO: 112290 - DNA, 1257 bp, Enterobacter aerogenes
atggccatcccgtcgtctctgagtctcgtacagctgcattctgggcagatgcaagtctttcagtcgccacatcgtttcaaagtggtgtgtgcgggtcgacgctggggtaaatcccggttgtcgatctccaccatcatccgcgcggcagccaaagagaagaagcaacgtgtctggtacgtcgcaccgacgtaccagatggctcgccagatcttgtgggatgacctgcaggaagttctgccgcgtaaatgggttcgtaagaaaaacgacaccacgatgaccatcgtgctgaagaacggctctgaaatcgcgctgaaaggtgcggataagcccgatacgcttcgtggtgtggcactgcactttgtggtgctcgatgaatttcaggatatgaagccggacacctggtacaaggtactgcgtccgacactgtcctctacccgtggcggtgcgctgatcatcggtacgccaaaaggcttctccgagttccacaagctgtggactatcggtcagaacaaagatttgcaacgcaaagggcagtggaagagctggcagttcgttacggctgattctccgttcgtaccgagcgcggaaatcgaagcagcgaagaacgatatggaccctaaatcgttcgcacaggaatacctggccagcttcgaaaacatgtccggacgcgtttactacccgttcgaccgcaatgtgcatgtgaagccactccagttcaatccgaaactgccgatctgggttggtcaggacttcaacatcgaccctatgtcatcggtcatcctgcagccgcagccaaatggcgagttgtgggccgtggacgaggttgtgctgttctcttccaacacggctgaagtgtgtgatgagctggagcgccgtttctggcgctggaagtctcaggtcactatcttccctgacccggcaggtgcgtatcgccagcacgcacgcggcgaatcggacgtcgatatcttcaaggaaaaaggtttccttcgagtcgattatccgaagaagcacccgccgatcgcagaccgtgttaacgcagtgaaccgcatgttgatgagtgcctcgggcgaaacccggttgtacatcgatccgaagtgcaaacacctcatcgactcgctggagaaggtgatctacaagccaggctcacgcgatatggataagactggcggcatcgaacacagtgcggatgcgttgggttatccggttcatcgtaggtatccggtgaaaaatcgtgttattcttggtggatctagatag

SEQ ID NO: 112291 - DNA, 642 bp, Enterobacter aerogenes
atgactgtagaaaaagacgagagcaaaactcgcctgacaccagctgagtgggcagaagccgaagcaaagtggacttccggcgaatacacactctccaagctggaggaagagtacggcattcgtcgtgaaacgctctccagacatttcaaaaagcgtggattagagaaaggcgcggactccgttgggaagatggtgcgcgagtcgctcaaatccgacgcagagctgcgtgcgaaggcgcgtgcagagaaaatcgaagagcgccggactcgttacgacgattgggcattcgcactcgggcgcatggtcatgcacgaagttgccactgccaaaaaggatggcagacctctcgcagccatagaagatgaccttaaaagtctccagcgagccagcggcacactcgctaagtgcttcgaaatatcctcgaaagcgctcggtatggatcgcgctgagaacgaagaagacgaaatcccgaacctggtatttggcgaacttacgccttcccaggtggcgcagctgcgtaaggaagatgatgagccggatctgattgatgacgatctgcttgagtcactcgaagaggaagcactgagcgaagcagagggcgattctgacgcgtctggtgatgaaagtgatgggagcgtctaa

SEQ ID NO: 112292 - DNA, 267 bp, Enterobacter aerogenes
atgacgttgaccgacaaacaaaaagacatcatcaaaaccatcaatttaggccatgagcgtgggcatctgctcgatctggacgagctgcttgaagtgctgccgtacaaaacgaccaaacagagtatgcagttctctatccgcgcactggtgaaaaaggggctggtggagaaaggaatgtgccgccagcgcggagattccggctaccaccgtcgcacgctgggactgaccacgttaggtcgtgcccgagccaaattactggtgatgtaa

SEQ ID NO: 112293 - DNA, 891 bp, Enterobacter aerogenes
atgacagacatcatcatcaaacgctaccgcccggaagagttcccgcgtcatctggactttctggagcgtatgaccgttaccaaaggcacggttgaagactggcacgcgctgaagtcgctgcactacaagacggatggtaagccgttcgcgccaacgtattatcgctgcgaactggacgaccggctggtgggcgtcgtggttatggcttacccgaaactgctgctggcgcctcgccatcgcatgtttcctaagctgaagccaaccaccaataccaccgtggccaaccagtattggggccggtacgtgaacaacaactttgcggtgatcagccgttccgttgttgacactcagtaccgcggtgtcggcgtctcctatcgtatgattaacctggttagcaggatgcacgaccggccaatcatcgagatccagtcgtcgatgagcaaatacaacccgttcgccatgaaagcagggttccagttcatccgtccggagcgtccgaagagctatgagagtgcgttgcgcgtcttccagcgtcatttccgttccgaccctggcgacaacgaagcgatcgtcaaagagctgttcgccatgagtgagtctcgccgccgtcgtgcgctgcgtgatctggttgccgactaccacaagaacagttcactggccaaagccgggcgtaaccgaggcactaccattcaggacattgccgacagcctggtggatgaagccagcatcgtgaagctactcaaagatattcataacctgagcttcacctcaccgttatatggggtgtaccgcaacccggattttggtcgtcagctgccggacacgctgccactgctggcattcgacaaacagcctttgaataaacctcttgaaattgcattaccggcataa

SEQ ID NO: 112294 - DNA, 255 bp, Enterobacter aerogenes
atgcctgatttgaagatcgtagagctgaagccatcgaaagaggctgacaacaacaacgttgaagtcatccgcctgctggaagaagcactccagtacgccagagaaggcaaaagccagagcctggcgctgctgatgatcaacaacgacggcaatgttctggattgctggcataacggtgggcgtccatacgtcatggtcggggcgatggaatcgcttcgcctggacttcatcaatgccaatatcgagcgcaggtga

SEQ ID NO: 112295 - DNA, 639 bp, Enterobacter aerogenes
atgagcaaatacaccatcaacgtatcgtttcagacccgcgtgaataaaaccacgcgcacgctggagattgccgaatcgttcggtcttggcctggacgaaaaagagtggacgctttacgacaatctggagctggaagtgaagcagggcgatgtggtgtacatcaccggccaatccggttccggtaaatccgttgtgctgcgcgagctgcaacgccagatgaaggatgaagggctttctgtagcctccatcgatgactttaccttcgacaatgaggttaacgtcatcgaccagctgggcaaaaccaccagcgaagcgctggggctgctgtctatggccggattgaatgacgcctatctattcgtgcgcaagccatccgagatgtctgacggccagaaataccgtctcaagatcgccaagctgatcgagtcaggcgccaaagtctgggcagccgacgaatttggcgctgttctcgaccgtgtaaccgcccaggttgtggcgtcgaacctccagcgtgccgcccgtaaggttggtgcgacggtaatggtggcgacgacccacgaagacctgaagaacgcgctgcgcccggatatgcagatcaccaagcactacaaagaacgcgtgaaggtggaatatgcctga

SEQ ID NO: 112296 - DNA, 669 bp, Enterobacter aerogenes
atgaccaaaaactttgaaatcgtctatcgaaacccggcagaactcatcccgtatgagatgaacgccaaaaaacatgacgaacagcagatccgcgatctggcggccgccatcaaaaagcgcggttttgaccagccgatcacggtcgacaagcacgatgtcatcattactggccacggtcgtcgcgaggcggcacttctggctggtctggagcgtgtgccggtcatcgttcgcgacgatctgagcgaagaagaagtgaaggcgaagcgtctggaagacaaccgcctggccagtattgactacgacgccatcaaattgcagcaggaactggaatccctggtgctgggcgacgtcgaggtcttcggttttgaagagcgcgagctgaacgtgcttgtcggcagcatgaccgaagagatggaaaccggctctctggtgctcgatctgggcgaagagacggaacgccagaaagaagagcacaccgagatcagtcgcgaagtggcctctgaagaagtccgcgtcatcgacgtattgggctttaaaacgctccctgctggctctgccattgtggttggggatttgcttgcccacatggaagaaatcacgggagagagcggggtagacgctttcgtggcgtatgcggagaaagtttcttctggggagctggctgcatga

SEQ ID NO: 112297 - DNA, 681 bp, Enterobacter aerogenes
atggatgtgaaaattacgattctgcaggtggaagtcgcgaacctgcgtccgaatccctggaataccaactccgttggggcgcaaaacttcgaaaaactgaaaggctctatcgaaaaattgggcttttttaagccaattctggcgcgggagctggacgggggcgtttttgagatcctcggtggcgaacaccgctggcgtgccgcgatggagcagggcatttcaacggtccccgtcatctccgtgggcaaaattaacgacctggtggccaaacagatgtccctggtcgataacgagcgctacggcgaagacgatcaggtcgctttgcagcgcttaatcgaagaaatccagtctgaaatcgactaccggttgtccgatatcgccccgtatgacgacgaaatggcggcaacactcgccaaagcgtccgttatcgatcttgaagcgctggaagcgctctcccgtggcgatgacgagtcggtcgatgaggacaaacgcgagaaaaccgagcgagtcggcgctgaacaccagacgatgcgcttcaaggtgacgtttgatgcgtcagatcgcgtcgccgacaccatcaaaaccatcatcaaagagcaggggatcaataccggtaacgaaatggagaacgccggggaagccctggtgtggctggtcgactactacaaggagcgtatgtaa

SEQ ID NO: 112298 - DNA, 1560 bp, Enterobacter aerogenes
atgacagttcggattgtatcgaatgcagtcaatgcgctgatttctggcgctgatgacaacgtgaaacggctcgttcaggagatgttgagctatgaagtggaggctggtgactggaaaggaaccagcacgatgttcaactggagcaaaaacgcgttcccggctgggtttgcgaagccagtagcggccaaccttctgaaagctggcatcaaatgcgtgcatgtgcgcaaggaaaaagcccccgcgcttggcaagccgaacccggtagttaacccattcccgtataacccggactatgcgtatcaggatcagactgtggaaacactggtgcgcgaagggatgatgattgcccagattgcgacgggtggcggtaaatcgaacgtagcgtgtaaggcagctgctcgcattggtcgtatgacgctgtttttaaccacgcgctcggttctgatgttccagatggcagagaacttccagaaatccatcgactaccgcgcggagaatggcgagccgtggttgaaaggtcagaaagttggggtgattggatctggtgagttccaggtctcgcgccatatcaacgttgccacggtgcagaccctggccagttttctcgaagaaccaccgcgcgacgcatcaccggagaaaaaacagtaccacctgaagcgccgggaactggttaagcgctttctgtccagcgtttctctgctgattctggaagaggcacacgaatcatctggttcaaacttctacgatatcgccaggttgtgcatcaatgccgattaccgtctggcgctgacagctacgccgttcatgaaggactcgaccgaggcaaatatgcgtctcatggccgttgccggccgcattgagataaaggtaacggagaaatatttgatcgatcgaggtattttagcgaaaccatactttctatatcataaaatcgcgtacactccagacgaggtgcggattagggccgaacttgcttcgaaacacctgaactttcgggttggaatgagtacggcttaccagaaagcctatcagttaggcatcgtttacaatctgggccgcaacgaggctattgtgcgcgaagcgttaatgtacaaaagtcacggtctgaactgtatgacgctggttcgtttgaagcgtcatggtcagattttgatggaaatgatgaaggaaagcggcctgaaggtcgatttcatctacggagaatcaaaccagactacccgacaagcaaagctcaacagtctggcggcaggcaagatagatgttctgattggttcaaccattctggatgttggtgtcgacgttccaagcgtaggggcagtgattctgggtggtggcggcaaagccgaagttgagatgcgccaacgtgttggtcgcggtcttcgagccaaaaagaatcaggctaacgtgtgctttatcaccgacttcatcgacgtgagcaacaaatacctcatgtcacattcatatgagcggaagcacattatcgatacgacgcctgggtttgccgagggcgttttgccggtgggtggcacattcgatttcactgttttgaatagagagtaa

SEQ ID NO: 112299 - DNA, 279 bp, Enterobacter aerogenes; identical to SEQ ID NO: 86047

SEQ ID NO: 112300 - DNA, 258 bp, Enterobacter aerogenes
atgataggtgcgggctgtgacgcgtccatcttcatcaatggtgagacggttgcgaaacttgagaccggtgaaaaagcgacgttccatcttgatgccgggcaatggattgttggcgcttcactggaaggcaccgggctgtgcgcactgaaccctgctcgtcaggaacgcgagaccatcaccaaagctggcgagacgaaagtcttccgggtgttcaccagcaacgcaggtgacatcgatatcctaccaacgacactgtga

SEQ ID NO: 112301 - DNA, 528 bp, Enterobacter aerogenes
atgacgaatattactgacatcacctacgggattcctgcagaagtctggccgcgcgattacaccaacgtggagaaggcgctgatgttctggcgtaagtctctcattcctgtaagggtcacgatggaagatggtcaggtgttctgcatgtacgttcagggtctcatgtcgtcgcgcaacaaagtcgatctttgccctgccccgttcgacaaagaaaatcgtataaggctcccacttgagcgaatcagtacgattgaatcaggtgtgacagaaggcattgcgcacgatttcacgggtcggacaacggtacacccagactatgtggacaatcggccatctcgccgtgatttcttcaaaatttgtcgccaggctcatgagatgcagaagtctataagggtctacatggcggatggccgtgaaattgagggggtgtcttcaggcgttgacgcttgccaggtcacgctcaacatgggggacggtcggaagacagtcgtcatgttcgattgggtcgaacggattttaccgttttaa

SEQ ID NO: 112302 - DNA, 651 bp, Enterobacter aerogenes
atgtctaacgttgctatctctaaaaaatccatcatcgacgctgctgtagttatcgctaatgaattacaagttgcagccaataatgctactcagacttataacaatcattatcagaatggtacgcacacaaaagcagataaagctaacatgcttgcagcgactaccaaacttgcatacttcaccaacaacgttttaaacgctgttaatgatgagaaattagctggtgtcttttactacgcgattaaagcaagcaaacaagcgccagaagtgtttttccgcgaagctatgaccaatagctattcactcgaaaaattggtttatctggttaaatctatcaagtctggtaaatgcgtttattccgtcgctgatatgtccggatctcgcgtattcgcattaatcgaaatgattaatgatgaaatggagacattcacaaatggcgctgttttcgatttgatgaatgaagccaaaaaagaaaatgaaattaaattagacgctggctacactcaagccaaccagctgattaatctttgtgaacgtctcggactggtcgagaagatcaaaggaatgggcgctgctaaaaacggatctcagcaatatcgctttatcaagaatgatttttataactatctggctgatgctttcaaagcgtaa

SEQ ID NO: 112303 - DNA, 204 bp, Enterobacter aerogenes
atgattagttatgaccagatccgcgcggaatatcgcgcaaaatatcgcgcttataaacttgaattaatcgacgacttaaaagcgcaacgtgacaaattaaattttacgttttctgatttgcttaacagcaaaagagactgtaagcgcaagcgtgaatatttgcgcttgtctgaaatgatcggaaaactgcaaaacagcatttaa

SEQ ID NO: 112304 - DNA, 483 bp, Enterobacter aerogenes
atgaattttatcgctactgttaacacccctgcgcatggccatatttctgtgacgttctctgagaacgagaaaagcgtgctggacgcctggcgtgacaatgtaaccatcgagctgtccgggaaagagaaacagcagatcaccaatgacataatctgcaaccgtcgccataagcgcgtatttgagaaagcgtatgtctccacctccggatttggcgtattcatcttcccggtgcgcagcggtcgcttctgccagtcaaaactcatcgagttcgccacgcagatcgcgctatgggttaaaacagaatccgggttcgacttcagcgaacaggaagcagtgggggaggggatgcgcatcgccaacaatgccatcaagtgcaaaaacgtcacctacgaagcaggaatcgactcgtggagtgtctcgtgcggggaatacgtgaaagaggtgtacggaaagaaccgcattcacatcatggctggcaagtaa

SEQ ID NO: 112305 - DNA, 282 bp, Enterobacter aerogenes
atgaccgatttcactatctcccctaaagctgaaaacgtatggctggaatcctggctcgacctgtcgccggaagagcagcaggaaatggatcacgttgaacaggacgaacaatttgatgcccgcttcttccgctttgaagacagcgtttatgacattgccgacttcatgcgcgatgaccgcttcccggactggcacgcaggatacccattaaatgctttcgccatgctgatgatccgcgtggatggctccggcgataccatcgacgtcggtctgctccactaa

SEQ ID NO: 112306 - DNA, 396 bp, Enterobacter aerogenes
atgactgttttacgcgaaaatcttgtgctggatttacattatgcgtccgaaaccaccttcggcgagaaagttgccaaactgaccgtcgttctgcgtgacaacactaccggaacggaggttcacaccagcaccttagtgcgcgagggggaaggtgaaagtgcggtatacaccgtaggttatcagaacatcagcaacgcaaccgacccgctgctgctaaagctggaagcgtacttccgcaccgcggacaaggcgatgttcgataagctgatgaccagagtagataagctgtttacctccgatttgaactctaacagcacctggatgggtcaatacggtctgcgtatcgtttccagcgcgatggtagacgaatttattcccgaaagcgtgtttgaataa

SEQ ID NO: 112307 - DNA, 312 bp, Enterobacter aerogenes
atgaaaaacgcgatgatcaccaaactgagtgcgggccagccacgtaaagaaaagccaaccgcaatgagccagctgaccctgctcgatatcatcgccaacggcactgctattcgcctgttcaaagagacgctggtctcgttcgacaatggttcccgcacgcgttacgtcatgagtgtgcgtcgccagagtggaagagggtggatggcaaaacagattatctggccggaaggagagctggaacaggcgctactggaggcgaacaaagcagcccagcaagaaatccagcgtgcctctctactggcgacagcctga

SEQ ID NO: 112308 - DNA, 300 bp, Enterobacter aerogenes
atgaccattttcatttgccagaactgtggccgcgagtatgaaggcgctacagtttgcgcctctgacgattgcccggggaatgaaattaagatgcctgtgctggtggaggtatggagtgtggattcgctggccgaatgtctggatgctgtagggccggaactgcaccgcaagctatggtcgttcgtcccggcagaaggggaatcgcccaaagggaaggatatctggcacctgctcagtgaagatgaacagcgggagctggtggacgcggtacacattgagttcccggacgacgaagattaa

SEQ ID NO: 112309 - DNA, 243 bp, Enterobacter aerogenes
atgagcactaacaactacacagacggttacttcagcatcgacgtcgagagaggcgaactgctacatggcggtatctctgtcggacgcatcattttgaccaacggtcagatttatacagagctggacgacaccagttcagacgcacctgtcgtctccggccccttcgggacaagagaagaggcgctcgatgatttgtgggacaacagggacgatgcgaatcagggcagtgagattttcgaataa

SEQ ID NO: 112310 - DNA, 519 bp, Enterobacter aerogenes
atgaattttcgtttgacctgtgctttcgcgttgggcatatcgttttccgcagcggctgctgaaagcacagatgaattgatacgcacagcgccaccggcaggacgcgataccatgctgctctgcaacgcagagcttctttcaggcaaaaccgcgacccaattgtctggaaaagcctacctagaaggcgtgggagagcagatcttgtttgcgataatcccaaccactaaatctgacgaatacatgcaggcatttttcagcgcttggggattcacgccatttggacaggtcgaaagccgcgagcaattccacaactgggcactgattcatcttggacggcaaaatctcgttcgtgggaagacttccgattacaccttcgttaatgctacgccacaggacaacatcgattttcagatgcgggatatcctccgcttttacgactgtcaaaaccagaatgcacgtcctgactggacccgacaagaatccgccacccaaaaacacttcaatgggaatgtctattag

SEQ ID NO: 112311 - DNA, 837 bp, Enterobacter aerogenes
atggaactattccagtaccttcagtcgcgatacccgccgctgaccccacagaactgcaaaattcatttagctagcaccaacgagtataaagaaaacccgataacggagttcgtaaacaagacgtttgatagttggcaatgtctacagaagcataaaagctttgatagaacttatgttgtctcactcattcagactgaagataaggaacgatttctctatgccgggacctatatcaagaaggggtgtagtctgacggcatctcattatgtcccaggtcggaatgaaacatacaatctctatcaactgacccctgttactgaactggatgaatatcgtgggcgtatgtacgttcgcacggctcgtcctcgcaactttatcctgaaaggtgagacgctagctgggacgatgcaaatcgtcgagatctcccctgtttgtctctcgtttggtgagtttcccggctacaaaaacgtggtactggatagagtcagtctgggagccatcatccggcaggagctaaaatcgtggaaaacagcgctgagtattgtcaaaggcatttacctgctaaccgatgtcgatggagagaagctgtatgttggccaggctaacggcaaagacggaatatggggaagatggaagacctactttacgacgggacacggtgggaacgccggactgattgaagcgttcggtacctgcgacgaggaacggctcaaaaacgtcacgttttccattctggagatcatggacaacaacagcgacaaacacgaaatcaacaggcgtgaaaaacattggaaaagtatcctgctttcgcgctcaataggtcacaaccggaactga

SEQ ID NO: 112312 - DNA, 318 bp, Enterobacter aerogenes
atgttgaagttcacggaagtctacaaaacggcagtgatcagcaccgcccacgtaacggcagcggattcagagcggctacccattgcctgcttcgacccacttaccgatcgcgggttgaattgggtacacggtacacagtacggctggattgttcgtgctggaatgcgtggcagtgactggaaagaagagctaagtgaatacggcatttcgaaagaggcgatctccaacatacaggccatactggatgccggctttgacgcggtgcaattcgattgcgacgccgagctggtggatgggctgcctgcatgggactggtaa

SEQ ID NO: 112313 - DNA, 267 bp, Enterobacter aerogenes
atgggcagagaaaattccaaatatgtgatcgtctacaggggagaagtgctcaagtacttaatacctggacagttcgttttcttccaacgtaaaaaagaatacggcggtggattctggcttggtaaaacgcatgagaacgggttcgagtttgtgctggaacaacccacttcacttagttacgggcttgcatatctgatcagactgtctagtgttgaagccagacatatggagttcgtggacgacatagatgactttaaattgacctaa

SEQ ID NO: 112314 - DNA, 204 bp, Enterobacter aerogenes
atgaagacctatgatcgcaaccgtaacgctatcactgccggcagccgggtgatggtggcaacgaatggtgcaacgggagtcatcagggaaatctgtggagaaggcaaatcagaagaacaattacgccgctctgactgcgtgtctatcgaaggtgtggaaggtctgttctgcccaatggatttagttcgcctggggttccattga

SEQ ID NO: 112315 - DNA, 699 bp, Enterobacter aerogenes
atgaaaaatatcctactggcatcattgttggtggcatcgccggtctcatttgcagccagctttgactgccaaaaggcttcgacagaaatcgaacacaaaatctgtgacaacgaacgcctgtcaaaattagacgaacaacttagcgcaacctattccagcgcgctcaaggctaacccagaaaatgcagataccctaaagacggttcaacgacagtgggtaaatatgcgtggaaaactcactgatgataaggctctggagctggcttatcttatccaaattaatggtctcaatggcttaggtgttccggccgctacagcagcggtcaatgagacaccgaagccgacgcagaaacagcctgaagttcaggaaaagacaagcaaggcagacgcaaagccggccaagaaaggtaatgagctaactctggaatcattccgggctaagtatattgaggtcaatggtgagtactacagtacgacatctcttcccagagggagttcgtttttgttcacctgcgccagtcgcattgctgacgaccaggtaaatgtctggaagaagcacgcagcaaaagagggcaagatcgaccttttctttgagcttgagaatcgcatacacaccgcgatgttgaatgccaattttcagcagctgaatagtgatttaactaaaacaggcatttgcgatctgattaccgctgtgccataa

SEQ ID NO: 112316 - DNA, 825 bp, Enterobacter aerogenes
atgagcgaaaactcgagaattacattcgccagcgttaatcaggcgaagctgccatttaatttagtgctacaggggaacgaaggaacgcctgccggaaccatcaaaatcgacaaggagcttgtgacgttcgaaggtaactttgatgaatcggcgcaggtttttatcgaacatctggcacgccgttggagccagcagtggagagaccttgagaaacgcgccaatgagttcgaccggttcatggacgcaatggacacagcaaaagaggctctggctgccggcactccgttagatctggagcgcgtgggaggctgcatgaaggtcgagaaattagatgttctttcctttgtgctgacggatctggaacgtctcgacccggtacgcgtaatgattgaaaactacgagccgggtaagggaagagtcaccataacctgctatgggaaagcgtggactgccgcctggtttgcgatgggcggtgatgatgttcagacatttattaagcgagtgagtgatgattacttgattggctgcctcgcccctcaactgcgaagtacggtcggcgatgacaacgacgcaaatctgattttcgtaaagtccgaaatcataaagttgcgcagagagagggaaatcgacgcagaaacggccagaaatatgtgggacgaagctgaaaacgctgatgacgtaaaagagagttgctgctgtttcggagtaggtaacgaactgctgagtttgtttggcgatgaaccgtggtatgcaggctggccaacggtgccaaatccagcataccaataccttgagcgtatgtcagagcggtacgtgatggactga

SEQ ID NO: 112317 - DNA, 1686 bp, Enterobacter aerogenes
atgaatacagccctttccatcattgacgctatcaccccaaacactgatatcgactaccggcaggaaatgaacgtcatccacgaaattgtggccgagtgcgagaaagagatcgcattcatgcatcaggttcacgacttcgtttatggcgacgaacgccacaacatgattaaccgcctgctgcgactcaaccaccggccggatgacgagcgcacacgctttaacagagcctggctggacaaggtcgaccttgaatgggtgaaacagaatatctgggccgagtactggaagaaggtcacggatatgacaaacgttctgctgatcatgccagcttcccgccgcgacgagtggcgtgagcagtttatcgagggcaagcaggagaccatcaggactgacagaaccggctaccagatgaaggttaaggagttcgttggtgtgccggagttcaaagcagaaacggtcatccccacgatgctcaatctgctgaatgacaggcacaaatatctctctgagcgcgtgtatggcttgtttaaggcgctgagtcctgcccacaagaccaataagacgaacggctttagcgagcgtctgatcatcgccaactgcatttccgagttctggcgggacagcgtcagcgtgaactaccgaaaagaggactacatcgacgacctgcgcgtcatgcttcatttcttcgcgcacaaagagttcatcaccatcaaccgcacaactgagatgctatctgctgcgtaccgggcaaacgactgccagaccggtgactggatgaatgtcgacggaaacctgatgcgcgtgaagatgttcaagaacggcaacgttcactttgaaatacatcctgacgtggcctggaagctgaatgaggtgctggcttacagtatgcctgcagcaatcccggcgccatgccgtactgcacccaaaacacgggcaccaaaagagttcgggttaatccagaagacgatctccgagccggttcgtaccgcgctgcgcgacgggcgattcaacaaagacaaaggcgtctggtacttctctgattccaacctccagaagtcgcaagtggaagagcttgagcgcacactgaacttcattggcggcgtacaggagaaaaagcactggcagttcccgtatgagatcggccatacgctcaatacgattgtggccaccggcttaatgccggatacaaaatcacaccagttctaccctaccccacgtttgatagcggagtacgttgccagagccatcgagctgaagccaggtgagaagctgctggagcctgaagccgggcgtggagatctgctggcctgcatcgacgctaatccggaagacgttacctgcatagaagtcgcacctctcttcgctgatatcctgcttggcaaggggtacacaaatacggtctgctgcgacttcatgaagtggtctgaggacaacgcaggctatcagttcgacaaaatcgtcatgaacccgccctactctcttggccgtcacagagagcatacgctggccgcgctggagcatctgaaagtcggcgggcgactggtggcagtactgccgggtgatgcgccagttctgaactggatgacgctggataattacgtttatgccaaagggaagtcgtttactgacgagtttgaagacaccggaatcactgtaagcgtatacgttttcaaacgcgtaaaatga

SEQ ID NO: 112318 - DNA, 573 bp, Enterobacter aerogenes
atgtgcgaaaaatgcaaaaaaactaatgccaaagttgaaaacgtgattaaaaaagttggtgcggccgaactggttgagatcatgggtcttgtggttggtcacgaagacgacgcctcccctatcgaccgccttttcagcgttctcaagttctcaagcatgattgatgatccgattgaaattgtgatgctggcgcgtcatttcggcgaagcgtatctggaagagaaagaacgcgccgacaaacttcaggcaactctggaaatggtaatcaagccgaagtgctcaccggattcagtcaaggcagatgaaaccaacgccagcaaagatcgtgaaatcgccgggctgaagtcttctctggcgatgttgctggccgccttcaaactgatgtcttcccaggctgggttcaaaatgcctgagctgaacagcgacgatccgatagccgttcgccatctgctgggggcaatggccgaccagcttgacgacaccaagagccgtcttgaagacatgatgcgcgagctgacccatcgccacgacctgaacaaacagccgcacaaaacgcagcacgtacaccactaa

SEQ ID NO: 112319 - DNA, 843 bp, Enterobacter aerogenes
atgtttgagatgactactttatcgattcccggtgtgctcccggacagaccattgatgtcctcaaaagaaatctcaaagctgaccggtaaacgacacagcgacattcttcgcgacatccgtagcgtgctgaatgagctgtatgccgacgattaccataacgcaaaattgcgttatgagaaaaatcagttacttacaattgttgaaggcattgttgtcaacatcgattaccggggaatggaaggcgagtacatgctcgaccgaaagcataccgatgttctcattaccggctactcgttgaagtaccgcgctgctgtcattgagcgctggcatgagctggaaatgagtgtttcaagcggggcgctttacggtgcctaccccagcatcccggaaaccttttcagaagcacttcgactggcagccgatcttgaagaacagcgtgctgatcttgagcgcaagctgtcggtggcaaggccaaaagccattctcatggacaccatttgcggcactgctgatgagctttatgggctgaatgaagctggtcgcattctcggaacgtccggggctgttctgggtgcgctgatggactcgctgggtgatgtgtacgttaagcgcaaatacaccactgttaaccgccagttcctcaagatcttcattgaccgcggatatggcaaaaacgttgtcatcggaaacggacgcaaccaggccaagttcacctttaaaggactttgctttgctgccgtgaagctaattgctgccgggaaaattaccgccagcgccattgagtatgagccttgtcgtgagcatgtcgaacgcgaaatgaaggaatccaaacgtcttcattaa

SEQ ID NO: 112320 - DNA, 189 bp, Enterobacter aerogenes
atgaaatggagcttccagaaagtcaccgcgatgattgttggcctcgccatttttctgcttggtggctggatcatgaatctggtgaaactcgtgaacggtggcgatcttcagtttgatgccggaatgacacttgcgcgtgtcgtgggaattttcgttgttccggtgggcagcattctcgggttcttttga

SEQ ID NO: 112321 - DNA, 495 bp, Enterobacter aerogenes
atggcacgtcaaacgcctttcacttctttcaataaacgtccccgttcaattcgcctggttctggccgagctgtttagcggtcgtgtttctgcacgccttgcggaactggaagaacgagtgtttgagctggagaagcgcattgatgcgcaagctaccgccatagcaaatctgggtgcgacagtaggcatggagaaggtgcgtgattccgtcgcctctcgtgtgttgcgtgaatcccagacgcacaaggacagttcccatggaaaattttcaacgaaatcgactgaagccaatggcctacggagtaattttagcaaccctggcagcggtagccgtgccagccggtcagagtctgttgataccggacacaactacttccaccacaaccttgcagacgacgcccctgccagaacgacctcctgtctctctggatgggatgctgctggacacgattccagctcgacctgcaactccggatcttccttctactgtgactga

SEQ ID NO: 112322 - DNA, 609 bp, Enterobacter aerogenes
atgacgaccaagaccccagcccggcaacatactggctgccgcacgaagtccaaagccagataccaaacccaccagcaatcccgtaccaacttcaaaacccccgtagtcgagttcaatccccagctcaaaaccgtaaaagtattcagtgatggctcttgcctcaaaaatccgggcgggccgggcggttacggcatcgttctccagtatcgaggcgaagagcgcgagctttctgagggcttccacagcacgaccaacaatcggatggagatgatgggcgccctgattgcgctggagcgtctgaagtacccctgcaacgtgatcctgcattccgacagccagtatttaaaaaacggcatgacgctctggatgaaaggctggaagcgtaacggatggatcacgtctgagaagaagccagtcaaaaacgtcgatctctggaaacgtctcgattcggccgccagccgtcacaatgtccgctggaagtgggttaaaggtcatgccggtcatcgcgagaacgaaatgtgtgaccgcctggcgaagatcgccgcctactccgcagctgatatgcctcacaagcgtgacattggatttttgtcacaaaatgataagtaa

SEQ ID NO: 112323 - DNA, 231 bp, Enterobacter aerogenes
atggtatacccgacgaacgtcgtagcgctcgttgagagcgattttctggccaaagtgcgcgacatgatgaaagatcgcgataaggctttcagtctctacgaatggtcgctcaaatgtcttcattcaggcgagcacaaagagctggtggagcagctgttaggggaactcatcaatgaggtgtttgccctgaacgtccagcttcatgggcgagaaaataatcaatcgaaataa

SEQ ID NO: 112324 - DNA, 594 bp, Enterobacter aerogenes
atgatcgcagccgaaaaaatcaaaaagcgagagcgtgatgcctctcttcgcgacctttggcgcacaccgcagtggttgtttgtcgccatccaacgttacataggcgcaaagttcgatgtggacgtcgcctgcaacaaagataatgccctcctgccgaactttatcggtgttgagcgtgatgcgctcaagtgcagctggggagaacctggcactgtggcgttccttaacccgccctactccaaaatcaccccctggatagacgcagccatccgcgagcaggcgcgtggagtgacgacggtcatgctgataccacaatccctcgatacgcagtggtacgagcgtgcggctgaatgcgccaacgaaaccgtcatcttgtctggcggccgcgtggcgttcgttgagccagatgttgaacttgggctggtggaggtgaacatcaaccctggtggcagcatgttgcttatcttccgtggctactgtcaggaagctgggcacaccatcaacaagataccgctggcggtgatgaaaaagctgggtggttatgatcctgccaatgttgtcaggaagaagagaccacgtaaaaaggcagcgtaa

SEQ ID NO: 112325 - DNA, 843 bp, Enterobacter aerogenes
atgagcgcagttacaaacactgttaaaaacgatgaactggacgaactgactgcaatgttgcaatctctcgacgaaccagtgcaaaaagctgcgaaaatgagcggtgtcgacgagatcgacgatcttctctctggtctgggtgatgcaatcgcaaaaccagtcgaggcggtggcggatgaagtcatgaatgccagctctaccggcgatctgagtagcgttctggaagagcttgagattgagcacgaatcggtgaaggtcgaggaaccagagcgtgaccttgttgcggagatagtgaacgagccagcgcctgaacttgacgctcgaagtactgagactaccggtacagatccaacccctttaccttcagtggcgtcagagcctaaacctgaagaagagcagccaaaacgccagaaggcaaaatcagagcgtaccccggccaaacctcgcttcacgctggaaggtaaggacgaatcgttctatgcgacagccggtctggaaagtgagagctttactgccgcattcgaaggggcgccagtcaaagctaaagacaagatcttaaaccttttgaactggtttagtggtgggccggaaatcagcgtctacacggtaatcgcaatgcgccatatccttgacgcgaacacggcgaccagcaatagcattaaactggcgctaatgagcaacccggagaaaccatatccgctcaacaccgcttcgactcaggctggccagatgatggctgtgtttccagctactggcattgccaccagggaaggtggaaatctaacccttaataaagagtcgccgatcgtcaaaaaattcatagcggagtattccattggatga

SEQ ID NO: 112326 - DNA, 558 bp, Enterobacter aerogenes
atgaccacgattgtcggtggcttcgatattgagtccacagggctggacttcacatccggccacaaaattatcgaaatcgcgataacccgttatgaactggaaacccagaagcacatcgacagccttgagatgcgcttcaacccgcgtcgcagtatcgatccgaaggcgcaggcagtgcatggcatttcactggaagatctggcgacggaaccgctactggctgaccacgcaggcaagattgctgcgtacatgggcgcatgtagcgcgttagtcgcccataacggagaggcttttgaccttccgttcattcgccacgagttcggtagctatggggtgaaattgccagatatccctctggttgactccatgctagatggcttgtgggctaccgaggatgggaagcgcccacgcctggaagagctggcgttctcacttgggttcacttacgaccgtgagaaggctcacagcgctctctacgatactgacctgatgatgcagtgcttcttcaaagcccgagagaaatacggcttcttcaaactcccattcgaaagcgcctga

SEQ ID NO: 112327 - DNA, 420 bp, Enterobacter aerogenes
atgatagacgaacttcccctctcggatgaattagatcgtaaagcgattgaagcactgatccgcattgctgacgaacaatcccgctctttgatgagtgaacgtgaagcacgtctggctatccgcgcagtgtttgagtccgttcaagggcttgttggtgaagaggttggcgaagccatcaatgtggcgatgtcgcagttcaatggcggcaccaagcgccctctgtttcctatgcacctcaaactctcaggcggtacggttctgtacgtgtccgtttgcctggagaccaaccaaatccagatcctcaacacatcaacgggcgaatggcgcgagccggtcgtctgcgaaagtggcgaggacgcactgaaaaaggctgctcagtttgtgcgtggcgcactgctgaaaggcgcgaagaagctgtaa

SEQ ID NO: 112328 - DNA, 645 bp, Enterobacter aerogenes
atggattaccggattggaatcactggcgcacagggcagtggaaaaacaaccctggcaaggtacatcgatgcgcattatggcattccgtatgtggatgccggcgttggcaagctgatgagcagtctgggggtgaaggttggcgagcgtttgcccctttacgaacgtcttcaggttcagatggagattgccagacatatcgagatgatcacccgcggcgttgaaggttttgttatcgaccgcacgccagccgatgtcatggcttatacgcttgacctggtcggccagaccaacgaagaccgctgcatcgagctggctctcgacattgagcagttttgccacaaagcggccatttccaacttcaatgctatcgcgggtcttcgcccgggcgttgagctttccagcaaagatctcgcgcgtccccagcgaggatcgcttgaccgtctctatgttgctcgcatcgatgcacttatgtgcggtgagctgacgaaaatcaacacgcttccccaaaccggcgatctgcaggtgttcgttatttctgaaaagtgccgcacggttgaagcgcgagccagatcggtattgcgagtgctggatagagccgctgaaaacatcgagcgccgtataacaggacgagtgaccttccactga

SEQ ID NO: 112329 - DNA, 477 bp, Enterobacter aerogenes
atgaagatgattgcagctgtcggccgcaactatgaaatcggcattggcaacgaacttccctggcgttgcccgaccgatctgaaactgttcaaacaactcaccaaaaacgccactgtcgtgatgggacgcaagacgatggaaagtctcaagcgcccgctgccagagcgccataacctcgttttgacgcgctctcgtgggtatatccccaatgggttctaccccgctggcatcgatgacgttttgagactgccagatccggtctgggtgattggtggcgggcagatttacttgctctttatgccacacgtagaagagatctggctgtcgcatattggcgtggatgtgccgggcgcggatgcgttcttcccggcgccaatgatgcgttctttagggttcgtaccagtcgaaacggcttatacccaacgtgcaaatgaggatgagcctggctttttgcagatcgtatacagaaggtcgtaa

SEQ ID NO: 112330 - DNA, 396 bp, Enterobacter aerogenes
gtgttgtgtgaaattgaaggtgtgctggcgagagccagccatcgcaaagcagtgtctgatgcggatgcaggcgctctcattgccggtgatgaactcatctttcccaccagccgcatgttgcgtggttttgctcgctccggtgctgaagtggtgcttatcagtagtcgtccggaagcgctcgaaggcccaaccaaacgctggctgaaggacttcggcattgattatgactggctccaccttgttccgcgcggtgtcagttttgaaacccatatcaagcgcacgctggcagagcacaaaggcgacttacttatcgccgcactggttcatgatccgcgtctgcgttctgcgctggcagattctcaccagcgaccaaccatctatgaggtaagccaatga

SEQ ID NO: 112331 - DNA, 1104 bp, Enterobacter aerogenes
ttgtctatcctactgaatcgagactttacgaacggtcagtttgccagtggttcgtatgccaaagtggttgaaacggtgctcaacactggcgttcacgcgggtgatcgcaccggaaccggcacaaaaagcgtttcatatgtcccttcctactacatgctgacgggaggctctgttccacttatctccggaaaagccgtcaacctgaagccgttactggttgagctggagtggtatctcaaaggaacgggcaacatccagttcctgaaagacaatggcgtcaaaatctgggatgcctgggctgatgaaaatggcgatttaggcccggtctatggcaaacaatggcgtcggtgggaagatacccgcatcgtgagccatagcgagtatttgagcaaaatcgacacgttccgtgagcgcgggtacaaggtcgaggggtatctgggcgtaagtgaagatcgcgttgtgttgtcccgtgaaatcgaccagctacagcgtatcgttcacacgcttcgcaccaacccgacagatcgtcgcatcctgctgaatgcctggaatgttggcgaactggaagatatgaagctgccgccatgccatttcgtgttttcactgtggagtcgcgagctggactttgagactcgactgacgatggccaccgacattggcatccagcacaaccgccacggccacgaatccatttacacccagatgctgtgtcttctggaaagagatggcggcattactgagaacatgctggacgagctgggcatcccgaaacgcattctgaactcatgcctggtgcagcgcagcgtcgatacctttgttggtatgccgttcaacatcgccggttacggcattctcacccacttcctcgcgaagatcaccggccacatggctggcgcattcgtgcattttggctttgacgttcatctctacgacaaccacatggaaggcgttgaggagctgatgaagcgcgagccgcccaaagagtccgacccggttgtcatttttccgcatgaatgggccgaactggacgacttcaaatgggaaggtgtgcaggtgtgcggctacagccctcttccgtggatcaaggttccagtggcggtgtga

SEQ ID NO: 112332 - DNA, 870 bp, Enterobacter aerogenes
atgaaatttacgaaactgaccgatcatctgaaacttgccgcagacaaactcgtgggatttaagccagagccttacgagttgaatcccggttttggcaaggcaacggaaagcatctacctgatggttgaccagttccacacactgtttcatcacccacgccgtgccattccagatccggcactactgcgtctgcgtgccaagctgatccacgaagaagctgttaccgagggcatcccggcagctaaaaacggggacatgacggcgctgctggatgcgatggctgacttcctttacgtgggcgtcggcacaatggtggccatcaaaggcggtatctctacaggtatgagctactacacccaagagcagagtgttgatcgcttcatccacaccatcatggttccaggcaacacggtctttgacgacatggccatcccgtttgaagaagcaaaagaagctgcattaatgctgaatgcgctggctgacaaactcgaagcgaagccgattagcgattccgaattggtgcaggagctgcgccgcgtgatgaataaaatctacgttgcctgcatgatgacctaccgcctggctgattttctcggtatcgatattgttgagctggtggcagaaatccatcgttccaacatgaccaagctgtggccggctggcgccgaagagcgtcgtgtggcggtagagaattgcaaatacgacaaggaagatctgggcttccgccacgctgaagggactgacatgatgattggcttcagagtttctgatggcaagatcctcaaatccccaacctacagcgatgtggatctgactcgctttgttgagaaggcgaaagcctcatctctttacgagatggtaaaaaaataa

SEQ ID NO: 112333 - DNA, 1143 bp, Enterobacter aerogenes
atgacttattctactttccgtttgggcgctaacgacgcaacgaaggaacctatgttcctcggccagtctgtcaacgtagcacgctacgatcagcaaaagtaccgtgacttcgaaaagctgattgagaaacaactctcgttcttctggcgccctgaagaagtcgacattaccactgaccgcatcgacttcaataccaagctgcaagagcacgaacgccatattttcctgagcaacctgcgttaccagacgctgttggattccgttcagggtcgcagtcctaacgcaacactgctgccgctgatctccattcctgagctggagacatgggtcgagacctggtcgttctccgagacgattcacagccgcagctatacgcacattatccgcggtatggtggatgacccgagcatcgttttcgacggcatcgtcacggacgaagagatcatcagccgggctgtaagcatctcaagcgaatatgacaggctgtacgaaatgacctgcgctcgccagcatcttggcgaagacgaatttgaacggctgtatgtcagcgagtttgatggcaagccctaccctctccagcgccagctgttccgaacactggtgtcggtgaatgcactggaggcgattcgcttctacgtgagctttgcgtgtacgttcgcctttggtgagcggaagctgctggagggcaacacgaagatcatgcgcttcatcgcgcgcgacgaggctctgcattgcgaaggtactgaacgcatgatccgctttatgcgtaccggtcgtgaaggtctgatgtggaagatgattgccgcagaagaagagagcttcatctatcagaccatgatggacgtggccgggcaggaaatgcgctgggctgactatctgtttaaagacggctcaatgattggcttgaatgccgacatcctcaaaagctatgtgaaataccgcaccaacctggcaatgcgtcgtcttgggctgcgaccgctgttcccggaaatcaaagacgatccactggtatggatgaacaaatggctgctgtcagacaccctgcagatcgctccgcaggaagctgaacaaagcaactacctcgttggccagattgactccgctgtcgatcgctccggcctgagccagttcgcagacctttaa

SEQ ID NO: 112334 - DNA, 2316 bp, Enterobacter aerogenes
atgataagcatcgtaaaacgtaacggttccactgagccgttgtcagaggaaaaatacaaccgcgttgtgatgtggggagtcgaaaacattcgcaacgttagcgcgtctgctgtcgctatgggcgctgctgccagcattttcgacggaatgaccacctgccagctgcatgaggcgctggtaaagtccgctgccgatctgatctctccggaaaccccgaactactcgcaggttgccgcgcgactgagcctgttcaagatccgcaaggacgccttcggccagtatgactacccgaatttctacaatcacatcgtcagcaacgtcagtcgtggcgtttacgatgaagaccttctcaagtactactctcaggaagaaattgccgagctgggcgtgtacatcaagcctaagcgcgacgaatacttcggctatgccgccaccgtgcagctggcgagcaagtatctcgttcaaaaccgagtaactggcgctatctacgaagggccacagcaactctatatgctggtcggcatgtgcctgttccagaattgggaagatggctgcgccggtaagacgcgtctggagatggtcaaaggcttctacgatgtgaccagtacattcaagctgtctctgccaacgccaattatggccggcgtgcgcacccctactcgccagttctccagctgcgtgctgattgaagctgctgatagtctgaaagggattagcgctgcgtcttccgcaatcattgactacgtgtcacgtcgcgcgggaattggtattggctttgggcgtctgcgtgcgctgggaagtgagatccgcaatggcgaggccacccacactggcgttattccattcctgaaacacttccagacagctgtgaaatcctgctctcagggcggtgttcgcggcggcgctgctacagcgttctatccgatctggcacttggaagtagaaagcctgctggtgctgaaaaacaaccgtggcattgaagagaaccgcgttcgtcatctcgactatggcgtgatgattaaccgtctgatgtatcgccgcctggtgcgcaacgaaaacattacgctgttcagcccacacgatgtgccgggcctgtacgacgcgttctttgttgatcaggacaagttcgaagagctgtacctgaagtacgaagccgacgagagcatccgtaagaaatctatcccggccgtcgacctgttctctacgctgatgcaggagcgtgcctctactggtcgtgtttacattgccaacgtcgaccacatgaacgatcacggcgcattcgttccggaaattgcaccggtacaccagtccaatctctgcatggagatcacgctaccgaccaagccactggcgttcactgacgatccgaacggggaaatcgcgctttgcactctgtctgcgtttaacctgggcgcgatccgcacgttggactcactgaaagacgtggcgttctacgctgtggcggcactggactctctgctcgactatcaggactacccgatggctgctgcagaaatcccggctaaagcacgtcgtagcctgggcattggcgtaaccaactttgcctactatctggcgaagaacggctttaactactctgacactgcgggcaaccagctggtgcatgagaccttcgaagccattcagtactacctgctcgatgcgagctgccgactggccgaagcgaaaggtgcatgtgactggttctcccacaccaaatatgcacagggccagctgccagtcgaccactatcgcaaaacgctggataccaacccggagacctctttcgagctgaaaatgccgtgggaagagctgcgtggccgtatccgtgagcatggtctgcgtaactccactctgaccgcccaaatgccgtgcgagacgtccagtcagatcaccaactccaccaatggtattgagccgccccgcggcccggtgtccgtgaagtcgtccaaagacggcatcgtgaagatggtcgttccggacttcgcgcaactgaaagaccagtacgagtacctgtgggatatgccggacaaccgcggctatctgactaaggtggccatcattcagaagttcttcgatcaggccatctctgcgaacaccaactacgacccgactcgcttccctggcgacaaggttccaatgatgaagctgctggaagacctgctgtttgcgtatcagcaaggtgtgaagacgctttattaccacaacacgcgtgatggcgctggtaagcgtgatgacgacgatcaggtgtcagaaccttccgctgcggaggttgttgagccagaagatgagtgcgatggtgcgtgcaaaatctga

SEQ ID NO: 112335 - DNA, 570 bp, Enterobacter aerogenes
atgagtaaaaccattcgtgtggtcggcgtcgacccttcaatgagcaactttggcctggcgattggcacgctggatctggaaacggataagctggacattcatggcctgacattggtggaaaccaaagctggcggcaacaagaagacggttcgcgtaaacagcgacgatctgcgccgcgctaatgaaatctggcgtaccgccaagcccataatcgagcaggctcatatggtgttttgcgaattgccggttggtagccaatcgagtcgctctcagacctcatacggcatctgtattggcgtactggcgtgcgtggataagccactgatacaggtcacgccaaacgagattaagcactatgtcgggaataagctgaccacgtcgaaggaagagatcattcagtgggctacgcagaagcagccaaacgccccgtggttgcgccgtaagcaatctggtaaggaagtgctggtgaataaaaacgagcaccttgcggacgctgtcgcgtcgatttacaccggtatgcaaacagatcaattccttcaggttcgcgatgttcttgcaggaattttataa

SEQ ID NO: 112336 - DNA, 747 bp, Enterobacter aerogenes
atgtcgtttaacttgagccgaacgcagtttttgcagatgtttgccgtgatgcagtctataaagctgataaaccaccatacggcaaaagcagctgcgcctgcacttttgtggaaaaacgaaaacatcaatgacgaccagttctcggtattaaccagtctgctgtcatcgactccgttgatgccgagtttgtctatgctgccgtcaggaagcactgcgccgatccttattaatccatttacggaaggtggatatctcccacattctgggccggggttcgttgtgattcctgaaaccggaacgctgaacatccaagaaaatgcgctcttcaatgcgatggagacgcacatcagcaccgcattcactaatctgattcgacacgctaacgcacgcgcggatcacgttgcaatgccgggtgctgctttcgccagcttctctgttgactatgaccgacacgcgccaatttcaaagcgggcgaaactctgcttttacgaggagggatgtgaagtagcgattattgaagtacttctcccccatgtattcagcgcgaatgaaacggctgcacgccatctgatcgacatcatgcggcatttcatcggccagagcatgatcgatgcagacattgctgcaggcgttctaaccaacgatagcattcacgttgttagcgacattccgaagccgccaactcgcgagccggaaaagacacttgaacagaaactaatggaatgcccaacctgggctacgtggtaa

SEQ ID NO: 112337 - DNA, 1917 bp, Enterobacter aerogenes
atgaaatttctaaagctccaggttgagaacttcatggcgttagccagcgccgaagttgagttagaccaacgcggtctggtgctcattcagggtgttaacagtggcgactcttctgctgccagcaatggtgcgggcaaatcgacattgatgaacagcctgatgtggtgtctgtatggcgaaactgcgcatggcgtcaaaggtgacgacgtgctgtctacaggtcacgagaaaaactgtcgtgtgatggtgactgttgaggatgaaggaaagcgttacgccatcattcgccaccgcaaacacaaagagttcaagaaccggctgatcgtccgtggcgaagacggtgatatgaccaaaggcaaagacacactgacgcaggagttcgttgaacgcctgattggtgcatcgaaagaggtgttcatggcgtccatctacgccagtcaggaagcaatgcctgatctgccgggtatgtccgacaagaacctcaaaaccatcgttgaagaagccgctggcgtcgaccggttaacgcgagcctatgccattgctcgcgagcgtgctaatgcagctgccgcacgcatggatgttaccaaatccaaaatggacgcctgtctcacgcttatcgagaccgcgcagtcagagattgaggcggccaaagcgtcctctgatagttgggagcgcgatcgcggcgaacgtctggacaaggcccgcgtcgatttggctggcgcggaggtaacgctgtccgaagtcgtgatggaaattcgctcgctgccggaacagatccgggatacggaaaacgcgattgctggcgaacgcagtaagctggcctccaaagaagagcatgacgccaaactgctgaaggtgcgcggtgcgattacggagatccgctcaagcatccgcacttcagaagcggcacagaacgagtccatgaaccgtgctcgctcgtttaaaaccaaagcagaagaggttggcacaaaggtcggagcaccttgtgttacgtgcggaaagccctactgcgaagaagatttgtccaccgtaaaggagagtttcattgaacaagcgcgtaatgagatcggccaggcgcaggcatcagcagcggcagtggctcaacacaaagctcgtcttgagaaagcgctcggcatcgagtctgcactggtcgcagccacacccgacgtatcagaaatcatcgccagaatcgaacgcctgaccaatgagctaagtgcgctgcgtcatcgagaacgtgaagttgtggccgtcgaagcgatggtggcgcgggcacgtaccgacatgaatcgcattatggcagaggtaaacccatttctggccgttattaaacgtcatgaagacaaccttgctgccaataaatctaatcattcagtacttaaaaatgagttaaagagtattcaggagcaggctctgttgctggagaaagctcgccaggtttactccccagctggtgtgcgttcacacatcctgacctctgttacgcctttccttaacatcagaactgcggagtatctcaacacgctgtcggacggcaacatcgttgccgaatggtcgacaatggagacaacgaagaaaggcgagtatcgcgacaaattcaatatcagcgtaaccaaaacaggctccagcaaatccttccagacgttgtctggtggcgagaagcgtaaggtacgcattgcgtgctctcttgctttgcaggatctggttgccagtcgcgccagtaagaatatcgagctgtttatcggcgatgaaattgacgacgcgctcgacactgccggtctggagcgtctcatggggattctggaagccaaagcgcgtgaacgcggcacagtgatgatcatttcccacaaagagatgaaatcgtggttccgggaaaccatcacagtcgaagtcaaagagggtcgcagctatgtcgtttaa

SEQ ID NO: 112338 - DNA, 162 bp, Enterobacter aerogenes
atgttccacaagccctacccacccaacggaaaccctgtggcgttttatctgggaagactgagcaaacaaggcgtactgaaacggagatctttcccggcccacacagagtttcaactgcgaaaaggccagcatttgaatcaaaaagttagaggcattgtatga

SEQ ID NO: 112339 - DNA, 1086 bp, Enterobacter aerogenes
atgacattgccatacggggtgatatcagatccccattatcatcgttgggatgcttttgcgacaacaaacgctgacgggctgaactctcgactggagatccaactggacgccacgaaagaagcagccaaagccatgaaagctgcgggctgtaagtacatgctggtggctggtgatactttccatgttcgtggtgctatatcaccttccgtcctgcatttcgtgactgaaacttacgagtggatcatcaaagagttgggcctcgaagtggttatgctggccggcaaccacgacctcgaaaccaacgattccgtatacagcgccaatgcagcggcctctctgcgctcaatcggtgtggaaattgtctgcggcaaacgtcctcactccatcaaaatgggcgacgtaaccgtccacctgattagctggcgtaacaaccacgcagagcttattagcgacctcaaaacactgcgttccgggctggatggcgacaatcacgatgtcgttgtgcatacctcgatcaacaaagcgatccccaccatgccagatgtcggcatcgacgcacaggaactgaaagatatcggcttccgtttgttgctgtccggacactaccacaaccacaaagaagtgctgcctggagtggttagcatcggggcgctgacgcaccagaattggggcgatgttggctcgctggctggcttcatgatcgtcaaccctgacggcacattcacccactacgaaacctccgcacccaagttcgtcaaccttgaggacgatgtggaagacgaccaaattcgcggtaactacgtgcgcttccgtgccgttgtggagagcgatgaagaaggcatcaaaatccagaacgtcctgaaaacaatgggcgcgaagggtgtcgtctgcaacttcatccgcaaggcatcgatgatggaaggcactgccagtactgcggagaccagcaaaatagacagcctgggcgagtccgtcgcggcgtactgcaaaatcgttcacgacactgacggcggcttcgacctgagcaagctggacatgctatgtcaggagatcctgaccgaagcggagagtgcggaggcagtgtga

SEQ ID NO: 112340 - DNA, 495 bp, Enterobacter aerogenes
atgagtgaattttattcaagggcagcaactgtggcagacatgccatttatcatgggtgagttcgaagacggcgcacgcaagggtcacttctacgaagagatcctcacatcaaaggggggtaaaacctttgagaagcagaccaggctggccatcaagacgaacgagcagggccaatactccgggcattatatctacatcctgctgcgccgttctgatgacaaaaaagcagggctaatctggttctgtgccgaactcgatccaaccggtgcgccacgacttgaactccgtgccgtcagtatcgtcaaagagctacgcgggaaaggctatgggtcaatgctggtgtccgacatgatcgattcaaacccgagccagccgatgatggcgaagtgctacgtcaaatcctcgcaaatggccgacatgctaaaacgcagaggttttcaccttttcgacacgtcccccaaaggcacgcagatgctgtttcgcgatccgaagtaa

SEQ ID NO: 112341 - DNA, 645 bp, Enterobacter aerogenes
atggatctcaaacgcacgcgctgggttcgccgtcttgaagatggctcctacaccattgaatcgaacactagcctgaacaaacagaagttgctctgcgacctgtgcggcattgcgtcgaagtgcccgattaacgaaacccggctcaaactccacgacgccggggcgcacttccacctgaacagctgcatacgttacgtgccactgctggcatttcgtaaaccgatcatcggattagacgcaccctacttcaacacactccgctctggtgtaacatggcgagaccgggtcgaacctggcaagctcgtttgtctggttgaggctgatactggaaatatcatccggttcgggagagtcgataaggtctactccggcccggtggatgagatgctgcggaaacacagccggtttaaccatctctgcatgggtggagagaagatcgagaaggttggcgaagtgatccgcaaatcctacggacacttcctgaacgacgacagccttcttacggccatctacattcgccatgtcgatcgggagttcgatacggagtatcacagtgctgaagagttgaatcttgtcgaccctcgcccaaaagctggggtaatcgacatcagcgtagcgcgtcagaagccccctgagacgttttaa

SEQ ID NO: 112342 - DNA, 1065 bp, Enterobacter aerogenes
atgagcgaaaacggcaataaaaacatagcgatcgttgaagcattctcagaaacagacaaaaagaccggtgaagttgttacgttagttcctaacaccaacaacacagttcagcctgttgctctgatgcgtcttggtctcttcgttccgacgctgaaatcgaccgccaggggcagaaaggggcaaatggtctctatggacgcctctgctgaactcaaacagctgtctctggccaaagccgaagggtacgaggacataaggatctccggcgttcgtctggatatggataacgacttcaaaacgtgggtaggcatcatccacgcgttcgccaagcacaaggttgttggcgacaccgtcacgttaccgttcgtcgagttcgtcaggctctgtggcataccaacggccagatcgtccgcgaagttacgcaagcgcctggacagttctctaactcgtattgccacaaacactatctcattccgcagtaaaggctctgatgagtattacgtgacgcaccttgtgcagacagcaaagtacagcacaaagaacgacacggtctcgctgcaggctgatcctaagattttcgaactctaccagttcgacaaaaaggttcttctgcaactccgggcaattaacgaactctccagaaaagaatccgcgcaggcgctctacaccttcatcgaaagtttgccacctgacccggcaccaatctcgctggctcgcttacgcgccagacttaacttaaccagccgcaccattacccagaacgcgacagtcaggaaggcgatggagcagctgcgtgagatcggctatctcgattacaccgaagtgaagcgcggcagctcggtctacttcatcatccactataggcggccgaagttacgcccggcattgccaccagttaaagctgcgccggaagaaccagaagagcaggaagatagcttgcctggtgatgatcaggaggacatcatcgatgttgttcctgaagaaaaagacggtgagatggtcatgttaagcaaggaagaactggcgattctcgaagagctgcgcaaagctaaaactcgtaaatag

SEQ ID NO: 112343 - DNA, 213 bp, Enterobacter aerogenes
atggcggttacactggcaggtctggaaatcgaaaaaacaagcggctactggcgtgccaaagggtttaagcaacctggcgtgctggaacgtctggaacgtgaggacggtgtcattgtccaccagcgtcgcgaatggcgcatgtacgatccggaaacaggtaagctcacgacgaaggccgggacactctggggtctgctgaagaaaatccactga

SEQ ID NO: 112344 - DNA, 336 bp, Enterobacter aerogenes
atgaagaaaatagccctggctctggtgctgctctccctcccagtctacgcggacacatacgtctatgagtgtgagatgtcagtggccgaagtgaaaaacaacgtgatccgcaatgtcgtcaaagccagctacggcgcgatggttgtggacagcggcgaacagttttatgttgtgcgcgatgatcgcgtcctgtcttccccctatctcaccgaacgtaacggcaaactgactggcgtgggtgaagataagttcgtttacaacaaatcaggtgatgtctacggcgttcacgcgaagaacgccagctatcttttcgatgactgcaaggaggttggttga

SEQ ID NO: 112345 - DNA, 180 bp, Enterobacter aerogenes
atgaaaactgtattagacactttattacttattgtctcgatagcttttgtgctcgattgcatcttcaccggagcaatccgtaaagcgctggcgcctgttaatggcgcgatgattaatgcgctggccgtagtgctggtattcgactcagcatttggcgttatcaaaggagtcgtggcatga

SEQ ID NO: 112346 - DNA, 276 bp, Enterobacter aerogenes
atgaagattttggttcgagtttcagccagcaccgactatgacgtttacccgctattcatggtcaagtgcgatgggctgaacgatgaagaaattcaagcggcaattgagcgcaatctcgttgagtacactggcatggatgcagattctgtgtatgtcgacgatgacggtgtttgttggcacaacggtagttgctggtacgtcgacgacacgatgccggtaagcgatgaagacgcggctcatcttgagcgtatcttaggtatcagcacttttgagtga

SEQ ID NO: 112347 - DNA, 411 bp, Enterobacter aerogenes
gtgaagaaactgtatgacgcggccaacgctgcgctggatgtagtggataccgaaattgcccagggcttcccggagccagaatgggcgacgcagctgcgtgaggcgattgcagagatgaacgcaccggaaccttcagaagatgaagccgactggcagcgtttcatcagaatgtacgcggaagagattggcccgacgcccaccgctgaacaggccatgctgctcaagtacttcaaggaggctggagagaatctgccggttgatgatacaccgcactggtttcacgccgcctggcgtaagttcgacgtgatctacacccgcggtatgggaagtaaagatatggtcgtctggcatctgatgcacatcgataaagctgtcgaccgcacgctggagaagttctttccaccagcctga

SEQ ID NO: 112348 - DNA, 372 bp, Enterobacter aerogenes
atgaaaaattacagcgagatgacggactttgagattaactgcctggtcgcggaagccaccggccatcgaccgcttatctcacaatatggctggaaaggctcacaggaaggcgattacacagcagtggtcgccatcggcccgaacggagccggaaccttcgactggtgtaacgatccggaagatgcgtgggacattatttatcgacacagaatcggcgtaatccccaccagacagcctggcgagtggagagcggcccacagaaaggtggatagctcaacgccacaacatctgatccagaaccctaaccctttcagagcggcaatgaccgtgttccttttaatgcaggagaaaaagcgtgaagaaactgtatga

SEQ ID NO: 112349 - DNA, 2343 bp, Enterobacter aerogenes
atggcaaaaggcaaatccgcactggcactggcgctgaaaaagaaaatcggcagcaatgacgagatccagaaggtctcccactggattgactccggtttccctccactaaacaaagccatttccggacgttacgacggtggttttccgtgtggacgtatcgttgaagtcttcgggccaccaagcgcggggaaatgtgttaccgcagacaccatgctgctgacggagcgtggaatggtaacagtgaaagaactgtttgagattgaggggcacaaagcaacatgcactactcgcgatgtagagcataacgttggactcatcaatgaaaatggcgtgatagagaagacctcacacctgacatggaacaaccgtcgcaaattcaagcgcattaagctggcatcagggggttacatcgaggctacgttccgtcacccaattcgtgtggttgacgacttaggcaatatcgtctggcggtatgctgaaaaaatcagtgtaggcgacacgattccttcaatggttggcacacatcaattcggcgatcagcacttggatgccaatatcgcaaaactgatgggctatttaattgctgacggatacgtggcctctgaaaattctgtgcatttttctaacacagatccattcatcaaggatgagtactaccgcctcatttcgctggtatcaaacaagatgccagttacgagaaaacataacggctcggaagaccatgtgctgtttagcaaagaggtgcgttcgctgctttttaaagaatatggtctggagtatgagaaagctgctggcaagcaggttccgttgagtgtgcgtcgcgccaatagcgaggctcaaattgcattccttcgcggctactttgagctggaatgccacgtcaatgatggtcgctgcattgaggttgtgagcgcgagtgggctgctgctacagcaaattcgcctcatgctcctgaatctggggattacgtcaactatctctgaaaaacacgtcgcaggttataaaaacatatattaccggctgtcattcagtggctctaactacgaccttttcctgtcaacgattgggttcgagtctccggctcgtttagcagtggcaaccaaacgggacattagttttgaccgcacttatttaggctacgttccgcacatcagcggcttagtgaaatcactctacgagtcactcaccaagacctctcgtaaagactacgttctggtagatcacgttattggccgcggcgatcgtgtcggaatagacaaactgcgagaaatctatgtctccttcattggcagaaaaaatcgttttaacgagcatctgtttgcacaactggcagcggtaattgactctaacttgttctacgacgaagtcgtggctattgaggaaggtgaagcaccaacgttcgacgtagcgatgccggaaacacactctttctggtctaacgggattatcagccacaacacattcctcgcgacggcagcgatggtgtcagcacagaaacaggatggtctggccgtgttccttgaccacgaaaacagtttcgacgttggtctggcggtagcgaacggactgaacgccgacgaagacgacggtcagtgggtctacaaacagccggataccttcgaagactccgtagagctgatcggcacaatcctcaagctggtgcgcgacgaagagcttatcccggaaacagctcctatctgcatcgttgccgactctctggcgtcgatggttccgaactcgaaggctgagaagttcgacaagatggcagaaggtactgcgaaggacaaagatcagctgaacatgaacgacaacacggcgctggcgcgcgcgacgagtgcgaacttccctactctggcgctttgggcgcgtaagtacaacgcgtgcatcatcttcttgaaccaggtgcgtaccaaaattggcgtgatgtttggcgatccgacgacgtctccaggtggcgactctccgaagttctacgcgtcggtgcgcatccgtctgggcgcatccgttatgaaggatggcaaagagaagatcggacaggacgttggcgccgagtgcattaaaaacaaagtcgcgcctccgtttggcaaatgctcatggaaattctacttcgacccgactcgcgggctggacgtcatcgaatcgctggttgagtacatgctggaggaaggatacctgcccaagaacgccagcgggcgtgtggaaattggcgataagaaatacaccaaatcgcagatcgtcgagatgtaccgcgagaagccactcccggaaatcatcgcagcactccaggcgatagacgaacggcgagcgaaagagtcgtccccagcagagacagaagaagcgtaa

SEQ ID NO: 112350 - DNA, 267 bp, Enterobacter aerogenes
atgctgaagtccatcattaatggcggggcaactacgccaaccatgctggctaaagagattgtcttctgccacggcgagcacgctgtggtggcgctgccgaacattctgggcgctgctggcatttctgcaactgagcgcgagttcgcgctggtcagcgagcaggtcgtgaagatcatcgctcgcgtcgccaaacacctgaaccacgacgcaatcaagtttgacgaagccgctgcttcgaagcgaatcaacgaatcaaaaggagcctaa

SEQ ID NO: 112351 - DNA, 945 bp, Enterobacter aerogenes
gtgaattatctctttgtggacggtaacagcctgggctattaccaccagcaatccgacaaattacacaacggcgagatggaagttcaggcggcttttggcttcgtgaagaacgttcgtcgttacgcctcaattctccatgcccgcccaatgatcttgtgggatggattcagcgacaaacgtcgcgacttctacccggagtacaaagcgaatcgcgatgacgacccggatatgaagaagatgaaagaaggctttgccatccagaagccgtacatcttgaaaatgatgaccgcgctgggcgttaaccaactcattgcaaaggacgcagaagcggacgacctggctggaatgctggtctctcgcctggctccgcagccgaccgtcgatcacatctacctgctgacgggcgatggcgactggctccagttggttcgcgagaatgtgagctgggtaagcctgcgtgaagatgccaagcacaagcaggtgaacttcgaacagttcgcagagctgacaggtctgccaacaccacgcgcgtttctggaagcgaaagcgttgcagggcgataactcggacaacatcaaaggcgtcggcggcattggtgatggtggcgcgaaagagctgcttcatgagtggggaagcgtggccgcaatggtacgcggcattaacgacggctccattgtcatcaataagggtcgctataagacggcattcaacaagctggcaaagaacgccttcaacgagaagacgggctgccggatgctcgaagcctttaagcgcaacatgatgctgatgaaccttatcgacacaaaattcccacccagcgaaatcgagtcgattaaaggcgcacgcgacatgaatgccttcgaacagatgtgttacgagctgaatttccggtcgtttctggaagatctggaagtgtttgttctgccatttgagaggtactgctga

SEQ ID NO: 112352 - DNA, 1029 bp, Enterobacter aerogenes
atgtctaagtcattacttgatctgcttaacaagacccgtggcgatattgcttctaaacgtggcaataacgttgatttgacccgtctgaaagacggcaataactatctgcgcatttttccgaacaaggacgacccgaatggcgtgttcttccagactttcggtatgcactacgttaagcatcagaatgaggaaggcaaagatgtaacaaccgcctacatctgcgaacagcacacccacggccacgcttgccagctgtgtgagatggttatggaaggtcgtgctcgctttaagggcaacaaagcgatggaagagcgcattaacagtatgcgtgctacaccgcgttatctggtcaacggtgttctgtctgcgcgtgaagactttgcagacgcagagaaatgccagttgattgagctgccgtctacggtcttcgacgatatctgcaaagtgatgtccgaagatattgcggatgatatcggcaacccactgagcaaagaagaaggctatgcgttcctgattaagcgtaccggttccggtcgtgacaccaagtacgacgtatccccgaaacgtaaagtctacaaaggcgacattcctgagaagctctggactacccaacacgatctgatcgcatacgcgaaccaggctgacgaaactcgtctgctgtctacggctcgcactatgggtcgtctgattggtattgcggctccggcagcaacaatgtcctctccggccatttcttccgctgcaaaatcagctgctgctgaactgccaggctttggctctatcactggtcatacggaaggcgcagctgctgtcgctacagcacacactccggctccagagtccaccagtctggttgatgaagagatcctgcgtgccgctgaagctgagttcaaaccggaaactaaaccggaagaagttaaagctccggaagccgccgcagctgcaagtgcttcagcatctgctgccgctgcatctgcaccagctgacgaaggtctcgacgacctgctggctgaactggacgctctgtaa

SEQ ID NO: 112353 - DNA, 432 bp, Enterobacter aerogenes
atgagcaccgatatctacgaaaaaatcatgtccgatcttgagttcgatcgcgacaatctggaggaagtctggcgtcagcagccgcgtcttttgatggagtacggctctaagctggcgcgggcagaacgcgaggtcgcggatgcaaaactctccctcgatgcgattgaggcgaaaatctacgataatgagcgtaagaacctgagtatgaacggcattaagttcaatgaatccgtactggaggcgaaggtgagaaccaacccgcaatacctcgcaaagcgccagaaactcgacgatgcccggcacattgcagatctgtacaagcacgctgtggccgccttctctcaccgccgcgacatgattgtccaggcgtccaaaatggctatcgtggagattgaacgtttgggcgccgaacgtttccactcttcccgttaa

SEQ ID NO: 112354 - DNA, 558 bp, Enterobacter aerogenes
atggcgctttttaacttcactctgacactctcaggcgtaacgtatgagaccgaaggactggaagacgcgctgtacgaaagcggctgtgacgatgcgctgatttgcgcatatggaaactccgtctatgttgagttcgaccgcgaagccgaatcgctggatgctgctattgcatcagcgattgacaatatcgaatcagccggtatcggcgctattgttgaatctgtcgactctgctcttgttggcctgagcgacattgcagaaattacagaaatgtcccgacaggcgattgcaatgttgaaagatggcactcgcggtagcggcgacttcccttgcccagtccaacgcattaaaggccaatccccactctgggattgggctgatgtagccgaatggttactaaagaacggtcgattaaaagaagacagcaacttggtaaataacgctcgtgtgctgagtaaatggaaccttgccttacgtgcaagcgcttcaaaagattttcaagaagttgagtcaatagcggcagcactaatcgaacgtcgacgtaaaactatttcatag

SEQ ID NO: 112355 - DNA, 645 bp, Enterobacter aerogenes
atggcccaagactccaaacgtggtagtgaattggttgaggttataaaatctgatgatgtaaccgatctgttcaaggaatacggtgagatagctattgactctgcccttgaatcgggaacgcttgagtcgattcctttactcaatactctcgttggaattttcaagacggttagctcagtgcatgatcgtcggtttacggaaaagttaattcgtttcatctctggcttcgccgatctagacgatgctacacgaataaatatggccaatcggttgaatgaaaatgacaaatttgcgggtaaggccggcgatagactgattgaaatcattgaccgcatggagagtgaaaataagccagaaattgcagcagcattcttgaaagcgtttgcgtttgagcacattgattttattacattacgtcgcttaatggttgcgcttgaacgtatcccttcctttgagattgatgagttagatactttttccaaatacgatgaaaataaccaccatcaaatatcagatgaagcgcttttactctcatttgttaatgctgggttggggaaaaacaatggcgggtttgagggaggtattattttgccgacagatttgtgcgcagtattcgttcggttcaaaggcttcaaaccggaataa

SEQ ID NO: 112356 - DNA, 444 bp, Enterobacter aerogenes
atgaataaagagaacaccatgaacgaggcacagaagattgcacaagcgctggcggctatccccgcggattttcaggataaagcagttgcggccaccatgcggtcgcagttctgggaaatcatcgactgcccggtcacgttagatctggcgctggcgttcgccgggctggatggcgccgataaagtcagtcgtctgcgtaaatgtgccagagcgctggcgcttaaaacgcaagatccgaaggcgtgccagtatctgctggagatctacgaatcagataacccagaggaacagctggaggcattcaaagtattccgcaatcggctggtactgaaggtggccaaagaatttatggaagttaacaaaattggcgatgtgagacagtacaggctgaagcgccagataagagtcactctatccaacatttttggtaagaaagtcgcataa

SEQ ID NO: 112357 - DNA, 1170 bp, Enterobacter aerogenes
atgaaaattgccaaagttatttccgagcaggaaggtcttagccctgagaaagcccaagaaatatgggacgcctttgagaagttcggtggatatgccttcaacaaatcacactccgttgcctactcgctgatcagctatcagtctatgtggttaaagacacattaccctgctgagttcttcgctgctgctctcaccattctgggcgaggataagcaccaggggctggttaaggatgcgctgacctatggcattcgcgtattgccaccagacgttaacgtgtcatctaaccgaattgagatccgcacgctggaagacggcagccaggttctgtatgcgccattctctgctgtgaaaggctgctctgagaatggttgccaggccatcatgagagcgcgtgagaaagttggcggtaaattcgagtcacttgagcaatttgaggaagcggtcgagaagcgtgcgtgtaacagccgggtacgcgagtcactgcaaaaagtaggtgcgttcgcatcgattgagcctggcagtctgccagcgacagatccggaacggctgcgcgaccaggcagagttgatgggcaatctggtgatcgacgctgtaaaagcctctcgaccgttcgagatgaaccctaagcgctctgctgaagtgaatgtactgatgactcgcatggcggccgaaatgggtctgggagacgacctgatccgcccaagcattggcattaagccgaaaatcatggtcattctggacaacgcgaacggcaatgatgggcgtaccggctacttcatggagaacggctacgacgactttaaggcgaagttgcttactgcaggcgatctgcgtatgggcgatctctacgtcaccggcgtgtgcaaaaaggtgaaggacaaagagaaggactacaccaaagacgaaatcggccagttcatcgactttgtgcgtgaagagatcaatctggtgcgtccgacctatgtgctgacgtgtggcagccgggcgacgtcactcttcaacaacaagagcaaaccatccgacctggttggacgcaaagagtatctgccagagctggatgtgaccgttttctacggatttaacccgaacattttgtactttcgcccagaggaaggcgaaaagctggaagcaattctggcagaggtagcggagactattagcaaatga

SEQ ID NO: 112358 - DNA, 696 bp, Enterobacter aerogenes
gtggaagaaatttggaaatccattcctgagtttgaaggttattacgaagcatccagtttaggtcgcattcgctctttagatgttatacgaacagcccccaatgggggcgaatgggtgaagaaggggcaaatcctcaaacctcgcgtaatcaatgattttggacatctgggcgtgaaactaagcgtcaacggcgtcaaatgcgaccgcacagttcattatctggcagcaactgcattccacggagaacgaccagaaggcttacttattcgtcatcttgacggaagaccatcaaacaatgcgccctccaatctcgcgtatggcactcaagtcgacaacatggctgacgccattgcacacgataccgttgagtttggtgagaggcgctacaacgccaagctaaccaacgaagtcgtcattgctattcgcattaaaaagtcagaaggcgctctgaacaaagacctcgcggccgaatatggtttaactgagctttacattcaccatatcgtcaccgggaagaaatgggcacgagttggtgggccgatcgttgtctcaagagcatccaaaaaactggatgctgaagcaagagctgaggtggtcgccttgcgcaaggctggcgcaacctatgaaaagttgcgagaaaaattcggcatctctaacactcaaatcgcaaatatcttaaaaaaagctagcgtttga

SEQ ID NO: 112359 - DNA, 2364 bp, Enterobacter aerogenes
atgaaggctctgatggtcagaactgacttctccctgggagagtcggctctaaaagcagaaaacgcggtgaaaatcgcgagagaagctggctacaccgctgtcatttccgctgacagcatgaacattgccagtgtgatccccctgcagcgtgccgctggcgacgacatggcggttatttgtggtgttaagctgaatgtggtcgacgatccgacatacgagcaccgcgcccgcctggcgaaagagtcagggggatgtatggaatcattggtacgtgatcgcagctactgctttacggcactgataaagaatgagcaaggttatcgcgacgtgtgcgaactgatgaccttagccaacaagcgcgagcaattctactttgtccctcgtctggcacttgaccagctggcgaccgcatatgccaaaggcaacatcatcctgctgacgtccgacattggcagtgtattccagcgccgggacttcacaaagattatcgggacgctggtgacagctggaggacgcgataacttctacagcgtggtttatccgcaccctaccccattctacgaccagattaacgtccgggcgatgaaagtagcgagcgcactgaaaatagagccagtggcgttctatcccgcttattacgaagcggtcgacgacgctgacattaaagacattgcgcacatggttacgaacaacatcaaaatcgaccagccgcatcgtctgcgtattccccaccagcgagataatgccgttaatggtcgccgccatctccttgaagcgctgaaagccttctccattcgaatggatgtgccggtaacagctgcaatggcctcaacaacgcaggacaccattattgaagcctgcacatggcgctggcatgaattgccaccagcactgcccaagatggcagacgacgaacctgcaacgctgatgaagctggctgtcgcggggctgcgcaagcgtcttactaccaaagagtttggctacacaccaccggcttctgagcaccgtgtgtatgttgatcgcctgaagtacgaaatggacacactgacccgcctgggcttctgtggctacttcctgatggtgcgcgacctgatgaatcacagtcgtgaaactggcattcctgtcgggccaggtcgtggttcctctgccgggtctctggtggcgtggtgcataggcataaccaacgttgatcctatccgtcacggtcttctgtttgagcgtttcattaaccctgaacgtctcgacttgccggatgcggatctggacttcagccaggcacgtcgtcatgaggtgatcgagtatctgaatgaacgctatggcgaagattacgttgccggtattccgaacttcacctatctgggcgctgcttcggcgctgcgtgacactgcgcgtatttacggtgtcgacgctgcggatatggcggtatccaaagagttcaagaatctggaagacgatagcctgtcgctggaagagctgcgcgagcaactggccagcctggacaaatacgccacgaaaaacccggaagcgttcaaagcggcgtgtaagctgcaaagcctgatgcgtggttttggtcgtcacgctgcggggatgatcgtcgctggtgttccattggtagagcgcacgcccgtcgagctgcgtggcaatgctcgctgtattgcgttcgataaacgttactgcgaggcgatggggctgattaagctggacgttctcggtctggcaacgctcgatctgctggatagcgcgaaacgctacatcaaagagagtaccggggaagacatcaatctcgatgctatcccactggacgatcgcaaggttctggatgggttcgctgcagggtacacgcagggcgtattccagctggagtccggccccatgcgtaagttacttaaagatctgggcggtggcattgagccaatgagctttaaaaccgttgtcgctactaccgcgctatttcgacctggcccgattcagtcaggcatgttggacgactatgtctccgtagccaaaggcttcatggctccacattcaattcatccgcgtcttgaggaagcaactaaagaaaccaacggcgttttactctatcaagagcagatcatgaaaagctctcgcgtactcgctggattctctatggctgaggctgacgctctgcgttccgctatcggtaaaaagaacatggataagatgaaagcgatcggcagcgattttgtagaacgagcgcaagcaggttgggtgacactgtcacttgaaaacggaagcacagtagaagtccacaaaaaggccaagctgatgtgctctgacggcaaacgcagaacctatgacgaagcgattggtgataacgctgatattgttgattttggagtttga

SEQ ID NO: 112360 - DNA, 1236 bp, Enterobacter aerogenes
atgaccgctactgcactacagcaagaagaacatttgccggaagccatcgtctgcaagtggtgtggcaaatcctttcattacctgaaatcccatatctctatgggccgctgcgagaacattcctgagtccgcgaaaggtctggacgtggacgaggtggtgaaaatgtacacctctgcgtttccggatgaaccaacgatctctcgcacggcactggccaaactcaatgagaagcgtgccgaaaagcattcaggcgaaggaaaagtagcggagattagcgcacatccgggctacgcaggaacggtcgaatacaagaccgaactggtggccgcgcacgagctgcttggcgtaacgatcaaagagctgggaacgccacgcggaaaaccactacaggtgacagtcaacgtcaacacgccatatccggagttcgtaccggaagcgaagaagaactatgtgtatggcgacttcgacctgattaaagacatcttcatgatgctggaaatcggaatcccaggctatctctggggtcatgcaggaaccggtaaatcttctcttcctacgcagctatgcgccctgctgaatcgaccactgatccgcgcccagcatacggcgtctatggaagaggcacacgttacaggccagatcctcgctcgcgatggttccacctacttcgagcctggtttgctggcgctggcgatgaaaaatggctgggtgtacctcgctgatgaatatgacttcgcgttcccgcagattctgggtgtgtaccagccagttcttgaaggagaaccgctgatcatcaaagaggcaactccggactggcgccgtatcactccgcataaacgctttgccttcattggcactggcaacactaacggctctggcgacgaaacgggtctctatcaaggaacgaacatccagaacgcggcgaacttctcgcgcttcggcattgtttcgaacgtgaagtacatgagcactaaggctgaagtcaacatgctggctgaggctggcgtcatccgcgaatacgccgagaagatggtgaaattcgcgaaccttgtccgtgaaggttatgaacagcatctgatcagccagccaatcggccctcgcgagctgctgctgtccgcaaaaatcggaatgatgcgcggtgatttctctgccggcatcgaaaagtcgtttatcaataaacttccatccacgtctgcacaggcagcgcgtgaagtggttcagaagatcttcggttaa

SEQ ID NO: 112361 - DNA, 2373 bp, Enterobacter aerogenes
atgtccaaagccatgaccagagctgtgctgaaagaggtacaggacttccgcgactgcgtaaaacgagttgtagcgatgctatcaggcaaacagatacctgttgcagagcgaggcaatgaagcatatgtccgctacaaccggcgcggcgaaccagtgctggtaaacatcccatctataccggacgacgcgtcaccaaccctcatgaacgcagtacgtggttttctcgaccatgaggtagcccatatcctctttactgatccgaaagtcgcaatgaagatgcgcgagagaggaaaggctccgtctaccgggctttggaacgcgctggaagacgtttttattgaacgcagaatgggacaggtattcaacggaacccgtcgcaatttactggccacacagaacctggtgatcgacaaatacttcaagggcaaagtgtcagaggcggtttcaatctgccacggcaaccagcgtgaattgttcctgaaattcttcctttgccctgtcgtccgcgcctgggatggccaaagccctttcatcgactttatggaagaacactggcacctcatcgagaagcctatagccttgctcaaagagcatggtatcgacgtggccgttcgcaatatgtcgaacacagaagactgtgtgaaggtcgcagctgctatcgcccaaatcatgcaggatatgaaagacaagccagagggcaaattaccagagcttaaatcgtctgctaggaagccgtcgaagagtgaggatgagtcagaggaaaccccagaagccggtgatgaaccgactcatagtgaatcagcaccaaagcgtaccaaaggcgaagacgacgacaaggaagagcaagaagatgatgcctcagaagaggaagagtctggggattctgatttgcccgaatcagtagataaggacttacctacagaagataaagaaattagtgatatagaaagtaaatatacagaagcaggcgaagaggaatcaggagacaccccagaatccgatgatgccggcatggaatcaggtgattctgatgacgaaggtggtagtgatgacactggctctccaacgcctggtgatggcattcgcgatgacgccgatgactccgatggttatggctctggcgccgctggcgatggcgatggtgatagtgatgacggcgaagactccgatgccggtcatggggagtccgaaggagaaggcgaagaggaagatgacgccgccgatcacacagacggcgaaggtaaagaaaatgaggatgccgcggaagcgcctgaagacagtgaatcaggctttgttcctgctccggatgaaatgactctggaggacgcactcaaggcgctcgacgagatggaagacggaacaggcgaaatgaccgaagacgcactgtcggccaccatcagcaaagagcttatgagcacctcactttctgagtatcgcccatacgatcgttcatacgactttatcgggttgattgatgaggctgaagagcatgtaaagcgcaccagaaagacgttcggcgcaatcccaatgcactcacctgtcgatcgctaccgcatggttccggaaggcagaaagctctttgaactgaaaatcgaaaaacatctgccagcaggcgtttcttcgactctggccaaagacctggagcgagctatcgccagccgcaaccgagttcagtttatcccaggccagagacgtgggcggatacatggcgcgaacctgtatcgtctggcaatgaacgacgaccgcgtgttccgcaaaaaagaagaccacagagcggtgaacgcgtgcgtccagcaagtgatcgacttgtccggctcaatgggcggcaggaagattcagttggcactcgcaagcgcctacaccattgcggatgctctggatcgtatcaatgtgcctaacatcatcaccggctttaccacgtttggtagcccagattatgaaaccatgtcgaagcgcgggtttactcgcttcgaggcgctaatgctgcccattatcaaaaactggaatgagaaagctaactctccagagatccgcgcccgcatgggctgcgtgtgtgagacgttccccctgctcaataacgtcgatggtgagagcgtcgcgcagctggcgactctgtttgcagggcgaatggaggacaagaagatcatgctggttatgagcgacggggcgccatgtgctgcaggcgatgggttccatcagcatttacgaaccgtcaccaaagaaattgagacgttgagtgacatcgatttgatggctatcggcgttctgaccgacgcaccacggcgttactacaaaaattacgcactggtaaacagcgtagaagagttagggccgtcagtcgtcacagagctatctcgtatcattcttgggtaa

SEQ ID NO: 112362 - DNA, 213 bp, Enterobacter aerogenes
atgaaaaatataacttctaaattgaccgcccttgaggttggacacgcatatgcgattgggctggatggcgttgcgacgatcctgacagaactagaatctgaagagcttcccgtggagatggttgatacgacggttttcacttttgaactaaaaaataaacatttcacactcatcaatactggttgcggctcccttgccgtgagaaccatttaa

SEQ ID NO: 112363 - DNA, 387 bp, Enterobacter aerogenes
atggctaccaacgaaacagagatcaaacaaggtcgctacgcagcttacattgactcgttaatcacaatctcgcctaaaagtcaggctaccattgccaaagaggttgggtacaagaacgccaacaatctctctctcatcaaaagcggcaaaatcccacttccagtagataaggttcgagcattagccgaagcgctggatgcagatccggttcgactgatgctgatggttctggaagaacgtcatcctgagctgcttgagttttttcgcgaagagggcactgcaccgctctccgctgatgaaaaactcgttctagaagcgttccgtaaccgttttgacggtcaacagggagcgtcagaaaaggtggtagaggccatcaagtcactgtga

SEQ ID NO: 112364 - DNA, 1107 bp, Enterobacter aerogenes
atgaaaaacacctttgataaagcacgcgcagcagaaaacacctctcgggaagccatcgagtacctcgaacgcgcttccggtttgtcggcagtgtcgaccgccaatttcgacggagacatgtcgttttcttccgccttcatattattcactcgcttatctttactgataacgagacgtcgacctgaaatagccgttcattgtgttttgatacatataatgccgcatatctctgaagtaaaggtaagtgatataagtagggtcttggtcaaccaactggtgaacccactgatactggaaggcaagatcgtccagggcagacgcgtattctccctaatgaaacagttcctgagctggtgcgcttttcaggggctgattgatacatcaccgttgaatgatatgtcgctcaatagagttgccggtggcgcaaagccagtgccgcgcgaacgtaagctgacggacgccgaggtctgggtattctggaacgtctgggattacttcaatgtgtgcgaaggcacaaagtgggcggccaggctctgtcttgtcgccgccagacgacccgatgaagtgctccgggccagaaaggatgagttcaaccttcaacgtgatgtatggaatcaaggtacgcgaaacaaatcggccagacagcacgcgctgccgttaagcccattgatgcgccaatgcgtagaagggttgtttgagtacgggaaaggcagccagtggctcgttccttcgaataagaagaagggcgtggatacgccaatgtctaaggtggccattgcccaggcactgagaaggatactggaacgacctgagttgatggaggttgagtcattcaccccacgcgatctgagacgtacagcgcgtagttatttccctgctctggggattaatcaggaggtggcccgtaagattatgaaccacagtcttgaagggatagatcgcgtctatgatcgccacgattatatggatgagatgcgagacgccttgaataacttctcaacgtacatcgcatctatcgtgaatcaaacagacttagacgagatagaccacaaattcaagggagatcgtctagccaccgagcttattcgtgtaaatttctcacagtga

SEQ ID NO: 112365 - DNA, 417 bp, Enterobacter aerogenes; identical to SEQ ID NO: 86116

SEQ ID NO: 112366 - DNA, 525 bp, Enterobacter aerogenes; identical to SEQ ID NO: 86117

SEQ ID NO: 112367 - DNA, 246 bp, Enterobacter aerogenes; identical to SEQ ID NO: 86118

SEQ ID NO: 112368 - DNA, 366 bp, Enterobacter aerogenes; identical to SEQ ID NO: 86119

SEQ ID NO: 112369 - DNA, 204 bp, Enterobacter aerogenes; identical to SEQ ID NO: 86120

SEQ ID NO: 112370 - DNA, 774 bp, Enterobacter aerogenes; identical to SEQ ID NO: 86121

SEQ ID NO: 112371 - DNA, 813 bp, Enterobacter aerogenes; identical to SEQ ID NO: 95542

SEQ ID NO: 112372 - DNA, 324 bp, Enterobacter aerogenes; identical to SEQ ID NO: 106698

SEQ ID NO: 112373 - DNA, 2151 bp, Enterobacter aerogenes
atgaataacccaacgctgattgttgttaccgaccgcaatgatctagatggtcagctctatgccacgttctgcaacgcagttgagctcttgaagcaaacgcctgttcaagcatctgaccgagatgcgctaagacagttgttagctgaaagagagtctggcggcatcatttttaccacagtgcaaaagtttgccctgcttgacgacgagaagcatcatccaatactcaatgagcgtcacaatatagttgttatctcagacgaagcacaccgcagccaatatggcctgaaagccaccttaagtgcagatggtcaatataagtttggttacgccaagcatatgcgcgatgcgctaccgtctgcttcctttattggttttactggtacacccatttcacaagaagacaaagacactcgcgctgtatttggtggctatgtgtccatctacgacattcaagatgcagtagatgatggcgcaaccgttcctatttattatgagtcacgcttggcaaagcttgatttgaaccatgctgaaatcgctgagttgtccgatcaagttgatgaagtggtagaggacgaagaggacgtcagcaaccgtgaaaaaactaagggggaatggagccgtcttgaaaagcttgttggtgcgactcctagattaagccaagttgcagctgacttgatcgagcactttgagacacgcaatgccactatggatggtaaagccatgatagtggctatgagccgtgatatctgtgcgcatctctacaatgagattattgcactgcgcccagaatggcattcggatgatcctgaaaaaggggcgattaagattgtgatgacagggtcagcttcggacaagccacttttgcaaccccatatttataacaaaaaaaccaaaaaacgcttagaaaagcgctttaaagatatgaatgatcctctgaagttggtcattgtcagggacatgtggttaacggggtttgatgcgccttgttgtaacactatgtacgtggataaaccgatgaaaggccataacctgatgcaggccattgcgcgggttaaccgcgtatttaaaaacaagccaggcggtttagttgttgactacattggtattgctaacgagcttaagcaagcattgaaaacctatacagactctaaaggtaaaggcgagccaacactcaatgcagaagaagcgttttccattcttttagaaaaaattgatgctatccgtggcatgtttggtaaaacaccaaaatccgatggtttggacatatcggggtatgaaactcaagcgcacaaactattggtgcctgccgctaactatgtacttggcttagaggatggcaaaaagcgtttcttagacttagtgttggcggcaacaaaatcatactcactatgcagtaccttggatgaggctaaagagttaaggaaagaaatcgccttttactcagccattaaggccgccatcagcaaatttaccagcgtagatagaaagcgcactcaggaagaaaagaactcggcactgaaacagatcctagataacgcagtgatcgccgaaggcgttgctgacgtgttcgcactttgtggcttggacaagcccaatattggtttgctatcggatgagtttttagaagacgtgcgacagatgccggagcgcaacttggccgttgaattacttgaaaaactactcaaggatgacattaaagcgaaaacacgtaataacgttgtgcaagagaagaaatacgcagaccgcttgcaagaaacgcttagaaagtacaataaccgcgccattgaaacagctcaggtcattgaagaacttattcaaatggccaaagagtttcaggaagaaatgatgcgcgaggctgaactggggttaaatccagatgaaatcgcgttttatgatgctctagccaacaacgaaagtgcagtacgtgaacttggtgatgagatccttaaaaagattgccgtcgaaatcacagacaaactcagaaaatcgaccacggttgattggcaagttcgtgacagtgttcgagctaaattaaaaatactcgtgcgccgcactttacagcgttacaaatatccacctgacaaagccgctgaagctgtagagcttattttgaagcaggctgagacattgtcgaattcatggacgaaataa

SEQ ID NO: 112374 - DNA, 2199 bp, Enterobacter aerogenes
atgacaacaaataaatctaattcattctggtttgtgggtgcatcctacggcaaaggtagtgaagaccaaacggagcgttttctcaacgatggcgtttggcaaaatggctatgaagataaatatctcgatgtagtccgcagtatgcagccgggcgacaagattgccattaaatcgtcatatacaagaaagcgagagctcccttttgatactaaaggccagactgtttcagtaatggggatcaaagctattggtgtgattacccgtaatcatggcgatggccggtttgtcgatgttgaatggcaaccacgctttgagcctgttaatgaatggtatttctataccaatcgcagcactatttggcgcgtttctcccgatgattggatgacagaggggcttattgacttcactttcaataataaaccccaggatatagatcgttttcgcaatgctccctattggaaggagcgctttggtgatacccctgtcgataaacagcgttttaaatggacccaattttacgaagagtttgccgacaagctattaacttacaaggatgatcgtgcttctttaatggcagccatccacgatttaccgaacaaaattgaaagcatttctgtccttcaagatcagcctaaggaaggcacaaaagatttgctaagtgatatttgcccgtttaccgtcttcggcctgtttaaccggggcattaccgatgctaaccgaatagccatcgcaagcgagcttgctgcttttttgaaagttgaaacgcctgttcctaattcctttgaaggtatccctgttgttaataatcagcgctcttggttttttggatacaaataccgacggggtgaacatgacattgatacactatggaacctttttgaggccgccatagaacacgctaataactcagaaactgataccgcagaggcactttacgatgcttatgaaactgcgactaaatgctggggaaccggctggaacctctcaatggggctgtattggattagaccatggaagtatctgacacttgatggccaatcacaggcatacatcactaaaaagctgggtttagaaataggcaagaatggcgaaaaaggtcgctgtagctcaagagattacttcggtctgattgatgatctagaaacacgatttcaagaggacgcctaccccgtacactcttttccagaactgtcgctttcggcctggctatttaaggataccgacacatccgctcatccgaatgctactgaccttgatgacgaggagctatcggcagaagaagacgaagttgctgttcagactgcgcctattgaaccttatacaattgacgacatcattgccgatggttgttttcttgaaagagaaagcatcgcaaaaataattactcagcttagacataagaaaaaccttattctccaaggccctccgggaactggtaagacatggctcgcaaagaaacttgcatatgcgttaatgggccaaaaggacgaaaactctctacgcgctgttcagttccaccccaatctatcatatgaagattttgtgcgtggttggaggccatcaggcgaaggaaaattaactctcgttgatggtccatttctggaaatgattaatgaagccaaaaaagatgcgagcagcaaacacgtagtcgttatcgaagaaattaaccgaggaaaccctgctcagatttttggcgaaatgctcacattgttagaggctgacaagcgcacgccaagtgaagctttggagcttagttatcgtcgagctgaaggcgaaagaattcatattcccgctaacctttatgttattggcactatgaatattgccgaccgctcattagcacttgttgaccttgctctacgtcgccgattcgcattttttgatcttaagccaacgctcggtgaggcatggcgcaattgggttcatagtaaggctggtattgataacgattttttgcagttaattgaacagcgcatagtctcactaaataacgagatttcaaaagaacgcaacttgggccctcagtttaaaatcggccacagttatgtaacaccaccgttaaatacaaagattgaagatgctgcagcatggtttcaaggtgtcgtagaaactgaaattggaccgcttcttgaagaatactggtttgacgatatagaacgcgctatcaaatccaaagacgctttggttgaaggcatctaa
